(19) United States
(12) Patent Application Publication
(10) Pub. No.: US 2026/0049279 A1
(43) Pub. Date: Feb. 19, 2026

(54) ANAPLASTIC LYMPHOMA KINASE (ALK) SPECIFIC T CELL RECEPTORS AND METHODS OF USE THEREOF

(71) Applicant: The Children's Medical Center Corporation, Boston, MA (US)

(72) Inventors: Roberto Chiarle, Boston, MA (US); Rafael B. Blasco-Patino, Boston, MA (US); Carmen Mecca, Boston, MA (US)

(73) Assignee: The Children's Medical Center Corporation, Boston, MA (US)

(21) Appl. No.: 19/377,691

(22) Filed: Nov. 3, 2025

Related U.S. Application Data
(63) Continuation of application No. PCT/US2024/027841, filed on May 3, 2024.
(60) Provisional application No. 63/500,457, filed on May 5, 2023.
(60) Provisional application No. 63/568,379, filed on Mar. 21, 2024.

(51) Int. Cl. C12N 5/0783; A61K 35/17; A61K 40/32; A61K 40/42; C07K 14/725; C07K 16/40; C12N 15/86

(52) U.S. Cl. CPC C12N 5/0636; A61K 35/17; A61K 40/32; A61K 40/4251; C07K 14/7051; C07K 16/40; C12N 15/86; A61K 2239/13; C07K 2317/565; C12N 2510/00

(57) ABSTRACT

The invention features polypeptides and/or transgenic effector cells including T cell receptors (TCRs) which specifically bind anaplastic lymphoma kinase (ALK) antigens or peptide sequences, and the use of such polypeptides and/or transgenic effector cells and TCRs specific to anaplastic lymphoma kinase (ALK) antigens or peptide sequences in compositions and methods for treating ALK-positive neoplasias such as Non-Small Cell Lung Cancers (NSCLCs).

### CROSS-REFERENCE TO RELATED APPLICATIONS

[0001] The present application is a continuation under 35 U.S.C. § 111 (a) of PCT International Patent Application No. PCT/US2024/027841, filed May 3, 2024, designating the United States and published in English, which claims priority to and the benefit of U.S. Provisional Application Nos. 63/500,457, filed May 5, 2023, and U.S. Provisional Application No. 63/568,379, filed Mar. 21, 2024, each of which is incorporated herein by this reference in their entirety.

### SEQUENCE LISTING

[0002] This application contains a Sequence Listing which has been submitted electronically in XML format and is hereby incorporated by reference in its entirety. The Sequence Listing XML file, created on Jul. 30, 2024, is named 167705-033102PCT_SL.xml, and is 29,586,166 bytes in size.

### BACKGROUND OF THE INVENTION

[0003] Anaplastic Lymphoma Kinase (ALK) chromosomal translocations represent common oncogenic drivers across multiple tumor types, including anaplastic large cell lymphoma (ALCL) and non-small cell lung cancer (NSCLC), which is the leading cause of cancer-related death worldwide in both women and men. Over the last decade, several ALK tyrosine kinase inhibitors (TKIs), including crizotinib, alectinib, ceritinib, brigatinib, and lorlatinib received regulatory approval for the treatment of ALK-positive lung cancers, having been demonstrated to extend survival compared to standard chemotherapies in this patient population. However, although ALK inhibitors have improved clinical outcomes in these patients, their benefit is limited by the development of acquired resistance, which invariably develops within a few years of treatment. In addition, approximately 20% of these patients exhibit primary resistance to these targeted therapies. Therefore, there is an urgent need for additional therapeutic strategies beyond ALK TKIs for this patient population.

[0004] The advent of immune checkpoint inhibitors represented a major opportunity for the treatment of patients with advanced solid tumors, including NSCLC, and several hematologic malignancies. Unfortunately, although PD-(L)1 blockade has significantly improved the survival of cancer patients in general, only a fraction of patients with ALK+ cancers respond to this immunotherapy approach or other immune-checkpoint blockade approaches. In addition, specifically among patients with advanced ALK-positive lung cancers, immune-checkpoint blockade has been associated with a high rate of primary resistance and hyper-progression, which further highlights the need for novel and highly effective therapeutic interventions for patients with ALK-positive cancers.

### SUMMARY OF THE INVENTION

[0005] As described below, the present invention features T cell receptors that specifically bind ALK peptides, and methods of using such T cell receptors for treating anaplastic lymphoma kinase (ALK) positive neoplasias.

[0006] In one aspect, the disclosure provides a transgenic effector cell containing a heterologous polynucleotide encoding a T cell receptor (TCR) polypeptide that specifically binds an anaplastic lymphoma kinase (ALK) peptide in the context of specific HLA molecules.

[0007] In another aspect, the disclosure provides a polypeptide that specifically binds an ALK peptide or an antigen binding fragment thereof, the polypeptide containing:
[0008] (i) a complementarity determining region (CDR) 1, wherein the sequence of CDR 1 is any CDR 1 sequence disclosed in SEQ ID NOs 2969-4452, 20513-21122, 28105-28240, 29793-29820, or 30321-30416, or any sequence that has at least about 85%, 90%, 95%, 96%, 97%, 98%, 99%, or 100% identity thereto;
[0009] (ii) a CDR 2, wherein the sequence of CDR 2 is any CDR 2 sequence disclosed in SEQ ID NOs 8905-10388, 22953-23562, 28649-28784, 29905-29932, or 30705-30800, or any sequence that has at least about 85%, 90%, 95%, 96%, 97%, 98%, 99%, or 100% identity thereto; and/or
[0010] (iii) a CDR 3, wherein the sequence of CDR 3 is any CDR 3 sequence disclosed in SEQ ID NOs 14841-16324, 25393-26002, 29193-29328, 30017-30044, or 31089-31184, or any sequence that has at least about 85%, 90%, 95%, 96%, 97%, 98%, 99%, or 100% identity thereto.

[0011] In another aspect, the disclosure provides a polynucleotide encoding the polypeptide of any previous aspect or any other aspect of the invention delineated herein.

[0012] In another aspect, the disclosure provides a vector containing the polynucleotide of the prior aspect. In an embodiment, the disclosure provides an expression vector, where the vector is a viral vector (e.g., a retroviral or lentiviral vector). In an embodiment, the viral vector is a murine stem cell virus (MSCV) vector. In an embodiment, the vector is a mammalian expression vector. In an embodiment, the vector further contains a promoter that drives expression in a T cell or NK cell. In an embodiment, the promoter is a MSCV promoter.

[0013] In another aspect, the disclosure provides a pharmaceutical composition containing an effector cell containing a heterologous polynucleotide of any previous aspect. In an embodiment the heterologous polynucleotide is encoding a T-cell receptor (TCR) polypeptide that specifically binds an anaplastic lymphoma kinase (ALK) peptide.

[0014] In another aspect, the disclosure provides a pharmaceutical composition containing an antibody that specifically binds an ALK peptide, or an antigen binding fragment thereof, the antibody containing:
[0015] (i) a complementarity determining region (CDR) 1, wherein the sequence of CDR 1 is any CDR 1 sequence disclosed in SEQ ID NOs 2969-4452, 20513-21122, 28105-28240, 29793-29820, or 30321-30416, or any sequence that has at least about 85%, 90%, 95%, 96%, 97%, 98%, 99%, or 100% identity thereto;
[0016] (ii) a CDR 2, wherein the sequence of CDR 2 is any CDR 2 sequence disclosed in SEQ ID NOs 8905-10388, 22953-23562, 28649-28784, 29905-29932, or 30705-30800, or any sequence that has at least about 85%, 90%, 95%, 96%, 97%, 98%, 99%, or 100% identity thereto; and/or
[0017] (iii) a CDR 3, wherein the sequence of CDR 3 is any CDR 3 sequence disclosed in SEQ ID NOs 14841-16324, 25393-26002, 29193-29328, 30017-30044, or 31089-31184, or any sequence that has at least about 85%, 90%, 95%, 96%, 97%, 98%, 99%, or 100% identity thereto.

[0018] In one embodiment, the antibody is fused or conjugated to a cytotoxic agent.

[0019] In another aspect, the disclosure provides a method for treating a subject having an ALK-positive neoplasia, the method involving administering to the subject an effective amount of a transgenic effector cell of any previous aspect. In one embodiment, the transgenic effector cell contains a heterologous polynucleotide encoding a T-cell receptor (TCR) polypeptide that specifically binds an anaplastic lymphoma kinase (ALK) peptide, thereby treating the subject.

[0020] In another aspect, the disclosure provides a method for treating a subject having an ALK-positive neoplasia that is resistant to ALK tyrosine kinase inhibitor therapy, the method involving administering to the subject identified as resistant to ALK tyrosine kinase inhibitor therapy, an effective amount of a transgenic effector cell of any previous aspect. In one embodiment (e.g., a transgenic effector cell containing a heterologous polynucleotide encoding a T-cell receptor (TCR) polypeptide that specifically binds an anaplastic lymphoma kinase (ALK) peptide), thereby treating the subject.

[0021] In yet another aspect, the disclosure provides a method for reducing metastasis or inhibiting the development of metastasis in a subject having an ALK-positive neoplasia, the method containing administering to the subject a transgenic effector cell of any previous aspect, (e.g., an effector cell containing a heterologous polynucleotide encoding a T-cell receptor (TCR) polypeptide that specifically binds an anaplastic lymphoma kinase (ALK) peptide), thereby reducing or inhibiting the development of metastasis in the subject.

[0022] In yet another aspect, the disclosure provides a method of killing an ALK-positive neoplastic cell involving contacting the ALK positive neoplastic cell with a transgenic effector cell a transgenic effector cell of any previous aspect (e.g., an effector cell containing a heterologous polynucleotide encoding a T-cell receptor (TCR) polypeptide that specifically binds an anaplastic lymphoma kinase (ALK) peptide), thereby killing the ALK-positive neoplastic cell.

[0023] In yet another aspect, the disclosure provides a method of reducing or inhibiting the growth of an ALK positive neoplasia containing contacting the ALK positive neoplasia with a transgenic effector cell of any previous aspect (e.g., an effector cell containing a heterologous polynucleotide encoding a T-cell receptor (TCR) polypeptide that specifically binds an anaplastic lymphoma kinase (ALK) peptide), thereby reducing or inhibiting the growth of an ALK positive neoplasia.

[0024] In yet another aspect, the disclosure provides a method for treating an human leukocyte antigen (HLA) serotype A*02:01 subject having an anaplastic lymphoma kinase (ALK)-rearranged Non-Small Cell Lung Cancer (NSCLC) or anaplastic large cell lymphoma (ALCL), the method involving administering to the subject a a transgenic effector cell containing a heterologous polynucleotide encoding a T-cell receptor (TCR) polypeptide that specifically binds an anaplastic lymphoma kinase (ALK) peptide, thereby treating the subject.

[0025] In yet another aspect, the disclosure provides a method for treating an HLA-B*07:02 subject having an anaplastic lymphoma kinase (ALK)-rearranged Non-Small Cell Lung Cancer (NSCLC) or anaplastic large cell lymphoma (ALCL), the method involving administering to the subject a transgenic effector cell containing a heterologous polynucleotide encoding a T-cell receptor (TCR) polypeptide that specifically binds an anaplastic lymphoma kinase (ALK) peptide, thereby treating the subject.

[0026] In yet another aspect, the disclosure provides a method for treating an HLA-A*02:01 subject having an anaplastic lymphoma kinase (ALK)-rearranged Non-Small Cell Lung Cancer (NSCLC) or anaplastic large cell lymphoma (ALCL) that is resistant to ALK tyrosine kinase inhibitor therapy, the method involving administering to the subject identified as resistant to ALK tyrosine kinase inhibitor therapy a transgenic effector cell containing a heterologous polynucleotide encoding a T-cell receptor (TCR) polypeptide that specifically binds an anaplastic lymphoma kinase (ALK) peptide, thereby treating the subject.

[0027] In yet another aspect, the disclosure provides a method for treating an HLA-B*07:02 subject having an anaplastic lymphoma kinase (ALK)-rearranged Non-Small Cell Lung Cancer (NSCLC) or anaplastic large cell lymphoma (ALCL) that is resistant to ALK tyrosine kinase inhibitor therapy, the method involving administering to the subject identified as resistant to ALK tyrosine kinase inhibitor therapy a transgenic effector cell containing a heterologous polynucleotide encoding a T-cell receptor (TCR) polypeptide that specifically binds an anaplastic lymphoma kinase (ALK) peptide, thereby treating the subject.

[0028] In yet another aspect, the disclosure provides a method for reducing metastasis in an HLA-A*02:01 subject having an anaplastic lymphoma kinase (ALK)-rearranged Non-Small Cell Lung Cancer (NSCLC) or anaplastic large cell lymphoma (ALCL), the method involving administering to the subject a transgenic effector cell of any previous aspect (e.g., a cell containing a heterologous polynucleotide encoding a T-cell receptor (TCR) polypeptide that specifically binds an anaplastic lymphoma kinase (ALK) peptide), thereby reducing metastasis in the subject.

[0029] In yet another aspect, the disclosure provides a method for reducing metastasis in an HLA-B*07:02 subject having an anaplastic lymphoma kinase (ALK)-rearranged Non-Small Cell Lung Cancer (NSCLC) or anaplastic large cell lymphoma (ALCL), the method involving administering to the subject a transgenic effector cell of any previous aspect (e.g., a cell containing a heterologous polynucleotide encoding a T-cell receptor (TCR) polypeptide that specifically binds an anaplastic lymphoma kinase (ALK) peptide), thereby reducing metastasis in the subject.

[0030] In yet another aspect, the disclosure provides a method for reducing metastasis in an HLA-A*02:01 subject having an anaplastic lymphoma kinase (ALK)-rearranged Non-Small Cell Lung Cancer (NSCLC) or anaplastic large cell lymphoma (ALCL) that is resistant to ALK tyrosine kinase inhibitor therapy, the method involving administering to the subject identified as resistant to ALK tyrosine kinase inhibitor therapy a transgenic effector cell of any previous aspect (e.g., a cell containing a heterologous polynucleotide encoding a T-cell receptor (TCR) polypeptide that specifically binds an anaplastic lymphoma kinase (ALK) peptide), thereby reducing metastasis in the subject.

[0031] In yet another aspect, the disclosure provides a method for treating metastasis an HLA-B*07:02 subject having an anaplastic lymphoma kinase (ALK)-rearranged Non-Small Cell Lung Cancer (NSCLC) or anaplastic large cell lymphoma (ALCL) that is resistant to ALK tyrosine kinase inhibitor therapy, the method involving administering to the subject identified as resistant to ALK tyrosine kinase inhibitor therapy of any previous aspect (e.g., a cell containing a heterologous polynucleotide encoding a T-cell receptor (TCR) polypeptide that specifically binds an anaplastic lymphoma kinase (ALK) peptide), thereby reducing metastasis in the subject. In various embodiments of the above aspects, the metastasis is a central nervous system, liver, lymph node, or kidney metastasis. In various embodiments of the above aspects, the metastasis is reduced relative to an untreated control subject. In various embodiments of the above aspects, the T cell receptor polypeptide comprises:
[0032] (i) a complementarity determining region (CDR) 1, wherein the sequence of CDR 1 is any CDR I sequence disclosed in SEQ ID NOs 2969-4452, 20513-21122, 28105-28240, 29793-29820, or 30321-30416, or any sequence that has at least about 85%, 90%, 95%, 96%, 97%, 98%, 99%, or 100% identity thereto;
[0033] (ii) a CDR 2, wherein the sequence of CDR 2 is any CDR 2 sequence disclosed in SEQ ID NOs 8905-10388, 22953-23562, 28649-28784, 29905-29932, or 30705-30800, or any sequence that has at least about 85%, 90%, 95%, 96%, 97%, 98%, 99%, or 100% identity thereto; and/or
[0034] (iii) a CDR 3, wherein the sequence of CDR 3 is any CDR 3 sequence disclosed in SEQ ID NOs 14841-16324, 25393-26002, 29193-29328, 30017-30044, or 31089-31184, or any sequence that has at least about 85%, 90%, 95%, 96%, 97%, 98%, 99%, or 100% identity thereto.

[0035] In various embodiments of the above aspects, the method further involves administering to the subject lorlatinib and/or an immune checkpoint inhibitor (ICI) selected from the group consisting of an anti-PD1 antibody, an anti-PDL1 antibody, and an anti-CTLA-4 antibody. In various embodiments of the above aspects, the ALK rearrangement is an echinoderm microtubule-associate protein-like 4-ALK rearrangement (EML4-ALK).

[0036] In yet another aspect, the disclosure provides a method of killing an ALK-positive neoplastic cell, the method comprising contacting the ALK-positive neoplastic cell with a transgenic effector cell comprising a heterologous polynucleotide encoding a TCR polypeptide that specifically binds an ALK peptide,
[0037] wherein the TCR polypeptide comprises each of:
   [0038] (i) a complementarity determining region (CDR) 1, wherein the sequence of CDR 1 is any CDR I sequence disclosed in SEQ ID NOs 2969-4452, 20513-21122, 28105-28240, 29793-29820, or 30321-30416, or any sequence that has at least about 85%, 90%, 95%, 96%, 97%, 98%, 99%, or 100% identity thereto;
   [0039] (ii) a CDR 2, wherein the sequence of CDR 2 is any CDR 2 sequence disclosed in SEQ ID NOs 8905-10388, 22953-23562, 28649-28784, 29905-29932, or 30705-30800, or any sequence that has at least 85% identity thereto; and
   [0040] (iii) a CDR 3, wherein the sequence of CDR 3 is any CDR 3 sequence disclosed in SEQ ID NOs 14841-16324, 25393-26002, 29193-29328, 30017-30044, or 31089-31184, or any sequence that has at least about 85%, 90%, 95%, 96%, 97%, 98%, 99%, or 100% identity thereto.

[0041] In yet another aspect, the disclosure provides a method of reducing the growth of an ALK-positive neoplasia in a selected subject, the method comprising contacting the ALK-positive neoplasia with a transgenic effector cell comprising a heterologous polynucleotide encoding a TCR polypeptide that specifically binds an ALK peptide,
[0042] wherein the TCR polypeptide comprises each of:
   [0043] (i) a complementarity determining region (CDR) 1, wherein the sequence of CDR 1 is any CDR 1 sequence disclosed in SEQ ID NOs 2969-4452, 20513-21122, 28105-28240, 29793-29820, or 30321-30416, or any sequence that has at least about 85%, 90%, 95%, 96%, 97%, 98%, 99%, or 100% identity thereto;
   [0044] (ii) a CDR 2, wherein the sequence of CDR 2 is any CDR 2 sequence disclosed in SEQ ID NOs 8905-10388, 22953-23562, 28649-28784, 29905-29932, or 30705-30800, or any sequence that has at least about 85%, 90%, 95%, 96%, 97%, 98%, 99%, or 100% identity thereto; and
   [0045] (iii) a CDR 3, wherein the sequence of CDR 3 is any CDR 3 sequence disclosed in SEQ ID NOs 14841-16324, 25393-26002, 29193-29328, 30017-30044, or 31089-31184, or any sequence that has at least about 85%, 90%, 95%, 96%, 97%, 98%, 99%, or 100% identity thereto,
[0046] and wherein the subject is selected for expression of an HLA-B*07:02 serotype.

[0047] In yet another aspect, the disclosure provides a method of reducing the growth of an ALK-positive neoplasia in a selected subject, the method comprising contacting the ALK-positive neoplasia with a transgenic effector cell comprising a heterologous polynucleotide encoding a TCR polypeptide that specifically binds an ALK peptide,
[0048] wherein the TCR polypeptide comprises each of:
   [0049] (i) a complementarity determining region (CDR) 1, wherein the sequence of CDR 1 is any CDR 1 sequence disclosed in SEQ ID NOs 2969-4452, 20513-21122, 28105-28240, 29793-29820, or 30321-30416, or any sequence that has at least about 85%, 90%, 95%, 96%, 97%, 98%, 99%, or 100% identity thereto;
   [0050] (ii) a CDR 2, wherein the sequence of CDR 2 is any CDR 2 sequence disclosed in SEQ ID NOs 8905-10388, 22953-23562, 28649-28784, 29905-29932, or 30705-30800, or any sequence that has at least about 85%, 90%, 95%, 96%, 97%, 98%, 99%, or 100% identity thereto; and
   [0051] (iii) a CDR 3, wherein the sequence of CDR 3 is any CDR 3 sequence disclosed in SEQ ID NOs 14841-16324, 25393-26002, 29193-29328, 30017-30044, or 31089-31184, or any sequence that has at least about 85%, 90%, 95%, 96%, 97%, 98%, 99%, or 100% identity thereto, and wherein the subject is selected for expression of an HLA-A*02:01 serotype.

[0052] In yet another aspect, the disclosure provides a method of treating a selected subject having an ALK-positive neoplasia, the method comprising administering to the subject an effective amount of a transgenic effector cell comprising a heterologous polynucleotide encoding a TCR polypeptide that specifically binds an ALK peptide,
[0053] wherein the TCR polypeptide comprises each of:
   [0054] (i) a complementarity determining region (CDR) 1, wherein the sequence of CDR 1 is any CDR 1 sequence disclosed in SEQ ID NOs 2969-4452, 20513-21122, 28105-28240, 29793-29820, or 30321-30416, or any sequence that has at least about 85%, 90%, 95%, 96%, 97%, 98%, 99%, or 100% identity thereto;
   [0055] (ii) a CDR 2, wherein the sequence of CDR 2 is any CDR 2 sequence disclosed in SEQ ID NOs 8905-10388, 22953-23562, 28649-28784, 29905-29932, or 30705-30800, or any sequence that has at least about 85%, 90%, 95%, 96%, 97%, 98%, 99%, or 100% identity thereto; and
   [0056] (iii) a CDR 3, wherein the sequence of CDR 3 is any CDR 3 sequence disclosed in SEQ ID NOs 14841-16324, 25393-26002, 29193-29328, 30017-30044, or 31089-31184, or any sequence that has at least about 85%, 90%, 95%, 96%, 97%, 98%, 99%, or 100% identity thereto,
[0057] and wherein the subject is selected for expression of an HLA-B*07:02 serotype.

[0058] In yet another aspect, the disclosure provides a method of treating a selected subject having an ALK-positive neoplasia, the method comprising administering to the subject an effective amount of a transgenic effector cell comprising a heterologous polynucleotide encoding a TCR polypeptide that specifically binds an ALK peptide,
[0059] wherein the TCR polypeptide comprises each of:
   [0060] (i) a complementarity determining region (CDR) 1, wherein the sequence of CDR 1 is any CDR I sequence disclosed in SEQ ID NOs 2969-4452, 20513-21122, 28105-28240, 29793-29820, or 30321-30416, or any sequence that has at least about 85%, 90%, 95%, 96%, 97%, 98%, 99%, or 100% identity thereto;
   [0061] (ii) a CDR 2, wherein the sequence of CDR 2 is any CDR 2 sequence disclosed in SEQ ID NOs 8905-10388, 22953-23562, 28649-28784, 29905-29932, or 30705-30800, or any sequence that has at least about 85%, 90%, 95%, 96%, 97%, 98%, 99%, or 100% identity thereto; and
   [0062] (iii) a CDR 3, wherein the sequence of CDR 3 is any CDR 3 sequence disclosed in SEQ ID NOs 14841-16324, 25393-26002, 29193-29328, 30017-30044, or 31089-31184, or any sequence that has at least about 85%, 90%, 95%, 96%, 97%, 98%, 99%, or 100% identity thereto,
[0063] and wherein the subject is selected for expression of an HLA-A*02:01 serotype.

[0064] In yet another aspect, the disclosure provides a kit comprising an agent for administration to a subject with one or more ALK-positive cancers, wherein the agent comprises the pharmaceutical composition of any previous aspect.

[0065] In one embodiment of any of the above aspects or any other aspect of the invention delineated herein, the ALK peptide has at least about 85%, 90%, 95%, 96%, 97%, 98%, 99%, or 100% amino acid sequence identity to a peptide selected from the following: RPRPSQPSSL (SEQ ID NO: 32957); IVRCIGVSL (SEQ ID NO: 32958); VPRKNITLI (SEQ ID NO: 32959); TAAEVSVRV (SEQ ID NO: 32960); AMLDLLHVA (SEQ ID NO: 32961); GGDLKSFLRETRPRPSQPSSLAMLDLLHVA (SEQ ID NO: 32962); FNHQNIVRCIGVSL (SEQ ID NO: 32963); and GGDLKSFLRETRPRPSQPSSLAM (SEQ ID NO: 32964). In one embodiment of any of the above aspects or any other aspect of the invention delineated herein, the T cell receptor polypeptide contains:
[0066] (i) a complementarity determining region (CDR) 1, wherein the sequence of CDR 1 is any CDR 1 sequence disclosed in SEQ ID NOs 2969-4452, 20513-21122, 28105-28240, 29793-29820, or 30321-30416, or any sequence that has at least about 85%, 90%, 95%, 96%, 97%, 98%, 99%, or 100% identity thereto;
[0067] (ii) a CDR 2, wherein the sequence of CDR 2 is any CDR 2 sequence disclosed in SEQ ID NOs 8905-10388, 22953-23562, 28649-28784, 29905-29932, or 30705-30800, or any sequence that has at least about 85%, 90%, 95%, 96%, 97%, 98%, 99%, or 100% identity thereto; and/or
[0068] (iii) a CDR 3, wherein the sequence of CDR 3 is any CDR 3 sequence disclosed in SEQ ID NOs 14841-16324, 25393-26002, 29193-29328, 30017-30044, or 31089-31184, or any sequence that has at least about 85%, 90%, 95%, 96%, 97%, 98%, 99%, or 100% identity thereto.

[0069] In another embodiment, the T cell receptor polypeptide comprises each of:
[0070] (i) a complementarity determining region (CDR) 1, wherein the sequence of CDR 1 is any CDR 1 sequence disclosed in SEQ ID NOs 2969-4452, 20513-21122, 28105-28240, 29793-29820, or 30321-30416, or any sequence that has at least 85%, 90%, 95%, 96%, 97%, 98%, 99%, or 100% identity thereto;
[0071] (ii) a CDR 2, wherein the sequence of CDR 2 is any CDR 2 sequence disclosed in SEQ ID NOs 8905-10388, 22953-23562, 28649-28784, 29905-29932, or 30705-30800, or any sequence that has at least 85%, 90%, 95%, 96%, 97%, 98%, 99%, or 100% identity thereto; and
[0072] (iii) a CDR 3, wherein the sequence of CDR 3 is any CDR 3 sequence disclosed in SEQ ID NOs 14841-16324, 25393-26002, 29193-29328, 30017-30044, or 31089-31184, or any sequence that has at least about 85%, 90%, 95%, 96%, 97%, 98%, 99%, or 100% identity thereto.

[0073] In other embodiments, the effector cell is an NK cell or T cell (e.g., a CD8+ or CD4+ T cell). In other embodiments, the effector cell is an autologous or allogeneic cell. In other embodiments, the cell further contains a mutation which reduces the expression of an endogenous T cell receptor alpha constant (TRAC), T cell receptor beta constant 1 (TRBC1), and/or T cell receptor beta constant 2 (TRBC2) gene. In other embodiments, the TCR polypeptide is humanized or is non-humanized. In other embodiments, the ALK peptide has at least about 90% amino acid sequence identity to a peptide selected from the group consisting of RPRPSQPSSL (SEQ ID NO: 32957); IVRCIGVSL (SEQ ID NO: 32958); VPRKNITLI (SEQ ID NO: 32959); TAAEVSVRV (SEQ ID NO: 32960); AMLDLLHVA (SEQ ID NO: 32961); GGDLKSFLRETRPRPSQPSSLAMLDLLHVA (SEQ ID NO: 32962); FNHQNIVRCIGVSL (SEQ ID NO: 32963); and GGDLKSFLRETRPRPSQPSSLAM (SEQ ID NO: 32964). In other embodiments, the polypeptide is an antibody or antigen binding fragment thereof. In other embodiments, the polypeptide is a T cell receptor polypeptide or fragment thereof. In one embodiment of any of the above aspects or any other aspect of the invention delineated herein, a composition (e.g., a pharmaceutical composition) or kit of any previous aspect, further contains a tyrosine kinase inhibitor (TKI), an immune checkpoint inhibitor (ICI), an ALK peptide vaccine, or a CAR-T cell having specificity for an ALK peptide sequence. In embodiments, the TKI is crizotinib, alectinib, ceritinib, brigatinib, ensartinib, entrectinib, the ICI is selected from the group consisting of a programmed cell death protein 1 (PD-1) inhibitor, a programmed death-ligand 1 (PD-L1) inhibitor, and a cytotoxic T-lymphocyte-associated antigen-4 (CTLA-4) inhibitor.

[0074] In embodiments of any of the above aspects or any other aspect of the invention delineated herein, the metastasis is a central nervous system, liver, lymph node, or kidney metastasis. In embodiments of any of the above aspects the effector cell is an autologous or allogeneic cell. In embodiments of any of the above aspects, the effector cell further contains a mutation which reduces the expression of an endogenous T cell receptor alpha constant (TRAC), T cell receptor beta constant 1 (TRBC1), and/or T cell receptor beta constant 2 (TRBC2) gene. In embodiments of any of the above aspects, the TCR polypeptide is humanized or is non-humanized. In embodiments of any of the above aspects, the method further involves administering to the subject a tyrosine kinase inhibitor (TKI), an immune checkpoint inhibitor (ICI), an ALK peptide vaccine, and/or a CAR-T cell having specificity for an ALK peptide sequence is simultaneously or sequentially administered to the subject. In embodiments of any of the above aspects, the neoplasia is non-small cell lung cancer (NSCLC), anaplastic large cell lymphoma (ALCL), neuroblastoma, B-cell lymphoma, thyroid cancer, colon cancer, breast cancer, inflammatory myofibroblastic tumors (IMT), renal carcinoma, esophageal cancer, glioma, glioblastoma, or melanoma. In embodiments of any of the above aspects, the method further involves administering IFN-γ or a STING agonist (e.g., ADU-S100). In embodiments of any of the above aspects, the subject expresses an HLA class I allele. In embodiments of any of the above aspects, the ALK-positive neoplasia comprises an oncogenic ALK gene fusion, rearrangement, duplication, or mutation. In embodiments of any of the above aspects, the ALK rearrangement is a nucleophosmin-ALK rearrangement (NPM-ALK) or an echinoderm microtubule-associate protein-like 4-ALK rearrangement (EML4-ALK). In embodiments of any of the above aspects, survival of the subject is extended relative to a reference subject. In embodiments of any of the above aspects, the transgenic effector cell is administered in an amount effective to induce complete remission (CR) or partial remission of the ALK-positive neoplasia in the subject, or is effective to induce stable disease (SD) of the ALK-positive neoplasia in the subject.

[0075] Compositions and articles defined by the invention were isolated or otherwise manufactured in connection with the examples provided below. Other features and advantages of the invention will be apparent from the detailed description, and from the claims.

### Definitions

[0076] Unless defined otherwise, all technical and scientific terms used herein have the meaning commonly understood by a person skilled in the art to which this invention pertains or relates. The following references provide one of skill with a general definition of many of the terms used in this invention: Singleton et al., Dictionary of Microbiology and Molecular Biology (2nd ed. 1994); The Cambridge Dictionary of Science and Technology (Walker ed., 1988); The Glossary of Genetics, 5th Ed., R. Rieger et al. (eds.), Springer Verlag (1991); Benjamin Lewin, Genes V, published by Oxford University Press, 1994 (ISBN 0-19-854287-9); Kendrew et al. (eds.); The Encyclopedia of Molecular Biology, published by Blackwell Science Ltd., 1994 (ISBN 0-632-02182-9); Molecular Biology and Biotechnology: a Comprehensive Desk Reference, Robert A. Meyers (ed.), published by VCH Publishers, Inc., 1995 (ISBN 1-56081-569-8); and Hale & Marham, The Harper Collins Dictionary of Biology (1991). As used herein, the following terms have the meanings ascribed to them below, unless specified otherwise.

[0077] By “ADU-S100” is meant a compound having the structure

[chemical structure]

corresponding to CAS No. 1638241-89-0, and pharmaceutically acceptable salts thereof having activity as a stimulator of interferon genes (STING).

[0078] By “alectinib” is meant a compound having the structure

[chemical structure]

corresponding to CAS No. 1256580-46-7, and pharmaceutically acceptable salts thereof having activity as a tyrosine kinase inhibitor (TKI).

[0079] By “ALK positive” is meant having detectable ALK polypeptide or polynucleotide expression. Methods for measuring ALK expression are described, for example, in Vernersson, et al. “Characterization of the expression of the ALK receptor tyrosine kinase in mice,” Gene Expr Patterns, 6:448-461 (2005) and in Dirks, et al. “Expression and functional analysis of the anaplastic lymphoma kinase (ALK) gene in tumor cell lines,” Int. J. Cancer, 100:49-56 (2002), the disclosures of which are incorporated herein by reference in their entirities for all purposes. In embodiments, an ALK positive cell contains a change to the structure of the ALK gene. In some cases, an ALK positive cell expresses ALK at higher levels than a reference cell (e.g., a healthy non-neoplastic cell).

[0080] By “brigatinib” is meant a compound having the structure

[chemical structure]

corresponding to CAS No. 1197953-54-0, and pharmaceutically acceptable salts thereof having activity as a tyrosine kinase inhibitor (TKI).

[0081] By “ceritinib” is meant a compound having the structure

[chemical structure]

corresponding to CAS No. 1032900-25-6, and pharmaceutically acceptable salts thereof, having activity as a tyrosine kinase inhibitor (TKI).

[0082] By “crizotinib” is meant a compound having the structure

[chemical structure]

corresponding to CAS No. 877399-52-5, and pharmaceutically acceptable salts thereof having activity as a tyrosine kinase inhibitor (TKI).

[0083] By “ensartinib” is meant a compound having the structure

[chemical structure]

corresponding to CAS No. 1365267-27-1, and pharmaceutically acceptable salts thereof, having activity as a tyrosine kinase inhibitor (TKI).

[0084] By “entrectinib” is meant a compound having the structure

[chemical structure]

corresponding to CAS No. 1108743-60-7, and pharmaceutically acceptable salts thereof, having activity as a tyrosine kinase inhibitor (TKI).

[0085] By “lorlatinib,” “LORBRENAR,” or “LORVIQUAR” is meant a compound having the structure

[chemical structure]

corresponding to CAS No. 1454846-35-5, and pharmaceutically acceptable salts thereof having activity as a tyrosine kinase inhibitor (TKI).

[0086] By “adjuvant” is meant a substance or vehicle that non-specifically enhances the immune response to an antigen. Adjuvants may include a suspension of minerals (e.g., alum, aluminum hydroxide, or phosphate) on which antigen is adsorbed; or water-in-oil emulsion in which antigen solution is emulsified in mineral oil (e.g., Freund's incomplete adjuvant), sometimes with the inclusion of killed mycobacteria (Freund's complete adjuvant) to further enhance antigenicity. Immunostimulatory oligonucleotides or modifications thereof (such as those including a CpG motif) can also be used as adjuvants (see, e.g., U.S. Pat. Nos. 6,194,388; 6,207,646; 6,214,806; 6,218,371; 6,239,116; 6,339,068; 6,406,705; and 6,429,199). Adjuvants also include biological molecules, such as costimulatory molecules. Exemplary biological adjuvants include, without limitation, interleukin-1 (IL-2), the protein memory T-cell attractant “Regulated on Activation. Normal T Expressed and Secreted” (RANTES), granulocyte-macrophage-colony stimulating factor (GM-CSF), tumor necrosis factor-alpha (TNF-α), interferon-gamma (IFN-γ), granulocyte-colony stimulation factor (G-CSF), lymphocyte function-associated antigen 3 (LFA-3, also called CD58), cluster of differentiation antigen 72 (CD72), (a negative regulator of B-cell responsiveness), peripheral membrane protein, B7-1 (B7-1, also called CD80), peripheral membrane protein, B7-2 (B7-2, also called CD86), the TNF ligand superfamily member 4 ligand (OX40L) or the type 2 transmembrane glycoprotein receptor belonging to the TNF superfamily (4-1BBL). In some embodiments, the adjuvant may be conjugated to an amphiphile as described in H. Liu et al., Structure-based programming of lymph-node targeting in molecular vaccines. Nature 507, 5199522 (2014). In some embodiments, the amphiphile conjugated to the adjuvant is N-hydroxy succinimidyl ester-end-functionalized poly(ethylene glycol)-lipid (NHS-PEG2KDa-DSPE).

[0087] By “administer” is meant giving, supplying, or dispensing a composition, agent, therapeutic and the like to a subject, or applying or bringing the composition and the like into contact with the subject. Administering or administration may be accomplished by any of a number of routes, such as, for example, without limitation, topical, oral, subcutaneous, intramuscular, intraperitoneal, intravenous (IV), injection, intrathecal, intramuscular, dermal, intradermal, intracranial, inhalation, rectal, intravaginal, or intraocular.

[0088] By “adoptive cell transfer” or “ACT” is meant a process in which immune effector cells (e.g. T cells) are isolated and engineered to recognize a specific antigen (i.e., “engineered immune cells”), then expanded and reintroduced to a subject. Immune effector cells (e.g., T cells) used for ACT may be “autologous,” derived from the subject to be treated, or “allogeneic” (sometimes called “homologous”), derived from a donor subject with an immunogenic profile similar enough not to be rejected by the subject receiving ACT. In some embodiments, cells to be transferred in ACT are engineered cells expressing T cell receptors, as described herein.

[0089] By “agent” is meant any cell, small molecule chemical compound, antibody, nucleic acid molecule, peptide, polypeptide, or fragments thereof. In some embodiments, the polypeptide is a T cell receptor. In some embodiments, the polypeptide is an antibody. In some embodiments, the cell is an immune effector comprising a heterologous T cell receptor.

[0090] By “ALK polypeptide” or “ALK peptide” is meant a protein or fragment thereof having at least 85% amino acid identity to an anaplastic lymphoma kinase (ALK) amino acid sequence associated with GenBank Accessions No.: BAD92714.1, ACY79563.1, or ACI47591.1, and that is capable of inducing an ALK-specific immune response in an immunized subject. In some embodiments, the ALK polypeptide is at least 85%, at least 90%, at least 95%, at least 98%, at least 99%, or 100% identical to the ALK protein in Homo sapiens. In embodiments, the ALK peptide contains about, at least about, and/or nor more than about 5, 6, 7, 8, 9, 10, 11, 12, 13, 14, 15, 20, 25, 30, 35, 40, 45, or 50 amino acids. Exemplary ALK full-length amino acid sequences from Homo sapiens are provided below (see GenBank Accessions No. BAD92714.1, ACY79563.1, and ACI47591.1):

>BAD92714.1 anaplastic lymphoma kinase Ki-1
variant, partial [Homo sapiens] (ALK
cytoplasmic portion in bold font)
(SEQ ID NO: 32965)
TASSGGMGAIGLLWLLPLLLSTAAVGSGMGTGQRAGSPAAGPPLQ
PREPLSYSRLQRKSLAVDFVVPSLFRVYARDLLLPPSSSELKAGR
PEARGSLALDCAPLLRLLGPAPGVSWTAGSPAPAEARTLSRVLKG
GSVRKLRRAKQLVLELGEEAILEGCVGPPGEAAVGLLQFNLSELF
SWWIRQGEGRLRIRLMPEKKASEVGREGRLSAAIRASQPRLLFQI
FGTGHSSLESPTNMPSPSPDYFTWNLTWIMKDSFPFLSHRSRYGL
ECSFDFPCELEYSPPLHDLRNQSWSWRRIPSEEASQMDLLDGPGA
ERSKEMPRGSFLLLNTSADSKHTILSPWMRSSSEHCTLAVSVHRH
LQPSGRYIAQLLPHNEAAREILLMPTPGKHGWTVLQGRIGRPDNP
FRVALEYISSGNRSLSAVDFFALKNCSEGTSPGSKMALQSSFTCW
NGTVLQLGQACDFHQDCAQGEDESQMCRKLPVGFYCNFEDGFCGW
TQGTLSPHTPQWQVRTLKDARFQDHQDHALLLSTTDVPASESATV
TSATFPAPIKSSPCELRMSWLIRGVLRGNVSLVLVENKTGKEQGR
MVWHVAAYEGLSLWQWMVLPLLDVSDRFWLQMVAWWGQGSRAIVA
FDNISISLDCYLTISGEDKILQNTAPKSRNLFERNPNKELKPGEN
SPRQTPIFDPTVHWLFTTCGASGPHGPTQAQCNNAYQNSNLSVEV
GSEGPLKGIQIWKVPATDTYSISGYGAAGGKGGKNTMMRSHGVSV
LGIFNLEKDDMLYILVGQQGEDACPSTNQLIQKVCIGENNVIEEE
IRVNRSVHEWAGGGGGGGGATYVFKMKDGVPVPLIIAAGGGGRAY
GAKTDTFHPERLENNSSVLGLNGNSGAAGGGGGWNDNTSLLWAGK
SLQEGATGGHSCPQAMKKWGWETRGGFGGGGGGCSSGGGGGGYIG
GNAASNNDPEMDGEDGVSFISPLGILYTPALKVMEGHGEVNIKHY
LNCSHCEVDECHMDPESHKVICFCDHGTVLAEDGVSCIVSPTPEP
HLPLSLILSVVTSALVAALVLAFSGIMIVYRRKHQELQAMQMELQ
SPEYKLSKLRTSTIMTDYNPNYCFAGKTSSISDLKEVPRKNITLI
RGLGHGAFGEVYEGQVSGMPNDPSPLQVAVKTLPEVCSEQDELDF
LMEALIISKFNHQNIVRCIGVSLQSLPRFILLELMAGGDLKSFLR
ETRPRPSQPSSLAMLDLLHVARDIACGCQYLEENHFIHRDIAARN
CLLTCPGPGRVAKIGDFGMARDIYRASYYRKGGCAMLPVKWMPPE
AFMEGIFTSKTDTWSFGVLLWEIFSLGYMPYPSKSNQEVLEFVTS
GGRMDPPKNCPGPVYRIMTQCWQHQPEDRPNFAIILERIEYCTQD
PDVINTALPIEYGPLVEEEEKVPVRPKDPEGVPPLLVSQQAKREE
ERSPAAPPPLPTTSSGKAAKKPTAAEVSVRVPRGPAVEGGHVNMA
FSQSNPPSELHRVHGSRNKPTSLWNPTYGSWFTEKPTKKNNPIAK
KEPHERGNLGLEGSCTVPPNVATGRLPGASLLLEPSSLTANMKEV
PLFRLRHFPCGNVNYGYQQQGLPLEAATAPGAGHYEDTILKSKNS
MNQPGP.
>ACY79563.1 mutant anaplastic lymphoma receptor
tyrosine kinase [Homo sapiens]
(SEQ ID NO: 32966)
[sequence omitted]
>ACI47591.1 anaplastic lymphoma kinase
[Homo sapiens]
(SEQ ID NO: 32967)
[sequence omitted]

[0091] An exemplary Homo sapiens ALK amino acid sequence from GenBank™ accession no. NP_004295 is provided below:

```
(SEQ ID NO: 32968)
      1 MGAIGLLWLL PLLLSTAAVG SGMGTGQRAG SPAAGPPLQP REPLSYSRLQ RKSLAVDFVV
    61 PSLFRVYARD LLLPPSSSEL KAGRPEARGS LALDCAPLLR LLGPAPGVSW TAGSPAPAEA
  121 RTLSRVLKGG SVRKLRRAKQ LVLELGEEAI LEGCVGPPGE AAVGLLQFNL SELFSWWIRQ
  181 GEGRLRIRLM PEKKASEVGR EGRLSAAIRA SQPRLLFQIF GTGHSSLESP TNMPSPSPDY
  241 FTWNLTWIMK DSFPFLSHRS RYGLECSFDF PCELEYSPPL HDLRNQSWSW RRIPSEEASQ
  301 MDLLDGPGAE RSKEMPRGSF LLLNTSADSK HTILSPWMRS SSEHCTLAVS VHRHLQPSGR
  361 YIAQLLPHNE AAREILLMPT PGKHGWTVLQ GRIGRPDNPF RVALEYISSG NRSLSAVDFF
  421 ALKNCSEGTS PGSKMALQSS FTCWNGTVLQ LGQACDFHQD CAQGEDESQM CRKLPVGFYC
  481 NFEDGFCGWT QGTLSPHTPQ WQVRTLKDAR FQDHQDHALL LSTTDVPASE SATVTSATFP
  541 APIKSSPCEL RMSWLIRGVL RGNVSLVLVE NKTGKEQGRM VWHVAAYEGL SLWQWMVLPL
  601 LDVSDRFWLQ MVAWWGQGSR AIVAFDNISI SLDCYLTISG EDKILQNTAP KSRNLFERNP
  661 NKELKPGENS PRQTPIFDPT VHWLFTTCGA SGPHGPTQAQ CNNAYQNSNL SVEVGSEGPL
  721 KGIQIWKVPA TDTYSISGYG AAGGKGGKNT MMRSHGVSVL GIFNLEKDDM LYILVGQQGE
  781 DACPSTNQLI QKVCIGENNV IEEEIRVNRS VHEWAGGGGG GGGATYVFKM KDGVPVPLII
  841 AAGGGGRAYG AKTDTFHPER LENNSSVLGL NGNSGAAGGG GGWNDNTSLL WAGKSLQEGA
  901 TGGHSCPQAM KKWGWETRGG FGGGGGGCSS GGGGGGYIGG NAASNNDPEM DGEDGVSFIS
  961 PLGILYTPAL KVMEGHGEVN IKHYLNCSHC EVDECHMDPE SHKVICFCDH GTVLAEDGVS
1021 CIVSPTPEPH LPLSLILSVV TSALVAALVL AFSGIMIVYR RKHQELQAMQ MELQSPEYKL
1081 SKLRTSTIMT DYNPNYCFAG KTSSISDLKE VPRKNITLIR GLGHGAFGEV YEGQVSGMPN
1141 DPSPLQVAVK TLPEVCSEQD ELDFLMEALI ISKFNHQNIV RCIGVSLQSL PRFILLELMA
1201 GGDLKSFLRE TRPRPSQPSS LAMLDLLHVA RDIACGCQYL EENHFIHRDI AARNCLLTCP
1261 GPGRVAKIGD FGMARDIYRA SYYRKGGCAM LPVKWMPPEA FMEGIFTSKT DTWSFGVLLW
1321 EIFSLGYMPY PSKSNQEVLE FVTSGGRMDP PKNCPGPVYR IMTQCWQHQP EDRPNFAIIL
1381 ERIEYCTQDP DVINTALPIE YGPLVEEEEK VPVRPKDPEG VPPLLVSQQA KREEERSPAA
1441 PPPLPTTSSG KAAKKPTAAE ISVRVPRGPA VEGGHVNMAF SQSNPPSELH KVHGSRNKPT
1501 SLWNPTYGSW FTEKPTKKNN PIAKKEPHDR GNLGLEGSCT VPPNVATGRL PGASLLLEPS
1561 SLTANMKEVP LFRLRHFPCG NVNYGYQQQG LPLEAATAPG AGHYEDTILK SKNSMNQPGP
```

[0092] An exemplary Homo sapiens ALK polypeptide sequence from UniProt Accession No. Q9UM73 is provided below (extracellular domain (amino acids 19-1038) provided in bold font):

(SEQ ID NO: 33008)
MGAIGLLWLLPLLLSTAAVGSGMGTGQRAGSPAAGPPLQPREPLSY
SRLQRKSLAVDFVVPSLFRVYARDLLLPPSSSELKAGRPEARGSL
ALDCAPLLRLLGPAPGVSWTAGSPAPAEARTLSRVLKGGSVRKLR
RAKQLVLELGEEAILEGCVGPPGEAAVGLLQFNLSELFSWWIRQG
EGRLRIRLMPEKKASEVGREGRLSAAIRASQPRLLFQIFGTGHSS
LESPTNMPSPSPDYFTWNLTWIMKDSFPFLSHRSRYGLECSFDFP
CELEYSPPLHDLRNQSWSWRRIPSEEASQMDLLDGPGAERSKEMP
RGSFLLLNTSADSKHTILSPWMRSSSEHCTLAVSVHRHLQPSGRY
IAQLLPHNEAAREILLMPTPGKHGWTVLQGRIGRPDNPFRVALEY
ISSGNRSLSAVDFFALKNCSEGTSPGSKMALQSSFTCWNGTVLQL
GQACDFHQDCAQGEDESQMCRKLPVGFYCNFEDGFCGWTQGTLSP
HTPQWQVRTLKDARFQDHQDHALLLSTTDVPASESATVTSATFPA
PIKSSPCELRMSWLIRGVLRGNVSLVLVENKTGKEQGRMVWHVAA
YEGLSLWQWMVLPLLDVSDRFWLQMVAWWGQGSRAIVAFDNISIS
LDCYLTISGEDKILQNTAPKSRNLFERNPNKELKPGENSPRQTPI
FDPTVHWLFTTCGASGPHGPTQAQCNNAYQNSNLSVEVGSEGPLK
GIQIWKVPATDTYSISGYGAAGGKGGKNTMMRSHGVSVLGIFNLE
KDDMLYILVGQQGEDACPSTNQLIQKVCIGENNVIEEEIRVNRSV
HEWAGGGGGGGGATYVFKMKDGVPVPLIIAAGGGGRAYGAKTDTF
HPERLENNSSVLGLNGNSGAAGGGGGWNDNTSLLWAGKSLQEGAT
GGHSCPQAMKKWGWETRGGFGGGGGGCSSGGGGGGYIGGNAASNN
DPEMDGEDGVSFISPLGILYTPALKVMEGHGEVNIKHYLNCSHCE
VDECHMDPESHKVICFCDHGTVLAEDGVSCIVSPTPEPHLPLSLI
LSVVTSALVAALVLAFSGIMIVYRRKHQELQAMQMELQSPEYKLS
KLRTSTIMTDYNPNYCFAGKTSSISDLKEVPRKNITLIRGLGHGA
FGEVYEGQVSGMPNDPSPLQVAVKTLPEVCSEQDELDFLMEALII
SKFNHQNIVRCIGVSLQSLPRFILLELMAGGDLKSFLRETRPRPS
QPSSLAMLDLLHVARDIACGCQYLEENHFIHRDIAARNCLLTCPG
PGRVAKIGDFGMARDIYRASYYRKGGCAMLPVKWMPPEAFMEGIF
TSKTDTWSFGVLLWEIFSLGYMPYPSKSNQEVLEFVTSGGRMDPP
KNCPGPVYRIMTQCWQHQPEDRPNFAIILERIEYCTQDPDVINTA
LPIEYGPLVEEEEKVPVRPKDPEGVPPLLVSQQAKREEERSPAAP
PPLPTTSSGKAAKKPTAAEISVRVPRGPAVEGGHVNMAFSQSNPP
SELHKVHGSRNKPTSLWNPTYGSWFTEKPTKKNNPIAKKEPHDRG
NLGLEGSCTVPPNVATGRLPGASLLLEPSSLTANMKEVPLFRLRH
FPCGNVNYGYQQQGLPLEAATAPGAGHYEDTILKSKNSMNQPGP

[0093] An exemplary ALK full-length amino acid sequence from Mus musculus is provided below:

| (SEQ ID NO: 32969) | |
|---|---|
| 1 | MGQRQSILKR CPEGSFLLLN TSADSKHTIL |
| | SPWMRSSSDH CTLAVSVHRH LQPSGRYVAQ |
| 61 | LLPHNEAGRE ILLVPTPGKH GWTVLQGRVG |
| | RPANPFRVAL EYISSGNRSL SAVDFFALKN |
| 121 | CSEGTSPGSK MALQSSFTCW NGTVLQLGQA |
| | CDFHQDCAQG EDEGQLCSKL PAGFYCNFEN |
| 181 | GFCGWTQSPL SPHMPRWQVR TLRDAHSQGH |
| | QGRALLLSTT DILASEGATV TSATFPAPMK |
| 241 | NSPCELRMSW LIRGVLRGNV SLVLVENKTG |
| | KEQSRTVWHV ATDEGLSLWQ HTVLSLLDVT |
| 301 | DRFWLQIVTW WGPGSRATVG FDNISISLDC |
| | YLTISGEEKM SLNSVPKSRN LFEKNPNKES |
| 361 | KSWANISGPT PIFDPTVHWL FTTCGASGPH |
| | GPTQAQCNNA YQNSNLSVVV GSEGPLKGVQ |
| 421 | IWKVPATDTY SISGYGAAGG KGGKNTMMRS |
| | HGVSVLGIFN LEKGDTLYIL VGQQGEDACP |
| 481 | RANQLIQKVC VGENNVIEEE IRVNRSVHEW |
| | AGGGGGGGGA TYVFKMKDGV PVPLIIAAGG |
| 541 | GGRAYGAKTE TFHPERLESN SSVLGLNGNS |
| | GAAGGGGGWN DNTSLLWAGK SLLEGAAGGH |
| 601 | SCPQAMKKWG WETRGGFGGG GGGGAPQVEE |
| | AEDI |

[0094] By “anaplastic lymphoma kinase (ALK) peptide” is meant an immunogenic fragment of an ALK polypeptide.

[0095] An exemplary ALK peptide amino sequence is as follows: RPRPSQPSSL (SEQ ID NO: 32957) (RPRshort).

[0096] An exemplary ALK peptide amino sequence is as follows: IVRCIGVSL (SEQ ID NO: 32958) (IVRshort).

[0097] An exemplary ALK peptide amino sequence is as follows: VPRKNITLI (SEQ ID NO: 32959).

[0098] An exemplary ALK peptide amino sequence is as follows: TAAEVSVRV (SEQ ID NO: 32960).

[0099] An exemplary ALK peptide amino sequence is as follows: AMLDLLHVA (SEQ ID NO: 32961).

[0100] An exemplary ALK peptide amino sequence is as follows:

(SEQ ID NO: 32962)
GGDLKSFLRETRPRPSQPSSLAMLDLLHVA.

[0101] An exemplary ALK peptide amino sequence is as follows: FNHQNIVRCIGVSL (SEQ ID NO: 32963) (IVRlong).

[0102] An exemplary ALK peptide amino sequence is as follows:

(SEQ ID NO: 32964)
GGDLKSFLRETRPRPSQPSSLAM.
(RPRlong)

[0103] By “ALK polynucleotide” is meant any nucleic acid molecule encoding an ALK polypeptide or fragment thereof. Exemplary full-length ALK nucleic acid sequences from Homo sapiens are provided below (see GenBank Accessions No.: AB209477.4, GU128155.1, and EU788003.1):

>AB209477.4:472-5352 Homo sapiens mRNA for anaplastic
lymphoma kinase Ki-1 variant protein, partial cds
(SEQ ID NO: 32970)
ACGGCCTCCTCCGGCGGGATGGGAGCCATCGGGCTCCTGTGGCTCCTGCCGCTGCTGCTTTCCA
CGGCAGCTGTGGGCTCCGGGATGGGGACCGGCCAGCGCGCGGGCTCCCCAGCTGCGGGGCCGCC
GCTGCAGCCCCGGGAGCCACTCAGCTACTCGCGCCTGCAGAGGAAGAGTCTGGCAGTTGACTTC
GTGGTGCCCTCGCTCTTCCGTGTCTACGCCCGGGACCTACTGCTGCCACCATCCTCCTCGGAGC
TGAAGGCTGGCAGGCCCGAGGCCCGCGGCTCGCTAGCTCTGGACTGCGCCCCGCTGCTCAGGTT
GCTGGGGCCGGCGCCGGGGGTCTCCTGGACCGCCGGTTCACCAGCCCCGGCAGAGGCCCGGACG
CTGTCCAGGGTGCTGAAGGGCGGCTCCGTGCGCAAGCTCCGGCGTGCCAAGCAGTTGGTGCTGG
AGCTGGGCGAGGAGGCGATCTTGGAGGGTTGCGTCGGGCCCCCCGGGGAGGCGGCTGTGGGGCT
GCTCCAGTTCAATCTCAGCGAGCTGTTCAGTTGGTGGATTCGCCAAGGCGAAGGGCGACTGAGG
ATCCGCCTGATGCCCGAGAAGAAGGCGTCGGAAGTGGGCAGAGAGGGAAGGCTGTCCGCGGCAA
TTCGCGCCTCCCAGCCCCGCCTTCTCTTCCAGATCTTCGGGACTGGTCATAGCTCCTTGGAATC
ACCAACAAACATGCCATCTCCTTCTCCTGATTATTTTACATGGAATCTCACCTGGATAATGAAA
GACTCCTTCCCTTTCCTGTCTCATCGCAGCCGATATGGTCTGGAGTGCAGCTTTGACTTCCCCT
GTGAGCTGGAGTATTCCCCTCCACTGCATGACCTCAGGAACCAGAGCTGGTCCTGGCGCCGCAT
CCCCTCCGAGGAGGCCTCCCAGATGGACTTGCTGGATGGGCCTGGGGCAGAGCGTTCTAAGGAG
ATGCCCAGAGGCTCCTTTCTCCTTCTCAACACCTCAGCTGACTCCAAGCACACCATCCTGAGTC
CGTGGATGAGGAGCAGCAGTGAGCACTGCACACTGGCCGTCTCGGTGCACAGGCACCTGCAGCC
CTCTGGAAGGTACATTGCCCAGCTGCTGCCCCACAACGAGGCTGCAAGAGAGATCCTCCTGATG
CCCACTCCAGGGAAGCATGGTTGGACAGTGCTCCAGGGAAGAATCGGGCGTCCAGACAACCCAT
TTCGAGTGGCCCTGGAATACATCTCCAGTGGAAACCGCAGCTTGTCTGCAGTGGACTTCTTTGC
CCTGAAGAACTGCAGTGAAGGAACATCCCCAGGCTCCAAGATGGCCCTGCAGAGCTCCTTCACT
TGTTGGAATGGGACAGTCCTCCAGCTTGGGCAGGCCTGTGACTTCCACCAGGACTGTGCCCAGG
GAGAAGATGAGAGCCAGATGTGCCGGAAACTGCCTGTGGGTTTTTACTGCAACTTTGAAGATGG
CTTCTGTGGCTGGACCCAAGGCACACTGTCACCCCACACTCCTCAGTGGCAGGTCAGGACCCTA
AAGGATGCCCGGTTCCAGGACCACCAAGACCATGCTCTATTGCTCAGTACCACTGATGTCCCCG
CTTCTGAAAGTGCTACAGTGACCAGTGCTACGTTTCCTGCACCGATCAAGAGCTCTCCATGTGA
GCTCCGAATGTCCTGGCTCATTCGTGGAGTCTTGAGGGGAAACGTGTCCTTGGTGCTAGTGGAG
AACAAAACCGGGAAGGAGCAAGGCAGGATGGTCTGGCATGTCGCCGCCTATGAAGGCTTGAGCC
TGTGGCAGTGGATGGTGTTGCCTCTCCTCGATGTGTCTGACAGGTTCTGGCTGCAGATGGTCGC
ATGGTGGGGACAAGGATCCAGAGCCATCGTGGCTTTTGACAATATCTCCATCAGCCTGGACTGC
TACCTCACCATTAGCGGAGAGGACAAGATCCTGCAGAATACAGCACCCAAATCAAGAAACCTGT
TTGAGAGAAACCCAAACAAGGAGCTGAAACCCGGGGAAAATTCACCAAGACAGACCCCCATCTT
TGACCCTACAGTTCATTGGCTGTTCACCACATGTGGGGCCAGCGGGCCCCATGGCCCCACCCAG
GCACAGTGCAACAACGCCTACCAGAACTCCAACCTGAGCGTGGAGGTGGGGAGCGAGGGCCCCC
TGAAAGGCATCCAGATCTGGAAGGTGCCAGCCACCGACACCTACAGCATCTCGGGCTACGGAGC
TGCTGGCGGGAAAGGCGGGAAGAACACCATGATGCGGTCCCACGGCGTGTCTGTGCTGGGCATC
TTCAACCTGGAGAAGGATGACATGCTGTACATCCTGGTTGGGCAGCAGGGAGAGGACGCCTGCC
CCAGTACAAACCAGTTAATCCAGAAAGTCTGCATTGGAGAGAACAATGTGATAGAAGAAGAAAT
CCGTGTGAACAGAAGCGTGCATGAGTGGGCAGGAGGCGGAGGAGGAGGGGGTGGAGCCACCTAC
GTATTTAAGATGAAGGATGGAGTGCCGGTGCCCCTGATCATTGCAGCCGGAGGTGGTGGCAGGG
CCTACGGGGCCAAGACAGACACGTTCCACCCAGAGAGACTGGAGAATAACTCCTCGGTTCTAGG
GCTAAACGGCAATTCCGGAGCCGCAGGTGGTGGAGGTGGCTGGAATGATAACACTTCCTTGCTC
TGGGCCGGAAAATCTTTGCAGGAGGGTGCCACCGGAGGACATTCCTGCCCCCAGGCCATGAAGA
AGTGGGGGTGGGAGACAAGAGGGGGTTTCGGAGGGGGTGGAGGGGGGTGCTCCTCAGGTGGAGG
AGGCGGAGGATATATAGGCGGCAATGCAGCCTCAAACAATGACCCCGAAATGGATGGGGAAGAT
GGGGTTTCCTTCATCAGTCCACTGGGCATCCTGTACACCCCAGCTTTAAAAGTGATGGAAGGCC
ACGGGGAAGTGAATATTAAGCATTATCTAAACTGCAGTCACTGTGAGGTAGACGAATGTCACAT
GGACCCTGAAAGCCACAAGGTCATCTGCTTCTGTGACCACGGGACGGTGCTGGCTGAGGATGGC
GTCTCCTGCATTGTGTCACCCACCCCGGAGCCACACCTGCCACTCTCGCTGATCCTCTCTGTGG
TGACCTCTGCCCTCGTGGCCGCCCTGGTCCTGGCTTTCTCCGGCATCATGATTGTGTACCGCCG
GAAGCACCAGGAGCTGCAAGCCATGCAGATGGAGCTGCAGAGCCCTGAGTACAAGCTGAGCAAG
CTCCGCACCTCGACCATCATGACCGACTACAACCCCAACTACTGCTTTGCTGGCAAGACCTCCT
CCATCAGTGACCTGAAGGAGGTGCCGCGGAAAAACATCACCCTCATTCGGGGTCTGGGCCATGG
AGCCTTTGGGGAGGTGTATGAAGGCCAGGTGTCCGGAATGCCCAACGACCCAAGCCCCCTGCAA
GTGGCTGTGAAGACGCTGCCTGAAGTGTGCTCTGAACAGGACGAACTGGATTTCCTCATGGAAG
CCCTGATCATCAGCAAATTCAACCACCAGAACATTGTTCGCTGCATTGGGGTGAGCCTGCAATC
CCTGCCCCGGTTCATCCTGCTGGAGCTCATGGCGGGGGGAGACCTCAAGTCCTTCCTCCGAGAG
ACCCGCCCTCGCCCGAGCCAGCCCTCCTCCCTGGCCATGCTGGACCTTCTGCACGTGGCTCGGG
ACATTGCCTGTGGCTGTCAGTATTTGGAGGAAAACCACTTCATCCACCGAGACATTGCTGCCAG
AAACTGCCTCTTGACCTGTCCAGGCCCTGGAAGAGTGGCCAAGATTGGAGACTTCGGGATGGCC
CGAGACATCTACAGGGCGAGCTACTATAGAAAGGGAGGCTGTGCCATGCTGCCAGTTAAGTGGA
TGCCCCCAGAGGCCTTCATGGAAGGAATATTCACTTCTAAAACAGACACATGGTCCTTTGGAGT
GCTGCTATGGGAAATCTTTTCTCTTGGATATATGCCATACCCCAGCAAAAGCAACCAGGAAGTT
CTGGAGTTTGTCACCAGTGGAGGCCGGATGGACCCACCCAAGAACTGCCCTGGGCCTGTATACC
GGATAATGACTCAGTGCTGGCAACATCAGCCTGAAGACAGGCCCAACTTTGCCATCATTTTGGA
GAGGATTGAATACTGCACCCAGGACCCGGATGTAATCAACACCGCTTTGCCGATAGAATATGGT
CCACTTGTGGAAGAGGAAGAGAAAGTGCCTGTGAGGCCCAAGGACCCTGAGGGGGTTCCTCCTC
TCCTGGTCTCTCAACAGGCAAAACGGGAGGAGGAGCGCAGCCCAGCTGCCCCACCACCTCTGCC
TACCACCTCCTCTGGCAAGGCTGCAAAGAAACCCACAGCTGCAGAGGTCTCTGTTCGAGTCCCT
AGAGGGCCGGCCGTGGAAGGGGGACACGTGAATATGGCATTCTCTCAGTCCAACCCTCCTTCGG
AGTTGCACAGGGTCCACGGATCCAGAAACAAGCCCACCAGCTTGTGGAACCCAACGTACGGCTC
CTGGTTTACAGAGAAACCCACCAAAAAGAATAATCCTATAGCAAAGAAGGAGCCACACGAGAGG
GGTAACCTGGGGCTGGAGGGAAGCTGTACTGTCCCACCTAACGTTGCAACTGGGAGACTTCCGG
GGGCCTCACTGCTCCTAGAGCCCTCTTCGCTGACTGCCAATATGAAGGAGGTACCTCTGTTCAG
GCTACGTCACTTCCCTTGTGGGAATGTCAATTACGGCTACCAGCAACAGGGCTTGCCCTTAGAA
GCCGCTACTGCCCCTGGAGCTGGTCATTACGAGGATACCATTCTGAAAAGCAAGAATAGCATGA
ACCAGCCTGGGCCCTGA.
>GU128155.1 Homo sapiens A1200V mutant anaplastic lymphoma
receptor tyrosine kinase (ALK) mRNA, complete cds
(SEQ ID NO: 32971)
ATGGGAGCCATCGGGCTCCTGTGGCTCCTGCCGCTGCTGCTTTCCACGGCAGCTGTGGGCTCCG
GGATGGGGACCGGCCAGCGCGCGGGCTCCCCAGCTGCGGGGCCGCCGCTGCAGCCCCGGGAGCC
ACTCAGCTACTCGCGCCTGCAGAGGAAGAGTCTGGCAGTTGACTTCGTGGTGCCCTCGCTCTTC
CGTGTCTACGCCCGGGACCTACTGCTGCCACCATCCTCCTCGGAGCTGAAGGCTGGCAGGCCCG
AGGCCCGCGGCTCGCTAGCTCTGGACTGCGCCCCGCTGCTCAGGTTGCTGGGGCCGGCGCCGGG
GGTCTCCTGGACCGCCGGTTCACCAGCCCCGGCAGAGGCCCGGACGCTGTCCAGGGTGCTGAAG
GGCGGCTCCGTGCGCAAGCTCCGGCGTGCCAAGCAGTTGGTGCTGGAGCTGGGCGAGGAGGCGA
TCTTGGAGGGTTGCGTCGGGCCCCCCGGGGAGGCGGCTGTGGGGCTGCTCCAGTTCAATCTCAG
CGAGCTGTTCAGTTGGTGGATTCGCCAAGGCGAAGGGCGACTGAGGATCCGCCTGATGCCCGAG
AAGAAGGCGTCGGAAGTGGGCAGAGAGGGAAGGCTGTCCGCGGCAATTCGCGCCTCCCAGCCCC
GCCTTCTCTTCCAGATCTTCGGGACTGGTCATAGCTCCTTGGAATCACCAACAAACATGCCTTC
TCCTTCTCCTGATTATTTTACATGGAATCTCACCTGGATAATGAAAGACTCCTTCCCTTTCCTG
TCTCATCGCAGCCGATATGGTCTGGAGTGCAGCTTTGACTTCCCCTGTGAGCTGGAGTATTCCC
CTCCACTGCATGACCTCAGGAACCAGAGCTGGTCCTGGCGCCGCATCCCCTCCGAGGAGGCCTC
CCAGATGGACTTGCTGGATGGGCCTGGGGCAGAGCGTTCTAAGGAGATGCCCAGAGGCTCCTTT
CTCCTTCTCAACACCTCAGCTGACTCCAAGCACACCATCCTGAGTCCGTGGATGAGGAGCAGCA
GTGAGCACTGCACACTGGCCGTCTCGGTGCACAGGCACCTGCAGCCCTCTGGAAGGTACATTGC
CCAGCTGCTGCCCCACAACGAGGCTGCAAGAGAGATCCTCCTGATGCCCACTCCAGGGAAGCAT
GGTTGGACAGTGCTCCAGGGAAGAATCGGGCGTCCAGACAACCCATTTCGAGTGGCCCTGGAAT
ACATCTCCAGTGGAAACCGCAGCTTGTCTGCAGTGGACTTCTTTGCCCTGAAGAACTGCAGTGA
AGGAACATCCCCAGGCTCCAAGATGGCCCTGCAGAGCTCCTTCACTTGTTGGAATGGGACAGTC
CTCCAGCTTGGGCAGGCCTGTGACTTCCACCAGGACTGTGCCCAGGGAGAAGATGAGAGCCAGA
TGTGCCGGAAACTGCCTGTGGGTTTTTACTGCAACTTTGAAGATGGCTTCTGTGGCTGGACCCA
AGGCACACTGTCACCCCACACTCCTCAATGGCAGGTCAGGACCCTAAAGGATGCCCGGTTCCAG
GACCACCAAGACCATGCTCTATTGCTCAGTACCACTGATGTCCCCGCTTCTGAAAGTGCTACAG
TGACCAGTGCTACGTTTCCTGCACCGATCAAGAGCTCTCCATGTGAGCTCCGAATGTCCTGGCT
CATTCGTGGAGTCTTGAGGGGAAACGTGTCCTTGGTGCTAGTGGAGAACAAAACCGGGAAGGAG
CAAGGCAGGATGGTCTGGCATGTCGCCGCCTATGAAGGCTTGAGCCTGTGGCAGTGGATGGTGT
TGCCTCTCCTCGATGTGTCTGACAGGTTCTGGCTGCAGATGGTCGCATGGTGGGGACAAGGATC
CAGAGCCATCGTGGCTTTTGACAATATCTCCATCAGCCTGGACTGCTACCTCACCATTAGCGGA
GAGGACAAGATCCTGCAGAATACAGCACCCAAATCAAGAAACCTGTTTGAGAGAAACCCAAACA
AGGAGCTGAAACCCGGGGAAAATTCACCAAGACAGACCCCCATCTTTGACCCTACAGTTCATTG
GCTGTTCACCACATGTGGGGCCAGCGGGCCCCATGGCCCCACCCAGGCACAGTGCAACAACGCC
TACCAGAACTCCAACCTGAGCGTGGAGGTGGGGAGCGAGGGCCCCCTGAAAGGCATCCAGATCT
GGAAGGTGCCAGCCACCGACACCTACAGCATCTCGGGCTACGGAGCTGCTGGCGGGAAAGGCGG
GAAGAACACCATGATGCGGTCCCACGGCGTGTCTGTGCTGGGCATCTTCAACCTGGAGAAGGAT
GACATGCTGTACATCCTGGTTGGGCAGCAGGGAGAGGACGCCTGCCCCAGTACAAACCAGTTAA
TCCAGAAAGTCTGCATTGGAGAGAACAATGTGATAGAAGAAGAAATCCGTGTGAACAGAAGCGT
GCATGAGTGGGCAGGAGGCGGAGGAGGAGGGGGTGGAGCCACCTACGTATTTAAGATGAAGGAT
GGAGTGCCGGTGCCCCTGATCATTGCAGCCGGAGGTGGTGGCAGGGCCTACGGGGCCAAGACAG
ACACGTTCCACCCAGAGAGACTGGAGAATAACTCCTCGGTTCTAGGGCTAAACGGCAATTCCGG
AGCCGCAGGTGGTGGAGGTGGCTGGAATGATAACACTTCCTTGCTCTGGGCCGGAAAATCTTTG
CAGGAGGGTGCCACCGGAGGACATTCCTGCCCCCAGGCCATGAAGAAGTGGGGGTGGGAGACAA
GAGGGGGTTTCGGAGGGGGTGGAGGGGGGTGCTCCTCAGGTGGAGGAGGCGGAGGATATATAGG
CGGCAATGCAGCCTCAAACAATGACCCCGAAATGGATGGGGAAGATGGGGTTTCCTTCATCAGT
CCACTGGGCATCCTGTACACCCCAGCTTTAAAAGTGATGGAAGGCCACGGGGAAGTGAATATTA
AGCATTATCTAAACTGCAGTCACTGTGAGGTAGACGAATGTCACATGGACCCTGAAAGCCACAA
GGTCATCTGCTTCTGTGACCACGGGACGGTGCTGGCTGAGGATGGCGTCTCCTGCATTGTGTCA
CCCACCCCGGAGCCACACCTGCCACTCTCGCTGATCCTCTCTGTGGTGACCTCTGCCCTCGTGG
CCGCCCTGGTCCTGGCTTTCTCCGGCATCATGATTGTGTACCGCCGGAAGCACCAGGAGCTGCA
AGCCATGCAGATGGAGCTGCAGAGCCCTGAGTACAAGCTGAGCAAGCTCCGCACCTCGACCATC
ATGACCGACTACAACCCCAACTACTGCTTTGCTGGCAAGACCTCCTCCATCAGTGACCTGAAGG
AGGTGCCGCGGAAAAACATCACCCTCATTCGGGGTCTGGGCCATGGCGCCTTTGGGGAGGTGTA
TGAAGGCCAGGTGTCCGGAATGCCCAACGACCCAAGCCCCCTGCAAGTGGCTGTGAAGACGCTG
CCTGAAGTGTGCTCTGAACAGGACGAACTGGATTTCCTCATGGAAGCCCTGATCATCAGCAAAT
TCAACCACCAGAACATTGTTCGCTGCATTGGGGTGAGCCTGCAATCCCTGCCCCGGTTCATCCT
GCTGGAGCTCATGGTGGGGGGAGACCTCAAGTCCTTCCTCCGAGAGACCCGCCCTCGCCCGAGC
CAGCCCTCCTCCCTGGCCATGCTGGACCTTCTGCACGTGGCTCGGGACATTGCCTGTGGCTGTC
AGTATTTGGAGGAAAACCACTTCATCCACCGAGACATTGCTGCCAGAAACTGCCTCTTGACCTG
TCCAGGCCCTGGAAGAGTGGCCAAGATTGGAGACTTCGGGATGGCCCGAGACATCTACAGGGCG
AGCTACTATAGAAAGGGAGGCTGTGCCATGCTGCCAGTTAAGTGGATGCCCCCAGAGGCCTTCA
TGGAAGGAATATTCACTTCTAAAACAGACACATGGTCCTTTGGAGTGCTGCTATGGGAAATCTT
TTCTCTTGGATATATGCCATACCCCAGCAAAAGCAACCAGGAAGTTCTGGAGTTTGTCACCAGT
GGAGGCCGGATGGACCCACCCAAGAACTGCCCTGGGCCTGTATACCGGATAATGACTCAGTGCT
GGCAACATCAGCCTGAAGACAGGCCCAACTTTGCCATCATTTTGGAGAGGATTGAATACTGCAC
CCAGGACCCGGATGTAATCAACACCGCTTTGCCGATAGAATATGGTCCACTTGTGGAAGAGGAA
GAGAAAGTGCCTGTGAGGCCCAAGGACCCTGAGGGGGTTCCTCCTCTCCTGGTCTCTCAACAGG
CAAAACGGGAGGAGGAGCGCAGCCCAGCTGCCCCACCACCTCTGCCTACCACCTCCTCTGGCAA
GGCTGCAAAGAAACCCACAGCTGCAGAGATCTCTGTTCGAGTCCCTAGAGGGCCGGCCGTGGAA
GGGGGACACGTGAATATGGCATTCTCTCAGTCCAACCCTCCTTCGGAGTTGCACAAGGTCCACG
GATCCAGAAACAAGCCCACCAGCTTGTGGAACCCAACGTACGGCTCCTGGTTTACAGAGAAACC
CACCAAAAAGAATAATCCTATAGCAAAGAAGGAGCCACACGACAGGGGTAACCTGGGGCTGGAG
GGAAGCTGTACTGTCCCACCTAACGTTGCAACTGGGAGACTTCCGGGGGCCTCACTGCTCCTAG
AGCCCTCTTCGCTGACTGCCAATATGAAGGAGGTACCTCTGTTCAGGCTACGTCACTTCCCTTG
TGGGAATGTCAATTACGGCTACCAGCAACAGGGCTTGCCCTTAGAAGCCGCTACTGCCCCTGGA
GCTGGTCATTACGAGGATACCATTCTGAAAAGCAAGAATAGCATGAACCAGCCTGGGCCCTGA.
>EU788003.1:908-5770 Homo sapiens mutant K1062M anaplastic
lymphoma kinase (ALK) mRNA, complete cds
(SEQ ID NO: 32972)
ATGGGAGCCATCGGGCTCCTGTGGCTCCTGCCGCTGCTGCTTTCCACGGCAGCTGTGGGCTCCG
GGATGGGGACCGGCCAGCGCGCGGGCTCCCCAGCTGCGGGGCCGCCGCTGCAGCCCCGGGAGCC
ACTCAGCTACTCGCGCCTGCAGAGGAAGAGTCTGGCAGTTGACTTCGTGGTGCCCTCGCTCTTC
CGTGTCTACGCCCGGGACCTACTGCTGCCACCATCCTCCTCGGAGCTGAAGGCTGGCAGGCCCG
AGGCCCGCGGCTCGCTAGCTCTGGACTGCGCCCCGCTGCTCAGGTTGCTGGGGCCGGCGCCGGG
GGTCTCCTGGACCGCCGGTTCACCAGCCCCGGCAGAGGCCCGGACGCTGTCCAGGGTGCTGAAG
GGCGGCTCCGTGCGCAAGCTCCGGCGTGCCAAGCAGTTGGTGCTGGAGCTGGGCGAGGAGGCGA
TCTTGGAGGGTTGCGTCGGGCCCCCCGGGGAGGCGGCTGTGGGGCTGCTCCAGTTCAATCTCAG
CGAGCTGTTCAGTTGGTGGATTCGCCAAGGCGAAGGGCGACTGAGGATCCGCCTGATGCCCGAG
AAGAAGGCGTCGGAAGTGGGCAGAGAGGGAAGGCTGTCCGCGGCAATTCGCGCCTCCCAGCCCC
GCCTTCTCTTCCAGATCTTCGGGACTGGTCATAGCTCCTTGGAATCACCAACAAACATGCCTTC
TCCTTCTCCTGATTATTTTACATGGAATCTCACCTGGATAATGAAAGACTCCTTCCCTTTCCTG
TCTCATCGCAGCCGATATGGTCTGGAGTGCAGCTTTGACTTCCCCTGTGAGCTGGAGTATTCCC
CTCCACTGCATGACCTCAGGAACCAGAGCTGGTCCTGGCGCCGCATCCCCTCCGAGGAGGCCTC
CCAGATGGACTTGCTGGATGGGCCTGGGGCAGAGCGTTCTAAGGAGATGCCCAGAGGCTCCTTT
CTCCTTCTCAACACCTCAGCTGACTCCAAGCACACCATCCTGAGTCCGTGGATGAGGAGCAGCA
GTGAGCACTGCACACTGGCCGTCTCGGTGCACAGGCACCTGCAGCCCTCTGGAAGGTACATTGC
CCAGCTGCTGCCCCACAACGAGGCTGCAAGAGAGATCCTCCTGATGCCCACTCCAGGGAAGCAT
GGTTGGACAGTGCTCCAGGGAAGAATCGGGCGTCCAGACAACCCATTTCGAGTGGCCCTGGAAT
ACATCTCCAGTGGAAACCGCAGCTTGTCTGCAGTGGACTTCTTTGCCCTGAAGAACTGCAGTGA
AGGAACATCCCCAGGCTCCAAGATGGCCCTGCAGAGCTCCTTCACTTGTTGGAATGGGACAGTC
CTCCAGCTTGGGCAGGCCTGTGACTTCCACCAGGACTGTGCCCAGGGAGAAGATGAGAGCCAGA
TGTGCCGGAAACTGCCTGTGGGTTTTTACTGCAACTTTGAAGATGGCTTCTGTGGCTGGACCCA
AGGCACACTGTCACCCCACACTCCTCAATGGCAGGTCAGGACCCTAAAGGATGCCCGGTTCCAG
GACCACCAAGACCATGCTCTATTGCTCAGTACCACTGATGTCCCCGCTTCTGAAAGTGCTACAG
TGACCAGTGCTACGTTTCCTGCACCGATCAAGAGCTCTCCATGTGAGCTCCGAATGTCCTGGCT
CATTCGTGGAGTCTTGAGGGGAAACGTGTCCTTGGTGCTAGTGGAGAACAAAACCGGGAAGGAG
CAAGGCAGGATGGTCTGGCATGTCGCCGCCTATGAAGGCTTGAGCCTGTGGCAGTGGATGGTGT
TGCCTCTCCTCGATGTGTCTGACAGGTTCTGGCTGCAGATGGTCGCATGGTGGGGACAAGGATC
CAGAGCCATCGTGGCTTTTGACAATATCTCCATCAGCCTGGACTGCTACCTCACCATTAGCGGA
GAGGACAAGATCCTGCAGAATACAGCACCCAAATCAAGAAACCTGTTTGAGAGAAACCCAAACA
AGGAGCTGAAACCCGGGGAAAATTCACCAAGACAGACCCCCATCTTTGACCCTACAGTTCATTG
GCTGTTCACCACATGTGGGGCCAGCGGGCCCCATGGCCCCACCCAGGCACAGTGCAACAACGCC
TACCAGAACTCCAACCTGAGCGTGGAGGTGGGGAGCGAGGGCCCCCTGAAAGGCATCCAGATCT
GGAAGGTGCCAGCCACCGACACCTACAGCATCTCGGGCTACGGAGCTGCTGGCGGGAAAGGCGG
GAAGAACACCATGATGCGGTCCCACGGCGTGTCTGTGCTGGGCATCTTCAACCTGGAGAAGGAT
GACATGCTGTACATCCTGGTTGGGCAGCAGGGAGAGGACGCCTGCCCCAGTACAAACCAGTTAA
TCCAGAAAGTCTGCATTGGAGAGAACAATGTGATAGAAGAAGAAATCCGTGTGAACAGAAGCGT
GCATGAGTGGGCAGGAGGCGGAGGAGGAGGGGGTGGAGCCACCTACGTATTTAAGATGAAGGAT
GGAGTGCCGGTGCCCCTGATCATTGCAGCCGGAGGTGGTGGCAGGGCCTACGGGGCCAAGACAG
ACACGTTCCACCCAGAGAGACTGGAGAATAACTCCTCGGTTCTAGGGCTAAACGGCAATTCCGG
AGCCGCAGGTGGTGGAGGTGGCTGGAATGATAACACTTCCTTGCTCTGGGCCGGAAAATCTTTG
CAGGAGGGTGCCACCGGAGGACATTCCTGCCCCCAGGCCATGAAGAAGTGGGGGTGGGAGACAA
GAGGGGGTTTCGGAGGGGGTGGAGGGGGGTGCTCCTCAGGTGGAGGAGGCGGAGGATATATAGG
CGGCAATGCAGCCTCAAACAATGACCCCGAAATGGATGGGGAAGATGGGGTTTCCTTCATCAGT
CCACTGGGCATCCTGTACACCCCAGCTTTAAAAGTGATGGAAGGCCACGGGGAAGTGAATATTA
AGCATTATCTAAACTGCAGTCACTGTGAGGTAGACGAATGTCACATGGACCCTGAAAGCCACAA
GGTCATCTGCTTCTGTGACCACGGGACGGTGCTGGCTGAGGATGGCGTCTCCTGCATTGTGTCA
CCCACCCCGGAGCCACACCTGCCACTCTCGCTGATCCTCTCTGTGGTGACCTCTGCCCTCGTGG
CCGCCCTGGTCCTGGCTTTCTCCGGCATCATGATTGTGTACCGCCGGATGCACCAGGAGCTGCA
AGCCATGCAGATGGAGCTGCAGAGCCCTGAGTACAAGCTGAGCAAGCTCCGCACCTCGACCATC
ATGACCGACTACAACCCCAACTACTGCTTTGCTGGCAAGACCTCCTCCATCAGTGACCTGAAGG
AGGTGCCGCGGAAAAACATCACCCTCATTCGGGGTCTGGGCCATGGCGCCTTTGGGGAGGTGTA
TGAAGGCCAGGTGTCCGGAATGCCCAACGACCCAAGCCCCCTGCAAGTGGCTGTGAAGACGCTG
CCTGAAGTGTGCTCTGAACAGGACGAACTGGATTTCCTCATGGAAGCCCTGATCATCAGCAAAT
TCAACCACCAGAACATTGTTCGCTGCATTGGGGTGAGCCTGCAATCCCTGCCCCGGTTCATCCT
GCTGGAGCTCATGGCGGGGGGAGACCTCAAGTCCTTCCTCCGAGAGACCCGCCCTCGCCCGAGC
CAGCCCTCCTCCCTGGCCATGCTGGACCTTCTGCACGTGGCTCGGGACATTGCCTGTGGCTGTC
AGTATTTGGAGGAAAACCACTTCATCCACCGAGACATTGCTGCCAGAAACTGCCTCTTGACCTG
TCCAGGCCCTGGAAGAGTGGCCAAGATTGGAGACTTCGGGATGGCCCGAGACATCTACAGGGCG
AGCTACTATAGAAAGGGAGGCTGTGCCATGCTGCCAGTTAAGTGGATGCCCCCAGAGGCCTTCA
TGGAAGGAATATTCACTTCTAAAACAGACACATGGTCCTTTGGAGTGCTGCTATGGGAAATCTT
TTCTCTTGGATATATGCCATACCCCAGCAAAAGCAACCAGGAAGTTCTGGAGTTTGTCACCAGT
GGAGGCCGGATGGACCCACCCAAGAACTGCCCTGGGCCTGTATACCGGATAATGACTCAGTGCT
GGCAACATCAGCCTGAAGACAGGCCCAACTTTGCCATCATTTTGGAGAGGATTGAATACTGCAC
CCAGGACCCGGATGTAATCAACACCGCTTTGCCGATAGAATATGGTCCACTTGTGGAAGAGGAA
GAGAAAGTGCCTGTGAGGCCCAAGGACCCTGAGGGGGTTCCTCCTCTCCTGGTCTCTCAACAGG
CAAAACGGGAGGAGGAGCGCAGCCCAGCTGCCCCACCACCTCTGCCTACCACCTCCTCTGGCAA
GGCTGCAAAGAAACCCACAGCTGCAGAGATCTCTGTTCGAGTCCCTAGAGGGCCGGCCGTGGAA
GGGGGACACGTGAATATGGCATTCTCTCAGTCCAACCCTCCTTCGGAGTTGCACAAGGTCCACG
GATCCAGAAACAAGCCCACCAGCTTGTGGAACCCAACGTACGGCTCCTGGTTTACAGAGAAACC
CACCAAAAAGAATAATCCTATAGCAAAGAAGGAGCCACACGACAGGGGTAACCTGGGGCTGGAG
GGAAGCTGTACTGTCCCACCTAACGTTGCAACTGGGAGACTTCCGGGGGCCTCACTGCTCCTAG
AGCCCTCTTCGCTGACTGCCAATATGAAGGAGGTACCTCTGTTCAGGCTACGTCACTTCCCTTG
TGGGAATGTCAATTACGGCTACCAGCAACAGGGCTTGCCCTTAGAAGCCGCTACTGCCCCTGGA
GCTGGTCATTACGAGGATACCATTCTGAAAAGCAAGAATAGCATGAACCAGCCTGGGCCCTGA

[0104] Another exemplary Homo sapiens ALK polynucleotide sequence from GenBank™ accession no. NM_004304 is provided below:

| (SEQ ID NO: 32973) | |
|---|---|
| 1 | agatgcgatc cagcggctct gggggcggca gcggtggtag cagctggtac ctcccgccgc |
| 61 | ctctgttcgg agggtcgcgg ggcaccgagg tgctttccgg ccgccctctg gtcggccacc |
| 121 | caaagccgcg ggcgctgatg atgggtgagg agggggcggc aagatttcgg gcgcccctgc |
| 181 | cctgaacgcc ctcagctgct gccgccgggg ccgctccagt gcctgcgaac tctgaggagc |
| 241 | cgaggcgccg gtgagagcaa ggacgctgca aacttgcgca gcgcgggggc tgggattcac |
| 301 | gcccagaagt tcagcaggca gacagtccga agccttcccg cagcggagag atagcttgag |
| 361 | ggtgcgcaag acggcagcct ccgccctcgg ttcccgccca gaccgggcag aagagcttgg |
| 421 | aggagccaaa aggaacgcaa aaggcggcca ggacagcgtg cagcagctgg gagccgccgt |
| 481 | tctcagcctt aaaagttgca gagattggag gctgccccga gaggggacag accccagctc |
| 541 | cgactgcggg gggcaggaga ggacggtacc caactgccac ctcccttcaa ccatagtagt |
| 601 | tcctctgtac cgagcgcagc gagctacaga cgggggcgcg gcactcggcg cggagagcgg |
| 661 | gaggctcaag gtcccagcca gtgagcccag tgtgcttgag tgtctctgga ctcgcccctg |
| 721 | agcttccagg tctgtttcat ttagactcct gctcgcctcc gtgcagttgg gggaaagcaa |
| 781 | gagacttgcg cgcacgcaca gtcctctgga gatcaggtgg aaggagccgc tgggtaccaa |
| 841 | ggactgttca gagcctcttc ccatctcggg gagagcgaag ggtgaggctg ggcccggaga |
| 901 | gcagtgtaaa cggcctcctc cggcgggatg ggagccatcg ggctcctgtg gctcctgccg |
| 961 | ctgctgcttt ccacggcagc tgtgggctcc gggatgggga ccggccagcg cgcgggctcc |
| 1021 | ccagctgcgg ggccgccgct gcagccccgg gagccactca gctactcgcg cctgcagagg |
| 1081 | aagagtctgg cagttgactt cgtggtgccc tcgctcttcc gtgtctacgc ccgggaccta |
| 1141 | ctgctgccac catcctcctc ggagctgaag gctggcaggc ccgaggcccg cggctcgcta |
| 1201 | gctctggact gcgccccgct gctcaggttg ctggggccgg cgccgggggt ctcctggacc |
| 1261 | gccggttcac cagccccggc agaggcccgg acgctgtcca gggtgctgaa gggcggctcc |
| 1321 | gtgcgcaagc tccggcgtgc caagcagttg gtgctggagc tgggcgagga ggcgatcttg |
| 1381 | gagggttgcg tcgggccccc cggggaggcg gctgtggggc tgctccagtt caatctcagc |
| 1441 | gagctgttca gttggtggat tcgccaaggc gaagggcgac tgaggatccg cctgatgccc |
| 1501 | gagaagaagg cgtcggaagt gggcagagag ggaaggctgt ccgcggcaat tcgcgcctcc |
| 1561 | cagccccgcc ttctcttcca gatcttcggg actggtcata gctccttgga atcaccaaca |
| 1621 | aacatgcctt ctccttctcc tgattatttt acatggaatc tcacctggat aatgaaagac |
| 1681 | tccttccctt tcctgtctca tcgcagccga tatggtctgg agtgcagctt tgacttcccc |
| 1741 | tgtgagctgg agtattcccc tccactgcat gacctcagga accagagctg gtcctggcgc |
| 1801 | cgcatcccct ccgaggaggc ctcccagatg gacttgctgg atgggcctgg ggcagagcgt |
| 1861 | tctaaggaga tgcccagagg ctcctttctc cttctcaaca cctcagctga ctccaagcac |
| 1921 | accatcctga gtccgtggat gaggagcagc agtgagcact gcacactggc cgtctcggtg |
| 1981 | cacaggcacc tgcagccctc tggaaggtac attgcccagc tgctgcccca caacgaggct |
| 2041 | gcaagagaga tcctcctgat gcccactcca gggaagcatg gttggacagt gctccaggga |
| 2101 | agaatcgggc gtccagacaa cccatttcga gtggccctgg aatacatctc cagtggaaac |
| 2161 | cgcagcttgt ctgcagtgga cttctttgcc ctgaagaact gcagtgaagg aacatcccca |
| 2221 | ggctccaaga tggccctgca gagctccttc acttgttgga atgggacagt cctccagctt |
| 2281 | gggcaggcct gtgacttcca ccaggactgt gcccagggag aagatgagag ccagatgtgc |
| 2341 | cggaaactgc ctgtgggttt ttactgcaac tttgaagatg gcttctgtgg ctggacccaa |
| 2401 | ggcacactgt caccccacac tcctcaatgg caggtcagga ccctaaagga tgcccggttc |
| 2461 | caggaccacc aagaccatgc tctattgctc agtaccactg atgtccccgc ttctgaaagt |
| 2521 | gctacagtga ccagtgctac gtttcctgca ccgatcaaga gctctccatg tgagctccga |
| 2581 | atgtcctggc tcattcgtgg agtcttgagg ggaaacgtgt ccttggtgct agtggagaac |
| 2641 | aaaaccggga aggagcaagg caggatggtc tggcatgtcg ccgcctatga aggcttgagc |
| 2701 | ctgtggcagt ggatggtgtt gcctctcctc gatgtgtctg acaggttctg gctgcagatg |
| 2761 | gtcgcatggt ggggacaagg atccagagcc atcgtggctt ttgacaatat ctccatcagc |
| 2821 | ctggactgct acctcaccat tagcggagag gacaagatcc tgcagaatac agcacccaaa |
| 2881 | tcaagaaacc tgtttgagag aaacccaaac aaggagctga aacccgggga aaattcacca |
| 2941 | agacagaccc ccatctttga ccctacagtt cattggctgt tcaccacatg tggggccagc |
| 3001 | gggccccatg gccccaccca ggcacagtgc aacaacgcct accagaactc caacctgagc |
| 3061 | gtggaggtgg ggagcgaggg ccccctgaaa ggcatccaga tctggaaggt gccagccacc |
| 3121 | gacacctaca gcatctcggg ctacggagct gctggcggga aaggcgggaa gaacaccatg |
| 3181 | atgcggtccc acggcgtgtc tgtgctgggc atcttcaacc tggagaagga tgacatgctg |
| 3241 | tacatcctgg ttgggcagca gggagaggac gcctgcccca gtacaaacca gttaatccag |
| 3301 | aaagtctgca ttggagagaa caatgtgata gaagaagaaa tccgtgtgaa cagaagcgtg |
| 3361 | catgagtggg caggaggcgg aggaggaggg ggtggagcca cctacgtatt taagatgaag |
| 3421 | gatggagtgc cggtgcccct gatcattgca gccggaggtg gtggcagggc ctacggggcc |
| 3481 | aagacagaca cgttccaccc agagagactg gagaataact cctcggttct agggctaaac |
| 3541 | ggcaattccg gagccgcagg tggtggaggt ggctggaatg ataacacttc cttgctctgg |
| 3601 | gccggaaaat ctttgcagga gggtgccacc ggaggacatt cctgccccca ggccatgaag |
| 3661 | aagtgggggt gggagacaag agggggtttc ggagggggtg gaggggggtg ctcctcaggt |
| 3721 | ggaggaggcg gaggatatat aggcggcaat gcagcctcaa acaatgaccc cgaaatggat |
| 3781 | ggggaagatg gggtttcctt catcagtcca ctgggcatcc tgtacacccc agctttaaaa |
| 3841 | gtgatggaag gccacgggga agtgaatatt aagcattatc taaactgcag tcactgtgag |
| 3901 | gtagacgaat gtcacatgga ccctgaaagc cacaaggtca tctgcttctg tgaccacggg |
| 3961 | acggtgctgg ctgaggatgg cgtctcctgc attgtgtcac ccaccccgga gccacacctg |
| 4021 | ccactctcgc tgatcctctc tgtggtgacc tctgccctcg tggccgccct ggtcctggct |
| 4081 | ttctccggca tcatgattgt gtaccgccgg aagcaccagg agctgcaagc catgcagatg |
| 4141 | gagctgcaga gccctgagta caagctgagc aagctccgca cctcgaccat catgaccgac |
| 4201 | tacaacccca actactgctt tgctggcaag acctcctcca tcagtgacct gaaggaggtg |
| 4261 | ccgcggaaaa acatcaccct cattcggggt ctgggccatg gcgcctttgg ggaggtgtat |
| 4321 | gaaggccagg tgtccggaat gcccaacgac ccaagccccc tgcaagtggc tgtgaagacg |
| 4381 | ctgcctgaag tgtgctctga acaggacgaa ctggatttcc tcatggaagc cctgatcatc |
| 4441 | agcaaattca accaccagaa cattgttcgc tgcattgggg tgagcctgca atccctgccc |
| 4501 | cggttcatcc tgctggagct catggcgggg ggagacctca agtccttcct ccgagagacc |
| 4561 | cgccctcgcc cgagccagcc ctcctccctg gccatgctgg accttctgca cgtggctcgg |
| 4621 | gacattgcct gtggctgtca gtatttggag gaaaaccact tcatccaccg agacattgct |
| 4681 | gccagaaact gcctcttgac ctgtccaggc cctggaagag tggccaagat tggagacttc |
| 4741 | gggatggccc gagacatcta cagggcgagc tactatagaa agggaggctg tgccatgctg |
| 4801 | ccagttaagt ggatgccccc agaggccttc atggaaggaa tattcacttc taaaacagac |
| 4861 | acatggtcct ttggagtgct gctatgggaa atcttttctc ttggatatat gccatacccc |
| 4921 | agcaaaagca accaggaagt tctggagttt gtcaccagtg gaggccggat ggacccaccc |
| 4981 | aagaactgcc ctgggcctgt ataccggata atgactcagt gctggcaaca tcagcctgaa |
| 5041 | gacaggccca actttgccat cattttggag aggattgaat actgcaccca ggacccggat |
| 5101 | gtaatcaaca ccgctttgcc gatagaatat ggtccacttg tggaagagga agagaaagtg |
| 5161 | cctgtgaggc ccaaggaccc tgagggggtt cctcctctcc tggtctctca acaggcaaaa |
| 5221 | cgggaggagg agcgcagccc agctgcccca ccacctctgc ctaccacctc ctctggcaag |
| 5281 | gctgcaaaga aacccacagc tgcagagatc tctgttcgag tccctagagg gccggccgtg |
| 5341 | gaagggggac acgtgaatat ggcattctct cagtccaacc ctccttcgga gttgcacaag |
| 5401 | gtccacggat ccagaaacaa gcccaccagc ttgtggaacc caacgtacgg ctcctggttt |
| 5461 | acagagaaac ccaccaaaaa gaataatcct atagcaaaga aggagccaca cgacaggggt |
| 5521 | aacctggggc tggagggaag ctgtactgtc ccacctaacg ttgcaactgg gagacttccg |
| 5581 | ggggcctcac tgctcctaga gccctcttcg ctgactgcca atatgaagga ggtacctctg |
| 5641 | ttcaggctac gtcacttccc ttgtgggaat gtcaattacg gctaccagca acagggcttg |
| 5701 | cccttagaag ccgctactgc ccctggagct ggtcattacg aggataccat tctgaaaagc |
| 5761 | aagaatagca tgaaccagcc tgggccctga gctcggtcgc acactcactt ctcttccttg |
| 5821 | ggatccctaa gaccgtggag gagagagagg caatggctcc ttcacaaacc agagaccaaa |
| 5881 | tgtcacgttt tgttttgtgc caacctattt tgaagtacca ccaaaaaagc tgtattttga |
| 5941 | aaatgcttta gaaaggtttt gagcatgggt tcatcctatt ctttcgaaag aagaaaatat |
| 6001 | cataaaaatg agtgataaat acaaggccca gatgtggttg cataaggttt ttatgcatgt |
| 6061 | ttgttgtata cttccttatg cttctttcaa attgtgtgtg ctctgcttca atgtagtcag |
| 6121 | aattagctgc ttctatgttt catagttggg gtcatagatg tttccttgcc ttgttgatgt |
| 6181 | ggacatgagc catttgaggg gagagggaac ggaaataaag gagttatttg taatgactaa |

[0105] An exemplary Mus musculus ALK nucleic acid sequence from GenBank™ accession no. NM_007439.2 is provided below:

| (SEQ ID NO: 32974) | |
|---|---|
| 1 | gtgttcacgc ccagaagttc agcgggcagg gtgatcgatc cgaagacttc ctgcagcgga |
| 61 | ggtcacttga gggggcgcta gaaagcagcc ccctccggtg gtccttgcct agacctggga |
| 121 | aggagcgcag aggaggtgac aggagcggag gacgtgggca agacagtgac cgactcggag |
| 181 | ccacggttca cagcctggaa agttgcagaa gattggaagc taagaggaga gctctggtcg |
| 241 | ccgagggctc cttgaacggt acctaattgc cacctccctg gtccctgagc aaaggcctct |
| 301 | acaaatgggg cgcagcacgg cgagaggcgc aggatccagc tgttgagccc agggtgtctc |
| 361 | actgtctccg aactaccccc tgactttgtc ttccgttttg ctgagaaccc ttctcgcctc |
| 421 | cttgtagctt gggaaaagca agggcgctct atagtgtaca cacagtccct gagatctagt |
| 481 | ggaaggagcc attcaggacc aaggactatt tggagccctt tcctgtttgg gggagagtga |
| 541 | agggcgaggc tggaccagca agggaaggga gactagtgta aactcgccct ccagcgggat |
| 601 | gggagctgct gggttcctgt ggctgctgcc tccactgctt ttggcagcag cctcgtactc |
| 661 | cggagctgca accgatcagc gcgcgggttc cccagcctca gggcctcctc tgcagccccg |
| 721 | ggagccgctc agttattcgc gcctgcagag gaagagtctg gcagtggact tcgttgtacc |
| 781 | ctcgctcttc cgcgtctatg cccgagacct gctgctaccg cagccacggt ccccctcgga |
| 841 | gcccgaggct ggcgggctgg aggcgcgggg atcactggcc ctggattgtg agcctctgct |
| 901 | caggctgctg gggccactgc ctggaatctc ctgggcagat ggagccagtt ctcctagtcc |
| 961 | cgaggcgggt ccgacgctgt ccagggtgct gaagggaggc tcggtgcgca agctcaggcg |
| 1021 | tgccaaacag ctggtgctgg agctgggcga ggagacgatt cttgaaggct gtattggtcc |
| 1081 | cccagaggag gtagcggctg tggggatact ccagttcaac ctcagcgagc tgttcagctg |
| 1141 | gtggattctc cacggcgaag ggaggctgag gatccgcctg atgcctgaga agaaggcatc |
| 1201 | ggaagtgggc agggagggaa ggctatccag tgcgatccga gcctcccagc cccgccttct |
| 1261 | cttccagatc ttcgggacgg gacacagctc catggagtca ccctcagaaa cgccttctcc |
| 1321 | tcctggtacc ttcatgtgga atctgacctg gacgatgaaa gactccttcc ctttcctttc |
| 1381 | ccaccgcagt cgatatggtc tggagtgcag ctttgacttc ccctgtgagc tggaatattc |
| 1441 | tcctcccctg cacaaccacg ggaatcagag ctggtcctgg cgccatgtgc cctccgagga |
| 1501 | ggcctcgagg atgaacttgc tggatgggcc agaggcagag cattctcaag agatgcccag |
| 1561 | aggctccttc ctcctcctga acacctctgc agattccaag cataccattc tgagcccatg |
| 1621 | gatgaggagc agtagtgatc actgcacact ggctgtctcc gtgcacagac atctacagcc |
| 1681 | ttcggggaga tatgttgccc agctcctacc ccacaacgaa gctggaagag agattctttt |
| 1741 | ggtgcccacc ccagggaagc atggctggac agtgctgcag gggagagtcg ggcgcccagc |
| 1801 | aaacccattt cgagtggctc tggaatacat ctccagtggc aaccggagct tgtcggcggt |
| 1861 | ggatttcttt gccctgaaga actgcagtga agggacatcc ccaggctcca agatggcatt |
| 1921 | gcagagttcc ttcacttgtt ggaatgggac cgtcctccag ctcgggcaag cctgtgattt |
| 1981 | ccaccaggac tgtgcccaag gagaagatga gggccagctg tgcagtaaac ttcctgctgg |
| 2041 | attttactgt aactttgaaa atggcttctg tggctggacc caaagtccac tctcacccca |
| 2101 | tatgccccgg tggcaagtga ggaccctaag agatgcccat tcccagggcc accaaggccg |
| 2161 | tgccctgttg ctcagcacca ctgacatcct cgcttctgaa ggtgcaacag tgaccagtgc |
| 2221 | caccttccct gcaccaatga aaaattctcc ttgtgagctc cgcatgtcct ggctcatccg |
| 2281 | cggggttttg agaggaaacg tatctctggt gctggtggag aacaaaaccg gaaaggagca |
| 2341 | aagccggact gtctggcatg tcgccactga cgaaggctta agcctgtggc agcatacagt |
| 2401 | gctgtccctc ctcgatgtga ctgacaggtt ctggctgcag atagtcacat ggtggggtcc |
| 2461 | aggatccagg gcaaccgtgg gatttgacaa catttccatc agcctcgact gctaccttac |
| 2521 | catcagtgga gaggagaaaa tgtccctgaa ttcagtaccc aaatctagaa atctgtttga |
| 2581 | gaaaaaccca aacaaggagt caaaatcctg ggcaaacata tcaggaccaa ctcccatctt |
| 2641 | cgaccctaca gttcactggc tgttcaccac gtgtggggcc agtggacctc atggccccac |
| 2701 | ccaggcacag tgcaacaacg cctaccagaa ttccaacttg agcgtggtgg tgggaagtga |
| 2761 | agggcccttg aagggagtcc agatttggaa agtgccagct actgacacct acagtatctc |
| 2821 | gggctacgga gcagctggcg ggaaaggtgg gaaaaacacc atgatgcggt cccatggcgt |
| 2881 | gtctgtcctg ggcatcttca atctggagaa aggtgacaca ctctacatcc ttgtcggtca |
| 2941 | gcaaggggag gatgcctgtc ccagggcaaa ccaactaatc cagaaagtct gtgtgggtga |
| 3001 | gaacaatgtc atagaagaag agatccgagt gaacagaagc gtgcacgagt gggcaggagg |
| 3061 | aggaggaggt gggggtggag ccacctacgt gtttaagatg aaagatggcg tgcctgtacc |
| 3121 | cctgatcatt gcagctggtg gtggtggcag ggcctatggg gccaagacag aaacgttcca |
| 3181 | cccagagaga ctggagagta actcctcggt tctagggctg aacggcaatt ccggagccgc |
| 3241 | aggtggtgga ggcggctgga atgataacac ttccttgctc tgggccggaa agtctttgct |
| 3301 | ggagggtgcc gccggaggac attcctgccc ccaggccatg aagaagtggg ggtgggagac |
| 3361 | aagagggggt ttcggagggg gtggaggggg gtgctcctca ggtggaggag gcggaggata |
| 3421 | tataggtggc aacgcagcat caaacaatga ccccgaaatg gatggggaag atggggtttc |
| 3481 | cttcatcagt ccattgggta tcctgtacac cccggcctta aaagtgatgg agggccacgg |
| 3541 | ggaagtgaat atcaagcatt atctaaactg cagtcactgc gaggtagacg aatgtcacat |
| 3601 | ggaccccgag agccacaaag tcatctgctt ctgtgatcat gggaccgtgc tggctgatga |
| 3661 | tggtgtctcc tgcattgtgt cacccacccc ggagccccac ctgccgctct cattgatcct |
| 3721 | ctccgtcgtg acctctgccc tggtggctgc ccttgttctg gcattctccg gcatcatgat |
| 3781 | tgtgtaccgt cggaagcacc aggagttgca ggctatgcag atggaactgc agagccccga |
| 3841 | gtataagctg agcaagctac ggacctcgac catcatgacc gactacaacc ccaactactg |
| 3901 | cttcgctggc aagacttcct ccatcagtga cctgaaagaa gtgccacgga aaaacatcac |
| 3961 | actcatccgg ggcctaggcc atggcgcatt tggggaggtg tatgaaggcc aggtgtctgg |
| 4021 | aatgcccaat gacccaagcc ctctacaagt ggctgtaaag acgctgccag aagtgtgttc |
| 4081 | agaacaagat gagctggact ttctcatgga agctctgatc atcagcaaat tcaaccacca |
| 4141 | gaatattgtt cgctgcatcg gggtgagtct acaagccctg ccccgcttca tcctgctgga |
| 4201 | actcatggct ggcggagacc tcaagtcctt cctcagggag acacgccctc gcccgaacca |
| 4261 | acccacctcc ctggccatgc tggaccttct gcatgtggct cgggacattg cctgtggctg |
| 4321 | tcagtaccta gaggagaatc actttatcca ccgggatatt gctgctagaa actgtctgtt |
| 4381 | gacctgccca ggagctggaa gaatagcaaa gattggagac tttgggatgg cccgagatat |
| 4441 | ctacagggcc agctactacc gaaagggagg ctgcgccatg ctgccggtca agtggatgcc |
| 4501 | ccctgaagcc ttcatggaag ggatatttac ctctaaaaca gacacatggt cttttggagt |
| 4561 | gttgctatgg gaaatatttt ctcttggata tatgccgtac cccagcaaga gcaaccagga |
| 4621 | agttctggag tttgtcacca gcggaggacg gatggacccg cctaagaact gccccgggcc |
| 4681 | tgtataccgg ataatgacgc agtgctggca gcatcagcct gaagacagac ccaacttcgc |
| 4741 | catcattttg gagaggatcg aatactgcac ccaggacccc gatgtgatca acacagctct |
| 4801 | gcccatcgaa tacggtccag tagtagaaga ggaggagaaa gtgcccatgc gccccaaaga |
| 4861 | ccccgagggg atgccacctt tgctggtgtc tccccagcct gcgaagcacg aggaggcgtc |
| 4921 | cgcagctccc cagcccgcag ccctgacggc accaggccca tcggtgaaga agcccccggg |
| 4981 | tgcgggtgcg ggcgcgggcg cgggtgcggg tgccggcccg gtgccccgag gtgcggccga |
| 5041 | tcggggccac gtgaacatgg ctttctctca gcccaaccct cccccggagc tgcacaaagg |
| 5101 | cccgggatcc agaaacaagc cgaccagcct gtggaacccc acctacggct cgtggttcac |
| 5161 | cgagaagcct gccaaaaaga cccatcctcc gccaggcgcc gagccgcagg cgcgggcagg |
| 5221 | agcggccgag ggtggctgga ccgggccggg cgcggggccc cgcagagccg aggcagcgct |
| 5281 | gctgctagag ccatcggcgc tgagcgccac catgaaggag gtgccgctgt tcaggctgcg |
| 5341 | ccacttcccc tgcggcaatg tcaactatgg ttaccagcaa cagggtctcc ccttggaagc |
| 5401 | cacagccgcg ccaggggaca ccatgctgaa aagcaagaat aaggtcaccc agccggggcc |
| 5461 | ctgagccctg tactccacta gcttctcctc ctggcggagc cggagcccac ccagagggag |
| 5521 | atggacagga tggctccacc acaaacccaa gaccaaaact ttcatttttg tgccaacttg |
| 5581 | ttttgaagtg ccacatttta aaaaaaggaa acttgtgttt ttaagatgtg ttagaaggtt |
| 5641 | ttttgagcat gggttcatct atcctctcaa aagaagaaaa tgccattctt taaaaaagaa |
| 5701 | aaaaaagcaa tcagtgcaag gcccagattg gttgcgccaa gttttcgtgc atggtctgct |
| 5761 | gtacagtccc ctaaggcttc tttccgattt ttgtgtgcgc tctgcttccg cgtagtcaga |
| 5821 | aatagctgct tccatgtctc atagggggag tcctaggtgt ttcctttgcc ttatgaatat |
| 5881 | gaaccactcg aggggcgggc gagggaacag aaataaag |

[0106] By “alteration” is meant a change in the structure, such as a chromosomal tranlocation or a gene rearrangement or gene amplification, or the expression levels or activity of a gene or polypeptide as detected by standard art known methods such as those described herein. An alteration may be an increase or decrease. As used herein, an alteration includes a 5% change in expression levels, a 10% change in expression levels, preferably a 25% change, more preferably a 40% change, and most preferably a 50% or greater change in expression levels.

[0107] By “ameliorate” is meant decrease, reduce, delay diminish, suppress, attenuate, arrest, or stabilize the development or progression of a disease or pathological condition.

[0108] By “antibody” is meant an immunoglobulin polypeptide having immunogen binding ability. Antibodies are evoked or elicited in subjects (humans or other animals or mammals) following exposure to a specific antigen (immunogen). A subject capable of generating antibodies/immunoglobulins (i.e., an immune response) directed against a specific antigen/immunogen is said to be immunocompetent. Antibodies are characterized by reacting specifically with (e.g., binding to) an antigen or immunogen in some demonstrable way, antibody, and antigen/immunogen each being defined in terms of the other.

[0109] By “amphiphile” is meant a chemical compound possessing both hydrophilic and lipophilic properties. Such a compound is called amphiphilic or amphipathic. The amphiphile may be conjugated or linked to an antigen or adjuvant cargo by a solubility-promoting polar polymer chain. In some embodiments, the amphiphile is conjugated or linked to an adjuvant. In some embodiments, the adjuvant is Freund's adjuvant. In some embodiments, the amphiphile is conjugated or linked to an ALK antigen or immunogen. In some embodiments, the amphiphile is a lipophilic albumin-binding tail. In some embodiments, the amphiphile is N-hydroxy succinimidyl ester-end-functionalized poly(ethylene glycol)-lipid (NHS-PEG2KDa-DSPE).

[0110] By “antigen” is meant an agent that can stimulate an immune response in an animal. An antigen reacts with the products of specific humoral or cellular immunity, including those induced by heterologous immunogens. In some embodiments of the disclosed compositions and methods, the antigen is an ALK protein or an antibody-binding portion thereof.

[0111] By “chimeric antigen receptor T cell” or “CAR-T cell” is meant a T cell expressing a CAR that has antigen specificity determined by the antibody-derived targeting domain of the CAR. As used herein, “CAR-T cells” includes T cells or NK cells. As used herein, “CAR-T cells” includes cells engineered to express a CAR or a T cell receptor (TCR). In some embodiments, CAR-T cells can be T helper CD4+ and/or T effector CD8+ cells, optionally in defined proportions. In some embodiments, CAR-T cells may comprise total CD3+ cells. Methods of making CARS (e.g., for treatment of cancer) are publicly available (see, e.g., Park et al., Trends Biotechnol., 29:550-557, 2011: Grupp et al., N Engl J Med., 368:1509-1518, 2013; Han et al., J. Hematol Oncol. 6:47, 2013; Haso et al., (2013) Blood, 121, 1165-1174; PCT Pubs. WO2012/079000, WO2013/059593; and U.S. Pub. 2012/0213783, each of which is incorporated by reference herein in its entirety). In some embodiments, the CAR-T cell expresses an ALK CAR.

[0112] A “codon-optimized” nucleic acid (polynucleotide) refers to a nucleic acid sequence that has been altered such that the codons are optimal for expression in a particular system (such as a particular species of group of species). For example, a nucleic acid sequence can be optimized for expression in mammalian cells. Codon optimization does not alter the amino acid sequence of the encoded protein.

[0113] In this disclosure, “comprises,” “comprising,” “containing” and “having” and the like can have the meaning ascribed to them in U.S. patent law and can mean “includes,” “including,” and the like: “consisting essentially of” or “consists essentially” likewise has the meaning ascribed in U.S. patent law and the term is open-ended, allowing for the presence of more than that which is recited so long as basic or novel characteristics of that which is recited is not changed by the presence of more than that which is recited, but excludes prior art embodiments. Any embodiments specified as “comprising” a particular component(s) or element(s) are also contemplated as “consisting of” or “consisting essentially of” the particular component(s) or element(s) in some embodiments.

[0114] “Detect” refers to identifying the presence, absence or amount of an analyte, compound, agent, or substance to be detected.

[0115] By “detectable label” is meant a composition that, when linked to a molecule of interest, renders the latter detectable, e.g., via spectroscopic, photochemical, biochemical, immunochemical, or chemical means. Nonlimiting examples of useful detectable labels include radioactive isotopes, magnetic beads, metallic beads, colloidal particles, fluorescent dyes, electron-dense reagents, enzymes (for example, as commonly used in an ELISA), biotin, digoxigenin, or haptens.

[0116] By “disease” is meant any condition, disorder, or pathology that damages or interferes with the normal function of a cell, tissue, or organ. Examples of diseases include those caused by oncogenic ALK gene fusions, rearrangements, duplications, or mutations (e.g., ALK-positive cancers). In some embodiments, the cancer is an ALK-positive cancer.

[0117] By “ALK positive” is meant having detectable ALK polypeptide or polynucleotide expression. Methods for measuring ALK expression are described, for example, in Vernersson, et al. “Characterization of the expression of the ALK receptor tyrosine kinase in mice,” Gene Expr Patterns, 6:448-461 (2005) and in Dirks, et al. “Expression and functional analysis of the anaplastic lymphoma kinase (ALK) gene in tumor cell lines,” Int. J. Cancer, 100:49-56 (2002), the disclosures of which are incorporated herein by reference in their entirities for all purposes. In embodiments, an ALK positive cell contains a change to the structure of the ALK gene. In some cases, an ALK positive cell expresses ALK at higher levels than a reference cell (e.g., a healthy non-neoplastic cell). Nonlimiting examples of ALK-positive cancers include non-small cell lung cancer (NSCLC), anaplastic large cell lymphoma (ALCL), neuroblastoma, B-cell lymphoma, thyroid cancer, colon cancer, breast cancer, inflammatory myofibroblastic tumors (IMT), renal carcinoma, esophageal cancer, glioma, glioblastoma, and melanoma. The ALK-positive cancer may be caused by an oncogenic ALK gene that either forms a fusion gene with other genes, gains additional gene copies, or is genetically mutated. In some embodiments, the ALK-positive cancer is caused by an ALK fusion gene encoding an ALK fusion protein. In some embodiments, the ALK-positive cancer is caused by a fusion between the ALK gene and the nucleophosmin (NPM) gene encoding a NPM-ALK fusion protein. In some embodiments, the ALK-positive cancer is caused by a fusion between the ALK gene and the echinoderm microtubule-associated protein-like 4 (EML4) gene encoding an ELM4-ALK fusion protein.

[0118] By “effective amount” is meant the amount of an agent required to ameliorate, reduce, delay, improve, abrogate, diminish, or eliminate the symptoms and/or effects of a disease, condition, or pathology relative to an untreated patient. In some embodiments, an effective amount of a cell expressing a T cell receptor is the amount required to reduce the size of a tumor, stabilize tumor cell growth, eliminate a tumor, reduce or eliminate metastasis in a subject. In some embodiments, an effective amount of an ALK peptide is the amount required to induce an ALK-specific immune response in a subject immunized with the peptide. The effective amount of an immunogen or a composition comprising an immunogen, as used to practice the methods of therapeutic treatment of a disease, condition, or pathology, varies depending upon the manner of administration, the age, body weight, and general health of the subject. Ultimately, the attending physician or veterinarian will decide the appropriate amount and dosage regimen. Such amount is referred to as an “effective” amount.

[0119] By “epitope,” as used herein, means an antigenic determinant. An epitope is the part of an antigen molecule that by its structure determines the immunoglobulin that will recognize and specifically bind to elicit a specific immune response. In some embodiments, a disclosed engineered TCR or immunoglobulin specifically binds to an epitope on an ALK polypeptide.

[0120] By “fragment” is meant a portion of a polypeptide or nucleic acid molecule. This portion contains, preferably, at least 10%, 20%, 30%, 40%, 50%, 60%, 70%, 80%, or 90% of the entire length of the reference nucleic acid molecule or polypeptide. A fragment may contain 3, 4, 5, 6, 7, 8, 9, 10, 20, 30, 40, 50, 60, 70, 80, 90, or 100, 200, 300, 400, 500, 600, 700, 800, 900, or 1000 nucleotides or amino acids. A portion or fragment of a polypeptide may be a peptide. In the case of an antibody or immunoglobulin fragment, the fragment typically binds to the target antigen.

[0121] By “fusion protein” is meant a protein generated by expression of a nucleic acid (polynucleotide) sequence engineered from nucleic acid sequences encoding at least a portion of two different (heterologous) proteins or peptides. To create a fusion protein, the nucleic acid sequences must be in the same open reading frame and contain no internal stop codons. One protein can be located at the amino-terminal (N-terminal) portion of the fusion protein or at the carboxy-terminal (C-terminal) protein thus forming an amino-terminal fusion protein or a carboxy-terminal fusion protein, respectively.

[0122] For example, a fusion protein includes an ALK protein fused to a heterologous protein. In some embodiments, the fusion protein is an ALK protein fused to a nucleophosmin (NPM) protein. In some embodiments, the NPM-ALK fusion protein is at least 85%, at least 90%, at least 95%, at least 98%, at least 99%, or 100% identical to a NPM-ALK fusion protein in Homo sapiens. In some embodiments, the NPM-ALK fusion protein is at least 85%, at least 90%, at least 95%, at least 98%, at least 99%, or 100% identical to an exemplary NPM-ALK fusion protein amino acid sequence from Homo sapiens as provided below (see GenBank Accession Nos. BAA08343.1, AAA58698.1):

>BAA08343.1 p80 protein [Homo sapiens]
(ALK cytoplasmic portion in bold font)
(SEQ ID NO: 32975)
[sequence omitted]
>AAA58698.1 nucleophosmin-anaplastic lymphoma
kinase fusion protein [Homo sapiens]
(SEQ ID NO: 32976)
MEDSMDMDMSPLRPQNYLFGCELKADKDYHFKVDNDENEHQLSLRTVSLGAGAKDELHIVEAEA
MNYEGSPIKVTLATLKMSVQPTVSLGGFEITPPVVLRLKCGSGPVHISGQHLVVYRRKHQELQA
MQMELQSPEYKLSKLRTSTIMTDYNPNYCFAGKTSSISDLKEVPRKNITLIRGLGHGAFGEVYE
GQVSGMPNDPSPLQVAVKTLPEVCSEQDELDFLMEALIISKFNHQNIVRCIGVSLQSLPRFILL
ELMAGGDLKSFLRETRPRPSQPSSLAMLDLLHVARDIACGCQYLEENHFIHRDIAARNCLLTCP
GPGRVAKIGDFGMARDIYRASYYRKGGCAMLPVKWMPPEAFMEGIFTSKTDTWSFGVLLWEIFS
LGYMPYPSKSNQEVLEFVTSGGRMDPPKNCPGPVYRIMTQCWQHQPEDRPNFAIILERIEYCTQ
DPDVINTALPIEYGPLVEEEEKVPVRPKDPEGVPPLLVSQQAKREEERSPAAPPPLPTTSSGKA
AKKPTAAEVSVRVPRGPAVEGGHVNMAFSQSNPPSELHKVHGSRNKPTSLWNPTYGSWFTEKPT
KKNNPIAKKEPHDRGNLGLEGSCTVPPNVATGRLPGASLLLEPSSLTANMKEVPLFRLRHFPCG
NVNYGYQQQGLPLEAATAPGAGHYEDTILKSKNSMNQPGP

[0123] In some embodiments, the NPM-ALK fusion protein is encoded by a nucleic acid sequence that is at least 85%, at least 90%, at least 95%, at least 98%, at least 99%, or 100% identical to an exemplary nucleic acid sequence from Homo sapiens as provided below (see GenBank Accessions No. D45915.1 and U04946.1):

>D45915.1: 90-2132 Homo sapiens mRNA for p80 protein, complete cds
(SEQ ID NO: 32977)
ATGGAAGATTCGATGGACATGGACATGAGCCCCCTGAGGCCCCAGAACTATCTTTTCGGTTGTG
AACTAAAGGCCGACAAAGATTATCACTTTAAGGTGGATAATGATGAAAATGAGCACCAGTTATC
TTTAAGAACGGTCAGTTTAGGGGCTGGTGCAAAGGATGAGTTGCACATTGTTGAAGCAGAGGCA
ATGAATTACGAAGGCAGTCCAATTAAAGTAACACTGGCAACTTTGAAAATGTCTGTACAGCCAA
CGGTTTCCCTTGGGGGCTTTGAAATAACACCACCAGTGGTCTTAAGGTTGAAGTGTGGTTCAGG
GCCAGTGCATATTAGTGGACAGCACTTAGTAGTGTACCGCCGGAAGCACCAGGAGCTGCAAGCC
ATGCAGATGGAGCTGCAGAGCCCTGAGTACAAGCTGAGCAAGCTCCGCACCTCGACCATCATGA
CCGACTACAACCCCAACTACTGCTTTGCTGGCAAGACCTCCTCCATCAGTGACCTGAAGGAGGT
GCCACGGAAAAACATCACCCTCATTCGGGGTCTGGGCCATGGAGCCTTTGGGGAGGTGTATGAA
GGCCAGGTGTCCGGAATGCCCAACGACCCAAGCCCCCTGCAAGTGGCTGTGAAGACGCTGCCTG
AAGTGTGCTCTGAACAGGACGAACTGGATTTCCTCATGGAAGCCCTGATCATCAGCAAATTCAA
CCACCAGAACATTGTTCGCTGCATTGGGGTGAGCCTGCAATCCCTGCCCCGGTTCATCCTGCTG
GAGCTCATGGCGGGGGGAGACCTCAAGTCCTTCCTCCGAGAGACCCGCCCTCGCCCGAGCCAGC
CCTCCTCCCTGGCCATGCTGGACCTTCTGCACGTGGCTCGGGACATTGCCTGTGGCTGTCAGTA
TTTGGAGGAAAACCACTTCATCCACCGAGACATTGCTGCCAGAAACTGCCTCTTGACCTGTCCA
GGCCCTGGAAGAGTGGCCAAGATTGGAGACTTCGGGATGGCCCGAGACATCTACAGGGCGAGCT
ACTATAGAAAGGGAGGCTGTGCCATGCTGCCAGTTAAGTGGATGCCCCCAGAGGCCTTCATGGA
AGGAATATTCACTTCTAAAACAGACACATGGTCCTTTGGAGTGCTGCTATGGGAAATCTTTTCT
CTTGGATATATGCCATACCCCAGCAAAAGCAACCAGGAAGTTCTGGAGTTTGTCACCAGTGGAG
GCCGGATGGACCCACCCAAGAACTGCCCTGGGCCTGTATACCGGATAATGACTCAGTGCTGGCA
ACATCAGCCTGAAGACAGGCCCAACTTTGCCATCATTTTGGAGAGGATTGAATACTGCACCCAG
GACCCGGATGTAATCAACACCGCTTTGCCGATAGAATATGGTCCACTTGTGGAAGAGGAAGAGA
AAGTGCCTGTGAGGCCCAAGGACCCTGAGGGGGTTCCTCCTCTCCTGGTCTCTCAACAGGCAAA
ACGGGAGGAGGAGCGCAGCCCAGCTGCCCCACCACCTCTGCCTACCACCTCCTCTGGCAAGGCT
GCAAAGAAACCCACAGCTGCAGAGGTCTCTGTTCGAGTCCCTAGAGGGCCGGCCGTGGAAGGGG
GACACGTGAATATGGCATTCTCTCAGTCCAACCCTCCTTCGGAGTTGCACAGGGTCCACGGATC
CAGAAATAAGCCCACCAGCTTGTGGAACCCAACGTACGGCTCCTGGTTTACAGAGAAACCCACC
AAAAAGAATAATCCTATAGCAAAGAAGGAGCCACACGAGAGGGGTAACCTGGGGCTGGAGGGAA
GCTGTACTGTCCCACCTAACGTTGCAACTGGGAGACTTCCGGGGGCCTCACTGCTCCTAGAGCC
CTCTTCGCTGACTGCCAATATGAAGGAGGTACCTCTGTTCAGGCTACGTCACTTCCCTTGTGGG
AATGTCAATTACGGCTACCAGCAACAGGGCTTGCCCTTAGAAGCCGCTACTGCCCCTGGAGCTG
GTCATTACGAGGATACCATTCTGAAAAGCAAGAATAGCATGAACCAGCCTGGGCCCTGA.
>U04946.1 Human nucleophosmin-anaplastic lymphoma kinase
fusion protein (NPM/ALK) mRNA, complete cds
(SEQ ID NO: 32978)
ATGGAAGATTCGATGGACATGGACATGAGCCCCCTGAGGCCCCAGAACTATCTTTTCGGTTGTG
AACTAAAGGCCGACAAAGATTATCACTTTAAGGTGGATAATGATGAAAATGAGCACCAGTTATC
TTTAAGAACGGTCAGTTTAGGGGCTGGTGCAAAGGATGAGTTGCACATTGTTGAAGCAGAGGCA
ATGAATTACGAAGGCAGTCCAATTAAAGTAACACTGGCAACTTTGAAAATGTCTGTACAGCCAA
CGGTTTCCCTTGGGGGCTTTGAAATAACACCACCAGTGGTCTTAAGGTTGAAGTGTGGTTCAGG
GCCAGTGCATATTAGTGGACAGCACTTAGTAGTGTACCGCCGGAAGCACCAGGAGCTGCAAGCC
ATGCAGATGGAGCTGCAGAGCCCTGAGTACAAGCTGAGCAAGCTCCGCACCTCGACCATCATGA
CCGACTACAACCCCAACTACTGCTTTGCTGGCAAGACCTCCTCCATCAGTGACCTGAAGGAGGT
GCCGCGGAAAAACATCACCCTCATTCGGGGTCTGGGCCATGGCGCCTTTGGGGAGGTGTATGAA
GGCCAGGTGTCCGGAATGCCCAACGACCCAAGCCCCCTGCAAGTGGCTGTGAAGACGCTGCCTG
AAGTGTGCTCTGAACAGGACGAACTGGATTTCCTCATGGAAGCCCTGATCATCAGCAAATTCAA
CCACCAGAACATTGTTCGCTGCATTGGGGTGAGCCTGCAATCCCTGCCCCGGTTCATCCTGCTG
GAGCTCATGGCGGGGGGAGACCTCAAGTCCTTCCTCCGAGAGACCCGCCCTCGCCCGAGCCAGC
CCTCCTCCCTGGCCATGCTGGACCTTCTGCACGTGGCTCGGGACATTGCCTGTGGCTGTCAGTA
TTTGGAGGAAAACCACTTCATCCACCGAGACATTGCTGCCAGAAACTGCCTCTTGACCTGTCCA
GGCCCTGGAAGAGTGGCCAAGATTGGAGACTTCGGGATGGCCCGAGACATCTACAGGGCGAGCT
ACTATAGAAAGGGAGGCTGTGCCATGCTGCCAGTTAAGTGGATGCCCCCAGAGGCCTTCATGGA
AGGAATATTCACTTCTAAAACAGACACATGGTCCTTTGGAGTGCTGCTATGGGAAATCTTTTCT
CTTGGATATATGCCATACCCCAGCAAAAGCAACCAGGAAGTTCTGGAGTTTGTCACCAGTGGAG
GCCGGATGGACCCACCCAAGAACTGCCCTGGGCCTGTATACCGGATAATGACTCAGTGCTGGCA
ACATCAGCCTGAAGACAGGCCCAACTTTGCCATCATTTTGGAGAGGATTGAATACTGCACCCAG
GACCCGGATGTAATCAACACCGCTTTGCCGATAGAATATGGTCCACTTGTGGAAGAGGAAGAGA
AAGTGCCTGTGAGGCCCAAGGACCCTGAGGGGGTTCCTCCTCTCCTGGTCTCTCAACAGGCAAA
ACGGGAGGAGGAGCGCAGCCCAGCTGCCCCACCACCTCTGCCTACCACCTCCTCTGGCAAGGCT
GCAAAGAAACCCACAGCTGCAGAGGTCTCTGTTCGAGTCCCTAGAGGGCCGGCCGTGGAAGGGG
GACACGTGAATATGGCATTCTCTCAGTCCAACCCTCCTTCGGAGTTGCACAAGGTCCACGGATC
CAGAAACAAGCCCACCAGCTTGTGGAACCCAACGTACGGCTCCTGGTTTACAGAGAAACCCACC
AAAAAGAATAATCCTATAGCAAAGAAGGAGCCACACGACAGGGGTAACCTGGGGCTGGAGGGAA
GCTGTACTGTCCCACCTAACGTTGCAACTGGGAGACTTCCGGGGGCCTCACTGCTCCTAGAGCC
CTCTTCGCTGACTGCCAATATGAAGGAGGTACCTCTGTTCAGGCTACGTCACTTCCCTTGTGGG
AATGTCAATTACGGCTACCAGCAACAGGGCTTGCCCTTAGAAGCCGCTACTGCCCCTGGAGCTG
GTCATTACGAGGATACCATTCTGAAAAGCAAGAATAGCATGAACCAGCCTGGGCCCTGA.

[0124] In some embodiments, the fusion protein is an ALK protein fused to an echinoderm microtubule-associated protein-like 4 (EML4) protein. In some embodiments, the ELM4-ALK fusion protein is at least 85%, at least 90%, at least 95%, at least 98%, at least 99%, or 100% identical to a ELM4-ALK fusion protein in Homo sapiens or a variant thereof. In some embodiments, the ELM4-ALK fusion protein is at least 85%, at least 90%, at least 95%, at least 98%, at least 99%, or 100% identical to an exemplary ELM4-ALK fusion protein amino acid sequence from Homo sapiens as provided below (see GenBank Accessions No. BAM37627.1 and BAF73611.1);

>BAM37627.1 EML4-ALK fusion protein [Homo sapiens]
(SEQ ID NO: 32979)
[sequence omitted]
>BAF73611.1 fusion protein EML4-ALK variant 1 [Homo sapiens]
(SEQ ID NO: 32980)
[sequence omitted]

[0125] In some embodiments, the ELM4-ALK fusion protein is encoded by a nucleic acid sequence that is at least 85%, at least 90%, at least 95%, at least 98%, at least 99%, or 100% identical to an exemplary nucleic acid sequence from Homo sapiens as provided below (see GenBank Accessions No. AB663645.1 and AB274722.1):

>AB663645.1:15-3404 Homo sapiens EML4-ALK mRNA for EML4-ALK
fusion protein, complete cds
(SEQ ID NO: 32981)
ATGGACGGTTTCGCCGGCAGTCTCGATGATAGTATTTCTGCTGCAAGTACTTCTGATGTTCAAG
ATCGCCTGTCAGCTCTTGAGTCACGAGTTCAGCAACAAGAAGATGAAATCACTGTGCTAAAGGC
GGCTTTGGCTGATGTTTTGAGGCGTCTTGCAATCTCTGAAGATCATGTGGCCTCAGTGAAAAAA
TCAGTCTCAAGTAAAGGCCAACCAAGCCCTCGAGCAGTTATTCCCATGTCCTGTATAACCAATG
GAAGTGGTGCAAACAGAAAACCAAGTCATACCAGTGCTGTCTCAATTGCAGGAAAAGAAACTCT
TTCATCTGCTGCTAAAAGTGGTACAGAAAAAAAGAAAGAAAAACCACAAGGACAGAGAGAAAAA
AAAGAGGAATCTCATTCTAATGATCAAAGTCCACAAATTCGAGCATCACCTTCTCCCCAGCCCT
CTTCACAACCTCTCCAAATACACAGACAAACTCCAGAAAGCAAGAATGCTACTCCCACCAAAAG
CATAAAACGACCATCACCAGCTGAAAAGTCACATAATTCTTGGGAAAATTCAGATGATAGCCGT
AATAAATTGTCGAAAATACCTTCAACACCCAAATTAATACCAAAAGTTACCAAAACTGCAGACA
AGCATAAAGATGTCATCATCAACCAAGAAGGAGAATATATTAAAATGTTTATGCGCGGTCGGCC
AATTACCATGTTCATTCCTTCCGATGTTGACAACTATGATGACATCAGAACGGAACTGCCTCCT
GAGAAGCTCAAACTGGAGTGGGCATATGGTTATCGAGGAAAGGACTGTAGAGCTAATGTTTACC
TTCTTCCGACCGGGGAAATAGTTTATTTCATTGCATCAGTAGTAGTACTATTTAATTATGAGGA
GAGAACTCAGCGACACTACCTGGGCCATACAGACTGTGTGAAATGCCTTGCTATACATCCTGAC
AAAATTAGGATTGCAACTGGACAGATAGCTGGCGTGGATAAAGATGGAAGGCCTCTACAACCCC
ACGTCAGAGTGTGGGATTCTGTTACTCTATCCACACTGCAGATTATTGGACTTGGCACTTTTGA
GCGTGGAGTAGGATGCCTGGATTTTTCAAAAGCAGATTCAGGTGTTCATTTATGTGTTATTGAT
GACTCCAATGAGCATATGCTTACTGTATGGGACTGGCAGAGGAAAGCAAAAGGAGCAGAAATAA
AGACAACAAATGAAGTTGTTTTGGCTGTGGAGTTTCACCCAACAGATGCAAATACCATAATTAC
ATGCGGTAAATCTCATATTTTCTTCTGGACCTGGAGCGGCAATTCACTAACAAGAAAACAGGGA
ATTTTTGGGAAATATGAAAAGCCAAAATTTGTGCAGTGTTTAGCATTCTTGGGGAATGGAGATG
TTCTTACTGGAGACTCAGGTGGAGTCATGCTTATATGGAGCAAAACTACTGTAGAGCCCACACC
TGGGAAAGGACCTAAAGGTGTATATCAAATCAGCAAACAAATCAAAGCTCATGATGGCAGTGTG
TTCACACTTTGTCAGATGAGAAATGGGATGTTATTAACTGGAGGAGGGAAAGACAGAAAAATAA
TTCTGTGGGATCATGATCTGAATCCTGAAAGAGAAATAGAGTTTAGTGCTTCAAGGGCCAGGCT
GCCAGGCCATGTTGCAGCTGACCACCCACCTGCAGTGTACCGCCGGAAGCACCAGGAGCTGCAA
GCCATGCAGATGGAGCTGCAGAGCCCTGAGTACAAGCTGAGCAAGCTCCGCACCTCGACCATCA
TGACCGACTACAACCCCAACTACTGCTTTGCTGGCAAGACCTCCTCCATCAGTGACCTGAAGGA
GGTGCCGCGGAAAAACATCACCCTCATTCGGGGTCTGGGCCATGGCGCCTTTGGGGAGGTGTAT
GAAGGCCAGGTGTCCGGAATGCCCAACGACCCAAGCCCCCTGCAAGTGGCTGTGAAGACGCTGC
CTGAAGTGTGCTCTGAACAGGACGAACTGGATTTCCTCATGGAAGCCCTGATCATCAGCAAATT
CAACCACCAGAACATTGTTCGCTGCATTGGGGTGAGCCTGCAATCCCTGCCCCGGTTCATCCTG
CTGGAGCTCATGGCGGGGGGAGACCTCAAGTCCTTCCTCCGAGAGACCCGCCCTCGCCCGAGCC
AGCCCTCCTCCCTGGCCATGCTGGACCTTCTGCACGTGGCTCGGGACATTGCCTGTGGCTGTCA
GTATTTGGAGGAAAACCACTTCATCCACCGAGACATTGCTGCCAGAAACTGCCTCTTGACCTGT
CCAGGCCCTGGAAGAGTGGCCAAGATTGGAGACTTCGGGATGGCCCGAGACATCTACAGGGCGA
GCTACTATAGAAAGGGAGGCTGTGCCATGCTGCCAGTTAAGTGGATGCCCCCAGAGGCCTTCAT
GGAAGGAATATTCACTTCTAAAACAGACACATGGTCCTTTGGAGTGCTGCTATGGGAAATCTTT
TCTCTTGGATATATGCCATACCCCAGCAAAAGCAACCAGGAAGTTCTGGAGTTTGTCACCAGTG
GAGGCCGGATGGACCCACCCAAGAACTGCCCTGGGCCTGTATACCGGATAATGACTCAGTGCTG
GCAACATCAGCCTGAAGACAGGCCCAACTTTGCCATCATTTTGGAGAGGATTGAATACTGCACC
CAGGACCCGGATGTAATCAACACCGCTTTGCCGATAGAATATGGTCCACTTGTGGAAGAGGAAG
AGAAAGTGCCTGTGAGGCCCAAGGACCCTGAGGGGGTTCCTCCTCTCCTGGTCTCTCAACAGGC
AAAACGGGAGGAGGAGCGCAGCCCAGCTGCCCCACCACCTCTGCCTACCACCTCCTCTGGCAAG
GCTGCAAAGAAACCCACAGCTGCAGAGATCTCTGTTCGAGTCCCTAGAGGGCCGGCCGTGGAAG
GGGGACACGTGAATATGGCATTCTCTCAGTCCAACCCTCCTTCGGAGTTGCACAAGGTCCACGG
ATCCAGAAACAAGCCCACCAGCTTGTGGAACCCAACGTACGGCTCCTGGTTTACAGAGAAACCC
ACCAAAAAGAATAATCCTATAGCAAAGAAGGAGCCACACGACAGGGGTAACCTGGGGCTGGAGG
GAAGCTGTACTGTCCCACCTAACGTTGCAACTGGGAGACTTCCGGGGGCCTCACTGCTCCTAGA
GCCCTCTTCGCTGACTGCCAATATGAAGGAGGTACCTCTGTTCAGGCTACGTCACTTCCCTTGT
GGGAATGTCAATTACGGCTACCAGCAACAGGGCTTGCCCTTAGAAGCCGCTACTGCCCCTGGAG
CTGGTCATTACGAGGATACCATTCTGAAAAGCAAGAATAGCATGAACCAGCCTGGGCCCTGA.
>AB274722.1:271-3450 Homo sapiens mRNA for fusion protein
EML4-ALK variant 1, complete cds
(SEQ ID NO: 32982)
ATGGACGGTTTCGCCGGCAGTCTCGATGATAGTATTTCTGCTGCAAGTACTTCTGATGTTCAAG
ATCGCCTGTCAGCTCTTGAGTCACGAGTTCAGCAACAAGAAGATGAAATCACTGTGCTAAAGGC
GGCTTTGGCTGATGTTTTGAGGCGTCTTGCAATCTCTGAAGATCATGTGGCCTCAGTGAAAAAA
TCAGTCTCAAGTAAAGGCCAACCAAGCCCTCGAGCAGTTATTCCCATGTCCTGTATAACCAATG
GAAGTGGTGCAAACAGAAAACCAAGTCATACCAGTGCTGTCTCAATTGCAGGAAAAGAAACTCT
TTCATCTGCTGCTAAAAGTGGTACAGAAAAAAAGAAAGAAAAACCACAAGGACAGAGAGAAAAA
AAAGAGGAATCTCATTCTAATGATCAAAGTCCACAAATTCGAGCATCACCTTCTCCCCAGCCCT
CTTCACAACCTCTCCAAATACACAGACAAACTCCAGAAAGCAAGAATGCTACTCCCACCAAAAG
CATAAAACGACCATCACCAGCTGAAAAGTCACATAATTCTTGGGAAAATTCAGATGATAGCCGT
AATAAATTGTCGAAAATACCTTCAACACCCAAATTAATACCAAAAGTTACCAAAACTGCAGACA
AGCATAAAGATGTCATCATCAACCAAGAAGGAGAATATATTAAAATGTTTATGCGCGGTCGGCC
AATTACCATGTTCATTCCTTCCGATGTTGACAACTATGATGACATCAGAACGGAACTGCCTCCT
GAGAAGCTCAAACTGGAGTGGGCATATGGTTATCGAGGAAAGGACTGTAGAGCTAATGTTTACC
TTCTTCCGACCGGGGAAATAGTTTATTTCATTGCATCAGTAGTAGTACTATTTAATTATGAGGA
GAGAACTCAGCGACACTACCTGGGCCATACAGACTGTGTGAAATGCCTTGCTATACATCCTGAC
AAAATTAGGATTGCAACTGGACAGATAGCTGGCGTGGATAAAGATGGAAGGCCTCTACAACCCC
ACGTCAGAGTGTGGGATTCTGTTACTCTATCCACACTGCAGATTATTGGACTTGGCACTTTTGA
GCGTGGAGTAGGATGCCTGGATTTTTCAAAAGCAGATTCAGGTGTTCATTTATGTGTTATTGAT
GACTCCAATGAGCATATGCTTACTGTATGGGACTGGCAGAAGAAAGCAAAAGGAGCAGAAATAA
AGACAACAAATGAAGTTGTTTTGGCTGTGGAGTTTCACCCAACAGATGCAAATACCATAATTAC
ATGCGGTAAATCTCATATTTTCTTCTGGACCTGGAGCGGCAATTCACTAACAAGAAAACAGGGA
ATTTTTGGGAAATATGAAAAGCCAAAATTTGTGCAGTGTTTAGCATTCTTGGGGAATGGAGATG
TTCTTACTGGAGACTCAGGTGGAGTCATGCTTATATGGAGCAAAACTACTGTAGAGCCCACACC
TGGGAAAGGACCTAAAGTGTACCGCCGGAAGCACCAGGAGCTGCAAGCCATGCAGATGGAGCTG
CAGAGCCCTGAGTACAAGCTGAGCAAGCTCCGCACCTCGACCATCATGACCGACTACAACCCCA
ACTACTGCTTTGCTGGCAAGACCTCCTCCATCAGTGACCTGAAGGAGGTGCCGCGGAAAAACAT
CACCCTCATTCGGGGTCTGGGCCATGGAGCCTTTGGGGAGGTGTATGAAGGCCAGGTGTCCGGA
ATGCCCAACGACCCAAGCCCCCTGCAAGTGGCTGTGAAGACGCTGCCTGAAGTGTGCTCTGAAC
AGGACGAACTGGATTTCCTCATGGAAGCCCTGATCATCAGCAAATTCAACCACCAGAACATTGT
TCGCTGCATTGGGGTGAGCCTGCAATCCCTGCCCCGGTTCATCCTGCTGGAGCTCATGGCGGGG
GGAGACCTCAAGTCCTTCCTCCGAGAGACCCGCCCTCGCCCGAGCCAGCCCTCCTCCCTGGCCA
TGCTGGACCTTCTGCACGTGGCTCGGGACATTGCCTGTGGCTGTCAGTATTTGGAGGAAAACCA
CTTCATCCACCGAGACATTGCTGCCAGAAACTGCCTCTTGACCTGTCCAGGCCCTGGAAGAGTG
GCCAAGATTGGAGACTTCGGGATGGCCCGAGACATCTACAGGGCGAGCTACTATAGAAAGGGAG
GCTGTGCCATGCTGCCAGTTAAGTGGATGCCCCCAGAGGCCTTCATGGAAGGAATATTCACTTC
TAAAACAGACACATGGTCCTTTGGAGTGCTGCTATGGGAAATCTTTTCTCTTGGATATATGCCA
TACCCCAGCAAAAGCAACCAGGAAGTTCTGGAGTTTGTCACCAGTGGAGGCCGGATGGACCCAC
CCAAGAACTGCCCTGGGCCTGTATACCGGATAATGACTCAGTGCTGGCAACATCAGCCTGAAGA
CAGGCCCAACTTTGCCATCATTTTGGAGAGGATTGAATACTGCACCCAGGACCCGGATGTAATC
AACACCGCTTTGCCGATAGAATATGGTCCACTTGTGGAAGAGGAAGAGAAAGTGCCTGTGAGGC
CCAAGGACCCTGAGGGGGTTCCTCCTCTCCTGGTCTCTCAACAGGCAAAACGGGAGGAGGAGCG
CAGCCCAGCTGCCCCACCACCTCTGCCTACCACCTCCTCTGGCAAGGCTGCAAAGAAACCCACA
GCTGCAGAGGTCTCTGTTCGAGTCCCTAGAGGGCCGGCCGTGGAAGGGGGACACGTGAATATGG
CATTCTCTCAGTCCAACCCTCCTTCGGAGTTGCACAGGGTCCACGGATCCAGAAACAAGCCCAC
CAGCTTGTGGAACCCAACGTACGGCTCCTGGTTTACAGAGAAACCCACCAAAAAGAATAATCCT
ATAGCAAAGAAGGAGCCACACGAGAGGGGTAACCTGGGGCTGGAGGGAAGCTGTACTGTCCCAC
CTAACGTTGCAACTGGGAGACTTCCGGGGGCCTCACTGCTCCTAGAGCCCTCTTCGCTGACTGC
CAATATGAAGGAGGTACCTCTGTTCAGGCTACGTCACTTCCCTTGTGGGAATGTCAATTACGGC
TACCAGCAACAGGGCTTGCCCTTAGAAGCCGCTACTGCCCCTGGAGCTGGTCATTACGAGGATA
CCATTCTGAAAAGCAAGAATAGCATGAACCAGCCTGGGCCCTGA.

[0126] By “genetic vaccine” is meant an immunogenic composition comprising a polynucleotide encoding an antigen. In embodiments, the antigen is an ALK antigen.

[0127] By “HLA” is meant a human leukocyte antigen protein, or fragment thereof. As used herein “HLA class I” includes HLA-A, HLA-B, and HLA-C.

[0128] By “HLA-A*02” is meant the *02 allele group or serotype, or any member of such allele group or serotype, or fragments thereof, of MHC Class I human leukocyte antigen proteins having an α-chain encoded in the A locus. Members of the HLA-A*02 serotype or subgroup include, but are not limited to, HLA-A*02:01, HLA-A*02:02, HLA-A*02:03, HLA-A*02:05, HLA-A*02:06, HLA-A*02:07, HLA-A*02:11.

[0129] By “HLA-B*07” is meant the *07 allele group or serotype, or any member of such allele group or serotype, or fragments thereof, of MHC Class I human leukocyte antigen proteins having an α-chain encoded in the B locus. Members of the HLA-B*07 serotype or subgroup include, but are not limited to, HLA-B*07:02, HLA-B*07:04, HLA-B*07:05, HLA-B*07:07.

[0130] By “HLA-A*02:01 polypeptide” is meant a human leukocyte antigen protein, or fragment thereof, having an α-chain having at least about 85% amino acid sequence identity to GenBank Accession No. 8EB2_A. An exemplary HLA-A*02:01 α-chain amino acid sequence is provided below (GenBank Accession No. 8EB2_A):

(SEQ ID NO: 32983)
[sequence omitted]
TLRWE.

[0131] By “HLA-B*07:02” is meant a human leukocyte antigen protein, or fragment thereof, having an α-chain having at least about 85% amino acid sequence identity to GenBank Accession No. 7S8F_A. An exemplary HLA-B*07:02 α-chain amino acid sequence is provided below (GenBank Accession No. 7S8F_A):

(SEQ ID NO: 32984)
[sequence omitted]
TLRWE

[0132] “Hybridization” means hydrogen bonding, which may be Watson-Crick. Hoogsteen, or reversed Hoogsteen hydrogen bonding, between complementary nucleobases. For example, in DNA, adenine and thymine, and cytosine and guanine, are, respectively, complementary nucleobases that pair through the formation of hydrogen bonds. By “hybridize” is meant pairing to form a double-stranded molecule between complementary polynucleotide sequences (e.g., a gene), or portions thereof, under various conditions of stringency (e.g., Wahl, G. M. and S. L. Berger, (1987), Methods Enzymol., 152:399; Kimmel, A. R., (1987), Methods Enzymol. 152:507).

[0133] By way of example, stringent salt concentration will ordinarily be less than about 750) mM NaCl and 75 mM trisodium citrate, preferably less than about 500 mM NaCl and 50 mM trisodium citrate, and more preferably less than about 250 mM NaCl and 25 mM trisodium citrate. Low stringency hybridization can be obtained in the absence of organic solvent, e.g., formamide, while high stringency hybridization can be obtained in the presence of at least about 35% formamide, and more preferably at least about 50% formamide. Stringent temperature conditions will ordinarily include temperatures of at least about 30° C., more preferably of at least about 37° C., and most preferably of at least about 42° C. Varying additional parameters, such as hybridization time, the concentration of detergent, e.g., sodium dodecyl sulfate (SDS), and the inclusion or exclusion of carrier DNA, are well known to those skilled in the art. Various levels of stringency are accomplished by combining these various conditions as needed. In a preferred: embodiment, hybridization will occur at 30° C. in 750 mM NaCl. 75 mM trisodium citrate, and 1% SDS. In a more preferred embodiment, hybridization will occur at 37° C. in 500 mM NaCl, 50 mM trisodium citrate, 1% SDS, 35% formamide, and 100 μg/ml denatured salmon sperm DNA (ssDNA). In a most preferred embodiment, hybridization will occur at 42° C. in 250 mM NaCl, 25 mM trisodium citrate, 1% SDS, 50% formamide, and 200 μg/ml ssDNA. Useful variations on these conditions will be apparent to those skilled in the art.

[0134] For most applications, washing steps that follow hybridization will also vary in stringency. Wash stringency conditions can be defined by salt concentration and by temperature. As above, wash stringency can be increased by decreasing salt concentration or by increasing temperature. For example, stringent salt concentration for the wash steps will preferably be less than about 30 mM NaCl and 3 mM trisodium citrate, and most preferably less than about 15 mM NaCl and 1.5 mM trisodium citrate. Stringent temperature conditions for the wash steps will ordinarily include a temperature of at least about 25° C., more preferably of at least about 42° C., and even more preferably of at least about 68° C. In a preferred embodiment, wash steps will occur at 25° C. in 30 mM NaCl, 3 mM trisodium citrate, and 0.1% SDS. In a more preferred embodiment, wash steps will occur at 42 C in 15 mM NaCl, 1.5 mM trisodium citrate, and 0.1% SDS. In a more preferred embodiment, wash steps will occur at 68° C. in 15 mM NaCl, 1.5 mM trisodium citrate, and 0.1% SDS. Additional variations on these conditions will be apparent to those skilled in the art. Hybridization techniques are well known to those skilled in the art and are described, for example, in Benton and Davis (Science 196:180, 1977); Grunstein and Hogness (Proc. Natl. Acad. Sci., USA 72:3961, 1975); Ausubel et al. (Current Protocols in Molecular Biology, Wiley Interscience, New York, 2001); Berger and Kimmel (Guide to Molecular Cloning Techniques, 1987, Academic Press, New York); and Sambrook et al., Molecular Cloning: A Laboratory Manual, Cold Spring Harbor Laboratory Press, New York.

[0135] By “immune effector cell” is meant a lymphocyte, once activated, capable of effecting an immune response upon a target cell. In some embodiments, immune effector cells are effector T cells. In some embodiments, the effector T cell is a naïve CD8⁺ T cell, a cytotoxic T cell, a natural killer T (NKT) cell, a natural killer (NK) cell, or a regulatory T (Treg) cell. In some embodiments, the effector T cells are thymocytes, immature T lymphocytes, mature T lymphocytes, resting T lymphocytes, or activated T lymphocytes. In some embodiments the immune effector cell is a CD4 CD8 T cell or a CD4 CD8-T cell. In some embodiments the immune effector cell is a T helper cell. In some embodiments the T helper cell is a T helper 1 (Th1), a T helper 2 (Th2) cell, or a helper T cell expressing CD4 (CD4+ T cell).

[0136] By “immunogen” is meant agent which is capable, under appropriate conditions, of eliciting or stimulating an immune response. In an embodiment, an immune response includes a T-cell response. As used herein, an “immunogenic composition” is a composition comprising an immunogen (such as an ALK polypeptide) or a vaccine comprising an immunogen (such as an ALK polypeptide). As will be appreciated by the skilled person in the art, if administered to a subject in need prior to the subject's contracting disease or experiencing full-blown disease, an immunogenic composition can be prophylactic and result in the subject's eliciting an immune response, e.g., a cellular immune response, to protect against disease, or to prevent more severe disease or condition, and/or the symptoms thereof. If administered to a subject in need following the subject's contracting disease, an immunogenic composition can be therapeutic and result in the subject's eliciting an immune response, e.g., a cellular immune response, to treat the disease, e.g., by reducing, diminishing, abrogating, ameliorating, or eliminating the disease, and/or the symptoms thereof. In some embodiments, the immune response is a B-cell response, which results in the production of antibodies, e.g., neutralizing antibodies, directed against the immunogen or immunogenic composition comprising the antigen or antigen sequence. In some embodiments, the immune response is a T-cell response, which results in the production of T-lymphocytes. In a manner similar to the foregoing, in some embodiments, an immunogenic composition or vaccine can be prophylactic. In some embodiments, an immunogenic composition or vaccine can be therapeutic. In some embodiments, the disease is caused by oncogenic ALK gene fusions, rearrangements, duplications, or mutations (e.g., ALK-positive cancers). In some embodiments, the cancer is an ALK-positive cancer. In some embodiments, the ALK-positive cancer is non-small cell lung cancer (NSCLC), anaplastic large cell lymphoma (ALCL), neuroblastoma, B-cell lymphoma, thyroid cancer, colon cancer, breast cancer, inflammatory myofibroblastic tumors (IMT), renal carcinoma, esophageal cancer, glioma, glioblastoma, melanoma, or a combination thereof.

[0137] The term “immune response” is meant any response mediated by an immunoresponsive cell. In one example of an immune response, leukocytes are recruited to carry out a variety of different specific functions in response to exposure to an antigen (e.g., a foreign entity). Immune responses are multifactorial processes that differ depending on the type of cells involved. Immune responses include cell-mediated responses (e.g., T-cell responses), humoral responses (B-cell/antibody responses), innate responses and combinations thereof.

[0138] By “immunogenic composition” is meant a composition that elicits an immune response in a subject. In some instances, the subject is an immunized subject.

[0139] The term “immunize” refers to the process of rendering a subject protected from a disease or pathology, or the symptoms thereof, such as by vaccination. In an embodiment, the term “immunize” relates to injecting a polypeptide comprising an oncogenic ALK gene fusions, rearrangements, duplications, or mutations (e.g., ALK-positive cancers), or fragments thereof.

[0140] By “increases” is meant a positive alteration of at least 5%, 10%, 25%, 30%, 40%, 50%, 75%, 80%, 85%, 90%, 95%, 98%, or 100%.

[0141] The terms “isolated,” “purified,” or “biologically pure” refer to material that is free to varying degrees from components which normally accompany it as found in its native state. “Isolate” denotes a degree of separation from original source or surroundings. “Purify” denotes a degree of separation that is higher than isolation. A “purified” or “biologically pure” protein is sufficiently free of other materials such that any impurities do not materially affect the biological properties of the protein or cause other adverse consequences. That is, a nucleic acid, protein, or peptide is purified if it is substantially free of cellular material, debris, non-relevant viral material, or culture medium when produced by recombinant DNA techniques, or of chemical precursors or other chemicals when chemically synthesized. Purity and homogeneity are typically determined using standard purification methods and analytical chemistry techniques, for example, polyacrylamide gel electrophoresis or high-performance liquid chromatography. The term “purified” can denote that a nucleic acid or protein gives rise to essentially one band in an electrophoretic gel. For a protein that can be subjected to modifications, for example, phosphorylation or glycosylation, different modifications may give rise to different isolated proteins, which can be separately purified. The term “isolated” also embraces recombinant nucleic acids or proteins, as well as chemically synthesized nucleic acids or peptides.

[0142] By “isolated polynucleotide” is meant a nucleic acid molecule that is free of the genes which flank the gene, in the naturally-occurring genome of the organism from which the nucleic acid molecule of the invention is derived. In some instances the nucleic acid molecule is a DNA molecule or an RNA molecule. The term includes, for example, a recombinant DNA that is incorporated into a vector: into an autonomously replicating plasmid or virus: into the genomic DNA of a prokaryote or eukaryote; or that exists as a separate molecule independent of other sequences (for example, a cDNA or a genomic or cDNA fragment produced by PCR or restriction endonuclease digestion). In addition, the term includes an RNA molecule that is transcribed from a DNA molecule, as well as a recombinant DNA that is part of a hybrid gene encoding additional polypeptide sequence.

[0143] By an “isolated polypeptide” is meant a polypeptide of the invention that has been separated from components that naturally accompany it. Typically, the polypeptide is isolated when it is at least 40%, by weight, at least 50%, by weight, at least 60%, by weight, free from the proteins and naturally-occurring organic molecules with which it is naturally associated. Preferably, an isolated polypeptide preparation is at least 75%, more preferably at least 90%, and most preferably at least 99%, by weight, free from the proteins and naturally-occurring organic molecules with which it is naturally associated. An isolated polypeptide may be obtained, for example, by extraction from a natural source; by expression of a recombinant nucleic acid encoding such a polypeptide; or by chemically synthesizing the protein. Purity can be measured by any standard, appropriate method, for example, column chromatography, polyacrylamide gel electrophoresis, or by HPLC analysis. An isolated polypeptide can refer to an ALK antigen or immunogen polypeptide generated by the methods described herein.

[0144] By “linker” is meant one or more amino acids that serve as a spacer between two polypeptides or peptides of a fusion protein.

[0145] By “marker” is meant any analyte having an alteration in expression level or activity that is associated with or used to characterize a disease, condition, pathology, or disorder.

[0146] As used herein, “obtaining” as in “obtaining an agent” includes synthesizing, isolating, purchasing, or otherwise acquiring the agent.

[0147] “Neoplasia” refers to cells or tissues exhibiting abnormal growth or proliferation. The term neoplasia encompasses cancer and solid tumors.

[0148] “Neuroblastoma” refers to a solid cancerous tumor that usually originates in the abdomen in adrenal gland tissue, but can also originate from nerve tissue in the neck, chest, abdomen, and pelvis. Neuroblastoma is derived from the neural crest and is characterized by a marked clinical heterogeneity (aggressive, unremitting growth to spontaneous remission). Neuroblastoma may metastasize to the lymph nodes, liver, lungs, bones and bone marrow. Neuroblastoma is the most common heterogenous and malignant tumor of early childhood, and two thirds of individuals with neuroblastoma are diagnosed when they are younger than 5 years. About 10% of neuroblastoma cases have activating point mutation in the ALK protein (e.g., ALK^{F1174L}).

[0149] By “operably linked” is meant that a first polynucleotide is positioned adjacent to a second polynucleotide that directs transcription of the first polynucleotide when appropriate molecules are bound to the second polynucleotide. By way of example, a first nucleic acid sequence is operably linked to a second nucleic acid sequence when the first nucleic acid sequence is placed in a functional relationship with the second nucleic acid sequence. For instance, a promoter is operably linked to a coding sequence if the promoter affects (allows) the transcription or expression of the coding sequence. Generally, operably linked DNA sequences are contiguous and, where necessary to join two protein-coding regions, are in the same open reading frame.

[0150] The nucleic acid sequence encoding an ALK peptide (antigen peptide) generated by the described methods can be optimized for expression in mammalian cells via codon-optimization and RNA optimization (such as to increase RNA stability) using procedures and techniques practiced in the art.

[0151] The term “pharmaceutically acceptable vehicle” refers to conventional carriers and excipients that are physiologically and pharmaceutically acceptable for use, particularly in mammalian subjects. A non-limiting example of a mammalian subject is a human subject. Pharmaceutically acceptable vehicles are known to the skilled practitioner in the pertinent art and can be readily found in Remington's Pharmaceutical Sciences, by E. W. Martin, Mack Publishing Co., Easton, Pa., 15th Edition (1975) and its updated editions, which describes compositions and formulations suitable for pharmaceutical delivery of one or more therapeutic or immunogenic compositions, such as one or more vaccines, and additional pharmaceutical agents. In general, the nature of a pharmaceutically acceptable carrier depends on the particular mode of administration being employed. For instance, parenteral formulations usually comprise injectable fluids/liquids that include pharmaceutically and physiologically acceptable fluids such as water, physiological saline, balanced salt solutions, aqueous dextrose, glycerol, or the like as a vehicle. For solid compositions (for example, powder, pill, tablet, or capsule forms), conventional non-toxic solid carriers may include, for example, pharmaceutical grades of mannitol, lactose, starch, or magnesium stearate, which typically stabilize and/or increase the half-life of a composition or drug. In addition to biologically-neutral carriers, pharmaceutical compositions to be administered can contain minor amounts of non-toxic auxiliary substances, such as wetting or emulsifying agents, preservatives, and pH buffering agents and the like, for example sodium acetate or sorbitan monolaurate.

[0152] By “plasmid” is meant a circular nucleic acid molecule capable of autonomous replication in a host cell.

[0153] The terms “protein.” “peptide.” “polypeptide,” and their grammatical equivalents are used interchangeably herein, and refer to a polymer of amino acid residues linked together by peptide bonds. The terms refer to a protein, peptide, or polypeptide of any size, structure, or function. Typically, a protein, peptide, or polypeptide will be at least three (3) amino acids long. A protein, peptide, or polypeptide can refer to an individual protein or a collection of proteins. One or more of the amino acids in a protein, peptide, or polypeptide can be modified, such as glycoproteins, for example, by the addition of a chemical entity such as a carbohydrate group, a hydroxyl group, a phosphate group, a farnesyl group, an isofarnesyl group, a fatty acid group, a linker for conjugation, functionalization, or other modifications, etc. A protein, peptide, or polypeptide can also be a single molecule or can be a multi-molecular complex. A protein, peptide, or polypeptide can be just a fragment of a naturally occurring protein or peptide. A protein, peptide, or polypeptide can be naturally occurring, recombinant, or synthetic, or any combination thereof.

[0154] In some embodiments, a protein comprises a proteinaceous part, e.g., an amino acid sequence constituting a nucleic acid binding domain, and an organic compound, e.g., a compound that can act as a nucleic acid cleavage agent. In some embodiments, a protein is in a complex with, or is in association with, a nucleic acid, e.g., RNA or DNA. Any of the proteins provided herein can be produced by any method known in the art. For example, the proteins provided herein can be produced via recombinant protein expression and purification, which is especially suited for fusion proteins comprising a peptide linker. Methods for recombinant protein expression and purification are well known, and include those described by Green and Sambrook, Molecular Cloning: A Laboratory Manual (4th ed., Cold Spring Harbor Laboratory Press, Cold Spring Harbor, N.Y. (2012)), the entire contents of which are incorporated herein by reference.

[0155] Conservative amino acid substitutions are those substitutions that, when made, least interfere with the properties of the original protein, that is, the structure and especially the function of the protein is conserved and is not significantly changed by such substitutions. Examples of conservative amino acid substitutions are known in the art, e.g., as set forth in, for example, U.S. Publication No. 2015/0030628. Conservative substitutions generally maintain (a) the structure of the polypeptide backbone in the area of the substitution, for example, as a sheet or helical conformation; (b) the charge or hydrophobicity of the molecule at the target site; and/or (c) the bulk of the side chain

[0156] The substitutions that are generally expected to produce the greatest changes in protein properties are non-conservative, for instance, changes in which (a) a hydrophilic residue, for example, seryl or threonyl, is substituted for (or by) a hydrophobic residue, for example, leucyl, isoleucyl, phenylalanyl, valyl or alanyl; (b) a cysteine or proline is substituted for (or by) any other residue; (c) a residue having an electropositive side chain, for example, lysyl, arginyl, or histadyl, is substituted for (or by) an electronegative residue, for example, glutamyl or aspartyl; or (d) a residue having a bulky side chain, for example, phenylalanine, is substituted for (or by) one not having a side chain, for example, glycine.

[0157] By “promoter” is meant a polynucleotide sufficient to direct transcription. A promoter includes necessary nucleic acid sequences near the start site of transcription. A promoter also optionally includes distal enhancer or repressor sequence elements. A “constitutive promoter” is a promoter that is continuously active and is not subject to regulation by external signals or molecules. In contrast, the activity of an “inducible promoter” is regulated by an external signal or molecule (for example, a transcription factor). By way of example, a promoter may be a CMV promoter.

[0158] As will be appreciated by the skilled practitioner in the art, the term “purified” does not require absolute purity: rather, it is intended as a relative term. Thus, for example, a purified peptide, protein, or other active compound is one that is isolated in whole or in part from naturally associated proteins and other contaminants. In certain embodiments, the term “substantially purified” refers to a peptide, protein, or other active compound that has been isolated from a cell, cell culture medium, or other crude preparation and subjected to routine methods, such as fractionation, chromatography, or electrophoresis, to remove various components of the initial preparation, such as proteins, cellular debris, and other components.

[0159] A “recombinant” nucleic acid or protein is one that has a sequence that is not naturally occurring or that has a sequence that is made by an artificial combination of two otherwise separated segments of sequence. Such an artificial combination is often accomplished by chemical synthesis or by the artificial manipulation of isolated segments of nucleic acids, for example, by genetic engineering techniques. A “non-naturally occurring” nucleic acid or protein is one that may be made via recombinant technology, artificial manipulation, or genetic or molecular biological engineering procedures and techniques, such as those commonly practiced in the art.

[0160] By “reduces” is meant a negative alteration of at least 5%, 10%, 25%, 30%, 40%, 50%, 75%, 80%, 85%, 90%, 95%, 98%, or 100%.

[0161] By “reference” is meant a standard or control condition. In some cases, the reference is a healthy cell or a healthy subject, or the reference is a cell or subject that does not have or is not associated with a cancer or tumor (e.g., an ALK-positive neoplasia, such as a non-small cell lung cancer (NSCLC)). In some instances, the reference is a subject or cell prior to being administered a composition or being treated for a disease or a subject or cell that has not been administered a composition or treatment. In some instances, the reference is a subject or cell prior to a change in a treatment.

[0162] A “reference sequence” is a defined sequence used as a basis for sequence comparison. The reference sequence can be an ALK antigen nucleotide or polypeptide sequence. A reference sequence may be a subset of or the entirety of a specified sequence: for example, a segment of a full-length cDNA or gene sequence, or the complete cDNA or gene sequence. For polypeptides, the length of the reference polypeptide sequence will generally be at least about 16 amino acids, preferably at least about 20 amino acids, more preferably at least about 25 amino acids, and even more preferably about 35 amino acids, about 50 amino acids, or about 100 amino acids. For nucleic acids, the length of the reference nucleic acid sequence will generally be at least about 50 nucleotides, preferably at least about 60 nucleotides, more preferably at least about 75 nucleotides, and even more preferably about 100 nucleotides or about 300 nucleotides or any integer thereabout or therebetween.

[0163] By “specifically binds” is meant an agent that recognizes and binds a polypeptide (e.g., an ALK polypeptide), but which does not substantially recognize and bind other molecules in a sample, for example, a biological sample, which naturally includes a polypeptide of the invention, such as an ALK polypeptide. For example, an engineered T-cell receptor that specifically binds an antigen (e.g., an ALK polypeptide or fragment thereof) expressed on the surface of a cell, but which does not substantially bind to other polypeptides, carbohydrates, lipids, or other element on the surface of the cell.

[0164] Nucleic acid molecules useful in the methods described herein include any nucleic acid molecule that encodes a polypeptide as described, or a fragment thereof. Such nucleic acid molecules need not be 100% identical with an endogenous nucleic acid sequence, but will typically exhibit substantial identity.

[0165] By “substantially identical” is meant a polypeptide or nucleic acid molecule exhibiting at least 50% identity to a reference amino acid sequence or nucleic acid sequence. Examples of reference amino acid sequences and nucleic acid sequences include any of those provided herein. In embodiments, such a sequence is at least 60%, or at least 80% or 85%, or at least or equal to 90%, 95%, 98% or even 99% identical at the amino acid level or nucleic acid to the sequence used for comparison. Polynucleotides having “substantial identity” to an endogenous sequence are in some instances capable of hybridizing with at least one strand of a double-stranded nucleic acid molecule.

[0166] “Sequence identity” refers to the similarity between amino acid or nucleic acid sequences that is expressed in terms of the similarity between the sequences. Sequence identity is frequently measured in terms of percentage identity (or similarity or homology); the higher the percentage, the more similar the sequences are. Homologs or variants of a given gene or protein will possess a relatively high degree of sequence identity when aligned using standard methods. Sequence identity is typically measured using sequence analysis software (for example, Sequence Analysis Software Package of the Genetics Computer Group, University of Wisconsin Biotechnology Center, 1710 University Avenue, Madison, Wis. 53705, BLAST, BESTFIT, GAP, or PILEUP/PRETTYBOX programs). Such software matches identical or similar sequences by assigning degrees of homology to various substitutions, deletions, and/or other modifications. Conservative substitutions typically include substitutions within the following groups: glycine, alanine; valine, isoleucine, leucine; aspartic acid, glutamic acid, asparagine, glutamine; serine, threonine; lysine, arginine; and phenylalanine, tyrosine. In an exemplary approach to determining the degree of identity, a BLAST program may be used, with a probability score between e⁻³ and e⁻¹⁰⁰ indicating a closely related sequence. In addition, other programs and alignment algorithms are described in, for example, Smith and Waterman, 1981, Adv. Appl. Math. 2:482; Needleman and Wunsch, 1970, J. Mol. Biol. 48:443; Pearson and Lipman, 1988, Proc. Natl. Acad. Sci. U.S.A. 85:2444; Higgins and Sharp, 1988, Gene 73:237-244; Higgins and Sharp, 1989, CABIOS 5:151-153; Corpet et al., 1988, Nucleic Acids Research 16:10881-10890; Pearson and Lipman, 1988, Proc. Natl. Acad. Sci. U.S.A. 85:2444; and Altschul et al., 1994, Nature Genet. 6:119-129. The NCBI Basic Local Alignment Search Tool (BLAST™) (Altschul et al. 1990, J. Mol. Biol. 215:403-410) is readily available from several sources, including the National Center for Biotechnology Information (NCBI, Bethesda, Md.) and on the Internet, for use in connection with the sequence analysis programs blastp, blastn, blastx, tblastn and tblastx.

[0167] By “subject” is meant an animal. Non-limiting examples of animals include a mammal, including, but not limited to, a human, a non-human primate, or a non-human mammal, such as a bovine, equine, canine, ovine, or feline mammal, or a sheep, goat, llama, camel, or a rodent (e.g., rat, mouse), gerbil, or hamster. In a nonlimiting example, a subject is one who has, is at risk of developing, or who is susceptible to a disease caused by oncogenic ALK gene fusions, rearrangements, duplications, or mutations (e.g., ALK-positive cancers). In particular aspects as described herein, the subject is a human subject, such as a patient.

[0168] Ranges provided herein are understood to be shorthand for all of the values within the range, inclusive of the first and last stated values. For example, a range of 1 to 50 is understood to include any number, combination of numbers, or sub-range from the group consisting 1, 2, 3, 4, 5, 6, 7, 8, 9, 10, 11, 12, 13, 14, 15, 16, 17, 18, 19, 20, 21, 22, 23, 24, 25, 26, 27, 28, 29, 30, 31, 32, 33, 34, 35, 36, 37, 38, 39, 40, 41, 42, 43, 44, 45, 46, 47, 48, 49, 50, or greater, consecutively, such as to 100 or greater.

[0169] By “T Cell” is meant a type of white blood cell having a T cell receptor on the cell surface that functions in an adaptive immune response. T cells include, but are not limited to, CD4+ T cells and CD8+ T cells. A CD4+T lymphocyte is an immune cell that carries a marker on its surface known as “cluster of differentiation 4 (CD4).” These cells, also known as helper T cells, help orchestrate the immune response, including antibody responses as well as killer T cell responses. A subset of CD4+ T cells has regulatory functions (Treg cells). Various other subsets of CD4+ T cells are defined by their pattern of cytokine production (e.g. Th17 cells that produce IL-17, Th (cells that produce IL-9, etc). CD8+ T cells carry the “cluster of differentiation 8” (CD8) marker. In one embodiment, a CD8+ T cell is a cytotoxic T lymphocyte. In another embodiment, a CD8+ cell is a suppressor T cell. An effector function of a T cell is a specialized function of the T cell, such as cytolytic activity or helper activity including the secretion of cytokines.

[0170] By “T cell receptor (TCR)” is meant a polypeptide comprising an alpha locus, a beta locus or fragment thereof that binds a polypeptide of interest (e.g., ALK) or a fragment thereof. In some embodiments, the TCR is expressed as part of a complex with a CD3 polypeptide. In some embodiments, the T cell receptor binds an ALK polypeptide or fragment thereof. Is some embodiments, the TCR is membrane bound. In other embodiments, the TCR is soluble. In some embodiments, the ALK-specific TCRs recognize human ALK peptides presented by HLA-B*0) 7:02 human HLA allele. In some embodiments, a TCR comprises are listed in Tables 2 and 3.

[0171] By “TCR polynucleotide” is meant a nucleic acid molecule encoding a TCR polypeptide.

[0172] As used herein, the terms “treat,” “treating,” “treatment,” and the like refer to reducing, diminishing, decreasing, delaying, abrogating, ameliorating, or eliminating, a disease, condition, disorder, or pathology, and/or symptoms associated therewith. While not intending to be limiting. “treating” typically relates to a therapeutic intervention that occurs after a disease, condition, disorder, or pathology, and/or symptoms associated therewith, have begun to develop to reduce the severity of the disease, etc., and the associated signs and symptoms. It will be appreciated that, although not precluded, treating a disorder or condition does not require that the disease, condition, disorder, pathology, or the symptoms associated therewith, be completely eliminated.

[0173] As referred to herein, a “transformed” or “transfected” cell is a cell into which a nucleic acid molecule or polynucleotide sequence has been introduced by molecular biology techniques. As used herein, the term “transfection” encompasses all techniques by which a nucleic acid molecule or polynucleotide may be introduced into such a cell, including transfection with viral vectors, transformation with plasmid vectors, and introduction of naked nucleic acid (DNA or RNA) by electroporation, lipofection, and particle gun acceleration.

[0174] By “vaccine” is meant a preparation of immunogenic material capable of eliciting an immune response. In embodiments, a vaccine is administered to a subject to treat a disease, condition, or pathology, or to prevent a disease, condition, or pathology. In some instances, the disease is caused by oncogenic ALK gene fusions, rearrangements, duplications, or mutations (e.g., ALK-positive cancers). In embodiments, the immunogenic materials is a protein or nucleic acid molecule. The immunogenic material may include, for example, antigenic proteins, peptides, or DNA derived from ALK-expressing tumors or cell lines. Vaccines may elicit a prophylactic (preventative) immune response in the subject: they may also elicit a therapeutic response immune response in a subject. As mentioned above, methods of vaccine administration vary according to the vaccine, and can include routes or means, such as inoculation (intravenous or subcutaneous injection), ingestion, inhalation, or other forms of administration. Inoculations can be delivered by any number of routes, including parenteral, such as intravenous, subcutaneous, or intramuscular. Vaccines may also be administered with an adjuvant to boost the immune response.

[0175] As used herein, a “vector” refers to a nucleic acid molecule into which foreign nucleic acid can be inserted without disrupting the ability of the vector to replicate in and/or integrate into a host cell. A vector can include nucleic acid sequences that permit it to replicate in a host cell, such as an origin of replication. An insertional vector is capable of inserting itself into a host nucleic acid. A vector can also include one or more selectable marker genes and other genetic elements. An expression vector is a vector that contains the necessary regulatory sequences to allow transcription and translation of inserted gene or genes in a host cell. In some embodiments of the present disclosure, the vector encodes an ALK protein. In some embodiments, the vector is the pTR600 expression vector (U.S. Patent Application Publication No. 2002/0106798; Ross et al., 2000, Nat Immunol. 1(2):102-103; and Green et al., 2001, Vaccine 20:242-248).

[0176] Unless specifically stated or obvious from context, as used herein, the term “or” is understood to be inclusive. Unless specifically stated or obvious from context, as used herein, the terms “a,” “an,” and “the” are understood to be singular or plural. Similarly, the word “or” is intended to include “and” unless the context clearly indicates otherwise. Hence “comprising A or B” means including A, or B, or A and B. It is further to be understood that all base sizes or amino acid sizes, and all molecular weight or molecular mass values, given for nucleic acids or polypeptides are approximate, and are provided for description.

[0177] Unless specifically stated or obvious from context, as used herein, the term “about” is understood as within a range of normal tolerance in the art, for example within 2 standard deviations of the mean. Unless otherwise clear from context, all numerical values provided herein are modified by the term about.

[0178] The recitation of a listing of chemical groups in any definition of a variable herein includes definitions of that variable as any single group or combination of listed groups. The recitation of some embodiments for a variable or aspect herein includes that embodiment as any single embodiment or in combination with any other embodiments or portions thereof.

[0179] Any compositions or methods provided herein can be combined with one or more of any of the other compositions and methods provided herein.

### BRIEF DESCRIPTION OF THE DRAWINGS

[0180] FIG. 1 provides the results of Fluorescence Activated Cell Sorting (FACs) analysis showing isolation of murine CD8+ T cells reactive against ALK. CD8⁺ T cells reactive against the ALK PGPGRVAKI (SEQ ID NO: 32985) peptide were identified and sorted for their binding to the PGPGRVAKI (SEQ ID NO: 32985) DEXTRAMER made with ALK PGPGRVAKI (SEQ ID NO: 32985) peptide bound to H-2D^{d} MHC-I molecules. In this figure, FSC is forward scatter, the x-axis is labeled in increments of 200, and the y-axis is labeled on a logarithmic base 10 scale. The plots provide a comparison between mice vaccinated with the PGPGRVAKI (SEQ ID NO: 32985) peptide (VAX) versus unvaccinated (Naïve) mice. Figure discloses “PGPGRVAKI” as SEQ ID NO: 32985.

[0181] FIG. 2 provides a series of graphs showing cloning of murine TCRs against ALK. The paired sequence of α and β chains were cloned into a retroviral vector and transduced into BW5147.3 cells. The efficiency of transduction was evaluated by analyzing CD3 and TCRβ chain expression by flow cytometry and the specificity of the TCRs was demonstrated by selective binding to the ALK PGPGRVAKI (SEQ ID NO: 32985) DEXTRAMER.

[0182] FIG. 3 provides a graph showing in vitro validation of murine ALK TCR-T cell lines 1-5. IFN-γ production by murine ALK TCR-T cell lines was evaluated with ELISA; supernatants were collected 24 hours after incubation of ALK TCR-T cells with BALB/c splenocytes pulsed with increasing concentrations of ALK PGPGRVAKI (SEQ ID NO: 32985) peptide. Figure discloses “PGPGRVAKI” as SEQ ID NO: 32985.

[0183] FIG. 4 provides a graph showing in vitro validation of murine ALK TCR-T cells. IL2 production by murine ALK TCR-T cells was evaluated with ELISA; supernatants were collected 24 hours after incubation of ALK TCR-T cells with BALB/c splenocytes that were pulsed with increasing concentrations of ALK PGPGRVAKI (SEQ ID NO: 32985) peptide. Figure discloses “PGPGRVAKI” as SEQ ID NO: 32985.

[0184] FIG. 5 provides graphs showing in vitro validation of murine ALK TCR-T cells. IL2 production by murine ALK TCR-T cells was evaluated using ELISA; supernatants were collected 24 hours after incubation of ALK TCR-T cells with murine H2-D^{d} lung cancer cell lines, including cell lines expressing human EML4-ALK, an ALK translocation, Effector: Target ratio 1:1. For each set of four bars in the bar graph, the first bar is ASB-XIV, the second bar is ASB-XIV^{Eml4-Alk}, the third bar is Eml4-Alk, and the fourth bar is Eml4-Alk^{PGPGRVAKI} (“PGPGRVAKI” disclosed as SEQ ID NO: 32985). The panel at the right describes the efficiency of transduction of the H2-D^{d} cancer cell lines with human EML4-ALK, which was evaluated by analyzing H2-D^{d} expression by flow cytometry. Figure discloses “PGPGRVAKI” as SEQ ID NO: 32985.

[0185] FIG. 6 provides graphs showing in vitro validation of murine ALK-specific TCR-T cells. IL2 production by murine ALK-specific TCR-T cells was evaluated with ELISA; supernatants were collected 24 h after incubation of ALK-specific TCR-T cells with lymphoma H2-D^{d} lung cancer cell lines, E:T ratio 1:1. For each pair of bars in the bar graph, the left bar is Npm-Alk-1, and the right bar is Npm-Alk-2. The panel at the right describes the efficiency of transduction of the H2-D^{d} cancer cell lines with Npm-Alk-1 or Npm-Alk-2, which was evaluated by analyzing H2-D^{d} expression by flow cytometry.

[0186] FIG. 7 provides a bar graph showing murine ALK-specific TCR expression in primary murine CD8⁺ T cells. The percentage of expression of the murine ALK-specific TCR on the surface of primary murine CD8⁺ T cells was calculated two days after retroviral infection by dividing the number of cells binding an ALK MHC-I multimer optimized to accommodate multiple binding sites and numerous fluorophores to boost avidity in bind antigen-specific CD8+ T cells by the number of infected cells (GFP-positive cells). The Multimer is commercially available (Dextramer® reagent, Immudex).

[0187] FIG. 8 provides a bar graph showing Mean Fluorescence Intensity (MFI) of the ALK Dextramer®. The MFI of the ALK Dextramer® in primary murine CD8⁺ T cells was calculated 2 days after transduction with the ALK TCR.

[0188] FIG. 9 provides a bar graph showing in vitro evaluation of murine ALK-specific TCR-T cells killing activity. Murine ALK-specific TCR-T cell killing activity was evaluated by measuring the residual bioluminescence of luciferase-positive (FFUC⁺) lung tumor cells 3 days post-coculture (E:T ratio 1:1). Figure discloses “PGPGRVAKI” as SEQ ID NO: 32985.

[0189] FIG. 10 provides a series of plots showing the expression of IFN-γ and TNF-α, detected by intracellular staining, in a first cohort of HLA-B*0) 7:02 mice vaccinated with RPRPSQPSSL (SEQ ID NO: 32957) peptide. Peripheral blood of one naïve mouse and of HLA-B*07:02 mice vaccinated with the RPRPSQPSSL (SEQ ID NO: 32957) peptide was collected 7 days after the first vaccination boost and T cells were pulsed overnight with the RPRPSQPSSL (SEQ ID NO: 32957) peptide and with a mock peptide. Data shown are gated on CD8 T cells. Figure discloses “RPRPSQPSSL” as SEQ ID NO: 32957.

[0190] FIG. 11 provides a series of plots showing the expression of IFN-γ and TNF-α, detected by intracellular staining, in a first cohort of HLA-B*0) 7:02 mice vaccinated with IVRCIGVSL (SEQ ID NO: 32958) peptide. Peripheral blood of one naïve mouse and of HLA-B*07:02 mice vaccinated with IVRCIGVSL (SEQ ID NO: 32958) peptide was collected 7 days after the first vaccination boost and T cells were pulsed overnight with the IVRCIGVSL (SEQ ID NO: 32958) peptide and with a mock peptide. Data shown are gated on CD8 T cells. Figure discloses “IVRCIGVSL” as SEQ ID NO: 32958.

[0191] FIG. 12 provides a series of plots showing the expression of IFN-γ and TNF-α, detected by intracellular staining, in a second cohort of HLA-B*07:02 mice vaccinated with RPRPSQPSSL (SEQ ID NO: 32957) peptide. Peripheral blood of one naïve mouse and of HLA-B*0) 7:02 mice vaccinated with the RPRPSQPSSL (SEQ ID NO: 32957) peptide was collected 7 days after the first vaccination boost and T cells were pulsed overnight with the RPRPSQPSSL (SEQ ID NO: 32957) peptide and with a mock peptide. Data shown are gated on CD8⁺ T cells. Figure discloses “RPRPSQPSSL” as SEQ ID NO: 32957.

[0192] FIG. 13 provides a series of plots showing the expression of IFN-γ and TNF-α, detected by intracellular staining, in a second cohort of HLA-B*07:02 mice vaccinated with IVRCIGVSL (SEQ ID NO: 32958) peptide. Peripheral blood of one naïve mouse and of HLA-B*07:02 mice vaccinated with IVRCIGVSL (SEQ ID NO: 32958) peptide was collected 7 days after the first vaccination boost and T cells were pulsed overnight with the IVRCIGVSL (SEQ ID NO: 32958) peptide and with a mock peptide. Data shown are gated on CD8 T cells. Figure discloses “IVRCIGVSL” as SEQ ID NO: 32958.

[0193] FIG. 14 provides plots showing the isolation of CD8⁺ T cells reactive against RPRPSQPSSL (SEQ ID NO: 32957) peptide in a first cohort. Splenocytes and inguinal lymph-node cells of a HLA-B*07:02 naïve control mouse and of one HLA-B*0) 7:02 mouse vaccinated with RPRPSQPSSL (SEQ ID NO: 32957) peptide were collected 7 days after the last vaccination booster and incubated overnight with the RPRPSQPSSL (SEQ ID NO: 32957) peptide. Twelve hours after, untouched CD8⁺ T cells were purified and CD8⁺/CD137 (4-1BB)⁺ T cells were sorted and subjected to single cell sequencing. Figure discloses “RPRPSQPSSL” as 30) SEQ ID NO: 32957.

[0194] FIG. 15 provides plots showing the isolation of CD8+ T cells reactive against RPRPSQPSSL (SEQ ID NO: 32957) peptide in a first cohort. Splenocytes and inguinal lymph-node cells of a HLA-B*07:02 naïve control mouse and of three HLA-B*07:02 mice vaccinated with RPRPSQPSSL (SEQ ID NO: 32957) peptide were collected 7 days after the last vaccination booster and incubated overnight with the RPRPSQPSSL (SEQ ID NO: 32957) peptide. Twelve hours after, untouched CD8⁺ T cells were purified and CD8⁺/CD137(4-1BB)⁺ T cells were sorted and subjected to single cell sequencing. Figure discloses “RPRPSQPSSL” as SEQ ID NO: 32957.

[0195] FIG. 16 provides plots showing the isolation of CD8 T cells reactive against IVRCIGVSL (SEQ ID NO: 32958) peptide in a first cohort. Splenocytes and inguinal lymph-node cells of a HLA-B*07:02 naïve control mouse and of three HLA-B*07:02 mice vaccinated with IVRCIGVSL (SEQ ID NO: 32958) peptide were collected 7 days after the last vaccination booster and incubated overnight with the IVRCIGVSL (SEQ ID NO: 32958) peptide. Twelve hours after, untouched CD8 T cells were purified and CD8⁺/CD137(4-1BB)⁺ T cells were sorted and subjected to single cell sequencing. Figure discloses “IVRCIGVSL” as SEQ ID NO: 32958.

[0196] FIG. 17 provides FACS analyses showing the isolation of CD8⁺ T cells reactive against RPRPSQPSSL (SEQ ID NO: 32957) peptide in a second cohort. Splenocytes and inguinal lymph-node cells of a HLA-B*07:02 naïve control mouse and of a HLA-B*07:02 moused vaccinated with RPRPSQPSSL (SEQ ID NO: 32957) peptide were collected 7 days after the last vaccination booster and incubated overnight with the RPRPSQPSSL (SEQ ID NO: 32957) peptide. Twelve hours after, untouched CD8⁺ T cells were purified and CD8⁺/CD137(4-1BB)⁺ T cells were sorted and subjected to single cell sequencing. Figure discloses “RPRPSQPSSL” as SEQ ID NO: 32957.

[0197] FIG. 18 provides FACS analyses showing the isolation of CD8⁺ T cells reactive against IVRCIGVSL (SEQ ID NO: 32958) peptide in a second cohort. Splenocytes and inguinal lymph-node cells of a HLA-B*07:02 naïve control mouse and of four HLA-B*07:02 mice vaccinated with IVRCIGVSL (SEQ ID NO: 32958) peptide were collected 7 days after the last vaccination booster and incubated overnight with the IVRCIGVSL (SEQ ID NO: 32958) peptide. Twelve hours after, untouched CD8⁺ T cells were purified and CD8⁺/CD137(4-1BB)⁺ T cells were sorted and subjected to single cell sequencing. Figure discloses “IVRCIGVSL” as SEQ ID NO: 32958.

[0198] FIG. 19 provides a bar chart showing the relative frequency of the expanded TCR clonotypes identified from the first and the second cohorts of HLA*B07:02 mice vaccinated with RPRPSQPSSL (SEQ ID NO: 32957) peptide. TCR clonotypes were classified as expanded if their Variable-Diversity Joining rearrangement (VDJ) count was ≥4; TCR clonotypes were classified as not expanded if their VDJ count was <4. Figure discloses “RPRPSQPSSL” as SEQ ID NO: 32957.

[0199] FIG. 20 provides a bar chart showing the relative frequency of the expanded TCR clonotypes identified from the first and the second cohorts of HLA*B07:02 mice vaccinated with IVRCIGVSL (SEQ ID NO: 32958) peptide. TCR clonotypes were classified as expanded if their VDJ count was ≥4; TCR clonotypes were classified as not expanded if their VDJ count was <4. Figure discloses “IVRCIGVSL” as SEQ ID NO: 32958.

[0200] FIG. 21 provides a volcano plot showing differentially expressed genes between expanded (VDJ count≥4) and not expanded (VDJ count≤4) ALK-specific TCR clonotypes in one HLA-B*0) 7:02 mouse from a first cohort vaccinated with RPRPSQPSSL (SEQ ID NO: 32957). Right of right dotted line=upregulated genes (LFG>1.5), Left of left dotted line=downregulated genes (LFG<−1.5), Between the dotted lines=unchanged genes (p<0.05).

[0201] FIG. 22 provides a volcano plot showing differentially expressed genes between expanded (VDJ count≥4) and not expanded (VDJ count≤4) ALK-specific TCR clonotypes in three HLA-B*0) 7:02 mice from a first cohort vaccinated with RPRPSQPSSL (SEQ ID NO: 32957). Right of right dotted line=upregulated genes (LFG>1.5), Left of left dotted line=downregulated genes (LFG<−1.5), Between the dotted lines=unchanged genes (p<0.05).

[0202] FIG. 23 provides a volcano plot showing differentially expressed genes between expanded (VDJ count≥4) and not expanded (VDJ count≤4) ALK-specific TCR clonotypes in three HLA-B*07:02 mice from a first cohort vaccinated with IVRCIGVSL (SEQ ID NO: 32958). Right of right dotted line=upregulated genes (LFG>1.5), Left of left dotted line=downregulated genes (LFG<−1.5), Between the dotted lines=unchanged genes (p<0.05).

[0203] FIG. 24 provides a bubble plot showing pathways from Gene Set Enrichment Analysis (GSEA) that are enriched in expanded versus non-expanded ALK-specific TCR clonotypes sequenced from one HLA*B07:02 mouse from a first cohort vaccinated with RPRPSQPSSL (SEQ ID NO: 32957).

[0204] FIG. 25 provides a bubble plot showing pathways from Gene Set Enrichment Analysis (GSEA) that are enriched in expanded versus non-expanded ALK-specific TCR clonotypes sequenced from three HLA*B07:02 mice from a first cohort vaccinated with RPRPSQPSSL (SEQ ID NO: 32957).

[0205] FIG. 26 provides a bar graphs showing the percentage of infection of human ALK TCR-T cells (Cβ1) in CD8⁺ T and cells CD4⁺ T of two healthy donors. Untouched CD3⁺ T cells were purified from the Peripheral Blood Mononuclear Cells (PBMCs) of two healthy donors and activated in vitro with anti-CD3 anti-CD28 beads for 2 days before retroviral transduction with the ALK TCR constructs (Cβ1). The percentage of infection was calculated by evaluating GFP expression 3 days post-infection. Data shown are mean±SEM.

[0206] FIG. 27 provides a bar graph showing the percentage of infection of human ALK TCR-T cells (Cβ1 and Cβ2) in CD8⁺ T and cells CD4⁺ T cells of one healthy donor. Untouched CD3⁺ T cells were purified from the Peripheral Blood Mononuclear Cells (PBMCs) of one healthy donor and activated in vitro with anti-CD3 anti-CD28 beads for 2 days before retroviral transduction with the ALK TCR constructs (Cβ1 and Cβ2). The percentage of infection was calculated by evaluating GFP expression 3 days post-infection.

[0207] FIG. 28 provides a bar graph showing human ALK TCR-T expression (Cβ1) in CD8⁺ T and cells CD4⁺ T cells of two healthy donors. The expression of the ALK TCR-T cells on the surface of CD8⁺ T and cells CD4⁺ T cells of two healthy donors was calculated by evaluating the expression of murine TCRβ three days post-infection. Data shown are mean±SEM.

[0208] FIG. 29 provides a bar graph showing human ALK TCR-T expression (Cβ1 and Cβ2) in CD8⁺ T cells of one healthy donor. The expression of the ALK TCR-T cells on the CD8⁺ T cell surface of one healthy donor was calculated by evaluating the expression of murine TCRβ three days post-infection.

[0209] FIG. 30 provides a bar graph showing murine TCRβ mean fluoresce intensity (MFI). The MFI of murine TCRβ was calculated in both CD8⁺ T cells and CD4⁺ T cells of two healthy donors transduced with the human ALK TCR-T cells (Cβ1).

[0210] FIG. 31 provides a bar graph showing Dextramer® mean fluoresce intensity (MFI). The MFI of the ALK dextramer was evaluated in both CD8⁺ and CD4+ T cells of two healthy donors transduced with the human ALK TCR-T cells (Cβ1).

[0211] FIG. 32 provides a bar graph showing murine TCRβ and ALK Dextramer® mean fluorescence intensity (MFI). The MFI of the murine TCRβ was calculated in CD8⁺ T cells of one healthy donor transduced with the human ALK TCR-T cell (Cβ1 and Cβ2); the MFI of the ALK dextramer was evaluated in both CD8⁺ and CD4⁺ T cells of the same healthy donor transduced with the human ALK TCR-T cell (Cβ1 and Cβ2).

[0212] FIG. 33 provides a series of graphs showing a summary of human ALK TCR-T cells (Cβ1) percentage of infection, murine TCRβ expression, and Dextramer® binding in CD8⁺ T cells of one healthy donor.

[0213] FIG. 34 provides a series of graphs showing a summary of human ALK TCR-T cells (Cβ1) percentage of infection, murine TCRβ expression, and Dextramer® binding among CD4⁺ T cells of one healthy donor.

[0214] FIG. 35 provides a series of graphs showing a summary of human ALK TCR-T cells (Cβ1) percentage of infection, murine TCRβ expression, and Dextramer® binding among CD8⁺ T cells of healthy donor 2.

[0215] FIG. 36 provides a series of graphs showing a summary of human ALK TCR-T cells (Cβ1) percentage of infection, murine TCRβ expression, and dextramer binding among CD4⁺ T cells of healthy donor 2.

[0216] FIG. 37 provides a series of graphs showing a summary of human ALK TCR-T cells (Cβ2) percentage of infection, murine TCRβ expression, and dextramer binding among CD8⁺ T cells of healthy donor 1.

[0217] FIG. 38 provides a series of graphs showing a summary of human ALK TCR-T cells (Cβ1 and Cβ2) percentage of infection, murine TCRβ expression, and dextramer binding among CD8⁺ T cells of healthy donor 1.

[0218] FIG. 39 provides a series of graphs showing a summary of human ALK TCR-T cells (Cβ2) percentage of infection, murine TCRβ expression, and dextramer binding among CD4⁺ T cells of healthy donor 1.

[0219] FIG. 40 provides a series of graphs showing a summary of human ALK TCR-T cells (Cβ2) percentage of infection, murine TCRβ expression, and dextramer binding among CD4⁺ T cells of healthy donor 1.

[0220] FIG. 41 provides a series of graphs showing HLA*B07 expression in the human tumor cell lines NCI H2228, NCI H3122, NCI H226, Karpas 299, and JB6.

[0221] FIG. 42 provides bar graphs showing an in vitro evaluation of the human ALK TCR-T cells (Cβ1) killing activity. Human ALK TCR-T cells (Cβ1) killing activity was evaluated by measuring the residual bioluminescence of luciferase-positive (FFUC⁺) tumor cells NCI H2228, NCI H3122, NCI H226, and CaSki 3 days post-coculture (E:T ratio 1:1). Figure discloses “RPRPSQPSSL” as SEQ ID NO: 32957.

[0222] FIG. 43 provides bar graphs showing an in vitro evaluation of human ALK TCR-T cells (Cβ1) killing activity. Human ALK TCR-T cells (Cβ1) killing activity was evaluated by measuring the residual bioluminescence of luciferase-positive (FFUC⁺) tumor cells NCI H2228, NCI H3122, NCI H226, and CaSki 5 days post-coculture (E:T ratio 1:1). Figure discloses “RPRPSQPSSL” as SEQ ID NO: 32957.

[0223] FIG. 44 provides bar graphs showing an in vitro evaluation of human ALK TCR-T cells (Cβ1) killing activity. Human ALK TCR-T cells (Cβ1) killing activity was evaluated by measuring the residual bioluminescence of luciferase-positive (FFUC⁺) tumor cells Karpas 299 and JB6 3 and 5 days post-coculture (E:T ratio 1:1). Figure discloses “RPRPSQPSSL” as SEQ ID NO: 32957.

[0224] FIG. 45 provides bar graphs showing an in vitro evaluation of human ALK TCR-T cells (Cβ2) killing activity. Human ALK TCR-T cells (Cβ2) killing activity was evaluated by measuring the residual bioluminescence of luciferase-positive (FFUC⁺) tumor cells NCI H2228, NCI H3122, NCI H226, and CaSki 1 day post-coculture (E:T ratio 1:1). Figure discloses “RPRPSQPSSL” as SEQ ID NO: 32957.

[0225] FIG. 46 provides a bar graph showing an in vitro evaluation of human ALK TCR-T cells (Cβ2) killing activity. Human ALK TCR-T cells (Cβ2) killing activity was evaluated by measuring the residual bioluminescence of luciferase-positive (FFUC⁺) tumor cells Karpas 299 and JB6 1 day post-coculture (E:T ratio 1:1). Figure discloses “RPRPSQPSSL” as SEQ ID NO: 32957.

[0226] FIG. 47 provides bar graphs showing an in vitro evaluation of human ALK TCR-T cells (Cβ2) killing activity. Human ALK TCR-T cells (Cβ2) killing activity was evaluated by measuring the residual bioluminescence of luciferase-positive (FFUC⁺) tumor cells NCI H2228, NCI H3122, NCI H226, and CaSki 2 days post-coculture (E:T ratio 1:1). Figure discloses “RPRPSQPSSL” as SEQ ID NO: 32957.

[0227] FIG. 48 provides a bar graph showing an in vitro evaluation of human ALK TCR-T cells (Cβ2) killing activity. Human ALK TCR-T cells (Cβ2) killing activity was evaluated by measuring the residual bioluminescence of luciferase-positive (FFUC⁺) tumor cells Karpas 299 and JB6 2 days post-coculture (E:T ratio 1:1). Figure discloses “RPRPSQPSSL” as SEQ ID NO: 32957.

[0228] FIG. 49 provides bar graphs showing an in vitro evaluation of human ALK TCR-T cells (Cβ2) killing activity. Human ALK TCR-T cells (Cβ2) killing activity was evaluated by measuring the residual bioluminescence of luciferase-positive (FFUC⁺) tumor cells NCI H2228, NCI H3122, NCI H226, and CaSki 3 days post-coculture (E:T ratio 1:1). Figure discloses “RPRPSQPSSL” as SEQ ID NO: 32957.

[0229] FIG. 50 provides a bar graph showing an in vitro evaluation of human ALK TCR-T cells (Cβ2) killing activity. Human ALK TCR-T cells (Cβ2) killing activity was evaluated by measuring the residual bioluminescence of luciferase-positive (FFUC⁺) tumor cells Karpas 299 and JB6 3 days post-coculture (E:T ratio 1:1). Figure discloses “RPRPSQPSSL” as SEQ ID NO: 32957.

[0230] FIG. 51 provides bar graphs showing an in vitro evaluation of human ALK TCR-T cells (Cβ2) killing activity. Human ALK TCR-T cells (Cβ2) killing activity was evaluated by measuring the residual bioluminescence of luciferase-positive (FFUC⁺) tumor cells NCI H2228, NCI H3122, NCI H226, and CaSki 5 days post-coculture (E:T ratio 1:1). Figure discloses “RPRPSQPSSL” as SEQ ID NO: 32957.

[0231] FIG. 52 provides a bar graph showing an in vitro evaluation of human ALK TCR-T cells (Cβ2) killing activity. Human ALK TCR-T cells (Cβ2) killing activity was evaluated by measuring the residual bioluminescence of luciferase-positive (FFUC⁺) tumor cells Karpas 299 and JB6 3 days post-coculture (E:T ratio 1:1). Figure discloses “RPRPSQPSSL” as SEQ ID NO: 32957.

[0232] FIG. 53 provides an illustration showing a schematic workflow of ALK-specific TCRs isolation from HLA-A*02:01 and HLA-B*07:02 Peripheral Blood MonoCytes (PBMCs) of healthy donors.

[0233] FIG. 54 provides a series of plots showing the identification of CD8⁺ T cells reactive against RPRPSQPSSL (SEQ ID NO: 32957) peptide from Peripheral Blood MonoCytes (PBMCs) of an HLA-B*07:02 healthy donor. CD8⁺ T cells reactive against RPRPSQPSSL (SEQ ID NO: 32957) peptide were identified by staining with two RPRPSQPSSL (SEQ ID NO: 32957) DEXTRAMERS 10 days after stimulation of naïve CD8⁺ T cells with irradiated autologous mature dentritic cells (DCs) in presence of IL2, IL7, IL15 and RPRPSQPSSL (SEQ ID NO: 32957) peptide. Figure discloses “RPRPSQPSSL” as SEQ ID NO: 32957.

### DETAILED DESCRIPTION OF THE INVENTION

[0234] The disclosure features compositions and methods that are useful for treating anaplastic lymphoma kinase (ALK) neoplasias.

[0235] The invention is based, at least in part, upon the discovery that T cell receptors (TCRs) expressed as heterologous proteins in an immune effector cell specifically recognize ALK sequences presented by major histocompatibility complexes (MHCs) or human leukocyte antigens (HLAs) and were effective in targeting ALK positive tumor cells. In particular, TCRs of the present disclosure, when transduced into T cells, transformed such T cells, particularly CD8⁺ T cells, into T cells capable of specifically, selectively and strongly recognizing ALK positive tumor cells becoming effective killers of ALK positive tumor cells.

[0236] Provided herein are also multiple methods of producing engineered TCRs specific to ALK peptide sequences presented by MHCs or HLAs. Such methods include, but are not limited to, isolation of ALK specific TCRs from one or more of the following sources: 1) transgenic mice expressing humanized MHCs and injected with specific ALK peptide sequences; 2) peripheral blood of subjects having ALK positive tumors; and/or 3) tumor infiltrating lymphocytes (TILs) of subjects having ALK positive tumors. Not intending to be bound by theory, the data provided herein pave the way for the development of engineered TCRs specific to ALK peptide sequences for use in treating ALK positive tumors.

### T Cell Receptors

[0237] The TCR evolved to detect subtle changes in cellular proteins that can include viral peptides or mutated oncogenic proteins. Thus, TCR-based agents can be directed to the vast majority of truly tumor-specific antigens. Peptides derived from proteins of any subcellular location are presented on the cell surface in the context of major histocompatibility complexes (MHC), known as human leukocyte antigens (HLA) when referring to human MHC, where they are recognized by T cells through their TCRs. TCR-based therapies are able to recognize and react to cells expressing these mutated or differentially expressed, cancer-associated proteins presented on MHC. The exploitation of this powerful modality to treat cancer and possibly other serious diseases. Numerous approaches have been employed to generate a more potent anti-tumor T cell response. Tumor-reactive T cells expressing native TCRs can be stimulated in vivo through administration of vaccines, checkpoint blockade inhibitors, or cytokines. Alternatively, reactive T cells can be expanded ex vivo and reinfused for adoptive cell therapy

[0238] Several biomarkers, including PD-1, 4-1BB and cytokine production, such as of IFNγ, indicate the T cell has interacted with its cognate antigen and can be used to isolate T cells. Not all T cells that are multimer positive, and therefore peptide-MHC specific, are able to exert cytotoxic effects against tumor cells expressing tumor antigens. Conversely, multimer staining may not detect all antigen-reactive T cells. This may be due to decreased TCR surface density or expression of TCRs with low affinity. Multimer staining can be enhanced to detect low-affinity TCRs by staining with multimers with more peptide-MHC sites, i.e. tetramers, dextramers or dodecamers.

[0239] T cell receptor therapies include the heterologous expression of T-cell receptors, as well as the expression of soluble anti-ALK T Cell receptors, soluble anti-ALK antibodies, or soluble anti-ALK bispecific or drug conjugate antibodies, all of which recognize ALK peptides in the context of HLAs.

### TCR Heterologous Expression

[0240] Individual reactive TCRs can be sequenced and subsequently expressed exogenously in T cells prior to reinfusion. Isolated individual reactive TCRs can be transduced and expressed into other T cells, known as TCR-T cells, to broaden therapy to additional patients. Immunization of mice expressing human HLA molecules or mice expressing the human TCR repertoire can be used for immunization and isolation of high affinity TCRs. High affinity human TCRs with increased activity also can be isolated when human T cells are stimulated ex vivo with tumor antigens on HLA mismatched antigen presenting cells.

### ALK Positive Neoplasias

[0241] Lung cancer is the most common cause of cancer-related death worldwide, and the annual incidence of anaplastic lymphoma kinase (ALK) expressing non-small cell lung cancer (NSCLC) in the U.S. is about 8,000 cases. In these patients, treatment with ALK tyrosine kinase inhibitors (TKIs) fails to induce durable remissions. In this context, a successful engineered TCR based treatment could lead to durable responses and greatly improve survival and quality of life for NSCLC patients. ALK represents an attractive target because of its oncogenicity, its immunogenicity, and its restricted expression to tumor tissue rather than healthy adult tissue. Importantly, use of therapeutic compositions including engineered TCRs could potentially be extended to many other cancer types which are driven by ALK rearrangements or activating mutations (i.e., ALK-positive cancers), such as anaplastic large cell lymphoma (ALCL), neuroblastoma, B-cell lymphoma, thyroid cancer, colon cancer, breast cancer, inflammatory myofibroblastic tumors (IMT), renal carcinoma, esophageal cancer, glioma, glioblastoma, and melanoma. Therefore, the engineered TCRs described can more effectively treat patients diagnosed with ALK-positive tumors.

[0242] As described below, the present invention features engineered TCRs which specifically recognize ALK peptide sequences presented by MHCs or HLAs, derived from ALK-positive cell lines and immune cells from patients with ALK-positive cancers. Such immunogenic antigens are also referred to as “immunogens” herein. The ALK-specific immunogenic antigens elicit a potent immune response, e.g., in the form of reactive T-lymphocytes, following administration or delivery to, or introduction into, a subject, particularly, a human subject. The engineered TCRs may be used in methods to treat and/or reduce disease caused by oncogenic ALK gene fusions, rearrangements, duplications, or mutations.

[0243] The immunogenic ALK antigens described herein may be used in immunogenic compositions (e.g., ALK-specific vaccines) that treat ALK-positive cancers caused by oncogenic ALK gene fusions, rearrangements, duplications, or mutations in a subject, particularly a human subject, to whom the immunogenic composition or vaccine, is administered. The vaccine elicits a potent ALK protein-specific T cell response that treats and/or protects against ALK-positive cancers in a subject. The antigens, immunogens, immunogenic compositions and vaccines, and pharmaceutical compositions thereof, of the invention provide an additional treatment option for patients that have either become resistant to or have failed to respond to prior and traditional therapies for ALK-positive cancers.

### Heterologous T Cell Receptors (TCRs)

[0244] The present disclosure features the isolation, identification, and recombinant expression of T cell receptors (TCRs) having specificity to ALK antigens or peptide sequences presented by major histocompatibility complexes (MHCs) and/or human leukocyte antigens (HLAs) in immune effector cells. In some embodiments, the TCRs of the present invention are used to effectively treat a disease and its symptoms, either prophylactically or therapeutically, caused by oncogenic ALK gene fusions, rearrangements, duplications, or mutations (e.g., ALK-positive cancers or tumors) following administration and delivery to a susceptible subject. The disclosure provides pharmaceutical compositions comprising a vector encoding the TCRs, as well as cells expressing the heterologous TCRs.

[0245] In some embodiments, the TCRs are able to recognize at least one, more than one, or all types of ALK-positive cancers. In some embodiments, when the TCRs provided herein are expressed by an immune cell (e.g., a CD8+ T cell), the immune cells expressing the TCRs (i.e., engineered immune cells) are capable of killing or inhibiting the growth of ALK positive cancers or tumors.

[0246] The present invention also provides the specific complementarity determining regions (CDRs) which allow the TCRs to specifically recognize and/or bind to ALK antigens or peptide sequences presented by major histocompatibility complexes (MHCs) and/or human leukocyte antigens (HLAs). Without intending to be bound by theory, since CDRs are found throughout the immunoglobulin superfamily, proteins, peptides, and fragments thereof incorporating the provided CDRs are also provided by the present invention (e.g., polypeptides such as antibodies incorporating the CDR sequences provided herein). In some embodiments, the TCRs or polypeptides of the present disclosure include one or more of the CDR sequences listed in Tables 2 or 3 provided herein.

[0247] In embodiments, the TCRs provided herein may be humanized or non-humanized. Humanized TCRs are TCRs in which at least part of the sequence has been altered from its initial form to render it more like human TCRs. In embodiments, the TCRs are non-humanized. Without intending to be bound by theory, non-humanized heterologous TCRs do not pair with endogenous TCRs in a transduced T cell, and accordingly the use of non-humanized TCRs may have the advantage of preventing endogenous TCR/heterologous TCR mismatch pairings.

[0248] In some embodiments, the disease caused by oncogenic ALK gene fusions, rearrangements, duplications, or mutations is an ALK-positive cancer. Nonlimiting examples of ALK-positive cancers include non-small cell lung cancer (NSCLC), anaplastic large cell lymphoma (ALCL), neuroblastoma, B-cell lymphoma, thyroid cancer, colon cancer, breast cancer, inflammatory myofibroblastic tumors (IMT), renal carcinoma, esophageal cancer, glioma, glioblastoma, melanoma, or a combination thereof. In some embodiments, the ALK-positive cancer is non-small cell lung cancer (NSCLC). In some embodiments, the ALK-positive cancer is anaplastic large cell lymphoma (ALCL).

### ALK Antigens and Immunogens

[0249] The present invention provides herein ALK antigens and peptide sequences recognizable by the TCRs of the present invention. In some embodiments, such ALK antigens represent oncogenic ALK gene fusions, rearrangements, duplications, or mutations (e.g., ALK-positive cancers). An ALK antigen or peptide sequence as described herein is a polypeptide, peptide, or antigen receptor-binding portion thereof. In some embodiments, the ALK antigen or peptide sequence is an ALK polypeptide or fragment thereof.

[0250] In some embodiments, the ALK antigen or peptide amino acid sequence comprises an amino acid sequence that is at least 80%, at least 85%, at least 90%, at least 95%, at least 98%, at least 99%, or 100% identical to any of the following amino acid sequences: RPRPSQPSSL (SEQ ID NO: 32957); IVRCIGVSL (SEQ ID NO: 32958); VPRKNITLI (SEQ ID NO: 32959); TAAEVSVRV (SEQ ID NO: 32960); AMLDLLHVA (SEQ ID NO: 32961); GGDLKSFLRETRPRPSQPSSLAMLDLLHVA (SEQ ID NO: 32962); FNHQNIVRCIGVSL (SEQ ID NO: 32963); and/or GGDLKSFLRETRPRPSQPSSLAM (SEQ ID NO: 32964). In some embodiments, the ALK antigen or peptide comprises an amino acid sequence that is at least 90%, at least 95%, at least 98%, at least 99%, or 100% identical to: RPRPSQPSSL (SEQ ID NO: 32957). In some embodiments, the ALK antigen or peptide comprises an amino acid sequence that is at least 90%, at least 95%, at least 98%, at least 99%, or 100% identical to: IVRCIGVSL (SEQ ID NO: 32958). In some embodiments, the ALK antigen or peptide comprises an amino acid sequence that is at least 90%, at least 95%, at least 98%, at least 99%, or 100% identical to: VPRKNITLI (SEQ ID NO: 32959). In some embodiments, the ALK antigen or peptide comprises an amino acid sequence that is at least 90%, at least 95%, at least 98%, at least 99%, or 100% identical to: TAAEVSVRV (SEQ ID NO: 32960). In some embodiments, the ALK antigen or peptide comprises an amino acid sequence that is at least 90%, at least 95%, at least 98%, at least 99%, or 100% identical to: AMLDLLHVA (SEQ ID NO: 32961). In some embodiments, the ALK antigen or peptide comprises an amino acid sequence that is at least 80%, at least 85%, at least 90%, at least 95%, at least 98%, at least 99%, or 100% identical to: GGDLKSFLRETRPRPSQPSSLAMLDLLHVA (SEQ ID NO: 32962). In some embodiments, the ALK antigen or peptide comprises an amino acid sequence that is at least 90%, at least 95%, at least 98%, at least 99%, or 100% identical to: FNHQNIVRCIGVSL (SEQ ID NO: 32963). In some embodiments, the ALK antigen or peptide comprises an amino acid sequence that is at least 80%, at least 85%, at least 90%, at least 95%, at least 98%, at least 99%, or 100% identical to: GGDLKSFLRETRPRPSQPSSLAM (SEQ ID NO: 32964).

[0251] In some embodiments, the ALK antigen or peptide is conjugated to an amphiphile or amphiphilic tail. In some embodiments, the amphiphile is N-hydroxy succinimidyl ester-end-functionalized poly(ethylene glycol)-lipid (NHS-PEG2KDa-DSPE). ALK amph-peptides may significantly increase T-cell expansion and greatly enhance anti-tumor efficacy. ALK amph-peptides may be generated as taught in H. Liu et al., Structure-based programming of lymph-node targeting in molecular vaccines. Nature 507, 5199522 (2014), which is incorporated herein in its entirety.

[0252] In some embodiments, the ALK antigen or peptide, optionally conjugated to an amphiphile or amphiphilic tail, comprises an amino acid sequence selected from the following amino acid sequences: RPRPSQPSSL (SEQ ID NO: 32957); IVRCIGVSL (SEQ ID NO: 32958); VPRKNITLI (SEQ ID NO: 32959); TAAEVSVRV (SEQ ID NO: 32960); AMLDLLHVA (SEQ ID NO: 32961); GGDLKSFLRETRPRPSQPSSLAMLDLLHVA (SEQ ID NO: 32962); FNHQNIVRCIGVSL (SEQ ID NO: 32963); and/or GGDLKSFLRETRPRPSQPSSLAM (SEQ ID NO: 32964).

[0253] In some embodiments, the ALK antigen or peptide, optionally conjugated to an amphiphile or amphiphilic tail, comprises flanking amino acid sequences. In some embodiments, the flanking amino acid sequences are on either side or on both sides of the ALK antigen or peptide sequence. In some embodiments, the ALK antigen or peptide sequence is a central core amino acid sequence with flanking amino acid sequences on both sides of the core. In some embodiments, the core amino acid sequence is about 9 to 10 amino acids in length. In some embodiments, the flanking amino acid sequences are between 5 to 15 amino acids. In some embodiments, the ALK antigen or peptide conjugated to an amphiphile or amphiphilic tail comprises an amino acid sequence that is about 9 to about 30 amino acids in length.

[0254] In some embodiments, the ALK antigen or peptide is a polynucleotide molecule. In some embodiments, the ALK antigen or peptide has a polynucleotide sequence that encodes a polypeptide or peptide antigen or fragment thereof as described herein.

[0255] In some embodiments, ALK polynucleotide sequences encode ALK antigen or peptide amino acid sequences that are at least 90%, 95%, at least 98%, at least 99%, or 100% identical to any of the following amino acid sequences: RPRPSQPSSL (SEQ ID NO: 32957); IVRCIGVSL (SEQ ID NO: 32958); VPRKNITLI (SEQ ID NO: 32959); TAAEVSVRV (SEQ ID NO: 32960); AMLDLLHVA (SEQ ID NO: 32961); GGDLKSFLRETRPRPSQPSSLAMLDLLHVA (SEQ ID NO: 32962); FNHQNIVRCIGVSL (SEQ ID NO: 32963); and/or GGDLKSFLRETRPRPSQPSSLAM (SEQ ID NO: 32964). In some embodiments, the ALK polynucleotide sequence encodes the ALK antigen or peptide amino acid sequence that is at least 90%, at least 95%, at least 98%, at least 99%, or 100% identical to: RPRPSQPSSL (SEQ ID NO: 32957). In some embodiments, the ALK polynucleotide sequence encodes the ALK antigen or peptide amino acid sequence that is at least 90%, at least 95%, at least 98%, at least 99%, or 100% identical to: IVRCIGVSL (SEQ ID NO: 32958). In some embodiments, the ALK polynucleotide sequence encodes the ALK antigen or peptide amino acid sequence that is at least 90%, at least 95%, at least 98%, at least 99%, or 100% identical to: VPRKNITLI (SEQ ID NO: 32959). In some embodiments, the ALK polynucleotide sequence encodes the ALK antigen or peptide amino acid sequence that is at least 90%, at least 95%, at least 98%, at least 99%, or 100% identical to: TAAEVSVRV (SEQ ID NO: 32960). In some embodiments, the ALK polynucleotide sequence encodes the ALK antigen or peptide amino acid sequence that is at least 90%, at least 95%, at least 98%, at least 99%, or 100% identical to: AMLDLLHVA (SEQ ID NO: 32961). In some embodiments, the ALK polynucleotide sequence encodes the ALK antigen or peptide amino acid sequence that is at least 90%, at least 95%, at least 98%, at least 99%, or 100% identical to: GGDLKSFLRETRPRPSQPSSLAMLDLLHVA (SEQ ID NO: 32962). In some embodiments, the ALK polynucleotide sequence encodes the ALK antigen or peptide amino acid sequence that is at least 90%, at least 95%, at least 98%, at least 99%, or 100% identical to: FNHQNIVRCIGVSL (SEQ ID NO: 32963). In some embodiments, the ALK polynucleotide sequence encodes the ALK antigen or peptide amino acid sequence that is at least 90%, at least 95%, at least 98%, at least 99%, or 100% identical to:

(SEQ ID NO: 32964)
GGDLKSFLRETRPRPSQPSSLAM.

[0256] In some embodiments, the amino acid sequence of the antigen or peptide, e.g., the ALK protein, is reverse translated and optimized for expression in mammalian cells. As will be appreciated by a skilled practitioner in the art, optimization of the nucleic acid sequence includes optimization of the codons for expression of a sequence in mammalian cells and RNA optimization (such as RNA stability).

[0257] In some embodiments, fusion proteins comprising the ALK antigen polypeptides are as described herein. In some embodiments, the ALK polypeptide can be fused to any heterologous amino acid sequence to form the fusion protein. By way of example, peptide components of ALK polypeptides may be generated independently and then fused together to produce an intact ALK polypeptide antigen.

### ALK Immunogenic Compositions and Vaccines

[0258] The ALK antigens or immunogens may be used in immunogenic compositions or vaccines to elicit an immune response, e.g., a T-cell response, against disease caused by oncogenic ALK gene fusions, rearrangements, duplications, or mutations (e.g., ALK-positive cancers). In some embodiments, the immune response includes producing T-lymphocytes.

[0259] In particular embodiments, the ALK polypeptides of the immunogenic compositions or vaccines contain antigenic determinants that serve to elicit an immune response in a subject (e.g., the production of activated T-cells) that can treat and/or protect a subject against disease caused by oncogenic ALK gene fusions, rearrangements, duplications, or mutations (e.g., ALK-positive cancers) and symptoms thereof.

[0260] In some embodiments, such immunogenic compositions or vaccines as described herein contain at least one ALK antigen or immunogen and are effective in treating, reducing, delaying, or preventing at least one disease caused by oncogenic ALK gene fusions, rearrangements, duplications, or mutations (e.g., ALK-positive cancers). In some embodiments, such immunogenic compositions or vaccines as described herein contain two or more ALK antigens or immunogens and are effective in treating, reducing, or preventing at least one disease caused by oncogenic ALK gene fusions, rearrangements, duplications, or mutations (e.g., ALK-positive cancers). In some embodiments, the two or more ALK antigens or immunogens comprise one, two, or more amino acid sequences selected from the following: AMLDLLHVA (SEQ ID NO: 32961); RPRPSQPSSL (SEQ ID NO: 32957); IVRCIGVSL (SEQ ID NO: 32958); VPRKNITLI (SEQ ID NO: 32959); TAAEVSVRV (SEQ ID NO: 32960); GGDLKSFLRETRPRPSQPSSLAMLDLLHVA (SEQ ID NO: 32962); FNHQNIVRCIGVSL (SEQ ID NO: 32963); and/or GGDLKSFLRETRPRPSQPSSLAM (SEQ ID NO: 32964). In some embodiments, the immunogenic compositions or vaccines contain at least one ALK antigen or immunogen conjugated to an amphiphile or amphiphilic tail. In some embodiments, at least one of the two or more ALK antigens or immunogens in an immunogenic composition or vaccine is conjugated to an amphiphile or amphiphilic tail. In some embodiments, the amphiphile is N-hydroxy succinimidyl ester-end-functionalized poly(ethylene glycol)-lipid (NHS-PEG2Kda-DSPE). In some embodiments, the two or more ALK antigens or immunogens are provided in equal concentration ratios in an immunogenic composition or vaccine.

[0261] Because the ALK antigens or immunogens and the sequences thereof as described herein and used as immunogenic compositions or vaccines elicit an immune response in an immunocompetent subject, they provide a superior vaccine against which an immune response (e.g., producing T-lymphocytes) is generated.

[0262] In some embodiments, an immunogenic composition or a vaccine is provided that elicits an immune response (e.g., producing T-lymphocytes) in a subject following introduction, administration, or delivery of the antigen or immunogen to the subject. The route of introduction, administration, or delivery is not limited and may include, for example, intravenous, subcutaneous, intramuscular, oral, or other routes. The immunogenic composition or vaccine may be therapeutic (e.g., administered to a subject following a symptom of disease caused by oncogenic ALK gene fusions, rearrangements, duplications, or mutations (e.g., ALK-positive cancers)) or prophylactic (e.g., administered to a subject prior to the subject having or expressing a symptom of disease, or full-blown disease, caused by oncogenic ALK gene fusions, rearrangements, duplications, or mutations (e.g., ALK-positive cancers)).

### Vectors

[0263] Vectors containing a nucleotide sequence encoding the TCRs described herein are provided. In some embodiments, the vector further includes a promoter operably linked to the nucleotide sequence encoding the TCR. In embodiments, the promoter is a cytomegalovirus (CMV) promoter. In embodiments, the promoter is a murine stem cell virus (MSCV) promoter.

[0264] The vectors used to express an TCR as described herein may be any suitable expression vector known and used in the art. In some embodiments, the vector is a prokaryotic or eukaryotic vector. In some embodiments, the vector is an expression vector, such as a eukaryotic (e.g., mammalian) expression vector. In another embodiment, the vector is a plasmid (prokaryotic or bacterial) vector. In another embodiment, the vector is a viral vector (e.g., a retroviral vector, lentiviral vector or an adeno associated viral vector). In some embodiments, the vector is an RNA polynucleotide suitable for translation in a cell. In embodiments, the vector is a MSCV vector.

[0265] In some embodiments, the vectors comprise a nucleotide sequence encoding a TCR amino acid sequence that is at least 85%, at least 90%, at least 95%, at least 96%, at least 97%, at least 98%, at least 99%, or 100% identical to a TCR sequence comprising an amino acid sequence provided in SEQ ID Nos 1-1484, 2969-4452, 5937-7420, 8905-10388, 11873-13356, 14841-17808, 19293-19901, 20513-21122, 21733-22342, 22953-23562, 24173-24782, 25393-26002, 26613-27222, 27833-27968, 28105-28240, 28377-28512, 28649-28784, 28921-29056, 29193-29328, 29465-29600, 29737-29764, 29793-29820, 29849-29876, 29905-29932, 29961-29988, 30018-30045, 30074-30101, 30130-30225, 30322-30417, 30514-30609, 30706-30801, 30898-30993, 31090-31185, or 31282-31377, herein. In some embodiments, the vectors comprise a nucleotide sequence encoding a CDR I amino acid sequence that is at least 85%, at least 90%, at least 95%, at least 96%, at least 97%, at least 98%, at least 99%, or 100% identical to a CDR 1 sequence provided in SEQ ID Nos 2969-4452, 20513-21122, 28105-28240, 29793-29820, or 30321-30416, herein. In some embodiments, the vectors comprise a nucleotide sequence encoding a CDR 2 amino acid sequence that is at least 85%, at least 90%, at least 95%, at least 96%, at least 97%, at least 98%, at least 99%, or 100% identical to a CDR 2 sequence provided in SEQ ID Nos 8905-10388, 22953-23562, 28649-28784, 29905-29932, or 30705-30800, herein. In some embodiments, the vectors comprise a nucleotide sequence encoding a CDR 3 amino acid sequence that is at least 85%, at least 90%, at least 95%, at least 96%, at least 97%, at least 98%, at least 99%, or 100% identical to a CDR 3 sequence provided in SEQ ID Nos 14841-16324, 25393-26002, 29193-29328, 30017-30044, or 31089-31184, herein.

[0266] Provided are isolated, non-naturally occurring TCRs, e.g., TCRs selected for specificity to ALK antigens or peptides sequences presented by MHCs or HLAs, produced by transfecting a host cell with an expression vector as known and used in the art under conditions sufficient to allow for expression of the TCR, e.g., a TCR, in the cell. Isolated cells including the vectors are also provided.

[0267] Collections of vectors are also contemplated. In certain embodiments, the collection of vectors includes plasmid encoding an TCR as described herein.

### Transgenic Effector Cells

[0268] Provided herein are effector cells expressing the TCRs specific to ALK antigens or peptide sequences provided herein (e.g., TCRs including one or more of the CDRs listed in Tables 2 or 3). In some embodiments, the transgenic effector cells include polynucleotide sequences encoding the TCRs specific to ALK antigens or peptide sequences provided herein. In some embodiments, the transgenic effector cells are produced by transforming or transfecting a host or naïve effector cell (e.g., a CD8+ and/or CD4+ cell, T cell, natural killer (NK) cell, cytotoxic T lymphocyte (CTL) cell, or regulatory T cell) with an expression vector containing a polynucleotide encoding an TCR, as described herein, as known and used in the art under conditions sufficient to allow for expression of the TCR, thereby producing the transgenic effector cell. Isolated transgenic effector cells (e.g., T cells, NK cells, CTL cells, or regulatory T cells) containing the vectors are also provided. In embodiments, the effector cell is isolated from a host and transduced ex vivo before infusion into a subject. The host may be the same as the subject, or different. Accordingly, in embodiments, the transgenic effector cell may be autologous, allogeneic, or heterologous.

[0269] In embodiments, T cells transduced with the heterologous TCRs of the present disclosure also include the knockout of endogenous TCRs in the T cells to prevent expression of the endogenous TCRs. In embodiments, one or more of the endogenous T cell receptor alpha constant (TRAC), T cell receptor beta constant 1 (TRBC1), and/or T cell receptor beta constant 2 (TRBC2) genes are knocked out. In embodiments, the endogenous TCRs are knocked out using gene editing techniques known in the art (e.g., CRISPR). In embodiments, knockout of the TRAC gene involves the use of the crRNA guide AGAGATCTCCCACACCCAAA (SEQ ID NO: 32986). In embodiments, knockout of the TRBC1 and/or TRBC2 genes involves the use of the crRNA guide AGAGATCTCCCACACCCAAA (SEQ ID NO: 32986).

### Polypeptides Specific to ALK

[0270] Provided herein are polypeptides having specificity to the ALK antigens or peptide sequences provided herein. Such polypeptides are characterized by their specificity and ability to bind to the ALK antigens or peptide sequences provided herein. In some embodiments, polypeptides of the present disclosure are members of the immunoglobulin superfamily, and may include, but are not limited to, T cell receptors, B cell receptors, antibodies (e.g., antibodies specific to the ALK antigens or peptides sequences provided herein, bispecific antibodies, drug conjugated antibodies, etc.), and variants, derivatives, or fragments thereof.

[0271] In some embodiments, the polypeptides have a complementarity determining region (CDR) 1 amino acid sequence that is at least 85%, at least 90%, at least 95%, at least 96%, at least 97%, at least 98%, at least 99%, or 100% identical to a CDR 1 sequence provided in SEQ ID Nos 2969-4452, 20513-21122, 28105-28240, 29793-29820, or 30321-30416, herein. In some embodiments, the polypeptides have a CDR 2 amino acid sequence that is at least 85%, at least 90%, at least 95%, at least 96%, at least 97%, at least 98%, at least 99%, or 100% identical to a CDR 2 sequence provided in SEQ ID Nos 8905-10388, 22953-23562, 28649-28784, 29905-29932, or 30705-30800, herein. In some embodiments, the polypeptides have a CDR 3 amino acid sequence that is at least 85%, at least 90%, at least 95%, at least 96%, at least 97%, at least 98%, at least 99%, or 100% identical to a CDR 3 sequence provided in SEQ ID Nos 14841-16324, 25393-26002, 29193-29328, 30017-30044, or 31089-31184, herein.

### Antibodies Specific to ALK

[0272] Provided herein are antibodies that selectively bind ALK antigens or peptide sequences. In some embodiments, the antibodies of the present disclosure are characterized by their ability to bind those ALK antigens or peptide sequences provided herein.

[0273] Methods of preparing antibodies are well known to those of ordinary skill in the science of immunology. As used herein, the term “antibody” means not only intact antibody molecules, but also fragments of antibody molecules that retain immunogen-binding ability, particularly ALK binding ability. Such fragments are also well known in the art and are regularly employed both in vitro and in vivo. Accordingly, as used herein, the term “antibody” means not only intact immunoglobulin molecules but also the well-known active fragments F(ab′)₂, and Fab. F(ab′)₂, and Fab fragments that lack the Fc fragment of intact antibody, clear more rapidly from the circulation, and may have less non-specific tissue binding of an intact antibody (Wahl et al., J. Nucl. Med. 24:316-325 (1983). The antibodies of the invention comprise whole native antibodies, bispecific antibodies; chimeric antibodies; Fab, Fab′, single chain V region fragments (scFv), fusion polypeptides, and unconventional antibodies.

[0274] In one embodiment, an antibody that binds an ALK antigen or peptide sequence is monoclonal. Alternatively, the antibody that binds an ALK antigen or peptide sequence is a polyclonal antibody. The preparation and use of polyclonal antibodies are known to the skilled artisan. The invention also encompasses hybrid antibodies, in which one pair of heavy and light chains is obtained from a first antibody, while the other pair of heavy and light chains is obtained from a different second antibody. Such hybrids may also be formed using humanized heavy and light chains. Such antibodies are often referred to as “chimeric” antibodies.

[0275] In general, intact antibodies are said to contain “Fc” and “Fab” regions. The Fc regions are involved in complement activation and are not involved in antigen binding. An antibody from which the Fc′ region has been enzymatically cleaved, or which has been produced without the Fc′ region, designated an “F(ab′)₂” fragment, retains both of the antigen binding sites of the intact antibody. Similarly, an antibody from which the Fc region has been enzymatically cleaved, or which has been produced without the Fc region, designated an “Fab” fragment, retains one of the antigen binding sites of the intact antibody. Fab′ fragments consist of a covalently bound antibody light chain and a portion of the antibody heavy chain, denoted “Fd.” The Fd fragments are the major determinants of antibody specificity (a single Fd fragment may be associated with up to ten different light chains without altering antibody specificity). Isolated Fd fragments retain the ability to specifically bind to immunogenic epitopes.

[0276] Antibodies can be made by any of the methods known in the art utilizing ALK peptide sequences or antigens disclosed herein, or immunogenic fragments thereof, as an immunogen. One method of obtaining antibodies is to immunize suitable host animals with an immunogen and to follow standard procedures for polyclonal or monoclonal antibody production. The immunogen will facilitate presentation of the immunogen on the cell surface. Immunization of a suitable host can be carried out in a number of ways. Nucleic acid sequences encoding an ALK peptide sequence or antigen or immunogenic fragments thereof, can be provided to the host in a delivery vehicle that is taken up by immune cells of the host. The cells will in turn express the receptor on the cell surface generating an immunogenic response in the host. Alternatively, nucleic acid sequences encoding an ALK peptide sequence or antigen, or immunogenic fragments thereof, can be expressed in cells in vitro, followed by isolation of the ALK peptide sequence or antigen and administration of the ALK peptide sequence or antigen to a suitable host in which antibodies are raised.

[0277] Alternatively, antibodies against an ALK peptide sequence or antigen may, if desired, be derived from an antibody phage display library. A bacteriophage is capable of infecting and reproducing within bacteria, which can be engineered, when combined with human antibody genes, to display human antibody proteins. Phage display is the process by which the phage is made to ‘display’ the human antibody proteins on its surface. Genes from the human antibody gene libraries are inserted into a population of phage. Each phage carries the genes for a different antibody and thus displays a different antibody on its surface.

[0278] Antibodies made by any method known in the art can then be purified from the host. Antibody purification methods may include salt precipitation (for example, with ammonium sulfate), ion exchange chromatography (for example, on a cationic or anionic exchange column preferably run at neutral pH and eluted with step gradients of increasing ionic strength), gel filtration chromatography (including gel filtration HPLC), and chromatography on affinity resins such as protein A, protein G, hydroxyapatite, and anti-immunoglobulin.

[0279] Antibodies can be conveniently produced from hybridoma cells engineered to express the antibody. Methods of making hybridomas are well known in the art. The hybridoma cells can be cultured in a suitable medium, and spent medium can be used as an antibody source. Polynucleotides encoding the antibody of interest can in turn be obtained from the hybridoma that produces the antibody, and then the antibody may be produced synthetically or recombinantly from these DNA sequences. For the production of large amounts of antibody, it is generally more convenient to obtain an ascites fluid. The method of raising ascites generally comprises injecting hybridoma cells into an immunologically naive histocompatible or immunotolerant mammal, especially a mouse. The mammal may be primed for ascites production by prior administration of a suitable composition (e.g., Pristane).

[0280] Monoclonal antibodies (Mabs) produced by methods of the invention can be “humanized” by methods known in the art. “Humanized” antibodies are antibodies in which at least part of the sequence has been altered from its initial form to render it more like human immunoglobulins. Techniques to humanize antibodies are particularly useful when non-human animal (e.g., murine) antibodies are generated. Examples of methods for humanizing a murine antibody are provided in U.S. Pat. Nos. 4,816,567, 5,530,101, 5,225,539, 5,585,089, 5,693,762 and 5,859,205.

[0281] The disclosed ALK specific antibodies can be recombinantly fused or chemically conjugated (including both covalently and non-covalently conjugations) to a heterologous molecule (i.e., an unrelated molecule). The fusion does not necessarily need to be direct, but may occur through linker sequences.

[0282] In some embodiments, the disclosed ALK specific antibodies may be fused or conjugated to therapeutic compounds, preferably therapeutic compounds useful in treating neoplasias. In exemplary embodiments, the disclosed ALK specific antibodies may be fused or conjugated to compounds which effectively treat a disease and its symptoms, either prophylactically or therapeutically, caused by oncogenic ALK gene fusions, rearrangements, duplications, or mutations (e.g., ALK-positive cancers or tumors) following administration and delivery to a susceptible subject.

[0283] In some embodiments the antibody is conjugated to an agent. The agent can be, for example, a cytotoxic agent such as a chemotherapeutic drug, or radioactive isotype. In some embodiments, the agent is a toxin. Upon binding to ALK on a target tumor cell, the antibody and its payload can be internalized by the target cell. In this way, the antibody-drug conjugate can carry out selective destruction of the target cells. Suitable drug conjugates as well as methods of making and using antibody-drug conjugates in the treatment of immune disorders and cancer are known in the art. See for example, U.S. Published Application No. 2012/0288512, which describes anti-CD70-drug conjugates, is specifically incorporated by reference in its entirety.

[0284] Techniques for conjugating therapeutic compounds to antibodies are well known; see, e.g., Amon et al., “Monoclonal Antibodies For Immunotargeting Of Drugs In Cancer Therapy”, in MONOCLONAL ANTIBODIES AND CANCER THERAPY, Reisfeld et al. (eds.), 1985, pp. 243-56, Alan R. Liss, Inc.); Hellstrom et al., “Antibodies For Drug Delivery”, in CONTROLLED DRUG DELIVERY (2nd Ed.), Robinson et al. (eds.), 1987, pp. 623-53, Marcel Dekker, Inc.); Thorpe, “Antibody Carriers Of Cytotoxic Agents In Cancer Therapy: A Review”, in MONOCLONAL ANTIBODIES '84: BIOLOGICAL AND CLINICAL APPLICATIONS, Pinchera et al. (eds.), 1985, pp. 475-506); “Analysis, Results, And Future Prospective Of The Therapeutic Use Of Radiolabeled Antibody In Cancer Therapy”, in MONOCLONAL ANTIBODIES FOR CANCER DETECTION AND THERAPY, Baldwin et al. (eds.), 1985, pp. 303-16, Academic Press; and Thorpe et al. (1982) “The Preparation And Cytotoxic Properties Of Antibody-Toxin Conjugates,” Immunol. Rev. 62:119-158.

### Compositions and Pharmaceutical Compositions for Administration

[0285] Compositions comprising one or more T cell receptors, vectors encoding T cell receptors, polypeptides (e.g., polypeptides specific to ALK peptide sequences and/or antigens), and/or transgenic cells expressing such receptors, as described herein are provided. In some embodiments, the compositions further comprise a pharmaceutically acceptable carrier, diluent, excipient, or vehicle. In some embodiments, an adjuvant (a pharmacological or immunological agent that modifies or boosts an immune response, e.g., to produce more antibodies that are longer-lasting) is also employed. For example, without limitation, the adjuvant can be an inorganic compound, such as alum, aluminum hydroxide, or aluminum phosphate; mineral or paraffin oil; squalene; detergents such as Quil A; plant saponins; Freund's complete or incomplete adjuvant, a biological adjuvant (e.g., cytokines such as IL-1, IL-2, or IL-12); bacterial products such as killed Bordetella pertussis, or toxoids; or immunostimulatory oligonucleotides (such as CpG oligonucleotides). In some embodiments, the adjuvant is conjugated to an amphiphile as previously described (H. Liu et al., Structure-based programming of lymph-node targeting in molecular vaccines. Nature 507, 5199522 (2014)). In some embodiments, the amphiphile is N-hydroxy succinimidyl ester-end-functionalized poly(ethylene glycol)-lipid (NHS-PEG2Kda-DSPE)

[0286] Compositions and preparations (e.g., physiologically or pharmaceutically acceptable compositions) containing T cell receptors, vectors encoding T cell receptors, polypeptides, and/or engineered cells expressing such receptors for parenteral administration include, without limitation, sterile aqueous or non-aqueous solutions, suspensions, and emulsions. Nonlimiting examples of non-aqueous solvents include propylene glycol, polyethylene glycol, vegetable oils, such as olive oil and canola oil, and injectable organic esters, such as ethyl oleate. Aqueous carriers include water, alcoholic/aqueous solutions, emulsions, or suspensions, including saline and buffered media. Parenteral vehicles include, for example, sodium chloride solution, Ringer's dextrose, dextrose and sodium chloride, lactated Ringer's, or fixed oils. Intravenous vehicles include, for example, fluid and nutrient replenishers, electrolyte replenishers (such as those based on Ringer's dextrose), and the like. Preservatives and other additives may also be present in such compositions and preparations, such as, for example, antimicrobials, antioxidants, chelating agents, colorants, stabilizers, inert gases, and the like.

[0287] Some of the compositions may potentially be administered as a pharmaceutically acceptable acid- or base-addition salt, formed by reaction with inorganic acids, such as hydrochloric acid, hydrobromic acid, perchloric acid, nitric acid, thiocyanic acid, sulfuric acid, and phosphoric acid, and organic acids, such as formic acid, acetic acid, propionic acid, glycolic acid, lactic acid, pyruvic acid, oxalic acid, malonic acid, succinic acid, maleic acid, and fumaric acid, or by reaction with an inorganic base such as sodium hydroxide, ammonium hydroxide, potassium hydroxide, and organic bases such as mono-, di-, tri-alkyl and aryl amines and substituted ethanolamines.

[0288] Provided herein are pharmaceutical compositions which include a therapeutically effective amount of an isolated T cell receptor, vector encoding T cell receptors, polypeptide, and/or engineered cell, as described herein, alone, or in combination with a pharmaceutically acceptable carrier. Pharmaceutically acceptable carriers include, but are not limited to, saline, buffered saline, dextrose, water, glycerol, ethanol, and combinations thereof. The carrier and composition can be sterile, and the formulation suits the mode of administration. The composition can also contain minor amounts of wetting or emulsifying agents, or pH buffering agents. The composition can be a liquid or aqueous solution, suspension, emulsion, dispersion, tablet, pill, capsule, powder, or sustained release formulation. A liquid or aqueous composition can be lyophilized and reconstituted with a solution or buffer prior to use. The composition can be formulated as a suppository, with traditional binders and carriers such as triglycerides. Oral formulations can include standard carriers, such as pharmaceutical grades of mannitol, lactose, starch, magnesium stearate, sodium saccharine, cellulose, and magnesium carbonate. Any of the commonly known pharmaceutical carriers, such as sterile saline solution or sesame oil, can be used. The medium can also contain conventional pharmaceutical adjunct materials such as, for example, pharmaceutically acceptable salts to adjust the osmotic pressure, buffers, preservatives, and the like. Other media that can be used in the compositions and administration methods as described are normal saline and sesame oil.

### Methods of Treatment, Administration and Delivery

[0289] Methods of treating a disease (e.g., ALK-positive cancers (e.g., lung cancer, lymphoma or neuroblastoma)), or symptoms thereof, are provided. The methods comprise administering a therapeutically effective amount of an T cell receptor, vector encoding T cell receptors, polypeptide, and/or engineered cell, as described herein, or a pharmaceutical composition thereof, as described herein, to a subject (e.g., a mammal), in particular, a human subject. The invention provides methods of treating a subject suffering from, or at risk of, or susceptible to disease, or a symptom thereof, or delaying the progression of a disease (e.g., ALK-positive cancer (e.g., lung cancer, lymphoma or neuroblastoma)). In some embodiments, the method includes administering to the subject (e.g., a mammalian subject), an effective amount or a therapeutic amount of a T cell receptor, vector encoding a T cell receptor, polypeptide, and/or engineered cell, as described herein, or pharmaceutical composition thereof, sufficient to treat the disease, delay the growth of, or treat the symptoms thereof (e.g., ALK-positive cancers (e.g., lung cancer, lymphoma or neuroblastoma)). In embodiments, an effective amount of a T cell receptor, vector encoding a T cell receptor, polypeptide, and/or engineered cell, as described herein, or pharmaceutical composition thereof, is an amount sufficient to induce partial remission (PR) of a tumor in a subject, complete remission (CR) of a tumor in a subject, or stable disease (SD) in a subject.

[0290] In some embodiments, the methods herein include administering to the subject (including a human subject identified as in need of such treatment) an effective amount of an T cell receptor, vector encoding T cell receptors, polypeptide, and/or engineered cell, or a pharmaceutical composition thereof, as described herein to produce such effect. The treatment methods are suitably administered to subjects, particularly humans, suffering from, are susceptible to, or at risk of having a disease, or symptoms thereof, namely, cancer (e.g., ALK-positive cancers (e.g., lung cancer, lymphoma or neuroblastoma)). Nonlimiting examples of ALK-positive cancers include non-small cell lung cancer (NSCLC), anaplastic large cell lymphoma (ALCL), neuroblastoma, B-cell lymphoma, thyroid cancer, colon cancer, breast cancer, inflammatory myofibroblastic tumors (IMT), renal carcinoma, esophageal cancer, melanoma, or a combination thereof. In some embodiments, the ALK-positive cancer is neuroblastoma.

[0291] The ALK-positive cancer may be caused by an oncogenic ALK gene that either forms a fusion gene with other genes, gains additional gene copies, or is genetically mutated. In some embodiments, the ALK-positive cancer is caused by an ALK fusion gene encoding an ALK fusion protein. In some embodiments, the ALK-positive cancer is caused by a fusion between the ALK gene and the nucleophosmin (NPM) gene encoding a NPM-ALK fusion protein. In some embodiments, the ALK-positive cancer is caused by a fusion between the ALK gene and the echinoderm microtubule-associated protein-like 4 (EML4) gene encoding an ELM4-ALK fusion protein. In some embodiments, the ALK-positive cancer is caused by a point mutation. In some embodiments, the point mutation is F1174L (ALK^{F1174L}).

[0292] Identifying a subject in need of such treatment can be based on the judgment of the subject or of a health care professional and can be subjective (e.g., opinion) or objective (e.g., measurable by a test or diagnostic method). Briefly, the determination of those subjects who are in need of treatment or who are “at risk” or “susceptible” can be made by any objective or subjective determination by a diagnostic test (e.g., blood sample, biopsy, genetic test, enzyme or protein marker assay), marker analysis, family history, and the like, including an opinion of the subject or a health care provider. The T cell receptor, vector encoding T cell receptors, polypeptide, and/or engineered cell, or pharmaceutical compositions thereof, as described herein, may also be used in the treatment of any other disorders in which disease caused by oncogenic ALK gene fusions, rearrangements, duplications or mutations may be implicated. A subject undergoing treatment can be a non-human mammal, such as a veterinary subject, or a human subject (also referred to as a “patient”). In some embodiments, the disease caused by oncogenic ALK-gene fusions, rearrangements, duplications, or mutations may be one resistant to treatment with TKIs (e.g., an anaplastic lymphoma kinase (ALK)-rearranged and/or ALK-positive neoplasia that is resistant to ALK tyrosine kinase inhibitor (TKI) therapy).

[0293] In addition, prophylactic methods of preventing or protecting against a disease (e.g., ALK-positive cancers (e.g., lung cancer, lymphoma or neuroblastoma)), or symptoms thereof, are provided. Such methods comprise administering a therapeutically effective amount of a pharmaceutical composition comprising an T cell receptor, vector encoding T cell receptors, polypeptide, and/or engineered cell as described herein to a subject (e.g., a mammal, such as a human), in particular, prior to development or onset of a disease (e.g., ALK-positive cancers (e.g., lung cancer, lymphoma or neuroblastoma)).

[0294] In another embodiment, a method of monitoring the progress of a disease (e.g., ALK-positive cancers (e.g., lung cancer, lymphoma or neuroblastoma)), or monitoring treatment of the disease is provided. The method includes a diagnostic measurement (e.g., CT scan, screening assay or detection assay) in a subject suffering from or susceptible to disease or symptoms thereof (e.g., ALK-positive cancers (e.g., lung cancer, lymphoma or neuroblastoma)), in which the subject has been administered an amount (e.g., a therapeutic amount) of an T cell receptor, vector encoding T cell receptors, polypeptide, and/or engineered cell, or a pharmaceutical composition thereof, as described herein, sufficient to treat the disease or symptoms thereof. The diagnostic measurement in the method can be compared to samples from healthy, normal controls; in a pre-disease sample of the subject; or in other afflicted/diseased patients to establish the treated subject's disease status. For monitoring, a second diagnostic measurement may be obtained from the subject at a time point later than the determination of the first diagnostic measurement, and the two measurements can be compared to monitor the course of disease or the efficacy of the therapy/treatment. In certain embodiments, a pre-treatment measurement in the subject (e.g., in a sample or biopsy obtained from the subject or CT scan) is determined prior to beginning treatment as described: this measurement can then be compared to a measurement in the subject after the treatment commences and/or during the course of treatment to determine the efficacy of (monitor the efficacy of) the disease treatment.

[0295] The T cell receptor, vector encoding T cell receptors, polypeptide, and/or engineered cell, or pharmaceutical compositions thereof, can be administered to a subject by any of the routes normally used for introducing a recombinant protein or composition containing the recombinant protein into a subject. Routes and methods of administration include, without limitation, intradermal, intramuscular, intraperitoneal, intrathecal, parenteral, such as intravenous (IV) or subcutaneous (SC), vaginal, rectal, intranasal, inhalation, intraocular, intracranial, or oral. Parenteral administration, such as subcutaneous, intravenous or intramuscular administration, is generally achieved by injection (immunization). Injectables can be prepared in conventional forms and formulations, either as liquid solutions or suspensions, solid forms (e.g., lyophilized forms) suitable for solution or suspension in liquid prior to injection, or as emulsions. Injection solutions and suspensions can be prepared from sterile powders, granules, and tablets. Administration can be systemic or local.

[0296] The T cell receptor, vector encoding T cell receptors, polypeptide, and/or engineered cell, or pharmaceutical compositions thereof, can be administered in any suitable manner, such as with pharmaceutically acceptable carriers, diluents, or excipients as described supra. Pharmaceutically acceptable carriers are determined in part by the particular composition being administered, as well as by the particular method used to administer the composition. Accordingly, a pharmaceutical composition comprising the T cell receptor, vector encoding T cell receptors, polypeptide, and/or engineered cell, can be prepared using a wide variety of suitable and physiologically and pharmaceutically acceptable formulations. In some embodiments, the disclosed methods include isolating T cells from a subject, transducing the T cells with an expression vector (e.g., a lentiviral vector) encoding the TCRs, and administering the engineered TCR-expressing T cells to the subject for treatment of a disease ((e.g., ALK-positive cancers (e.g., lung cancer, lymphoma or neuroblastoma)) in the subject.

[0297] Administration of the T cell receptor, vector encoding T cell receptors, polypeptide, and/or engineered cell, or pharmaceutical compositions thereof, can be accomplished by single or multiple doses. The dose administered to a subject should be sufficient to induce a beneficial therapeutic response in a subject over time, such as to inhibit, block, reduce, ameliorate, protect against, or prevent disease (e.g., ALK-positive cancers (e.g., lung cancer, lymphoma or neuroblastoma)). The dose required will vary from subject to subject depending on the species, age, weight and general condition of the subject, by the severity of the cancer being treated, by the particular composition being used and by the mode of administration. An appropriate dose can be determined by a person skilled in the art, such as a clinician or medical practitioner, using only routine experimentation. One of skill in the art is capable of determining therapeutically effective amounts of T cell receptor, vector encoding T cell receptors, polypeptide, and/or engineered cell, or pharmaceutical compositions, that provide a therapeutic effect or protection against disease (e.g., ALK-positive cancers (e.g., lung cancer, lymphoma or neuroblastoma)) suitable for administering to a subject in need of treatment or protection.

[0298] In some embodiments, a T cell receptor, vector encoding T cell receptors, polypeptide, and/or engineered cell, or a pharmaceutical composition thereof, is administered as a maxium-tolerated dose (MTD). In some embodiments, MTD is the dose with estimated probability of dose limiting toxicity (DLT) closest to the target toxicity rate of 20%. In some embodiments, a T cell receptor, vector encoding T cell receptors, polypeptide, and/or engineered cell, or a pharmaceutical composition thereof, is administered in a therapeutically effective dose for a mammal. In some embodiments, the mammal is a mouse. In some embodiments, a mouse is administered a dose of 0.5 million to 15 million cells. In some embodiments, the mammal is a human. In some embodiments, a human is administered a dose of at least about 0.25×10⁶ engineered cells/kg, at least about 0.5×10⁶ engineered cells/kg, at least about 1×10⁶ engineered cells/kg, or at least about 1.5×10⁶ engineered cells/kg.

### Combination Therapies

[0299] The T cell receptor, vector encoding T cell receptors, polypeptide, and/or engineered cells expressing such receptors as described herein can be administered alone or in combination with other therapeutic agents in a subject for the treatment of cancer (e.g., ALK-positive cancer (e.g., neuroblastoma)). For example, the T cell receptor, vector encoding T cell receptors, polypeptide, and/or engineered cell can be administered with an adjuvant, such as alum, Freund's incomplete adjuvant, Freund's complete adjuvant, biological adjuvant, or immunostimulatory oligonucleotides (such as CpG oligonucleotides). The adjuvant may be conjugated to an amphiphile as previously described (H. Liu et al., Structure-based programming of lymph-node targeting in molecular vaccines. Nature 507, 5199522 (2014)). In some embodiments, the amphiphile conjugated to the adjuvant is N-hydroxy succinimidyl ester-end-functionalized poly(ethylene glycol)-lipid (NHS-PEG2KDa-DSPE).

[0300] One or more cytokines, such as interleukin-1 (IL-2), interleukin-6 (IL-6), interleukin-12 (IL-12), the protein memory T-cell attractant “Regulated on Activation, Normal T Expressed and Secreted” (RANTES), granulocyte-macrophage-colony stimulating factor (GM-CSF), tumor necrosis factor-alpha (TNF-α), or interferon-gamma (IFN-γ): a stimulator of interferon genes (STING) agonist (e.g., ADU-S100); one or more growth factors, such as GM-CSF or granulocyte-colony stimulation factor (G-CSF): one or more molecules such as the TNF ligand superfamily member 4 ligand (OX40L) or the type 2 transmembrane glycoprotein receptor belonging to the TNF superfamily (4-1BBL), or combinations of these molecules, can be used as biological adjuvants, if desired or warranted (see, e.g., Salgaller et al., 1998, J. Surg. Oncol. 68 (2); 122-38; Lotze et al., 2000, Cancer J. Sci. Am. 6 (Suppl 1); S61-6; Cao et al., 1998, Stem Cells 16 (Suppl 1); 251-60; Kuiper et al., 2000, Adv. Exp. Med. Biol. 465:381-90). These molecules can be administered systemically (or locally) to a subject.

[0301] The T cell receptor, vector encoding T cell receptors, polypeptide, and/or engineered cell can also be administered as a combination therapy with one or more other therapeutic agents, such as an ALK peptide or fusion protein. ALK peptide vaccine, ALK inhibitors, tyrosine kinase inhibitors (TKIs), and/or immune checkpoint inhibitors. Non-limiting examples of ALK inhibitors include lorlatinib (Lobrena®), ceritinib, alectinib, and brigatinib (Gristina et al., Pharmaceuticals 13: Issue 12 10.3390/ph13120474. In other embodiments, an ALK inhibitor is an agent that degrades ALK (e.g., an ALK proteolysis-targeting chimera (PROTAC). In other embodiments, the ALK inhibitor is a an ALK covalent inhibitor, preferably an ALK covelent inhibitor designed to bind an amino acid in ALK, such as cysteine (e.g., Con B-1 as described in Yan et al., J Med Chem. 2021 Feb. 11; 64 (3):1558-1569; BNP7787 as described in Parker et al., Onco Targets Ther. 2015 Feb. 4; 8:375-83; Non-limiting examples of checkpoint inhibitors include programmed cell death protein 1 (PD-1) inhibitors, programmed death-ligand 1 (PD-L1) inhibitors, cytotoxic T-lymphocyte-associated antigen-4 (CTLA-4) inhibitors, T-cell immunoglobulin and mucin domain 3 (TIM3) inhibitors, lymphocyte-activation gene 3 (LAG3) inhibitors, T-cell immunoglobulin and ITIM domain (TIGIT) inhibitors, V-domain immunoglobulin suppressor of T cell activation (VISTA) inhibitors, immunoglobulin-like transcript 2 (ILT2) inhibitors, immunoglobulin-like transcript 4 (ILT4) inhibitors, and killer cell immunoglobulin-like receptor, three immunoglobulin domains and long cytoplasmic tail (KIR3DL3) inhibitors. Nonlimiting examples of PD-1 inhibitors include pembrolizumab (Keytruda®) and nivolumab (Opdivo®). Nonlimiting examples of CTLA-4 inhibitors include ipilimumab (Yervoy®). Non-limiting examples of PD-L1 inhibitors include atezolizumab (TECENTRIQ®), avelumab (BAVENCIO®), and durvalumab (IMFINZI®). Non-limiting examples of TIM3 inhibitors include sabatolimab and cobolimab. Non-limiting examples of LAG3 inhibitors include relatimab. Non-limiting examples of TIGIT inhibitors include vibostolimab, ociperlimab, domvanalimab, and etigilimab. Non-limiting examples of VISTA inhibitors include onvatilimab. Non-limiting examples of ILT2 inhibitors include BND-22. Non-limiting examples of ILT4 inhibitors include MK-4830 and JTX-8064. Non-limiting examples of KIR3DL3 inhibitors include NPX-267. Non-limiting examples of TKI inhibitors include crizotinib, ceritinib, alectinib, brigatinib, and lorlatinib. In some embodiments, one or more ALK peptides or fusion proteins, ALK peptide vaccines, ALK inhibitors, immune checkpoint inhibitors, and/or TKI inhibitors is/are administered simultaneously or sequentially with T cell receptors, vector encoding T cell receptors, polypeptide, and/or engineered cells, as described herein, to a subject (e.g., human). In embodiments, combination therapies disclosed herein are administered in an amount effective to induce partial remission (PR) of a tumor in a subject, complete remission (CR) of a tumor in a subject, or stable disease (SD) in a subject.

[0302] In some embodiments, the T cell receptor, vector encoding T cell receptors, polypeptide, and/or engineered cell is administered simultaneously or sequentially with an ALK peptide vaccine. In particular embodiments, the ALK peptide vaccine contains antigenic determinants that serve to elicit an immune response in a subject (e.g., the production of activated T-cells) that can treat and/or protect a subject against disease caused by oncogenic ALK gene fusions, rearrangements, duplications or mutations (e.g., ALK-positive cancers) and symptoms thereof. In some embodiments, the immune response includes producing T-lymphocytes. In some embodiments, the ALK peptide vaccine contains at least one ALK antigen or peptide or fragment thereof. In some embodiments, the ALK peptide vaccine contains two or more ALK peptides or antigens or fragments thereof. In some embodiments, the ALK peptides or antigens or fragments thereof are fragments of the cytoplasmic portion of an ALK protein, which bind a human leukocyte antigen (HLA). In some embodiments the ALK peptides or antigens or fragments thereof are modified with an amphiphilic conjugate to increase T-cell expansion and greatly enhance anti-tumor efficacy. In some embodiments, the amphiphile is N-hydroxy succinimidyl ester-end-functionalized poly(ethylene glycol)-lipid (NHS-PEG2KDa-DSPE).

### Kits

[0303] Also provided are kits containing the T cell receptor, vector encoding T cell receptors, polypeptide, and/or engineered cell, or a pharmaceutically acceptable composition thereof, as described herein, and a pharmaceutically acceptable carrier, diluent, or excipient, for administering to a subject, for example. In some embodiments, the kit is provided for treating cancer (e.g., ALK-positive cancer (e.g., lung cancer, lymphoma or neuroblastoma)) in a subject (e.g., human). In some embodiments, the kit is provided for making an T cell receptor, vector encoding T cell receptors, polypeptide, and/or engineered cell as provided herein. In some embodiments, the kit will contain one or more of an ALK antibody or antigen binding fragment thereof, nucleic acid molecule encoding for an ALK peptide, T cell receptor, vector encoding T cell receptors, polypeptide, and/or engineered cell, as disclosed herein. The TCR may be in the form of a polypeptide or a polynucleotide encoding a TCR, as described herein. In some embodiments, the kit comprises a vector containing a nucleotide sequence encoding an TCR as disclosed herein. As will be appreciated by the skilled practitioner in the art, such a kit may contain one or more containers, labels, carriers, diluents or excipients, as necessary, and instructions for use.

[0304] The practice of the present invention employs, unless otherwise indicated, conventional techniques of molecular biology (including recombinant techniques), microbiology, cell biology, biochemistry and immunology, which are well within the purview of the skilled artisan. Such techniques are explained fully in the literature, such as, “Molecular Cloning: A Laboratory Manual”, second edition (Sambrook, 1989); “Oligonucleotide Synthesis” (Gait, 1984); “Animal Cell Culture” (Freshney, 1987); “Methods in Enzymology” “Handbook of Experimental Immunology” (Weir, 1996); “Gene Transfer Vectors for Mammalian Cells” (Miller and Calos, 1987); “Current Protocols in Molecular Biology” (Ausubel, 1987); “PCR: The Polymerase Chain Reaction”, (Mullis, 1994); “Current Protocols in Immunology” (Coligan, 1991). These techniques are applicable to the production of the polynucleotides and polypeptides of the invention, and, as such, may be considered in making and practicing the invention. Useful techniques for particular embodiments will be discussed in the sections that follow.

[0305] The following examples are put forth to provide those of ordinary skill in the art with a complete disclosure and description of how to make and use the assay, screening, and therapeutic methods of the invention, and are not intended to limit the scope of what the inventors regard as their invention.

### EXAMPLES

[0306] The following examples are provided to illustrate certain particular features and/or embodiments. The examples should not be construed to limit the disclosure to the particular features or embodiments described.

### Example 1: Isolation of ALK-Specific TCRs from HLA-A*02:01 and HLA-B*07:02 Transgenic Mice Vaccinated with ALK Peptides

[0307] Alpha Beta T cell receptors form a site that recognizes molecular complexes containing peptides bound to MHC class I or MHC class II (MHC-I, II) molecules.

[0308] Data supporting the feasibility of isolating and cloning ALK-specific T Cell Receptors (TCRs) was generated by vaccinating BALB/c mice with a peptide fragment of anaplastic lymphoma kinase (ALK), ALK peptide PGPGRVAKI (SEQ ID NO: 32985), which was emulsified with adjuvant cyclic diguanylate monophosphate (c-di-GMP). BALB/c mice received a priming vaccine containing the ALK peptide and adjuvant at day 0 followed by two booster vaccines at day 14 and day 21. BALB/c splenocytes were isolated from the mice seven days after the last vaccination booster. The splenocytes were then stimulated overnight in vitro with the ALK peptide PGPGRVAKI (SEQ ID NO: 32985).

[0309] ALK-specific CD8+ T cells were sorted via staining with an MHC-I multimer optimized to accommodate multiple binding sites and numerous fluorophores to boost avidity in bind antigen-specific CD8+ T cells, which is commercially available (Dextramer® reagent, Immudex), that binds the PGPGRVAKI (SEQ ID NO: 32985) peptide with the mouse H-2D^{d} MHC-I (FIG. 1). Sorted T cells were subjected to single cell sequencing using 10× genomics technology. Among 5044 single cells sequenced, the five most expanded clonotypes were identified. The paired α and β chains of these five ALK-specific TCRs were cloned into a retroviral vector that efficiently transduced and reconstituted TCR expression in the TCR-deficient BW5147.3 lymphoma cell line. Remarkably, all five murine ALK-specific TCR-T cell lines generated recognized the PGPGRVAKI (SEQ ID NO: 32985) Dextramer®, demonstrating their specificity for the PGPGRVAKI (SEQ ID NO: 32985) peptide (FIG. 2). To test the functional activity of the murine ALK TCR-T cells, the release of IFN-γ (FIG. 3) and IL2 (FIG. 4) was measured following incubation of ALK TCR-T cells with 1) BALB/c splenocytes loaded with increasing concentrations of the ALK peptide PGPGRVAKI (SEQ ID NO: 32985) and 2) H2-Dd murine lung cancer cells in which the human EML4-ALK translocation was introduced with a retroviral infection (FIGS. 5 and 6). The results demonstrated that these five ALK-specific TCR-T cells are functional, as evidenced by the production of IFN-γ and IL-2.

[0310] The killing activity of the murine ALK TCR-T cells was investigated in vitro by transducing primary CD8⁺ T cells with the murine ALK specific constructs. Untouched CD8⁺ T cells were purified from BALB/c splenocytes and activated in vitro for 24 h with 30 U/ml IL2 and anti-CD3/CD28 beads (T cell:beads ratio 1:1) before retroviral infection. The expression of the ALK-specific TCRs on the surface of the primary murine CD8⁺ T cells was analyzed two days post-infection by evaluating the expression of the green fluorescence protein expression (GFP) and the binding to the PGPGRVAKI (SEQ ID NO: 32985) Dextramer®). The level of expression of the ALK-specific TCRs on primary murine CD8⁺ T cells was construct-dependent with levels ranging from 15% to 80% (FIGS. 7 and 8); this difference reflected a variable level of mispairing of each ALK-specific TCR with the endogenous TCR repertoire.

[0311] The ALK TCR-T3, ALK TCR-T4, and ALK TCR-T5 cells were co-cultured with luciferase-positive (FFLUC*) H2-Dd murine ALK-positive lung tumor cells and the residual bioluminescence of the tumor cells was measured three days post co-culture. ALK TCR-T3 killed more than 50% of H2-Dd ALK-positive lung tumor cells expressing the ALK peptide PGPGRVAKI (SEQ ID NO: 32985). No killing of H2-Dd positive and ALK-positive tumor cells that did not express the ALK peptide PGPGRVAKI (SEQ ID NO: 32985) was observed. Both ALK TCR-T4 and ALK TCR-T5 killed 30% of ALK-positive tumor cells expressing the PGPGRVAKI (SEQ ID NO: 32985), peptide (FIG. 9). The cloned sequences of the ALK-specific TCRs that recognize mouse ALK peptides presented by mouse MHC-I complex (BALB/c) are listed in Table 1.

TABLE 1
Sequences for ALK-specific TCRs that recognize mouse ALK peptides

| # | chain | fwr1 | cdr1 | fwr2 | cdr2 | fwr3 | cdr3 | fwr4 | Freqeuncy | proportion |
|---|---|---|---|---|---|---|---|---|---|---|
| Clonotype_1 | TRB | ETAVF | LGHDT | MYWYK | YNNKQ | IVNET | CASSQ | GPGTR | 826 | 0.16375892 |
| | | QTPNY | (SEQ | QDSKK | L | VPRRF | DWDEQ | LTVL | | |
| | | HVTQV | ID | LLKIM | (SEQ | SPQSS | YF | (SEQ | | |
| | | GNEVS | NO: | FS | ID | DKAHL | (SEQ | ID | | |
| | | FNCKQ | 3067) | (SEQ | NO: | NLRIK | ID | NO: | | |
| | | T | | ID | 9003) | SVEPE | NO: | 16327) | | |
| | | (SEQ | | NO: | | DSAVY | 32989) | | | |
| | | ID | | 6035) | | L | | | | |
| | | NO: | | | | (SEQ | | | | |
| | | 99) | | | | ID | | | | |
| | | | | | | NO: | | | | |
| | | | | | | 11971) | | | | |
| Clonotype_1 | TRB | GAGAC | CTGGG | ATGTA | TACAA | ATTGT | TGTGC | GGTCC | | |
| Nucleotide | | GGCTG | CCACG | TTGGT | TAATA | AAACG | CAGCA | CGGCA | | |
| sequence | | TTTTC | ATACT | ACAAG | AGCAA | AAACA | GCCAG | CCAGG | | |
| | | CAGAC | (SEQ | CAAGA | CTC | GTTCC | GACTG | CTCAC | | |
| | | TCCAA | ID | CTCTA | (SEQ | AAGGC | GGATG | GGTTT | | |
| | | ACTAT | NO: | AGAAA | ID | GCTTC | AACAG | TAG | | |
| | | CATGT | 4551) | TTGCT | NO: | TCACC | TACTT | (SEQ | | |
| | | CACAC | | GAAGA | 10487) | TCAGT | C | ID | | |
| | | AGGTG | | TTATG | | CTTCA | (SEQ | NO: | | |
| | | GGAAA | | TTTAG | | GATAA | ID | 17811) | | |
| | | TGAAG | | C | | AGCTC | NO: | | | |
| | | TGTCT | | (SEQ | | ATTTG | 32990) | | | |
| | | TTCAA | | ID | | AATCT | | | | |
| | | TTGTA | | NO: | | TCGAA | | | | |
| | | AGCAA | | 7519) | | TCAAG | | | | |
| | | ACT | | | | TCTGT | | | | |
| | | (SEQ | | | | AGAGC | | | | |
| | | ID | | | | CGGAG | | | | |
| | | NO: | | | | GACTC | | | | |
| | | 1583) | | | | TGCTG | | | | |
| | | | | | | TGTAT | | | | |
| | | | | | | CTC | | | | |
| | | | | | | (SEQ | | | | |
| | | | | | | ID | | | | |
| | | | | | | NO: | | | | |
| | | | | | | 13455) | | | | |
| Clonotype_1 | TRA | QQKVQ | DRNFQ | FWWYR | IFSDG | KKEGR | CAASE | GDGTQ | | |
| | | QSPES | Y | QHSGE | D | FTAHL | HGNNR | LVVKP | | |
| | | LSVPE | (SEQ | GPKAL | (SEQ | NKASL | IFF | (SEQ | | |
| | | GGMAS | ID | MS | ID | HVSLH | (SEQ | ID | | |
| | | FNCTS | NO: | (SEQ | NO: | IRDSQ | ID | NO: | | |
| | | S | 2970) | ID | 8906) | PSDSA | NO: | 16328) | | |
| | | (SEQ | | NO: | | LYF | 32991) | | | |
| | | ID | | 5938) | | (SEQ | | | | |
| | | NO: | | | | ID | | | | |
| | | 2) | | | | NO: | | | | |
| | | | | | | 11874) | | | | |
| Clonotype_1 | TRA | CAGCA | GATCG | TTCTG | ATCTT | AAGAA | TGTGC | GGTGA | | |
| Nucleotide | | GAAGG | TAATT | GTGGT | CTCTG | AGAAG | AGCTA | TGGGA | | |
| sequence | | TGCAG | TTCAG | ACAGA | ATGGT | GCAGA | GTGAG | CGCAG | | |
| | | CAGAG | TAC | CAGCA | GAC | TTCAC | CATGG | CTGGT | | |
| | | CCCAG | (SEQ | TTCTG | (SEQ | AGCTC | GAATA | GGTGA | | |
| | | AATCC | ID | GAGAA | ID | ACCTC | ACAGA | AGCCC | | |
| | | CTCAG | NO: | GGCCC | NO: | AATAA | ATCTT | A | | |
| | | TGTCC | 4454) | CAAGG | 10390) | GGCCA | CTTT | (SEQ | | |
| | | CAGAG | | CACTG | | GCCTG | (SEQ | ID | | |
| | | GGAGG | | ATGTC | | CATGT | ID | NO: | | |
| | | CATGG | | A | | TTCCC | NO: | 17812) | | |
| | | CCTCT | | (SEQ | | TGCAC | 32992) | | | |
| | | TTCAA | | ID | | ATCAG | | | | |
| | | CTGCA | | NO: | | AGACT | | | | |
| | | CTTCA | | 7422) | | CCCAG | | | | |
| | | AGT | | | | CCCAG | | | | |
| | | (SEQ | | | | TGACT | | | | |
| | | ID | | | | CCGCT | | | | |
| | | NO: | | | | CTCTA | | | | |
| | | 1486) | | | | CTTC | | | | |
| | | | | | | (SEQ | | | | |
| | | | | | | ID | | | | |
| | | | | | | NO: | | | | |
| | | | | | | 13358) | | | | |
| Clonotype_2 | TRB | DMKVT | MSHET | MYWYR | SYDVD | NSEGD | CASSL | GPGTR | 485 | 0.09615385 |
| | | QMPRY | (SEQ | QDPGL | S | IPKGY | GDSPD | LLVL | | |
| | | LIKRM | ID | GLQLI | (SEQ | RVSRK | TQYF | (SEQ | | |
| | | GENVL | NO: | YI | ID | KREHF | (SEQ | ID | | |
| | | LECGQ | 3131) | (SEQ | NO: | SLILD | ID | NO: | | |
| | | D | | ID | 9067) | SAKTN | NO: | 16341) | | |
| | | (SEQ | | NO: | | OTSVY | 32993) | | | |
| | | ID | | 6099) | | F | | | | |
| | | NO: | | | | (SEQ | | | | |
| | | 163) | | | | ID | | | | |
| | | | | | | NO: | | | | |
| | | | | | | 12035) | | | | |
| Clonotype_2 | TRB | GACAT | ATGAG | ATGTA | TCATA | AACAG | TGTGC | GGGCC | | |
| Nucleotide | | GAAAG | CCATG | CTGGT | CGATG | CGAAG | TAGCA | AGGCA | | |
| sequence | | TAACC | AAACA | ATCGA | TTGAT | GAGAC | GTTTA | CTCGG | | |
| | | CAGAT | (SEQ | CAAGA | AGT | ATCCC | GGGGA | CTCCT | | |
| | | GCCAA | ID | CCCTG | (SEQ | TAAAG | CAGCC | CGTGT | | |
| | | GATAC | NO: | GTCTG | ID | GATAC | CTGAC | TAG | | |
| | | CTGAT | 4615) | GGGCT | NO: | AGGGT | ACCCA | (SEQ | | |
| | | CAAAA | | ACAGC | 10551) | CTCAC | GTACT | ID | | |
| | | GAATG | | TGATT | | GGAAG | TT | NO: | | |
| | | GGAGA | | TATAT | | AAGCG | (SEQ | 17825) | | |
| | | GAATG | | C | | GGAGC | ID | | | |
| | | TTTTG | | (SEQ | | ATTTC | NO: | | | |
| | | CTGGA | | ID | | TCCCT | 32994) | | | |
| | | ATGTG | | NO: | | GATTC | | | | |
| | | GACAG | | 7583) | | TGGAT | | | | |
| | | GAC | | | | TCTGC | | | | |
| | | (SEQ | | | | TAAAA | | | | |
| | | ID | | | | CAAAC | | | | |
| | | NO: | | | | CAGAC | | | | |
| | | 1647) | | | | ATCTG | | | | |
| | | | | | | TGTAC | | | | |
| | | | | | | TTC | | | | |
| | | | | | | (SEQ | | | | |
| | | | | | | ID | | | | |
| | | | | | | NO: | | | | |
| | | | | | | 13519) | | | | |
| Clonotype_2 | TRA | QQKVQ | DRNFQ | FWWYR | IFSDG | KKEGR | CAASE | GQGTS | | |
| | | QSPES | Y | QHSGE | D | FTAHL | HGASS | LSVVP | | |
| | | LSVPE | (SEQ | GPKAL | (SEQ | NKASL | SFSKL | (SEQ | | |
| | | GGMAS | ID | MS | ID | HVSLH | VF | ID | | |
| | | LNCTS | NO: | (SEQ | NO: | IRDSQ | (SEQ | NO: | | |
| | | S | 2970) | ID | 8906) | PSDSA | ID | 16422) | | |
| | | (SEQ | | NO: | | LYF | NO: | | | |
| | | ID | | 5938) | | (SEQ | 32995) | | | |
| | | NO: | | | | ID | | | | |
| | | 64) | | | | NO: | | | | |
| | | | | | | 11874) | | | | |
| Clonotype_2 | TRA | CAGCA | GATCG | TTCTG | ATCTT | AAGAA | TGTGC | GGGCA | | |
| Nucleotide | | GAAGG | TAATT | GTGGT | CTCTG | AGAAG | AGCTA | GGGGA | | |
| sequence | | TGCAG | TTCAG | ACAGA | ATGGT | GCAGA | GTGAG | CATCC | | |
| | | CAGAG | TAC | CAGCA | GAC | TTCAC | CATGG | TTATC | | |
| | | CCCAG | (SEQ | TTCTG | (SEQ | AGCTC | GGCAT | AGTCG | | |
| | | AATCC | ID | GAGAA | ID | ACCTC | CCTCC | TTCCA | | |
| | | CTCAG | NO: | GGCCC | NO: | AATAA | TCCTT | A | | |
| | | TGTCC | 4454) | CAAGG | 10390) | GGCCA | CAGCA | (SEQ | | |
| | | CAGAG | | CACTG | | GCCTG | AGCTG | ID | | |
| | | GGAGG | | ATGTC | | CATGT | GTGTT | NO: | | |
| | | CATGG | | C | | TTCCC | T | 17906) | | |
| | | CCTCT | | (SEQ | | TGCAC | (SEQ | | | |
| | | CTCAA | | ID | | ATCAG | ID | | | |
| | | CTGCA | | NO: | | AGACT | NO: | | | |
| | | CTTCA | | 7944) | | CCCAG | 32996) | | | |
| | | AGT | | | | CCCAG | | | | |
| | | (SEQ | | | | TGACT | | | | |
| | | ID | | | | CCGCT | | | | |
| | | NO: | | | | CTCTA | | | | |
| | | 1548) | | | | CTTC | | | | |
| | | | | | | (SEQ | | | | |
| | | | | | | ID | | | | |
| | | | | | | NO: | | | | |
| | | | | | | 13358) | | | | |
| Clonotype_3 | TRB | EAAVT | NNHDY | MYWYR | SYVAD | TEKGD | CASSE | GPGTR | 263 | 0.05214116 |
| | | QSPRS | (SEQ | QDTGH | S | IPDGY | GSSYE | LTVL | | |
| | | KVAVT | ID | GLRLI | (SEQ | KASRP | QYF | (SEQ | | |
| | | GGKVT | NO: | HY | ID | SQENF | (SEQ | ID | | |
| | | LSCHO | 2975) | (SEQ | NO: | SLILE | ID | NO: | | |
| | | T | | ID | 8911) | LASLS | NO: | 16327) | | |
| | | (SEQ | | NO: | | QTAVY | 32997) | | | |
| | | ID | | 5939) | | F | | | | |
| | | NO: | | | | (SEQ | | | | |
| | | 7) | | | | ID | | | | |
| | | | | | | NO: | | | | |
| | | | | | | 11879) | | | | |
| Clonotype_3 | TRB | GAGGC | AATAA | ATGTA | TCATA | ACGGA | TGTGC | GGTCC | | |
| Nucleotide | | TGCAG | CCATG | CTGGT | TGTCG | GAAAG | CAGCA | CGGCA | | |
| sequence | | TCACC | ACTAT | ATCGG | CTGAC | GAGAT | GTGAG | CCAGG | | |
| | | CAAAG | (SEQ | CAGGA | AGC | ATCCC | GGGAG | CTCAC | | |
| | | TCCAA | ID | CACGG | (SEQ | TGATG | CTCCT | GGTTT | | |
| | | GAAGC | NO: | GGCAT | ID | GGTAC | ATGAA | TAG | | |
| | | AAGGT | 4459) | GGGCT | NO: | AAGGC | CAGTA | (SEQ | | |
| | | GGCAG | | GAGGC | 10395) | CTCCA | CTTC | ID | | |
| | | TAACA | | TGATC | | GACCA | (SEQ | NO: | | |
| | | GGAGG | | CATTA | | AGCCA | ID | 17811) | | |
| | | AAAGG | | C | | AGAGA | NO: | | | |
| | | TGACA | | (SEQ | | ATTTC | 32998) | | | |
| | | TTGAG | | ID | | TCTCT | | | | |
| | | CTGTC | | NO: | | CATTC | | | | |
| | | ACCAG | | 7427) | | TGGAG | | | | |
| | | ACT | | | | TTGGC | | | | |
| | | (SEQ | | | | TTCCC | | | | |
| | | ID | | | | TTTCT | | | | |
| | | NO: | | | | CAGAC | | | | |
| | | 1491) | | | | AGCTG | | | | |
| | | | | | | TATAT | | | | |
| | | | | | | TTC | | | | |
| | | | | | | (SEQ | | | | |
| | | | | | | ID | | | | |
| | | | | | | NO: | | | | |
| | | | | | | 13363) | | | | |
| Clonotype_3 | TRA | QQKVQ | DRNFQ | FWWYR | IFSDG | KKEGR | CAASE | GTGTK | | |
| | | QSPES | Y | QHSGE | D | FTAHL | HGNSG | LQVVP | | |
| | | LSVPE | (SEQ | GPKAL | (SEQ | NKASL | TYQRF | (SEQ | | |
| | | GGMAS | ID | MS | ID | HVSLH | (SEQ | ID | | |
| | | FNCTS | NO: | (SEQ | NO: | IRDSQ | ID | NO: | | |
| | | S | 2970) | ID | 8906) | PSDSA | NO: | 16432) | | |
| | | (SEQ | | NO: | | LYF | 32999) | | | |
| | | ID | | 5938) | | (SEQ | | | | |
| | | NO: | | | | ID | | | | |
| | | 2) | | | | NO: | | | | |
| | | | | | | 11874) | | | | |
| Clonotype_3 | TRA | CAGCA | GATCG | TTCTG | ATCTT | AAGAA | TGTGC | GGAAC | | |
| Nucleotide | | GAAGG | TAATT | GTGGT | CTCTG | AGAAG | AGCTA | TGGGA | | |
| sequence | | TGCAG | TTCAG | ACAGA | ATGGT | GCAGA | GTGAG | CAAAA | | |
| | | CAGAG | TAC | CAGCA | GAC | TTCAC | CATGG | CTCCA | | |
| | | CCCAG | (SEQ | TTCTG | (SEQ | AGCTC | AAATT | AGTCG | | |
| | | AATCC | ID | GAGAA | ID | ACCTC | CTGGG | TTCCA | | |
| | | CTCAG | NO: | GGCCC | NO: | AATAA | ACTTA | A | | |
| | | TGTCC | 4454) | CAAGG | 10390) | GGCCA | CCAGA | (SEQ | | |
| | | CAGAG | | CACTG | | GCCTG | GGTTT | ID | | |
| | | GGAGG | | ATGTC | | CATGT | (SEQ | NO: | | |
| | | CATGG | | A | | TTCCC | ID | 17916) | | |
| | | CCTCT | | (SEQ | | TGCAC | NO: | | | |
| | | TTCAA | | ID | | ATCAG | 33000) | | | |
| | | CTGCA | | NO: | | AGACT | | | | |
| | | CTTCA | | 7422) | | CCCAG | | | | |
| | | AGT | | | | CCCAG | | | | |
| | | (SEQ | | | | TGACT | | | | |
| | | ID | | | | CCGCT | | | | |
| | | NO: | | | | CTCTA | | | | |
| | | 1486) | | | | CTTC | | | | |
| | | | | | | (SEQ | | | | |
| | | | | | | ID | | | | |
| | | | | | | NO: | | | | |
| | | | | | | 13358) | | | | |
| Clonotype_4 | TRB | DAGVT | SGHND | LFWYR | FRSKS | MEDGG | CASSF | GPGTR | 183 | 0.03628073 |
| | | QTPRH | (SEQ | QTKIQ | L | AFKDR | SDWGD | LTVL | | |
| | | EVAEK | ID | GLELL | (SEQ | FKAEM | EQYF | (SEQ | | |
| | | GQTII | NO: | SY | ID | LNSSF | (SEQ | ID | | |
| | | LKCEP | 4207) | (SEQ | NO: | STLKI | ID | NO: | | |
| | | V | | ID | 10143) | QPTEP | NO: | 16327) | | |
| | | (SEQ | | NO: | | KDSAV | 33001) | | | |
| | | ID | | 7175) | | YL | | | | |
| | | NO: | | | | (SEQ | | | | |
| | | 1239) | | | | ID | | | | |
| | | | | | | NO: | | | | |
| | | | | | | 13111) | | | | |
| Clonotype_4 | TRB | GATGC | TCAGG | CTTTT | TTCCG | ATGGA | TGTGC | GGTCC | | |
| Nucleotide | | TGGAG | CCACA | CTGGT | CAGCA | AGATG | CAGCA | CGGCA | | |
| sequence | | TTACC | ATGAC | ACAGA | AGTCT | GTGGG | GTTTC | CCAGG | | |
| | | CAGAC | (SEQ | CAGAC | CTT | GCTTT | TCGGA | CTCAC | | |
| | | ACCCA | ID | CAAGA | (SEQ | CAAGG | CTGGG | GGTTT | | |
| | | GACAT | NO: | TACAG | ID | ATCGA | GGGAT | TAG | | |
| | | GAGGT | 5691) | GGACT | NO: | TTCAA | GAACA | (SEQ | | |
| | | GGCAG | | AGAGT | 11627) | AGCTG | GTACT | ID | | |
| | | AGAAA | | TGCTG | | AGATG | TC | NO: | | |
| | | GGACA | | AGCTA | | CTAAA | (SEQ | 17811) | | |
| | | AACAA | | C | | TTCAT | ID | | | |
| | | TAATC | | (SEQ | | CCTTC | NO: | | | |
| | | CTGAA | | ID | | TCCAC | 33002) | | | |
| | | GTGTG | | NO: | | TCTGA | | | | |
| | | AGCCA | | 8659) | | AGATT | | | | |
| | | GTT | | | | CAACC | | | | |
| | | (SEQ | | | | TACAG | | | | |
| | | ID | | | | AACCC | | | | |
| | | NO: | | | | AAGGA | | | | |
| | | 2723) | | | | CTCAG | | | | |
| | | | | | | CTGTG | | | | |
| | | | | | | TATCT | | | | |
| | | | | | | G | | | | |
| | | | | | | (SEQ | | | | |
| | | | | | | ID | | | | |
| | | | | | | NO: | | | | |
| | | | | | | 14595) | | | | |
| Clonotype_4 | TRA | QQKVQ | DRNFQ | FWWYR | IFSDG | KKEGR | CAASE | GKGTQ | | |
| | | QSPES | Y | QHSGE | D | FTAHL | HGNNR | VVVLP | | |
| | | LSVPE | (SEQ | GPKAL | (SEQ | NKASL | LTL | (SEQ | | |
| | | GGMAS | ID | MS | ID | HVSLH | (SEQ | ID | | |
| | | LNCTS | NO: | (SEQ | NO: | IRDSQ | ID | NO: | | |
| | | S | 2970) | ID | 8906) | PSDSA | NO: | 16644) | | |
| | | (SEQ | | NO: | | LYF | 33003) | | | |
| | | ID | | 5938) | | (SEQ | | | | |
| | | NO: | | | | ID | | | | |
| | | 64) | | | | NO: | | | | |
| | | | | | | 11874) | | | | |
| Clonotype_4 | TRA | CAGCA | GATCG | TTCTG | ATCTT | AAGAA | TGTGC | GGGAA | | |
| Nucleotide | | GAAGG | TAATT | GTGGT | CTCTG | AGAAG | AGCTA | GGGAA | | |
| sequence | | TGCAG | TTCAG | ACAGA | ATGGT | GCAGA | GTGAG | CCCAG | | |
| | | CAGAG | TAC | CAGCA | GAC | TTCAC | CACGG | GTGGT | | |
| | | CCCAG | (SEQ | TTCTG | (SEQ | AGCTC | CAACA | GGTGT | | |
| | | AATCC | ID | GAGAA | ID | ACCTC | ACAGA | TACCA | | |
| | | CTCAG | NO: | GGCCC | NO: | AATAA | CTTAC | A | | |
| | | TGTCC | 4454) | CAAGG | 10390) | GGCCA | TTTG | (SEQ | | |
| | | CAGAG | | CACTG | | GCCTG | (SEQ | ID | | |
| | | GGAGG | | ATGTC | | CATGT | ID | NO: | | |
| | | CATGG | | C | | TTCCC | NO: | 18128) | | |
| | | CCTCT | | (SEQ | | TGCAC | 33004) | | | |
| | | CTCAA | | ID | | ATCAG | | | | |
| | | CTGCA | | NO: | | AGACT | | | | |
| | | CTTCA | | 7944) | | CCCAG | | | | |
| | | AGT | | | | CCCAG | | | | |
| | | (SEQ | | | | TGACT | | | | |
| | | ID | | | | CCGCT | | | | |
| | | NO: | | | | CTCTA | | | | |
| | | 1548) | | | | CTTC | | | | |
| | | | | | | (SEQ | | | | |
| | | | | | | ID | | | | |
| | | | | | | NO: | | | | |
| | | | | | | 13358) | | | | |
| Clonotype_5 | TRB | GGIIT | FNHDT | MYWYR | SITEN | LQKGD | CASSI | GPGTR | 171 | 0.03390167 |
| | | QTPKF | (SEQ | QDSGK | D | LSEGY | SDWGD | LTVL | | |
| | | LIGQE | ID | GLRLI | (SEQ | DASRE | EQYF | (SEQ | | |
| | | GQKLT | NO: | YY | ID | KKSSF | (SEQ | ID | | |
| | | LKCQQ | 2995) | (SEQ | NO: | SLTVT | ID | NO: | | |
| | | N | | ID | 8931) | SAQKN | NO: | 16327) | | |
| | | (SEQ | | NO: | | EMAVF | 33005) | | | |
| | | ID | | 5963) | | L | | | | |
| | | NO: | | | | (SEQ | | | | |
| | | 27) | | | | ID | | | | |
| | | | | | | NO: | | | | |
| | | | | | | 11899) | | | | |
| Clonotype_5 | TRB | GGTGG | TTCAA | ATGTA | TCAAT | CTTCA | TGTGC | GGTCC | | |
| Nucleotide | | CATCA | TCATG | CTGGT | AACTG | AAAAG | CAGCA | CGGCA | | |
| sequence | | TTACT | ATACA | ACCGA | AAAAC | GCGAT | GTATA | CCAGG | | |
| | | CAGAC | (SEQ | CAGGA | GAT | CTATC | TCGGA | CTCAC | | |
| | | ACCCA | ID | TTCAG | (SEQ | TGAAG | CTGGG | GGTTT | | |
| | | AATTC | NO: | GGAAA | ID | GCTAT | GGGAT | TAG | | |
| | | CTGAT | 4479) | GGATT | NO: | GATGC | GAACA | (SEQ | | |
| | | TGGTC | | GAGAC | 10415) | GTCTC | GTACT | ID | | |
| | | AGGAA | | TGATC | | GAGAG | TC | NO: | | |
| | | GGGCA | | TACTA | | AAGAA | (SEQ | 17811) | | |
| | | AAAAC | | T | | GTCAT | ID | | | |
| | | TGACC | | (SEQ | | CTTTT | NO: | | | |
| | | TTGAA | | ID | | TCTCT | 33006) | | | |
| | | ATGTC | | NO: | | CACTG | | | | |
| | | AACAG | | 7447) | | TGACA | | | | |
| | | AAT | | | | TCTGC | | | | |
| | | (SEQ | | | | CCAGA | | | | |
| | | ID | | | | AGAAC | | | | |
| | | NO: | | | | GAGAT | | | | |
| | | 1511) | | | | GGCCG | | | | |
| | | | | | | TTTTT | | | | |
| | | | | | | CTC | | | | |
| | | | | | | (SEQ | | | | |
| | | | | | | ID | | | | |
| | | | | | | NO: | | | | |
| | | | | | | 13383) | | | | |
| Clonotype_5 | TRA | QQKVQ | DRNFQ | FWWYR | IFSDG | KKEGR | CAASE | GDGTQ | | |
| | | QSPES | Y | QHSGE | D | FTAHL | HGNNR | LVVKP | | |
| | | LSVPE | (SEQ | GPKAL | (SEQ | NKASL | IFF | (SEQ | | |
| | | GGMAS | ID | MS | ID | HVSLH | (SEQ | ID | | |
| | | FNCTS | NO: | (SEQ | NO: | IRDSQ | ID | NO: | | |
| | | S | 2970) | ID | 8906) | PSDSA | NO: | 16328) | | |
| | | (SEQ | | NO: | | LYF | 32991) | | | |
| | | ID | | 5938) | | (SEQ | | | | |
| | | NO: | | | | ID | | | | |
| | | 2) | | | | NO: | | | | |
| | | | | | | 11874) | | | | |
| Clonotype_5 | TRA | CAGCA | GATCG | TTCTG | ATCTT | AAGAA | TGTGC | GGTGA | | |
| Nucleotide | | GAAGG | TAATT | GTGGT | CTCTG | AGAAG | AGCTA | TGGGA | | |
| sequence | | TGCAG | TTCAG | ACAGA | ATGGT | GCAGA | GTGAG | CGCAG | | |
| | | CAGAG | TAC | CAGCA | GAC | TTCAC | CACGG | CTGGT | | |
| | | CCCAG | SEQ | TTCTG | SEQ | AGCTC | CAATA | GGTGA | | |
| | | AATCC | ID | GAGAA | ID | ACCTC | ACAGA | AGCCC | | |
| | | CTCAG | NO: | GGCCC | NO: | AATAA | ATCTT | A | | |
| | | TGTCC | 4454) | CAAGG | 10390) | GGCCA | CTTT | SEQ | | |
| | | CAGAG | | CACTG | | GCCTG | SEQ | ID | | |
| | | GGAGG | | ATGTC | | CATGT | ID | NO: | | |
| | | CATGG | | A | | TTCCC | NO: | 17812) | | |
| | | CCTCT | | SEQ | | TGCAC | 33007) | | | |
| | | TTCAA | | ID | | ATCAG | | | | |
| | | CTGCA | | NO: | | AGACT | | | | |
| | | CTTCA | | 7422) | | CCCAG | | | | |
| | | AGT | | | | CCCAG | | | | |
| | | SEQ | | | | TGACT | | | | |
| | | ID | | | | CCGCT | | | | |
| | | NO: | | | | CTCTA | | | | |
| | | 1486) | | | | CTTC | | | | |
| | | | | | | SEQ | | | | |
| | | | | | | ID | | | | |
| | | | | | | NO: | | | | |
| | | | | | | 13358) | | | | |

[0312] FWR=framework region; CDR=complementarity determining region

[0313] To isolate TCRs recognizing human ALK peptides, four cohorts of HLA-B*07:02 transgenic mice (CB6F1-B2mtm1Unc Tg(B2M)55Hpl Tg(HLA-B*0702/H2-Kb)B7.xx, Taconic®) were vaccinated with either RPRPSQPSSL (SEQ ID NO: 32957) or IVRCIGVSL (SEQ ID NO: 32958) peptides. Mice received two priming subcutis injections at the base of the tail of either RPRPSQPSSL (SEQ ID NO: 32957) or IVRCIGVSL (SEQ ID NO: 32958) peptide and adjuvant cyclic diguanylate monophosphate (c-di-GMP) at day 0 and day 14. Seven days after the first vaccination booster, intracellular staining (ICS) was performed from the peripheral blood of naïve mice and mice vaccinated with either RPRPSQPSSL (SEQ ID NO: 32957) or IVRCIGVSL (SEQ ID NO: 32958). The results showed that CD8 T cells of mice vaccinated with RPRPSQPSSL (SEQ ID NO: 32957) or IVRCIGVSL (SEQ ID NO: 32958) produced both IFN-γ and TNF-α (FIGS. 10-13). Seven days after the last vaccination booster, which occurred on day 56, splenocytes and inguinal lymph node cells of one naïve mouse and mice vaccinated with either RPRPSQPSSL (SEQ ID NO: 32957) or IVRCIGVSL (SEQ ID NO: 32958) were collected and stimulated overnight in vitro with either RPRPSQPSSL (SEQ ID NO: 32957) or IVRCIGVSL (SEQ ID NO: 32958) peptides, respectively. Next, untouched CD8⁺ T cells were purified and the expression of CD137 (4-1BB), a marker of T cell activation, was evaluated by flow cytometry. The results showed that CD137 (4-1BB) expression was detectable only in CD8⁺ T cells collected from mice vaccinated with RPRPSQPSS (SEQ ID NO: 32987) or IVRCIGVSL (SEQ ID NO: 32958) peptides that were also pulsed overnight in vitro with either RPRPSQPSS (SEQ ID NO: 32987) or IVRCIGVSL (SEQ ID NO: 32958) peptides (FIGS. 14-18).

[0314] CD8⁺/CD137⁺ (4-1BB) T cells were sorted from the splenocytes, and inguinal lymph node cells of mice vaccinated with either RPRPSQPSSL (SEQ ID NO: 32957) or IVRCIGVSL (SEQ ID NO: 32958) peptides and subjected to single-cell sequencing (10× Genomics®). TCR pair-ended sequencing of 412 CD8/CD137 (4-1BB) T cells sorted from one mouse of the first cohort of HLA*B07:02 mice vaccinated with RPRPSQPSSL (SEQ ID NO: 32957), identified 48 unique clonotypes, whose relative frequency ranged from 85.44% to 0.24%, while 305 unique clonotypes whose relative frequency ranged from 16.61% to 0.18% were identified from 554 CD8⁺/CD137⁺ (4-1BB) sorted from three mice of the same cohort (FIG. 19). The cloned sequences of the ALK-specific TCRs that recognize human ALK peptides presented by HLA-B*07:02 human HLA from the one mouse of the first cohort of HLA*B07:02 mice vaccinated with RPRPSQPSSL (SEQ ID NO: 32957) are provided in SEQ ID NOs XXX. The cloned sequences of the ALK-specific TCRs that recognize human ALK peptides presented by HLA-B*07:02 human HLA from the three mice of the first cohort of HLA*B07:02 mice vaccinated with RPRPSQPSSL (SEQ ID NO: 32957) are provided in SEQ ID NOs XXX.

[0315] 59 CD8⁺/CD137⁺ (4-1BB) T cells that were sorted from one mouse of the second cohort of HLA*B07:02 mice vaccinated with RPRPSQPSSL (SEQ ID NO: 32957) were also sequenced, resulting in 14 unique clonotypes, whose frequency ranged from 64.4% to 1.7% (FIG. 19). The cloned sequences of the ALK-specific TCRs that recognize human ALK peptides presented by HLA-B*07:02 human HLA from the one mouse of the second cohort of HLA*B07:02 mice vaccinated with RPRPSQPSSL (SEQ ID NO: 32957) are provided in SEQ ID NOs XXX.

[0316] TCR pair-ended sequencing of 4398 CD8⁺/CD137⁺ (4-1BB) T cells sorted from the pool of three mice of the first cohort of HLA*B07:02 mice vaccinated with IVRCIGVSL (SEQ ID NO: 32958) identified 742 unique clonotypes, whose frequency ranged from 10.28% to 0.02%, while TCR pair-ended sequencing of 98 CD8⁺/CD137⁺ (4-1BB) T cells sorted from four mice of the second cohort of HLA*B07:02 mice vaccinated with IVRCIGVSL (SEQ ID NO: 32958) identified 68 unique clonotypes whose frequency ranged from 10.20% to 1.02% (FIG. 20). The cloned sequences of the ALK-specific TCRs that recognize human ALK peptides presented by HLA-B*0) 7:02 human HLA from the three mice of the first cohort of HLA*B07:02 mice vaccinated with IVRCIGVSL (SEQ ID NO: 32958) are provided in SEQ ID NOs XXX. The cloned sequences of the ALK-specific TCRs that recognize human ALK peptides presented by HLA-B*0) 7:02 human HLA from the four mice of the second cohort of HLA*B07:02 mice vaccinated with IVRCIGVSL (SEQ ID NO: 32958) are provided in SEQ ID NOs XXX.

[0317] The transcriptomic profile of the expanded clonotypes (VDJ count≥4) was analyzed versus the not expanded clonotypes (VDJ count<4) identified in the first cohort of mice vaccinated with both RPRPSQPSSL (SEQ ID NO: 32957) and IVRCIGVSL (SEQ ID NO: 32958). It was found that the expanded clonotypes are characterized by a different gene expression profile compared with the not expanded clonotypes (FIGS. 21-23). Gene Set Enrichment Analysis was also performed between the expanded and the not expanded ALK clonotypes identified from the first cohort of HLA*B07:02 mice vaccinated with RPRPSQPSSL (SEQ ID NO: 32957). Significant upregulation of multiple pathways of the adaptive immune response was observed, including T-cell activation, IFN-γ signaling, IFN-γ production, cytokine release, and T-cell proliferation in the expanded clonotype group, suggesting functional activity of these clonotypes (FIGS. 24-25).

[0318] The paired α and β sequence of all the expanded ALK-specific clonotypes (VDJ count≥4) isolated from the first cohort of HLA*B07:02 mice vaccinated with RPRPSQPSSL (SEQ ID NO: 32957) was cloned into a retroviral vector. Two different retroviral vectors were generated for the three most expanded ALK clonotypes of group 1 and for the two most expanded clonotypes of group 2, one expressing the constant β chain 1 (Cβ1) of the murine TCR, and the other expressing the constant β chain 2 (Cβ2) of the murine TCR. All the other ALK expanded clonotypes were cloned with Cβ1 or Cβ2 based on the RNA sequencing data of these cells. Untouched CD3 T cells were purified from Peripheral Blood Mononuclear Cells of healthy donors (PMBCs) and were activated in vitro with anti-CD3 and anti-CD28 beads (ratio cells:beads cells 1:1). 10 ng/ml rhIL-7 and 5 ng/ml rhIL 15 for two days before retroviral transduction with the ALK TCR constructs (both Cβ1 and Cβ2). The transduction efficiency was evaluated three days post-retroviral infection by analyzing the expression of the GFP that was inserted as a reporter in the retroviral construct.

[0319] GFP expression revealed that more than 90% of the CD3⁺ T cells of two independent donors were infected with the ALK TCR constructs (both Cβ1 and Cβ2) and the infection level among CD8 T and CD4 T subpopulations was comparable (FIGS. 26-27). The percentage of expression of each ALK TCR (both Cβ1 and Cβ2) was calculated by evaluating the expression and the mean fluorescence intensity (MFI) of the murine TCRβ on the surface of both CD8 T cells and CD4⁺ T cells (FIGS. 28-30). Furthermore, the specificity of the ALK TCR constructs (both Cβ1 and Cβ2) was evaluated by levels of binding to an ALK Dextramer® that has the RPRPSQPSSL (SEQ ID NO: 32957) peptide bound to HLA*B07:02 molecules (FIGS. 31-32). The results demonstrated that despite the transduction efficiency being comparable among all the different ALK constructs tested in two healthy donors, the expression of the ALK TCRs on the surface of both CD8 T cells and CD4 T was construct-dependent, ranging from 2% to 90% and reflecting a different level of mispairing of each ALK TCR construct with the endogenous TCR repertoire. The level of binding to the ALK Dextramer® was variable among all the ALK TCR-T cells (both Cβ1 and Cβ2), with percentages spanning from 1% to 96% in both CD8⁺ T cells and CD4 T of two healthy donors (FIGS. 33-40).

[0320] The ALK TCR-T cells were expanded in vitro for 11 days with replacement of 10 ng/ml rhIL-7 and 5 ng/ml rhIL 15 every 2 days. On day 11, untouched CD8⁺ T cells were purified and kept in culture for 2 more days in the absence of rhIL7 and rhIL15. On day 12, a panel of luciferase-positive (FFLUC) tumor cells: NCI H2228 (HLA*B07:02 positive. E6; A20). NCI H3122 (HLA*B07:02 negative E13; A20), NCI H226 (HLA*B07:02 positive. ALK-negative), CaSki (HLA-B07:02 positive, ALK-negative), Karpas 299 (HLA*B07:02 positive, NPM; ALK) and JB6 (HLA*B07:02 negative, NPM; ALK) (FIG. 41) were plated in black 96 well plates, and on day 13, ALK TCR-T cells were added to the tumor cells with a ratio of 1:1. The number of ALK TCR-T cells added was normalized based on the binding to the ALK Dextramer®. The percentage killing was calculated by evaluating the residual bioluminescence of the tumor cells with an IVIS machine at different time points after the co-culture started. The results demonstrated the specificity of the ALK TCR-T cells we generated for both ALK and HLA*B07:02, as no killing of both ALK-negative tumor cells that express HLA*B07:02 and ALK-positive tumor cells that do not express HLA*B07:02 was observed. To further confirm the specificity of the ALK TCR-T cells, the results showed that TCR-T 2.2_Cβ1 and TCR-T 2.2_Cβ2 were able to kill ALK-negative cells that express HLA*B07:02 only when ALK-negative cells were pulsed for two hours with the ALK peptide RPRPSQPSSL (SEQ ID NO: 32957) before the co-culture was started; no killing from any of the TCR-T cells generated when pulsed with the ALK peptide RPRPSQPSSL (SEQ ID NO: 32957) tumor cells that are negative for HLA*B07:02 expression was observed. Instead, very specific, potent, and time-dependent killing of the TCR-T 2.2_Cβ1 and Cβ2 in ALK-positive cells that express HLA*B07:02 was observed (FIGS. 42-52).

[0321] Table 2 provides TCR sequences of TCRs isolated from 3 mice of the first cohort of mice vaccinated with RPRPSQPSSL (SEQ ID NO: 32957). Table 3 provides sequences of TCRs isolated from one additional mouse of the first cohort of mice vaccinated with RPRPSQPSSL (SEQ ID NO: 32957).

TABLE 2
TCR sequences from 3 mice, cohort 1, RPRPSQPSSL (SEQ ID NO: 32957) vaccination

| # | Freq | Chain | fwr1 | cdr1 | fwr2 | cdr2 | fwr3 | cdr3 | fwr4 |
|---|---|---|---|---|---|---|---|---|---|
| Clonotype_ | 92 | TRB | GGIITQTPKFLIGQEGQK | FNHDT | MYWYRQDSGKGLR | SITEND | LQKGDLSEGYDASREKKSSFSLTVT | CASSIGTGDNQAPL | GEGTRLSV |
| 1 | | | LTLKCQQN (SEQ ID | (SEQ ID | LIYY (SEQ ID | (SEQ ID | SAQKNEMAVFL (SEQ ID NO: | F (SEQ ID NO: | L (SEQ ID |
| | | | NO: 27) | NO: 2995) | NO: 5963) | NO: 8931) | 11899) | 25393) | NO: 16441) |
| Clonotype_ | 92 | TRA | GEQVEQLPSSLIVQEGAS | DSASVY | FPWYKQEPGKRLQ | IRSNMER | KQNQRLTLLFDKKTKHLSLHITATQ | CSASNNYAQGLTF | GLGTRVSVF |
| 1 | | | VLINCSYT (SEQ ID | (SEQ ID | FIID (SEQ ID | (SEQ ID | PGDSAIYF (SEQ ID NO: | (SEQ ID NO: | P (SEQ ID |
| | | | NO: 160) | NO: | NO: 6096) | NO: | 12032) | 25394) | NO: |
| | | | | 3128) | | 8952) | | | 16344) |
| Clonotype_ | 34 | TRB | VTLLEQNPRWRLVPRGQA | NSQYPW | MSWYQQDLQKQLQ | LRSPGD | KEVKSLPGADYLATRVTDTELRLQV | CTCSADPGGYAEQF | GPGTRLTVL |
| 2 | | | VNLRCILK (SEQ ID | (SEQ ID | WLFT (SEQ ID | (SEQ ID | ANMSQGRTLY (SEQ ID NO: | F (SEQ ID NO: | (SEQ ID |
| | | | NO: 23) | NO: 2991) | NO: 5959) | NO: 8927) | 11895) | 25395) | NO: |
| | | | | | | | | | 16327) |
| Clonotype_ | 34 | TRA | GEQVEQLPSSLIVQEGAS | DSASVY | FPWYKQEPGKRLQ | IRSNMER | KQNQRLTLLFDKKTKHLSLHITATQ | CSASDNYAQGLTF | GLGTRVSVF |
| 2 | | | VLINCSYT (SEQ ID | (SEQ ID | FIID (SEQ ID | (SEQ ID | PGDSAIYF (SEQ ID NO: | (SEQ ID NO: | P (SEQ ID |
| | | | NO: 160) | NO: | NO: 6096) | NO: | 12032) | 25396) | NO: |
| | | | | 3128) | | 8952) | | | 16344) |
| Clonotype_ | 21 | TRB | GGIITQTPKFLIGQEGQK | FNHDT | MYWYRQDSGKGLR | SITEND | LQKGDLSEGYDASREKKSSFSLTVT | CASTDSGNTLYF | GEGSRLIVV |
| 3 | | | LTLKCQQN | (SEQ ID | LIYY (SEQ ID | (SEQ ID | SAQKNEMAVFL (SEQ ID NO: | (SEQ ID NO: | (SEQ ID |
| | | | (SEQ ID | NO: | NO: 5963) | NO: | 11899) | 25397) | NO: |
| | | | NO: 27) | 2995) | | 8931) | | | 16471) |
| Clonotype_ | 21 | TRA | AQSVTQPDARVTVSEGAS | YFGTPY | FWYVQYPRQGLQ | YYPGDPV | GVNGFEAEFSKSNSSFHLRKASVH | CAVTSSGQKLVF | GQGTILKVY |
| 3 | | | LQLRCKYS (SEQ ID | (SEQ ID | LLLK (SEQ ID | V (SEQ | WSDWAVYF (SEQ ID NO: | (SEQ ID NO: | L (SEQ ID |
| | | | NO: 12) | NO: | NO: 5948) | ID NO: | 11924) | 25398) | NO: |
| | | | | 3020) | | 8956) | | | 16414) |
| Clonotype_ | 14 | TRB | EAAVTQSPRSKVAVTGGK | NNHDY | MYWYRQDTGHGLR | SYVADS | TEKGDIPDGYKASRPSQENFSLILE | CASREGDNSAETLY | GSGTRLTVL |
| 4 | | | VTLSCHQT (SEQ ID | (SEQ ID | LIHY (SEQ ID | (SEQ ID | LASLSQTAVYF (SEQ ID NO: | F (SEQ ID NO: | (SEQ ID |
| | | | NO: 7) | NO: | NO: 5939) | NO: | 11879) | 25399) | NO: |
| | | | | 2975) | | 8911) | | | 16325) |
| Clonotype_ | 14 | TRA | GEQVEQRPPHLSVREGDS | DPNSYY | FFWYKQEPGAGLQ | VFSSTEI | NEGQGFTVLLNKKDKQLSLNLTAAH | CAVTPSSSFSKLVF | GQGTSLSVV |
| 4 | | | AVIICTYT (SEQ ID | (SEQ ID | LLMK (SEQ ID | (SEQ ID | PGDSAVYF (SEQ ID NO: | (SEQ ID NO: | P (SEQ ID |
| | | | NO: 108) | NO: | NO: 6044) | NO: | 11980) | 25400) | NO: |
| | | | | 3010) | | 8946) | | | 16422) |
| Clonotype_ | 11 | TRB | DTTVKQNPRYKLARVGKP | MNHDT | MYWYQKKPNQAPK | YYDKIL | NREADTFEKFQSSRPNNSFCSLYIG | CASSRDGHSNTGQL | GEGSKLTVL |
| 5 | | | VNLICSQT (SEQ ID | (SEQ ID | LLLF (SEQ ID | (SEQ ID | SAGLEYSAMYL (SEQ ID NO: | YF (SEQ ID NO: | (SEQ ID |
| | | | NO: 299) | NO: 3267) | NO: 6235) | NO: 9203) | 12171) | 25401) | NO: 16347) |
| Clonotype_ | 11 | TRA | TQTVSQSDAHVTVFEGDS | YGGSIY | LSWYIQHHGHGLQ | YYSGNPV | GVNGFEAEFSKSDSSFHLRKASVH | CAVRGSNAKLTF | GKGTKLSVK |
| 5 | | | VELRCNYS (SEQ ID | (SEQ ID | FLLK (SEQ ID | V (SEQ | WSDSAVYF (SEQ ID NO: | (SEQ ID NO: | S (SEQ ID |
| | | | NO: 110) | NO: | NO: 6518) | ID NO: | 11946) | 25402) | NO: |
| | | | | 3078) | | 9014) | | | 16342) |
| Clonotype_ | 9 | TRB | DMKVTQMPRYLIKRMGEN | MSHET | MYWYRQDPGLGLQ | SYDVDS | NSEGDIPKGYRVSRKKREHFSLILD | CASSFPLGDYAEQF | GPGTRLTVL |
| 6 | | | VLLECGQD (SEQ ID | (SEQ ID | LIYI (SEQ ID | (SEQ ID | SAKTNQTSVYF (SEQ ID NO: | F (SEQ ID NO: | (SEQ ID |
| | | | NO: 163) | NO: | NO: 6099) | NO: | 12035) | 25403) | NO: |
| | | | | 3131) | | 9067) | | | 16327) |
| Clonotype_ | 9 | TRA | QQKVQQSPESLSVPEGGM | DRNFQY | FWWYRQHSGEGPK | IFSDGD | KKEGRFTAHLNKASLHVSLHIRDSQ | CAASGSSGSWQLIF | GSGTQLTVM |
| 6 | | | ASLNCTSS (SEQ ID | (SEQ ID | ALMS (SEQ ID | (SEQ ID | PSDSALYF (SEQ ID NO: | (SEQ ID NO: | P (SEQ ID |
| | | | NO: 64) | NO: | NO: 5938) | NO: | 11874) | 25404) | NO: |
| | | | | 2970) | | 8906) | | | 16400) |
| Clonotype_ | 8 | TRB | EAAVTQSPRSKVAVTGGK | NNHDY | MYWYRQDTGHGLR | SYVADS | TEKGDIPDGYKASRPSQENFSLILE | CASSDTGEEVFF | GKGTRLTVV |
| 7 | | | VTLSCHQT (SEQ ID | (SEQ ID | LIHY (SEQ ID | (SEQ ID | LASLSQTAVYF (SEQ ID NO: | (SEQ ID NO: | (SEQ ID |
| | | | NO: 7) | NO: | NO: 5939) | NO: | 11879) | 25405) | NO: |
| | | | | 2975) | | 8911) | | | 16333) |
| Clonotype_ | 8 | TRA | SQWGEENLQALSIQEGED | TYTTV | VQWYRQKSGKGPA | IRSNERE | KRSGRLRATLDTSSQSSSLSITGTL | CATDNTGYQNFYF | GKGTSLTVI |
| 7 | | | VTMNCSYK (SEQ ID | (SEQ ID | QLIL (SEQ ID | (SEQ ID | ATDTAVYF (SEQ ID NO: | (SEQ ID NO: | P (SEQ ID |
| | | | NO: 80) | NO: 3048) | NO: 6586) | NO: 8928) | 12030) | 25406) | NO: 16366) |
| Clonotype_ | 7 | TRB | EAAVTQSPRNKVAVTGGK | NNHNN | MYWYRQDTGHGLR | SYGAGS | TEKGDIPDGYKASRPSQENFSLILE | CASGRDNSDYTF | GSGTRLLVI |
| 8 | | | VTLSCNQT (SEQ ID | (SEQ ID | LIHY (SEQ ID | (SEQ ID | LATPSQTSVYF (SEQ ID NO: | (SEQ ID NO: | (SEQ ID |
| | | | NO: 3) | NO: 2971) | NO: 5939) | NO: 8907) | 11875) | 25407) | NO: |
| | | | | | | | | | 16337) |
| Clonotype_ | 7 | TRA | GQGVEQPDNLMSVEGTFA | TSGFNG | LSWYQQREGHAPV | VVLDGL | KDSGHFSTFLSRSNGYSYLLLTELQ | CAVAGNTRKLIF | GLGTTLQVQ |
| 8 | | | RVNCTYS (SEQ ID NO: | (SEQ ID | FLSY (SEQ ID | (SEQ ID | IKDSASYL (SEQ ID NO: | (SEQ ID NO: | P (SEQ ID |
| | | | 4) | NO: | NO: 5940) | NO: | 11876) | 25408) | NO: |
| | | | | 2972) | | 8908) | | | 16326) |
| Clonotype_ | 7 | TRB | EAAVTQSPRNKVAVTGGK | NNHNN | MYWYRQDTGHGLR | SYGAGS | TEKGDIPDGYKASRPSQENFSLILE | CASGDGGAQDTQYF | GPGTRLLVL |
| 9 | | | VTLSCNQT (SEQ ID | (SEQ ID | LIHY (SEQ ID | (SEQ ID | LATPSQTSVYF (SEQ ID NO: | (SEQ ID NO: | (SEQ ID |
| | | | NO: 3) | NO: 2971) | NO: 5939) | NO: 8907) | 11875) | 25409) | NO: |
| | | | | | | | | | 16341) |
| Clonotype_ | 7 | TRA | GDSVTQKQGQVTLSEDDF | TTTYPT | LFWYVQYPGQGPQ | VTTANNK | GISRGFEATYDKGTTSFHLQKASVQ | CALVDRASSGQKLV | GQGTILKVY |
| 9 | | | LFINCTYS (SEQ ID | (SEQ ID | LLLK (SEQ ID | (SEQ ID | ESDSAVYF (SEQ ID NO: | F (SEQ ID NO: | L (SEQ ID |
| | | | NO: 510) | NO: | NO: 6446) | NO: | 12382) | 25410) | NO: |
| | | | | 3478) | | 9054) | | | 16414) |
| Clonotype_ | 7 | TRB | EAAVTQSPRSKVAVTGGK | INNHDY | MYWYRQDTGHGLR | SYVADS | TEKGDIPDGYKASRPSQENFSLILE | CASSDQGAYEQYF | GPGTRLTVL |
| 10 | | | VTLSCHQT (SEQ ID | (SEQ ID | LIHY (SEQ ID | (SEQ ID | LASLSQTAVYF (SEQ ID NO: | (SEQ ID NO: | (SEQ ID |
| | | | NO: 7) | NO: 2975) | NO: 5939) | NO: 8911) | 11879) | 25411) | NO: 16327) |
| Clonotype_ | 7 | TRA | GDSVTQTEGLVTLTKGLP | TTYSPF | LFWYVQHLNEAPK | SSTDNKR | TEHQGFYATLHKSSSSFHLQKSSVQ | CALRPNYNVLYF | GSGTKLTVE |
| 10 | | | VMLNCTYQ (SEQ ID | (SEQ ID | LLLK (SEQ ID | (SEQ ID | LSDSALYF (SEQ ID NO: | (SEQ ID NO: | P (SEQ ID |
| | | | NO: 8) | NO: 2976) | NO: 5944) | NO: 8912) | 11880) | 25412) | NO: 16336) |
| Clonotype_ | 6 | TRB | NTKITQSPRYLILGRANK | LGHNA | MYWYKQSAEKPPE | YNLKQL | IRNETVPSRFIPECPDSSKLLLHIS | CASSQDEGWGEAEQ | GPGTRLTVL |
| 11 | | | SLECEQH (SEQ ID NO: | (SEQ ID | LMFL (SEQ ID | (SEQ ID | AVDPEDSAVYF (SEQ ID NO: | FF (SEQ ID NO: | (SEQ ID |
| | | | 95) | NO: | NO: 6031) | NO: | 11967) | 25413) | NO: |
| | | | | 2983) | | 8999) | | | 16327) |
| Clonotype_ | 6 | TRA | GQQVKQSSPSLTVQEGGI | NDMFDY | FAWYKKYPDNSPT | VRSNVDK | REDGRFTVFLNKSGKHFSLHITASQ | CAAAGFASALTF | GSGTKVIVL |
| 11 | | | LILNCDYE (SEQ ID | (SEQ ID | LLIS (SEQ ID | (SEQ ID | PEDTAVYL (SEQ ID NO: | (SEQ ID NO: | PY (SEQ ID |
| | | | NO: 78) | NO: | | NO: | 11950) | 25414) | NO: |
| | | | | 3046) | | 8982) | | | 17004) |
| Clonotype_ | 5 | TRB | AQTIHQWPVAEIKAVGSP | GKSSPN | LYWYWQATGGTLQ | SITVG | VESVVQLNLSASRPKDDQFILSTE | CAWRTGGVNTGQLY | GEGSKLTVL |
| 12 | | | LSLGCTIK (SEQ ID | (SEQ ID | QLFY (SEQ ID | (SEQ ID | KLLLSHSGFYL (SEQ ID NO: | F (SEQ ID NO: | (SEQ ID |
| | | | NO: 35) | NO: 3003) | NO: 5971) | NO: 8939) | 11907) | 25415) | NO: 16347) |
| Clonotype_ | 5 | TRA | AQKVTQTQTSISVMEKTT | TQDSSYF | LFWYKQTASGEIV | QDSYKKE | ATVGHYSLNFQKPKSSIGLIITATQ | CAMREDSGGSNYKL | GKGTLLTVT |
| 12 | | | VTMDCVYE (SEQ ID | (SEQ ID | FLIR (SEQ ID | N (SEQ | IEDSAVYF (SEQ ID NO: | TF (SEQ ID NO: | P (SEQ ID |
| | | | NO: 44) | NO: | NO: 5942) | ID NO: | 11878) | 16046) | NO: |
| | | | | 3056) | | 8910) | | | 16642) |
| Clonotype_ | 4 | TRB | EAGVTQSPRYAVLQEGQA | SGHDT | LYWYQQPRDQGPQ | FRDEAV | IDNSQLPSDRFSAVRPKGINSTLKI | CASSHSSEQFF | GPGTRLTVL |
| 13 | | | VSFWCDPI (SEQ ID | (SEQ ID | LLVY (SEQ ID | (SEQ ID | (SEQSAKQGDTATYL (SEQ ID NO: | (SEQ ID NO: | (SEQ ID |
| | | | NO: 1) | NO: | NO: 5937) | NO: | 11873) | 25417) | NO: |
| | | | | 2969) | | 8905) | | | 16327) |
| Clonotype_ | 4 | TRA | GDSVTQTEGLVTLTKGLP | TTYSPF | LFWYVQHLNEAPK | SSTDNKR | TEHQGFYATLHKSSSSFHLQKSSVQ | CALINNAGAKLTF | GGGTRLTVR |
| 13 | | | VMLNCTYQ (SEQ ID | (SEQ ID | LLLK (SEQ ID | (SEQ ID | LSDSALYF (SEQ ID NO: | (SEQ ID NO: | P (SEQ ID |
| | | | NO: 8) | NO: | NO: 5944) | NO: | 11880) | 25418) | NO: |
| | | | | 2976) | | 8912) | | | 16338) |
| Clonotype_ | 4 | TRB | DPKIIQKPKYLVAVTGSE | LGHNA | MYWYRQSAKKPLE | YSYQKL | MDNQTASSRFQPQSSKKNHLDLQIT | CASSQDLGHPNERL | GHGTKLSVL |
| 14 | | | KILICEQY (SEQ ID | (SEQ ID | FMFS (SEQ ID | (SEQ ID | ALKPDDSATYF (SEQ ID NO: | FF (SEQ ID NO: | (SEQ ID |
| | | | NO: 15) | NO: | NO: 5951) | NO: | 11887) | 25419) | NO: |
| | | | | 2983) | | 8919) | | | 16401) |
| Clonotype_ | 4 | TRA | GDQVKQSPSALSLQEGTN | IATTT | VQWFLQNPRGSLM | LVPGT | KENGRLKSTFNSKESYSTLHIRDAQ | CAAHSGGSNAKLTF | GKGTKLSVK |
| 14 | | | SALRCNFS (SEQ ID | (SEQ ID | NLFY (SEQ ID | (SEQ ID | LEDSGTYF (SEQ ID NO: | (SEQ ID NO: | S (SEQ ID |
| | | | NO: 258) | NO: | NO: 6194) | NO: | 12130) | 25420) | NO: |
| | | | | 3226) | | 9162) | | | 16342) |
| Clonotype_ | 4 | TRB | EAAVTQSPRSKVAVTGGK | INNHDY | MYWYRQDTGHGLR | SYVADS | TEKGDIPDGYKASRPSQENFSLILE | CASRGLGVYAEQFF | GPGTRLTVL |
| 15 | | | VTLSCHQT (SEQ ID | (SEQ ID | LIHY (SEQ ID | (SEQ ID | LASLSQTAVYF (SEQ ID NO: | (SEQ ID NO: | (SEQ ID |
| | | | NO: 7) | NO: | NO: 5939) | NO: | 11879) | 25421) | NO: |
| | | | | 2975) | | 8911) | | | 16327) |
| Clonotype_ | 4 | TRA | AQKVTQTQTSISVMEKTT | TQDSSYF | FLIR (SEQ ID | QDSYKKE | ATVGHYSLNFQKPKSSIGLIITATQ | CAMREGPDYANKMI | GLGTILRVR |
| 15 | | | VTMDCVYE (SEQ ID | (SEQ ID | LFWYKQTASGEIV | N (SEQ | IEDSAVYF (SEQ ID NO: | F (SEQ ID NO: | P (SEQ ID |
| | | | NO: 44) | NO: | NO: 5942) | ID NO: | 11878) | 25422) | NO: |
| | | | | 3056) | | 8910) | | | 16416) |
| Clonotype_ | 4 | TRB | GGIITQTPKFLIGQEGQK | FNHDT | MYWYRQDSGKGLR | SITEND | LQKGDLSEGYDASREKKSSFSLTVT | CASSIGTGDNQAPL | GEGTRLSVL |
| 16 | | | LTLKCQQN (SEQ ID | (SEQ ID | LIYY (SEQ ID | (SEQ ID | SAQKNEMAVFL (SEQ ID NO: | F (SEQ ID NO: | (SEQ ID |
| | | | NO: 27) | NO: 2995) | NO: 5963) | NO: 8931) | 11899) | 25393) | NO: |
| | | | | | | | | | 16441) |
| Clonotype_ | 4 | TRA | GEQVEQLPSSLIVQEGAS | DSASVY | FIID (SEQ ID | IRSNMER | KQNQRLTLLFDKKTKHLSLHITATQ | CSASNNYAQGLTF | GLGTRVSVF |
| 16 | | | VLINCSYT (SEQ ID | (SEQ ID | NO: 6096) | (SEQ ID | PGDSAIYF (SEQ ID NO: | (SEQ ID NO: | P (SEQ ID |
| | | | NO: 160) | NO: | FPWYKQEPGKRLQ | NO: 8952) | 12032) | 25394) | NO: 16344) |
| | | | | 3128) | | | | | |
| Clonotype_ | 4 | TRB | GGIITQTPKFLIGQEGQK | FNHDT | MYWYRQDSGKGLR | SITEND | LQKGDLSEGYDASREKKSSFSLTVT | CASSIGQGAGNTLY | GEGSRLIVV |
| 17 | | | LTLKCQQN (SEQ ID | (SEQ ID | LIYY (SEQ ID | (SEQ ID | SAQKNEMAVFL (SEQ ID NO: | F (SEQ ID NO: | (SEQ ID |
| | | | NO: 27) | NO: | NO: 5963) | NO: | 11899) | 25425) | NO: |
| | | | | 2995) | | 8931) | | | 16471) |
| Clonotype_ | 4 | TRA | GDSVTQTEGLVTLTEGLP | TAYSTF | LFWYVQHLNEAPK | SSTDNKR | TEHQGFHATLHKSSSSFHLQKSSAQ | CALSVTGANTGKLT | GHGTILRVH |
| 17 | | | VMLNCTYQ (SEQ ID | (SEQ ID | LLLK (SEQ ID | (SEQ ID | LSDSALYY (SEQ ID NO: | F (SEQ ID NO: | P (SEQ ID |
| | | | NO: 46) | NO: | NO: 5944) | NO: | 11918) | 25426) | NO: |
| | | | | 3030) | | 8912) | | | 16356) |
| Clonotype_ | 3 | TRB | NTKITQSPRYLILGRANK | ILGHNA | MYWYKQSAEKPPE | YNLKQL | IRNETVPSRFIPECPDSSKLLLHIS | CASSPGTGGGLYNS | AAGTRLTVT |
| 18 | | | SLECEQH (SEQ ID NO: | (SEQ ID | LMFL (SEQ ID | (SEQ ID | AVDPEDSAVYF (SEQ ID NO: | PLYF (SEQ ID | (SEQ ID |
| | | | 95) | NO: | NO: 6031) | NO: | 11967) | NO: 25427) | NO: |
| | | | | 2983) | | 8999) | | | 16381) |
| Clonotype_ | 3 | TRA | GQQVQQSPASLVLQEGEN | TSLNS | MQWFYQRPGGSLV | NPSGT | KHSGRLTSTTVIKERRSSLHISSSQ | CALKRNNNNAPRF | GAGTKLSVK |
| 18 | | | AELQCNFS (SEQ ID | (SEQ ID | SLFY (SEQ ID | (SEQ ID | TTDSGTYL (SEQ ID NO: | (SEQ ID NO: | P (SEQ ID |
| | | | NO: 10) | NO: 2978) | NO: 5946) | NO: 8914) | 11928) | 25428) | NO: |
| | | | | | | | | | 16426) |
| Clonotype_ | 3 | TRB | DPKIIQKPKYLVAVTGSE | LGHNA | MYWYRQSAKKPLE | YSYQKL | MDNQTASSRFQPQSSKKNHLDLQIT | CASSQNRDRGNTEV | GKGTRLTVV |
| 19 | | | KILICEQY (SEQ ID | (SEQ ID | FMFS (SEQ ID | (SEQ ID | ALKPDDSATYF (SEQ ID NO: | FF (SEQ ID NO: | (SEQ ID |
| | | | NO: 15) | NO: 2983) | NO: 5951) | NO: 8919) | 11887) | 25429) | NO: 16333) |
| Clonotype_ | 3 | TRA | GDSVTQTEGQVTVSESKS | TTSIAYP | LFWYVRYPGEGLQ | VITAGQK | GSSRGFEATYNKETTSFHLQKASVQ | CALGAPHTDKVVF | GTGTRLQVS |
| 19 | | | LIINCTYS (SEQ ID | N (SEQ | LLLK (SEQ ID | (SEQ ID | ESDSAVYY (SEQ ID NO: | (SEQ ID NO: | P (SEQ ID |
| | | | NO: 60) | ID NO: | NO: 5996) | NO: | 11932) | 25430) | NO: |
| | | | | 3028) | | 8964) | | | 16374) |
| Clonotype_ | 3 | TRB | EAAVTQSPRNKVAVTGGK | INNHNN | MYWYRQDTGHGLR | SYGAGS | TEKGDIPDGYKASRPSQENFSLILE | CASGDAGQPNTGQL | GEGSKLTVL |
| 20 | | | VTLSCNQT (SEQ ID | (SEQ ID | LIHY (SEQ ID | (SEQ ID | LATPSQTSVYF (SEQ ID NO: | YF (SEQ ID NO: | (SEQ ID |
| | | | NO: 3) | NO: | NO: 5939) | NO: | 11875) | 25431) | NO: |
| | | | | 2971) | | 8907) | | | 16347) |
| Clonotype_ | 3 | TRA | AQKVTQTQTSISVMEKTT | TQDSSYF | LFWYKQTASGEIV | QDSYKKE | ATVGHYSLNFQKPKSSIGLIITATQ | CAMTSNTDKVVF | GTGTRLQVS |
| 20 | | | VTMDCVYE (SEQ ID | (SEQ ID | FLIR (SEQ ID | N (SEQ | IEDSAVYF (SEQ ID NO: | (SEQ ID NO: | P (SEQ ID |
| | | | NO: 44) | NO: | NO: 5942) | ID NO: | 11878) | 25432) | NO: |
| | | | | 3056) | | 8910) | | | 16374) |
| Clonotype_ | 3 | TRB | EAAVTQSPRNKVAVTGGK | NNHNN | MYWYRQDTGHGLR | SYGAGS | TEKGDIPDGYKASRPSQENFSLILE | CASGDVRNERLFF | GHGTKLSVL |
| 21 | | | VTLSCNQT (SEQ ID | (SEQ ID | LIHY (SEQ ID | (SEQ ID | LATPSQTSVYF (SEQ ID NO: | (SEQ ID NO: | (SEQ ID |
| | | | NO: 3) | NO: | NO: 5939) | NO: | 11875) | 25433) | NO: |
| | | | | 2971) | | 8907) | | | 16401) |
| Clonotype_ | 3 | TRA | GEQVEQRPPHLSVREGDS | DSATAY | FSWYKQEAGAGLQ | VLSNVDR | KEEQGLTVLLNKKDKRLSLNLTAAH | CAVSPSSGSWQLIF | GSGTQLTVM |
| 21 | | | AIIICTYT (SEQ ID | (SEQ ID | LLMS (SEQ ID | (SEQ ID | PGDSAVYF (SEQ ID NO: | (SEQ ID NO: | P (SEQ ID |
| | | | NO: 22) | NO: | NO: 5958) | NO: | 11894) | 25434) | NO: |
| | | | | 2990) | | 8926) | | | 16400) |
| Clonotype_ | 3 | TRB | EAAVTQSPRSKVAVTGGK | NNHDY | MYWYRQDTGHGLR | SYVADS | TEKGDIPDGYKASRPSQENFSLILE | CASSEGISNERLFF | GHGTKLSVL |
| 22 | | | VTLSCHQT (SEQ ID | (SEQ ID | LIHY (SEQ ID | (SEQ ID | LASLSQTAVYF (SEQ ID NO: | (SEQ ID NO: | (SEQ ID |
| | | | NO: 7) | NO: | NO: 5939) | NO: | 11879) | 25435) | NO: |
| | | | | 2975) | | 8911) | | | 16401) |
| Clonotype_ | 3 | TRA | AQKVTQTQTSISVMEKTT | TRDSSYF | LFWYKQTASGEIV | QDSYKKE | ATEGHYSLNFQKPKSSIGLIITATQ | CAMREVNTGANTGK | GHGTILRVH |
| 22 | | | VTMDCVYE (SEQ ID | (SEQ ID | FLIR (SEQ ID | N (SEQ | IEDSAVYF (SEQ ID NO: | LTF (SEQ ID NO: | P (SEQ ID |
| | | | NO: 44) | NO: | NO: 5942) | ID NO: | 11916) | 25436) | NO: |
| | | | | 2974) | | 8910) | | | 16356) |
| Clonotype_ | 3 | TRB | EAAVTQSPRSKVAVTGGK | NNHDY | MYWYRQDTGHGLR | SYVADS | TEKGDIPDGYKASRPSQENFSLILE | CASSDGWGVYEQYF | GPGTRLTVL |
| 23 | | | VTLSCHQT (SEQ ID | (SEQ ID | LIHY (SEQ ID | (SEQ ID | LASLSQTAVYF (SEQ ID NO: | (SEQ ID NO: | (SEQ ID |
| | | | NO: 7) | NO: 2975) | NO: 5939) | NO: 8911) | 11879) | 25437) | NO: |
| | | | | | | | | | 16327) |
| Clonotype_ | 3 | TRA | QQKVQQSPESLTVSEGAM | DGTSNN | FRWYRQHSAKGLE | IFSDGE | KEEGRFTAHLNRANLHVSLHIREPQ | CAANTGANTGKLTF | GHGTILRVH |
| 23 | | | ASLNCTFS (SEQ ID | (SEQ ID | VLVS (SEQ ID | (SEQ ID | PSDSAVYL (SEQ ID NO: | (SEQ ID NO: | P (SEQ ID |
| | | | NO: 92) | NO: | NO: 6028) | NO: | 11964) | 25438) | NO: |
| | | | | 3060) | | 8996) | | | 16356) |
| Clonotype_ | 2 | TRB | NTKITQSPRYLILGRANK | LGHNA | MYWYKQSAEKPPE | YNLKQL | IRNETVPSRFIPECPDSSKLLLHIS | CASNRDRDTEVFF | GKGTRLTVV |
| 24 | | | SLECEQH (SEQ ID NO: | (SEQ ID | LMFL (SEQ ID | (SEQ ID | AVDPEDSAVYF (SEQ ID NO: | (SEQ ID NO: | (SEQ ID |
| | | | 95) | NO: | NO: 6031) | NO: | 11967) | 25439) | NO: |
| | | | | 2983) | | 8999) | | | 16333) |
| Clonotype_ | | TRA | GDSVTQKQGQVTLSEDDF | TTTYPT | LFWYVQYPGQGPQ | VTTANNK | GISRGFEATYDKGTTSFHLQKASVQ | CALAASNTGYQNFY | GKGTSLTVI |
| 24 | | | LFINCTYS (SEQ ID | (SEQ ID | LLLK (SEQ ID | (SEQ ID | ESDSAVYF (SEQ ID NO: | F (SEQ ID NO: | P (SEQ ID |
| | | | NO: 510) | NO: | NO: 6446) | NO: | 12382) | 25440) | NO: |
| | | | | 3478) | | 9054) | | | 16366) |
| Clonotype_ | 2 | TRB | NTKITQSPRYLILGRANK | GHNA | MYWYKQSAEKPPE | YNLKQL | IRNETVPSRFIPECPDSSKLLLHIS | CASSQDYSSGNTLY | GEGSRLIVV |
| 25 | | | SLECEQH (SEQ ID NO: | (SEQ ID | LMFL (SEQ ID | (SEQ ID | AVDPEDSAVYF (SEQ ID NO: | F (SEQ ID NO: | (SEQ ID |
| | | | 95) | NO: | NO: 6031) | NO: | 11967) | 25441) | NO: |
| | | | | 2983) | | 8999) | | | 16471) |
| Clonotype_ | 2 | TRA | GQQVQQSPASLVLQEGEN | STATR | LQWFYQHPGGRLV | NPSGT | KHTGRLTSTTVTNERRGSLHISSSQ | CANYNVLYF (SEQ | GSGTKLTVE |
| 25 | | | AELQCNFS (SEQ ID | (SEQ ID | SLFY (SEQ ID | (SEQ ID | TTDSGTYF (SEQ ID NO: 11966) | ID NO: 25442) | P (SEQ ID |
| | | | NO: 10) | NO: 3062) | NO: 6030) | NO: 8914) | | | NO: |
| | | | | | | | | | 16336) |
| Clonotype_ | 2 | TRB | SVLLYQKPNRDICQSGTS | SQVVS | MFWYQQFQEQSLM | ANEGSEA | TYESGFTKDKFPISRPNLTFSTLTV | CSSRDGGAQDTQYF | GPGTRLLVL |
| 26 | | | LKIQCVAD (SEQ ID | (SEQ ID | LMAT (SEQ ID | (SEQ ID | NNARPGDSSIYF (SEQ ID NO: | (SEQ ID NO: | (SEQ ID |
| | | | NO: 567) | NO: 3535) | NO: 6503) | NO: 9471) | 12439) | 25443) | NO: 16341) |
| Clonotype_ | 2 | TRA | AQKVTQTQTSISVMEKTT | TRDSSYF | LFWYKQTASGEIV | QDSYKKE | ATEGHYSLNFQKPKSSIGLIITATQ | CAMGTGNYKYVF | GAGTRLKVI |
| 26 | | | VTMDCVYE (SEQ ID | (SEQ ID | FLIR (SEQ ID | N (SEQ | IEDSAVYF (SEQ ID NO: 11916) | (SEQ ID NO: | A (SEQ ID |
| | | | NO: 44) | NO: 2974) | NO: 5942) | ID NO: | | 25444) | NO: 16380) |
| | | | | | | 8910) | | | |
| Clonotype_ | 2 | TRB | ETAVFQTPNYHVTQVGNE | LGHDT | MYWYKQDSKKLLK | YNNKQL | IVNETVPRRFSPQSSDKAHLNLRIK | CASSQLGESSYEQY | GPGTRLTVL |
| 27 | | | VSFNCKQT (SEQ ID | (SEQ ID | IMFS (SEQ ID | (SEQ ID | SVEPEDSAVYL (SEQ ID NO: | F (SEQ ID NO: | (SEQ ID |
| | | | NO: 99) | NO: | NO: 6035) | NO: | 11971) | 25445) | NO: |
| | | | | 3067) | | 9003) | | | 16327) |
| Clonotype_ | 2 | TRA | GQQVQQSPASLVLQEGEN | STATQ | LQWFYQSPGGSLV | NPSGT | KHTGRLTSTTVTKERRSSLHISSSQ | CAIALGGYKLTF | GTGTSLLVD |
| 27 | | | AELQCNFS (SEQ ID | (SEQ ID | SLLS (SEQ ID | (SEQ ID | TTDSGTYL (SEQ ID NO: | (SEQ ID NO: | P (SEQ ID |
| | | | NO: 10) | NO: | NO: 6258) | NO: | 12194) | 25446) | NO: |
| | | | | 3290) | | 8914) | | | 16398) |
| Clonotype_ | 2 | TRB | ETAVFQTPNYHVTQVGNE | LGHDT | MYWYKQDSKKLLK | YNNKQL | IVNETVPRRFSPQSSDKAHLNLRIK | CASSSRGLDSYEQY | GPGTRLTVL |
| 28 | | | VSFNCKQT (SEQ ID | (SEQ ID | IMFS (SEQ ID | (SEQ ID | SVEPEDSAVYL (SEQ ID NO: | F (SEQ ID NO: | (SEQ ID |
| | | | NO: 99) | NO: | NO: 6035) | NO: | 11971) | 25447) | NO: |
| | | | | 3067) | | 9003) | | | 16327) |
| Clonotype_ | 2 | TRA | GQQVQQSPASLVLQEGEN | TSLNS | MQWFYQRPGGSLV | NPSGT | KQSGRLTSTTVIKERRSSLHISSSQ | CAMDSAGNKLTF | GIGTRVLVR |
| 28 | | | AELQCNFS (SEQ ID | (SEQ ID | SLFY (SEQ ID | (SEQ ID | TTDSGTYL (SEQ ID NO: 11882) | (SEQ ID NO: | P (SEQ ID |
| | | | NO: 10) | NO: 2978) | NO: 5946) | NO: 8914) | | 15096) | NO: 16580) |
| Clonotype_ | 2 | TRB | EAAVTQSPRNKVAVTGGK | NNHNN | MYWYRQDTGHGLR | SYGAGS | TEKGDIPDGYKASRPSQENFSLILE | CASGAPGLGDYEQY | GPGTRLTVL |
| 29 | | | VTLSCNQT (SEQ ID | (SEQ ID | LIHY (SEQ ID | (SEQ ID | LATPSQTSVYF (SEQ ID NO: | F (SEQ ID NO: | (SEQ ID |
| | | | NO: 3) | NO: 2971) | NO: 5939) | NO: 8907) | 11875) | 25449) | NO: |
| | | | | | | | | | 16327) |
| Clonotype_ | 2 | TRA | GQQVQQSPASLVLQEGEN | STATR | LQWFYQHPGGRLV | NPSGT | KHTGRLTSTTVTNERRGSLHISSSQ | CAIDRGNYAQGLTF | GLGTRVSVF |
| 29 | | | AELQCNFS (SEQ ID | (SEQ ID | SLFY (SEQ ID | (SEQ ID | TTDSGTYF (SEQ ID NO: | (SEQ ID NO: | P (SEQ ID |
| | | | NO: 10) | NO: | NO: 6030) | NO: | 11966) | 25450) | NO: |
| | | | | 3062) | | 8914) | | | 16344) |
| Clonotype_ | 2 | TRB | EAAVTQSPRNKVAVTGGK | NNHNN | MYWYRQDTGHGLR | SYGAGS | TEKGDIPDGYKASRPSQENFSLILE | CASGDGAGGGAEQF | GPGTRLTVL |
| 30 | | | VTLSCNQT (SEQ ID | (SEQ ID | LIHY (SEQ ID | (SEQ ID | LATPSQTSVYF (SEQ ID NO: | F (SEQ ID NO: | (SEQ ID |
| | | | NO: 3) | NO: | NO: 5939) | NO: | 11875) | 25451) | NO: |
| | | | | 2971) | | 8907) | | | 16327) |
| Clonotype_ | 2 | TRA | GDSVTQTEGQVTVSESKS | ATSIGYP | LFWYVRYPGEGLQ | VITAGQK | GSSRGFEATYNKEATSFHLQKASVQ | CALSNTGYQNFYF | GKGTSLTVI |
| 30 | | | LIINCTYS (SEQ ID | N (SEQ | LLLK (SEQ ID | (SEQ ID | ESDSAVYY (SEQ ID NO: | (SEQ ID NO: | P (SEQ ID |
| | | | NO: 60) | ID NO: | NO: 5996) | NO: | 12094) | 25452) | NO: |
| | | | | 3330) | | 8964) | | | 16366) |
| Clonotype_ | 2 | TRB | EAAVTQSPRNKVAVTGGK | NNHNN | MYWYRQDTGHGLR | SYGAGS | TEKGDIPDGYKASRPSQENFSLILE | CASGGTGGGDTQYF | GPGTRLLVL |
| 31 | | | VTLSCNQT (SEQ ID | (SEQ ID | LIHY (SEQ ID | (SEQ ID | LATPSQTSVYF (SEQ ID NO: | (SEQ ID NO: | (SEQ ID |
| | | | NO: 3) | NO: 2971) | NO: 5939) | NO: 8907) | 11875) | 25453) | NO: |
| | | | | | | | | | 16341) |
| Clonotype_ | 2 | TRA | GDSVTQMQGQVTLSEDDF | TTWYPT | LFWYVQYPGEGPQ | VTTANNK | GISRGFEATYDKRTTSFHLQKASVQ | CVLGEGSNYQLIW | GSGTKLIIK |
| 31 | | | LFINCTYS (SEQ ID | (SEQ ID | LLLK (SEQ ID | (SEQ ID | ESDSAVYY (SEQ ID NO: | (SEQ ID NO: | P (SEQ ID |
| | | | NO: 150) | NO: | NO: 6086) | NO: | 12022) | 25454) | NO: |
| | | | | 3118) | | 9054) | | | 16372) |
| Clonotype_ | 2 | TRB | EAAVTQSPRSKVAVTGGK | NNHDY | MYWYRQDTGHGLR | SYVADS | TEKGDIPDGYKASRPSQENFSLILE | CASSRDNSYNSPLY | AAGTRLTVT |
| 32 | | | VTLSCHQT (SEQ ID | (SEQ ID | LIHY (SEQ ID | (SEQ ID | LASLSQTAVYF (SEQ ID NO: | F (SEQ ID NO: | (SEQ ID |
| | | | NO: 7) | NO: | NO: 5939) | NO: | 11879) | 25455) | NO: |
| | | | | 2975) | | 8911) | | | 16381) |
| Clonotype_ | 2 | TRA | AQSVDQPDAHVTLYEGAS | YSAAPY | LFWYVQYPGQSLQ | YITGDAV | KGTKGFEAEFRKSNSSFNLKKSPAH | CACVGDNSKLIW | GLGTSLVVN |
| 32 | | | LELRCSYS (SEQ ID | (SEQ ID | FLLK (SEQ ID | V (SEQ | WSDSAKYF (SEQ ID NO: | (SEQ ID NO: | P (SEQ ID |
| | | | NO: 398) | NO: | NO: 6216) | ID NO: | 12152) | 25456) | NO: |
| | | | | 3248) | | 9302) | | | 17292) |
| Clonotype_ | 2 | TRB | EAAVTQSPRSKVAVTGGK | NNHDY | MYWYRQDTGHGLR | SYVADS | TEKGDIPDGYKASRPSQENFSLILE | CASSDGTTLYF | GAGTRLSVL |
| 33 | | | VTLSCHQT (SEQ ID | (SEQ ID | LIHY (SEQ ID | (SEQ ID | LASLSQTAVYF (SEQ ID NO: | (SEQ ID NO: | (SEQ ID |
| | | | NO: 7) | NO: | NO: 5939) | NO: | 11879) | 25457) | NO: |
| | | | | 2975) | | 8911) | | | 16365) |
| Clonotype_ | 2 | TRA | AQSVDQPDAHVTLSEGAS | YSAAPY | LFWYVQYPGQSLQ | YITGDTV | KGTKGFEAEFRKSNSSFNLKKSPAH | CALEAGGGSNYKLT | GKGTLLTVT |
| 33 | | | LELRCSYS (SEQ ID | (SEQ ID | FLLK (SEQ ID | V (SEQ | WSDSAKYF (SEQ ID NO: | F (SEQ ID NO: | P (SEQ ID |
| | | | NO: 280) | NO: | NO: 6216) | ID NO: | 12152) | 25458) | NO: |
| | | | | 3248) | | 9184) | | | 16642) |
| Clonotype_ | 2 | TRB | DTTVKQNPRYKLARVGKP | MNHDT | MYWYQKKPNQAPK | YYDKIL | NREADTFEKFQSSRPNNSFCSLYIG | CASSWTGRDAEQFF | GPGTRLTVL |
| 34 | | | VNLICSQT (SEQ ID | (SEQ ID | LLLF (SEQ ID | (SEQ ID | SAGLEYSAMYL (SEQ ID NO: | (SEQ ID NO: | (SEQ ID |
| | | | NO: 299) | NO: | NO: 6235) | NO: | 12171) | 25459) | NO: |
| | | | | 3267) | | 9203) | | | 16327) |
| Clonotype_ | 2 | TRA | AQSVTQPDARVTVSEGAS | SSVTPY | LFWYVQYPRQGLQ | YYSGDPV | GVNGFEAEFSKSNSSFHLRKASVH | CAVSMANAPRF | GAGTKLTVK |
| 34 | | | LQLRCKYS (SEQ ID | (SEQ ID | LLLK (SEQ ID | V (SEQ | WSDSAVYF (SEQ ID NO: | (SEQ ID NO: | P (SEQ ID |
| | | | NO: 12) | NO: | NO: 5948) | ID NO: | 11892) | 25460) | NO: |
| | | | | 2988) | | 8916) | | | 16424) |
| Clonotype_ | 2 | TRB | AQTIHQWPVAEIKAVGSP | GKSSPN | LYWYWQATGGTLQ | SITVG | VESVVQLNLSASRPKDDQFILSTE | CAWSLPSRLSDEQY | GPGTRLTVL |
| 35 | | | LSLGCTIK (SEQ ID | (SEQ ID | QLFY (SEQ ID | (SEQ ID | KLLLSHSGFYL (SEQ ID NO: | F (SEQ ID NO: | (SEQ ID |
| | | | NO: 35) | NO: | NO: 5971) | NO: | 11907) | 25461) | NO: |
| | | | | 3003) | | 8939) | | | 16327) |
| Clonotype_ | 2 | TRA | GEQVEQRPPHLSVREGDS | DPNSYY | FFWYKQEPGAGLQ | VFSSTEI | NEGQGFTVLLNKKDKQLSLNLTAAH | CAASTNAYKVIF | GKGTHLHVL |
| 35 | | | AVIICTYT (SEQ ID | (SEQ ID | LLMK (SEQ ID | (SEQ ID | PGDSAVYF (SEQ ID NO: | (SEQ ID NO: | P (SEQ ID |
| | | | NO: 108) | NO: | NO: 6044) | NO: | 11980) | 25462) | NO: |
| | | | | 3010) | | 8946) | | | 16330) |
| Clonotype_ | 2 | TRB | GGIITQTPKFLIGQEGQK | FNHDT | MYWYRQDSGKGLR | SITEND | LQKGDLSEGYDASREKKSSFSLTVT | CASSLGQFTEVFF | GKGTRLTVV |
| 36 | | | LTLKCQQN (SEQ ID | (SEQ ID | LIYY (SEQ ID | (SEQ ID | SAQKNEMAVFL (SEQ ID NO: | (SEQ ID NO: | (SEQ ID |
| | | | NO: 27) | NO: 2995) | NO: 5963) | NO: 8931) | 11899) | 25463) | NO: |
| | | | | | | | | | 16333) |
| Clonotype_ | 2 | TRA | AQSVDQPDAHVTLSEGAS | YSAAPY | LFWYVQYPGQSLQ | YITGDTV | KGTKGFEAEFRKSNSSFNLKKSPAH | CALEGRYGSSGNKL | GIGTLLSVK |
| 36 | | | LELRCSYS (SEQ ID | (SEQ ID | FLLK (SEQ ID | V (SEQ | WSDSAKYF (SEQ ID NO: | IF (SEQ ID NO: | P (SEQ ID |
| | | | NO: 280) | NO: | NO: 6216) | ID NO: | 12152) | 25464) | NO: |
| | | | | 3248) | | 9184) | | | 16456) |
| Clonotype_ | 1 | TRB | NTKITQSPRYLILGRANK | LGHNA | MYWYKQSAEKPPE | YNLKQL | IRNETVPSRFIPECPDSSKLLLHIS | CASSQRDSGEQYF | GPGTRLTVL |
| 37 | | | SLECEQH (SEQ ID NO: | (SEQ ID | LMFL (SEQ ID | (SEQ ID | AVDPEDSAVYF (SEQ ID NO: | (SEQ ID NO: | (SEQ ID |
| | | | 95) | NO: | NO: 6031) | NO: | 11967) | 25465) | NO: |
| | | | | 2983) | | 8999) | | | 16327) |
| Clonotype_ | 1 | TRA | GDSVTQTEGQVALSEEDF | ASGYPA | LFWYVQYPGEGPQ | ASRDKEK | GSSRGFEATYNKEATSFHLQKASVQ | CALTANTGNYKYVF | GAGTRLKVI |
| 37 | | | LTIHCNYS (SEQ ID | (SEQ ID | FLFR (SEQ ID | (SEQ ID | ESDSAVYY (SEQ ID NO: | (SEQ ID NO: | A (SEQ ID |
| | | | NO: 14) | NO: | NO: 6050) | NO: | 12094) | 25466) | NO: |
| | | | | 3082) | | 8918) | | | 16380) |
| Clonotype_ | 1 | TRB | NTKITQSPRYLILGRANK | LGHNA | MYWYKQSAEKPPE | YNLKQL | IRNETVPSRFIPECPDSSKLLLHIS | CASSQEQNAETLYF | GSGTRLTVL |
| 38 | | | SLECEQH (SEQ ID NO: | (SEQ ID | LMFL (SEQ ID | (SEQ ID | AVDPEDSAVYF (SEQ ID NO: | (SEQ ID NO: | (SEQ ID |
| | | | 95) | NO: | NO: 6031) | NO: | 11967) | 25467) | NO: |
| | | | | 2983) | | 8999) | | | 16325) |
| Clonotype_ | 1 | TRA | (SEQEKVQQSPESLIVPEGAM | NSASQS | IWWYQQHPGKGPE | IFSNGN | KKEGRLTVYLNRASLHVSLHIRDSQ | CAAATSSGQKLVF | GQGTILKVY |
| 38 | | | SSLNCTFS (SEQ ID | (SEQ ID | ALIS (SEQ ID | (SEQ ID | PSDSAVYL (SEQ ID NO: | (SEQ ID NO: | L (SEQ ID |
| | | | NO: 96) | NO: | NO: 6032) | NO: | 11968) | 25468) | NO: |
| | | | | 3064) | | 9000) | | | 16414) |
| Clonotype_ | 1 | TRB | NTKITQSPRYLILGRANK | LGHNA | MYWYKQSAEKPPE | YNLKQL | IRNETVPSRFIPECPDSSKLLLHIS | CASSQDRGFAEQFF | GPGTRLTVL |
| 39 | | | SLECEQH (SEQ ID NO: | (SEQ ID | LMFL (SEQ ID | (SEQ ID | AVDPEDSAVYF (SEQ ID NO: | (SEQ ID NO: | (SEQ ID |
| | | | 95) | NO: | NO: 6031) | NO: | 11967) | 25469) | NO: |
| | | | | 2983) | | 8999) | | | 16327) |
| Clonotype_ | 1 | TRA | AQKVTQTQTSISVMEKTT | TQDSSYF | LFWYKQTASGEIV | QDSYKKE | ATVGHYSLNFQKPKSSIGLIITATQ | CAMRESSSSFSKLV | GQGTSLSVV |
| 39 | | | VTMDCVYE (SEQ ID | (SEQ ID | FLIR (SEQ ID | N (SEQ | IEDSAVYF (SEQ ID NO: | F (SEQ ID NO: | P (SEQ ID |
| | | | NO: 44) | NO: | NO: 5942) | ID NO: | 11878) | 25470) | NO: |
| | | | | 3056) | | 8910) | | | 16422) |
| Clonotype_ | 1 | TRB | NTKITQSPRYLILGRANK | LGHNA | MYWYKQSAEKPPE | YNLKQL | IRNETVPSRFIPECPDSSKLLLHIS | CASSQDWVSYNSPL | AAGTRLTVT |
| 40 | | | SLECEQH (SEQ ID NO: | (SEQ ID | LMFL (SEQ ID | (SEQ ID | AVDPEDSAVYF (SEQ ID NO: | YF (SEQ ID NO: | (SEQ ID |
| | | | 95) | NO: | NO: 6031) | NO: | 11967) | 25471) | NO: |
| | | | | 2983) | | 8999) | | | 16381) |
| Clonotype_ | 1 | TRA | GDSVTQTEGLVTLTEGLP | STYSPF | LFWYVQHLNEAPK | SFTDNKR | PEHQGFHATLHKSSSSFHLQKSSAQ | CARGDNSKLIW | GLGTSLVVN |
| 40 | | | VMLNCTYQ (SEQ ID | (SEQ ID | LLLK (SEQ ID | (SEQ ID | LSDSALYY (SEQ ID NO: | (SEQ ID NO: | P (SEQ ID |
| | | | NO: 46) | NO: | NO: 5944) | NO: | 11944) | 25472) | NO: |
| | | | | 3040) | | 8950) | | | 17292) |
| Clonotype_ | 1 | TRB | NTKITQSPRYLILGRANK | LGHNA | MYWYKQSAEKPPE | YNLKQL | IRNETVPSRFIPECPDSSKLLLHIS | CASSQDPGGLAETL | GSGTRLTVL |
| 41 | | | SLECEQH (SEQ ID NO: | (SEQ ID | LMFL (SEQ ID | (SEQ ID | AVDPEDSAVYF (SEQ ID NO: | YF (SEQ ID NO: | (SEQ ID |
| | | | 95) | NO: | NO: 6031) | NO: | 11967) | 25473) | NQ |
| | | | | 2983) | | 8999) | | | 16325) |
| Clonotype_ | 1 | TRA | GDSVIQMQGQVTLSENDF | TTGYPT | LFWYVQYSGEGPQ | VTTANNK | GSSRGFEATYDKGTTSFHLQKTSVQ | CAMSPNMGYKLTF | GTGTSLLVD |
| 41 | | | LFINCTYS (SEQ ID | (SEQ ID | LLLQ (SEQ ID | (SEQ ID | EIDSAVYY (SEQ ID NO: | (SEQ ID NO: | P (SEQ ID |
| | | | NO: 456) | NO: | NO: 6392) | NO: 9054) | 12328) | 25474) | NO: |
| | | | | 3220) | | | | | 16398) |
| Clonotype_ | 1 | TRB | NTKITQSPRYLILGRANK | LGHNA | MYWYKQSAEKPPE | YNLKQL | IRNETVPSRFIPECPDSSKLLLHIS | CASSQDAGDTLYF | GEGSRLIVV |
| 42 | | | SLECEQH (SEQ ID NO: | (SEQ ID | LMFL (SEQ ID | (SEQ ID | AVDPEDSAVYF (SEQ ID NO: | (SEQ ID NO: | (SEQ ID |
| | | | 95) | NO: | NO: 6031) | NO: | 11967) | 25475) | NO: |
| | | | | 2983) | | 8999) | | | 16471) |
| Clonotype_ | 1 | TRA | AQKVTQTQTSISVMEKTT | TRDSSYF | LFWYKQTASGEIV | QDSYKKE | ATEGHYSLNFQKPKSSIGLIITATQ | CAMRGHSSSSFSKL | GQGTSLSVV |
| 42 | | | VTMDCVYE (SEQ ID | (SEQ ID | FLIR (SEQ ID | N (SEQ | IEDSAVYF (SEQ ID NO: | VF (SEQ ID NO: | P (SEQ ID |
| | | | NO: 44) | NO: | NO: 5942) | ID NO: | 11916) | 25476) | NO: |
| | | | | 2974) | | 8910) | | | 16422) |
| Clonotype_ | 1 | TRB | NTKITQSPRYLILGRANK | LGHNA | MYWYKQSAEKPPE | YNLKQL | IRNETVPSRFIPECPDSSKLLLHIS | CASSQDGGDAETLY | GSGTRLTVL |
| 43 | | | SLECEQH (SEQ ID NO: | (SEQ ID | LMFL (SEQ ID | (SEQ ID | AVDPEDSAVYF (SEQ ID NO: | F (SEQ ID NO: | (SEQ ID |
| | | | 95) | NO: | NO: 6031) | NO: | 11967) | 25477) | NO: |
| | | | | 2983) | | 8999) | | | 16325) |
| Clonotype_ | 1 | TRA | AQSVTQPDARVTVSEGAS | SSVTPY | LFWYVQYPRQGLQ | YYSGDPV | GVNGFEAEFSKSNSSFHLRKASVH | CAVSSLNVGDNSKL | GLGTSLVVN |
| 43 | | | LQLRCKYS (SEQ ID | (SEQ ID | LLLK (SEQ ID | V (SEQ | WSDSAVYF (SEQ ID NO: 11892) | IW (SEQ ID NO: | P (SEQ ID |
| | | | NO: 12) | NO: 2988) | NO: 5948) | ID NO: | | 25478) | NO: |
| | | | | | | 8916) | | | 17292) |
| Clonotype_ | 1 | TRB | NTKITQSPRYLILGRANK | LGHNA | MYWYKQSAEKPPE | YNLKQL | IRNETVPSRFIPECPDSSKLLLHIS | CASSQDGHYAEQFF | GPGTRLTVL |
| 44 | | | SLECEQH (SEQ ID NO: | (SEQ ID | LMFL (SEQ ID | (SEQ ID | AVDPEDSAVYF (SEQ ID NO: | (SEQ ID NO: | (SEQ ID |
| | | | 95) | NO: | NO: 6031) | NO: | 11967) | 25479) | NO: |
| | | | | 2983) | | 8999) | | | 16327) |
| Clonotype_ | 1 | TRA | AQKVTQTQTSISVMEKTT | TRDSSYF | LFWYKQTASGEIV | QDSYKKE | ATEGHYSLNFQKPKSSIGLIITATQ | CAMRGQGTGSKLSF | GKGAKLTVS |
| 44 | | | VTMDCVYE (SEQ ID | (SEQ ID | FLIR (SEQ ID | N (SEQ | IEDSAVYF (SEQ ID NO: | (SEQ ID NO: | P (SEQ ID |
| | | | NO: 44) | NO: | NO: 5942) | ID NO: | 11916) | 25480) | NO: |
| | | | | 2974) | | 8910) | | | 16524) |
| Clonotype_ | 1 | TRB | NTKITQSPRYLILGRANK | LGHNA | MYWYKQSAEKPPE | YNLKQL | IRNETVPSRFIPECPDSSKLLLHIS | CASSQDWDSGNTLY | GEGSRLIVV |
| 45 | | | SLECEQH (SEQ ID NO: | (SEQ ID | LMFL (SEQ ID | (SEQ ID | AVDPEDSAVYF (SEQ ID NO: | F (SEQ ID NO: | (SEQ ID |
| | | | 95) | NO: | NO: 6031) | NO: 8999) | 11967) | 25481) | NO: |
| | | | | 2983) | | | | | 16471) |
| Clonotype_ | 1 | TRA | AQKVTQTQTSISVMEKTT | TQDSSYF | LFWYKQTASGEIV | QDSYKKE | ATVGHYSLNFQKPKSSIGLIITATQ | CAMRLTGNTRKLIF | GLGTTLQVQ |
| 45 | | | VTMDCVYE (SEQ ID | (SEQ ID | FLIR (SEQ ID | N (SEQ | IEDSAVYF (SEQ ID NO: | (SEQ ID NO: | P (SEQ ID |
| | | | NO: 44) | NO: | NO: 5942) | ID NO: | 11878) | 25482) | NO: |
| | | | | 3056) | | 8910) | | | 16326) |
| Clonotype_ | 1 | TRB | NTKITQSPRYLILGRANK | LGHNA | MYWYKQSAEKPPE | YNLKQL | IRNETVPSRFIPECPDSSKLLLHIS | CASSQAQSQNTLYF | GAGTRLSVL |
| 46 | | | SLECEQH (SEQ ID NO: | (SEQ ID | LMFL (SEQ ID | (SEQ ID | AVDPEDSAVYF (SEQ ID NO: | (SEQ ID NO: | (SEQ ID |
| | | | 95) | NO: | NO: 6031) | NO: | 11967) | 25483) | NO: |
| | | | | 2983) | | 8999) | | | 16365) |
| Clonotype_ | 1 | TRA | GEQVEQRPPHLSVREGDS | DPNSYY | FFWYKQEPGAGLQ | VFSSTEI | NEGQGFTVLLNKKDKQLSLNLTAAH | CAVRASSGSWQLIF | GSGTQLTVM |
| 46 | | | AVIICTYT (SEQ ID | (SEQ ID | LLMK (SEQ ID | (SEQ ID | PGDSAVYF (SEQ ID NO: | (SEQ ID NO: | P (SEQ ID |
| | | | NO: 108) | NO: | NO: 6044) | NO: | 11980) | 25484) | NO: |
| | | | | 3010) | | 8946) | | | 16400) |
| Clonotype_ | 1 | TRB | NTKITQSPRYLILGRANK | LGHNA | MYWYKQSAEKPPE | YNLKQL | IRNETVPSRFIPECPDSSKLLLHIS | CASSQAGNYAEQFF | GPGTRLTVL |
| 47 | | | SLECEQH (SEQ ID NO: | (SEQ ID | LMFL (SEQ ID | (SEQ ID | AVDPEDSAVYF (SEQ ID NO: | (SEQ ID NO: | (SEQ ID |
| | | | 95) | NO: | NO: 6031) | NO: | 11967) | 25485) | NO: |
| | | | | 2983) | | 8999) | | | 16327) |
| Clonotype_ | 1 | TRA | GDSVTQTEGQVALSEEDF | ASGYPA | LFWYVQYPGEGPQ | ASRDKEK | GSSRGFEATYNKEATSFHLQKASVQ | CALSAMTNSAGNKL | GIGTRVLVR |
| 47 | | | LTIHCNYS (SEQ ID | (SEQ ID | FLFR (SEQ ID | (SEQ ID | ESDSAVYY (SEQ ID NO: 12094) | TF (SEQ ID NO: | P (SEQ ID |
| | | | NO: 14) | NO: | NO: 6050) | NO: 8918) | | 25486) | NO: 16580) |
| | | | | 3082) | | | | | |
| Clonotype_ | 1 | TRB | NTKITQSPRYLILGRANK | LGHNA | MYWYKQSAEKPPE | YNLKQL | IRNETVPSRFIPECPDSSKLLLHIS | CASSQAGTGDAEQF | GPGTRLTVL |
| 48 | | | SLECEQH (SEQ ID NO: | (SEQ ID | LMFL (SEQ ID | (SEQ ID | AVDPEDSAVYF (SEQ ID NO: | F (SEQ ID NO: | (SEQ ID |
| | | | 95) | NO: | NO: 6031) | NO: | 11967) | 25487) | NO: |
| | | | | 2983) | | 8999) | | | 16327) |
| Clonotype_ | 1 | TRA | GQQVQQSPASLVLQEGEN | TSLNS | MQWFYQRPEGSLV | NPSGT | KQSGRLTSTTVIKERRSSLHISSSQ | CASPF (SEQ ID | GDGTQLVVK |
| 48 | | | AELQCNFS (SEQ ID | (SEQ ID | SLFY (SEQ ID | (SEQ ID | ITDSGTYL (SEQ ID NO: | NO: 25488) | P (SEQ ID |
| | | | NO: 10) | NO: | NO: 6192) | NO: | 12038) | | NO: |
| | | | | 2978) | | 8914) | | | 16328) |
| Clonotype_ | 1 | TRB | NTKITQSPRYLILGRANK | LGHNA | MYWYKQSAEKPPE | YNLKQL | IRNETVPSRFIPECPDSSKILLHIS | CASSQGETLYF | GSGTRLTVL |
| 49 | | | SLECEQH (SEQ ID NO: | (SEQ ID | LMFL (SEQ ID | (SEQ ID | AVDPEDSAVYF (SEQ ID NO: | (SEQ ID NO: | (SEQ ID |
| | | | 95) | NO: | NO: 6031) | NO: | 11967) | 25489) | NO: |
| | | | | 2983) | | 8999) | | | 16325) |
| Clonotype_ | 1 | TRA | GDSVTQTEGQVALSEEDF | ASGYPT | LFWYVQYPGEGPQ | ASRDKEK | GSSRGFEATYDKGTTSFHLRKASVQ | CALSGDYANKMIF | GLGTILRVR |
| 49 | | | LTIHCNYS (SEQ ID | (SEQ ID | LLFR (SEQ ID | (SEQ ID | ESDSAVYY (SEQ ID NO: | (SEQ ID NO: | P (SEQ ID |
| | | | NO: 14) | NO: | NO: 5950) | NO: | 11886) | 25490) | NO: |
| | | | | 2982) | | 8918) | | | 16416) |
| Clonotype_ | 1 | TRB | NTKITQSPRYLILGRANK | LGHNA | MYWYKQSAEKPPE | YNLKQL | IRNETVPSRFIPECPDSSKLLLHIS | CASSQGGQAPLF | GEGTRLSVL |
| 50 | | | SLECEQH (SEQ ID NO: | (SEQ ID | LMFL (SEQ ID | (SEQ ID | AVDPEDSAVYF (SEQ ID NO: | (SEQ ID NO: | (SEQ ID |
| | | | 95) | NO: | NO: 6031) | NO: | 11967) | 25491) | NO: |
| | | | | 2983) | | 8999) | | | 16441) |
| Clonotype_ | 1 | TRA | SQLAEENLWALSVHEGES | TSITA | LQWYRQKSGEGPA | IRSNERE | KRNGRLRATLDTSSQSSSLSITATR | CAIASSSFSKLVF | GQGTSLSVV |
| 50 | | | VTVNCSYK (SEQ ID | (SEQ ID | QLIL (SEQ ID | (SEQ ID | CEDTAVYF (SEQ ID NO: | (SEQ ID NO: | P (SEQ ID |
| | | | NO: 190) | NO: | NO: 5960) | NO: | 11896) | 15566) | NO: |
| | | | | 2992) | | 8928) | | | 16422) |
| Clonotype_ | 1 | TRB | NTKITQSPRYLILGRANK | LGHNA | MYWYKQSAEKPPE | YNLKQL | IRNETVPSRFIPECPDSSKLLLHIS | CASSPTGISNERLF | GHGTKLSVL |
| 51 | | | SLECEQH (SEQ ID NO: | (SEQ ID | LMFL (SEQ ID | (SEQ ID | AVDPEDSAVYF (SEQ ID NO: | F (SEQ ID NO: | (SEQ ID |
| | | | 95) | NO: | NO: 6031) | NO: | 11967) | 25493) | NO: |
| | | | | 2983) | | 8999) | | | 16401) |
| Clonotype_ | 1 | TRA | GQQVQQSPASLVLQEGEN | TSLNS | MQWFYQRPGGSLV | NPSGT | KHSGRLTSTTVIKERRSSLHISSSQ | CALAPSNTNKVVF | GTGTRLQVL |
| 51 | | | AELQCNFS (SEQ ID | (SEQ ID | SLFY (SEQ ID | (SEQ ID | TTDSGTYL (SEQ ID NO: 11928) | (SEQ ID NO: | P (SEQ ID |
| | | | NO: 10) | NO: 2978) | NO: 5946) | NO: 8914) | | 25494) | NO: |
| | | | | | | | | | 16698) |
| Clonotype_ | 1 | TRB | NTKITQSPRYLILGRANK | LGHNA | MYWYKQSAEKPPE | YNLKQL | IRNETVPSRFIPECPDSSKLLLHIS | CASSPRQTNTGQLY | GEGSKLTVL |
| 52 | | | SLECEQH (SEQ ID NO: | (SEQ ID | LMFL (SEQ ID | (SEQ ID | AVDPEDSAVYF (SEQ ID NO: | F (SEQ ID NO: | (SEQ ID |
| | | | 95) | NO: | NO: 6031) | NO: | 11967) | 25495) | NO: |
| | | | | 2983) | | 8999) | | | 16347) |
| Clonotype_ | 1 | TRA | GDSVTQTEGLVTLTEGLP | STYSPF | LFWYVQHLNEAPK | SFTDNKR | PEHQGFHATLHKSSSSFHLQKSSAQ | CALWGSGGKLTL | GAGTRLQVN |
| 52 | | | VMLNCTYQ (SEQ ID | (SEQ ID | LLLK (SEQ ID | (SEQ ID | LSDSALYY (SEQ ID NO: | (SEQ ID NO: | L (SEQ ID |
| | | | NO: 46) | NO: 3040) | NO: 5944) | NO: 8950) | 11944) | 25496) | NO: |
| | | | | | | | | | 17020) |
| Clonotype_ | 1 | TRB | NTKITQSPRYLILGRANK | LGHNA | MYWYKQSAEKPPE | YNLKQL | IRNETVPSRFIPECPDSSKLLLHIS | CASSPGTGPNERLF | GHGTKLSVL |
| 53 | | | SLECEQH (SEQ ID NO: | (SEQ ID | LMFL (SEQ ID | (SEQ ID | AVDPEDSAVYF (SEQ ID NO: | F (SEQ ID NO: | (SEQ ID |
| | | | 95) | NO: | NO: 6031) | NO: | 11967) | 25497) | NO: |
| | | | | 2983) | | 8999) | | | 16401) |
| Clonotype_ | 1 | TRA | QQQVRQSPQSLTVWEGGT | DSTFNY | FPWYQQFPGEGPA | ILSVSDK | KEDGRFTTFFNKREKKLSLHIIDSQ | CAASAPGGYKVVF | GSGTRLLVS |
| 53 | | | TVLTCSYE (SEQ ID | (SEQ ID | LLIS (SEQ ID | (SEQ ID | PGDSATYF (SEQ ID NO: | (SEQ ID NO: | P (SEQ ID |
| | | | NO: 374) | NO: | NO: 6004) | NO: | 12246) | 25498) | NO: |
| | | | | 3036) | | 9200) | | | 16354) |
| Clonotype_ | 1 | TRB | NTKITQSPRYLILGRANK | LGHNA | MYWYKQSAEKPPE | YNLKQL | IRNETVPSRFIPECPDSSKLLLHIS | CASSPGLGDEQYF | GPGTRLTVL |
| 54 | | | SLECEQH (SEQ ID NO: | (SEQ ID | LMFL (SEQ ID | (SEQ ID | AVDPEDSAVYF (SEQ ID NO: | (SEQ ID NO: | (SEQ ID |
| | | | 95) | NO: | NO: 6031) | NO: 8999) | 11967) | 25499) | NO: 16327) |
| | | | | 2983) | | | | | |
| Clonotype_ | 1 | TRA | AQSVTQPDARVTVSEGAS | SSVTPY | LFWYVQYPRQGLQ | YYSGDPV | GVNGFEAEFSKSNSSFHLRKASVH | CAAQQGTGSKLSF | GKGAKLTVS |
| 54 | | | LQLRCKYS (SEQ ID | (SEQ ID | LLLK (SEQ ID | V (SEQ | WSDSAVYF (SEQ ID NO: | (SEQ ID NO: | P (SEQ ID |
| | | | NO: 12) | NO: | NO: 5948) | ID NO: | 11892) | 25500) | NO: |
| | | | | 2988) | | 8916) | | | 16524) |
| Clonotype_ | 1 | TRB | NTKITQSPRYLILGRANK | LGHNA | MYWYKQSAEKPPE | YNLKQL | IRNETVPSRFIPECPDSSKILLHIS | CASGTGGVEQYF | GPGTRLTVL |
| 55 | | | SLECEQH (SEQ ID NO: | (SEQ ID | LMFL (SEQ ID | (SEQ ID | AVDPEDSAVYF (SEQ ID NO: | (SEQ ID NO: | (SEQ ID |
| | | | 95) | NO: | NO: 6031) | NO: | 11967) | 25501) | NO: |
| | | | | 2983) | | 8999) | | | 16327) |
| Clonotype_ | 1 | TRA | GQQVQQSPASLVLQEGEN | TSLNS | SLFY (SEQ ID | NPSGT | KQSGRLTSTTVIKERRSSLHISSSQ | CAMELGGADRLTF | GKGTQLIIQ |
| 55 | | | AELQCNFS (SEQ ID | (SEQ ID | NO: 5946) | (SEQ ID | TTDSGTYL (SEQ ID NO: 11882) | (SEQ ID NO: | P (SEQ ID |
| | | | NO: 10) | NO: | MQWFYQRPGGSLV | NO: | | 25502) | NO: |
| | | | | 2978) | | 8914) | | | 16360) |
| Clonotype_ | 1 | TRB | NAGVIQTPRHKVTGKGQE | SGHSA | VFWYRQTIVQGLE | FRNQAP | IDDSGMPKERFSAQMPNQSHSTLKI | CASSLDASQNTLYF | GAGTRLSVL |
| 56 | | | ATLWCEPI (SEQ ID | (SEQ ID | FLTY (SEQ ID | (SEQ ID | (SEQSTQPQDSAVYL (SEQ ID NO: | (SEQ ID NO: | (SEQ ID |
| | | | NO: 17) | NO: | NO: 5953) | NO: | 11889) | 25503) | NO: |
| | | | | 2985) | | 8921) | | | 16365) |
| Clonotype_ | 1 | TRA | GQQVQQSPSSLVLQEGEN | STATQ | LQWFYQSPGGSLV | NPSGT | KHTGRLTSTTVTKERRSSLHISSSQ | CAIDPITGSGGKLT | GTGTRLQVN |
| 56 | | | AELQCNFS (SEQ ID | (SEQ ID | SLLS (SEQ ID | (SEQ ID | TTDSGTYL (SEQ ID NO: | L (SEQ ID NO: | L (SEQ ID |
| | | | NO: 322) | NO: | NO: 6258) | NO: | 12194) | 25504) | NO: |
| | | | | 3290) | | 8914) | | | 16448) |
| Clonotype_ | 1 | TRB | NAGVIQTPRHKVTGKGQE | SGHSA | VFWYRQTIVQGLE | FRNQAP | IDDSGMPKERFSAQMPNQSHSTLKI | CASSLAGDEQYF | GPGTRLTVL |
| 57 | | | ATLWCEPI (SEQ ID | (SEQ ID | FLTY (SEQ ID | (SEQ ID | (SEQSTQPQDSAVYL (SEQ ID NO: | (SEQ ID NO: | (SEQ ID |
| | | | NO: 17) | NO: 2985) | NO: 5953) | NO: 8921) | 11889) | 25505) | NO: |
| | | | | | | | | | 16327) |
| Clonotype_ | 1 | TRA | AQSVTQPDARVTVSEGAS | YSATPY | ILFWYVQYPRQGLQ | YYSGDPV | GVNGFEAEFSKSNSSFHLRKASVH | CAVRDYANKMIF | GLGTILRVR |
| 57 | | | LQLRCKYS (SEQ ID | (SEQ ID | LLLK (SEQ ID | V (SEQ | WSDSAVYF (SEQ ID NO: 11892) | (SEQ ID NO: | P (SEQ ID |
| | | | NO: 12) | NO: | NO: 5948) | ID NO: | | 25506) | NO: 16416) |
| | | | | 2980) | | 8916) | | | |
| Clonotype_ | 1 | TRB | NAGVIQTPRHKVTGKGQE | SGHSA | VFWYRQTIVQGLE | FRNQAP | IDDSGMPKERFSAQMPNQSHSTLKI | CASSLAGGGSAETL | GSGTRLTVL |
| 58 | | | ATLWCEPI (SEQ ID | (SEQ ID | FLTY (SEQ ID | (SEQ ID | (SEQSTQPQDSAVYL (SEQ ID NO: | YF (SEQ ID NO: | (SEQ ID |
| | | | NO: 17) | NO: | NO: 5953) | NO: | 11889) | 25507) | NO: |
| | | | | 2985) | | 8921) | | | 16325) |
| Clonotype_ | 1 | TRA | GQQVQQSPASLVLQEGEN | TSLNS | MQWFYQRPEGSLV | NPSGT | KQSGRLTSTTVIKERRSSLHISSSQ | CAMDPGTGSNRLTF | GKGTKFSLI |
| 58 | | | AELQCNFS (SEQ ID | (SEQ ID | SLFY (SEQ ID | (SEQ ID | ITDSGTYL (SEQ ID NO: | (SEQ ID NO: | P (SEQ ID |
| | | | NO: 10) | NO: | NO: 6192) | NO: | 12038) | 25508) | NO: |
| | | | | 2978) | | 8914) | | | 16608) |
| Clonotype_ | 1 | TRB | NSKVIQTPRYLVKGQGQK | KGHPV | VFWYQQNKNNEFK | FQNQEV | ILQQIDMTEKRFSAECPSNSPCSLEI | CASSLRDDQDTQYF | GPGTRLLVL |
| 59 | | | AKMRCIPE (SEQ ID | (SEQ ID | FLIN (SEQ ID | (SEQ ID | (SEQSSEAGDSALYL (SEQ ID NO: | (SEQ ID NO: | (SEQ ID |
| | | | NO: 19409) | NO: | NO: 21849) | NO: | 24289) | 25509) | NO: |
| | | | | 20629) | | 23069) | | | 16341) |
| Clonotype_ | 1 | TRA | AQKVTQTQTSISVMEKTT | TQDSSYF | LFWYKQTASGEIV | QDSYKKE | ATVGHYSLNFQKPKSSIGLIITATQ | CAMREGSSNTDKVV | GTGTRLQVS |
| 59 | | | VTMDCVYE (SEQ ID | (SEQ ID | FLIR (SEQ ID | N (SEQ | IEDSAVYF (SEQ ID NO: | F (SEQ ID NO: | P (SEQ ID |
| | | | NO: 44) | NO: | NO: 5942) | ID NO: | 11878) | 25510) | NO: |
| | | | | 3056) | | 8910) | | | 16374) |
| Clonotype_ | 1 | TRB | SVLLYQKPNRDICQSGTS | SQVVS | MFWYQQFQEQSLM | ANEGSEA | TYESGFTKDKFPISRPNLTFSTLTV | CSSTGSYAEQFF | GPGTRLTVL |
| 60 | | | LKIQCVAD (SEQ ID | (SEQ ID | LMAT (SEQ ID | (SEQ ID | NNARPGDSSIYF (SEQ ID NO: | (SEQ ID NO: | (SEQ ID |
| | | | NO: 567) | NO: | NO: 6503) | NO: | 12439) | 25511) | NO: |
| | | | | 3535) | | 9471) | | | 16327) |
| Clonotype_ | 1 | TRA | GEQVEQRPPHLSVREGDS | DPNSYY | FFWYKQEPGAGLQ | VFSSTEI | NEGQGFTVLLNKKDKQLSLNLTAAH | CAVGLSNYNVLYF | GSGTKLTVE |
| 60 | | | AVIICTYT (SEQ ID | (SEQ ID | LLMK (SEQ ID | (SEQ ID | PGDSAVYF (SEQ ID NO: | (SEQ ID NO: | P (SEQ ID |
| | | | NO: 108) | NO: | NO: 6044) | NO: | 11980) | 25512) | NO: |
| | | | | 3010) | | 8946) | | | 16336) |
| Clonotype_ | 1 | TRB | SVLLYQKPNRDICQSGTS | SQVVS | LMAT (SEQ ID | ANEGSEA | TYESGFTKDKFPISRPNLTFSTLTV | CSSSEQFF (SEQ | GPGTRLTVL |
| 61 | | | LKIQCVAD (SEQ ID | (SEQ ID | NO: 6503) | (SEQ ID | NNARPGDSSIYF (SEQ ID NO: | ID NO: 25513) | (SEQ ID |
| | | | NO: 567) | NO: | MFWYQQFQEQSLM | NO: | 12439) | | NO: |
| | | | | 3535) | | 9471) | | | 16327) |
| Clonotype_ | 1 | TRA | GEQVEQRPPHLSVREGDS | DPNSYY | FFWYKQEPGASLQ | VFSSTEI | NEGQGFTVLINKKPTRLSLNLTAAH | CAVSGANTGKLTF | GHGTILRVH |
| 61 | | | AVITCTYT (SEQ ID | (SEQ ID | LLMK (SEQ ID | (SEQ ID | PGDSAAYF (SEQ ID NO: | (SEQ ID NO: | P (SEQ ID |
| | | | NO: 42) | NO: | NO: 5978) | NO: | 24294) | 25514) | NO: |
| | | | | 3010) | | 8946) | | | 16356) |
| Clonotype_ | 1 | TRB | SVLLYQKPNRDICQSGTS | SQVVS | MFWYQQFQEQSLM | ANEGSEA | TYESGFTKDKFPISRPNLTFSTLTV | CSSSEQFF (SEQ | GPGTRLTVL |
| 62 | | | LKIQCVAD (SEQ ID | (SEQ ID | LMAT (SEQ ID | (SEQ ID | NNARPGDSSIYF (SEQ ID NO: | ID NO: 25513) | (SEQ ID |
| | | | NO: 567) | NO: | NO: 6503) | NO: | 12439) | | NO: |
| | | | | 3535) | | 9471) | | | 16327) |
| Clonotype_ | 1 | TRA | GEQVEQRPPHLSVREGDS | DPNSYY | FFWYKQEPGASLQ | VFSSTEI | NEGQGFTVLLNKKDKRLSLNLTAAH | CAVSGANTGKLTF | GHGTILRVH |
| 62 | | | AVITCTYT (SEQ ID | (SEQ ID | LLMK (SEQ ID | (SEQ ID | PGDSAAYF (SEQ ID NO: | (SEQ ID NO: | P (SEQ ID |
| | | | NO: 42) | NO: | NO: 5978) | NO: | 11914) | 25514) | NO: |
| | | | | 3010) | | 8946) | | | 16356) |
| Clonotype_ | 1 | TRB | SVLLYQKPNRDICQSGTS | SQVVS | MFWYQQFQEQSLM | ANEGSEA | TYESGFTKDKFPISRPNLTFSTLTV | CSSSEGAEVFF | GKGTRLTVV |
| 63 | | | LKIQCVAD (SEQ ID | (SEQ ID | LMAT (SEQ ID | (SEQ ID | NNARPGDSSIYF (SEQ ID NO: | (SEQ ID NO: | (SEQ ID |
| | | | NO: 567) | NO: | NO: 6503) | NO: | 12439) | 25517) | NO: |
| | | | | 3535) | | 9471) | | | 16333) |
| Clonotype_ | 1 | TRA | AQSVTQPDARVTVSEGAS | YSGTPY | FWYVQYPRQGLQ | YYSGDPV | GVNGFEAEFSKSNSSFHLRKASVH | CVLSGGHKVVF | GTGTRLQVL |
| 63 | | | LQLRCKYS (SEQ ID | (SEQ ID | LLLK (SEQ ID | V (SEQ | WSDSAVYF (SEQ ID NO: | (SEQ ID NO: | P (SEQ ID |
| | | | NO: 12) | NO: | NO: 5948) | ID NO: | 11892) | 25518) | NO: |
| | | | | 3054) | | 8916) | | | 16698) |
| Clonotype_ | 1 | TRB | SVLLYQKPNRDICQSGTS | SQVVS | MFWYQQFQEQSLM | ANEGSEA | TYESGFTKDKFPISRPNLTFSTLTV | CSSSGGRDTLYF | GAGTRLSVL |
| 64 | | | LKIQCVAD (SEQ ID | (SEQ ID | LMAT (SEQ ID | (SEQ ID | NNARPGDSSIYF (SEQ ID NO: | (SEQ ID NO: | (SEQ ID |
| | | | NO: 567) | NO: | NO: 6503) | NO: | 12439) | 25519) | NO: |
| | | | | 3535) | | 9471) | | | 16365) |
| Clonotype_ | 1 | TRA | GEQVEQRPPHLSVREGDS | DPNSYY | FFWYKQEPGASLQ | VFSSTEI | NEGQGFTVLLNKKDKRLSLNLTAAH | CAVSNSAGNKLTF | GIGTRVLVR |
| 64 | | | AFITCTYT (SEQ ID | (SEQ ID | LLMK (SEQ ID | (SEQ ID | PGDSAAYF (SEQ ID NO: | (SEQ ID NO: | P (SEQ ID |
| | | | NO: 846) | NO: | NO: 5978) | NO: | 11914) | 25520) | NO: |
| | | | | 3010) | | 8946) | | | 16580) |
| Clonotype_ | 1 | TRB | SVLLYQKPNRDICQSGTS | SQVVS | MFWYQQFQEQSLM | ANEGSEA | TYESGFTKDKFPISRPNLTFSTLTV | CSSHRGEVFF (SEQ | GKGTRLTVV |
| 65 | | | LKIQCVAD (SEQ ID | (SEQ ID | LMAT (SEQ ID | (SEQ ID | NNARPGDSSIYF (SEQ ID NO: | ID NO: 25521) | (SEQ ID |
| | | | NO: 567) | NO: 3535) | NO: 6503) | NO: 9471) | 12439) | | NO: 16333) |
| Clonotype_ | 1 | TRA | GEQVEQRPPHLSVREGDS | DPNSYY | FFWYKQEPGASLQ | VFSSTEI | NEGQGFTVLLNKKDKRLSLNLTAAH | CAVSERYNQGKLIF | GQGTKLSIK |
| 65 | | | AVITCTYT (SEQ ID | (SEQ ID | LLMK (SEQ ID | (SEQ ID | PGDSAAYF (SEQ ID NO: | (SEQ ID NO: | P (SEQ ID |
| | | | NO: 42) | NO: | NO: 5978) | NO: | 11914) | 25522) | NO: |
| | | | | 3010) | | 8946) | | | 16332) |
| Clonotype_ | 1 | TRB | EAGVTQSPRYAVLQEGQA | SGHDT | LYWYQQPRDQGPQ | FRDEAV | IDNSQLPSDRFSAVRPKGTNSTLKI | CASTGGTRDTQYF | GPGTRLLVL |
| 66 | | | VSFWCDPI (SEQ ID | (SEQ ID | LLVY (SEQ ID | (SEQ ID | (SEQSAKQGDTATYL (SEQ ID NO: | (SEQ ID NO: | (SEQ ID |
| | | | NO: 1) | NO: | NO: 5937) | NO: | 11873) | 25523) | NO: |
| | | | | 2969) | | 8905) | | | 16341) |
| Clonotype_ | 1 | TRA | GDSVTQTEGLVTLTKGLP | TTYSPF | LFWYVQHLNEAPK | SSTDNKR | TEHQGFYATLHKSSSSFHLQKSSVQ | CALSENYNQGKLIF | GQGTKLSIK |
| 66 | | | VMLNCTYQ (SEQ ID | (SEQ ID | LLLK (SEQ ID | (SEQ ID | LSDSALYF (SEQ ID NO: | (SEQ ID NO: | P (SEQ ID |
| | | | NO: 8) | NO: | NO: 5944) | NO: | 11880) | 14848) | NO: |
| | | | | 2976) | | 8912) | | | 16332) |
| Clonotype_ | 1 | TRB | EAGVTQSPRYAVLQEGQA | SGHDT | LYWYQQPRDQGPQ | FRDEAV | IDNSQLPSDRFSAVRPKGTNSTLKI | CASSPRDWGYEQYF | GPGTRLTVL |
| 67 | | | VSFWCDPI (SEQ ID | (SEQ ID | LLVY (SEQ ID | (SEQ ID | (SEQSAKQGDTATYL (SEQ ID NO: | (SEQ ID NO: | (SEQ ID |
| | | | NO: 1) | NO: 2969) | NO: 5937) | NO: 8905) | 11873) | 25525) | NO: |
| | | | | | | | | | 16327) |
| Clonotype_ | 1 | TRA | GDSVTQTEGQVTVSESKS | TTSIAYP | LLLK (SEQ ID | VITAGQK | GSSRGFEATYNKETTSFHLQKASVQ | CALVPMDYANKMIF | GLGTILRVR |
| 67 | | | LIINCTYS (SEQ ID | N (SEQ | NO: 5996) | (SEQ ID | ESDSAVYY (SEQ ID NO: | (SEQ ID NO: | P (SEQ ID |
| | | | NO: 60) | ID NO: | LFWYVRYPGEGLQ | NO: 8964) | 11932) | 25526) | NO: 16416) |
| | | | | 3028) | | | | | |
| Clonotype_ | 1 | TRB | EAGVTQSPRYAVLQEGQA | SGHDT | LYWYQQPRDQGPQ | FRDEAV | IDNSQLPSDRFSAVRPKGTNSTLKI | CASSPIEWGQGNTL | GEGSRLIVV |
| 68 | | | VSFWCDPI (SEQ ID | (SEQ ID | LLVY (SEQ ID | (SEQ ID | (SEQSAKQGDTATYL (SEQ ID NO: | YF (SEQ ID NO: | (SEQ ID |
| | | | NO: 1) | NO: | NO: 5937) | NO: | 11873) | 25527) | NO: |
| | | | | 2969) | | 8905) | | | 16471) |
| Clonotype_ | 1 | TRA | GDSVTQTEGPVTLSEGTS | TKQYPT | LFWYVQYPGEGPQ | VPKANEK | GSSRGFEATYNKEATSFHLQKASVQ | CALSEDSGYNKLTF | GKGTVLLVS |
| 68 | | | LTVNCSYE (SEQ ID | (SEQ ID | LLFK (SEQ ID | (SEQ ID | ESDSAVYY (SEQ ID NO: | (SEQ ID NO: | P (SEQ ID |
| | | | NO: 38) | NO: | NO: 5974) | NO: | 12094) | 25528) | NO: |
| | | | | 3006) | | 8942) | | | 16378) |
| Clonotype_ | 1 | TRB | EAGVTQSPRYAVLQEGQA | SGHDT | LYWYQQPRDQGPQ | FRDEAV | IDNSQLPSDRFSAVRPKGTNSTLKI | CASSPPGQYYAEQF | GPGTRLTVL |
| 69 | | | VSFWCDPI (SEQ ID | (SEQ ID | LLVY (SEQ ID | (SEQ ID | (SEQSAKQGDTATYL (SEQ ID NO: | F (SEQ ID NO: | (SEQ ID |
| | | | NO: 1) | NO: | NO: 5937) | NO: | 11873) | 25529) | NO: |
| | | | | 2969) | | 8905) | | | 16327) |
| Clonotype_ | 1 | TRA | GQGVEQPDNLMSVEGTFA | TSGFNG | ILSWYQQREGHAPV | VVLDGL | KDSGHFSTFLSRSNGYSYLLLTELQ | CAVSTASLGKLQF | GTGTQVVVT |
| 69 | | | RVNCTYS (SEQ ID NO: | (SEQ ID | FLSY (SEQ ID | (SEQ ID | IKDSASYL (SEQ ID NO: 11876) | (SEQ ID NO: | P (SEQ ID |
| | | | 4) | NO: | NO: 5940) | NO: 8908) | | 25530) | NO: 16488) |
| | | | | 2972) | | | | | |
| Clonotype_ | 1 | TRB | EAGVTQSPRYAVLQEGQA | SGHDT | LYWYQQPRDQGPQ | FRDEAV | IDNSQLPSDRFSAVRPKGTNSTLKI | CASSLQGANTEVFF | GKGTRLTVV |
| 70 | | | VSFWCDPI (SEQ ID | (SEQ ID | LLVY (SEQ ID | (SEQ ID | (SEQSAKQGDTATYL (SEQ ID NO: | (SEQ ID NO: | (SEQ ID |
| | | | NO: 1) | NO: | NO: 5937) | NO: | 11873) | 25531) | NO: |
| | | | | 2969) | | 8905) | | | 16333) |
| Clonotype_ | 1 | TRA | GDSVTQTEGLVTLTEGLP | STYSPF | LFWYVQHLNEAPK | SFTDNKR | PEHQGFHATLHKSSSSFHLQKSSAQ | CALTHSSNTNKVVF | GTGTRLQVL |
| 70 | | | VMLNCTYQ (SEQ ID | (SEQ ID | LLLK (SEQ ID | (SEQ ID | LSDSALYY (SEQ ID NO: | (SEQ ID NO: | P (SEQ ID |
| | | | NO: 46) | NO: | NO: 5944) | NO: | 11944) | 25532) | NO: |
| | | | | 3040) | | 8950) | | | 16698) |
| Clonotype_ | 1 | TRB | JEAGVTQSPRYAVLQEGQA | SGHDT | LYWYQQPRDQGPQ | FRDEAV | IDNSQLPSDRFSAVRPKGTNSTLKI | CASSLPAETLYF | GSGTRLTVL |
| 71 | | | VSFWCDPI (SEQ ID | (SEQ ID | LLVY (SEQ ID | (SEQ ID | (SEQSAKQGDTATYL (SEQ ID NO: | (SEQ ID NO: | (SEQ ID |
| | | | NO: 1) | NO: | NO: 5937) | NO: | 11873) | 25533) | NO: |
| | | | | 2969) | | 8905) | | | 16325) |
| Clonotype_ | 1 | TRA | AQSVTQPDARVTVSEGAS | SSGTPY | ILFWYVQYPRQGLQ | YYSGDPV | GVNGFEAEFSKSNSSFHLRKASVH | CVLRASSSGQKLVF | GQGTILKVY |
| 71 | | | LQLRCKYS (SEQ ID | (SEQ ID | LLLK (SEQ ID | V (SEQ | WSDSAVYF (SEQ ID NO: | (SEQ ID NO: | L (SEQ ID |
| | | | NO: 12) | NO: | NO: 5948) | ID NO: | 11892) | 25534) | NO: |
| | | | | 2998) | | 8916) | | | 16414) |
| Clonotype_ | 1 | TRB | EAGVTQSPRYAVLQEGQA | SGHDT | LYWYQQPRDQGPQ | FRDEAV | IDNSQLPSDRFSAVRPKGTNSTLKI | CASSDWGSYEQYF | GPGTRLTVL |
| 72 | | | VSFWCDPI (SEQ ID | (SEQ | LLVY (SEQ ID | (SEQ ID | (SEQSAKQGDTATYL (SEQ ID NO: | (SEQ ID NO: | (SEQ ID |
| | | | NO: 1) | NO: | NO: 5937) | NO: | 11873) | 25535) | NO: |
| | | | | 2969) | | 8905) | | | 16327) |
| Clonotype_ | 1 | TRA | QQKVQQSPESLSVPEGGM | DRNFQY | FWWYRQHSGEGPK | IFSDGD | KKEGRFTAHLNKASLHVSLHIRDSQ | CAASGYGSSGNKLI | GIGTLLSVK |
| 72 | | | ASLNCTSS (SEQ ID | (SEQ ID | ALMS (SEQ ID | (SEQ ID | PSDSALYF (SEQ ID NO: | F (SEQ ID NO: | P (SEQ ID |
| | | | NO: 64) | NO: 2970) | NO: 5938) | NO: 8906) | 11874) | 25536) | NO: |
| | | | | | | | | | 16456) |
| Clonotype_ | 1 | TRB | EAGVTQSPRYAVLQEGQA | SGHDT | LYWYQQPRDQGPQ | FRDEAV | IDNSQLPSDRFSAVRPKGTNSTLKI | CASSPGTGRNTEVF | GKGTRLTVV |
| 73 | | | VSFWCDPI (SEQ ID | (SEQ ID | LLVY (SEQ ID | (SEQ ID | (SEQSAKQGDTATYL (SEQ ID NO: | F (SEQ ID NO: | (SEQ ID |
| | | | NO: 1) | NO: | NO: 5937) | NO: | 11873) | 25537) | NO: |
| | | | | 2969) | | 8905) | | | 16333) |
| Clonotype_ | 1 | TRA | GDSVTQTEGQVALSEEDF | ASGYPA | LFWYVQYPGEGPQ | ASRDKEK | GSSRGFEATYNKEATSFHLQKASVQ | CALSGSSSFSKLVF | GQGTSLSVV |
| 73 | | | LTIHCNYS (SEQ ID | (SEQ ID | FLFR (SEQ ID | (SEQ ID | ESDSAVYY (SEQ ID NO: 12094) | (SEQ ID NO: | P (SEQ ID |
| | | | NO: 14) | NO: 3082) | NO: 6050) | NO: 8918) | | 25538) | NO: 16422) |
| Clonotype_ | 1 | TRB | EAGVTQSPRYAVLQEGQA | SGHDT | LYWYQQPRDQGPQ | FRDEAV | IDNSQLPSDRFSAVRPKGTNSTLKI | CASSSGTDSYEQYF | GPGTRLTVL |
| 74 | | | VSFWCDPI (SEQ ID | (SEQ ID | LLVY (SEQ ID | (SEQ ID | (SEQSAKQGDTATYL (SEQ ID NO: | (SEQ ID NO: | (SEQ ID |
| | | | NO: 1) | NO: | NO: 5937) | NO: | 11873) | 25539) | NO: |
| | | | | 2969) | | 8905) | | | 16327) |
| Clonotype_ | 1 | TRA | QQNVQQSPESLIVPEGAR | DSASQY | FWWYRQHSGKAPK | IFSNGE | KEEGRFTIHLNKASLHFSLHIRDSQ | CAVKAYQGGRALIF | GTGTTVSVS |
| 74 | | | TSLNCTFS (SEQ ID | (SEQ ID | ALMS (SEQ ID | (SEQ ID | PSDSALYL (SEQ ID NO: | (SEQ ID NO: | P (SEQ ID |
| | | | NO: 76) | NO: | NO: 6012) | NO: | 11948) | 25540) | NO: |
| | | | | 3044) | | 8932) | | | 16348) |
| Clonotype_ | 1 | TRB | EAGVTQSPRYAVLQEGQA | SGHDT | LYWYQQPRDQGPQ | FRDEAV | IDNSQLPSDRFSAVRPKGTNSTLKI | CASSSGTANTEVFF | GKGTRLTVV |
| 75 | | | VSFWCDPI (SEQ ID | (SEQ ID | LLVY (SEQ ID | (SEQ ID | (SEQSAKQGDTATYL (SEQ ID NO: | (SEQ ID NO: | (SEQ ID |
| | | | NO: 1) | NO: | NO: 5937) | NO: | 11873) | 25541) | NO: |
| | | | | 2969) | | 8905) | | | 16333) |
| Clonotype_ | 1 | TRA | GDSVTQTEGLVTLTKGLP | TTYSPF | ILFWYVQHLNEAPK | SSTDNKR | TEHQGFYATLHKSSSSFHLQKSSVQ | CALRNGGSGNKLIF | GTGTLLSVK |
| 75 | | | VMLNCTYQ (SEQ ID | (SEQ ID | LLLK (SEQ ID | (SEQ ID | LSDSALYF (SEQ ID NO: | (SEQ ID NO: | P (SEQ ID |
| | | | NO: 8) | NO: | NO: 5944) | NO: | 11880) | 25542) | NO: |
| | | | | 2976) | | 8912) | | | 16350) |
| Clonotype_ | 1 | TRB | EAGVTQSPRYAVLQEGQA | SGHDT | LYWYQQPRDQGPQ | FRDEAV | IDNSQLPSDRFSAVRPKGTNSTLKI | CASSLRSYEQYF | GPGTRLTVL |
| 76 | | | VSFWCDPI (SEQ ID | (SEQ ID | LLVY (SEQ ID | (SEQ ID | (SEQSAKQGDTATYL (SEQ ID NO: | (SEQ ID NO: | (SEQ ID |
| | | | NO: 1) | NO: | NO: 5937) | NO: | 11873) | 25543) | NO: |
| | | | | 2969) | | 8905) | | | 16327) |
| Clonotype_ | 1 | TRA | QQQVRQSPQSLTVWEGET | DSTFNY | FPWYQQFPGEGPA | IRSVSDK | KEDGRFTIFFNKREKKLSLHITDSQ | CAAASNYNVLYF | GSGTKLTVE |
| 76 | | | AILNCSYE (SEQ ID | (SEQ ID | LLIS (SEQ ID | (SEQ ID | PGDSATYF (SEQ ID NO: | (SEQ ID NO: | P (SEQ ID |
| | | | NO: 68) | NO: | NO: 6004) | NO: | 11940) | 25544) | NO: |
| | | | | 3036) | | 8988) | | | 16336) |
| Clonotype_ | | TRB | EAGVTQSPRYAVLQEGQA | SGHDT | LYWYQQPRDQGPQ | FRDEAV | IDNSQLPSDRFSAVRPKGTNSTLKI | CASSLWGASAETLY | GSGTRLTVL |
| 77 | | | VSFWCDPI (SEQ ID | (SEQ ID | LLVY (SEQ ID | (SEQ ID | (SEQSAKQGDTATYL (SEQ ID NO: | F (SEQ ID NO: | (SEQ ID |
| | | | NO: 1) | NO: | NO: 5937) | NO: | 11873) | 25545) | NO: |
| | | | | 2969) | | 8905) | | | 16325) |
| Clonotype_ | 1 | TRA | GDSVTQTEGQVALSEEDF | ASGYPA | LFWYVQYPGEGPQ | ASRDKEK | GSSRGFEATYDKGTTSFHLRKASVQ | CALGDYNQGKLIF | GQGTKLSIK |
| 77 | | | LTIHCNYS (SEQ ID | (SEQ ID | FLFR (SEQ ID | (SEQ ID | ESDSAVYY (SEQ ID NO: 11886) | (SEQ ID NO: | P (SEQ ID |
| | | | NO: 14) | NO: | NO: 6050) | NO: | | 15964) | NO: |
| | | | | 3082) | | 8918) | | | 16332) |
| Clonotype_ | 1 | TRB | EAGVTQSPRYAVLQEGQA | SGHDT | LYWYQQPRDQGPQ | FRDEAV | IDNSQLPSDRFSAVRPKGTNSTLKI | CASSFDGANTEVFF | GKGTRLTVV |
| 78 | | | VSFWCDPI (SEQ ID | (SEQ ID | LLVY (SEQ ID | (SEQ ID | (SEQSAKQGDTATYL (SEQ ID NO: | (SEQ ID NO: | (SEQ ID |
| | | | NO: 1) | NO: | NO: 5937) | NO: | 11873) | 25547) | NO: |
| | | | | 2969) | | 8905) | | | 16333) |
| Clonotype_ | 1 | TRA | GDSVTQTEGLVTVTEGLP | TTYLTIA | FFWYVQYLNEAPQ | SSTDNKR | TEHQGFHATLHKSSSSFHLQKSSAQ | CALRSGGSNYKLTF | GKGTLLTVT |
| 78 | | | VKLNCTYQ (SEQ ID | (SEQ ID | VLLK (SEQ ID | (SEQ ID | LSDSALYY (SEQ ID NO: | (SEQ ID NO: | P (SEQ ID |
| | | | NO: 116) | NO: | NO: 6052) | NO: | 11918) | 25548) | NO: |
| | | | | 3084) | | 8912) | | | 16642) |
| Clonotype_ | 1 | TRB | EAGVTQSPRYAVLQEGQA | SGHDT | LYWYQQPRDQGPQ | FRDEAV | IDNSQLPSDRFSAVRPKGTNSTLKI | CASSFGGRTNERLF | GHGTKLSVL |
| 79 | | | VSFWCDPI (SEQ ID | (SEQ ID | LLVY (SEQ ID | (SEQ ID | (SEQSAKQGDTATYL (SEQ ID NO: | F (SEQ ID NO: | (SEQ ID |
| | | | NO: 1) | NO: | NO: 5937) | NO: | 11873) | 25549) | NO: |
| | | | | 2969) | | 8905) | | | 16401) |
| Clonotype_ | 1 | TRA | QQQVRQSSQSLTVWEGET | NSAFDY | FPWYQQFPGEGPA | IRSVSDK | KEDGRFTIFFNKREKNLSLHIKDSQ | CAASGTNYGSSGNK | GIGTLLSVK |
| 79 | | | AILNCSYE (SEQ ID | (SEQ ID | LLIA (SEQ ID | (SEQ ID | PGDSATYF (SEQ ID NO: | LIF (SEQ ID NO: | P (SEQ ID |
| | | | NO: 84) | NO: | NO: 6020) | NO: | 11956) | 25550) | NO: |
| | | | | 3052) | | 8988) | | | 16456) |
| Clonotype_ | 1 | TRB | EAGVTQSPRYAVLQEGQA | SGHDT | LYWYQQPRDQGPQ | FRDEAV | IDNSQLPSDRFSAVRPKGTNSTLKI | CASSFGDTGNTLYF | GEGSRLIVV |
| 80 | | | VSFWCDPI (SEQ ID | (SEQ ID | LLVY (SEQ ID | (SEQ ID | (SEQSAKQGDTATYL (SEQ ID NO: | (SEQ ID NO: | (SEQ ID |
| | | | NO: 1) | NO: | NO: 5937) | NO: | 11873) | 25551) | NO: |
| | | | | 2969) | | 8905) | | | 16471) |
| Clonotype_ | 1 | TRA | GDSVTQTEGQVALSEEDF | ASGYPA | LFWYVQYPGEGPQ | ASRDKEK | GSSRGFEATYNKEATSFHLQKASVQ | CALSGATNAYKVIF | GKGTHLHVL |
| 80 | | | LTIHCNYS (SEQ ID | (SEQ ID | FLFR (SEQ ID | (SEQ ID | ESDSAVYY (SEQ ID NO: | (SEQ ID NO: | P (SEQ ID |
| | | | NO: 14) | NO: | NO: 6050) | NO: | 12094) | 25552) | NO: |
| | | | | 3082) | | 8918) | | | 16330) |
| Clonotype_ | 1 | TRB | EAGVTQSPRYAVLQEGQA | SGHDT | LYWYQQPRDQGPQ | FRDEAV | IDNSQLPSDRFSAVRPKGTNSTLKI | CASSFGDTQYF | GPGTRLLVL |
| 81 | | | VSFWCDPI (SEQ ID | (SEQ ID | LLVY (SEQ ID | (SEQ ID | (SEQSAKQGDTATYL (SEQ ID NO: | (SEQ ID NO: | (SEQ ID |
| | | | NO: 1) | NO: | NO: 5937) | NO: | 11873) | 25553) | NO: |
| | | | | 2969) | | 8905) | | | 16341) |
| Clonotype_ | 1 | TRA | GDSVTQTEGPVTLSEGTS | TKQYPT | LFWYVQYPGEGPQ | VPKANEK | GSNRGFEATYNKEATSFHLQKASVQ | CALSDEYQGGRALI | GTGTTVSVS |
| 81 | | | LTVNCSYE (SEQ ID | (SEQ ID | LLFK (SEQ ID | (SEQ ID | ESDSAVYY (SEQ ID NO: | F (SEQ ID NO: | P (SEQ ID |
| | | | NO: 38) | NO: 3006) | NO: 5974) | NO: 8942) | 11910) | 25554) | NO: 16348) |
| Clonotype_ | | TRB | EAGVTQSPRYAVLQEGQA | SGHDT | LYWYQQPRDQGPQ | FRDEAV | IDNSQLPSDRFSAVRPKGTNSTLKI | CASSFWGSSAETLY | GSGTRLTVL |
| 82 | | | VSFWCDPI (SEQ ID | (SEQ ID | LLVY (SEQ ID | (SEQ ID | (SEQSAKQGDTATYL (SEQ ID NO: | F (SEQ ID NO: | (SEQ ID |
| | | | NO: 1) | NO: | NO: 5937) | NO: | 11873) | 25555) | NO: |
| | | | | 2969) | | 8905) | | | 16325) |
| Clonotype_ | 1 | TRA | GQQVQQSPASLVLQEGEN | STATQ | LQWFYQSPGGSLV | NPSGT | KHTGRLTSTTVTKERRSSLHISSSQ | CYSSGSWQLIF | GSGTQLTVM |
| 82 | | | AELQCNFS (SEQ ID | (SEQ ID | SLLS (SEQ ID | (SEQ ID | TTDSGTYL (SEQ ID NO: 12194) | (SEQ ID NO: | P (SEQ ID |
| | | | NO: 10) | NO: | NO: 6258) | NO: 8914) | | 25556) | NO: 16400) |
| | | | | 3290) | | | | | |
| Clonotype_ | 1 | TRB | DMKVTQMPRYLIKRMGEN | MSHET | MYWYRQDPGLGLQ | SYDVDS | NSEGDIPKGYRVSRKKREHFSLILD | CASSGTDYEQYF | GPGTRLTVL |
| 83 | | | VLLECGQD (SEQ ID | (SEQ ID | LIYI (SEQ ID | (SEQ ID | SAKTNQTSVYF (SEQ ID NO: | (SEQ ID NO: | (SEQ ID |
| | | | NO: 163) | NO: | NO: 6099) | NO: | 12035) | 25557) | NO: |
| | | | | 3131) | | 9067) | | | 16327) |
| Clonotype_ | 1 | TRA | GEQVEQRPPHLSVPEGDS | IDSATAY | FYWYKQEPGAGLQ | VFSNVDR | KEEQGLTVLLNKKDKQLSLNLTAAH | CAVSAGKTGNTRKL | GLGTTLQVQ |
| 83 | | | AVIICTYT (SEQ ID | (SEQ ID | LLMS (SEQ ID | (SEQ ID | PGDSAVYF (SEQ ID NO: | IF (SEQ ID NO: | P (SEQ ID |
| | | | NO: 100) | NO: | NO: 6036) | NO: | 11972) | 25558) | NO: |
| | | | | 2990) | | 9004) | | | 16326) |
| Clonotype_ | 1 | TRB | DMKVTQMPRYLIKRMGEN | MSHET | MYWYRQDPGLGLQ | SYDVDS | NSEGDIPKGYRVSRKKREHFSLILD | CASSLGEANQAPLF | GEGTRLSVL |
| 84 | | | VLLECGQD (SEQ ID | (SEQ ID | LIYI (SEQ ID | (SEQ ID | SAKTNQTSVYF (SEQ ID NO: | (SEQ ID NO: | (SEQ ID |
| | | | NO: 163) | NO: | NO: 6099) | NO: | 12035) | 25559) | NO: |
| | | | | 3131) | | 9067) | | | 16441) |
| Clonotype_ | 1 | TRA | GDSVTQTEGPVTLSEGTS | TKQYPT | LFWYVQYPGEGPQ | VPKANEK | GSNRGFEATYNKEATSFHLQKASVQ | CALSVASSGSWQLI | GSGTQLTVM |
| 84 | | | LTVNCSYE (SEQ ID | (SEQ ID | LLFK (SEQ ID | (SEQ ID | ESDSAVYY (SEQ ID NO: | F (SEQ ID NO: | P (SEQ ID |
| | | | NO: 38) | NO: | NO: 5974) | NO: | 11910) | 25560) | NO: |
| | | | | 3006) | | 8942) | | | 16400) |
| Clonotype_ | 1 | TRB | DMKVTQMPRYLIKRMGEN | MSHET | MYWYRQDPGLGLQ | SYDVDS | NSEGDIPKGYRVSRKKREHFSLILD | CASSGTGGVQDTQY | GPGTRLLVL |
| 85 | | | VLLECGQD (SEQ ID | (SEQ ID | LIYI (SEQ ID | (SEQ ID | SAKTNQTSVYF (SEQ ID NO: | F (SEQ ID NO: | (SEQ ID |
| | | | NO: 163) | NO: | NO: 6099) | NO: | 12035) | 25561) | NO: |
| | | | | 3131) | | 9067) | | | 16341) |
| Clonotype_ | 1 | TRA | SQWGEENLQALSIQEGED | TYTTV | VQWYRQKSGKGPA | IRSNERE | KRSGRLRATLDTSSQSSSLSITGTL | CASMDSNYQLIW | GSGTKLIIK |
| 85 | | | VTMNCSYK (SEQ ID | (SEQ ID | QLIL (SEQ ID | (SEQ ID | ATDTAVYF (SEQ ID NO: | (SEQ ID NO: | P (SEQ ID |
| | | | NO: 80) | NO: | NO: 6586) | NO: | 12030) | 25562) | NO: |
| | | | | 3048) | | 8928) | | | 16372) |
| Clonotype_ | 1 | TRB | DMKVTQMPRYLIKRMGEN | MSHET | MYWYRQDPGLGLQ | SYDVDS | NSEGDIPKGYRVSRKKREHFSLILD | CASSLGGNNERLFF | GHGTKLSVL |
| 86 | | | VLLECGQD (SEQ ID | (SEQ ID | LIYI (SEQ ID | (SEQ ID | SAKTNQTSVYF (SEQ ID NO: | (SEQ ID NO: | (SEQ ID |
| | | | NO: 163) | NO: | NO: 6099) | NO: | 12035) | 25563) | NO: |
| | | | | 3131) | | 9067) | | | 16401) |
| Clonotype_ | 1 | TRA | QQQVRQSPQSLTVWEGET | NSAFDY | FPWYQQFPGEGPA | ILSVSNK | KEDGRFTIFFNKREKKLSLHIADSQ | CAASGNTGYQNFYF | GKGTSLTVI |
| 86 | | | AILNCSYE (SEQ ID | (SEQ ID | LLIS (SEQ ID | (SEQ ID | PGDSATYF (SEQ ID NO: | (SEQ ID NO: | P (SEQ ID |
| | | | NO: 68) | NO: | NO: 6004) | NO: | 11996) | 15714) | NO: |
| | | | | 3052) | | 9028) | | | 16366) |
| Clonotype_ | 1 | TRB | DMKVTQMPRYLIKRMGEN | MSHET | MYWYRQDPGLGLQ | SYDVDS | NSEGDIPKGYRVSRKKREHFSLILD | CASSLDRNTEVFF | GKGTRLTVV |
| 87 | | | VLLECGQD (SEQ ID | (SEQ ID | LIYI (SEQ ID | (SEQ ID | SAKTNQTSVYF (SEQ ID NO: | (SEQ ID NO: | (SEQ ID |
| | | | NO: 163) | NO: | NO: 6099) | NO: | 12035) | 25565) | NO: |
| | | | | 3131) | | 9067) | | | 16333) |
| Clonotype_ | 1 | TRA | GQQVKQSSPSLTVQEGGI | NDMFDY | FAWYKKYPDNSPT | VRSNVDK | REDGRLTVFLNKSGKHFSLHITASQ | CAAGAQDQGGSAKL | GEGTKLTVS |
| 87 | | | SILNCDYE (SEQ ID | (SEQ ID | LLIS (SEQ ID | (SEQ ID | PEDTAVYL (SEQ ID NO: | IF (SEQ ID NO: | S (SEQ ID |
| | | | NO: 248) | NO: | NO: 6014) | NO: | 12120) | 25566) | NO: |
| | | | | 3046) | | 8982) | | | 16384) |
| Clonotype_ | 1 | TRB | DMKVTQMPRYLIKRMGEN | MSHET | MYWYRQDPGLGLQ | SYDVDS | NSEGDIPKGYRVSRKKREHFSLILD | CASSFGLEVFF | GKGTRLTVV |
| 88 | | | VLLECGQD (SEQ ID | (SEQ ID | LIYI (SEQ ID | (SEQ ID | SAKTNQTSVYF (SEQ ID NO: | (SEQ ID NO: | (SEQ ID |
| | | | NO: 163) | NO: | NO: 6099) | NO: | 12035) | 25567) | NO: |
| | | | | 3131) | | 9067) | | | 16333) |
| Clonotype_ | 1 | TRA | DAKTTQPDSMESTEGETV | TISGNEY | YVTH (SEQ ID | GLQQN | TTNSMAFLAIASDRKSSTLILPHVS | CILRVQGGSAKLIF | GEGTKLTVS |
| 88 | | | HLPCSHA (SEQ ID NO: | (SEQ ID | IYWYRQVPLQGPE | (SEQ ID | LRDAAVYH (SEQ ID NO: | (SEQ ID NO: | S (SEQ ID |
| | | | 104) | NO: | NO: 6040) | NO: | 12266) | 25568) | NO: |
| | | | | 3072) | | 9008) | | | 16384) |
| Clonotype_ | 1 | TRB | DPKIIQKPKYLVAVTGSE | LGHNA | MYWYRQSAKKPLE | YSYQKL | MDNQTASSRFQPQSSKKNHLDLQIT | CASSQTRDNYNSPL | AAGTRLTVT |
| 89 | | | KILICEQY (SEQ ID | (SEQ ID | FMFS (SEQ ID | (SEQ ID | ALKPDDSATYF (SEQ ID NO: | YF (SEQ ID NO: | (SEQ ID |
| | | | NO: 15) | NO: | NO: 5951) | NO: 8919) | 11887) | 25569) | NO: 16381) |
| | | | | 2983) | | | | | |
| Clonotype_ | 1 | TRA | AQKVTQTQTSISVMEKTT | TQDSSYF | LFWYKQTASGEIV | QDSYKKE | ATVGHYSLNFQKPKSSIGLIITATQ | CAMREGTNTDKVVF | GTGTRLQVS |
| 89 | | | VTMDCVYE (SEQ ID | (SEQ ID | FLIR (SEQ ID | N (SEQ | IEDSAVYF (SEQ ID NO: | (SEQ ID NO: | P (SEQ ID |
| | | | NO: 44) | NO: | NO: 5942) | ID NO: | 11878) | 25570) | NO: |
| | | | | 3056) | | 8910) | | | 16374) |
| Clonotype_ | 1 | TRB | DPKIIQKPKYLVAVTGSE | LGHNA | MYWYRQSAKKPLE | YSYQKL | MDNQTASSRFQPQSSKKNHLDLQIT | CASSQEPGLGGIDT | GPGTRLLVL |
| 90 | | | KILICEQY (SEQ ID | (SEQ ID | FMFS (SEQ ID | (SEQ ID | ALKPDDSATYF (SEQ ID NO: | YF (SEQ ID NO: | (SEQ ID |
| | | | NO: 15) | NO: | NO: 5951) | NO: | 11887) | 25571) | NO: |
| | | | | 2983) | | 8919) | | | 16341) |
| Clonotype_ | 1 | TRA | GDSVTQTEGQVTVSESKS | TTSIAYP | LFWYVRYPGEGLQ | VITAGQK | GSSRGFEATYNKETTSFHLQKASVQ | CALGPSNNRIFF | GDGTQLVVK |
| 90 | | | LIINCTYS (SEQ ID | N (SEQ | LLLK (SEQ ID | (SEQ ID | ESDSAVYY (SEQ ID NO: | (SEQ ID NO: | P (SEQ ID |
| | | | NO: 60) | ID NO: | NO: 5996) | NO: | 11932) | 25572) | NO: |
| | | | | 3028) | | 8964) | | | 16328) |
| Clonotype_ | 1 | TRB | DPKIIQKPKYLVAVTGSE | LGHNA | MYWYRQSAKKPLE | YSYQKL | MDNQTASSRFQPQSSKKNHLDLQIT | CASSQEWVNQDTQY | GPGTRLLVL |
| 91 | | | KILICEQY (SEQ ID | (SEQ ID | FMFS (SEQ ID | (SEQ ID | ALKPDDSATYF (SEQ ID NO: | F (SEQ ID NO: | (SEQ ID |
| | | | NO: 15) | NO: | NO: 5951) | NO: 8919) | 11887) | 25573) | NO: 16341) |
| | | | | 2983) | | | | | |
| Clonotype_ | 1 | TRA | GQQVQQSPTSLVLQEGEN | TSLNS | MQWFYQRPGGSLV | NPSGT | ITDSGTYL (SEQ ID NO: 12038) | CAMERFGTGYQNFY | GKGTSLTVI |
| 91 | | | AELQCNFS (SEQ ID | (SEQ ID | SVFY (SEQ ID | (SEQ ID | KQSGRLTSTTVIKERRSSLHISSSQ | F (SEQ ID NO: | P (SEQ ID |
| | | | NO: 528) | NO: 2978) | NO: 6464) | NO: 8914) | | 25574) | NO: |
| | | | | | | | | | 16366) |
| Clonotype_ | 1 | TRB | DPKIIQKPKYLVAVTGSE | LGHNA | MYWYRQSAKKPLE | YSYQKL | MDNQTASSRFQPQSSKKNHLDLQIT | CASSQDNSAETLYF | GSGTRLTVL |
| 92 | | | KILICEQY (SEQ ID | (SEQ ID | FMFS (SEQ ID | (SEQ ID | ALKPDDSATYF (SEQ ID NO: | (SEQ ID NO: | (SEQ ID |
| | | | NO: 15) | NO: | NO: 5951) | NO: | 11887) | 25575) | NO: |
| | | | | 2983) | | 8919) | | | 16325) |
| Clonotype_ | 1 | TRA | AQKVTQTQTSISVMEKTT | TQDSSYF | LFWYKQTASGEIV | QDSYKKE | ATVGHYSLNFQKPKSSIGLIITATQ | CAMREGGNAGAKLT | GGGTRLTVR |
| 92 | | | VTMDCVYE (SEQ ID | (SEQ ID | FLIR (SEQ ID | N (SEQ | IEDSAVYF (SEQ ID NO: 11878) | F (SEQ ID NO: | P (SEQ ID |
| | | | NO: 44) | NO: | NO: 5942) | ID NO: | | 25576) | NO: 16338) |
| | | | | 3056) | | 8910) | | | |
| Clonotype_ | 1 | TRB | DPKIIQKPKYLVAVTGSE | LGHNA | MYWYRQSAKKPLE | YSYQKL | MDNQTASSRFQPQSSKKNHLDLQIT | CASSQDRGDTEVFF | GKGTRLTVV |
| 93 | | | KILICEQY (SEQ ID | (SEQ ID | FMFS (SEQ ID | (SEQ ID | ALKPDDSATYF (SEQ ID NO: | (SEQ ID NO: | (SEQ ID |
| | | | NO: 15) | NO: | NO: 5951) | NO: | 11887) | 25577) | NO: |
| | | | | 2983) | | 8919) | | | 16333) |
| Clonotype_ | 1 | TRA | SQWGEENLQALSIQEGED | TYTTV | VQWYRQKSGKGPA | IRSNERE | KRSGRLRATLDTSSQSSSLSITGTL | CACLSGSFNKLTF | GAGTRLAVC |
| 93 | | | VTMNCSYK (SEQ ID | (SEQ ID | QLIL (SEQ ID | (SEQ ID | ATDTAVYF (SEQ ID NO: | (SEQ ID NO: | P (SEQ ID |
| | | | NO: 80) | NO: | NO: 6586) | NO: | 12030) | 25578) | NO: |
| | | | | 3048) | | 8928) | | | 16692) |
| Clonotype_ | 1 | TRB | DPKIIQKPKYLVAVTGSE | LGHNA | MYWYRQSAKKPLE | YSYQKL | MDNQTASSRFQPQSSKKNHLDLQIT | CASSQDHISNERLF | GHGTKLSVL |
| 94 | | | KILICEQY (SEQ ID | (SEQ ID | FMFS (SEQ ID | (SEQ ID | ALKPDDSATYF (SEQ ID NO: | F (SEQ ID NO: | (SEQ ID |
| | | | NO: 15) | NO: | NO: 5951) | NO: | 11887) | 25579) | NO: |
| | | | | 2983) | | 8919) | | | 16401) |
| Clonotype_ | 1 | TRA | GDSVTQTEGPVTVSESES | ATSIAYP | LFWYVRYPGEGLQ | VITAGQK | GSSRGFEATYNKETTSFHLQKASVQ | CALGDRDYAQGLTF | GLGTRVSVF |
| 94 | | | LIINCTYS (SEQ ID | N (SEQ | LLLK (SEQ ID | (SEQ ID | ESDSAVYY (SEQ ID NO: | (SEQ ID NO: | P (SEQ ID |
| | | | NO: 130) | ID NO: | NO: 5996) | NO: | 11932) | 25580) | NO: |
| | | | | 3098) | | 8964) | | | 16344) |
| Clonotype_ | 1 | TRB | DPKIIQKPKYLVAVTGSE | ILGHNA | MYWYRQSAKKPLE | YSYQKL | MDNQTASSRFQPQSSKKNHLDLQIT | CASSQDPFQDTQYF | GPGTRLLVL |
| 95 | | | KILICEQY (SEQ ID | (SEQ ID | FMFS (SEQ ID | (SEQ ID | ALKPDDSATYF (SEQ ID NO: | (SEQ ID NO: | (SEQ ID |
| | | | NO: 15) | NO: | NO: 5951) | NO: | 11887) | 25581) | NO: |
| | | | | 2983) | | 8919) | | | 16341) |
| Clonotype_ | 1 | TRA | GDSVTQKQGQVTLSEDDF | TTTYPT | LFWYVQYPGQGPQ | VTTANNK | GISRGFEATYDKGTTSFHLQKASVQ | CALVDDSGTYQRF | GTGTKLQVV |
| 95 | | | LFINCTYS (SEQ ID | (SEQ ID | LLLK (SEQ ID | (SEQ ID | ESDSAVYF (SEQ ID NO: 12382) | (SEQ ID NO: | P (SEQ ID |
| | | | NO: 510) | NO: | NO: 6446) | NO: 9054) | | 25582) | NO: 16432) |
| | | | | 3478) | | | | | |
| Clonotype_ | 1 | TRB | DPKIIQKPKYLVAVTGSE | LGHNA | MYWYRQSAKKPLE | YSYQKL | MDNQTASSRFQPQSSKKNHLDLQIT | CASSQDGGARDSDY | GSGTRLLVI |
| 96 | | | KILICEQY (SEQ ID | (SEQ ID | FMFS (SEQ ID | (SEQ ID | ALKPDDSATYF (SEQ ID NO: | TF (SEQ ID NO: | (SEQ ID |
| | | | NO: 15) | NO: | NO: 5951) | NO: | 11887) | 25583) | NO: |
| | | | | 2983) | | 8919) | | | 16337) |
| Clonotype_ | 1 | TRA | QQKVQQSPESLSVPEGGM | DRNFQY | FWWYRQHSGEGPK | IFSDGD | KKEGRFTAHLNKASLHVSLHIRDSQ | CAASDPMLSGSFNK | GAGTRLAVC |
| 96 | | | ASFNCTSS (SEQ ID | (SEQ ID | ALMS (SEQ ID | (SEQ ID | PSDSALYF (SEQ ID NO: | LTF (SEQ ID NO: | P (SEQ ID |
| | | | NO: 2) | NO: | NO: 5938) | NO: | 11874) | 25584) | NO: |
| | | | | 2970) | | 8906) | | | 16692) |
| Clonotype_ | 1 | TRB | DPKIIQKPKYLVAVTGSE | LGHNA | MYWYRQSAKKPLE | YSYQKL | MDNQTASSRFQPQSSKKNHLDLQIT | CASSQDQISNERLF | GHGTKLSVL |
| 97 | | | KILICEQY (SEQ ID | (SEQ ID | FMFS (SEQ ID | (SEQ ID | ALKPDDSATYF (SEQ ID NO: | F (SEQ ID NO: | (SEQ ID |
| | | | NO: 15) | NO: | NO: 5951) | NO: | 11887) | 25585) | NO: |
| | | | | 2983) | | 8919) | | | 16401) |
| Clonotype_ | 1 | TRA | QQKVQQSPESLSVPEGGM | DRNFQY | FWWYRQHSGEGPK | IFSDGD | KKEGRFTAHLNKASLHVSLHIRDSQ | CAAFHDSGYNKLTF | GKGTVLLVS |
| 97 | | | ASLNCTSS (SEQ ID | (SEQ ID | ALMS (SEQ ID | (SEQ ID | PSDSALYF (SEQ ID NO: | (SEQ ID NO: | P (SEQ ID |
| | | | NO: 64) | NO: | NO: 5938) | NO: | 11874) | 25586) | NO: |
| | | | | 2970) | | 8906) | | | 16378) |
| Clonotype_ | 1 | TRB | DPKIIQKPKYLVAVTGSE | LGHNA | MYWYRQSAKKPLE | YSYQKL | MDNQTASSRFQPQSSKKNHLDLQIT | CASSQDVTGGYEQY | GPGTRLTVL |
| 98 | | | KILICEQY (SEQ ID | (SEQ ID | FMFS (SEQ ID | (SEQ ID | ALKPDDSATYF (SEQ ID NO: | F (SEQ ID NO: | (SEQ ID |
| | | | NO: 15) | NO: 2983) | NO: 5951) | NO: 8919) | 11887) | 25587) | NO: 16327) |
| Clonotype_ | | TRA | GDSVTQTEGQVTVSESKS | ATSIGYP | LFWYVRYPGEGLQ | VITAGQK | GSSRGFEATYNKEATSFHLQKASVQ | CALSWSSGSWQLIF | GSGTQLTVM |
| 98 | | | LIINCTYS (SEQ ID | N (SEQ | LLLK (SEQ ID | (SEQ ID | ESDSAVYY (SEQ ID NO: | (SEQ ID NO: | P (SEQ ID |
| | | | NO: 60) | ID NO: | NO: 5996) | NO: 8964) | 12094) | 25588) | NO: 16400) |
| | | | | 3330) | | | | | |
| Clonotype_ | 1 | TRB | DPKIIQKPKYLVAVTGSE | LGHNA | MYWYRQSAKKPLE | YSYQKL | MDNQTASSRFQPQSSKKNHLDLQIT | CASSQDWGQDAETL | GSGTRLTVL |
| 99 | | | KILICEQY (SEQ ID | (SEQ ID | FMFS (SEQ ID | (SEQ ID | ALKPDDSATYF (SEQ ID NO: | YF (SEQ ID NO: | (SEQ ID |
| | | | NO: 15) | NO: | NO: 5951) | NO: | 11887) | 25589) | NO: |
| | | | | 2983) | | 8919) | | | 16325) |
| Clonotype_ | 1 | TRA | GDSVTQTEGLVTLTEGLP | STYSPF | LFWYVQHLNEAPK | SFTDNKR | PEHQGFHATLHKSSSSFHLQKSSAQ | CALSDAGSGGKLTL | GAGTRLQVN |
| 99 | | | VMLNCTYQ (SEQ ID | (SEQ ID | LLLK (SEQ ID | (SEQ ID | LSDSALYY (SEQ ID NO: | (SEQ ID NO: | L (SEQ ID |
| | | | NO: 46) | NO: | NO: 5944) | NO: | 11944) | 25590) | NO: |
| | | | | 3040) | | 8950) | | | 17020) |
| Clonotype_ | 1 | TRB | DPKIIQKPKYLVAVTGSE | LGHNA | MYWYRQSAKKPLE | YSYQKL | MDNQTASSRFQPQSSKKNHLDLQIT | CASSQADWDNQDTQ | GPGTRLLVL |
| 100 | | | KILICEQY (SEQ ID | (SEQ ID | FMFS (SEQ ID | (SEQ ID | ALKPDDSATYF (SEQ ID NO: | YF (SEQ ID NO: | (SEQ ID |
| | | | NO: 15) | NO: 2983) | NO: 5951) | NO: 8919) | 11887) | 25591) | NO: 16341) |
| Clonotype_ | 1 | TRA | AQKVTQTQTSISVVEKTT | TRDSSYF | LFWYKQTASGEIV | QDSYKKE | ATVGHYSLNFQKPKSSIGLIITATQ | CAMRESSGGNYKPT | GKGTSLVVH |
| 100 | | | VTMDCVYE (SEQ ID | (SEQ ID | FLIR (SEQ ID | N (SEQ | IEDSAVYF (SEQ ID NO: | F (SEQ ID NO: | P (SEQ ID |
| | | | NO: 6) | NO: | NO: 5942) | ID NO: | 11878) | 25592) | NO: |
| | | | | 2974) | | 8910) | | | 16394) |
| Clonotype_ | 1 | TRB | DPKIIQKPKYLVAVTGSE | LGHNA | MYWYRQSAKKPLE | YSYQKL | MDNQTASSRFQPQSSKKNHLDLQIT | CASSQGTNSDYTF | GSGTRLLVI |
| 101 | | | KILICEQY (SEQ ID | (SEQ ID | FMFS (SEQ ID | (SEQ ID | ALKPDDSATYF (SEQ ID NO: | (SEQ ID NO: | (SEQ ID |
| | | | NO: 15) | NO: | NO: 5951) | NO: | 11887) | 25593) | NO: |
| | | | | 2983) | | 8919) | | | 16337) |
| Clonotype_ | 1 | TRA | GEKVEQHESTLSVREGDS | DTASSY | FPWYKQEAGKSLH | IRSNVDR | KQSQRLTVLLDKKAKRFSLHITATQ | CAARSAGNKLTF | GIGTRVLVR |
| 101 | | | AVINCTYT (SEQ ID | ID NO: | FVID (SEQ ID | (SEQ ID | PEDSAIYF (SEQ ID NO: | (SEQ ID NO: | P (SEQ ID |
| | | | NO: 54) | 3022) | NO: 5990) | NO: | 12238) | 25594) | NO: |
| | | | | | | 8958) | | | 16580) |
| Clonotype_ | 1 | TRB | DPKIIQKPKYLVAVTGSE | LGHNA | MYWYRQSAKKPLE | YSYQKL | MDNQTASSRFQPQSSKKNHLDLQIT | CASSPQIANTEVFF | GKGTRLTVV |
| 102 | | | KILICEQY (SEQ ID | (SEQ ID | FMFS (SEQ ID | (SEQ ID | ALKPDDSATYF (SEQ ID NO: | (SEQ ID NO: | (SEQ ID |
| | | | NO: 15) | NO: | NO: 5951) | NO: | 11887) | 25595) | NO: |
| | | | | 2983) | | 8919) | | | 16333) |
| Clonotype_ | 1 | TRA | AQSVTQPDARVTVSEGAS | YSATPY | ILFWYVQYPRQGLQ | YYSGDPV | GVNGFEAEFSKSNSSFHLRKASVH | CAVIGGGSAKLIF | GEGTKLTVS |
| 102 | | | LQLRCKYS (SEQ ID | (SEQ ID | LLLK (SEQ ID | V (SEQ | WSDSAVYF (SEQ ID NO: 11892) | (SEQ ID NO: | S (SEQ ID |
| | | | NO: 12) | NO: | NO: 5948) | ID NO: | | 25596) | NO: 16384) |
| | | | | 2980) | | 8916) | | | |
| Clonotype_ | 1 | TRB | DPKIIQKPKYLVAVTGSE | LGHNA | MYWYRQSAKKPLE | YSYQKL | MDNQTASSRFQPQSSKKNHLDLQIT | CASGLGVSAEQFF | GPGTRLTVL |
| 103 | | | KILICEQY (SEQ ID | (SEQ ID | FMFS (SEQ ID | (SEQ ID | ALKPDDSATYF (SEQ ID NO: | (SEQ ID NO: | (SEQ ID |
| | | | NO: 15) | NO: | NO: 5951) | NO: | 11887) | 25597) | NO: |
| | | | | 2983) | | 8919) | | | 16327) |
| Clonotype_ | 1 | TRA | AQKVTQTQTSISVMEKTT | TRDSSYF | LFWYKQTASGEIV | QDSYKKE | ATEGHYSLNFQKPKSSIGLIITATQ | CAMREGPGYQNFYF | GKGTSLTVI |
| 103 | | | VTMDCVYE (SEQ ID | (SEQ ID | FLIR (SEQ ID | N (SEQ | IEDSAVYF (SEQ ID NO: | (SEQ ID NO: | P (SEQ ID |
| | | | NO: 44) | NO: | NO: 5942) | ID NO: | 11916) | 25598) | NO: |
| | | | | 2974) | | 8910) | | | 16366) |
| Clonotype_ | 1 | TRB | ETAVFQTPNYHVTQVGNE | LGHDT | MYWYKQDSKKLLK | YNNKQL | IVNETVPRRFSPQSSDKAHLNLRIK | CASRQGAYAEQFF | GPGTRLTVL |
| 104 | | | VSFNCKQT (SEQ ID | (SEQ ID | IMFS (SEQ ID | (SEQ ID | SVEPEDSAVYL (SEQ ID NO: | (SEQ ID NO: | (SEQ ID |
| | | | NO: 99) | NO: | NO: 6035) | NO: | 11971) | 25599) | NO: |
| | | | | 3067) | | 9003) | | | 16327) |
| Clonotype_ | 1 | TRA | AQSVTQPDARVTVSEGAS | YFGTPY | LFWYVQYPRQGLQ | YYPGDPV | GVNGFEAEFSKSNSSFHLRKASVH | CAVSPLNQGGSAKL | GEGTKLTVS |
| 104 | | | LQLRCKYS (SEQ ID | (SEQ ID | LLLK (SEQ ID | V (SEQ | WSDWAVYF (SEQ ID NO: | IF (SEQ ID NO: | S (SEQ ID |
| | | | NO: 12) | NO: | NO: 5948) | ID NO: | 11924) | 25600) | NO: |
| | | | | 3020) | | 8956) | | | 16384) |
| Clonotype_ | 1 | TRB | ETAVFQTPNYHVTQVGNE | LGHDT | MYWYKQDSKKLLK | YNNKQL | IVNETVPRRFSPQSSDKAHLNLRIK | CASSKQGYEQYF | GPGTRLTVL |
| 105 | | | VSFNCKQT (SEQ ID | (SEQ ID | IMFS (SEQ ID | (SEQ ID | SVEPEDSAVYL (SEQ ID NO: | (SEQ ID NO: | (SEQ ID |
| | | | NO: 99) | NO: | NO: 6035) | NO: | 11971) | 25601) | NO: |
| | | | | 3067) | | 9003) | | | 16327) |
| Clonotype_ | 1 | TRA | AQSVTQPDARVTVSEGAS | YSGTPY | LFWYVQYPRQGLQ | YYSGDPV | GVNGFEAEFIKSNSSFHLRKASVH | CAVSSYTGNYKYVF | GAGTRLKVI |
| 105 | | | LQLRCKYS (SEQ ID | (SEQ ID | LLLK (SEQ ID | V (SEQ | WSDSAVYF (SEQ ID NO: | (SEQ ID NO: | A (SEQ ID |
| | | | NO: 12) | NO: | NO: 5948) | ID NO: | 12016) | 25602) | NO: |
| | | | | 3054) | | 8916) | | | 16380) |
| Clonotype_ | 1 | TRB | ETAVFQTPNYHVTQVGNE | LGHDT | MYWYKQDSKKLLK | YNNKQL | IVNETVPRRFSPQSSDKAHLNLRIK | CASSPTANSDYTF | GSGTRLLVI |
| 106 | | | VSFNCKQT (SEQ ID | (SEQ ID | IMFS (SEQ ID | (SEQ ID | SVEPEDSAVYL (SEQ ID NO: | (SEQ ID NO: | (SEQ ID |
| | | | NO: 99) | NO: | NO: 6035) | NO: | 11971) | 25603) | NO: |
| | | | | 3067) | | 9003) | | | 16337) |
| Clonotype_ | 1 | TRA | AQKVTQTQTSISVMEKTT | TQDSSYF | FLIR (SEQ ID | QDSYKKE | ATVGHYSLNFQKPKSSIGLIITATQ | CAMREGYAQGLTF | GLGTRVSVF |
| 106 | | | VTMDCVYE (SEQ ID | (SEQ ID | LFWYKQTASGEIV | N (SEQ | IEDSAVYF (SEQ ID NO: | (SEQ ID NO: | P (SEQ ID |
| | | | NO: 44) | NO: | NO: 5942) | ID NO: | 11878) | 15140) | NO: |
| | | | | 3056) | | 8910) | | | 16344) |
| Clonotype_ | 1 | TRB | ETAVFQTPNYHVTQVGNE | LGHDT | MYWYKQDSKKLLK | YNNKQL | IVNETVPRRFSPQSSDKAHLNLRIK | CASSPWGGALDTQY | GPGTRLLVL |
| 107 | | | VSFNCKQT (SEQ ID | (SEQ ID | IMFS (SEQ ID | (SEQ ID | SVEPEDSAVYL (SEQ ID NO: | F (SEQ ID NO: | (SEQ ID |
| | | | NO: 99) | NO: | NO: 6035) | NO: | 11971) | 25605) | NO: |
| | | | | 3067) | | 9003) | | | 16341) |
| Clonotype_ | 1 | TRA | TQTVSQSDAHVTVFEGDS | YGGSIY | LSWYIQHHGRGLQ | YYSGNPV | GVNGFEAEFSKSDSSFHLRKASVH | CAVRSDTNAYKVIF | GKGTHLHVL |
| 107 | | | VELRCNYS (SEQ ID | (SEQ ID | FLLK (SEQ ID | V (SEQ | WSDSAVYF (SEQ ID NO: | (SEQ ID NO: | P (SEQ ID |
| | | | NO: 110) | NO: | NO: 6046) | ID NO: | 11946) | 25606) | NO: |
| | | | | 3078) | | 9014) | | | 16330) |
| Clonotype_ | 1 | TRB | ETAVFQTPNYHVTQVGNE | LGHDT | MYWYKQDSKKLLK | YNNKQL | IVNETVPRRFSPQSSDKAHLNLRIK | CASSDYWGSSYEQY | GPGTRLTVL |
| 108 | | | VSFNCKQT (SEQ ID | (SEQ ID | IMFS (SEQ ID | (SEQ ID | SVEPEDSAVYL (SEQ ID NO: | F (SEQ ID NO: | (SEQ ID |
| | | | NO: 99) | NO: | NO: 6035) | NO: | 11971) | 25607) | NO: |
| | | | | 3067) | | 9003) | | | 16327) |
| Clonotype_ | 1 | TRA | GDSVTQKQGQVTLSEDDF | TTTYPT | LLWYVQYPGQGPQ | VTTANNK | GISRGFEATYDKGTTSFHLQKASVQ | CALVGGGNYKPTF | GKGTSLVVH |
| 108 | | | LFINCTYS (SEQ ID | (SEQ ID | LLLK (SEQ ID | (SEQ ID | ESDSAVYF (SEQ ID NO: | (SEQ ID NO: | P (SEQ ID |
| | | | NO: 510) | NO: | NO: 21948) | NO: | 12382) | 25608) | NO: |
| | | | | 3478) | | 9054) | | | 16394) |
| Clonotype_ | 1 | TRB | ETAVFQTPNYHVTQVGNE | LGHDT | MYWYKQDSKKLLK | YNNKQL | IVNETVPRRFSPQSSDKAHLNLRIK | CASSADWGAGDTQY | GPGTRLLVL |
| 109 | | | VSFNCKQT (SEQ ID | (SEQ ID | IMFS (SEQ ID | (SEQ ID | SVEPEDSAVYL (SEQ ID NO: | F (SEQ ID NO: | (SEQ ID |
| | | | NO: 99) | NO: | NO: 6035) | NO: | 11971) | 25609) | NO: |
| | | | | 3067) | | 9003) | | | 16341) |
| Clonotype_ | 1 | TRA | GDSVTQKQGQVTLSEDDF | TTTYPT | ILFWYVQYPGQGPQ | VTTANNK | GISRGFEATYDKGTTSFHLQKASVQ | CALAQTSGGNYKPT | GKGTSLVVH |
| 109 | | | LFINCTYS (SEQ ID | (SEQ ID | LLLK (SEQ ID | (SEQ ID | ESDSAVYF (SEQ ID NO: | F (SEQ ID NO: | P (SEQ ID |
| | | | NO: 510) | NO: | NO: 6446) | NO: | 12382) | 25610) | NO: |
| | | | | 3478) | | 9054) | | | 16394) |
| Clonotype_ | 1 | TRB | ETAVFQTPNYHVTQVGNE | LGHDT | MYWYKQDSKKLLK | YNNKQL | IVNETVPRRFSPQSSDKAHLNLRIK | CASSYTGGDSYEQY | GPGTRLTVL |
| 110 | | | VSFNCKQT (SEQ ID | (SEQ ID | IMFS (SEQ ID | (SEQ ID | SVEPEDSAVYL (SEQ ID NO: | F (SEQ ID NO: | (SEQ ID |
| | | | NO: 99) | NO: 3067) | NO: 6035) | NO: 9003) | 11971) | 25611) | NO: 16327) |
| Clonotype_ | 1 | TRA | GQQVQQSPASLVLQEGEN | TSLNS | MQWFYQRPGGSLV | NPSGT | KQSGRLTSTTVIKERRSSLHISSSQ | CAITSSGQKLVF | GQGTILKVY |
| 110 | | | AELQCNFS (SEQ ID | (SEQ ID | SLFY (SEQ ID | (SEQ ID | TTDSGTYL (SEQ ID NO: 11882) | (SEQ ID | L (SEQ ID |
| | | | NO: 10) | NO: | NO: 5946) | NO: | | NO: 25612) | NO: |
| | | | | 2978) | | 8914) | | | 16414) |
| Clonotype_ | 1 | TRB | ETAVFQTPNYHVTQVGNE | LGHDT | MYWYKQDSKKLLK | YNNKQL | IVNETVPRRFSPQSSDKAHLNLRIK | CASSYRLGRDTGQL | GEGSKLTVL |
| 111 | | | VSFNCKQT (SEQ ID | (SEQ ID | IMFS (SEQ ID | (SEQ ID | SVEPEDSAVYL (SEQ ID NO: | YF (SEQ ID NO: | (SEQ ID |
| | | | NO: 99) | NO: | NO: 6035) | NO: | 11971) | 25613) | NO: |
| | | | | 3067) | | 9003) | | | 16347) |
| Clonotype_ | 1 | TRA | GDSVTQTEGLVTLTEGLP | TAYSTF | LFWYVQHLNEAPK | SSTDNKR | TEHQGFHATLHKSSSSFHLQKSSAQ | CALWTGNYKYVF | GAGTRLKVI |
| 111 | | | VMLNCTYQ (SEQ ID | (SEQ ID | LLLK (SEQ ID | (SEQ ID | LSDSALYY (SEQ ID NO: | (SEQ ID NO: | A (SEQ ID |
| | | | NO: 46) | NO: 3030) | NO: 5944) | NO: 8912) | 11918) | 25614) | NO: |
| | | | | | | | | | 16380) |
| Clonotype_ | 1 | TRB | ETAVFQTPNYHVTQVGNE | LGHDT | MYWYKQDSKKLLK | YNNKQL | IVNETVPRRFSPQSSDKAHLNLRIK | CASSWTKDTQYF | GPGTRLLVL |
| 112 | | | VSFNCKQT (SEQ ID | (SEQ ID | IMFS (SEQ ID | (SEQ ID | SVEPEDSAVYL (SEQ ID NO: | (SEQ ID NO: | (SEQ ID |
| | | | NO: 99) | NO: | NO: 6035) | NO: | 11971) | 25615) | NO: |
| | | | | 3067) | | 9003) | | | 16341) |
| Clonotype_ | 1 | TRA | AQKVTQTQTSISVMEKTT | TQDSSYF | LFWYKQTASGEIV | QDSYKKE | ATVGHYSLNFQKPKSSIGLIITATQ | CAMRETSGGNYKPT | GKGTSLVVH |
| 112 | | | VTMDCVYE (SEQ ID | (SEQ ID | FLIR (SEQ ID | N (SEQ | IEDSAVYF (SEQ ID NO: 11878) | F (SEQ ID NO: | P (SEQ ID |
| | | | NO: 44) | NO: 3056) | NO: 5942) | ID NO: | | 25616) | NO: 16394) |
| | | | | | | 8910) | | | |
| Clonotype_ | 1 | TRB | ETAVFQTPNYHVTQVGNE | LGHDT | MYWYKQDSKKLLK | YNNKQL | IVNETVPRRFSPQSSDKAHLNLRIK | CASSFDWGAGDTQY | GPGTRLLVL |
| 113 | | | VSFNCKQT (SEQ ID | (SEQ ID | IMFS (SEQ ID | (SEQ ID | SVEPEDSAVYL (SEQ ID NO: | F (SEQ ID NO: | (SEQ ID |
| | | | NO: 99) | NO: | NO: 6035) | NO: | 11971) | 25617) | NO: |
| | | | | 3067) | | 9003) | | | 16341) |
| Clonotype_ | 1 | TRA | GQQVQQSPTSLVLQEGEN | TSLNS | MQWFYQRPGGSLI | NPSGT | KQSGRLTSTTVIKERRSSLHISSSQ | CAMEATSSGQKLVF | GQGTILKVY |
| 113 | | | AELQCNFS (SEQ ID | (SEQ ID | SVFY (SEQ ID | (SEQ ID | ITDSGTYL (SEQ ID NO: | (SEQ ID NO: | L (SEQ ID |
| | | | NO: 528) | NO: | NO: 6710) | NO: | 12038) | 25618) | NO: |
| | | | | 2978) | | 8914) | | | 16414) |
| Clonotype_ | 1 | TRB | ETAVFQTPNYHVTQVGNE | LGHDT | MYWYKQDSKKLLK | YNNKQL | IVNETVPRRFSPQSSDKAHLNLRIK | CASRTGGIGEQYF | GPGTRLTVL |
| 114 | | | VSFNCKQT (SEQ ID | (SEQ ID | IMFS (SEQ ID | (SEQ ID | SVEPEDSAVYL (SEQ ID NO: | (SEQ ID NO: | (SEQ ID |
| | | | NO: 99) | NO: | NO: 6035) | NO: | 11971) | 25619) | NO: |
| | | | | 3067) | | 9003) | | | 16327) |
| Clonotype_ | 1 | TRA | QQKVQQSPESLSVPEGGM | DRNFQY | FWWYRQHSGEGPK | IFSDGD | KKEGRFTAHLNKASLHVSLHIRDSQ | CAASEHLWGNYGNE | GAGTKLTIK |
| 114 | | | ASFNCTSS (SEQ ID | (SEQ ID | ALMS (SEQ ID | (SEQ ID | PSDSALYF (SEQ ID NO: | KITF (SEQ ID | P (SEQ ID |
| | | | NO: 2) | NO: | NO: 5938) | NO: | 11874) | NO: 25620) | NO: |
| | | | | 2970) | | 8906) | | | 16512) |
| Clonotype_ | 1 | TRB | ETAVFQTPNYHVTQVGNE | LGHDT | MYWYKQDSKKLLK | YNNKQL | IVNETVPRRFSPQSSDKAHLNLRIK | CASSPGLGDYEQYF | GPGTRLTVL |
| 115 | | | VSFNCKQT (SEQ ID | (SEQ ID | IMFS (SEQ ID | (SEQ ID | SVEPEDSAVYL (SEQ ID NO: | (SEQ ID NO: | (SEQ ID |
| | | | NO: 99) | NO: | NO: 6035) | NO: | 11971) | 25621) | NO: |
| | | | | 3067) | | 9003) | | | 16327) |
| Clonotype_ | 1 | TRA | GEKVEQHESTLSVREGDS | DTASSY | FPWYKQEAGKGLH | IRSNVDR | KQSQRLIVLLDKKAKRFSLHITATQ | CAAPGGYKVVF | GSGTRLLVS |
| 115 | | | AVINCTYT (SEQ ID | (SEQ ID | FVID (SEQ ID | (SEQ ID | PEDSAIYF (SEQ ID NO: | (SEQ ID NO: | P (SEQ ID |
| | | | NO: 54) | NO: | NO: 5994) | NO: | 11926) | 25622) | NO: |
| | | | | 3022) | | 8958) | | | 16354) |
| Clonotype_ | 1 | TRB | ETAVFQTPNYHVTQVGNE | LGHDT | MYWYKQDSKKLLK | YNNKQL | IVNETVPRRFSPQSSDKAHLNLRIK | CASVGFSYEQYF | GPGTRLTVL |
| 116 | | | VSFNCKQT (SEQ ID | (SEQ ID | IMFS (SEQ ID | (SEQ ID | SVEPEDSAVYL (SEQ ID NO: | (SEQ ID NO: | (SEQ ID |
| | | | NO: 99) | NO: | NO: 6035) | NO: | 11971) | 25623) | NO: |
| | | | | 3067) | | 9003) | | | 16327) |
| Clonotype_ | 1 | TRA | GDSVTQTEGLVTLTEGLP | TAYSTF | LFWYVQHLNEAPK | SSTDNKR | TEHQGFHATLHKSSSSFHLQKSSAQ | CALSDRDNNAPRF | GAGTKLTVK |
| 116 | | | VMLNCTYQ (SEQ ID | (SEQ ID | LLLK (SEQ ID | (SEQ ID | LSDSALYY (SEQ ID NO: | (SEQ ID NO: | P (SEQ ID |
| | | | NO: 46) | NO: | NO: 5944) | NO: | 11918) | 25624) | NO: |
| | | | | 3030) | | 8912) | | | 16424) |
| Clonotype_ | 1 | TRB | EAAVTQSPRNKVAVTGGK | NNHNN | MYWYRQDTGHGLR | SYGAGS | TEKGDIPDGYKASRPSQENFSLILE | CASDWGANTGQLYF | GEGSKLTVL |
| 117 | | | VTLSCNQT (SEQ ID | (SEQ ID | LIHY (SEQ ID | (SEQ ID | LATPSQTSVYF (SEQ ID NO: | (SEQ ID NO: | (SEQ ID |
| | | | NO: 3) | NO: | NO: 5939) | NO: | 11875) | 25625) | NO: |
| | | | | 2971) | | 8907) | | | 16347) |
| Clonotype_ | 1 | TRA | GEQVEQLPSILRVQEGSS | DSASNY | FPWYKQEPGENPK | IRSNMER | KQIQELIVLLDKKAKRFSLHITDTQ | CAAPSSSFSKLVF | GQGTSLSVV |
| 117 | | | ASINCSYE (SEQ ID | (SEQ ID | LIID (SEQ ID | (SEQ ID | PGDSAMYF (SEQ ID NO: | (SEQ ID NO: | P (SEQ ID |
| | | | NO: 48) | NO: | NO: 5984) | NO: | 11920) | 25626) | NO: |
| | | | | 3016) | | 8952) | | | 16422) |
| Clonotype_ | 1 | TRB | EAAVTQSPRNKVAVTGGK | NNHNN | MYWYRQDTGHGLR | SYGAGS | TEKGDIPDGYKASRPSQENFSLILE | CASGDWGGSAETLY | GSGTRLTVL |
| 118 | | | VTLSCNQT (SEQ ID | (SEQ ID | LIHY (SEQ ID | (SEQ ID | LATPSQTSVYF (SEQ ID NO: | F (SEQ ID NO: | (SEQ ID |
| | | | NO: 3) | NO: | NO: 5939) | NO: | 11875) | 25627) | NO: |
| | | | | 2971) | | 8907) | | | 16325) |
| Clonotype_ | 1 | TRA | QQQVRQSPQSLTVWEGET | DSTFDY | FPWYRQFPGKSPA | ISLVSNK | KEDGRFTIFFNKREKKLSLHITDSQ | CAASEDSGTYQRF | GTGTKLQVV |
| 118 | | | TILNCSYE (SEQ ID | (SEQ ID | LLIA (SEQ ID | (SEQ ID | PGDSATYF (SEQ ID NO: | (SEQ ID NO: | P (SEQ ID |
| | | | NO: 19528) | NO: | NO: 21968) | NO: | 11940) | 25628) | NO: |
| | | | | 3208) | | 23188) | | | 16432) |
| Clonotype_ | 1 | TRB | EAAVTQSPRNKVAVTGGK | NNHNN | MYWYRQDTGHGLR | SYGAGS | TEKGDIPDGYKASRPSQENFSLILE | CASGDPRTGANTEV | GKGTRLTVV |
| 119 | | | VTLSCNQT (SEQ ID | (SEQ ID | LIHY (SEQ ID | (SEQ ID | LATPSQTSVYF (SEQ ID NO: | FF (SEQ ID NO: | (SEQ ID |
| | | | NO: 3) | NO: 2971) | NO: 5939) | NO: 8907) | 11875) | 25629) | NO: 16333) |
| Clonotype_ | 1 | TRA | QQKVQQSPESLTVSEGAM | DGTSNN | FRWYRQHSAKGLE | IFSDGE | KEEGRFTAHLNRANLHVSLHIREPQ | CAVTGGYKVVF | GSGTRLLVS |
| 119 | | | ASLNCTFS (SEQ ID | (SEQ ID | VLVS (SEQ ID | (SEQ ID | PSDSAVYL (SEQ ID NO: | (SEQ ID NO: | P (SEQ ID |
| | | | NO: 92) | NO: | NO: 6028) | NO: | 11964) | 25630) | NO: |
| | | | | 3060) | | 8996) | | | 16354) |
| Clonotype_ | 1 | TRB | EAAVTQSPRNKVAVTGGK | NNHNN | MYWYRQDTGHGLR | SYGAGS | TEKGDIPDGYKASRPSQENFSLILE | CASGTDEQYF (SEQ | GPGTRLTVL |
| 120 | | | VTLSCNQT (SEQ ID | (SEQ ID | LIHY (SEQ ID | (SEQ ID | LATPSQTSVYF (SEQ ID NO: | ID NO: 25631) | (SEQ ID |
| | | | NO: 3) | NO: | NO: 5939) | NO: | 11875) | | NO: |
| | | | | 2971) | | 8907) | | | 16327) |
| Clonotype_ | 1 | TRA | GEQVEQLPSILRVQEGSS | NSASNY | FPWYKQEPGENPK | IRSNMER | KQTQGLIVLLDKKAKRFSLHITDTQ | CAATSSGSWQLIF | GSGTQLTVM |
| 120 | | | ASINCTYE (SEQ ID | (SEQ ID | LIID (SEQ ID | (SEQ ID | PGDSAMYF (SEQ ID NO: | (SEQ ID NO: | P (SEQ ID |
| | | | NO: 170) | NO: 3138) | NO: 5984) | NO: 8952) | 12042) | 25632) | NO: |
| | | | | | | | | | 16400) |
| Clonotype_ | 1 | TRB | EAAVTQSPRNKVAVTGGK | NNHNN | MYWYRQDTGHGLR | SYGAGS | TEKGDIPDGYKASRPSQENFSLILE | CASGDRGGQDTQYF | GPGTRLLVL |
| 121 | | | VTLSCNQT (SEQ ID | (SEQ ID | LIHY (SEQ ID | (SEQ ID | LATPSQTSVYF (SEQ ID NO: | (SEQ ID NO: | (SEQ ID |
| | | | NO: 3) | NO: | NO: 5939) | NO: | 11875) | 25633) | NO: |
| | | | | 2971) | | 8907) | | | 16341) |
| Clonotype_ | 1 | TRA | GDSVTQTEGQVTVSESKS | TTSIAYP | LFWYVRYPGEGLQ | VITAGQK | GSSRGFEATYNKETTSFHLQKASVQ | CALGVVVGQLTF | GSGTRLQVY |
| 121 | | | LIINCTYS (SEQ ID | N (SEQ | LLLK (SEQ ID | (SEQ ID | ESDSAVYY (SEQ ID NO: | (SEQ ID NO: | A (SEQ ID |
| | | | NO: 60) | ID NO: | NO: 5996) | NO: | 11932) | 25634) | NO: |
| | | | | 3028) | | 8964) | | | 26854) |
| Clonotype_ | 1 | TRB | EAAVTQSPRNKVAVTGGK | NNHNN | MYWYRQDTGHGLR | SYGAGS | TEKGDIPDGYKASRPSQENFSLILE | CASGDYEQYF (SEQ | GPGTRLTVL |
| 122 | | | VTLSCNQT (SEQ ID | (SEQ ID | LIHY (SEQ ID | (SEQ ID | LATPSQTSVYF (SEQ ID NO: | ID NO: 25635) | (SEQ ID |
| | | | NO: 3) | NO: 2971) | NO: 5939) | NO: 8907) | 11875) | | NO: 16327) |
| Clonotype_ | 1 | TRA | QQKVQQSPESLTVSEGAM | DGTSDN | FRWYRQHSGKGLE | IFSDGE | KEEGRFTAHLNRASLHVSLHIREPQ | CAMMGGRALIF | GTGTTVSVS |
| 122 | | | ASLNCTFS (SEQ ID | (SEQ ID | VLVS (SEQ ID | (SEQ ID | PSDSAVYL (SEQ ID NO: | (SEQ ID NO: | P (SEQ ID |
| | | | NO: 92) | NO: | NO: 6592) | NO: | 12528) | 25636) | NO: |
| | | | | 3624) | | 8996) | | | 16348) |
| Clonotype_ | 1 | TRB | EAAVTQSPRNKVAVTGGK | NNHNN | MYWYRQDTGHGLR | SYGAGS | TEKGDIPDGYKASRPSQENFSLILE | CASGTNNNQAPLF | GEGTRLSVL |
| 123 | | | VTLSCNQT (SEQ ID | (SEQ ID | LIHY (SEQ ID | (SEQ ID | LATPSQTSVYF (SEQ ID NO: | (SEQ ID NO: | (SEQ ID |
| | | | NO: 3) | NO: | NO: 5939) | NO: | 11875) | 25637) | NO: |
| | | | | 2971) | | 8907) | | | 16441) |
| Clonotype_ | 1 | TRA | QQKVQQSPESLTVSEGAM | DGTSNN | FRWYRQHSAKGLE | IFSDGE | KEEGRFTAHLNRANLHVSLHIREPQ | CAVMSNYNVLYF | GSGTKLTVE |
| 123 | | | ASLNCTFS (SEQ ID | (SEQ ID | VLVS (SEQ ID | (SEQ ID | PSDSAVYL (SEQ ID NO: 11964) | (SEQ ID NO: | P (SEQ ID |
| | | | NO: 92) | NO: 3060) | NO: 6028) | NO: 8996) | | 15660) | NO: |
| | | | | | | | | | 16336) |
| Clonotype_ | 1 | TRB | EAAVTQSPRNKVAVTGGK | NNHNN | MYWYRQDTGHGLR | SYGAGS | TEKGDIPDGYKASRPSQENFSLILE | CASGPGGATEVFF | GKGTRLTVV |
| 124 | | | VTLSCNQT (SEQ ID | (SEQ ID | LIHY (SEQ ID | (SEQ ID | LATPSQTSVYF (SEQ ID NO: | (SEQ ID NO: | (SEQ ID |
| | | | NO: 3) | NO: 2971) | NO: 5939) | NO: 8907) | 11875) | 25639) | NO: 16333) |
| Clonotype_ | 1 | TRA | GEQVEQRPPHLSVREGDS | DPNSYY | FFWYKQEPGAGLQ | VFSSTEI | NEGQGFTVLLNKKDKQLSLNLTAAH | CAVSAGKLTF (SEQ | GTGTSLLVD |
| 124 | | | AVIICTYT (SEQ ID | (SEQ ID | LLMK (SEQ ID | (SEQ ID | PGDSAVYF (SEQ ID NO: | ID NO: 25640) | P (SEQ ID |
| | | | NO: 108) | NO: | NO: 6044) | NO: | 11980) | | NO: |
| | | | | 3010) | | 8946) | | | 16398) |
| Clonotype_ | 1 | TRB | EAAVTQSPRNKVAVTGGK | NNHNN | MYWYRQDTGHGLR | SYGAGS | TEKGDIPDGYKASRPSQENFSLILE | CASGETGGSNERLF | GHGTKLSVL |
| 125 | | | VTLSCNQT (SEQ ID | (SEQ ID | LIHY (SEQ ID | (SEQ ID | LATPSQTSVYF (SEQ ID NO: | F (SEQ ID NO: | (SEQ ID |
| | | | NO: 3) | NO: | NO: 5939) | NO: | 11875) | 25641) | NO: |
| | | | | 2971) | | 8907) | | | 16401) |
| Clonotype_ | 1 | TRA | QQQVRQSSQSLTVWEGET | NSAFDY | FPWYQQFPGEGPA | IRSVSDK | KEDGRFTIFFNKREKNLSLHIKDSQ | CAAVPSSGSWQLIF | GSGTQLTVM |
| 125 | | | AILNCSYE (SEQ ID | (SEQ ID | LLIA (SEQ ID | (SEQ ID | PGDSATYF (SEQ ID NO: | (SEQ ID NO: | P (SEQ ID |
| | | | NO: 84) | NO: | NO: 6020) | NO: 8988) | 11956) | 25642) | NO: 16400) |
| | | | | 3052) | | | | | |
| Clonotype_ | 1 | TRB | EAAVTQSPRNKVAVTGGK | NNHNN | MYWYRQDTGHGLR | SYGAGS | TEKGDIPDGYKASRPSQENFSLILE | CASGETGGYAEQFF | GPGTRLTVL |
| 126 | | | VTLSCNQT (SEQ ID | (SEQ ID | LIHY (SEQ ID | (SEQ ID | LATPSQTSVYF (SEQ ID NO: | (SEQ ID NO: | (SEQ ID |
| | | | NO: 3) | NO: | NO: 5939) | NO: | 11875) | 25643) | NO: |
| | | | | 2971) | | 8907) | | | 16327) |
| Clonotype_ | 1 | TRA | QQKVQQSPESLSVPEGGM | DRNFQY | FWWYRQHSGEGPK | IFSDGD | KKEGRFTAHLNKASLHVSLHIRDSQ | CAARTGGYKVVF | GSGTRLLVS |
| 126 | | | ASLNCTSS (SEQ ID | (SEQ ID | ALMS (SEQ ID | (SEQ ID | PSDSALYF (SEQ ID NO: | (SEQ ID NO: | P (SEQ ID |
| | | | NO: 64) | NO: | NO: 5938) | NO: | 11874) | 25644) | NO: |
| | | | | 2970) | | 8906) | | | 16354) |
| Clonotype_ | 1 | TRB | EAAVTQSPRNKVAVTGGK | NNHNN | MYWYRQDTGHGLR | SYGAGS | TEKGDIPDGYKASRPSQENFSLILE | CASGEGGGLYEQYF | GPGTRLTVL |
| 127 | | | VTLSCNQT (SEQ ID | (SEQ ID | LIHY (SEQ ID | (SEQ ID | LATPSQTSVYF (SEQ ID NO: | (SEQ ID NO: | (SEQ ID |
| | | | NO: 3) | NO: | NO: 5939) | NO: | 11875) | 25645) | NO: |
| | | | | 2971) | | 8907) | | | 16327) |
| Clonotype_ | 1 | TRA | QQKVQQSPESLSVPEGGM | DRNFQY | FWWYRQHSGEGPK | IFSDGD | KKEGRFTAHLNKASLHVSLHIRDSQ | CAASDSGSWQLIF | GSGTQLTVM |
| 127 | | | ASFNCTSS (SEQ ID | (SEQ ID | ALMS (SEQ ID | (SEQ ID | PSDSALYF (SEQ ID NO: | (SEQ ID NO: | P (SEQ ID |
| | | | NO: 2) | NO: | NO: 5938) | NO: | 11874) | 25646) | NO: |
| | | | | 2970) | | 8906) | | | 16400) |
| Clonotype_ | 1 | TRB | EAAVTQSPRNKVAVTGGK | NNHNN | MYWYRQDTGHGLR | SYGAGS () | TEKGDIPDGYKASRPSQENFSLILE | CASGDRGRGEQYF | GPGTRLTVL |
| 128 | | | VTLSCNQT (SEQ ID | (SEQ ID | LIHY (SEQ ID | (SEQ ID | LATPSQTSVYF (SEQ ID NO: | (SEQ ID NO: | (SEQ ID |
| | | | NO: 3) | NO: | NO: 5939) | NO: | 11875) | 25647) | NO: |
| | | | | 2971) | | 8907) | | | 16327) |
| Clonotype_ | 1 | TRA | GDSVTQTEGPVTLSEGTS | TKQYPT | ILFWYVQYPGEGPQ | VPKANEK | GSSRGFEATYNKEATSFHLQKASVQ | CALSERAGANTGKL | GHGTILRVH |
| 128 | | | LTVNCSYE (SEQ ID | (SEQ ID | LLFK (SEQ ID | (SEQ ID | ESDSAVYY (SEQ ID NO: | TF (SEQ ID NO: | P (SEQ ID |
| | | | NO: 38) | NO: | NO: 5974) | NO: | 12094) | 25648) | NO: |
| | | | | 3006) | | 8942) | | | 16356) |
| Clonotype_ | 1 | TRB | EAAVTQSPRNKVAVTGGK | NNHNN | MYWYRQDTGHGLR | SYGAGS | TEKGDIPDGYKASRPSQENFSLILE | CASGDLGSSAETLY | GSGTRLTVL |
| 129 | | | VTLSCNQT (SEQ ID | (SEQ ID | LIHY (SEQ ID | (SEQ ID | LATPSQTSVYF (SEQ ID NO: | F (SEQ ID NO: | (SEQ ID |
| | | | NO: 3) | NO: | NO: 5939) | NO: | 11875) | 25649) | NO: |
| | | | | 2971) | | 8907) | | | 16325) |
| Clonotype_ | 1 | TRA | SQLAEENSWALSVHEGES | TSITA | LQWYRQKSGKGPA | IRSNERE | KRNGRLRATLDTSSQSSSLSITATR | CATDLDYANKMIF | GLGTILRVR |
| 129 | | | VTVNCSYK (SEQ ID | (SEQ ID | QLIL (SEQ ID | (SEQ ID | CEDTAVYF (SEQ ID NO: | (SEQ ID NO: | P (SEQ ID |
| | | | NO: 188) | NO: | NO: 6124) | NO: | 11896) | 25650) | NO: |
| | | | | 2992) | | 8928) | | | 16416) |
| Clonotype_ | 1 | TRB | EAAVTQSPRNKVAVTGGK | NNHNN | MYWYRQDTGHGLR | SYGAGS | TEKGDIPDGYKASRPSQENFSLILE | CASGDWGAYEQYF | GPGTRLTVL |
| 130 | | | VTLSCNQT (SEQ ID | (SEQ ID | LIHY (SEQ ID | (SEQ ID | LATPSQTSVYF (SEQ ID NO: | (SEQ ID NO: | (SEQ ID |
| | | | NO: 3) | NO: | NO: 5939) | NO: | 11875) | 25651) | NO: |
| | | | | 2971) | | 8907) | | | 16327) |
| Clonotype_ | 1 | TRA | GQQVQQSPTSLVLQEGEN | TSLNS | MQWFYQRPGGSLV | NPSGT | KQSGRLTSTTVIKERRSSLHISSSQ | CAMWASSSFSKLVF | GQGTSLSVV |
| 130 | | | AELQCNFS (SEQ ID | (SEQ ID | SVFY (SEQ ID | (SEQ ID | ITDSGTYL (SEQ ID NO: 12038) | (SEQ ID NO: | P (SEQ ID |
| | | | NO: 528) | NO: 2978) | NO: 6464) | NO: 8914) | | 25652) | NO: |
| | | | | | | | | | 16422) |
| Clonotype_ | 1 | TRB | EAAVTQSPRNKVAVTGGK | NNHNN | MYWYRQDTGHGLR | SYGAGS | TEKGDIPDGYKASRPSQENFSLILE | CASGETGASSDYTF | GSGTRLLVI |
| 131 | | | VTLSCNQT (SEQ ID | (SEQ ID | LIHY (SEQ ID | (SEQ ID | LATPSQTSVYF (SEQ ID NO: | (SEQ ID NO: | (SEQ ID |
| | | | NO: 3) | NO: | NO: 5939) | NO: | 11875) | 25653) | NO: |
| | | | | 2971) | | 8907) | | | 16337) |
| Clonotype_ | 1 | TRA | QQKVQQSPESLIVPEGGM | DRNVDY | FWWYRQHSGKSPK | IFSNGE | KEEGRFTVHLNKASLHTSLHIRDSQ | CAAWTGGYKVVF | GSGTRLLVS |
| 131 | | | ASLNCTSS (SEQ ID | (SEQ ID | MLMS (SEQ ID | (SEQ ID | PSDSALYL (SEQ ID NO: | (SEQ ID NO: | P (SEQ ID |
| | | | NO: 28) | NO: | NO: 5964) | NO: | 11900) | 25654) | NO: |
| | | | | 2996) | | 8932) | | | 16354) |
| Clonotype_ | 1 | TRB | EAAVTQSPRNKVAVTGGK | NNHNN | MYWYRQDTGHGLR | SYGAGS | TEKGDIPDGYKASRPSQENFSLILE | CASGETGGDAETLY | GSGTRLTVL |
| 132 | | | VTLSCNQT (SEQ ID | (SEQ ID | LIHY (SEQ ID | (SEQ ID | LATPSQTSVYF (SEQ ID NO: | F (SEQ ID NO: | (SEQ ID |
| | | | NO: 3) | NO: | NO: 5939) | NO: | 11875) | 25655) | NO: |
| | | | | 2971) | | 8907) | | | 16325) |
| Clonotype_ | 1 | TRA | QQQVRQSPQSLTVWEGET | NSAFDY | FPWYQQFPGEGPA | ILSVSNK | KEDGRFTIFFNKREKKLSLHIADSQ | CAASSNTGYQNFYF | GKGTSLTVI |
| 132 | | | AILNCSYE (SEQ ID | (SEQ ID | LLIS (SEQ ID | (SEQ ID | PGDSATYF (SEQ ID NO: | (SEQ ID NO: | P (SEQ ID |
| | | | NO: 68) | NO: | NO: 6004) | NO: | 11996) | 25656) | NO: |
| | | | | 3052) | | 9028) | | | 16366) |
| Clonotype_ | 1 | TRB | EAAVTQSPRNKVAVTGGK | NNHNN | MYWYRQDTGHGLR | SYGAGS | TEKGDIPDGYKASRPSQENFSLILE | CASGERTVQDTQYF | GPGTRLLVL |
| 133 | | | VTLSCNQT (SEQ ID | (SEQ ID | LIHY (SEQ ID | (SEQ ID | LATPSQTSVYF (SEQ ID NO: | (SEQ ID NO: | (SEQ ID |
| | | | NO: 3) | NO: | NO: 5939) | NO: | 11875) | 25657) | NO: |
| | | | | 2971) | | 8907) | | | 16341) |
| Clonotype_ | 1 | TRA | GDSVTQTEGLVTLTEGLP | TIYSNAF | LFWYVHYLNESPW | SSTDNKR | TEHQGFHATLHKSSSSFHLQKSSAQ | CALSDNNAGAKLTF | GGGTRLTVR |
| 133 | | | VMLNCTYQ (SEQ ID | (SEQ ID | LLLR (SEQ ID | (SEQ ID | LSDSALYY (SEQ ID NO: | (SEQ ID NO: | P (SEQ ID |
| | | | NO: 46) | NO: | NO: 21998) | NO: | 11918) | 25658) | NO: |
| | | | | 3858) | | 8912) | | | 16338) |
| Clonotype_ | 1 | TRB | EAAVTQSPRNKVAVTGGK | NNHNN | MYWYRQDTGHGLR | SYGAGS | TEKGDIPDGYKASRPSQENFSLILE | CASGESQNTLYF | GAGTRLSVL |
| 134 | | | VTLSCNQT (SEQ ID | (SEQ ID | LIHY (SEQ ID | (SEQ ID | LATPSQTSVYF (SEQ ID NO: | (SEQ ID NO: | (SEQ ID |
| | | | NO: 3) | NO: | NO: 5939) | NO: 8907) | 11875) | 25659) | NO: 16365) |
| | | | | 2971) | | | | | |
| Clonotype_ | 1 | TRA | GDSVTQTEGPVTLSEGTS | TKQYPT | LFWYVQYPGEGPQ | VPKANEK | GSSRGFEATYNKEATSFHLQKASVQ | CALSDGTGYQNFYF | GKGTSLTVI |
| 134 | | | LTVNCSYE (SEQ ID | (SEQ ID | LLFK (SEQ ID | (SEQ ID | ESDSAVYY (SEQ ID NO: | (SEQ ID NO: | P (SEQ ID |
| | | | NO: 38) | NO: | NO: 5974) | NO: | 12094) | 25660) | NO: |
| | | | | 3006) | | 8942) | | | 16366) |
| Clonotype_ | 1 | TRB | EAAVTQSPRNKVAVTGGK | NNHNN | MYWYRQDTGHGLR | SYGAGS | TEKGDIPDGYKASRPSQENFSLILE | CASGEGLGGRETLY | GSGTRLTVL |
| 135 | | | VTLSCNQT (SEQ ID | (SEQ ID | LIHY (SEQ ID | (SEQ ID | LATPSQTSVYF (SEQ ID NO: | F (SEQ ID NO: | (SEQ ID |
| | | | NO: 3) | NO: | NO: 5939) | NO: | 11875) | 25661) | NO: |
| | | | | 2971) | | 8907) | | | 16325) |
| Clonotype_ | 1 | TRA | AQKVTQTQTSISVMEKTT | TQDSSYF | LFWYKQTASGEIV | QDSYKKE | ATVGHYSLNFQKPKSSIGLIITATQ | CAMREGEGGRALIF | GTGTTVSVS |
| 135 | | | VTMDCVYE (SEQ ID | (SEQ ID | FLIR (SEQ ID | N (SEQ | IEDSAVYF (SEQ ID NO: | (SEQ ID NO: | P (SEQ ID |
| | | | NO: 44) | NO: | NO: 5942) | ID NO: | 11878) | 25662) | NO: |
| | | | | 3056) | | 8910) | | | 16348) |
| Clonotype_ | 1 | TRB | EAAVTQSPRNKVAVTGGK | NNHNN | MYWYRQDTGHGLR | SYGAGS | TEKGDIPDGYKASRPSQENFSLILE | CASGEGLGGRGDTQ | GPGTRLLVL |
| 136 | | | VTLSCNQT (SEQ ID | (SEQ ID | LIHY (SEQ ID | (SEQ ID | LATPSQTSVYF (SEQ ID NO: | YF (SEQ ID NO: | (SEQ ID |
| | | | NO: 3) | NO: 2971) | NO: 5939) | NO: 8907) | 11875) | 25663) | NO: |
| | | | | | | | | | 16341) |
| Clonotype_ | 1 | TRA | LAKTTQPPSMEAYEGQEV | NIATSEY | IYWYRQVPHQGPQ | GYKDYVV | NEVASLFISADRKLSTLSLPWVSLR | CIVTDPWGSNTNKV | GTGTRLQVL |
| 136 | | | NVSCSHT (SEQ ID NO: | (SEQ ID | FIIQ (SEQ ID | (SEQ ID | DAAVYY (SEQ ID NO: 11978) | VF (SEQ ID NO: | P (SEQ ID |
| | | | 106) | NO: | NO: 6042) | NO: | | 25664) | NO: |
| | | | | 3074) | | 9010) | | | 16698) |
| Clonotype_ | 1 | TRB | EAAVTQSPRNKVAVTGGK | NNHNN | MYWYRQDTGHGLR | SYGAGS | TEKGDIPDGYKASRPSQENFSLILE | CASGEGQGNTEVFF | GKGTRLTVV |
| 137 | | | VTLSCNQT (SEQ ID | (SEQ ID | LIHY (SEQ ID | (SEQ ID | LATPSQTSVYF (SEQ ID NO: | (SEQ ID NO: | (SEQ ID |
| | | | NO: 3) | NO: | NO: 5939) | NO: | 11875) | 25665) | NO: |
| | | | | 2971) | | 8907) | | | 16333) |
| Clonotype_ | 1 | TRA | AQKVTQTQTSISVMEKTT | TQDSSYF | LFWYKQTASGEIV | QDSYKKE | ATVGHYSLNFQKPKSSIGLIITATQ | CAMREGDYSNNRLT | GKGTQVVVL |
| 137 | | | VTMDCVYE (SEQ ID | (SEQ ID | FLIR (SEQ ID | N (SEQ | IEDSAVYF (SEQ ID NO: | L (SEQ ID NO: | P (SEQ ID |
| | | | NO: 44) | NO: | NO: 5942) | ID NO: | 11878) | 25666) | NO: |
| | | | | 3056) | | 8910) | | | 16644) |
| Clonotype_ | 1 | TRB | EAAVTQSPRNKVAVTGGK | NNHNN | MYWYRQDTGHGLR | SYGAGS | TEKGDIPDGYKASRPSQENFSLILE | CASGEGETTEVFF | GKGTRLTVV |
| 138 | | | VTLSCNQT (SEQ ID | (SEQ ID | LIHY (SEQ ID | (SEQ ID | LATPSQTSVYF (SEQ ID NO: | (SEQ ID NO: | (SEQ ID |
| | | | NO: 3) | NO: | NO: 5939) | NO: | 11875) | 25667) | NO: |
| | | | | 2971) | | 8907) | | | 16333) |
| Clonotype_ | 1 | TRA | GEQVEQLPSSLIVQEGAS | DSASVY | FPWYKQEPGKRLQ | IRSNMER | KQNQRLTLLFDKKTKHLSLHITATQ | CSAPGAPNSAGNKL | GIGTRVLVR |
| 138 | | | VLINCSYT (SEQ ID | (SEQ ID | FIID (SEQ ID | (SEQ ID | PGDSAIYF (SEQ ID NO: | TF (SEQ ID NO: | P (SEQ ID |
| | | | NO: 160) | NO: | NO: 6096) | NO: | 12032) | 25668) | NO: |
| | | | | 3128) | | 8952) | | | 16580) |
| Clonotype_ | 1 | TRB | EAAVTQSPRNKVAVTGGK | NNHNN | MYWYRQDTGHGLR | SYGAGS | TEKGDIPDGYKASRPSQENFSLILE | CASGEGAANTEVFF | GKGTRLTVV |
| 139 | | | VTLSCNQT (SEQ ID | (SEQ ID | LIHY (SEQ ID | (SEQ ID | LATPSQTSVYF (SEQ ID NO: | (SEQ ID NO: | (SEQ ID |
| | | | NO: 3) | NO: | NO: 5939) | NO: | 11875) | 25669) | NO: |
| | | | | 2971) | | 8907) | | | 16333) |
| Clonotype_ | 1 | TRA | GDSVTQTEGPVTLSEGTS | TKQYPT | LFWYVQYPGEGPQ | VPKANEK | GSNRGFEATYNKEATSFHLQKASVQ | CALSDGTSGSWQLI | GSGTQLTVM |
| 139 | | | LTVNCSYE (SEQ ID | (SEQ ID | LLFK (SEQ ID | (SEQ ID | ESDSAVYY (SEQ ID NO: | F (SEQ ID NO: | P (SEQ ID |
| | | | NO: 38) | NO: | NO: 5974) | NO: | 11910) | 25670) | NO: |
| | | | | 3006) | | 8942) | | | 16400) |
| Clonotype_ | 1 | TRB | EAAVTQSPRNKVAVTGGK | NNHNN | MYWYRQDTGHGLR | SYGAGS | TEKGDIPDGYKASRPSQENFSLILE | CASGDNWGDTQYF | GPGTRLLVL |
| 140 | | | VTLSCNQT (SEQ ID | (SEQ ID | LIHY (SEQ ID | (SEQ ID | LATPSQTSVYF (SEQ ID NO: | (SEQ ID NO: | (SEQ ID |
| | | | NO: 3) | NO: 2971) | NO: 5939) | NO: 8907) | 11875) | 25671) | NO: |
| | | | | | | | | | 16341) |
| Clonotype_ | 1 | TRA | GDSVTQTEGLVTLTEGLP | STYSPF | LFWYVQHLNEAPK | SFTDNKR | PEHQGFHATLHKSSSSFHLQKSSAQ | CALSDQGGSAKLIF | GEGTKLTVS |
| 140 | | | VMLNCTYQ (SEQ ID | (SEQ ID | LLLK (SEQ ID | (SEQ ID | LSDSALYY (SEQ ID NO: | (SEQ ID NO: | S (SEQ ID |
| | | | NO: 46) | NO: | NO: 5944) | NO: | 11944) | 25672) | NO: |
| | | | | 3040) | | 8950) | | | 16384) |
| Clonotype_ | 1 | TRB | EAAVTQSPRNKVAVTGGK | NNHNN | MYWYRQDTGHGLR | SYGAGS | TEKGDIPDGYKASRPSQENFSLILE | CASGDTGDSDYTF | GSGTRLLVI |
| 141 | | | VTLSCNQT (SEQ ID | (SEQ ID | LIHY (SEQ ID | (SEQ ID | LATPSQTSVYF (SEQ ID NO: | (SEQ ID NO: | (SEQ ID |
| | | | NO: 3) | NO: | NO: 5939) | NO: | 11875) | 25673) | NO: |
| | | | | 2971) | | 8907) | | | 16337) |
| Clonotype_ | 1 | TRA | GDSVTQKQGQVTLSEDDF | TTTYPT | ILLWYVQYPGQGPQ | VTTANNK | GISRGFEATYDKGTTSFHLQKASVQ | CALVSYYGSSGNKL | GIGTLLSVK |
| 141 | | | LFINCTYS (SEQ ID | (SEQ ID | LLLK (SEQ ID | (SEQ ID | ESDSAVYF (SEQ ID NO: | IF (SEQ ID NO: | P (SEQ ID |
| | | | NO: 510) | NO: | NO: 21948) | NO: | 12382) | 25674) | NO: |
| | | | | 3478) | | 9054) | | | 16456) |
| Clonotype_ | 1 | TRB | EAAVTQSPRNKVAVTGGK | NNHNN | MYWYRQDTGHGLR | SYGAGS | TEKGDIPDGYKASRPSQENFSLILE | CASGDPGDAEQFF | GPGTRLTVL |
| 142 | | | VTLSCNQT (SEQ ID | (SEQ ID | LIHY (SEQ ID | (SEQ ID | LATPSQTSVYF (SEQ ID NO: | (SEQ ID NO: | (SEQ ID |
| | | | NO: 3) | NO: | NO: 5939) | NO: | 11875) | 25675) | NO: |
| | | | | 2971) | | 8907) | | | 16327) |
| Clonotype_ | 1 | TRA | GQQVQQSPASLVLQEGEN | TSLNS | MQWFYQRPEGSLV | NPSGT | KQSGRLTSTTVIKERRSSLHISSSQ | CAMEPGTGNYKYVF | GAGTRLKVI |
| 142 | | | AELQCNFS (SEQ ID | (SEQ ID | SLFY (SEQ ID | (SEQ ID | ITDSGTYL (SEQ ID NO: | (SEQ ID NO: | A (SEQ ID |
| | | | NO: 10) | NO: | NO: 6192) | NO: | 12038) | 25676) | NO: |
| | | | | 2978) | | 8914) | | | 16380) |
| Clonotype_ | 1 | TRB | EAAVTQSPRNKVAVTGGK | NNHNN | MYWYRQDTGHGLR | SYGAGS | TEKGDIPDGYKASRPSQENFSLILE | CASGDPGNSDYTF | GSGTRLLVI |
| 143 | | | VTLSCNQT (SEQ ID | (SEQ ID | LIHY (SEQ ID | (SEQ ID | LATPSQTSVYF (SEQ ID NO: | (SEQ ID NO: | (SEQ ID |
| | | | NO: 3) | NO: 2971) | NO: 5939) | NO: 8907) | 11875) | 25677) | NO: |
| | | | | | | | | | 16337) |
| Clonotype_ | 1 | TRA | AQSVTQPDARVTVSEGAS | YSGTPY | LFWYVQYPRQGLQ | YYSGDPV | GVNGFEAEFSKSNSSFHLRKASVH | CVLSVTNTGKLTF | GDGTVLTVK |
| 143 | | | LQLRCKYS (SEQ ID | (SEQ ID | LLLK (SEQ ID | V (SEQ | WSDSAVYF (SEQ ID NO: | (SEQ ID NO: | P (SEQ ID |
| | | | NO: 12) | NO: | NO: 5948) | ID NO: | 11892) | 25678) | NO: |
| | | | | 3054) | | 8916) | | | 16516) |
| Clonotype_ | 1 | TRB | EAAVTQSPRNKVAVTGGK | NNHNN | MYWYRQDTGHGLR | SYGAGS | TEKGDIPDGYKASRPSQENFSLILE | CASGDLGGHYEQYF | GPGTRLTVL |
| 144 | | | VTLSCNQT (SEQ ID | (SEQ ID | LIHY (SEQ ID | (SEQ ID | LATPSQTSVYF (SEQ ID NO: | (SEQ ID NO: | (SEQ ID |
| | | | NO: 3) | NO: | NO: 5939) | NO: 8907) | 11875) | 25679) | NO: 16327) |
| | | | | 2971) | | | | | |
| Clonotype_ | 1 | TRA | SQWGEENLQALSIQEGED | TYTTV | VHWYRQDSGRGPA | IRSNERE | KRSGRLRATLDTSSQSSSLSITAAQ | CAPASSGSWQLIF | GSGTQLTVM |
| 144 | | | VTMNCSYK (SEQ ID | (SEQ ID | LIIL (SEQ ID | (SEQ ID | CEDTAVYF (SEQ ID NO: | (SEQ ID NO: | P (SEQ ID |
| | | | NO: 80) | NO: 3048) | NO: 6016) | NO: 8928) | 11952) | 25680) | NO: 16400) |
| Clonotype_ | 1 | TRB | EAAVTQSPRNKVAVTGGK | INNHNN | MYWYRQDTGHGLR | SYGAGS | TEKGDIPDGYKASRPSQENFSLILE | CASGDDWDQNTLYF | GAGTRLSVL |
| 145 | | | VTLSCNQT (SEQ ID | (SEQ ID | LIHY (SEQ ID | (SEQ ID | LATPSQTSVYF (SEQ ID NO: | (SEQ ID NO: | (SEQ ID |
| | | | NO: 3) | NO: | NO: 5939) | NO: | 11875) | 25681) | NO: |
| | | | | 2971) | | 8907) | | | 16365) |
| Clonotype_ | 1 | TRA | AQSVTQPDARVTVSEGAS | YSATPY | LFWYVQYPRQGLQ | YYSGDPV | GVNGFEAEFSKSNSSFHLRKASVH | CAVKGNAGAKLTF | GGGTRLTVR |
| 145 | | | LQLRCKYS (SEQ ID | (SEQ ID | LLLK (SEQ ID | V (SEQ | WSDSAVYF (SEQ ID NO: | (SEQ ID NO: | P (SEQ ID |
| | | | NO: 12) | NO: | NO: 5948) | ID NO: | 11892) | 25682) | NO: |
| | | | | 2980) | | 8916) | | | 16338) |
| Clonotype_ | 1 | TRB | EAAVTQSPRNKVAVTGGK | NNHNN | MYWYRQDTGHGLR | SYGAGS | TEKGDIPDGYKASRPSQENFSLILE | CASGDAEWDTQYF | GPGTRLLVL |
| 146 | | | VTLSCNQT (SEQ ID | (SEQ ID | LIHY (SEQ ID | (SEQ ID | LATPSQTSVYF (SEQ ID NO: | (SEQ ID NO: | (SEQ ID |
| | | | NO: 3) | NO: | NO: 5939) | NO: | 11875) | 25683) | NO: |
| | | | | 2971) | | 8907) | | | 16341) |
| Clonotype_ | 1 | TRA | GDSVIQMQGQVTLSENDF | TTGYPT | LFWYVQYSGEGPQ | VTTANNK | GSSRGFEATYDKGTTSFHLQKTSVQ | CAMSAASSGSWQLI | GSGTQLTVM |
| 146 | | | LFINCTYS (SEQ ID | (SEQ ID | LLLQ (SEQ ID | (SEQ ID | EIDSAVYY (SEQ ID NO: | F (SEQ ID NO: | P (SEQ ID |
| | | | NO: 456) | NO: | NO: 6392) | NO: 9054) | 12328) | 25684) | NO: 16400) |
| | | | | 3220) | | | | | |
| Clonotype_ | 1 | TRE | EAAVTQSPRNKVAVTGGK | NNHNN | MYWYRQDTGHGLR | SYGAGS | TEKGDIPDGYKASRPSQENFSLILE | CASGDAGNSDYTF | GSGTRLLVI |
| 147 | | | VTLSCNQT (SEQ ID | (SEQ ID | LIHY (SEQ ID | (SEQ ID | LATPSQTSVYF (SEQ ID NO: | (SEQ ID NO: | (SEQ ID |
| | | | NO: 3) | NO: | NO: 5939) | NO: 8907) | 11875) | 25685) | NO: 16337) |
| | | | | 2971) | | | | | |
| Clonotype_ | 1 | TRA | GDSVTQTEGQVTVSESKS | ATSIAYP | LFWYVRYPGEGLQ | VITAGQK | GSSRGFEATYNKETTSFHLQKASVQ | CALRPNMGYKLTF | GTGTSLLVD |
| 147 | | | LIINCTYS (SEQ ID | N (SEQ | LLLK (SEQ ID | (SEQ ID | ESDSAVYY (SEQ ID NO: | (SEQ ID NO: | P (SEQ ID |
| | | | NO: 60) | ID NO: | NO: 5996) | NO: | 11932) | 25686) | NO: |
| | | | | 3098) | | 8964) | | | 16398) |
| Clonotype_ | 1 | TRB | EAAVTQSPRNKVAVTGGK | NNHNN | MYWYRQDTGHGLR | SYGAGS | TEKGDIPDGYKASRPSQENFSLILE | CASGDAGIQDTQYF | GPGTRLLVL |
| 148 | | | VTLSCNQT (SEQ ID | (SEQ ID | LIHY (SEQ ID | (SEQ ID | LATPSQTSVYF (SEQ ID NO: | (SEQ ID NO: | (SEQ ID |
| | | | NO: 3) | NO: | NO: 5939) | NO: | 11875) | 25687) | NO: |
| | | | | 2971) | | 8907) | | | 16341) |
| Clonotype_ | 1 | TRA | GDSVTQTEGPVTVSESES | ATSIAYP | LFWYVRYPGEGLQ | VITAGQK | ESDSAVYY (SEQ ID NO: | CASSANKVVF (SEQ | GTGTRLQVL |
| 148 | | | LIINCTYS (SEQ ID | N (SEQ | LLLK (SEQ ID | (SEQ ID | GSSRGFEATYNKETTSFHLQKASVQ | ID NO: 25688) | P (SEQ ID |
| | | | NO: 130) | ID NO: | NO: 5996) | NO: | 11932) | | NO: |
| | | | | 3098) | | 8964) | | | 16698) |
| Clonotype_ | 1 | TRB | EAAVTQSPRNKVAVTGGK | NNHNN | MYWYRQDTGHGLR | SYGAGS | TEKGDIPDGYKASRPSQENFSLILE | CASGDAGGGNERLF | GHGTKLSVL |
| 149 | | | VTLSCNQT (SEQ ID | (SEQ ID | LIHY (SEQ ID | (SEQ ID | LATPSQTSVYF (SEQ ID NO: | F (SEQ ID NO: | (SEQ ID |
| | | | NO: 3) | NO: | NO: 5939) | NO: | 11875) | 25689) | NO: |
| | | | | 2971) | | 8907) | | | 16401) |
| Clonotype_ | 1 | TRA | QQQVRQSPQSLTVWEGET | NSAFDY | FPWYQQFPGEGPA | IRSVSDK | KEDGGFTIFFNKREKNLSLHIKDSQ | CAASESGGNYKPTF | GKGTSLVVH |
| 149 | | | AILNCSYE (SEQ ID | (SEQ ID | LLIA (SEQ ID | (SEQ ID | PGDSATYF (SEQ ID NO: | (SEQ ID NO: | P (SEQ ID |
| | | | NO: 68) | NO: 3052) | NO: 6020) | NO: 8988) | 24470) | 25690) | NO: 16394) |
| Clonotype_ | 1 | TRB | EAAVTQSPRNKVAVTGGK | NNHNN | MYWYRQDTGHGLR | SYGAGS | TEKGDIPDGYKASRPSQENFSLILE | CASGDATYNSPLYF | AAGTRLTVT |
| 150 | | | VTLSCNQT (SEQ ID | (SEQ ID | LIHY (SEQ ID | (SEQ ID | LATPSQTSVYF (SEQ ID NO: | (SEQ ID NO: | (SEQ ID |
| | | | NO: 3) | NO: | NO: 5939) | NO: | 11875) | 25691) | NO: |
| | | | | 2971) | | 8907) | | | 16381) |
| Clonotype_ | 1 | TRA | AQKVTQTQTSISVMEKTT | TQDSSYF | FLIR (SEQ ID | QDSYKKE | ATVGHYSLNFQKPKSSIGLIITATQ | CAMRDEGSAGNKLT | GIGTRVLVR |
| 150 | | | VTMDCVYE (SEQ ID | (SEQ ID | LFWYKQTASGEIV | N (SEQ | IEDSAVYF (SEQ ID NO: | F (SEQ ID NO: | P (SEQ ID |
| | | | NO: 44) | NO: | NO: 5942) | ID NO: | 11878) | 25692) | NO: |
| | | | | 3056) | | 8910) | | | 16580) |
| Clonotype_ | 1 | TRB | EAAVTQSPRNKVAVTGGK | NNHNN | MYWYRQDTGHGLR | SYGAGS | TEKGDIPDGYKASRPSQENFSLILE | CASGDAAENTLYF | GAGTRLSVL |
| 151 | | | VTLSCNQT (SEQ ID | (SEQ ID | LIHY (SEQ ID | (SEQ ID | LATPSQTSVYF (SEQ ID NO: | (SEQ ID NO: | (SEQ ID |
| | | | NO: 3) | NO: | NO: 5939) | NO: | 11875) | 25693) | NO: |
| | | | | 2971) | | 8907) | | | 16365) |
| Clonotype_ | 1 | TRA | GQQVQQSPASLVLQEGEN | TSLNS | MQWFYQRPGGSLV | NPSGT | KQSGRLTSTTVIKERRSSLHISSSQ | CAMDTGGADRLTF | GKGTQLIIQ |
| 151 | | | AELQCNFS (SEQ ID | (SEQ ID | SLFY (SEQ ID | (SEQ ID | TTDSGTYL (SEQ ID NO: | (SEQ ID NO: | P (SEQ ID |
| | | | NO: 10) | NO: | NO: 5946) | NO: | 11882) | 25694) | NO: |
| | | | | 2978) | | 8914) | | | 16360) |
| Clonotype_ | 1 | TRB | EAAVTQSPRNKVAVTGGK | NNHNN | MYWYRQDTGHGLR | SYGAGS | TEKGDIPDGYKASRPSQENFSLILE | CASGDAGSAETLYF | GSGTRLTVL |
| 152 | | | VTLSCNQT (SEQ ID | (SEQ ID | LIHY (SEQ ID | (SEQ ID | LATPSQTSVYF (SEQ ID NO: | (SEQ ID NO: | (SEQ ID |
| | | | NO: 3) | NO: 2971) | NO: 5939) | NO: 8907) | 11875) | 25695) | NO: 16325) |
| Clonotype_ | 1 | TRA | GDSVTQTEGLVTLTKGLP | TTYSPF | LFWYVQHLNEAPK | SSTDNKR | TEHQGFYATLHKSSSSFHLQKSSVQ | CALSSGSWQLIF | GSGTQLTVM |
| 152 | | | VMLNCTYQ (SEQ ID | (SEQ ID | LLLK (SEQ ID | (SEQ ID | LSDSALYF (SEQ ID NO: | (SEQ ID NO: | P (SEQ ID |
| | | | NO: 8) | NO: | NO: 5944) | NO: | 11880) | 15636) | NO: |
| | | | | 2976) | | 8912) | | | 16400) |
| Clonotype_ | 1 | TRB | EAAVTQSPRNKVAVTGGK | NNHNN | MYWYRQDTGHGLR | SYGAGS | TEKGDIPDGYKASRPSQENFSLILE | CASGDAGGSAETLY | GSGTRLTVL |
| 153 | | | VTLSCNQT (SEQ ID | (SEQ ID | LIHY (SEQ ID | (SEQ ID | LATPSQTSVYF (SEQ ID NO: | F (SEQ ID NO: | (SEQ ID |
| | | | NO: 3) | NO: | NO: 5939) | NO: | 11875) | 25697) | NO: |
| | | | | 2971) | | 8907) | | | 16325) |
| Clonotype_ | 1 | TRA | QQQVRQSPQSLTVWEGET | DSTFNY | FPWYQQFPGEGPA | ISSVSDK | KEDGRFTIFFNKREKKLSLHITDSQ | CAASPNTGYQNFYF | GKGTSLTVI |
| 153 | | | AILNCSYE (SEQ ID | (SEQ ID | LLIS (SEQ ID | (SEQ ID | PGDSATYF (SEQ ID NO: | (SEQ ID NO: | P (SEQ ID |
| | | | NO: 68) | NO: | NO: 6004) | NO: 8972) | 11940) | 25698) | NO: 16366) |
| | | | | 3036) | | | | | |
| Clonotype_ | 1 | TRB | EAAVTQSPRNKVAVTGGK | NNHNN | MYWYRQDTGHGLR | SYGAGS | TEKGDIPDGYKASRPSQENFSLILE | CASGDAGGRQNTLY | GAGTRLSVL |
| 154 | | | VTLSCNQT (SEQ ID | (SEQ ID | LIHY (SEQ ID | (SEQ ID | LATPSQTSVYF (SEQ ID NO: | F (SEQ ID NO: | (SEQ ID |
| | | | NO: 3) | NO: 2971) | NO: 5939) | NO: 8907) | 11875) | 25699) | NO: 16365) |
| Clonotype_ | 1 | TRA | QQQVRQSPQSLTVWEGET | DSTFNY | FPWYQQFPGEGPA | IRSVSDK | KEDGRFTIFFNKREKKLSLHITDSQ | CAASADTGNYKYVF | GAGTRLKVI |
| 154 | | | AILNCSYE (SEQ ID | (SEQ ID | LLIS (SEQ ID | (SEQ ID | PGDSATYF (SEQ ID NO: 11940) | (SEQ ID NO: | A (SEQ ID |
| | | | NO: 68) | NO: | NO: 6004) | NO: | | 25700) | NO: |
| | | | | 3036) | | 8988) | | | 16380) |
| Clonotype_ | 1 | TRB | EAAVTQSPRNKVAVTGGK | NNHNN | MYWYRQDTGHGLR | SYGAGS | TEKGDIPDGYKASRPSQENFSLILE | CASGDAGGANSDYT | GSGTRLLVI |
| 155 | | | VTLSCNQT (SEQ ID | (SEQ ID | LIHY (SEQ ID | (SEQ ID | LATPSQTSVYF (SEQ ID NO: | F (SEQ ID NO: | (SEQ ID |
| | | | NO: 3) | NO: 2971) | NO: 5939) | NO: 8907) | 11875) | 25701) | NO: |
| | | | | | | | | | 16337) |
| Clonotype_ | 1 | TRA | GQQVQQSPSSLVLQEGEN | STATQ | LQWFYQSPGGSLV | NPSGT | KHTGRLTSTTVTKERRSSLHISSSQ | CAPQQNTGYQNFYF | GKGTSLTVI |
| 155 | | | AELQCNFS (SEQ ID | (SEQ ID | SLLS (SEQ ID | (SEQ ID | TTDSGTYL (SEQ ID NO: | (SEQ ID NO: | P (SEQ ID |
| | | | NO: 322) | NO: | NO: 6258) | NO: | 12194) | 25702) | NO: |
| | | | | 3290) | | 8914) | | | 16366) |
| Clonotype_ | 1 | TRB | EAAVTQSPRNKVAVTGGK | NNHNN | MYWYRQDTGHGLR | SYGAGS | TEKGDIPDGYKASRPSQENFSLILE | CASGDGPWDTEVFF | GKGTRLTVV |
| 156 | | | VTLSCNQT (SEQ ID | (SEQ ID | LIHY (SEQ ID | (SEQ ID | LATPSQTSVYF (SEQ ID NO: | (SEQ ID NO: | (SEQ ID |
| | | | NO: 3) | NO: | NO: 5939) | NO: | 11875) | 25703) | NO: |
| | | | | 2971) | | 8907) | | | 16333) |
| Clonotype_ | 1 | TRA | DAKTTQPDSMESTEGETV | TISGNEY | IYWYRQVPLQGPE | GLQQN | TTNSMAFLAIASDRKSSTLILPHVS | CILRGTGSKLSF | GKGAKLTVS |
| 156 | | | HLPCSHA (SEQ ID NO: | (SEQ ID | YVTH (SEQ ID | (SEQ ID | LRDAAVYH (SEQ ID NO: | (SEQ ID NO: | P (SEQ ID |
| | | | 104) | NO: | NO: 6040) | NO: | 12266) | 25704) | NO: |
| | | | | 3072) | | 9008) | | | 16524) |
| Clonotype_ | 1 | TRB | EAAVTQSPRNKVAVTGGK | NNHNN | MYWYRQDTGHGLR | SYGAGS | TEKGDIPDGYKASRPSQENFSLILE | CASGDVTGGAREQY | GPGTRLTVL |
| 157 | | | VTLSCNQT (SEQ ID | (SEQ ID | LIHY (SEQ ID | (SEQ ID | LATPSQTSVYF (SEQ ID NO: | F (SEQ ID NO: | (SEQ ID |
| | | | NO: 3) | NO: | NO: 5939) | NO: | 11875) | 25705) | NO: |
| | | | | 2971) | | 8907) | | | 16327) |
| Clonotype_ | 1 | TRA | AQKVTQTQTSISVMEKTT | TQDSSYF | LFWYKQTASGEIV | QDSYKKE | ATVGHYSLNFQKPKSSIGLIITATQ | CAMREGHTGYQNFY | GKGTSLTVI |
| 157 | | | VTMDCVYE (SEQ ID | (SEQ ID | FLIR (SEQ ID | N (SEQ | IEDSAVYF (SEQ ID NO: | F (SEQ ID NO: | P (SEQ ID |
| | | | NO: 44) | NO: | NO: 5942) | ID NO: | 11878) | 25706) | NO: |
| | | | | 3056) | | 8910) | | | 16366) |
| Clonotype_ | 1 | TRB | EAAVTQSPRNKVAVTGGK | NNHNN | MYWYRQDTGHGLR | SYGAGS | TEKGDIPDGYKASRPSQENFSLILE | CASGDVLGGIEQYF | GPGTRLTVL |
| 158 | | | VTLSCNQT (SEQ ID | (SEQ ID | LIHY (SEQ ID | (SEQ ID | LATPSQTSVYF (SEQ ID NO: | (SEQ ID NO: | (SEQ ID |
| | | | NO: 3) | NO: 2971) | NO: 5939) | NO: 8907) | 11875) | 25707) | NO: |
| | | | | | | | | | 16327) |
| Clonotype_ | 1 | TRA | AQKVTQTQTSISVMEKTT | TQDSSYF | LFWYKQTASGEIV | QDSYKKE | ATVGHYSLNFQKPKSSIGLIITATQ | CAMREDDSGYNKLT | GKGTVLLVS |
| 158 | | | VTMDCVYE (SEQ ID | (SEQ ID | FLIR (SEQ ID | N (SEQ | IEDSAVYF (SEQ ID NO: | F (SEQ ID NO: | P (SEQ ID |
| | | | NO: 44) | NO: | NO: 5942) | ID NO: | 11878) | 25708) | NO: |
| | | | | 3056) | | 8910) | | | 16378) |
| Clonotype_ | | TRB | EAAVTQSPRNKVAVTGGK | NNHNN | MYWYRQDTGHGLR | SYGAGS | TEKGDIPDGYKASRPSQENFSLILE | CASGDVGQGFYAEQ | GPGTRLTVL |
| 159 | | | VTLSCNQT (SEQ ID | (SEQ ID | LIHY (SEQ ID | (SEQ ID | LATPSQTSVYF (SEQ ID NO: | FF (SEQ ID NO: | (SEQ ID |
| | | | NO: 3) | NO: | NO: 5939) | NO: | 11875) | 25709) | NO: |
| | | | | 2971) | | 8907) | | | 16327) |
| Clonotype_ | 1 | TRA | QQKVQQSPESLSVPEGGM | DRNFQY | FWWYRQHSGEGPK | IFSDGD | KKEGRFTAHLNKASLHVSLHIRDSQ | CAVNYSNNRLTL | GKGTQVVVL |
| 159 | | | ASLNCTSS (SEQ ID | (SEQ ID | ALMS (SEQ ID | (SEQ ID | PSDSALYF (SEQ ID NO: | (SEQ ID NO: | P (SEQ ID |
| | | | NO: 64) | NO: | NO: 5938) | NO: | 11874) | 25710) | NO: |
| | | | | 2970) | | 8906) | | | 16644) |
| Clonotype_ | 1 | TRB | EAAVTQSPRNKVAVTGGK | INNHNN | MYWYRQDTGHGLR | SYGAGS | TEKGDIPDGYKASRPSQENFSLILE | CASGDVGGAHTGQL | GEGSKLTVL |
| 160 | | | VTLSCNQT (SEQ ID | (SEQ ID | LIHY (SEQ ID | (SEQ ID | LATPSQTSVYF (SEQ ID NO: | YF (SEQ ID NO: | (SEQ ID |
| | | | NO: 3) | NO: | NO: 5939) | NO: | 11875) | 25711) | NO: |
| | | | | 2971) | | 8907) | | | 16347) |
| Clonotype_ | 1 | TRA | QQQVRQSPQSLTVWEGET | DSTFDY | FPWYRQFPGKSPA | ISLVSNK | KEDGRFTIFFNKREKKLSLHITDSQ | CAASKAGNTRKLIF | GLGTTLQVQ |
| 160 | | | TILNCSYE (SEQ ID | (SEQ ID | LLIA (SEQ ID | (SEQ ID | PGDSATYF (SEQ ID NO: | (SEQ ID NO: | P (SEQ ID |
| | | | NO: 19528) | NO: | NO: 21968) | NO: | 11940) | 25712) | NO: 16326) |
| | | | | 3208) | | 23188) | | | |
| Clonotype_ | 1 | TRB | EAAVTQSPRNKVAVTGGK | NNHNN | MYWYRQDTGHGLR | SYGAGS | TEKGDIPDGYKASRPSQENFSLILE | CASGDVGGHNTGQL | GEGSKLTVL |
| 161 | | | VTLSCNQT (SEQ ID | (SEQ ID | LIHY (SEQ ID | (SEQ ID | LATPSQTSVYF (SEQ ID NO: | YF (SEQ ID NO: | (SEQ ID |
| | | | NO: 3) | NO: 2971) | NO: 5939) | NO: 8907) | 11875) | 25713) | NO: |
| | | | | | | | | | 16347) |
| Clonotype_ | 1 | TRA | QQKVQQSPESLIVPEGGM | DRNVDY | FWWYRQHSGKSPK | IFSNGE | KEEGRFTVHLNKASLHTSLHIRDSQ | CAASTAGNTRKLIF | GLGTTLQVQ |
| 161 | | | ASLNCTSS (SEQ ID | (SEQ ID | MLMS (SEQ ID | (SEQ ID | PSDSALYL (SEQ ID NO: | (SEQ ID NO: | P (SEQ ID |
| | | | NO: 28) | NO: | NO: 5964) | NO: | 11900) | 25714) | NO: |
| | | | | 2996) | | 8932) | | | 16326) |
| Clonotype_ | 1 | TRB | EAAVTQSPRNKVAVTGGK | NNHNN | MYWYRQDTGHGLR | SYGAGS | TEKGDIPDGYKASRPSQENFSLILE | CASGDVETGGSQNT | GAGTRLSVL |
| 162 | | | VTLSCNQT (SEQ ID | (SEQ ID | LIHY (SEQ ID | (SEQ ID | LATPSQTSVYF (SEQ ID NO: | LYF (SEQ ID NO: | (SEQ ID |
| | | | NO: 3) | NO: | NO: 5939) | NO: | 11875) | 25715) | NO: |
| | | | | 2971) | | 8907) | | | 16365) |
| Clonotype_ | 1 | TRA | QQNVQQSPESLIVPEGAR | DSASQY | FWWYRQHSGKAPK | IFSNGE | KEEGRFTIHLNKASLHFSLHIRDSQ | CAVSPWTGGYKVVF | GSGTRLLVS |
| 162 | | | TSLNCTFS (SEQ ID | (SEQ ID | ALMS (SEQ ID | (SEQ ID | PSDSALYL (SEQ ID NO: | (SEQ ID NO: | P (SEQ ID |
| | | | NO: 76) | NO: | NO: 6012) | NO: | 11948) | 25716) | NO: |
| | | | | 3044) | | 8932) | | | 16354) |
| Clonotype_ | 1 | TRB | EAAVTQSPRNKVAVTGGK | INNHNN | MYWYRQDTGHGLR | SYGAGS | TEKGDIPDGYKASRPSQENFSLILE | CASGDSLSGNTLYF | GEGSRLIVV |
| 163 | | | VTLSCNQT (SEQ ID | (SEQ ID | LIHY (SEQ ID | (SEQ ID | LATPSQTSVYF (SEQ ID NO: | (SEQ ID NO: | (SEQ ID |
| | | | NO: 3) | NO: | NO: 5939) | NO: | 11875) | 25717) | NO: |
| | | | | 2971) | | 8907) | | | 16471) |
| Clonotype_ | 1 | TRA | GDSVTQTEGLVTLTEGLP | TIYSNPF | LLLK (SEQ ID | SSTDNKR | TEHQGFHATLHKSSSSFHLQKSSAQ | CALSGDRGSALGRL | GAGTQLIVI |
| 163 | | | VMLNCTYQ (SEQ ID | (SEQ ID | LFWYVHYLNESPR | (SEQ ID | LSDSALYY (SEQ ID NO: | HF (SEQ ID NO: | P (SEQ ID |
| | | | NO: 46) | NO: | NO: 6144) | NO: | 11918) | 25718) | NO: |
| | | | | 3014) | | 8912) | | | 16480) |
| Clonotype_ | 1 | TRB | EAAVTQSPRNKVAVTGGK | NNHNN | MYWYRQDTGHGLR | SYGAGS | TEKGDIPDGYKASRPSQENFSLILE | CASGDSGGVAETLY | GSGTRLTVL |
| 164 | | | VTLSCNQT (SEQ ID | (SEQ ID | LIHY (SEQ ID | (SEQ ID | LATPSQTSVYF (SEQ ID NO: | F (SEQ ID NO: | (SEQ ID |
| | | | NO: 3) | NO: | NO: 5939) | NO: | 11875) | 25719) | NO: |
| | | | | 2971) | | 8907) | | | 16325) |
| Clonotype_ | 1 | TRA | QQQVRQSPQSLTVWEGET | NSAFDY | FPWYQQFPGEGPA | ILSVSDK | KEDGRFTIFFNKREKKLSLHIADSQ | CAAKGIASSSFSKL | GQGTSLSVV |
| 164 | | | AILNCSYE (SEQ ID | (SEQ ID | LLIS (SEQ ID | (SEQ ID | PGDSATYF (SEQ ID NO: | VF (SEQ ID NO: | P (SEQ ID |
| | | | NO: 68) | NO: | NO: 6004) | NO: | 11996) | 25720) | NO: |
| | | | | 3052) | | 9200) | | | 16422) |
| Clonotype_ | 1 | TRB | EAAVTQSPRNKVAVTGGK | NNHNN | MYWYRQDTGHGLR | SYGAGS | TEKGDIPDGYKASRPSQENFSLILE | CASGDLSAETLYF | GSGTRLTVL |
| 165 | | | VTLSCNQT (SEQ ID | (SEQ ID | LIHY (SEQ ID | (SEQ ID | LATPSQTSVYF (SEQ ID NO: | (SEQ ID NO: | (SEQ ID |
| | | | NO: 3) | NO: 2971) | NO: 5939) | NO: 8907) | 11875) | 25721) | NO: |
| | | | | | | | | | 16325) |
| Clonotype_ | 1 | TRA | GDSVTQTEGLVTLTKGLP | TTYSPF | LFWYVQHLNEAPK | SSTDNKR | TEHQGFYATLHKSSSSFHLQKSSVQ | CALSSNSGTYQRF | GTGTKLQVV |
| 165 | | | VMLNCTYQ (SEQ ID | (SEQ ID | LLLK (SEQ ID | (SEQ ID | LSDSALYF (SEQ ID NO: | (SEQ ID NO: | P (SEQ ID |
| | | | NO: 8) | NO: | NO: 5944) | NO: | 11880) | 25722) | NO: |
| | | | | 2976) | | 8912) | | | 16432) |
| Clonotype_ | 1 | TRB | EAAVTQSPRNKVAVTGGK | NNHNN | MYWYRQDTGHGLR | SYGAGS | TEKGDIPDGYKASRPSQENFSLILE | CASGAWGGEQYF | GPGTRLTVL |
| 166 | | | VTLSCNQT (SEQ ID | (SEQ ID | LIHY (SEQ ID | (SEQ ID | LATPSQTSVYF (SEQ ID NO: | (SEQ ID NO: | (SEQ ID |
| | | | NO: 3) | NO: | NO: 5939) | NO: | 11875) | 25723) | NO: |
| | | | | 2971) | | 8907) | | | 16327) |
| Clonotype_ | 1 | TRA | GQQVQQSPTSLVLQEGEN | TSLNS | MQWFYQRPGGSLI | NPSGT | KQSGRLTSTTVIKERRSSLHISSSQ | CATPADTNAYKVIF | GKGTHLHVL |
| 166 | | | AELQCNFS (SEQ ID | (SEQ ID | SVFY (SEQ ID | (SEQ ID | ITDSGTYL (SEQ ID NO: 12038) | (SEQ ID NO: | P (SEQ ID |
| | | | NO: 528) | NO: 2978) | NO: 6710) | NO: 8914) | | 25724) | NO: 16330) |
| Clonotype_ | 1 | TRB | EAAVTQSPRNKVAVTGGK | NNHNN | MYWYRQDTGHGLR | SYGAGS | TEKGDIPDGYKASRPSQENFSLILE | CASGGQGAYEQYF | GPGTRLTVL |
| 167 | | | VTLSCNQT (SEQ ID | (SEQ ID | LIHY (SEQ ID | (SEQ ID | LATPSQTSVYF (SEQ ID NO: | (SEQ ID NO: | (SEQ ID |
| | | | NO: 3) | NO: | NO: 5939) | NO: | 11875) | 25725) | NO: |
| | | | | 2971) | | 8907) | | | 16327) |
| Clonotype_ | 1 | TRA | GEQVEQRPPHLSVREGDS | DPNSYY | FFWYKQEPGAGLQ | VFSSTEI | NEGQGFTVLLNKKDKQLSLNLTAAH | CAVRTGSGGKLTL | GAGTRLQVN |
| 167 | | | AVIICTYT (SEQ ID | (SEQ ID | LLMK (SEQ ID | (SEQ ID | PGDSAVYF (SEQ ID NO: | (SEQ ID NO: | L(SEQ ID |
| | | | NO: 108) | NO: | NO: 6044) | NO: | 11980) | 25726) | NO: |
| | | | | 3010) | | 8946) | | | 17020) |
| Clonotype_ | 1 | TRB | EAAVTQSPRNKVAVTGGK | NNHNN | MYWYRQDTGHGLR | SYGAGS | TEKGDIPDGYKASRPSQENFSLILE | CASGGPGLGSETLY | GSGTRLTVL |
| 168 | | | VTLSCNQT (SEQ ID | (SEQ ID | LIHY (SEQ ID | (SEQ ID | LATPSQTSVYF (SEQ ID NO: | F (SEQ ID NO: | (SEQ ID |
| | | | NO: 3) | NO: 2971) | NO: 5939) | NO: 8907) | 11875) | 25727) | NO: 16325) |
| Clonotype_ | 1 | TRA | GDKVKQSPSALSLQEGTN | IAATT | VQWFLQNPRGSLI | LVPGT | KENGRLKSTFNSKESYSTLHIRDAQ | CAGYGGSGNKLIF | GTGTLLSVK |
| 168 | | | SALRCNFS (SEQ ID | (SEQ ID | NLFY (SEQ ID | (SEQ ID | LEDSGTYF (SEQ ID NO: | (SEQ ID NO: | P (SEQ ID |
| | | | NO: 404) | NO: | NO: 6486) | NO: | 12130) | 25728) | NO: |
| | | | | 3372) | | 9162) | | | 16350) |
| Clonotype_ | 1 | TRB | EAAVTQSPRNKVAVTGGK | NNHNN | MYWYRQDTGHGLR | SYGAGS | TEKGDIPDGYKASRPSQENFSLILE | CASGGDREVFF | GKGTRLTVV |
| 169 | | | VTLSCNQT (SEQ ID | (SEQ ID | LIHY (SEQ ID | (SEQ ID | LATPSQTSVYF (SEQ ID NO: | (SEQ ID NO: | (SEQ ID |
| | | | NO: 3) | NO: 2971) | NO: 5939) | NO: 8907) | 11875) | 25729) | NO: |
| | | | | | | | | | 16333) |
| Clonotype_ | 1 | TRA | GNSVTQMQGQVTLSEEEF | TTGYPT | ILFWYVQYPGEGPQ | VTTANNK | ESDSAVYY (SEQ ID NO: | CVLGDHSNNRLTL | GKGTQVVVL |
| 169 | | | LFINCTYS (SEQ ID | (SEQ ID | LLLK (SEQ ID | (SEQ ID | GSSRGFEATYDKGTTSFHLQKASVQ | (SEQ ID NO: | P (SEQ ID |
| | | | NO: 252) | NO: | NO: 6086) | NO: | 12124) | 25730) | NO: |
| | | | | 3220) | | 9054) | | | 16644) |
| Clonotype_ | 1 | TRB | EAAVTQSPRNKVAVTGGK | NNHNN | MYWYRQDTGHGLR | SYGAGS | TEKGDIPDGYKASRPSQENFSLILE | CASGYWGNEQYF | GPGTRLTVL |
| 170 | | | VTLSCNQT (SEQ ID | (SEQ ID | LIHY (SEQ ID | (SEQ ID | LATPSQTSVYF (SEQ ID NO: | (SEQ ID NO: | (SEQ ID |
| | | | NO: 3) | NO: | NO: 5939) | NO: | 11875) | 25731) | NO: |
| | | | | 2971) | | 8907) | | | 16327) |
| Clonotype_ | 1 | TRA | AQKVTQTQTSISVMEKTT | TQDSSYF | LFWYKQTASGEIV | QDSYKKE | ATVGHYSLNFQKPKSSIGLIITATQ | CAMRGMATGGNNKL | GQGTVLSVI |
| 170 | | | VTMDCVYE (SEQ ID | (SEQ ID | FLIR (SEQ ID | N (SEQ | IEDSAVYF (SEQ ID NO: | TF (SEQ ID NO: | P (SEQ ID |
| | | | NO: 44) | NO: | NO: 5942) | ID NO: | 11878) | 25732) | NO: |
| | | | | 3056) | | 8910) | | | 16368) |
| Clonotype_ | 1 | TRB | EAAVTQSPRNKVTVTGGN | NSHNY | MYWYRQDTGHGLR | SYGAGN | ILQIGDVPDGYKATRTTQEDFFLLLE | CASTPGQSSYEQYF | GPGTRLTVL |
| 171 | | | VTLSCRQT (SEQ ID | (SEQ ID | LIHY (SEQ ID | (SEQ ID | LASPSQTSLYF (SEQ ID NO: | (SEQ ID NO: | (SEQ ID |
| | | | NO: 37) | NO: | NO: 5939) | NO: | 11909) | 25733) | NO: |
| | | | | 3005) | | 8941) | | | 16327) |
| Clonotype_ | 1 | TRA | QQKVQQSPESLIVPEGGM | DRNVDY | FWWYRQHSGKSPK | IFSNGE | KEEGRFTVHLNKASLHTSLHIRDSQ | CAAMLSGSFNKLTF | GAGTRLAVC |
| 171 | | | ASLNCTSS (SEQ ID | (SEQ ID | MLMS (SEQ ID | (SEQ ID | PSDSALYL (SEQ ID NO: 11900) | (SEQ ID NO: | P (SEQ ID |
| | | | NO: 28) | NO: 2996) | NO: 5964) | NO: 8932) | | 25734) | NO: 16692) |
| Clonotype_ | 1 | TRB | EAAVTQSPRNKVTVTGGN | NSHNY | MYWYRQDTGHGLR | SYGAGN | LQIGDVPDGYKATRTTQEDFFLLLE | CASRDSSGNTLYF | GEGSRLIVV |
| 172 | | | VTLSCRQT (SEQ ID | (SEQ ID | LIHY (SEQ ID | (SEQ ID | LASPSQTSLYF (SEQ ID NO: | (SEQ ID NO: | (SEQ ID |
| | | | NO: 37) | NO: | NO: 5939) | NO: | 11909) | 25735) | NO: |
| | | | | 3005) | | 8941) | | | 16471) |
| Clonotype_ | 1 | TRA | AQSVTQPDARVTVSEGAS | YSATPY | LFWYVQYPRQGLQ | | YYSGDPEFSKSNSSFHLQKASVHWS | CALSMLGGRALIF | GTGTTVSVS |
| 172 | | | LQLRCKYS (SEQ ID | (SEQ ID | LLLK (SEQ ID | | DSAVYF (SEQ ID NO: 24516) | (SEQ ID NO: | P (SEQ ID |
| | | | NO: 12) | NO: | NO: 5948) | | | 25736) | NO: |
| | | | | 2980) | | | | | 16348) |
| Clonotype_ | 1 | TRB | EAAVTQSPRNKVTVTGGN | NSHNY | MYWYRQDTGHGLR | SYGAGN | LQIGDVPDGYKATRTTQEDFFLLLE | CASRDNNQAPLF | GEGTRLSVL |
| 173 | | | VTLSCRQT (SEQ ID | (SEQ ID | LIHY (SEQ ID | (SEQ ID | LASPSQTSLYF (SEQ ID NO: | (SEQ ID NO: | (SEQ ID |
| | | | NO: 37) | NO: | NO: 5939) | NO: | 11909) | 25737) | NO: |
| | | | | 3005) | | 8941) | | | 16441) |
| Clonotype_ | 1 | TRA | QQKVQQSPESLSVPEGGM | DRNFQY | FWWYRQHSGEGPK | IFSDGD | KKEGRFTAHLNKASLHVSLHIRDSQ | CAASKTSSSFSKLV | GQGTSLSVV |
| 173 | | | ASFNCTSS (SEQ ID | (SEQ ID | ALMS (SEQ ID | (SEQ ID | PSDSALYF (SEQ ID NO: 11874) | F (SEQ ID NO: | P (SEQ ID |
| | | | NO: 2) | NO: | NO: 5938) | NO: 8906) | | 25738) | NO: 16422) |
| | | | | 2970) | | | | | |
| Clonotype_ | 1 | TRB | EAAVTQSPRNKVTVTGGN | NSHNY | MYWYRQDTGHGLR | SYGAGN | LQIGDVPDGYKATRTTQEDFFLLLE | CASSTNNQAPLF | GEGTRLSVL |
| 174 | | | VTLSCRQT (SEQ ID | (SEQ ID | LIHY (SEQ ID | (SEQ ID | LASPSQTSLYF (SEQ ID NO: | (SEQ ID NO: | (SEQ ID |
| | | | NO: 37) | NO: | NO: 5939) | NO: | 11909) | 25739) | NO: |
| | | | | 3005) | | 8941) | | | 16441) |
| Clonotype_ | 1 | TRA | AQKVTQTQTSISVMEKTT | TQDSSYF | LFWYKQTASGEIV | QDSYKKE | ATVGHYSLNFQKPKSSIGLIITATQ | CAMRASNTDKVVF | GTGTRLQVS |
| 174 | | | VTMDCVYE (SEQ ID | (SEQ ID | FLIR (SEQ ID | N (SEQ | IEDSAVYF (SEQ ID NO: 11878) | (SEQ ID NO: | P (SEQ ID |
| | | | NO: 44) | NO: 3056) | NO: 5942) | ID NO: | | 25740) | NO: 16374) |
| | | | | | | 8910) | | | |
| Clonotype_ | 1 | TRB | EAAVTQSPRNKVTVTGGN | NSHNY | MYWYRQDTGHGLR | SYGAGN | LQIGDVPDGYKATRTTQEDFFLLLE | CASSEMGGRQDTQY | GPGTRLLVL |
| 175 | | | VTLSCRQT (SEQ ID | (SEQ ID | LIHY (SEQ ID | (SEQ ID | LASPSQTSLYF (SEQ ID NO: | F (SEQ ID NO: | (SEQ ID |
| | | | NO: 37) | NO: | NO: 5939) | NO: | 11909) | 25741) | NO: |
| | | | | 3005) | | 8941) | | | 16341) |
| Clonotype_ | 1 | TRA | GDSVTQKQGQVTLSEDDF | TTTYPT | LLWYVQYPGQGPQ | VTTANNK | GISRGFEATYDKGTTSFHLQKASVQ | CALVEGATGGNNKL | GQGTVLSVI |
| 175 | | | LFINCTYS (SEQ ID | (SEQ ID | LLLK (SEQ ID | (SEQ ID | ESDSAVYF (SEQ ID NO: | TF (SEQ ID NO: | P (SEQ ID |
| | | | NO: 510) | NO: 3478) | NO: 21948) | NO: 9054) | 12382) | 25742) | NO: |
| | | | | | | | | | 16368) |
| Clonotype_ | 1 | TRB | EAAVTQSPRNKVTVTGGN | NSHNY | MYWYRQDTGHGLR | SYGAGN | LQIGDVPDGYKATRTTQEDFFLLLE | CASSEGTNQAPLF | GEGTRLSVL |
| 176 | | | VTLSCRQT (SEQ ID | (SEQ ID | LIHY (SEQ ID | (SEQ ID | LASPSQTSLYF (SEQ ID NO: | (SEQ ID NO: | (SEQ ID |
| | | | NO: 37) | NO: | NO: 5939) | NO: | 11909) | 25743) | NO: |
| | | | | 3005) | | 8941) | | | 16441) |
| Clonotype_ | 1 | TRA | GDSVTQTEGQVTVSESKS | ATSIAYP | LFWYVRYPGEGLQ | VITAGQK | GSSRGFEATYNKETTSFHLQKASVQ | CALSDQGGSAKLIF | GEGTKLTVS |
| 176 | | | LIINCTYS (SEQ ID | N (SEQ | LLLK (SEQ ID | (SEQ ID | ESDSAVYY (SEQ ID NO: | (SEQ ID NO: | S (SEQ ID |
| | | | NO: 60) | ID NO: | NO: 5996) | NO: | 11932) | 25672) | NO: |
| | | | | 3098) | | 8964) | | | 16384) |
| Clonotype_ | 1 | TRB | EAAVTQSPRNKVTVTGGN | NSHNY | MYWYRQDTGHGLR | SYGAGN | LQIGDVPDGYKATRTTQEDFFLLLE | CASSEGTGRIDSGN | GEGSRLIVV |
| 177 | | | VTLSCRQT (SEQ ID | (SEQ ID | LIHY (SEQ ID | (SEQ ID | LASPSQTSLYF (SEQ ID NO: | TLYF (SEQ ID | (SEQ ID |
| | | | NO: 37) | NO: 3005) | NO: 5939) | NO: 8941) | 11909) | NO: 25745) | NO: 16471) |
| Clonotype_ | 1 | TRA | AQKVTQTQTSISVMEKTT | TRDSSYF | LFWYKQTASGEIV | QDSYKKE | ATEGHYSLNFQKPKSSIGLIITATQ | CAMREVTGANTGKL | GHGTILRVH |
| 177 | | | VTMDCVYE (SEQ ID | (SEQ ID | FLIR (SEQ ID | N (SEQ | IEDSAVYF (SEQ ID NO: | TF (SEQ ID NO: | P (SEQ ID |
| | | | NO: 44) | NO: | NO: 5942) | ID NO: | 11916) | 25746) | NO: |
| | | | | 2974) | | 8910) | | | 16356) |
| Clonotype_ | 1 | TRB | EAAVTQSPRNKVTVTGGN | NSHNY | MYWYRQDTGHGLR | SYGAGN | LQIGDVPDGYKATRTTQEDFFLLLE | CASSDSANTEVFF | GKGTRLTVV |
| 178 | | | VTLSCRQT (SEQ ID | (SEQ ID | LIHY (SEQ ID | (SEQ ID | LASPSQTSLYF (SEQ ID NO: | (SEQ ID NO: | (SEQ ID |
| | | | NO: 37) | NO: 3005) | NO: 5939) | NO: 8941) | 11909) | 25747) | NO: |
| | | | | | | | | | 16333) |
| Clonotype_ | 1 | TRA | AQKVTQTQTSISVMEKTT | TQDSSYF | LFWYKQTASGEIV | QDSYKKE | ATVGHYSLNFQKPKSSIGLIITATQ | CAMREGGGSAKLIF | GEGTKLTVS |
| 178 | | | VTMDCVYE (SEQ ID | (SEQ ID | FLIR (SEQ ID | N (SEQ | IEDSAVYF (SEQ ID NO: | (SEQ ID NO: | S (SEQ ID |
| | | | NO: 44) | NO: | NO: 5942) | ID NO: | 11878) | 25748) | NO: |
| | | | | 3056) | | 8910) | | | 16384) |
| Clonotype_ | 1 | TRB | EAAVTQSPRNKVTVTGGN | NSHNY | MYWYRQDTGHGLR | SYGAGN | LQIGDVPDGYKATRTTQEDFFLLLE | CASSDLGGSAETLY | GSGTRLTVL |
| 179 | | | VTLSCRQT (SEQ ID | (SEQ ID | LIHY (SEQ ID | (SEQ ID | LASPSQTSLYF (SEQ ID NO: | F (SEQ ID NO: | (SEQ ID |
| | | | NO: 37) | NO: | NO: 5939) | NO: | 11909) | 25749) | NO: |
| | | | | 3005) | | 8941) | | | 16325) |
| Clonotype_ | 1 | TRA | QQKVQQSPESLIVPEGAM | DSASQY | FAWYRQHSGKAPK | IFSNGE | KEEGRFTIHLNKASLHFSLHIRDSQ | CAVSGDSNYQLIW | GSGTKLIIK |
| 179 | | | TSLNCTFS (SEQ ID | (SEQ ID | ALMS (SEQ ID | (SEQ ID | PSDSALYL (SEQ ID NO: 11948) | (SEQ ID NO: | P (SEQ ID |
| | | | NO: 214) | NO: 3044) | NO: 6150) | NO: 8932) | | 25750) | NO: 16372) |
| Clonotype_ | 1 | TRB | EAAVTQSPRNKVTVTGGN | NSHNY | MYWYRQDTGHGLR | SYGAGN | LQIGDVPDGYKATRTTQEDFFLLLE | CASSDSSSYEQYF | GPGTRLTVL |
| 180 | | | VTLSCRQT (SEQ ID | (SEQ ID | LIHY (SEQ ID | (SEQ ID | LASPSQTSLYF (SEQ ID NO: | (SEQ ID NO: | (SEQ ID |
| | | | NO: 37) | NO: | NO: 5939) | NO: | 11909) | 25751) | NO: |
| | | | | 3005) | | 8941) | | | 16327) |
| Clonotype_ | 1 | TRA | GEQVEQLPSILRVQEGSS | DSASNY | FPWYKQEPGENPK | IRSNMER | KQIQELIVLLDKKAKRFSLHITDTQ | CAASEGGGSAKLIF | GEGTKLTVS |
| 180 | | | ASINCSYE (SEQ ID | (SEQ ID | LIID (SEQ ID | (SEQ ID | PGDSAMYF (SEQ ID NO: | (SEQ ID NO: | S (SEQ ID |
| | | | NO: 48) | NO: | NO: 5984) | NO: | 11920) | 25752) | NO: |
| | | | | 3016) | | 8952) | | | 16384) |
| Clonotype_ | 1 | TRB | EAAVTQSPRNKVTVTGGN | NSHNY | MYWYRQDTGHGLR | SYGAGN | LQIGDVPDGYKATRTTQEDFFLLLE | CASSDWQNTLYF | GAGTRLSVL |
| 181 | | | VTLSCRQT (SEQ ID | (SEQ ID | LIHY (SEQ ID | (SEQ ID | LASPSQTSLYF (SEQ ID NO: | (SEQ ID NO: | (SEQ ID |
| | | | NO: 37) | NO: | NO: 5939) | NO: | 11909) | 25753) | NO: |
| | | | | 3005) | | 8941) | | | 16365) |
| Clonotype_ | 1 | TRA | AQSVTQPDARVTVSEGAS | SSVTPY | LFWYVQYPRQGLQ | YYSGDPV | GVNGFEAEFSKSNSSFHLRKASVH | CASDQGGSAKLIF | GEGTKLTVS |
| 181 | | | LQLRCKYS (SEQ ID | (SEQ ID | LLLK (SEQ ID | V (SEQ | WSDSAVYF (SEQ ID NO: | (SEQ ID NO: | S (SEQ ID |
| | | | NO: 12) | NO: | NO: 5948) | ID NO: | 11892) | 25754) | NO: |
| | | | | 2988) | | 8916) | | | 16384) |
| Clonotype_ | 1 | TRB | EAAVTQSPRNKVTVTGGN | NSHNY | MYWYRQDTGHGLR | SYGAGN | LQIGDVPDGYKATRTTQEDFFLLLE | CASSDFRGGFF | GKGTRLTVV |
| 182 | | | VTLSCRQT (SEQ ID | (SEQ ID | LIHY (SEQ ID | (SEQ ID | LASPSQTSLYF (SEQ ID NO: | (SEQ ID NO: | (SEQ ID |
| | | | NO: 37) | NO: | NO: 5939) | NO: | 11909) | 25755) | NO: |
| | | | | 3005) | | 8941) | | | 16333) |
| Clonotype_ | 1 | TRA | GDSVTQTEGLVTVTEGLP | TTYLTIA | FFWYVQYLNEAPQ | SSTDNKR | TEHQGFHATLHKSSSSFHLQKSSAQ | CALSSGGSNAKLTF | GKGTKLSVK |
| 182 | | | VKLNCTYQ (SEQ ID | (SEQ ID | VLLK (SEQ ID | (SEQ ID | LSDSALYY (SEQ ID NO: | (SEQ ID NO: | S (SEQ ID |
| | | | NO: 116) | NO: | NO: 6052) | NO: | 11918) | 25756) | NO: |
| | | | | 3084) | | 8912) | | | 16342) |
| Clonotype_ | 1 | TRB | EAAVTQSPRNKVTVTGGN | NSHNY | MYWYRQDTGHGLR | SYGAGN | LQIGDVPDGYKATRTTQEDFFLLLE | CASSETGGASAETL | GSGTRLTVL |
| 183 | | | VTLSCRQT (SEQ ID | (SEQ ID | LIHY (SEQ ID | (SEQ ID | LASPSQTSLYF (SEQ ID NO: | YF (SEQ ID NO: | (SEQ ID |
| | | | NO: 37) | NO: | NO: 5939) | NO: | 11909) | 25757) | NO: |
| | | | | 3005) | | 8941) | | | 16325) |
| Clonotype_ | 1 | TRA | GNSVTQMQGQVTLSEEEF | TTGYPT | LFWYVQYPGEGPQ | VTTANNK | GSSRGFEATYDKGTTSFHLQKASVQ | CVLGDRGQGGRALI | GTGTTVSVS |
| 183 | | | LFINCTYS (SEQ ID | (SEQ ID | LLLK (SEQ ID | (SEQ ID | ESDSAVYY (SEQ ID NO: 12124) | F (SEQ ID NO: | P (SEQ ID |
| | | | NO: 252) | NO: 3220) | NO: 6086) | NO: 9054) | | 25758) | NO: |
| | | | | | | | | | 16348) |
| Clonotype_ | 1 | TRB | EAAVTQSPRNKVTVTGGN | NSHNY | MYWYRQDTGHGLR | SYGAGN | LQIGDVPDGYKATRTTQEDFFLLLE | CASSERLGPSNTGQ | GEGSKLTVL |
| 184 | | | VTLSCRQT (SEQ ID | (SEQ ID | LIHY (SEQ ID | (SEQ ID | LASPSQTSLYF (SEQ ID NO: | LYF (SEQ ID NO: | (SEQ ID |
| | | | NO: 37) | NO: | NO: 5939) | NO: | 11909) | 25759) | NO: |
| | | | | 3005) | | 8941) | | | 16347) |
| Clonotype_ | 1 | TRA | LAKTTQPPSMEAYEGQEV | NIATSEY | FIIQ (SEQ ID | GYKDYVV | NEVASLFISADRKLSTLSLPWVSLR | CIVTDRGFASALTF | GSGTKVIVL |
| 184 | | | NVSCSHT (SEQ ID NO: | (SEQ ID | IYWYRQVPHQGPQ | (SEQ ID | DAAVYY (SEQ ID NO: 11978) | (SEQ ID NO: | PY (SEQ ID |
| | | | 106) | NO: | NO: 6042) | NO: | | 25760) | NO: |
| | | | | 3074) | | 9010) | | | 17004) |
| Clonotype_ | 1 | TRB | EAAVTQSPRNKVTVTGGN | NSHNY | MYWYRQDTGHGLR | SYGAGN | LQIGDVPDGYKATRTTQEDFFLLLE | CASSEGTGGYAEQF | GPGTRLTVL |
| 185 | | | VTLSCRQT (SEQ ID | (SEQ ID | LIHY (SEQ ID | (SEQ ID | LASPSQTSLYF (SEQ ID NO: | F (SEQ ID NO: | (SEQ ID |
| | | | NO: 37) | NO: | NO: 5939) | NO: | 11909) | 25761) | NO: |
| | | | | 3005) | | 8941) | | | 16327) |
| Clonotype_ | 1 | TRA | QQKVQQSPESLTVSEGAM | DGTSNN | FRWYRQHSAKGLE | IFSDGE | KEEGRFTAHLNRANLHVSLHIREPQ | CAVRGSWQLIF | GSGTQLTVM |
| 185 | | | ASLNCTFS (SEQ ID | (SEQ ID | VLVS (SEQ ID | (SEQ ID | PSDSAVYL (SEQ ID NO: | (SEQ ID NO: | P (SEQ ID |
| | | | NO: 92) | NO: | NO: 6028) | NO: | 11964) | 25762) | NO: |
| | | | | 3060) | | 8996) | | | 16400) |
| Clonotype_ | 1 | TRB | EAAVTQSPRNKVTVTGGN | NSHNY | MYWYRQDTGHGLR | SYGAGN | LQIGDVPDGYKATRTTQEDFFLLLE | CASSEGGANERLFF | GHGTKLSVL |
| 186 | | | VTLSCRQT (SEQ ID | (SEQ ID | LIHY (SEQ ID | (SEQ ID | LASPSQTSLYF (SEQ ID NO: | (SEQ ID NO: | (SEQ ID |
| | | | NO: 37) | NO: 3005) | NO: 5939) | NO: 8941) | 11909) | 25763) | NO: |
| | | | | | | | | | 16401) |
| Clonotype_ | 1 | TRA | GDSVTQTEGQVTVSESKS | TTSIAYP | LFWYVRYPGEGLQ | VITAGQK | GSSRGFEATYNKETTSFHLQKASVQ | CALGDNVGDNSKLI | GLGTSLVVN |
| 186 | | | LIINCTYS (SEQ ID | N (SEQ | LLLK (SEQ ID | (SEQ ID | ESDSAVYY (SEQ ID NO: | W (SEQ ID NO: | P (SEQ ID |
| | | | NO: 60) | ID NO: | NO: 5996) | NO: | 11932) | 25764) | NO: |
| | | | | 3028) | | 8964) | | | 17292) |
| Clonotype_ | 1 | TRB | EAAVTQSPRNKVTVTGGN | NSHNY | MYWYRQDTGHGLR | SYGAGN | LQIGDVPDGYKATRTTQEDFFLLLE | CASSEYRVANTEVF | GKGTRLTVV |
| 187 | | | VTLSCRQT (SEQ ID | (SEQ ID | LIHY (SEQ ID | (SEQ ID | LASPSQTSLYF (SEQ ID NO: | F (SEQ ID NO: | (SEQ ID |
| | | | NO: 37) | NO: | NO: 5939) | NO: | 11909) | 25765) | NO: |
| | | | | 3005) | | 8941) | | | 16333) |
| Clonotype_ | 1 | TRA | GDSVTQTEGQVALSEEDF | ASGYPA | LFWYVQYPGEGPQ | ASRDKEK | GSSRGFEATYDKGTTSFHLRKASVQ | CALGVMDYANKMIF | GLGTILRVR |
| 187 | | | LTIHCNYS (SEQ ID | (SEQ ID | FLFR (SEQ ID | (SEQ ID | ESDSAVYY (SEQ ID NO: | (SEQ ID NO: | P (SEQ ID |
| | | | NO: 14) | NO: | NO: 6050) | NO: | 11886) | 25766) | NO: |
| | | | | 3082) | | 8918) | | | 16416) |
| Clonotype_ | 1 | TRB | EAAVTQSPRNKVTVTGGN | NSHNY | MYWYRQDTGHGLR | SYGAGN | LQIGDVPDGYKATRTTQEDFFLLLE | CASSEWDSNERLFF | GHGTKLSVL |
| 188 | | | VTLSCRQT (SEQ ID | (SEQ ID | LIHY (SEQ ID | (SEQ ID | LASPSQTSLYF (SEQ ID NO: | (SEQ ID NO: | (SEQ ID |
| | | | NO: 37) | NO: | NO: 5939) | NO: | 11909) | 25767) | NO: |
| | | | | 3005) | | 8941) | | | 16401) |
| Clonotype_ | 1 | TRA | AQKVTQTQTSISVMEKTT | TRDSSYF | LFWYKQTASGEIV | QDSYKKE | ATEGHYSLNFQKPKSSIGLIITATQ | CAMREGEGTGGNNK | GQGTVLSVI |
| 188 | | | VTMDCVYE (SEQ ID | (SEQ ID | FLIR (SEQ ID | N (SEQ | IEDSAVYF (SEQ ID NO: | LTF (SEQ ID NO: | P (SEQ ID |
| | | | NO: 44) | NO: | NO: 5942) | ID NO: | 11916) | 25768) | NO: |
| | | | | 2974) | | 8910) | | | 16368) |
| Clonotype_ | 1 | TRB | EAAVTQSPRNKVTVTGGN | NSHNY | MYWYRQDTGHGLR | SYGAGN | LQIGDVPDGYKATRTTQEDFFLLLE | CASSDKGLEVFF | GKGTRLTVV |
| 189 | | | VTLSCRQT (SEQ ID | (SEQ ID | LIHY (SEQ ID | (SEQ ID | LASPSQTSLYF (SEQ ID NO: | (SEQ ID NO: | (SEQ ID |
| | | | NO: 37) | NO: | NO: 5939) | NO: | 11909) | 25769) | NO: |
| | | | | 3005) | | 8941) | | | 16333) |
| Clonotype_ | 1 | TRA | QQKVQQSPESLIVPEGGM | DRNSQY | FWWYRQHSGEGPK | IFSNGD | KKEGRFTAHLNKASLYVSLHIKDSQ | CAVDGGSGNKLIF | GTGTLLSVK |
| 189 | | | ASLNCTFS (SEQ ID | (SEQ ID | ALMS (SEQ ID | (SEQ ID | PSDSALYF (SEQ ID NO: 12542) | (SEQ ID NO: | P (SEQ ID |
| | | | NO: 132) | NO: | NO: 5938) | NO: 9036) | | 25770) | NO: 16350) |
| | | | | 3100) | | | | | |
| Clonotype_ | 1 | TRB | EAAVTQSPRNKVTVTGGN | NSHNY | MYWYRQDTGHGLR | SYGAGN | LQIGDVPDGYKATRTTQEDFFLLLE | CASSDPVSNERLFF | GHGTKLSVL |
| 190 | | | VTLSCRQT (SEQ ID | (SEQ ID | LIHY (SEQ ID | (SEQ ID | LASPSQTSLYF (SEQ ID NO: | (SEQ ID NO: | (SEQ ID |
| | | | NO: 37) | NO: | NO: 5939) | NO: | 11909) | 25771) | NO: |
| | | | | 3005) | | 8941) | | | 16401) |
| Clonotype_ | 1 | TRA | GEQVEQRPPHLSVPEGDS | DSATAY | FYWYKQEPGAGLQ | VFSNVDR | KEEQGLTVLLNKKDKQLSLNLTAAH | CAVIASSSFSKLVF | GQGTSLSVV |
| 190 | | | AVIICTYT (SEQ ID | (SEQ ID | LLMS (SEQ ID | (SEQ ID | PGDSAVYF (SEQ ID NO: | (SEQ ID NO: | P (SEQ ID |
| | | | NO: 100) | NO: | NO: 6036) | NO: | 11972) | 25772) | NO: |
| | | | | 2990) | | 9004) | | | 16422) |
| Clonotype_ | 1 | TRB | EAAVTQSPRNKVTVTGGN | NSHNY | MYWYRQDTGHGLR | SYGAGN | LQIGDVPDGYKATRTTQEDFFLLLE | CASSDDRGFAEQFF | GPGTRLTVL |
| 191 | | | VTLSCRQT (SEQ ID | (SEQ ID | LIHY (SEQ ID | (SEQ ID | LASPSQTSLYF (SEQ ID NO: | (SEQ ID NO: | (SEQ ID |
| | | | NO: 37) | NO: | NO: 5939) | NO: | 11909) | 25773) | NO: |
| | | | | 3005) | | 8941) | | | 16327) |
| Clonotype_ | 1 | TRA | GDSVTQTEGLVTLTKGLP | TTYSPF | LFWYVQHLNEAPK | SSTDNKR | TEHQGFYATLHKSSSSFHLQKSSVQ | CALSNYAQGLTF | GLGTRVSVF |
| 191 | | | VMLNCTYQ (SEQ ID | (SEQ ID | LLLK (SEQ ID | (SEQ ID | LSDSALYF (SEQ ID NO: | (SEQ ID NO: | P (SEQ ID |
| | | | NO: 8) | NO: | NO: 5944) | NO: 8912) | 11880) | 25774) | NO: 16344) |
| | | | | 2976) | | | | | |
| Clonotype_ | 1 | TRB | EAAVTQSPRNKVTVTGGN | NSHNY | MYWYRQDTGHGLR | SYGAGN | LQIGDVPDGYKATRTTQEDFFLLLE | CASSDAGISNERLF | GHGTKLSVL |
| 192 | | | VTLSCRQT (SEQ ID | (SEQ ID | LIHY (SEQ ID | (SEQ ID | LASPSQTSLYF (SEQ ID NO: | F (SEQ ID NO: | (SEQ ID |
| | | | NO: 37) | NO: | NO: 5939) | NO: | 11909) | 25775) | NO: |
| | | | | 3005) | | 8941) | | | 16401) |
| Clonotype_ | 1 | TRA | QQQVRQSPQSLTVWEGET | NSAFDY | FPWYQQFPGEGPA | IRSVSDK | KEDGGFTIFFNKREKNLSLHIKDSQ | CAARYAQGLTF | GLGTRVSVF |
| 192 | | | AILNCSYE (SEQ ID | (SEQ ID | LLIA (SEQ ID | (SEQ ID | PGDSATYF (SEQ ID NO: | (SEQ ID NO: | P (SEQ ID |
| | | | NO: 68) | NO: | NO: 6020) | NO: | 24470) | 25776) | NO: |
| | | | | 3052) | | 8988) | | | 16344) |
| Clonotype_ | 1 | TRB | EAAVTQSPRNKVTVTGGN | NSHNY | MYWYRQDTGHGLR | SYGAGN | LQIGDVPDGYKATRTTQEDFFLLLE | CASSDALGGTETLY | GSGTRLTVL |
| 193 | | | VTLSCRQT (SEQ ID | (SEQ ID | LIHY | (SEQ ID | LASPSQTSLYF (SEQ ID NO: | F (SEQ ID NO: | (SEQ ID |
| | | | NO: 37) | NO: | (SEQ ID | NO: | 11909) | 25777) | NO: |
| | | | | 3005) | NO: 5939) | 8941) | | | 16325) |
| Clonotype_ | 1 | TRA | GDSVTQTEGLVTLTEGLP | TAYSTF | LFWYVQHLNEAPK | SSTDNKR | TEHQGFHATLHKSSSSFHLQKSSAQ | CALRGNNAGAKLTF | GGGTRLTVR |
| 193 | | | VMLNCTYQ (SEQ ID | (SEQ ID | LLLK (SEQ ID | (SEQ ID | LSDSALYY (SEQ ID NO: 11918) | (SEQ ID NO: | P (SEQ ID |
| | | | NO: 46) | NO: 3030) | NO: 5944) | NO: 8912) | | 25778) | NO: 16338) |
| Clonotype_ | 1 | TRB | EAAVTQSPRNKVTVTGGN | NSHNY (S) | MYWYRQDTGHGLR | SYGAGN | LQIGDVPDGYKATRTTQEDFFLLLE | CASSDAAGREQYF | GPGTRLTVL |
| 194 | | | VTLSCRQT (SEQ ID | (SEQ ID | LIHY (SEQ ID | (SEQ ID | LASPSQTSLYF (SEQ ID NO: | (SEQ ID NO: | (SEQ ID |
| | | | NO: 37) | NO: | NO: 5939) | NO: 8941) | 11909) | 25779) | NO: 16327) |
| | | | | 3005) | | | | | |
| Clonotype_ | 1 | TRA | GDSVTQTEGPVTVSESES | ATSIAYP | LFWYVRYPGEGLQ | VITAGQK | GSSRGFEATYNKETTSFHLQKASVQ | CALDYTNAYKVIF | GKGTHLHVL |
| 194 | | | LIINCTYS (SEQ ID | N (SEQ | LLLK (SEQ ID | (SEQ ID | ESDSAVYY (SEQ ID NO: | (SEQ ID NO: | P (SEQ ID |
| | | | NO: 130) | ID NO: | NO: 5996) | NO: | 11932) | 25780) | NO: |
| | | | | 3098) | | 8964) | | | 16330) |
| Clonotype_ | 1 | TRB | EAAVTQSPRNKVTVTGGN | NSHNY | MYWYRQDTGHGLR | SYGAGN | LQIGDVPDGYKATRTTQEDFFLLLE | CASSDGDTLYF | GAGTRLSVL |
| 195 | | | VTLSCRQT (SEQ ID | (SEQ ID | LIHY (SEQ ID | (SEQ ID | LASPSQTSLYF (SEQ ID NO: | (SEQ ID NO: | (SEQ ID |
| | | | NO: 37) | NO: | NO: 5939) | NO: | 11909) | 25781) | NO: |
| | | | | 3005) | | 8941) | | | 16365) |
| Clonotype_ | 1 | TRA | GDSVTQTEGPVTVSESES | ATSIAYP | LFWYVRYPGEGLQ | VITAGQK | GSSRGFEATYNKETTSFHLQKASVQ | CALGDRTNAYKVIF | GKGTHLHVL |
| 195 | | | LIINCTYS (SEQ ID | N (SEQ | LLLK (SEQ ID | (SEQ ID | ESDSAVYY (SEQ ID NO: | (SEQ ID NO: | P (SEQ ID |
| | | | NO: 130) | ID NO: | NO: 5996) | NO: 8964) | 11932) | 25782) | NO: 16330) |
| | | | | 3098) | | | | | |
| Clonotype_ | 1 | TRB | EAAVTQSPRNKVTVTGGN | NSHNY | MYWYRQDTGHGLR | SYGAGN | LQIGDVPDGYKATRTTQEDFFLLLE | CASSDGGVAEQFF | GPGTRLTVL |
| 196 | | | VTLSCRQT (SEQ ID | (SEQ ID | LIHY (SEQ ID | (SEQ ID | LASPSQTSLYF (SEQ ID NO: | (SEQ ID NO: | (SEQ ID |
| | | | NO: 37) | NO: 3005) | NO: 5939) | NO: 8941) | 11909) | 25783) | NO: 16327) |
| Clonotype_ | 1 | TRA | GDSVTQTEGLVTLTEGLP | TAYSTF | ILFWYVQHLNEAPK | SSTDNKR | TEHQGFHATLHKSSSSFHLQKSSAQ | CALSDGNEKITF | GAGTKLTIK |
| 196 | | | VMLNCTYQ (SEQ ID | (SEQ ID | LLLK (SEQ ID | (SEQ ID | LSDSALYY (SEQ ID NO: | (SEQ ID NO: | P (SEQ ID |
| | | | NO: 46) | NO: | NO: 5944) | NO: | 11918) | 25784) | NO: |
| | | | | 3030) | | 8912) | | | 16512) |
| Clonotype_ | 1 | TRB | EAAVTQSPRNKVTVTGGN | NSHNY | MYWYRQDTGHGLR | SYGAGN | LQIGDVPDGYKATRTTQEDFFLLLE | CASSDGGNSDYTF | GSGTRLLVI |
| 197 | | | VTLSCRQT (SEQ ID | (SEQ ID | LIHY (SEQ ID | (SEQ ID | LASPSQTSLYF (SEQ ID NO: | (SEQ ID NO: | (SEQ ID |
| | | | NO: 37) | NO: | NO: 5939) | NO: | 11909) | 25785) | NO: |
| | | | | 3005) | | 8941) | | | 16337) |
| Clonotype_ | 1 | TRA | AQKVTQTQTSISVMEKTT | TRDSSYF | LFWYKQTASGEIV | QDSYKKE | ATEGHYSLNFQKPKSSIGLIITATQ | CAMREGDGNEKITF | GAGTKLTIK |
| 197 | | | VTMDCVYE (SEQ ID | (SEQ ID | FLIR (SEQ ID | N (SEQ | IEDSAVYF (SEQ ID NO: 11916) | (SEQ ID NO: | P (SEQ ID |
| | | | NO: 44) | NO: | NO: 5942) | ID NO: | | 25786) | NO: 16512) |
| | | | | 2974) | | 8910) | | | |
| Clonotype_ | 1 | TRB | EAAVTQSPRNKVTVTGGN | NSHNY | MYWYRQDTGHGLR | SYGAGN | LQIGDVPDGYKATRTTQEDFFLLLE | CASSDVWDRGYEQY | GPGTRLTVL |
| 198 | | | VTLSCRQT (SEQ ID | (SEQ ID | LIHY (SEQ ID | (SEQ ID | LASPSQTSLYF (SEQ ID NO: | F (SEQ ID NO: | (SEQ ID |
| | | | NO: 37) | NO: | NO: 5939) | NO: | 11909) | 25787) | NO: |
| | | | | 3005) | | 8941) | | | 16327) |
| Clonotype_ | 1 | TRA | QQQVRQSPQSLTVWEGET | DSTFDY | FPWYRQFPGKSPA | ISLVSNK | KEDGRFTIFFNKREKKLSLHITDSQ | CAASSGANTGKLTF | GHGTILRVH |
| 198 | | | TILNCSYE (SEQ ID | (SEQ ID | LLIA (SEQ ID | (SEQ ID | PGDSATYF (SEQ ID NO: 11940) | (SEQ ID NO: | P (SEQ ID |
| | | | NO: 19528) | NO: | NO: 21968) | NO: | | 25788) | NO: |
| | | | | 3208) | | 23188) | | | 16356) |
| Clonotype_ | 1 | TRB | EAAVTQSPRNKVTVTGGN | NSHNY | MYWYRQDTGHGLR | SYGAGN | LQIGDVPDGYKATRTTQEDFFLLLE | CASSDVGANSDYTF | GSGTRLLVI |
| 199 | | | VTLSCRQT (SEQ ID | (SEQ ID | LIHY (SEQ ID | (SEQ ID | LASPSQTSLYF (SEQ ID NO: | (SEQ ID NO: | (SEQ ID |
| | | | NO: 37) | NO: | NO: 5939) | NO: | 11909) | 25789) | NO: |
| | | | | 3005) | | 8941) | | | 16337) |
| Clonotype_ | 1 | TRA | QQKVQQSPESLIVPEGGM | DRNVDY | FWWYRQHSGKSPK | IFSNGE | KEEGRFTVHLNKASLHTSLHIRDSQ | CAAHDSGYNKLTF | GKGTVLLVS |
| 199 | | | ASLNCTSS (SEQ ID | (SEQ ID | MLMS (SEQ ID | (SEQ ID | PSDSALYL (SEQ ID NO: | (SEQ ID NO: | P (SEQ ID |
| | | | NO: 28) | NO: | NO: 5964) | NO: | 11900) | 25790) | NO: |
| | | | | 2996) | | 8932) | | | 16378) |
| Clonotype_ | 1 | TRB | EAAVTQSPRNKVTVTGGN | NSHNY | MYWYRQDTGHGLR | SYGAGN | LQIGDVPDGYKATRTTQEDFFLLLE | CASSDVGGSAETLY | GSGTRLTVL |
| 200 | | | VTLSCRQT (SEQ ID | (SEQ ID | LIHY (SEQ ID | (SEQ ID | LASPSQTSLYF (SEQ ID NO: | F (SEQ ID NO: | (SEQ ID |
| | | | NO: 37) | NO: | NO: 5939) | NO: | 11909) | 25791) | NO: |
| | | | | 3005) | | 8941) | | | 16325) |
| Clonotype_ | 1 | TRA | QQQVRQSPQSLTVWEGET | DSTFDY | FPWYRLFPGESPA | IRPVSNK | PGDSATYF (SEQ ID NO: | CAASATGGNNKLTF | GQGTVLSVI |
| 200 | | | AILNCSYE (SEQ ID | (SEQ ID | LLIA (SEQ ID | (SEQ ID | KEDGRFTIFFNKREKKLSLHITDSQ | (SEQ ID NO: | P (SEQ ID |
| | | | NO: 68) | NO: | NO: 6176) | NO: | 11940) | 25792) | NO: |
| | | | | 3208) | | 9144) | | | 16368) |
| Clonotype_ | 1 | TRB | EAAVTQSPRNKVTVTGGN | NSHNY | MYWYRQDTGHGLR | SYGAGN | LQIGDVPDGYKATRTTQEDFFLLLE | CASSDLQGNTEVFF | GKGTRLTVV |
| 201 | | | VTLSCRQT (SEQ ID | (SEQ ID | LIHY (SEQ ID | (SEQ ID | LASPSQTSLYF (SEQ ID NO: | (SEQ ID NO: | (SEQ ID |
| | | | NO: 37) | NO: 3005) | NO: 5939) | NO: 8941) | 11909) | 25793) | NO: |
| | | | | | | | | | 16333) |
| Clonotype_ | 1 | TRA | AQKVTQTQTSISVMEKTT | TQDSSYF | LFWYKQTASGEIV | QDSYKKE | ATVGHYSLNFQKPKSSIGLIITATQ | CAMRYTGNYKYVF | GAGTRLKVI |
| 201 | | | VTMDCVYE (SEQ ID | (SEQ ID | FLIR (SEQ ID | N (SEQ | IEDSAVYF (SEQ ID NO: | (SEQ ID NO: | A (SEQ ID |
| | | | NO: 44) | NO: | NO: 5942) | ID NO: | 11878) | 25794) | NO: |
| | | | | 3056) | | 8910) | | | 16380) |
| Clonotype_ | 1 | TRB | EAAVTQSPRNKVTVTGGN | NSHNY | MYWYRQDTGHGLR | SYGAGN | LQIGDVPDGYKATRTTQEDFFLLLE | CASSDLGGRDYAEQ | GPGTRLTVL |
| 202 | | | VTLSCRQT (SEQ ID | (SEQ ID | LIHY (SEQ ID | (SEQ ID | LASPSQTSLYF (SEQ ID NO: | FF (SEQ ID NO: | (SEQ ID |
| | | | NO: 37) | NO: | NO: 5939) | NO: | 11909) | 25795) | NO: |
| | | | | 3005) | | 8941) | | | 16327) |
| Clonotype_ | 1 | TRA | QQKVQQSPESLIVPEGGM | DRNVDY | FWWYRQHSGKSPK | IFSNGE | KEEGRFTVHLNKASLHTSLHIRDSQ | CAAKGNTGKLIF | GLGTTLQVQ |
| 202 | | | ASLNCTSS (SEQ ID | (SEQ ID | MLMS (SEQ ID | (SEQ ID | PSDSALYL (SEQ ID NO: | (SEQ ID NO: | P (SEQ ID |
| | | | NO: 28) | NO: | NO: 5964) | NO: | 11900) | 25796) | NO: |
| | | | | 2996) | | 8932) | | | 16326) |
| Clonotype_ | 1 | TRB | EAAVTQSPRNKVTVTGGN | NSHNY | MYWYRQDTGHGLR | SYGAGN | LQIGDVPDGYKATRTTQEDFFLLLE | CASSGTGGANTLYF | GAGTRLSVL |
| 203 | | | VTLSCRQT (SEQ ID | (SEQ ID | LIHY (SEQ ID | (SEQ ID | LASPSQTSLYF (SEQ ID NO: | (SEQ ID NO: | (SEQ ID |
| | | | NO: 37) | NO: | NO: 5939) | NO: | 11909) | 25797) | NO: |
| | | | | 3005) | | 8941) | | | 16365) |
| Clonotype_ | 1 | TRA | GQGVEQPDNLMSVEGTFA | TSGFNG | LSWYQQREGHAPV | VVLDGL | KDSGHFSTFLSRSNGYSYLLLTELQ | CAVRDSTASLGKLQ | GTGTQVVVT |
| 203 | | | RVNCTYS (SEQ ID NO: | (SEQ ID | FLSY (SEQ ID | (SEQ ID | IKDSASYL (SEQ ID NO: | F (SEQ ID NO: | P (SEQ ID |
| | | | 4) | NO: | NO: 5940) | NO: | 11876) | 25798) | NO: |
| | | | | 2972) | | 8908) | | | 16488) |
| Clonotype_ | 1 | TRB | EAAVTQSPRNKVTVTGGN | NSHNY | MYWYRQDTGHGLR | SYGAGN | LQIGDVPDGYKATRTTQEDFFLLLE | CASSGSNYAEQFF | GPGTRLTVL |
| 204 | | | VTLSCRQT (SEQ ID | (SEQ ID | LIHY (SEQ ID | (SEQ ID | LASPSQTSLYF (SEQ ID NO: | (SEQ ID NO: | (SEQ ID |
| | | | NO: 37) | NO: | NO: 5939) | NO: | 11909) | 25799) | NO: |
| | | | | 3005) | | 8941) | | | 16327) |
| Clonotype_ | 1 | TRA | QQNVQQSPESLIVPEGAR | DSASQY | FWWYRQHSGKAPK | IFSNGE | KEEGRFTIHLNKASLHFSLHIRDSQ | CAVSTGGADRLTF | GKGTQLIIQ |
| 204 | | | TSLNCTFS (SEQ ID | (SEQ ID | ALMS (SEQ ID | (SEQ ID | PSDSALYL (SEQ ID NO: | (SEQ ID NO: | P (SEQ ID |
| | | | NO: 76) | NO: | NO: 6012) | NO: | 11948) | 25800) | NO: |
| | | | | 3044) | | 8932) | | | 16360) |
| Clonotype_ | 1 | TRB | EAAVTQSPRNKVTVTGGN | NSHNY | MYWYRQDTGHGLR | SYGAGN | LQIGDVPDGYKATRTTQEDFFLLLE | CASSGDWGDTQYF | GPGTRLLVL |
| 205 | | | VTLSCRQT (SEQ ID | (SEQ ID | LIHY (SEQ ID | (SEQ ID | LASPSQTSLYF (SEQ ID NO: | (SEQ ID NO: | (SEQ ID |
| | | | NO: 37) | NO: | NO: 5939) | NO: | 11909) | 25801) | NO: |
| | | | | 3005) | | 8941) | | | 16341) |
| Clonotype_ | 1 | TRA | GEQVEQRPPHLSVREGDS | DPNSYY | FFWYKQEPGAGLQ | VFSSTEI | NEGQGFTVLLNKKDKQLSLNLTAAH | CAVSDSGGNYKPTF | GKGTSLVVH |
| 205 | | | AVIICTYT (SEQ ID | (SEQ ID | LLMK (SEQ ID | (SEQ ID | PGDSAVYF (SEQ ID NO: | (SEQ ID NO: | P (SEQ ID |
| | | | NO: 108) | NO: 3010) | NO: 6044) | NO: 8946) | 11980) | 25802) | NO: |
| | | | | | | | | | 16394) |
| Clonotype_ | 1 | TRB | EAAVTQSPRNKVTVTGGN | NSHNY | MYWYRQDTGHGLR | SYGAGN | LQIGDVPDGYKATRTTQEDFFLLLE | CASSSGTGGTYEQY | GPGTRLTVL |
| 206 | | | VTLSCRQT (SEQ ID | (SEQ ID | LIHY (SEQ ID | (SEQ ID | LASPSQTSLYF (SEQ ID NO: | F (SEQ ID NO: | (SEQ ID |
| | | | NO: 37) | NO: 3005) | NO: 5939) | NO: 8941) | 11909) | 25803) | NO: |
| | | | | | | | | | 16327) |
| Clonotype_ | 1 | TRA | GDSVTQTEGQVALSEEDF | ASGYPA | LFWYVQYPGEGPQ | ASRDKEK | GSSRGFEATYDKGTTSFHLRKASVQ | CALGENYAQGLTF | GLGTRVSVF |
| 206 | | | LTIHCNYS (SEQ ID | (SEQ ID | FLFR (SEQ ID | (SEQ ID | ESDSAVYY (SEQ ID NO: | (SEQ ID NO: | P (SEQ ID |
| | | | NO: 14) | NO: | NO: 6050) | NO: | 11886) | 25804) | NO: |
| | | | | 3082) | | 8918) | | | 16344) |
| Clonotype_ | 7 | TRB | EAAVTQSPRNKVTVTGGN | NSHNY | MYWYRQDTGHGLR | SYGAGN | LQIGDVPDGYKATRTTQEDFFLLLE | CASGRTEVFF (SEQ | GKGTRLTVV |
| 207 | | | VTLSCRQT (SEQ ID | (SEQ ID | LIHY (SEQ ID | (SEQ ID | LASPSQTSLYF (SEQ ID NO: | ID NO: 25805) | (SEQ ID |
| | | | NO: 37) | NO: | NO: 5939) | NO: | 11909) | | NO: |
| | | | | 3005) | | 8941) | | | 16333) |
| Clonotype_ | 1 | TRA | QQQVRQSPQSLTVWEGET | NSAFDY | FPWYQQFPGEGPA | ILSVSDK | KEDGRFTIFFNKREKKLSLHIADSQ | CAASANSGTYQRF | GTGTKLQVV |
| 207 | | | AILNCSYE (SEQ ID | (SEQ ID | LLIS (SEQ ID | (SEQ ID | PGDSATYF (SEQ ID NO: | (SEQ ID NO: | P (SEQ ID |
| | | | NO: 68) | NO: 3052) | NO: 6004) | NO: 9200) | 11996) | 25806) | NO: |
| | | | | | | | | | 16432) |
| Clonotype_ | 1 | TRB | EAAVTQSPRSKVAVTGGK | NNHDY | MYWYRQDTGHGLR | SYVADS | TEKGDIPDGYKASRPSQENFSLILE | CASTRTGGRDSDYT | GSGTRLLVI |
| 208 | | | VTLSCHQT (SEQ ID | (SEQ ID | LIHY (SEQ ID | (SEQ ID | LASLSQTAVYF (SEQ ID NO: | F (SEQ ID NO: | (SEQ ID |
| | | | NO: 7) | NO: 2975) | NO: 5939) | NO: 8911) | 11879) | 25807) | NO: |
| | | | | | | | | | 16337) |
| Clonotype_ | 1 | TRA | SQLAEENLWALSVHEGES | TSITA | LQWYRQKSGEGPA | IRSNERE | KRNGRLRATLDTSSQSSSLSITATR | CASNNYAQGLTF | GLGTRVSVF |
| 208 | | | VTVNCSYK (SEQ ID | (SEQ ID | QLIL (SEQ ID | (SEQ ID | CEDTAVYF (SEQ ID NO: | (SEQ ID | P (SEQ ID |
| | | | NO: 190) | NO: 2992) | NO: 5960) | NO: 8928) | 11896) | NO: 25808) | NO: 16344) |
| Clonotype_ | 1 | TRB | EAAVTQSPRSKVAVTGGK | NNHDY | MYWYRQDTGHGLR | SYVADS | TEKGDIPDGYKASRPSQENFSLILE | CASTRGQKSYEQYF | GPGTRLTVL |
| 209 | | | VTLSCHQT (SEQ ID | (SEQ ID | LIHY (SEQ ID | (SEQ ID | LASLSQTAVYF (SEQ ID NO: | (SEQ ID NO: | (SEQ ID |
| | | | NO: 7) | NO: 2975) | NO: 5939) | NO: 8911) | 11879) | 25809) | NO: |
| | | | | | | | | | 16327) |
| Clonotype_ | 1 | TRA | QQQVRQSPQSLTVWEGET | DSTFNY | FPWYQQFPGEGPA | ISSVSDK | KEDGRFTIFFNKREKKLSLHITDSQ | CAASRGNNAGAKLT | GGGTRLTVR |
| 209 | | | AILNCSYE (SEQ ID | (SEQ ID | LLIS | (SEQ ID | PGDSATYF (SEQ ID NO: 11940) | F (SEQ ID NO: | P (SEQ ID |
| | | | NO: 68) | NO: | (SEQ ID | NO: | | 25810) | NO: |
| | | | | 3036) | NO: 6004) | 8972) | | | 16338) |
| Clonotype_ | 1 | TRB | EAAVTQSPRSKVAVTGGK | NNHDY | MYWYRQDTGHGLR | SYVADS | TEKGDIPDGYKASRPSQENFSLILE | CASSPGDGNTLYF | GEGSRLIVV |
| 210 | | | VTLSCHQT (SEQ ID | (SEQ ID | LIHY (SEQ ID | (SEQ ID | LASLSQTAVYF (SEQ ID NO: | (SEQ ID NO: | (SEQ ID |
| | | | NO: 7) | NO: | NO: 5939) | NO: | 11879) | 25811) | NO: |
| | | | | 2975) | | 8911) | | | 16471) |
| Clonotype_ | 1 | TRA | QQKVQQSPESLSVPEGGM | DRNFQY | FWWYRQHSGEGPK | IFSDGD | KKEGRFTAHLNKASLHVSLHIRDSQ | CAARDSNYQLIW | GSGTKLIIK |
| 210 | | | ASLNCTSS (SEQ ID | (SEQ ID | ALMS (SEQ ID | (SEQ ID | PSDSALYF (SEQ ID NO: | (SEQ ID NO: | P (SEQ ID |
| | | | NO: 64) | NO: 2970) | NO: 5938) | NO: 8906) | 11874) | 15044) | NO: |
| | | | | | | | | | 16372) |
| Clonotype_ | 1 | TRB | EAAVTQSPRSKVAVTGGK | NNHDY | MYWYRQDTGHGLR | SYVADS | TEKGDIPDGYKASRPSQENFSLILE | CASSPGTAYEQYF | GPGTRLTVL |
| 211 | | | VTLSCHQT (SEQ ID | (SEQ ID | LIHY (SEQ ID | (SEQ ID | LASLSQTAVYF (SEQ ID NO: | (SEQ ID NO: | (SEQ ID |
| | | | NO: 7) | NO: 2975) | NO: 5939) | NO: 8911) | 11879) | 25813) | NO: |
| | | | | | | | | | 16327) |
| Clonotype_ | 1 | TRA | GQQVQQSPSSLVLQEGEN | STATQ | LQWFYQSPGGSLV | NPSGT | KHTGRLTSTTVTKERRSSLHISSSQ | CAIVPLTGNTRKLI | GLGTTLQVQ |
| 211 | | | AELQCNFS (SEQ ID | (SEQ ID | SLLS (SEQ ID | (SEQ ID | TTDSGTYL (SEQ ID NO: | F (SEQ ID NO: | P (SEQ ID |
| | | | NO: 322) | NO: | NO: 6258) | NO: | 12194) | 25814) | NO: |
| | | | | 3290) | | 8914) | | | 16326) |
| Clonotype_ | 1 | TRB | EAAVTQSPRSKVAVTGGK | NNHDY | MYWYRQDTGHGLR | SYVADS | TEKGDIPDGYKASRPSQENFSLILE | CASSLQGTEVFF | GKGTRLTVV |
| 212 | | | VTLSCHQT (SEQ ID | (SEQ ID | LIHY (SEQ ID | (SEQ ID | LASLSQTAVYF (SEQ ID NO: | (SEQ ID NO: | (SEQ ID |
| | | | NO: 7) | NO: 2975) | NO: 5939) | NO: 8911) | 11879) | 25815) | NO: |
| | | | | | | | | | 16333) |
| Clonotype_ | 1 | TRA | AQKVTQTQTSISVVEKTT | TRDSSYF | LFWYKQTASGEIV | QDSYKKE | ATVGHYSLNFQKPKSSIGLIITATQ | CAMREGGGSNAKLT | GKGTKLSVK |
| 212 | | | VTMDCVYE (SEQ ID | (SEQ ID | FLIR (SEQ ID | N (SEQ | IEDSAVYF (SEQ ID NO: | F (SEQ ID NO: | S (SEQ ID |
| | | | NO: 6) | NO: | NO: 5942) | ID NO: | 11878) | 25816) | NO: |
| | | | | 2974) | | 8910) | | | 16342) |
| Clonotype_ | 1 | TRB | EAAVTQSPRSKVAVTGGK | NNHDY | MYWYRQDTGHGLR | SYVADS | TEKGDIPDGYKASRPSQENFSLILE | CASSADRGGTEVFF | GKGTRLTVV |
| 213 | | | VTLSCHQT (SEQ ID | (SEQ ID | LIHY (SEQ ID | (SEQ ID | LASLSQTAVYF (SEQ ID NO: | (SEQ ID NO: | (SEQ ID |
| | | | NO: 7) | NO: | NO: 5939) | NO: | 11879) | 25817) | NO: |
| | | | | 2975) | | 8911) | | | 16333) |
| Clonotype_ | 1 | TRA | GEQVEQLPSILRVQERSS | NSASNY | FPWYKQEPGENPK | IRSNMER | KQIQGLIVLLDKKAKRFSLHITDTQ | CAASAYNNNAPRF | GAGTKLTVK |
| 213 | | | ASINCTYE (SEQ ID | (SEQ ID | LIID (SEQ ID | (SEQ ID | PADSAMYF (SEQ ID NO: | (SEQ ID NO: | P (SEQ ID |
| | | | NO: 182) | NO: | NO: 5984) | NO: | 12054) | 25818) | NO: |
| | | | | 3138) | | 8952) | | | 16424) |
| Clonotype_ | 1 | TRB | EAAVTQSPRSKVAVTGGK | NNHDY | MYWYRQDTGHGLR | SYVADS | TEKGDIPDGYKASRPSQENFSLILE | CASRDNTGQLYF | GEGSKLTVL |
| 214 | | | VTLSCHQT (SEQ ID | (SEQ ID | LIHY (SEQ ID | (SEQ ID | LASLSQTAVYF (SEQ ID NO: | (SEQ ID NO: | (SEQ ID |
| | | | NO: 7) | NO: 2975) | NO: 5939) | NO: 8911) | 11879) | 25819) | NO: 16347) |
| Clonotype_ | 1 | TRA | LAKTTQPPSMEAYEGQEV | NIATSEY | FIIQ (SEQ ID | GYKDYVV | NEVASLFISADRKLSTLSLPWVSLR | CIVTDTGFASALTF | GSGTKVIVL |
| 214 | | | NVSCSHT (SEQ ID NO: | (SEQ ID | IYWYRQVPHQGPQ | (SEQ ID | DAAVYY (SEQ ID NO: 11978) | (SEQ ID NO: | PY (SEQ ID |
| | | | 106) | NO: | NO: 6042) | NO: | | 25820) | NO: |
| | | | | 3074) | | 9010) | | | 17004) |
| Clonotype_ | 1 | TRB | EAAVTQSPRSKVAVTGGK | NNHDY | MYWYRQDTGHGLR | SYVADS | TEKGDIPDGYKASRPSQENFSLILE | CASRDRGREQYF | GPGTRLTVL |
| 215 | | | VTLSCHQT (SEQ ID | (SEQ ID | LIHY (SEQ ID | (SEQ ID | LASLSQTAVYF (SEQ ID NO: | (SEQ ID NO: | (SEQ ID |
| | | | NO: 7) | NO: | NO: 5939) | NO: | 11879) | 25821) | NO: |
| | | | | 2975) | | 8911) | | | 16327) |
| Clonotype_ | 1 | TRA | GEQVEQLPSILRVQEGSS | DSASNY | FPWYKQEPGENPK | IRSNMER | KQIQELIVLLDKKAKRFSLHITDTQ | CAASPNTNKVVF | GTGTRLQVL |
| 215 | | | ASINCSYE (SEQ ID | (SEQ ID | LIID (SEQ ID | (SEQ ID | PGDSAMYF (SEQ ID NO: | (SEQ ID NO: | P (SEQ ID |
| | | | NO: 48) | NO: | NO: 5984) | NO: | 11920) | 25822) | NO: |
| | | | | 3016) | | 8952) | | | 16698) |
| Clonotype_ | 1 | TRB | EAAVTQSPRSKVAVTGGK | NNHDY | MYWYRQDTGHGLR | SYVADS | TEKGDIPDGYKASRPSQENFSLILE | CASRGLGAYEQYF | GPGTRLTVL |
| 216 | | | VTLSCHQT (SEQ ID | (SEQ ID | LIHY (SEQ ID | (SEQ ID | LASLSQTAVYF (SEQ ID NO: | (SEQ ID NO: | (SEQ ID |
| | | | NO: 7) | NO: | NO: 5939) | NO: 8911) | 11879) | 25823) | NO: 16327) |
| | | | | 2975) | | | | | |
| Clonotype_ | 1 | TRA | AQKVTQTQTSISVMEKTT | TQDSSYF | LFWYKQTASGEIV | QDSYKKE | ATVGHYSLNFQKPKSSIGLIITATQ | CAMREGFSGSWQLI | GSGTQLTVM |
| 216 | | | VTMDCVYE (SEQ ID | (SEQ ID | FLIR (SEQ ID | N (SEQ | IEDSAVYF (SEQ ID NO: | F (SEQ ID NO: | P (SEQ ID |
| | | | NO: 44) | NO: | NO: 5942) | ID NO: | 11878) | 25824) | NO: |
| | | | | 3056) | | 8910) | | | 16400) |
| Clonotype_ | 1 | TRB | EAAVTQSPRSKVAVTGGK | NNHDY | MYWYRQDTGHGLR | SYVADS | TEKGDIPDGYKASRPSQENFSLILE | CASSTGGNYEQYF | GPGTRLTVL |
| 217 | | | VTLSCHQT (SEQ ID | (SEQ ID | LIHY (SEQ ID | (SEQ ID | LASLSQTAVYF (SEQ ID NO: | (SEQ ID NO: | (SEQ ID |
| | | | NO: 7) | NO: | NO: 5939) | NO: | 11879) | 25825) | NO: |
| | | | | 2975) | | 8911) | | | 16327) |
| Clonotype_ | 1 | TRA | AQSVTQPDARVTVSEGAS | SSVTPY | LFWYVQYPRQGLQ | YYSGDPV | GVNGFEAEFSKSNSSFHLRKASVH | CAVSSEDTGYQNFY | GKGTSLTVI |
| 217 | | | LQLRCKYS (SEQ ID | (SEQ ID | LLLK (SEQ ID | V (SEQ | WSDSAVYF (SEQ ID NO: | F (SEQ ID NO: | P (SEQ ID |
| | | | NO: 12) | NO: | NO: 5948) | ID NO: | 11892) | 25826) | NO: |
| | | | | 2988) | | 8916) | | | 16366) |
| Clonotype_ | 1 | TRB | EAAVTQSPRSKVAVTGGK | NNHDY | MYWYRQDTGHGLR | SYVADS | TEKGDIPDGYKASRPSQENFSLILE | CASSPTGGAGSDYT | GSGTRLLVI |
| 218 | | | VTLSCHQT (SEQ ID | (SEQ ID | LIHY (SEQ ID | (SEQ ID | LASLSQTAVYF (SEQ ID NO: | F (SEQ ID NO: | (SEQ ID |
| | | | NO: 7) | NO: | NO: 5939) | NO: | 11879) | 25827) | NO: |
| | | | | 2975) | | 8911) | | | 16337) |
| Clonotype_ | 1 | TRA | GDSVTQTEGLVTLTKGLP | TTYSPF | ILFWYVQHLNEAPK | SSTDNKR | TEHQGFYATLHKSSSSFHLQKSSVQ | CALSGAMSNYNVLY | GSGTKLTVE |
| 218 | | | VMLNCTYQ (SEQ ID | (SEQ ID | LLLK (SEQ ID | (SEQ ID | LSDSALYF (SEQ ID NO: | F (SEQ ID NO: | P (SEQ ID |
| | | | NO: 8) | NO: | NO: 5944) | NO: | 11880) | 25828) | NO: |
| | | | | 2976) | | 8912) | | | 16336) |
| Clonotype_ | 1 | TRB | EAAVTQSPRSKVAVTGGK | NNHDY | MYWYRQDTGHGLR | SYVADS | TEKGDIPDGYKASRPSQENFSLILE | CASSETYEQYF | GPGTRLTVL |
| 219 | | | VTLSCHQT (SEQ ID | (SEQ ID | LIHY (SEQ ID | (SEQ ID | LASLSQTAVYF (SEQ ID NO: | (SEQ ID NO: | (SEQ ID |
| | | | NO: 7) | NO: | NO: 5939) | NO: | 11879) | 25829) | NO: |
| | | | | 2975) | | 8911) | | | 16327) |
| Clonotype_ | 1 | TRA | TQTVSQSDAHVTVFEGDS | YGGSIY | LSWYIQHHGRGLQ | YYSGNPV | GVNGFEAEFSKSDSSFHLRKASVH | CAVSAAGSGGKLTL | GTGTRLQVN |
| 219 | | | VELRCNYS (SEQ ID | (SEQ ID | FLLK (SEQ ID | V (SEQ | WSDSAVYF (SEQ ID NO: | (SEQ ID NO: | L (SEQ ID |
| | | | NO: 110) | NO: | NO: 6046) | ID NO: | 11946) | 25830) | NO: |
| | | | | 3078) | | 9014) | | | 16448) |
| Clonotype_ | 1 | TRB | EAAVTQSPRSKVAVTGGK | INNHDY | MYWYRQDTGHGLR | SYVADS | TEKGDIPDGYKASRPSQENFSLILE | CASSDNSDYTF | GSGTRLLVI |
| 220 | | | VTLSCHQT (SEQ ID | (SEQ ID | LIHY (SEQ ID | (SEQ ID | LASLSQTAVYF (SEQ ID NO: | (SEQ ID NO: | (SEQ ID |
| | | | NO: 7) | NO: | NO: 5939) | NO: | 11879) | 25831) | NO: |
| | | | | 2975) | | 8911) | | | 16337) |
| Clonotype_ | 1 | TRA | GDQVEQSPSALSLHEGTD | TTMRS | VQWFRQNSRGSLI | LASGT | KENGRLKSAFDSKERRYSTLHIRDA | CAANTGANTGKLTF | GHGTILRVH |
| 220 | | | SALRCNFT (SEQ ID | (SEQ ID | SLFY (SEQ ID | (SEQ ID | QLEDSGTYF (SEQ ID NO: | (SEQ ID NO: | P (SEQ ID |
| | | | NO: 18) | NO: | NO: 5954) | NO: | 11890) | 25438) | NO: |
| | | | | 2986) | | 8922) | | | 16356) |
| Clonotype_ | 1 | TRB | EAAVTQSPRSKVAVTGGK | NNHDY | MYWYRQDTGHGLR | SYVADS | TEKGDIPDGYKASRPSQENFSLILE | CASSDSTEVFF | GKGTRLTVV |
| 221 | | | VTLSCHQT (SEQ ID | (SEQ ID | LIHY (SEQ ID | (SEQ ID | LASLSQTAVYF (SEQ ID NO: | (SEQ ID NO: | (SEQ ID |
| | | | NO: 7) | NO: 2975) | NO: 5939) | NO: 8911) | 11879) | 25833) | NO: 16333) |
| Clonotype_ | 1 | TRA | QQQVRQSPQSLTVWEGET | NSAFDY | FPWYQQFPGEGPA | ILSVSNK | KEDGRFTIFFNKREKKLSLHIADSQ | CAASEGNYKYVF | GAGTRLKVI |
| 221 | | | AILNCSYE (SEQ ID | (SEQ ID | LLIS (SEQ ID | (SEQ ID | PGDSATYF (SEQ ID NO: | (SEQ ID NO: | A (SEQ ID |
| | | | NO: 68) | NO: | NO: 6004) | NO: 9028) | 11996) | 25834) | NO: 16380) |
| | | | | 3052) | | | | | |
| Clonotype_ | 1 | TRB | EAAVTQSPRSKVAVTGGK | NNHDY | MYWYRQDTGHGLR | SYVADS | TEKGDIPDGYKASRPSQENFSLILE | CASSERGANTEVFF | GKGTRLTVV |
| 222 | | | VTLSCHQT (SEQ ID | (SEQ ID | LIHY (SEQ ID | (SEQ ID | LASLSQTAVYF (SEQ ID NO: | (SEQ ID NO: | (SEQ ID |
| | | | NO: 7) | NO: | NO: 5939) | NO: | 11879) | 25835) | NO: |
| | | | | 2975) | | 8911) | | | 16333) |
| Clonotype_ | 1 | TRA | GEQVEQLPSSLIVQEGAS | DSASVY | FPWYKQEPGKRLQ | IRSNMER | KQNQRLTLLFDKKTKHLSLHITATQ | CSASPMDYANKMIF | GLGTILRVR |
| 222 | | | VLINCSYT (SEQ ID | (SEQ ID | FIID (SEQ ID | (SEQ ID | PGDSAIYF (SEQ ID NO: | (SEQ ID NO: | P (SEQ ID |
| | | | NO: 160) | NO: | NO: 6096) | NO: | 12032) | 25836) | NO: |
| | | | | 3128) | | 8952) | | | 16416) |
| Clonotype_ | 1 | TRB | EAAVTQSPRSKVAVTGGK | NNHDY | MYWYRQDTGHGLR | SYVADS | TEKGDIPDGYKASRPSQENFSLILE | CASSEGGWAETLYF | GSGTRLTVL |
| 223 | | | VTLSCHQT (SEQ ID | (SEQ ID | LIHY (SEQ ID | (SEQ ID | LASLSQTAVYF (SEQ ID NO: | (SEQ ID NO: | (SEQ ID |
| | | | NO: 7) | NO: | NO: 5939) | NO: | 11879) | 25837) | NO: |
| | | | | 2975) | | 8911) | | | 16325) |
| Clonotype_ | 1 | TRA | QQKVQQSPESLSVPEGGM | DRNFQY | FWWYRQHSGEGPK | IFSDGD | KKEGRFTAHLNKASLHVSLHIRDSQ | CAASEEGGGSGNKL | GTGTLLSVK |
| 223 | | | ASFNCTSS (SEQ ID | (SEQ ID | ALMS (SEQ ID | (SEQ ID | PSDSALYF (SEQ ID NO: | IF (SEQ ID NO: | P (SEQ ID |
| | | | NO: 2) | NO: | NO: 5938) | NO: | 11874) | 25838) | NO: |
| | | | | 2970) | | 8906) | | | 16350) |
| Clonotype_ | 1 | TRB | EAAVTQSPRSKVAVTGGK | INNHDY | MYWYRQDTGHGLR | SYVADS | TEKGDIPDGYKASRPSQENFSLILE | CASSDPGRDTEVFF | GKGTRLTVV |
| 224 | | | VTLSCHQT (SEQ ID | (SEQ ID | LIHY (SEQ ID | (SEQ ID | LASLSQTAVYF (SEQ ID NO: | (SEQ ID NO: | (SEQ ID |
| | | | NO: 7) | NO: | NO: 5939) | NO: | 11879) | 14927) | NO: |
| | | | | 2975) | | 8911) | | | 16333) |
| Clonotype_ | 1 | TRA | AQKVTQTQTSISVMEKTT | TQDSSYF | LFWYKQTASGEIV | QDSYKKE | ATVGHYSLNFQKPKSSIGLIITATQ | CAMREGGGGADRLT | GKGTQLIIQ |
| 224 | | | VTMDCVYE (SEQ ID | (SEQ ID | FLIR (SEQ ID | N (SEQ | IEDSAVYF (SEQ ID NO: | F (SEQ ID NO: | P (SEQ ID |
| | | | NO: 44) | NO: | NO: 5942) | ID NO: | 11878) | 14928) | NO: |
| | | | | 3056) | | 8910) | | | 16360) |
| Clonotype_ | 1 | TRB | EAAVTQSPRSKVAVTGGK | NNHDY | MYWYRQDTGHGLR | SYVADS | TEKGDIPDGYKASRPSQENFSLILE | CASSDEISNERLFF | GHGTKLSVL |
| 225 | | | VTLSCHQT (SEQ ID | (SEQ ID | LIHY (SEQ ID | (SEQ ID | LASLSQTAVYF (SEQ ID NO: | (SEQ ID NO: | (SEQ ID |
| | | | NO: 7) | NO: 2975) | NO: 5939) | NO: 8911) | 11879) | 25841) | NO: |
| | | | | | | | | | 16401) |
| Clonotype_ | 1 | TRA | GEQVEQLPSSLIVQEGAS | DSASVY | FPWYKQEPGKRLQ | IRSNMER | KQNQRLTLLFDKKTKHLSLHITATQ | CSASMGNAGAKLTF | GGGTRLTVR |
| 225 | | | VLINCSYT (SEQ ID | (SEQ ID | FIID (SEQ ID | (SEQ ID | PGDSAIYF (SEQ ID NO: | (SEQ ID NO: | P (SEQ ID |
| | | | NO: 160) | NO: | NO: 6096) | NO: | 12032) | 25842) | NO: |
| | | | | 3128) | | 8952) | | | 16338) |
| Clonotype_ | 1 | TRB | EAAVTQSPRSKVAVTGGK | NNHDY | MYWYRQDTGHGLR | SYVADS | TEKGDIPDGYKASRPSQENFSLILE | CASSDDANSDYTF | GSGTRLLVI |
| 226 | | | VTLSCHQT (SEQ ID | (SEQ ID | LIHY (SEQ ID | (SEQ ID | LASLSQTAVYF (SEQ ID NO: | (SEQ ID NO: | (SEQ ID |
| | | | NO: 7) | NO: | NO: 5939) | NO: | 11879) | 25843) | NO: |
| | | | | 2975) | | 8911) | | | 16337) |
| Clonotype_ | 1 | TRA | AQKVTQTQTSISVMEKTT | TQDSSYF | LFWYKQTASGEIV | QDSYKKE | ATVGHYSLNFQKPKSSIGLIITATQ | CAMREGPSNTDKVV | GTGTRLQVS |
| 226 | | | VTMDCVYE (SEQ ID | (SEQ ID | FLIR (SEQ ID | N (SEQ | IEDSAVYF (SEQ ID NO: 11878) | F (SEQ ID NO: | P (SEQ ID |
| | | | NO: 44) | NO: | NO: 5942) | ID NO: | | 25844) | NO: 16374) |
| | | | | 3056) | | 8910) | | | |
| Clonotype_ | 1 | TRB | EAAVTQSPRSKVAVTGGK | NNHDY | MYWYRQDTGHGLR | SYVADS | TEKGDIPDGYKASRPSQENFSLILE | CASSDAGSHSGNTL | GEGSRLIVV |
| 227 | | | VTLSCHQT (SEQ ID | (SEQ ID | LIHY (SEQ ID | (SEQ ID | LASLSQTAVYF (SEQ ID NO: | YF (SEQ ID NO: | (SEQ ID |
| | | | NO: 7) | NO: | NO: 5939) | NO: | 11879) | 25845) | NO: |
| | | | | 2975) | | 8911) | | | 16471) |
| Clonotype_ | 1 | TRA | AQKVTQTQTSISVMEKTT | TRDSSYF | FLIR (SEQ ID | QDSYKKE | ATEGHYSLNFQKPKSSIGLIITATQ | CAMREVNTGANTGK | GHGTILRVH |
| 227 | | | VTMDCVYE (SEQ ID | (SEQ ID | LFWYKQTASGEIV | N (SEQ | IEDSAVYF (SEQ ID NO: | LTF (SEQ ID NO: | P (SEQ ID |
| | | | NO: 44) | NO: | NO: 5942) | ID NO: | 11916) | 25436) | NO: |
| | | | | 2974) | | 8910) | | | 16356) |
| Clonotype_ | 1 | TRB | EAAVTQSPRSKVAVTGGK | NNHDY | MYWYRQDTGHGLR | SYVADS | TEKGDIPDGYKASRPSQENFSLILE | CASSDGTGGSAETL | GSGTRLTVL |
| 228 | | | VTLSCHQT (SEQ ID | (SEQ ID | LIHY (SEQ ID | (SEQ ID | LASLSQTAVYF (SEQ ID NO: | YF (SEQ ID NO: | (SEQ ID |
| | | | NO: 7) | NO: 2975) | NO: 5939) | NO: 8911) | 11879) | 25847) | NO: |
| | | | | | | | | | 16325) |
| Clonotype_ | 1 | TRA | GQQVKQSSPSLTVQEGGI | NDMFDY | FAWYKKYPDNSPT | VRSNVDK | REDGRFTVFLNKSGKHFSLHITASQ | CAAGAGGYQNFYF | GKGTSLTVI |
| 228 | | | LILNCDYE (SEQ ID | (SEQ ID | LLIS (SEQ ID | (SEQ ID | PEDTAVYL (SEQ ID NO: | (SEQ ID NO: | P (SEQ ID |
| | | | NO: 78) | NO: 3046) | NO: 6014) | NO: 8982) | 11950) | 25848) | NO: 16366) |
| Clonotype_ | 1 | TRB | EAAVTQSPRSKVAVTGGK | NNHDY | MYWYRQDTGHGLR | SYVADS | TEKGDIPDGYKASRPSQENFSLILE | CASSDVGEQYF | GPGTRLTVL |
| 229 | | | VTLSCHQT (SEQ ID | (SEQ ID | LIHY (SEQ ID | (SEQ ID | LASLSQTAVYF (SEQ ID NO: | (SEQ ID NO: | (SEQ ID |
| | | | NO: 7) | NO: | NO: 5939) | NO: | 11879) | 25849) | NO: |
| | | | | 2975) | | 8911) | | | 16327) |
| Clonotype_ | 1 | TRA | GDQVKQSPSALSLQEGTN | IATTT | VQWFLQNPRGSLM | LVPGT | KENGRLKSTFNSKESYSTLHIRDAQ | CAANSGGSNAKLTF | GKGTKLSVK |
| 229 | | | SALRCNFS (SEQ ID | (SEQ ID | NLFY (SEQ ID | (SEQ ID | LEDSGTYF (SEQ ID NO: | (SEQ ID NO: | S (SEQ ID |
| | | | NO: 258) | NO: | NO: 6194) | NO: | 12130) | 25850) | NO: |
| | | | | 3226) | | 9162) | | | 16342) |
| Clonotype_ | 1 | TRB | EAAVTQSPRSKVAVTGGK | NNHDY | MYWYRQDTGHGLR | SYVADS | TEKGDIPDGYKASRPSQENFSLILE | CASSDVRVNSPLYF | AAGTRLTVT |
| 230 | | | VTLSCHQT (SEQ ID | (SEQ ID | LIHY (SEQ ID | (SEQ ID | LASLSQTAVYF (SEQ ID NO: | (SEQ ID NO: | (SEQ ID |
| | | | NO: 7) | NO: | NO: 5939) | NO: | 11879) | 25851) | NO: |
| | | | | 2975) | | 8911) | | | 16381) |
| Clonotype_ | 1 | TRA | SQWGEENLQALSIQEGED | TYTTV | VHWYRQDSGRGPA | IRSNERE | KRSGRLRATLDTSSQSSSLSITAAQ | CATDGGNYAQGLTF | GLGTRVSVF |
| 230 | | | VTMNCSYK (SEQ ID | (SEQ ID | LIIL (SEQ ID | (SEQ ID | CEDTAVYF (SEQ ID NO: | (SEQ ID NO: | P (SEQ ID |
| | | | NO: 80) | NO: | NO: 6016) | NO: | 11952) | 25852) | NO: |
| | | | | 3048) | | 8928) | | | 16344) |
| Clonotype_ | 1 | TRB | EAAVTQSPRSKVAVTGGK | NNHDY | MYWYRQDTGHGLR | SYVADS | TEKGDIPDGYKASRPSQENFSLILE | CASSGLGGRGAETL | GSGTRLTVL |
| 231 | | | VTLSCHQT (SEQ ID | (SEQ ID | LIHY (SEQ ID | (SEQ ID | LASLSQTAVYF (SEQ ID NO: | YF (SEQ ID NO: | (SEQ ID |
| | | | NO: 7) | NO: | NO: 5939) | NO: | 11879) | 25853) | NO: |
| | | | | 2975) | | 8911) | | | 16325) |
| Clonotype_ | 1 | TRA | AQKVTQTQTSISVMEKTT | TRDSSYF | LFWYKQTASGEIV | QDSYKKE | ATEGHYSLNFQKPKSSIGLIITATQ | CAMREVHTGANTGK | GHGTILRVH |
| 231 | | | VTMDCVYE (SEQ ID | (SEQ ID | FLIR (SEQ ID | N (SEQ | IEDSAVYF (SEQ ID NO: 11916) | LTF (SEQ ID NO: | P (SEQ ID |
| | | | NO: 44) | NO: | NO: 5942) | ID NO: | | 25854) | NO: |
| | | | | 2974) | | 8910) | | | 16356) |
| Clonotype_ | 1 | TRB | EAAVTQSPRSKVAVTGGK | NNHDY | MYWYRQDTGHGLR | SYVADS | TEKGDIPDGYKASRPSQENFSLILE | CASSGGGNEQYF | GPGTRLTVL |
| 232 | | | VTLSCHQT (SEQ ID | (SEQ ID | LIHY (SEQ ID | (SEQ ID | LASLSQTAVYF (SEQ ID NO: | (SEQ ID NO: | (SEQ ID |
| | | | NO: 7) | NO: | NO: 5939) | NO: | 11879) | 25855) | NO: |
| | | | | 2975) | | 8911) | | | 16327) |
| Clonotype_ | 1 | TRA | GEQVEQLPSSLIVQEGAS | DSASVY | FPWYKQEPGKRLQ | IRSNMER | KQTQRLTLLFDKKTKHLSLHITATQ | CSASSQGGRALIF | GTGTTVSVS |
| 232 | | | VLINCSYT (SEQ ID | (SEQ ID | FIID (SEQ ID | (SEQ ID | PGDSAIYF (SEQ ID NO: | (SEQ ID NO: | P (SEQ ID |
| | | | NO: 160) | NO: | NO: 6096) | NO: | 24636) | 25856) | NO: |
| | | | | 3128) | | 8952) | | | 16348) |
| Clonotype_ | 1 | TRB | EAAVTQSPRSKVAVTGGK | NNHDY | MYWYRQDTGHGLR | SYVADS | TEKGDIPDGYKASRPSQENFSLILE | CASSGTLNSGNTLY | GEGSRLIVV |
| 233 | | | VTLSCHQT (SEQ ID | (SEQ ID | LIHY (SEQ ID | (SEQ ID | LASLSQTAVYF (SEQ ID NO: | F (SEQ ID NO: | (SEQ ID |
| | | | NO: 7) | NO: 2975) | NO: 5939) | NO: 8911) | 11879) | 25857) | NO: |
| | | | | | | | | | 16471) |
| Clonotype_ | 1 | TRA | AQKVTQTQTSISVMEKTT | TQDSSYF | LFWYKQTASGEIV | QDSYKKE | ATVGHYSLNFQKPKSSIGLIITATQ | CAMREVNTGANTGK | GHGTILRVH |
| 233 | | | VTMDCVYE (SEQ ID | (SEQ ID | FLIR (SEQ ID | N (SEQ | IEDSAVYF (SEQ ID NO: 11878) | LTF (SEQ ID NO: | P (SEQ ID |
| | | | NO: 44) | NO: 3056) | NO: 5942) | ID NO: | | 25436) | NO: |
| | | | | | | 8910) | | | 16356) |
| Clonotype_ | 1 | TRB | EAAVTQSPRSKVAVTGGK | NNHDY | MYWYRQDTGHGLR | SYVADS | TEKGDIPDGYKASRPSQENFSLILE | CASSGTANSDYTF | GSGTRLLVI |
| 234 | | | VTLSCHQT (SEQ ID | (SEQ ID | LIHY (SEQ ID | (SEQ ID | LASLSQTAVYF (SEQ ID NO: | (SEQ ID NO: | (SEQ ID |
| | | | NO: 7) | NO: 2975) | NO: 5939) | NO: 8911) | 11879) | 25859) | NO: |
| | | | | | | | | | 16337) |
| Clonotype_ | 1 | TRA | GQQVQQSPASLVLQEGEN | TSLNS | MQWFYQRPGGSLV | NPSGT | KHSGRLTSTTVIKERRSSLHISSSQ | CALEDNYAQGLTF | GLGTRVSVF |
| 234 | | | AELQCNFS (SEQ ID | (SEQ ID | SLFY (SEQ ID | (SEQ ID | TTDSGTYL (SEQ ID NO: 11928) | (SEQ ID NO: | P (SEQ ID |
| | | | NO: 10) | NO: 2978) | NO: 5946) | NO: 8914) | | 25860) | NO: 16344) |
| Clonotype_ | 1 | TRB | EAAVTQSPRSKVAVTGGK | NNHDY | MYWYRQDTGHGLR | SYVADS | TEKGDIPDGYKASRPSQENFSLILE | CASSGRDWDQDTQY | GPGTRLLVL |
| 235 | | | VTLSCHQT (SEQ ID | (SEQ ID | LIHY (SEQ ID | (SEQ ID | LASLSQTAVYF (SEQ ID NO: | F (SEQ ID NO: | (SEQ ID |
| | | | NO: 7) | NO: 2975) | NO: 5939) | NO: 8911) | 11879) | 25861) | NO: |
| | | | | | | | | | 16341) |
| Clonotype_ | 1 | TRA | GQQVKQSSPSLTVQEGGI | NDMEDY | FAWYKKYPDNSPT | VRSNVDK | REDGRLTVFLNKSGKHFSLHITASQ | CAAGEGTGSKLSF | GKGAKLTVS |
| 235 | | | SILNCDYE (SEQ ID | (SEQ ID | LLIS (SEQ ID | (SEQ ID | PEDTAVYL (SEQ ID NO: | (SEQ ID NO: | P (SEQ ID |
| | | | NO: 248) | NO: | NO: 6014) | NO: 8982) | 12120) | 25862) | NO: |
| | | | | 3046) | | | | | 16524) |
| Clonotype_ | 1 | TRB | EAAVTQSPRSKVAVTGGK | NNHDY | MYWYRQDTGHGLR | SYVADS | TEKGDIPDGYKASRPSQENFSLILE | CASSSLGNTGQLYF | GEGSKLTVL |
| 236 | | | VTLSCHQT (SEQ ID | (SEQ ID | LIHY (SEQ ID | (SEQ ID | LASLSQTAVYF (SEQ ID NO: | (SEQ ID NO: | (SEQ ID |
| | | | NO: 7) | NO: | NO: 5939) | NO: | 11879) | 25863) | NO: |
| | | | | 2975) | | 8911) | | | 16347) |
| Clonotype_ | 1 | TRA | AQKVTQTQTSISVMEKTT | TRDSSYF | LFWYKQTASGEIV | QDSYKKE | ATEGHYSLNFQKPKSSIGLIITATQ | CAMRESGGSNYKLT | GKGTLLTVT |
| 236 | | | VTMDCVYE (SEQ ID | (SEQ ID | FLIR (SEQ ID | N (SEQ | IEDSAVYF (SEQ ID NO: | F (SEQ ID NO: | P (SEQ ID |
| | | | NO: 44) | NO: | NO: 5942) | ID NO: | 11916) | 25864) | NO: |
| | | | | 2974) | | 8910) | | | 16642) |
| Clonotype_ | 1 | TRB | EAAVTQSPRSKVAVTGGK | NNHDY | MYWYRQDTGHGLR | SYVADS | TEKGDIPDGYKASRPSQENFSLILE | CASSWGGAAEQFF | GPGTRLTVL |
| 237 | | | VTLSCHQT (SEQ ID | (SEQ ID | LIHY (SEQ ID | (SEQ ID | LASLSQTAVYF (SEQ ID NO: | (SEQ ID NO: | (SEQ ID |
| | | | NO: 7) | NO: | NO: 5939) | NO: | 11879) | 25865) | NO: |
| | | | | 2975) | | 8911) | | | 16327) |
| Clonotype_ | 1 | TRA | AQSVDQPDAHVTLSEGAS | YSAAPY | LFWYVQYPGQSLQ | YITGDTV | KGTKGFEAEFRKSNSSFNLKKSPAH | CALEGRSGGSNYKL | GKGTLLTVT |
| 237 | | | LELRCSYS (SEQ ID | (SEQ ID | FLLK (SEQ ID | V (SEQ | WSDSAKYF (SEQ ID NO: 12152) | TF (SEQ ID NO: | P (SEQ ID |
| | | | NO: 280) | NO: | NO: 6216) | ID NO: | | 25866) | NO: 16642) |
| | | | | 3248) | | 9184) | | | |
| Clonotype_ | 1 | TRB | EAAVTQSPRSKVAVTGGK | NNHDY | MYWYRQDTGHGLR | SYVADS | TEKGDIPDGYKASRPSQENFSLILE | CASRDRGDYTF | GSGTRLLVI |
| 238 | | | VTLSCHQT (SEQ ID | (SEQ ID | LIHY (SEQ ID | (SEQ ID | LASLSQTAVYF (SEQ ID NO: | (SEQ ID NO: | (SEQ ID |
| | | | NO: 7) | NO: | NO: 5939) | NO: | 11879) | 25867) | NO: |
| | | | | 2975) | | 8911) | | | 16337) |
| Clonotype_ | 1 | TRA | GDKVKQSPSALSLQEGTN | IAATT | VQWFLQNPRGSLI | LVPGT | KENGRLKSAFDSKESYSTLHIRDAQ | CAAANYGNEKITF | GAGTKLTIK |
| 238 | | | SALRCNFS (SEQ ID | (SEQ ID | NLFY (SEQ ID | (SEQ ID | LEDSGTYF (SEQ ID NO: | (SEQ ID NO: | P (SEQ ID |
| | | | NO: 404) | NO: | NO: 6486) | NO: | 12276) | 15494) | NO: |
| | | | | 3372) | | 9162) | | | 16512) |
| Clonotype_ | 1 | TRB | EAAVTQSPRSKVAVTGGK | NNHDY | MYWYRQDTGHGLR | SYVADS | TEKGDIPDGYKASRPSQENFSLILE | CASTGGYTLYF | GAGTRLSVL |
| 239 | | | VTLSCHQT (SEQ ID | (SEQ ID | LIHY (SEQ ID | (SEQ ID | LASLSQTAVYF (SEQ ID NO: | (SEQ ID NO: | (SEQ ID |
| | | | NO: 7) | NO: | NO: 5939) | NO: | 11879) | 25869) | NO: |
| | | | | 2975) | | 8911) | | | 16365) |
| Clonotype_ | 1 | TRA | AQKVTQTQTSISVMEKTT | TQDSSYF | LFWYKQTASGEIV | QDSYKKE | ATVGHYSLNFQKPKSSIGLIITATQ | CAMREGDQGGSAKL | GEGTKLTVS |
| 239 | | | VTMDCVYE (SEQ ID | (SEQ ID | FLIR (SEQ ID | N (SEQ | IEDSAVYF (SEQ ID NO: | IF (SEQ ID NO: | S (SEQ ID |
| | | | NO: 44) | NO: | NO: 5942) | ID NO: | 11878) | 25870) | NO: |
| | | | | 3056) | | 8910) | | | 16384) |
| Clonotype_ | 1 | TRB | DTTVKQNPRYKLARVGKP | MNHDT | MYWYQKKPNQAPK | YYDKIL | NREADTFEKFQSSRPNNSFCSLYIG | CASSTRGREQYF | GPGTRLTVL |
| 240 | | | VNLICSQT (SEQ ID | (SEQ ID | LLLF (SEQ ID | (SEQ ID | SAGLEYSAMYL (SEQ ID NO: | (SEQ ID NO: | (SEQ ID |
| | | | NO: 299) | NO: 3267) | NO: 6235) | NO: 9203) | 12171) | 25871) | NO: 16327) |
| Clonotype_ | 1 | TRA | DAKTTQPDSMESTEGETV | TISGNEY | IYWYRQVPLQGPE | GLQQN | TTNSMAFLAIASDRKSSTLILPHVS | CILRANSGTYQRF | GTGTKLQVV |
| 240 | | | HLPCSHA (SEQ ID NO: | (SEQ ID | YVTH (SEQ ID | (SEQ ID | LRDAAVYH (SEQ ID NO: | (SEQ ID NO: | P (SEQ ID |
| | | | 104) | NO: | NO: 6040) | NO: | 12266) | 25872) | NO: |
| | | | | 3072) | | 9008) | | | 16432) |
| Clonotype_ | 1 | TRB | DTTVKQNPRYKLARVGKP | MNHDT | MYWYQKKPNQAPK | YYDKIL | NREADTFEKFQSSRPNNSFCSLYIG | CASSRGTGVGNTLY | GEGSRLIVV |
| 241 | | | VNLICSQT (SEQ ID | (SEQ ID | LLLF (SEQ ID | ID NO: | SAGLEYSAMYL (SEQ ID NO: | F (SEQ ID NO: | (SEQ ID |
| | | | NO: 299) | NO: | NO: 6235) | 9203) | 12171) | 25873) | NO: |
| | | | | 3267) | | | | | 16471) |
| Clonotype_ | 1 | TRA | GDSVTQTEGQVTVSESKS | ATSIAYP | LFWYVRYPGEGLQ | VITAGQK | GSSRGFEATYNKETTSFHLQKASVQ | CALSALTSGGNYKP | GKGTSLVVH |
| 241 | | | LIINCTYS (SEQ ID | N (SEQ | LLLK (SEQ ID | (SEQ ID | ESDSAVYY (SEQ ID NO: | TF (SEQ ID NO: | P (SEQ ID |
| | | | NO: 60) | ID NO: | NO: 5996) | NO: | 11932) | 25874) | NO: |
| | | | | 3098) | | 8964) | | | 16394) |
| Clonotype_ | 1 | TRB | DTTVKQNPRYKLARVGKP | MNHDT | MYWYQKKPNQAPK | YYDKIL | NREADTFEKFQSSRPNNSFCSLYIG | CASSRGDWGLYEQY | GPGTRLTVL |
| 242 | | | VNLICSQT (SEQ ID | (SEQ ID | LLLF (SEQ ID | (SEQ ID | SAGLEYSAMYL (SEQ ID NO: | F (SEQ ID NO: | (SEQ ID |
| | | | NO: 299) | NO: | NO: 6235) | NO: | 12171) | 25875) | NO: |
| | | | | 3267) | | 9203) | | | 16327) |
| Clonotype_ | 1 | TRA | AQRVTQVQPTGSSQWGEE | TSEYFYR | IFWYRQLFSGEMV | PSFDTQ | RSGRYSVVFQKSFKSISLVISASQ | CALSEPRGSALGRL | GAGTQLIVI |
| 242 | | | VTLDCSYE (SEQ ID | (SEQ ID | FLIY (SEQ ID | N (SEQ | PEDSGTYF (SEQ ID NO: 12182) | HF (SEQ ID NO: | P (SEQ ID |
| | | | NO: 310) | NO: | NO: 6246) | ID NO: | | 25876) | NO: |
| | | | | 3278) | | 9214) | | | 16480) |
| Clonotype_ | 1 | TRB | DTTVKQNPRYKLARVGKP | MNHDT | MYWYQKKPNQAPK | YYDKIL | NREADTFEKFQSSRPNNSFCSLYIG | CASSSGQGNTEVFF | GKGTRLTVV |
| 243 | | | VNLICSQT (SEQ ID | (SEQ ID | LLLF (SEQ ID | (SEQ ID | SAGLEYSAMYL (SEQ ID NO: | (SEQ ID NO: | (SEQ ID |
| | | | NO: 299) | NO: 3267) | NO: 6235) | NO: 9203) | 12171) | 25877) | NO: |
| | | | | | | | | | 16333) |
| Clonotype_ | 1 | TRA | GDQVKQSPSALSLQEGTN | IATTT | VQWFLQNPRGSLM | LVPGT | KENGRLKSTFNSKESYSTLHIRDAQ | CAADGNNRIFF | GDGTQLVVK |
| 243 | | | SALRCNFS (SEQ ID | (SEQ ID | NLFY (SEQ ID | (SEQ ID | LEDSGTYF (SEQ ID NO: | (SEQ ID NO: | P (SEQ ID |
| | | | NO: 258) | NO: | NO: 6194) | NO: | 12130) | 25878) | NO: |
| | | | | 3226) | | 9162) | | | 16328) |
| Clonotype_ | 1 | TRB | DTTVKQNPRYKLARVGKP | MNHDT | MYWYQKKPNQAPK | YYDKIL | NREADTFEKFQSSRPNNSFCSLYIG | CASSRDRDEQYF | GPGTRLTVL |
| 244 | | | VNLICSQT (SEQ ID | (SEQ ID | LLLF (SEQ ID | (SEQ ID | SAGLEYSAMYL (SEQ ID NO: | (SEQ ID NO: | (SEQ ID |
| | | | NO: 299) | NO: | NO: 6235) | NO: | 12171) | 25879) | NO: |
| | | | | 3267) | | 9203) | | | 16327) |
| Clonotype_ | 1 | TRA | AQKVTQTQTSISVMEKTT | TRDSSYF | LFWYKQTASGE IV | QDSYKKE | ATEGHYSLNFQKPKSSIGLIITATQ | CAMREGAGTGSKLS | GKGAKLTVS |
| 244 | | | VTMDCVYE (SEQ ID | (SEQ ID | FLIR (SEQ ID | N (SEQ | IEDSAVYF (SEQ ID NO: | F (SEQ ID NO: | P (SEQ ID |
| | | | NO: 44) | NO: | NO: 5942) | ID NO: | 11916) | 25880) | NO: |
| | | | | 2974) | | 8910) | | | 16524) |
| Clonotype_ | 1 | TRB | DTTVKQNPRYKLARVGKP | MNHDT | MYWYQKKPNQAPK | YYDKIL | NREADTFEKFQSSRPNNSFCSLYIG | CASSALRTEVFF | GKGTRLTVV |
| 245 | | | VNLICSQT (SEQ ID | (SEQ ID | LLLF (SEQ ID | (SEQ ID | SAGLEYSAMYL (SEQ ID NO: | (SEQ ID NO: | (SEQ ID |
| | | | NO: 299) | NO: | NO: 6235) | NO: | 12171) | 25881) | NO: |
| | | | | 3267) | | 9203) | | | 16333) |
| Clonotype_ | 1 | TRA | GDSVTQTEGQVTVSESKS | ATSIGYP | LFWYVRYPGEGLQ | VITAGQK | GSSRGFEATYNKEATSFHLQKASVQ | CALSASSGSWQLIF | GSGTQLTVM |
| 245 | | | LIINCTYS (SEQ ID | N (SEQ | LLLK (SEQ ID | (SEQ ID | ESDSAVYY (SEQ ID NO: | (SEQ ID NO: | P (SEQ ID |
| | | | NO: 60) | ID NO: | NO: 5996) | NO: | 12094) | 25882) | NO: |
| | | | | 3330) | | 8964) | | | 16400) |
| Clonotype_ | 1 | TRB | DTTVKQNPRYKLARVGKP | MNHDT | MYWYQKKPNQAPK | YYDKIL | NREADTFEKFQSSRPNNSFCSLYIG | CASSSGTNTGQLYF | GEGSKLTVL |
| 246 | | | VNLICSQT (SEQ ID | (SEQ ID | LLLF (SEQ ID | (SEQ ID | SAGLEYSAMYL (SEQ ID NO: | (SEQ ID NO: | (SEQ ID |
| | | | NO: 299) | NO: | NO: 6235) | NO: | 12171) | 25883) | NO: |
| | | | | 3267) | | 9203) | | | 16347) |
| Clonotype_ | 1 | TRA | GDSVTQTEGPVTVSESES | ATSIAYP | LFWYVRYPGEGLQ | VITAGQK | GSSRGFEATYNKETTSFHLQKASVQ | CALGDRASLGKLQF | GTGTQVVVT |
| 246 | | | LIINCTYS (SEQ ID | N (SEQ | LLLK (SEQ ID | (SEQ ID | ESDSAVYY (SEQ ID NO: | (SEQ ID NO: | P (SEQ ID |
| | | | NO: 130) | ID NO: | NO: 5996) | NO: 8964) | 11932) | 25884) | NO: 16488) |
| | | | | 3098) | | | | | |
| Clonotype_ | 1 | TRB | DTTVKQNPRYKLARVGKP | MNHDT | MYWYQKKPNQAPK | YYDKIL | NREADTFEKFQSSRPNNSFCSLYIG | CASSSGTSSYEQYF | GPGTRLTVL |
| 247 | | | VNLICSQT (SEQ ID | (SEQ ID | LLLF (SEQ ID | (SEQ ID | SAGLEYSAMYL (SEQ ID NO: | (SEQ ID NO: | (SEQ ID |
| | | | NO: 299) | NO: | NO: 6235) | NO: | 12171) | 25885) | NO: |
| | | | | 3267) | | 9203) | | | 16327) |
| Clonotype_ | 1 | TRA | GEKVEQHESTLSVREGDS | DTASSY | FPWYKQEAGKGLH | IRSNVDR | KQSQRLIVLLDKKAKRFSLHITATQ | CAAASSGSWQLIF | GSGTQLTVM |
| 247 | | | AVINCTYT (SEQ ID | (SEQ ID | FVID (SEQ ID | (SEQ ID | PEDSAIYF (SEQ ID NO: | (SEQ ID NO: | P (SEQ ID |
| | | | NO: 54) | NO: | NO: 5994) | NO: | 11926) | 25886) | NO: |
| | | | | 3022) | | 8958) | | | 16400) |
| Clonotype_ | 1 | TRB | DAGVTQTPRHEVAEKGQT | SGHND | LFWYRQTKIQGLE | FRSKSL | MEDGGAFKDRFKAEMLNSSFSTLKI | CASSLDNTGQLYF | GEGSKLTVL |
| 248 | | | IILKCEPV (SEQ ID | (SEQ ID | LLSY (SEQ ID | (SEQ ID | PTEPKDSAVYL (SEQ ID NO: | (SEQ ID NO: | (SEQ ID |
| | | | NO: 1239) | NO: | NO: 7175) | NO: | 13111) | 25887) | NO: |
| | | | | 4207) | | 10143) | | | 16347) |
| Clonotype_ | 1 | TRA | AQKVTQTQTSISVMEKTT | TQDSSYF | LFWYKQTASGEIV | QDSYKKE | ATVGHYSLNFQKPKSSIGLIITATQ | CAMRVTYGGSGNKL | GIGTLLSVK |
| 248 | | | VTMDCVYE (SEQ ID | (SEQ ID | FLIR (SEQ ID | N (SEQ | IEDSAVYF (SEQ ID NO: 11878) | IF (SEQ ID NO: | P (SEQ ID |
| | | | NO: 44) | NO: 3056) | NO: 5942) | ID NO: | | 25888) | NO: |
| | | | | | | 8910) | | | 16456) |
| Clonotype_ | 1 | TRB | DAGVTQTPRHEVAEKGQT | SGHND | LFWYRQTKIQGLE | FRSKSL | MEDGGAFKDRFKAEMLNSSFSTLKI | CASSLGTGGPFSNE | GHGTKLSVL |
| 249 | | | IILKCEPV (SEQ ID | (SEQ ID | LLSY (SEQ ID | (SEQ ID | PTEPKDSAVYL (SEQ ID NO: | RLFF (SEQ ID | (SEQ ID |
| | | | NO: 1239) | NO: | NO: 7175) | NO: | 13111) | NO: 25889) | NO: 16401) |
| | | | | 4207) | | 10143) | | | |
| Clonotype_ | 1 | TRA | AQKVTQTQTSISVMEKTT | TQDSSYF | LFWYKQTASGEIV | QDSYKKE | ATVGHYSLNFQKPKSSIGLIITATQ | CAMREGEGNNRIFF | GDGTQLVVK |
| 249 | | | VTMDCVYE (SEQ ID | (SEQ ID | FLIR (SEQ ID | N (SEQ | IEDSAVYF (SEQ ID NO: 11878) | (SEQ ID NO: | P (SEQ ID |
| | | | NO: 44) | NO: | NO: 5942) | ID NO: | | 25890) | NO: 16328) |
| | | | | 3056) | | 8910) | | | |
| Clonotype_ | 1 | TRB | AQTIHQWPVAEIKAVGSP | GKSSPN | LYWYWQATGGTLQ | SITVG | VESVVQLNLSASRPKDDQFILSTE | CAWTLTGGASQNTL | GAGTRLSVL |
| 250 | | | LSLGCTIK (SEQ ID | (SEQ ID | QLFY (SEQ ID | (SEQ ID | KLLLSHSGFYL (SEQ ID NO: | YF (SEQ ID NO: | (SEQ ID |
| | | | NO: 35) | NO: | NO: 5971) | NO: | 11907) | 25891) | NO: |
| | | | | 3003) | | 8939) | | | 16365) |
| Clonotype_ | 1 | TRA | QQKVQQSPESLIVPEGGM | DRNVDY | FWWYRQHSGKSPK | IFSNGE | KEEGRFTVHLNKASLHTSLHIRDSQ | CAASGYSNNRLTL | GKGTQVVVL |
| 250 | | | ASLNCTSS (SEQ ID | (SEQ ID | MLMS (SEQ ID | (SEQ ID | PSDSALYL (SEQ ID NO: | (SEQ ID NO: | P (SEQ ID |
| | | | NO: 28) | NO: | NO: 5964) | NO: | 11900) | 25892) | NO: |
| | | | | 2996) | | 8932) | | | 16644) |
| Clonotype_ | 1 | TRB | AQTIHQWPVAEIKAVGSP | GKSSPN | LYWYWQATGGTLQ | SITVG | VESVVQLNLSASRPKDDQFILSTE | CAWRSGTANTEVFF | GKGTRLTVV |
| 251 | | | LSLGCTIK (SEQ ID | (SEQ ID | QLFY (SEQ ID | (SEQ ID | KLLLSHSGFYL (SEQ ID NO: | (SEQ ID NO: | (SEQ ID |
| | | | NO: 35) | NO: | NO: 5971) | NO: | 11907) | 25893) | NO: |
| | | | | 3003) | | 8939) | | | 16333) |
| Clonotype_ | 1 | TRA | GQQVQQSPSSLVLQEGEN | STATQ | LQWFYQSPGGSLV | NPSGT | KHTGRLTSTTVTKERRSSLHISSSQ | CAIERNMGYKLTF | GTGTSLLVD |
| 251 | | | AELQCNFS (SEQ ID | (SEQ ID | SLLS (SEQ ID | (SEQ ID | TTDSGTYL (SEQ ID NO: | (SEQ ID NO: | P (SEQ ID |
| | | | NO: 322) | NO: | NO: 6258) | NO: | 12194) | 25894) | NO: |
| | | | | 3290) | | 8914) | | | 16398) |
| Clonotype_ | 1 | TRB | AQTIHQWPVAEIKAVGSP | GKSSPN | LYWYWQATGGTLQ | SITVG | VESVVQLNLSASRPKDDQFILSTE | CAWSPGLGSYEQYF | GPGTRLTVL |
| 252 | | | LSLGCTIK (SEQ ID | (SEQ ID | QLFY (SEQ ID | (SEQ ID | KLLLSHSGFYL (SEQ ID NO: | (SEQ ID NO: | (SEQ ID |
| | | | NO: 35) | NO: | NO: 5971) | NO: | 11907) | 25895) | NO: |
| | | | | 3003) | | 8939) | | | 16327) |
| Clonotype_ | 1 | TRA | GDSVTQTEGLVTLTKGLP | TTYSPF | LFWYVQHLNEAPK | SSTDNKR | TEHQGFYATLHKSSSSFHLQKSSVQ | CALSASSGSWQLIF | GSGTQLTVM |
| 252 | | | VMLNCTYQ (SEQ ID | (SEQ ID | LLLK (SEQ ID | (SEQ ID | LSDSALYF (SEQ ID NO: | (SEQ ID NO: | P (SEQ ID |
| | | | NO: 8) | NO: | NO: 5944) | NO: | 11880) | 25882) | NO: |
| | | | | 2976) | | 8912) | | | 16400) |
| Clonotype_ | 1 | TRB | AQTIHQWPVAEIKAVGSP | GKSSPN | LYWYWQATGGTLQ | SITVG | VESVVQLNLSASRPKDDQFILSTE | CAWSLGVANERLFF | GHGTKLSVL |
| 253 | | | LSLGCTIK (SEQ ID | (SEQ ID | QLFY (SEQ ID | (SEQ ID | KLLLSHSGFYL (SEQ ID NO: | (SEQ ID NO: | (SEQ ID |
| | | | NO: 35) | NO: | NO: 5971) | NO: | 11907) | 25897) | NO: |
| | | | | 3003) | | 8939) | | | 16401) |
| Clonotype_ | 1 | TRA | GDSVTQTEGLVTLTEGLP | STYSPF | LFWYVQHLNEAPK | SFTDNKR | PEHQGFHATLHKSSSSFHLQKSSAQ | CASNSGGSNAKLTF | GKGTKLSVK |
| 253 | | | VMLNCTYQ (SEQ ID | (SEQ ID | LLLK (SEQ ID | (SEQ ID | LSDSALYY (SEQ ID NO: 11944) | (SEQ ID NO: | S (SEQ ID |
| | | | NO: 46) | NO: | NO: 5944) | NO: | | 25898) | NO: |
| | | | | 3040) | | 8950) | | | 16342) |
| Clonotype_ | 1 | TRB | AQTIHQWPVAEIKAVGSP | GKSSPN | LYWYWQATGGTLQ | SITVG | VESVVQLNLSASRPKDDQFILSTE | CAWSNRGYEQYF | GPGTRLTVL |
| 254 | | | LSLGCTIK (SEQ ID | (SEQ ID | QLFY (SEQ ID | (SEQ ID | KLLLSHSGFYL (SEQ ID NO: | (SEQ ID NO: | (SEQ ID |
| | | | NO: 35) | NO: | NO: 5971) | NO: 8939) | 11907) | 25899) | NO: 16327) |
| | | | | 3003) | | | | | |
| Clonotype_ | 1 | TRA | GEQVEQRPPHLSVPEGDS | DSATAY | FYWYKQEPGAGLQ | VFSNVDR | KEEQGLTVLLNKKDKQLSLNLTAAH | CAVSDTGGADRLTF | GKGTQLIIQ |
| 254 | | | AVIICTYT (SEQ ID | (SEQ ID | LLMS (SEQ ID | (SEQ ID | PGDSAVYF (SEQ ID NO: | (SEQ ID NO: | P (SEQ ID |
| | | | NO: 100) | NO: | NO: 6036) | NO: | 11972) | 25900) | NO: |
| | | | | 2990) | | 9004) | | | 16360) |
| Clonotype_ | 1 | TRB | AQTIHQWPVAEIKAVGSP | GKSSPN | LYWYWQATGGTLQ | SITVG | VESVVQLNLSASRPKDDQFILSTE | CAWSQRDRGYEQYF | GPGTRLTVL |
| 255 | | | LSLGCTIK (SEQ ID | (SEQ ID | QLFY (SEQ ID | (SEQ ID | KLLLSHSGFYL (SEQ ID NO: | (SEQ ID NO: | (SEQ ID |
| | | | NO: 35) | NO: | NO: 5971) | NO: 8939) | 11907) | 25901) | NO: 16327) |
| | | | | 3003) | | | | | |
| Clonotype_ | 1 | TRA | QQKVQQSPESLIVPEGAM | DSASQY | FAWYRQHSGKAPK | IFSNGE | KEEGRFTIHLNKASLHFSLHIRDSQ | CAVRVSGSFNKLTF | GAGTRLAVC |
| _255 | | | TSLNCTFS (SEQ ID | (SEQ ID | ALMS (SEQ ID | (SEQ ID | PSDSALYL (SEQ ID NO: 11948) | (SEQ ID NO: | P (SEQ ID |
| | | NO: 214) | NO: 3044) | NO: 6150) | NO: 8932) | | 25902) | NO: | 16692) |
| Clonotype_ | 1 | TRB | AQTIHQWPVAEIKAVGSP | GKSSPN | LYWYWQATGGTLQ | SITVG | VESVVQLNLSASRPKDDQFILSTE | CAWSLDNSGNTLYF | GEGSRLIVV |
| 256 | | | LSLGCTIK (SEQ ID | (SEQ ID | QLFY (SEQ ID | (SEQ ID | KLLLSHSGFYL (SEQ ID NO: | (SEQ ID NO: | (SEQ ID |
| | | | NO: 35) | NO: | NO: 5971) | NO: | 11907) | 25903) | NO: |
| | | | | 3003) | | 8939) | | | 16471) |
| Clonotype_ | 1 | TRA | GEQVEQRPPHLSVREGDS | DSATAY | FSWYKQEAGAGLQ | VLSNVDR | KEEQGLTVLLNKKDKRLSLNLTAAH | CAVSASSGSWQLIF | GSGTQLTVM |
| 256 | | | AIIICTYT (SEQ ID | (SEQ ID | LLMS (SEQ ID | (SEQ ID | PGDSAVYF (SEQ ID NO: | (SEQ ID NO: | P (SEQ ID |
| | | | NO: 22) | NO: | NO: 5958) | NO: | 11894) | 16268) | NO: |
| | | | | 2990) | | 8926) | | | 16400) |
| Clonotype_ | 1 | TRB | AQTIHQWPVAEIKAVGSP | GKSSPN | LYWYWQATGGTLQ | SITVG | VESVVQLNLSASRPKDDQFILSTE | CAWSLEGEPYEQYF | GPGTRLTVL |
| 257 | | | LSLGCTIK (SEQ ID | (SEQ ID | QLFY (SEQ ID | (SEQ ID | KLLLSHSGFYL (SEQ ID NO: | (SEQ ID NO: | (SEQ ID |
| | | | NO: 35) | NO: | NO: 5971) | NO: | 11907) | 25905) | NO: |
| | | | | 3003) | | 8939) | | | 16327) |
| Clonotype_ | 1 | TRA | GEQVEQR PPHLSVREGDS | DPNSYY | FFWYKQEPGAGLQ | VFSSTEI | NEGQGFTVLLNKKDKQLSLNLTAAH | CAVSAGYSNNRLTL | GKGTQVVVL |
| 257 | | | AVIICTYT (SEQ ID | (SEQ ID | LLMK (SEQ ID | (SEQ ID | PGDSAVYF (SEQ ID NO: | (SEQ ID NO: | P (SEQ ID |
| | | | NO: 108) | NO: | NO: 6044) | NO: | 11980) | 25906) | NO: |
| | | | | 3010) | | 8946) | | | 16644) |
| Clonotype_ | 1 | TRB | AQTIHQWPVAEIKAVGSP | GKSSPN | LYWYWQATGGTLQ | SITVG | VESVVQLNLSASRPKDDQFILSTE | CAWSYMNSDYTF | GSGTRLLVI |
| 258 | | | LSLGCTIK (SEQ ID | (SEQ ID | QLFY (SEQ ID | (SEQ ID | KLLLSHSGFYL (SEQ ID NO: | (SEQ ID NO: | (SEQ ID |
| | | | NO: 35) | NO: | NO: 5971) | NO: | 11907) | 25907) | NO: |
| | | | | 3003) | | 8939) | | | 16337) |
| Clonotype_ | 1 | TRA | AQKVTQTQTSISVMEKTT | TRDSSYF | LFWYKQTASGEIV | QDSYKKE | ATEGHYSLNFQKPKSSIGLIITATQ | CAMRVASSGSWQLI | GSGTQLTVM |
| 258 | | | VTMDCVYE (SEQ ID | (SEQ ID | FLIR (SEQ ID | N (SEQ | IEDSAVYF (SEQ ID NO: 11916) | F (SEQ ID NO: | P (SEQ ID |
| | | | NO: 44) | NO: | NO: 5942) | ID NO: | | 25908) | NO: 16400) |
| | | | | 2974) | | 8910) | | | |
| Clonotype_ | 1 | TRB | GPKVLQIPSHQIIDMGQM | SNHLY | FYWYKQILGQQME | FYNGKV | MEKSKLFKDQFSVERPDGSYFTLKI | CASSPYWGAYEQYF | GPGTRLTVL |
| 259 | | | VTLNCDPV (SEQ ID | (SEQ ID | FLVN (SEQ ID | (SEQ ID | PTALEDSAVYF (SEQ ID NO: | (SEQ ID NO: | (SEQ ID |
| | | | NO: 91) | NO: | NO: 6027) | NO: | 11963) | 25909) | NO: |
| | | | | 3059) | | 8995) | | | 16327) |
| Clonotype_ | 1 | TRA | GDSVTQTEGPVTLSEGTS | TKQYPT | LFWYVQYPGEGPQ | VPKANEK | GSSRGFEATYNKEATSFHLQKASVQ | CALSETGGSNAKLT | GKGTKLSVK |
| 259 | | | LTVNCSYE (SEQ ID | (SEQ ID | LLFK (SEQ ID | (SEQ ID | ESDSAVYY (SEQ ID NO: | F (SEQ ID NO: | S (SEQ ID |
| | | | NO: 38) | NO: | NO: 5974) | NO: | 12094) | 25910) | NO: |
| | | | | 3006) | | 8942) | | | 16342) |
| Clonotype_ | 1 | TRB | GPKVLQIPSHQIIDMGQM | SNHLY | FYWYKQILGQQME | FYNGKV | MEKSKLFKDQFSVERPDGSYFTLKI | CASSPDWGDTQYF | GPGTRLLVL |
| 260 | | | VTLNCDPV (SEQ ID | (SEQ ID | FLVN (SEQ ID | (SEQ ID | PTALEDSAVYF (SEQ ID NO: | (SEQ ID NO: | (SEQ ID |
| | | | NO: 91) | NO: | NO: 6027) | NO: | 11963) | 25911) | NO: |
| | | | | 3059) | | 8995) | | | 16341) |
| Clonotype_ | 1 | TRA | AQSVTQPDARVTVSEGAS | YSGTPY | LFWYVQYPRQGLQ | YYSGDPV | GVNGFEAEFSKSNSSFHLRKASVH | CVLSDYGNEKITF | GAGTKLTIK |
| 260 | | | LQLRCKYS (SEQ ID | (SEQ ID | LLLK (SEQ ID | V (SEQ | WSDSAVYF (SEQ ID NO: | (SEQ ID NO: | P (SEQ ID |
| | | | NO: 12) | NO: | NO: 5948) | ID NO: | 11892) | 25912) | NO: |
| | | | | 3054) | | 8916) | | | 16512) |
| Clonotype_ | 1 | TRB | GPKVLQIPSHQIIDMGQM | SNHLY | FYWYKQILGQQME | FYNGKV | MEKSKLFKDQFSVERPDGSYFTLKI | CASRGDRANERLFF | GHGTKLSVL |
| 261 | | | VTLNCDPV (SEQ ID | (SEQ ID | FLVN (SEQ ID | (SEQ ID | PTALEDSAVYF (SEQ ID NO: | (SEQ ID NO: | (SEQ ID |
| | | | NO: 91) | NO: | NO: 6027) | NO: | 11963) | 25913) | NO: |
| | | | | 3059) | | 8995) | | | 16401) |
| Clonotype_ | 1 | TRA | SQWGEENLQALSIQEGED | TYTTV | VHWYRQDSGRGPA | IRSNERE | KRSGRLRATLDTSSQSSSLSITAAQ | CATDTEGADRLTF | GKGTQLIIQ |
| 261 | | | VTMNCSYK (SEQ ID | (SEQ ID | LIIL (SEQ ID | (SEQ ID | CEDTAVYF (SEQ ID NO: | (SEQ ID NO: | P (SEQ ID |
| | | | NO: 80) | NO: | NO: 6016) | NO: | 11952) | 25914) | NO: |
| | | | | 3048) | | 8928) | | | 16360) |
| Clonotype_ | 1 | TRB | GGIITQTPKFLIGQEGQK | FNHDT | MYWYRQDSGKGLR | SITEND | LQKGDLSEGYDASREKKSSFSLTVT | CASSENERLFF | GHGTKLSVL |
| 262 | | | LTLKCQQN (SEQ ID | (SEQ ID | LIYY (SEQ ID | (SEQ ID | SAQKNEMAVFL (SEQ ID NO: | (SEQ ID NO: | (SEQ ID |
| | | | NO: 27) | NO: | NO: 5963) | NO: | 11899) | 25915) | NO: |
| | | | | 2995) | | 8931) | | | 16401) |
| Clonotype_ | 1 | TRA | QQKVQQSPESLTVSEGAM | DGTSNN | FRWYRQHSAKGLE | IFSDGE | KEEGRFTAHLNRANLHVSLHIREPQ | CAVPNSAGNKLTF | GIGTRVLVR |
| 262 | | | ASLNCTFS (SEQ ID | (SEQ ID | VLVS (SEQ ID | (SEQ ID | PSDSAVYL (SEQ ID NO: | (SEQ ID NO: | P (SEQ ID |
| | | | NO: 92) | NO: | NO: 6028) | NO: | 11964) | 15686) | NO: |
| | | | | 3060) | | 8996) | | | 16580) |
| Clonotype_ | 1 | TRB | GGIITQTPKFLIGQEGQK | FNHDT | MYWYRQDSGKGLR | SITEND | LQKGDLSEGYDASREKKSSFSLTVT | CASSGTFYAEQFF | GPGTRLTVL |
| 263 | | | LTLKCQQN (SEQ ID | (SEQ ID | LIYY (SEQ ID | (SEQ ID | SAQKNEMAVFL (SEQ ID NO: | (SEQ ID NO: | (SEQ ID |
| | | | NO: 27) | NO: | NO: 5963) | NO: | 11899) | 25917) | NO: |
| | | | | 2995) | | 8931) | | | 16327) |
| Clonotype_ | 1 | TRA | GQQVQQSPASLVLQEGEN | TSLNS | MQWFYQRPEGSLV | NPSGT | KQSGRLTSTTVIKERRSSLHISSSQ | CATNYGNEKITF | GAGTKLTIK |
| 263 | | | AELQCNFS (SEQ ID | (SEQ ID | SLFY (SEQ ID | (SEQ ID | ITDSGTYL (SEQ ID NO: | (SEQ ID NO: | P (SEQ ID |
| | | | NO: 10) | NO: | NO: 6192) | NO: | 12038) | | NO: |
| | | | | 2978) | | 8914) | | 25918) | 16512) |
| Clonotype_ | 1 | TRB | GGIITQTPKFLIGQEGQK | FNHDT | MYWYRQDSGKGLR | SITEND | LQKGDLSEGYDASREKKSSFSLTVT | CASRDNYAEQFF | GPGTRLTVL |
| 264 | | | LTLKCQQN (SEQ ID | (SEQ ID | LIYY (SEQ ID | (SEQ ID | SAQKNEMAVFL (SEQ ID NO: | (SEQ ID NO: | (SEQ ID |
| | | | NO: 27) | NO: | NO: 5963) | NO: | 11899) | 25919) | NO: |
| | | | | 2995) | | 8931) | | | 16327) |
| Clonotype_ | 1 | TRA | QQKVQQSPESLIVPEGGM | DRNVDY | FWWYRQHSGKSPK | IFSNGE | KEEGRFTVHLNKASLHTSLHIRDSQ | CAARTGGYKVVF | GSGTRLLVS |
| 264 | | | ASLNCTSS (SEQ ID | (SEQ ID | MLMS (SEQ ID | (SEQ ID | PSDSALYL (SEQ ID NO: | (SEQ ID NO: | P (SEQ ID |
| | | | NO: 28) | NO: | NO: 5964) | NO: | 11900) | 25644) | NO: |
| | | | | 2996) | | 8932) | | | 16354) |
| Clonotype_ | 1 | TRB | GGIITQTPKFLIGQEGQK | FNHDT | MYWYRQDSGKGLR | SITEND | LQKGDLSEGYDASREKKSSFSLTVT | CASRDNNNQAPLF | GEGTRLSVL |
| 265 | | | LTLKCQQN (SEQ ID | (SEQ ID | LIYY (SEQ ID | (SEQ ID | SAQKNEMAVFL (SEQ ID NO: | (SEQ ID NO: | (SEQ ID |
| | | | NO: 27) | NO: 2995) | NO: 5963) | NO: 8931) | 11899) | 15213) | NO: 16441) |
| Clonotype_ | 1 | TRA | GDSVTQTEGQVTVSESKS | ATSIGYP | LFWYVRYPGEGLQ | VITAGQK | GSSRGFEATYNKEATSFHLQKASVQ | CALSDPLYQGGRAL | GTGTTVSVS |
| 265 | | | LIINCTYS (SEQ ID | N (SEQ | LLLK (SEQ ID | (SEQ ID | ESDSAVYY (SEQ ID NO: | IF (SEQ ID NO: | P (SEQ ID |
| | | | NO: 60) | ID NO: | NO: 5996) | NO: | 12094) | 25922) | NO: |
| | | | | 3330) | | 8964) | | | 16348) |
| Clonotype_ | 1 | TRB | GGIITQTPKFLIGQEGQK | FNHDT | MYWYRQDSGKGLR | SITEND | LQKGDLSEGYDASREKKSSFSLTVT | CASSTGTGDNSPLY | AAGTRLTVT |
| 266 | | | LTLKCQQN (SEQ ID | (SEQ ID | LIYY (SEQ ID | (SEQ ID | SAQKNEMAVFL (SEQ ID NO: | F (SEQ ID NO: | (SEQ ID |
| | | | NO: 27) | NO: | NO: 5963) | NO: | 11899) | 25923) | NO: |
| | | | | 2995) | | 8931) | | | 16381) |
| Clonotype_ | 1 | TRA | GEQVEQLPSSLIVQEGAS | DSASVY | FPWYKQEPGKRLQ | IRSNMER | KQNQRLTLLFDKKTKHLSLHITATQ | CSASNNYAQGLTF | GLGTRVSVF |
| 266 | | | VLINCSYT (SEQ ID | (SEQ ID | FIID (SEQ ID | (SEQ ID | PGDSAIYF (SEQ ID NO: | (SEQ ID NO: | P (SEQ ID |
| | | | NO: 160) | NO: | NO: 6096) | NO: | 12032) | 25394) | NO: |
| | | | | 3128) | | 8952) | | | 16344) |
| Clonotype_ | 1 | TRB | GGIITQTPKFLIGQEGQK | FNHDT | MYWYRQDSGKGLR | SITEND | LQKGDLSEGYDASREKKSSFSLTVT | CASSTGVWDTLYF | GAGTRLSVL |
| 267 | | | LTLKCQQN (SEQ ID | (SEQ ID | LIYY (SEQ ID | (SEQ ID | SAQKNEMAVFL (SEQ ID NO: | (SEQ ID NO: | (SEQ ID |
| | | | NO: 27) | NO: | NO: 5963) | NO: | 11899) | 25925) | NO: |
| | | | | 2995) | | 8931) | | | 16365) |
| Clonotype_ | 1 | TRA | TQTVSQSDAHVTVFEGDS | YGGSIY | ILSWYIQHHGRGLQ | YYSGNPV | GVNGFEAEFSKSDSSFHLRKASVH | CAVSAGNNAPRF | GAGTKLTVK |
| 267 | | | VELRCNYS (SEQ ID | (SEQ ID | FLLK (SEQ ID | V (SEQ | WSDSAVYF (SEQ ID NO: | (SEQ ID NO: | P (SEQ ID |
| | | | NO: 110) | NO: | NO: 6046) | ID NO: | 11946) | 25926) | NO: |
| | | | | 3078) | | 9014) | | | 16424) |
| Clonotype_ | 1 | TRB | GGIITQTPKFLIGQEGQK | FNHDT | MYWYRQDSGKGLR | SITEND | LQKGDLSEGYDASREKKSSFSLTVT | CASSRTTGPNSDYT | GSGTRLLVI |
| 268 | | | LTLKCQQN (SEQ ID | (SEQ ID | LIYY (SEQ ID | (SEQ ID | SAQKNEMAVFL (SEQ ID NO: | F (SEQ ID NO: | (SEQ ID |
| | | | NO: 27) | NO: | NO: 5963) | NO: | 11899) | 25927) | NO: |
| | | | | 2995) | | 8931) | | | 16337) |
| Clonotype_ | 1 | TRA | GDSVTQKQGQVTLSEDDF | TTTYPT | LLWYVQYLGQGPQ | VTTANNK | GISRGFEATYDKGTTSFHLQKASVQ | CALDTNAYKVIF | GKGTHLHVL |
| 268 | | | LFINCTYS (SEQ ID | (SEQ ID | LLLK (SEQ ID | (SEQ ID | ESDSAVYF (SEQ ID NO: | (SEQ ID NO: | P (SEQ ID |
| | | | NO: 510) | NO: | NO: 22268) | NO: | 12382) | 25928) | NO: |
| | | | | 3478) | | 9054) | | | 16330) |
| Clonotype_ | 1 | TRB | GGIITQTPKFLIGQEGQK | FNHDT | MYWYRQDSGKGLR | SITEND | LQKGDLSEGYDASREKKSSFSLTVT | CASSITSANTEVFF | GKGTRLTVV |
| 269 | | | LTLKCQQN (SEQ ID | (SEQ ID | LIYY (SEQ ID | (SEQ ID | SAQKNEMAVFL (SEQ ID NO: | (SEQ ID NO: | (SEQ ID |
| | | | NO: 27) | NO: | NO: 5963) | NO: | 11899) | 25929) | NO: |
| | | | | 2995) | | 8931) | | | 16333) |
| Clonotype_ | 1 | TRA | GDSVTQTEGLVTLTEGLP | STYSPF | LFWYVQHLNEAPK | SFTDNKR | PEHQGFHATLHKSSSSFHLQKSSAQ | CADTGANTGKLTF | GHGTILRVH |
| 269 | | | VMLNCTYQ (SEQ ID | (SEQ ID | LLLK (SEQ ID | (SEQ ID | LSDSALYY (SEQ ID NO: | (SEQ ID NO: | P (SEQ ID |
| | | | NO: 46) | NO: 3040) | NO: 5944) | NO: 8950) | 11944) | 25930) | NO: |
| | | | | | | | | | 16356) |
| Clonotype_ | 1 | TRB | GGIITQTPKFLIGQEGQK | FNHDT | MYWYRQDSGKGLR | SITEND | LQKGDLSEGYDASREKKSSFSLTVT | CASSIRGWGTEVFF | GKGTRLTVV |
| 270 | | | LTLKCQQN (SEQ ID | (SEQ ID | LIYY (SEQ ID | (SEQ ID | SAQKNEMAVFL (SEQ ID NO: | (SEQ ID NO: | (SEQ ID |
| | | | NO: 27) | NO: | NO: 5963) | NO: | 11899) | 25931) | NO: |
| | | | | 2995) | | 8931) | | | 16333) |
| Clonotype_ | 1 | TRA | QQQVRQSPQSLTVWEGET | NSAFDY | FPWYQQFPGEGPA | IRSVSDK | KEDGRFTIFFNKREKKLSLHITDSQ | CAASGGGYQNFYF | GKGTSLTVI |
| 270 | | | AILNCSYE (SEQ ID | (SEQ ID | LLIA (SEQ ID | (SEQ ID | PGDSATYF (SEQ ID NO: | (SEQ ID NO: | P (SEQ ID |
| | | | NO: 68) | NO: 3052) | NO: 6020) | NO: 8988) | 11940) | 25932) | NO: 16366) |
| Clonotype_ | 1 | TRB | GGIITQTPKFLIGQEGQK | FNHDT | MYWYRQDSGKGLR | SITEND | LQKGDLSEGYDASREKKSSFSLTVT | CASSIEGRYTEVFF | GKGTRLTVV |
| 271 | | | LTLKCQQN (SEQ ID | (SEQ ID | LIYY (SEQ ID | (SEQ ID | SAQKNEMAVFL (SEQ ID NO: | (SEQ ID NO: | (SEQ ID |
| | | | NO: 27) | NO: 2995) | NO: 5963) | NO: 8931) | 11899) | 25933) | NO: 16333) |
| Clonotype_ | 1 | TRA | AQKVTQTQTSISVMEKTT | TQDSSYF | LFWYKQTASGEIV | QDSYKKE | ATVGHYSLNFQKPKSSIGLIITATQ | CAMREAGYQNFYF | GKGTSLTVI |
| 271 | | | VTMDCVYE (SEQ ID | (SEQ ID | FLIR (SEQ ID | N (SEQ | IEDSAVYF (SEQ ID NO: 11878) | (SEQ ID NO: | P (SEQ ID |
| | | | NO: 44) | NO: 3056) | NO: 5942) | ID NO: | | 25934) | NO: 16366) |
| | | | | | | 8910) | | | |
| Clonotype_ | 1 | TRB | GGIITQTPKFLIGQEGQK | FNHDT | MYWYRQDSGKGLR | SITEND | LQKGDLSEGYDASREKKSSFSLTVT | CASSIGGRDTQYF | GPGTRLLVL |
| 272 | | | LTLKCQQN (SEQ ID | (SEQ ID | LIYY (SEQ ID | (SEQ ID | SAQKNEMAVFL (SEQ ID NO: | (SEQ ID NO: | (SEQ ID |
| | | | NO: 27) | NO: | NO: 5963) | NO: | 11899) | 25935) | NO: |
| | | | | 2995) | | 8931) | | | 16341) |
| Clonotype_ | 1 | TRA | GDQVKQSPSALSLQEGTN | IATTT | VQWFLQNPRGSLM | LVPGT | KENGRLKSTFNSKESYSTLHIRDAQ | CAAGTDYANKMIF | GLGTILRVR |
| 272 | | | SALRCNFS (SEQ ID | (SEQ ID | NLFY (SEQ ID | (SEQ ID | LEDSGTYF (SEQ ID NO: | (SEQ ID NO: | P (SEQ ID |
| | | | NO: 258) | NO: | NO: 6194) | NO: | 12130) | 25936) | NO: |
| | | | | 3226) | | 9162) | | | 16416) |
| Clonotype_ | 1 | TRB | GGIITQTPKFLIGQEGQK | FNHDT | MYWYRQDSGKGLR | SITEND | LQKGDLSEGYDASREKKSSFSLTVT | CASSIGIYEQYF | GPGTRLTVL |
| 273 | | | LTLKCQQN (SEQ ID | (SEQ ID | LIYY (SEQ ID | (SEQ ID | SAQKNEMAVFL (SEQ ID NO: | (SEQ ID NO: | (SEQ ID |
| | | | NO: 27) | NO: | NO: 5963) | NO: | 11899) | 25937) | NO: |
| | | | | 2995) | | 8931) | | | 16327) |
| Clonotype_ | 1 | TRA | AQKVTQTQTSISVMEKTT | TQDSSYF | LFWYKQTASGEIV | QDSYKKE | ATVGHYSLNFQKPKSSIGLIITATQ | CAMRNSAGNKLTF | GIGTRVLVR |
| 273 | | | VTMDCVYE (SEQ ID | (SEQ ID | FLIR (SEQ ID | N (SEQ | IEDSAVYF (SEQ ID NO: 11878) | (SEQ ID NO: | P (SEQ ID |
| | | | NO: 44) | NO: 3056) | NO: 5942) | ID NO: | | 25938) | NO: |
| | | | | | | 8910) | | | 16580) |
| Clonotype_ | 1 | TRB | GGIITQTPKFLIGQEGQK | FNHDT | MYWYRQDSGKGLR | SITEND | LQKGDLSEGYDASREKKSSFSLTVT | CASSMRGGAEEQYF | GPGTRLTVL |
| 274 | | | LTLKCQQN (SEQ ID | (SEQ ID | LIYY (SEQ ID | (SEQ ID | SAQKNEMAVEL (SEQ ID NO: | (SEQ ID NO: | (SEQ ID |
| | | | NO: 27) | NO: 2995) | NO: 5963) | NO: 8931) | 11899) | 25939) | NO: |
| | | | | | | | | | 16327) |
| Clonotype_ | 1 | TRA | SQLAEENSWALSVHEGES | TSITA | LQWYRQKSGKGPA | IRSNERE | KRNGRLRATLDTSSQSSSLSITATR | CATENNMGYKLTF | GTGTSLLVD |
| 274 | | | VTVNCSYK (SEQ ID | (SEQ ID | QLIL (SEQ ID | (SEQ ID | CEDTAVYF (SEQ ID NO: | (SEQ ID NO: | P (SEQ ID |
| | | | NO: 188) | NO: | NO: 6124) | NO: | 11896) | 25940) | NO: |
| | | | | 2992) | | 8928) | | | 16398) |
| Clonotype_ | 1 | TRB | GGIITQTPKFLIGQEGQK | FNHDT | MYWYRQDSGKGLR | SITEND | LQKGDLSEGYDASREKKSSFSLTVT | CASSMGTKEVFF | GKGTRLTVV |
| 275 | | | LTLKCQQN (SEQ ID | (SEQ ID | LIYY (SEQ ID | (SEQ ID | SAQKNEMAVFL (SEQ ID NO: | (SEQ ID NO: | (SEQ ID |
| | | | NO: 27) | NO: | NO: 5963) | NO: | 11899) | 25941) | NO: |
| | | | | 2995) | | 8931) | | | 16333) |
| Clonotype_ | 1 | TRA | AQKVTQTQTSISVMEKTT | TQDSSYF | LFWYKQTASGEIV | QDSYKKE | ATVGHYSLNFQKPKSSIGLIITATQ | CAMKEDTNTGKLTF | GDGTVLTVK |
| 275 | | | VTMDCVYE (SEQ ID | (SEQ ID | FLIR (SEQ ID | N (SEQ | IEDSAVYF (SEQ ID NO: | (SEQ ID NO: | P (SEQ ID |
| | | | NO: 44) | NO: | NO: 5942) | ID NO: | 11878) | 25942) | NO: |
| | | | | 3056) | | 8910) | | | 16516) |
| Clonotype_ | 1 | TRB | GGIITQTPKFLIGQEGQK | FNHDT | MYWYRQDSGKGLR | SITEND | LQKGDLSEGYDASREKKSSFSLTVT | CASSMGTGVAEQFF | GPGTRLTVL |
| 276 | | | LTLKCQQN (SEQ ID | (SEQ ID | LIYY (SEQ ID | (SEQ ID | SAQKNEMAVFL (SEQ ID NO: | (SEQ ID NO: | (SEQ ID |
| | | | NO: 27) | NO: | NO: 5963) | NO: | 11899) | 25943) | NO: |
| | | | | 2995) | | 8931) | | | 16327) |
| Clonotype_ | 1 | TRA | AQSVDQPDAHVTLYEGAS | YSAAPY | LFWYVQYPGQSLQ | YITGDAV | KGTKGFEAEFRKSNSSFNLKKSPAH | CALEGRNSGGSNYK | GKGTLLTVT |
| 276 | | | LELRCSYS (SEQ ID | (SEQ ID | FLLK (SEQ ID | V (SEQ | WSDSAKYF (SEQ ID NO: | LTF (SEQ ID NO: | P (SEQ ID |
| | | | NO: 398) | NO: | NO: 6216) | ID NO: | 12152) | 15238) | NO: |
| | | | | 3248) | | 9302) | | | 16642) |
| Clonotype_ | 1 | TRB | GGIITQTPKFLIGQEGQK | FNHDT (S) | MYWYRQDSGKGLR | SITEND | LQKGDLSEGYDASREKKSSFSLTVT | CASSMGANSDYTF | GSGTRLLVI |
| 277 | | | LTLKCQQN (SEQ ID | (SEQ ID | LIYY (SEQ ID | (SEQ ID | SAQKNEMAVEL (SEQ ID NO: | (SEQ ID NO: | (SEQ ID |
| | | | NO: 27) | NO: | NO: 5963) | NO: | 11899) | 25945) | NO: |
| | | | | 2995) | | 8931) | | | 16337) |
| Clonotype_ | 1 | TRA | GEKVEQHESTLSVREGDS | DTASSY | FPWYKQEAGKGLH | IRSNVDR | KQSQRLIVLLDKKAKRFSLHITATQ | CAASTRGGSNYKLT | GKGTLLTVT |
| 277 | | | AVINCTYT (SEQ ID | (SEQ ID | FVID (SEQ ID | (SEQ ID | PEDSAIYF (SEQ ID NO: | F (SEQ ID NO: | P (SEQ ID |
| | | | NO: 54) | NO: 3022) | NO: 5994) | NO: 8958) | 11926) | 25946) | NO: 16642) |
| Clonotype_ | 1 | TRB | GGIITQTPKFLIGQEGQK | FNHDT | MYWYRQDSGKGLR | SITEND | LQKGDLSEGYDASREKKSSFSLTVT | CASSMGGATEVFF | GKGTRLTVV |
| 278 | | | LTLKCQQN (SEQ ID | (SEQ ID | LIYY (SEQ ID | (SEQ ID | SAQKNEMAVFL (SEQ ID NO: | (SEQ ID NO: | (SEQ ID |
| | | | NO: 27) | NO: | NO: 5963) | NO: | 11899) | 25947) | NO: |
| | | | | 2995) | | 8931) | | | 16333) |
| Clonotype_ | 1 | TRA | GEKVEQHESTLSVREGDS | DTASSY | FPWYKQEAGKGLH | IRSNVDR | KQSQRLIVLLDKKAKRFSLHITATQ | CAASRSGGSNYKLT | GKGTLLTVT |
| 278 | | | AVINCTYT (SEQ ID | (SEQ ID | FVID (SEQ ID | (SEQ ID | PEDSAIYF (SEQ ID NO: | F (SEQ ID NO: | P (SEQ ID |
| | | | NO: 54) | NO: 3022) | NO: 5994) | NO: 8958) | 11926) | 25948) | NO: |
| | | | | | | | | | 16642) |
| Clonotype_ | 1 | TRB | GGIITQTPKFLIGQEGQK | FNHDT | MYWYRQDSGKGLR | SITEND | LQKGDLSEGYDASREKKSSFSLTVT | CASSMVGNTGQLYF | GEGSKLTVL |
| 279 | | | LTLKCQQN (SEQ ID | (SEQ ID | LIYY (SEQ ID | (SEQ ID | SAQKNEMAVFL (SEQ ID NO: | (SEQ ID NO: | (SEQ ID |
| | | | NO: 27) | NO: 2995) | NO: 5963) | NO: 8931) | 11899) | 25949) | NO: |
| | | | | | | | | | 16347) |
| Clonotype_ | 1 | TRA | QQQVRQSPQSLTVWEGET | DSTFDY | FPWYRLFPGESPA | IRPVSNK | KEDGRFTIFFNKREKKLSLHITDSQ | CAAPTGANTGKLTF | GHGTILRVH |
| 279 | | | AILNCSYE (SEQ ID | (SEQ ID | LLIA (SEQ ID | (SEQ ID | PGDSATYF (SEQ ID NO: | (SEQ ID NO: | P (SEQ ID |
| | | | NO: 68) | NO: | NO: 6176) | NO: | 11940) | 25950) | NO: |
| | | | | 3208) | | 9144) | | | 16356) |
| Clonotype_ | 1 | TRB | GGIITQTPKFLIGQEGQK | FNHDT | MYWYRQDSGKGLR | SITEND | LQKGDLSEGYDASREKKSSFSLTVT | CASSMSGTEVFF | GKGTRLTVV |
| 280 | | | LTLKCQQN (SEQ ID | (SEQ ID | LIYY (SEQ ID | (SEQ ID | SAQKNEMAVFL (SEQ ID NO: | (SEQ ID NO: | (SEQ ID |
| | | | NO: 27) | NO: 2995) | NO: 5963) | NO: 8931) | 11899) | 25951) | NO: |
| | | | | | | | | | 16333) |
| Clonotype_ | 1 | TRA | GDSVTQTEGQVTVSESKS | ATSIAYP | LFWYVRYPGEGLQ | VITAGQK | GSSRGFEATYNKETTSFHLQKASVQ | CALRANSGGSNAKL | GKGTKLSVK |
| 280 | | | LIINCTYS (SEQ ID | N (SEQ | LLLK (SEQ ID | (SEQ ID | ESDSAVYY (SEQ ID NO: | TF (SEQ ID NO: | S (SEQ ID |
| | | | NO: 60) | ID NO: | NO: 5996) | NO: | 11932) | 25952) | NO: |
| | | | | 3098) | | 8964) | | | 16342) |
| Clonotype_ | 1 | TRB | GGIITQTPKFLIGQEGQK | FNHDT | MYWYRQDSGKGLR | SITEND | LQKGDLSEGYDASREKKSSFSLTVT | CASSMWDTSEVFF | GKGTRLTVV |
| 281 | | | LTLKCQQN (SEQ ID | (SEQ ID | LIYY (SEQ ID | (SEQ ID | SAQKNEMAVFL (SEQ ID NO: | (SEQ ID NO: | (SEQ ID |
| | | | NO: 27) | NO: | NO: 5963) | NO: | 11899) | 25953) | NO: |
| | | | | 2995) | | 8931) | | | 16333) |
| Clonotype_ | 1 | TRA | GDSVTQTEGQVTVSESKS | TTSIAYP | LFWYVRYPGEGLQ | VITAGQK | GSSRGFEATYNKETTSFHLQKASVQ | CALGNSGGSNYKLT | GKGTLLTVT |
| 281 | | | LIINCTYS (SEQ ID | N (SEQ | LLLK (SEQ ID | (SEQ ID | ESDSAVYY (SEQ ID NO: | F (SEQ ID NO: | P (SEQ ID |
| | | | NO: 60) | ID NO: | NO: 5996) | NO: | 11932) | 25954) | NO: |
| | | | | 3028) | | 8964) | | | 16642) |
| Clonotype_ | 1 | TRB | GGIITQTPKFLIGQEGQK | FNHDT | MYWYRQDSGKGLR | SITEND | LQKGDLSEGYDASREKKSSFSLTVT | CASSITGTNTGQLY | GEGSKLTVL |
| 282 | | | LTLKCQQN (SEQ ID | (SEQ ID | LIYY (SEQ ID | (SEQ ID | SAQKNEMAVFL (SEQ ID NO: | F (SEQ ID NO: | (SEQ ID |
| | | | NO: 27) | NO: | NO: 5963) | NO: | 11899) | 25955) | NO: |
| | | | | 2995) | | 8931) | | | 16347) |
| Clonotype_ | 1 | TRA | GEQVEQRPPHLSVREGDS | DPNSYY | FFWYKQEPGASLQ | VFSSTEI | NEGQGFTVLLNKKDKRLSLNLTAAH | CAVSAYGNEKITF | GAGTKLTIK |
| 282 | | | AVITCTYT (SEQ ID | (SEQ ID | LLMK (SEQ ID | (SEQ ID | PGDSAAYF (SEQ ID NO: | (SEQ ID NO: | P (SEQ ID |
| | | | NO: 42) | NO: | NO: 5978) | NO: | 11914) | 25956) | NO: |
| | | | | 3010) | | 8946) | | | 16512) |
| Clonotype_ | 1 | TRB | GGIITQTPKFLIGQEGQK | FNHDT | MYWYRQDSGKGLR | SITEND | LQKGDLSEGYDASREKKSSFSLTVT | CASSISERLFF | GHGTKLSVL |
| 283 | | | LTLKCQQN (SEQ ID | (SEQ ID | LIYY (SEQ ID | (SEQ ID | SAQKNEMAVFL (SEQ ID NO: | (SEQ ID NO: | (SEQ ID |
| | | | NO: 27) | NO: | NO: 5963) | NO: | 11899) | 25957) | NO: |
| | | | | 2995) | | 8931) | | | 16401) |
| Clonotype_ | 1 | TRA | QQKVQQSPESLSVPEGGM | DRNFQY | FWWYRQHSGEGPK | IFSDGD | KKEGRFTAHLNKASLHVSLHIRDSQ | CAAPANYGNEKITF | GAGTKLTIK |
| 283 | | | ASFNCTSS (SEQ ID | (SEQ ID | ALMS (SEQ ID | (SEQ ID | PSDSALYF (SEQ ID NO: | (SEQ ID NO: | P (SEQ ID |
| | | | NO: 2) | NO: | NO: 5938) | NO: | 11874) | 25958) | NO: |
| | | | | 2970) | | 8906) | | | 16512) |
| Clonotype_ | 1 | TRB | GGIITQTPKFLIGQEGQK | FNHDT | MYWYRQDSGKGLR | SITEND | LQKGDLSEGYDASREKKSSFSLTVT | CASSIGNNQDTQYF | GPGTRLLVL |
| 284 | | | LTLKCQQN (SEQ ID | (SEQ ID | LIYY (SEQ ID | (SEQ ID | SAQKNEMAVFL (SEQ ID NO: | (SEQ ID NO: | (SEQ ID |
| | | | NO: 27) | NO: | NO: 5963) | NO: | 11899) | 25959) | NO: |
| | | | | 2995) | | 8931) | | | 16341) |
| Clonotype_ | 1 | TRA | AQSVTQPDARVTVSEGAS | YSGTPY | LFWYVQYPRQGLQ | YYSGDPV | GVNGFEAEFSKSNSSFHLRKASVH | CVLSASNNRIFF | GDGTQLVVK |
| 284 | | | LQLRCKYS (SEQ ID | (SEQ ID | LLLK (SEQ ID | V (SEQ | WSDSAVYF (SEQ ID NO: | (SEQ ID NO: | P (SEQ ID |
| | | | NO: 12) | NO: | NO: 5948) | ID NO: | 11892) | 16320) | NO: |
| | | | | 3054) | | 8916) | | | 16328) |
| Clonotype_ | 1 | TRB | GGIITQTPKFLIGQEGQK | FNHDT | MYWYRQDSGKGLR | SITEND | LQKGDLSEGYDASREKKSSFSLTVT | CASSIGTAYEQYF | GPGTRLTVL |
| 285 | | | LTLKCQQN (SEQ ID | (SEQ ID | LIYY (SEQ ID | (SEQ ID | SAQKNEMAVFL (SEQ ID NO: | (SEQ ID NO: | (SEQ ID |
| | | | NO: 27) | NO: | NO: 5963) | NO: | 11899) | 25961) | NO: |
| | | | | 2995) | | 8931) | | | 16327) |
| Clonotype_ | 1 | TRA | GDSVTQKQGQVTLSEDDF | TTTYPT | LFWYVQYPGQGPQ | VTTANNK | GISRGFEATYDKGTTSFHLQKASVQ | CALNYGNEKITF | GAGTKLTIK |
| 285 | | | LFINCTYS (SEQ ID | (SEQ ID | LLLK (SEQ ID | (SEQ ID | ESDSAVYF (SEQ ID NO: | (SEQ ID NO: | P (SEQ ID |
| | | | NO: 510) | NO: 3478) | NO: 6446) | NO: 9054) | 12382) | 25962) | NO: |
| | | | | | | | | | 16512) |
| Clonotype_ | 1 | TRB | GGIITQTPKFLIGQEGQK | FNHDT | MYWYRQDSGKGLR | SITEND | LQKGDLSEGYDASREKKSSFSLTVT | CASSILGDQDTQYF | GPGTRLLVL |
| 286 | | | LTLKCQQN (SEQ ID | (SEQ ID | LIYY (SEQ ID | (SEQ ID | SAQKNEMAVFL (SEQ ID NO: | (SEQ ID NO: | (SEQ ID |
| | | | NO: 27) | NO: | NO: 5963) | NO: | 11899) | 25963) | NO: |
| | | | | 2995) | | 8931) | | | 16341) |
| Clonotype_ | 1 | TRA | TQTVSQSDAHVTVFEGDS | YGGSTY | ILSWYIQHHGRGLQ | YYSGNPV | GVNGFEAEFSKSDSSFHLRKASVH | CAVSASGSWQLIF | GSGTQLTVM |
| 286 | | | VELRCNYS (SEQ ID | (SEQ ID | FLLK (SEQ ID | V (SEQ | WSDSAVYF (SEQ ID NO: | (SEQ ID NO: | P (SEQ ID |
| | | | NO: 110) | NO: | NO: 6046) | ID NO: | 11946) | 25964) | NO: |
| | | | | 3078) | | 9014) | | | 16400) |
| Clonotype_ | 1 | TRB | GGIITQTPKFLIGQEGQK | FNHDT | MYWYRQDSGKGLR | SITEND | LQKGDLSEGYDASREKKSSFSLTVT | CASSHWGGDTGQLY | GEGSKLTVL |
| 287 | | | LTLKCQQN (SEQ ID | (SEQ ID | LIYY (SEQ ID | (SEQ ID | SAQKNEMAVFL (SEQ ID NO: | F (SEQ ID NO: | (SEQ ID |
| | | | NO: 27) | NO: 2995) | NO: 5963) | NO: 8931) | 11899) | 25965) | NO: |
| | | | | | | | | | 16347) |
| Clonotype_ | 1 | TRA | TQTVSQSDAHVTVFEGDS | YGGSIY | LSWYIQHHGHGLQ | YYSGNPV | GVNGFEAEFSKSDSSFHLRKASVH | CAVSAEESNYQLIW | GSGTKLIIK |
| 287 | | | VELRCNYS (SEQ ID | (SEQ ID | FLLK (SEQ ID | V (SEQ | WSDSAVYF (SEQ ID NO: | (SEQ ID NO: | P (SEQ ID |
| | | | NO: 110) | NO: | NO: 6518) | ID NO: | 11946) | 25966) | NO: |
| | | | | 3078) | | 9014) | | | 16372) |
| Clonotype_ | 1 | TRB | GGIITQTPKFLIGQEGQK | FNHDT | MYWYRQDSGKGLR | SITEND | LQKGDLSEGYDASREKKSSFSLTVT | CASSPTGRDEQYF | GPGTRLTVL |
| 288 | | | LTLKCQQN (SEQ ID | (SEQ ID | LIYY (SEQ ID | (SEQ ID | SAQKNEMAVFL (SEQ ID NO: | (SEQ ID NO: | (SEQ ID |
| | | | NO: 27) | NO: | NO: 5963) | NO: | 11899) | 25967) | NO: |
| | | | | 2995) | | 8931) | | | 16327) |
| Clonotype_ | 1 | TRA | GEQVEQLPSSLIVQEGAS | DSASVY | FPWYKQEPGKRLQ | IRSNMER | KQNQRLTLLFDKKTKHLSLHITATQ | CSATFNTDKVVF | GTGTRLQVS |
| 288 | | | VLINCSYT (SEQ ID | (SEQ ID | FIID (SEQ ID | (SEQ ID | PGDSAIYF (SEQ ID NO: | (SEQ ID NO: | P (SEQ ID |
| | | | NO: 160) | NO: | NO: 6096) | NO: | 12032) | 25968) | NO: |
| | | | | 3128) | | 8952) | | | 16374) |
| Clonotype_ | 1 | TRB | GGIITQTPKFLIGQEGQK | FNHDT | LIYY | SITEND | LQKGDLSEGYDASREKKSSFSLTVT | CASSRGTGGPEQFF | GPGTRLTVL |
| 289 | | | LTLKCQQN (SEQ ID | (SEQ ID | (SEQ ID | (SEQ ID | SAQKNEMAVFL (SEQ ID NO: | (SEQ ID NO: | (SEQ ID |
| | | | NO: 27) | NO: | NO: 5963) | NO: | 11899) | 25969) | NO: 16327) |
| | | | | 2995) | MYWYRQDSGKGLR | 8931) | | | |
| Clonotype_ | 1 | TRA | LAKTTQPPSMEAYEGQEV | NIATSEY | IYWYRQVPHQGPQ | GYKDYVV | NEVASLFISADRKLSTLSLPWVSLR | CIVTDIGNYAQGLT | GLGTRVSVF |
| 289 | | | NVSCSHT (SEQ ID NO: | (SEQ ID | FIIQ (SEQ ID | (SEQ ID | DAAVYY (SEQ ID NO: 11978) | F (SEQ ID NO: | P (SEQ ID |
| | | | 106) | NO: 3074) | NO: 6042) | NO: 9010) | | 25970) | NO: |
| | | | | | | | | | 16344) |
| Clonotype_ | 1 | TRB | GGIITQTPKFLIGQEGQK | FNHDT | MYWYRQDSGKGLR | SITEND | LQKGDLSEGYDASREKKSSFSLTVT | CASSLSTYNSPLYF | AAGTRLTVT |
| 290 | | | LTLKCQQN (SEQ ID | (SEQ ID | LIYY (SEQ ID | (SEQ ID | SAQKNEMAVFL (SEQ ID NO: | (SEQ ID NO: | (SEQ ID |
| | | | NO: 27) | NO: | NO: 5963) | NO: | 11899) | 25971) | NO: |
| | | | | 2995) | | 8931) | | | 16381) |
| Clonotype_ | 1 | TRA | QQKVQQSPESLIVPEGGM | DRNVDY | FWWYRQHSGKSPK | IFSNGE | KEEGRFTVHLNKASLHTSLHIRDSQ | CAASGKSNNRIFF | GDGTQLVVK |
| 290 | | | ASLNCTSS (SEQ ID | (SEQ ID | MLMS (SEQ ID | (SEQ ID | PSDSALYL (SEQ ID NO: | (SEQ ID NO: | P (SEQ ID |
| | | | NO: 28) | NO: | NO: 5964) | NO: | 11900) | 25972) | NO: |
| | | | | 2996) | | 8932) | | | 16328) |
| Clonotype_ | 1 | TRB | GGIITQTPKFLIGQEGQK | FNHDT | MYWYRQDSGKGLR | SITEND | LQKGDLSEGYDASREKKSSFSLTVT | CASSEDSYAEQFF | GPGTRLTVL |
| 291 | | | LTLKCQQN (SEQ ID | (SEQ ID | LIYY (SEQ ID | (SEQ ID | SAQKNEMAVFL (SEQ ID NO: | (SEQ ID NO: | (SEQ ID |
| | | | NO: 27) | NO: | NO: 5963) | NO: | 11899) | 25973) | NO: |
| | | | | 2995) | | 8931) | | | 16327) |
| Clonotype_ | 1 | TRA | GDSVIQMQGQVTLSENDF | TTGYPT | LFWYVQYSGEGPQ | VTTANNK | GSSRGFEATYDKGTTSFHLQKTSVQ | CAMRVGGSNAKLTF | GKGTKLSVK |
| 291 | | | LFINCTYS (SEQ ID | (SEQ ID | LLLQ (SEQ ID | (SEQ ID | EIDSAVYY (SEQ ID NO: | (SEQ ID NO: | S (SEQ ID |
| | | | NO: 456) | NO: | NO: 6392) | NO: | 12328) | 25974) | NO: |
| | | | | 3220) | | 9054) | | | 16342) |
| Clonotype_ | 1 | TRB | GGIITQTPKFLIGQEGQK | FNHDT | MYWYRQDSGKGLR | SITEND | LQKGDLSEGYDASREKKSSFSLTVT | CASSGVGADTQYF | GPGTRLLVL |
| 292 | | | LTLKCQQN (SEQ ID | (SEQ ID | LIYY (SEQ ID | (SEQ ID | SAQKNEMAVFL (SEQ ID NO: | (SEQ ID NO: | (SEQ ID |
| | | | NO: 27) | NO: | NO: 5963) | NO: | 11899) | 25975) | NO: |
| | | | | 2995) | | 8931) | | | 16341) |
| Clonotype_ | 1 | TRA | QQQVRQSPQSLTVWEGET | DSTFNY | FPWYQQFPGEGPA | IRSVSDK | KEDGRFTIFFNKREKKLSLHITDSQ | CAASESSGSWQLIF | GSGTQLTVM |
| 292 | | | AILNCSYE (SEQ ID | (SEQ ID | LLIS (SEQ ID | (SEQ ID | PGDSATYF (SEQ ID NO: | (SEQ ID NO: | P (SEQ ID |
| | | | NO: 68) | NO: | NO: 6004) | NO: | 11940) | 25976) | NO: |
| | | | | 3036) | | 8988) | | | 16400) |
| Clonotype_ | 1 | TRB | GGIITQTPKFLIGQEGQK | FNHDT | MYWYRQDSGKGLR | SITEND | LQKGDLSEGYDASREKKSSFSLTVT | CASSWEGTGQLYF | GEGSKLTVL |
| 293 | | | LTLKCQQN (SEQ ID | (SEQ ID | LIYY (SEQ ID | (SEQ ID | SAQKNEMAVFL (SEQ ID NO: | (SEQ ID NO: | (SEQ ID |
| | | | NO: 27) | NO: | NO: 5963) | NO: | 11899) | 25977) | NO: |
| | | | | 2995) | | 8931) | | | 16347) |
| Clonotype_ | 1 | TRA | GDSVTQTEGLVTLTKGLP | TTYSPF | LFWYVQHLNEAPK | SSTDNKR | TEHQGFYATLHKSSSSFHLQKSSVQ | CALSDQTGFASALT | GSGTKVIVL |
| 293 | | | VMLNCTYQ (SEQ ID | (SEQ ID | LLLK (SEQ ID | (SEQ ID | LSDSALYF (SEQ ID NO: | F (SEQ ID NO: | PY (SEQ ID |
| | | | NO: 8) | NO: | NO: 5944) | NO: | 11880) | 25978) | NO: |
| | | | | 2976) | | 8912) | | | 17004) |
| Clonotype_ | 1 | TRB | VTLLEQNPRWRLVPRGQA | NSQYPW | MSWYQQDLQKQLQ | LRSPGD | KEVKSLPGADYLATRVTDTELRLQV | CTCRRDRDYAEQFF | GPGTRLTVL |
| 294 | | | VNLRCILK (SEQ ID | (SEQ ID | WLFT (SEQ ID | (SEQ ID | ANMSQGRTLY (SEQ ID NO: | (SEQ ID NO: | (SEQ ID |
| | | | NO: 23) | NO: | NO: 5959) | NO: | 11895) | 25979) | NO: |
| | | | | 2991) | | 8927) | | | 16327) |
| Clonotype_ | 1 | TRA | LAKTTQPPSMEAYEGQEV | NIATSEY | FIIQ (SEQ ID | GYKDYVV | NEVASLFISADRKLSTLSLPWVSLR | CIVTGDDSGYNKLT | GKGTVLLVS |
| 294 | | | NVSCSHT (SEQ ID NO: | (SEQ ID | IYWYRQVPHQGPQ | (SEQ ID | DAAVYY (SEQ ID NO: 11978) | F (SEQ ID NO: | P (SEQ ID |
| | | | 106) | NO: | NO: 6042) | NO: | | 25980) | NO: |
| | | | | 3074) | | 9010) | | | 16378) |
| Clonotype_ | 1 | TRB | VTLLEQNPRWRLVPRGQA | NSQYPW | MSWYQQDLQKQLQ | LRSPGD | KEVKSLPGADYLATRVTDTELRLQV | CTCSADRDWGGYNY | GPGTRLTVL |
| 295 | | | VNLRCILK (SEQ ID | (SEQ ID | WLFT (SEQ ID | (SEQ ID | ANMSQGRTLY (SEQ ID NO: | AEQFF (SEQ ID | (SEQ ID |
| | | | NO: 23) | NO: 2991) | NO: 5959) | NO: 8927) | 11895) | NO: 25981) | NO: 16327) |
| Clonotype_ | 1 | TRA | GEQVEQRPPHLSVREGDS | DPNSYY | FFWYKQEPGAGLQ | VFSSTEI | NEGQGFTVLLNKKDKQLSLNLTAAH | CAVSDHSNNRIFF | GDGTQLVVK |
| 295 | | | AVIICTYT (SEQ ID | (SEQ ID | LLMK (SEQ ID | (SEQ ID | PGDSAVYF (SEQ ID NO: | (SEQ ID NO: | P (SEQ ID |
| | | | NO: 108) | NO: | NO: 6044) | NO: | 11980) | 25982) | NO: |
| | | | | 3010) | | 8946) | | | 16328) |
| Clonotype_ | 1 | TRB | VTLLEQNPRWRLVPRGQA | NSQYPW | MSWYQQDLQKQLQ | LRSPGD | KEVKSLPGADYLATRVTDTELRLQV | CTCSADRDRYAEQF | GPGTRLTVL |
| 296 | | | VNLRCILK (SEQ ID | (SEQ ID | WLFT (SEQ ID | (SEQ ID | ANMSQGRTLY (SEQ ID NO: | F (SEQ ID NO: | (SEQ ID |
| | | | NO: 23) | NO: | NO: 5959) | NO: 8927) | 11895) | 25983) | NO: 16327) |
| | | | | 2991) | | | | | |
| Clonotype_ | 1 | TRA | AQKVTQTQTSISVMEKTT | TQDSSYF | LFWYKQTASGEIV | QDSYKKE | ATVGHYSLNFQKPKSSIGLIITATQ | CAMRDTGYQNFYF | GKGTSLTVI |
| 296 | | | VTMDCVYE (SEQ ID | (SEQ ID | FLIR (SEQ ID | N (SEQ | IEDSAVYF (SEQ ID NO: | (SEQ ID NO: | P (SEQ ID |
| | | | NO: 44) | NO: | NO: 5942) | ID NO: | 11878) | 25984) | NO: |
| | | | | 3056) | | 8910) | | | 16366) |
| Clonotype_ | 1 | TRB | VTLLEQNPRWRLVPRGQA | NSQYPW | MSWYQQDLQKQLQ | LRSPGD | KEVKSLPGADYLATRVTDTELRLQV | CTCSADFERLFF | GHGTKLSVL |
| 297 | | | VNLRCILK (SEQ ID | (SEQ ID | WLFT (SEQ ID | (SEQ ID | ANMSQGRTLY (SEQ ID NO: | (SEQ ID NO: | (SEQ ID |
| | | | NO: 23) | NO: | NO: 5959) | NO: 8927) | 11895) | 25985) | NO: 16401) |
| | | | | 2991) | | | | | |
| Clonotype_ | 1 | TRA | AQSVTQPDARVTVSEGAS | YSATPY | LFWYVQYPRQGLQ | YYSGDPV | GVNGFEAEFSKSNSSFHLRKASVH | CAGDTNAYKVIF | GKGTHLHVL |
| 297 | | | LQLRCKYS (SEQ ID | (SEQ ID | LLLK (SEQ ID | V (SEQ | WSDSAVYF (SEQ ID NO: | (SEQ ID NO: | P (SEQ ID |
| | | | NO: 12) | NO: | NO: 5948) | ID NO: | 11892) | 25986) | NO: |
| | | | | 2980) | | 8916) | | | 16330) |
| Clonotype_ | 1 | TRB | VTLLEQNPRWRLVPRGQA | NSQYPW | MSWYQQDLQKQLQ | LRSPGD | KEVKSLPGADYLATRVTDTELRLQV | CTCSAGDNSYNSPL | AAGTRLTVT |
| 298 | | | VNLRCILK (SEQ ID | (SEQ ID | WLFT (SEQ ID | (SEQ ID | ANMSQGRTLY (SEQ ID NO: | YF (SEQ ID NO: | (SEQ ID |
| | | | NO: 23) | NO: | NO: 5959) | NO: 8927) | 11895) | 25987) | NO: 16381) |
| | | | | 2991) | | | | | |
| Clonotype_ | 1 | TRA | GDSVTQTEGLVTLTEGLP | STYSPF | LFWYVQHLNEAPK | SFTDNKR | PEHQGFHATLHKSSSSFHLQKSSAQ | CAANYNQGKLIF | GQGTKLSIK |
| 298 | | | VMLNCTYQ (SEQ ID | (SEQ ID | LLLK (SEQ ID | (SEQ ID | LSDSALYY (SEQ ID NO: | (SEQ ID NO: | P (SEQ ID |
| | | | NO: 46) | NO: | NO: 5944) | NO: | 11944) | 25988) | NO: |
| | | | | 3040) | | 8950) | | | 16332) |
| Clonotype_ | 1 | TRB | VTLLEQNPRWRLVPRGQA | NSQYPW | MSWYQQDLQKQLQ | LRSPGD | KEVKSLPGADYLATRVTDTELRLQV | CTCSAGGADAEQFF | GPGTRLTVL |
| 299 | | | VNLRCILK (SEQ ID | (SEQ ID | WLFT (SEQ ID | (SEQ ID | ANMSQGRTLY (SEQ ID NO: | (SEQ ID NO: | (SEQ ID |
| | | | NO: 23) | NO: | NO: 5959) | NO: 8927) | 11895) | 25989) | NO: 16327) |
| | | | | 2991) | | | | | |
| Clonotype_ | 1 | TRA | LAKTTQPPSMEAYEGQEV | NIATSEY | TYWYRQVPHQGPQ | GYKDYVV | NEVASLFISADRKLSTLSLPWVSLR | CIVTANNRIFF | GDGTQLVVK |
| 299 | | | NVSCSHT (SEQ ID NO: | (SEQ ID | FIIQ (SEQ ID | (SEQ ID | DAAVYY (SEQ ID NO: 11978) | (SEQ ID NO: | P (SEQ ID |
| | | | 106) | NO: 3074) | NO: 6042) | NO: 9010) | | 25990) | NO: |
| | | | | | | | | | 16328) |
| Clonotype_ | 1 | TRB | VTLLEQNPRWRLVPRGQA | NSQYPW | MSWYQQDLQKQLQ | LRSPGD | KEVKSLPGADYLATRVTDTELRLQV | CTCSAGQNQAPLF | GEGTRLSVL |
| 300 | | | VNLRCILK (SEQ ID | (SEQ ID | WLFT (SEQ ID | (SEQ ID | ANMSQGRTLY (SEQ ID NO: | (SEQ ID NO: | (SEQ ID |
| | | | NO: 23) | NO: | NO: 5959) | NO: 8927) | 11895) | 25991) | NO: 16441) |
| | | | | 2991) | | | | | |
| Clonotype_ | 1 | TRA | GEQVEQRPPHLSVPEGDS | DSATAY | FYWYKQEPGAGLQ | VFSNVDR | KEEQGLTVLLNKKDKQLSLNLTAAH | CAVSYTGGADRLTF | GKGTQLIIQ |
| 300 | | | AVIICTYT (SEQ ID | (SEQ ID | LLMS (SEQ ID | (SEQ ID | PGDSAVYF (SEQ ID NO: | (SEQ ID NO: | P (SEQ ID |
| | | | NO: 100) | NO: | NO: 6036) | NO: | 11972) | 25992) | NO: |
| | | | | 2990) | | 9004) | | | 16360) |
| Clonotype_ | 1 | TRB | VTLLEQNPRWRLVPRGQA | NSQYPW | MSWYQQDLQKQLQ | LRSPGD | KEVKSLPGADYLATRVTDTELRLQV | CTCSASSGGKDTQY | GPGTRLLVL |
| 301 | | | VNLRCILK (SEQ ID | (SEQ ID | WLFT (SEQ ID | (SEQ ID | ANMSQGRTLY (SEQ ID NO: | F (SEQ ID NO: | (SEQ ID |
| | | | NO: 23) | NO: | NO: 5959) | NO: | 11895) | 25993) | NO: |
| | | | | 2991) | | 8927) | | | 16341) |
| Clonotype_ | 1 | TRA | SQLAEENSWALSVHEGES | TSITA | LQWYRQKSGKGPA | IRSNERE | KRNGRLRATLDTSSQSSSLSITATR | CDTNAYKVIF (SEQ | GKGTHLHVL |
| 301 | | | VTVNCSYK (SEQ ID | (SEQ ID | QLIL (SEQ ID | (SEQ ID | CEDTAVYF (SEQ ID NO: | ID NO: 25994) | P (SEQ ID |
| | | | NO: 188) | NO: | NO: 6124) | NO: | 11896) | | NO: |
| | | | | 2992) | | 8928) | | | 16330) |
| Clonotype_ | 1 | TRB | VTLLEQNPRWRLVPRGQA | NSQYPW | MSWYQQDLQKQLQ | LRSPGD | KEVKSLPGADYLATRVTDTELRLQV | CTCSAGQANSDYTF | GSGTRLLVI |
| 302 | | | VNLRCILK (SEQ ID | (SEQ ID | WLFT (SEQ ID | (SEQ ID | ANMSQGRTLY (SEQ ID NO: | (SEQ ID NO: | (SEQ ID |
| | | | NO: 23) | NO: | NO: 5959) | NO: | 11895) | 25995) | NO: |
| | | | | 2991) | | 8927) | | | 16337) |
| Clonotype_ | 1 | TRA | QQQVRQSPQSLTVWEGET | DSTFNY | FPWYQQFPGEGPA | IRSVSDK | KEDGRFTIFFNKREKKLSLHITDSQ | CAARLTGNTRKLIF | GLGTTLQVQ |
| 302 | | | AILNCSYE (SEQ ID | (SEQ ID | LLIS (SEQ ID | (SEQ ID | PGDSATYF (SEQ ID NO: | (SEQ ID NO: | P (SEQ ID |
| | | | NO: 68) | NO: | NO: 6004) | NO: | 11940) | 25996) | NO: 16326) |
| | | | | 3036) | | 8988) | | | |
| Clonotype_ | 1 | TRB | VTLLEQNPRWRLVPRGQA | NSQYPW | MSWYQQDLQKQLQ | LRSPGD | KEVKSLPGADYLATRVTDTELRLQV | CTCSAGLGDAEQFF | GPGTRLTVL |
| 303 | | | VNLRCILK (SEQ ID | (SEQ ID | WLFT (SEQ ID | (SEQ ID | ANMSQGRTLY (SEQ ID NO: | (SEQ ID NO: | (SEQ ID |
| | | | NO: 23) | NO: | NO: 5959) | NO: | 11895) | 25997) | NO: |
| | | | | 2991) | | 8927) | | | 16327) |
| Clonotype_ | | TRA | SQLAEENLWALSVHEGES | TSITA | LQWYRQKSGEGPA | IRSNERE | KRNGRLRATLDTSSQSSSLSITATR | CATSSGQKLVF | GQGTILKVY |
| 303 | | | VTVNCSYK (SEQ ID | (SEQ ID | QLIL (SEQ ID | (SEQ ID | CEDTAVYF (SEQ ID NO: | (SEQ ID NO: | L (SEQ ID |
| | | | NO: 190) | NO: | NO: 5960) | NO: | 11896) | 25998) | NO: |
| | | | | 2992) | | 8928) | | | 16414) |
| Clonotype_ | 1 | TRB | VTLLEQNPRWRLVPRGQA | NSQYPW | MSWYQQDLQKQLQ | LRSPGD | KEVKSLPGADYLATRVTDTELRLQV | CTCSGLGQDTQYF | GPGTRLLVL |
| 304 | | | VNLRCILK (SEQ ID | (SEQ ID | WLFT (SEQ ID | (SEQ ID | ANMSQGRTLY (SEQ ID NO: | (SEQ ID NO: | (SEQ ID |
| | | | NO: 23) | NO: | NO: 5959) | NO: 8927) | 11895) | 25999) | NO: 16341) |
| | | | | 2991) | | | | | |
| Clonotype_ | 1 | TRA | AQSVTQPDARVTVSEGAS | SSVTPY | LFWYVQYPRQGLQ | YYSGDPV | GVNGFEAEFSKSNSSFHLRKASVH | CAVSMNTGGADRLT | GKGTQLIIQ |
| 304 | | | LQLRCKYS (SEQ ID | (SEQ ID | LLLK (SEQ ID | V (SEQ | WSDSAVYF (SEQ ID NO: | F (SEQ ID NO: | P (SEQ ID |
| | | | NO: 12) | NO: | NO: 5948) | ID NO: | 11892) | 26000) | NO: |
| | | | | 2988) | | 8916) | | | 16360) |
| Clonotype_ | 1 | TRB | VTLLEQNPRWRLVPRGQA | NSQYPW | MSWYQQDLQKQLQ | LRSPGD | KEVKSLPGADYLATRVTDTELRLQV | CTCSGGLGGHSAET | GSGTRLTVL |
| 305 | | | VNLRCILK (SEQ ID | (SEQ ID | WLFT (SEQ ID | (SEQ ID | ANMSQGRTLY (SEQ ID NO: | LYF (SEQ ID NO: | (SEQ ID |
| | | | NO: 23) | NO: | NO: 5959) | NO: | 11895) | 26001) | NO: |
| | | | | 2991) | | 8927) | | | 16325) |
| Clonotype_ | 1 | TRA | QQQVRQSPQSLTVWEGET | NSAFDY | FPWYQQFPGEGPA | IRSVSDK | KEDGRFTIFFNKREKKLSLHITDSQ | CAASHSGGSNYKLT | GKGTLLTVT |
| 305 | | | AILNCSYE (SEQ ID | (SEQ ID | LLIA (SEQ ID | (SEQ ID | PGDSATYF (SEQ ID NO: | F (SEQ ID NO: | P (SEQ ID |
| | | | NO: 68) | NO: | NO: 6020) | NO: | 11940) | 26002) | NO: |
| | | | | 3052) | | 8988) | | | 16642) |

TABLE 3
TCR sequences from one mouse, cohort 1, RPRPSQPSSL (SEQ ID NO: 32957) vaccination

| Clono- | | | | | | | | | |
|---|---|---|---|---|---|---|---|---|---|
| type | Freq | Chain | fwr1 | cdr1 | fwr2 | cdr2 | fwr3 | cdr3 | fwr4 |
| Clono- | 352 | TRB | ETAVFQTPNYHVTQVGNEV | LGHDT | MYWYKQDSKKLLK | YNNKQL | IVNETVPRRFSPQSSDKAHLNLRIKS | CASSSTGANERLF | GHGTKLSV |
| type_1 | | | SFNCKQT (SEQ ID NO: | (SEQ ID | IMFS (SEQ ID | (SEQ ID | VEPEDSAVYL (SEQ ID NO: | F (SEQ ID NO: 31089) | L (SEQ |
| | | | 99) | NO: | NO: 6035) | NO: 9003) | 11971) | | ID NO: |
| | | | | 3067) | | | | | 16401) |
| Clono- | 325 | TRA | QQKVQQSPESLIVPEGAMT | DSASQY | FAWYRQHSGKAPK | IFSNGE | KEEGRFTIHLNKASLHFSLHIRDSQP | CAVSSYSNYQLIW | GSGTKLII |
| type_1 | | | SLNCTFS (SEQ ID NO: | (SEQ ID | ALMS (SEQ ID | (SEQ ID | SDSALYL (SEQ ID NO: 11948) | (SEQ ID NO: 31090) | KP (SEQ |
| | | | 214) | NO: | NO: 6150) | NO: 8932) | | | ID NO: |
| | | | | 3044) | | | | | 16372) |
| Clono- | 6 | TRB | GGIITQTPKFLIGQEGQKL | FNHDT | MYWYRQDSGKGLR | SITEND | LQKGDLSEGYDASREKKSSFSLTVTS | CASSIGTGDNQAP | GEGTRLSV |
| type_2 | | | TLKCQQN (SEQ ID NO: | (SEQ ID | LLIY (SEQ | (SEQ ID | AQKNEMAVFL (SEQ ID NO: | LF (SEQ ID NO: | L (SEQ ID |
| | | | 27) | NO: | ID NO: 5963) | NO: 8931) | 11899) | 25393) | NO: |
| | | | | 2995) | | | | | 16441) |
| Clono- | 6 | TRA | GEQVEQLPSSLIVQEGASV | DSASVY | FPWYKQEPGKRLQ | IRSNMER | KQTQRLTLLFDKKTKHLSLHITATQP | CSASNNYAQGLTF | GLGTRVSV |
| type_2 | | | LINCSYT (SEQ ID NO: | (SEQ ID | FIID (SEQ ID | (SEQ ID | GDSAIYF (SEQ ID NO: 24636) | (SEQ ID NO: | FP (SEQ |
| | | | 160) | NO: | NO: 6096) | NO: | | 25394) | ID NO: |
| | | | | 3128) | | 8952) | | | 16344) |
| Clono- | 5 | TRB | ETAVFQTPNYHVTQVGNEV | LGHDT | MYWYKQDSKKLLK | YNNKQL | IVNETVPRRFSPQSSDKAHLNLRIKS | CASSGDWGARAET | GSGTRLTV |
| type_3 | | | SFNCKQT (SEQ ID NO: | (SEQ ID | IMFS (SEQ ID | (SEQ ID | VEPEDSAVYL (SEQ ID NO: | LYF (SEQ ID | L |
| | | | 99) | NO: | NO: 6035) | NO: | 11971) | NO: 31093) | (SEQ ID |
| | | | | 3067) | | 9003) | | | NO: |
| | | | | | | | | | 16325) |
| Clono- | 5 | TRA | GEKVEQHQSTLSVREGDSA | DTASSY | FPWYKQEAGKSLH | IRSNVDR | KQSQRLTVLLDKKAKRFSLHITATQP | CAASIGNYAQGLT | GLGTRVSV |
| type_3 | | | VINCTYT (SEQ ID NO: | (SEQ ID | FVID (SEQ ID | (SEQ ID | EDSAIYF (SEQ ID NO: 12238) | F (SEQ ID NO: | FP (SEQ |
| | | | 366) | NO: | NO: 5990) | NO: 8958) | | 31094) | ID NO: |
| | | | | 3022) | | | | | 16344) |
| Clono- | 2 | TRB | EAAVTQSPRNKVAVTGGKV | NNHNN | MYWYRQDTGHGLR | SYGAGS | TEKGDIPDGYKASRPSQENFSLILEL | CASGDGGNSDYTF | GSGTRLLV |
| type_4 | | | TLSCNQT (SEQ ID NO: | (SEQ ID | LIHY (SEQ ID | (SEQ ID | ATPSQTSVYF (SEQ ID NO: | (SEQ ID NO: 31095) | I (SEQ ID |
| | | | 3) | NO: | NO: 5939) | NO: 8907) | 11875) | | NO: |
| | | | | 2971) | | | | | 16337) |
| Clono- | 2 | TRA | GEQVEQLPSILRVQEGSSA | NSASNY | FPWYKQEPGENPK | IRSNMER | KQTQGLIVLLDKKAKRFSLHITDTQP | CAAGNSGTYQRF | GTGTKLQV |
| type_4 | | | SINCTYE (SEQ ID NO: | (SEQ ID | LIID (SEQ ID | (SEQ ID | GDSAMYF (SEQ ID NO: 12042) | (SEQ ID NO: 31096) | VP (SEQ |
| | | | 170) | NO: | NO: 5984) | NO: 8952) | | | ID NO: |
| | | | | 3138) | | | | | 16432) |
| Clono- | 2 | TRB | EAAVTQSPRNKVAVTGGKV | NNHNN | MYWYRQDTGHGLR | SYGAGS | TEKGDIPDGYKASRPSQENFSLILEL | CASGDWGRTGQLY | GEGSKLTV |
| type_5 | | | TLSCNQT (SEQ ID NO: | (SEQ ID | LIHY (SEQ ID | (SEQ ID | ATPSQTSVYF (SEQ ID NO: | F (SEQ ID NO: 31097) | L (SEQ |
| | | | 3) | NO: | NO: 5939) | NO: 8907) | 11875) | | ID NO: |
| | | | | 2971) | | | | | 16347) |
| Clono- | 2 | TRA | SQLAEENPWALSVHEGESV | TSITA | LQWYRQKSGEGPA | IRSNERE | KRNGRLRATLDTSSQSSSLSITATRC | CATIGDNNNRIFF | GDGTQLVV |
| type_5 | | | TVNCSYK (SEQ ID NO: | (SEQ ID | QLIL (SEQ ID | (SEQ ID | EDTAVYF (SEQ ID NO: 11896) | (SEQ ID NO: | KP (SEQ |
| | | | 24) | NO: | NO: 5960) | NO: | | 31098) | ID NO: |
| | | | | 2992) | | 8928) | | | 16328) |
| Clono- | 2 | TRB | EAAVTQSPRNKVAVTGGKV | NNHNN | MYWYRQDTGHGLR | SYGAGS | TEKGDIPDGYKASRPSQENFSLILEL | CASGGPGQEQYF | GPGTRLTV |
| type_6 | | | TLSCNQT (SEQ ID NO: | (SEQ ID | LIHY (SEQ ID | (SEQ ID | ATPSQTSVYF (SEQ ID NO: | (SEQ ID NO: 31099) | L (SEQ |
| | | | 3) | NO: | NO: 5939) | NO: | 11875) | | ID NO: |
| | | | | 2971) | | 8907) | | | 16327) |
| Clono- | 2 | TRA | GDSVTQTEGQVALSEEDFL | ASGYPA | LFWYVQYPGEGPQ | ASRDKEK | GSSRGFEATYDKGTTSFHLRKASVQE | CALGRSSNTNKVV | GTGTRLQV |
| type_6 | | | TIHCNYS (SEQ ID NO: | (SEQ ID | FLFR (SEQ ID | (SEQ ID | SDSAVYY (SEQ ID NO: 11886) | F (SEQ ID NO: | LP (SEQ |
| | | | 14) | NO: | NO: 6050) | NO: 8918) | | 31100) | ID NO: |
| | | | | 3082) | | | | | 16698) |
| Clono- | 2 | TRB | GGIITQTPKFLIGQEGQKL | FNHDT | MYWYRQDSGKGLR | SITEND | LQKGDLSEGYDASREKKSSFSLTVTS | CASSPGTIFSGNT | GEGSRLIV |
| type_7 | | | TLKCQQN (SEQ ID NO: | (SEQ ID | LIYY (SEQ ID | SEQ ID | AQKNEMAVFL (SEQ ID NO: | LYF (SEQ ID | V (SEQ |
| | | | 27) | NO: | NO: 5963) | NO: 8931) | 11899) | NO: 31101) | ID NO: |
| | | | | 2995) | | | | | 16471) |
| Clono- | 2 | TRA | QQKVQQSPESLIVPEGAMT | DSASQY | FAWYRQHSGKAPK | IFSNGE | KEEGRFTIHLNKASLHFSLHIRDSQP | CAVSSYSNYQLIW | GSGTKLII |
| type_7 | | | SLNCTFS (SEQ ID NO: | (SEQ ID | ALMS (SEQ ID | (SEQ ID | SDSALYL (SEQ ID NO: 11948) | (SEQ ID NO: 31090) | KP (SEQ |
| | | | 214) | NO: | NO: 6150) | NO: 8932) | | | ID NO: |
| | | | | 3044) | | | | | 16372) |
| Clono- | 1 | TRB | NTKITQSPRYLILGRANKS | LGHNA | MYWYKQSAEKPPE | YNLKQL | IRNETVPSRFIPECPDSSKLLLHISA | CASSQEGGREQYF | GPGTRLTV |
| type_8 | | | LECEQH (SEQ ID NO: | (SEQ ID | LMFL (SEQ ID | (SEQ ID | VDPEDSAVYF (SEQ ID NO: | (SEQ ID NO: | L (SEQ ID |
| | | | 95) | NO: | NO: 6031) | NO: 8999) | 11967) | 31103) | NO: |
| | | | | 2983) | | | | | 16327) |
| Clono- | 1 | TRA | GEQVEQLPSSLIVQEGASV | DSASVY | FPWYKQEPGKRLQ | IRSNMER | KQNQRLTLLFDKKTKHLSLHITATQP | CSATYRGSALGRL | GAGTQLIV |
| type_8 | | | LINCSYT (SEQ ID NO: | (SEQ ID | FIID (SEQ ID | (SEQ ID | GDSAIYF (SEQ ID NO: 12032) | HF (SEQ ID NO: | IP (SEQ |
| | | | 160) | NO: | NO: 6096) | NO: | | 31104) | ID NO: |
| | | | | 3128) | | 8952) | | | 16480) |
| Clono- | 1 | TRB | NTKITQSPRYLILGRANKS | LGHNA | MYWYKQSAEKPPE | YNLKQL | IRNETVPSRFIPECPDSSKLLLHISA | CASSQDDRDEQYF | GPGTRLTV |
| type_9 | | | LECEQH (SEQ ID NO: | (SEQ ID | LMFL (SEQ ID | (SEQ ID | VDPEDSAVYF (SEQ ID NO: | (SEQ ID NO: | L (SEQ ID |
| | | | 95) | NO: | NO: 6031) | NO: 8999) | 11967) | 31105) | NO: |
| | | | | 2983) | | | | | 16327) |
| Clono- | 1 | TRA | QQKVQQSPESLIVPEGAMT | DSASQY | FAWYRQHSGKAPK | IFSNGE | KEEGRFTIHLNKASLHFSLHIRDSQP | CAVSSYSNYQLIW | GSGTKLII |
| type_9 | | | SLNCTFS (SEQ ID NO: | (SEQ ID | ALMS (SEQ ID | (SEQ ID | SDSALYL (SEQ ID NO: 11948) | (SEQ ID NO: | KP (SEQ |
| | | | 214) | NO: | NO: 6150) | NO: | | 31090) | ID NO: |
| | | | | 3044) | | 8932) | | | 16372) |
| Clono- | 1 | TRB | NTKITQSPRYLILGRANKS | LGHNA | MYWYKQSAEKPPE | YNLKQL | IRNETVPSRFIPECPDSSKLLLHISA | CASSQDGGAGEQY | GPGTRLTV |
| type_10 | | | LECEQH (SEQ ID NO: | (SEQ ID | LMFL (SEQ ID | (SEQ ID | VDPEDSAVYF (SEQ ID NO: | F (SEQ ID NO: | L (SEQ ID |
| | | | 95) | NO: | NO: 6031) | NO: 8999) | 11967) | 31107) | NO: |
| | | | | 2983) | | | | | 16327) |
| Clono- | 1 | TRA | GDQVEQSPSALSLHEGTDS | TTMRS | VQWFRQNSRGSLI | LASGT | KENGRLKSAFDSKERRYSTLHIRDAQ | CAAEENYAQGLTF | GLGTRVSV |
| type_10 | | | ALRCNFT (SEQ ID NO: | (SEQ ID | SLFY (SEQ ID | (SEQ ID | LEDSGTYF (SEQ ID NO: 11890) | (SEQ ID NO: | FP (SEQ |
| | | | 18) | NO: | NO: 5954) | NO: 8922) | | 31108) | ID NO: |
| | | | | 2986) | | | | | 16344) |
| Clono- | 1 | TRB | NTKITQSPRYLILGRANKS | LGHNA | MYWYKQSAEKPPE | YNLKQL | IRNETVPSRFIPECPDSSKLLLHISA | CASSQGLGGYEQY | GPGTRLTV |
| type_11 | | | LECEQH (SEQ ID NO: | (SEQ ID | LMFL (SEQ ID | (SEQ ID | VDPEDSAVYF (SEQ ID NO: | F (SEQ ID NO: | L (SEQ ID |
| | | | 95) | NO: | NO: 6031) | NO: 8999) | 11967) | 31109) | NO: |
| | | | | 2983) | | | | | 16327) |
| Clono- | 1 | TRA | QQKVQQSPESLIVPEGAMT | DSASQY | FAWYRQHSGKAPK | IFSNGE | KEEGRFTIHLNKASLHFSLHIRDSQP | CAVDTGNYKYVF ( | GAGTRLKV |
| type_11 | | | SLNCTFS (SEQ ID NO: | (SEQ ID | ALMS (SEQ ID | (SEQ ID | SDSALYL (SEQ ID NO: 11948) | SEQ ID NO: | IA (SEQ |
| | | | 214) | NO: | NO: 6150) | NO: | | 31110) | ID NO: |
| | | | | 3044) | | 8932) | | | 16380) |
| Clono- | 1 | TRB | NTKITQSPRYLILGRANKS | LGHNA | MYWYKQSAEKPPE | YNLKQL | IRNETVPSRFIPECPDSSKLLLHISA | CASRDWDAYEQYF | GPGTRLTV |
| type_12 | | | LECEQH (SEQ ID NO: | (SEQ ID | LMFL (SEQ ID | (SEQ ID | VDPEDSAVYF (SEQ ID NO: | (SEQ ID NO: | L (SEQ ID |
| | | | 95) | NO: | NO: 6031) | NO: | 11967) | 31111) | NO: |
| | | | | 2983) | | 8999) | | | 16327) |
| Clono- | 1 | TRA | AQKVTQTQTSISVMEKTTV | TRDSSYF | LFWYKQTASGEIV | QDSYKKE | ATEGHYSLNFQKPKSSIGLIITATQI | CAMREGSNQGGSA | GEGTKLTV |
| type_12 | | | TMDCVYE (SEQ ID NO: | (SEQ ID | FLIR (SEQ ID | N (SEQ | EDSAVYF (SEQ ID NO: 11916) | KLIF ( SEQ ID | SS (SEQ |
| | | | 44) | NO: | NO: 5942) | ID NO: | | NO: 31112) | ID NO: |
| | | | | 2974) | | 8910) | | | 16384) |
| Clono- | 1 | TRB | NTKITQSPRYLILGRANKS | LGHNA | MYWYKQSAEKPPE | YNLKQL | IRNETVPSRFIPECPDSSKLLLHISA | CASSLGEDAEQFF | GPGTRLTV |
| type_13 | | | LECEQH (SEQ ID NO: | (SEQ ID | LMFL (SEQ ID | (SEQ ID | VDPEDSAVYF (SEQ ID NO: | (SEQ ID NO: | L (SEQ ID |
| | | | 95) | NO: | NO: 6031) | NO: | 11967) | 31113) | NO: |
| | | | | 2983) | | 8999) | | | 16327) |
| Clono | 1 | TRA | GDSVTQTEGQVTVSESKSL | ATSIGYP | LFWYVRYPGEGLQ | VITAGQK | GSSRGFEATYNKEATSFHLQKASVQE | CALSMGGYKLTF | GTGTSLLV |
| type_13 | | | IINCTYS (SEQ ID NO: | N (SEQ | LLLK (SEQ ID | (SEQ ID | SDSAVYY (SEQ ID NO: 12094) | SEQ ID NO: | DP (SEQ |
| | | | 60) | ID NO: | NO: 5996) | NO: | | (31114) | ID NO: |
| | | | | 3330) | | 8964) | | | 16398) |
| Clono- | 1 | TRB | EAGVTQSPRYAVLQEGQAV | SGHDT | LYWYQQPRDQGPQ | FRDEAV | IDNSQLPSDRFSAVRPKGTNSTLKIQ | CASSPTLYEQYF | GPGTRLTV |
| type_14 | | | SFWCDPI (SEQ ID NO: | (SEQ ID | LLVY (SEQ ID | (SEQ ID | SAKQGDTATYL (SEQ ID NO: | (SEQ ID NO: | L (SEQ ID |
| | | | 1) | NO: | NO: 5937) | NO: | 11873) | 31115) | NO: |
| | | | | 2969) | | 8905) | | | 16327) |
| Clono- | 1 | TRA | AQSVTQPDARVTVSEGASL | YSATPY | ILFWYVQYPRQGLQ | YYSGDPV | QGVNGFEAEFSKSNSSFHLRKASVHW | CAVSTGANTGKLT | GHGTILRV |
| type_14 | | | QLRCKYS (SEQ ID NO: | (SEQ ID | LLLK (SEQ ID | V (SEQ | SDSAVYF (SEQ ID NO: 11892) | F (SEQ ID NO: 31116) | HP (SEQ |
| | | | 12) | NO: | NO: 5948) | ID NO: | | | ID NO: |
| | | | | 2980) | | 8916) | | | 16356) |
| Clono- | 1 | TRB | EAGVTQSPRYAVLQEGQAV | SGHDT | LYWYQQPRDQGPQ | FRDEAV | IDNSQLPSDRFSAVRPKGTNSTLKIQ | CASSPGLGYAEQF | GPGTRLTV |
| type_15 | | | SFWCDPI (SEQ ID NO: | (SEQ ID | LLVY (SEQ ID | (SEQ ID | SAKQGDTATYL (SEQ ID NO: | F (SEQ ID NO: | L (SEQ ID |
| | | | 1) | NO: | NO: 5937) | NO: 8905) | 11873) | 31117) | NO: |
| | | | | 2969) | | | | | 16327) |
| Clono- | 1 | TRA | GDQVEQSPSALSLHEGTGS | TTMRA | VQWFQQNSRGSLI | LASGT | KENGRLKSTFNSKESYSTLHIRDAQL | CAASNTNKVVF | GTGTRLQV |
| type_15 | | | ALRCNFT (SEQ ID NO: | (SEQ ID | NLFY (SEQ ID | (SEQ ID | EDSGTYF (SEQ ID NO: 12130) | (SEQ ID NO: | LP (SEQ |
| | | | 112) | NO: | NO: 6222) | NO: | | 31118) | ID NO: |
| | | | | 3080) | | 8922) | | | 16698) |
| Clono- | 1 | TRB | EAGVTQSPRYAVLQEGQAV | SGHDT | LYWYQQPRDQGPQ | FRDEAV | IDNSQLPSDRFSAVRPKGTNSTLKIQ | CASSFTLGEYEQY | GPGTRLTV |
| type_16 | | | SFWCDPI (SEQ ID NO: | (SEQ ID | LLVY (SEQ ID | (SEQ ID | SAKQGDTATYL (SEQ ID NO: | F (SEQ ID NO: | L (SEQ ID |
| | | | 1) | NO: | NO: 5937) | NO: | 11873) | 31119) | NO: |
| | | | | 2969) | | 8905) | | | 16327) |
| Clono- | 1 | TRA | LAKTTQPPSMEAYEGQEVN | NIATSEY | IYWYRQVPHQGPQ | GYKDYVV | NEVASLFISADRKLSTLSLPWVSLRD | CIVTDMGTGGYKV | GSGTRLLV |
| type_16 | | | VSCSHT (SEQ ID NO: | (SEQ ID | FIIQ (SEQ ID | (SEQ ID | AAVYY (SEQ ID NO: 11978) | VF (SEQ ID NO: | SP (SEQ |
| | | | 106) | NO: | NO: 6042) | NO: 9010) | | 31120) | ID NO: |
| | | | | 3074) | | | | | 16354) |
| Clono- | 1 | TRB | DPKIIQKPKYLVAVTGSEK | LGHNA | MYWYRQSAKKPLE | YSYQKL | MDNQTASSRFQPQSSKKNHLDLQITA | CASSQEGPGNTLY | GEGSRLIV |
| type_17 | | | ILICEQY (SEQ ID NO: | (SEQ ID | FMFS (SEQ ID | (SEQ ID | LKPDDSATYF (SEQ ID NO: | F (SEQ ID NO: 31121) | V (SEQ ID |
| | | | 15) | NO: | NO: 5951) | NO: | 11887) | | NO: |
| | | | | 2983) | | 8919) | | | 16471) |
| Clono- | 1 | TRA | GDSVTQTEGPVTVSESESL | ATSIAYP | LFWYVRYPGEGLQ | VITAGQK | GSSRGFEATYNKETTSFHLQKASVQE | CALGNNNNAPRF | GAGTKLSV |
| type_17 | | | IINCTYS (SEQ ID NO: | N (SEQ | LLLK (SEQ ID | (SEQ ID | SDSAVYY (SEQ ID NO: 11932) | S(EQ ID NO: 31122) | KP (SEQ |
| | | | 130) | ID NO: | NO: 5996) | NO: 8964) | | | ID NO: |
| | | | | 3098) | | | | | 16426) |
| Clono- | 1 | TRB | DPKIIQKPKYLVAVTGSEK | LGHNA | MYWYRQSAKKPLE | YSYQKL | MDNQTASSRFQPQSSKKNHLDLQITA | CASSQYEQYF | GPGTRLTV |
| type_18 | | | ILICEQY (SEQ ID NO: | (SEQ ID | FMFS (SEQ ID | (SEQ ID | LKPDDSATYF (SEQ ID NO: | (SEQ ID NO: | L (SEQ ID |
| | | | 15) | NO: | NO: 5951) | NO: | 11887) | 31123) | NO: |
| | | | | 2983) | | 8919) | | | 16327) |
| Clono- | 1 | TRA | GDQVEQSPSALSLHEGTGS | TTMRA | VQWFRKNSRGSLI | LASGT | KENGRLKSAFDSKERYSTLHIRDAQL | CAAFNMGYKLTF | GTGTSLLV |
| type_18 | | | ALRCNFT (SEQ ID NO: | (SEQ ID | NLFY (SEQ ID | (SEQ ID | EDSGTYF (SEQ ID NO: 11984) | (SEQ ID NO: | DP (SEQ |
| | | | 112) | NO: | NO: 6048) | NO: | | 31124) | ID NO: |
| | | | | 3080) | | 8922) | | | 16398) |
| Clono- | 1 | TRB | ETAVFQTPNYHVTQVGNEV | LGHDT | MYWYKQDSKKLLK | YNNKQL | IVNETVPRRFSPQSSDKAHLNLRIKS | CASSPRQGTNTLY | GAGTRLSV |
| type_19 | | | SENCKQT (SEQ ID NO: | (SEQ ID | IMFS (SEQ ID | (SEQ ID | VEPEDSAVYL (SEQ ID NO: | F (SEQ ID NO: | L (SEQ ID |
| | | | 99) | NO: | NO: 6035) | NO: | 11971) | 31125) | NO: |
| | | | | 3067) | | 9003) | | | 16365) |
| Clono- | 1 | TRA | GEKVEQHESTLSVREGDSA | DTASSY | FPWYKQEAGKSLH | IRSNVDR | KQSQRLIVLLDKKAKRFSLHITATQP | CAASIVGDNSKLI | GLGTSLVV |
| type_19 | | | VINCTYT (SEQ ID NO: | (SEQ ID | FVID (SEQ ID | (SEQ ID | EDSAIYF (SEQ ID NO: 11926) | W (SEQ ID NO: | NP (SEQ |
| | | | 54) | NO: | NO: 5990) | NO: | | 31126) | ID NO: |
| | | | | 3022) | | 8958) | | | 17292) |
| Clono- | 1 | TRB | ETAVFQTPNYHVTQVGNEV | LGHDT | MYWYKQDSKKLLK | YNNKQL | IVNETVPRRFSPQSSDKAHLNLRIKS | CASSSRQNTEVFF | GKGTRLTV |
| type 20 | | | SFNCKQT (SEQ ID NO: | (SEQ ID | IMFS (SEQ ID | (SEQ ID | VEPEDSAVYL (SEQ ID NO: | (SEQ ID NO: | V (SEQ ID |
| | | | 99) | NO: | NO: 6035) | NO: 9003) | 11971) | 31127) | NO: |
| | | | | 3067) | | | | | 16333) |
| Clono- | 1 | TRA | GQQVQQSPASLVLQEGENA | TSLNS | MQWFYQRPGGSLV | NPSGT | KHSGRLTSTTVIKERRSSLHISSSQT | CALERSYGNEKIT | GAGTKLTI |
| type_20 | | | ELQCNFS (SEQ ID NO: | (SEQ ID | SLFY (SEQ ID | (SEQ ID | TDSGTYL (SEQ ID NO: 11928) | F (SEQ ID NO: | KP (SEQ |
| | | | 10) | NO: | NO: 5946) | NO: 8914) | | 31128) | ID NO: |
| | | | | 2978) | | | | | 16512) |
| Clono- | 1 | TRB | ETAVFQTPNYHVTQVGNEV | LGHDT | MYWYKQDSKKLLK | YNNKQL | IVNETVPRRFSPQSSDKAHLNLRIKS | CASISRDSSYEQY | GPGTRLTV |
| type_21 | | | SFNCKQT (SEQ ID NO: | (SEQ ID | IMFS (SEQ ID | (SEQ ID | VEPEDSAVYL (SEQ ID NO: | F (SEQ ID NO: | L (SEQ ID |
| | | | 99) | NO: | NO: 6035) | NO: | 11971) | 31129) | NO: |
| | | | | 3067) | | 9003) | | | 16327) |
| Clono- | 1 | TRA | GQQVQQSPASLVLQEGENA | TSLNS | MQWFYQRPEGSLV | NPSGT | KQSGRLTSTTVIKERRSSLHISSSQI | CALNSAGNKLTF | GIGTRVLV |
| type_21 | | | ELQCNFS (SEQ ID NO: | (SEQ ID | SLFY (SEQ ID | (SEQ ID | TDSGTYL (SEQ ID NO: 12038) | (SEQ ID NO: 16304) | RP (SEQ |
| | | | 10) | NO: | NO: 6192) | NO: 8914) | | | ID NO: |
| | | | | 2978) | | | | | 16580) |
| Clono- | 1 | TRB | EAAVTQSPRNKVAVTGGKV | NNHNN | MYWYRQDTGHGLR | SYGAGS | TEKGDIPDGYKASRPSQENFSLILEL | CASGDARQDQDTQ | GPGTRLLV |
| type_22 | | | TLSCNQT (SEQ ID NO: | (SEQ ID | LIHY (SEQ ID | (SEQ ID | ATPSQTSVYF (SEQ ID NO: | YF (SEQ ID NO: | L (SEQ ID |
| | | | 3) | NO: | NO: 5939) | NO: 8907) | 11875) | 31131) | NO: |
| | | | | 2971) | | | | | 16341) |
| Clono- | 1 | TRA | GEQVEQLPSILRVQEGSSA | DSASNY | FPWYKQEPGENPK | IRSNMER | KQIQELIVLLDKKAKRFSLHITDTQP | CAAPDASSGSWQL | GSGTQLTV |
| type_22 | | | SINCSYE (SEQ ID NO: | (SEQ ID | LIID (SEQ ID | (SEQ ID | GDSAMYF (SEQ ID NO: 11920) | IF (SEQ ID NO: | MP (SEQ |
| | | | 48) | NO: | NO: 5984) | NO: | | 31132) | ID NO: |
| | | | | 3016) | | 8952) | | | 16400) |
| Clono- | 1 | TRB | EAAVTQSPRNKVAVTGGKV | NNHNN | MYWYRQDTGHGLR | SYGAGS | TEKGDIPDGYKASRPSQENFSLILEL | CASGGTGANTGQL | GEGSKLTV |
| type_23 | | | TLSCNQT (SEQ ID NO: | (SEQ ID | LIHY (SEQ ID | S(EQ ID | ATPSQTSVYF (SEQ ID NO: | YF (SEQ ID NO: | L (SEQ |
| | | | 3) | NO: | NO: 5939) | NO: | 11875) | 31133) | ID NO: |
| | | | | 2971) | | 8907) | | | 16347) |
| Clono- | 1 | TRA | AQKVTQTQTSISVMEKTTV | TQDSSYF | LFWYKQTASGEIV | QDSYKKE | ATVGHYSLNFQKPKSSIGLIITATQI | CAMREGVPGANTG | GHGTILRV |
| type_23 | | | TMDCVYE (SEQ ID NO: | (SEQ ID | FLIR (SEQ ID | N (SEQ | EDSAVYF (SEQ ID NO: 11878) | KLTF (SEQ ID | HP (SEQ |
| | | | 44) | NO: | NO: 5942) | ID NO: | | NO: 31134) | ID NO: |
| | | | | 3056) | | 8910) | | | 16356) |
| Clono- | 1 | TRB | EAAVTQSPRNKVTVTGGNV | NSHNY | MYWYRQDTGHGLR | SYGAGN | LQIGDVPDGYKATRTTQEDFFLLLEL | CASSEEENTEVFF | GKGTRLTV |
| type_24 | | | TLSCRQT (SEQ ID NO: | (SEQ ID | LIHY (SEQ ID | (SEQ ID | ASPSQTSLYF (SEQ ID NO: | (SEQ ID NO: 31135) | V (SEQ ID |
| | | | 37) | NO: | NO: 5939) | NO: 8941) | 11909) | | NO: |
| | | | | 3005) | | | | | 16333) |
| Clono- | 1 | TRA | GDSVIQMQGQVTLSENDFL | TTGYPT | LFWYVQYSGEGPQ | VTTANNK | GSSRGFEATYDKGTTSFHLQKTSVQE | CAMRDNTGANTGK | GHGTILRV |
| type_24 | | | FINCTYS (SEQ ID NO: | (SEQ ID | LLLQ (SEQ ID | (SEQ ID | IDSAVYY (SEQ ID NO: 12328) | LTF (SEQ ID | HP (SEQ |
| | | | 456) | NO: | NO: 6392) | NO: 9054) | | NO: 31136) | ID NO: |
| | | | | 3220) | | | | | 16356) |
| Clono- | 1 | TRB | EAAVTQSPRNKVTVTGGNV | NSHNY | MYWYRQDTGHGLR | SYGAGN | LQIGDVPDGYKATRTTQEDFFLLLEL | CASSDLGPQDTQY | GPGTRLLV |
| type_25 | | | TLSCRQT (SEQ ID NO: | (SEQ ID | LIHY (SEQ ID | (SEQ ID | ASPSQTSLYF (SEQ ID NO: | F (SEQ ID NO: | L (SEQ ID |
| | | | 37) | NO: | NO: 5939) | NO: | 11909) | 31137) | NO: |
| | | | | 3005) | | 8941) | | | 16341) |
| Clono- | 1 | TRA | GDSVTQTEGQVTVSESKSL | TTSIAYP | LFWYVRYPGEGLQ | VITAGQK | GSSRGFEATYNKETTSFHLQKASVQE | CALGPNYGGSGNK | GTGTLLSV |
| type_25 | | | IINCTYS (SEQ ID NO: | N (SEQ | LLLK (SEQ ID | (SEQ ID | SDSAVYY (SEQ ID NO: 11932) | LIF (SEQ ID | KP (SEQ |
| | | | 60) | ID NO: | NO: 5996) | NO: 8964) | | NO: 31138) | ID NO: |
| | | | | 3028) | | | | | 16350) |
| Clono- | 1 | TRB | EAAVTQSPRNKVTVTGGNV | NSHNY | MYWYRQDTGHGLR | SYGAGN | LQIGDVPDGYKATRTTQEDFFLLLEL | CASSDAGTAPQDT | GPGTRLLV |
| type_26 | | | TLSCRQT (SEQ ID NO: | (SEQ ID | LIHY (SEQ ID | (SEQ ID | ASPSQTSLYF (SEQ ID NO: | QYF (SEQ ID | L (SEQ ID |
| | | | 37) | NO: | NO: 5939) | NO: 8941) | 11909) | NO: 31139) | NO: |
| | | | | 3005) | | | | | 16341) |
| Clono- | 1 | TRA | LAKTTQPPSMEAYEGQEVN | NIATSEY | IYWYRQVPHQGPQ | GYKDYVV | NEVASLFISADRKLSTLSLPWVSLRD | CIVTDMGGSALGR | GAGTQLIV |
| type_26 | | | VSCSHT (SEQ ID NO: | (SEQ ID | FIIQ (SEQ ID | (SEQ ID | AAVYY (SEQ ID NO: 11978) | LHF (SEQ ID | IP (SEQ |
| | | | 106) | NO: | NO: 6042) | NO: 9010) | | NO: 31140) | ID NO: |
| | | | | 3074) | | | | | 16480) |
| Clono- | 1 | TRB | EAAVTQSPRNKVTVTGGNV | NSHNY | MYWYRQDTGHGLR | SYGAGN | LQIGDVPDGYKATRTTQEDFFLLLEL | CASSDAGGGLYAE | GPGTRLTV |
| type_27 | | | TLSCRQT (SEQ ID NO: | (SEQ ID | LIHY (SEQ ID | (SEQ ID | ASPSQTSLYF (SEQ ID NO: | QFF ( SEQ ID | L (SEQ |
| | | | 37) | NO: | NO: 5939) | NO: 8941) | 11909) | NO: 31141) | ID NO: |
| | | | | 3005) | | | | | 16327) |
| Clono- | 1 | TRA | AQSVTQPDARVTVSEGASL | SSVTPY | LFWYVQYPRQGLQ | YYSGDPV | QGVNGFEAEFSKSNSSFHLRKASVHW | CVVSGNYAQGLTF | GLGTRVSV |
| type_27 | | | QLRCKYS (SEQ ID NO: | (SEQ ID | LLLK (SEQ ID | V (SEQ | SDSAVYF (SEQ ID NO: 11892) | (SEQ ID NO: 31142) | FP (SEQ |
| | | | 12) | NO: | NO: 5948) | ID NO: | | | ID NO: |
| | | | | 2988) | | 8916) | | | 16344) |
| Clono- | 1 | TRB | EAAVTQSPRNKVTVTGGNV | NSHNY | MYWYRQDTGHGLR | SYGAGN | LQIGDVPDGYKATRTTQEDFFLLLEL | CASSDGWQNTLYF | GAGTRLSV |
| type_28 | | | TLSCRQT (SEQ ID NO: | (SEQ ID | LIHY (SEQ ID | (SEQ ID | ASPSQTSLYF (SEQ ID NO: | (SEQ ID NO: | L (SEQ |
| | | | 37) | NO: | NO: 5939) | NO: | 11909) | 31143) | ID NO: |
| | | | | 3005) | | 8941) | | | 16365) |
| Clono- | 1 | TRA | QEKVQQSPESLIVPEGAMS | NSASQS | IWWYQQHPGKGPE | IFSNGN | KKEGRLTVYLNRASLHVSLHIRDSQP | CAGSSNTNKVVF | GTGTRLQV |
| type 28 | | | SLNCTFS (SEQ ID NO: | (SEQ ID | ALIS (SEQ ID | (SEQ ID | SDSAVYL (SEQ ID NO: 11968) | (SEQ ID NO: | LP (SEQ |
| | | | 96) | NO: | NO: 6032) | NO: | | 31144) | ID NO: |
| | | | | 3064) | | 9000) | | | 16698) |
| Clono- | 1 | TRB | EAAVTQSPRNKVTVTGGNV | NSHNY | MYWYRQDTGHGLR | SYGAGN | LQIGDVPDGYKATRTTQEDFFLLLEL | CASSGWDTSGNTL | GEGSRLIV |
| type_29 | | | TLSCRQT (SEQ ID NO: | (SEQ ID | LIHY (SEQ ID | (SEQ ID | ASPSQTSLYF (SEQ ID NO: | YF (SEQ ID NO: | V (SEQ |
| | | | 37) | NO: | NO: 5939) | NO: 8941) | 11909) | 31145) | ID NO: |
| | | | | 3005) | | | | | 16471) |
| Clono- | 1 | TRA | QQQVRQSPQSLTVWEGETA | NSAFDY | FPWYQQFPGEGPA | IRSVSDK | KEDGGFTIFFNKREKNLSLHIKDSQP | CAASEGNNNRIFF | GDGTQLVV |
| type_29 | | | ILNCSYE (SEQ ID NO: | (SEQ ID | LLIA (SEQ ID | (SEQ ID | GDSATYF (SEQ ID NO: 24470) | (SEQ ID NO: | KP (SEQ |
| | | | 68) | NO: | NO: 6020) | NO: | | 31146) | ID NO: |
| | | | | 3052) | | 8988) | | | 16328) |
| Clono- | 1 | TRB | EAAVTQSPRNKVTVTGGNV | NSHNY | MYWYRQDTGHGLR | SYGAGN | LQIGDVPDGYKATRTTQEDFFLLLEL | CASSVRVEEQYF | GPGTRLTV |
| type_30 | | | TLSCRQT (SEQ ID NO: | (SEQ ID | LIHY (SEQ ID | (SEQ ID | ASPSQTSLYF (SEQ ID NO: | (SEQ ID NO: | L (SEQ ID |
| | | | 37) | NO: | NO: 5939) | NO: | 11909) | 31147) | NO: |
| | | | | 3005) | | 8941) | | | 16327) |
| Clono- | 1 | TRA | GEQVEQLPSILRVQEGSSA | DSASNY | FPWYKQEPGENPK | IRSNMER | KQIQELIVLLDKKAKRFSLHITDTQP | CAASGNNAGAKLT | GGGTRLTV |
| type_30 | | | SINCSYE (SEQ ID NO: | (SEQ ID | LIID (SEQ ID | (SEQ ID | GDSAMYF (SEQ ID NO: 11920) | F (SEQ ID NO: | RP (SEQ |
| | | | 48) | NO: | NO: 5984) | NO: 8952) | | 31148) | ID NO: |
| | | | | 3016) | | | | | 16338) |
| Clono- | 1 | TRB | EAAVTQSPRNKVTVTGGNV | NSHNY | MYWYRQDTGHGLR | SYGAGN | LQIGDVPDGYKATRTTQEDFFLLLEL | CASGRKDSPLYF | AAGTRLTV |
| type_31 | | | TLSCRQT (SEQ ID NO: | (SEQ ID | LIHY (SEQ ID | (SEQ ID | ASPSQTSLYF (SEQ ID NO: | (SEQ ID NO: | T (SEQ ID |
| | | | 37) | NO: | NO: 5939) | NO: 8941) | 11909) | 31149) | NO: |
| | | | | 3005) | | | | | 16381) |
| Clono- | 1 | TRA | AQKVTQTQTSISVMEKTTV | TQDSSYF | LFWYKQTASGEIV | QDSYKKE | ATVGHYSLNFQKPKSSIGLIITATQI | CAMREGGDSNNRI | GDGTQLVV |
| type_31 | | | TMDCVYE (SEQ ID NO: | (SEQ ID | FLIR (SEQ ID | N (SEQ | EDSAVYF (SEQ ID NO: 11878) | FF | KP (SEQ |
| | | | 44) | NO: | NO: 5942) | ID NO: | | (SEQ ID NO: 31150) | ID NO: |
| | | | | 3056) | | 8910) | | | 16328) |
| Clono- | 1 | TRB | EAAVTQSPRSKVAVTGGKV | NNHDY | MYWYRQDTGHGLR | SYVADS | TEKGDIPDGYKASRPSQENFSLILEL | CASTPTGGAQETL | GSGTRLTV |
| type_32 | | | TLSCHQT (SEQ ID NO: | (SEQ ID | LIHY (SEQ ID | (SEQ ID | ASLSQTAVYF (SEQ ID NO: | YF (SEQ ID NO: | L (SEQ |
| | | | 7) | NO: | NO: 5939) | NO: 8911) | 11879) | 31151) | ID NO: |
| | | | | 2975) | | | | | 16325) |
| Clono- | 1 | TRA | QQQVRQSPQSLTVWEGETA | DSTFNY | FPWYQQFPGEGPA | IRSVSDK | KEDGRFTIFFNKREKKLSLHITDSQP | CAASHRGSALGRL | GAGTQLIV |
| type_32 | | | ILNCSYE (SEQ ID NO: | (SEQ ID | LLIS (SEQ ID | (SEQ ID | GDSATYF (SEQ ID NO: 11940) | HF (SEQ ID NO: | IP (SEQ |
| | | | 68) | NO: | NO: 6004) | NO: | | 31152) | ID NO: |
| | | | | 3036) | | 8988) | | | 16480) |
| Clono- | 1 | TRB | EAAVTQSPRSKVAVTGGKV | NNHDY | MYWYRQDTGHGLR | SYVADS | TEKGDIPDGYKASRPSQENFSLILEL | CASSPGSGSSGNT | GEGSRLIV |
| type_33 | | | TLSCHQT (SEQ ID NO: | (SEQ ID | LIHY (SEQ ID | (SEQ ID | ASLSQTAVYF (SEQ ID NO: | LYF (SEQ ID | V (SEQ |
| | | | 7) | NO: | NO: 5939) | NO: 8911) | 11879) | NO: 31153) | ID NO: |
| | | | | 2975) | | | | | 16471) |
| Clono- | 1 | TRA | AQKVTQTQTSISVMEKTTV | TRDSSYF | LFWYKQTASGEIV | QDSYKKE | ATEGHYSLNFQKPKSSIGLIITATQI | CAMREVESGANTG | GHGTILRV |
| type_33 | | | TMDCVYE (SEQ ID NO: | (SEQ ID | FLIR (SEQ ID | N (SEQ | EDSAVYF (SEQ ID NO: 11916) | KLTF (SEQ ID | HP (SEQ |
| | | | 44) | NO: | NO: 5942) | ID NO: | | NO: 31154) | ID NO: |
| | | | | 2974) | | 8910) | | | 16356) |
| Clono- | 1 | TRB | EAAVTQSPRSKVAVTGGKV | NNHDY | MYWYRQDTGHGLR | SYVADS | TEKGDIPDGYKASRPSQENFSLILEL | CASSDGGEDTQYF | GPGTRLLV |
| type_34 | | | TLSCHQT (SEQ ID NO: | (SEQ ID | LIHY (SEQ ID | (SEQ ID | ASLSQTAVYF (SEQ ID NO: | (SEQ ID NO: | L (SEQ |
| | | | 7) | NO: | NO: 5939) | NO: | 11879) | 31155) | ID NO: |
| | | | | 2975) | | 8911) | | | 16341) |
| Clono- | 1 | TRA | GDSVTQTEGLVTLTKGLPV | TTYSPF | LFWYVQHLNEAPK | SSTDNKR | TEHQGFYATLHKSSSSFHLQKSSVQL | CALTAGAKLTF | GGGTRLTV |
| type_34 | | | MLNCTYQ (SEQ ID NO: | SEQ ID | LLLK (SEQ ID | (SEQ ID | SDSALYF (SEQ ID NO: 11880) | (SEQ ID NO: 31156) | RP (SEQ |
| | | | 8) | NO: | NO: 5944) | NO: 8912) | | | ID NO: |
| | | | | 2976) | | | | | 16338) |
| Clono- | 1 | TRB | DTTVKQNPRYKLARVGKPV | MNHDT | MYWYQKKPNQAPK | YYDKIL | NREADTFEKFQSSRPNNSFCSLYIGS | CASSSPQNTLYF | GAGTRLSV |
| type_35 | | | NLICSQT (SEQ ID NO: | (SEQ ID | LLLF (SEQ ID | (SEQ ID | AGLEYSAMYL (SEQ ID NO: | (SEQ ID NO: | L (SEQ |
| | | | 299) | NO: | NO: 6235) | NO: | 12171) | 31157) | ID NO: |
| | | | | 3267) | | 9203) | | | 16365) |
| Clono | 1 | TRA | QQKVQQSPESLSVPEGGMA | DRNFQY | FWWYRQHSGEGPK | IFSDGD | KKEGRFTAHLNKASLHVSLHIRDSQP | CAASGSGGSNAKL | GKGTKLSV |
| type_35 | | | SLNCTSS (SEQ ID NO: | S(EQ ID | ALMS (SEQ ID | (SEQ ID | SDSALYF (SEQ ID NO: 11874) | TF (SEQ ID NO: | KS (SEQ |
| | | | 64) | NO: | NO: 5938) | NO: | | 31158) | ID NO: |
| | | | | 2970) | | 8906) | | | 16342) |
| Clono- | 1 | TRB | AQTIHQWPVAEIKAVGSPL | GKSSPN | LYWYWQATGGTLQ | SITVG | QVESVVQLNLSASRPKDDQFILSTEK | CAWRPGQGVSDYT | GSGTRLLV |
| type_36 | | | SLGCTIK (SEQ ID NO: | (SEQ ID | QLFY (SEQ ID | (SEQ ID | LLLSHSGFYL (SEQ ID NO: | F (SEQ ID NO: | I (SEQ |
| | | | 35) | NO: | NO: 5971) | NO: | 11907) | 31159) | ID NO: |
| | | | | 3003) | | 8939) | | | 16337) |
| Clono- | 1 | TRA | AQKVTQTQTSISVMEKTTV | TQDSSYF | LFWYKQTASGEIV | QDSYKKE | ATVGHYSLNFQKPKSSIGLIITATQI | CAMRESNYGNEKI | GAGTKLTI |
| type_36 | | | TMDCVYE (SEQ ID NO: | (SEQ ID | FLIR (SEQ ID | N (SEQ | EDSAVYF (SEQ ID NO: 11878) | TF (SEQ ID NO: | KP (SEQ |
| | | | 44) | NO: | NO: 5942) | ID NO: | | 31160) | ID NO: |
| | | | | 3056) | | 8910) | | | 16512) |
| Clono- | 1 | TRB | AQTIHQWPVAEIKAVGSPL | GKSSPN | LYWYWQATGGTLQ | SITVG | QVESVVQLNLSASRPKDDQFILSTEK | CAWSPSFSYNSPL | AAGTRLTV |
| type_37 | | | SLGCTIK (SEQ ID NO: | (SEQ ID | QLFY (SEQ ID | (SEQ ID | LLLSHSGFYL (SEQ ID NO: | YF (SEQ ID NO: | T (SEQ |
| | | | 35) | NO: | NO: 5971) | NO: 8939) | 11907) | 31161) | ID NO: |
| | | | | 3003) | | | | | 16381) |
| Clono- | 1 | TRA | AQSVTQPDARVTVSEGASL | YFGTPY | LFWYVQYPRQGLQ | YYPGDPV | QGVNGFEAEFSKSNSSFHLRKASVHW | CAVSITGTGSKLS | GKGAKLTV |
| type_37 | | | QLRCKYS (SEQ ID NO: | (SEQ ID | LLLK (SEQ ID | V (SEQ | SDWAVYF (SEQ ID NO: 11924) | F (SEQ ID NO: 31162) | SP (SEQ |
| | | | 12) | NO: | NO: 5948) | ID NO: | | | ID NO: |
| | | | | 3020) | | 8956) | | | 16524) |
| Clono- | 1 | TRB | GGIITQTPKFLIGQEGQKL | FNHDT | MYWYRQDSGKGLR | SITEND | LQKGDLSEGYDASREKKSSFSLTVTS | CASSPGTIFSGNT | GEGSRLIV |
| type_38 | | | TLKCQQN (SEQ ID NO: | (SEQ ID | LIYY (SEQ ID | (SEQ ID | AQKNEMAVFL (SEQ ID NO: | LYF (SEQ ID | V (SEQ |
| | | | 27) | NO: | NO: 5963) | NO: 8931) | 11899) | NO: 31101) | ID NO: |
| | | | | 2995) | | | | | 16471) |
| Clono- | 1 | TRA | GDSVTQTEGQVTVSESKSL | TTSIAYP | LFWYVRYPGEGLQ | VITAGQK | GSSRGFEATYNKETTSFHLQKASVQE | CALGESGQKLVF | GQGTILKV |
| type_38 | | | IINCTYS (SEQ ID NO: | N (SEQ | LLLK (SEQ ID | (SEQ ID | SDSAVYY (SEQ ID NO: 11932) | (SEQ ID NO: 31164) | YL (SEQ |
| | | | 60) | ID NO: | NO: 5996) | NO: 8964) | | | ID NO: |
| | | | | 3028) | | | | | 16414) |
| Clono- | 1 | TRB | GGIITQTPKFLIGQEGQKL | FNHDT | MYWYRQDSGKGLR | SITEND | LQKGDLSEGYDASREKKSSFSLTVTS | CASSIWPEQYF | GPGTRLTV |
| type_39 | | | TLKCQQN (SEQ ID NO: | (SEQ ID | LIYY (SEQ ID | (SEQ ID | AQKNEMAVFL (SEQ ID NO: | (SEQ ID NO: 31165) | L (SEQ |
| | | | 27) | NO: | NO: 5963) | NO: | 11899) | | ID NO: |
| | | | | 2995) | | 8931) | | | 16327) |
| Clono- | 1 | TRA | AQSVDQPDAHVTLSEGASL | YSAAPY | LFWYVQYPGQSLQ | YITGDTV | KGTKGFEAEFRKSNSSFNLKKSPAHW | CALEGRNTGANTG | GHGTILRV |
| type_39 | | | ELRCSYS (SEQ ID NO: | (SEQ ID | FLLK (SEQ ID | V (SEQ | SDSAKYF (SEQ ID NO: 12152) | KLTF (SEQ ID | HP (SEQ |
| | | | 280) | NO: | NO: 6216) | ID NO: | | NO: 31166) | ID NO: |
| | | | | 3248) | | 9184) | | | 16356) |
| Clono- | 1 | TRB | GGIITQTPKFLIGQEGQKL | FNHDT | MYWYRQDSGKGLR | SITEND | LQKGDLSEGYDASREKKSSFSLTVTS | CASSIWDRNTEVF | GKGTRLTV |
| type_40 | | | TLKCQQN (SEQ ID NO: | (SEQ ID | LIYY (SEQ ID | (SEQ ID | AQKNEMAVFL (SEQ ID NO: | F (SEQ ID NO: | V (SEQ |
| | | | 27) | NO: | NO: 5963) | NO: | 11899) | 31167) | ID NO: |
| | | | | 2995) | | 8931) | | | 16333) |
| Clono- | 1 | TRA | AQKVTQTQTSISVMEKTTV | TRDSSYF | LFWYKQTASGEIV | QDSYKKE | ATEGHYSLNFQKPKSSIGLIITATQI | CAMREGPATGGNN | GQGTVLSV |
| type_40 | | | TMDCVYE (SEQ ID NO: | (SEQ ID | FLIR (SEQ ID | N (SEQ | EDSAVYF (SEQ ID NO: 11916) | KLTF (SEQ ID | IP (SEQ |
| | | | 44) | NO: | NO: 5942) | ID NO: | | NO: 31168) | ID NO: |
| | | | | 2974) | | 8910) | | | 16368) |
| Clono- | 1 | TRB | GGIITQTPKFLIGQEGQKL | FNHDT | MYWYRQDSGKGLR | SITEND | LQKGDLSEGYDASREKKSSFSLTVTS | CASSIGTEVFF | GKGTRLTV |
| type_41 | | | TLKCQQN (SEQ ID NO: | (SEQ ID | LIYY (SEQ ID | (SEQ ID | AQKNEMAVFL (SEQ ID NO: | (SEQ ID NO: | V (SEQ |
| | | | 27) | NO: | NO: 5963) | NO: | 11899) | 31169) | ID NO: |
| | | | | 2995) | | 8931) | | | 16333) |
| Clono- | 1 | TRA | GDSVTQTEGQVALSEEDFL | ASGYPT | LFWYVQYPGEGPQ | ASRDKEK | GSSRGFEATYDKGTTSFHLRKASVQE | CALSEFNGNEKIT | GAGTKLTI |
| type_41 | | | TIHCNYS (SEQ ID NO: | (SEQ ID | LLFR (SEQ ID | (SEQ ID | SDSAVYY (SEQ ID NO: 11886) | F (SEQ ID NO: 31170) | KP (SEQ |
| | | | 14) | NO: | NO: 5950) | NO: 8918) | | | ID NO: |
| | | | | 2982) | | | | | 16512) |
| Clono- | 1 | TRB | GGIITQTPKFLIGQEGQKL | FNHDT | MYWYRQDSGKGLR | SITEND | LQKGDLSEGYDASREKKSSFSLTVTS | CASSMGQGSDYTF | GSGTRLLV |
| type_42 | | | TLKCQQN (SEQ ID NO: | (SEQ ID | LIYY (SEQ ID | (SEQ ID | AQKNEMAVFL (SEQ ID NO: | (SEQ ID NO: 16225) | I (SEQ |
| | | | 27) | NO: | NO: 5963) | NO: 8931) | 11899) | | ID NO: |
| | | | | 2995) | | | | | 16337) |
| Clono- | 1 | TRA | GDSVTQTEGQVTVSESKSL | ATSIAYP | LFWYVRYPGEGLQ | VITAGQK | GSSRGFEATYNKETTSFHLQKASVQE | CALSENYAQGLTF | GLGTRVSV |
| type_42 | | | IINCTYS (SEQ ID NO: | N (SEQ | LLLK (SEQ ID | (SEQ ID | SDSAVYY (SEQ ID NO: 11932) | (SEQ ID NO: | FP (SEQ |
| | | | 60) | ID NO: | NO: 5996) | NO: 8964) | | 31172) | ID NO: |
| | | | | 3098) | | | | | 16344) |
| Clono- | 1 | TRB | GGIITQTPKFLIGQEGQKL | FNHDT | MYWYRQDSGKGLR | SITEND | LQKGDLSEGYDASREKKSSFSLTVTS | CASANRGADTQYF | GPGTRLLV |
| type_43 | | | TLKCQQN (SEQ ID NO: | (SEQ ID | LIYY (SEQ ID | (SEQ ID | AQKNEMAVFL (SEQ ID NO: | (SEQ ID NO: | L (SEQ |
| | | | 27) | NO: | NO: 5963) | NO: 8931) | 11899) | 31173) | ID NO: |
| | | | | 2995) | | | | | 16341) |
| Clono- | 1 | TRA | QQKVQQSPESLIVPEGAMT | DSASQY | FAWYRQHSGKAPK | IFSNGE | KEEGRFTIHLNKASLHFSLHIRDSQP | CAVSMGGYQNFYF | GKGTSLTV |
| type_43 | | | SLNCTFS (SEQ ID NO: | (SEQ ID | ALMS (SEQ ID | (SEQ ID | SDSALYL (SEQ ID NO: 11948) | (SEQ ID NO: 31174) | IP (SEQ |
| | | | 214) | NO: | NO: 6150) | NO: 8932) | | | ID NO: |
| | | | | 3044) | | | | | 16366) |
| Clono | 1 | TRB | VTLLEQNPRWRLVPRGQAV | NSQYPW | MSWYQQDLQKQLQ | LRSPGD | KEVKSLPGADYLATRVTDTELRLQVA | CTCRTGGGGSNER | GHGTKLSV |
| type_44 | | | NLRCILK (SEQ ID NO: | (SEQ ID | WLFT (SEQ ID | (SEQ ID | NMSQGRTLY (SEQ ID NO: | LFF (SEQ ID | L (SEQ |
| | | | 23) | NO: | NO: 5959) | NO: | 11895) | NO: 31175) | ID NO: |
| | | | | 2991) | | 8927) | | | 16401) |
| Clono- | 1 | TRA | SQLAEENLWALSVHEGESV | TSITA | LQWYRQKSGEGPA | IRSNERE | KRNGRLRATLDTSSQSSSLSITATRC | CGTGSGGKLTL | GTGTRLQV |
| type_44 | | | TVNCSYK (SEQ ID NO: | (SEQ ID | QLIL (SEQ ID | (SEQ ID | EDTAVYF (SEQ ID NO: 11896) | (SEQ ID NO: | NL (SEQ |
| | | | 190) | NO: | NO: 5960) | NO: | | 31176) | ID NO: |
| | | | | 2992) | | 8928) | | | 16448) |
| Clono- | 1 | TRB | VTLLEQNPRWRLVPRGQAV | NSQYPW | MSWYQQDLQKQLQ | LRSPGD | KEVKSLPGADYLATRVTDTELRLQVA | CTCSAGGQDTQYF | GPGTRLLV |
| type_45 | | | NLRCILK (SEQ ID NO: | (SEQ ID | WLFT (SEQ ID | (SEQ ID | NMSQGRTLY (SEQ ID NO: | (SEQ ID NO: | L (SEQ |
| | | | 23) | NO: | NO: 5959) | NO: 8927) | 11895) | 31177) | ID NO: |
| | | | | 2991) | | | | | 16341) |
| Clono- | 1 | TRA | GEQVEQLPSSLIVQEGASV | DSASVY | FPWYKQEPGKRLQ | IRSNMER | KQNQRLTLLFDKKTKHLSLHITATQP | CSASDGGSGNKLI | GTGTLLSV |
| type_45 | | | LINCSYT (SEQ ID NO: | (SEQ ID | FIID (SEQ ID | (SEQ ID | GDSAIYF (SEQ ID NO: 12032) | F (SEQ ID NO: | KP (SEQ |
| | | | 160) | NO: | NO: 6096) | NO: 8952) | | 31178) | ID NO: |
| | | | | 3128) | | | | | 16350) |
| Clono- | 1 | TRB | VTLLEQNPRWRLVPRGQAV | NSQYPW | MSWYQQDLQKQLQ | LRSPGD | KEVKSLPGADYLATRVTDTELRLQVA | CTCSAPGTGGYQN | GAGTRLSV |
| type_46 | | | NLRCILK (SEQ ID NO: | (SEQ ID | WLFT (SEQ ID | (SEQ ID | NMSQGRTLY (SEQ ID NO: | TLYF (SEQ ID | L (SEQ |
| | | | 23) | NO: | NO: 5959) | NO: 8927) | 11895) | NO: 31179) | ID NO: |
| | | | | 2991) | | | | | 16365) |
| Clono- | 1 | TRA | GEKVEQHESTLSVREGDSA | DTASSY | FPWYKQEAGKSLH | IRSNVDR | KQSQRLIVLLDKKAKRFSLHITATQP | CAASMWTGGYKVV | GSGTRLLV |
| type_46 | | | VINCTYT (SEQ ID NO: | (SEQ ID | FVID (SEQ ID | (SEQ ID | EDSAIYF (SEQ ID NO: 11926) | F (SEQ ID NO: 31180) | SP (SEQ |
| | | | 54) | NO: | NO: 5990) | NO: 8958) | | | ID NO: |
| | | | | 3022) | | | | | 16354) |
| Clono- | 1 | TRB | VTLLEQNPRWRLVPRGQAV | NSQYPW | MSWYQQDLQKQLQ | LRSPGD | KEVKSLPGADYLATRVTDTELRLQVA | CTCSAPGFQNTLY | GAGTRLSV |
| type_47 | | | NLRCILK (SEQ ID NO: | (SEQ ID | WLFT (SEQ ID | (SEQ ID | NMSQGRTLY (SEQ ID NO: | F (SEQ ID NO: | L (SEQ |
| | | | 23) | NO: | NO: 5959) | NO: | 11895) | 31181) | ID NO: |
| | | | | 2991) | | 8927) | | | 16365) |
| Clono- | 1 | TRA | GDSVTQKEGLVTLTEGLPV | TIYSNAF | LFWYVHYLNESPR | SSTDNKR | TEHQGFHATLHKSSSSFHLQKSSAQL | CALRDSGYNKLTF | GKGTVLLV |
| type_47 | | | MLNCTYQ (SEQ ID NO: | (SEQ ID | LLLK (SEQ ID | (SEQ ID | SDSALYY (SEQ ID NO: 11918) | (SEQ ID NO: 31182) | SP (SEQ |
| | | | 890) | NO: | NO: 6144) | NO: 8912) | | | ID NO: |
| | | | | 3858) | | | | | 16378) |
| Clono- | 1 | TRB | VTLLEQNPRWRLVPRGQAV | NSQYPW | MSWYQQDLQKQLQ | LRSPGD | KEVKSLPGADYLATRVTDTELRLQVA | CTCSGDWGAYEQY | GPGTRLTV |
| type_48 | | | NLRCILK (SEQ ID NO: | (SEQ ID | WLFT (SEQ ID | (SEQ ID | NMSQGRTLY (SEQ ID NO: | F (SEQ ID NO: | L (SEQ ID |
| | | | 23) | NO: | NO: 5959) | NO: | 11895) | 31183) | NO: |
| | | | | 2991) | | 8927) | | | 16327) |
| Clono- | 1 | TRA | GDSVTQTEGQVALSEEDFL | ASGYPT | LFWYVQYPGEGPQ | ASRDKEK | GSSRGFEATYDKGTTSFHLRKASVQE | CALRDNNNAPRF | GAGTKLSV |
| type_48 | | | TIHCNYS (SEQ ID NO: | (SEQ ID | LLFR (SEQ ID | (SEQ ID | SDSAVYY (SEQ ID NO: 11886) | (SEQ ID NO: | KP (SEQ |
| | | | 14) | NO: | NO: 5950) | NO: | | 31184) | ID NO: |
| | | | | 2982) | | 8918) | | | 16426) |

### Example 2: Isolation of ALK-Specific TCRs from Peripheral Blood of HLA-A*02:01 and HLA-B*07:02 Patients with NSCLC and Healthy Donors

[0322] Data is generated supporting the feasibility of isolating CD8+ T cells reactive against the ALK peptide RPRPSQPSSL (SEQ ID NO: 32957) from peripheral blood of HLA-B*07:02 healthy donors. Untouched naïve CD8+ T cells are purified from PBMCs and stimulated in vitro with autologous irradiated antigen presenting cells at a ratio 1:1 and cultured in presence of 50 IU/ml IL2, 25 ng/ml IL7, 25 ng/ml IL15 and 1 uM RPRPSQPSSL (SEQ ID NO: 32957) peptide for 10 days. RPRPSQPSSL (SEQ ID NO: 32957) peptide and all the cytokines are replaced every 2-3 days (FIG. 53). The presence of CD8+ T cells reactive against RPRPSQPSSL (SEQ ID NO: 32957) are identified by staining the CD8+ T cells with two Dextramers® that bind the RPRPSQPSSL (SEQ ID NO: 32957) peptide with its MHC-I (HLA-B*0) 7:02) and are conjugated with different fluorochromes (FIG. 54).

[0323] To isolate TCRs recognizing human ALK peptides PBMCs are collected from HLA-A*02:01 and HLA-B*07:02 healthy donors and HLA-A*02:01 and HLA-B*07:02 patients with NSCLC, who consented to correlative IRB approved protocols (DF/HCC 02-180, 11-104 and 17-000). Autologous Dendritic Cells (DCs) are isolated from PBMCs by stimulation with GM-CSF and IL4 and DCs maturation is induced by using a synthetic analog of dsRNA known as polyinosinic-polycytidylic acid (poly I:C). In parallel, purified CD8+ T cells from PBMCs are cultured with autologous mature DCs (mDCs) pulsed with each human ALK peptide at a ratio 20:1 in the presence of human IL7, IL15 and IL12. Fourteen days later, a second round of CD8+T stimulation is performed with peptide-pulsed mDCs in the presence of human IL2. Fourteen days after the second stimulation, the presence of ALK-specific T cell responses is evaluated by IFNγ ELISPOT assay and CD8+ T cells are sorted by using human Dextramers that combined each human ALK peptide with the corresponding human MCH-I (HLA-B*07:02 or HLA-A*02:01). Sorted cells are subjected to single cell sequencing (10× Genomics®).

### Example 3: Isolation of ALK-Specific TCRs from Tumor Infiltrating Lymphocytes (TILs) of Patients with ALK Positive Tumors and HLA-A*02:01 or HLA-B*07:02 Genotype

[0324] To isolate TCRs recognizing human ALK peptides from TILs, tumor biopsies and/or tumor specimens from HLA-A*02:01 and HLA-B*07:02 patients with ALK+NSCLC who consented to correlative IRB-approved protocols (DF/HCC 02-180, 11-104 and 17-000) are collected. Tumor specimens are cut into small fragments that are plated in a 24 well plate to allow the TILs to migrate out of the fragments and expand individually in vitro. Tumor fragments are cultured in RPMI complete media supplemented with 10% human AB serum and 6000 IU/mL IL-2 and until T cell growth is observed. IL-2 and media is replaced every 2-3 days.

[0325] Next, TILs are expanded by using irradiated autologous PBMCs at a ratio of 1 to 100 in media supplemented with 5% human AB serum, 3000 IU/ml of IL-2 and 30 ng/mL OKT3 antibody and CD8+ T cells are enriched by negative selection with StemCell Technology™ reagents.

[0326] Autologous Dendritic Cells (DCs) are isolated from patient's PBMCs by stimulation with GM-CSF and IL4 and DCs maturation is induced by using a synthetic analog of dsRNA known as polyinosinic-polycytidylic acid (poly I:C).

[0327] Next, the enriched population of CD8+ T cells obtained by TILs is cultured with autologous mature DCs (mDCs) pulsed with each human ALK peptide at a ratio 20:1 in the presence of human IL7, IL15 and IL12. Fourteen days later, a second round of CD8+T stimulation is performed with peptide-pulsed mDCs in the presence of human IL-2. Fourteen days after the second stimulation, the presence of ALK-specific T cell responses is evaluated by IFNγ ELISPOT assay and CD8+ T cells are enriched by sorting with human Dextramers® that combine each RPRPSQPSSL (SEQ ID NO: 32957), IVRCIGVSL (SEQ ID NO: 32958) or AMLDLLHVA (SEQ ID NO: 32961) peptide with the human HLA-B*07:02 or HLA-A*02:01. Sorted cells are subjected to single cell sequencing (10× Genomics®).

### Example 4: Production of ALK-TCR T Cells

[0328] The paired α and β sequence of all the expanded ALK-specific clonotypes (VDJ count≥4) isolated from HLA-B*0) 7:02 mice vaccinated with RPRPSQPSSL (SEQ ID NO: 32957) was cloned into pMSCV-IRES-GFP II retroviral vector. The transcription of each ALK-TCR construct was driven by the endogenous 5′LTR of the pMSCV-IRES-GFP II retroviral vector.

[0329] Next, the CD3⁺ T cells were purified by negative selection from Peripheral Blood Mononuclear Cells of healthy donors (PMBCs) obtained from the Boston Children's Hospital Blood Donor Center. CD3⁺ T cells were activated in vitro with anti-CD3, and anti-CD28 beads (ratio cells:beads cells 1:1) in media supplemented with 10 ng/ml rhIL-7, and 5 ng/ml rhIL15 for two days. On day two 2.5×10\hat{ }⁵ CD3⁺ T cells were transduced with retroviral supernatants using Retronectin® coated plates prepared following manufacturer's instructions. On day five transduced CD3⁺ T cells were collected and expanded in vitro for eleven days in media supplemented with 10 ng/ml rhIL-7 and 5 ng/ml rhIL15 that were replaced every 2 days. On day eleven, CD8⁺ T cells were further purified from CD3⁺ T cells by depleting the CD4⁺ T cell population with positive selection and kept in culture for 2 more days in the absence of rhIL7 and rhIL15.

[0330] A set of ALK-TCR T cells in which endogenous TCRs were knocked out were also produced. Endogenous TCRs were knocked out in the T cells using the following crRNA guides to knock out the endogenous TRAC gene: AGAGTCTCTCAGCTGGTACA (SEQ ID NO: 32988) (Ren J. et al., Clin Cancer Res (2017) 23 (9); 2255-2266.) and the TRBC1 and TRBC2 genes: AGAGATCTCCCACACCCAAA (SEQ ID NO: 32986) (Morton L. T. et al., Molecular Therapy (2020) 28 (1): 64-74). Alt-R® CRISPR-Cas9 crRNA 200 μM was mixed with Alt-R® CRISPR-Cas9 tracrRNA 200 μM in a ratio of 1:1. RNAs were annealed by incubation at 95° for 5 minutes. 200 pmol of gRNA was then mixed with 120 pmol SpCas9 nuclease and cells were then treated with 4 μl of RNP. When the double knock-out of TRAC and TRBC1/2 was performed, TRAC and TRBC1/2 RNPs were prepared separately and then cells were treated with 4 μl of each RNP.

[0331] Next, CD3⁺ T cells were purified by negative selection from Peripheral Blood Mononuclear Cells of healthy donors (PMBCs) obtained from the Boston Children's Hospital Blood Donor Center. CD3⁺ T cells were activated in vitro with anti-CD3, and anti-CD28 beads (ratio cells:beads cells 1:1) in media supplemented with 10 ng/ml rhIL-7, and 5 ng/ml rhIL15 for two days. On day two anti-CD3 and anti-CD28 beads were magnetically removed, CD3⁺ T cells were washed with PBS and 1×10\hat{ }⁶ cells were resuspended in Lonza electroporation buffer P3 supplemented with 100 uM (100 pmol) of electroporation enhancer. Next, 4 μl of each RNP was added to the reaction mix. 23 μl of reaction mix was then transferred into the cuvette strips and CD3⁺ T cells were electroporated with 4D nucleofector (Lonza), program EO115. Immediately after electroporation, CD3⁺ T cells were incubated with an additional 100 μl of warm T cell media and were transferred into 48 well plates containing 300 μl of T-cell media supplemented with 10 ng/ml IL7 and 5 ng/ml IL15. On day three 2.5×10\hat{ }⁵ CD3⁺ T cells were transduced with retroviral supernatants using Retronectin® coated plates prepared following manufacturer's instructions. On day six transduced CD3⁺ T cells were collected and and expanded in vitro for nine days in media supplemented with 10 ng/ml rhIL-7 and 5 ng/ml rhIL15 that were replaced every 2 days. The knock-out efficiency was assessed on day nine by analyzing the expression of human TCRαβ with flow cytometry. On day twelve, CD8 T cells were further purified from CD3⁺ T cells by depleting the CD4⁺ T cell population with positive selection and kept in culture for 2 more days in the absence of rhIL7 and rhIL15.

### OTHER EMBODIMENTS

[0332] From the foregoing description, it will be apparent that variations and modifications may be made to the invention described herein to adopt it to various usages and conditions. Such embodiments are also within the scope of the following claims.

[0333] The recitation of a listing of elements in any definition of a variable herein includes definitions of that variable as any single element or combination (or subcombination) of listed elements. The recitation of some embodiments herein includes that embodiment as any single embodiment or in combination with any other embodiments or portions thereof.

[0334] All patents and publications mentioned in this specification are herein incorporated by reference to the same extent as if each independent patent and publication was specifically and individually indicated to be incorporated by reference. The invention may be related to any of International Patent Application No. PCT/US20/51237, filed Sep. 17, 2020, International Patent Application No. PCT/US21/15519, filed Jan. 28, 2021, or U.S. Provisional Application No. 63/339,018, filed May 6, 2022, the entirety of each of which is incorporated herein by reference for all purposes.

The application's sequence listing, which the Patent Office published only in electronic form, follows.

SEQUENCE LISTING (33008 sequences)

SEQ ID NO: 1 - protein, 26 aa, synthetic construct
EAGVTQSPRYAVLQEGQAVSFWCDPI

SEQ ID NO: 2 - protein, 26 aa, synthetic construct
QQKVQQSPESLSVPEGGMASFNCTSS

SEQ ID NO: 3 - protein, 26 aa, synthetic construct
EAAVTQSPRNKVAVTGGKVTLSCNQT

SEQ ID NO: 4 - protein, 25 aa, synthetic construct
GQGVEQPDNLMSVEGTFARVNCTYS

SEQ ID NO: 5 - protein, 26 aa, synthetic construct
EAAVTQSPRNKVAVTGGKVTLSCNQT

SEQ ID NO: 6 - protein, 26 aa, synthetic construct
AQKVTQTQTSISVVEKTTVTMDCVYE

SEQ ID NO: 7 - protein, 26 aa, synthetic construct
EAAVTQSPRSKVAVTGGKVTLSCHQT

SEQ ID NO: 8 - protein, 26 aa, synthetic construct
GDSVTQTEGLVTLTKGLPVMLNCTYQ

SEQ ID NO: 9 - protein, 26 aa, synthetic construct
EAAVTQSPRNKVAVTGGKVTLSCNQT

SEQ ID NO: 10 - protein, 26 aa, synthetic construct
GQQVQQSPASLVLQEGENAELQCNFS

SEQ ID NO: 11 - protein, 26 aa, synthetic construct
EAGVTQSPRYAVLQEGQAVSFWCDPI

SEQ ID NO: 12 - protein, 26 aa, synthetic construct
AQSVTQPDARVTVSEGASLQLRCKYS

SEQ ID NO: 13 - protein, 26 aa, synthetic construct
EAAVTQSPRNKVAVTGGKVTLSCNQT

SEQ ID NO: 14 - protein, 26 aa, synthetic construct
GDSVTQTEGQVALSEEDFLTIHCNYS

SEQ ID NO: 15 - protein, 26 aa, synthetic construct
DPKIIQKPKYLVAVTGSEKILICEQY

SEQ ID NO: 16 - protein, 25 aa, synthetic construct
GQGVEQPDNLMSVEGTFARVNCTYS

SEQ ID NO: 17 - protein, 26 aa, synthetic construct
NAGVIQTPRHKVTGKGQEATLWCEPI

SEQ ID NO: 18 - protein, 26 aa, synthetic construct
GDQVEQSPSALSLHEGTDSALRCNFT

SEQ ID NO: 19 - protein, 26 aa, synthetic construct
EAAVTQSPRNKVAVTGGKVTLSCNQT

SEQ ID NO: 20 - protein, 26 aa, synthetic construct
AQSVTQPDARVTVSEGASLQLRCKYS

SEQ ID NO: 21 - protein, 26 aa, synthetic construct
EAAVTQSPRSKVAVTGGKVTLSCHQT

SEQ ID NO: 22 - protein, 26 aa, synthetic construct
GEQVEQRPPHLSVREGDSAIIICTYT

SEQ ID NO: 23 - protein, 26 aa, synthetic construct
VTLLEQNPRWRLVPRGQAVNLRCILK

SEQ ID NO: 24 - protein, 26 aa, synthetic construct
SQLAEENPWALSVHEGESVTVNCSYK

SEQ ID NO: 25 - protein, 26 aa, synthetic construct
VTLLEQNPRWRLVPRGQAVNLRCILK

SEQ ID NO: 26 - protein, 26 aa, synthetic construct
AQSVTQPDARVTVSEGASLQLRCKYS

SEQ ID NO: 27 - protein, 26 aa, synthetic construct
GGIITQTPKFLIGQEGQKLTLKCQQN

SEQ ID NO: 28 - protein, 26 aa, synthetic construct
QQKVQQSPESLIVPEGGMASLNCTSS

SEQ ID NO: 29 - protein, 26 aa, synthetic construct
DPKIIQKPKYLVAVTGSEKILICEQY

SEQ ID NO: 30 - protein, 26 aa, synthetic construct
AQSVTQPDARVTVSEGASLQLRCKYS

SEQ ID NO: 31 - protein, 26 aa, synthetic construct
EAAVTQSPRNKVAVTGGKVTLSCNQT

SEQ ID NO: 32 - protein, 26 aa, synthetic construct
GQQVQQSPASLVLQEGENAELQCNFS

SEQ ID NO: 33 - protein, 26 aa, synthetic construct
EAAVTQSPRNKVAVTGGKVTLSCNQT

SEQ ID NO: 34 - protein, 26 aa, synthetic construct
AQSVTQPDARVTVSEGASLQLRCKYS

SEQ ID NO: 35 - protein, 26 aa, synthetic construct
AQTIHQWPVAEIKAVGSPLSLGCTIK

SEQ ID NO: 36 - protein, 26 aa, synthetic construct
AQSVTQPDARVTVSEGASLQLRCKYS

SEQ ID NO: 37 - protein, 26 aa, synthetic construct
EAAVTQSPRNKVTVTGGNVTLSCRQT

SEQ ID NO: 38 - protein, 26 aa, synthetic construct
GDSVTQTEGPVTLSEGTSLTVNCSYE

SEQ ID NO: 39 - protein, 26 aa, synthetic construct
AQTIHQWPVAEIKAVGSPLSLGCTIK

SEQ ID NO: 40 - protein, 26 aa, synthetic construct
GEQVEQRPPHLSVREGDSAIIICTYT

SEQ ID NO: 41 - protein, 26 aa, synthetic construct
EAAVTQSPRNKVAVTGGKVTLSCNQT

SEQ ID NO: 42 - protein, 26 aa, synthetic construct
GEQVEQRPPHLSVREGDSAVITCTYT

SEQ ID NO: 43 - protein, 26 aa, synthetic construct
EAAVTQSPRNKVAVTGGKVTLSCNQT

SEQ ID NO: 44 - protein, 26 aa, synthetic construct
AQKVTQTQTSISVMEKTTVTMDCVYE

SEQ ID NO: 45 - protein, 26 aa, synthetic construct
EAAVTQSPRSKVAVTGGKVTLSCHQT

SEQ ID NO: 46 - protein, 26 aa, synthetic construct
GDSVTQTEGLVTLTEGLPVMLNCTYQ

SEQ ID NO: 47 - protein, 26 aa, synthetic construct
GGIITQTPKFLIGQEGQKLTLKCQQN

SEQ ID NO: 48 - protein, 26 aa, synthetic construct
GEQVEQLPSILRVQEGSSASINCSYE

SEQ ID NO: 49 - protein, 26 aa, synthetic construct
EAAVTQSPRSKVAVTGGKVTLSCHQT

SEQ ID NO: 50 - protein, 26 aa, synthetic construct
GEQVEQRPPHLSVREGDSAVITCTYT

SEQ ID NO: 51 - protein, 26 aa, synthetic construct
EAAVTQSPRSKVAVTGGKVTLSCHQT

SEQ ID NO: 52 - protein, 26 aa, synthetic construct
AQSVTQPDARVTVSEGASLQLRCKYS

SEQ ID NO: 53 - protein, 26 aa, synthetic construct
EAAVTQSPRNKVTVTGGNVTLSCRQT

SEQ ID NO: 54 - protein, 26 aa, synthetic construct
GEKVEQHESTLSVREGDSAVINCTYT

SEQ ID NO: 55 - protein, 26 aa, synthetic construct
EAAVTQSPRSKVAVTGGKVTLSCHQT

SEQ ID NO: 56 - protein, 26 aa, synthetic construct
GQQVQQSPASLVLQEGENAELQCNFS

SEQ ID NO: 57 - protein, 26 aa, synthetic construct
DPKIIQKPKYLVAVTGSEKILICEQY

SEQ ID NO: 58 - protein, 26 aa, synthetic construct
GEKVEQHESTLSVREGDSAVINCTYT

SEQ ID NO: 59 - protein, 26 aa, synthetic construct
EAAVTQSPRNKVAVTGGKVTLSCNQT

SEQ ID NO: 60 - protein, 26 aa, synthetic construct
GDSVTQTEGQVTVSESKSLIINCTYS

SEQ ID NO: 61 - protein, 26 aa, synthetic construct
EAAVTQSPRSKVAVTGGKVTLSCHQT

SEQ ID NO: 62 - protein, 26 aa, synthetic construct
GDSVTQTEGLVTLTEGLPVMLNCTYQ

SEQ ID NO: 63 - protein, 26 aa, synthetic construct
AQTIHQWPVAEIKAVGSPLSLGCTIK

SEQ ID NO: 64 - protein, 26 aa, synthetic construct
QQKVQQSPESLSVPEGGMASLNCTSS

SEQ ID NO: 65 - protein, 26 aa, synthetic construct
GGIITQTPKFLIGQEGQKLTLKCQQN

SEQ ID NO: 66 - protein, 26 aa, synthetic construct
AQKVTQTQTSISVMEKTTVTMDCVYE

SEQ ID NO: 67 - protein, 26 aa, synthetic construct
EAGVTQSPRYAVLQEGQAVSFWCDPI

SEQ ID NO: 68 - protein, 26 aa, synthetic construct
QQQVRQSPQSLTVWEGETAILNCSYE

SEQ ID NO: 69 - protein, 26 aa, synthetic construct
DPKIIQKPKYLVAVTGSEKILICEQY

SEQ ID NO: 70 - protein, 26 aa, synthetic construct
GDSVTQTEGLVTLTKGLPVMLNCTYQ

SEQ ID NO: 71 - protein, 26 aa, synthetic construct
EAAVTQSPRNKVTVTGGNVTLSCRQT

SEQ ID NO: 72 - protein, 26 aa, synthetic construct
GDSVTQTEGLVTLTEGLPVMLNCTYQ

SEQ ID NO: 73 - protein, 26 aa, synthetic construct
AQTIHQWPVAEIKAVGSPLSLGCTIK

SEQ ID NO: 74 - protein, 26 aa, synthetic construct
AQSVTQPDARVTVSEGASLQLRCKYS

SEQ ID NO: 75 - protein, 26 aa, synthetic construct
VTLLEQNPRWRLVPRGQAVNLRCILK

SEQ ID NO: 76 - protein, 26 aa, synthetic construct
QQNVQQSPESLIVPEGARTSLNCTFS

SEQ ID NO: 77 - protein, 26 aa, synthetic construct
VTLLEQNPRWRLVPRGQAVNLRCILK

SEQ ID NO: 78 - protein, 26 aa, synthetic construct
GQQVKQSSPSLTVQEGGILILNCDYE

SEQ ID NO: 79 - protein, 26 aa, synthetic construct
GALVYQYPRRTICKSGTSMRMECQAV

SEQ ID NO: 80 - protein, 26 aa, synthetic construct
SQWGEENLQALSIQEGEDVTMNCSYK

SEQ ID NO: 81 - protein, 26 aa, synthetic construct
DPKIIQKPKYLVAVTGSEKILICEQY

SEQ ID NO: 82 - protein, 26 aa, synthetic construct
AQKVTQTQTSISVMEKTTVTMDCVYE

SEQ ID NO: 83 - protein, 26 aa, synthetic construct
EAAVTQSPRNKVTVTGGNVTLSCRQT

SEQ ID NO: 84 - protein, 26 aa, synthetic construct
QQQVRQSSQSLTVWEGETAILNCSYE

SEQ ID NO: 85 - protein, 26 aa, synthetic construct
GGIITQTPKFLIGQEGQKLTLKCQQN

SEQ ID NO: 86 - protein, 26 aa, synthetic construct
AQSVTQPDARVTVSEGASLQLRCKYS

SEQ ID NO: 87 - protein, 26 aa, synthetic construct
EAAVTQSPRSKVAVTGGKVTLSCHQT

SEQ ID NO: 88 - protein, 26 aa, synthetic construct
AQKVTQTQTSISVMEKTTVTMDCVYE

SEQ ID NO: 89 - protein, 26 aa, synthetic construct
EAAVTQSPRSKVAVTGGKVTLSCHQT

SEQ ID NO: 90 - protein, 26 aa, synthetic construct
GEQVEQRPPHLSVREGDSAIIICTYT

SEQ ID NO: 91 - protein, 26 aa, synthetic construct
GPKVLQIPSHQIIDMGQMVTLNCDPV

SEQ ID NO: 92 - protein, 26 aa, synthetic construct
QQKVQQSPESLTVSEGAMASLNCTFS

SEQ ID NO: 93 - protein, 26 aa, synthetic construct
VTLLEQNPRWRLVPRGQAVNLRCILK

SEQ ID NO: 94 - protein, 26 aa, synthetic construct
GQQVQQSPASLVLQEGENAELQCNFS

SEQ ID NO: 95 - protein, 25 aa, synthetic construct
NTKITQSPRYLILGRANKSLECEQH

SEQ ID NO: 96 - protein, 26 aa, synthetic construct
QEKVQQSPESLIVPEGAMSSLNCTFS

SEQ ID NO: 97 - protein, 25 aa, synthetic construct
NTKITQSPRYLILGRANKSLECEQH

SEQ ID NO: 98 - protein, 26 aa, synthetic construct
GDSVTQTEGLVTLTEGLPVMLNCTYQ

SEQ ID NO: 99 - protein, 26 aa, synthetic construct
ETAVFQTPNYHVTQVGNEVSFNCKQT

SEQ ID NO: 100 - protein, 26 aa, synthetic construct
GEQVEQRPPHLSVPEGDSAVIICTYT

SEQ ID NO: 101 - protein, 26 aa, synthetic construct
EAAVTQSPRNKVAVTGGKVTLSCNQT

SEQ ID NO: 102 - protein, 26 aa, synthetic construct
GEQVEQRPPHLSVREGDSAVITCTYT

SEQ ID NO: 103 - protein, 26 aa, synthetic construct
EAAVTQSPRSKVAVTGGKVTLSCHQT

SEQ ID NO: 104 - protein, 25 aa, synthetic construct
DAKTTQPDSMESTEGETVHLPCSHA

SEQ ID NO: 105 - protein, 25 aa, synthetic construct
NTKITQSPRYLILGRANKSLECEQH

SEQ ID NO: 106 - protein, 25 aa, synthetic construct
LAKTTQPPSMEAYEGQEVNVSCSHT

SEQ ID NO: 107 - protein, 26 aa, synthetic construct
DPKIIQKPKYLVAVTGSEKILICEQY

SEQ ID NO: 108 - protein, 26 aa, synthetic construct
GEQVEQRPPHLSVREGDSAVIICTYT

SEQ ID NO: 109 - protein, 26 aa, synthetic construct
EAAVTQSPRNKVAVTGGKVTLSCNQT

SEQ ID NO: 110 - protein, 26 aa, synthetic construct
TQTVSQSDAHVTVFEGDSVELRCNYS

SEQ ID NO: 111 - protein, 26 aa, synthetic construct
EAAVTQSPRSKVAVTGGKVTLSCHQT

SEQ ID NO: 112 - protein, 26 aa, synthetic construct
GDQVEQSPSALSLHEGTGSALRCNFT

SEQ ID NO: 113 - protein, 25 aa, synthetic construct
NTKITQSPRYLILGRANKSLECEQH

SEQ ID NO: 114 - protein, 26 aa, synthetic construct
GDSVTQTEGQVALSEEDFLTIHCNYS

SEQ ID NO: 115 - protein, 26 aa, synthetic construct
EAAVTQSPRNKVAVTGGKVTLSCNQT

SEQ ID NO: 116 - protein, 26 aa, synthetic construct
GDSVTQTEGLVTVTEGLPVKLNCTYQ

SEQ ID NO: 117 - protein, 26 aa, synthetic construct
EAAVTQSPRNKVAVTGGKVTLSCNQT

SEQ ID NO: 118 - protein, 26 aa, synthetic construct
AQKVTQTQTSISVMEKTTVTMDCVYE

SEQ ID NO: 119 - protein, 26 aa, synthetic construct
EAAVTQSPRNKVAVTGGKVTLSCNQT

SEQ ID NO: 120 - protein, 27 aa, synthetic construct
GQQVQQSPPASLVLQEGENAELQCTYS

SEQ ID NO: 121 - protein, 26 aa, synthetic construct
GPKVLQIPSHQIIDMGQMVTLNCDPV

SEQ ID NO: 122 - protein, 26 aa, synthetic construct
AQSVTQPDARVTVSEGASLQLRCKYS

SEQ ID NO: 123 - protein, 26 aa, synthetic construct
EAGVTQSPRYAVLQEGQAVSFWCDPI

SEQ ID NO: 124 - protein, 26 aa, synthetic construct
QQQVRQSPQSLTVWEGETAILNCSYE

SEQ ID NO: 125 - protein, 26 aa, synthetic construct
ETAVFQTPNYHVTQVGNEVSFNCKQT

SEQ ID NO: 126 - protein, 26 aa, synthetic construct
GQQVQQSPASLVLQEGENAELQCNFS

SEQ ID NO: 127 - protein, 26 aa, synthetic construct
EAAVTQSPRNKVAVTGGKVTLSCNQT

SEQ ID NO: 128 - protein, 26 aa, synthetic construct
AQSVTQPDARVTVSEGASLQLRCKYS

SEQ ID NO: 129 - protein, 26 aa, synthetic construct
EAAVTQSPRNKVAVTGGKVTLSCNQT

SEQ ID NO: 130 - protein, 26 aa, synthetic construct
GDSVTQTEGPVTVSESESLIINCTYS

SEQ ID NO: 131 - protein, 26 aa, synthetic construct
EAAVTQSPRNKVAVTGGKVTLSCNQT

SEQ ID NO: 132 - protein, 26 aa, synthetic construct
QQKVQQSPESLIVPEGGMASLNCTFS

SEQ ID NO: 133 - protein, 26 aa, synthetic construct
EAAVTQSPRNKVAVTGGKVTLSCNQT

SEQ ID NO: 134 - protein, 26 aa, synthetic construct
GDSVTQTEGPVTVSESESLIINCTYS

SEQ ID NO: 135 - protein, 26 aa, synthetic construct
EAAVTQSPRNKVAVTGGKVTLSCNQT

SEQ ID NO: 136 - protein, 26 aa, synthetic construct
QQNVQQSPESLIVPEGARTSLNCTFS

SEQ ID NO: 137 - protein, 26 aa, synthetic construct
EAAVTQSPRNKVTVTGGNVTLSCRQT

SEQ ID NO: 138 - protein, 26 aa, synthetic construct
GDSVTQTEGLVTLTKGLPVMLNCTYQ

SEQ ID NO: 139 - protein, 26 aa, synthetic construct
AQTIHQWPVAEIKAVGSPLSLGCTIK

SEQ ID NO: 140 - protein, 26 aa, synthetic construct
GQQVQQSPASLVLQEGENAELQCNFS

SEQ ID NO: 141 - protein, 26 aa, synthetic construct
AQTIHQWPVAEIKAVGSPLSLGCTIK

SEQ ID NO: 142 - protein, 26 aa, synthetic construct
QQKVQQSPESLSVPEGGMASFNCTSS

SEQ ID NO: 143 - protein, 26 aa, synthetic construct
GPKVLQIPSHQIIDMGQMVTLNCDPV

SEQ ID NO: 144 - protein, 26 aa, synthetic construct
AQSVTQPDARVTVSEGASLQLRCKYS

SEQ ID NO: 145 - protein, 26 aa, synthetic construct
GALVYQYPRRTICKSGTSMRMECQAV

SEQ ID NO: 146 - protein, 26 aa, synthetic construct
TQTVSQSDAHVTVFEGDSVELRCNYS

SEQ ID NO: 147 - protein, 26 aa, synthetic construct
GGIITQTPKFLIGQEGQKLTLKCQQN

SEQ ID NO: 148 - protein, 26 aa, synthetic construct
GEKVEQHESTLSVREGDSAVINCTYT

SEQ ID NO: 149 - protein, 26 aa, synthetic construct
GGIITQTPKFLIGQEGQKLTLKCQQN

SEQ ID NO: 150 - protein, 26 aa, synthetic construct
GDSVTQMQGQVTLSEDDFLFINCTYS

SEQ ID NO: 151 - protein, 26 aa, synthetic construct
GGIITQTPKFLIGQEGQKLTLKCQQN

SEQ ID NO: 152 - protein, 26 aa, synthetic construct
GEQVEQRPPHLSVPEGDSAVIICTYT

SEQ ID NO: 153 - protein, 26 aa, synthetic construct
GGIITQTPKFLIGQEGQKLTLKCQQN

SEQ ID NO: 154 - protein, 26 aa, synthetic construct
SQWGEENLQALSIQEGEDVTMNCSYK

SEQ ID NO: 155 - protein, 25 aa, synthetic construct
NTKITQSPRYLILGRANKSLECEQH

SEQ ID NO: 156 - protein, 26 aa, synthetic construct
GQQVQQSPASLVLQEGENAELQCNFS

SEQ ID NO: 157 - protein, 25 aa, synthetic construct
NTKITQSPRYLILGRANKSLECEQH

SEQ ID NO: 158 - protein, 26 aa, synthetic construct
SQWGEENLQALSIQEGEDVTMNCSYK

SEQ ID NO: 159 - protein, 26 aa, synthetic construct
EAGVTQSPRYAVLQEGQAVSFWCDPI

SEQ ID NO: 160 - protein, 26 aa, synthetic construct
GEQVEQLPSSLIVQEGASVLINCSYT

SEQ ID NO: 161 - protein, 26 aa, synthetic construct
EAGVTQSPRYAVLQEGQAVSFWCDPI

SEQ ID NO: 162 - protein, 26 aa, synthetic construct
QQKVQQSPESLSVPEGGMASLNCTSS

SEQ ID NO: 163 - protein, 26 aa, synthetic construct
DMKVTQMPRYLIKRMGENVLLECGQD

SEQ ID NO: 164 - protein, 26 aa, synthetic construct
GEKVEQHESTLSVREGDSAVINCTYT

SEQ ID NO: 165 - protein, 26 aa, synthetic construct
ETAVFQTPNYHVTQVGNEVSFNCKQT

SEQ ID NO: 166 - protein, 26 aa, synthetic construct
EQQVQQSPASLVLQEGENAELQCSFS

SEQ ID NO: 167 - protein, 26 aa, synthetic construct
EAAVTQSPRNKVAVTGGKVTLSCNQT

SEQ ID NO: 168 - protein, 26 aa, synthetic construct
AQKVTQTQTSISVMEKTTVTMDCVYE

SEQ ID NO: 169 - protein, 26 aa, synthetic construct
EAAVTQSPRNKVAVTGGKVTLSCNQT

SEQ ID NO: 170 - protein, 26 aa, synthetic construct
GEQVEQLPSILRVQEGSSASINCTYE

SEQ ID NO: 171 - protein, 26 aa, synthetic construct
EAAVTQSPRNKVAVTGGKVTLSCNQT

SEQ ID NO: 172 - protein, 26 aa, synthetic construct
GEQVEQLPSILRVQEGSSASINCSYE

SEQ ID NO: 173 - protein, 26 aa, synthetic construct
EAAVTQSPRNKVAVTGGKVTLSCNQT

SEQ ID NO: 174 - protein, 26 aa, synthetic construct
GEQVEQRPPHLSVPEGDSAVIICTYT

SEQ ID NO: 175 - protein, 26 aa, synthetic construct
EAAVTQSPRNKVAVTGGKVTLSCNQT

SEQ ID NO: 176 - protein, 26 aa, synthetic construct
AQKVTQTQTSISVVEKTTVTMDCVYE

SEQ ID NO: 177 - protein, 26 aa, synthetic construct
EAAVTQSPRNKVTVTGGNVTLSCRQT

SEQ ID NO: 178 - protein, 26 aa, synthetic construct
GEQVEQLPSILRVQEGSSASINCTYE

SEQ ID NO: 179 - protein, 26 aa, synthetic construct
EAAVTQSPRSKVAVTGGKVTLSCHQT

SEQ ID NO: 180 - protein, 26 aa, synthetic construct
GDSVTQTEGPVTVSESESLIINCTYS

SEQ ID NO: 181 - protein, 26 aa, synthetic construct
EAAVTQSPRSKVAVTGGKVTLSCHQT

SEQ ID NO: 182 - protein, 26 aa, synthetic construct
GEQVEQLPSILRVQERSSASINCTYE

SEQ ID NO: 183 - protein, 26 aa, synthetic construct
AQTIHQWPVAEIKAVGSPLSLGCTIK

SEQ ID NO: 184 - protein, 26 aa, synthetic construct
QQKVQQSPESLSVPEGGMASFNCTSS

SEQ ID NO: 185 - protein, 26 aa, synthetic construct
GALVYQYPRRTICKSGTSMRMECQAV

SEQ ID NO: 186 - protein, 26 aa, synthetic construct
AQKVTQTQTSISVMEKTTVTMDCVYE

SEQ ID NO: 187 - protein, 26 aa, synthetic construct
GGIITQTPKFLIGQEGQKLTLKCQQN

SEQ ID NO: 188 - protein, 26 aa, synthetic construct
SQLAEENSWALSVHEGESVTVNCSYK

SEQ ID NO: 189 - protein, 26 aa, synthetic construct
GGIITQTPKFLIGQEGQKLTLKCQQN

SEQ ID NO: 190 - protein, 26 aa, synthetic construct
SQLAEENLWALSVHEGESVTVNCSYK

SEQ ID NO: 191 - protein, 26 aa, synthetic construct
VTLLEQNPRWRLVPRGQAVNLRCILK

SEQ ID NO: 192 - protein, 26 aa, synthetic construct
AQSVTQPDARVTVSEGASLQLRCKYS

SEQ ID NO: 193 - protein, 25 aa, synthetic construct
NTKITQSPRYLILGRANKSLECEQH

SEQ ID NO: 194 - protein, 26 aa, synthetic construct
GDSVTQTEGQVALSEEDFLTIHCNYS

SEQ ID NO: 195 - protein, 26 aa, synthetic construct
EAGVTQSPRYAVLQEGQAVSFWCDPI

SEQ ID NO: 196 - protein, 26 aa, synthetic construct
GQQVQQSPASLVLQEGENAELQCSFS

SEQ ID NO: 197 - protein, 26 aa, synthetic construct
EAGVTQSPRYAVLQEGQAVSFWCDPI

SEQ ID NO: 198 - protein, 26 aa, synthetic construct
GDQVEQSPSALSLHEGTGSALRCNFT

SEQ ID NO: 199 - protein, 26 aa, synthetic construct
DPKIIQKPKYLVAVTGSEKILICEQY

SEQ ID NO: 200 - protein, 26 aa, synthetic construct
GQQVQQSPASLVLQEGENAELQCSFS

SEQ ID NO: 201 - protein, 26 aa, synthetic construct
ETAVFQTPNYHVTQVGNEVSFNCKQT

SEQ ID NO: 202 - protein, 26 aa, synthetic construct
GQQVQQSPASLVLQEGENAELQCNFS

SEQ ID NO: 203 - protein, 26 aa, synthetic construct
ETAVFQTPNYHVTQVGNEVSFNCKQT

SEQ ID NO: 204 - protein, 26 aa, synthetic construct
GDQVEQSPSALSLHEGTSSALRCNFT

SEQ ID NO: 205 - protein, 26 aa, synthetic construct
EAAVTQSPRNKVAVTGGKVTLSCNQT

SEQ ID NO: 206 - protein, 26 aa, synthetic construct
AQKVTQTQTSISVMEKTTVTMDCVYE

SEQ ID NO: 207 - protein, 26 aa, synthetic construct
EAAVTQSPRNKVAVTGGKVTLSCNQT

SEQ ID NO: 208 - protein, 26 aa, synthetic construct
GDSVTQTEGLVTLTEGLPVMLNCTYQ

SEQ ID NO: 209 - protein, 26 aa, synthetic construct
EAAVTQSPRNKVAVTGGKVTLSCNQT

SEQ ID NO: 210 - protein, 25 aa, synthetic construct
GQGVEQPDNLMSVEGTFARVNCTYS

SEQ ID NO: 211 - protein, 26 aa, synthetic construct
EAAVTQSPRNKVTVTGGNVTLSCRQT

SEQ ID NO: 212 - protein, 26 aa, synthetic construct
GDSVTQTEGPVTVSESESLIINCTYS

SEQ ID NO: 213 - protein, 26 aa, synthetic construct
EAAVTQSPRNKVTVTGGNVTLSCRQT

SEQ ID NO: 214 - protein, 26 aa, synthetic construct
QQKVQQSPESLIVPEGAMTSLNCTFS

SEQ ID NO: 215 - protein, 26 aa, synthetic construct
EAAVTQSPRSKVAVTGGKVTLSCHQT

SEQ ID NO: 216 - protein, 26 aa, synthetic construct
AQSVTQPDARVTVSEGASLQLRCKYS

SEQ ID NO: 217 - protein, 26 aa, synthetic construct
EAAVTQSPRSKVAVTGGKVTLSCHQT

SEQ ID NO: 218 - protein, 26 aa, synthetic construct
GDSVTQTEGQVTVSESKSLIINCTYS

SEQ ID NO: 219 - protein, 26 aa, synthetic construct
AQTIHQWPVAEIKAVGSPLSLGCTIK

SEQ ID NO: 220 - protein, 26 aa, synthetic construct
AQKVTQTQTSISVMEKTTVTMDCVYE

SEQ ID NO: 221 - protein, 26 aa, synthetic construct
GALVYQYPRRTICKSGTSMRMECQAV

SEQ ID NO: 222 - protein, 26 aa, synthetic construct
GDSVTQTEGQVALSEEDFLTIHCNYS

SEQ ID NO: 223 - protein, 26 aa, synthetic construct
GGIITQTPKFLIGQEGQKLTLKCQQN

SEQ ID NO: 224 - protein, 26 aa, synthetic construct
GEQVEQRPPHLSVREGDSAVITCTYT

SEQ ID NO: 225 - protein, 26 aa, synthetic construct
VTLLEQNPRWRLVPRGQAVNLRCILK

SEQ ID NO: 226 - protein, 26 aa, synthetic construct
QQQVRQSPQSLTVWEGETAILNCSYE

SEQ ID NO: 227 - protein, 26 aa, synthetic construct
VTLLEQNPRWRLVPRGQAVNLRCILK

SEQ ID NO: 228 - protein, 26 aa, synthetic construct
GDSVTQTEGQVTVSESKSLIINCTYS

SEQ ID NO: 229 - protein, 26 aa, synthetic construct
VTLLEQNPRWRLVPRGQAVNLRCILK

SEQ ID NO: 230 - protein, 26 aa, synthetic construct
AQKVTQTQTSISVMEKTTVTMDCVYE

SEQ ID NO: 231 - protein, 26 aa, synthetic construct
VTLLEQNPRWRLVPRGQAVNLRCILK

SEQ ID NO: 232 - protein, 26 aa, synthetic construct
QQKVQQSPESLIVPEGGMASLNCTSS

SEQ ID NO: 233 - protein, 25 aa, synthetic construct
NTKITQSPRYLILGRANKSLECEQH

SEQ ID NO: 234 - protein, 26 aa, synthetic construct
EQQVQQSPASLVLQEAENAELQCSFS

SEQ ID NO: 235 - protein, 25 aa, synthetic construct
NTKITQSPRYLILGRANKSLECEQH

SEQ ID NO: 236 - protein, 26 aa, synthetic construct
GDSVTQTEGPVTVSESESLIINCTYS

SEQ ID NO: 237 - protein, 25 aa, synthetic construct
NTKITQSPRYLILGRANKSLECEQH

SEQ ID NO: 238 - protein, 26 aa, synthetic construct
QQQVRQSPQSLTVWEGETAILNCSYE

SEQ ID NO: 239 - protein, 26 aa, synthetic construct
NAGVIQTPRHKVTGKGQEATLWCEPI

SEQ ID NO: 240 - protein, 26 aa, synthetic construct
QQQVRQSPQSLTVWEGETAILNCSYE

SEQ ID NO: 241 - protein, 26 aa, synthetic construct
NSGVVQSPRYIIKGKGERSILKCIPI

SEQ ID NO: 242 - protein, 26 aa, synthetic construct
AQSVTQPDARVTVSEGASLQLRCKYS

SEQ ID NO: 243 - protein, 26 aa, synthetic construct
EAGVTQSPRYAVLQEGQAVSFWCDPI

SEQ ID NO: 244 - protein, 26 aa, synthetic construct
GDSVTQTEGLVTLTKGLPVMLNCTYQ

SEQ ID NO: 245 - protein, 26 aa, synthetic construct
EAGVTQSPRYAVLQEGQAVSFWCDPI

SEQ ID NO: 246 - protein, 26 aa, synthetic construct
GDSVTQTEGQVTVSESKSLIINCTYS

SEQ ID NO: 247 - protein, 26 aa, synthetic construct
EAGVTQSPRYAVLQEGQAVSFWCDPI

SEQ ID NO: 248 - protein, 26 aa, synthetic construct
GQQVKQSSPSLTVQEGGISILNCDYE

SEQ ID NO: 249 - protein, 26 aa, synthetic construct
DPKIIQKPKYLVAVTGSEKILICEQY

SEQ ID NO: 250 - protein, 26 aa, synthetic construct
AQSVTQPDARVTVSEGASLQLRCKYS

SEQ ID NO: 251 - protein, 26 aa, synthetic construct
DPKIIQKPKYLVAVTGSEKILICEQY

SEQ ID NO: 252 - protein, 26 aa, synthetic construct
GNSVTQMQGQVTLSEEEFLFINCTYS

SEQ ID NO: 253 - protein, 26 aa, synthetic construct
DPKIIQKPKYLVAVTGSEKILICEQY

SEQ ID NO: 254 - protein, 26 aa, synthetic construct
GDSVTQMQGQVTLSEDDFLFINCTYS

SEQ ID NO: 255 - protein, 26 aa, synthetic construct
ETAVFQTPNYHVTQVGNEVSFNCKQT

SEQ ID NO: 256 - protein, 26 aa, synthetic construct
GQQVQQSPASLVLQEGENAELQCNFS

SEQ ID NO: 257 - protein, 26 aa, synthetic construct
ETAVFQTPNYHVTQVGNEVSFNCKQT

SEQ ID NO: 258 - protein, 26 aa, synthetic construct
GDQVKQSPSALSLQEGTNSALRCNFS

SEQ ID NO: 259 - protein, 26 aa, synthetic construct
ETAVFQTPNYHVTQVGNEVSFNCKQT

SEQ ID NO: 260 - protein, 26 aa, synthetic construct
AQKVTQTQTSISVVEKTTVTMDCVYE

SEQ ID NO: 261 - protein, 26 aa, synthetic construct
EAAVTQSPRNKVAVTGGKVTLSCNQT

SEQ ID NO: 262 - protein, 26 aa, synthetic construct
QQKVQQSPESLIVPEGAMTSLNCTFS

SEQ ID NO: 263 - protein, 26 aa, synthetic construct
EAAVTQSPRNKVAVTGGKVTLSCNQT

SEQ ID NO: 264 - protein, 26 aa, synthetic construct
GDSVTQTEGLVTLTEGLPVMLNCTYQ

SEQ ID NO: 265 - protein, 26 aa, synthetic construct
EAAVTQSPRNKVAVTGGKVTLSCNQT

SEQ ID NO: 266 - protein, 26 aa, synthetic construct
GQQVQQSPASLVLQEGENAELQCNFS

SEQ ID NO: 267 - protein, 26 aa, synthetic construct
EAAVTQSPRNKVAVTGGKVTLSCNQT

SEQ ID NO: 268 - protein, 26 aa, synthetic construct
GEQVEQRPPHLSVREGDSAVITCTYT

SEQ ID NO: 269 - protein, 26 aa, synthetic construct
EAAVTQSPRNKVAVTGGKVTLSCNQT

SEQ ID NO: 270 - protein, 26 aa, synthetic construct
AQKVTQTQTSISVMEKTTVTMDCVYE

SEQ ID NO: 271 - protein, 26 aa, synthetic construct
EAAVTQSPRNKVTVTGGNVTLSCRQT

SEQ ID NO: 272 - protein, 26 aa, synthetic construct
GEQVEQRPPHLSVREGDSAVIICTYT

SEQ ID NO: 273 - protein, 26 aa, synthetic construct
EAAVTQSPRNKVTVTGGNVTLSCRQT

SEQ ID NO: 274 - protein, 26 aa, synthetic construct
GEQVEQRPPHLSVREGDSAIIICTYT

SEQ ID NO: 275 - protein, 26 aa, synthetic construct
EAAVTQSPRNKVTVTGGNVTLSCRQT

SEQ ID NO: 276 - protein, 26 aa, synthetic construct
AQKVTQTQTSISVMEKTTVTMDCVYE

SEQ ID NO: 277 - protein, 26 aa, synthetic construct
EAAVTQSPRNKVTVTGGNVTLSCRQT

SEQ ID NO: 278 - protein, 26 aa, synthetic construct
GEQVEQRPPHLSVREGDSAVITCTYT

SEQ ID NO: 279 - protein, 26 aa, synthetic construct
EAAVTQSPRNKVTVTGGNVTLSCRQT

SEQ ID NO: 280 - protein, 26 aa, synthetic construct
AQSVDQPDAHVTLSEGASLELRCSYS

SEQ ID NO: 281 - protein, 26 aa, synthetic construct
EAAVTQSPRNKVTVTGGNVTLSCRQT

SEQ ID NO: 282 - protein, 26 aa, synthetic construct
QQQVRQSPQSLTVWEGETAILNCSYE

SEQ ID NO: 283 - protein, 26 aa, synthetic construct
EAAVTQSPRNKVTVTGGNVTLSCRQT

SEQ ID NO: 284 - protein, 26 aa, synthetic construct
GDSVTQTEGLVTLTEGLPVMLNCTYQ

SEQ ID NO: 285 - protein, 26 aa, synthetic construct
EAAVTQSPRNKVTVTGGNVTLSCRQT

SEQ ID NO: 286 - protein, 26 aa, synthetic construct
GDQVEQSPSALSLHEGTGSALRCNFT

SEQ ID NO: 287 - protein, 26 aa, synthetic construct
EAAVTQSPRSKVAVTGGKVTLSCHQT

SEQ ID NO: 288 - protein, 26 aa, synthetic construct
GMPVEQNPPALSLYEGADSGLRCNFS

SEQ ID NO: 289 - protein, 26 aa, synthetic construct
EAAVTQSPRSKVAVTGGKVTLSCHQT

SEQ ID NO: 290 - protein, 26 aa, synthetic construct
AQKVTQTQTSISVMEKTTVTMDCVYE

SEQ ID NO: 291 - protein, 26 aa, synthetic construct
EAAVTQSPRSKVAVTGGKVTLSCHQT

SEQ ID NO: 292 - protein, 26 aa, synthetic construct
AQSVTQPDARVTVSEGASLQLRCKYS

SEQ ID NO: 293 - protein, 26 aa, synthetic construct
EAAVTQSPRSKVAVTGGKVTLSCHQT

SEQ ID NO: 294 - protein, 26 aa, synthetic construct
GEQVEQRPPHLSVREGDSAIIICTYT

SEQ ID NO: 295 - protein, 26 aa, synthetic construct
EAAVTQSPRSKVAVTGGKVTLSCHQT

SEQ ID NO: 296 - protein, 26 aa, synthetic construct
QQQVRQSPQSLTVWEGETAILNCSYE

SEQ ID NO: 297 - protein, 26 aa, synthetic construct
EAAVTQSPRSKVAVTGGKVTLSCHQT

SEQ ID NO: 298 - protein, 26 aa, synthetic construct
GMPVEQNPPALSLYEGADSGLRCNFS

SEQ ID NO: 299 - protein, 26 aa, synthetic construct
DTTVKQNPRYKLARVGKPVNLICSQT

SEQ ID NO: 300 - protein, 26 aa, synthetic construct
AQKVTQTQTSISVVEKTTVTMDCVYE

SEQ ID NO: 301 - protein, 26 aa, synthetic construct
DTTVKQNPRYKLARVGKPVNLICSQT

SEQ ID NO: 302 - protein, 26 aa, synthetic construct
AQKVTQTQTSISVMEKTTVTMDCVYE

SEQ ID NO: 303 - protein, 26 aa, synthetic construct
AQTIHQWPVAEIKAVGSPLSLGCTIK

SEQ ID NO: 304 - protein, 26 aa, synthetic construct
AQSVTQPDARVTVSEGASLQLRCKYS

SEQ ID NO: 305 - protein, 26 aa, synthetic construct
AQTIHQWPVAEIKAVGSPLSLGCTIK

SEQ ID NO: 306 - protein, 25 aa, synthetic construct
LAKTTQPPSMEAYEGQEVNVSCSHT

SEQ ID NO: 307 - protein, 26 aa, synthetic construct
GPKVLQIPSHQIIDMGQMVTLNCDPV

SEQ ID NO: 308 - protein, 26 aa, synthetic construct
QQQVRQSPQSLTVWEGETAILNCSYE

SEQ ID NO: 309 - protein, 26 aa, synthetic construct
GALVYQYPRRTICKSGTSMRMECQAV

SEQ ID NO: 310 - protein, 26 aa, synthetic construct
AQRVTQVQPTGSSQWGEEVTLDCSYE

SEQ ID NO: 311 - protein, 26 aa, synthetic construct
GALVYQYPRRTICKSGTSMRMECQAV

SEQ ID NO: 312 - protein, 26 aa, synthetic construct
GEKVEQHESTLSVREGDSAVINCTYT

SEQ ID NO: 313 - protein, 26 aa, synthetic construct
GGIITQTPKFLIGQEGQKLTLKCQQN

SEQ ID NO: 314 - protein, 26 aa, synthetic construct
GDQVKQSPSALSLQEGTNSALRCNFS

SEQ ID NO: 315 - protein, 26 aa, synthetic construct
GGIITQTPKFLIGQEGQKLTLKCQQN

SEQ ID NO: 316 - protein, 26 aa, synthetic construct
GEQVEQRPPHLSVREGDSAVITCTYT

SEQ ID NO: 317 - protein, 26 aa, synthetic construct
VTLLEQNPRWRLVPRGQAVNLRCILK

SEQ ID NO: 318 - protein, 26 aa, synthetic construct
AQRVTQVQPTGSSQWGEEVTLDCSYE

SEQ ID NO: 319 - protein, 26 aa, synthetic construct
VTLLEQNPRWRLVPRGQAVNLRCILK

SEQ ID NO: 320 - protein, 26 aa, synthetic construct
AQSVTQPDARVTVSEGASLQLRCKYS

SEQ ID NO: 321 - protein, 26 aa, synthetic construct
VTLLEQNPRWRLVPRGQAVNLRCILK

SEQ ID NO: 322 - protein, 26 aa, synthetic construct
GQQVQQSPSSLVLQEGENAELQCNFS

SEQ ID NO: 323 - protein, 25 aa, synthetic construct
NTKITQSPRYLILGRANKSLECEQH

SEQ ID NO: 324 - protein, 26 aa, synthetic construct
GEKVEQHESTLSVREGDSAVINCTYT

SEQ ID NO: 325 - protein, 25 aa, synthetic construct
NTKITQSPRYLILGRANKSLECEQH

SEQ ID NO: 326 - protein, 26 aa, synthetic construct
GDSVTQTEGLVTLTKGLPVMLNCTYQ

SEQ ID NO: 327 - protein, 25 aa, synthetic construct
NTKITQSPRYLILGRANKSLECEQH

SEQ ID NO: 328 - protein, 26 aa, synthetic construct
GDSVTQTEGQVTVSESKSLIINCTYS

SEQ ID NO: 329 - protein, 25 aa, synthetic construct
NTKITQSPRYLILGRANKSLECEQH

SEQ ID NO: 330 - protein, 26 aa, synthetic construct
GDSVTQTEGLVTLTKGLPVMLNCTYQ

SEQ ID NO: 331 - protein, 25 aa, synthetic construct
NTKITQSPRYLILGRANKSLECEQH

SEQ ID NO: 332 - protein, 26 aa, synthetic construct
GDSVTQTEGPVTLSEGTSLTVNCSYE

SEQ ID NO: 333 - protein, 25 aa, synthetic construct
NTKITQSPRYLILGRANKSLECEQH

SEQ ID NO: 334 - protein, 26 aa, synthetic construct
GDSVTQTEGQVALSEEDFLTIHCNYS

SEQ ID NO: 335 - protein, 26 aa, synthetic construct
NAGVIQTPRHKVTGKGQEATLWCEPI

SEQ ID NO: 336 - protein, 26 aa, synthetic construct
TQTVSQSDAHVTVFEGDSVELRCNYS

SEQ ID NO: 337 - protein, 26 aa, synthetic construct
NAGVIQTPRHKVTGKGQEATLWCEPI

SEQ ID NO: 338 - protein, 25 aa, synthetic construct
GQGVEQPDNLMSVEGTFARVNCTYS

SEQ ID NO: 339 - protein, 26 aa, synthetic construct
NAGVIQTPRHKVTGKGQEATLWCEPI

SEQ ID NO: 340 - protein, 26 aa, synthetic construct
AQSVTQPDARVTVSEGASLQLRCKYS

SEQ ID NO: 341 - protein, 26 aa, synthetic construct
EAGVTQSPRYAVLQEGQAVSFWCDPI

SEQ ID NO: 342 - protein, 26 aa, synthetic construct
GEKVEQHESTLSVREGDSAVINCTYT

SEQ ID NO: 343 - protein, 26 aa, synthetic construct
EAGVTQSPRYAVLQEGQAVSFWCDPI

SEQ ID NO: 344 - protein, 25 aa, synthetic construct
DAKTTQPDSMESTEGETVHLPCSHA

SEQ ID NO: 345 - protein, 26 aa, synthetic construct
EAGVTQSPRYAVLQEGQAVSFWCDPI

SEQ ID NO: 346 - protein, 26 aa, synthetic construct
QQKVQQSPESLIVPEGAMTSLNCTFS

SEQ ID NO: 347 - protein, 26 aa, synthetic construct
EAGVTQSPRYAVLQEGQAVSFWCDPI

SEQ ID NO: 348 - protein, 26 aa, synthetic construct
GEKVEQHESTLSVREGDSAVINCTYT

SEQ ID NO: 349 - protein, 26 aa, synthetic construct
DMKVTQMPRYLIKRMGENVLLECGQD

SEQ ID NO: 350 - protein, 26 aa, synthetic construct
AEKVIQVWSTASRQEGEELTLDCSYE

SEQ ID NO: 351 - protein, 26 aa, synthetic construct
DPKIIQKPKYLVAVTGSEKILICEQY

SEQ ID NO: 352 - protein, 26 aa, synthetic construct
GNSVTQMQGQVTLSEEEFLFINCTYS

SEQ ID NO: 353 - protein, 26 aa, synthetic construct
DPKIIQKPKYLVAVTGSEKILICEQY

SEQ ID NO: 354 - protein, 26 aa, synthetic construct
GQQVQQSPASLVLQEGENAELQCNFS

SEQ ID NO: 355 - protein, 26 aa, synthetic construct
DPKIIQKPKYLVAVTGSEKILICEQY

SEQ ID NO: 356 - protein, 26 aa, synthetic construct
AQSVTQPDARVTVSEGASLQLRCKYS

SEQ ID NO: 357 - protein, 26 aa, synthetic construct
DPKIIQKPKYLVAVTGSEKILICEQY

SEQ ID NO: 358 - protein, 26 aa, synthetic construct
GQQVQQSPASLVLQEGENAELQCNFS

SEQ ID NO: 359 - protein, 26 aa, synthetic construct
DPKIIQKPKYLVAVTGSEKILICEQY

SEQ ID NO: 360 - protein, 26 aa, synthetic construct
GQQVQQSPASLVLQEGENAELQCNFS

SEQ ID NO: 361 - protein, 26 aa, synthetic construct
DPKIIQKPKYLVAVTGSEKILICEQY

SEQ ID NO: 362 - protein, 26 aa, synthetic construct
GDSVTQTEGQVTVSESKSLIINCTYS

SEQ ID NO: 363 - protein, 26 aa, synthetic construct
ETAVFQTPNYHVTQVGNEVSFNCKQT

SEQ ID NO: 364 - protein, 26 aa, synthetic construct
GQQVQQSPASLVLQEGENAELQCNFS

SEQ ID NO: 365 - protein, 26 aa, synthetic construct
ETAVFQTPNYHVTQVGNEVSFNCKQT

SEQ ID NO: 366 - protein, 26 aa, synthetic construct
GEKVEQHQSTLSVREGDSAVINCTYT

SEQ ID NO: 367 - protein, 26 aa, synthetic construct
ETAVFQTPNYHVTQVGNEVSFNCKQT

SEQ ID NO: 368 - protein, 26 aa, synthetic construct
GEQVEQRPPHLSVREGDSAVIICTYT

SEQ ID NO: 369 - protein, 26 aa, synthetic construct
ETAVFQTPNYHVTQVGNEVSFNCKQT

SEQ ID NO: 370 - protein, 26 aa, synthetic construct
QQQVRQSSQSLTVWEGETAILNCSYE

SEQ ID NO: 371 - protein, 26 aa, synthetic construct
ETAVFQTPNYHVTQVGNEVSFNCKQT

SEQ ID NO: 372 - protein, 26 aa, synthetic construct
GQQVQQSPASLVLQEGENAELQCNFS

SEQ ID NO: 373 - protein, 26 aa, synthetic construct
ETAVFQTPNYHVTQVGNEVSFNCKQT

SEQ ID NO: 374 - protein, 26 aa, synthetic construct
QQQVRQSPQSLTVWEGGTTVLTCSYE

SEQ ID NO: 375 - protein, 26 aa, synthetic construct
ETAVFQTPNYHVTQVGNEVSFNCKQT

SEQ ID NO: 376 - protein, 26 aa, synthetic construct
QQKVQQSPESLIVPEGAMTSLNCTFS

SEQ ID NO: 377 - protein, 26 aa, synthetic construct
ETAVFQTPNYHVTQVGNEVSFNCKQT

SEQ ID NO: 378 - protein, 26 aa, synthetic construct
GEQVEQLPSILRVQEGSSASINCTYE

SEQ ID NO: 379 - protein, 26 aa, synthetic construct
ETAVFQTPNYHVTQVGNEVSFNCKQT

SEQ ID NO: 380 - protein, 26 aa, synthetic construct
AQKVTQTQTSISVVEKTTVTMDCVYE

SEQ ID NO: 381 - protein, 26 aa, synthetic construct
EAAVTQSPRNKVAVTGGKVTLSCNQT

SEQ ID NO: 382 - protein, 26 aa, synthetic construct
AQSVTQPDARVTVSEGASLQLRCKYS

SEQ ID NO: 383 - protein, 26 aa, synthetic construct
EAAVTQSPRNKVAVTGGKVTLSCNQT

SEQ ID NO: 384 - protein, 26 aa, synthetic construct
AQSVTQPDARVTVSEGASLQLRCKYS

SEQ ID NO: 385 - protein, 26 aa, synthetic construct
EAAVTQSPRNKVAVTGGKVTLSCNQT

SEQ ID NO: 386 - protein, 26 aa, synthetic construct
AQKVTQTQTSISVMEKTTVTMDCVYE

SEQ ID NO: 387 - protein, 26 aa, synthetic construct
EAAVTQSPRNKVAVTGGKVTLSCNQT

SEQ ID NO: 388 - protein, 26 aa, synthetic construct
AQKVTQTQTSISVVEKTTVTMDCVYE

SEQ ID NO: 389 - protein, 26 aa, synthetic construct
EAAVTQSPRNKVAVTGGKVTLSCNQT

SEQ ID NO: 390 - protein, 26 aa, synthetic construct
GQQVQQSPASLVLQEGENAELQCNFS

SEQ ID NO: 391 - protein, 26 aa, synthetic construct
EAAVTQSPRNKVAVTGGKVTLSCNQT

SEQ ID NO: 392 - protein, 26 aa, synthetic construct
GEKVEQHQSTLSVREGDSAVINCTYT

SEQ ID NO: 393 - protein, 26 aa, synthetic construct
EAAVTQSPRNKVAVTGGKVTLSCNQT

SEQ ID NO: 394 - protein, 25 aa, synthetic construct
DAKTTQPDSMESTEGETVHLPCSHA

SEQ ID NO: 395 - protein, 26 aa, synthetic construct
EAAVTQSPRNKVAVTGGKVTLSCNQT

SEQ ID NO: 396 - protein, 26 aa, synthetic construct
GQQVQQSPASLVLQEGENAELQCNFS

SEQ ID NO: 397 - protein, 26 aa, synthetic construct
EAAVTQSPRNKVTVTGGNVTLSCRQT

SEQ ID NO: 398 - protein, 26 aa, synthetic construct
AQSVDQPDAHVTLYEGASLELRCSYS

SEQ ID NO: 399 - protein, 26 aa, synthetic construct
EAAVTQSPRNKVTVTGGNVTLSCRQT

SEQ ID NO: 400 - protein, 26 aa, synthetic construct
AQKVTQTQTSISVMEKTTVTMDCVYE

SEQ ID NO: 401 - protein, 26 aa, synthetic construct
EAAVTQSPRNKVTVTGGNVTLSCRQT

SEQ ID NO: 402 - protein, 26 aa, synthetic construct
GEQVEQLPSSLIVQEGASVLINCSYT

SEQ ID NO: 403 - protein, 26 aa, synthetic construct
EAAVTQSPRNKVTVTGGNVTLSCRQT

SEQ ID NO: 404 - protein, 26 aa, synthetic construct
GDKVKQSPSALSLQEGTNSALRCNFS

SEQ ID NO: 405 - protein, 26 aa, synthetic construct
EAAVTQSPRNKVTVTGGNVTLSCRQT

SEQ ID NO: 406 - protein, 26 aa, synthetic construct
QQQVRQSPQSLTVWEGETAILNCSYE

SEQ ID NO: 407 - protein, 26 aa, synthetic construct
EAAVTQSPRNKVTVTGGNVTLSCRQT

SEQ ID NO: 408 - protein, 26 aa, synthetic construct
GEQVEQRPPHLSVREGDSAVIICTYT

SEQ ID NO: 409 - protein, 26 aa, synthetic construct
EAAVTQSPRNKVTVTGGNVTLSCRQT

SEQ ID NO: 410 - protein, 26 aa, synthetic construct
GDSVTQMQGQVTLSEDDFLFINCTYS

SEQ ID NO: 411 - protein, 26 aa, synthetic construct
EAAVTQSPRSKVAVTGGKVTLSCHQT

SEQ ID NO: 412 - protein, 25 aa, synthetic construct
GQGVEQPDNLMSVEGTFARVNCTYS

SEQ ID NO: 413 - protein, 26 aa, synthetic construct
EAAVTQSPRSKVAVTGGKVTLSCHQT

SEQ ID NO: 414 - protein, 26 aa, synthetic construct
QQKVQQSPESLIVPEGAMTSLNCTFS

SEQ ID NO: 415 - protein, 26 aa, synthetic construct
EAAVTQSPRSKVAVTGGKVTLSCHQT

SEQ ID NO: 416 - protein, 26 aa, synthetic construct
AQKVTQTQTSISVMEKTTVTMDCVYE

SEQ ID NO: 417 - protein, 26 aa, synthetic construct
EAAVTQSPRSKVAVTGGKVTLSCHQT

SEQ ID NO: 418 - protein, 26 aa, synthetic construct
GEQVEQRPPHLSVREGDSAVIICTYT

SEQ ID NO: 419 - protein, 26 aa, synthetic construct
EAAVTQSPRSKVAVTGGKVTLSCHQT

SEQ ID NO: 420 - protein, 26 aa, synthetic construct
AQSVTQPDARVTVSEGASLQLRCKYS

SEQ ID NO: 421 - protein, 26 aa, synthetic construct
EAAVTQSPRSKVAVTGGKVTLSCHQT

SEQ ID NO: 422 - protein, 26 aa, synthetic construct
QQQVRQSPQSLTVWEGETAILNCSYE

SEQ ID NO: 423 - protein, 26 aa, synthetic construct
EAAVTQSPRSKVAVTGGKVTLSCHQT

SEQ ID NO: 424 - protein, 26 aa, synthetic construct
QQKVQQSPESLIVPEGAMTSLNCTFS

SEQ ID NO: 425 - protein, 26 aa, synthetic construct
EAAVTQSPRSKVAVTGGKVTLSCHQT

SEQ ID NO: 426 - protein, 25 aa, synthetic construct
GQGVEQPDNLMSVEGTFARVNCTYS

SEQ ID NO: 427 - protein, 26 aa, synthetic construct
DTTVKQNPRYKLARVGKPVNLICSQT

SEQ ID NO: 428 - protein, 26 aa, synthetic construct
GQQVKQSSPSLTVQEGGILILNCDYE

SEQ ID NO: 429 - protein, 26 aa, synthetic construct
DTTVKQNPRYKLARVGKPVNLICSQT

SEQ ID NO: 430 - protein, 26 aa, synthetic construct
GEQVEQRPPHLSVREGDSAIIICTYT

SEQ ID NO: 431 - protein, 26 aa, synthetic construct
AQTIHQWPVAEIKAVGSPLSLGCTIK

SEQ ID NO: 432 - protein, 26 aa, synthetic construct
QQQVRQSPQSLTVWEGETAILNCSYE

SEQ ID NO: 433 - protein, 26 aa, synthetic construct
AQTIHQWPVAEIKAVGSPLSLGCTIK

SEQ ID NO: 434 - protein, 26 aa, synthetic construct
DSVTQTEGPVTLSEGTSLTVNCSYET

SEQ ID NO: 435 - protein, 26 aa, synthetic construct
AQTIHQWPVAEIKAVGSPLSLGCTIK

SEQ ID NO: 436 - protein, 26 aa, synthetic construct
AEKVIQVWSTASRQEGEELTLDCSYE

SEQ ID NO: 437 - protein, 26 aa, synthetic construct
AQTIHQWPVAEIKAVGSPLSLGCTIK

SEQ ID NO: 438 - protein, 26 aa, synthetic construct
GEKVEQHESTLSVREGDSAVINCTYT

SEQ ID NO: 439 - protein, 26 aa, synthetic construct
GALVYQYPRRTICKSGTSMRMECQAV

SEQ ID NO: 440 - protein, 26 aa, synthetic construct
GEQVEQRPPHLSVREGDSAVITCTYT

SEQ ID NO: 441 - protein, 26 aa, synthetic construct
GALVYQYPRRTICKSGTSMRMECQAV

SEQ ID NO: 442 - protein, 26 aa, synthetic construct
GEQVEQLPSILRVQEGSSASINCTYE

SEQ ID NO: 443 - protein, 26 aa, synthetic construct
GGIITQTPKFLIGQEGQKLTLKCQQN

SEQ ID NO: 444 - protein, 26 aa, synthetic construct
GDSVTQTEGQVALSEEDFLTIHCNYS

SEQ ID NO: 445 - protein, 26 aa, synthetic construct
GGIITQTPKFLIGQEGQKLTLKCQQN

SEQ ID NO: 446 - protein, 26 aa, synthetic construct
GEKVEQHESTLSVREGDSAVINCTYT

SEQ ID NO: 447 - protein, 26 aa, synthetic construct
GGIITQTPKFLIGQEGQKLTLKCQQN

SEQ ID NO: 448 - protein, 26 aa, synthetic construct
GDQVEQSPSALSLHEGTGSALRCNFT

SEQ ID NO: 449 - protein, 26 aa, synthetic construct
GGIITQTPKFLIGQEGQKLTLKCQQN

SEQ ID NO: 450 - protein, 26 aa, synthetic construct
QQQVRQSPQSLTVWEGETAILNCSYE

SEQ ID NO: 451 - protein, 26 aa, synthetic construct
GGIITQTPKFLIGQEGQKLTLKCQQN

SEQ ID NO: 452 - protein, 26 aa, synthetic construct
GDSVTQTEGQVALSEEDFLTIHCNYS

SEQ ID NO: 453 - protein, 26 aa, synthetic construct
GGIITQTPKFLIGQEGQKLTLKCQQN

SEQ ID NO: 454 - protein, 26 aa, synthetic construct
GEQVEQRPPHLSVREGDSAVIICTYT

SEQ ID NO: 455 - protein, 26 aa, synthetic construct
GGIITQTPKFLIGQEGQKLTLKCQQN

SEQ ID NO: 456 - protein, 26 aa, synthetic construct
GDSVIQMQGQVTLSENDFLFINCTYS

SEQ ID NO: 457 - protein, 26 aa, synthetic construct
GGIITQTPKFLIGQEGQKLTLKCQQN

SEQ ID NO: 458 - protein, 26 aa, synthetic construct
GDSVTQTEGQVTVSESKSLIINCTYS

SEQ ID NO: 459 - protein, 26 aa, synthetic construct
GGIITQTPKFLIGQEGQKLTLKCQQN

SEQ ID NO: 460 - protein, 26 aa, synthetic construct
GEQVEQRPPHLSVREGDSAVIICTYT

SEQ ID NO: 461 - protein, 26 aa, synthetic construct
GGIITQTPKFLIGQEGQKLTLKCQQN

SEQ ID NO: 462 - protein, 26 aa, synthetic construct
AQSVTQPDARVTVSEGASLQLRCKYS

SEQ ID NO: 463 - protein, 26 aa, synthetic construct
GGIITQTPKFLIGQEGQKLTLKCQQN

SEQ ID NO: 464 - protein, 26 aa, synthetic construct
GDSVTQTEGLVTLTEGLPVMLNCTYQ

SEQ ID NO: 465 - protein, 26 aa, synthetic construct
GGIITQTPKFLIGQEGQKLTLKCQQN

SEQ ID NO: 466 - protein, 26 aa, synthetic construct
AQSVTQPDARVTVSEGASLQLRCKYS

SEQ ID NO: 467 - protein, 26 aa, synthetic construct
GGIITQTPKFLIGQEGQKLTLKCQQN

SEQ ID NO: 468 - protein, 26 aa, synthetic construct
QQQVRQSPQSLTVWEGETAILNCSYE

SEQ ID NO: 469 - protein, 26 aa, synthetic construct
VTLLEQNPRWRLVPRGQAVNLRCILK

SEQ ID NO: 470 - protein, 26 aa, synthetic construct
AQSVTQPDARVTVSEGASLQLRCKYS

SEQ ID NO: 471 - protein, 26 aa, synthetic construct
VTLLEQNPRWRLVPRGQAVNLRCILK

SEQ ID NO: 472 - protein, 26 aa, synthetic construct
AQKVTQTQTSISVMEKTTVTMDCVYE

SEQ ID NO: 473 - protein, 26 aa, synthetic construct
VTLLEQNPRWRLVPRGQAVNLRCILK

SEQ ID NO: 474 - protein, 26 aa, synthetic construct
QQKVQQSPESLSVPEGGMASFNCTSS

SEQ ID NO: 475 - protein, 26 aa, synthetic construct
VTLLEQNPRWRLVPRGQAVNLRCILK

SEQ ID NO: 476 - protein, 26 aa, synthetic construct
GDKVKQSPSALSLQEGTNSALRCNFS

SEQ ID NO: 477 - protein, 26 aa, synthetic construct
VTLLEQNPRWRLVPRGQAVNLRCILK

SEQ ID NO: 478 - protein, 26 aa, synthetic construct
GDSVTQTEGQVTVSESKSLIINCTYS

SEQ ID NO: 479 - protein, 26 aa, synthetic construct
VTLLEQNPRWRLVPRGQAVNLRCILK

SEQ ID NO: 480 - protein, 26 aa, synthetic construct
QQNVQQSPESLIVPEGARTSLNCTFS

SEQ ID NO: 481 - protein, 26 aa, synthetic construct
VTLLEQNPRWRLVPRGQAVNLRCILK

SEQ ID NO: 482 - protein, 26 aa, synthetic construct
AQSVTQPDARVTVSEGASLQLRCKYS

SEQ ID NO: 483 - protein, 25 aa, synthetic construct
NTKITQSPRYLILGRANKSLECEQH

SEQ ID NO: 484 - protein, 25 aa, synthetic construct
DAKTTQPDSMESTEGETVHLPCSHA

SEQ ID NO: 485 - protein, 25 aa, synthetic construct
NTKITQSPRYLILGRANKSLECEQH

SEQ ID NO: 486 - protein, 26 aa, synthetic construct
AQSVTQPDARVTVSEGASLQLRCKYS

SEQ ID NO: 487 - protein, 25 aa, synthetic construct
NTKITQSPRYLILGRANKSLECEQH

SEQ ID NO: 488 - protein, 26 aa, synthetic construct
GEQVEQRPPHLSVREGDSAVIICTYT

SEQ ID NO: 489 - protein, 25 aa, synthetic construct
NTKITQSPRYLILGRANKSLECEQH

SEQ ID NO: 490 - protein, 26 aa, synthetic construct
GDSVTQTEGQVTVSESKSLIINCTYS

SEQ ID NO: 491 - protein, 25 aa, synthetic construct
NTKITQSPRYLILGRANKSLECEQH

SEQ ID NO: 492 - protein, 26 aa, synthetic construct
GDSVTQTEGPVTVSESESLIINCTYS

SEQ ID NO: 493 - protein, 25 aa, synthetic construct
NTKITQSPRYLILGRANKSLECEQH

SEQ ID NO: 494 - protein, 26 aa, synthetic construct
GDQVEQSPSALSLHEGTGSALRCNFT

SEQ ID NO: 495 - protein, 25 aa, synthetic construct
NTKITQSPRYLILGRANKSLECEQH

SEQ ID NO: 496 - protein, 25 aa, synthetic construct
GQGVEQPDNLMSVEGTFARVNCTYS

SEQ ID NO: 497 - protein, 25 aa, synthetic construct
NTKITQSPRYLILGRANKSLECEQH

SEQ ID NO: 498 - protein, 26 aa, synthetic construct
QQNVQQSPESLIVPEGARTSLNCTFS

SEQ ID NO: 499 - protein, 25 aa, synthetic construct
NTKITQSPRYLILGRANKSLECEQH

SEQ ID NO: 500 - protein, 26 aa, synthetic construct
GDSVTQTEGQVTVSESKSLIINCTYS

SEQ ID NO: 501 - protein, 25 aa, synthetic construct
NTKITQSPRYLILGRANKSLECEQH

SEQ ID NO: 502 - protein, 26 aa, synthetic construct
TQTVSQSDAHVTVFEGDSVELRCNYS

SEQ ID NO: 503 - protein, 25 aa, synthetic construct
NTKITQSPRYLILGRANKSLECEQH

SEQ ID NO: 504 - protein, 26 aa, synthetic construct
GQQVKQSSPSLTVQEGGISILNCDYE

SEQ ID NO: 505 - protein, 25 aa, synthetic construct
NTKITQSPRYLILGRANKSLECEQH

SEQ ID NO: 506 - protein, 26 aa, synthetic construct
AQKVTQTQTSISVMEKTTVTMDCVYE

SEQ ID NO: 507 - protein, 25 aa, synthetic construct
NTKITQSPRYLILGRANKSLECEQH

SEQ ID NO: 508 - protein, 26 aa, synthetic construct
GDSVTQTEGPVTVSESESLIINCTYS

SEQ ID NO: 509 - protein, 25 aa, synthetic construct
NTKITQSPRYLILGRANKSLECEQH

SEQ ID NO: 510 - protein, 26 aa, synthetic construct
GDSVTQKQGQVTLSEDDFLFINCTYS

SEQ ID NO: 511 - protein, 25 aa, synthetic construct
NTKITQSPRYLILGRANKSLECEQH

SEQ ID NO: 512 - protein, 26 aa, synthetic construct
GQQVQQSPASLVLQEGENAELQCNFS

SEQ ID NO: 513 - protein, 25 aa, synthetic construct
NTKITQSPRYLILGRANKSLECEQH

SEQ ID NO: 514 - protein, 26 aa, synthetic construct
AQSVTQPDARVTVSEGASLQLRCKYS

SEQ ID NO: 515 - protein, 25 aa, synthetic construct
NTKITQSPRYLILGRANKSLECEQH

SEQ ID NO: 516 - protein, 26 aa, synthetic construct
GDSVTQTEGPVTVSESESLIINCTYS

SEQ ID NO: 517 - protein, 25 aa, synthetic construct
NTKITQSPRYLILGRANKSLECEQH

SEQ ID NO: 518 - protein, 26 aa, synthetic construct
GDSVTQTEGQVALSEEDFLTIHCNYS

SEQ ID NO: 519 - protein, 25 aa, synthetic construct
NTKITQSPRYLILGRANKSLECEQH

SEQ ID NO: 520 - protein, 25 aa, synthetic construct
GQGVEQPDNLMSVEGTFARVNCTYS

SEQ ID NO: 521 - protein, 25 aa, synthetic construct
NTKITQSPRYLILGRANKSLECEQH

SEQ ID NO: 522 - protein, 26 aa, synthetic construct
AQKVTQTQTSISVMEKTTVTMDCVYE

SEQ ID NO: 523 - protein, 25 aa, synthetic construct
NTKITQSPRYLILGRANKSLECEQH

SEQ ID NO: 524 - protein, 26 aa, synthetic construct
QQKVQQSPESLSVPEGGMASLNCTSS

SEQ ID NO: 525 - protein, 25 aa, synthetic construct
NTKITQSPRYLILGRANKSLECEQH

SEQ ID NO: 526 - protein, 26 aa, synthetic construct
QQNVQQSPESLIVPEGARTSLNCTFS

SEQ ID NO: 527 - protein, 25 aa, synthetic construct
NTKITQSPRYLILGRANKSLECEQH

SEQ ID NO: 528 - protein, 26 aa, synthetic construct
GQQVQQSPTSLVLQEGENAELQCNFS

SEQ ID NO: 529 - protein, 25 aa, synthetic construct
NTKITQSPRYLILGRANKSLECEQH

SEQ ID NO: 530 - protein, 26 aa, synthetic construct
KTQVEQSPQSLVVRQGENCVLQCNYS

SEQ ID NO: 531 - protein, 25 aa, synthetic construct
NTKITQSPRYLILGRANKSLECEQH

SEQ ID NO: 532 - protein, 26 aa, synthetic construct
QQQVRQSPQSLTVWEGETAILNCSYE

SEQ ID NO: 533 - protein, 25 aa, synthetic construct
NTKITQSPRYLILGRANKSLECEQH

SEQ ID NO: 534 - protein, 26 aa, synthetic construct
GDSVTQTEGPVTVSESESLIINCTYS

SEQ ID NO: 535 - protein, 25 aa, synthetic construct
NTKITQSPRYLILGRANKSLECEQH

SEQ ID NO: 536 - protein, 26 aa, synthetic construct
GDSVTQTEGLVTLTEGLPVMLNCTYQ

SEQ ID NO: 537 - protein, 25 aa, synthetic construct
NTKITQSPRYLILGRANKSLECEQH

SEQ ID NO: 538 - protein, 26 aa, synthetic construct
GEQVEQRPPHLSVREGDSAVIICTYT

SEQ ID NO: 539 - protein, 25 aa, synthetic construct
NTKITQSPRYLILGRANKSLECEQH

SEQ ID NO: 540 - protein, 25 aa, synthetic construct
LAKTTQPPSMEAYEGQEVNVSCSHT

SEQ ID NO: 541 - protein, 25 aa, synthetic construct
NTKITQSPRYLILGRANKSLECEQH

SEQ ID NO: 542 - protein, 26 aa, synthetic construct
AQSVDQPDAHVTLSEGASLELRCSYS

SEQ ID NO: 543 - protein, 25 aa, synthetic construct
NTKITQSPRYLILGRANKSLECEQH

SEQ ID NO: 544 - protein, 26 aa, synthetic construct
QQKVQQSPESLIVPEGGMASLNCTSS

SEQ ID NO: 545 - protein, 25 aa, synthetic construct
NTKITQSPRYLILGRANKSLECEQH

SEQ ID NO: 546 - protein, 26 aa, synthetic construct
EQQVQQSPASLVLQEGENAELQCSFS

SEQ ID NO: 547 - protein, 25 aa, synthetic construct
NTKITQSPRYLILGRANKSLECEQH

SEQ ID NO: 548 - protein, 26 aa, synthetic construct
AQSVTQPDARVTVSEGASLQLRCKYS

SEQ ID NO: 549 - protein, 25 aa, synthetic construct
NTKITQSPRYLILGRANKSLECEQH

SEQ ID NO: 550 - protein, 26 aa, synthetic construct
GDKVKQSPSALSLQEGTNSALRCNFS

SEQ ID NO: 551 - protein, 25 aa, synthetic construct
NTKITQSPRYLILGRANKSLECEQH

SEQ ID NO: 552 - protein, 26 aa, synthetic construct
AQKVTQTQTSISVMEKTTVTMDCVYE

SEQ ID NO: 553 - protein, 26 aa, synthetic construct
NAGVIQTPRHKVTGKGQEATLWCEPI

SEQ ID NO: 554 - protein, 26 aa, synthetic construct
AQSVTQPDARVTVSEGASLQLRCKYS

SEQ ID NO: 555 - protein, 26 aa, synthetic construct
NAGVIQTPRHKVTGKGQEATLWCEPI

SEQ ID NO: 556 - protein, 26 aa, synthetic construct
SQLAEENPWALSVHEGESVTVNCSYK

SEQ ID NO: 557 - protein, 26 aa, synthetic construct
NAGVIQTPRHKVTGKGQEATLWCEPI

SEQ ID NO: 558 - protein, 26 aa, synthetic construct
SQLAEENPWALSVHEGESVTVNCSYK

SEQ ID NO: 559 - protein, 26 aa, synthetic construct
NAGVIQTPRHKVTGKGQEATLWCEPI

SEQ ID NO: 560 - protein, 26 aa, synthetic construct
AQSVTQPDARVTVSEGASLQLRCKYS

SEQ ID NO: 561 - protein, 26 aa, synthetic construct
NAGVIQTPRHKVTGKGQEATLWCEPI

SEQ ID NO: 562 - protein, 26 aa, synthetic construct
QQKVQQSPESLIVPEGAMTSLNCTFS

SEQ ID NO: 563 - protein, 26 aa, synthetic construct
NAGVIQTPRHKVTGKGQEATLWCEPI

SEQ ID NO: 564 - protein, 26 aa, synthetic construct
GDQVEQSPSALSLHEGTDSALRCNFT

SEQ ID NO: 565 - protein, 26 aa, synthetic construct
NSGVVQSPRYIIKGKGERSILKCIPI

SEQ ID NO: 566 - protein, 26 aa, synthetic construct
GQQVQQSPASLVLQEGENAELQCNFS

SEQ ID NO: 567 - protein, 26 aa, synthetic construct
SVLLYQKPNRDICQSGTSLKIQCVAD

SEQ ID NO: 568 - protein, 26 aa, synthetic construct
AQSVTQPDARVTVSEGASLQLRCKYS

SEQ ID NO: 569 - protein, 26 aa, synthetic construct
SVLLYQKPNRDICQSGTSLKIQCVAD

SEQ ID NO: 570 - protein, 26 aa, synthetic construct
GEQVEQLPSILRVQERSSASINCTYE

SEQ ID NO: 571 - protein, 26 aa, synthetic construct
SVLLYQKPNRDICQSGTSLKIQCVAD

SEQ ID NO: 572 - protein, 26 aa, synthetic construct
QQNVQQSPESLIVPEGARTSLNCTFS

SEQ ID NO: 573 - protein, 26 aa, synthetic construct
EAGVTQSPRYAVLQEGQAVSFWCDPI

SEQ ID NO: 574 - protein, 26 aa, synthetic construct
QQKVQQSPESLSVPEGGMASFNCTSS

SEQ ID NO: 575 - protein, 26 aa, synthetic construct
EAGVTQSPRYAVLQEGQAVSFWCDPI

SEQ ID NO: 576 - protein, 26 aa, synthetic construct
AQKVTQTQTSISVVEKTTVTMDCVYE

SEQ ID NO: 577 - protein, 26 aa, synthetic construct
EAGVTQSPRYAVLQEGQAVSFWCDPI

SEQ ID NO: 578 - protein, 26 aa, synthetic construct
GDSVTQTEGQVALSEEDFLTIHCNYS

SEQ ID NO: 579 - protein, 26 aa, synthetic construct
EAGVTQSPRYAVLQEGQAVSFWCDPI

SEQ ID NO: 580 - protein, 26 aa, synthetic construct
GDSVTQTEGPVTLSEGTSLTVNCSYE

SEQ ID NO: 581 - protein, 26 aa, synthetic construct
EAGVTQSPRYAVLQEGQAVSFWCDPI

SEQ ID NO: 582 - protein, 26 aa, synthetic construct
TQTVSQSDAHVTVFEGDSVELRCNYS

SEQ ID NO: 583 - protein, 26 aa, synthetic construct
EAGVTQSPRYAVLQEGQAVSFWCDPI

SEQ ID NO: 584 - protein, 26 aa, synthetic construct
GQQVKQSSPSLTVQEGGISILNCDYE

SEQ ID NO: 585 - protein, 26 aa, synthetic construct
EAGVTQSPRYAVLQEGQAVSFWCDPI

SEQ ID NO: 586 - protein, 26 aa, synthetic construct
GDSVTQTEGQVALSEEDFLTIHCNYS

SEQ ID NO: 587 - protein, 26 aa, synthetic construct
EAGVTQSPRYAVLQEGQAVSFWCDPI

SEQ ID NO: 588 - protein, 26 aa, synthetic construct
GDSVTQTEGPVTLSEGTSLTVNCSYE

SEQ ID NO: 589 - protein, 26 aa, synthetic construct
EAGVTQSPRYAVLQEGQAVSFWCDPI

SEQ ID NO: 590 - protein, 26 aa, synthetic construct
AQSVTQPDARVTVSEGASLQLRCKYS

SEQ ID NO: 591 - protein, 26 aa, synthetic construct
EAGVTQSPRYAVLQEGQAVSFWCDPI

SEQ ID NO: 592 - protein, 26 aa, synthetic construct
AQSVTQPDARVTVSEGASLQLRCKYS

SEQ ID NO: 593 - protein, 26 aa, synthetic construct
EAGVTQSPRYAVLQEGQAVSFWCDPI

SEQ ID NO: 594 - protein, 26 aa, synthetic construct
GQQVKQSSPSLTVQEGGISILNCDYE

SEQ ID NO: 595 - protein, 26 aa, synthetic construct
EAGVTQSPRYAVLQEGQAVSFWCDPI

SEQ ID NO: 596 - protein, 26 aa, synthetic construct
QQKVQQSPESLIVPEGGMASLNCTSS

SEQ ID NO: 597 - protein, 26 aa, synthetic construct
EAGVTQSPRYAVLQEGQAVSFWCDPI

SEQ ID NO: 598 - protein, 26 aa, synthetic construct
QQKVQQSPESLSVPEGGMASFNCTSS

SEQ ID NO: 599 - protein, 26 aa, synthetic construct
EAGVTQSPRYAVLQEGQAVSFWCDPI

SEQ ID NO: 600 - protein, 26 aa, synthetic construct
GDSVTQTEGQVTVSESKSLIINCTYS

SEQ ID NO: 601 - protein, 26 aa, synthetic construct
EAGVTQSPRYAVLQEGQAVSFWCDPI

SEQ ID NO: 602 - protein, 26 aa, synthetic construct
GEQVEQLPSILRVQERSSASINCTYE

SEQ ID NO: 603 - protein, 26 aa, synthetic construct
EAGVTQSPRYAVLQEGQAVSFWCDPI

SEQ ID NO: 604 - protein, 26 aa, synthetic construct
GQQVQQSPASLVLQEGENAELQCNFS

SEQ ID NO: 605 - protein, 26 aa, synthetic construct
EAGVTQSPRYAVLQEGQAVSFWCDPI

SEQ ID NO: 606 - protein, 26 aa, synthetic construct
GDSVTQTEGLVTLTKGLPVMLNCTYQ

SEQ ID NO: 607 - protein, 26 aa, synthetic construct
EAGVTQSPRYAVLQEGQAVSFWCDPI

SEQ ID NO: 608 - protein, 26 aa, synthetic construct
GDSVTQTEGPVTVSESESLIINCTYS

SEQ ID NO: 609 - protein, 26 aa, synthetic construct
EAGVTQSPRYAVLQEGQAVSFWCDPI

SEQ ID NO: 610 - protein, 26 aa, synthetic construct
AQKVTQTQTSISVMEKTTVTMDCVYE

SEQ ID NO: 611 - protein, 26 aa, synthetic construct
EAGVTQSPRYAVLQEGQAVSFWCDPI

SEQ ID NO: 612 - protein, 26 aa, synthetic construct
AQKVTQTQTSISVMEKTTVTMDCVYE

SEQ ID NO: 613 - protein, 26 aa, synthetic construct
EAGVTQSPRYAVLQEGQAVSFWCDPI

SEQ ID NO: 614 - protein, 26 aa, synthetic construct
SQLAEENSWALSVHEGESVTVNCSYK

SEQ ID NO: 615 - protein, 26 aa, synthetic construct
EAGVTQSPRYAVLQEGQAVSFWCDPI

SEQ ID NO: 616 - protein, 26 aa, synthetic construct
AQSVTQPDARVTVSEGASLQLRCKYS

SEQ ID NO: 617 - protein, 26 aa, synthetic construct
EAGVTQSPRYAVLQEGQAVSFWCDPI

SEQ ID NO: 618 - protein, 26 aa, synthetic construct
QQQVRQSPQSLTVWEGETAILNCSYE

SEQ ID NO: 619 - protein, 26 aa, synthetic construct
EAGVTQSPRYAVLQEGQAVSFWCDPI

SEQ ID NO: 620 - protein, 26 aa, synthetic construct
GDQVEQSPSALSLHEGTSSALRCNFT

SEQ ID NO: 621 - protein, 26 aa, synthetic construct
EAGVTQSPRYAVLQEGQAVSFWCDPI

SEQ ID NO: 622 - protein, 26 aa, synthetic construct
GDSVTQTEGQVALSEEDFLTIHCNYS

SEQ ID NO: 623 - protein, 26 aa, synthetic construct
EAGVTQSPRYAVLQEGQAVSFWCDPI

SEQ ID NO: 624 - protein, 26 aa, synthetic construct
GDSVTQTEGPVTLSEGTSLTVNCSYE

SEQ ID NO: 625 - protein, 26 aa, synthetic construct
EAGVTQSPRYAVLQEGQAVSFWCDPI

SEQ ID NO: 626 - protein, 26 aa, synthetic construct
AQSVTQPDARVTVSEGASLQLRCKYS

SEQ ID NO: 627 - protein, 26 aa, synthetic construct
EAGVTQSPRYAVLQEGQAVSFWCDPI

SEQ ID NO: 628 - protein, 26 aa, synthetic construct
GEQVEQLPSILRVQEGSSASINCTYE

SEQ ID NO: 629 - protein, 26 aa, synthetic construct
EAGVTQSPRYAVLQEGQAVSFWCDPI

SEQ ID NO: 630 - protein, 26 aa, synthetic construct
TQTVSQSDAHVTVFEGDSVELRCNYS

SEQ ID NO: 631 - protein, 26 aa, synthetic construct
DMKVTQMPRYLIKRMGENVLLECGQD

SEQ ID NO: 632 - protein, 26 aa, synthetic construct
GDSVTQTEGPVTVSESESLIINCTYS

SEQ ID NO: 633 - protein, 26 aa, synthetic construct
DMKVTQMPRYLIKRMGENVLLECGQD

SEQ ID NO: 634 - protein, 26 aa, synthetic construct
QQKVQQSPESLIVPEGAMTSLNCTFS

SEQ ID NO: 635 - protein, 26 aa, synthetic construct
DMKVTQMPRYLIKRMGENVLLECGQD

SEQ ID NO: 636 - protein, 26 aa, synthetic construct
AQSVTQPDARVTVSEGASLQLRCKYS

SEQ ID NO: 637 - protein, 26 aa, synthetic construct
DMKVTQMPRYLIKRMGENVLLECGQD

SEQ ID NO: 638 - protein, 26 aa, synthetic construct
SQLAEENLWALSVHEGESVTVNCSYK

SEQ ID NO: 639 - protein, 26 aa, synthetic construct
DMKVTQMPRYLIKRMGENVLLECGQD

SEQ ID NO: 640 - protein, 25 aa, synthetic construct
GQGVEQPDNLMSVEGTFARVNCTYS

SEQ ID NO: 641 - protein, 26 aa, synthetic construct
DMKVTQMPRYLIKRMGENVLLECGQD

SEQ ID NO: 642 - protein, 26 aa, synthetic construct
GDSVTQTEGLVTLTEGLPVMLNCTYQ

SEQ ID NO: 643 - protein, 26 aa, synthetic construct
DMKVTQMPRYLIKRMGENVLLECGQD

SEQ ID NO: 644 - protein, 26 aa, synthetic construct
GDSVTQMQGQVTLSEDDFLFINCTYS

SEQ ID NO: 645 - protein, 26 aa, synthetic construct
DPKIIQKPKYLVAVTGSEKILICEQY

SEQ ID NO: 646 - protein, 26 aa, synthetic construct
GQQVQQSPASLVLQEGENAELQCNFS

SEQ ID NO: 647 - protein, 26 aa, synthetic construct
DPKIIQKPKYLVAVTGSEKILICEQY

SEQ ID NO: 648 - protein, 26 aa, synthetic construct
QQQVRQSPQSLTVWEGETAILNCSYE

SEQ ID NO: 649 - protein, 26 aa, synthetic construct
DPKIIQKPKYLVAVTGSEKILICEQY

SEQ ID NO: 650 - protein, 26 aa, synthetic construct
SQWGEENLQALSIQEGEDVTMNCSYK

SEQ ID NO: 651 - protein, 26 aa, synthetic construct
DPKIIQKPKYLVAVTGSEKILICEQY

SEQ ID NO: 652 - protein, 26 aa, synthetic construct
AQSVTQPDARVTVSEGASLQLRCKYS

SEQ ID NO: 653 - protein, 26 aa, synthetic construct
DPKIIQKPKYLVAVTGSEKILICEQY

SEQ ID NO: 654 - protein, 26 aa, synthetic construct
QQKVQQSPESLIVPEGGMASLNCTSS

SEQ ID NO: 655 - protein, 26 aa, synthetic construct
DPKIIQKPKYLVAVTGSEKILICEQY

SEQ ID NO: 656 - protein, 26 aa, synthetic construct
QQKVQQSPESLTVSEGAMASLNCTFS

SEQ ID NO: 657 - protein, 26 aa, synthetic construct
DPKIIQKPKYLVAVTGSEKILICEQY

SEQ ID NO: 658 - protein, 26 aa, synthetic construct
QQKVQQSPESLSVPEGGMASLNCTSS

SEQ ID NO: 659 - protein, 26 aa, synthetic construct
DPKIIQKPKYLVAVTGSEKILICEQY

SEQ ID NO: 660 - protein, 26 aa, synthetic construct
AQKVTQTQTSISVMEKTTVTMDCVYE

SEQ ID NO: 661 - protein, 26 aa, synthetic construct
DPKIIQKPKYLVAVTGSEKILICEQY

SEQ ID NO: 662 - protein, 26 aa, synthetic construct
AQKVTQTQTSISVVEKTTVTMDCVYE

SEQ ID NO: 663 - protein, 26 aa, synthetic construct
DPKIIQKPKYLVAVTGSEKILICEQY

SEQ ID NO: 664 - protein, 26 aa, synthetic construct
GDSVTQTEGPVTVSESESLIINCTYS

SEQ ID NO: 665 - protein, 26 aa, synthetic construct
DPKIIQKPKYLVAVTGSEKILICEQY

SEQ ID NO: 666 - protein, 26 aa, synthetic construct
GDSVTQMQGQVTLSEDDFLFINCTYS

SEQ ID NO: 667 - protein, 26 aa, synthetic construct
DPKIIQKPKYLVAVTGSEKILICEQY

SEQ ID NO: 668 - protein, 26 aa, synthetic construct
GDSVTQTEGQVALSEEDFLTIHCNYS

SEQ ID NO: 669 - protein, 26 aa, synthetic construct
DPKIIQKPKYLVAVTGSEKILICEQY

SEQ ID NO: 670 - protein, 26 aa, synthetic construct
QQKVQQSPESLIVPEGGMASLNCTFS

SEQ ID NO: 671 - protein, 26 aa, synthetic construct
DPKIIQKPKYLVAVTGSEKILICEQY

SEQ ID NO: 672 - protein, 26 aa, synthetic construct
GEKVEQHESTLSVREGDSAVINCTYT

SEQ ID NO: 673 - protein, 26 aa, synthetic construct
DPKIIQKPKYLVAVTGSEKILICEQY

SEQ ID NO: 674 - protein, 26 aa, synthetic construct
AQKVTQTQTSISVVEKTTVTMDCVYE

SEQ ID NO: 675 - protein, 26 aa, synthetic construct
DPKIIQKPKYLVAVTGSEKILICEQY

SEQ ID NO: 676 - protein, 26 aa, synthetic construct
AQSVTQPDARVTVSEGASLQLRCKYS

SEQ ID NO: 677 - protein, 26 aa, synthetic construct
DPKIIQKPKYLVAVTGSEKILICEQY

SEQ ID NO: 678 - protein, 26 aa, synthetic construct
SQLAEENLWALSVHEGESVTVNCSYK

SEQ ID NO: 679 - protein, 26 aa, synthetic construct
DPKIIQKPKYLVAVTGSEKILICEQY

SEQ ID NO: 680 - protein, 26 aa, synthetic construct
GQQVQQSPSSLVLQEGENAELQCNFS

SEQ ID NO: 681 - protein, 26 aa, synthetic construct
DPKIIQKPKYLVAVTGSEKILICEQY

SEQ ID NO: 682 - protein, 26 aa, synthetic construct
GEQVEQRPPHLSVREGDSAVIICTYT

SEQ ID NO: 683 - protein, 26 aa, synthetic construct
DPKIIQKPKYLVAVTGSEKILICEQY

SEQ ID NO: 684 - protein, 26 aa, synthetic construct
AQSVTQPDARVTVSEGASLQLRCKYS

SEQ ID NO: 685 - protein, 26 aa, synthetic construct
DPKIIQKPKYLVAVTGSEKILICEQY

SEQ ID NO: 686 - protein, 26 aa, synthetic construct
QQKVQQSPESLIVPEGAMTSLNCTFS

SEQ ID NO: 687 - protein, 26 aa, synthetic construct
DPKIIQKPKYLVAVTGSEKILICEQY

SEQ ID NO: 688 - protein, 26 aa, synthetic construct
GQQVKQSSPSLTVQEGGILILNCDYE

SEQ ID NO: 689 - protein, 26 aa, synthetic construct
DPKIIQKPKYLVAVTGSEKILICEQY

SEQ ID NO: 690 - protein, 26 aa, synthetic construct
GQQVQQSPASLVLQEGENAELQCNFS

SEQ ID NO: 691 - protein, 26 aa, synthetic construct
DPKIIQKPKYLVAVTGSEKILICEQY

SEQ ID NO: 692 - protein, 26 aa, synthetic construct
QQKVQQSPESLIVPEGGMASLNCTSS

SEQ ID NO: 693 - protein, 26 aa, synthetic construct
DPKIIQKPKYLVAVTGSEKILICEQY

SEQ ID NO: 694 - protein, 26 aa, synthetic construct
GQQVQQSPASLVLQEGENAELQCNFS

SEQ ID NO: 695 - protein, 26 aa, synthetic construct
DPKIIQKPKYLVAVTGSEKILICEQY

SEQ ID NO: 696 - protein, 26 aa, synthetic construct
GEQVEQLPSILRVQEGSSASINCSYE

SEQ ID NO: 697 - protein, 26 aa, synthetic construct
DPKIIQKPKYLVAVTGSEKILICEQY

SEQ ID NO: 698 - protein, 26 aa, synthetic construct
GDSVTQTEGPVTLSEGTSLTVNCSYE

SEQ ID NO: 699 - protein, 26 aa, synthetic construct
DPKIIQKPKYLVAVTGSEKILICEQY

SEQ ID NO: 700 - protein, 25 aa, synthetic construct
LAKTTQPPSMEAYEGQEVNVSCSHT

SEQ ID NO: 701 - protein, 26 aa, synthetic construct
DPKIIQKPKYLVAVTGSEKILICEQY

SEQ ID NO: 702 - protein, 25 aa, synthetic construct
LAKTTQPPSMEAYEGQEVNVSCSHT

SEQ ID NO: 703 - protein, 26 aa, synthetic construct
DPKIIQKPKYLVAVTGSEKILICEQY

SEQ ID NO: 704 - protein, 26 aa, synthetic construct
GEKVEQHESTLSVREGDSAVINCTYT

SEQ ID NO: 705 - protein, 26 aa, synthetic construct
DPKIIQKPKYLVAVTGSEKILICEQY

SEQ ID NO: 706 - protein, 26 aa, synthetic construct
GEKVEQHESTLSVREGDSAVINCTYT

SEQ ID NO: 707 - protein, 26 aa, synthetic construct
DPKIIQKPKYLVAVTGSEKILICEQY

SEQ ID NO: 708 - protein, 26 aa, synthetic construct
GQQVKQSSPSLTVQEGGISILNCDYE

SEQ ID NO: 709 - protein, 26 aa, synthetic construct
DPKIIQKPKYLVAVTGSEKILICEQY

SEQ ID NO: 710 - protein, 26 aa, synthetic construct
GEKVEQHESTLSVREGDSAVINCTYT

SEQ ID NO: 711 - protein, 26 aa, synthetic construct
ETAVFQTPNYHVTQVGNEVSFNCKQT

SEQ ID NO: 712 - protein, 26 aa, synthetic construct
QQKVQQSPESLIVPEGGMASLNCTSS

SEQ ID NO: 713 - protein, 26 aa, synthetic construct
ETAVFQTPNYHVTQVGNEVSFNCKQT

SEQ ID NO: 714 - protein, 26 aa, synthetic construct
GDSVTQTEGQVTVSESKSLIINCTYS

SEQ ID NO: 715 - protein, 26 aa, synthetic construct
ETAVFQTPNYHVTQVGNEVSFNCKQT

SEQ ID NO: 716 - protein, 26 aa, synthetic construct
GNSVTQMQGQVTLSEEEFLFINCTYS

SEQ ID NO: 717 - protein, 26 aa, synthetic construct
ETAVFQTPNYHVTQVGNEVSFNCKQT

SEQ ID NO: 718 - protein, 26 aa, synthetic construct
GDSVTQTEGLVTLTEGLPVMLNCTYQ

SEQ ID NO: 719 - protein, 26 aa, synthetic construct
ETAVFQTPNYHVTQVGNEVSFNCKQT

SEQ ID NO: 720 - protein, 26 aa, synthetic construct
AQKVTQTQTSISVMEKTTVTMDCVYE

SEQ ID NO: 721 - protein, 26 aa, synthetic construct
ETAVFQTPNYHVTQVGNEVSFNCKQT

SEQ ID NO: 722 - protein, 26 aa, synthetic construct
GQQVQQSPASLVLQEGENAELQCNFS

SEQ ID NO: 723 - protein, 26 aa, synthetic construct
ETAVFQTPNYHVTQVGNEVSFNCKQT

SEQ ID NO: 724 - protein, 26 aa, synthetic construct
QQKVQQSPESLSVPEGGMASLNCTSS

SEQ ID NO: 725 - protein, 26 aa, synthetic construct
ETAVFQTPNYHVTQVGNEVSFNCKQT

SEQ ID NO: 726 - protein, 26 aa, synthetic construct
GQQVQQSPASLVLQEGENAELQCNFS

SEQ ID NO: 727 - protein, 26 aa, synthetic construct
ETAVFQTPNYHVTQVGNEVSFNCKQT

SEQ ID NO: 728 - protein, 26 aa, synthetic construct
GQQVQQSPASLVLQEGENAELQCNFS

SEQ ID NO: 729 - protein, 26 aa, synthetic construct
ETAVFQTPNYHVTQVGNEVSFNCKQT

SEQ ID NO: 730 - protein, 26 aa, synthetic construct
SQWGEENLQALSIQEGEDVTMNCSYK

SEQ ID NO: 731 - protein, 26 aa, synthetic construct
ETAVFQTPNYHVTQVGNEVSFNCKQT

SEQ ID NO: 732 - protein, 26 aa, synthetic construct
AQSVTQPDARVTVSEGASLQLRCKYS

SEQ ID NO: 733 - protein, 26 aa, synthetic construct
ETAVFQTPNYHVTQVGNEVSFNCKQT

SEQ ID NO: 734 - protein, 26 aa, synthetic construct
AQKVTQTQTSISVMEKTTVTMDCVYE

SEQ ID NO: 735 - protein, 26 aa, synthetic construct
ETAVFQTPNYHVTQVGNEVSFNCKQT

SEQ ID NO: 736 - protein, 26 aa, synthetic construct
AQKVTQTQTSISVVEKTTVTMDCVYE

SEQ ID NO: 737 - protein, 26 aa, synthetic construct
ETAVFQTPNYHVTQVGNEVSFNCKQT

SEQ ID NO: 738 - protein, 26 aa, synthetic construct
QQQVRQSPQSLTVWEGETAILNCSYE

SEQ ID NO: 739 - protein, 26 aa, synthetic construct
ETAVFQTPNYHVTQVGNEVSFNCKQT

SEQ ID NO: 740 - protein, 26 aa, synthetic construct
GQQVQQSPASLVLQEGENAELQCNFS

SEQ ID NO: 741 - protein, 26 aa, synthetic construct
ETAVFQTPNYHVTQVGNEVSFNCKQT

SEQ ID NO: 742 - protein, 26 aa, synthetic construct
QQKVQQSPESLTVSEGAMASLNCTFS

SEQ ID NO: 743 - protein, 26 aa, synthetic construct
ETAVFQTPNYHVTQVGNEVSFNCKQT

SEQ ID NO: 744 - protein, 26 aa, synthetic construct
SQWGEENLQALSIQEGEDVTMNCSYK

SEQ ID NO: 745 - protein, 26 aa, synthetic construct
ETAVFQTPNYHVTQVGNEVSFNCKQT

SEQ ID NO: 746 - protein, 26 aa, synthetic construct
GDSVTQTEGQVALSEEDFLTIHCNYS

SEQ ID NO: 747 - protein, 26 aa, synthetic construct
ETAVFQTPNYHVTQVGNEVSFNCKQT

SEQ ID NO: 748 - protein, 26 aa, synthetic construct
GDSVTQTEGPVTLSEGTSLTVNCSYE

SEQ ID NO: 749 - protein, 26 aa, synthetic construct
ETAVFQTPNYHVTQVGNEVSFNCKQT

SEQ ID NO: 750 - protein, 26 aa, synthetic construct
GDSVTQTEGPVTVSESESLIINCTYS

SEQ ID NO: 751 - protein, 26 aa, synthetic construct
ETAVFQTPNYHVTQVGNEVSFNCKQT

SEQ ID NO: 752 - protein, 26 aa, synthetic construct
AQKVTQTQTSISVMEKTTVTMDCVYE

SEQ ID NO: 753 - protein, 26 aa, synthetic construct
ETAVFQTPNYHVTQVGNEVSFNCKQT

SEQ ID NO: 754 - protein, 26 aa, synthetic construct
GDSVTQTEGLVTLTEGLPVMLNCTYQ

SEQ ID NO: 755 - protein, 26 aa, synthetic construct
ETAVFQTPNYHVTQVGNEVSFNCKQT

SEQ ID NO: 756 - protein, 26 aa, synthetic construct
GDSVTQTEGLVTLTEGLPVMLNCTYQ

SEQ ID NO: 757 - protein, 26 aa, synthetic construct
ETAVFQTPNYHVTQVGNEVSFNCKQT

SEQ ID NO: 758 - protein, 26 aa, synthetic construct
QQKVQQSPESLSVPEGGMASLNCTSS

SEQ ID NO: 759 - protein, 26 aa, synthetic construct
ETAVFQTPNYHVTQVGNEVSFNCKQT

SEQ ID NO: 760 - protein, 26 aa, synthetic construct
GEQVEQRPPHLSVREGDSAVIICTYT

SEQ ID NO: 761 - protein, 26 aa, synthetic construct
ETAVFQTPNYHVTQVGNEVSFNCKQT

SEQ ID NO: 762 - protein, 26 aa, synthetic construct
GEQVEQLPSILRVQEGSSASINCSYE

SEQ ID NO: 763 - protein, 26 aa, synthetic construct
EAAVTQSPRNKVAVTGGKVTLSCNQT

SEQ ID NO: 764 - protein, 25 aa, synthetic construct
GQGVEQPAKLMSVEGTFARVNCTYS

SEQ ID NO: 765 - protein, 26 aa, synthetic construct
EAAVTQSPRNKVAVTGGKVTLSCNQT

SEQ ID NO: 766 - protein, 26 aa, synthetic construct
AQKVTQTQTSISVMEKTTVTMDCVYE

SEQ ID NO: 767 - protein, 26 aa, synthetic construct
EAAVTQSPRNKVAVTGGKVTLSCNQT

SEQ ID NO: 768 - protein, 26 aa, synthetic construct
GDSVTQTEGLVTLTEGLPVMLNCTYQ

SEQ ID NO: 769 - protein, 26 aa, synthetic construct
EAAVTQSPRNKVAVTGGKVTLSCNQT

SEQ ID NO: 770 - protein, 26 aa, synthetic construct
AQSVTQPDARVTVSEGASLQLRCKYS

SEQ ID NO: 771 - protein, 26 aa, synthetic construct
EAAVTQSPRNKVAVTGGKVTLSCNQT

SEQ ID NO: 772 - protein, 26 aa, synthetic construct
GDSVTQTEGQVALSEEDFLTIHCNYS

SEQ ID NO: 773 - protein, 26 aa, synthetic construct
EAAVTQSPRNKVAVTGGKVTLSCNQT

SEQ ID NO: 774 - protein, 26 aa, synthetic construct
GQQVQQSPTSLVLQEGENAELQCNFS

SEQ ID NO: 775 - protein, 26 aa, synthetic construct
EAAVTQSPRNKVAVTGGKVTLSCNQT

SEQ ID NO: 776 - protein, 26 aa, synthetic construct
AQSVTQPDARVTVSEGASLQLRCKYS

SEQ ID NO: 777 - protein, 26 aa, synthetic construct
EAAVTQSPRNKVAVTGGKVTLSCNQT

SEQ ID NO: 778 - protein, 26 aa, synthetic construct
GEQVEQLPSILRVQEGSSASINCSYE

SEQ ID NO: 779 - protein, 26 aa, synthetic construct
EAAVTQSPRNKVAVTGGKVTLSCNQT

SEQ ID NO: 780 - protein, 26 aa, synthetic construct
AQKVTQTQTSISVMEKTTVTMDCVYE

SEQ ID NO: 781 - protein, 26 aa, synthetic construct
EAAVTQSPRNKVAVTGGKVTLSCNQT

SEQ ID NO: 782 - protein, 26 aa, synthetic construct
QQQVRQSPQSLTVWEGETAILNCSYE

SEQ ID NO: 783 - protein, 26 aa, synthetic construct
EAAVTQSPRNKVAVTGGKVTLSCNQT

SEQ ID NO: 784 - protein, 26 aa, synthetic construct
GDSVTQTEGPVTVSESESLIINCTYS

SEQ ID NO: 785 - protein, 26 aa, synthetic construct
EAAVTQSPRNKVAVTGGKVTLSCNQT

SEQ ID NO: 786 - protein, 26 aa, synthetic construct
GEQVEQRPPHLSVREGDSAVITCTYT

SEQ ID NO: 787 - protein, 26 aa, synthetic construct
EAAVTQSPRNKVAVTGGKVTLSCNQT

SEQ ID NO: 788 - protein, 26 aa, synthetic construct
QQQVRQSPQSLTVWEGETAILNCSYE

SEQ ID NO: 789 - protein, 26 aa, synthetic construct
EAAVTQSPRNKVAVTGGKVTLSCNQT

SEQ ID NO: 790 - protein, 26 aa, synthetic construct
AQKVTQTQTSISVMEKTTVTMDCVYE

SEQ ID NO: 791 - protein, 26 aa, synthetic construct
EAAVTQSPRNKVAVTGGKVTLSCNQT

SEQ ID NO: 792 - protein, 26 aa, synthetic construct
GQQVQQSPASLVLQEGENAELQCNFS

SEQ ID NO: 793 - protein, 26 aa, synthetic construct
EAAVTQSPRNKVAVTGGKVTLSCNQT

SEQ ID NO: 794 - protein, 26 aa, synthetic construct
GDSVTQMQGQVTLSEDDFLFINCTYS

SEQ ID NO: 795 - protein, 26 aa, synthetic construct
EAAVTQSPRNKVAVTGGKVTLSCNQT

SEQ ID NO: 796 - protein, 26 aa, synthetic construct
GDSVTQTEGLVTLTKGLPVMLNCTYQ

SEQ ID NO: 797 - protein, 26 aa, synthetic construct
EAAVTQSPRNKVAVTGGKVTLSCNQT

SEQ ID NO: 798 - protein, 26 aa, synthetic construct
AQSVTQPDARVTVSEGASLQLRCKYS

SEQ ID NO: 799 - protein, 26 aa, synthetic construct
EAAVTQSPRNKVAVTGGKVTLSCNQT

SEQ ID NO: 800 - protein, 26 aa, synthetic construct
GDSVTQTEGLVTLTKGLPVMLNCTYQ

SEQ ID NO: 801 - protein, 26 aa, synthetic construct
EAAVTQSPRNKVAVTGGKVTLSCNQT

SEQ ID NO: 802 - protein, 26 aa, synthetic construct
QQKVQQSPESLTVSEGAMASLNCTFS

SEQ ID NO: 803 - protein, 26 aa, synthetic construct
EAAVTQSPRNKVAVTGGKVTLSCNQT

SEQ ID NO: 804 - protein, 26 aa, synthetic construct
QQKVQQSPESLIVPEGAMTSLNCTFS

SEQ ID NO: 805 - protein, 26 aa, synthetic construct
EAAVTQSPRNKVAVTGGKVTLSCNQT

SEQ ID NO: 806 - protein, 26 aa, synthetic construct
GDSVTQTEGLVTVTEGLPVKLNCTYQ

SEQ ID NO: 807 - protein, 26 aa, synthetic construct
EAAVTQSPRNKVAVTGGKVTLSCNQT

SEQ ID NO: 808 - protein, 26 aa, synthetic construct
GEQVEQRPPHLSVREGDSAIIICTYT

SEQ ID NO: 809 - protein, 26 aa, synthetic construct
EAAVTQSPRNKVAVTGGKVTLSCNQT

SEQ ID NO: 810 - protein, 26 aa, synthetic construct
AQKVTQTQTSISVMEKTTVTMDCVYE

SEQ ID NO: 811 - protein, 26 aa, synthetic construct
EAAVTQSPRNKVAVTGGKVTLSCNQT

SEQ ID NO: 812 - protein, 26 aa, synthetic construct
AQKVTQTQTSISVMEKTTVTMDCVYE

SEQ ID NO: 813 - protein, 26 aa, synthetic construct
EAAVTQSPRNKVAVTGGKVTLSCNQT

SEQ ID NO: 814 - protein, 26 aa, synthetic construct
GQQVQQSPASLVLQEGENAELQCNFS

SEQ ID NO: 815 - protein, 26 aa, synthetic construct
EAAVTQSPRNKVAVTGGKVTLSCNQT

SEQ ID NO: 816 - protein, 26 aa, synthetic construct
AQKVTQTQTSISVVEKTTVTMDCVYE

SEQ ID NO: 817 - protein, 26 aa, synthetic construct
EAAVTQSPRNKVAVTGGKVTLSCNQT

SEQ ID NO: 818 - protein, 26 aa, synthetic construct
GDSVTQTEGPVTVSESESLIINCTYS

SEQ ID NO: 819 - protein, 26 aa, synthetic construct
EAAVTQSPRNKVAVTGGKVTLSCNQT

SEQ ID NO: 820 - protein, 26 aa, synthetic construct
QQKVQQSPESLTVSEGAMASLNCTFS

SEQ ID NO: 821 - protein, 26 aa, synthetic construct
EAAVTQSPRNKVAVTGGKVTLSCNQT

SEQ ID NO: 822 - protein, 26 aa, synthetic construct
QQKVQQSPESLTVSEGAMASLNCTFS

SEQ ID NO: 823 - protein, 26 aa, synthetic construct
EAAVTQSPRNKVAVTGGKVTLSCNQT

SEQ ID NO: 824 - protein, 26 aa, synthetic construct
AQKVTQTQTSISVVEKTTVTMDCVYE

SEQ ID NO: 825 - protein, 26 aa, synthetic construct
EAAVTQSPRNKVAVTGGKVTLSCNQT

SEQ ID NO: 826 - protein, 26 aa, synthetic construct
AQKVTQTQTSISVVEKTTVTMDCVYE

SEQ ID NO: 827 - protein, 26 aa, synthetic construct
EAAVTQSPRNKVAVTGGKVTLSCNQT

SEQ ID NO: 828 - protein, 26 aa, synthetic construct
GDSVTQTEGLVTVTEGLPVMLNCTYQ

SEQ ID NO: 829 - protein, 26 aa, synthetic construct
EAAVTQSPRNKVAVTGGKVTLSCNQT

SEQ ID NO: 830 - protein, 26 aa, synthetic construct
AQKVTQTQTSISVMEKTTVTMDCVYE

SEQ ID NO: 831 - protein, 26 aa, synthetic construct
EAAVTQSPRNKVAVTGGKVTLSCNQT

SEQ ID NO: 832 - protein, 26 aa, synthetic construct
AQKVTQTQTSISVVEKTTVTMDCVYE

SEQ ID NO: 833 - protein, 26 aa, synthetic construct
EAAVTQSPRNKVAVTGGKVTLSCNQT

SEQ ID NO: 834 - protein, 25 aa, synthetic construct
GQGVEQPDNLMSVEGTFARVNCTYS

SEQ ID NO: 835 - protein, 26 aa, synthetic construct
EAAVTQSPRNKVAVTGGKVTLSCNQT

SEQ ID NO: 836 - protein, 26 aa, synthetic construct
GEQVEQRPPHLSVREGDSAVITCTYT

SEQ ID NO: 837 - protein, 26 aa, synthetic construct
EAAVTQSPRNKVAVTGGKVTLSCNQT

SEQ ID NO: 838 - protein, 26 aa, synthetic construct
GEQVEQRPPHLSVREGDSAVITCTYT

SEQ ID NO: 839 - protein, 26 aa, synthetic construct
EAAVTQSPRNKVAVTGGKVTLSCNQT

SEQ ID NO: 840 - protein, 26 aa, synthetic construct
GDSVTQTEGLVTLTKGLPVMLNCTYQ

SEQ ID NO: 841 - protein, 26 aa, synthetic construct
EAAVTQSPRNKVAVTGGKVTLSCNQT

SEQ ID NO: 842 - protein, 26 aa, synthetic construct
GEQVEQRPPHLSVREGDSAVITCTYT

SEQ ID NO: 843 - protein, 26 aa, synthetic construct
EAAVTQSPRNKVAVTGGKVTLSCNQT

SEQ ID NO: 844 - protein, 26 aa, synthetic construct
GDSVTQTEGLVTLTKGLPVMLNCTYQ

SEQ ID NO: 845 - protein, 26 aa, synthetic construct
EAAVTQSPRNKVAVTGGKVTLSCNQT

SEQ ID NO: 846 - protein, 26 aa, synthetic construct
GEQVEQRPPHLSVREGDSAFITCTYT

SEQ ID NO: 847 - protein, 26 aa, synthetic construct
EAAVTQSPRNKVAVTGGKVTLSCNQT

SEQ ID NO: 848 - protein, 26 aa, synthetic construct
QQKVQQSPESLIVPEGGMASLNCTSS

SEQ ID NO: 849 - protein, 26 aa, synthetic construct
EAAVTQSPRNKVAVTGGKVTLSCNQT

SEQ ID NO: 850 - protein, 26 aa, synthetic construct
GDSVTQTEGPVTLSEGTSLTVNCSYE

SEQ ID NO: 851 - protein, 26 aa, synthetic construct
EAAVTQSPRNKVAVTGGKVTLSCNQT

SEQ ID NO: 852 - protein, 25 aa, synthetic construct
GQGVEQPAKLMSVEGTFARVNCTYS

SEQ ID NO: 853 - protein, 26 aa, synthetic construct
EAAVTQSPRNKVAVTGGKVTLSCNQT

SEQ ID NO: 854 - protein, 26 aa, synthetic construct
QQQVRQSPQSLTVWEGETAILNCSYE

SEQ ID NO: 855 - protein, 26 aa, synthetic construct
EAAVTQSPRNKVAVTGGKVTLSCNQT

SEQ ID NO: 856 - protein, 26 aa, synthetic construct
TQTVSQSDAHVTVFEGDSVELRCNYS

SEQ ID NO: 857 - protein, 26 aa, synthetic construct
EAAVTQSPRNKVAVTGGKVTLSCNQT

SEQ ID NO: 858 - protein, 25 aa, synthetic construct
GQGVEQPDNLMSVEGTFARVNCTYS

SEQ ID NO: 859 - protein, 26 aa, synthetic construct
EAAVTQSPRNKVAVTGGKVTLSCNQT

SEQ ID NO: 860 - protein, 26 aa, synthetic construct
GEKVEQHESTLSVREGDSAVINCTYT

SEQ ID NO: 861 - protein, 26 aa, synthetic construct
EAAVTQSPRNKVAVTGGKVTLSCNQT

SEQ ID NO: 862 - protein, 26 aa, synthetic construct
TQTVSQSDAHVTVFEGDSVELRCNYS

SEQ ID NO: 863 - protein, 26 aa, synthetic construct
EAAVTQSPRNKVAVTGGKVTLSCNQT

SEQ ID NO: 864 - protein, 26 aa, synthetic construct
GDSVTQTEGQVALSEEDFLTIHCNYS

SEQ ID NO: 865 - protein, 26 aa, synthetic construct
EAAVTQSPRNKVAVTGGKVTLSCNQT

SEQ ID NO: 866 - protein, 26 aa, synthetic construct
GEQVEQRPPHLSVREGDSAIIICTYT

SEQ ID NO: 867 - protein, 26 aa, synthetic construct
EAAVTQSPRNKVAVTGGKVTLSCNQT

SEQ ID NO: 868 - protein, 26 aa, synthetic construct
QQNVQQSPESLIVPEGARTSLNCTFS

SEQ ID NO: 869 - protein, 26 aa, synthetic construct
EAAVTQSPRNKVAVTGGKVTLSCNQT

SEQ ID NO: 870 - protein, 25 aa, synthetic construct
LAKTTQPPSMEAYEGQEVNVSCSHT

SEQ ID NO: 871 - protein, 26 aa, synthetic construct
EAAVTQSPRNKVAVTGGKVTLSCNQT

SEQ ID NO: 872 - protein, 26 aa, synthetic construct
GEQVEQRPPHLSVREGDSAFITCTYT

SEQ ID NO: 873 - protein, 26 aa, synthetic construct
EAAVTQSPRNKVAVTGGKVTLSCNQT

SEQ ID NO: 874 - protein, 26 aa, synthetic construct
QQQVRQSPQSLTVWEGETAILNCSYE

SEQ ID NO: 875 - protein, 26 aa, synthetic construct
EAAVTQSPRNKVAVTGGKVTLSCNQT

SEQ ID NO: 876 - protein, 26 aa, synthetic construct
GDSVTQKQGQVTLSEDDFLFINCTYS

SEQ ID NO: 877 - protein, 26 aa, synthetic construct
EAAVTQSPRNKVAVTGGKVTLSCNQT

SEQ ID NO: 878 - protein, 26 aa, synthetic construct
GDSVTQKQGQVTLSEDDFLFINCTYS

SEQ ID NO: 879 - protein, 26 aa, synthetic construct
EAAVTQSPRNKVAVTGGKVTLSCNQT

SEQ ID NO: 880 - protein, 26 aa, synthetic construct
SQWGEENLQALSIQEGEDVTMNCSYK

SEQ ID NO: 881 - protein, 26 aa, synthetic construct
EAAVTQSPRNKVAVTGGKVTLSCNQT

SEQ ID NO: 882 - protein, 26 aa, synthetic construct
GDSVTQTEGPVTLSEGTSLTVNCSYE

SEQ ID NO: 883 - protein, 26 aa, synthetic construct
EAAVTQSPRNKVAVTGGKVTLSCNQT

SEQ ID NO: 884 - protein, 26 aa, synthetic construct
GEQVEQLPSSLIVQEGASVLINCSYT

SEQ ID NO: 885 - protein, 26 aa, synthetic construct
EAAVTQSPRNKVAVTGGKVTLSCNQT

SEQ ID NO: 886 - protein, 26 aa, synthetic construct
QQKVQQSPESLIVPEGAMTSLNCTFS

SEQ ID NO: 887 - protein, 26 aa, synthetic construct
EAAVTQSPRNKVAVTGGKVTLSCNQT

SEQ ID NO: 888 - protein, 26 aa, synthetic construct
GEQVEQLPSILRVQEGSSASINCSYE

SEQ ID NO: 889 - protein, 26 aa, synthetic construct
EAAVTQSPRNKVAVTGGKVTLSCNQT

SEQ ID NO: 890 - protein, 26 aa, synthetic construct
GDSVTQKEGLVTLTEGLPVMLNCTYQ

SEQ ID NO: 891 - protein, 26 aa, synthetic construct
EAAVTQSPRNKVAVTGGKVTLSCNQT

SEQ ID NO: 892 - protein, 26 aa, synthetic construct
GDSVTQTEGLVTLTEGLPVMLNCTYQ

SEQ ID NO: 893 - protein, 26 aa, synthetic construct
EAAVTQSPRNKVAVTGGKVTLSCNQT

SEQ ID NO: 894 - protein, 26 aa, synthetic construct
QQQVRQSSQSLTVWEGETAILNCSYE

SEQ ID NO: 895 - protein, 26 aa, synthetic construct
EAAVTQSPRNKVAVTGGKVTLSCNQT

SEQ ID NO: 896 - protein, 26 aa, synthetic construct
GEQVEQRPPHLSVREGDSAVITCTYT

SEQ ID NO: 897 - protein, 26 aa, synthetic construct
EAAVTQSPRNKVAVTGGKVTLSCNQT

SEQ ID NO: 898 - protein, 26 aa, synthetic construct
AQKVTQTQTSISVMEKTTVTMDCVYE

SEQ ID NO: 899 - protein, 26 aa, synthetic construct
EAAVTQSPRNKVAVTGGKVTLSCNQT

SEQ ID NO: 900 - protein, 26 aa, synthetic construct
GQQVQQSPASLVLQEGENAELQCNFS

SEQ ID NO: 901 - protein, 26 aa, synthetic construct
EAAVTQSPRNKVAVTGGKVTLSCNQT

SEQ ID NO: 902 - protein, 26 aa, synthetic construct
GDSVTQTEGLVTLTKGLPVMLNCTYQ

SEQ ID NO: 903 - protein, 26 aa, synthetic construct
EAAVTQSPRNKVAVTGGKVTLSCNQT

SEQ ID NO: 904 - protein, 26 aa, synthetic construct
GDSVTQKEGLVTLTEGLPVMLNCTYQ

SEQ ID NO: 905 - protein, 26 aa, synthetic construct
EAAVTQSPRNKVAVTGGKVTLSCNQT

SEQ ID NO: 906 - protein, 26 aa, synthetic construct
AQKVTQTQTSISVMEKTTVTMDCVYE

SEQ ID NO: 907 - protein, 26 aa, synthetic construct
EAAVTQSPRNKVAVTGGKVTLSCNQT

SEQ ID NO: 908 - protein, 26 aa, synthetic construct
GDSVTQTEGLVTLTEGLPVMLNCTYQ

SEQ ID NO: 909 - protein, 26 aa, synthetic construct
EAAVTQSPRNKVAVTGGKVTLSCNQT

SEQ ID NO: 910 - protein, 26 aa, synthetic construct
GEQVEQRPPHLSVPEGDSAVIICTYT

SEQ ID NO: 911 - protein, 26 aa, synthetic construct
EAAVTQSPRNKVAVTGGKVTLSCNQT

SEQ ID NO: 912 - protein, 26 aa, synthetic construct
GDSVTQTEGQVALSEEDFLTIHCNYS

SEQ ID NO: 913 - protein, 26 aa, synthetic construct
EAAVTQSPRNKVAVTGGKVTLSCNQT

SEQ ID NO: 914 - protein, 26 aa, synthetic construct
GEKVEQHESTLSVREGDSAVINCTYT

SEQ ID NO: 915 - protein, 26 aa, synthetic construct
EAAVTQSPRNKVAVTGGKVTLSCNQT

SEQ ID NO: 916 - protein, 26 aa, synthetic construct
SQLAEENPWALSVHEGESVTVNCSYK

SEQ ID NO: 917 - protein, 26 aa, synthetic construct
EAAVTQSPRNKVAVTGGKVTLSCNQT

SEQ ID NO: 918 - protein, 26 aa, synthetic construct
AQKVTQTQTSISVVEKTTVTMDCVYE

SEQ ID NO: 919 - protein, 26 aa, synthetic construct
EAAVTQSPRNKVAVTGGKVTLSCNQT

SEQ ID NO: 920 - protein, 25 aa, synthetic construct
GQGVEQPDNLMSVEGTFARVNCTYS

SEQ ID NO: 921 - protein, 26 aa, synthetic construct
EAAVTQSPRNKVAVTGGKVTLSCNQT

SEQ ID NO: 922 - protein, 26 aa, synthetic construct
AQKVTQTQTSISVVEKTTVTMDCVYE

SEQ ID NO: 923 - protein, 26 aa, synthetic construct
EAAVTQSPRNKVAVTGGKVTLSCNQT

SEQ ID NO: 924 - protein, 26 aa, synthetic construct
AQSVTQPDARVTVSEGASLQLRCKYS

SEQ ID NO: 925 - protein, 26 aa, synthetic construct
EAAVTQSPRNKVAVTGGKVTLSCNQT

SEQ ID NO: 926 - protein, 26 aa, synthetic construct
QQKVQQSPESLIVPEGGMASLNCTSS

SEQ ID NO: 927 - protein, 26 aa, synthetic construct
EAAVTQSPRNKVAVTGGKVTLSCNQT

SEQ ID NO: 928 - protein, 27 aa, synthetic construct
GQQVQQSPPASLVLQEGENAELQCTYS

SEQ ID NO: 929 - protein, 26 aa, synthetic construct
EAAVTQSPRNKVAVTGGKVTLSCNQT

SEQ ID NO: 930 - protein, 26 aa, synthetic construct
GQQVQQSPASLVLQEGENAELQCNFS

SEQ ID NO: 931 - protein, 26 aa, synthetic construct
EAAVTQSPRNKVAVTGGKVTLSCNQT

SEQ ID NO: 932 - protein, 26 aa, synthetic construct
GDSVTQMQGQVTLSEDDFLFINCTYS

SEQ ID NO: 933 - protein, 26 aa, synthetic construct
EAAVTQSPRNKVAVTGGKVTLSCNQT

SEQ ID NO: 934 - protein, 26 aa, synthetic construct
GDSVTQTEGQVALSEEDFLTIHCNYS

SEQ ID NO: 935 - protein, 26 aa, synthetic construct
EAAVTQSPRNKVAVTGGKVTLSCNQT

SEQ ID NO: 936 - protein, 26 aa, synthetic construct
GDSVTQTEGLVTLTEGLPVMLNCTYQ

SEQ ID NO: 937 - protein, 26 aa, synthetic construct
EAAVTQSPRNKVAVTGGKVTLSCNQT

SEQ ID NO: 938 - protein, 26 aa, synthetic construct
GDKVKQSPSALSLQEGTNSALRCNFS

SEQ ID NO: 939 - protein, 26 aa, synthetic construct
EAAVTQSPRNKVAVTGGKVTLSCNQT

SEQ ID NO: 940 - protein, 26 aa, synthetic construct
GDKVKQSPSALSLQEGTNSALRCNFS

SEQ ID NO: 941 - protein, 26 aa, synthetic construct
EAAVTQSPRNKVAVTGGKVTLSCNQT

SEQ ID NO: 942 - protein, 26 aa, synthetic construct
GDSVTQTEGQVTVSESKSLIINCTYS

SEQ ID NO: 943 - protein, 26 aa, synthetic construct
EAAVTQSPRNKVAVTGGKVTLSCNQT

SEQ ID NO: 944 - protein, 26 aa, synthetic construct
GDSVTQTEGPVTVSESESLIINCTYS

SEQ ID NO: 945 - protein, 26 aa, synthetic construct
EAAVTQSPRNKVAVTGGKVTLSCNQT

SEQ ID NO: 946 - protein, 26 aa, synthetic construct
GEQVEQRPPHLSVREGDSAVITCTYT

SEQ ID NO: 947 - protein, 26 aa, synthetic construct
EAAVTQSPRNKVAVTGGKVTLSCNQT

SEQ ID NO: 948 - protein, 26 aa, synthetic construct
GEQVEQLPSILRVQEGSSASINCTYE

SEQ ID NO: 949 - protein, 26 aa, synthetic construct
EAAVTQSPRNKVAVTGGKVTLSCNQT

SEQ ID NO: 950 - protein, 26 aa, synthetic construct
GEQVEQLPSILRVQERSSASINCTYE

SEQ ID NO: 951 - protein, 26 aa, synthetic construct
EAAVTQSPRNKVAVTGGKVTLSCNQT

SEQ ID NO: 952 - protein, 26 aa, synthetic construct
QQNVQQSPESLIVPEGARTSLNCTFS

SEQ ID NO: 953 - protein, 26 aa, synthetic construct
EAAVTQSPRNKVAVTGGKVTLSCNQT

SEQ ID NO: 954 - protein, 26 aa, synthetic construct
AQKVTQTQTSISVVEKTTVTMDCVYE

SEQ ID NO: 955 - protein, 26 aa, synthetic construct
EAAVTQSPRNKVAVTGGKVTLSCNQT

SEQ ID NO: 956 - protein, 26 aa, synthetic construct
QQNVQQSPESLIVPEGARTSLNCTFS

SEQ ID NO: 957 - protein, 26 aa, synthetic construct
EAAVTQSPRNKVAVTGGKVTLSCNQT

SEQ ID NO: 958 - protein, 26 aa, synthetic construct
GQQVQQSPASLVLQEGENAELQCNFS

SEQ ID NO: 959 - protein, 26 aa, synthetic construct
EAAVTQSPRNKVTVTGGNVTLSCRQT

SEQ ID NO: 960 - protein, 25 aa, synthetic construct
DAKTTQPDSMESTEGETVHLPCSHA

SEQ ID NO: 961 - protein, 26 aa, synthetic construct
EAAVTQSPRNKVTVTGGNVTLSCRQT

SEQ ID NO: 962 - protein, 25 aa, synthetic construct
GQGVEQPDNLMSVEGTFARVNCTYS

SEQ ID NO: 963 - protein, 26 aa, synthetic construct
EAAVTQSPRNKVTVTGGNVTLSCRQT

SEQ ID NO: 964 - protein, 26 aa, synthetic construct
GQQVKQSSPSLTVQEGGISILNCDYE

SEQ ID NO: 965 - protein, 26 aa, synthetic construct
EAAVTQSPRNKVTVTGGNVTLSCRQT

SEQ ID NO: 966 - protein, 26 aa, synthetic construct
QQNVQQSPESLIVPEGARTSLNCTFS

SEQ ID NO: 967 - protein, 26 aa, synthetic construct
EAAVTQSPRNKVTVTGGNVTLSCRQT

SEQ ID NO: 968 - protein, 26 aa, synthetic construct
GDSVTQTEGLVTLTEGLPVMLNCTYQ

SEQ ID NO: 969 - protein, 26 aa, synthetic construct
EAAVTQSPRNKVTVTGGNVTLSCRQT

SEQ ID NO: 970 - protein, 26 aa, synthetic construct
GDSVTQTEGQVALSEEDFLTIHCNYS

SEQ ID NO: 971 - protein, 26 aa, synthetic construct
EAAVTQSPRNKVTVTGGNVTLSCRQT

SEQ ID NO: 972 - protein, 26 aa, synthetic construct
GEQVEQRPPHLSVREGDSAVITCTYT

SEQ ID NO: 973 - protein, 26 aa, synthetic construct
EAAVTQSPRNKVTVTGGNVTLSCRQT

SEQ ID NO: 974 - protein, 26 aa, synthetic construct
QQNVQQSPESLIVPEGARTSLNCTFS

SEQ ID NO: 975 - protein, 26 aa, synthetic construct
EAAVTQSPRNKVTVTGGNVTLSCRQT

SEQ ID NO: 976 - protein, 26 aa, synthetic construct
GDKVKQSPSALSLQEGTNSALRCNFS

SEQ ID NO: 977 - protein, 26 aa, synthetic construct
EAAVTQSPRNKVTVTGGNVTLSCRQT

SEQ ID NO: 978 - protein, 26 aa, synthetic construct
AQKVTQTQTSISVMEKTTVTMDCVYE

SEQ ID NO: 979 - protein, 26 aa, synthetic construct
EAAVTQSPRNKVTVTGGNVTLSCRQT

SEQ ID NO: 980 - protein, 26 aa, synthetic construct
AQKVTQTQTSISVMEKTTVTMDCVYE

SEQ ID NO: 981 - protein, 26 aa, synthetic construct
EAAVTQSPRNKVTVTGGNVTLSCRQT

SEQ ID NO: 982 - protein, 26 aa, synthetic construct
GDSVTQTEGPVTLSEGTSLTVNCSYE

SEQ ID NO: 983 - protein, 26 aa, synthetic construct
EAAVTQSPRNKVTVTGGNVTLSCRQT

SEQ ID NO: 984 - protein, 26 aa, synthetic construct
GEKVEQHESTLSVREGDSAVINCTYT

SEQ ID NO: 985 - protein, 26 aa, synthetic construct
EAAVTQSPRNKVTVTGGNVTLSCRQT

SEQ ID NO: 986 - protein, 26 aa, synthetic construct
QQKVQQSPESLIVPEGAMTSLNCTFS

SEQ ID NO: 987 - protein, 26 aa, synthetic construct
EAAVTQSPRNKVTVTGGNVTLSCRQT

SEQ ID NO: 988 - protein, 26 aa, synthetic construct
GQQVQQSPASLVLQEGENAELQCNFS

SEQ ID NO: 989 - protein, 26 aa, synthetic construct
EAAVTQSPRNKVTVTGGNVTLSCRQT

SEQ ID NO: 990 - protein, 26 aa, synthetic construct
GEQVEQRPPHLSVREGDSAVITCTYT

SEQ ID NO: 991 - protein, 26 aa, synthetic construct
EAAVTQSPRNKVTVTGGNVTLSCRQT

SEQ ID NO: 992 - protein, 26 aa, synthetic construct
GEQVEQLPSSLIVQEGASVLINCSYT

SEQ ID NO: 993 - protein, 26 aa, synthetic construct
EAAVTQSPRNKVTVTGGNVTLSCRQT

SEQ ID NO: 994 - protein, 26 aa, synthetic construct
AQSVTQPDARVTVSEGASLQLRCKYS

SEQ ID NO: 995 - protein, 26 aa, synthetic construct
EAAVTQSPRNKVTVTGGNVTLSCRQT

SEQ ID NO: 996 - protein, 25 aa, synthetic construct
DAKTTQPDSMESTEGETVHLPCSHA

SEQ ID NO: 997 - protein, 26 aa, synthetic construct
EAAVTQSPRNKVTVTGGNVTLSCRQT

SEQ ID NO: 998 - protein, 26 aa, synthetic construct
GDSVTQTEGQVALSEEDFLTIHCNYS

SEQ ID NO: 999 - protein, 26 aa, synthetic construct
EAAVTQSPRNKVTVTGGNVTLSCRQT

SEQ ID NO: 1000 - protein, 26 aa, synthetic construct
GDSVTQTEGQVALSEEDFLTIHCNYS

SEQ ID NO: 1001 - protein, 26 aa, synthetic construct
EAAVTQSPRNKVTVTGGNVTLSCRQT

SEQ ID NO: 1002 - protein, 26 aa, synthetic construct
GEQVEQRPPHLSVREGDSAVIICTYT

SEQ ID NO: 1003 - protein, 26 aa, synthetic construct
EAAVTQSPRNKVTVTGGNVTLSCRQT

SEQ ID NO: 1004 - protein, 26 aa, synthetic construct
DSVTQTEGPVTLSEGTSLTVNCSYET

SEQ ID NO: 1005 - protein, 26 aa, synthetic construct
EAAVTQSPRNKVTVTGGNVTLSCRQT

SEQ ID NO: 1006 - protein, 26 aa, synthetic construct
AQSVTQPDARVTVSEGASLQLRCKYS

SEQ ID NO: 1007 - protein, 26 aa, synthetic construct
EAAVTQSPRNKVTVTGGNVTLSCRQT

SEQ ID NO: 1008 - protein, 26 aa, synthetic construct
QQQVRQSPQSLTVWEGETAILNCSYE

SEQ ID NO: 1009 - protein, 26 aa, synthetic construct
EAAVTQSPRNKVTVTGGNVTLSCRQT

SEQ ID NO: 1010 - protein, 26 aa, synthetic construct
GDSVTQTEGQVALSEEDFLTIHCNYS

SEQ ID NO: 1011 - protein, 26 aa, synthetic construct
EAAVTQSPRNKVTVTGGNVTLSCRQT

SEQ ID NO: 1012 - protein, 26 aa, synthetic construct
AQKVTQTQTSISVVEKTTVTMDCVYE

SEQ ID NO: 1013 - protein, 26 aa, synthetic construct
EAAVTQSPRNKVTVTGGNVTLSCRQT

SEQ ID NO: 1014 - protein, 26 aa, synthetic construct
TQTVSQSDAHVTVFEGDSVELRCNYS

SEQ ID NO: 1015 - protein, 26 aa, synthetic construct
EAAVTQSPRNKVTVTGGNVTLSCRQT

SEQ ID NO: 1016 - protein, 26 aa, synthetic construct
QQNVQQSPESLIVPEGARTSLNCTFS

SEQ ID NO: 1017 - protein, 26 aa, synthetic construct
EAAVTQSPRNKVTVTGGNVTLSCRQT

SEQ ID NO: 1018 - protein, 26 aa, synthetic construct
GDSVTQTEGPVTVSESESLIINCTYS

SEQ ID NO: 1019 - protein, 26 aa, synthetic construct
EAAVTQSPRNKVTVTGGNVTLSCRQT

SEQ ID NO: 1020 - protein, 26 aa, synthetic construct
AQKVTQTQTSISVMEKTTVTMDCVYE

SEQ ID NO: 1021 - protein, 26 aa, synthetic construct
EAAVTQSPRNKVTVTGGNVTLSCRQT

SEQ ID NO: 1022 - protein, 26 aa, synthetic construct
GEQVEQRPPHLSVREGDSAVITCTYT

SEQ ID NO: 1023 - protein, 26 aa, synthetic construct
EAAVTQSPRNKVTVTGGNVTLSCRQT

SEQ ID NO: 1024 - protein, 26 aa, synthetic construct
GEQVEQLPSSLIVQEGASVLINCSYT

SEQ ID NO: 1025 - protein, 26 aa, synthetic construct
EAAVTQSPRNKVTVTGGNVTLSCRQT

SEQ ID NO: 1026 - protein, 26 aa, synthetic construct
GDSVTQTEGLVTLTKGLPVMLNCTYQ

SEQ ID NO: 1027 - protein, 26 aa, synthetic construct
EAAVTQSPRNKVTVTGGNVTLSCRQT

SEQ ID NO: 1028 - protein, 26 aa, synthetic construct
GDSVTQTEGQVTVSESKSLIINCTYS

SEQ ID NO: 1029 - protein, 26 aa, synthetic construct
EAAVTQSPRNKVTVTGGNVTLSCRQT

SEQ ID NO: 1030 - protein, 25 aa, synthetic construct
DAKTTQPDSMESTEGETVHLPCSHA

SEQ ID NO: 1031 - protein, 26 aa, synthetic construct
EAAVTQSPRNKVTVTGGNVTLSCRQT

SEQ ID NO: 1032 - protein, 26 aa, synthetic construct
GDSVTQTEGLVTLTKGLPVMLNCTYQ

SEQ ID NO: 1033 - protein, 26 aa, synthetic construct
EAAVTQSPRNKVTVTGGNVTLSCRQT

SEQ ID NO: 1034 - protein, 26 aa, synthetic construct
GDSVTQTEGLVTLTEGLPVMLNCTYQ

SEQ ID NO: 1035 - protein, 26 aa, synthetic construct
EAAVTQSPRNKVTVTGGNVTLSCRQT

SEQ ID NO: 1036 - protein, 26 aa, synthetic construct
GDSVTQTEGQVALSEEDFLTIHCNYS

SEQ ID NO: 1037 - protein, 26 aa, synthetic construct
EAAVTQSPRNKVTVTGGNVTLSCRQT

SEQ ID NO: 1038 - protein, 26 aa, synthetic construct
GEQVEQRPPHLSVPEGDSAVIICTYT

SEQ ID NO: 1039 - protein, 26 aa, synthetic construct
EAAVTQSPRNKVTVTGGNVTLSCRQT

SEQ ID NO: 1040 - protein, 26 aa, synthetic construct
GDSVTQTEGQVTVSESKSLIINCTYS

SEQ ID NO: 1041 - protein, 26 aa, synthetic construct
EAAVTQSPRNKVTVTGGNVTLSCRQT

SEQ ID NO: 1042 - protein, 26 aa, synthetic construct
AQSVTQPDARVTVSEGASLQLRCKYS

SEQ ID NO: 1043 - protein, 26 aa, synthetic construct
EAAVTQSPRNKVTVTGGNVTLSCRQT

SEQ ID NO: 1044 - protein, 26 aa, synthetic construct
QQQVRQSPQSLTVWEGETAILNCSYE

SEQ ID NO: 1045 - protein, 26 aa, synthetic construct
EAAVTQSPRNKVTVTGGNVTLSCRQT

SEQ ID NO: 1046 - protein, 26 aa, synthetic construct
GDSVIQMQGQVTLSENDFLFINCTYS

SEQ ID NO: 1047 - protein, 26 aa, synthetic construct
EAAVTQSPRNKVTVTGGNVTLSCRQT

SEQ ID NO: 1048 - protein, 26 aa, synthetic construct
AQRVTQVQPTGSSQWGEEVTLDCSYE

SEQ ID NO: 1049 - protein, 26 aa, synthetic construct
EAAVTQSPRNKVTVTGGNVTLSCRQT

SEQ ID NO: 1050 - protein, 26 aa, synthetic construct
GEQVEQRPPHLSVPEGDSAVIICTYT

SEQ ID NO: 1051 - protein, 26 aa, synthetic construct
EAAVTQSPRSKVAVTGGKVTLSCHQT

SEQ ID NO: 1052 - protein, 26 aa, synthetic construct
AQKVTQTQTSISVMEKTTVTMDCVYE

SEQ ID NO: 1053 - protein, 26 aa, synthetic construct
EAAVTQSPRSKVAVTGGKVTLSCHQT

SEQ ID NO: 1054 - protein, 26 aa, synthetic construct
GQQVQQSPASLVLQEGENAELQCNFS

SEQ ID NO: 1055 - protein, 26 aa, synthetic construct
EAAVTQSPRSKVAVTGGKVTLSCHQT

SEQ ID NO: 1056 - protein, 26 aa, synthetic construct
GQQVQQSPASLVLQEGENAELQCNFS

SEQ ID NO: 1057 - protein, 26 aa, synthetic construct
EAAVTQSPRSKVAVTGGKVTLSCHQT

SEQ ID NO: 1058 - protein, 26 aa, synthetic construct
GDSVTQTEGQVTVSESKSLIINCTYS

SEQ ID NO: 1059 - protein, 26 aa, synthetic construct
EAAVTQSPRSKVAVTGGKVTLSCHQT

SEQ ID NO: 1060 - protein, 26 aa, synthetic construct
GEQVEQRPPHLSVPEGDSAVIICTYT

SEQ ID NO: 1061 - protein, 26 aa, synthetic construct
EAAVTQSPRSKVAVTGGKVTLSCHQT

SEQ ID NO: 1062 - protein, 26 aa, synthetic construct
QQKVQQSPESLTVSEGAMASLNCTFS

SEQ ID NO: 1063 - protein, 26 aa, synthetic construct
EAAVTQSPRSKVAVTGGKVTLSCHQT

SEQ ID NO: 1064 - protein, 26 aa, synthetic construct
AQSVTQPDARVTVSEGASLQLRCKYS

SEQ ID NO: 1065 - protein, 26 aa, synthetic construct
EAAVTQSPRSKVAVTGGKVTLSCHQT

SEQ ID NO: 1066 - protein, 26 aa, synthetic construct
AQKVTQTQTSISVMEKTTVTMDCVYE

SEQ ID NO: 1067 - protein, 26 aa, synthetic construct
EAAVTQSPRSKVAVTGGKVTLSCHQT

SEQ ID NO: 1068 - protein, 26 aa, synthetic construct
AQKVTQTQTSISVMEKTTVTMDCVYE

SEQ ID NO: 1069 - protein, 26 aa, synthetic construct
EAAVTQSPRSKVAVTGGKVTLSCHQT

SEQ ID NO: 1070 - protein, 26 aa, synthetic construct
AQKVTQTQTSISVMEKTTVTMDCVYE

SEQ ID NO: 1071 - protein, 26 aa, synthetic construct
EAAVTQSPRSKVAVTGGKVTLSCHQT

SEQ ID NO: 1072 - protein, 26 aa, synthetic construct
AQSVDQPDAHVTLSEGASLELRCSYS

SEQ ID NO: 1073 - protein, 26 aa, synthetic construct
EAAVTQSPRSKVAVTGGKVTLSCHQT

SEQ ID NO: 1074 - protein, 25 aa, synthetic construct
DAKTTQPDSMESTEGETVHLPCSHA

SEQ ID NO: 1075 - protein, 26 aa, synthetic construct
EAAVTQSPRSKVAVTGGKVTLSCHQT

SEQ ID NO: 1076 - protein, 26 aa, synthetic construct
GDSVTQTEGQVALSEEDFLTIHCNYS

SEQ ID NO: 1077 - protein, 26 aa, synthetic construct
EAAVTQSPRSKVAVTGGKVTLSCHQT

SEQ ID NO: 1078 - protein, 26 aa, synthetic construct
SQWGEENLQALSIQEGEDVTMNCSYK

SEQ ID NO: 1079 - protein, 26 aa, synthetic construct
EAAVTQSPRSKVAVTGGKVTLSCHQT

SEQ ID NO: 1080 - protein, 26 aa, synthetic construct
GDSVTQTEGPVTVSESESLIINCTYS

SEQ ID NO: 1081 - protein, 26 aa, synthetic construct
EAAVTQSPRSKVAVTGGKVTLSCHQT

SEQ ID NO: 1082 - protein, 26 aa, synthetic construct
AQSVTQPDARVTVSEGASLQLRCKYS

SEQ ID NO: 1083 - protein, 26 aa, synthetic construct
EAAVTQSPRSKVAVTGGKVTLSCHQT

SEQ ID NO: 1084 - protein, 26 aa, synthetic construct
AQSVDQPDAHVTLSEGASLELRCSYS

SEQ ID NO: 1085 - protein, 26 aa, synthetic construct
EAAVTQSPRSKVAVTGGKVTLSCHQT

SEQ ID NO: 1086 - protein, 26 aa, synthetic construct
AQKVTQTQTSISVMEKTTVTMDCVYE

SEQ ID NO: 1087 - protein, 26 aa, synthetic construct
EAAVTQSPRSKVAVTGGKVTLSCHQT

SEQ ID NO: 1088 - protein, 27 aa, synthetic construct
GQQVQQSPPASLVLQEGENAELQCTYS

SEQ ID NO: 1089 - protein, 26 aa, synthetic construct
EAAVTQSPRSKVAVTGGKVTLSCHQT

SEQ ID NO: 1090 - protein, 26 aa, synthetic construct
GDSVTQTEGLVTLTEGLPVMLNCTYQ

SEQ ID NO: 1091 - protein, 26 aa, synthetic construct
EAAVTQSPRSKVAVTGGKVTLSCHQT

SEQ ID NO: 1092 - protein, 26 aa, synthetic construct
GQQVKQSSPSLTVQEGGILILNCDYE

SEQ ID NO: 1093 - protein, 26 aa, synthetic construct
EAAVTQSPRSKVAVTGGKVTLSCHQT

SEQ ID NO: 1094 - protein, 26 aa, synthetic construct
GEQVEQRPPHLSVREGDSAIIICTYT

SEQ ID NO: 1095 - protein, 26 aa, synthetic construct
EAAVTQSPRSKVAVTGGKVTLSCHQT

SEQ ID NO: 1096 - protein, 26 aa, synthetic construct
GEQVEQRPPHLSVREGDSAIIICTYT

SEQ ID NO: 1097 - protein, 26 aa, synthetic construct
EAAVTQSPRSKVAVTGGKVTLSCHQT

SEQ ID NO: 1098 - protein, 26 aa, synthetic construct
AQKVTQTQTSISVMEKTTVTMDCVYE

SEQ ID NO: 1099 - protein, 26 aa, synthetic construct
EAAVTQSPRSKVAVTGGKVTLSCHQT

SEQ ID NO: 1100 - protein, 26 aa, synthetic construct
QQNVQQSPESLIVPEGARTSLNCTFS

SEQ ID NO: 1101 - protein, 26 aa, synthetic construct
EAAVTQSPRSKVAVTGGKVTLSCHQT

SEQ ID NO: 1102 - protein, 26 aa, synthetic construct
GEQVEQRPPHLSVREGDSAVITCTYT

SEQ ID NO: 1103 - protein, 26 aa, synthetic construct
EAAVTQSPRSKVAVTGGKVTLSCHQT

SEQ ID NO: 1104 - protein, 26 aa, synthetic construct
AQKVTQTQTSISVMEKTTVTMDCVYE

SEQ ID NO: 1105 - protein, 26 aa, synthetic construct
EAAVTQSPRSKVAVTGGKVTLSCHQT

SEQ ID NO: 1106 - protein, 26 aa, synthetic construct
AQKVTQTQTSISVMEKTTVTMDCVYE

SEQ ID NO: 1107 - protein, 26 aa, synthetic construct
EAAVTQSPRSKVAVTGGKVTLSCHQT

SEQ ID NO: 1108 - protein, 26 aa, synthetic construct
QQQVRQSPQSLTVWEGETAILNCSYE

SEQ ID NO: 1109 - protein, 26 aa, synthetic construct
EAAVTQSPRSKVAVTGGKVTLSCHQT

SEQ ID NO: 1110 - protein, 26 aa, synthetic construct
AQSVTQPDARVTVSEGASLQLRCKYS

SEQ ID NO: 1111 - protein, 26 aa, synthetic construct
EAAVTQSPRSKVAVTGGKVTLSCHQT

SEQ ID NO: 1112 - protein, 26 aa, synthetic construct
QQQVRQSPQSLTVWEGETAILNCSYE

SEQ ID NO: 1113 - protein, 26 aa, synthetic construct
EAAVTQSPRSKVAVTGGKVTLSCHQT

SEQ ID NO: 1114 - protein, 25 aa, synthetic construct
GQGVEQPAKLMSVEGTFARVNCTYS

SEQ ID NO: 1115 - protein, 26 aa, synthetic construct
EAAVTQSPRSKVAVTGGKVTLSCHQT

SEQ ID NO: 1116 - protein, 26 aa, synthetic construct
QQKVQQSPESLIVPEGAMTSLNCTFS

SEQ ID NO: 1117 - protein, 26 aa, synthetic construct
EAAVTQSPRSKVAVTGGKVTLSCHQT

SEQ ID NO: 1118 - protein, 26 aa, synthetic construct
SQLAEENPWALSVHEGESVTVNCSYK

SEQ ID NO: 1119 - protein, 26 aa, synthetic construct
EAAVTQSPRSKVAVTGGKVTLSCHQT

SEQ ID NO: 1120 - protein, 26 aa, synthetic construct
SQWGEENLQALSIQEGEDVTMNCSYK

SEQ ID NO: 1121 - protein, 26 aa, synthetic construct
EAAVTQSPRSKVAVTGGKVTLSCHQT

SEQ ID NO: 1122 - protein, 26 aa, synthetic construct
GDSVTQTEGQVALSEEDFLTIHCNYS

SEQ ID NO: 1123 - protein, 26 aa, synthetic construct
EAAVTQSPRSKVAVTGGKVTLSCHQT

SEQ ID NO: 1124 - protein, 26 aa, synthetic construct
GDSVTQTEGPVTVSESESLIINCTYS

SEQ ID NO: 1125 - protein, 26 aa, synthetic construct
EAAVTQSPRSKVAVTGGKVTLSCHQT

SEQ ID NO: 1126 - protein, 26 aa, synthetic construct
GQQVQQSPASLVLQEGENAELQCNFS

SEQ ID NO: 1127 - protein, 26 aa, synthetic construct
EAAVTQSPRSKVAVTGGKVTLSCHQT

SEQ ID NO: 1128 - protein, 26 aa, synthetic construct
QQQVRQSPQSLTVWEGETAILNCSYE

SEQ ID NO: 1129 - protein, 26 aa, synthetic construct
EAAVTQSPRSKVAVTGGKVTLSCHQT

SEQ ID NO: 1130 - protein, 26 aa, synthetic construct
GDSVTQTEGLVTLTKGLPVMLNCTYQ

SEQ ID NO: 1131 - protein, 26 aa, synthetic construct
EAAVTQSPRSKVAVTGGKVTLSCHQT

SEQ ID NO: 1132 - protein, 26 aa, synthetic construct
GQQVQQSPTSLVLQEGENAELQCNFS

SEQ ID NO: 1133 - protein, 26 aa, synthetic construct
EAAVTQSPRSKVAVTGGKVTLSCHQT

SEQ ID NO: 1134 - protein, 26 aa, synthetic construct
QEKVQQSPESLIVPEGAMASLNCTFS

SEQ ID NO: 1135 - protein, 26 aa, synthetic construct
EAAVTQSPRSKVAVTGGKVTLSCHQT

SEQ ID NO: 1136 - protein, 26 aa, synthetic construct
AQKVTQTQTSISVMEKTTVTMDCVYE

SEQ ID NO: 1137 - protein, 26 aa, synthetic construct
EAAVTQSPRSKVAVTGGKVTLSCHQT

SEQ ID NO: 1138 - protein, 26 aa, synthetic construct
AQKVTQTQTSISVMEKTTVTMDCVYE

SEQ ID NO: 1139 - protein, 26 aa, synthetic construct
EAAVTQSPRSKVAVTGGKVTLSCHQT

SEQ ID NO: 1140 - protein, 26 aa, synthetic construct
GDSVTQMQGQVTLSEDDFLFINCTYS

SEQ ID NO: 1141 - protein, 26 aa, synthetic construct
EAAVTQSPRSKVAVTGGKVTLSCHQT

SEQ ID NO: 1142 - protein, 26 aa, synthetic construct
GQQVQQSPASLVLQEGENAELQCNFS

SEQ ID NO: 1143 - protein, 26 aa, synthetic construct
EAAVTQSPRSKVAVTGGKVTLSCHQT

SEQ ID NO: 1144 - protein, 26 aa, synthetic construct
GDSVTQTEGQVALSEEDFLTIHCNYS

SEQ ID NO: 1145 - protein, 26 aa, synthetic construct
EAAVTQSPRSKVAVTGGKVTLSCHQT

SEQ ID NO: 1146 - protein, 26 aa, synthetic construct
QQKVQQSPESLSVPEGGMASLNCTSS

SEQ ID NO: 1147 - protein, 26 aa, synthetic construct
EAAVTQSPRSKVAVTGGKVTLSCHQT

SEQ ID NO: 1148 - protein, 26 aa, synthetic construct
GDSVTQTEGLVTVTEGLPVMLNCTYQ

SEQ ID NO: 1149 - protein, 26 aa, synthetic construct
EAAVTQSPRSKVAVTGGKVTLSCHQT

SEQ ID NO: 1150 - protein, 26 aa, synthetic construct
GDQVEQSPSALSLHEGTGSALRCNFT

SEQ ID NO: 1151 - protein, 26 aa, synthetic construct
EAAVTQSPRSKVAVTGGKVTLSCHQT

SEQ ID NO: 1152 - protein, 26 aa, synthetic construct
GEQVEQLPSILRVQERSSASINCTYE

SEQ ID NO: 1153 - protein, 26 aa, synthetic construct
EAAVTQSPRSKVAVTGGKVTLSCHQT

SEQ ID NO: 1154 - protein, 26 aa, synthetic construct
QQKVQQSPESLIVPEGAMTSLNCTFS

SEQ ID NO: 1155 - protein, 26 aa, synthetic construct
EAAVTQSPRSKVAVTGGKVTLSCHQT

SEQ ID NO: 1156 - protein, 26 aa, synthetic construct
GDSVTQTEGPVTVSESESLIINCTYS

SEQ ID NO: 1157 - protein, 26 aa, synthetic construct
EAAVTQSPRSKVAVTGGKVTLSCHQT

SEQ ID NO: 1158 - protein, 26 aa, synthetic construct
GDSVTQTEGLVTLTKGLPVMLNCTYQ

SEQ ID NO: 1159 - protein, 26 aa, synthetic construct
EAAVTQSPRSKVAVTGGKVTLSCHQT

SEQ ID NO: 1160 - protein, 26 aa, synthetic construct
QQQVRQSPQSLTVWEGETAILNCSYE

SEQ ID NO: 1161 - protein, 26 aa, synthetic construct
EAAVTQSPRSKVAVTGGKVTLSCHQT

SEQ ID NO: 1162 - protein, 26 aa, synthetic construct
GEQVEQRPPHLSVREGDSAIIICTYT

SEQ ID NO: 1163 - protein, 26 aa, synthetic construct
EAAVTQSPRSKVAVTGGKVTLSCHQT

SEQ ID NO: 1164 - protein, 26 aa, synthetic construct
GDSVTQTEGPVTVSESESLIINCTYS

SEQ ID NO: 1165 - protein, 26 aa, synthetic construct
EAAVTQSPRSKVAVTGGKVTLSCHQT

SEQ ID NO: 1166 - protein, 26 aa, synthetic construct
GEKVEQHQSTLSVREGDSAVINCTYT

SEQ ID NO: 1167 - protein, 26 aa, synthetic construct
EAAVTQSPRSKVAVTGGKVTLSCHQT

SEQ ID NO: 1168 - protein, 26 aa, synthetic construct
QQQVRQSPQSLTVWEGETAILNCSYE

SEQ ID NO: 1169 - protein, 26 aa, synthetic construct
EAAVTQSPRSKVAVTGGKVTLSCHQT

SEQ ID NO: 1170 - protein, 26 aa, synthetic construct
GDSVTQTEGPVTLSEGTSLTVNCSYE

SEQ ID NO: 1171 - protein, 26 aa, synthetic construct
EAAVTQSPRSKVAVTGGKVTLSCHQT

SEQ ID NO: 1172 - protein, 26 aa, synthetic construct
AQSVTQPDARVTVSEGASLQLRCKYS

SEQ ID NO: 1173 - protein, 26 aa, synthetic construct
EAAVTQSPRSKVAVTGGKVTLSCHQT

SEQ ID NO: 1174 - protein, 26 aa, synthetic construct
AQKVTQTQTSISVMEKTTVTMDCVYE

SEQ ID NO: 1175 - protein, 26 aa, synthetic construct
EAAVTQSPRSKVAVTGGKVTLSCHQT

SEQ ID NO: 1176 - protein, 26 aa, synthetic construct
TQTVSQSDAHVTVFEGDSVELRCNYS

SEQ ID NO: 1177 - protein, 26 aa, synthetic construct
EAAVTQSPRSKVAVTGGKVTLSCHQT

SEQ ID NO: 1178 - protein, 26 aa, synthetic construct
GDSVTQTEGPVTVSESESLIINCTYS

SEQ ID NO: 1179 - protein, 26 aa, synthetic construct
EAAVTQSPRSKVAVTGGKVTLSCHQT

SEQ ID NO: 1180 - protein, 26 aa, synthetic construct
AQKVIQVWSTASRQEGEELTLDCSYE

SEQ ID NO: 1181 - protein, 26 aa, synthetic construct
EAAVTQSPRSKVAVTGGKVTLSCHQT

SEQ ID NO: 1182 - protein, 26 aa, synthetic construct
GDSVTQTEGPVTVSESESLIINCTYS

SEQ ID NO: 1183 - protein, 26 aa, synthetic construct
EAAVTQSPRSKVAVTGGKVTLSCHQT

SEQ ID NO: 1184 - protein, 26 aa, synthetic construct
QQQVRQSPQSLTVWEGGTTVLTCSYE

SEQ ID NO: 1185 - protein, 26 aa, synthetic construct
EAAVTQSPRSKVAVTGGKVTLSCHQT

SEQ ID NO: 1186 - protein, 26 aa, synthetic construct
AQKVTQTQTSISVVEKTTVTMDCVYE

SEQ ID NO: 1187 - protein, 26 aa, synthetic construct
EAAVTQSPRSKVAVTGGKVTLSCHQT

SEQ ID NO: 1188 - protein, 26 aa, synthetic construct
GEQVEQLPSILRVQEGSSASINCTYE

SEQ ID NO: 1189 - protein, 26 aa, synthetic construct
EAAVTQSPRSKVAVTGGKVTLSCHQT

SEQ ID NO: 1190 - protein, 26 aa, synthetic construct
GDKVKQSPSALSLQEGTNSALRCNFS

SEQ ID NO: 1191 - protein, 26 aa, synthetic construct
EAAVTQSPRSKVAVTGGKVTLSCHQT

SEQ ID NO: 1192 - protein, 26 aa, synthetic construct
GQQVQQSPASLVLQEGENAELQCNFS

SEQ ID NO: 1193 - protein, 26 aa, synthetic construct
EAAVTQSPRSKVAVTGGKVTLSCHQT

SEQ ID NO: 1194 - protein, 26 aa, synthetic construct
GEQVEQRPPHLSVREGDSAFIICTYT

SEQ ID NO: 1195 - protein, 26 aa, synthetic construct
EAAVTQSPRSKVAVTGGKVTLSCHQT

SEQ ID NO: 1196 - protein, 26 aa, synthetic construct
GMPVEQNPPALSLYEGADSGLRCNFS

SEQ ID NO: 1197 - protein, 26 aa, synthetic construct
EAAVTQSPRSKVAVTGGKVTLSCHQT

SEQ ID NO: 1198 - protein, 26 aa, synthetic construct
GDSVTQTEGLVTLTKGLPVMLNCTYQ

SEQ ID NO: 1199 - protein, 26 aa, synthetic construct
EAAVTQSPRSKVAVTGGKVTLSCHQT

SEQ ID NO: 1200 - protein, 26 aa, synthetic construct
GEQVEQLPSILRVQEGSSASINCTYE

SEQ ID NO: 1201 - protein, 26 aa, synthetic construct
EAAVTQSPRSKVAVTGGKVTLSCHQT

SEQ ID NO: 1202 - protein, 26 aa, synthetic construct
AQKVTQTQTSISVMEKTTVTMDCVYE

SEQ ID NO: 1203 - protein, 26 aa, synthetic construct
EAAVTQSPRSKVAVTGGKVTLSCHQT

SEQ ID NO: 1204 - protein, 26 aa, synthetic construct
AQSVTQPDARVTVSEGASLQLRCKYS

SEQ ID NO: 1205 - protein, 26 aa, synthetic construct
EAAVTQSPRSKVAVTGGKVTLSCHQT

SEQ ID NO: 1206 - protein, 26 aa, synthetic construct
AQKVTQTQTSISVVEKTTVTMDCVYE

SEQ ID NO: 1207 - protein, 26 aa, synthetic construct
EAAVTQSPRSKVAVTGGKVTLSCHQT

SEQ ID NO: 1208 - protein, 26 aa, synthetic construct
AQKVTQTQTSISVMEKTTVTMDCVYE

SEQ ID NO: 1209 - protein, 26 aa, synthetic construct
EAAVTQSPRSKVAVTGGKVTLSCHQT

SEQ ID NO: 1210 - protein, 26 aa, synthetic construct
AQKVTQTQTSISVMEKTTVTMDCVYE

SEQ ID NO: 1211 - protein, 26 aa, synthetic construct
DTTVKQNPRYKLARVGKPVNLICSQT

SEQ ID NO: 1212 - protein, 26 aa, synthetic construct
GEQVEQRPPHLSVREGDSAVIICTYT

SEQ ID NO: 1213 - protein, 26 aa, synthetic construct
DTTVKQNPRYKLARVGKPVNLICSQT

SEQ ID NO: 1214 - protein, 26 aa, synthetic construct
AQKVTQTQTSISVMEKTTVTMDCVYE

SEQ ID NO: 1215 - protein, 26 aa, synthetic construct
DTTVKQNPRYKLARVGKPVNLICSQT

SEQ ID NO: 1216 - protein, 26 aa, synthetic construct
GDSVTQTEGPVTVSESESLIINCTYS

SEQ ID NO: 1217 - protein, 26 aa, synthetic construct
DTTVKQNPRYKLARVGKPVNLICSQT

SEQ ID NO: 1218 - protein, 26 aa, synthetic construct
GDSVTQTEGQVTVSESKSLIINCTYS

SEQ ID NO: 1219 - protein, 26 aa, synthetic construct
DTTVKQNPRYKLARVGKPVNLICSQT

SEQ ID NO: 1220 - protein, 26 aa, synthetic construct
QQKVQQSPESLSVPEGGMASLNCTSS

SEQ ID NO: 1221 - protein, 26 aa, synthetic construct
DTTVKQNPRYKLARVGKPVNLICSQT

SEQ ID NO: 1222 - protein, 26 aa, synthetic construct
QQKVQQSPESLSVPEGGMASLNCTSS

SEQ ID NO: 1223 - protein, 26 aa, synthetic construct
DTTVKQNPRYKLARVGKPVNLICSQT

SEQ ID NO: 1224 - protein, 26 aa, synthetic construct
GEKVEQHESTLSVREGDSAVINCTYT

SEQ ID NO: 1225 - protein, 26 aa, synthetic construct
DTTVKQNPRYKLARVGKPVNLICSQT

SEQ ID NO: 1226 - protein, 26 aa, synthetic construct
AQSVDQPDAHVTLSEGASLELRCSYS

SEQ ID NO: 1227 - protein, 26 aa, synthetic construct
DTTVKQNPRYKLARVGKPVNLICSQT

SEQ ID NO: 1228 - protein, 26 aa, synthetic construct
GQQVQQSPASLVLQEGENAELQCNFS

SEQ ID NO: 1229 - protein, 26 aa, synthetic construct
DTTVKQNPRYKLARVGKPVNLICSQT

SEQ ID NO: 1230 - protein, 26 aa, synthetic construct
AQKVTQTQTSISVMEKTTVTMDCVYE

SEQ ID NO: 1231 - protein, 26 aa, synthetic construct
DTTVKQNPRYKLARVGKPVNLICSQT

SEQ ID NO: 1232 - protein, 26 aa, synthetic construct
GDSVTQTEGPVTVSESESLIINCTYS

SEQ ID NO: 1233 - protein, 26 aa, synthetic construct
DTTVKQNPRYKLARVGKPVNLICSQT

SEQ ID NO: 1234 - protein, 25 aa, synthetic construct
GQGVEQPDNLMSVEGTFARVNCTYS

SEQ ID NO: 1235 - protein, 26 aa, synthetic construct
DTTVKQNPRYKLARVGKPVNLICSQT

SEQ ID NO: 1236 - protein, 26 aa, synthetic construct
GEQVEQRPPHLSVREGDSAVIICTYT

SEQ ID NO: 1237 - protein, 26 aa, synthetic construct
DTTVKQNPRYKLARVGKPVNLICSQT

SEQ ID NO: 1238 - protein, 26 aa, synthetic construct
AQKVTQTQTSISVVEKTTVTMDCVYE

SEQ ID NO: 1239 - protein, 26 aa, synthetic construct
DAGVTQTPRHEVAEKGQTIILKCEPV

SEQ ID NO: 1240 - protein, 26 aa, synthetic construct
AQKVTQTQTSISVMEKTTVTMDCVYE

SEQ ID NO: 1241 - protein, 26 aa, synthetic construct
DSGVVQSPRHIIKEKGGRSVLTCIPI

SEQ ID NO: 1242 - protein, 26 aa, synthetic construct
AQSVTQPDARVTVSEGASLQLRCKYS

SEQ ID NO: 1243 - protein, 26 aa, synthetic construct
AQTIHQWPVAEIKAVGSPLSLGCTIK

SEQ ID NO: 1244 - protein, 26 aa, synthetic construct
QQKVQQSPESLIVPEGAMTSLNCTFS

SEQ ID NO: 1245 - protein, 26 aa, synthetic construct
AQTIHQWPVAEIKAVGSPLSLGCTIK

SEQ ID NO: 1246 - protein, 26 aa, synthetic construct
QQQVRQSPQSLTVWEGETAILNCSYE

SEQ ID NO: 1247 - protein, 26 aa, synthetic construct
AQTIHQWPVAEIKAVGSPLSLGCTIK

SEQ ID NO: 1248 - protein, 26 aa, synthetic construct
GEQVEQRPPHLSVREGDSAIIICTYT

SEQ ID NO: 1249 - protein, 26 aa, synthetic construct
AQTIHQWPVAEIKAVGSPLSLGCTIK

SEQ ID NO: 1250 - protein, 26 aa, synthetic construct
GEQVEQLPSILRVQEGSSASINCSYE

SEQ ID NO: 1251 - protein, 26 aa, synthetic construct
AQTIHQWPVAEIKAVGSPLSLGCTIK

SEQ ID NO: 1252 - protein, 26 aa, synthetic construct
QQQVRQSPQSLTVWEGETAILNCSYE

SEQ ID NO: 1253 - protein, 26 aa, synthetic construct
AQTIHQWPVAEIKAVGSPLSLGCTIK

SEQ ID NO: 1254 - protein, 26 aa, synthetic construct
GDSVTQTEGPVTVSESESLIINCTYS

SEQ ID NO: 1255 - protein, 26 aa, synthetic construct
AQTIHQWPVAEIKAVGSPLSLGCTIK

SEQ ID NO: 1256 - protein, 26 aa, synthetic construct
AQKVTQTQTSISVVEKTTVTMDCVYE

SEQ ID NO: 1257 - protein, 26 aa, synthetic construct
AQTIHQWPVAEIKAVGSPLSLGCTIK

SEQ ID NO: 1258 - protein, 26 aa, synthetic construct
GEQVEQRPPHLSVREGDSAVITCTYT

SEQ ID NO: 1259 - protein, 26 aa, synthetic construct
AQTIHQWPVAEIKAVGSPLSLGCTIK

SEQ ID NO: 1260 - protein, 26 aa, synthetic construct
GEKVEQHESTLSVREGDSAVINCTYT

SEQ ID NO: 1261 - protein, 26 aa, synthetic construct
AQTIHQWPVAEIKAVGSPLSLGCTIK

SEQ ID NO: 1262 - protein, 26 aa, synthetic construct
SQWGEENLQALSIQEGEDVTMNCSYK

SEQ ID NO: 1263 - protein, 26 aa, synthetic construct
GPKVLQIPSHQIIDMGQMVTLNCDPV

SEQ ID NO: 1264 - protein, 26 aa, synthetic construct
AQSVTQPDARVTVSEGASLQLRCKYS

SEQ ID NO: 1265 - protein, 26 aa, synthetic construct
GPKVLQIPSHQIIDMGQMVTLNCDPV

SEQ ID NO: 1266 - protein, 26 aa, synthetic construct
GDQVEQSPSALSLHEGTGSALRCNFT

SEQ ID NO: 1267 - protein, 26 aa, synthetic construct
GPKVLQIPSHQIIDMGQMVTLNCDPV

SEQ ID NO: 1268 - protein, 26 aa, synthetic construct
AQKVTQTQTSISVMEKTTVTMDCVYE

SEQ ID NO: 1269 - protein, 26 aa, synthetic construct
GPKVLQIPSHQIIDMGQMVTLNCDPV

SEQ ID NO: 1270 - protein, 26 aa, synthetic construct
QQQVRQSPQSLTVWEGETAILNCSYE

SEQ ID NO: 1271 - protein, 26 aa, synthetic construct
GPKVLQIPSHQIIDMGQMVTLNCDPV

SEQ ID NO: 1272 - protein, 26 aa, synthetic construct
GDQVEQSPSALSLHEGTSSALRCNFT

SEQ ID NO: 1273 - protein, 26 aa, synthetic construct
GPKVLQIPSHQIIDMGQMVTLNCDPV

SEQ ID NO: 1274 - protein, 26 aa, synthetic construct
SQWGEENLQALSIQEGEDVTMNCSYK

SEQ ID NO: 1275 - protein, 26 aa, synthetic construct
GPKVLQIPSHQIIDMGQMVTLNCDPV

SEQ ID NO: 1276 - protein, 26 aa, synthetic construct
GQQVQQSPTSLVLQEGENAELQCNFS

SEQ ID NO: 1277 - protein, 26 aa, synthetic construct
GPKVLQIPSHQIIDMGQMVTLNCDPV

SEQ ID NO: 1278 - protein, 26 aa, synthetic construct
AQKVTQTQTSISVMEKTTVTMDCVYE

SEQ ID NO: 1279 - protein, 26 aa, synthetic construct
GPKVLQIPSHQIIDMGQMVTLNCDPV

SEQ ID NO: 1280 - protein, 26 aa, synthetic construct
GQQVKQSSPSLTVQEGGISILNCDYE

SEQ ID NO: 1281 - protein, 26 aa, synthetic construct
GPKVLQIPSHQIIDMGQMVTLNCDPV

SEQ ID NO: 1282 - protein, 26 aa, synthetic construct
AQSVTQPDARVTVSEGASLQLRCKYS

SEQ ID NO: 1283 - protein, 26 aa, synthetic construct
GPKVLQIPSHQIIDMGQMVTLNCDPV

SEQ ID NO: 1284 - protein, 26 aa, synthetic construct
AQSVTQPDARVTVSEGASLQLRCKYS

SEQ ID NO: 1285 - protein, 26 aa, synthetic construct
GPKVLQIPSHQIIDMGQMVTLNCDPV

SEQ ID NO: 1286 - protein, 26 aa, synthetic construct
QQKVQQSPESLIVPEGGMASLNCTSS

SEQ ID NO: 1287 - protein, 26 aa, synthetic construct
GALVYQYPRRTICKSGTSMRMECQAV

SEQ ID NO: 1288 - protein, 26 aa, synthetic construct
GQQVQQSPASLVLQEGENAELQCNFS

SEQ ID NO: 1289 - protein, 26 aa, synthetic construct
GALVYQYPRRTICKSGTSMRMECQAV

SEQ ID NO: 1290 - protein, 26 aa, synthetic construct
GEQVEQRPPHLSVREGDSAIIICTYT

SEQ ID NO: 1291 - protein, 26 aa, synthetic construct
GALVYQYPRRTICKSGTSMRMECQAV

SEQ ID NO: 1292 - protein, 26 aa, synthetic construct
GDQVEQSPSALSLHEGTSSALRCNFT

SEQ ID NO: 1293 - protein, 26 aa, synthetic construct
GALVYQYPRRTICKSGTSMRMECQAV

SEQ ID NO: 1294 - protein, 26 aa, synthetic construct
GDSVTQTEGLVTLTKGLPVMLNCTYQ

SEQ ID NO: 1295 - protein, 26 aa, synthetic construct
GALVYQYPRRTICKSGTSMRMECQAV

SEQ ID NO: 1296 - protein, 26 aa, synthetic construct
QQKVQQSPESLIVPEGGMASLNCTSS

SEQ ID NO: 1297 - protein, 26 aa, synthetic construct
GALVYQYPRRTICKSGTSMRMECQAV

SEQ ID NO: 1298 - protein, 26 aa, synthetic construct
AQSVTQPDARVTVSEGASLQLRCKYS

SEQ ID NO: 1299 - protein, 26 aa, synthetic construct
GALVYQYPRRTICKSGTSMRMECQAV

SEQ ID NO: 1300 - protein, 26 aa, synthetic construct
QQKVQQSPESLSVPEGGMASLNCTSS

SEQ ID NO: 1301 - protein, 26 aa, synthetic construct
GALVYQYPRRTICKSGTSMRMECQAV

SEQ ID NO: 1302 - protein, 26 aa, synthetic construct
GDSVTQTEGQVALSEEDFLTIHCNYS

SEQ ID NO: 1303 - protein, 26 aa, synthetic construct
GALVYQYPRRTICKSGTSMRMECQAV

SEQ ID NO: 1304 - protein, 26 aa, synthetic construct
GQQVQQSPASLVLQEGENAELQCNFS

SEQ ID NO: 1305 - protein, 26 aa, synthetic construct
GALVYQYPRRTICKSGTSMRMECQAV

SEQ ID NO: 1306 - protein, 26 aa, synthetic construct
QQKVQQSPESLSVPEGGMASLNCTSS

SEQ ID NO: 1307 - protein, 26 aa, synthetic construct
GALVYQYPRRTICKSGTSMRMECQAV

SEQ ID NO: 1308 - protein, 26 aa, synthetic construct
SQLAEENLWALSVHEGESVTVNCSYK

SEQ ID NO: 1309 - protein, 26 aa, synthetic construct
GALVYQYPRRTICKSGTSMRMECQAV

SEQ ID NO: 1310 - protein, 26 aa, synthetic construct
AQKVTQTQTSISVVEKTTVTMDCVYE

SEQ ID NO: 1311 - protein, 26 aa, synthetic construct
GALVYQYPRRTICKSGTSMRMECQAV

SEQ ID NO: 1312 - protein, 26 aa, synthetic construct
GDKVKQSPSALSLQEGTNSALRCNFS

SEQ ID NO: 1313 - protein, 26 aa, synthetic construct
GALVYQYPRRTICKSGTSMRMECQAV

SEQ ID NO: 1314 - protein, 26 aa, synthetic construct
GEKVEQHESTLSVREGDSAVINCTYT

SEQ ID NO: 1315 - protein, 26 aa, synthetic construct
GGIITQTPKFLIGQEGQKLTLKCQQN

SEQ ID NO: 1316 - protein, 26 aa, synthetic construct
GQQVQQSPASLVLQEGENAELQCNFS

SEQ ID NO: 1317 - protein, 26 aa, synthetic construct
GGIITQTPKFLIGQEGQKLTLKCQQN

SEQ ID NO: 1318 - protein, 26 aa, synthetic construct
QQKVQQSPESLTVSEGAMASLNCTFS

SEQ ID NO: 1319 - protein, 26 aa, synthetic construct
GGIITQTPKFLIGQEGQKLTLKCQQN

SEQ ID NO: 1320 - protein, 26 aa, synthetic construct
GDSVTQMQGQVTLSEDDFLFINCTYS

SEQ ID NO: 1321 - protein, 26 aa, synthetic construct
GGIITQTPKFLIGQEGQKLTLKCQQN

SEQ ID NO: 1322 - protein, 25 aa, synthetic construct
LAKTTQPPSMEAYEGQEVNVSCSHT

SEQ ID NO: 1323 - protein, 26 aa, synthetic construct
GGIITQTPKFLIGQEGQKLTLKCQQN

SEQ ID NO: 1324 - protein, 26 aa, synthetic construct
AQKVTQTQTSISVMEKTTVTMDCVYE

SEQ ID NO: 1325 - protein, 26 aa, synthetic construct
GGIITQTPKFLIGQEGQKLTLKCQQN

SEQ ID NO: 1326 - protein, 26 aa, synthetic construct
GDSVTQTEGQVALSEEDFLTIHCNYS

SEQ ID NO: 1327 - protein, 26 aa, synthetic construct
GGIITQTPKFLIGQEGQKLTLKCQQN

SEQ ID NO: 1328 - protein, 26 aa, synthetic construct
AQSVTQPDARVTVSEGASLQLRCKYS

SEQ ID NO: 1329 - protein, 26 aa, synthetic construct
GGIITQTPKFLIGQEGQKLTLKCQQN

SEQ ID NO: 1330 - protein, 26 aa, synthetic construct
AQKVTQTQTSISVMEKTTVTMDCVYE

SEQ ID NO: 1331 - protein, 26 aa, synthetic construct
GGIITQTPKFLIGQEGQKLTLKCQQN

SEQ ID NO: 1332 - protein, 26 aa, synthetic construct
GDSVTQTEGLVTLTEGLPVMLNCTYQ

SEQ ID NO: 1333 - protein, 26 aa, synthetic construct
GGIITQTPKFLIGQEGQKLTLKCQQN

SEQ ID NO: 1334 - protein, 26 aa, synthetic construct
GDSVTQTEGQVTVSESKSLIINCTYS

SEQ ID NO: 1335 - protein, 26 aa, synthetic construct
GGIITQTPKFLIGQEGQKLTLKCQQN

SEQ ID NO: 1336 - protein, 26 aa, synthetic construct
GEQVEQRPPHLSVREGDSAVITCTYT

SEQ ID NO: 1337 - protein, 26 aa, synthetic construct
GGIITQTPKFLIGQEGQKLTLKCQQN

SEQ ID NO: 1338 - protein, 26 aa, synthetic construct
GDSVTQTEGLVTLTEGLPVMLNCTYQ

SEQ ID NO: 1339 - protein, 26 aa, synthetic construct
GGIITQTPKFLIGQEGQKLTLKCQQN

SEQ ID NO: 1340 - protein, 26 aa, synthetic construct
GEQVEQRPPHLSVREGDSAIIICTYT

SEQ ID NO: 1341 - protein, 26 aa, synthetic construct
GGIITQTPKFLIGQEGQKLTLKCQQN

SEQ ID NO: 1342 - protein, 26 aa, synthetic construct
GDSVTQTEGPVTLSEGTSLTVNCSYE

SEQ ID NO: 1343 - protein, 26 aa, synthetic construct
GGIITQTPKFLIGQEGQKLTLKCQQN

SEQ ID NO: 1344 - protein, 26 aa, synthetic construct
GQQVQQSPASLVLQEGENAELQCNFS

SEQ ID NO: 1345 - protein, 26 aa, synthetic construct
GGIITQTPKFLIGQEGQKLTLKCQQN

SEQ ID NO: 1346 - protein, 26 aa, synthetic construct
QQQVRQSPQSLTVWEGETAILNCSYE

SEQ ID NO: 1347 - protein, 26 aa, synthetic construct
GGIITQTPKFLIGQEGQKLTLKCQQN

SEQ ID NO: 1348 - protein, 26 aa, synthetic construct
GEQVEQRPPHLSVREGDSAVIICTYT

SEQ ID NO: 1349 - protein, 26 aa, synthetic construct
GGIITQTPKFLIGQEGQKLTLKCQQN

SEQ ID NO: 1350 - protein, 26 aa, synthetic construct
QQKVQQSPESLTVSEGAMASLNCTFS

SEQ ID NO: 1351 - protein, 26 aa, synthetic construct
GGIITQTPKFLIGQEGQKLTLKCQQN

SEQ ID NO: 1352 - protein, 26 aa, synthetic construct
QQKVQQSPESLIVPEGGMASLNCTSS

SEQ ID NO: 1353 - protein, 26 aa, synthetic construct
GGIITQTPKFLIGQEGQKLTLKCQQN

SEQ ID NO: 1354 - protein, 26 aa, synthetic construct
SQWGEENLQALSIQEGEDVTMNCSYK

SEQ ID NO: 1355 - protein, 26 aa, synthetic construct
GGIITQTPKFLIGQEGQKLTLKCQQN

SEQ ID NO: 1356 - protein, 25 aa, synthetic construct
DAKTTQPDSMESTEGETVHLPCSHA

SEQ ID NO: 1357 - protein, 26 aa, synthetic construct
GGIITQTPKFLIGQEGQKLTLKCQQN

SEQ ID NO: 1358 - protein, 26 aa, synthetic construct
AQSVTQPDARVTVSEGASLQLRCKYS

SEQ ID NO: 1359 - protein, 26 aa, synthetic construct
GGIITQTPKFLIGQEGQKLTLKCQQN

SEQ ID NO: 1360 - protein, 26 aa, synthetic construct
GDSVTQTEGLVTLTEGLPVMLNCTYQ

SEQ ID NO: 1361 - protein, 26 aa, synthetic construct
GGIITQTPKFLIGQEGQKLTLKCQQN

SEQ ID NO: 1362 - protein, 26 aa, synthetic construct
SQWGEENLQALSIQEGEDVTMNCSYK

SEQ ID NO: 1363 - protein, 26 aa, synthetic construct
GGIITQTPKFLIGQEGQKLTLKCQQN

SEQ ID NO: 1364 - protein, 26 aa, synthetic construct
GQQVQQSPASLVLQEGENAELQCNFS

SEQ ID NO: 1365 - protein, 26 aa, synthetic construct
GGIITQTPKFLIGQEGQKLTLKCQQN

SEQ ID NO: 1366 - protein, 26 aa, synthetic construct
GDSVTQTEGLVTLTEGLPVMLNCTYQ

SEQ ID NO: 1367 - protein, 26 aa, synthetic construct
GGIITQTPKFLIGQEGQKLTLKCQQN

SEQ ID NO: 1368 - protein, 26 aa, synthetic construct
GDSVTQTEGLVTLTKGLPVMLNCTYQ

SEQ ID NO: 1369 - protein, 26 aa, synthetic construct
GGIITQTPKFLIGQEGQKLTLKCQQN

SEQ ID NO: 1370 - protein, 26 aa, synthetic construct
AQSVTQPDARVTVSEGASLQLRCKYS

SEQ ID NO: 1371 - protein, 26 aa, synthetic construct
GGIITQTPKFLIGQEGQKLTLKCQQN

SEQ ID NO: 1372 - protein, 26 aa, synthetic construct
GQQVQQSPASLVLQEGENAELQCNFS

SEQ ID NO: 1373 - protein, 26 aa, synthetic construct
GGIITQTPKFLIGQEGQKLTLKCQQN

SEQ ID NO: 1374 - protein, 26 aa, synthetic construct
QQKVQQSPESLSVPEGGMASLNCTSS

SEQ ID NO: 1375 - protein, 26 aa, synthetic construct
GGIITQTPKFLIGQEGQKLTLKCQQN

SEQ ID NO: 1376 - protein, 26 aa, synthetic construct
GQQVQQSPASLVLQEGENAELQCNFS

SEQ ID NO: 1377 - protein, 26 aa, synthetic construct
GGIITQTPKFLIGQEGQKLTLKCQQN

SEQ ID NO: 1378 - protein, 26 aa, synthetic construct
AQKVTQTQTSISVMEKTTVTMDCVYE

SEQ ID NO: 1379 - protein, 26 aa, synthetic construct
GGIITQTPKFLIGQEGQKLTLKCQQN

SEQ ID NO: 1380 - protein, 26 aa, synthetic construct
GDQVKQSPSALSLQEGTNSALRCNFS

SEQ ID NO: 1381 - protein, 26 aa, synthetic construct
GGIITQTPKFLIGQEGQKLTLKCQQN

SEQ ID NO: 1382 - protein, 26 aa, synthetic construct
GEQVEQRPPHLSVPEGDSAVIICTYT

SEQ ID NO: 1383 - protein, 26 aa, synthetic construct
GGIITQTPKFLIGQEGQKLTLKCQQN

SEQ ID NO: 1384 - protein, 26 aa, synthetic construct
QQNVQQSPESLIVPEGARTSLNCTFS

SEQ ID NO: 1385 - protein, 26 aa, synthetic construct
GGIITQTPKFLIGQEGQKLTLKCQQN

SEQ ID NO: 1386 - protein, 26 aa, synthetic construct
GDSVTQTEGQVTVSESKSLIINCTYS

SEQ ID NO: 1387 - protein, 26 aa, synthetic construct
GGIITQTPKFLIGQEGQKLTLKCQQN

SEQ ID NO: 1388 - protein, 26 aa, synthetic construct
AQKVTQTQTSISVVEKTTVTMDCVYE

SEQ ID NO: 1389 - protein, 26 aa, synthetic construct
GGIITQTPKFLIGQEGQKLTLKCQQN

SEQ ID NO: 1390 - protein, 26 aa, synthetic construct
AQKVTQTQTSISVMEKTTVTMDCVYE

SEQ ID NO: 1391 - protein, 26 aa, synthetic construct
GGIITQTPKFLIGQEGQKLTLKCQQN

SEQ ID NO: 1392 - protein, 26 aa, synthetic construct
QQQVRQSPQSLTVWEGETAILNCSYE

SEQ ID NO: 1393 - protein, 26 aa, synthetic construct
GGIITQTPKFLIGQEGQKLTLKCQQN

SEQ ID NO: 1394 - protein, 26 aa, synthetic construct
AQSVTQPDARVTVSEGASLQLRCKYS

SEQ ID NO: 1395 - protein, 26 aa, synthetic construct
GGIITQTPKFLIGQEGQKLTLKCQQN

SEQ ID NO: 1396 - protein, 26 aa, synthetic construct
GDSVTQKQGQVTLSEDDFLFINCTYS

SEQ ID NO: 1397 - protein, 26 aa, synthetic construct
GGIITQTPKFLIGQEGQKLTLKCQQN

SEQ ID NO: 1398 - protein, 26 aa, synthetic construct
GEKVEQHESTLSVREGDSAVINCTYT

SEQ ID NO: 1399 - protein, 26 aa, synthetic construct
GGIITQTPKFLIGQEGQKLTLKCQQN

SEQ ID NO: 1400 - protein, 26 aa, synthetic construct
GEQVEQRPPHLSVREGDSAIIICTYT

SEQ ID NO: 1401 - protein, 26 aa, synthetic construct
GGIITQTPKFLIGQEGQKLTLKCQQN

SEQ ID NO: 1402 - protein, 26 aa, synthetic construct
GDSVTQTEGLVTLTEGLPVMLNCTYQ

SEQ ID NO: 1403 - protein, 26 aa, synthetic construct
GGIITQTPKFLIGQEGQKLTLKCQQN

SEQ ID NO: 1404 - protein, 26 aa, synthetic construct
GDSVIQMQGQVTLSENDFLFINCTYS

SEQ ID NO: 1405 - protein, 26 aa, synthetic construct
GGIITQTPKFLIGQEGQKLTLKCQQN

SEQ ID NO: 1406 - protein, 26 aa, synthetic construct
QQKVQQSPESLSVPEGGMASLNCTSS

SEQ ID NO: 1407 - protein, 26 aa, synthetic construct
GGIITQTPKFLIGQEGQKLTLKCQQN

SEQ ID NO: 1408 - protein, 26 aa, synthetic construct
GDSVTQTEGQVTVSESKSLIINCTYS

SEQ ID NO: 1409 - protein, 26 aa, synthetic construct
GGIITQTPKFLIGQEGQKLTLKCQQN

SEQ ID NO: 1410 - protein, 26 aa, synthetic construct
QQQVRQSPQSLTVWEGETAILNCSYE

SEQ ID NO: 1411 - protein, 26 aa, synthetic construct
GGIITQTPKFLIGQEGQKLTLKCQQN

SEQ ID NO: 1412 - protein, 26 aa, synthetic construct
GDSVTQTEGPVTVSESESLIINCTYS

SEQ ID NO: 1413 - protein, 26 aa, synthetic construct
GGIITQTPKFLIGQEGQKLTLKCQQN

SEQ ID NO: 1414 - protein, 26 aa, synthetic construct
GEQVEQLPSILRVQEGSSASINCSYE

SEQ ID NO: 1415 - protein, 26 aa, synthetic construct
GGIITQTPKFLIGQEGQKLTLKCQQN

SEQ ID NO: 1416 - protein, 25 aa, synthetic construct
LAKTTQPPSMEAYEGQEVNVSCSHT

SEQ ID NO: 1417 - protein, 26 aa, synthetic construct
GGIITQTPKFLIGQEGQKLTLKCQQN

SEQ ID NO: 1418 - protein, 26 aa, synthetic construct
GEQVEQRPPHLSVREGDSAFITCTYT

SEQ ID NO: 1419 - protein, 26 aa, synthetic construct
GGIITQTPKFLIGQEGQKLTLKCQQN

SEQ ID NO: 1420 - protein, 26 aa, synthetic construct
GDSVTQTEGLVTLTEGLPVMLNCTYQ

SEQ ID NO: 1421 - protein, 26 aa, synthetic construct
VTLLEQNPRWRLVPRGQAVNLRCILK

SEQ ID NO: 1422 - protein, 26 aa, synthetic construct
AQSVTQPDARVTVSEGASLQLRCKYS

SEQ ID NO: 1423 - protein, 26 aa, synthetic construct
VTLLEQNPRWRLVPRGQAVNLRCILK

SEQ ID NO: 1424 - protein, 26 aa, synthetic construct
AQSVTQPDARVTVSEGASLQLRCKYS

SEQ ID NO: 1425 - protein, 26 aa, synthetic construct
VTLLEQNPRWRLVPRGQAVNLRCILK

SEQ ID NO: 1426 - protein, 26 aa, synthetic construct
GDSVTQTEGQVTVSESKSLIINCTYS

SEQ ID NO: 1427 - protein, 26 aa, synthetic construct
VTLLEQNPRWRLVPRGQAVNLRCILK

SEQ ID NO: 1428 - protein, 26 aa, synthetic construct
GEQVEQRPPHLSVPEGDSAVIICTYT

SEQ ID NO: 1429 - protein, 26 aa, synthetic construct
VTLLEQNPRWRLVPRGQAVNLRCILK

SEQ ID NO: 1430 - protein, 26 aa, synthetic construct
GDSVTQTEGLVTLTEGLPVMLNCTYQ

SEQ ID NO: 1431 - protein, 26 aa, synthetic construct
VTLLEQNPRWRLVPRGQAVNLRCILK

SEQ ID NO: 1432 - protein, 26 aa, synthetic construct
AQSVTQPDARVTVSEGASLQLRCKYS

SEQ ID NO: 1433 - protein, 26 aa, synthetic construct
VTLLEQNPRWRLVPRGQAVNLRCILK

SEQ ID NO: 1434 - protein, 25 aa, synthetic construct
GQGVEQPAKLMSVEGTFARVNCTYS

SEQ ID NO: 1435 - protein, 26 aa, synthetic construct
VTLLEQNPRWRLVPRGQAVNLRCILK

SEQ ID NO: 1436 - protein, 26 aa, synthetic construct
KTQVEQSPQSLVVRQGENCVLQCNYS

SEQ ID NO: 1437 - protein, 26 aa, synthetic construct
VTLLEQNPRWRLVPRGQAVNLRCILK

SEQ ID NO: 1438 - protein, 26 aa, synthetic construct
GDSVTQTEGLVTLTEGLPVMLNCTYQ

SEQ ID NO: 1439 - protein, 26 aa, synthetic construct
VTLLEQNPRWRLVPRGQAVNLRCILK

SEQ ID NO: 1440 - protein, 26 aa, synthetic construct
AQSVTQPDARVTVSEGASLQLRCKYS

SEQ ID NO: 1441 - protein, 26 aa, synthetic construct
VTLLEQNPRWRLVPRGQAVNLRCILK

SEQ ID NO: 1442 - protein, 26 aa, synthetic construct
QQQVRQSPQSLTVWEGETAILNCSYE

SEQ ID NO: 1443 - protein, 26 aa, synthetic construct
VTLLEQNPRWRLVPRGQAVNLRCILK

SEQ ID NO: 1444 - protein, 26 aa, synthetic construct
GEQVEQLPSILRVQERSSASINCTYE

SEQ ID NO: 1445 - protein, 26 aa, synthetic construct
VTLLEQNPRWRLVPRGQAVNLRCILK

SEQ ID NO: 1446 - protein, 26 aa, synthetic construct
AQSVTQPDARVTVSEGASLQLRCKYS

SEQ ID NO: 1447 - protein, 26 aa, synthetic construct
VTLLEQNPRWRLVPRGQAVNLRCILK

SEQ ID NO: 1448 - protein, 26 aa, synthetic construct
GQQVQQSPASLVLQEGENAELQCNFS

SEQ ID NO: 1449 - protein, 26 aa, synthetic construct
VTLLEQNPRWRLVPRGQAVNLRCILK

SEQ ID NO: 1450 - protein, 26 aa, synthetic construct
GEQVEQRPPHLSVREGDSAVIICTYT

SEQ ID NO: 1451 - protein, 26 aa, synthetic construct
VTLLEQNPRWRLVPRGQAVNLRCILK

SEQ ID NO: 1452 - protein, 26 aa, synthetic construct
AQKVTQTQTSISVMEKTTVTMDCVYE

SEQ ID NO: 1453 - protein, 26 aa, synthetic construct
VTLLEQNPRWRLVPRGQAVNLRCILK

SEQ ID NO: 1454 - protein, 26 aa, synthetic construct
SQWGEENLQALSIQEGEDVTMNCSYK

SEQ ID NO: 1455 - protein, 26 aa, synthetic construct
VTLLEQNPRWRLVPRGQAVNLRCILK

SEQ ID NO: 1456 - protein, 26 aa, synthetic construct
AQSVTQPDARVTVSEGASLQLRCKYS

SEQ ID NO: 1457 - protein, 26 aa, synthetic construct
VTLLEQNPRWRLVPRGQAVNLRCILK

SEQ ID NO: 1458 - protein, 26 aa, synthetic construct
QQKVQQSPESLSVPEGGMASLNCTSS

SEQ ID NO: 1459 - protein, 26 aa, synthetic construct
VTLLEQNPRWRLVPRGQAVNLRCILK

SEQ ID NO: 1460 - protein, 26 aa, synthetic construct
GQQVQQSPASLVLQEGENAELQCNFS

SEQ ID NO: 1461 - protein, 26 aa, synthetic construct
VTLLEQNPRWRLVPRGQAVNLRCILK

SEQ ID NO: 1462 - protein, 26 aa, synthetic construct
GDSVTQTEGPVTVSESESLIINCTYS

SEQ ID NO: 1463 - protein, 26 aa, synthetic construct
VTLLEQNPRWRLVPRGQAVNLRCILK

SEQ ID NO: 1464 - protein, 26 aa, synthetic construct
GDSVTQTEGQVTVSESKSLIINCTYS

SEQ ID NO: 1465 - protein, 26 aa, synthetic construct
VTLLEQNPRWRLVPRGQAVNLRCILK

SEQ ID NO: 1466 - protein, 26 aa, synthetic construct
KTQVEQSPQSLVVRQGENCVLQCNYS

SEQ ID NO: 1467 - protein, 26 aa, synthetic construct
VTLLEQNPRWRLVPRGQAVNLRCILK

SEQ ID NO: 1468 - protein, 26 aa, synthetic construct
GEQVEQRPPHLSVREGDSAFITCTYT

SEQ ID NO: 1469 - protein, 26 aa, synthetic construct
VTLLEQNPRWRLVPRGQAVNLRCILK

SEQ ID NO: 1470 - protein, 26 aa, synthetic construct
QQKVQQSPESLSVPEGGMASLNCTSS

SEQ ID NO: 1471 - protein, 26 aa, synthetic construct
VTLLEQNPRWRLVPRGQAVNLRCILK

SEQ ID NO: 1472 - protein, 26 aa, synthetic construct
GEQVEQLPSILRVQEGSSASINCSYE

SEQ ID NO: 1473 - protein, 26 aa, synthetic construct
VTLLEQNPRWRLVPRGQAVNLRCILK

SEQ ID NO: 1474 - protein, 26 aa, synthetic construct
GDSVTQTEGQVALSEEDFLTIHCNYS

SEQ ID NO: 1475 - protein, 26 aa, synthetic construct
VTLLEQNPRWRLVPRGQAVNLRCILK

SEQ ID NO: 1476 - protein, 26 aa, synthetic construct
GDSVTQTEGQVALSEEDFLTIHCNYS

SEQ ID NO: 1477 - protein, 26 aa, synthetic construct
VTLLEQNPRWRLVPRGQAVNLRCILK

SEQ ID NO: 1478 - protein, 26 aa, synthetic construct
QQNVQQSPESLIVPEGARTSLNCTFS

SEQ ID NO: 1479 - protein, 26 aa, synthetic construct
VTLLEQNPRWRLVPRGQAVNLRCILK

SEQ ID NO: 1480 - protein, 26 aa, synthetic construct
AQSVTQPDARVTVSEGASLQLRCKYS

SEQ ID NO: 1481 - protein, 26 aa, synthetic construct
VTLLEQNPRWRLVPRGQAVNLRCILK

SEQ ID NO: 1482 - protein, 26 aa, synthetic construct
QQQVRQSPQSLTVWEGETAILNCSYE

SEQ ID NO: 1483 - protein, 26 aa, synthetic construct
VTLLEQNPRWRLVPRGQAVNLRCILK

SEQ ID NO: 1484 - protein, 26 aa, synthetic construct
GDSVTQTEGLVTLTEGLPVMLNCTYQ

SEQ ID NO: 1485 - DNA, 78 bp, synthetic construct
  source 1..78: mol_type = other DNA
gaagctggagtcacccagtctcccagatatgcagtcctacaggaagggcaagctgtttccttttggtgtgaccctatt

SEQ ID NO: 1486 - DNA, 78 bp, synthetic construct
  source 1..78: mol_type = other DNA
cagcagaaggtgcagcagagcccagaatccctcagtgtcccagagggaggcatggcctctttcaactgcacttcaagt

SEQ ID NO: 1487 - DNA, 78 bp, synthetic construct
  source 1..78: mol_type = other DNA
gaggctgcagtcacccaaagcccaagaaacaaggtggcagtaacaggaggaaaggtgacattgagctgtaatcagact

SEQ ID NO: 1488 - DNA, 75 bp, synthetic construct
  source 1..75: mol_type = other DNA
ggacagggcgtggagcagcctgacaacttgatgtctgtagagggaacctttgctcgggtcaactgcacatacagc

SEQ ID NO: 1489 - DNA, 78 bp, synthetic construct; identical to SEQ ID NO: 1487
  source 1..78: mol_type = other DNA

SEQ ID NO: 1490 - DNA, 78 bp, synthetic construct
  source 1..78: mol_type = other DNA
gcccagaaggtaacacagactcagacttcaatttctgtggtggagaagacaacggtgacaatggactgtgtgtatgaa

SEQ ID NO: 1491 - DNA, 78 bp, synthetic construct
  source 1..78: mol_type = other DNA
gaggctgcagtcacccaaagtccaagaagcaaggtggcagtaacaggaggaaaggtgacattgagctgtcaccagact

SEQ ID NO: 1492 - DNA, 78 bp, synthetic construct
  source 1..78: mol_type = other DNA
ggagactcagtgacccagacagaaggcctggtcactctcaccaaggggttgcctgtgatgctgaactgcacctatcag

SEQ ID NO: 1493 - DNA, 78 bp, synthetic construct; identical to SEQ ID NO: 1487
  source 1..78: mol_type = other DNA

SEQ ID NO: 1494 - DNA, 78 bp, synthetic construct
  source 1..78: mol_type = other DNA
ggacagcaagtgcagcagagccctgcatccttggttctgcaggagggggagaacgcagagctgcagtgtaacttttcc

SEQ ID NO: 1495 - DNA, 78 bp, synthetic construct; identical to SEQ ID NO: 1485
  source 1..78: mol_type = other DNA

SEQ ID NO: 1496 - DNA, 78 bp, synthetic construct
  source 1..78: mol_type = other DNA
gctcagtcagtgacacagcccgatgctcgcgtcactgtctctgaaggagcctctctgcagctgagatgcaagtattcc

SEQ ID NO: 1497 - DNA, 78 bp, synthetic construct; identical to SEQ ID NO: 1487
  source 1..78: mol_type = other DNA

SEQ ID NO: 1498 - DNA, 78 bp, synthetic construct
  source 1..78: mol_type = other DNA
ggagactcagtgactcagacggaaggtcaagtggccctctcagaagaggactttcttacgatacactgcaactactca

SEQ ID NO: 1499 - DNA, 78 bp, synthetic construct
  source 1..78: mol_type = other DNA
gacccgaaaattatccagaaaccaaaatatctggtggcagtcacagggagcgaaaaaatcctgatatgcgaacagtat

SEQ ID NO: 1500 - DNA, 75 bp, synthetic construct; identical to SEQ ID NO: 1488
  source 1..75: mol_type = other DNA

SEQ ID NO: 1501 - DNA, 78 bp, synthetic construct
  source 1..78: mol_type = other DNA
aatgctggtgtcatccaaacacctaggcacaaggtgacagggaagggacaagaagcaactctgtggtgtgagccaatt

SEQ ID NO: 1502 - DNA, 78 bp, synthetic construct
  source 1..78: mol_type = other DNA
ggggatcaggtggagcagagtccttcagccctgagcctccacgagggaaccgattctgctctgagatgcaattttacg

SEQ ID NO: 1503 - DNA, 78 bp, synthetic construct; identical to SEQ ID NO: 1487
  source 1..78: mol_type = other DNA

SEQ ID NO: 1504 - DNA, 78 bp, synthetic construct
  source 1..78: mol_type = other DNA
gctcagtcagtgacgcagcccgatgctcgtgtcactgtctctgaaggagcctctctgcagctgagatgcaagtattcc

SEQ ID NO: 1505 - DNA, 78 bp, synthetic construct; identical to SEQ ID NO: 1491
  source 1..78: mol_type = other DNA

SEQ ID NO: 1506 - DNA, 78 bp, synthetic construct
  source 1..78: mol_type = other DNA
ggcgagcaggtggagcagcgccctcctcacctgagtgtccgggagggagacagcgccattatcatctgcacctacaca

SEQ ID NO: 1507 - DNA, 78 bp, synthetic construct
  source 1..78: mol_type = other DNA
gtgactttgctggagcaaaacccaaggtggcgtctggtaccacgtggtcaagctgtgaacctacgctgcatcttgaag

SEQ ID NO: 1508 - DNA, 78 bp, synthetic construct
  source 1..78: mol_type = other DNA
agtcaactagcagaagagaatccgtgggccctgagcgtccacgagggtgaaagtgtcacggtgaattgtagttacaag

SEQ ID NO: 1509 - DNA, 78 bp, synthetic construct; identical to SEQ ID NO: 1507
  source 1..78: mol_type = other DNA

SEQ ID NO: 1510 - DNA, 78 bp, synthetic construct; identical to SEQ ID NO: 1504
  source 1..78: mol_type = other DNA

SEQ ID NO: 1511 - DNA, 78 bp, synthetic construct
  source 1..78: mol_type = other DNA
ggtggcatcattactcagacacccaaattcctgattggtcaggaagggcaaaaactgaccttgaaatgtcaacagaat

SEQ ID NO: 1512 - DNA, 78 bp, synthetic construct
  source 1..78: mol_type = other DNA
caacagaaggtgcagcagagcccagaatccctcattgttccagagggaggcatggcctctctcaactgcacttccagt

SEQ ID NO: 1513 - DNA, 78 bp, synthetic construct; identical to SEQ ID NO: 1499
  source 1..78: mol_type = other DNA

SEQ ID NO: 1514 - DNA, 78 bp, synthetic construct
  source 1..78: mol_type = other DNA
gctcagtcagtgacgcagcccgatgctcgcgtcactgtctctgaaggagcctctctgcagctgagatgcaagtattcc

SEQ ID NO: 1515 - DNA, 78 bp, synthetic construct; identical to SEQ ID NO: 1487
  source 1..78: mol_type = other DNA

SEQ ID NO: 1516 - DNA, 78 bp, synthetic construct; identical to SEQ ID NO: 1494
  source 1..78: mol_type = other DNA

SEQ ID NO: 1517 - DNA, 78 bp, synthetic construct; identical to SEQ ID NO: 1487
  source 1..78: mol_type = other DNA

SEQ ID NO: 1518 - DNA, 78 bp, synthetic construct; identical to SEQ ID NO: 1504
  source 1..78: mol_type = other DNA

SEQ ID NO: 1519 - DNA, 78 bp, synthetic construct
  source 1..78: mol_type = other DNA
gctcagactatccatcaatggccagttgccgagatcaaggctgtgggcagcccactgtctctggggtgtaccataaag

SEQ ID NO: 1520 - DNA, 78 bp, synthetic construct; identical to SEQ ID NO: 1496
  source 1..78: mol_type = other DNA

SEQ ID NO: 1521 - DNA, 78 bp, synthetic construct
  source 1..78: mol_type = other DNA
gaggctgcagtcacccaaagccctagaaacaaggtgacagtaacaggaggaaacgtgacattgagctgtcgccagact

SEQ ID NO: 1522 - DNA, 78 bp, synthetic construct
  source 1..78: mol_type = other DNA
ggagactcagtgactcagacagaaggcccagtgacactgtctgaagggacttctctgactgtgaactgttcctatgaa

SEQ ID NO: 1523 - DNA, 78 bp, synthetic construct; identical to SEQ ID NO: 1519
  source 1..78: mol_type = other DNA

SEQ ID NO: 1524 - DNA, 78 bp, synthetic construct; identical to SEQ ID NO: 1506
  source 1..78: mol_type = other DNA

SEQ ID NO: 1525 - DNA, 78 bp, synthetic construct; identical to SEQ ID NO: 1487
  source 1..78: mol_type = other DNA

SEQ ID NO: 1526 - DNA, 78 bp, synthetic construct
  source 1..78: mol_type = other DNA
ggcgagcaggtggagcagcgccctcctcacctgagtgtccgggagggagacagtgccgttatcacctgcacctacaca

SEQ ID NO: 1527 - DNA, 78 bp, synthetic construct; identical to SEQ ID NO: 1487
  source 1..78: mol_type = other DNA

SEQ ID NO: 1528 - DNA, 78 bp, synthetic construct
  source 1..78: mol_type = other DNA
gcccagaaggtaacacagactcagacttcaatttctgtgatggagaagacaacggtgacaatggactgtgtgtatgaa

SEQ ID NO: 1529 - DNA, 78 bp, synthetic construct; identical to SEQ ID NO: 1491
  source 1..78: mol_type = other DNA

SEQ ID NO: 1530 - DNA, 78 bp, synthetic construct
  source 1..78: mol_type = other DNA
ggagactccgtgacccagacagaaggcctggtcactctcacagaagggttgcctgtgatgctgaactgcacctatcag

SEQ ID NO: 1531 - DNA, 78 bp, synthetic construct; identical to SEQ ID NO: 1511
  source 1..78: mol_type = other DNA

SEQ ID NO: 1532 - DNA, 78 bp, synthetic construct
  source 1..78: mol_type = other DNA
ggcgagcaggtggagcagcttccttccatcctgagagtccaggagggatccagtgccagcatcaactgcagttatgaa

SEQ ID NO: 1533 - DNA, 78 bp, synthetic construct; identical to SEQ ID NO: 1491
  source 1..78: mol_type = other DNA

SEQ ID NO: 1534 - DNA, 78 bp, synthetic construct; identical to SEQ ID NO: 1526
  source 1..78: mol_type = other DNA

SEQ ID NO: 1535 - DNA, 78 bp, synthetic construct; identical to SEQ ID NO: 1491
  source 1..78: mol_type = other DNA

SEQ ID NO: 1536 - DNA, 78 bp, synthetic construct; identical to SEQ ID NO: 1514
  source 1..78: mol_type = other DNA

SEQ ID NO: 1537 - DNA, 78 bp, synthetic construct; identical to SEQ ID NO: 1521
  source 1..78: mol_type = other DNA

SEQ ID NO: 1538 - DNA, 78 bp, synthetic construct
  source 1..78: mol_type = other DNA
ggagagaaggtcgagcaacacgagtctacactgagtgttcgagagggagacagcgctgtcatcaactgcacttacaca

SEQ ID NO: 1539 - DNA, 78 bp, synthetic construct; identical to SEQ ID NO: 1491
  source 1..78: mol_type = other DNA

SEQ ID NO: 1540 - DNA, 78 bp, synthetic construct
  source 1..78: mol_type = other DNA
ggacagcaagtgcagcagagccccgcgtccttggttctgcaggagggggagaacgcagagctgcagtgtaacttttcc

SEQ ID NO: 1541 - DNA, 78 bp, synthetic construct; identical to SEQ ID NO: 1499
  source 1..78: mol_type = other DNA

SEQ ID NO: 1542 - DNA, 78 bp, synthetic construct; identical to SEQ ID NO: 1538
  source 1..78: mol_type = other DNA

SEQ ID NO: 1543 - DNA, 78 bp, synthetic construct; identical to SEQ ID NO: 1487
  source 1..78: mol_type = other DNA

SEQ ID NO: 1544 - DNA, 78 bp, synthetic construct
  source 1..78: mol_type = other DNA
ggagattccgtgactcaaacagaaggccaagtgaccgtctcagaaagcaagtccctgataataaattgcacgtattca

SEQ ID NO: 1545 - DNA, 78 bp, synthetic construct; identical to SEQ ID NO: 1491
  source 1..78: mol_type = other DNA

SEQ ID NO: 1546 - DNA, 78 bp, synthetic construct
  source 1..78: mol_type = other DNA
ggagactcagtgacccagacagaaggcctggtcactctcaccgaggggttgcctgtgatgctgaactgcacctatcag

SEQ ID NO: 1547 - DNA, 78 bp, synthetic construct; identical to SEQ ID NO: 1519
  source 1..78: mol_type = other DNA

SEQ ID NO: 1548 - DNA, 78 bp, synthetic construct
  source 1..78: mol_type = other DNA
cagcagaaggtgcagcagagcccagaatccctcagtgtcccagagggaggcatggcctctctcaactgcacttcaagt

SEQ ID NO: 1549 - DNA, 78 bp, synthetic construct; identical to SEQ ID NO: 1511
  source 1..78: mol_type = other DNA

SEQ ID NO: 1550 - DNA, 78 bp, synthetic construct; identical to SEQ ID NO: 1528
  source 1..78: mol_type = other DNA

SEQ ID NO: 1551 - DNA, 78 bp, synthetic construct; identical to SEQ ID NO: 1485
  source 1..78: mol_type = other DNA

SEQ ID NO: 1552 - DNA, 78 bp, synthetic construct
  source 1..78: mol_type = other DNA
cagcagcaggtgagacaaagtccccaatctctgacagtctgggaaggagagacagcaattctgaactgcagttatgag

SEQ ID NO: 1553 - DNA, 78 bp, synthetic construct; identical to SEQ ID NO: 1499
  source 1..78: mol_type = other DNA

SEQ ID NO: 1554 - DNA, 78 bp, synthetic construct; identical to SEQ ID NO: 1492
  source 1..78: mol_type = other DNA

SEQ ID NO: 1555 - DNA, 78 bp, synthetic construct; identical to SEQ ID NO: 1521
  source 1..78: mol_type = other DNA

SEQ ID NO: 1556 - DNA, 78 bp, synthetic construct
  source 1..78: mol_type = other DNA
ggagactctgtgacccagacagaaggcctggtcactctcaccgaggggttgcctgtgatgctgaactgcacctatcag

SEQ ID NO: 1557 - DNA, 78 bp, synthetic construct; identical to SEQ ID NO: 1519
  source 1..78: mol_type = other DNA

SEQ ID NO: 1558 - DNA, 78 bp, synthetic construct; identical to SEQ ID NO: 1496
  source 1..78: mol_type = other DNA

SEQ ID NO: 1559 - DNA, 78 bp, synthetic construct; identical to SEQ ID NO: 1507
  source 1..78: mol_type = other DNA

SEQ ID NO: 1560 - DNA, 78 bp, synthetic construct
  source 1..78: mol_type = other DNA
cagcagaatgtgcagcagagcccagaatccctcattgtcccagagggagccaggacctctctcaactgcactttcagt

SEQ ID NO: 1561 - DNA, 78 bp, synthetic construct; identical to SEQ ID NO: 1507
  source 1..78: mol_type = other DNA

SEQ ID NO: 1562 - DNA, 78 bp, synthetic construct
  source 1..78: mol_type = other DNA
ggccagcaagttaaacaaagctctccatcgctgactgttcaagagggagggatattgatcctgaattgtgattacgag

SEQ ID NO: 1563 - DNA, 78 bp, synthetic construct
  source 1..78: mol_type = other DNA
ggagcactcgtctatcaatatcccagaagaaccatctgtaagagtggaacttccatgaggatggagtgtcaagctgtg

SEQ ID NO: 1564 - DNA, 78 bp, synthetic construct
  source 1..78: mol_type = other DNA
agccaatggggagaagagaatcttcaggctctgagcatccaggagggtgaagatgtcaccatgaactgcagttacaag

SEQ ID NO: 1565 - DNA, 78 bp, synthetic construct; identical to SEQ ID NO: 1499
  source 1..78: mol_type = other DNA

SEQ ID NO: 1566 - DNA, 78 bp, synthetic construct; identical to SEQ ID NO: 1528
  source 1..78: mol_type = other DNA

SEQ ID NO: 1567 - DNA, 78 bp, synthetic construct; identical to SEQ ID NO: 1521
  source 1..78: mol_type = other DNA

SEQ ID NO: 1568 - DNA, 78 bp, synthetic construct
  source 1..78: mol_type = other DNA
cagcagcaggtgagacaaagttcccaatctctgacagtctgggaaggagagaccgcaattctgaactgcagttatgag

SEQ ID NO: 1569 - DNA, 78 bp, synthetic construct; identical to SEQ ID NO: 1511
  source 1..78: mol_type = other DNA

SEQ ID NO: 1570 - DNA, 78 bp, synthetic construct
  source 1..78: mol_type = other DNA
gctcagtcagtgacacagcccgatgctcgcgtcactgtctctgaaggagcctcgctgcagctgagatgcaagtattcc

SEQ ID NO: 1571 - DNA, 78 bp, synthetic construct; identical to SEQ ID NO: 1491
  source 1..78: mol_type = other DNA

SEQ ID NO: 1572 - DNA, 78 bp, synthetic construct; identical to SEQ ID NO: 1528
  source 1..78: mol_type = other DNA

SEQ ID NO: 1573 - DNA, 78 bp, synthetic construct; identical to SEQ ID NO: 1491
  source 1..78: mol_type = other DNA

SEQ ID NO: 1574 - DNA, 78 bp, synthetic construct; identical to SEQ ID NO: 1506
  source 1..78: mol_type = other DNA

SEQ ID NO: 1575 - DNA, 78 bp, synthetic construct
  source 1..78: mol_type = other DNA
ggacccaaagtcttacagatcccaagtcatcaaataatagatatggggcagatggtgaccctcaattgtgacccagtt

SEQ ID NO: 1576 - DNA, 78 bp, synthetic construct
  source 1..78: mol_type = other DNA
cagcagaaggtgcagcagagcccagaatccctcactgtctcagagggagccatggcctctctcaactgcacgttcagt

SEQ ID NO: 1577 - DNA, 78 bp, synthetic construct; identical to SEQ ID NO: 1507
  source 1..78: mol_type = other DNA

SEQ ID NO: 1578 - DNA, 78 bp, synthetic construct
  source 1..78: mol_type = other DNA
ggacagcaagtgcagcagagtcccgcatccttggttctgcaggagggggagaacgcagagctgcagtgtaacttttcc

SEQ ID NO: 1579 - DNA, 75 bp, synthetic construct
  source 1..75: mol_type = other DNA
aacactaaaattactcagtcaccaagatatctaatcctgggaagagcaaataagtctttggaatgtgagcaacat

SEQ ID NO: 1580 - DNA, 78 bp, synthetic construct
  source 1..78: mol_type = other DNA
caggagaaggtacagcagagcccagaatccctcattgtcccagagggagccatgtcctccctcaactgcactttcagc

SEQ ID NO: 1581 - DNA, 75 bp, synthetic construct; identical to SEQ ID NO: 1579
  source 1..75: mol_type = other DNA

SEQ ID NO: 1582 - DNA, 78 bp, synthetic construct; identical to SEQ ID NO: 1556
  source 1..78: mol_type = other DNA

SEQ ID NO: 1583 - DNA, 78 bp, synthetic construct
  source 1..78: mol_type = other DNA
gagacggctgttttccagactccaaactatcatgtcacacaggtgggaaatgaagtgtctttcaattgtaagcaaact

SEQ ID NO: 1584 - DNA, 78 bp, synthetic construct
  source 1..78: mol_type = other DNA
ggcgagcaggtggagcagcgccctcctcacctgagtgtcccggagggagacagcgccgttatcatctgcacctacaca

SEQ ID NO: 1585 - DNA, 78 bp, synthetic construct; identical to SEQ ID NO: 1487
  source 1..78: mol_type = other DNA

SEQ ID NO: 1586 - DNA, 78 bp, synthetic construct; identical to SEQ ID NO: 1526
  source 1..78: mol_type = other DNA

SEQ ID NO: 1587 - DNA, 78 bp, synthetic construct; identical to SEQ ID NO: 1491
  source 1..78: mol_type = other DNA

SEQ ID NO: 1588 - DNA, 75 bp, synthetic construct
  source 1..75: mol_type = other DNA
gatgctaagactacacaaccagattcaatggaaagtactgaaggagaaacggtgcacttgccttgtagccacgcc

SEQ ID NO: 1589 - DNA, 75 bp, synthetic construct; identical to SEQ ID NO: 1579
  source 1..75: mol_type = other DNA

SEQ ID NO: 1590 - DNA, 75 bp, synthetic construct
  source 1..75: mol_type = other DNA
cttgccaagaccacccagcccccctccatggaggcctatgaagggcaagaagtgaacgtgtcctgcagccataca

SEQ ID NO: 1591 - DNA, 78 bp, synthetic construct; identical to SEQ ID NO: 1499
  source 1..78: mol_type = other DNA

SEQ ID NO: 1592 - DNA, 78 bp, synthetic construct
  source 1..78: mol_type = other DNA
ggcgagcaggtggagcagcgccctcctcacctgagtgtccgggagggagacagtgccgttatcatctgcacctacaca

SEQ ID NO: 1593 - DNA, 78 bp, synthetic construct; identical to SEQ ID NO: 1487
  source 1..78: mol_type = other DNA

SEQ ID NO: 1594 - DNA, 78 bp, synthetic construct
  source 1..78: mol_type = other DNA
acacagacagtttcccagtctgatgcccatgtcactgtcttcgaaggagactcggtggagctgagatgcaactattcc

SEQ ID NO: 1595 - DNA, 78 bp, synthetic construct; identical to SEQ ID NO: 1491
  source 1..78: mol_type = other DNA

SEQ ID NO: 1596 - DNA, 78 bp, synthetic construct
  source 1..78: mol_type = other DNA
ggagatcaggtggagcagagtccttcagccctgagcctccacgagggaaccggttctgctctgagatgcaattttact

SEQ ID NO: 1597 - DNA, 75 bp, synthetic construct; identical to SEQ ID NO: 1579
  source 1..75: mol_type = other DNA

SEQ ID NO: 1598 - DNA, 78 bp, synthetic construct; identical to SEQ ID NO: 1498
  source 1..78: mol_type = other DNA

SEQ ID NO: 1599 - DNA, 78 bp, synthetic construct; identical to SEQ ID NO: 1487
  source 1..78: mol_type = other DNA

SEQ ID NO: 1600 - DNA, 78 bp, synthetic construct
  source 1..78: mol_type = other DNA
ggagactccgtgacccagacagaaggcctggtcactgtcaccgaggggttgcctgtgaagctgaactgcacctatcag

SEQ ID NO: 1601 - DNA, 78 bp, synthetic construct; identical to SEQ ID NO: 1487
  source 1..78: mol_type = other DNA

SEQ ID NO: 1602 - DNA, 78 bp, synthetic construct; identical to SEQ ID NO: 1528
  source 1..78: mol_type = other DNA

SEQ ID NO: 1603 - DNA, 78 bp, synthetic construct; identical to SEQ ID NO: 1487
  source 1..78: mol_type = other DNA

SEQ ID NO: 1604 - DNA, 81 bp, synthetic construct
  source 1..81: mol_type = other DNA
ggacagcaagtgcagcagagcccccccgcgtccttggttctgcaggagggggagaacgcagagctgcagtgcacctattcc

SEQ ID NO: 1605 - DNA, 78 bp, synthetic construct; identical to SEQ ID NO: 1575
  source 1..78: mol_type = other DNA

SEQ ID NO: 1606 - DNA, 78 bp, synthetic construct; identical to SEQ ID NO: 1570
  source 1..78: mol_type = other DNA

SEQ ID NO: 1607 - DNA, 78 bp, synthetic construct; identical to SEQ ID NO: 1485
  source 1..78: mol_type = other DNA

SEQ ID NO: 1608 - DNA, 78 bp, synthetic construct
  source 1..78: mol_type = other DNA
cagcagcaggtgagacaaagtccccaatctctgacagtctgggaaggagagaccgcaattctgaactgcagttatgag

SEQ ID NO: 1609 - DNA, 78 bp, synthetic construct; identical to SEQ ID NO: 1583
  source 1..78: mol_type = other DNA

SEQ ID NO: 1610 - DNA, 78 bp, synthetic construct; identical to SEQ ID NO: 1494
  source 1..78: mol_type = other DNA

SEQ ID NO: 1611 - DNA, 78 bp, synthetic construct; identical to SEQ ID NO: 1487
  source 1..78: mol_type = other DNA

SEQ ID NO: 1612 - DNA, 78 bp, synthetic construct; identical to SEQ ID NO: 1514
  source 1..78: mol_type = other DNA

SEQ ID NO: 1613 - DNA, 78 bp, synthetic construct; identical to SEQ ID NO: 1487
  source 1..78: mol_type = other DNA

SEQ ID NO: 1614 - DNA, 78 bp, synthetic construct
  source 1..78: mol_type = other DNA
ggagattccgtgactcaaacagaaggcccagtgaccgtctcagaaagcgagtccctgataataaattgcacgtattca

SEQ ID NO: 1615 - DNA, 78 bp, synthetic construct; identical to SEQ ID NO: 1487
  source 1..78: mol_type = other DNA

SEQ ID NO: 1616 - DNA, 78 bp, synthetic construct
  source 1..78: mol_type = other DNA
cagcagaaggtgcagcagagcccagaatccctcattgttccagagggaggcatggcctctctcaactgcactttcagt

SEQ ID NO: 1617 - DNA, 78 bp, synthetic construct; identical to SEQ ID NO: 1487
  source 1..78: mol_type = other DNA

SEQ ID NO: 1618 - DNA, 78 bp, synthetic construct; identical to SEQ ID NO: 1614
  source 1..78: mol_type = other DNA

SEQ ID NO: 1619 - DNA, 78 bp, synthetic construct; identical to SEQ ID NO: 1487
  source 1..78: mol_type = other DNA

SEQ ID NO: 1620 - DNA, 78 bp, synthetic construct; identical to SEQ ID NO: 1560
  source 1..78: mol_type = other DNA

SEQ ID NO: 1621 - DNA, 78 bp, synthetic construct; identical to SEQ ID NO: 1521
  source 1..78: mol_type = other DNA

SEQ ID NO: 1622 - DNA, 78 bp, synthetic construct; identical to SEQ ID NO: 1492
  source 1..78: mol_type = other DNA

SEQ ID NO: 1623 - DNA, 78 bp, synthetic construct; identical to SEQ ID NO: 1519
  source 1..78: mol_type = other DNA

SEQ ID NO: 1624 - DNA, 78 bp, synthetic construct; identical to SEQ ID NO: 1540
  source 1..78: mol_type = other DNA

SEQ ID NO: 1625 - DNA, 78 bp, synthetic construct; identical to SEQ ID NO: 1519
  source 1..78: mol_type = other DNA

SEQ ID NO: 1626 - DNA, 78 bp, synthetic construct; identical to SEQ ID NO: 1486
  source 1..78: mol_type = other DNA

SEQ ID NO: 1627 - DNA, 78 bp, synthetic construct; identical to SEQ ID NO: 1575
  source 1..78: mol_type = other DNA

SEQ ID NO: 1628 - DNA, 78 bp, synthetic construct; identical to SEQ ID NO: 1496
  source 1..78: mol_type = other DNA

SEQ ID NO: 1629 - DNA, 78 bp, synthetic construct; identical to SEQ ID NO: 1563
  source 1..78: mol_type = other DNA

SEQ ID NO: 1630 - DNA, 78 bp, synthetic construct; identical to SEQ ID NO: 1594
  source 1..78: mol_type = other DNA

SEQ ID NO: 1631 - DNA, 78 bp, synthetic construct; identical to SEQ ID NO: 1511
  source 1..78: mol_type = other DNA

SEQ ID NO: 1632 - DNA, 78 bp, synthetic construct; identical to SEQ ID NO: 1538
  source 1..78: mol_type = other DNA

SEQ ID NO: 1633 - DNA, 78 bp, synthetic construct; identical to SEQ ID NO: 1511
  source 1..78: mol_type = other DNA

SEQ ID NO: 1634 - DNA, 78 bp, synthetic construct
  source 1..78: mol_type = other DNA
ggagactcagtgacccagatgcaaggtcaagtgaccctctcagaagacgacttcctatttataaactgtacttattca

SEQ ID NO: 1635 - DNA, 78 bp, synthetic construct; identical to SEQ ID NO: 1511
  source 1..78: mol_type = other DNA

SEQ ID NO: 1636 - DNA, 78 bp, synthetic construct; identical to SEQ ID NO: 1584
  source 1..78: mol_type = other DNA

SEQ ID NO: 1637 - DNA, 78 bp, synthetic construct; identical to SEQ ID NO: 1511
  source 1..78: mol_type = other DNA

SEQ ID NO: 1638 - DNA, 78 bp, synthetic construct; identical to SEQ ID NO: 1564
  source 1..78: mol_type = other DNA

SEQ ID NO: 1639 - DNA, 75 bp, synthetic construct; identical to SEQ ID NO: 1579
  source 1..75: mol_type = other DNA

SEQ ID NO: 1640 - DNA, 78 bp, synthetic construct; identical to SEQ ID NO: 1494
  source 1..78: mol_type = other DNA

SEQ ID NO: 1641 - DNA, 75 bp, synthetic construct; identical to SEQ ID NO: 1579
  source 1..75: mol_type = other DNA

SEQ ID NO: 1642 - DNA, 78 bp, synthetic construct; identical to SEQ ID NO: 1564
  source 1..78: mol_type = other DNA

SEQ ID NO: 1643 - DNA, 78 bp, synthetic construct; identical to SEQ ID NO: 1485
  source 1..78: mol_type = other DNA

SEQ ID NO: 1644 - DNA, 78 bp, synthetic construct
  source 1..78: mol_type = other DNA
ggcgagcaggtggaacagctcccttcctccctgattgtccaggagggagccagtgttctcatcaactgctcctacaca

SEQ ID NO: 1645 - DNA, 78 bp, synthetic construct; identical to SEQ ID NO: 1485
  source 1..78: mol_type = other DNA

SEQ ID NO: 1646 - DNA, 78 bp, synthetic construct; identical to SEQ ID NO: 1548
  source 1..78: mol_type = other DNA

SEQ ID NO: 1647 - DNA, 78 bp, synthetic construct
  source 1..78: mol_type = other DNA
gacatgaaagtaacccagatgccaagatacctgatcaaaagaatgggagagaatgttttgctggaatgtggacaggac

SEQ ID NO: 1648 - DNA, 78 bp, synthetic construct; identical to SEQ ID NO: 1538
  source 1..78: mol_type = other DNA

SEQ ID NO: 1649 - DNA, 78 bp, synthetic construct; identical to SEQ ID NO: 1583
  source 1..78: mol_type = other DNA

SEQ ID NO: 1650 - DNA, 78 bp, synthetic construct
  source 1..78: mol_type = other DNA
gaacagcaagtgcagcagagtcccgcatccttggttctgcaggagggggagaacgcagagctccagtgtagcttttcc

SEQ ID NO: 1651 - DNA, 78 bp, synthetic construct; identical to SEQ ID NO: 1487
  source 1..78: mol_type = other DNA

SEQ ID NO: 1652 - DNA, 78 bp, synthetic construct; identical to SEQ ID NO: 1528
  source 1..78: mol_type = other DNA

SEQ ID NO: 1653 - DNA, 78 bp, synthetic construct; identical to SEQ ID NO: 1487
  source 1..78: mol_type = other DNA

SEQ ID NO: 1654 - DNA, 78 bp, synthetic construct
  source 1..78: mol_type = other DNA
ggcgagcaggtggagcagcttccttccatcctgagagtccaggagggatccagtgccagcatcaactgcacttatgag

SEQ ID NO: 1655 - DNA, 78 bp, synthetic construct; identical to SEQ ID NO: 1487
  source 1..78: mol_type = other DNA

SEQ ID NO: 1656 - DNA, 78 bp, synthetic construct; identical to SEQ ID NO: 1532
  source 1..78: mol_type = other DNA

SEQ ID NO: 1657 - DNA, 78 bp, synthetic construct; identical to SEQ ID NO: 1487
  source 1..78: mol_type = other DNA

SEQ ID NO: 1658 - DNA, 78 bp, synthetic construct; identical to SEQ ID NO: 1584
  source 1..78: mol_type = other DNA

SEQ ID NO: 1659 - DNA, 78 bp, synthetic construct; identical to SEQ ID NO: 1487
  source 1..78: mol_type = other DNA

SEQ ID NO: 1660 - DNA, 78 bp, synthetic construct; identical to SEQ ID NO: 1490
  source 1..78: mol_type = other DNA

SEQ ID NO: 1661 - DNA, 78 bp, synthetic construct; identical to SEQ ID NO: 1521
  source 1..78: mol_type = other DNA

SEQ ID NO: 1662 - DNA, 78 bp, synthetic construct; identical to SEQ ID NO: 1654
  source 1..78: mol_type = other DNA

SEQ ID NO: 1663 - DNA, 78 bp, synthetic construct; identical to SEQ ID NO: 1491
  source 1..78: mol_type = other DNA

SEQ ID NO: 1664 - DNA, 78 bp, synthetic construct; identical to SEQ ID NO: 1614
  source 1..78: mol_type = other DNA

SEQ ID NO: 1665 - DNA, 78 bp, synthetic construct; identical to SEQ ID NO: 1491
  source 1..78: mol_type = other DNA

SEQ ID NO: 1666 - DNA, 78 bp, synthetic construct
  source 1..78: mol_type = other DNA
ggcgagcaggtggagcagcttccttccatcctgagagtccaggaaagatccagtgccagcatcaactgcacttatgag

SEQ ID NO: 1667 - DNA, 78 bp, synthetic construct; identical to SEQ ID NO: 1519
  source 1..78: mol_type = other DNA

SEQ ID NO: 1668 - DNA, 78 bp, synthetic construct; identical to SEQ ID NO: 1486
  source 1..78: mol_type = other DNA

SEQ ID NO: 1669 - DNA, 78 bp, synthetic construct; identical to SEQ ID NO: 1563
  source 1..78: mol_type = other DNA

SEQ ID NO: 1670 - DNA, 78 bp, synthetic construct; identical to SEQ ID NO: 1528
  source 1..78: mol_type = other DNA

SEQ ID NO: 1671 - DNA, 78 bp, synthetic construct; identical to SEQ ID NO: 1511
  source 1..78: mol_type = other DNA

SEQ ID NO: 1672 - DNA, 78 bp, synthetic construct
  source 1..78: mol_type = other DNA
agtcaactagcagaagagaattcgtgggccctgagcgtccacgagggtgaaagtgtcacggtgaattgtagttacaag

SEQ ID NO: 1673 - DNA, 78 bp, synthetic construct; identical to SEQ ID NO: 1511
  source 1..78: mol_type = other DNA

SEQ ID NO: 1674 - DNA, 78 bp, synthetic construct
  source 1..78: mol_type = other DNA
agtcaactagcagaagagaatctgtgggccctgagcgtccacgagggtgaaagtgtcacggtgaattgtagttacaag

SEQ ID NO: 1675 - DNA, 78 bp, synthetic construct; identical to SEQ ID NO: 1507
  source 1..78: mol_type = other DNA

SEQ ID NO: 1676 - DNA, 78 bp, synthetic construct; identical to SEQ ID NO: 1514
  source 1..78: mol_type = other DNA

SEQ ID NO: 1677 - DNA, 75 bp, synthetic construct; identical to SEQ ID NO: 1579
  source 1..75: mol_type = other DNA

SEQ ID NO: 1678 - DNA, 78 bp, synthetic construct; identical to SEQ ID NO: 1498
  source 1..78: mol_type = other DNA

SEQ ID NO: 1679 - DNA, 78 bp, synthetic construct; identical to SEQ ID NO: 1485
  source 1..78: mol_type = other DNA

SEQ ID NO: 1680 - DNA, 78 bp, synthetic construct
  source 1..78: mol_type = other DNA
ggtcagcaagtgcagcagagtcccgcgtccttggttctgcaggagggggagaacgcagagctgcagtgtagcttttcc

SEQ ID NO: 1681 - DNA, 78 bp, synthetic construct; identical to SEQ ID NO: 1485
  source 1..78: mol_type = other DNA

SEQ ID NO: 1682 - DNA, 78 bp, synthetic construct; identical to SEQ ID NO: 1596
  source 1..78: mol_type = other DNA

SEQ ID NO: 1683 - DNA, 78 bp, synthetic construct; identical to SEQ ID NO: 1499
  source 1..78: mol_type = other DNA

SEQ ID NO: 1684 - DNA, 78 bp, synthetic construct; identical to SEQ ID NO: 1680
  source 1..78: mol_type = other DNA

SEQ ID NO: 1685 - DNA, 78 bp, synthetic construct; identical to SEQ ID NO: 1583
  source 1..78: mol_type = other DNA

SEQ ID NO: 1686 - DNA, 78 bp, synthetic construct; identical to SEQ ID NO: 1540
  source 1..78: mol_type = other DNA

SEQ ID NO: 1687 - DNA, 78 bp, synthetic construct; identical to SEQ ID NO: 1583
  source 1..78: mol_type = other DNA

SEQ ID NO: 1688 - DNA, 78 bp, synthetic construct
  source 1..78: mol_type = other DNA
ggagatcaggtggagcagagtccttcagccctgagcctccacgagggaaccagttctgctctgagatgcaattttacg

SEQ ID NO: 1689 - DNA, 78 bp, synthetic construct; identical to SEQ ID NO: 1487
  source 1..78: mol_type = other DNA

SEQ ID NO: 1690 - DNA, 78 bp, synthetic construct; identical to SEQ ID NO: 1528
  source 1..78: mol_type = other DNA

SEQ ID NO: 1691 - DNA, 78 bp, synthetic construct; identical to SEQ ID NO: 1487
  source 1..78: mol_type = other DNA

SEQ ID NO: 1692 - DNA, 78 bp, synthetic construct; identical to SEQ ID NO: 1546
  source 1..78: mol_type = other DNA

SEQ ID NO: 1693 - DNA, 78 bp, synthetic construct; identical to SEQ ID NO: 1487
  source 1..78: mol_type = other DNA

SEQ ID NO: 1694 - DNA, 75 bp, synthetic construct; identical to SEQ ID NO: 1488
  source 1..75: mol_type = other DNA

SEQ ID NO: 1695 - DNA, 78 bp, synthetic construct; identical to SEQ ID NO: 1521
  source 1..78: mol_type = other DNA

SEQ ID NO: 1696 - DNA, 78 bp, synthetic construct; identical to SEQ ID NO: 1614
  source 1..78: mol_type = other DNA

SEQ ID NO: 1697 - DNA, 78 bp, synthetic construct; identical to SEQ ID NO: 1521
  source 1..78: mol_type = other DNA

SEQ ID NO: 1698 - DNA, 78 bp, synthetic construct
  source 1..78: mol_type = other DNA
cagcagaaggtgcagcagagcccagaatccctcattgtcccagagggagccatgacttctctcaactgcactttcagc

SEQ ID NO: 1699 - DNA, 78 bp, synthetic construct; identical to SEQ ID NO: 1491
  source 1..78: mol_type = other DNA

SEQ ID NO: 1700 - DNA, 78 bp, synthetic construct; identical to SEQ ID NO: 1496
  source 1..78: mol_type = other DNA

SEQ ID NO: 1701 - DNA, 78 bp, synthetic construct; identical to SEQ ID NO: 1491
  source 1..78: mol_type = other DNA

SEQ ID NO: 1702 - DNA, 78 bp, synthetic construct; identical to SEQ ID NO: 1544
  source 1..78: mol_type = other DNA

SEQ ID NO: 1703 - DNA, 78 bp, synthetic construct; identical to SEQ ID NO: 1519
  source 1..78: mol_type = other DNA

SEQ ID NO: 1704 - DNA, 78 bp, synthetic construct; identical to SEQ ID NO: 1528
  source 1..78: mol_type = other DNA

SEQ ID NO: 1705 - DNA, 78 bp, synthetic construct; identical to SEQ ID NO: 1563
  source 1..78: mol_type = other DNA

SEQ ID NO: 1706 - DNA, 78 bp, synthetic construct
  source 1..78: mol_type = other DNA
ggggactcagtgactcagacggaaggtcaagtggccctctcagaagaggactttcttacgatacactgcaactactca

SEQ ID NO: 1707 - DNA, 78 bp, synthetic construct; identical to SEQ ID NO: 1511
  source 1..78: mol_type = other DNA

SEQ ID NO: 1708 - DNA, 78 bp, synthetic construct; identical to SEQ ID NO: 1526
  source 1..78: mol_type = other DNA

SEQ ID NO: 1709 - DNA, 78 bp, synthetic construct; identical to SEQ ID NO: 1507
  source 1..78: mol_type = other DNA

SEQ ID NO: 1710 - DNA, 78 bp, synthetic construct; identical to SEQ ID NO: 1608
  source 1..78: mol_type = other DNA

SEQ ID NO: 1711 - DNA, 78 bp, synthetic construct; identical to SEQ ID NO: 1507
  source 1..78: mol_type = other DNA

SEQ ID NO: 1712 - DNA, 78 bp, synthetic construct; identical to SEQ ID NO: 1544
  source 1..78: mol_type = other DNA

SEQ ID NO: 1713 - DNA, 78 bp, synthetic construct; identical to SEQ ID NO: 1507
  source 1..78: mol_type = other DNA

SEQ ID NO: 1714 - DNA, 78 bp, synthetic construct; identical to SEQ ID NO: 1528
  source 1..78: mol_type = other DNA

SEQ ID NO: 1715 - DNA, 78 bp, synthetic construct; identical to SEQ ID NO: 1507
  source 1..78: mol_type = other DNA

SEQ ID NO: 1716 - DNA, 78 bp, synthetic construct; identical to SEQ ID NO: 1512
  source 1..78: mol_type = other DNA

SEQ ID NO: 1717 - DNA, 75 bp, synthetic construct; identical to SEQ ID NO: 1579
  source 1..75: mol_type = other DNA

SEQ ID NO: 1718 - DNA, 78 bp, synthetic construct
  source 1..78: mol_type = other DNA
gaacagcaagtgcagcagagtcccgcatccttggttctgcaggaggcggagaacgcagagctccagtgtagcttttcc

SEQ ID NO: 1719 - DNA, 75 bp, synthetic construct; identical to SEQ ID NO: 1579
  source 1..75: mol_type = other DNA

SEQ ID NO: 1720 - DNA, 78 bp, synthetic construct; identical to SEQ ID NO: 1614
  source 1..78: mol_type = other DNA

SEQ ID NO: 1721 - DNA, 75 bp, synthetic construct; identical to SEQ ID NO: 1579
  source 1..75: mol_type = other DNA

SEQ ID NO: 1722 - DNA, 78 bp, synthetic construct; identical to SEQ ID NO: 1552
  source 1..78: mol_type = other DNA

SEQ ID NO: 1723 - DNA, 78 bp, synthetic construct; identical to SEQ ID NO: 1501
  source 1..78: mol_type = other DNA

SEQ ID NO: 1724 - DNA, 78 bp, synthetic construct; identical to SEQ ID NO: 1552
  source 1..78: mol_type = other DNA

SEQ ID NO: 1725 - DNA, 78 bp, synthetic construct
  source 1..78: mol_type = other DNA
aattctggggttgtccagtctccaagatacataatcaaaggaaagggagaaaggtccattctaaaatgtattcccatc

SEQ ID NO: 1726 - DNA, 78 bp, synthetic construct; identical to SEQ ID NO: 1496
  source 1..78: mol_type = other DNA

SEQ ID NO: 1727 - DNA, 78 bp, synthetic construct; identical to SEQ ID NO: 1485
  source 1..78: mol_type = other DNA

SEQ ID NO: 1728 - DNA, 78 bp, synthetic construct; identical to SEQ ID NO: 1492
  source 1..78: mol_type = other DNA

SEQ ID NO: 1729 - DNA, 78 bp, synthetic construct; identical to SEQ ID NO: 1485
  source 1..78: mol_type = other DNA

SEQ ID NO: 1730 - DNA, 78 bp, synthetic construct; identical to SEQ ID NO: 1544
  source 1..78: mol_type = other DNA

SEQ ID NO: 1731 - DNA, 78 bp, synthetic construct; identical to SEQ ID NO: 1485
  source 1..78: mol_type = other DNA

SEQ ID NO: 1732 - DNA, 78 bp, synthetic construct
  source 1..78: mol_type = other DNA
ggccagcaagttaaacaaagctctccatcgctgactgttcaagagggagggatatcgatcctgaattgtgactacgag

SEQ ID NO: 1733 - DNA, 78 bp, synthetic construct; identical to SEQ ID NO: 1499
  source 1..78: mol_type = other DNA

SEQ ID NO: 1734 - DNA, 78 bp, synthetic construct; identical to SEQ ID NO: 1514
  source 1..78: mol_type = other DNA

SEQ ID NO: 1735 - DNA, 78 bp, synthetic construct; identical to SEQ ID NO: 1499
  source 1..78: mol_type = other DNA

SEQ ID NO: 1736 - DNA, 78 bp, synthetic construct
  source 1..78: mol_type = other DNA
ggaaattcagtgacccagatgcaaggtcaagtgaccctttcagaagaggagtttctatttataaactgtacctattca

SEQ ID NO: 1737 - DNA, 78 bp, synthetic construct; identical to SEQ ID NO: 1499
  source 1..78: mol_type = other DNA

SEQ ID NO: 1738 - DNA, 78 bp, synthetic construct
  source 1..78: mol_type = other DNA
ggagactcagtaacccagatgcaaggtcaagtgaccctctcagaagacgacttcctatttataaactgtacttattca

SEQ ID NO: 1739 - DNA, 78 bp, synthetic construct; identical to SEQ ID NO: 1583
  source 1..78: mol_type = other DNA

SEQ ID NO: 1740 - DNA, 78 bp, synthetic construct
  source 1..78: mol_type = other DNA
ggacagcaagtgcagcagagccccgcgtccttggttctgcaggagggggagaatgcagagctgcagtgtaacttttcc

SEQ ID NO: 1741 - DNA, 78 bp, synthetic construct; identical to SEQ ID NO: 1583
  source 1..78: mol_type = other DNA

SEQ ID NO: 1742 - DNA, 78 bp, synthetic construct
  source 1..78: mol_type = other DNA
ggagatcaggtgaagcaaagtccctcagcgctgagtctccaagaaggaaccaattctgctctgagatgcaatttttct

SEQ ID NO: 1743 - DNA, 78 bp, synthetic construct; identical to SEQ ID NO: 1583
  source 1..78: mol_type = other DNA

SEQ ID NO: 1744 - DNA, 78 bp, synthetic construct; identical to SEQ ID NO: 1490
  source 1..78: mol_type = other DNA

SEQ ID NO: 1745 - DNA, 78 bp, synthetic construct; identical to SEQ ID NO: 1487
  source 1..78: mol_type = other DNA

SEQ ID NO: 1746 - DNA, 78 bp, synthetic construct; identical to SEQ ID NO: 1698
  source 1..78: mol_type = other DNA

SEQ ID NO: 1747 - DNA, 78 bp, synthetic construct; identical to SEQ ID NO: 1487
  source 1..78: mol_type = other DNA

SEQ ID NO: 1748 - DNA, 78 bp, synthetic construct; identical to SEQ ID NO: 1546
  source 1..78: mol_type = other DNA

SEQ ID NO: 1749 - DNA, 78 bp, synthetic construct; identical to SEQ ID NO: 1487
  source 1..78: mol_type = other DNA

SEQ ID NO: 1750 - DNA, 78 bp, synthetic construct; identical to SEQ ID NO: 1578
  source 1..78: mol_type = other DNA

SEQ ID NO: 1751 - DNA, 78 bp, synthetic construct; identical to SEQ ID NO: 1487
  source 1..78: mol_type = other DNA

SEQ ID NO: 1752 - DNA, 78 bp, synthetic construct; identical to SEQ ID NO: 1526
  source 1..78: mol_type = other DNA

SEQ ID NO: 1753 - DNA, 78 bp, synthetic construct; identical to SEQ ID NO: 1487
  source 1..78: mol_type = other DNA

SEQ ID NO: 1754 - DNA, 78 bp, synthetic construct; identical to SEQ ID NO: 1528
  source 1..78: mol_type = other DNA

SEQ ID NO: 1755 - DNA, 78 bp, synthetic construct; identical to SEQ ID NO: 1521
  source 1..78: mol_type = other DNA

SEQ ID NO: 1756 - DNA, 78 bp, synthetic construct; identical to SEQ ID NO: 1592
  source 1..78: mol_type = other DNA

SEQ ID NO: 1757 - DNA, 78 bp, synthetic construct; identical to SEQ ID NO: 1521
  source 1..78: mol_type = other DNA

SEQ ID NO: 1758 - DNA, 78 bp, synthetic construct; identical to SEQ ID NO: 1506
  source 1..78: mol_type = other DNA

SEQ ID NO: 1759 - DNA, 78 bp, synthetic construct; identical to SEQ ID NO: 1521
  source 1..78: mol_type = other DNA

SEQ ID NO: 1760 - DNA, 78 bp, synthetic construct; identical to SEQ ID NO: 1528
  source 1..78: mol_type = other DNA

SEQ ID NO: 1761 - DNA, 78 bp, synthetic construct; identical to SEQ ID NO: 1521
  source 1..78: mol_type = other DNA

SEQ ID NO: 1762 - DNA, 78 bp, synthetic construct; identical to SEQ ID NO: 1526
  source 1..78: mol_type = other DNA

SEQ ID NO: 1763 - DNA, 78 bp, synthetic construct; identical to SEQ ID NO: 1521
  source 1..78: mol_type = other DNA

SEQ ID NO: 1764 - DNA, 78 bp, synthetic construct
  source 1..78: mol_type = other DNA
gcccagtccgtggaccagcctgatgctcatgtcacgctctctgaaggagcctccctggagctcagatgcagttattca

SEQ ID NO: 1765 - DNA, 78 bp, synthetic construct; identical to SEQ ID NO: 1521
  source 1..78: mol_type = other DNA

SEQ ID NO: 1766 - DNA, 78 bp, synthetic construct; identical to SEQ ID NO: 1552
  source 1..78: mol_type = other DNA

SEQ ID NO: 1767 - DNA, 78 bp, synthetic construct; identical to SEQ ID NO: 1521
  source 1..78: mol_type = other DNA

SEQ ID NO: 1768 - DNA, 78 bp, synthetic construct; identical to SEQ ID NO: 1556
  source 1..78: mol_type = other DNA

SEQ ID NO: 1769 - DNA, 78 bp, synthetic construct; identical to SEQ ID NO: 1521
  source 1..78: mol_type = other DNA

SEQ ID NO: 1770 - DNA, 78 bp, synthetic construct
  source 1..78: mol_type = other DNA
ggagatcaggtggagcagagtccttcagccctgagcctccacgagggaaccggttctgctctgagatgcaattttacg

SEQ ID NO: 1771 - DNA, 78 bp, synthetic construct; identical to SEQ ID NO: 1491
  source 1..78: mol_type = other DNA

SEQ ID NO: 1772 - DNA, 78 bp, synthetic construct
  source 1..78: mol_type = other DNA
ggaatgccggtggaacagaatcctccagccctgagtctttatgaaggagctgactctggtctgagatgcaatttttct

SEQ ID NO: 1773 - DNA, 78 bp, synthetic construct; identical to SEQ ID NO: 1491
  source 1..78: mol_type = other DNA

SEQ ID NO: 1774 - DNA, 78 bp, synthetic construct; identical to SEQ ID NO: 1528
  source 1..78: mol_type = other DNA

SEQ ID NO: 1775 - DNA, 78 bp, synthetic construct; identical to SEQ ID NO: 1491
  source 1..78: mol_type = other DNA

SEQ ID NO: 1776 - DNA, 78 bp, synthetic construct; identical to SEQ ID NO: 1570
  source 1..78: mol_type = other DNA

SEQ ID NO: 1777 - DNA, 78 bp, synthetic construct; identical to SEQ ID NO: 1491
  source 1..78: mol_type = other DNA

SEQ ID NO: 1778 - DNA, 78 bp, synthetic construct; identical to SEQ ID NO: 1506
  source 1..78: mol_type = other DNA

SEQ ID NO: 1779 - DNA, 78 bp, synthetic construct; identical to SEQ ID NO: 1491
  source 1..78: mol_type = other DNA

SEQ ID NO: 1780 - DNA, 78 bp, synthetic construct; identical to SEQ ID NO: 1608
  source 1..78: mol_type = other DNA

SEQ ID NO: 1781 - DNA, 78 bp, synthetic construct; identical to SEQ ID NO: 1491
  source 1..78: mol_type = other DNA

SEQ ID NO: 1782 - DNA, 78 bp, synthetic construct; identical to SEQ ID NO: 1772
  source 1..78: mol_type = other DNA

SEQ ID NO: 1783 - DNA, 78 bp, synthetic construct
  source 1..78: mol_type = other DNA
gatactacggttaagcagaacccaagatacaagcttgcaagagttggaaaaccagtgaatttgatctgttctcagact

SEQ ID NO: 1784 - DNA, 78 bp, synthetic construct; identical to SEQ ID NO: 1490
  source 1..78: mol_type = other DNA

SEQ ID NO: 1785 - DNA, 78 bp, synthetic construct; identical to SEQ ID NO: 1783
  source 1..78: mol_type = other DNA

SEQ ID NO: 1786 - DNA, 78 bp, synthetic construct; identical to SEQ ID NO: 1528
  source 1..78: mol_type = other DNA

SEQ ID NO: 1787 - DNA, 78 bp, synthetic construct; identical to SEQ ID NO: 1519
  source 1..78: mol_type = other DNA

SEQ ID NO: 1788 - DNA, 78 bp, synthetic construct; identical to SEQ ID NO: 1496
  source 1..78: mol_type = other DNA

SEQ ID NO: 1789 - DNA, 78 bp, synthetic construct; identical to SEQ ID NO: 1519
  source 1..78: mol_type = other DNA

SEQ ID NO: 1790 - DNA, 75 bp, synthetic construct; identical to SEQ ID NO: 1590
  source 1..75: mol_type = other DNA

SEQ ID NO: 1791 - DNA, 78 bp, synthetic construct; identical to SEQ ID NO: 1575
  source 1..78: mol_type = other DNA

SEQ ID NO: 1792 - DNA, 78 bp, synthetic construct; identical to SEQ ID NO: 1608
  source 1..78: mol_type = other DNA

SEQ ID NO: 1793 - DNA, 78 bp, synthetic construct; identical to SEQ ID NO: 1563
  source 1..78: mol_type = other DNA

SEQ ID NO: 1794 - DNA, 78 bp, synthetic construct
  source 1..78: mol_type = other DNA
gcccagagagtgactcaggtccagccaacaggcagcagtcagtggggagaagaagtcaccctggactgttcatatgag

SEQ ID NO: 1795 - DNA, 78 bp, synthetic construct; identical to SEQ ID NO: 1563
  source 1..78: mol_type = other DNA

SEQ ID NO: 1796 - DNA, 78 bp, synthetic construct
  source 1..78: mol_type = other DNA
ggagagaaggtcgagcaacatgagtctacactgagtgttcgagagggagacagcgctgtcatcaactgcacttacaca

SEQ ID NO: 1797 - DNA, 78 bp, synthetic construct; identical to SEQ ID NO: 1511
  source 1..78: mol_type = other DNA

SEQ ID NO: 1798 - DNA, 78 bp, synthetic construct; identical to SEQ ID NO: 1742
  source 1..78: mol_type = other DNA

SEQ ID NO: 1799 - DNA, 78 bp, synthetic construct; identical to SEQ ID NO: 1511
  source 1..78: mol_type = other DNA

SEQ ID NO: 1800 - DNA, 78 bp, synthetic construct; identical to SEQ ID NO: 1526
  source 1..78: mol_type = other DNA

SEQ ID NO: 1801 - DNA, 78 bp, synthetic construct; identical to SEQ ID NO: 1507
  source 1..78: mol_type = other DNA

SEQ ID NO: 1802 - DNA, 78 bp, synthetic construct; identical to SEQ ID NO: 1794
  source 1..78: mol_type = other DNA

SEQ ID NO: 1803 - DNA, 78 bp, synthetic construct; identical to SEQ ID NO: 1507
  source 1..78: mol_type = other DNA

SEQ ID NO: 1804 - DNA, 78 bp, synthetic construct; identical to SEQ ID NO: 1496
  source 1..78: mol_type = other DNA

SEQ ID NO: 1805 - DNA, 78 bp, synthetic construct; identical to SEQ ID NO: 1507
  source 1..78: mol_type = other DNA

SEQ ID NO: 1806 - DNA, 78 bp, synthetic construct
  source 1..78: mol_type = other DNA
ggacagcaagtgcagcagagtccctcgtccttggttctgcaggagggggagaacgcagagctgcagtgtaacttttcc

SEQ ID NO: 1807 - DNA, 75 bp, synthetic construct; identical to SEQ ID NO: 1579
  source 1..75: mol_type = other DNA

SEQ ID NO: 1808 - DNA, 78 bp, synthetic construct; identical to SEQ ID NO: 1538
  source 1..78: mol_type = other DNA

SEQ ID NO: 1809 - DNA, 75 bp, synthetic construct; identical to SEQ ID NO: 1579
  source 1..75: mol_type = other DNA

SEQ ID NO: 1810 - DNA, 78 bp, synthetic construct; identical to SEQ ID NO: 1492
  source 1..78: mol_type = other DNA

SEQ ID NO: 1811 - DNA, 75 bp, synthetic construct; identical to SEQ ID NO: 1579
  source 1..75: mol_type = other DNA

SEQ ID NO: 1812 - DNA, 78 bp, synthetic construct; identical to SEQ ID NO: 1544
  source 1..78: mol_type = other DNA

SEQ ID NO: 1813 - DNA, 75 bp, synthetic construct; identical to SEQ ID NO: 1579
  source 1..75: mol_type = other DNA

SEQ ID NO: 1814 - DNA, 78 bp, synthetic construct; identical to SEQ ID NO: 1492
  source 1..78: mol_type = other DNA

SEQ ID NO: 1815 - DNA, 75 bp, synthetic construct; identical to SEQ ID NO: 1579
  source 1..75: mol_type = other DNA

SEQ ID NO: 1816 - DNA, 78 bp, synthetic construct; identical to SEQ ID NO: 1522
  source 1..78: mol_type = other DNA

SEQ ID NO: 1817 - DNA, 75 bp, synthetic construct; identical to SEQ ID NO: 1579
  source 1..75: mol_type = other DNA

SEQ ID NO: 1818 - DNA, 78 bp, synthetic construct; identical to SEQ ID NO: 1706
  source 1..78: mol_type = other DNA

SEQ ID NO: 1819 - DNA, 78 bp, synthetic construct; identical to SEQ ID NO: 1501
  source 1..78: mol_type = other DNA

SEQ ID NO: 1820 - DNA, 78 bp, synthetic construct; identical to SEQ ID NO: 1594
  source 1..78: mol_type = other DNA

SEQ ID NO: 1821 - DNA, 78 bp, synthetic construct; identical to SEQ ID NO: 1501
  source 1..78: mol_type = other DNA

SEQ ID NO: 1822 - DNA, 75 bp, synthetic construct; identical to SEQ ID NO: 1488
  source 1..75: mol_type = other DNA

SEQ ID NO: 1823 - DNA, 78 bp, synthetic construct; identical to SEQ ID NO: 1501
  source 1..78: mol_type = other DNA

SEQ ID NO: 1824 - DNA, 78 bp, synthetic construct; identical to SEQ ID NO: 1514
  source 1..78: mol_type = other DNA

SEQ ID NO: 1825 - DNA, 78 bp, synthetic construct; identical to SEQ ID NO: 1485
  source 1..78: mol_type = other DNA

SEQ ID NO: 1826 - DNA, 78 bp, synthetic construct; identical to SEQ ID NO: 1796
  source 1..78: mol_type = other DNA

SEQ ID NO: 1827 - DNA, 78 bp, synthetic construct; identical to SEQ ID NO: 1485
  source 1..78: mol_type = other DNA

SEQ ID NO: 1828 - DNA, 75 bp, synthetic construct; identical to SEQ ID NO: 1588
  source 1..75: mol_type = other DNA

SEQ ID NO: 1829 - DNA, 78 bp, synthetic construct; identical to SEQ ID NO: 1485
  source 1..78: mol_type = other DNA

SEQ ID NO: 1830 - DNA, 78 bp, synthetic construct; identical to SEQ ID NO: 1698
  source 1..78: mol_type = other DNA

SEQ ID NO: 1831 - DNA, 78 bp, synthetic construct; identical to SEQ ID NO: 1485
  source 1..78: mol_type = other DNA

SEQ ID NO: 1832 - DNA, 78 bp, synthetic construct; identical to SEQ ID NO: 1538
  source 1..78: mol_type = other DNA

SEQ ID NO: 1833 - DNA, 78 bp, synthetic construct; identical to SEQ ID NO: 1647
  source 1..78: mol_type = other DNA

SEQ ID NO: 1834 - DNA, 78 bp, synthetic construct
  source 1..78: mol_type = other DNA
gccgagaaagtgattcaggtctggtcaacagcaagcaggcaggagggcgaagaactcaccctggactgttcatatgag

SEQ ID NO: 1835 - DNA, 78 bp, synthetic construct; identical to SEQ ID NO: 1499
  source 1..78: mol_type = other DNA

SEQ ID NO: 1836 - DNA, 78 bp, synthetic construct; identical to SEQ ID NO: 1736
  source 1..78: mol_type = other DNA

SEQ ID NO: 1837 - DNA, 78 bp, synthetic construct; identical to SEQ ID NO: 1499
  source 1..78: mol_type = other DNA

SEQ ID NO: 1838 - DNA, 78 bp, synthetic construct; identical to SEQ ID NO: 1540
  source 1..78: mol_type = other DNA

SEQ ID NO: 1839 - DNA, 78 bp, synthetic construct; identical to SEQ ID NO: 1499
  source 1..78: mol_type = other DNA

SEQ ID NO: 1840 - DNA, 78 bp, synthetic construct; identical to SEQ ID NO: 1496
  source 1..78: mol_type = other DNA

SEQ ID NO: 1841 - DNA, 78 bp, synthetic construct; identical to SEQ ID NO: 1499
  source 1..78: mol_type = other DNA

SEQ ID NO: 1842 - DNA, 78 bp, synthetic construct
  source 1..78: mol_type = other DNA
ggacagcaagtgcagcagagtcctgcatccttggttctgcaggagggggagaacgcagagctgcagtgtaacttttcc

SEQ ID NO: 1843 - DNA, 78 bp, synthetic construct; identical to SEQ ID NO: 1499
  source 1..78: mol_type = other DNA

SEQ ID NO: 1844 - DNA, 78 bp, synthetic construct; identical to SEQ ID NO: 1740
  source 1..78: mol_type = other DNA

SEQ ID NO: 1845 - DNA, 78 bp, synthetic construct; identical to SEQ ID NO: 1499
  source 1..78: mol_type = other DNA

SEQ ID NO: 1846 - DNA, 78 bp, synthetic construct
  source 1..78: mol_type = other DNA
ggagattccgtgactcaaacagaaggccaagtgactgtctcagaaagcaagtccctgataataaattgcacgtattca

SEQ ID NO: 1847 - DNA, 78 bp, synthetic construct; identical to SEQ ID NO: 1583
  source 1..78: mol_type = other DNA

SEQ ID NO: 1848 - DNA, 78 bp, synthetic construct; identical to SEQ ID NO: 1540
  source 1..78: mol_type = other DNA

SEQ ID NO: 1849 - DNA, 78 bp, synthetic construct; identical to SEQ ID NO: 1583
  source 1..78: mol_type = other DNA

SEQ ID NO: 1850 - DNA, 78 bp, synthetic construct
  source 1..78: mol_type = other DNA
ggagagaaggtcgagcaacaccagtctacactgagtgttcgagagggagacagcgctgtcatcaactgcacttacaca

SEQ ID NO: 1851 - DNA, 78 bp, synthetic construct; identical to SEQ ID NO: 1583
  source 1..78: mol_type = other DNA

SEQ ID NO: 1852 - DNA, 78 bp, synthetic construct; identical to SEQ ID NO: 1592
  source 1..78: mol_type = other DNA

SEQ ID NO: 1853 - DNA, 78 bp, synthetic construct; identical to SEQ ID NO: 1583
  source 1..78: mol_type = other DNA

SEQ ID NO: 1854 - DNA, 78 bp, synthetic construct; identical to SEQ ID NO: 1568
  source 1..78: mol_type = other DNA

SEQ ID NO: 1855 - DNA, 78 bp, synthetic construct; identical to SEQ ID NO: 1583
  source 1..78: mol_type = other DNA

SEQ ID NO: 1856 - DNA, 78 bp, synthetic construct; identical to SEQ ID NO: 1540
  source 1..78: mol_type = other DNA

SEQ ID NO: 1857 - DNA, 78 bp, synthetic construct; identical to SEQ ID NO: 1583
  source 1..78: mol_type = other DNA

SEQ ID NO: 1858 - DNA, 78 bp, synthetic construct
  source 1..78: mol_type = other DNA
cagcagcaggtgagacaaagtccccaatctctgacagtctgggaaggaggaaccacagttctgacctgcagttatgag

SEQ ID NO: 1859 - DNA, 78 bp, synthetic construct; identical to SEQ ID NO: 1583
  source 1..78: mol_type = other DNA

SEQ ID NO: 1860 - DNA, 78 bp, synthetic construct
  source 1..78: mol_type = other DNA
cagcagaaggtgcagcagagcccagaatccctcattgtcccagagggagccatgacctctctcaactgcactttcagc

SEQ ID NO: 1861 - DNA, 78 bp, synthetic construct; identical to SEQ ID NO: 1583
  source 1..78: mol_type = other DNA

SEQ ID NO: 1862 - DNA, 78 bp, synthetic construct
  source 1..78: mol_type = other DNA
ggtgagcaggtggagcagcttccttccatcctgagagtccaggagggatccagtgccagcatcaactgcacttatgag

SEQ ID NO: 1863 - DNA, 78 bp, synthetic construct; identical to SEQ ID NO: 1583
  source 1..78: mol_type = other DNA

SEQ ID NO: 1864 - DNA, 78 bp, synthetic construct; identical to SEQ ID NO: 1490
  source 1..78: mol_type = other DNA

SEQ ID NO: 1865 - DNA, 78 bp, synthetic construct; identical to SEQ ID NO: 1487
  source 1..78: mol_type = other DNA

SEQ ID NO: 1866 - DNA, 78 bp, synthetic construct; identical to SEQ ID NO: 1504
  source 1..78: mol_type = other DNA

SEQ ID NO: 1867 - DNA, 78 bp, synthetic construct; identical to SEQ ID NO: 1487
  source 1..78: mol_type = other DNA

SEQ ID NO: 1868 - DNA, 78 bp, synthetic construct; identical to SEQ ID NO: 1496
  source 1..78: mol_type = other DNA

SEQ ID NO: 1869 - DNA, 78 bp, synthetic construct; identical to SEQ ID NO: 1487
  source 1..78: mol_type = other DNA

SEQ ID NO: 1870 - DNA, 78 bp, synthetic construct; identical to SEQ ID NO: 1528
  source 1..78: mol_type = other DNA

SEQ ID NO: 1871 - DNA, 78 bp, synthetic construct; identical to SEQ ID NO: 1487
  source 1..78: mol_type = other DNA

SEQ ID NO: 1872 - DNA, 78 bp, synthetic construct; identical to SEQ ID NO: 1490
  source 1..78: mol_type = other DNA

SEQ ID NO: 1873 - DNA, 78 bp, synthetic construct; identical to SEQ ID NO: 1487
  source 1..78: mol_type = other DNA

SEQ ID NO: 1874 - DNA, 78 bp, synthetic construct; identical to SEQ ID NO: 1540
  source 1..78: mol_type = other DNA

SEQ ID NO: 1875 - DNA, 78 bp, synthetic construct; identical to SEQ ID NO: 1487
  source 1..78: mol_type = other DNA

SEQ ID NO: 1876 - DNA, 78 bp, synthetic construct; identical to SEQ ID NO: 1850
  source 1..78: mol_type = other DNA

SEQ ID NO: 1877 - DNA, 78 bp, synthetic construct; identical to SEQ ID NO: 1487
  source 1..78: mol_type = other DNA

SEQ ID NO: 1878 - DNA, 75 bp, synthetic construct; identical to SEQ ID NO: 1588
  source 1..75: mol_type = other DNA

SEQ ID NO: 1879 - DNA, 78 bp, synthetic construct; identical to SEQ ID NO: 1487
  source 1..78: mol_type = other DNA

SEQ ID NO: 1880 - DNA, 78 bp, synthetic construct; identical to SEQ ID NO: 1842
  source 1..78: mol_type = other DNA

SEQ ID NO: 1881 - DNA, 78 bp, synthetic construct; identical to SEQ ID NO: 1521
  source 1..78: mol_type = other DNA

SEQ ID NO: 1882 - DNA, 78 bp, synthetic construct
  source 1..78: mol_type = other DNA
gcccagtccgtggaccagcctgatgctcacgtcacgctctatgaaggagcctccctggagctcagatgcagttattca

SEQ ID NO: 1883 - DNA, 78 bp, synthetic construct; identical to SEQ ID NO: 1521
  source 1..78: mol_type = other DNA

SEQ ID NO: 1884 - DNA, 78 bp, synthetic construct; identical to SEQ ID NO: 1528
  source 1..78: mol_type = other DNA

SEQ ID NO: 1885 - DNA, 78 bp, synthetic construct; identical to SEQ ID NO: 1521
  source 1..78: mol_type = other DNA

SEQ ID NO: 1886 - DNA, 78 bp, synthetic construct; identical to SEQ ID NO: 1644
  source 1..78: mol_type = other DNA

SEQ ID NO: 1887 - DNA, 78 bp, synthetic construct; identical to SEQ ID NO: 1521
  source 1..78: mol_type = other DNA

SEQ ID NO: 1888 - DNA, 78 bp, synthetic construct
  source 1..78: mol_type = other DNA
ggagataaggtgaagcaaagtccctcagcgctgagtctccaagagggaaccaattctgctctgagatgcaatttttct

SEQ ID NO: 1889 - DNA, 78 bp, synthetic construct; identical to SEQ ID NO: 1521
  source 1..78: mol_type = other DNA

SEQ ID NO: 1890 - DNA, 78 bp, synthetic construct; identical to SEQ ID NO: 1608
  source 1..78: mol_type = other DNA

SEQ ID NO: 1891 - DNA, 78 bp, synthetic construct; identical to SEQ ID NO: 1521
  source 1..78: mol_type = other DNA

SEQ ID NO: 1892 - DNA, 78 bp, synthetic construct; identical to SEQ ID NO: 1592
  source 1..78: mol_type = other DNA

SEQ ID NO: 1893 - DNA, 78 bp, synthetic construct; identical to SEQ ID NO: 1521
  source 1..78: mol_type = other DNA

SEQ ID NO: 1894 - DNA, 78 bp, synthetic construct; identical to SEQ ID NO: 1738
  source 1..78: mol_type = other DNA

SEQ ID NO: 1895 - DNA, 78 bp, synthetic construct; identical to SEQ ID NO: 1491
  source 1..78: mol_type = other DNA

SEQ ID NO: 1896 - DNA, 75 bp, synthetic construct; identical to SEQ ID NO: 1488
  source 1..75: mol_type = other DNA

SEQ ID NO: 1897 - DNA, 78 bp, synthetic construct; identical to SEQ ID NO: 1491
  source 1..78: mol_type = other DNA

SEQ ID NO: 1898 - DNA, 78 bp, synthetic construct; identical to SEQ ID NO: 1698
  source 1..78: mol_type = other DNA

SEQ ID NO: 1899 - DNA, 78 bp, synthetic construct; identical to SEQ ID NO: 1491
  source 1..78: mol_type = other DNA

SEQ ID NO: 1900 - DNA, 78 bp, synthetic construct; identical to SEQ ID NO: 1528
  source 1..78: mol_type = other DNA

SEQ ID NO: 1901 - DNA, 78 bp, synthetic construct; identical to SEQ ID NO: 1491
  source 1..78: mol_type = other DNA

SEQ ID NO: 1902 - DNA, 78 bp, synthetic construct; identical to SEQ ID NO: 1592
  source 1..78: mol_type = other DNA

SEQ ID NO: 1903 - DNA, 78 bp, synthetic construct; identical to SEQ ID NO: 1491
  source 1..78: mol_type = other DNA

SEQ ID NO: 1904 - DNA, 78 bp, synthetic construct; identical to SEQ ID NO: 1496
  source 1..78: mol_type = other DNA

SEQ ID NO: 1905 - DNA, 78 bp, synthetic construct; identical to SEQ ID NO: 1491
  source 1..78: mol_type = other DNA

SEQ ID NO: 1906 - DNA, 78 bp, synthetic construct; identical to SEQ ID NO: 1552
  source 1..78: mol_type = other DNA

SEQ ID NO: 1907 - DNA, 78 bp, synthetic construct; identical to SEQ ID NO: 1491
  source 1..78: mol_type = other DNA

SEQ ID NO: 1908 - DNA, 78 bp, synthetic construct; identical to SEQ ID NO: 1860
  source 1..78: mol_type = other DNA

SEQ ID NO: 1909 - DNA, 78 bp, synthetic construct; identical to SEQ ID NO: 1491
  source 1..78: mol_type = other DNA

SEQ ID NO: 1910 - DNA, 75 bp, synthetic construct; identical to SEQ ID NO: 1488
  source 1..75: mol_type = other DNA

SEQ ID NO: 1911 - DNA, 78 bp, synthetic construct; identical to SEQ ID NO: 1783
  source 1..78: mol_type = other DNA

SEQ ID NO: 1912 - DNA, 78 bp, synthetic construct; identical to SEQ ID NO: 1562
  source 1..78: mol_type = other DNA

SEQ ID NO: 1913 - DNA, 78 bp, synthetic construct; identical to SEQ ID NO: 1783
  source 1..78: mol_type = other DNA

SEQ ID NO: 1914 - DNA, 78 bp, synthetic construct; identical to SEQ ID NO: 1506
  source 1..78: mol_type = other DNA

SEQ ID NO: 1915 - DNA, 78 bp, synthetic construct; identical to SEQ ID NO: 1519
  source 1..78: mol_type = other DNA

SEQ ID NO: 1916 - DNA, 78 bp, synthetic construct; identical to SEQ ID NO: 1608
  source 1..78: mol_type = other DNA

SEQ ID NO: 1917 - DNA, 78 bp, synthetic construct; identical to SEQ ID NO: 1519
  source 1..78: mol_type = other DNA

SEQ ID NO: 1918 - DNA, 78 bp, synthetic construct
  source 1..78: mol_type = other DNA
gactcagtgactcagacagaaggcccagtgacactgtctgaagggacttctctgactgtgaactgttcctatgaaacc

SEQ ID NO: 1919 - DNA, 78 bp, synthetic construct; identical to SEQ ID NO: 1519
  source 1..78: mol_type = other DNA

SEQ ID NO: 1920 - DNA, 78 bp, synthetic construct; identical to SEQ ID NO: 1834
  source 1..78: mol_type = other DNA

SEQ ID NO: 1921 - DNA, 78 bp, synthetic construct; identical to SEQ ID NO: 1519
  source 1..78: mol_type = other DNA

SEQ ID NO: 1922 - DNA, 78 bp, synthetic construct; identical to SEQ ID NO: 1538
  source 1..78: mol_type = other DNA

SEQ ID NO: 1923 - DNA, 78 bp, synthetic construct; identical to SEQ ID NO: 1563
  source 1..78: mol_type = other DNA

SEQ ID NO: 1924 - DNA, 78 bp, synthetic construct; identical to SEQ ID NO: 1526
  source 1..78: mol_type = other DNA

SEQ ID NO: 1925 - DNA, 78 bp, synthetic construct; identical to SEQ ID NO: 1563
  source 1..78: mol_type = other DNA

SEQ ID NO: 1926 - DNA, 78 bp, synthetic construct; identical to SEQ ID NO: 1862
  source 1..78: mol_type = other DNA

SEQ ID NO: 1927 - DNA, 78 bp, synthetic construct; identical to SEQ ID NO: 1511
  source 1..78: mol_type = other DNA

SEQ ID NO: 1928 - DNA, 78 bp, synthetic construct; identical to SEQ ID NO: 1498
  source 1..78: mol_type = other DNA

SEQ ID NO: 1929 - DNA, 78 bp, synthetic construct; identical to SEQ ID NO: 1511
  source 1..78: mol_type = other DNA

SEQ ID NO: 1930 - DNA, 78 bp, synthetic construct; identical to SEQ ID NO: 1538
  source 1..78: mol_type = other DNA

SEQ ID NO: 1931 - DNA, 78 bp, synthetic construct; identical to SEQ ID NO: 1511
  source 1..78: mol_type = other DNA

SEQ ID NO: 1932 - DNA, 78 bp, synthetic construct; identical to SEQ ID NO: 1770
  source 1..78: mol_type = other DNA

SEQ ID NO: 1933 - DNA, 78 bp, synthetic construct; identical to SEQ ID NO: 1511
  source 1..78: mol_type = other DNA

SEQ ID NO: 1934 - DNA, 78 bp, synthetic construct; identical to SEQ ID NO: 1552
  source 1..78: mol_type = other DNA

SEQ ID NO: 1935 - DNA, 78 bp, synthetic construct; identical to SEQ ID NO: 1511
  source 1..78: mol_type = other DNA

SEQ ID NO: 1936 - DNA, 78 bp, synthetic construct; identical to SEQ ID NO: 1498
  source 1..78: mol_type = other DNA

SEQ ID NO: 1937 - DNA, 78 bp, synthetic construct; identical to SEQ ID NO: 1511
  source 1..78: mol_type = other DNA

SEQ ID NO: 1938 - DNA, 78 bp, synthetic construct; identical to SEQ ID NO: 1592
  source 1..78: mol_type = other DNA

SEQ ID NO: 1939 - DNA, 78 bp, synthetic construct; identical to SEQ ID NO: 1511
  source 1..78: mol_type = other DNA

SEQ ID NO: 1940 - DNA, 78 bp, synthetic construct
  source 1..78: mol_type = other DNA
ggagactcagtgatccagatgcaaggtcaagtgaccctttcagaaaacgacttcttatttataaactgcacttattca

SEQ ID NO: 1941 - DNA, 78 bp, synthetic construct; identical to SEQ ID NO: 1511
  source 1..78: mol_type = other DNA

SEQ ID NO: 1942 - DNA, 78 bp, synthetic construct; identical to SEQ ID NO: 1544
  source 1..78: mol_type = other DNA

SEQ ID NO: 1943 - DNA, 78 bp, synthetic construct; identical to SEQ ID NO: 1511
  source 1..78: mol_type = other DNA

SEQ ID NO: 1944 - DNA, 78 bp, synthetic construct; identical to SEQ ID NO: 1592
  source 1..78: mol_type = other DNA

SEQ ID NO: 1945 - DNA, 78 bp, synthetic construct; identical to SEQ ID NO: 1511
  source 1..78: mol_type = other DNA

SEQ ID NO: 1946 - DNA, 78 bp, synthetic construct; identical to SEQ ID NO: 1496
  source 1..78: mol_type = other DNA

SEQ ID NO: 1947 - DNA, 78 bp, synthetic construct; identical to SEQ ID NO: 1511
  source 1..78: mol_type = other DNA

SEQ ID NO: 1948 - DNA, 78 bp, synthetic construct; identical to SEQ ID NO: 1546
  source 1..78: mol_type = other DNA

SEQ ID NO: 1949 - DNA, 78 bp, synthetic construct; identical to SEQ ID NO: 1511
  source 1..78: mol_type = other DNA

SEQ ID NO: 1950 - DNA, 78 bp, synthetic construct; identical to SEQ ID NO: 1514
  source 1..78: mol_type = other DNA

SEQ ID NO: 1951 - DNA, 78 bp, synthetic construct; identical to SEQ ID NO: 1511
  source 1..78: mol_type = other DNA

SEQ ID NO: 1952 - DNA, 78 bp, synthetic construct; identical to SEQ ID NO: 1608
  source 1..78: mol_type = other DNA

SEQ ID NO: 1953 - DNA, 78 bp, synthetic construct; identical to SEQ ID NO: 1507
  source 1..78: mol_type = other DNA

SEQ ID NO: 1954 - DNA, 78 bp, synthetic construct; identical to SEQ ID NO: 1504
  source 1..78: mol_type = other DNA

SEQ ID NO: 1955 - DNA, 78 bp, synthetic construct; identical to SEQ ID NO: 1507
  source 1..78: mol_type = other DNA

SEQ ID NO: 1956 - DNA, 78 bp, synthetic construct; identical to SEQ ID NO: 1528
  source 1..78: mol_type = other DNA

SEQ ID NO: 1957 - DNA, 78 bp, synthetic construct; identical to SEQ ID NO: 1507
  source 1..78: mol_type = other DNA

SEQ ID NO: 1958 - DNA, 78 bp, synthetic construct; identical to SEQ ID NO: 1486
  source 1..78: mol_type = other DNA

SEQ ID NO: 1959 - DNA, 78 bp, synthetic construct; identical to SEQ ID NO: 1507
  source 1..78: mol_type = other DNA

SEQ ID NO: 1960 - DNA, 78 bp, synthetic construct; identical to SEQ ID NO: 1888
  source 1..78: mol_type = other DNA

SEQ ID NO: 1961 - DNA, 78 bp, synthetic construct; identical to SEQ ID NO: 1507
  source 1..78: mol_type = other DNA

SEQ ID NO: 1962 - DNA, 78 bp, synthetic construct; identical to SEQ ID NO: 1544
  source 1..78: mol_type = other DNA

SEQ ID NO: 1963 - DNA, 78 bp, synthetic construct; identical to SEQ ID NO: 1507
  source 1..78: mol_type = other DNA

SEQ ID NO: 1964 - DNA, 78 bp, synthetic construct; identical to SEQ ID NO: 1560
  source 1..78: mol_type = other DNA

SEQ ID NO: 1965 - DNA, 78 bp, synthetic construct; identical to SEQ ID NO: 1507
  source 1..78: mol_type = other DNA

SEQ ID NO: 1966 - DNA, 78 bp, synthetic construct; identical to SEQ ID NO: 1496
  source 1..78: mol_type = other DNA

SEQ ID NO: 1967 - DNA, 75 bp, synthetic construct; identical to SEQ ID NO: 1579
  source 1..75: mol_type = other DNA

SEQ ID NO: 1968 - DNA, 75 bp, synthetic construct; identical to SEQ ID NO: 1588
  source 1..75: mol_type = other DNA

SEQ ID NO: 1969 - DNA, 75 bp, synthetic construct; identical to SEQ ID NO: 1579
  source 1..75: mol_type = other DNA

SEQ ID NO: 1970 - DNA, 78 bp, synthetic construct; identical to SEQ ID NO: 1496
  source 1..78: mol_type = other DNA

SEQ ID NO: 1971 - DNA, 75 bp, synthetic construct; identical to SEQ ID NO: 1579
  source 1..75: mol_type = other DNA

SEQ ID NO: 1972 - DNA, 78 bp, synthetic construct; identical to SEQ ID NO: 1592
  source 1..78: mol_type = other DNA

SEQ ID NO: 1973 - DNA, 75 bp, synthetic construct; identical to SEQ ID NO: 1579
  source 1..75: mol_type = other DNA

SEQ ID NO: 1974 - DNA, 78 bp, synthetic construct; identical to SEQ ID NO: 1544
  source 1..78: mol_type = other DNA

SEQ ID NO: 1975 - DNA, 75 bp, synthetic construct; identical to SEQ ID NO: 1579
  source 1..75: mol_type = other DNA

SEQ ID NO: 1976 - DNA, 78 bp, synthetic construct; identical to SEQ ID NO: 1614
  source 1..78: mol_type = other DNA

SEQ ID NO: 1977 - DNA, 75 bp, synthetic construct; identical to SEQ ID NO: 1579
  source 1..75: mol_type = other DNA

SEQ ID NO: 1978 - DNA, 78 bp, synthetic construct; identical to SEQ ID NO: 1770
  source 1..78: mol_type = other DNA

SEQ ID NO: 1979 - DNA, 75 bp, synthetic construct; identical to SEQ ID NO: 1579
  source 1..75: mol_type = other DNA

SEQ ID NO: 1980 - DNA, 75 bp, synthetic construct; identical to SEQ ID NO: 1488
  source 1..75: mol_type = other DNA

SEQ ID NO: 1981 - DNA, 75 bp, synthetic construct; identical to SEQ ID NO: 1579
  source 1..75: mol_type = other DNA

SEQ ID NO: 1982 - DNA, 78 bp, synthetic construct; identical to SEQ ID NO: 1560
  source 1..78: mol_type = other DNA

SEQ ID NO: 1983 - DNA, 75 bp, synthetic construct; identical to SEQ ID NO: 1579
  source 1..75: mol_type = other DNA

SEQ ID NO: 1984 - DNA, 78 bp, synthetic construct; identical to SEQ ID NO: 1544
  source 1..78: mol_type = other DNA

SEQ ID NO: 1985 - DNA, 75 bp, synthetic construct; identical to SEQ ID NO: 1579
  source 1..75: mol_type = other DNA

SEQ ID NO: 1986 - DNA, 78 bp, synthetic construct; identical to SEQ ID NO: 1594
  source 1..78: mol_type = other DNA

SEQ ID NO: 1987 - DNA, 75 bp, synthetic construct; identical to SEQ ID NO: 1579
  source 1..75: mol_type = other DNA

SEQ ID NO: 1988 - DNA, 78 bp, synthetic construct; identical to SEQ ID NO: 1732
  source 1..78: mol_type = other DNA

SEQ ID NO: 1989 - DNA, 75 bp, synthetic construct; identical to SEQ ID NO: 1579
  source 1..75: mol_type = other DNA

SEQ ID NO: 1990 - DNA, 78 bp, synthetic construct; identical to SEQ ID NO: 1528
  source 1..78: mol_type = other DNA

SEQ ID NO: 1991 - DNA, 75 bp, synthetic construct; identical to SEQ ID NO: 1579
  source 1..75: mol_type = other DNA

SEQ ID NO: 1992 - DNA, 78 bp, synthetic construct; identical to SEQ ID NO: 1614
  source 1..78: mol_type = other DNA

SEQ ID NO: 1993 - DNA, 75 bp, synthetic construct; identical to SEQ ID NO: 1579
  source 1..75: mol_type = other DNA

SEQ ID NO: 1994 - DNA, 78 bp, synthetic construct
  source 1..78: mol_type = other DNA
ggagattcagtgacccagaaacaaggtcaagtgaccctttcagaagatgacttcctatttataaattgcacttattct

SEQ ID NO: 1995 - DNA, 75 bp, synthetic construct; identical to SEQ ID NO: 1579
  source 1..75: mol_type = other DNA

SEQ ID NO: 1996 - DNA, 78 bp, synthetic construct; identical to SEQ ID NO: 1540
  source 1..78: mol_type = other DNA

SEQ ID NO: 1997 - DNA, 75 bp, synthetic construct; identical to SEQ ID NO: 1579
  source 1..75: mol_type = other DNA

SEQ ID NO: 1998 - DNA, 78 bp, synthetic construct; identical to SEQ ID NO: 1504
  source 1..78: mol_type = other DNA

SEQ ID NO: 1999 - DNA, 75 bp, synthetic construct; identical to SEQ ID NO: 1579
  source 1..75: mol_type = other DNA

SEQ ID NO: 2000 - DNA, 78 bp, synthetic construct; identical to SEQ ID NO: 1614
  source 1..78: mol_type = other DNA

SEQ ID NO: 2001 - DNA, 75 bp, synthetic construct; identical to SEQ ID NO: 1579
  source 1..75: mol_type = other DNA

SEQ ID NO: 2002 - DNA, 78 bp, synthetic construct; identical to SEQ ID NO: 1706
  source 1..78: mol_type = other DNA

SEQ ID NO: 2003 - DNA, 75 bp, synthetic construct; identical to SEQ ID NO: 1579
  source 1..75: mol_type = other DNA

SEQ ID NO: 2004 - DNA, 75 bp, synthetic construct; identical to SEQ ID NO: 1488
  source 1..75: mol_type = other DNA

SEQ ID NO: 2005 - DNA, 75 bp, synthetic construct; identical to SEQ ID NO: 1579
  source 1..75: mol_type = other DNA

SEQ ID NO: 2006 - DNA, 78 bp, synthetic construct; identical to SEQ ID NO: 1528
  source 1..78: mol_type = other DNA

SEQ ID NO: 2007 - DNA, 75 bp, synthetic construct; identical to SEQ ID NO: 1579
  source 1..75: mol_type = other DNA

SEQ ID NO: 2008 - DNA, 78 bp, synthetic construct; identical to SEQ ID NO: 1548
  source 1..78: mol_type = other DNA

SEQ ID NO: 2009 - DNA, 75 bp, synthetic construct; identical to SEQ ID NO: 1579
  source 1..75: mol_type = other DNA

SEQ ID NO: 2010 - DNA, 78 bp, synthetic construct; identical to SEQ ID NO: 1560
  source 1..78: mol_type = other DNA

SEQ ID NO: 2011 - DNA, 75 bp, synthetic construct; identical to SEQ ID NO: 1579
  source 1..75: mol_type = other DNA

SEQ ID NO: 2012 - DNA, 78 bp, synthetic construct
  source 1..78: mol_type = other DNA
ggacagcaagtgcagcagagtcccacgtccttggttctgcaggagggggaaaacgcagagctgcagtgtaacttttcc

SEQ ID NO: 2013 - DNA, 75 bp, synthetic construct; identical to SEQ ID NO: 1579
  source 1..75: mol_type = other DNA

SEQ ID NO: 2014 - DNA, 78 bp, synthetic construct
  source 1..78: mol_type = other DNA
aagacccaagtggagcagagtcctcagtccctggttgtccgtcagggagagaactgcgtccttcaatgtaattacagt

SEQ ID NO: 2015 - DNA, 75 bp, synthetic construct; identical to SEQ ID NO: 1579
  source 1..75: mol_type = other DNA

SEQ ID NO: 2016 - DNA, 78 bp, synthetic construct; identical to SEQ ID NO: 1552
  source 1..78: mol_type = other DNA

SEQ ID NO: 2017 - DNA, 75 bp, synthetic construct; identical to SEQ ID NO: 1579
  source 1..75: mol_type = other DNA

SEQ ID NO: 2018 - DNA, 78 bp, synthetic construct; identical to SEQ ID NO: 1614
  source 1..78: mol_type = other DNA

SEQ ID NO: 2019 - DNA, 75 bp, synthetic construct; identical to SEQ ID NO: 1579
  source 1..75: mol_type = other DNA

SEQ ID NO: 2020 - DNA, 78 bp, synthetic construct; identical to SEQ ID NO: 1556
  source 1..78: mol_type = other DNA

SEQ ID NO: 2021 - DNA, 75 bp, synthetic construct; identical to SEQ ID NO: 1579
  source 1..75: mol_type = other DNA

SEQ ID NO: 2022 - DNA, 78 bp, synthetic construct; identical to SEQ ID NO: 1592
  source 1..78: mol_type = other DNA

SEQ ID NO: 2023 - DNA, 75 bp, synthetic construct; identical to SEQ ID NO: 1579
  source 1..75: mol_type = other DNA

SEQ ID NO: 2024 - DNA, 75 bp, synthetic construct; identical to SEQ ID NO: 1590
  source 1..75: mol_type = other DNA

SEQ ID NO: 2025 - DNA, 75 bp, synthetic construct; identical to SEQ ID NO: 1579
  source 1..75: mol_type = other DNA

SEQ ID NO: 2026 - DNA, 78 bp, synthetic construct; identical to SEQ ID NO: 1764
  source 1..78: mol_type = other DNA

SEQ ID NO: 2027 - DNA, 75 bp, synthetic construct; identical to SEQ ID NO: 1579
  source 1..75: mol_type = other DNA

SEQ ID NO: 2028 - DNA, 78 bp, synthetic construct; identical to SEQ ID NO: 1512
  source 1..78: mol_type = other DNA

SEQ ID NO: 2029 - DNA, 75 bp, synthetic construct; identical to SEQ ID NO: 1579
  source 1..75: mol_type = other DNA

SEQ ID NO: 2030 - DNA, 78 bp, synthetic construct; identical to SEQ ID NO: 1650
  source 1..78: mol_type = other DNA

SEQ ID NO: 2031 - DNA, 75 bp, synthetic construct; identical to SEQ ID NO: 1579
  source 1..75: mol_type = other DNA

SEQ ID NO: 2032 - DNA, 78 bp, synthetic construct; identical to SEQ ID NO: 1514
  source 1..78: mol_type = other DNA

SEQ ID NO: 2033 - DNA, 75 bp, synthetic construct; identical to SEQ ID NO: 1579
  source 1..75: mol_type = other DNA

SEQ ID NO: 2034 - DNA, 78 bp, synthetic construct; identical to SEQ ID NO: 1888
  source 1..78: mol_type = other DNA

SEQ ID NO: 2035 - DNA, 75 bp, synthetic construct; identical to SEQ ID NO: 1579
  source 1..75: mol_type = other DNA

SEQ ID NO: 2036 - DNA, 78 bp, synthetic construct; identical to SEQ ID NO: 1528
  source 1..78: mol_type = other DNA

SEQ ID NO: 2037 - DNA, 78 bp, synthetic construct; identical to SEQ ID NO: 1501
  source 1..78: mol_type = other DNA

SEQ ID NO: 2038 - DNA, 78 bp, synthetic construct; identical to SEQ ID NO: 1514
  source 1..78: mol_type = other DNA

SEQ ID NO: 2039 - DNA, 78 bp, synthetic construct; identical to SEQ ID NO: 1501
  source 1..78: mol_type = other DNA

SEQ ID NO: 2040 - DNA, 78 bp, synthetic construct; identical to SEQ ID NO: 1508
  source 1..78: mol_type = other DNA

SEQ ID NO: 2041 - DNA, 78 bp, synthetic construct; identical to SEQ ID NO: 1501
  source 1..78: mol_type = other DNA

SEQ ID NO: 2042 - DNA, 78 bp, synthetic construct; identical to SEQ ID NO: 1508
  source 1..78: mol_type = other DNA

SEQ ID NO: 2043 - DNA, 78 bp, synthetic construct; identical to SEQ ID NO: 1501
  source 1..78: mol_type = other DNA

SEQ ID NO: 2044 - DNA, 78 bp, synthetic construct; identical to SEQ ID NO: 1514
  source 1..78: mol_type = other DNA

SEQ ID NO: 2045 - DNA, 78 bp, synthetic construct; identical to SEQ ID NO: 1501
  source 1..78: mol_type = other DNA

SEQ ID NO: 2046 - DNA, 78 bp, synthetic construct; identical to SEQ ID NO: 1860
  source 1..78: mol_type = other DNA

SEQ ID NO: 2047 - DNA, 78 bp, synthetic construct; identical to SEQ ID NO: 1501
  source 1..78: mol_type = other DNA

SEQ ID NO: 2048 - DNA, 78 bp, synthetic construct; identical to SEQ ID NO: 1502
  source 1..78: mol_type = other DNA

SEQ ID NO: 2049 - DNA, 78 bp, synthetic construct; identical to SEQ ID NO: 1725
  source 1..78: mol_type = other DNA

SEQ ID NO: 2050 - DNA, 78 bp, synthetic construct; identical to SEQ ID NO: 1540
  source 1..78: mol_type = other DNA

SEQ ID NO: 2051 - DNA, 78 bp, synthetic construct
  source 1..78: mol_type = other DNA
agtgtcctcctctaccaaaagccaaacagggacatctgtcaaagtggcacttcactgaaaatccagtgtgtggctgac

SEQ ID NO: 2052 - DNA, 78 bp, synthetic construct; identical to SEQ ID NO: 1514
  source 1..78: mol_type = other DNA

SEQ ID NO: 2053 - DNA, 78 bp, synthetic construct; identical to SEQ ID NO: 2051
  source 1..78: mol_type = other DNA

SEQ ID NO: 2054 - DNA, 78 bp, synthetic construct; identical to SEQ ID NO: 1666
  source 1..78: mol_type = other DNA

SEQ ID NO: 2055 - DNA, 78 bp, synthetic construct; identical to SEQ ID NO: 2051
  source 1..78: mol_type = other DNA

SEQ ID NO: 2056 - DNA, 78 bp, synthetic construct; identical to SEQ ID NO: 1560
  source 1..78: mol_type = other DNA

SEQ ID NO: 2057 - DNA, 78 bp, synthetic construct; identical to SEQ ID NO: 1485
  source 1..78: mol_type = other DNA

SEQ ID NO: 2058 - DNA, 78 bp, synthetic construct; identical to SEQ ID NO: 1486
  source 1..78: mol_type = other DNA

SEQ ID NO: 2059 - DNA, 78 bp, synthetic construct; identical to SEQ ID NO: 1485
  source 1..78: mol_type = other DNA

SEQ ID NO: 2060 - DNA, 78 bp, synthetic construct; identical to SEQ ID NO: 1490
  source 1..78: mol_type = other DNA

SEQ ID NO: 2061 - DNA, 78 bp, synthetic construct; identical to SEQ ID NO: 1485
  source 1..78: mol_type = other DNA

SEQ ID NO: 2062 - DNA, 78 bp, synthetic construct; identical to SEQ ID NO: 1498
  source 1..78: mol_type = other DNA

SEQ ID NO: 2063 - DNA, 78 bp, synthetic construct; identical to SEQ ID NO: 1485
  source 1..78: mol_type = other DNA

SEQ ID NO: 2064 - DNA, 78 bp, synthetic construct; identical to SEQ ID NO: 1522
  source 1..78: mol_type = other DNA

SEQ ID NO: 2065 - DNA, 78 bp, synthetic construct; identical to SEQ ID NO: 1485
  source 1..78: mol_type = other DNA

SEQ ID NO: 2066 - DNA, 78 bp, synthetic construct; identical to SEQ ID NO: 1594
  source 1..78: mol_type = other DNA

SEQ ID NO: 2067 - DNA, 78 bp, synthetic construct; identical to SEQ ID NO: 1485
  source 1..78: mol_type = other DNA

SEQ ID NO: 2068 - DNA, 78 bp, synthetic construct; identical to SEQ ID NO: 1732
  source 1..78: mol_type = other DNA

SEQ ID NO: 2069 - DNA, 78 bp, synthetic construct; identical to SEQ ID NO: 1485
  source 1..78: mol_type = other DNA

SEQ ID NO: 2070 - DNA, 78 bp, synthetic construct; identical to SEQ ID NO: 1706
  source 1..78: mol_type = other DNA

SEQ ID NO: 2071 - DNA, 78 bp, synthetic construct; identical to SEQ ID NO: 1485
  source 1..78: mol_type = other DNA

SEQ ID NO: 2072 - DNA, 78 bp, synthetic construct
  source 1..78: mol_type = other DNA
ggagactcggtgactcagacagaaggtccagtgacattgtctgaaggaacttctctgactgtgaactgttcctatgaa

SEQ ID NO: 2073 - DNA, 78 bp, synthetic construct; identical to SEQ ID NO: 1485
  source 1..78: mol_type = other DNA

SEQ ID NO: 2074 - DNA, 78 bp, synthetic construct; identical to SEQ ID NO: 1496
  source 1..78: mol_type = other DNA

SEQ ID NO: 2075 - DNA, 78 bp, synthetic construct; identical to SEQ ID NO: 1485
  source 1..78: mol_type = other DNA

SEQ ID NO: 2076 - DNA, 78 bp, synthetic construct; identical to SEQ ID NO: 1496
  source 1..78: mol_type = other DNA

SEQ ID NO: 2077 - DNA, 78 bp, synthetic construct; identical to SEQ ID NO: 1485
  source 1..78: mol_type = other DNA

SEQ ID NO: 2078 - DNA, 78 bp, synthetic construct; identical to SEQ ID NO: 1732
  source 1..78: mol_type = other DNA

SEQ ID NO: 2079 - DNA, 78 bp, synthetic construct; identical to SEQ ID NO: 1485
  source 1..78: mol_type = other DNA

SEQ ID NO: 2080 - DNA, 78 bp, synthetic construct; identical to SEQ ID NO: 1512
  source 1..78: mol_type = other DNA

SEQ ID NO: 2081 - DNA, 78 bp, synthetic construct; identical to SEQ ID NO: 1485
  source 1..78: mol_type = other DNA

SEQ ID NO: 2082 - DNA, 78 bp, synthetic construct; identical to SEQ ID NO: 1486
  source 1..78: mol_type = other DNA

SEQ ID NO: 2083 - DNA, 78 bp, synthetic construct; identical to SEQ ID NO: 1485
  source 1..78: mol_type = other DNA

SEQ ID NO: 2084 - DNA, 78 bp, synthetic construct; identical to SEQ ID NO: 1544
  source 1..78: mol_type = other DNA

SEQ ID NO: 2085 - DNA, 78 bp, synthetic construct; identical to SEQ ID NO: 1485
  source 1..78: mol_type = other DNA

SEQ ID NO: 2086 - DNA, 78 bp, synthetic construct; identical to SEQ ID NO: 1666
  source 1..78: mol_type = other DNA

SEQ ID NO: 2087 - DNA, 78 bp, synthetic construct; identical to SEQ ID NO: 1485
  source 1..78: mol_type = other DNA

SEQ ID NO: 2088 - DNA, 78 bp, synthetic construct; identical to SEQ ID NO: 1540
  source 1..78: mol_type = other DNA

SEQ ID NO: 2089 - DNA, 78 bp, synthetic construct; identical to SEQ ID NO: 1485
  source 1..78: mol_type = other DNA

SEQ ID NO: 2090 - DNA, 78 bp, synthetic construct; identical to SEQ ID NO: 1492
  source 1..78: mol_type = other DNA

SEQ ID NO: 2091 - DNA, 78 bp, synthetic construct; identical to SEQ ID NO: 1485
  source 1..78: mol_type = other DNA

SEQ ID NO: 2092 - DNA, 78 bp, synthetic construct; identical to SEQ ID NO: 1614
  source 1..78: mol_type = other DNA

SEQ ID NO: 2093 - DNA, 78 bp, synthetic construct; identical to SEQ ID NO: 1485
  source 1..78: mol_type = other DNA

SEQ ID NO: 2094 - DNA, 78 bp, synthetic construct; identical to SEQ ID NO: 1528
  source 1..78: mol_type = other DNA

SEQ ID NO: 2095 - DNA, 78 bp, synthetic construct; identical to SEQ ID NO: 1485
  source 1..78: mol_type = other DNA

SEQ ID NO: 2096 - DNA, 78 bp, synthetic construct; identical to SEQ ID NO: 1528
  source 1..78: mol_type = other DNA

SEQ ID NO: 2097 - DNA, 78 bp, synthetic construct; identical to SEQ ID NO: 1485
  source 1..78: mol_type = other DNA

SEQ ID NO: 2098 - DNA, 78 bp, synthetic construct; identical to SEQ ID NO: 1672
  source 1..78: mol_type = other DNA

SEQ ID NO: 2099 - DNA, 78 bp, synthetic construct; identical to SEQ ID NO: 1485
  source 1..78: mol_type = other DNA

SEQ ID NO: 2100 - DNA, 78 bp, synthetic construct; identical to SEQ ID NO: 1514
  source 1..78: mol_type = other DNA

SEQ ID NO: 2101 - DNA, 78 bp, synthetic construct; identical to SEQ ID NO: 1485
  source 1..78: mol_type = other DNA

SEQ ID NO: 2102 - DNA, 78 bp, synthetic construct
  source 1..78: mol_type = other DNA
cagcagcaggtgagacaaagtccccaatctctgacagtctgggaaggagagaccgcaattctaaactgcagttatgag

SEQ ID NO: 2103 - DNA, 78 bp, synthetic construct; identical to SEQ ID NO: 1485
  source 1..78: mol_type = other DNA

SEQ ID NO: 2104 - DNA, 78 bp, synthetic construct; identical to SEQ ID NO: 1688
  source 1..78: mol_type = other DNA

SEQ ID NO: 2105 - DNA, 78 bp, synthetic construct; identical to SEQ ID NO: 1485
  source 1..78: mol_type = other DNA

SEQ ID NO: 2106 - DNA, 78 bp, synthetic construct; identical to SEQ ID NO: 1706
  source 1..78: mol_type = other DNA

SEQ ID NO: 2107 - DNA, 78 bp, synthetic construct; identical to SEQ ID NO: 1485
  source 1..78: mol_type = other DNA

SEQ ID NO: 2108 - DNA, 78 bp, synthetic construct; identical to SEQ ID NO: 1522
  source 1..78: mol_type = other DNA

SEQ ID NO: 2109 - DNA, 78 bp, synthetic construct; identical to SEQ ID NO: 1485
  source 1..78: mol_type = other DNA

SEQ ID NO: 2110 - DNA, 78 bp, synthetic construct; identical to SEQ ID NO: 1514
  source 1..78: mol_type = other DNA

SEQ ID NO: 2111 - DNA, 78 bp, synthetic construct; identical to SEQ ID NO: 1485
  source 1..78: mol_type = other DNA

SEQ ID NO: 2112 - DNA, 78 bp, synthetic construct; identical to SEQ ID NO: 1654
  source 1..78: mol_type = other DNA

SEQ ID NO: 2113 - DNA, 78 bp, synthetic construct; identical to SEQ ID NO: 1485
  source 1..78: mol_type = other DNA

SEQ ID NO: 2114 - DNA, 78 bp, synthetic construct; identical to SEQ ID NO: 1594
  source 1..78: mol_type = other DNA

SEQ ID NO: 2115 - DNA, 78 bp, synthetic construct; identical to SEQ ID NO: 1647
  source 1..78: mol_type = other DNA

SEQ ID NO: 2116 - DNA, 78 bp, synthetic construct; identical to SEQ ID NO: 1614
  source 1..78: mol_type = other DNA

SEQ ID NO: 2117 - DNA, 78 bp, synthetic construct; identical to SEQ ID NO: 1647
  source 1..78: mol_type = other DNA

SEQ ID NO: 2118 - DNA, 78 bp, synthetic construct; identical to SEQ ID NO: 1860
  source 1..78: mol_type = other DNA

SEQ ID NO: 2119 - DNA, 78 bp, synthetic construct; identical to SEQ ID NO: 1647
  source 1..78: mol_type = other DNA

SEQ ID NO: 2120 - DNA, 78 bp, synthetic construct; identical to SEQ ID NO: 1514
  source 1..78: mol_type = other DNA

SEQ ID NO: 2121 - DNA, 78 bp, synthetic construct; identical to SEQ ID NO: 1647
  source 1..78: mol_type = other DNA

SEQ ID NO: 2122 - DNA, 78 bp, synthetic construct; identical to SEQ ID NO: 1674
  source 1..78: mol_type = other DNA

SEQ ID NO: 2123 - DNA, 78 bp, synthetic construct; identical to SEQ ID NO: 1647
  source 1..78: mol_type = other DNA

SEQ ID NO: 2124 - DNA, 75 bp, synthetic construct; identical to SEQ ID NO: 1488
  source 1..75: mol_type = other DNA

SEQ ID NO: 2125 - DNA, 78 bp, synthetic construct; identical to SEQ ID NO: 1647
  source 1..78: mol_type = other DNA

SEQ ID NO: 2126 - DNA, 78 bp, synthetic construct; identical to SEQ ID NO: 1546
  source 1..78: mol_type = other DNA

SEQ ID NO: 2127 - DNA, 78 bp, synthetic construct; identical to SEQ ID NO: 1647
  source 1..78: mol_type = other DNA

SEQ ID NO: 2128 - DNA, 78 bp, synthetic construct; identical to SEQ ID NO: 1634
  source 1..78: mol_type = other DNA

SEQ ID NO: 2129 - DNA, 78 bp, synthetic construct; identical to SEQ ID NO: 1499
  source 1..78: mol_type = other DNA

SEQ ID NO: 2130 - DNA, 78 bp, synthetic construct; identical to SEQ ID NO: 1578
  source 1..78: mol_type = other DNA

SEQ ID NO: 2131 - DNA, 78 bp, synthetic construct; identical to SEQ ID NO: 1499
  source 1..78: mol_type = other DNA

SEQ ID NO: 2132 - DNA, 78 bp, synthetic construct; identical to SEQ ID NO: 1608
  source 1..78: mol_type = other DNA

SEQ ID NO: 2133 - DNA, 78 bp, synthetic construct; identical to SEQ ID NO: 1499
  source 1..78: mol_type = other DNA

SEQ ID NO: 2134 - DNA, 78 bp, synthetic construct; identical to SEQ ID NO: 1564
  source 1..78: mol_type = other DNA

SEQ ID NO: 2135 - DNA, 78 bp, synthetic construct; identical to SEQ ID NO: 1499
  source 1..78: mol_type = other DNA

SEQ ID NO: 2136 - DNA, 78 bp, synthetic construct; identical to SEQ ID NO: 1514
  source 1..78: mol_type = other DNA

SEQ ID NO: 2137 - DNA, 78 bp, synthetic construct; identical to SEQ ID NO: 1499
  source 1..78: mol_type = other DNA

SEQ ID NO: 2138 - DNA, 78 bp, synthetic construct; identical to SEQ ID NO: 1512
  source 1..78: mol_type = other DNA

SEQ ID NO: 2139 - DNA, 78 bp, synthetic construct; identical to SEQ ID NO: 1499
  source 1..78: mol_type = other DNA

SEQ ID NO: 2140 - DNA, 78 bp, synthetic construct
  source 1..78: mol_type = other DNA
cagcagaaggtgcagcagagcccagaatccctcactgtctcagagggagccatggcctctctcaactgcactttcagt

SEQ ID NO: 2141 - DNA, 78 bp, synthetic construct; identical to SEQ ID NO: 1499
  source 1..78: mol_type = other DNA

SEQ ID NO: 2142 - DNA, 78 bp, synthetic construct; identical to SEQ ID NO: 1548
  source 1..78: mol_type = other DNA

SEQ ID NO: 2143 - DNA, 78 bp, synthetic construct; identical to SEQ ID NO: 1499
  source 1..78: mol_type = other DNA

SEQ ID NO: 2144 - DNA, 78 bp, synthetic construct; identical to SEQ ID NO: 1528
  source 1..78: mol_type = other DNA

SEQ ID NO: 2145 - DNA, 78 bp, synthetic construct; identical to SEQ ID NO: 1499
  source 1..78: mol_type = other DNA

SEQ ID NO: 2146 - DNA, 78 bp, synthetic construct; identical to SEQ ID NO: 1490
  source 1..78: mol_type = other DNA

SEQ ID NO: 2147 - DNA, 78 bp, synthetic construct; identical to SEQ ID NO: 1499
  source 1..78: mol_type = other DNA

SEQ ID NO: 2148 - DNA, 78 bp, synthetic construct; identical to SEQ ID NO: 1614
  source 1..78: mol_type = other DNA

SEQ ID NO: 2149 - DNA, 78 bp, synthetic construct; identical to SEQ ID NO: 1499
  source 1..78: mol_type = other DNA

SEQ ID NO: 2150 - DNA, 78 bp, synthetic construct; identical to SEQ ID NO: 1738
  source 1..78: mol_type = other DNA

SEQ ID NO: 2151 - DNA, 78 bp, synthetic construct; identical to SEQ ID NO: 1499
  source 1..78: mol_type = other DNA

SEQ ID NO: 2152 - DNA, 78 bp, synthetic construct; identical to SEQ ID NO: 1706
  source 1..78: mol_type = other DNA

SEQ ID NO: 2153 - DNA, 78 bp, synthetic construct; identical to SEQ ID NO: 1499
  source 1..78: mol_type = other DNA

SEQ ID NO: 2154 - DNA, 78 bp, synthetic construct; identical to SEQ ID NO: 1616
  source 1..78: mol_type = other DNA

SEQ ID NO: 2155 - DNA, 78 bp, synthetic construct; identical to SEQ ID NO: 1499
  source 1..78: mol_type = other DNA

SEQ ID NO: 2156 - DNA, 78 bp, synthetic construct; identical to SEQ ID NO: 1796
  source 1..78: mol_type = other DNA

SEQ ID NO: 2157 - DNA, 78 bp, synthetic construct; identical to SEQ ID NO: 1499
  source 1..78: mol_type = other DNA

SEQ ID NO: 2158 - DNA, 78 bp, synthetic construct; identical to SEQ ID NO: 1490
  source 1..78: mol_type = other DNA

SEQ ID NO: 2159 - DNA, 78 bp, synthetic construct; identical to SEQ ID NO: 1499
  source 1..78: mol_type = other DNA

SEQ ID NO: 2160 - DNA, 78 bp, synthetic construct; identical to SEQ ID NO: 1514
  source 1..78: mol_type = other DNA

SEQ ID NO: 2161 - DNA, 78 bp, synthetic construct; identical to SEQ ID NO: 1499
  source 1..78: mol_type = other DNA

SEQ ID NO: 2162 - DNA, 78 bp, synthetic construct; identical to SEQ ID NO: 1674
  source 1..78: mol_type = other DNA

SEQ ID NO: 2163 - DNA, 78 bp, synthetic construct; identical to SEQ ID NO: 1499
  source 1..78: mol_type = other DNA

SEQ ID NO: 2164 - DNA, 78 bp, synthetic construct; identical to SEQ ID NO: 1806
  source 1..78: mol_type = other DNA

SEQ ID NO: 2165 - DNA, 78 bp, synthetic construct; identical to SEQ ID NO: 1499
  source 1..78: mol_type = other DNA

SEQ ID NO: 2166 - DNA, 78 bp, synthetic construct; identical to SEQ ID NO: 1592
  source 1..78: mol_type = other DNA

SEQ ID NO: 2167 - DNA, 78 bp, synthetic construct; identical to SEQ ID NO: 1499
  source 1..78: mol_type = other DNA

SEQ ID NO: 2168 - DNA, 78 bp, synthetic construct; identical to SEQ ID NO: 1496
  source 1..78: mol_type = other DNA

SEQ ID NO: 2169 - DNA, 78 bp, synthetic construct; identical to SEQ ID NO: 1499
  source 1..78: mol_type = other DNA

SEQ ID NO: 2170 - DNA, 78 bp, synthetic construct; identical to SEQ ID NO: 1860
  source 1..78: mol_type = other DNA

SEQ ID NO: 2171 - DNA, 78 bp, synthetic construct; identical to SEQ ID NO: 1499
  source 1..78: mol_type = other DNA

SEQ ID NO: 2172 - DNA, 78 bp, synthetic construct; identical to SEQ ID NO: 1562
  source 1..78: mol_type = other DNA

SEQ ID NO: 2173 - DNA, 78 bp, synthetic construct; identical to SEQ ID NO: 1499
  source 1..78: mol_type = other DNA

SEQ ID NO: 2174 - DNA, 78 bp, synthetic construct; identical to SEQ ID NO: 1740
  source 1..78: mol_type = other DNA

SEQ ID NO: 2175 - DNA, 78 bp, synthetic construct; identical to SEQ ID NO: 1499
  source 1..78: mol_type = other DNA

SEQ ID NO: 2176 - DNA, 78 bp, synthetic construct; identical to SEQ ID NO: 1512
  source 1..78: mol_type = other DNA

SEQ ID NO: 2177 - DNA, 78 bp, synthetic construct; identical to SEQ ID NO: 1499
  source 1..78: mol_type = other DNA

SEQ ID NO: 2178 - DNA, 78 bp, synthetic construct; identical to SEQ ID NO: 1842
  source 1..78: mol_type = other DNA

SEQ ID NO: 2179 - DNA, 78 bp, synthetic construct; identical to SEQ ID NO: 1499
  source 1..78: mol_type = other DNA

SEQ ID NO: 2180 - DNA, 78 bp, synthetic construct; identical to SEQ ID NO: 1532
  source 1..78: mol_type = other DNA

SEQ ID NO: 2181 - DNA, 78 bp, synthetic construct; identical to SEQ ID NO: 1499
  source 1..78: mol_type = other DNA

SEQ ID NO: 2182 - DNA, 78 bp, synthetic construct; identical to SEQ ID NO: 1522
  source 1..78: mol_type = other DNA

SEQ ID NO: 2183 - DNA, 78 bp, synthetic construct; identical to SEQ ID NO: 1499
  source 1..78: mol_type = other DNA

SEQ ID NO: 2184 - DNA, 75 bp, synthetic construct; identical to SEQ ID NO: 1590
  source 1..75: mol_type = other DNA

SEQ ID NO: 2185 - DNA, 78 bp, synthetic construct; identical to SEQ ID NO: 1499
  source 1..78: mol_type = other DNA

SEQ ID NO: 2186 - DNA, 75 bp, synthetic construct; identical to SEQ ID NO: 1590
  source 1..75: mol_type = other DNA

SEQ ID NO: 2187 - DNA, 78 bp, synthetic construct; identical to SEQ ID NO: 1499
  source 1..78: mol_type = other DNA

SEQ ID NO: 2188 - DNA, 78 bp, synthetic construct; identical to SEQ ID NO: 1538
  source 1..78: mol_type = other DNA

SEQ ID NO: 2189 - DNA, 78 bp, synthetic construct; identical to SEQ ID NO: 1499
  source 1..78: mol_type = other DNA

SEQ ID NO: 2190 - DNA, 78 bp, synthetic construct; identical to SEQ ID NO: 1538
  source 1..78: mol_type = other DNA

SEQ ID NO: 2191 - DNA, 78 bp, synthetic construct; identical to SEQ ID NO: 1499
  source 1..78: mol_type = other DNA

SEQ ID NO: 2192 - DNA, 78 bp, synthetic construct; identical to SEQ ID NO: 1732
  source 1..78: mol_type = other DNA

SEQ ID NO: 2193 - DNA, 78 bp, synthetic construct; identical to SEQ ID NO: 1499
  source 1..78: mol_type = other DNA

SEQ ID NO: 2194 - DNA, 78 bp, synthetic construct; identical to SEQ ID NO: 1538
  source 1..78: mol_type = other DNA

SEQ ID NO: 2195 - DNA, 78 bp, synthetic construct; identical to SEQ ID NO: 1583
  source 1..78: mol_type = other DNA

SEQ ID NO: 2196 - DNA, 78 bp, synthetic construct; identical to SEQ ID NO: 1512
  source 1..78: mol_type = other DNA

SEQ ID NO: 2197 - DNA, 78 bp, synthetic construct; identical to SEQ ID NO: 1583
  source 1..78: mol_type = other DNA

SEQ ID NO: 2198 - DNA, 78 bp, synthetic construct; identical to SEQ ID NO: 1544
  source 1..78: mol_type = other DNA

SEQ ID NO: 2199 - DNA, 78 bp, synthetic construct; identical to SEQ ID NO: 1583
  source 1..78: mol_type = other DNA

SEQ ID NO: 2200 - DNA, 78 bp, synthetic construct; identical to SEQ ID NO: 1736
  source 1..78: mol_type = other DNA

SEQ ID NO: 2201 - DNA, 78 bp, synthetic construct; identical to SEQ ID NO: 1583
  source 1..78: mol_type = other DNA

SEQ ID NO: 2202 - DNA, 78 bp, synthetic construct; identical to SEQ ID NO: 1546
  source 1..78: mol_type = other DNA

SEQ ID NO: 2203 - DNA, 78 bp, synthetic construct; identical to SEQ ID NO: 1583
  source 1..78: mol_type = other DNA

SEQ ID NO: 2204 - DNA, 78 bp, synthetic construct; identical to SEQ ID NO: 1528
  source 1..78: mol_type = other DNA

SEQ ID NO: 2205 - DNA, 78 bp, synthetic construct; identical to SEQ ID NO: 1583
  source 1..78: mol_type = other DNA

SEQ ID NO: 2206 - DNA, 78 bp, synthetic construct; identical to SEQ ID NO: 1842
  source 1..78: mol_type = other DNA

SEQ ID NO: 2207 - DNA, 78 bp, synthetic construct; identical to SEQ ID NO: 1583
  source 1..78: mol_type = other DNA

SEQ ID NO: 2208 - DNA, 78 bp, synthetic construct; identical to SEQ ID NO: 1548
  source 1..78: mol_type = other DNA

SEQ ID NO: 2209 - DNA, 78 bp, synthetic construct; identical to SEQ ID NO: 1583
  source 1..78: mol_type = other DNA

SEQ ID NO: 2210 - DNA, 78 bp, synthetic construct; identical to SEQ ID NO: 1578
  source 1..78: mol_type = other DNA

SEQ ID NO: 2211 - DNA, 78 bp, synthetic construct; identical to SEQ ID NO: 1583
  source 1..78: mol_type = other DNA

SEQ ID NO: 2212 - DNA, 78 bp, synthetic construct; identical to SEQ ID NO: 1842
  source 1..78: mol_type = other DNA

SEQ ID NO: 2213 - DNA, 78 bp, synthetic construct; identical to SEQ ID NO: 1583
  source 1..78: mol_type = other DNA

SEQ ID NO: 2214 - DNA, 78 bp, synthetic construct; identical to SEQ ID NO: 1564
  source 1..78: mol_type = other DNA

SEQ ID NO: 2215 - DNA, 78 bp, synthetic construct; identical to SEQ ID NO: 1583
  source 1..78: mol_type = other DNA

SEQ ID NO: 2216 - DNA, 78 bp, synthetic construct; identical to SEQ ID NO: 1514
  source 1..78: mol_type = other DNA

SEQ ID NO: 2217 - DNA, 78 bp, synthetic construct; identical to SEQ ID NO: 1583
  source 1..78: mol_type = other DNA

SEQ ID NO: 2218 - DNA, 78 bp, synthetic construct; identical to SEQ ID NO: 1528
  source 1..78: mol_type = other DNA

SEQ ID NO: 2219 - DNA, 78 bp, synthetic construct; identical to SEQ ID NO: 1583
  source 1..78: mol_type = other DNA

SEQ ID NO: 2220 - DNA, 78 bp, synthetic construct; identical to SEQ ID NO: 1490
  source 1..78: mol_type = other DNA

SEQ ID NO: 2221 - DNA, 78 bp, synthetic construct; identical to SEQ ID NO: 1583
  source 1..78: mol_type = other DNA

SEQ ID NO: 2222 - DNA, 78 bp, synthetic construct; identical to SEQ ID NO: 1608
  source 1..78: mol_type = other DNA

SEQ ID NO: 2223 - DNA, 78 bp, synthetic construct; identical to SEQ ID NO: 1583
  source 1..78: mol_type = other DNA

SEQ ID NO: 2224 - DNA, 78 bp, synthetic construct; identical to SEQ ID NO: 1842
  source 1..78: mol_type = other DNA

SEQ ID NO: 2225 - DNA, 78 bp, synthetic construct; identical to SEQ ID NO: 1583
  source 1..78: mol_type = other DNA

SEQ ID NO: 2226 - DNA, 78 bp, synthetic construct; identical to SEQ ID NO: 1576
  source 1..78: mol_type = other DNA

SEQ ID NO: 2227 - DNA, 78 bp, synthetic construct; identical to SEQ ID NO: 1583
  source 1..78: mol_type = other DNA

SEQ ID NO: 2228 - DNA, 78 bp, synthetic construct; identical to SEQ ID NO: 1564
  source 1..78: mol_type = other DNA

SEQ ID NO: 2229 - DNA, 78 bp, synthetic construct; identical to SEQ ID NO: 1583
  source 1..78: mol_type = other DNA

SEQ ID NO: 2230 - DNA, 78 bp, synthetic construct; identical to SEQ ID NO: 1498
  source 1..78: mol_type = other DNA

SEQ ID NO: 2231 - DNA, 78 bp, synthetic construct; identical to SEQ ID NO: 1583
  source 1..78: mol_type = other DNA

SEQ ID NO: 2232 - DNA, 78 bp, synthetic construct; identical to SEQ ID NO: 1522
  source 1..78: mol_type = other DNA

SEQ ID NO: 2233 - DNA, 78 bp, synthetic construct; identical to SEQ ID NO: 1583
  source 1..78: mol_type = other DNA

SEQ ID NO: 2234 - DNA, 78 bp, synthetic construct; identical to SEQ ID NO: 1614
  source 1..78: mol_type = other DNA

SEQ ID NO: 2235 - DNA, 78 bp, synthetic construct; identical to SEQ ID NO: 1583
  source 1..78: mol_type = other DNA

SEQ ID NO: 2236 - DNA, 78 bp, synthetic construct; identical to SEQ ID NO: 1528
  source 1..78: mol_type = other DNA

SEQ ID NO: 2237 - DNA, 78 bp, synthetic construct; identical to SEQ ID NO: 1583
  source 1..78: mol_type = other DNA

SEQ ID NO: 2238 - DNA, 78 bp, synthetic construct; identical to SEQ ID NO: 1530
  source 1..78: mol_type = other DNA

SEQ ID NO: 2239 - DNA, 78 bp, synthetic construct; identical to SEQ ID NO: 1583
  source 1..78: mol_type = other DNA

SEQ ID NO: 2240 - DNA, 78 bp, synthetic construct; identical to SEQ ID NO: 1556
  source 1..78: mol_type = other DNA

SEQ ID NO: 2241 - DNA, 78 bp, synthetic construct; identical to SEQ ID NO: 1583
  source 1..78: mol_type = other DNA

SEQ ID NO: 2242 - DNA, 78 bp, synthetic construct; identical to SEQ ID NO: 1548
  source 1..78: mol_type = other DNA

SEQ ID NO: 2243 - DNA, 78 bp, synthetic construct; identical to SEQ ID NO: 1583
  source 1..78: mol_type = other DNA

SEQ ID NO: 2244 - DNA, 78 bp, synthetic construct; identical to SEQ ID NO: 1592
  source 1..78: mol_type = other DNA

SEQ ID NO: 2245 - DNA, 78 bp, synthetic construct; identical to SEQ ID NO: 1583
  source 1..78: mol_type = other DNA

SEQ ID NO: 2246 - DNA, 78 bp, synthetic construct; identical to SEQ ID NO: 1532
  source 1..78: mol_type = other DNA

SEQ ID NO: 2247 - DNA, 78 bp, synthetic construct; identical to SEQ ID NO: 1487
  source 1..78: mol_type = other DNA

SEQ ID NO: 2248 - DNA, 75 bp, synthetic construct
  source 1..75: mol_type = other DNA
ggacagggtgtggagcagcctgccaaattgatgtctgtggagggaacctttgctcgggtcaactgcacatacagc

SEQ ID NO: 2249 - DNA, 78 bp, synthetic construct; identical to SEQ ID NO: 1487
  source 1..78: mol_type = other DNA

SEQ ID NO: 2250 - DNA, 78 bp, synthetic construct; identical to SEQ ID NO: 1528
  source 1..78: mol_type = other DNA

SEQ ID NO: 2251 - DNA, 78 bp, synthetic construct; identical to SEQ ID NO: 1487
  source 1..78: mol_type = other DNA

SEQ ID NO: 2252 - DNA, 78 bp, synthetic construct; identical to SEQ ID NO: 1546
  source 1..78: mol_type = other DNA

SEQ ID NO: 2253 - DNA, 78 bp, synthetic construct; identical to SEQ ID NO: 1487
  source 1..78: mol_type = other DNA

SEQ ID NO: 2254 - DNA, 78 bp, synthetic construct; identical to SEQ ID NO: 1504
  source 1..78: mol_type = other DNA

SEQ ID NO: 2255 - DNA, 78 bp, synthetic construct; identical to SEQ ID NO: 1487
  source 1..78: mol_type = other DNA

SEQ ID NO: 2256 - DNA, 78 bp, synthetic construct; identical to SEQ ID NO: 1498
  source 1..78: mol_type = other DNA

SEQ ID NO: 2257 - DNA, 78 bp, synthetic construct; identical to SEQ ID NO: 1487
  source 1..78: mol_type = other DNA

SEQ ID NO: 2258 - DNA, 78 bp, synthetic construct; identical to SEQ ID NO: 2012
  source 1..78: mol_type = other DNA

SEQ ID NO: 2259 - DNA, 78 bp, synthetic construct; identical to SEQ ID NO: 1487
  source 1..78: mol_type = other DNA

SEQ ID NO: 2260 - DNA, 78 bp, synthetic construct; identical to SEQ ID NO: 1496
  source 1..78: mol_type = other DNA

SEQ ID NO: 2261 - DNA, 78 bp, synthetic construct; identical to SEQ ID NO: 1487
  source 1..78: mol_type = other DNA

SEQ ID NO: 2262 - DNA, 78 bp, synthetic construct; identical to SEQ ID NO: 1532
  source 1..78: mol_type = other DNA

SEQ ID NO: 2263 - DNA, 78 bp, synthetic construct; identical to SEQ ID NO: 1487
  source 1..78: mol_type = other DNA

SEQ ID NO: 2264 - DNA, 78 bp, synthetic construct; identical to SEQ ID NO: 1528
  source 1..78: mol_type = other DNA

SEQ ID NO: 2265 - DNA, 78 bp, synthetic construct; identical to SEQ ID NO: 1487
  source 1..78: mol_type = other DNA

SEQ ID NO: 2266 - DNA, 78 bp, synthetic construct; identical to SEQ ID NO: 1608
  source 1..78: mol_type = other DNA

SEQ ID NO: 2267 - DNA, 78 bp, synthetic construct; identical to SEQ ID NO: 1487
  source 1..78: mol_type = other DNA

SEQ ID NO: 2268 - DNA, 78 bp, synthetic construct; identical to SEQ ID NO: 1614
  source 1..78: mol_type = other DNA

SEQ ID NO: 2269 - DNA, 78 bp, synthetic construct; identical to SEQ ID NO: 1487
  source 1..78: mol_type = other DNA

SEQ ID NO: 2270 - DNA, 78 bp, synthetic construct; identical to SEQ ID NO: 1526
  source 1..78: mol_type = other DNA

SEQ ID NO: 2271 - DNA, 78 bp, synthetic construct; identical to SEQ ID NO: 1487
  source 1..78: mol_type = other DNA

SEQ ID NO: 2272 - DNA, 78 bp, synthetic construct; identical to SEQ ID NO: 1552
  source 1..78: mol_type = other DNA

SEQ ID NO: 2273 - DNA, 78 bp, synthetic construct; identical to SEQ ID NO: 1487
  source 1..78: mol_type = other DNA

SEQ ID NO: 2274 - DNA, 78 bp, synthetic construct; identical to SEQ ID NO: 1528
  source 1..78: mol_type = other DNA

SEQ ID NO: 2275 - DNA, 78 bp, synthetic construct; identical to SEQ ID NO: 1487
  source 1..78: mol_type = other DNA

SEQ ID NO: 2276 - DNA, 78 bp, synthetic construct; identical to SEQ ID NO: 1740
  source 1..78: mol_type = other DNA

SEQ ID NO: 2277 - DNA, 78 bp, synthetic construct; identical to SEQ ID NO: 1487
  source 1..78: mol_type = other DNA

SEQ ID NO: 2278 - DNA, 78 bp, synthetic construct; identical to SEQ ID NO: 1738
  source 1..78: mol_type = other DNA

SEQ ID NO: 2279 - DNA, 78 bp, synthetic construct; identical to SEQ ID NO: 1487
  source 1..78: mol_type = other DNA

SEQ ID NO: 2280 - DNA, 78 bp, synthetic construct; identical to SEQ ID NO: 1492
  source 1..78: mol_type = other DNA

SEQ ID NO: 2281 - DNA, 78 bp, synthetic construct; identical to SEQ ID NO: 1487
  source 1..78: mol_type = other DNA

SEQ ID NO: 2282 - DNA, 78 bp, synthetic construct; identical to SEQ ID NO: 1496
  source 1..78: mol_type = other DNA

SEQ ID NO: 2283 - DNA, 78 bp, synthetic construct; identical to SEQ ID NO: 1487
  source 1..78: mol_type = other DNA

SEQ ID NO: 2284 - DNA, 78 bp, synthetic construct; identical to SEQ ID NO: 1492
  source 1..78: mol_type = other DNA

SEQ ID NO: 2285 - DNA, 78 bp, synthetic construct; identical to SEQ ID NO: 1487
  source 1..78: mol_type = other DNA

SEQ ID NO: 2286 - DNA, 78 bp, synthetic construct; identical to SEQ ID NO: 2140
  source 1..78: mol_type = other DNA

SEQ ID NO: 2287 - DNA, 78 bp, synthetic construct; identical to SEQ ID NO: 1487
  source 1..78: mol_type = other DNA

SEQ ID NO: 2288 - DNA, 78 bp, synthetic construct; identical to SEQ ID NO: 1860
  source 1..78: mol_type = other DNA

SEQ ID NO: 2289 - DNA, 78 bp, synthetic construct; identical to SEQ ID NO: 1487
  source 1..78: mol_type = other DNA

SEQ ID NO: 2290 - DNA, 78 bp, synthetic construct; identical to SEQ ID NO: 1600
  source 1..78: mol_type = other DNA

SEQ ID NO: 2291 - DNA, 78 bp, synthetic construct; identical to SEQ ID NO: 1487
  source 1..78: mol_type = other DNA

SEQ ID NO: 2292 - DNA, 78 bp, synthetic construct; identical to SEQ ID NO: 1506
  source 1..78: mol_type = other DNA

SEQ ID NO: 2293 - DNA, 78 bp, synthetic construct; identical to SEQ ID NO: 1487
  source 1..78: mol_type = other DNA

SEQ ID NO: 2294 - DNA, 78 bp, synthetic construct; identical to SEQ ID NO: 1528
  source 1..78: mol_type = other DNA

SEQ ID NO: 2295 - DNA, 78 bp, synthetic construct; identical to SEQ ID NO: 1487
  source 1..78: mol_type = other DNA

SEQ ID NO: 2296 - DNA, 78 bp, synthetic construct; identical to SEQ ID NO: 1528
  source 1..78: mol_type = other DNA

SEQ ID NO: 2297 - DNA, 78 bp, synthetic construct; identical to SEQ ID NO: 1487
  source 1..78: mol_type = other DNA

SEQ ID NO: 2298 - DNA, 78 bp, synthetic construct; identical to SEQ ID NO: 1842
  source 1..78: mol_type = other DNA

SEQ ID NO: 2299 - DNA, 78 bp, synthetic construct; identical to SEQ ID NO: 1487
  source 1..78: mol_type = other DNA

SEQ ID NO: 2300 - DNA, 78 bp, synthetic construct; identical to SEQ ID NO: 1490
  source 1..78: mol_type = other DNA

SEQ ID NO: 2301 - DNA, 78 bp, synthetic construct; identical to SEQ ID NO: 1487
  source 1..78: mol_type = other DNA

SEQ ID NO: 2302 - DNA, 78 bp, synthetic construct; identical to SEQ ID NO: 1614
  source 1..78: mol_type = other DNA

SEQ ID NO: 2303 - DNA, 78 bp, synthetic construct; identical to SEQ ID NO: 1487
  source 1..78: mol_type = other DNA

SEQ ID NO: 2304 - DNA, 78 bp, synthetic construct; identical to SEQ ID NO: 1576
  source 1..78: mol_type = other DNA

SEQ ID NO: 2305 - DNA, 78 bp, synthetic construct; identical to SEQ ID NO: 1487
  source 1..78: mol_type = other DNA

SEQ ID NO: 2306 - DNA, 78 bp, synthetic construct; identical to SEQ ID NO: 2140
  source 1..78: mol_type = other DNA

SEQ ID NO: 2307 - DNA, 78 bp, synthetic construct; identical to SEQ ID NO: 1487
  source 1..78: mol_type = other DNA

SEQ ID NO: 2308 - DNA, 78 bp, synthetic construct; identical to SEQ ID NO: 1490
  source 1..78: mol_type = other DNA

SEQ ID NO: 2309 - DNA, 78 bp, synthetic construct; identical to SEQ ID NO: 1487
  source 1..78: mol_type = other DNA

SEQ ID NO: 2310 - DNA, 78 bp, synthetic construct; identical to SEQ ID NO: 1490
  source 1..78: mol_type = other DNA

SEQ ID NO: 2311 - DNA, 78 bp, synthetic construct; identical to SEQ ID NO: 1487
  source 1..78: mol_type = other DNA

SEQ ID NO: 2312 - DNA, 78 bp, synthetic construct
  source 1..78: mol_type = other DNA
ggagactccgtgacccagacagaaggcctggtcactgtcacagaagggttgcctgtgatgctgaactgcacctatcag

SEQ ID NO: 2313 - DNA, 78 bp, synthetic construct; identical to SEQ ID NO: 1487
  source 1..78: mol_type = other DNA

SEQ ID NO: 2314 - DNA, 78 bp, synthetic construct; identical to SEQ ID NO: 1528
  source 1..78: mol_type = other DNA

SEQ ID NO: 2315 - DNA, 78 bp, synthetic construct; identical to SEQ ID NO: 1487
  source 1..78: mol_type = other DNA

SEQ ID NO: 2316 - DNA, 78 bp, synthetic construct; identical to SEQ ID NO: 1490
  source 1..78: mol_type = other DNA

SEQ ID NO: 2317 - DNA, 78 bp, synthetic construct; identical to SEQ ID NO: 1487
  source 1..78: mol_type = other DNA

SEQ ID NO: 2318 - DNA, 75 bp, synthetic construct; identical to SEQ ID NO: 1488
  source 1..75: mol_type = other DNA

SEQ ID NO: 2319 - DNA, 78 bp, synthetic construct; identical to SEQ ID NO: 1487
  source 1..78: mol_type = other DNA

SEQ ID NO: 2320 - DNA, 78 bp, synthetic construct; identical to SEQ ID NO: 1526
  source 1..78: mol_type = other DNA

SEQ ID NO: 2321 - DNA, 78 bp, synthetic construct; identical to SEQ ID NO: 1487
  source 1..78: mol_type = other DNA

SEQ ID NO: 2322 - DNA, 78 bp, synthetic construct; identical to SEQ ID NO: 1526
  source 1..78: mol_type = other DNA

SEQ ID NO: 2323 - DNA, 78 bp, synthetic construct; identical to SEQ ID NO: 1487
  source 1..78: mol_type = other DNA

SEQ ID NO: 2324 - DNA, 78 bp, synthetic construct; identical to SEQ ID NO: 1492
  source 1..78: mol_type = other DNA

SEQ ID NO: 2325 - DNA, 78 bp, synthetic construct; identical to SEQ ID NO: 1487
  source 1..78: mol_type = other DNA

SEQ ID NO: 2326 - DNA, 78 bp, synthetic construct; identical to SEQ ID NO: 1526
  source 1..78: mol_type = other DNA

SEQ ID NO: 2327 - DNA, 78 bp, synthetic construct; identical to SEQ ID NO: 1487
  source 1..78: mol_type = other DNA

SEQ ID NO: 2328 - DNA, 78 bp, synthetic construct; identical to SEQ ID NO: 1492
  source 1..78: mol_type = other DNA

SEQ ID NO: 2329 - DNA, 78 bp, synthetic construct; identical to SEQ ID NO: 1487
  source 1..78: mol_type = other DNA

SEQ ID NO: 2330 - DNA, 78 bp, synthetic construct
  source 1..78: mol_type = other DNA
ggcgagcaggtggagcagcgccctcctcacctgagtgtccgggagggagacagtgcctttatcacctgcacctacaca

SEQ ID NO: 2331 - DNA, 78 bp, synthetic construct; identical to SEQ ID NO: 1487
  source 1..78: mol_type = other DNA

SEQ ID NO: 2332 - DNA, 78 bp, synthetic construct; identical to SEQ ID NO: 1512
  source 1..78: mol_type = other DNA

SEQ ID NO: 2333 - DNA, 78 bp, synthetic construct; identical to SEQ ID NO: 1487
  source 1..78: mol_type = other DNA

SEQ ID NO: 2334 - DNA, 78 bp, synthetic construct; identical to SEQ ID NO: 1522
  source 1..78: mol_type = other DNA

SEQ ID NO: 2335 - DNA, 78 bp, synthetic construct; identical to SEQ ID NO: 1487
  source 1..78: mol_type = other DNA

SEQ ID NO: 2336 - DNA, 75 bp, synthetic construct; identical to SEQ ID NO: 2248
  source 1..75: mol_type = other DNA

SEQ ID NO: 2337 - DNA, 78 bp, synthetic construct; identical to SEQ ID NO: 1487
  source 1..78: mol_type = other DNA

SEQ ID NO: 2338 - DNA, 78 bp, synthetic construct; identical to SEQ ID NO: 1552
  source 1..78: mol_type = other DNA

SEQ ID NO: 2339 - DNA, 78 bp, synthetic construct; identical to SEQ ID NO: 1487
  source 1..78: mol_type = other DNA

SEQ ID NO: 2340 - DNA, 78 bp, synthetic construct; identical to SEQ ID NO: 1594
  source 1..78: mol_type = other DNA

SEQ ID NO: 2341 - DNA, 78 bp, synthetic construct; identical to SEQ ID NO: 1487
  source 1..78: mol_type = other DNA

SEQ ID NO: 2342 - DNA, 75 bp, synthetic construct; identical to SEQ ID NO: 1488
  source 1..75: mol_type = other DNA

SEQ ID NO: 2343 - DNA, 78 bp, synthetic construct; identical to SEQ ID NO: 1487
  source 1..78: mol_type = other DNA

SEQ ID NO: 2344 - DNA, 78 bp, synthetic construct; identical to SEQ ID NO: 1796
  source 1..78: mol_type = other DNA

SEQ ID NO: 2345 - DNA, 78 bp, synthetic construct; identical to SEQ ID NO: 1487
  source 1..78: mol_type = other DNA

SEQ ID NO: 2346 - DNA, 78 bp, synthetic construct; identical to SEQ ID NO: 1594
  source 1..78: mol_type = other DNA

SEQ ID NO: 2347 - DNA, 78 bp, synthetic construct; identical to SEQ ID NO: 1487
  source 1..78: mol_type = other DNA

SEQ ID NO: 2348 - DNA, 78 bp, synthetic construct; identical to SEQ ID NO: 1498
  source 1..78: mol_type = other DNA

SEQ ID NO: 2349 - DNA, 78 bp, synthetic construct; identical to SEQ ID NO: 1487
  source 1..78: mol_type = other DNA

SEQ ID NO: 2350 - DNA, 78 bp, synthetic construct; identical to SEQ ID NO: 1506
  source 1..78: mol_type = other DNA

SEQ ID NO: 2351 - DNA, 78 bp, synthetic construct; identical to SEQ ID NO: 1487
  source 1..78: mol_type = other DNA

SEQ ID NO: 2352 - DNA, 78 bp, synthetic construct; identical to SEQ ID NO: 1560
  source 1..78: mol_type = other DNA

SEQ ID NO: 2353 - DNA, 78 bp, synthetic construct; identical to SEQ ID NO: 1487
  source 1..78: mol_type = other DNA

SEQ ID NO: 2354 - DNA, 75 bp, synthetic construct; identical to SEQ ID NO: 1590
  source 1..75: mol_type = other DNA

SEQ ID NO: 2355 - DNA, 78 bp, synthetic construct; identical to SEQ ID NO: 1487
  source 1..78: mol_type = other DNA

SEQ ID NO: 2356 - DNA, 78 bp, synthetic construct; identical to SEQ ID NO: 2330
  source 1..78: mol_type = other DNA

SEQ ID NO: 2357 - DNA, 78 bp, synthetic construct; identical to SEQ ID NO: 1487
  source 1..78: mol_type = other DNA

SEQ ID NO: 2358 - DNA, 78 bp, synthetic construct; identical to SEQ ID NO: 1608
  source 1..78: mol_type = other DNA

SEQ ID NO: 2359 - DNA, 78 bp, synthetic construct; identical to SEQ ID NO: 1487
  source 1..78: mol_type = other DNA

SEQ ID NO: 2360 - DNA, 78 bp, synthetic construct; identical to SEQ ID NO: 1994
  source 1..78: mol_type = other DNA

SEQ ID NO: 2361 - DNA, 78 bp, synthetic construct; identical to SEQ ID NO: 1487
  source 1..78: mol_type = other DNA

SEQ ID NO: 2362 - DNA, 78 bp, synthetic construct; identical to SEQ ID NO: 1994
  source 1..78: mol_type = other DNA

SEQ ID NO: 2363 - DNA, 78 bp, synthetic construct; identical to SEQ ID NO: 1487
  source 1..78: mol_type = other DNA

SEQ ID NO: 2364 - DNA, 78 bp, synthetic construct; identical to SEQ ID NO: 1564
  source 1..78: mol_type = other DNA

SEQ ID NO: 2365 - DNA, 78 bp, synthetic construct; identical to SEQ ID NO: 1487
  source 1..78: mol_type = other DNA

SEQ ID NO: 2366 - DNA, 78 bp, synthetic construct; identical to SEQ ID NO: 2072
  source 1..78: mol_type = other DNA

SEQ ID NO: 2367 - DNA, 78 bp, synthetic construct; identical to SEQ ID NO: 1487
  source 1..78: mol_type = other DNA

SEQ ID NO: 2368 - DNA, 78 bp, synthetic construct; identical to SEQ ID NO: 1644
  source 1..78: mol_type = other DNA

SEQ ID NO: 2369 - DNA, 78 bp, synthetic construct; identical to SEQ ID NO: 1487
  source 1..78: mol_type = other DNA

SEQ ID NO: 2370 - DNA, 78 bp, synthetic construct; identical to SEQ ID NO: 1860
  source 1..78: mol_type = other DNA

SEQ ID NO: 2371 - DNA, 78 bp, synthetic construct; identical to SEQ ID NO: 1487
  source 1..78: mol_type = other DNA

SEQ ID NO: 2372 - DNA, 78 bp, synthetic construct; identical to SEQ ID NO: 1532
  source 1..78: mol_type = other DNA

SEQ ID NO: 2373 - DNA, 78 bp, synthetic construct; identical to SEQ ID NO: 1487
  source 1..78: mol_type = other DNA

SEQ ID NO: 2374 - DNA, 78 bp, synthetic construct
  source 1..78: mol_type = other DNA
ggagactcagtgacccagaaggaaggcctggtcactctcaccgaggggttgcctgtgatgctgaactgcacctatcag

SEQ ID NO: 2375 - DNA, 78 bp, synthetic construct; identical to SEQ ID NO: 1487
  source 1..78: mol_type = other DNA

SEQ ID NO: 2376 - DNA, 78 bp, synthetic construct; identical to SEQ ID NO: 1556
  source 1..78: mol_type = other DNA

SEQ ID NO: 2377 - DNA, 78 bp, synthetic construct; identical to SEQ ID NO: 1487
  source 1..78: mol_type = other DNA

SEQ ID NO: 2378 - DNA, 78 bp, synthetic construct; identical to SEQ ID NO: 1568
  source 1..78: mol_type = other DNA

SEQ ID NO: 2379 - DNA, 78 bp, synthetic construct; identical to SEQ ID NO: 1487
  source 1..78: mol_type = other DNA

SEQ ID NO: 2380 - DNA, 78 bp, synthetic construct; identical to SEQ ID NO: 1526
  source 1..78: mol_type = other DNA

SEQ ID NO: 2381 - DNA, 78 bp, synthetic construct; identical to SEQ ID NO: 1487
  source 1..78: mol_type = other DNA

SEQ ID NO: 2382 - DNA, 78 bp, synthetic construct; identical to SEQ ID NO: 1528
  source 1..78: mol_type = other DNA

SEQ ID NO: 2383 - DNA, 78 bp, synthetic construct; identical to SEQ ID NO: 1487
  source 1..78: mol_type = other DNA

SEQ ID NO: 2384 - DNA, 78 bp, synthetic construct; identical to SEQ ID NO: 1494
  source 1..78: mol_type = other DNA

SEQ ID NO: 2385 - DNA, 78 bp, synthetic construct; identical to SEQ ID NO: 1487
  source 1..78: mol_type = other DNA

SEQ ID NO: 2386 - DNA, 78 bp, synthetic construct; identical to SEQ ID NO: 1492
  source 1..78: mol_type = other DNA

SEQ ID NO: 2387 - DNA, 78 bp, synthetic construct; identical to SEQ ID NO: 1487
  source 1..78: mol_type = other DNA

SEQ ID NO: 2388 - DNA, 78 bp, synthetic construct; identical to SEQ ID NO: 2374
  source 1..78: mol_type = other DNA

SEQ ID NO: 2389 - DNA, 78 bp, synthetic construct; identical to SEQ ID NO: 1487
  source 1..78: mol_type = other DNA

SEQ ID NO: 2390 - DNA, 78 bp, synthetic construct; identical to SEQ ID NO: 1528
  source 1..78: mol_type = other DNA

SEQ ID NO: 2391 - DNA, 78 bp, synthetic construct; identical to SEQ ID NO: 1487
  source 1..78: mol_type = other DNA

SEQ ID NO: 2392 - DNA, 78 bp, synthetic construct; identical to SEQ ID NO: 1556
  source 1..78: mol_type = other DNA

SEQ ID NO: 2393 - DNA, 78 bp, synthetic construct; identical to SEQ ID NO: 1487
  source 1..78: mol_type = other DNA

SEQ ID NO: 2394 - DNA, 78 bp, synthetic construct; identical to SEQ ID NO: 1584
  source 1..78: mol_type = other DNA

SEQ ID NO: 2395 - DNA, 78 bp, synthetic construct; identical to SEQ ID NO: 1487
  source 1..78: mol_type = other DNA

SEQ ID NO: 2396 - DNA, 78 bp, synthetic construct; identical to SEQ ID NO: 1706
  source 1..78: mol_type = other DNA

SEQ ID NO: 2397 - DNA, 78 bp, synthetic construct; identical to SEQ ID NO: 1487
  source 1..78: mol_type = other DNA

SEQ ID NO: 2398 - DNA, 78 bp, synthetic construct; identical to SEQ ID NO: 1538
  source 1..78: mol_type = other DNA

SEQ ID NO: 2399 - DNA, 78 bp, synthetic construct; identical to SEQ ID NO: 1487
  source 1..78: mol_type = other DNA

SEQ ID NO: 2400 - DNA, 78 bp, synthetic construct; identical to SEQ ID NO: 1508
  source 1..78: mol_type = other DNA

SEQ ID NO: 2401 - DNA, 78 bp, synthetic construct; identical to SEQ ID NO: 1487
  source 1..78: mol_type = other DNA

SEQ ID NO: 2402 - DNA, 78 bp, synthetic construct; identical to SEQ ID NO: 1490
  source 1..78: mol_type = other DNA

SEQ ID NO: 2403 - DNA, 78 bp, synthetic construct; identical to SEQ ID NO: 1487
  source 1..78: mol_type = other DNA

SEQ ID NO: 2404 - DNA, 75 bp, synthetic construct; identical to SEQ ID NO: 1488
  source 1..75: mol_type = other DNA

SEQ ID NO: 2405 - DNA, 78 bp, synthetic construct; identical to SEQ ID NO: 1487
  source 1..78: mol_type = other DNA

SEQ ID NO: 2406 - DNA, 78 bp, synthetic construct; identical to SEQ ID NO: 1490
  source 1..78: mol_type = other DNA

SEQ ID NO: 2407 - DNA, 78 bp, synthetic construct; identical to SEQ ID NO: 1487
  source 1..78: mol_type = other DNA

SEQ ID NO: 2408 - DNA, 78 bp, synthetic construct; identical to SEQ ID NO: 1570
  source 1..78: mol_type = other DNA

SEQ ID NO: 2409 - DNA, 78 bp, synthetic construct; identical to SEQ ID NO: 1487
  source 1..78: mol_type = other DNA

SEQ ID NO: 2410 - DNA, 78 bp, synthetic construct; identical to SEQ ID NO: 1512
  source 1..78: mol_type = other DNA

SEQ ID NO: 2411 - DNA, 78 bp, synthetic construct; identical to SEQ ID NO: 1487
  source 1..78: mol_type = other DNA

SEQ ID NO: 2412 - DNA, 81 bp, synthetic construct; identical to SEQ ID NO: 1604
  source 1..81: mol_type = other DNA

SEQ ID NO: 2413 - DNA, 78 bp, synthetic construct; identical to SEQ ID NO: 1487
  source 1..78: mol_type = other DNA

SEQ ID NO: 2414 - DNA, 78 bp, synthetic construct; identical to SEQ ID NO: 1740
  source 1..78: mol_type = other DNA

SEQ ID NO: 2415 - DNA, 78 bp, synthetic construct; identical to SEQ ID NO: 1487
  source 1..78: mol_type = other DNA

SEQ ID NO: 2416 - DNA, 78 bp, synthetic construct; identical to SEQ ID NO: 1738
  source 1..78: mol_type = other DNA

SEQ ID NO: 2417 - DNA, 78 bp, synthetic construct; identical to SEQ ID NO: 1487
  source 1..78: mol_type = other DNA

SEQ ID NO: 2418 - DNA, 78 bp, synthetic construct; identical to SEQ ID NO: 1498
  source 1..78: mol_type = other DNA

SEQ ID NO: 2419 - DNA, 78 bp, synthetic construct; identical to SEQ ID NO: 1487
  source 1..78: mol_type = other DNA

SEQ ID NO: 2420 - DNA, 78 bp, synthetic construct; identical to SEQ ID NO: 1530
  source 1..78: mol_type = other DNA

SEQ ID NO: 2421 - DNA, 78 bp, synthetic construct; identical to SEQ ID NO: 1487
  source 1..78: mol_type = other DNA

SEQ ID NO: 2422 - DNA, 78 bp, synthetic construct
  source 1..78: mol_type = other DNA
ggagataaggtgaaacaaagtccctcagcgctgagtctccaagaaggaaccaattctgctctgagatgcaatttttct

SEQ ID NO: 2423 - DNA, 78 bp, synthetic construct; identical to SEQ ID NO: 1487
  source 1..78: mol_type = other DNA

SEQ ID NO: 2424 - DNA, 78 bp, synthetic construct; identical to SEQ ID NO: 1888
  source 1..78: mol_type = other DNA

SEQ ID NO: 2425 - DNA, 78 bp, synthetic construct; identical to SEQ ID NO: 1487
  source 1..78: mol_type = other DNA

SEQ ID NO: 2426 - DNA, 78 bp, synthetic construct; identical to SEQ ID NO: 1544
  source 1..78: mol_type = other DNA

SEQ ID NO: 2427 - DNA, 78 bp, synthetic construct; identical to SEQ ID NO: 1487
  source 1..78: mol_type = other DNA

SEQ ID NO: 2428 - DNA, 78 bp, synthetic construct; identical to SEQ ID NO: 1614
  source 1..78: mol_type = other DNA

SEQ ID NO: 2429 - DNA, 78 bp, synthetic construct; identical to SEQ ID NO: 1487
  source 1..78: mol_type = other DNA

SEQ ID NO: 2430 - DNA, 78 bp, synthetic construct; identical to SEQ ID NO: 1526
  source 1..78: mol_type = other DNA

SEQ ID NO: 2431 - DNA, 78 bp, synthetic construct; identical to SEQ ID NO: 1487
  source 1..78: mol_type = other DNA

SEQ ID NO: 2432 - DNA, 78 bp, synthetic construct; identical to SEQ ID NO: 1654
  source 1..78: mol_type = other DNA

SEQ ID NO: 2433 - DNA, 78 bp, synthetic construct; identical to SEQ ID NO: 1487
  source 1..78: mol_type = other DNA

SEQ ID NO: 2434 - DNA, 78 bp, synthetic construct; identical to SEQ ID NO: 1666
  source 1..78: mol_type = other DNA

SEQ ID NO: 2435 - DNA, 78 bp, synthetic construct; identical to SEQ ID NO: 1487
  source 1..78: mol_type = other DNA

SEQ ID NO: 2436 - DNA, 78 bp, synthetic construct; identical to SEQ ID NO: 1560
  source 1..78: mol_type = other DNA

SEQ ID NO: 2437 - DNA, 78 bp, synthetic construct; identical to SEQ ID NO: 1487
  source 1..78: mol_type = other DNA

SEQ ID NO: 2438 - DNA, 78 bp, synthetic construct; identical to SEQ ID NO: 1490
  source 1..78: mol_type = other DNA

SEQ ID NO: 2439 - DNA, 78 bp, synthetic construct; identical to SEQ ID NO: 1487
  source 1..78: mol_type = other DNA

SEQ ID NO: 2440 - DNA, 78 bp, synthetic construct; identical to SEQ ID NO: 1560
  source 1..78: mol_type = other DNA

SEQ ID NO: 2441 - DNA, 78 bp, synthetic construct; identical to SEQ ID NO: 1487
  source 1..78: mol_type = other DNA

SEQ ID NO: 2442 - DNA, 78 bp, synthetic construct; identical to SEQ ID NO: 1740
  source 1..78: mol_type = other DNA

SEQ ID NO: 2443 - DNA, 78 bp, synthetic construct; identical to SEQ ID NO: 1521
  source 1..78: mol_type = other DNA

SEQ ID NO: 2444 - DNA, 75 bp, synthetic construct; identical to SEQ ID NO: 1588
  source 1..75: mol_type = other DNA

SEQ ID NO: 2445 - DNA, 78 bp, synthetic construct; identical to SEQ ID NO: 1521
  source 1..78: mol_type = other DNA

SEQ ID NO: 2446 - DNA, 75 bp, synthetic construct; identical to SEQ ID NO: 1488
  source 1..75: mol_type = other DNA

SEQ ID NO: 2447 - DNA, 78 bp, synthetic construct; identical to SEQ ID NO: 1521
  source 1..78: mol_type = other DNA

SEQ ID NO: 2448 - DNA, 78 bp, synthetic construct; identical to SEQ ID NO: 1732
  source 1..78: mol_type = other DNA

SEQ ID NO: 2449 - DNA, 78 bp, synthetic construct; identical to SEQ ID NO: 1521
  source 1..78: mol_type = other DNA

SEQ ID NO: 2450 - DNA, 78 bp, synthetic construct; identical to SEQ ID NO: 1560
  source 1..78: mol_type = other DNA

SEQ ID NO: 2451 - DNA, 78 bp, synthetic construct; identical to SEQ ID NO: 1521
  source 1..78: mol_type = other DNA

SEQ ID NO: 2452 - DNA, 78 bp, synthetic construct; identical to SEQ ID NO: 1530
  source 1..78: mol_type = other DNA

SEQ ID NO: 2453 - DNA, 78 bp, synthetic construct; identical to SEQ ID NO: 1521
  source 1..78: mol_type = other DNA

SEQ ID NO: 2454 - DNA, 78 bp, synthetic construct; identical to SEQ ID NO: 1498
  source 1..78: mol_type = other DNA

SEQ ID NO: 2455 - DNA, 78 bp, synthetic construct; identical to SEQ ID NO: 1521
  source 1..78: mol_type = other DNA

SEQ ID NO: 2456 - DNA, 78 bp, synthetic construct; identical to SEQ ID NO: 1526
  source 1..78: mol_type = other DNA

SEQ ID NO: 2457 - DNA, 78 bp, synthetic construct; identical to SEQ ID NO: 1521
  source 1..78: mol_type = other DNA

SEQ ID NO: 2458 - DNA, 78 bp, synthetic construct; identical to SEQ ID NO: 1560
  source 1..78: mol_type = other DNA

SEQ ID NO: 2459 - DNA, 78 bp, synthetic construct; identical to SEQ ID NO: 1521
  source 1..78: mol_type = other DNA

SEQ ID NO: 2460 - DNA, 78 bp, synthetic construct; identical to SEQ ID NO: 1888
  source 1..78: mol_type = other DNA

SEQ ID NO: 2461 - DNA, 78 bp, synthetic construct; identical to SEQ ID NO: 1521
  source 1..78: mol_type = other DNA

SEQ ID NO: 2462 - DNA, 78 bp, synthetic construct; identical to SEQ ID NO: 1528
  source 1..78: mol_type = other DNA

SEQ ID NO: 2463 - DNA, 78 bp, synthetic construct; identical to SEQ ID NO: 1521
  source 1..78: mol_type = other DNA

SEQ ID NO: 2464 - DNA, 78 bp, synthetic construct; identical to SEQ ID NO: 1528
  source 1..78: mol_type = other DNA

SEQ ID NO: 2465 - DNA, 78 bp, synthetic construct; identical to SEQ ID NO: 1521
  source 1..78: mol_type = other DNA

SEQ ID NO: 2466 - DNA, 78 bp, synthetic construct; identical to SEQ ID NO: 1522
  source 1..78: mol_type = other DNA

SEQ ID NO: 2467 - DNA, 78 bp, synthetic construct; identical to SEQ ID NO: 1521
  source 1..78: mol_type = other DNA

SEQ ID NO: 2468 - DNA, 78 bp, synthetic construct; identical to SEQ ID NO: 1796
  source 1..78: mol_type = other DNA

SEQ ID NO: 2469 - DNA, 78 bp, synthetic construct; identical to SEQ ID NO: 1521
  source 1..78: mol_type = other DNA

SEQ ID NO: 2470 - DNA, 78 bp, synthetic construct; identical to SEQ ID NO: 1860
  source 1..78: mol_type = other DNA

SEQ ID NO: 2471 - DNA, 78 bp, synthetic construct; identical to SEQ ID NO: 1521
  source 1..78: mol_type = other DNA

SEQ ID NO: 2472 - DNA, 78 bp, synthetic construct; identical to SEQ ID NO: 1540
  source 1..78: mol_type = other DNA

SEQ ID NO: 2473 - DNA, 78 bp, synthetic construct; identical to SEQ ID NO: 1521
  source 1..78: mol_type = other DNA

SEQ ID NO: 2474 - DNA, 78 bp, synthetic construct; identical to SEQ ID NO: 1526
  source 1..78: mol_type = other DNA

SEQ ID NO: 2475 - DNA, 78 bp, synthetic construct; identical to SEQ ID NO: 1521
  source 1..78: mol_type = other DNA

SEQ ID NO: 2476 - DNA, 78 bp, synthetic construct; identical to SEQ ID NO: 1644
  source 1..78: mol_type = other DNA

SEQ ID NO: 2477 - DNA, 78 bp, synthetic construct; identical to SEQ ID NO: 1521
  source 1..78: mol_type = other DNA

SEQ ID NO: 2478 - DNA, 78 bp, synthetic construct; identical to SEQ ID NO: 1514
  source 1..78: mol_type = other DNA

SEQ ID NO: 2479 - DNA, 78 bp, synthetic construct; identical to SEQ ID NO: 1521
  source 1..78: mol_type = other DNA

SEQ ID NO: 2480 - DNA, 75 bp, synthetic construct; identical to SEQ ID NO: 1588
  source 1..75: mol_type = other DNA

SEQ ID NO: 2481 - DNA, 78 bp, synthetic construct; identical to SEQ ID NO: 1521
  source 1..78: mol_type = other DNA

SEQ ID NO: 2482 - DNA, 78 bp, synthetic construct; identical to SEQ ID NO: 1706
  source 1..78: mol_type = other DNA

SEQ ID NO: 2483 - DNA, 78 bp, synthetic construct; identical to SEQ ID NO: 1521
  source 1..78: mol_type = other DNA

SEQ ID NO: 2484 - DNA, 78 bp, synthetic construct; identical to SEQ ID NO: 1498
  source 1..78: mol_type = other DNA

SEQ ID NO: 2485 - DNA, 78 bp, synthetic construct; identical to SEQ ID NO: 1521
  source 1..78: mol_type = other DNA

SEQ ID NO: 2486 - DNA, 78 bp, synthetic construct; identical to SEQ ID NO: 1592
  source 1..78: mol_type = other DNA

SEQ ID NO: 2487 - DNA, 78 bp, synthetic construct; identical to SEQ ID NO: 1521
  source 1..78: mol_type = other DNA

SEQ ID NO: 2488 - DNA, 78 bp, synthetic construct; identical to SEQ ID NO: 1918
  source 1..78: mol_type = other DNA

SEQ ID NO: 2489 - DNA, 78 bp, synthetic construct; identical to SEQ ID NO: 1521
  source 1..78: mol_type = other DNA

SEQ ID NO: 2490 - DNA, 78 bp, synthetic construct; identical to SEQ ID NO: 1570
  source 1..78: mol_type = other DNA

SEQ ID NO: 2491 - DNA, 78 bp, synthetic construct; identical to SEQ ID NO: 1521
  source 1..78: mol_type = other DNA

SEQ ID NO: 2492 - DNA, 78 bp, synthetic construct; identical to SEQ ID NO: 1608
  source 1..78: mol_type = other DNA

SEQ ID NO: 2493 - DNA, 78 bp, synthetic construct; identical to SEQ ID NO: 1521
  source 1..78: mol_type = other DNA

SEQ ID NO: 2494 - DNA, 78 bp, synthetic construct; identical to SEQ ID NO: 1498
  source 1..78: mol_type = other DNA

SEQ ID NO: 2495 - DNA, 78 bp, synthetic construct; identical to SEQ ID NO: 1521
  source 1..78: mol_type = other DNA

SEQ ID NO: 2496 - DNA, 78 bp, synthetic construct; identical to SEQ ID NO: 1490
  source 1..78: mol_type = other DNA

SEQ ID NO: 2497 - DNA, 78 bp, synthetic construct; identical to SEQ ID NO: 1521
  source 1..78: mol_type = other DNA

SEQ ID NO: 2498 - DNA, 78 bp, synthetic construct; identical to SEQ ID NO: 1594
  source 1..78: mol_type = other DNA

SEQ ID NO: 2499 - DNA, 78 bp, synthetic construct; identical to SEQ ID NO: 1521
  source 1..78: mol_type = other DNA

SEQ ID NO: 2500 - DNA, 78 bp, synthetic construct; identical to SEQ ID NO: 1560
  source 1..78: mol_type = other DNA

SEQ ID NO: 2501 - DNA, 78 bp, synthetic construct; identical to SEQ ID NO: 1521
  source 1..78: mol_type = other DNA

SEQ ID NO: 2502 - DNA, 78 bp, synthetic construct; identical to SEQ ID NO: 1614
  source 1..78: mol_type = other DNA

SEQ ID NO: 2503 - DNA, 78 bp, synthetic construct; identical to SEQ ID NO: 1521
  source 1..78: mol_type = other DNA

SEQ ID NO: 2504 - DNA, 78 bp, synthetic construct; identical to SEQ ID NO: 1528
  source 1..78: mol_type = other DNA

SEQ ID NO: 2505 - DNA, 78 bp, synthetic construct; identical to SEQ ID NO: 1521
  source 1..78: mol_type = other DNA

SEQ ID NO: 2506 - DNA, 78 bp, synthetic construct; identical to SEQ ID NO: 1526
  source 1..78: mol_type = other DNA

SEQ ID NO: 2507 - DNA, 78 bp, synthetic construct; identical to SEQ ID NO: 1521
  source 1..78: mol_type = other DNA

SEQ ID NO: 2508 - DNA, 78 bp, synthetic construct; identical to SEQ ID NO: 1644
  source 1..78: mol_type = other DNA

SEQ ID NO: 2509 - DNA, 78 bp, synthetic construct; identical to SEQ ID NO: 1521
  source 1..78: mol_type = other DNA

SEQ ID NO: 2510 - DNA, 78 bp, synthetic construct; identical to SEQ ID NO: 1492
  source 1..78: mol_type = other DNA

SEQ ID NO: 2511 - DNA, 78 bp, synthetic construct; identical to SEQ ID NO: 1521
  source 1..78: mol_type = other DNA

SEQ ID NO: 2512 - DNA, 78 bp, synthetic construct; identical to SEQ ID NO: 1544
  source 1..78: mol_type = other DNA

SEQ ID NO: 2513 - DNA, 78 bp, synthetic construct; identical to SEQ ID NO: 1521
  source 1..78: mol_type = other DNA

SEQ ID NO: 2514 - DNA, 75 bp, synthetic construct; identical to SEQ ID NO: 1588
  source 1..75: mol_type = other DNA

SEQ ID NO: 2515 - DNA, 78 bp, synthetic construct; identical to SEQ ID NO: 1521
  source 1..78: mol_type = other DNA

SEQ ID NO: 2516 - DNA, 78 bp, synthetic construct; identical to SEQ ID NO: 1492
  source 1..78: mol_type = other DNA

SEQ ID NO: 2517 - DNA, 78 bp, synthetic construct; identical to SEQ ID NO: 1521
  source 1..78: mol_type = other DNA

SEQ ID NO: 2518 - DNA, 78 bp, synthetic construct; identical to SEQ ID NO: 1546
  source 1..78: mol_type = other DNA

SEQ ID NO: 2519 - DNA, 78 bp, synthetic construct; identical to SEQ ID NO: 1521
  source 1..78: mol_type = other DNA

SEQ ID NO: 2520 - DNA, 78 bp, synthetic construct; identical to SEQ ID NO: 1706
  source 1..78: mol_type = other DNA

SEQ ID NO: 2521 - DNA, 78 bp, synthetic construct; identical to SEQ ID NO: 1521
  source 1..78: mol_type = other DNA

SEQ ID NO: 2522 - DNA, 78 bp, synthetic construct; identical to SEQ ID NO: 1584
  source 1..78: mol_type = other DNA

SEQ ID NO: 2523 - DNA, 78 bp, synthetic construct; identical to SEQ ID NO: 1521
  source 1..78: mol_type = other DNA

SEQ ID NO: 2524 - DNA, 78 bp, synthetic construct; identical to SEQ ID NO: 1544
  source 1..78: mol_type = other DNA

SEQ ID NO: 2525 - DNA, 78 bp, synthetic construct; identical to SEQ ID NO: 1521
  source 1..78: mol_type = other DNA

SEQ ID NO: 2526 - DNA, 78 bp, synthetic construct; identical to SEQ ID NO: 1496
  source 1..78: mol_type = other DNA

SEQ ID NO: 2527 - DNA, 78 bp, synthetic construct; identical to SEQ ID NO: 1521
  source 1..78: mol_type = other DNA

SEQ ID NO: 2528 - DNA, 78 bp, synthetic construct; identical to SEQ ID NO: 1552
  source 1..78: mol_type = other DNA

SEQ ID NO: 2529 - DNA, 78 bp, synthetic construct; identical to SEQ ID NO: 1521
  source 1..78: mol_type = other DNA

SEQ ID NO: 2530 - DNA, 78 bp, synthetic construct; identical to SEQ ID NO: 1940
  source 1..78: mol_type = other DNA

SEQ ID NO: 2531 - DNA, 78 bp, synthetic construct; identical to SEQ ID NO: 1521
  source 1..78: mol_type = other DNA

SEQ ID NO: 2532 - DNA, 78 bp, synthetic construct; identical to SEQ ID NO: 1794
  source 1..78: mol_type = other DNA

SEQ ID NO: 2533 - DNA, 78 bp, synthetic construct; identical to SEQ ID NO: 1521
  source 1..78: mol_type = other DNA

SEQ ID NO: 2534 - DNA, 78 bp, synthetic construct; identical to SEQ ID NO: 1584
  source 1..78: mol_type = other DNA

SEQ ID NO: 2535 - DNA, 78 bp, synthetic construct; identical to SEQ ID NO: 1491
  source 1..78: mol_type = other DNA

SEQ ID NO: 2536 - DNA, 78 bp, synthetic construct; identical to SEQ ID NO: 1528
  source 1..78: mol_type = other DNA

SEQ ID NO: 2537 - DNA, 78 bp, synthetic construct; identical to SEQ ID NO: 1491
  source 1..78: mol_type = other DNA

SEQ ID NO: 2538 - DNA, 78 bp, synthetic construct; identical to SEQ ID NO: 1540
  source 1..78: mol_type = other DNA

SEQ ID NO: 2539 - DNA, 78 bp, synthetic construct; identical to SEQ ID NO: 1491
  source 1..78: mol_type = other DNA

SEQ ID NO: 2540 - DNA, 78 bp, synthetic construct; identical to SEQ ID NO: 1494
  source 1..78: mol_type = other DNA

SEQ ID NO: 2541 - DNA, 78 bp, synthetic construct; identical to SEQ ID NO: 1491
  source 1..78: mol_type = other DNA

SEQ ID NO: 2542 - DNA, 78 bp, synthetic construct; identical to SEQ ID NO: 1544
  source 1..78: mol_type = other DNA

SEQ ID NO: 2543 - DNA, 78 bp, synthetic construct; identical to SEQ ID NO: 1491
  source 1..78: mol_type = other DNA

SEQ ID NO: 2544 - DNA, 78 bp, synthetic construct; identical to SEQ ID NO: 1584
  source 1..78: mol_type = other DNA

SEQ ID NO: 2545 - DNA, 78 bp, synthetic construct; identical to SEQ ID NO: 1491
  source 1..78: mol_type = other DNA

SEQ ID NO: 2546 - DNA, 78 bp, synthetic construct; identical to SEQ ID NO: 2140
  source 1..78: mol_type = other DNA

SEQ ID NO: 2547 - DNA, 78 bp, synthetic construct; identical to SEQ ID NO: 1491
  source 1..78: mol_type = other DNA

SEQ ID NO: 2548 - DNA, 78 bp, synthetic construct; identical to SEQ ID NO: 1514
  source 1..78: mol_type = other DNA

SEQ ID NO: 2549 - DNA, 78 bp, synthetic construct; identical to SEQ ID NO: 1491
  source 1..78: mol_type = other DNA

SEQ ID NO: 2550 - DNA, 78 bp, synthetic construct; identical to SEQ ID NO: 1528
  source 1..78: mol_type = other DNA

SEQ ID NO: 2551 - DNA, 78 bp, synthetic construct; identical to SEQ ID NO: 1491
  source 1..78: mol_type = other DNA

SEQ ID NO: 2552 - DNA, 78 bp, synthetic construct; identical to SEQ ID NO: 1528
  source 1..78: mol_type = other DNA

SEQ ID NO: 2553 - DNA, 78 bp, synthetic construct; identical to SEQ ID NO: 1491
  source 1..78: mol_type = other DNA

SEQ ID NO: 2554 - DNA, 78 bp, synthetic construct; identical to SEQ ID NO: 1528
  source 1..78: mol_type = other DNA

SEQ ID NO: 2555 - DNA, 78 bp, synthetic construct; identical to SEQ ID NO: 1491
  source 1..78: mol_type = other DNA

SEQ ID NO: 2556 - DNA, 78 bp, synthetic construct; identical to SEQ ID NO: 1764
  source 1..78: mol_type = other DNA

SEQ ID NO: 2557 - DNA, 78 bp, synthetic construct; identical to SEQ ID NO: 1491
  source 1..78: mol_type = other DNA

SEQ ID NO: 2558 - DNA, 75 bp, synthetic construct; identical to SEQ ID NO: 1588
  source 1..75: mol_type = other DNA

SEQ ID NO: 2559 - DNA, 78 bp, synthetic construct; identical to SEQ ID NO: 1491
  source 1..78: mol_type = other DNA

SEQ ID NO: 2560 - DNA, 78 bp, synthetic construct; identical to SEQ ID NO: 1498
  source 1..78: mol_type = other DNA

SEQ ID NO: 2561 - DNA, 78 bp, synthetic construct; identical to SEQ ID NO: 1491
  source 1..78: mol_type = other DNA

SEQ ID NO: 2562 - DNA, 78 bp, synthetic construct
  source 1..78: mol_type = other DNA
agccaatggggagaagagaatcttcaggctctgagcatccaggagggtgaagatgttaccatgaactgcagttacaag

SEQ ID NO: 2563 - DNA, 78 bp, synthetic construct; identical to SEQ ID NO: 1491
  source 1..78: mol_type = other DNA

SEQ ID NO: 2564 - DNA, 78 bp, synthetic construct; identical to SEQ ID NO: 1614
  source 1..78: mol_type = other DNA

SEQ ID NO: 2565 - DNA, 78 bp, synthetic construct; identical to SEQ ID NO: 1491
  source 1..78: mol_type = other DNA

SEQ ID NO: 2566 - DNA, 78 bp, synthetic construct; identical to SEQ ID NO: 1514
  source 1..78: mol_type = other DNA

SEQ ID NO: 2567 - DNA, 78 bp, synthetic construct; identical to SEQ ID NO: 1491
  source 1..78: mol_type = other DNA

SEQ ID NO: 2568 - DNA, 78 bp, synthetic construct; identical to SEQ ID NO: 1764
  source 1..78: mol_type = other DNA

SEQ ID NO: 2569 - DNA, 78 bp, synthetic construct; identical to SEQ ID NO: 1491
  source 1..78: mol_type = other DNA

SEQ ID NO: 2570 - DNA, 78 bp, synthetic construct; identical to SEQ ID NO: 1528
  source 1..78: mol_type = other DNA

SEQ ID NO: 2571 - DNA, 78 bp, synthetic construct; identical to SEQ ID NO: 1491
  source 1..78: mol_type = other DNA

SEQ ID NO: 2572 - DNA, 81 bp, synthetic construct; identical to SEQ ID NO: 1604
  source 1..81: mol_type = other DNA

SEQ ID NO: 2573 - DNA, 78 bp, synthetic construct; identical to SEQ ID NO: 1491
  source 1..78: mol_type = other DNA

SEQ ID NO: 2574 - DNA, 78 bp, synthetic construct; identical to SEQ ID NO: 1546
  source 1..78: mol_type = other DNA

SEQ ID NO: 2575 - DNA, 78 bp, synthetic construct; identical to SEQ ID NO: 1491
  source 1..78: mol_type = other DNA

SEQ ID NO: 2576 - DNA, 78 bp, synthetic construct; identical to SEQ ID NO: 1562
  source 1..78: mol_type = other DNA

SEQ ID NO: 2577 - DNA, 78 bp, synthetic construct; identical to SEQ ID NO: 1491
  source 1..78: mol_type = other DNA

SEQ ID NO: 2578 - DNA, 78 bp, synthetic construct; identical to SEQ ID NO: 1506
  source 1..78: mol_type = other DNA

SEQ ID NO: 2579 - DNA, 78 bp, synthetic construct; identical to SEQ ID NO: 1491
  source 1..78: mol_type = other DNA

SEQ ID NO: 2580 - DNA, 78 bp, synthetic construct; identical to SEQ ID NO: 1506
  source 1..78: mol_type = other DNA

SEQ ID NO: 2581 - DNA, 78 bp, synthetic construct; identical to SEQ ID NO: 1491
  source 1..78: mol_type = other DNA

SEQ ID NO: 2582 - DNA, 78 bp, synthetic construct; identical to SEQ ID NO: 1528
  source 1..78: mol_type = other DNA

SEQ ID NO: 2583 - DNA, 78 bp, synthetic construct; identical to SEQ ID NO: 1491
  source 1..78: mol_type = other DNA

SEQ ID NO: 2584 - DNA, 78 bp, synthetic construct; identical to SEQ ID NO: 1560
  source 1..78: mol_type = other DNA

SEQ ID NO: 2585 - DNA, 78 bp, synthetic construct; identical to SEQ ID NO: 1491
  source 1..78: mol_type = other DNA

SEQ ID NO: 2586 - DNA, 78 bp, synthetic construct; identical to SEQ ID NO: 1526
  source 1..78: mol_type = other DNA

SEQ ID NO: 2587 - DNA, 78 bp, synthetic construct; identical to SEQ ID NO: 1491
  source 1..78: mol_type = other DNA

SEQ ID NO: 2588 - DNA, 78 bp, synthetic construct; identical to SEQ ID NO: 1528
  source 1..78: mol_type = other DNA

SEQ ID NO: 2589 - DNA, 78 bp, synthetic construct; identical to SEQ ID NO: 1491
  source 1..78: mol_type = other DNA

SEQ ID NO: 2590 - DNA, 78 bp, synthetic construct; identical to SEQ ID NO: 1528
  source 1..78: mol_type = other DNA

SEQ ID NO: 2591 - DNA, 78 bp, synthetic construct; identical to SEQ ID NO: 1491
  source 1..78: mol_type = other DNA

SEQ ID NO: 2592 - DNA, 78 bp, synthetic construct; identical to SEQ ID NO: 2102
  source 1..78: mol_type = other DNA

SEQ ID NO: 2593 - DNA, 78 bp, synthetic construct; identical to SEQ ID NO: 1491
  source 1..78: mol_type = other DNA

SEQ ID NO: 2594 - DNA, 78 bp, synthetic construct; identical to SEQ ID NO: 1496
  source 1..78: mol_type = other DNA

SEQ ID NO: 2595 - DNA, 78 bp, synthetic construct; identical to SEQ ID NO: 1491
  source 1..78: mol_type = other DNA

SEQ ID NO: 2596 - DNA, 78 bp, synthetic construct; identical to SEQ ID NO: 1608
  source 1..78: mol_type = other DNA

SEQ ID NO: 2597 - DNA, 78 bp, synthetic construct; identical to SEQ ID NO: 1491
  source 1..78: mol_type = other DNA

SEQ ID NO: 2598 - DNA, 75 bp, synthetic construct; identical to SEQ ID NO: 2248
  source 1..75: mol_type = other DNA

SEQ ID NO: 2599 - DNA, 78 bp, synthetic construct; identical to SEQ ID NO: 1491
  source 1..78: mol_type = other DNA

SEQ ID NO: 2600 - DNA, 78 bp, synthetic construct; identical to SEQ ID NO: 1698
  source 1..78: mol_type = other DNA

SEQ ID NO: 2601 - DNA, 78 bp, synthetic construct; identical to SEQ ID NO: 1491
  source 1..78: mol_type = other DNA

SEQ ID NO: 2602 - DNA, 78 bp, synthetic construct; identical to SEQ ID NO: 1508
  source 1..78: mol_type = other DNA

SEQ ID NO: 2603 - DNA, 78 bp, synthetic construct; identical to SEQ ID NO: 1491
  source 1..78: mol_type = other DNA

SEQ ID NO: 2604 - DNA, 78 bp, synthetic construct; identical to SEQ ID NO: 1564
  source 1..78: mol_type = other DNA

SEQ ID NO: 2605 - DNA, 78 bp, synthetic construct; identical to SEQ ID NO: 1491
  source 1..78: mol_type = other DNA

SEQ ID NO: 2606 - DNA, 78 bp, synthetic construct; identical to SEQ ID NO: 1706
  source 1..78: mol_type = other DNA

SEQ ID NO: 2607 - DNA, 78 bp, synthetic construct; identical to SEQ ID NO: 1491
  source 1..78: mol_type = other DNA

SEQ ID NO: 2608 - DNA, 78 bp, synthetic construct; identical to SEQ ID NO: 1614
  source 1..78: mol_type = other DNA

SEQ ID NO: 2609 - DNA, 78 bp, synthetic construct; identical to SEQ ID NO: 1491
  source 1..78: mol_type = other DNA

SEQ ID NO: 2610 - DNA, 78 bp, synthetic construct; identical to SEQ ID NO: 1842
  source 1..78: mol_type = other DNA

SEQ ID NO: 2611 - DNA, 78 bp, synthetic construct; identical to SEQ ID NO: 1491
  source 1..78: mol_type = other DNA

SEQ ID NO: 2612 - DNA, 78 bp, synthetic construct; identical to SEQ ID NO: 1552
  source 1..78: mol_type = other DNA

SEQ ID NO: 2613 - DNA, 78 bp, synthetic construct; identical to SEQ ID NO: 1491
  source 1..78: mol_type = other DNA

SEQ ID NO: 2614 - DNA, 78 bp, synthetic construct; identical to SEQ ID NO: 1492
  source 1..78: mol_type = other DNA

SEQ ID NO: 2615 - DNA, 78 bp, synthetic construct; identical to SEQ ID NO: 1491
  source 1..78: mol_type = other DNA

SEQ ID NO: 2616 - DNA, 78 bp, synthetic construct; identical to SEQ ID NO: 2012
  source 1..78: mol_type = other DNA

SEQ ID NO: 2617 - DNA, 78 bp, synthetic construct; identical to SEQ ID NO: 1491
  source 1..78: mol_type = other DNA

SEQ ID NO: 2618 - DNA, 78 bp, synthetic construct
  source 1..78: mol_type = other DNA
caggagaaggtacagcagagcccagaatccctcattgtcccagagggagccatggcctccctcaactgcactttcagc

SEQ ID NO: 2619 - DNA, 78 bp, synthetic construct; identical to SEQ ID NO: 1491
  source 1..78: mol_type = other DNA

SEQ ID NO: 2620 - DNA, 78 bp, synthetic construct; identical to SEQ ID NO: 1528
  source 1..78: mol_type = other DNA

SEQ ID NO: 2621 - DNA, 78 bp, synthetic construct; identical to SEQ ID NO: 1491
  source 1..78: mol_type = other DNA

SEQ ID NO: 2622 - DNA, 78 bp, synthetic construct; identical to SEQ ID NO: 1528
  source 1..78: mol_type = other DNA

SEQ ID NO: 2623 - DNA, 78 bp, synthetic construct; identical to SEQ ID NO: 1491
  source 1..78: mol_type = other DNA

SEQ ID NO: 2624 - DNA, 78 bp, synthetic construct; identical to SEQ ID NO: 1634
  source 1..78: mol_type = other DNA

SEQ ID NO: 2625 - DNA, 78 bp, synthetic construct; identical to SEQ ID NO: 1491
  source 1..78: mol_type = other DNA

SEQ ID NO: 2626 - DNA, 78 bp, synthetic construct; identical to SEQ ID NO: 1740
  source 1..78: mol_type = other DNA

SEQ ID NO: 2627 - DNA, 78 bp, synthetic construct; identical to SEQ ID NO: 1491
  source 1..78: mol_type = other DNA

SEQ ID NO: 2628 - DNA, 78 bp, synthetic construct; identical to SEQ ID NO: 1706
  source 1..78: mol_type = other DNA

SEQ ID NO: 2629 - DNA, 78 bp, synthetic construct; identical to SEQ ID NO: 1491
  source 1..78: mol_type = other DNA

SEQ ID NO: 2630 - DNA, 78 bp, synthetic construct; identical to SEQ ID NO: 1548
  source 1..78: mol_type = other DNA

SEQ ID NO: 2631 - DNA, 78 bp, synthetic construct; identical to SEQ ID NO: 1491
  source 1..78: mol_type = other DNA

SEQ ID NO: 2632 - DNA, 78 bp, synthetic construct; identical to SEQ ID NO: 2312
  source 1..78: mol_type = other DNA

SEQ ID NO: 2633 - DNA, 78 bp, synthetic construct; identical to SEQ ID NO: 1491
  source 1..78: mol_type = other DNA

SEQ ID NO: 2634 - DNA, 78 bp, synthetic construct; identical to SEQ ID NO: 1770
  source 1..78: mol_type = other DNA

SEQ ID NO: 2635 - DNA, 78 bp, synthetic construct; identical to SEQ ID NO: 1491
  source 1..78: mol_type = other DNA

SEQ ID NO: 2636 - DNA, 78 bp, synthetic construct; identical to SEQ ID NO: 1666
  source 1..78: mol_type = other DNA

SEQ ID NO: 2637 - DNA, 78 bp, synthetic construct; identical to SEQ ID NO: 1491
  source 1..78: mol_type = other DNA

SEQ ID NO: 2638 - DNA, 78 bp, synthetic construct; identical to SEQ ID NO: 1860
  source 1..78: mol_type = other DNA

SEQ ID NO: 2639 - DNA, 78 bp, synthetic construct; identical to SEQ ID NO: 1491
  source 1..78: mol_type = other DNA

SEQ ID NO: 2640 - DNA, 78 bp, synthetic construct; identical to SEQ ID NO: 1614
  source 1..78: mol_type = other DNA

SEQ ID NO: 2641 - DNA, 78 bp, synthetic construct; identical to SEQ ID NO: 1491
  source 1..78: mol_type = other DNA

SEQ ID NO: 2642 - DNA, 78 bp, synthetic construct; identical to SEQ ID NO: 1492
  source 1..78: mol_type = other DNA

SEQ ID NO: 2643 - DNA, 78 bp, synthetic construct; identical to SEQ ID NO: 1491
  source 1..78: mol_type = other DNA

SEQ ID NO: 2644 - DNA, 78 bp, synthetic construct; identical to SEQ ID NO: 1608
  source 1..78: mol_type = other DNA

SEQ ID NO: 2645 - DNA, 78 bp, synthetic construct; identical to SEQ ID NO: 1491
  source 1..78: mol_type = other DNA

SEQ ID NO: 2646 - DNA, 78 bp, synthetic construct; identical to SEQ ID NO: 1506
  source 1..78: mol_type = other DNA

SEQ ID NO: 2647 - DNA, 78 bp, synthetic construct; identical to SEQ ID NO: 1491
  source 1..78: mol_type = other DNA

SEQ ID NO: 2648 - DNA, 78 bp, synthetic construct; identical to SEQ ID NO: 1614
  source 1..78: mol_type = other DNA

SEQ ID NO: 2649 - DNA, 78 bp, synthetic construct; identical to SEQ ID NO: 1491
  source 1..78: mol_type = other DNA

SEQ ID NO: 2650 - DNA, 78 bp, synthetic construct; identical to SEQ ID NO: 1850
  source 1..78: mol_type = other DNA

SEQ ID NO: 2651 - DNA, 78 bp, synthetic construct; identical to SEQ ID NO: 1491
  source 1..78: mol_type = other DNA

SEQ ID NO: 2652 - DNA, 78 bp, synthetic construct; identical to SEQ ID NO: 1552
  source 1..78: mol_type = other DNA

SEQ ID NO: 2653 - DNA, 78 bp, synthetic construct; identical to SEQ ID NO: 1491
  source 1..78: mol_type = other DNA

SEQ ID NO: 2654 - DNA, 78 bp, synthetic construct; identical to SEQ ID NO: 1522
  source 1..78: mol_type = other DNA

SEQ ID NO: 2655 - DNA, 78 bp, synthetic construct; identical to SEQ ID NO: 1491
  source 1..78: mol_type = other DNA

SEQ ID NO: 2656 - DNA, 78 bp, synthetic construct; identical to SEQ ID NO: 1514
  source 1..78: mol_type = other DNA

SEQ ID NO: 2657 - DNA, 78 bp, synthetic construct; identical to SEQ ID NO: 1491
  source 1..78: mol_type = other DNA

SEQ ID NO: 2658 - DNA, 78 bp, synthetic construct; identical to SEQ ID NO: 1528
  source 1..78: mol_type = other DNA

SEQ ID NO: 2659 - DNA, 78 bp, synthetic construct; identical to SEQ ID NO: 1491
  source 1..78: mol_type = other DNA

SEQ ID NO: 2660 - DNA, 78 bp, synthetic construct; identical to SEQ ID NO: 1594
  source 1..78: mol_type = other DNA

SEQ ID NO: 2661 - DNA, 78 bp, synthetic construct; identical to SEQ ID NO: 1491
  source 1..78: mol_type = other DNA

SEQ ID NO: 2662 - DNA, 78 bp, synthetic construct; identical to SEQ ID NO: 1614
  source 1..78: mol_type = other DNA

SEQ ID NO: 2663 - DNA, 78 bp, synthetic construct; identical to SEQ ID NO: 1491
  source 1..78: mol_type = other DNA

SEQ ID NO: 2664 - DNA, 78 bp, synthetic construct
  source 1..78: mol_type = other DNA
gcccagaaagtgattcaggtctggtcaacagcaagcaggcaggagggcgaagaactcaccctggactgttcatatgag

SEQ ID NO: 2665 - DNA, 78 bp, synthetic construct; identical to SEQ ID NO: 1491
  source 1..78: mol_type = other DNA

SEQ ID NO: 2666 - DNA, 78 bp, synthetic construct; identical to SEQ ID NO: 1614
  source 1..78: mol_type = other DNA

SEQ ID NO: 2667 - DNA, 78 bp, synthetic construct; identical to SEQ ID NO: 1491
  source 1..78: mol_type = other DNA

SEQ ID NO: 2668 - DNA, 78 bp, synthetic construct; identical to SEQ ID NO: 1858
  source 1..78: mol_type = other DNA

SEQ ID NO: 2669 - DNA, 78 bp, synthetic construct; identical to SEQ ID NO: 1491
  source 1..78: mol_type = other DNA

SEQ ID NO: 2670 - DNA, 78 bp, synthetic construct; identical to SEQ ID NO: 1490
  source 1..78: mol_type = other DNA

SEQ ID NO: 2671 - DNA, 78 bp, synthetic construct; identical to SEQ ID NO: 1491
  source 1..78: mol_type = other DNA

SEQ ID NO: 2672 - DNA, 78 bp, synthetic construct; identical to SEQ ID NO: 1654
  source 1..78: mol_type = other DNA

SEQ ID NO: 2673 - DNA, 78 bp, synthetic construct; identical to SEQ ID NO: 1491
  source 1..78: mol_type = other DNA

SEQ ID NO: 2674 - DNA, 78 bp, synthetic construct; identical to SEQ ID NO: 1888
  source 1..78: mol_type = other DNA

SEQ ID NO: 2675 - DNA, 78 bp, synthetic construct; identical to SEQ ID NO: 1491
  source 1..78: mol_type = other DNA

SEQ ID NO: 2676 - DNA, 78 bp, synthetic construct; identical to SEQ ID NO: 1540
  source 1..78: mol_type = other DNA

SEQ ID NO: 2677 - DNA, 78 bp, synthetic construct; identical to SEQ ID NO: 1491
  source 1..78: mol_type = other DNA

SEQ ID NO: 2678 - DNA, 78 bp, synthetic construct
  source 1..78: mol_type = other DNA
ggcgagcaggtggagcagcgccctcctcacctgagtgtccgggagggagacagcgcctttatcatctgcacctacaca

SEQ ID NO: 2679 - DNA, 78 bp, synthetic construct; identical to SEQ ID NO: 1491
  source 1..78: mol_type = other DNA

SEQ ID NO: 2680 - DNA, 78 bp, synthetic construct; identical to SEQ ID NO: 1772
  source 1..78: mol_type = other DNA

SEQ ID NO: 2681 - DNA, 78 bp, synthetic construct; identical to SEQ ID NO: 1491
  source 1..78: mol_type = other DNA

SEQ ID NO: 2682 - DNA, 78 bp, synthetic construct; identical to SEQ ID NO: 1492
  source 1..78: mol_type = other DNA

SEQ ID NO: 2683 - DNA, 78 bp, synthetic construct; identical to SEQ ID NO: 1491
  source 1..78: mol_type = other DNA

SEQ ID NO: 2684 - DNA, 78 bp, synthetic construct; identical to SEQ ID NO: 1862
  source 1..78: mol_type = other DNA

SEQ ID NO: 2685 - DNA, 78 bp, synthetic construct; identical to SEQ ID NO: 1491
  source 1..78: mol_type = other DNA

SEQ ID NO: 2686 - DNA, 78 bp, synthetic construct; identical to SEQ ID NO: 1528
  source 1..78: mol_type = other DNA

SEQ ID NO: 2687 - DNA, 78 bp, synthetic construct; identical to SEQ ID NO: 1491
  source 1..78: mol_type = other DNA

SEQ ID NO: 2688 - DNA, 78 bp, synthetic construct; identical to SEQ ID NO: 1514
  source 1..78: mol_type = other DNA

SEQ ID NO: 2689 - DNA, 78 bp, synthetic construct; identical to SEQ ID NO: 1491
  source 1..78: mol_type = other DNA

SEQ ID NO: 2690 - DNA, 78 bp, synthetic construct; identical to SEQ ID NO: 1490
  source 1..78: mol_type = other DNA

SEQ ID NO: 2691 - DNA, 78 bp, synthetic construct; identical to SEQ ID NO: 1491
  source 1..78: mol_type = other DNA

SEQ ID NO: 2692 - DNA, 78 bp, synthetic construct; identical to SEQ ID NO: 1528
  source 1..78: mol_type = other DNA

SEQ ID NO: 2693 - DNA, 78 bp, synthetic construct; identical to SEQ ID NO: 1491
  source 1..78: mol_type = other DNA

SEQ ID NO: 2694 - DNA, 78 bp, synthetic construct; identical to SEQ ID NO: 1528
  source 1..78: mol_type = other DNA

SEQ ID NO: 2695 - DNA, 78 bp, synthetic construct; identical to SEQ ID NO: 1783
  source 1..78: mol_type = other DNA

SEQ ID NO: 2696 - DNA, 78 bp, synthetic construct; identical to SEQ ID NO: 1592
  source 1..78: mol_type = other DNA

SEQ ID NO: 2697 - DNA, 78 bp, synthetic construct; identical to SEQ ID NO: 1783
  source 1..78: mol_type = other DNA

SEQ ID NO: 2698 - DNA, 78 bp, synthetic construct; identical to SEQ ID NO: 1528
  source 1..78: mol_type = other DNA

SEQ ID NO: 2699 - DNA, 78 bp, synthetic construct; identical to SEQ ID NO: 1783
  source 1..78: mol_type = other DNA

SEQ ID NO: 2700 - DNA, 78 bp, synthetic construct; identical to SEQ ID NO: 1614
  source 1..78: mol_type = other DNA

SEQ ID NO: 2701 - DNA, 78 bp, synthetic construct; identical to SEQ ID NO: 1783
  source 1..78: mol_type = other DNA

SEQ ID NO: 2702 - DNA, 78 bp, synthetic construct; identical to SEQ ID NO: 1544
  source 1..78: mol_type = other DNA

SEQ ID NO: 2703 - DNA, 78 bp, synthetic construct; identical to SEQ ID NO: 1783
  source 1..78: mol_type = other DNA

SEQ ID NO: 2704 - DNA, 78 bp, synthetic construct; identical to SEQ ID NO: 1548
  source 1..78: mol_type = other DNA

SEQ ID NO: 2705 - DNA, 78 bp, synthetic construct; identical to SEQ ID NO: 1783
  source 1..78: mol_type = other DNA

SEQ ID NO: 2706 - DNA, 78 bp, synthetic construct; identical to SEQ ID NO: 1548
  source 1..78: mol_type = other DNA

SEQ ID NO: 2707 - DNA, 78 bp, synthetic construct; identical to SEQ ID NO: 1783
  source 1..78: mol_type = other DNA

SEQ ID NO: 2708 - DNA, 78 bp, synthetic construct; identical to SEQ ID NO: 1796
  source 1..78: mol_type = other DNA

SEQ ID NO: 2709 - DNA, 78 bp, synthetic construct; identical to SEQ ID NO: 1783
  source 1..78: mol_type = other DNA

SEQ ID NO: 2710 - DNA, 78 bp, synthetic construct; identical to SEQ ID NO: 1764
  source 1..78: mol_type = other DNA

SEQ ID NO: 2711 - DNA, 78 bp, synthetic construct; identical to SEQ ID NO: 1783
  source 1..78: mol_type = other DNA

SEQ ID NO: 2712 - DNA, 78 bp, synthetic construct; identical to SEQ ID NO: 1540
  source 1..78: mol_type = other DNA

SEQ ID NO: 2713 - DNA, 78 bp, synthetic construct; identical to SEQ ID NO: 1783
  source 1..78: mol_type = other DNA

SEQ ID NO: 2714 - DNA, 78 bp, synthetic construct; identical to SEQ ID NO: 1528
  source 1..78: mol_type = other DNA

SEQ ID NO: 2715 - DNA, 78 bp, synthetic construct; identical to SEQ ID NO: 1783
  source 1..78: mol_type = other DNA

SEQ ID NO: 2716 - DNA, 78 bp, synthetic construct; identical to SEQ ID NO: 1614
  source 1..78: mol_type = other DNA

SEQ ID NO: 2717 - DNA, 78 bp, synthetic construct; identical to SEQ ID NO: 1783
  source 1..78: mol_type = other DNA

SEQ ID NO: 2718 - DNA, 75 bp, synthetic construct; identical to SEQ ID NO: 1488
  source 1..75: mol_type = other DNA

SEQ ID NO: 2719 - DNA, 78 bp, synthetic construct; identical to SEQ ID NO: 1783
  source 1..78: mol_type = other DNA

SEQ ID NO: 2720 - DNA, 78 bp, synthetic construct; identical to SEQ ID NO: 1592
  source 1..78: mol_type = other DNA

SEQ ID NO: 2721 - DNA, 78 bp, synthetic construct; identical to SEQ ID NO: 1783
  source 1..78: mol_type = other DNA

SEQ ID NO: 2722 - DNA, 78 bp, synthetic construct; identical to SEQ ID NO: 1490
  source 1..78: mol_type = other DNA

SEQ ID NO: 2723 - DNA, 78 bp, synthetic construct
  source 1..78: mol_type = other DNA
gatgctggagttacccagacacccagacatgaggtggcagagaaaggacaaacaataatcctgaagtgtgagccagtt

SEQ ID NO: 2724 - DNA, 78 bp, synthetic construct; identical to SEQ ID NO: 1528
  source 1..78: mol_type = other DNA

SEQ ID NO: 2725 - DNA, 78 bp, synthetic construct
  source 1..78: mol_type = other DNA
gattctggggttgtccagtctccaagacacataatcaaagaaaagggaggaaggtccgttctgacgtgtattcccatc

SEQ ID NO: 2726 - DNA, 78 bp, synthetic construct; identical to SEQ ID NO: 1514
  source 1..78: mol_type = other DNA

SEQ ID NO: 2727 - DNA, 78 bp, synthetic construct; identical to SEQ ID NO: 1519
  source 1..78: mol_type = other DNA

SEQ ID NO: 2728 - DNA, 78 bp, synthetic construct; identical to SEQ ID NO: 1698
  source 1..78: mol_type = other DNA

SEQ ID NO: 2729 - DNA, 78 bp, synthetic construct; identical to SEQ ID NO: 1519
  source 1..78: mol_type = other DNA

SEQ ID NO: 2730 - DNA, 78 bp, synthetic construct; identical to SEQ ID NO: 1552
  source 1..78: mol_type = other DNA

SEQ ID NO: 2731 - DNA, 78 bp, synthetic construct; identical to SEQ ID NO: 1519
  source 1..78: mol_type = other DNA

SEQ ID NO: 2732 - DNA, 78 bp, synthetic construct; identical to SEQ ID NO: 1506
  source 1..78: mol_type = other DNA

SEQ ID NO: 2733 - DNA, 78 bp, synthetic construct; identical to SEQ ID NO: 1519
  source 1..78: mol_type = other DNA

SEQ ID NO: 2734 - DNA, 78 bp, synthetic construct; identical to SEQ ID NO: 1532
  source 1..78: mol_type = other DNA

SEQ ID NO: 2735 - DNA, 78 bp, synthetic construct; identical to SEQ ID NO: 1519
  source 1..78: mol_type = other DNA

SEQ ID NO: 2736 - DNA, 78 bp, synthetic construct; identical to SEQ ID NO: 1552
  source 1..78: mol_type = other DNA

SEQ ID NO: 2737 - DNA, 78 bp, synthetic construct; identical to SEQ ID NO: 1519
  source 1..78: mol_type = other DNA

SEQ ID NO: 2738 - DNA, 78 bp, synthetic construct; identical to SEQ ID NO: 1614
  source 1..78: mol_type = other DNA

SEQ ID NO: 2739 - DNA, 78 bp, synthetic construct; identical to SEQ ID NO: 1519
  source 1..78: mol_type = other DNA

SEQ ID NO: 2740 - DNA, 78 bp, synthetic construct; identical to SEQ ID NO: 1490
  source 1..78: mol_type = other DNA

SEQ ID NO: 2741 - DNA, 78 bp, synthetic construct; identical to SEQ ID NO: 1519
  source 1..78: mol_type = other DNA

SEQ ID NO: 2742 - DNA, 78 bp, synthetic construct; identical to SEQ ID NO: 1526
  source 1..78: mol_type = other DNA

SEQ ID NO: 2743 - DNA, 78 bp, synthetic construct; identical to SEQ ID NO: 1519
  source 1..78: mol_type = other DNA

SEQ ID NO: 2744 - DNA, 78 bp, synthetic construct; identical to SEQ ID NO: 1538
  source 1..78: mol_type = other DNA

SEQ ID NO: 2745 - DNA, 78 bp, synthetic construct; identical to SEQ ID NO: 1519
  source 1..78: mol_type = other DNA

SEQ ID NO: 2746 - DNA, 78 bp, synthetic construct; identical to SEQ ID NO: 1564
  source 1..78: mol_type = other DNA

SEQ ID NO: 2747 - DNA, 78 bp, synthetic construct; identical to SEQ ID NO: 1575
  source 1..78: mol_type = other DNA

SEQ ID NO: 2748 - DNA, 78 bp, synthetic construct; identical to SEQ ID NO: 1514
  source 1..78: mol_type = other DNA

SEQ ID NO: 2749 - DNA, 78 bp, synthetic construct; identical to SEQ ID NO: 1575
  source 1..78: mol_type = other DNA

SEQ ID NO: 2750 - DNA, 78 bp, synthetic construct; identical to SEQ ID NO: 1596
  source 1..78: mol_type = other DNA

SEQ ID NO: 2751 - DNA, 78 bp, synthetic construct; identical to SEQ ID NO: 1575
  source 1..78: mol_type = other DNA

SEQ ID NO: 2752 - DNA, 78 bp, synthetic construct; identical to SEQ ID NO: 1528
  source 1..78: mol_type = other DNA

SEQ ID NO: 2753 - DNA, 78 bp, synthetic construct; identical to SEQ ID NO: 1575
  source 1..78: mol_type = other DNA

SEQ ID NO: 2754 - DNA, 78 bp, synthetic construct; identical to SEQ ID NO: 1552
  source 1..78: mol_type = other DNA

SEQ ID NO: 2755 - DNA, 78 bp, synthetic construct; identical to SEQ ID NO: 1575
  source 1..78: mol_type = other DNA

SEQ ID NO: 2756 - DNA, 78 bp, synthetic construct; identical to SEQ ID NO: 1688
  source 1..78: mol_type = other DNA

SEQ ID NO: 2757 - DNA, 78 bp, synthetic construct; identical to SEQ ID NO: 1575
  source 1..78: mol_type = other DNA

SEQ ID NO: 2758 - DNA, 78 bp, synthetic construct; identical to SEQ ID NO: 1564
  source 1..78: mol_type = other DNA

SEQ ID NO: 2759 - DNA, 78 bp, synthetic construct; identical to SEQ ID NO: 1575
  source 1..78: mol_type = other DNA

SEQ ID NO: 2760 - DNA, 78 bp, synthetic construct; identical to SEQ ID NO: 2012
  source 1..78: mol_type = other DNA

SEQ ID NO: 2761 - DNA, 78 bp, synthetic construct; identical to SEQ ID NO: 1575
  source 1..78: mol_type = other DNA

SEQ ID NO: 2762 - DNA, 78 bp, synthetic construct; identical to SEQ ID NO: 1528
  source 1..78: mol_type = other DNA

SEQ ID NO: 2763 - DNA, 78 bp, synthetic construct; identical to SEQ ID NO: 1575
  source 1..78: mol_type = other DNA

SEQ ID NO: 2764 - DNA, 78 bp, synthetic construct; identical to SEQ ID NO: 1732
  source 1..78: mol_type = other DNA

SEQ ID NO: 2765 - DNA, 78 bp, synthetic construct; identical to SEQ ID NO: 1575
  source 1..78: mol_type = other DNA

SEQ ID NO: 2766 - DNA, 78 bp, synthetic construct; identical to SEQ ID NO: 1496
  source 1..78: mol_type = other DNA

SEQ ID NO: 2767 - DNA, 78 bp, synthetic construct; identical to SEQ ID NO: 1575
  source 1..78: mol_type = other DNA

SEQ ID NO: 2768 - DNA, 78 bp, synthetic construct; identical to SEQ ID NO: 1504
  source 1..78: mol_type = other DNA

SEQ ID NO: 2769 - DNA, 78 bp, synthetic construct; identical to SEQ ID NO: 1575
  source 1..78: mol_type = other DNA

SEQ ID NO: 2770 - DNA, 78 bp, synthetic construct; identical to SEQ ID NO: 1512
  source 1..78: mol_type = other DNA

SEQ ID NO: 2771 - DNA, 78 bp, synthetic construct; identical to SEQ ID NO: 1563
  source 1..78: mol_type = other DNA

SEQ ID NO: 2772 - DNA, 78 bp, synthetic construct; identical to SEQ ID NO: 1494
  source 1..78: mol_type = other DNA

SEQ ID NO: 2773 - DNA, 78 bp, synthetic construct; identical to SEQ ID NO: 1563
  source 1..78: mol_type = other DNA

SEQ ID NO: 2774 - DNA, 78 bp, synthetic construct; identical to SEQ ID NO: 1506
  source 1..78: mol_type = other DNA

SEQ ID NO: 2775 - DNA, 78 bp, synthetic construct; identical to SEQ ID NO: 1563
  source 1..78: mol_type = other DNA

SEQ ID NO: 2776 - DNA, 78 bp, synthetic construct; identical to SEQ ID NO: 1688
  source 1..78: mol_type = other DNA

SEQ ID NO: 2777 - DNA, 78 bp, synthetic construct; identical to SEQ ID NO: 1563
  source 1..78: mol_type = other DNA

SEQ ID NO: 2778 - DNA, 78 bp, synthetic construct; identical to SEQ ID NO: 1492
  source 1..78: mol_type = other DNA

SEQ ID NO: 2779 - DNA, 78 bp, synthetic construct; identical to SEQ ID NO: 1563
  source 1..78: mol_type = other DNA

SEQ ID NO: 2780 - DNA, 78 bp, synthetic construct; identical to SEQ ID NO: 1512
  source 1..78: mol_type = other DNA

SEQ ID NO: 2781 - DNA, 78 bp, synthetic construct; identical to SEQ ID NO: 1563
  source 1..78: mol_type = other DNA

SEQ ID NO: 2782 - DNA, 78 bp, synthetic construct; identical to SEQ ID NO: 1514
  source 1..78: mol_type = other DNA

SEQ ID NO: 2783 - DNA, 78 bp, synthetic construct; identical to SEQ ID NO: 1563
  source 1..78: mol_type = other DNA

SEQ ID NO: 2784 - DNA, 78 bp, synthetic construct; identical to SEQ ID NO: 1548
  source 1..78: mol_type = other DNA

SEQ ID NO: 2785 - DNA, 78 bp, synthetic construct; identical to SEQ ID NO: 1563
  source 1..78: mol_type = other DNA

SEQ ID NO: 2786 - DNA, 78 bp, synthetic construct; identical to SEQ ID NO: 1498
  source 1..78: mol_type = other DNA

SEQ ID NO: 2787 - DNA, 78 bp, synthetic construct; identical to SEQ ID NO: 1563
  source 1..78: mol_type = other DNA

SEQ ID NO: 2788 - DNA, 78 bp, synthetic construct; identical to SEQ ID NO: 1540
  source 1..78: mol_type = other DNA

SEQ ID NO: 2789 - DNA, 78 bp, synthetic construct; identical to SEQ ID NO: 1563
  source 1..78: mol_type = other DNA

SEQ ID NO: 2790 - DNA, 78 bp, synthetic construct; identical to SEQ ID NO: 1548
  source 1..78: mol_type = other DNA

SEQ ID NO: 2791 - DNA, 78 bp, synthetic construct; identical to SEQ ID NO: 1563
  source 1..78: mol_type = other DNA

SEQ ID NO: 2792 - DNA, 78 bp, synthetic construct; identical to SEQ ID NO: 1674
  source 1..78: mol_type = other DNA

SEQ ID NO: 2793 - DNA, 78 bp, synthetic construct; identical to SEQ ID NO: 1563
  source 1..78: mol_type = other DNA

SEQ ID NO: 2794 - DNA, 78 bp, synthetic construct; identical to SEQ ID NO: 1490
  source 1..78: mol_type = other DNA

SEQ ID NO: 2795 - DNA, 78 bp, synthetic construct; identical to SEQ ID NO: 1563
  source 1..78: mol_type = other DNA

SEQ ID NO: 2796 - DNA, 78 bp, synthetic construct; identical to SEQ ID NO: 1888
  source 1..78: mol_type = other DNA

SEQ ID NO: 2797 - DNA, 78 bp, synthetic construct
  source 1..78: mol_type = other DNA
ggagcactcgtctatcaatatcccagaagaaccatctgtaagagtggaacttccatgaggatggagtgtcaggctgtg

SEQ ID NO: 2798 - DNA, 78 bp, synthetic construct; identical to SEQ ID NO: 1538
  source 1..78: mol_type = other DNA

SEQ ID NO: 2799 - DNA, 78 bp, synthetic construct; identical to SEQ ID NO: 1511
  source 1..78: mol_type = other DNA

SEQ ID NO: 2800 - DNA, 78 bp, synthetic construct; identical to SEQ ID NO: 1540
  source 1..78: mol_type = other DNA

SEQ ID NO: 2801 - DNA, 78 bp, synthetic construct; identical to SEQ ID NO: 1511
  source 1..78: mol_type = other DNA

SEQ ID NO: 2802 - DNA, 78 bp, synthetic construct; identical to SEQ ID NO: 1576
  source 1..78: mol_type = other DNA

SEQ ID NO: 2803 - DNA, 78 bp, synthetic construct; identical to SEQ ID NO: 1511
  source 1..78: mol_type = other DNA

SEQ ID NO: 2804 - DNA, 78 bp, synthetic construct; identical to SEQ ID NO: 1634
  source 1..78: mol_type = other DNA

SEQ ID NO: 2805 - DNA, 78 bp, synthetic construct; identical to SEQ ID NO: 1511
  source 1..78: mol_type = other DNA

SEQ ID NO: 2806 - DNA, 75 bp, synthetic construct; identical to SEQ ID NO: 1590
  source 1..75: mol_type = other DNA

SEQ ID NO: 2807 - DNA, 78 bp, synthetic construct; identical to SEQ ID NO: 1511
  source 1..78: mol_type = other DNA

SEQ ID NO: 2808 - DNA, 78 bp, synthetic construct; identical to SEQ ID NO: 1528
  source 1..78: mol_type = other DNA

SEQ ID NO: 2809 - DNA, 78 bp, synthetic construct; identical to SEQ ID NO: 1511
  source 1..78: mol_type = other DNA

SEQ ID NO: 2810 - DNA, 78 bp, synthetic construct; identical to SEQ ID NO: 1498
  source 1..78: mol_type = other DNA

SEQ ID NO: 2811 - DNA, 78 bp, synthetic construct; identical to SEQ ID NO: 1511
  source 1..78: mol_type = other DNA

SEQ ID NO: 2812 - DNA, 78 bp, synthetic construct; identical to SEQ ID NO: 1496
  source 1..78: mol_type = other DNA

SEQ ID NO: 2813 - DNA, 78 bp, synthetic construct; identical to SEQ ID NO: 1511
  source 1..78: mol_type = other DNA

SEQ ID NO: 2814 - DNA, 78 bp, synthetic construct; identical to SEQ ID NO: 1528
  source 1..78: mol_type = other DNA

SEQ ID NO: 2815 - DNA, 78 bp, synthetic construct; identical to SEQ ID NO: 1511
  source 1..78: mol_type = other DNA

SEQ ID NO: 2816 - DNA, 78 bp, synthetic construct; identical to SEQ ID NO: 1546
  source 1..78: mol_type = other DNA

SEQ ID NO: 2817 - DNA, 78 bp, synthetic construct; identical to SEQ ID NO: 1511
  source 1..78: mol_type = other DNA

SEQ ID NO: 2818 - DNA, 78 bp, synthetic construct; identical to SEQ ID NO: 1544
  source 1..78: mol_type = other DNA

SEQ ID NO: 2819 - DNA, 78 bp, synthetic construct; identical to SEQ ID NO: 1511
  source 1..78: mol_type = other DNA

SEQ ID NO: 2820 - DNA, 78 bp, synthetic construct; identical to SEQ ID NO: 1526
  source 1..78: mol_type = other DNA

SEQ ID NO: 2821 - DNA, 78 bp, synthetic construct; identical to SEQ ID NO: 1511
  source 1..78: mol_type = other DNA

SEQ ID NO: 2822 - DNA, 78 bp, synthetic construct; identical to SEQ ID NO: 1546
  source 1..78: mol_type = other DNA

SEQ ID NO: 2823 - DNA, 78 bp, synthetic construct; identical to SEQ ID NO: 1511
  source 1..78: mol_type = other DNA

SEQ ID NO: 2824 - DNA, 78 bp, synthetic construct; identical to SEQ ID NO: 1506
  source 1..78: mol_type = other DNA

SEQ ID NO: 2825 - DNA, 78 bp, synthetic construct; identical to SEQ ID NO: 1511
  source 1..78: mol_type = other DNA

SEQ ID NO: 2826 - DNA, 78 bp, synthetic construct; identical to SEQ ID NO: 1522
  source 1..78: mol_type = other DNA

SEQ ID NO: 2827 - DNA, 78 bp, synthetic construct; identical to SEQ ID NO: 1511
  source 1..78: mol_type = other DNA

SEQ ID NO: 2828 - DNA, 78 bp, synthetic construct; identical to SEQ ID NO: 1740
  source 1..78: mol_type = other DNA

SEQ ID NO: 2829 - DNA, 78 bp, synthetic construct; identical to SEQ ID NO: 1511
  source 1..78: mol_type = other DNA

SEQ ID NO: 2830 - DNA, 78 bp, synthetic construct; identical to SEQ ID NO: 1608
  source 1..78: mol_type = other DNA

SEQ ID NO: 2831 - DNA, 78 bp, synthetic construct; identical to SEQ ID NO: 1511
  source 1..78: mol_type = other DNA

SEQ ID NO: 2832 - DNA, 78 bp, synthetic construct; identical to SEQ ID NO: 1592
  source 1..78: mol_type = other DNA

SEQ ID NO: 2833 - DNA, 78 bp, synthetic construct; identical to SEQ ID NO: 1511
  source 1..78: mol_type = other DNA

SEQ ID NO: 2834 - DNA, 78 bp, synthetic construct; identical to SEQ ID NO: 2140
  source 1..78: mol_type = other DNA

SEQ ID NO: 2835 - DNA, 78 bp, synthetic construct; identical to SEQ ID NO: 1511
  source 1..78: mol_type = other DNA

SEQ ID NO: 2836 - DNA, 78 bp, synthetic construct; identical to SEQ ID NO: 1512
  source 1..78: mol_type = other DNA

SEQ ID NO: 2837 - DNA, 78 bp, synthetic construct; identical to SEQ ID NO: 1511
  source 1..78: mol_type = other DNA

SEQ ID NO: 2838 - DNA, 78 bp, synthetic construct; identical to SEQ ID NO: 1564
  source 1..78: mol_type = other DNA

SEQ ID NO: 2839 - DNA, 78 bp, synthetic construct; identical to SEQ ID NO: 1511
  source 1..78: mol_type = other DNA

SEQ ID NO: 2840 - DNA, 75 bp, synthetic construct; identical to SEQ ID NO: 1588
  source 1..75: mol_type = other DNA

SEQ ID NO: 2841 - DNA, 78 bp, synthetic construct; identical to SEQ ID NO: 1511
  source 1..78: mol_type = other DNA

SEQ ID NO: 2842 - DNA, 78 bp, synthetic construct; identical to SEQ ID NO: 1570
  source 1..78: mol_type = other DNA

SEQ ID NO: 2843 - DNA, 78 bp, synthetic construct; identical to SEQ ID NO: 1511
  source 1..78: mol_type = other DNA

SEQ ID NO: 2844 - DNA, 78 bp, synthetic construct; identical to SEQ ID NO: 1556
  source 1..78: mol_type = other DNA

SEQ ID NO: 2845 - DNA, 78 bp, synthetic construct; identical to SEQ ID NO: 1511
  source 1..78: mol_type = other DNA

SEQ ID NO: 2846 - DNA, 78 bp, synthetic construct; identical to SEQ ID NO: 1564
  source 1..78: mol_type = other DNA

SEQ ID NO: 2847 - DNA, 78 bp, synthetic construct; identical to SEQ ID NO: 1511
  source 1..78: mol_type = other DNA

SEQ ID NO: 2848 - DNA, 78 bp, synthetic construct; identical to SEQ ID NO: 1540
  source 1..78: mol_type = other DNA

SEQ ID NO: 2849 - DNA, 78 bp, synthetic construct; identical to SEQ ID NO: 1511
  source 1..78: mol_type = other DNA

SEQ ID NO: 2850 - DNA, 78 bp, synthetic construct; identical to SEQ ID NO: 1556
  source 1..78: mol_type = other DNA

SEQ ID NO: 2851 - DNA, 78 bp, synthetic construct; identical to SEQ ID NO: 1511
  source 1..78: mol_type = other DNA

SEQ ID NO: 2852 - DNA, 78 bp, synthetic construct; identical to SEQ ID NO: 1492
  source 1..78: mol_type = other DNA

SEQ ID NO: 2853 - DNA, 78 bp, synthetic construct; identical to SEQ ID NO: 1511
  source 1..78: mol_type = other DNA

SEQ ID NO: 2854 - DNA, 78 bp, synthetic construct; identical to SEQ ID NO: 1496
  source 1..78: mol_type = other DNA

SEQ ID NO: 2855 - DNA, 78 bp, synthetic construct; identical to SEQ ID NO: 1511
  source 1..78: mol_type = other DNA

SEQ ID NO: 2856 - DNA, 78 bp, synthetic construct; identical to SEQ ID NO: 1578
  source 1..78: mol_type = other DNA

SEQ ID NO: 2857 - DNA, 78 bp, synthetic construct; identical to SEQ ID NO: 1511
  source 1..78: mol_type = other DNA

SEQ ID NO: 2858 - DNA, 78 bp, synthetic construct; identical to SEQ ID NO: 1548
  source 1..78: mol_type = other DNA

SEQ ID NO: 2859 - DNA, 78 bp, synthetic construct; identical to SEQ ID NO: 1511
  source 1..78: mol_type = other DNA

SEQ ID NO: 2860 - DNA, 78 bp, synthetic construct; identical to SEQ ID NO: 1740
  source 1..78: mol_type = other DNA

SEQ ID NO: 2861 - DNA, 78 bp, synthetic construct; identical to SEQ ID NO: 1511
  source 1..78: mol_type = other DNA

SEQ ID NO: 2862 - DNA, 78 bp, synthetic construct; identical to SEQ ID NO: 1528
  source 1..78: mol_type = other DNA

SEQ ID NO: 2863 - DNA, 78 bp, synthetic construct; identical to SEQ ID NO: 1511
  source 1..78: mol_type = other DNA

SEQ ID NO: 2864 - DNA, 78 bp, synthetic construct; identical to SEQ ID NO: 1742
  source 1..78: mol_type = other DNA

SEQ ID NO: 2865 - DNA, 78 bp, synthetic construct; identical to SEQ ID NO: 1511
  source 1..78: mol_type = other DNA

SEQ ID NO: 2866 - DNA, 78 bp, synthetic construct; identical to SEQ ID NO: 1584
  source 1..78: mol_type = other DNA

SEQ ID NO: 2867 - DNA, 78 bp, synthetic construct; identical to SEQ ID NO: 1511
  source 1..78: mol_type = other DNA

SEQ ID NO: 2868 - DNA, 78 bp, synthetic construct; identical to SEQ ID NO: 1560
  source 1..78: mol_type = other DNA

SEQ ID NO: 2869 - DNA, 78 bp, synthetic construct; identical to SEQ ID NO: 1511
  source 1..78: mol_type = other DNA

SEQ ID NO: 2870 - DNA, 78 bp, synthetic construct; identical to SEQ ID NO: 1846
  source 1..78: mol_type = other DNA

SEQ ID NO: 2871 - DNA, 78 bp, synthetic construct; identical to SEQ ID NO: 1511
  source 1..78: mol_type = other DNA

SEQ ID NO: 2872 - DNA, 78 bp, synthetic construct; identical to SEQ ID NO: 1490
  source 1..78: mol_type = other DNA

SEQ ID NO: 2873 - DNA, 78 bp, synthetic construct; identical to SEQ ID NO: 1511
  source 1..78: mol_type = other DNA

SEQ ID NO: 2874 - DNA, 78 bp, synthetic construct; identical to SEQ ID NO: 1528
  source 1..78: mol_type = other DNA

SEQ ID NO: 2875 - DNA, 78 bp, synthetic construct; identical to SEQ ID NO: 1511
  source 1..78: mol_type = other DNA

SEQ ID NO: 2876 - DNA, 78 bp, synthetic construct; identical to SEQ ID NO: 1608
  source 1..78: mol_type = other DNA

SEQ ID NO: 2877 - DNA, 78 bp, synthetic construct; identical to SEQ ID NO: 1511
  source 1..78: mol_type = other DNA

SEQ ID NO: 2878 - DNA, 78 bp, synthetic construct; identical to SEQ ID NO: 1496
  source 1..78: mol_type = other DNA

SEQ ID NO: 2879 - DNA, 78 bp, synthetic construct; identical to SEQ ID NO: 1511
  source 1..78: mol_type = other DNA

SEQ ID NO: 2880 - DNA, 78 bp, synthetic construct; identical to SEQ ID NO: 1994
  source 1..78: mol_type = other DNA

SEQ ID NO: 2881 - DNA, 78 bp, synthetic construct; identical to SEQ ID NO: 1511
  source 1..78: mol_type = other DNA

SEQ ID NO: 2882 - DNA, 78 bp, synthetic construct; identical to SEQ ID NO: 1538
  source 1..78: mol_type = other DNA

SEQ ID NO: 2883 - DNA, 78 bp, synthetic construct; identical to SEQ ID NO: 1511
  source 1..78: mol_type = other DNA

SEQ ID NO: 2884 - DNA, 78 bp, synthetic construct; identical to SEQ ID NO: 1506
  source 1..78: mol_type = other DNA

SEQ ID NO: 2885 - DNA, 78 bp, synthetic construct; identical to SEQ ID NO: 1511
  source 1..78: mol_type = other DNA

SEQ ID NO: 2886 - DNA, 78 bp, synthetic construct; identical to SEQ ID NO: 1530
  source 1..78: mol_type = other DNA

SEQ ID NO: 2887 - DNA, 78 bp, synthetic construct; identical to SEQ ID NO: 1511
  source 1..78: mol_type = other DNA

SEQ ID NO: 2888 - DNA, 78 bp, synthetic construct; identical to SEQ ID NO: 1940
  source 1..78: mol_type = other DNA

SEQ ID NO: 2889 - DNA, 78 bp, synthetic construct; identical to SEQ ID NO: 1511
  source 1..78: mol_type = other DNA

SEQ ID NO: 2890 - DNA, 78 bp, synthetic construct; identical to SEQ ID NO: 1548
  source 1..78: mol_type = other DNA

SEQ ID NO: 2891 - DNA, 78 bp, synthetic construct; identical to SEQ ID NO: 1511
  source 1..78: mol_type = other DNA

SEQ ID NO: 2892 - DNA, 78 bp, synthetic construct; identical to SEQ ID NO: 1544
  source 1..78: mol_type = other DNA

SEQ ID NO: 2893 - DNA, 78 bp, synthetic construct; identical to SEQ ID NO: 1511
  source 1..78: mol_type = other DNA

SEQ ID NO: 2894 - DNA, 78 bp, synthetic construct; identical to SEQ ID NO: 1552
  source 1..78: mol_type = other DNA

SEQ ID NO: 2895 - DNA, 78 bp, synthetic construct; identical to SEQ ID NO: 1511
  source 1..78: mol_type = other DNA

SEQ ID NO: 2896 - DNA, 78 bp, synthetic construct; identical to SEQ ID NO: 1614
  source 1..78: mol_type = other DNA

SEQ ID NO: 2897 - DNA, 78 bp, synthetic construct; identical to SEQ ID NO: 1511
  source 1..78: mol_type = other DNA

SEQ ID NO: 2898 - DNA, 78 bp, synthetic construct; identical to SEQ ID NO: 1532
  source 1..78: mol_type = other DNA

SEQ ID NO: 2899 - DNA, 78 bp, synthetic construct; identical to SEQ ID NO: 1511
  source 1..78: mol_type = other DNA

SEQ ID NO: 2900 - DNA, 75 bp, synthetic construct; identical to SEQ ID NO: 1590
  source 1..75: mol_type = other DNA

SEQ ID NO: 2901 - DNA, 78 bp, synthetic construct; identical to SEQ ID NO: 1511
  source 1..78: mol_type = other DNA

SEQ ID NO: 2902 - DNA, 78 bp, synthetic construct; identical to SEQ ID NO: 2330
  source 1..78: mol_type = other DNA

SEQ ID NO: 2903 - DNA, 78 bp, synthetic construct; identical to SEQ ID NO: 1511
  source 1..78: mol_type = other DNA

SEQ ID NO: 2904 - DNA, 78 bp, synthetic construct; identical to SEQ ID NO: 1546
  source 1..78: mol_type = other DNA

SEQ ID NO: 2905 - DNA, 78 bp, synthetic construct; identical to SEQ ID NO: 1507
  source 1..78: mol_type = other DNA

SEQ ID NO: 2906 - DNA, 78 bp, synthetic construct; identical to SEQ ID NO: 1504
  source 1..78: mol_type = other DNA

SEQ ID NO: 2907 - DNA, 78 bp, synthetic construct; identical to SEQ ID NO: 1507
  source 1..78: mol_type = other DNA

SEQ ID NO: 2908 - DNA, 78 bp, synthetic construct; identical to SEQ ID NO: 1504
  source 1..78: mol_type = other DNA

SEQ ID NO: 2909 - DNA, 78 bp, synthetic construct; identical to SEQ ID NO: 1507
  source 1..78: mol_type = other DNA

SEQ ID NO: 2910 - DNA, 78 bp, synthetic construct; identical to SEQ ID NO: 1846
  source 1..78: mol_type = other DNA

SEQ ID NO: 2911 - DNA, 78 bp, synthetic construct; identical to SEQ ID NO: 1507
  source 1..78: mol_type = other DNA

SEQ ID NO: 2912 - DNA, 78 bp, synthetic construct; identical to SEQ ID NO: 1584
  source 1..78: mol_type = other DNA

SEQ ID NO: 2913 - DNA, 78 bp, synthetic construct; identical to SEQ ID NO: 1507
  source 1..78: mol_type = other DNA

SEQ ID NO: 2914 - DNA, 78 bp, synthetic construct; identical to SEQ ID NO: 1546
  source 1..78: mol_type = other DNA

SEQ ID NO: 2915 - DNA, 78 bp, synthetic construct; identical to SEQ ID NO: 1507
  source 1..78: mol_type = other DNA

SEQ ID NO: 2916 - DNA, 78 bp, synthetic construct; identical to SEQ ID NO: 1514
  source 1..78: mol_type = other DNA

SEQ ID NO: 2917 - DNA, 78 bp, synthetic construct; identical to SEQ ID NO: 1507
  source 1..78: mol_type = other DNA

SEQ ID NO: 2918 - DNA, 75 bp, synthetic construct; identical to SEQ ID NO: 2248
  source 1..75: mol_type = other DNA

SEQ ID NO: 2919 - DNA, 78 bp, synthetic construct; identical to SEQ ID NO: 1507
  source 1..78: mol_type = other DNA

SEQ ID NO: 2920 - DNA, 78 bp, synthetic construct; identical to SEQ ID NO: 2014
  source 1..78: mol_type = other DNA

SEQ ID NO: 2921 - DNA, 78 bp, synthetic construct; identical to SEQ ID NO: 1507
  source 1..78: mol_type = other DNA

SEQ ID NO: 2922 - DNA, 78 bp, synthetic construct; identical to SEQ ID NO: 1556
  source 1..78: mol_type = other DNA

SEQ ID NO: 2923 - DNA, 78 bp, synthetic construct; identical to SEQ ID NO: 1507
  source 1..78: mol_type = other DNA

SEQ ID NO: 2924 - DNA, 78 bp, synthetic construct; identical to SEQ ID NO: 1496
  source 1..78: mol_type = other DNA

SEQ ID NO: 2925 - DNA, 78 bp, synthetic construct; identical to SEQ ID NO: 1507
  source 1..78: mol_type = other DNA

SEQ ID NO: 2926 - DNA, 78 bp, synthetic construct; identical to SEQ ID NO: 1552
  source 1..78: mol_type = other DNA

SEQ ID NO: 2927 - DNA, 78 bp, synthetic construct; identical to SEQ ID NO: 1507
  source 1..78: mol_type = other DNA

SEQ ID NO: 2928 - DNA, 78 bp, synthetic construct; identical to SEQ ID NO: 1666
  source 1..78: mol_type = other DNA

SEQ ID NO: 2929 - DNA, 78 bp, synthetic construct; identical to SEQ ID NO: 1507
  source 1..78: mol_type = other DNA

SEQ ID NO: 2930 - DNA, 78 bp, synthetic construct; identical to SEQ ID NO: 1514
  source 1..78: mol_type = other DNA

SEQ ID NO: 2931 - DNA, 78 bp, synthetic construct; identical to SEQ ID NO: 1507
  source 1..78: mol_type = other DNA

SEQ ID NO: 2932 - DNA, 78 bp, synthetic construct; identical to SEQ ID NO: 1540
  source 1..78: mol_type = other DNA

SEQ ID NO: 2933 - DNA, 78 bp, synthetic construct; identical to SEQ ID NO: 1507
  source 1..78: mol_type = other DNA

SEQ ID NO: 2934 - DNA, 78 bp, synthetic construct; identical to SEQ ID NO: 1592
  source 1..78: mol_type = other DNA

SEQ ID NO: 2935 - DNA, 78 bp, synthetic construct; identical to SEQ ID NO: 1507
  source 1..78: mol_type = other DNA

SEQ ID NO: 2936 - DNA, 78 bp, synthetic construct; identical to SEQ ID NO: 1528
  source 1..78: mol_type = other DNA

SEQ ID NO: 2937 - DNA, 78 bp, synthetic construct; identical to SEQ ID NO: 1507
  source 1..78: mol_type = other DNA

SEQ ID NO: 2938 - DNA, 78 bp, synthetic construct; identical to SEQ ID NO: 2562
  source 1..78: mol_type = other DNA

SEQ ID NO: 2939 - DNA, 78 bp, synthetic construct; identical to SEQ ID NO: 1507
  source 1..78: mol_type = other DNA

SEQ ID NO: 2940 - DNA, 78 bp, synthetic construct; identical to SEQ ID NO: 1514
  source 1..78: mol_type = other DNA

SEQ ID NO: 2941 - DNA, 78 bp, synthetic construct; identical to SEQ ID NO: 1507
  source 1..78: mol_type = other DNA

SEQ ID NO: 2942 - DNA, 78 bp, synthetic construct; identical to SEQ ID NO: 1548
  source 1..78: mol_type = other DNA

SEQ ID NO: 2943 - DNA, 78 bp, synthetic construct; identical to SEQ ID NO: 1507
  source 1..78: mol_type = other DNA

SEQ ID NO: 2944 - DNA, 78 bp, synthetic construct; identical to SEQ ID NO: 1740
  source 1..78: mol_type = other DNA

SEQ ID NO: 2945 - DNA, 78 bp, synthetic construct; identical to SEQ ID NO: 1507
  source 1..78: mol_type = other DNA

SEQ ID NO: 2946 - DNA, 78 bp, synthetic construct; identical to SEQ ID NO: 1614
  source 1..78: mol_type = other DNA

SEQ ID NO: 2947 - DNA, 78 bp, synthetic construct; identical to SEQ ID NO: 1507
  source 1..78: mol_type = other DNA

SEQ ID NO: 2948 - DNA, 78 bp, synthetic construct; identical to SEQ ID NO: 1846
  source 1..78: mol_type = other DNA

SEQ ID NO: 2949 - DNA, 78 bp, synthetic construct; identical to SEQ ID NO: 1507
  source 1..78: mol_type = other DNA

SEQ ID NO: 2950 - DNA, 78 bp, synthetic construct; identical to SEQ ID NO: 2014
  source 1..78: mol_type = other DNA

SEQ ID NO: 2951 - DNA, 78 bp, synthetic construct; identical to SEQ ID NO: 1507
  source 1..78: mol_type = other DNA

SEQ ID NO: 2952 - DNA, 78 bp, synthetic construct; identical to SEQ ID NO: 2330
  source 1..78: mol_type = other DNA

SEQ ID NO: 2953 - DNA, 78 bp, synthetic construct; identical to SEQ ID NO: 1507
  source 1..78: mol_type = other DNA

SEQ ID NO: 2954 - DNA, 78 bp, synthetic construct; identical to SEQ ID NO: 1548
  source 1..78: mol_type = other DNA

SEQ ID NO: 2955 - DNA, 78 bp, synthetic construct; identical to SEQ ID NO: 1507
  source 1..78: mol_type = other DNA

SEQ ID NO: 2956 - DNA, 78 bp, synthetic construct; identical to SEQ ID NO: 1532
  source 1..78: mol_type = other DNA

SEQ ID NO: 2957 - DNA, 78 bp, synthetic construct; identical to SEQ ID NO: 1507
  source 1..78: mol_type = other DNA

SEQ ID NO: 2958 - DNA, 78 bp, synthetic construct; identical to SEQ ID NO: 1706
  source 1..78: mol_type = other DNA

SEQ ID NO: 2959 - DNA, 78 bp, synthetic construct; identical to SEQ ID NO: 1507
  source 1..78: mol_type = other DNA

SEQ ID NO: 2960 - DNA, 78 bp, synthetic construct; identical to SEQ ID NO: 1706
  source 1..78: mol_type = other DNA

SEQ ID NO: 2961 - DNA, 78 bp, synthetic construct; identical to SEQ ID NO: 1507
  source 1..78: mol_type = other DNA

SEQ ID NO: 2962 - DNA, 78 bp, synthetic construct; identical to SEQ ID NO: 1560
  source 1..78: mol_type = other DNA

SEQ ID NO: 2963 - DNA, 78 bp, synthetic construct; identical to SEQ ID NO: 1507
  source 1..78: mol_type = other DNA

SEQ ID NO: 2964 - DNA, 78 bp, synthetic construct; identical to SEQ ID NO: 1514
  source 1..78: mol_type = other DNA

SEQ ID NO: 2965 - DNA, 78 bp, synthetic construct; identical to SEQ ID NO: 1507
  source 1..78: mol_type = other DNA

SEQ ID NO: 2966 - DNA, 78 bp, synthetic construct; identical to SEQ ID NO: 1552
  source 1..78: mol_type = other DNA

SEQ ID NO: 2967 - DNA, 78 bp, synthetic construct; identical to SEQ ID NO: 1507
  source 1..78: mol_type = other DNA

SEQ ID NO: 2968 - DNA, 78 bp, synthetic construct; identical to SEQ ID NO: 1546
  source 1..78: mol_type = other DNA

SEQ ID NO: 2969 - protein, 5 aa, synthetic construct
SGHDT

SEQ ID NO: 2970 - protein, 6 aa, synthetic construct
DRNFQY

SEQ ID NO: 2971 - protein, 5 aa, synthetic construct
NNHNN

SEQ ID NO: 2972 - protein, 6 aa, synthetic construct
TSGFNG

SEQ ID NO: 2973 - protein, 5 aa, synthetic construct
NNHNN

SEQ ID NO: 2974 - protein, 7 aa, synthetic construct
TRDSSYF

SEQ ID NO: 2975 - protein, 5 aa, synthetic construct
NNHDY

SEQ ID NO: 2976 - protein, 6 aa, synthetic construct
TTYSPF

SEQ ID NO: 2977 - protein, 5 aa, synthetic construct
NNHNN

SEQ ID NO: 2978 - protein, 5 aa, synthetic construct
TSLNS

SEQ ID NO: 2979 - protein, 5 aa, synthetic construct
SGHDT

SEQ ID NO: 2980 - protein, 6 aa, synthetic construct
YSATPY

SEQ ID NO: 2981 - protein, 5 aa, synthetic construct
NNHNN

SEQ ID NO: 2982 - protein, 6 aa, synthetic construct
ASGYPT

SEQ ID NO: 2983 - protein, 5 aa, synthetic construct
LGHNA

SEQ ID NO: 2984 - protein, 6 aa, synthetic construct
TSGFNG

SEQ ID NO: 2985 - protein, 5 aa, synthetic construct
SGHSA

SEQ ID NO: 2986 - protein, 5 aa, synthetic construct
TTMRS

SEQ ID NO: 2987 - protein, 5 aa, synthetic construct
NNHNN

SEQ ID NO: 2988 - protein, 6 aa, synthetic construct
SSVTPY

SEQ ID NO: 2989 - protein, 5 aa, synthetic construct
NNHDY

SEQ ID NO: 2990 - protein, 6 aa, synthetic construct
DSATAY

SEQ ID NO: 2991 - protein, 6 aa, synthetic construct
NSQYPW

SEQ ID NO: 2992 - protein, 5 aa, synthetic construct
TSITA

SEQ ID NO: 2993 - protein, 6 aa, synthetic construct
NSQYPW

SEQ ID NO: 2994 - protein, 6 aa, synthetic construct
SSVTPY

SEQ ID NO: 2995 - protein, 5 aa, synthetic construct
FNHDT

SEQ ID NO: 2996 - protein, 6 aa, synthetic construct
DRNVDY

SEQ ID NO: 2997 - protein, 5 aa, synthetic construct
LGHNA

SEQ ID NO: 2998 - protein, 6 aa, synthetic construct
SSGTPY

SEQ ID NO: 2999 - protein, 5 aa, synthetic construct
NNHNN

SEQ ID NO: 3000 - protein, 5 aa, synthetic construct
TSLNS

SEQ ID NO: 3001 - protein, 5 aa, synthetic construct
NNHNN

SEQ ID NO: 3002 - protein, 6 aa, synthetic construct
SSVTPY

SEQ ID NO: 3003 - protein, 6 aa, synthetic construct
GKSSPN

SEQ ID NO: 3004 - protein, 6 aa, synthetic construct
YSATPY

SEQ ID NO: 3005 - protein, 5 aa, synthetic construct
NSHNY

SEQ ID NO: 3006 - protein, 6 aa, synthetic construct
TKQYPT

SEQ ID NO: 3007 - protein, 6 aa, synthetic construct
GKSSPN

SEQ ID NO: 3008 - protein, 6 aa, synthetic construct
DSATAY

SEQ ID NO: 3009 - protein, 5 aa, synthetic construct
NNHNN

SEQ ID NO: 3010 - protein, 6 aa, synthetic construct
DPNSYY

SEQ ID NO: 3011 - protein, 5 aa, synthetic construct
NNHNN

SEQ ID NO: 3012 - protein, 7 aa, synthetic construct
TRDSSYF

SEQ ID NO: 3013 - protein, 5 aa, synthetic construct
NNHDY

SEQ ID NO: 3014 - protein, 7 aa, synthetic construct
TIYSNPF

SEQ ID NO: 3015 - protein, 5 aa, synthetic construct
FNHDT

SEQ ID NO: 3016 - protein, 6 aa, synthetic construct
DSASNY

SEQ ID NO: 3017 - protein, 5 aa, synthetic construct
NNHDY

SEQ ID NO: 3018 - protein, 6 aa, synthetic construct
DPNSYY

SEQ ID NO: 3019 - protein, 5 aa, synthetic construct
NNHDY

SEQ ID NO: 3020 - protein, 6 aa, synthetic construct
YFGTPY

SEQ ID NO: 3021 - protein, 5 aa, synthetic construct
NSHNY

SEQ ID NO: 3022 - protein, 6 aa, synthetic construct
DTASSY

SEQ ID NO: 3023 - protein, 5 aa, synthetic construct
NNHDY

SEQ ID NO: 3024 - protein, 5 aa, synthetic construct
TSLNS

SEQ ID NO: 3025 - protein, 5 aa, synthetic construct
LGHNA

SEQ ID NO: 3026 - protein, 6 aa, synthetic construct
DTASSY

SEQ ID NO: 3027 - protein, 5 aa, synthetic construct
NNHNN

SEQ ID NO: 3028 - protein, 8 aa, synthetic construct
TTSIAYPN

SEQ ID NO: 3029 - protein, 5 aa, synthetic construct
NNHDY

SEQ ID NO: 3030 - protein, 6 aa, synthetic construct
TAYSTF

SEQ ID NO: 3031 - protein, 6 aa, synthetic construct
GKSSPN

SEQ ID NO: 3032 - protein, 6 aa, synthetic construct
DRNFQY

SEQ ID NO: 3033 - protein, 5 aa, synthetic construct
FNHDT

SEQ ID NO: 3034 - protein, 7 aa, synthetic construct
TRDSSYF

SEQ ID NO: 3035 - protein, 5 aa, synthetic construct
SGHDT

SEQ ID NO: 3036 - protein, 6 aa, synthetic construct
DSTFNY

SEQ ID NO: 3037 - protein, 5 aa, synthetic construct
LGHNA

SEQ ID NO: 3038 - protein, 6 aa, synthetic construct
TTYSPF

SEQ ID NO: 3039 - protein, 5 aa, synthetic construct
NSHNY

SEQ ID NO: 3040 - protein, 6 aa, synthetic construct
STYSPF

SEQ ID NO: 3041 - protein, 6 aa, synthetic construct
GKSSPN

SEQ ID NO: 3042 - protein, 6 aa, synthetic construct
YSATPY

SEQ ID NO: 3043 - protein, 6 aa, synthetic construct
NSQYPW

SEQ ID NO: 3044 - protein, 6 aa, synthetic construct
DSASQY

SEQ ID NO: 3045 - protein, 6 aa, synthetic construct
NSQYPW

SEQ ID NO: 3046 - protein, 6 aa, synthetic construct
NDMFDY

SEQ ID NO: 3047 - protein, 6 aa, synthetic construct
GFQATS

SEQ ID NO: 3048 - protein, 5 aa, synthetic construct
TYTTV

SEQ ID NO: 3049 - protein, 5 aa, synthetic construct
LGHNA

SEQ ID NO: 3050 - protein, 7 aa, synthetic construct
TRDSSYF

SEQ ID NO: 3051 - protein, 5 aa, synthetic construct
NSHNY

SEQ ID NO: 3052 - protein, 6 aa, synthetic construct
NSAFDY

SEQ ID NO: 3053 - protein, 5 aa, synthetic construct
FNHDT

SEQ ID NO: 3054 - protein, 6 aa, synthetic construct
YSGTPY

SEQ ID NO: 3055 - protein, 5 aa, synthetic construct
NNHDY

SEQ ID NO: 3056 - protein, 7 aa, synthetic construct
TQDSSYF

SEQ ID NO: 3057 - protein, 5 aa, synthetic construct
NNHDY

SEQ ID NO: 3058 - protein, 6 aa, synthetic construct
DSATAY

SEQ ID NO: 3059 - protein, 5 aa, synthetic construct
SNHLY

SEQ ID NO: 3060 - protein, 6 aa, synthetic construct
DGTSNN

SEQ ID NO: 3061 - protein, 6 aa, synthetic construct
NSQYPW

SEQ ID NO: 3062 - protein, 5 aa, synthetic construct
STATR

SEQ ID NO: 3063 - protein, 5 aa, synthetic construct
LGHNA

SEQ ID NO: 3064 - protein, 6 aa, synthetic construct
NSASQS

SEQ ID NO: 3065 - protein, 5 aa, synthetic construct
LGHNA

SEQ ID NO: 3066 - protein, 6 aa, synthetic construct
STYSPF

SEQ ID NO: 3067 - protein, 5 aa, synthetic construct
LGHDT

SEQ ID NO: 3068 - protein, 6 aa, synthetic construct
DSATAY

SEQ ID NO: 3069 - protein, 5 aa, synthetic construct
NNHNN

SEQ ID NO: 3070 - protein, 6 aa, synthetic construct
DPNSYY

SEQ ID NO: 3071 - protein, 5 aa, synthetic construct
NNHDY

SEQ ID NO: 3072 - protein, 7 aa, synthetic construct
TISGNEY

SEQ ID NO: 3073 - protein, 5 aa, synthetic construct
LGHNA

SEQ ID NO: 3074 - protein, 7 aa, synthetic construct
NIATSEY

SEQ ID NO: 3075 - protein, 5 aa, synthetic construct
LGHNA

SEQ ID NO: 3076 - protein, 6 aa, synthetic construct
DPNSYY

SEQ ID NO: 3077 - protein, 5 aa, synthetic construct
NNHNN

SEQ ID NO: 3078 - protein, 6 aa, synthetic construct
YGGSIY

SEQ ID NO: 3079 - protein, 5 aa, synthetic construct
NNHDY

SEQ ID NO: 3080 - protein, 5 aa, synthetic construct
TTMRA

SEQ ID NO: 3081 - protein, 5 aa, synthetic construct
LGHNA

SEQ ID NO: 3082 - protein, 6 aa, synthetic construct
ASGYPA

SEQ ID NO: 3083 - protein, 5 aa, synthetic construct
NNHNN

SEQ ID NO: 3084 - protein, 7 aa, synthetic construct
TTYLTIA

SEQ ID NO: 3085 - protein, 5 aa, synthetic construct
NNHNN

SEQ ID NO: 3086 - protein, 7 aa, synthetic construct
TQDSSYF

SEQ ID NO: 3087 - protein, 5 aa, synthetic construct
NNHNN

SEQ ID NO: 3088 - protein, 5 aa, synthetic construct
TTLNS

SEQ ID NO: 3089 - protein, 5 aa, synthetic construct
SNHLY

SEQ ID NO: 3090 - protein, 6 aa, synthetic construct
YSGTPY

SEQ ID NO: 3091 - protein, 5 aa, synthetic construct
SGHDT

SEQ ID NO: 3092 - protein, 6 aa, synthetic construct
NSAFDY

SEQ ID NO: 3093 - protein, 5 aa, synthetic construct
LGHDT

SEQ ID NO: 3094 - protein, 5 aa, synthetic construct
TSLNS

SEQ ID NO: 3095 - protein, 5 aa, synthetic construct
NNHNN

SEQ ID NO: 3096 - protein, 6 aa, synthetic construct
YFGTPY

SEQ ID NO: 3097 - protein, 5 aa, synthetic construct
NNHNN

SEQ ID NO: 3098 - protein, 8 aa, synthetic construct
ATSIAYPN

SEQ ID NO: 3099 - protein, 5 aa, synthetic construct
NNHNN

SEQ ID NO: 3100 - protein, 6 aa, synthetic construct
DRNSQY

SEQ ID NO: 3101 - protein, 5 aa, synthetic construct
NNHNN

SEQ ID NO: 3102 - protein, 8 aa, synthetic construct
ATSIAYPN

SEQ ID NO: 3103 - protein, 5 aa, synthetic construct
NNHNN

SEQ ID NO: 3104 - protein, 6 aa, synthetic construct
DSASQY

SEQ ID NO: 3105 - protein, 5 aa, synthetic construct
NSHNY

SEQ ID NO: 3106 - protein, 6 aa, synthetic construct
TTYSPF

SEQ ID NO: 3107 - protein, 6 aa, synthetic construct
GKSSPN

SEQ ID NO: 3108 - protein, 5 aa, synthetic construct
TSLNS

SEQ ID NO: 3109 - protein, 6 aa, synthetic construct
GKSSPN

SEQ ID NO: 3110 - protein, 6 aa, synthetic construct
DRNFQY

SEQ ID NO: 3111 - protein, 5 aa, synthetic construct
SNHLY

SEQ ID NO: 3112 - protein, 6 aa, synthetic construct
YSGTPY

SEQ ID NO: 3113 - protein, 6 aa, synthetic construct
GFQATS

SEQ ID NO: 3114 - protein, 6 aa, synthetic construct
YGGSIY

SEQ ID NO: 3115 - protein, 5 aa, synthetic construct
FNHDT

SEQ ID NO: 3116 - protein, 6 aa, synthetic construct
DTASSY

SEQ ID NO: 3117 - protein, 5 aa, synthetic construct
FNHDT

SEQ ID NO: 3118 - protein, 6 aa, synthetic construct
TTWYPT

SEQ ID NO: 3119 - protein, 5 aa, synthetic construct
FNHDT

SEQ ID NO: 3120 - protein, 6 aa, synthetic construct
DSATAY

SEQ ID NO: 3121 - protein, 5 aa, synthetic construct
FNHDT

SEQ ID NO: 3122 - protein, 5 aa, synthetic construct
TYTTV

SEQ ID NO: 3123 - protein, 5 aa, synthetic construct
LGHNA

SEQ ID NO: 3124 - protein, 5 aa, synthetic construct
TSLNS

SEQ ID NO: 3125 - protein, 5 aa, synthetic construct
LGHNA

SEQ ID NO: 3126 - protein, 5 aa, synthetic construct
TYTTV

SEQ ID NO: 3127 - protein, 5 aa, synthetic construct
SGHDT

SEQ ID NO: 3128 - protein, 6 aa, synthetic construct
DSASVY

SEQ ID NO: 3129 - protein, 5 aa, synthetic construct
SGHDT

SEQ ID NO: 3130 - protein, 6 aa, synthetic construct
DRNFQY

SEQ ID NO: 3131 - protein, 5 aa, synthetic construct
MSHET

SEQ ID NO: 3132 - protein, 6 aa, synthetic construct
DTASSY

SEQ ID NO: 3133 - protein, 5 aa, synthetic construct
LGHDT

SEQ ID NO: 3134 - protein, 5 aa, synthetic construct
IFTNQ

SEQ ID NO: 3135 - protein, 5 aa, synthetic construct
NNHNN

SEQ ID NO: 3136 - protein, 7 aa, synthetic construct
TQDSSYF

SEQ ID NO: 3137 - protein, 5 aa, synthetic construct
NNHNN

SEQ ID NO: 3138 - protein, 6 aa, synthetic construct
NSASNY

SEQ ID NO: 3139 - protein, 5 aa, synthetic construct
NNHNN

SEQ ID NO: 3140 - protein, 6 aa, synthetic construct
DSASNY

SEQ ID NO: 3141 - protein, 5 aa, synthetic construct
NNHNN

SEQ ID NO: 3142 - protein, 6 aa, synthetic construct
DSATAY

SEQ ID NO: 3143 - protein, 5 aa, synthetic construct
NNHNN

SEQ ID NO: 3144 - protein, 7 aa, synthetic construct
TRDSSYF

SEQ ID NO: 3145 - protein, 5 aa, synthetic construct
NSHNY

SEQ ID NO: 3146 - protein, 6 aa, synthetic construct
NSASNY

SEQ ID NO: 3147 - protein, 5 aa, synthetic construct
NNHDY

SEQ ID NO: 3148 - protein, 8 aa, synthetic construct
ATSIAYPN

SEQ ID NO: 3149 - protein, 5 aa, synthetic construct
NNHDY

SEQ ID NO: 3150 - protein, 6 aa, synthetic construct
NSASNY

SEQ ID NO: 3151 - protein, 6 aa, synthetic construct
GKSSPN

SEQ ID NO: 3152 - protein, 6 aa, synthetic construct
DRNFQY

SEQ ID NO: 3153 - protein, 6 aa, synthetic construct
GFQATS

SEQ ID NO: 3154 - protein, 7 aa, synthetic construct
TQDSSYF

SEQ ID NO: 3155 - protein, 5 aa, synthetic construct
FNHDT

SEQ ID NO: 3156 - protein, 5 aa, synthetic construct
TSITA

SEQ ID NO: 3157 - protein, 5 aa, synthetic construct
FNHDT

SEQ ID NO: 3158 - protein, 5 aa, synthetic construct
TSITA

SEQ ID NO: 3159 - protein, 6 aa, synthetic construct
NSQYPW

SEQ ID NO: 3160 - protein, 6 aa, synthetic construct
YFGTPY

SEQ ID NO: 3161 - protein, 5 aa, synthetic construct
LGHNA

SEQ ID NO: 3162 - protein, 6 aa, synthetic construct
ASGYPT

SEQ ID NO: 3163 - protein, 5 aa, synthetic construct
SGHDT

SEQ ID NO: 3164 - protein, 5 aa, synthetic construct
ISTNQ

SEQ ID NO: 3165 - protein, 5 aa, synthetic construct
SGHDT

SEQ ID NO: 3166 - protein, 5 aa, synthetic construct
TTMRA

SEQ ID NO: 3167 - protein, 5 aa, synthetic construct
LGHNA

SEQ ID NO: 3168 - protein, 5 aa, synthetic construct
ISTNQ

SEQ ID NO: 3169 - protein, 5 aa, synthetic construct
LGHDT

SEQ ID NO: 3170 - protein, 5 aa, synthetic construct
TSLNS

SEQ ID NO: 3171 - protein, 5 aa, synthetic construct
LGHDT

SEQ ID NO: 3172 - protein, 5 aa, synthetic construct
TTTRS

SEQ ID NO: 3173 - protein, 5 aa, synthetic construct
NNHNN

SEQ ID NO: 3174 - protein, 7 aa, synthetic construct
TQDSSYF

SEQ ID NO: 3175 - protein, 5 aa, synthetic construct
NNHNN

SEQ ID NO: 3176 - protein, 7 aa, synthetic construct
TIYSNPF

SEQ ID NO: 3177 - protein, 5 aa, synthetic construct
NNHNN

SEQ ID NO: 3178 - protein, 6 aa, synthetic construct
TSGFNG

SEQ ID NO: 3179 - protein, 5 aa, synthetic construct
NSHNY

SEQ ID NO: 3180 - protein, 8 aa, synthetic construct
ATSIAYPN

SEQ ID NO: 3181 - protein, 5 aa, synthetic construct
NSHNY

SEQ ID NO: 3182 - protein, 6 aa, synthetic construct
DSASQY

SEQ ID NO: 3183 - protein, 5 aa, synthetic construct
NNHDY

SEQ ID NO: 3184 - protein, 6 aa, synthetic construct
YSATPY

SEQ ID NO: 3185 - protein, 5 aa, synthetic construct
NNHDY

SEQ ID NO: 3186 - protein, 8 aa, synthetic construct
TTSIAYPN

SEQ ID NO: 3187 - protein, 6 aa, synthetic construct
GKSSPN

SEQ ID NO: 3188 - protein, 7 aa, synthetic construct
TRDSSYF

SEQ ID NO: 3189 - protein, 6 aa, synthetic construct
GFQATS

SEQ ID NO: 3190 - protein, 6 aa, synthetic construct
ASGYPA

SEQ ID NO: 3191 - protein, 5 aa, synthetic construct
FNHDT

SEQ ID NO: 3192 - protein, 6 aa, synthetic construct
DPNSYY

SEQ ID NO: 3193 - protein, 6 aa, synthetic construct
NSQYPW

SEQ ID NO: 3194 - protein, 6 aa, synthetic construct
NSAFDY

SEQ ID NO: 3195 - protein, 6 aa, synthetic construct
NSQYPW

SEQ ID NO: 3196 - protein, 8 aa, synthetic construct
TTSIAYPN

SEQ ID NO: 3197 - protein, 6 aa, synthetic construct
NSQYPW

SEQ ID NO: 3198 - protein, 7 aa, synthetic construct
TRDSSYF

SEQ ID NO: 3199 - protein, 6 aa, synthetic construct
NSQYPW

SEQ ID NO: 3200 - protein, 6 aa, synthetic construct
DRNVDY

SEQ ID NO: 3201 - protein, 5 aa, synthetic construct
LGHNA

SEQ ID NO: 3202 - protein, 5 aa, synthetic construct
IFTNQ

SEQ ID NO: 3203 - protein, 5 aa, synthetic construct
LGHNA

SEQ ID NO: 3204 - protein, 8 aa, synthetic construct
ATSIAYPN

SEQ ID NO: 3205 - protein, 5 aa, synthetic construct
LGHNA

SEQ ID NO: 3206 - protein, 6 aa, synthetic construct
DSTFNY

SEQ ID NO: 3207 - protein, 5 aa, synthetic construct
SGHSA

SEQ ID NO: 3208 - protein, 6 aa, synthetic construct
DSTFDY

SEQ ID NO: 3209 - protein, 5 aa, synthetic construct
SGHLS

SEQ ID NO: 3210 - protein, 6 aa, synthetic construct
YSATPY

SEQ ID NO: 3211 - protein, 5 aa, synthetic construct
SGHDT

SEQ ID NO: 3212 - protein, 6 aa, synthetic construct
TTYSPF

SEQ ID NO: 3213 - protein, 5 aa, synthetic construct
SGHDT

SEQ ID NO: 3214 - protein, 8 aa, synthetic construct
ATSIAYPN

SEQ ID NO: 3215 - protein, 5 aa, synthetic construct
SGHDT

SEQ ID NO: 3216 - protein, 6 aa, synthetic construct
NDMFDY

SEQ ID NO: 3217 - protein, 5 aa, synthetic construct
LGHNA

SEQ ID NO: 3218 - protein, 6 aa, synthetic construct
YFGTPY

SEQ ID NO: 3219 - protein, 5 aa, synthetic construct
LGHNA

SEQ ID NO: 3220 - protein, 6 aa, synthetic construct
TTGYPT

SEQ ID NO: 3221 - protein, 5 aa, synthetic construct
LGHNA

SEQ ID NO: 3222 - protein, 6 aa, synthetic construct
TTWYPT

SEQ ID NO: 3223 - protein, 5 aa, synthetic construct
LGHDT

SEQ ID NO: 3224 - protein, 5 aa, synthetic construct
TSLNS

SEQ ID NO: 3225 - protein, 5 aa, synthetic construct
LGHDT

SEQ ID NO: 3226 - protein, 5 aa, synthetic construct
IATTT

SEQ ID NO: 3227 - protein, 5 aa, synthetic construct
LGHDT

SEQ ID NO: 3228 - protein, 7 aa, synthetic construct
TRDSSYF

SEQ ID NO: 3229 - protein, 5 aa, synthetic construct
NNHNN

SEQ ID NO: 3230 - protein, 6 aa, synthetic construct
DSASQY

SEQ ID NO: 3231 - protein, 5 aa, synthetic construct
NNHNN

SEQ ID NO: 3232 - protein, 6 aa, synthetic construct
TAYSTF

SEQ ID NO: 3233 - protein, 5 aa, synthetic construct
NNHNN

SEQ ID NO: 3234 - protein, 5 aa, synthetic construct
STATR

SEQ ID NO: 3235 - protein, 5 aa, synthetic construct
NNHNN

SEQ ID NO: 3236 - protein, 6 aa, synthetic construct
DPNSYY

SEQ ID NO: 3237 - protein, 5 aa, synthetic construct
NNHNN

SEQ ID NO: 3238 - protein, 7 aa, synthetic construct
TQDSSYF

SEQ ID NO: 3239 - protein, 5 aa, synthetic construct
NSHNY

SEQ ID NO: 3240 - protein, 6 aa, synthetic construct
DPNSYY

SEQ ID NO: 3241 - protein, 5 aa, synthetic construct
NSHNY

SEQ ID NO: 3242 - protein, 6 aa, synthetic construct
DSATAY

SEQ ID NO: 3243 - protein, 5 aa, synthetic construct
NSHNY

SEQ ID NO: 3244 - protein, 7 aa, synthetic construct
TRDSSYF

SEQ ID NO: 3245 - protein, 5 aa, synthetic construct
NSHNY

SEQ ID NO: 3246 - protein, 6 aa, synthetic construct
DPNSYY

SEQ ID NO: 3247 - protein, 5 aa, synthetic construct
NSHNY

SEQ ID NO: 3248 - protein, 6 aa, synthetic construct
YSAAPY

SEQ ID NO: 3249 - protein, 5 aa, synthetic construct
NSHNY

SEQ ID NO: 3250 - protein, 6 aa, synthetic construct
DSTFDY

SEQ ID NO: 3251 - protein, 5 aa, synthetic construct
NSHNY

SEQ ID NO: 3252 - protein, 6 aa, synthetic construct
STYSPF

SEQ ID NO: 3253 - protein, 5 aa, synthetic construct
NSHNY

SEQ ID NO: 3254 - protein, 5 aa, synthetic construct
TTMRA

SEQ ID NO: 3255 - protein, 5 aa, synthetic construct
NNHDY

SEQ ID NO: 3256 - protein, 5 aa, synthetic construct
TTMKS

SEQ ID NO: 3257 - protein, 5 aa, synthetic construct
NNHDY

SEQ ID NO: 3258 - protein, 7 aa, synthetic construct
TQDSSYF

SEQ ID NO: 3259 - protein, 5 aa, synthetic construct
NNHDY

SEQ ID NO: 3260 - protein, 6 aa, synthetic construct
YSGTPY

SEQ ID NO: 3261 - protein, 5 aa, synthetic construct
NNHDY

SEQ ID NO: 3262 - protein, 6 aa, synthetic construct
DSATAY

SEQ ID NO: 3263 - protein, 5 aa, synthetic construct
NNHDY

SEQ ID NO: 3264 - protein, 6 aa, synthetic construct
NSAFDY

SEQ ID NO: 3265 - protein, 5 aa, synthetic construct
NNHDY

SEQ ID NO: 3266 - protein, 5 aa, synthetic construct
TTMKS

SEQ ID NO: 3267 - protein, 5 aa, synthetic construct
MNHDT

SEQ ID NO: 3268 - protein, 7 aa, synthetic construct
TRDSSYF

SEQ ID NO: 3269 - protein, 5 aa, synthetic construct
MNHDT

SEQ ID NO: 3270 - protein, 7 aa, synthetic construct
TQDSSYF

SEQ ID NO: 3271 - protein, 6 aa, synthetic construct
GKSSPN

SEQ ID NO: 3272 - protein, 6 aa, synthetic construct
YSATPY

SEQ ID NO: 3273 - protein, 6 aa, synthetic construct
GKSSPN

SEQ ID NO: 3274 - protein, 7 aa, synthetic construct
NIATSEY

SEQ ID NO: 3275 - protein, 5 aa, synthetic construct
SNHLY

SEQ ID NO: 3276 - protein, 6 aa, synthetic construct
NSAFDY

SEQ ID NO: 3277 - protein, 6 aa, synthetic construct
GFQATS

SEQ ID NO: 3278 - protein, 7 aa, synthetic construct
TSEYFYR

SEQ ID NO: 3279 - protein, 6 aa, synthetic construct
GFQATS

SEQ ID NO: 3280 - protein, 6 aa, synthetic construct
DTASSY

SEQ ID NO: 3281 - protein, 5 aa, synthetic construct
FNHDT

SEQ ID NO: 3282 - protein, 5 aa, synthetic construct
IATTT

SEQ ID NO: 3283 - protein, 5 aa, synthetic construct
FNHDT

SEQ ID NO: 3284 - protein, 6 aa, synthetic construct
DPNSYY

SEQ ID NO: 3285 - protein, 6 aa, synthetic construct
NSQYPW

SEQ ID NO: 3286 - protein, 7 aa, synthetic construct
TSEYFYR

SEQ ID NO: 3287 - protein, 6 aa, synthetic construct
NSQYPW

SEQ ID NO: 3288 - protein, 6 aa, synthetic construct
YSATPY

SEQ ID NO: 3289 - protein, 6 aa, synthetic construct
NSQYPW

SEQ ID NO: 3290 - protein, 5 aa, synthetic construct
STATQ

SEQ ID NO: 3291 - protein, 5 aa, synthetic construct
LGHNA

SEQ ID NO: 3292 - protein, 6 aa, synthetic construct
DTASSY

SEQ ID NO: 3293 - protein, 5 aa, synthetic construct
LGHNA

SEQ ID NO: 3294 - protein, 6 aa, synthetic construct
TTYSPF

SEQ ID NO: 3295 - protein, 5 aa, synthetic construct
LGHNA

SEQ ID NO: 3296 - protein, 8 aa, synthetic construct
TTSIAYPN

SEQ ID NO: 3297 - protein, 5 aa, synthetic construct
LGHNA

SEQ ID NO: 3298 - protein, 6 aa, synthetic construct
TTYSPF

SEQ ID NO: 3299 - protein, 5 aa, synthetic construct
LGHNA

SEQ ID NO: 3300 - protein, 6 aa, synthetic construct
TKQYPT

SEQ ID NO: 3301 - protein, 5 aa, synthetic construct
LGHNA

SEQ ID NO: 3302 - protein, 6 aa, synthetic construct
ASGYPA

SEQ ID NO: 3303 - protein, 5 aa, synthetic construct
SGHSA

SEQ ID NO: 3304 - protein, 6 aa, synthetic construct
YGGSIY

SEQ ID NO: 3305 - protein, 5 aa, synthetic construct
SGHSA

SEQ ID NO: 3306 - protein, 6 aa, synthetic construct
TSGFNG

SEQ ID NO: 3307 - protein, 5 aa, synthetic construct
SGHSA

SEQ ID NO: 3308 - protein, 6 aa, synthetic construct
YFGTPY

SEQ ID NO: 3309 - protein, 5 aa, synthetic construct
SGHDT

SEQ ID NO: 3310 - protein, 6 aa, synthetic construct
DTASSY

SEQ ID NO: 3311 - protein, 5 aa, synthetic construct
SGHDT

SEQ ID NO: 3312 - protein, 7 aa, synthetic construct
TISGNEY

SEQ ID NO: 3313 - protein, 5 aa, synthetic construct
SGHDT

SEQ ID NO: 3314 - protein, 6 aa, synthetic construct
DSASQY

SEQ ID NO: 3315 - protein, 5 aa, synthetic construct
SGHDT

SEQ ID NO: 3316 - protein, 6 aa, synthetic construct
DTASSY

SEQ ID NO: 3317 - protein, 5 aa, synthetic construct
MSHET

SEQ ID NO: 3318 - protein, 7 aa, synthetic construct
TSQVLYH

SEQ ID NO: 3319 - protein, 5 aa, synthetic construct
LGHNA

SEQ ID NO: 3320 - protein, 6 aa, synthetic construct
TTGYPT

SEQ ID NO: 3321 - protein, 5 aa, synthetic construct
LGHNA

SEQ ID NO: 3322 - protein, 5 aa, synthetic construct
STATQ

SEQ ID NO: 3323 - protein, 5 aa, synthetic construct
LGHNA

SEQ ID NO: 3324 - protein, 6 aa, synthetic construct
YSATPY

SEQ ID NO: 3325 - protein, 5 aa, synthetic construct
LGHNA

SEQ ID NO: 3326 - protein, 5 aa, synthetic construct
STATR

SEQ ID NO: 3327 - protein, 5 aa, synthetic construct
LGHNA

SEQ ID NO: 3328 - protein, 5 aa, synthetic construct
TSLNS

SEQ ID NO: 3329 - protein, 5 aa, synthetic construct
LGHNA

SEQ ID NO: 3330 - protein, 8 aa, synthetic construct
ATSIGYPN

SEQ ID NO: 3331 - protein, 5 aa, synthetic construct
LGHDT

SEQ ID NO: 3332 - protein, 5 aa, synthetic construct
STATQ

SEQ ID NO: 3333 - protein, 5 aa, synthetic construct
LGHDT

SEQ ID NO: 3334 - protein, 6 aa, synthetic construct
DTASSY

SEQ ID NO: 3335 - protein, 5 aa, synthetic construct
LGHDT

SEQ ID NO: 3336 - protein, 6 aa, synthetic construct
DPNSYY

SEQ ID NO: 3337 - protein, 5 aa, synthetic construct
LGHDT

SEQ ID NO: 3338 - protein, 6 aa, synthetic construct
NSAFDY

SEQ ID NO: 3339 - protein, 5 aa, synthetic construct
LGHDT

SEQ ID NO: 3340 - protein, 5 aa, synthetic construct
TSLNS

SEQ ID NO: 3341 - protein, 5 aa, synthetic construct
LGHDT

SEQ ID NO: 3342 - protein, 6 aa, synthetic construct
DSTFNY

SEQ ID NO: 3343 - protein, 5 aa, synthetic construct
LGHDT

SEQ ID NO: 3344 - protein, 6 aa, synthetic construct
DSASQY

SEQ ID NO: 3345 - protein, 5 aa, synthetic construct
LGHDT

SEQ ID NO: 3346 - protein, 6 aa, synthetic construct
NSASNY

SEQ ID NO: 3347 - protein, 5 aa, synthetic construct
LGHDT

SEQ ID NO: 3348 - protein, 7 aa, synthetic construct
TRDSSYF

SEQ ID NO: 3349 - protein, 5 aa, synthetic construct
NNHNN

SEQ ID NO: 3350 - protein, 6 aa, synthetic construct
SSVTPY

SEQ ID NO: 3351 - protein, 5 aa, synthetic construct
NNHNN

SEQ ID NO: 3352 - protein, 6 aa, synthetic construct
YSATPY

SEQ ID NO: 3353 - protein, 5 aa, synthetic construct
NNHNN

SEQ ID NO: 3354 - protein, 7 aa, synthetic construct
TRDSSYF

SEQ ID NO: 3355 - protein, 5 aa, synthetic construct
NNHNN

SEQ ID NO: 3356 - protein, 7 aa, synthetic construct
TRDSSYF

SEQ ID NO: 3357 - protein, 5 aa, synthetic construct
NNHNN

SEQ ID NO: 3358 - protein, 5 aa, synthetic construct
TSLNS

SEQ ID NO: 3359 - protein, 5 aa, synthetic construct
NNHNN

SEQ ID NO: 3360 - protein, 6 aa, synthetic construct
DTASSY

SEQ ID NO: 3361 - protein, 5 aa, synthetic construct
NNHNN

SEQ ID NO: 3362 - protein, 7 aa, synthetic construct
TISGNEY

SEQ ID NO: 3363 - protein, 5 aa, synthetic construct
NNHNN

SEQ ID NO: 3364 - protein, 5 aa, synthetic construct
STATR

SEQ ID NO: 3365 - protein, 5 aa, synthetic construct
NSHNY

SEQ ID NO: 3366 - protein, 6 aa, synthetic construct
YSAAPY

SEQ ID NO: 3367 - protein, 5 aa, synthetic construct
NSHNY

SEQ ID NO: 3368 - protein, 7 aa, synthetic construct
TQDSSYF

SEQ ID NO: 3369 - protein, 5 aa, synthetic construct
NSHNY

SEQ ID NO: 3370 - protein, 6 aa, synthetic construct
DSASVY

SEQ ID NO: 3371 - protein, 5 aa, synthetic construct
NSHNY

SEQ ID NO: 3372 - protein, 5 aa, synthetic construct
IAATT

SEQ ID NO: 3373 - protein, 5 aa, synthetic construct
NSHNY

SEQ ID NO: 3374 - protein, 6 aa, synthetic construct
DSTFNY

SEQ ID NO: 3375 - protein, 5 aa, synthetic construct
NSHNY

SEQ ID NO: 3376 - protein, 6 aa, synthetic construct
DPNSYY

SEQ ID NO: 3377 - protein, 5 aa, synthetic construct
NSHNY

SEQ ID NO: 3378 - protein, 6 aa, synthetic construct
TTWYPT

SEQ ID NO: 3379 - protein, 5 aa, synthetic construct
NNHDY

SEQ ID NO: 3380 - protein, 6 aa, synthetic construct
TSGFNG

SEQ ID NO: 3381 - protein, 5 aa, synthetic construct
NNHDY

SEQ ID NO: 3382 - protein, 6 aa, synthetic construct
DSASQY

SEQ ID NO: 3383 - protein, 5 aa, synthetic construct
NNHDY

SEQ ID NO: 3384 - protein, 7 aa, synthetic construct
TRDSSYF

SEQ ID NO: 3385 - protein, 5 aa, synthetic construct
NNHDY

SEQ ID NO: 3386 - protein, 6 aa, synthetic construct
DPNSYY

SEQ ID NO: 3387 - protein, 5 aa, synthetic construct
NNHDY

SEQ ID NO: 3388 - protein, 6 aa, synthetic construct
YSATPY

SEQ ID NO: 3389 - protein, 5 aa, synthetic construct
NNHDY

SEQ ID NO: 3390 - protein, 6 aa, synthetic construct
DSTFNY

SEQ ID NO: 3391 - protein, 5 aa, synthetic construct
NNHDY

SEQ ID NO: 3392 - protein, 6 aa, synthetic construct
DSASQY

SEQ ID NO: 3393 - protein, 5 aa, synthetic construct
NNHDY

SEQ ID NO: 3394 - protein, 6 aa, synthetic construct
TSGFNG

SEQ ID NO: 3395 - protein, 5 aa, synthetic construct
MNHDT

SEQ ID NO: 3396 - protein, 6 aa, synthetic construct
NDMFDY

SEQ ID NO: 3397 - protein, 5 aa, synthetic construct
MNHDT

SEQ ID NO: 3398 - protein, 6 aa, synthetic construct
DSATAY

SEQ ID NO: 3399 - protein, 6 aa, synthetic construct
GKSSPN

SEQ ID NO: 3400 - protein, 6 aa, synthetic construct
DSTFNY

SEQ ID NO: 3401 - protein, 6 aa, synthetic construct
GKSSPN

SEQ ID NO: 3402 - protein, 6 aa, synthetic construct
KQYPTL

SEQ ID NO: 3403 - protein, 6 aa, synthetic construct
GKSSPN

SEQ ID NO: 3404 - protein, 7 aa, synthetic construct
TSQVLYH

SEQ ID NO: 3405 - protein, 6 aa, synthetic construct
GKSSPN

SEQ ID NO: 3406 - protein, 6 aa, synthetic construct
DTASSY

SEQ ID NO: 3407 - protein, 6 aa, synthetic construct
GFQATS

SEQ ID NO: 3408 - protein, 6 aa, synthetic construct
DPNSYY

SEQ ID NO: 3409 - protein, 6 aa, synthetic construct
GFQATS

SEQ ID NO: 3410 - protein, 6 aa, synthetic construct
NSASNY

SEQ ID NO: 3411 - protein, 5 aa, synthetic construct
FNHDT

SEQ ID NO: 3412 - protein, 6 aa, synthetic construct
ASGYPA

SEQ ID NO: 3413 - protein, 5 aa, synthetic construct
FNHDT

SEQ ID NO: 3414 - protein, 6 aa, synthetic construct
DTASSY

SEQ ID NO: 3415 - protein, 5 aa, synthetic construct
FNHDT

SEQ ID NO: 3416 - protein, 5 aa, synthetic construct
TTMRA

SEQ ID NO: 3417 - protein, 5 aa, synthetic construct
FNHDT

SEQ ID NO: 3418 - protein, 6 aa, synthetic construct
DSTFDY

SEQ ID NO: 3419 - protein, 5 aa, synthetic construct
FNHDT

SEQ ID NO: 3420 - protein, 6 aa, synthetic construct
ASGYPT

SEQ ID NO: 3421 - protein, 5 aa, synthetic construct
FNHDT

SEQ ID NO: 3422 - protein, 6 aa, synthetic construct
DPNSYY

SEQ ID NO: 3423 - protein, 5 aa, synthetic construct
FNHDT

SEQ ID NO: 3424 - protein, 6 aa, synthetic construct
TTGYPT

SEQ ID NO: 3425 - protein, 5 aa, synthetic construct
FNHDT

SEQ ID NO: 3426 - protein, 8 aa, synthetic construct
ATSIAYPN

SEQ ID NO: 3427 - protein, 5 aa, synthetic construct
FNHDT

SEQ ID NO: 3428 - protein, 6 aa, synthetic construct
DPNSYY

SEQ ID NO: 3429 - protein, 5 aa, synthetic construct
FNHDT

SEQ ID NO: 3430 - protein, 6 aa, synthetic construct
YSATPY

SEQ ID NO: 3431 - protein, 5 aa, synthetic construct
FNHDT

SEQ ID NO: 3432 - protein, 6 aa, synthetic construct
TAYSTF

SEQ ID NO: 3433 - protein, 5 aa, synthetic construct
FNHDT

SEQ ID NO: 3434 - protein, 6 aa, synthetic construct
YSGTPY

SEQ ID NO: 3435 - protein, 5 aa, synthetic construct
FNHDT

SEQ ID NO: 3436 - protein, 6 aa, synthetic construct
DSTFNY

SEQ ID NO: 3437 - protein, 6 aa, synthetic construct
NSQYPW

SEQ ID NO: 3438 - protein, 6 aa, synthetic construct
SSVTPY

SEQ ID NO: 3439 - protein, 6 aa, synthetic construct
NSQYPW

SEQ ID NO: 3440 - protein, 7 aa, synthetic construct
TQDSSYF

SEQ ID NO: 3441 - protein, 6 aa, synthetic construct
NSQYPW

SEQ ID NO: 3442 - protein, 6 aa, synthetic construct
DRNFQY

SEQ ID NO: 3443 - protein, 6 aa, synthetic construct
NSQYPW

SEQ ID NO: 3444 - protein, 5 aa, synthetic construct
IAATT

SEQ ID NO: 3445 - protein, 6 aa, synthetic construct
NSQYPW

SEQ ID NO: 3446 - protein, 8 aa, synthetic construct
ATSIAYPN

SEQ ID NO: 3447 - protein, 6 aa, synthetic construct
NSQYPW

SEQ ID NO: 3448 - protein, 6 aa, synthetic construct
DSASQY

SEQ ID NO: 3449 - protein, 6 aa, synthetic construct
NSQYPW

SEQ ID NO: 3450 - protein, 6 aa, synthetic construct
YSGTPY

SEQ ID NO: 3451 - protein, 5 aa, synthetic construct
LGHNA

SEQ ID NO: 3452 - protein, 7 aa, synthetic construct
TISGNEY

SEQ ID NO: 3453 - protein, 5 aa, synthetic construct
LGHNA

SEQ ID NO: 3454 - protein, 6 aa, synthetic construct
YSGTPY

SEQ ID NO: 3455 - protein, 5 aa, synthetic construct
LGHNA

SEQ ID NO: 3456 - protein, 6 aa, synthetic construct
DPNSYY

SEQ ID NO: 3457 - protein, 5 aa, synthetic construct
LGHNA

SEQ ID NO: 3458 - protein, 8 aa, synthetic construct
TTSIAYPN

SEQ ID NO: 3459 - protein, 5 aa, synthetic construct
LGHNA

SEQ ID NO: 3460 - protein, 8 aa, synthetic construct
ATSIAYPN

SEQ ID NO: 3461 - protein, 5 aa, synthetic construct
LGHNA

SEQ ID NO: 3462 - protein, 5 aa, synthetic construct
TTMRA

SEQ ID NO: 3463 - protein, 5 aa, synthetic construct
LGHNA

SEQ ID NO: 3464 - protein, 6 aa, synthetic construct
TSGFNG

SEQ ID NO: 3465 - protein, 5 aa, synthetic construct
LGHNA

SEQ ID NO: 3466 - protein, 6 aa, synthetic construct
DSASQY

SEQ ID NO: 3467 - protein, 5 aa, synthetic construct
LGHNA

SEQ ID NO: 3468 - protein, 8 aa, synthetic construct
ATSIAYPN

SEQ ID NO: 3469 - protein, 5 aa, synthetic construct
LGHNA

SEQ ID NO: 3470 - protein, 6 aa, synthetic construct
YGGSIY

SEQ ID NO: 3471 - protein, 5 aa, synthetic construct
LGHNA

SEQ ID NO: 3472 - protein, 6 aa, synthetic construct
NDMFDY

SEQ ID NO: 3473 - protein, 5 aa, synthetic construct
LGHNA

SEQ ID NO: 3474 - protein, 7 aa, synthetic construct
TQDSSYF

SEQ ID NO: 3475 - protein, 5 aa, synthetic construct
LGHNA

SEQ ID NO: 3476 - protein, 8 aa, synthetic construct
ATSIAYPN

SEQ ID NO: 3477 - protein, 5 aa, synthetic construct
LGHNA

SEQ ID NO: 3478 - protein, 6 aa, synthetic construct
TTTYPT

SEQ ID NO: 3479 - protein, 5 aa, synthetic construct
LGHNA

SEQ ID NO: 3480 - protein, 5 aa, synthetic construct
STATQ

SEQ ID NO: 3481 - protein, 5 aa, synthetic construct
LGHNA

SEQ ID NO: 3482 - protein, 6 aa, synthetic construct
SSVTPY

SEQ ID NO: 3483 - protein, 5 aa, synthetic construct
LGHNA

SEQ ID NO: 3484 - protein, 8 aa, synthetic construct
ATSIAYPN

SEQ ID NO: 3485 - protein, 5 aa, synthetic construct
LGHNA

SEQ ID NO: 3486 - protein, 6 aa, synthetic construct
ASGYPA

SEQ ID NO: 3487 - protein, 5 aa, synthetic construct
LGHNA

SEQ ID NO: 3488 - protein, 6 aa, synthetic construct
TSGFNG

SEQ ID NO: 3489 - protein, 5 aa, synthetic construct
LGHNA

SEQ ID NO: 3490 - protein, 7 aa, synthetic construct
TQDSSYF

SEQ ID NO: 3491 - protein, 5 aa, synthetic construct
LGHNA

SEQ ID NO: 3492 - protein, 6 aa, synthetic construct
DRNFQY

SEQ ID NO: 3493 - protein, 5 aa, synthetic construct
LGHNA

SEQ ID NO: 3494 - protein, 6 aa, synthetic construct
DSASQY

SEQ ID NO: 3495 - protein, 5 aa, synthetic construct
LGHNA

SEQ ID NO: 3496 - protein, 5 aa, synthetic construct
TSLNS

SEQ ID NO: 3497 - protein, 5 aa, synthetic construct
LGHNA

SEQ ID NO: 3498 - protein, 6 aa, synthetic construct
VTPDNH

SEQ ID NO: 3499 - protein, 5 aa, synthetic construct
LGHNA

SEQ ID NO: 3500 - protein, 6 aa, synthetic construct
DSTFNY

SEQ ID NO: 3501 - protein, 5 aa, synthetic construct
LGHNA

SEQ ID NO: 3502 - protein, 8 aa, synthetic construct
ATSIAYPN

SEQ ID NO: 3503 - protein, 5 aa, synthetic construct
LGHNA

SEQ ID NO: 3504 - protein, 6 aa, synthetic construct
STYSPF

SEQ ID NO: 3505 - protein, 5 aa, synthetic construct
LGHNA

SEQ ID NO: 3506 - protein, 6 aa, synthetic construct
DPNSYY

SEQ ID NO: 3507 - protein, 5 aa, synthetic construct
LGHNA

SEQ ID NO: 3508 - protein, 7 aa, synthetic construct
NIATSEY

SEQ ID NO: 3509 - protein, 5 aa, synthetic construct
LGHNA

SEQ ID NO: 3510 - protein, 6 aa, synthetic construct
YSAAPY

SEQ ID NO: 3511 - protein, 5 aa, synthetic construct
LGHNA

SEQ ID NO: 3512 - protein, 6 aa, synthetic construct
DRNVDY

SEQ ID NO: 3513 - protein, 5 aa, synthetic construct
LGHNA

SEQ ID NO: 3514 - protein, 5 aa, synthetic construct
IFTNQ

SEQ ID NO: 3515 - protein, 5 aa, synthetic construct
LGHNA

SEQ ID NO: 3516 - protein, 6 aa, synthetic construct
YSGTPY

SEQ ID NO: 3517 - protein, 5 aa, synthetic construct
LGHNA

SEQ ID NO: 3518 - protein, 5 aa, synthetic construct
IAATT

SEQ ID NO: 3519 - protein, 5 aa, synthetic construct
LGHNA

SEQ ID NO: 3520 - protein, 7 aa, synthetic construct
TRDSSYF

SEQ ID NO: 3521 - protein, 5 aa, synthetic construct
SGHSA

SEQ ID NO: 3522 - protein, 6 aa, synthetic construct
YFGTPY

SEQ ID NO: 3523 - protein, 5 aa, synthetic construct
SGHSA

SEQ ID NO: 3524 - protein, 5 aa, synthetic construct
TSITA

SEQ ID NO: 3525 - protein, 5 aa, synthetic construct
SGHSA

SEQ ID NO: 3526 - protein, 5 aa, synthetic construct
TSITA

SEQ ID NO: 3527 - protein, 5 aa, synthetic construct
SGHSA

SEQ ID NO: 3528 - protein, 6 aa, synthetic construct
YSGTPY

SEQ ID NO: 3529 - protein, 5 aa, synthetic construct
SGHSA

SEQ ID NO: 3530 - protein, 6 aa, synthetic construct
DSASQY

SEQ ID NO: 3531 - protein, 5 aa, synthetic construct
SGHSA

SEQ ID NO: 3532 - protein, 5 aa, synthetic construct
TTMRS

SEQ ID NO: 3533 - protein, 5 aa, synthetic construct
SGHLS

SEQ ID NO: 3534 - protein, 5 aa, synthetic construct
TSLNS

SEQ ID NO: 3535 - protein, 5 aa, synthetic construct
SQVVS

SEQ ID NO: 3536 - protein, 6 aa, synthetic construct
YSGTPY

SEQ ID NO: 3537 - protein, 5 aa, synthetic construct
SQVVS

SEQ ID NO: 3538 - protein, 6 aa, synthetic construct
NSASNY

SEQ ID NO: 3539 - protein, 5 aa, synthetic construct
SQVVS

SEQ ID NO: 3540 - protein, 6 aa, synthetic construct
DSASQY

SEQ ID NO: 3541 - protein, 5 aa, synthetic construct
SGHDT

SEQ ID NO: 3542 - protein, 6 aa, synthetic construct
DRNFQY

SEQ ID NO: 3543 - protein, 5 aa, synthetic construct
SGHDT

SEQ ID NO: 3544 - protein, 7 aa, synthetic construct
TRDSSYF

SEQ ID NO: 3545 - protein, 5 aa, synthetic construct
SGHDT

SEQ ID NO: 3546 - protein, 6 aa, synthetic construct
ASGYPA

SEQ ID NO: 3547 - protein, 5 aa, synthetic construct
SGHDT

SEQ ID NO: 3548 - protein, 6 aa, synthetic construct
TKQYPT

SEQ ID NO: 3549 - protein, 5 aa, synthetic construct
SGHDT

SEQ ID NO: 3550 - protein, 6 aa, synthetic construct
YGGSIY

SEQ ID NO: 3551 - protein, 5 aa, synthetic construct
SGHDT

SEQ ID NO: 3552 - protein, 6 aa, synthetic construct
NDMFDY

SEQ ID NO: 3553 - protein, 5 aa, synthetic construct
SGHDT

SEQ ID NO: 3554 - protein, 6 aa, synthetic construct
ASGYPA

SEQ ID NO: 3555 - protein, 5 aa, synthetic construct
SGHDT

SEQ ID NO: 3556 - protein, 6 aa, synthetic construct
TKQYPT

SEQ ID NO: 3557 - protein, 5 aa, synthetic construct
SGHDT

SEQ ID NO: 3558 - protein, 6 aa, synthetic construct
YSATPY

SEQ ID NO: 3559 - protein, 5 aa, synthetic construct
SGHDT

SEQ ID NO: 3560 - protein, 6 aa, synthetic construct
YSATPY

SEQ ID NO: 3561 - protein, 5 aa, synthetic construct
SGHDT

SEQ ID NO: 3562 - protein, 6 aa, synthetic construct
NDMFDY

SEQ ID NO: 3563 - protein, 5 aa, synthetic construct
SGHDT

SEQ ID NO: 3564 - protein, 6 aa, synthetic construct
DRNVDY

SEQ ID NO: 3565 - protein, 5 aa, synthetic construct
SGHDT

SEQ ID NO: 3566 - protein, 6 aa, synthetic construct
DRNFQY

SEQ ID NO: 3567 - protein, 5 aa, synthetic construct
SGHDT

SEQ ID NO: 3568 - protein, 8 aa, synthetic construct
TTSIAYPN

SEQ ID NO: 3569 - protein, 5 aa, synthetic construct
SGHDT

SEQ ID NO: 3570 - protein, 6 aa, synthetic construct
NSASNY

SEQ ID NO: 3571 - protein, 5 aa, synthetic construct
SGHDT

SEQ ID NO: 3572 - protein, 5 aa, synthetic construct
STATQ

SEQ ID NO: 3573 - protein, 5 aa, synthetic construct
SGHDT

SEQ ID NO: 3574 - protein, 6 aa, synthetic construct
TTYSPF

SEQ ID NO: 3575 - protein, 5 aa, synthetic construct
SGHDT

SEQ ID NO: 3576 - protein, 8 aa, synthetic construct
ATSIAYPN

SEQ ID NO: 3577 - protein, 5 aa, synthetic construct
SGHDT

SEQ ID NO: 3578 - protein, 7 aa, synthetic construct
TQDSSYF

SEQ ID NO: 3579 - protein, 5 aa, synthetic construct
SGHDT

SEQ ID NO: 3580 - protein, 7 aa, synthetic construct
TQDSSYF

SEQ ID NO: 3581 - protein, 5 aa, synthetic construct
SGHDT

SEQ ID NO: 3582 - protein, 5 aa, synthetic construct
TSITA

SEQ ID NO: 3583 - protein, 5 aa, synthetic construct
SGHDT

SEQ ID NO: 3584 - protein, 6 aa, synthetic construct
YSGTPY

SEQ ID NO: 3585 - protein, 5 aa, synthetic construct
SGHDT

SEQ ID NO: 3586 - protein, 6 aa, synthetic construct
NSAFDY

SEQ ID NO: 3587 - protein, 5 aa, synthetic construct
SGHDT

SEQ ID NO: 3588 - protein, 5 aa, synthetic construct
TTTRS

SEQ ID NO: 3589 - protein, 5 aa, synthetic construct
SGHDT

SEQ ID NO: 3590 - protein, 6 aa, synthetic construct
ASGYPA

SEQ ID NO: 3591 - protein, 5 aa, synthetic construct
SGHDT

SEQ ID NO: 3592 - protein, 6 aa, synthetic construct
TKQYPT

SEQ ID NO: 3593 - protein, 5 aa, synthetic construct
SGHDT

SEQ ID NO: 3594 - protein, 6 aa, synthetic construct
YFGTPY

SEQ ID NO: 3595 - protein, 5 aa, synthetic construct
SGHDT

SEQ ID NO: 3596 - protein, 6 aa, synthetic construct
NSASNY

SEQ ID NO: 3597 - protein, 5 aa, synthetic construct
SGHDT

SEQ ID NO: 3598 - protein, 6 aa, synthetic construct
YGGSIY

SEQ ID NO: 3599 - protein, 5 aa, synthetic construct
MSHET

SEQ ID NO: 3600 - protein, 8 aa, synthetic construct
ATSIAYPN

SEQ ID NO: 3601 - protein, 5 aa, synthetic construct
MSHET

SEQ ID NO: 3602 - protein, 6 aa, synthetic construct
DSASQY

SEQ ID NO: 3603 - protein, 5 aa, synthetic construct
MSHET

SEQ ID NO: 3604 - protein, 6 aa, synthetic construct
YFGTPY

SEQ ID NO: 3605 - protein, 5 aa, synthetic construct
MSHET

SEQ ID NO: 3606 - protein, 5 aa, synthetic construct
TSITA

SEQ ID NO: 3607 - protein, 5 aa, synthetic construct
MSHET

SEQ ID NO: 3608 - protein, 6 aa, synthetic construct
TSGFNG

SEQ ID NO: 3609 - protein, 5 aa, synthetic construct
MSHET

SEQ ID NO: 3610 - protein, 7 aa, synthetic construct
TIYSNPF

SEQ ID NO: 3611 - protein, 5 aa, synthetic construct
MSHET

SEQ ID NO: 3612 - protein, 6 aa, synthetic construct
TTWYPT

SEQ ID NO: 3613 - protein, 5 aa, synthetic construct
LGHNA

SEQ ID NO: 3614 - protein, 5 aa, synthetic construct
STATR

SEQ ID NO: 3615 - protein, 5 aa, synthetic construct
LGHNA

SEQ ID NO: 3616 - protein, 6 aa, synthetic construct
NSAFDY

SEQ ID NO: 3617 - protein, 5 aa, synthetic construct
LGHNA

SEQ ID NO: 3618 - protein, 5 aa, synthetic construct
TYTTV

SEQ ID NO: 3619 - protein, 5 aa, synthetic construct
LGHNA

SEQ ID NO: 3620 - protein, 6 aa, synthetic construct
YFGTPY

SEQ ID NO: 3621 - protein, 5 aa, synthetic construct
LGHNA

SEQ ID NO: 3622 - protein, 6 aa, synthetic construct
DRNVDY

SEQ ID NO: 3623 - protein, 5 aa, synthetic construct
LGHNA

SEQ ID NO: 3624 - protein, 6 aa, synthetic construct
DGTSDN

SEQ ID NO: 3625 - protein, 5 aa, synthetic construct
LGHNA

SEQ ID NO: 3626 - protein, 6 aa, synthetic construct
DRNFQY

SEQ ID NO: 3627 - protein, 5 aa, synthetic construct
LGHNA

SEQ ID NO: 3628 - protein, 7 aa, synthetic construct
TQDSSYF

SEQ ID NO: 3629 - protein, 5 aa, synthetic construct
LGHNA

SEQ ID NO: 3630 - protein, 7 aa, synthetic construct
TRDSSYF

SEQ ID NO: 3631 - protein, 5 aa, synthetic construct
LGHNA

SEQ ID NO: 3632 - protein, 8 aa, synthetic construct
ATSIAYPN

SEQ ID NO: 3633 - protein, 5 aa, synthetic construct
LGHNA

SEQ ID NO: 3634 - protein, 6 aa, synthetic construct
TTWYPT

SEQ ID NO: 3635 - protein, 5 aa, synthetic construct
LGHNA

SEQ ID NO: 3636 - protein, 6 aa, synthetic construct
ASGYPA

SEQ ID NO: 3637 - protein, 5 aa, synthetic construct
LGHNA

SEQ ID NO: 3638 - protein, 6 aa, synthetic construct
DRNSQY

SEQ ID NO: 3639 - protein, 5 aa, synthetic construct
LGHNA

SEQ ID NO: 3640 - protein, 6 aa, synthetic construct
DTASSY

SEQ ID NO: 3641 - protein, 5 aa, synthetic construct
LGHNA

SEQ ID NO: 3642 - protein, 7 aa, synthetic construct
TRDSSYF

SEQ ID NO: 3643 - protein, 5 aa, synthetic construct
LGHNA

SEQ ID NO: 3644 - protein, 6 aa, synthetic construct
YSGTPY

SEQ ID NO: 3645 - protein, 5 aa, synthetic construct
LGHNA

SEQ ID NO: 3646 - protein, 5 aa, synthetic construct
TSITA

SEQ ID NO: 3647 - protein, 5 aa, synthetic construct
LGHNA

SEQ ID NO: 3648 - protein, 5 aa, synthetic construct
STATQ

SEQ ID NO: 3649 - protein, 5 aa, synthetic construct
LGHNA

SEQ ID NO: 3650 - protein, 6 aa, synthetic construct
DPNSYY

SEQ ID NO: 3651 - protein, 5 aa, synthetic construct
LGHNA

SEQ ID NO: 3652 - protein, 6 aa, synthetic construct
YSATPY

SEQ ID NO: 3653 - protein, 5 aa, synthetic construct
LGHNA

SEQ ID NO: 3654 - protein, 6 aa, synthetic construct
DSASQY

SEQ ID NO: 3655 - protein, 5 aa, synthetic construct
LGHNA

SEQ ID NO: 3656 - protein, 6 aa, synthetic construct
NDMFDY

SEQ ID NO: 3657 - protein, 5 aa, synthetic construct
LGHNA

SEQ ID NO: 3658 - protein, 5 aa, synthetic construct
TSLNS

SEQ ID NO: 3659 - protein, 5 aa, synthetic construct
LGHNA

SEQ ID NO: 3660 - protein, 6 aa, synthetic construct
DRNVDY

SEQ ID NO: 3661 - protein, 5 aa, synthetic construct
LGHNA

SEQ ID NO: 3662 - protein, 5 aa, synthetic construct
STATQ

SEQ ID NO: 3663 - protein, 5 aa, synthetic construct
LGHNA

SEQ ID NO: 3664 - protein, 6 aa, synthetic construct
DSASNY

SEQ ID NO: 3665 - protein, 5 aa, synthetic construct
LGHNA

SEQ ID NO: 3666 - protein, 6 aa, synthetic construct
TKQYPT

SEQ ID NO: 3667 - protein, 5 aa, synthetic construct
LGHNA

SEQ ID NO: 3668 - protein, 7 aa, synthetic construct
NIATSEY

SEQ ID NO: 3669 - protein, 5 aa, synthetic construct
LGHNA

SEQ ID NO: 3670 - protein, 7 aa, synthetic construct
NIATSEY

SEQ ID NO: 3671 - protein, 5 aa, synthetic construct
LGHNA

SEQ ID NO: 3672 - protein, 6 aa, synthetic construct
DTASSY

SEQ ID NO: 3673 - protein, 5 aa, synthetic construct
LGHNA

SEQ ID NO: 3674 - protein, 6 aa, synthetic construct
DTASSY

SEQ ID NO: 3675 - protein, 5 aa, synthetic construct
LGHNA

SEQ ID NO: 3676 - protein, 6 aa, synthetic construct
NDMFDY

SEQ ID NO: 3677 - protein, 5 aa, synthetic construct
LGHNA

SEQ ID NO: 3678 - protein, 6 aa, synthetic construct
DTASSY

SEQ ID NO: 3679 - protein, 5 aa, synthetic construct
LGHDT

SEQ ID NO: 3680 - protein, 6 aa, synthetic construct
DRNVDY

SEQ ID NO: 3681 - protein, 5 aa, synthetic construct
LGHDT

SEQ ID NO: 3682 - protein, 8 aa, synthetic construct
TTSIAYPN

SEQ ID NO: 3683 - protein, 5 aa, synthetic construct
LGHDT

SEQ ID NO: 3684 - protein, 6 aa, synthetic construct
TTGYPT

SEQ ID NO: 3685 - protein, 5 aa, synthetic construct
LGHDT

SEQ ID NO: 3686 - protein, 7 aa, synthetic construct
TIYSNPF

SEQ ID NO: 3687 - protein, 5 aa, synthetic construct
LGHDT

SEQ ID NO: 3688 - protein, 7 aa, synthetic construct
TQDSSYF

SEQ ID NO: 3689 - protein, 5 aa, synthetic construct
LGHDT

SEQ ID NO: 3690 - protein, 5 aa, synthetic construct
STATR

SEQ ID NO: 3691 - protein, 5 aa, synthetic construct
LGHDT

SEQ ID NO: 3692 - protein, 6 aa, synthetic construct
DRNFQY

SEQ ID NO: 3693 - protein, 5 aa, synthetic construct
LGHDT

SEQ ID NO: 3694 - protein, 5 aa, synthetic construct
STATR

SEQ ID NO: 3695 - protein, 5 aa, synthetic construct
LGHDT

SEQ ID NO: 3696 - protein, 5 aa, synthetic construct
STATR

SEQ ID NO: 3697 - protein, 5 aa, synthetic construct
LGHDT

SEQ ID NO: 3698 - protein, 5 aa, synthetic construct
TYTTV

SEQ ID NO: 3699 - protein, 5 aa, synthetic construct
LGHDT

SEQ ID NO: 3700 - protein, 6 aa, synthetic construct
YFGTPY

SEQ ID NO: 3701 - protein, 5 aa, synthetic construct
LGHDT

SEQ ID NO: 3702 - protein, 7 aa, synthetic construct
TQDSSYF

SEQ ID NO: 3703 - protein, 5 aa, synthetic construct
LGHDT

SEQ ID NO: 3704 - protein, 7 aa, synthetic construct
TRDSSYF

SEQ ID NO: 3705 - protein, 5 aa, synthetic construct
LGHDT

SEQ ID NO: 3706 - protein, 6 aa, synthetic construct
DSTFNY

SEQ ID NO: 3707 - protein, 5 aa, synthetic construct
LGHDT

SEQ ID NO: 3708 - protein, 5 aa, synthetic construct
STATQ

SEQ ID NO: 3709 - protein, 5 aa, synthetic construct
LGHDT

SEQ ID NO: 3710 - protein, 6 aa, synthetic construct
DGTSNN

SEQ ID NO: 3711 - protein, 5 aa, synthetic construct
LGHDT

SEQ ID NO: 3712 - protein, 5 aa, synthetic construct
TYTTV

SEQ ID NO: 3713 - protein, 5 aa, synthetic construct
LGHDT

SEQ ID NO: 3714 - protein, 6 aa, synthetic construct
ASGYPT

SEQ ID NO: 3715 - protein, 5 aa, synthetic construct
LGHDT

SEQ ID NO: 3716 - protein, 6 aa, synthetic construct
TKQYPT

SEQ ID NO: 3717 - protein, 5 aa, synthetic construct
LGHDT

SEQ ID NO: 3718 - protein, 8 aa, synthetic construct
ATSIAYPN

SEQ ID NO: 3719 - protein, 5 aa, synthetic construct
LGHDT

SEQ ID NO: 3720 - protein, 7 aa, synthetic construct
TQDSSYF

SEQ ID NO: 3721 - protein, 5 aa, synthetic construct
LGHDT

SEQ ID NO: 3722 - protein, 7 aa, synthetic construct
TIYSNPF

SEQ ID NO: 3723 - protein, 5 aa, synthetic construct
LGHDT

SEQ ID NO: 3724 - protein, 6 aa, synthetic construct
STYSPF

SEQ ID NO: 3725 - protein, 5 aa, synthetic construct
LGHDT

SEQ ID NO: 3726 - protein, 6 aa, synthetic construct
DRNFQY

SEQ ID NO: 3727 - protein, 5 aa, synthetic construct
LGHDT

SEQ ID NO: 3728 - protein, 6 aa, synthetic construct
DPNSYY

SEQ ID NO: 3729 - protein, 5 aa, synthetic construct
LGHDT

SEQ ID NO: 3730 - protein, 6 aa, synthetic construct
DSASNY

SEQ ID NO: 3731 - protein, 5 aa, synthetic construct
NNHNN

SEQ ID NO: 3732 - protein, 6 aa, synthetic construct
TSGFNG

SEQ ID NO: 3733 - protein, 5 aa, synthetic construct
NNHNN

SEQ ID NO: 3734 - protein, 7 aa, synthetic construct
TQDSSYF

SEQ ID NO: 3735 - protein, 5 aa, synthetic construct
NNHNN

SEQ ID NO: 3736 - protein, 6 aa, synthetic construct
TAYSTF

SEQ ID NO: 3737 - protein, 5 aa, synthetic construct
NNHNN

SEQ ID NO: 3738 - protein, 6 aa, synthetic construct
SSVTPY

SEQ ID NO: 3739 - protein, 5 aa, synthetic construct
NNHNN

SEQ ID NO: 3740 - protein, 6 aa, synthetic construct
ASGYPT

SEQ ID NO: 3741 - protein, 5 aa, synthetic construct
NNHNN

SEQ ID NO: 3742 - protein, 5 aa, synthetic construct
TSLNS

SEQ ID NO: 3743 - protein, 5 aa, synthetic construct
NNHNN

SEQ ID NO: 3744 - protein, 6 aa, synthetic construct
YSGTPY

SEQ ID NO: 3745 - protein, 5 aa, synthetic construct
NNHNN

SEQ ID NO: 3746 - protein, 6 aa, synthetic construct
DSASNY

SEQ ID NO: 3747 - protein, 5 aa, synthetic construct
NNHNN

SEQ ID NO: 3748 - protein, 7 aa, synthetic construct
TRDSSYF

SEQ ID NO: 3749 - protein, 5 aa, synthetic construct
NNHNN

SEQ ID NO: 3750 - protein, 6 aa, synthetic construct
NSAFDY

SEQ ID NO: 3751 - protein, 5 aa, synthetic construct
NNHNN

SEQ ID NO: 3752 - protein, 8 aa, synthetic construct
ATSIAYPN

SEQ ID NO: 3753 - protein, 5 aa, synthetic construct
NNHNN

SEQ ID NO: 3754 - protein, 6 aa, synthetic construct
DPNSYY

SEQ ID NO: 3755 - protein, 5 aa, synthetic construct
NNHNN

SEQ ID NO: 3756 - protein, 6 aa, synthetic construct
DSTFNY

SEQ ID NO: 3757 - protein, 5 aa, synthetic construct
NNHNN

SEQ ID NO: 3758 - protein, 7 aa, synthetic construct
TQDSSYF

SEQ ID NO: 3759 - protein, 5 aa, synthetic construct
NNHNN

SEQ ID NO: 3760 - protein, 5 aa, synthetic construct
TSLNS

SEQ ID NO: 3761 - protein, 5 aa, synthetic construct
NNHNN

SEQ ID NO: 3762 - protein, 6 aa, synthetic construct
TTWYPT

SEQ ID NO: 3763 - protein, 5 aa, synthetic construct
NNHNN

SEQ ID NO: 3764 - protein, 6 aa, synthetic construct
TTYSPF

SEQ ID NO: 3765 - protein, 5 aa, synthetic construct
NNHNN

SEQ ID NO: 3766 - protein, 6 aa, synthetic construct
YSGTPY

SEQ ID NO: 3767 - protein, 5 aa, synthetic construct
NNHNN

SEQ ID NO: 3768 - protein, 6 aa, synthetic construct
TTYSPF

SEQ ID NO: 3769 - protein, 5 aa, synthetic construct
NNHNN

SEQ ID NO: 3770 - protein, 6 aa, synthetic construct
DRSSDN

SEQ ID NO: 3771 - protein, 5 aa, synthetic construct
NNHNN

SEQ ID NO: 3772 - protein, 6 aa, synthetic construct
DSASQY

SEQ ID NO: 3773 - protein, 5 aa, synthetic construct
NNHNN

SEQ ID NO: 3774 - protein, 7 aa, synthetic construct
TTYLTIA

SEQ ID NO: 3775 - protein, 5 aa, synthetic construct
NNHNN

SEQ ID NO: 3776 - protein, 6 aa, synthetic construct
DSATAY

SEQ ID NO: 3777 - protein, 5 aa, synthetic construct
NNHNN

SEQ ID NO: 3778 - protein, 7 aa, synthetic construct
TRDSSYF

SEQ ID NO: 3779 - protein, 5 aa, synthetic construct
NNHNN

SEQ ID NO: 3780 - protein, 7 aa, synthetic construct
TQDSSYF

SEQ ID NO: 3781 - protein, 5 aa, synthetic construct
NNHNN

SEQ ID NO: 3782 - protein, 5 aa, synthetic construct
STATR

SEQ ID NO: 3783 - protein, 5 aa, synthetic construct
NNHNN

SEQ ID NO: 3784 - protein, 7 aa, synthetic construct
TRDSSYF

SEQ ID NO: 3785 - protein, 5 aa, synthetic construct
NNHNN

SEQ ID NO: 3786 - protein, 8 aa, synthetic construct
ATSIAYPN

SEQ ID NO: 3787 - protein, 5 aa, synthetic construct
NNHNN

SEQ ID NO: 3788 - protein, 6 aa, synthetic construct
DGTSNN

SEQ ID NO: 3789 - protein, 5 aa, synthetic construct
NNHNN

SEQ ID NO: 3790 - protein, 6 aa, synthetic construct
DRSSDN

SEQ ID NO: 3791 - protein, 5 aa, synthetic construct
NNHNN

SEQ ID NO: 3792 - protein, 7 aa, synthetic construct
TRDSSYF

SEQ ID NO: 3793 - protein, 5 aa, synthetic construct
NNHNN

SEQ ID NO: 3794 - protein, 7 aa, synthetic construct
TRDSSYF

SEQ ID NO: 3795 - protein, 5 aa, synthetic construct
NNHNN

SEQ ID NO: 3796 - protein, 7 aa, synthetic construct
TAYSDVA

SEQ ID NO: 3797 - protein, 5 aa, synthetic construct
NNHNN

SEQ ID NO: 3798 - protein, 7 aa, synthetic construct
TQDSSYF

SEQ ID NO: 3799 - protein, 5 aa, synthetic construct
NNHNN

SEQ ID NO: 3800 - protein, 7 aa, synthetic construct
TRDSSYF

SEQ ID NO: 3801 - protein, 5 aa, synthetic construct
NNHNN

SEQ ID NO: 3802 - protein, 6 aa, synthetic construct
TSGFNG

SEQ ID NO: 3803 - protein, 5 aa, synthetic construct
NNHNN

SEQ ID NO: 3804 - protein, 6 aa, synthetic construct
DPNSYY

SEQ ID NO: 3805 - protein, 5 aa, synthetic construct
NNHNN

SEQ ID NO: 3806 - protein, 6 aa, synthetic construct
DPNSYY

SEQ ID NO: 3807 - protein, 5 aa, synthetic construct
NNHNN

SEQ ID NO: 3808 - protein, 6 aa, synthetic construct
TTYSPF

SEQ ID NO: 3809 - protein, 5 aa, synthetic construct
NNHNN

SEQ ID NO: 3810 - protein, 6 aa, synthetic construct
DPNSYY

SEQ ID NO: 3811 - protein, 5 aa, synthetic construct
NNHNN

SEQ ID NO: 3812 - protein, 6 aa, synthetic construct
TTYSPF

SEQ ID NO: 3813 - protein, 5 aa, synthetic construct
NNHNN

SEQ ID NO: 3814 - protein, 6 aa, synthetic construct
DPNSYY

SEQ ID NO: 3815 - protein, 5 aa, synthetic construct
NNHNN

SEQ ID NO: 3816 - protein, 6 aa, synthetic construct
DRNVDY

SEQ ID NO: 3817 - protein, 5 aa, synthetic construct
NNHNN

SEQ ID NO: 3818 - protein, 6 aa, synthetic construct
TKQYPT

SEQ ID NO: 3819 - protein, 5 aa, synthetic construct
NNHNN

SEQ ID NO: 3820 - protein, 6 aa, synthetic construct
TSGFNG

SEQ ID NO: 3821 - protein, 5 aa, synthetic construct
NNHNN

SEQ ID NO: 3822 - protein, 6 aa, synthetic construct
DSTFNY

SEQ ID NO: 3823 - protein, 5 aa, synthetic construct
NNHNN

SEQ ID NO: 3824 - protein, 6 aa, synthetic construct
YGGSIY

SEQ ID NO: 3825 - protein, 5 aa, synthetic construct
NNHNN

SEQ ID NO: 3826 - protein, 6 aa, synthetic construct
TSGFNG

SEQ ID NO: 3827 - protein, 5 aa, synthetic construct
NNHNN

SEQ ID NO: 3828 - protein, 6 aa, synthetic construct
DTASSY

SEQ ID NO: 3829 - protein, 5 aa, synthetic construct
NNHNN

SEQ ID NO: 3830 - protein, 6 aa, synthetic construct
YGGSIY

SEQ ID NO: 3831 - protein, 5 aa, synthetic construct
NNHNN

SEQ ID NO: 3832 - protein, 6 aa, synthetic construct
ASGYPT

SEQ ID NO: 3833 - protein, 5 aa, synthetic construct
NNHNN

SEQ ID NO: 3834 - protein, 6 aa, synthetic construct
DSATAY

SEQ ID NO: 3835 - protein, 5 aa, synthetic construct
NNHNN

SEQ ID NO: 3836 - protein, 6 aa, synthetic construct
DSASQY

SEQ ID NO: 3837 - protein, 5 aa, synthetic construct
NNHNN

SEQ ID NO: 3838 - protein, 7 aa, synthetic construct
NIATSEY

SEQ ID NO: 3839 - protein, 5 aa, synthetic construct
NNHNN

SEQ ID NO: 3840 - protein, 6 aa, synthetic construct
DPNSYY

SEQ ID NO: 3841 - protein, 5 aa, synthetic construct
NNHNN

SEQ ID NO: 3842 - protein, 6 aa, synthetic construct
NSAFDY

SEQ ID NO: 3843 - protein, 5 aa, synthetic construct
NNHNN

SEQ ID NO: 3844 - protein, 6 aa, synthetic construct
TTTYPT

SEQ ID NO: 3845 - protein, 5 aa, synthetic construct
NNHNN

SEQ ID NO: 3846 - protein, 6 aa, synthetic construct
TTTYPT

SEQ ID NO: 3847 - protein, 5 aa, synthetic construct
NNHNN

SEQ ID NO: 3848 - protein, 5 aa, synthetic construct
TYTTV

SEQ ID NO: 3849 - protein, 5 aa, synthetic construct
NNHNN

SEQ ID NO: 3850 - protein, 6 aa, synthetic construct
TKQYPT

SEQ ID NO: 3851 - protein, 5 aa, synthetic construct
NNHNN

SEQ ID NO: 3852 - protein, 6 aa, synthetic construct
DSASVY

SEQ ID NO: 3853 - protein, 5 aa, synthetic construct
NNHNN

SEQ ID NO: 3854 - protein, 6 aa, synthetic construct
DSASQY

SEQ ID NO: 3855 - protein, 5 aa, synthetic construct
NNHNN

SEQ ID NO: 3856 - protein, 6 aa, synthetic construct
DSASNY

SEQ ID NO: 3857 - protein, 5 aa, synthetic construct
NNHNN

SEQ ID NO: 3858 - protein, 7 aa, synthetic construct
TIYSNAF

SEQ ID NO: 3859 - protein, 5 aa, synthetic construct
NNHNN

SEQ ID NO: 3860 - protein, 6 aa, synthetic construct
STYSPF

SEQ ID NO: 3861 - protein, 5 aa, synthetic construct
NNHNN

SEQ ID NO: 3862 - protein, 6 aa, synthetic construct
NSAFDY

SEQ ID NO: 3863 - protein, 5 aa, synthetic construct
NNHNN

SEQ ID NO: 3864 - protein, 6 aa, synthetic construct
DPNSYY

SEQ ID NO: 3865 - protein, 5 aa, synthetic construct
NNHNN

SEQ ID NO: 3866 - protein, 7 aa, synthetic construct
TQDSSYF

SEQ ID NO: 3867 - protein, 5 aa, synthetic construct
NNHNN

SEQ ID NO: 3868 - protein, 5 aa, synthetic construct
TSLNS

SEQ ID NO: 3869 - protein, 5 aa, synthetic construct
NNHNN

SEQ ID NO: 3870 - protein, 6 aa, synthetic construct
TTYSPF

SEQ ID NO: 3871 - protein, 5 aa, synthetic construct
NNHNN

SEQ ID NO: 3872 - protein, 7 aa, synthetic construct
TIYSNAF

SEQ ID NO: 3873 - protein, 5 aa, synthetic construct
NNHNN

SEQ ID NO: 3874 - protein, 7 aa, synthetic construct
TQDSSYF

SEQ ID NO: 3875 - protein, 5 aa, synthetic construct
NNHNN

SEQ ID NO: 3876 - protein, 6 aa, synthetic construct
STYSPF

SEQ ID NO: 3877 - protein, 5 aa, synthetic construct
NNHNN

SEQ ID NO: 3878 - protein, 6 aa, synthetic construct
DSATAY

SEQ ID NO: 3879 - protein, 5 aa, synthetic construct
NNHNN

SEQ ID NO: 3880 - protein, 6 aa, synthetic construct
ASGYPA

SEQ ID NO: 3881 - protein, 5 aa, synthetic construct
NNHNN

SEQ ID NO: 3882 - protein, 6 aa, synthetic construct
DTASSY

SEQ ID NO: 3883 - protein, 5 aa, synthetic construct
NNHNN

SEQ ID NO: 3884 - protein, 5 aa, synthetic construct
TSITA

SEQ ID NO: 3885 - protein, 5 aa, synthetic construct
NNHNN

SEQ ID NO: 3886 - protein, 7 aa, synthetic construct
TRDSSYF

SEQ ID NO: 3887 - protein, 5 aa, synthetic construct
NNHNN

SEQ ID NO: 3888 - protein, 6 aa, synthetic construct
TSGFNG

SEQ ID NO: 3889 - protein, 5 aa, synthetic construct
NNHNN

SEQ ID NO: 3890 - protein, 7 aa, synthetic construct
TRDSSYF

SEQ ID NO: 3891 - protein, 5 aa, synthetic construct
NNHNN

SEQ ID NO: 3892 - protein, 6 aa, synthetic construct
YSGTPY

SEQ ID NO: 3893 - protein, 5 aa, synthetic construct
NNHNN

SEQ ID NO: 3894 - protein, 6 aa, synthetic construct
DRNVDY

SEQ ID NO: 3895 - protein, 5 aa, synthetic construct
NNHNN

SEQ ID NO: 3896 - protein, 5 aa, synthetic construct
TTLNS

SEQ ID NO: 3897 - protein, 5 aa, synthetic construct
NNHNN

SEQ ID NO: 3898 - protein, 5 aa, synthetic construct
TSLNS

SEQ ID NO: 3899 - protein, 5 aa, synthetic construct
NNHNN

SEQ ID NO: 3900 - protein, 6 aa, synthetic construct
TTWYPT

SEQ ID NO: 3901 - protein, 5 aa, synthetic construct
NNHNN

SEQ ID NO: 3902 - protein, 6 aa, synthetic construct
ASGYPT

SEQ ID NO: 3903 - protein, 5 aa, synthetic construct
NNHNN

SEQ ID NO: 3904 - protein, 7 aa, synthetic construct
TIYSNPF

SEQ ID NO: 3905 - protein, 5 aa, synthetic construct
NNHNN

SEQ ID NO: 3906 - protein, 5 aa, synthetic construct
IAATT

SEQ ID NO: 3907 - protein, 5 aa, synthetic construct
NNHNN

SEQ ID NO: 3908 - protein, 5 aa, synthetic construct
IAATT

SEQ ID NO: 3909 - protein, 5 aa, synthetic construct
NNHNN

SEQ ID NO: 3910 - protein, 8 aa, synthetic construct
TTSIAYPN

SEQ ID NO: 3911 - protein, 5 aa, synthetic construct
NNHNN

SEQ ID NO: 3912 - protein, 8 aa, synthetic construct
ATSIAYPN

SEQ ID NO: 3913 - protein, 5 aa, synthetic construct
NNHNN

SEQ ID NO: 3914 - protein, 6 aa, synthetic construct
DPNSYY

SEQ ID NO: 3915 - protein, 5 aa, synthetic construct
NNHNN

SEQ ID NO: 3916 - protein, 6 aa, synthetic construct
NSASNY

SEQ ID NO: 3917 - protein, 5 aa, synthetic construct
NNHNN

SEQ ID NO: 3918 - protein, 6 aa, synthetic construct
NSASNY

SEQ ID NO: 3919 - protein, 5 aa, synthetic construct
NNHNN

SEQ ID NO: 3920 - protein, 6 aa, synthetic construct
DSASQY

SEQ ID NO: 3921 - protein, 5 aa, synthetic construct
NNHNN

SEQ ID NO: 3922 - protein, 7 aa, synthetic construct
TRDSSYF

SEQ ID NO: 3923 - protein, 5 aa, synthetic construct
NNHNN

SEQ ID NO: 3924 - protein, 6 aa, synthetic construct
DSASQY

SEQ ID NO: 3925 - protein, 5 aa, synthetic construct
NNHNN

SEQ ID NO: 3926 - protein, 5 aa, synthetic construct
TSLNS

SEQ ID NO: 3927 - protein, 5 aa, synthetic construct
NSHNY

SEQ ID NO: 3928 - protein, 7 aa, synthetic construct
TISGNEY

SEQ ID NO: 3929 - protein, 5 aa, synthetic construct
NSHNY

SEQ ID NO: 3930 - protein, 6 aa, synthetic construct
TSGFNG

SEQ ID NO: 3931 - protein, 5 aa, synthetic construct
NSHNY

SEQ ID NO: 3932 - protein, 6 aa, synthetic construct
NDMFDY

SEQ ID NO: 3933 - protein, 5 aa, synthetic construct
NSHNY

SEQ ID NO: 3934 - protein, 6 aa, synthetic construct
DSASQY

SEQ ID NO: 3935 - protein, 5 aa, synthetic construct
NSHNY

SEQ ID NO: 3936 - protein, 7 aa, synthetic construct
TIYSNPF

SEQ ID NO: 3937 - protein, 5 aa, synthetic construct
NSHNY

SEQ ID NO: 3938 - protein, 6 aa, synthetic construct
ASGYPA

SEQ ID NO: 3939 - protein, 5 aa, synthetic construct
NSHNY

SEQ ID NO: 3940 - protein, 6 aa, synthetic construct
DPNSYY

SEQ ID NO: 3941 - protein, 5 aa, synthetic construct
NSHNY

SEQ ID NO: 3942 - protein, 6 aa, synthetic construct
DSASQY

SEQ ID NO: 3943 - protein, 5 aa, synthetic construct
NSHNY

SEQ ID NO: 3944 - protein, 5 aa, synthetic construct
IAATT

SEQ ID NO: 3945 - protein, 5 aa, synthetic construct
NSHNY

SEQ ID NO: 3946 - protein, 7 aa, synthetic construct
TRDSSYF

SEQ ID NO: 3947 - protein, 5 aa, synthetic construct
NSHNY

SEQ ID NO: 3948 - protein, 7 aa, synthetic construct
TQDSSYF

SEQ ID NO: 3949 - protein, 5 aa, synthetic construct
NSHNY

SEQ ID NO: 3950 - protein, 6 aa, synthetic construct
TKQYPT

SEQ ID NO: 3951 - protein, 5 aa, synthetic construct
NSHNY

SEQ ID NO: 3952 - protein, 6 aa, synthetic construct
DTASSY

SEQ ID NO: 3953 - protein, 5 aa, synthetic construct
NSHNY

SEQ ID NO: 3954 - protein, 6 aa, synthetic construct
DSASQY

SEQ ID NO: 3955 - protein, 5 aa, synthetic construct
NSHNY

SEQ ID NO: 3956 - protein, 5 aa, synthetic construct
TSLNS

SEQ ID NO: 3957 - protein, 5 aa, synthetic construct
NSHNY

SEQ ID NO: 3958 - protein, 6 aa, synthetic construct
DPNSYY

SEQ ID NO: 3959 - protein, 5 aa, synthetic construct
NSHNY

SEQ ID NO: 3960 - protein, 6 aa, synthetic construct
DSASVY

SEQ ID NO: 3961 - protein, 5 aa, synthetic construct
NSHNY

SEQ ID NO: 3962 - protein, 6 aa, synthetic construct
YSGTPY

SEQ ID NO: 3963 - protein, 5 aa, synthetic construct
NSHNY

SEQ ID NO: 3964 - protein, 7 aa, synthetic construct
TISGNEY

SEQ ID NO: 3965 - protein, 5 aa, synthetic construct
NSHNY

SEQ ID NO: 3966 - protein, 6 aa, synthetic construct
ASGYPA

SEQ ID NO: 3967 - protein, 5 aa, synthetic construct
NSHNY

SEQ ID NO: 3968 - protein, 6 aa, synthetic construct
ASGYPT

SEQ ID NO: 3969 - protein, 5 aa, synthetic construct
NSHNY

SEQ ID NO: 3970 - protein, 6 aa, synthetic construct
DPNSYY

SEQ ID NO: 3971 - protein, 5 aa, synthetic construct
NSHNY

SEQ ID NO: 3972 - protein, 6 aa, synthetic construct
KQYPTL

SEQ ID NO: 3973 - protein, 5 aa, synthetic construct
NSHNY

SEQ ID NO: 3974 - protein, 6 aa, synthetic construct
YSGTPY

SEQ ID NO: 3975 - protein, 5 aa, synthetic construct
NSHNY

SEQ ID NO: 3976 - protein, 6 aa, synthetic construct
NSAFDY

SEQ ID NO: 3977 - protein, 5 aa, synthetic construct
NSHNY

SEQ ID NO: 3978 - protein, 6 aa, synthetic construct
ASGYPA

SEQ ID NO: 3979 - protein, 5 aa, synthetic construct
NSHNY

SEQ ID NO: 3980 - protein, 7 aa, synthetic construct
TRDSSYF

SEQ ID NO: 3981 - protein, 5 aa, synthetic construct
NSHNY

SEQ ID NO: 3982 - protein, 6 aa, synthetic construct
YGGSIY

SEQ ID NO: 3983 - protein, 5 aa, synthetic construct
NSHNY

SEQ ID NO: 3984 - protein, 6 aa, synthetic construct
DSASQY

SEQ ID NO: 3985 - protein, 5 aa, synthetic construct
NSHNY

SEQ ID NO: 3986 - protein, 8 aa, synthetic construct
ATSIAYPN

SEQ ID NO: 3987 - protein, 5 aa, synthetic construct
NSHNY

SEQ ID NO: 3988 - protein, 7 aa, synthetic construct
TQDSSYF

SEQ ID NO: 3989 - protein, 5 aa, synthetic construct
NSHNY

SEQ ID NO: 3990 - protein, 6 aa, synthetic construct
DPNSYY

SEQ ID NO: 3991 - protein, 5 aa, synthetic construct
NSHNY

SEQ ID NO: 3992 - protein, 6 aa, synthetic construct
DSASVY

SEQ ID NO: 3993 - protein, 5 aa, synthetic construct
NSHNY

SEQ ID NO: 3994 - protein, 6 aa, synthetic construct
TTYSPF

SEQ ID NO: 3995 - protein, 5 aa, synthetic construct
NSHNY

SEQ ID NO: 3996 - protein, 8 aa, synthetic construct
ATSIAYPN

SEQ ID NO: 3997 - protein, 5 aa, synthetic construct
NSHNY

SEQ ID NO: 3998 - protein, 7 aa, synthetic construct
TISGNEY

SEQ ID NO: 3999 - protein, 5 aa, synthetic construct
NSHNY

SEQ ID NO: 4000 - protein, 6 aa, synthetic construct
TTYSPF

SEQ ID NO: 4001 - protein, 5 aa, synthetic construct
NSHNY

SEQ ID NO: 4002 - protein, 6 aa, synthetic construct
TAYSTF

SEQ ID NO: 4003 - protein, 5 aa, synthetic construct
NSHNY

SEQ ID NO: 4004 - protein, 6 aa, synthetic construct
ASGYPA

SEQ ID NO: 4005 - protein, 5 aa, synthetic construct
NSHNY

SEQ ID NO: 4006 - protein, 6 aa, synthetic construct
DSATAY

SEQ ID NO: 4007 - protein, 5 aa, synthetic construct
NSHNY

SEQ ID NO: 4008 - protein, 8 aa, synthetic construct
ATSIAYPN

SEQ ID NO: 4009 - protein, 5 aa, synthetic construct
NSHNY

SEQ ID NO: 4010 - protein, 6 aa, synthetic construct
YSGTPY

SEQ ID NO: 4011 - protein, 5 aa, synthetic construct
NSHNY

SEQ ID NO: 4012 - protein, 6 aa, synthetic construct
DSTFDY

SEQ ID NO: 4013 - protein, 5 aa, synthetic construct
NSHNY

SEQ ID NO: 4014 - protein, 6 aa, synthetic construct
TTGYPT

SEQ ID NO: 4015 - protein, 5 aa, synthetic construct
NSHNY

SEQ ID NO: 4016 - protein, 7 aa, synthetic construct
TSEYFYR

SEQ ID NO: 4017 - protein, 5 aa, synthetic construct
NSHNY

SEQ ID NO: 4018 - protein, 6 aa, synthetic construct
DSATAY

SEQ ID NO: 4019 - protein, 5 aa, synthetic construct
NNHDY

SEQ ID NO: 4020 - protein, 7 aa, synthetic construct
TRDSSYF

SEQ ID NO: 4021 - protein, 5 aa, synthetic construct
NNHDY

SEQ ID NO: 4022 - protein, 5 aa, synthetic construct
STATQ

SEQ ID NO: 4023 - protein, 5 aa, synthetic construct
NNHDY

SEQ ID NO: 4024 - protein, 5 aa, synthetic construct
TSLNS

SEQ ID NO: 4025 - protein, 5 aa, synthetic construct
NNHDY

SEQ ID NO: 4026 - protein, 8 aa, synthetic construct
TTSIAYPN

SEQ ID NO: 4027 - protein, 5 aa, synthetic construct
NNHDY

SEQ ID NO: 4028 - protein, 6 aa, synthetic construct
DSATAY

SEQ ID NO: 4029 - protein, 5 aa, synthetic construct
NNHDY

SEQ ID NO: 4030 - protein, 6 aa, synthetic construct
DRSSDN

SEQ ID NO: 4031 - protein, 5 aa, synthetic construct
NNHDY

SEQ ID NO: 4032 - protein, 6 aa, synthetic construct
YSGTPY

SEQ ID NO: 4033 - protein, 5 aa, synthetic construct
NNHDY

SEQ ID NO: 4034 - protein, 7 aa, synthetic construct
TQDSSYF

SEQ ID NO: 4035 - protein, 5 aa, synthetic construct
NNHDY

SEQ ID NO: 4036 - protein, 7 aa, synthetic construct
TRDSSYF

SEQ ID NO: 4037 - protein, 5 aa, synthetic construct
NNHDY

SEQ ID NO: 4038 - protein, 7 aa, synthetic construct
TQDSSYF

SEQ ID NO: 4039 - protein, 5 aa, synthetic construct
NNHDY

SEQ ID NO: 4040 - protein, 6 aa, synthetic construct
YSAAPY

SEQ ID NO: 4041 - protein, 5 aa, synthetic construct
NNHDY

SEQ ID NO: 4042 - protein, 7 aa, synthetic construct
TISGNEY

SEQ ID NO: 4043 - protein, 5 aa, synthetic construct
NNHDY

SEQ ID NO: 4044 - protein, 6 aa, synthetic construct
ASGYPA

SEQ ID NO: 4045 - protein, 5 aa, synthetic construct
NNHDY

SEQ ID NO: 4046 - protein, 5 aa, synthetic construct
TYTTV

SEQ ID NO: 4047 - protein, 5 aa, synthetic construct
NNHDY

SEQ ID NO: 4048 - protein, 8 aa, synthetic construct
ATSIAYPN

SEQ ID NO: 4049 - protein, 5 aa, synthetic construct
NNHDY

SEQ ID NO: 4050 - protein, 6 aa, synthetic construct
YSGTPY

SEQ ID NO: 4051 - protein, 5 aa, synthetic construct
NNHDY

SEQ ID NO: 4052 - protein, 6 aa, synthetic construct
YSAAPY

SEQ ID NO: 4053 - protein, 5 aa, synthetic construct
NNHDY

SEQ ID NO: 4054 - protein, 7 aa, synthetic construct
TQDSSYF

SEQ ID NO: 4055 - protein, 5 aa, synthetic construct
NNHDY

SEQ ID NO: 4056 - protein, 5 aa, synthetic construct
TTLNS

SEQ ID NO: 4057 - protein, 5 aa, synthetic construct
NNHDY

SEQ ID NO: 4058 - protein, 7 aa, synthetic construct
TIYSNPF

SEQ ID NO: 4059 - protein, 5 aa, synthetic construct
NNHDY

SEQ ID NO: 4060 - protein, 6 aa, synthetic construct
NDMFDY

SEQ ID NO: 4061 - protein, 5 aa, synthetic construct
NNHDY

SEQ ID NO: 4062 - protein, 6 aa, synthetic construct
DSATAY

SEQ ID NO: 4063 - protein, 5 aa, synthetic construct
NNHDY

SEQ ID NO: 4064 - protein, 6 aa, synthetic construct
DSATAY

SEQ ID NO: 4065 - protein, 5 aa, synthetic construct
NNHDY

SEQ ID NO: 4066 - protein, 7 aa, synthetic construct
TQDSSYF

SEQ ID NO: 4067 - protein, 5 aa, synthetic construct
NNHDY

SEQ ID NO: 4068 - protein, 6 aa, synthetic construct
DSASQY

SEQ ID NO: 4069 - protein, 5 aa, synthetic construct
NNHDY

SEQ ID NO: 4070 - protein, 6 aa, synthetic construct
DPNSYY

SEQ ID NO: 4071 - protein, 5 aa, synthetic construct
NNHDY

SEQ ID NO: 4072 - protein, 7 aa, synthetic construct
TQDSSYF

SEQ ID NO: 4073 - protein, 5 aa, synthetic construct
NNHDY

SEQ ID NO: 4074 - protein, 7 aa, synthetic construct
TQDSSYF

SEQ ID NO: 4075 - protein, 5 aa, synthetic construct
NNHDY

SEQ ID NO: 4076 - protein, 6 aa, synthetic construct
NSAFDY

SEQ ID NO: 4077 - protein, 5 aa, synthetic construct
NNHDY

SEQ ID NO: 4078 - protein, 6 aa, synthetic construct
YSGTPY

SEQ ID NO: 4079 - protein, 5 aa, synthetic construct
NNHDY

SEQ ID NO: 4080 - protein, 6 aa, synthetic construct
DSTFNY

SEQ ID NO: 4081 - protein, 5 aa, synthetic construct
NNHDY

SEQ ID NO: 4082 - protein, 6 aa, synthetic construct
TSGFNG

SEQ ID NO: 4083 - protein, 5 aa, synthetic construct
NNHDY

SEQ ID NO: 4084 - protein, 6 aa, synthetic construct
DSASQY

SEQ ID NO: 4085 - protein, 5 aa, synthetic construct
NNHDY

SEQ ID NO: 4086 - protein, 5 aa, synthetic construct
TSITA

SEQ ID NO: 4087 - protein, 5 aa, synthetic construct
NNHDY

SEQ ID NO: 4088 - protein, 5 aa, synthetic construct
TYTTV

SEQ ID NO: 4089 - protein, 5 aa, synthetic construct
NNHDY

SEQ ID NO: 4090 - protein, 6 aa, synthetic construct
ASGYPA

SEQ ID NO: 4091 - protein, 5 aa, synthetic construct
NNHDY

SEQ ID NO: 4092 - protein, 8 aa, synthetic construct
ATSIAYPN

SEQ ID NO: 4093 - protein, 5 aa, synthetic construct
NNHDY

SEQ ID NO: 4094 - protein, 5 aa, synthetic construct
STATQ

SEQ ID NO: 4095 - protein, 5 aa, synthetic construct
NNHDY

SEQ ID NO: 4096 - protein, 6 aa, synthetic construct
DSTFDY

SEQ ID NO: 4097 - protein, 5 aa, synthetic construct
NNHDY

SEQ ID NO: 4098 - protein, 6 aa, synthetic construct
TTYSPF

SEQ ID NO: 4099 - protein, 5 aa, synthetic construct
NNHDY

SEQ ID NO: 4100 - protein, 5 aa, synthetic construct
TSLNS

SEQ ID NO: 4101 - protein, 5 aa, synthetic construct
NNHDY

SEQ ID NO: 4102 - protein, 6 aa, synthetic construct
NSASQS

SEQ ID NO: 4103 - protein, 5 aa, synthetic construct
NNHDY

SEQ ID NO: 4104 - protein, 7 aa, synthetic construct
TQDSSYF

SEQ ID NO: 4105 - protein, 5 aa, synthetic construct
NNHDY

SEQ ID NO: 4106 - protein, 7 aa, synthetic construct
TQDSSYF

SEQ ID NO: 4107 - protein, 5 aa, synthetic construct
NNHDY

SEQ ID NO: 4108 - protein, 6 aa, synthetic construct
TTWYPT

SEQ ID NO: 4109 - protein, 5 aa, synthetic construct
NNHDY

SEQ ID NO: 4110 - protein, 5 aa, synthetic construct
TSLNS

SEQ ID NO: 4111 - protein, 5 aa, synthetic construct
NNHDY

SEQ ID NO: 4112 - protein, 6 aa, synthetic construct
ASGYPA

SEQ ID NO: 4113 - protein, 5 aa, synthetic construct
NNHDY

SEQ ID NO: 4114 - protein, 6 aa, synthetic construct
DRNFQY

SEQ ID NO: 4115 - protein, 5 aa, synthetic construct
NNHDY

SEQ ID NO: 4116 - protein, 7 aa, synthetic construct
TAYSDVA

SEQ ID NO: 4117 - protein, 5 aa, synthetic construct
NNHDY

SEQ ID NO: 4118 - protein, 5 aa, synthetic construct
TTMRA

SEQ ID NO: 4119 - protein, 5 aa, synthetic construct
NNHDY

SEQ ID NO: 4120 - protein, 6 aa, synthetic construct
NSASNY

SEQ ID NO: 4121 - protein, 5 aa, synthetic construct
NNHDY

SEQ ID NO: 4122 - protein, 6 aa, synthetic construct
DSASQY

SEQ ID NO: 4123 - protein, 5 aa, synthetic construct
NNHDY

SEQ ID NO: 4124 - protein, 8 aa, synthetic construct
ATSIAYPN

SEQ ID NO: 4125 - protein, 5 aa, synthetic construct
NNHDY

SEQ ID NO: 4126 - protein, 6 aa, synthetic construct
TTYSPF

SEQ ID NO: 4127 - protein, 5 aa, synthetic construct
NNHDY

SEQ ID NO: 4128 - protein, 6 aa, synthetic construct
NSAFDY

SEQ ID NO: 4129 - protein, 5 aa, synthetic construct
NNHDY

SEQ ID NO: 4130 - protein, 6 aa, synthetic construct
DSATAY

SEQ ID NO: 4131 - protein, 5 aa, synthetic construct
NNHDY

SEQ ID NO: 4132 - protein, 8 aa, synthetic construct
ATSIAYPN

SEQ ID NO: 4133 - protein, 5 aa, synthetic construct
NNHDY

SEQ ID NO: 4134 - protein, 6 aa, synthetic construct
DTASSY

SEQ ID NO: 4135 - protein, 5 aa, synthetic construct
NNHDY

SEQ ID NO: 4136 - protein, 6 aa, synthetic construct
DSTFNY

SEQ ID NO: 4137 - protein, 5 aa, synthetic construct
NNHDY

SEQ ID NO: 4138 - protein, 6 aa, synthetic construct
TKQYPT

SEQ ID NO: 4139 - protein, 5 aa, synthetic construct
NNHDY

SEQ ID NO: 4140 - protein, 6 aa, synthetic construct
YSGTPY

SEQ ID NO: 4141 - protein, 5 aa, synthetic construct
NNHDY

SEQ ID NO: 4142 - protein, 7 aa, synthetic construct
TQDSSYF

SEQ ID NO: 4143 - protein, 5 aa, synthetic construct
NNHDY

SEQ ID NO: 4144 - protein, 6 aa, synthetic construct
YGGSIY

SEQ ID NO: 4145 - protein, 5 aa, synthetic construct
NNHDY

SEQ ID NO: 4146 - protein, 8 aa, synthetic construct
ATSIAYPN

SEQ ID NO: 4147 - protein, 5 aa, synthetic construct
NNHDY

SEQ ID NO: 4148 - protein, 7 aa, synthetic construct
TSQVLYH

SEQ ID NO: 4149 - protein, 5 aa, synthetic construct
NNHDY

SEQ ID NO: 4150 - protein, 8 aa, synthetic construct
ATSIAYPN

SEQ ID NO: 4151 - protein, 5 aa, synthetic construct
NNHDY

SEQ ID NO: 4152 - protein, 6 aa, synthetic construct
DSTFNY

SEQ ID NO: 4153 - protein, 5 aa, synthetic construct
NNHDY

SEQ ID NO: 4154 - protein, 7 aa, synthetic construct
TRDSSYF

SEQ ID NO: 4155 - protein, 5 aa, synthetic construct
NNHDY

SEQ ID NO: 4156 - protein, 6 aa, synthetic construct
NSASNY

SEQ ID NO: 4157 - protein, 5 aa, synthetic construct
NNHDY

SEQ ID NO: 4158 - protein, 5 aa, synthetic construct
IAATT

SEQ ID NO: 4159 - protein, 5 aa, synthetic construct
NNHDY

SEQ ID NO: 4160 - protein, 5 aa, synthetic construct
TSLNS

SEQ ID NO: 4161 - protein, 5 aa, synthetic construct
NNHDY

SEQ ID NO: 4162 - protein, 6 aa, synthetic construct
DSATAY

SEQ ID NO: 4163 - protein, 5 aa, synthetic construct
NNHDY

SEQ ID NO: 4164 - protein, 5 aa, synthetic construct
TTMKS

SEQ ID NO: 4165 - protein, 5 aa, synthetic construct
NNHDY

SEQ ID NO: 4166 - protein, 6 aa, synthetic construct
TTYSPF

SEQ ID NO: 4167 - protein, 5 aa, synthetic construct
NNHDY

SEQ ID NO: 4168 - protein, 6 aa, synthetic construct
NSASNY

SEQ ID NO: 4169 - protein, 5 aa, synthetic construct
NNHDY

SEQ ID NO: 4170 - protein, 7 aa, synthetic construct
TQDSSYF

SEQ ID NO: 4171 - protein, 5 aa, synthetic construct
NNHDY

SEQ ID NO: 4172 - protein, 6 aa, synthetic construct
YFGTPY

SEQ ID NO: 4173 - protein, 5 aa, synthetic construct
NNHDY

SEQ ID NO: 4174 - protein, 7 aa, synthetic construct
TRDSSYF

SEQ ID NO: 4175 - protein, 5 aa, synthetic construct
NNHDY

SEQ ID NO: 4176 - protein, 7 aa, synthetic construct
TQDSSYF

SEQ ID NO: 4177 - protein, 5 aa, synthetic construct
NNHDY

SEQ ID NO: 4178 - protein, 7 aa, synthetic construct
TQDSSYF

SEQ ID NO: 4179 - protein, 5 aa, synthetic construct
MNHDT

SEQ ID NO: 4180 - protein, 6 aa, synthetic construct
DPNSYY

SEQ ID NO: 4181 - protein, 5 aa, synthetic construct
MNHDT

SEQ ID NO: 4182 - protein, 7 aa, synthetic construct
TQDSSYF

SEQ ID NO: 4183 - protein, 5 aa, synthetic construct
MNHDT

SEQ ID NO: 4184 - protein, 8 aa, synthetic construct
ATSIAYPN

SEQ ID NO: 4185 - protein, 5 aa, synthetic construct
MNHDT

SEQ ID NO: 4186 - protein, 8 aa, synthetic construct
ATSIAYPN

SEQ ID NO: 4187 - protein, 5 aa, synthetic construct
MNHDT

SEQ ID NO: 4188 - protein, 6 aa, synthetic construct
DRNFQY

SEQ ID NO: 4189 - protein, 5 aa, synthetic construct
MNHDT

SEQ ID NO: 4190 - protein, 6 aa, synthetic construct
DRNFQY

SEQ ID NO: 4191 - protein, 5 aa, synthetic construct
MNHDT

SEQ ID NO: 4192 - protein, 6 aa, synthetic construct
DTASSY

SEQ ID NO: 4193 - protein, 5 aa, synthetic construct
MNHDT

SEQ ID NO: 4194 - protein, 6 aa, synthetic construct
YSAAPY

SEQ ID NO: 4195 - protein, 5 aa, synthetic construct
MNHDT

SEQ ID NO: 4196 - protein, 5 aa, synthetic construct
TSLNS

SEQ ID NO: 4197 - protein, 5 aa, synthetic construct
MNHDT

SEQ ID NO: 4198 - protein, 7 aa, synthetic construct
TQDSSYF

SEQ ID NO: 4199 - protein, 5 aa, synthetic construct
MNHDT

SEQ ID NO: 4200 - protein, 8 aa, synthetic construct
ATSIAYPN

SEQ ID NO: 4201 - protein, 5 aa, synthetic construct
MNHDT

SEQ ID NO: 4202 - protein, 6 aa, synthetic construct
TSGFNG

SEQ ID NO: 4203 - protein, 5 aa, synthetic construct
MNHDT

SEQ ID NO: 4204 - protein, 6 aa, synthetic construct
DPNSYY

SEQ ID NO: 4205 - protein, 5 aa, synthetic construct
MNHDT

SEQ ID NO: 4206 - protein, 7 aa, synthetic construct
TRDSSYF

SEQ ID NO: 4207 - protein, 5 aa, synthetic construct
SGHND

SEQ ID NO: 4208 - protein, 7 aa, synthetic construct
TRDSSYF

SEQ ID NO: 4209 - protein, 5 aa, synthetic construct
SGHSN

SEQ ID NO: 4210 - protein, 6 aa, synthetic construct
YFGTPY

SEQ ID NO: 4211 - protein, 6 aa, synthetic construct
GKSSPN

SEQ ID NO: 4212 - protein, 6 aa, synthetic construct
DSASQY

SEQ ID NO: 4213 - protein, 6 aa, synthetic construct
GKSSPN

SEQ ID NO: 4214 - protein, 6 aa, synthetic construct
DSTFDY

SEQ ID NO: 4215 - protein, 6 aa, synthetic construct
GKSSPN

SEQ ID NO: 4216 - protein, 6 aa, synthetic construct
DSATAY

SEQ ID NO: 4217 - protein, 6 aa, synthetic construct
GKSSPN

SEQ ID NO: 4218 - protein, 6 aa, synthetic construct
DSASNY

SEQ ID NO: 4219 - protein, 6 aa, synthetic construct
GKSSPN

SEQ ID NO: 4220 - protein, 6 aa, synthetic construct
DSTFDY

SEQ ID NO: 4221 - protein, 6 aa, synthetic construct
GKSSPN

SEQ ID NO: 4222 - protein, 8 aa, synthetic construct
ATSIAYPN

SEQ ID NO: 4223 - protein, 6 aa, synthetic construct
GKSSPN

SEQ ID NO: 4224 - protein, 7 aa, synthetic construct
TRDSSYF

SEQ ID NO: 4225 - protein, 6 aa, synthetic construct
GKSSPN

SEQ ID NO: 4226 - protein, 6 aa, synthetic construct
DPNSYY

SEQ ID NO: 4227 - protein, 6 aa, synthetic construct
GKSSPN

SEQ ID NO: 4228 - protein, 6 aa, synthetic construct
DTASSY

SEQ ID NO: 4229 - protein, 6 aa, synthetic construct
GKSSPN

SEQ ID NO: 4230 - protein, 5 aa, synthetic construct
TYTTV

SEQ ID NO: 4231 - protein, 5 aa, synthetic construct
SNHLY

SEQ ID NO: 4232 - protein, 6 aa, synthetic construct
YFGTPY

SEQ ID NO: 4233 - protein, 5 aa, synthetic construct
SNHLY

SEQ ID NO: 4234 - protein, 5 aa, synthetic construct
TTMRA

SEQ ID NO: 4235 - protein, 5 aa, synthetic construct
SNHLY

SEQ ID NO: 4236 - protein, 7 aa, synthetic construct
TQDSSYF

SEQ ID NO: 4237 - protein, 5 aa, synthetic construct
SNHLY

SEQ ID NO: 4238 - protein, 6 aa, synthetic construct
DSTFNY

SEQ ID NO: 4239 - protein, 5 aa, synthetic construct
SNHLY

SEQ ID NO: 4240 - protein, 5 aa, synthetic construct
TTTRS

SEQ ID NO: 4241 - protein, 5 aa, synthetic construct
SNHLY

SEQ ID NO: 4242 - protein, 5 aa, synthetic construct
TYTTV

SEQ ID NO: 4243 - protein, 5 aa, synthetic construct
SNHLY

SEQ ID NO: 4244 - protein, 5 aa, synthetic construct
TSLNS

SEQ ID NO: 4245 - protein, 5 aa, synthetic construct
SNHLY

SEQ ID NO: 4246 - protein, 7 aa, synthetic construct
TRDSSYF

SEQ ID NO: 4247 - protein, 5 aa, synthetic construct
SNHLY

SEQ ID NO: 4248 - protein, 6 aa, synthetic construct
NDMFDY

SEQ ID NO: 4249 - protein, 5 aa, synthetic construct
SNHLY

SEQ ID NO: 4250 - protein, 6 aa, synthetic construct
YSGTPY

SEQ ID NO: 4251 - protein, 5 aa, synthetic construct
SNHLY

SEQ ID NO: 4252 - protein, 6 aa, synthetic construct
SSVTPY

SEQ ID NO: 4253 - protein, 5 aa, synthetic construct
SNHLY

SEQ ID NO: 4254 - protein, 6 aa, synthetic construct
DRNVDY

SEQ ID NO: 4255 - protein, 6 aa, synthetic construct
GFQATS

SEQ ID NO: 4256 - protein, 5 aa, synthetic construct
TSLNS

SEQ ID NO: 4257 - protein, 6 aa, synthetic construct
GFQATS

SEQ ID NO: 4258 - protein, 6 aa, synthetic construct
DSATAY

SEQ ID NO: 4259 - protein, 6 aa, synthetic construct
GFQATS

SEQ ID NO: 4260 - protein, 5 aa, synthetic construct
TTTRS

SEQ ID NO: 4261 - protein, 6 aa, synthetic construct
GFQATS

SEQ ID NO: 4262 - protein, 6 aa, synthetic construct
TTYSPF

SEQ ID NO: 4263 - protein, 6 aa, synthetic construct
GFQATS

SEQ ID NO: 4264 - protein, 6 aa, synthetic construct
DRNVDY

SEQ ID NO: 4265 - protein, 6 aa, synthetic construct
GFQATS

SEQ ID NO: 4266 - protein, 6 aa, synthetic construct
YFGTPY

SEQ ID NO: 4267 - protein, 6 aa, synthetic construct
GFQATS

SEQ ID NO: 4268 - protein, 6 aa, synthetic construct
DRNFQY

SEQ ID NO: 4269 - protein, 6 aa, synthetic construct
GFQATS

SEQ ID NO: 4270 - protein, 6 aa, synthetic construct
ASGYPT

SEQ ID NO: 4271 - protein, 6 aa, synthetic construct
GFQATS

SEQ ID NO: 4272 - protein, 5 aa, synthetic construct
STATQ

SEQ ID NO: 4273 - protein, 6 aa, synthetic construct
GFQATS

SEQ ID NO: 4274 - protein, 6 aa, synthetic construct
DRNFQY

SEQ ID NO: 4275 - protein, 6 aa, synthetic construct
GFQATS

SEQ ID NO: 4276 - protein, 5 aa, synthetic construct
TSITA

SEQ ID NO: 4277 - protein, 6 aa, synthetic construct
GFQATS

SEQ ID NO: 4278 - protein, 7 aa, synthetic construct
TRDSSYF

SEQ ID NO: 4279 - protein, 6 aa, synthetic construct
GFQATS

SEQ ID NO: 4280 - protein, 5 aa, synthetic construct
IAATT

SEQ ID NO: 4281 - protein, 6 aa, synthetic construct
GFQATS

SEQ ID NO: 4282 - protein, 6 aa, synthetic construct
DTASSY

SEQ ID NO: 4283 - protein, 5 aa, synthetic construct
FNHDT

SEQ ID NO: 4284 - protein, 5 aa, synthetic construct
TSLNS

SEQ ID NO: 4285 - protein, 5 aa, synthetic construct
FNHDT

SEQ ID NO: 4286 - protein, 6 aa, synthetic construct
DGTSNN

SEQ ID NO: 4287 - protein, 5 aa, synthetic construct
FNHDT

SEQ ID NO: 4288 - protein, 6 aa, synthetic construct
TTWYPT

SEQ ID NO: 4289 - protein, 5 aa, synthetic construct
FNHDT

SEQ ID NO: 4290 - protein, 7 aa, synthetic construct
NIATSEY

SEQ ID NO: 4291 - protein, 5 aa, synthetic construct
FNHDT

SEQ ID NO: 4292 - protein, 7 aa, synthetic construct
TRDSSYF

SEQ ID NO: 4293 - protein, 5 aa, synthetic construct
FNHDT

SEQ ID NO: 4294 - protein, 6 aa, synthetic construct
ASGYPA

SEQ ID NO: 4295 - protein, 5 aa, synthetic construct
FNHDT

SEQ ID NO: 4296 - protein, 6 aa, synthetic construct
YSGTPY

SEQ ID NO: 4297 - protein, 5 aa, synthetic construct
FNHDT

SEQ ID NO: 4298 - protein, 7 aa, synthetic construct
TRDSSYF

SEQ ID NO: 4299 - protein, 5 aa, synthetic construct
FNHDT

SEQ ID NO: 4300 - protein, 6 aa, synthetic construct
TAYSTF

SEQ ID NO: 4301 - protein, 5 aa, synthetic construct
FNHDT

SEQ ID NO: 4302 - protein, 8 aa, synthetic construct
ATSIAYPN

SEQ ID NO: 4303 - protein, 5 aa, synthetic construct
FNHDT

SEQ ID NO: 4304 - protein, 6 aa, synthetic construct
DPNSYY

SEQ ID NO: 4305 - protein, 5 aa, synthetic construct
FNHDT

SEQ ID NO: 4306 - protein, 6 aa, synthetic construct
TAYSTF

SEQ ID NO: 4307 - protein, 5 aa, synthetic construct
FNHDT

SEQ ID NO: 4308 - protein, 6 aa, synthetic construct
DSATAY

SEQ ID NO: 4309 - protein, 5 aa, synthetic construct
FNHDT

SEQ ID NO: 4310 - protein, 6 aa, synthetic construct
TKQYPT

SEQ ID NO: 4311 - protein, 5 aa, synthetic construct
FNHDT

SEQ ID NO: 4312 - protein, 5 aa, synthetic construct
TSLNS

SEQ ID NO: 4313 - protein, 5 aa, synthetic construct
FNHDT

SEQ ID NO: 4314 - protein, 6 aa, synthetic construct
NSAFDY

SEQ ID NO: 4315 - protein, 5 aa, synthetic construct
FNHDT

SEQ ID NO: 4316 - protein, 6 aa, synthetic construct
DPNSYY

SEQ ID NO: 4317 - protein, 5 aa, synthetic construct
FNHDT

SEQ ID NO: 4318 - protein, 6 aa, synthetic construct
DRSSDN

SEQ ID NO: 4319 - protein, 5 aa, synthetic construct
FNHDT

SEQ ID NO: 4320 - protein, 6 aa, synthetic construct
DRNVDY

SEQ ID NO: 4321 - protein, 5 aa, synthetic construct
FNHDT

SEQ ID NO: 4322 - protein, 5 aa, synthetic construct
TYTTV

SEQ ID NO: 4323 - protein, 5 aa, synthetic construct
FNHDT

SEQ ID NO: 4324 - protein, 7 aa, synthetic construct
TISGNEY

SEQ ID NO: 4325 - protein, 5 aa, synthetic construct
FNHDT

SEQ ID NO: 4326 - protein, 6 aa, synthetic construct
YSGTPY

SEQ ID NO: 4327 - protein, 5 aa, synthetic construct
FNHDT

SEQ ID NO: 4328 - protein, 6 aa, synthetic construct
STYSPF

SEQ ID NO: 4329 - protein, 5 aa, synthetic construct
FNHDT

SEQ ID NO: 4330 - protein, 5 aa, synthetic construct
TYTTV

SEQ ID NO: 4331 - protein, 5 aa, synthetic construct
FNHDT

SEQ ID NO: 4332 - protein, 5 aa, synthetic construct
STATQ

SEQ ID NO: 4333 - protein, 5 aa, synthetic construct
FNHDT

SEQ ID NO: 4334 - protein, 6 aa, synthetic construct
STYSPF

SEQ ID NO: 4335 - protein, 5 aa, synthetic construct
FNHDT

SEQ ID NO: 4336 - protein, 6 aa, synthetic construct
TTYSPF

SEQ ID NO: 4337 - protein, 5 aa, synthetic construct
FNHDT

SEQ ID NO: 4338 - protein, 6 aa, synthetic construct
YSATPY

SEQ ID NO: 4339 - protein, 5 aa, synthetic construct
FNHDT

SEQ ID NO: 4340 - protein, 5 aa, synthetic construct
STATR

SEQ ID NO: 4341 - protein, 5 aa, synthetic construct
FNHDT

SEQ ID NO: 4342 - protein, 6 aa, synthetic construct
DRNFQY

SEQ ID NO: 4343 - protein, 5 aa, synthetic construct
FNHDT

SEQ ID NO: 4344 - protein, 5 aa, synthetic construct
TSLNS

SEQ ID NO: 4345 - protein, 5 aa, synthetic construct
FNHDT

SEQ ID NO: 4346 - protein, 7 aa, synthetic construct
TRDSSYF

SEQ ID NO: 4347 - protein, 5 aa, synthetic construct
FNHDT

SEQ ID NO: 4348 - protein, 5 aa, synthetic construct
IATTT

SEQ ID NO: 4349 - protein, 5 aa, synthetic construct
FNHDT

SEQ ID NO: 4350 - protein, 6 aa, synthetic construct
DSATAY

SEQ ID NO: 4351 - protein, 5 aa, synthetic construct
FNHDT

SEQ ID NO: 4352 - protein, 6 aa, synthetic construct
DSASQY

SEQ ID NO: 4353 - protein, 5 aa, synthetic construct
FNHDT

SEQ ID NO: 4354 - protein, 8 aa, synthetic construct
ATSIGYPN

SEQ ID NO: 4355 - protein, 5 aa, synthetic construct
FNHDT

SEQ ID NO: 4356 - protein, 7 aa, synthetic construct
TRDSSYF

SEQ ID NO: 4357 - protein, 5 aa, synthetic construct
FNHDT

SEQ ID NO: 4358 - protein, 7 aa, synthetic construct
TQDSSYF

SEQ ID NO: 4359 - protein, 5 aa, synthetic construct
FNHDT

SEQ ID NO: 4360 - protein, 6 aa, synthetic construct
NSAFDY

SEQ ID NO: 4361 - protein, 5 aa, synthetic construct
FNHDT

SEQ ID NO: 4362 - protein, 6 aa, synthetic construct
YSGTPY

SEQ ID NO: 4363 - protein, 5 aa, synthetic construct
FNHDT

SEQ ID NO: 4364 - protein, 6 aa, synthetic construct
TTTYPT

SEQ ID NO: 4365 - protein, 5 aa, synthetic construct
FNHDT

SEQ ID NO: 4366 - protein, 6 aa, synthetic construct
DTASSY

SEQ ID NO: 4367 - protein, 5 aa, synthetic construct
FNHDT

SEQ ID NO: 4368 - protein, 6 aa, synthetic construct
DSATAY

SEQ ID NO: 4369 - protein, 5 aa, synthetic construct
FNHDT

SEQ ID NO: 4370 - protein, 7 aa, synthetic construct
TIYSNPF

SEQ ID NO: 4371 - protein, 5 aa, synthetic construct
FNHDT

SEQ ID NO: 4372 - protein, 6 aa, synthetic construct
TTGYPT

SEQ ID NO: 4373 - protein, 5 aa, synthetic construct
FNHDT

SEQ ID NO: 4374 - protein, 6 aa, synthetic construct
DRNFQY

SEQ ID NO: 4375 - protein, 5 aa, synthetic construct
FNHDT

SEQ ID NO: 4376 - protein, 8 aa, synthetic construct
ATSIAYPN

SEQ ID NO: 4377 - protein, 5 aa, synthetic construct
FNHDT

SEQ ID NO: 4378 - protein, 6 aa, synthetic construct
DSTFNY

SEQ ID NO: 4379 - protein, 5 aa, synthetic construct
FNHDT

SEQ ID NO: 4380 - protein, 8 aa, synthetic construct
ATSIAYPN

SEQ ID NO: 4381 - protein, 5 aa, synthetic construct
FNHDT

SEQ ID NO: 4382 - protein, 6 aa, synthetic construct
DSASNY

SEQ ID NO: 4383 - protein, 5 aa, synthetic construct
FNHDT

SEQ ID NO: 4384 - protein, 7 aa, synthetic construct
NIATSEY

SEQ ID NO: 4385 - protein, 5 aa, synthetic construct
FNHDT

SEQ ID NO: 4386 - protein, 6 aa, synthetic construct
DPNSYY

SEQ ID NO: 4387 - protein, 5 aa, synthetic construct
FNHDT

SEQ ID NO: 4388 - protein, 6 aa, synthetic construct
TAYSTF

SEQ ID NO: 4389 - protein, 6 aa, synthetic construct
NSQYPW

SEQ ID NO: 4390 - protein, 6 aa, synthetic construct
SSVTPY

SEQ ID NO: 4391 - protein, 6 aa, synthetic construct
NSQYPW

SEQ ID NO: 4392 - protein, 6 aa, synthetic construct
SSVTPY

SEQ ID NO: 4393 - protein, 6 aa, synthetic construct
NSQYPW

SEQ ID NO: 4394 - protein, 8 aa, synthetic construct
ATSIGYPN

SEQ ID NO: 4395 - protein, 6 aa, synthetic construct
NSQYPW

SEQ ID NO: 4396 - protein, 6 aa, synthetic construct
DSATAY

SEQ ID NO: 4397 - protein, 6 aa, synthetic construct
NSQYPW

SEQ ID NO: 4398 - protein, 7 aa, synthetic construct
TIYSNPF

SEQ ID NO: 4399 - protein, 6 aa, synthetic construct
NSQYPW

SEQ ID NO: 4400 - protein, 6 aa, synthetic construct
YFGTPY

SEQ ID NO: 4401 - protein, 6 aa, synthetic construct
NSQYPW

SEQ ID NO: 4402 - protein, 6 aa, synthetic construct
TSGFNG

SEQ ID NO: 4403 - protein, 6 aa, synthetic construct
NSQYPW

SEQ ID NO: 4404 - protein, 6 aa, synthetic construct
VTPDNH

SEQ ID NO: 4405 - protein, 6 aa, synthetic construct
NSQYPW

SEQ ID NO: 4406 - protein, 6 aa, synthetic construct
STYSPF

SEQ ID NO: 4407 - protein, 6 aa, synthetic construct
NSQYPW

SEQ ID NO: 4408 - protein, 6 aa, synthetic construct
YSATPY

SEQ ID NO: 4409 - protein, 6 aa, synthetic construct
NSQYPW

SEQ ID NO: 4410 - protein, 6 aa, synthetic construct
DSTFNY

SEQ ID NO: 4411 - protein, 6 aa, synthetic construct
NSQYPW

SEQ ID NO: 4412 - protein, 6 aa, synthetic construct
NSASNY

SEQ ID NO: 4413 - protein, 6 aa, synthetic construct
NSQYPW

SEQ ID NO: 4414 - protein, 6 aa, synthetic construct
YSGTPY

SEQ ID NO: 4415 - protein, 6 aa, synthetic construct
NSQYPW

SEQ ID NO: 4416 - protein, 5 aa, synthetic construct
TSLNS

SEQ ID NO: 4417 - protein, 6 aa, synthetic construct
NSQYPW

SEQ ID NO: 4418 - protein, 6 aa, synthetic construct
DPNSYY

SEQ ID NO: 4419 - protein, 6 aa, synthetic construct
NSQYPW

SEQ ID NO: 4420 - protein, 7 aa, synthetic construct
TQDSSYF

SEQ ID NO: 4421 - protein, 6 aa, synthetic construct
NSQYPW

SEQ ID NO: 4422 - protein, 5 aa, synthetic construct
TYTTV

SEQ ID NO: 4423 - protein, 6 aa, synthetic construct
NSQYPW

SEQ ID NO: 4424 - protein, 6 aa, synthetic construct
YSGTPY

SEQ ID NO: 4425 - protein, 6 aa, synthetic construct
NSQYPW

SEQ ID NO: 4426 - protein, 6 aa, synthetic construct
DRNFQY

SEQ ID NO: 4427 - protein, 6 aa, synthetic construct
NSQYPW

SEQ ID NO: 4428 - protein, 5 aa, synthetic construct
TSLNS

SEQ ID NO: 4429 - protein, 6 aa, synthetic construct
NSQYPW

SEQ ID NO: 4430 - protein, 8 aa, synthetic construct
ATSIAYPN

SEQ ID NO: 4431 - protein, 6 aa, synthetic construct
NSQYPW

SEQ ID NO: 4432 - protein, 8 aa, synthetic construct
ATSIGYPN

SEQ ID NO: 4433 - protein, 6 aa, synthetic construct
NSQYPW

SEQ ID NO: 4434 - protein, 6 aa, synthetic construct
VTPDNH

SEQ ID NO: 4435 - protein, 6 aa, synthetic construct
NSQYPW

SEQ ID NO: 4436 - protein, 6 aa, synthetic construct
DPNSYY

SEQ ID NO: 4437 - protein, 6 aa, synthetic construct
NSQYPW

SEQ ID NO: 4438 - protein, 6 aa, synthetic construct
DRNFQY

SEQ ID NO: 4439 - protein, 6 aa, synthetic construct
NSQYPW

SEQ ID NO: 4440 - protein, 6 aa, synthetic construct
DSASNY

SEQ ID NO: 4441 - protein, 6 aa, synthetic construct
NSQYPW

SEQ ID NO: 4442 - protein, 6 aa, synthetic construct
ASGYPA

SEQ ID NO: 4443 - protein, 6 aa, synthetic construct
NSQYPW

SEQ ID NO: 4444 - protein, 6 aa, synthetic construct
ASGYPA

SEQ ID NO: 4445 - protein, 6 aa, synthetic construct
NSQYPW

SEQ ID NO: 4446 - protein, 6 aa, synthetic construct
DSASQY

SEQ ID NO: 4447 - protein, 6 aa, synthetic construct
NSQYPW

SEQ ID NO: 4448 - protein, 6 aa, synthetic construct
YSGTPY

SEQ ID NO: 4449 - protein, 6 aa, synthetic construct
NSQYPW

SEQ ID NO: 4450 - protein, 6 aa, synthetic construct
DSTFDY

SEQ ID NO: 4451 - protein, 6 aa, synthetic construct
NSQYPW

SEQ ID NO: 4452 - protein, 7 aa, synthetic construct
TIYSNPF

SEQ ID NO: 4453 - DNA, 15 bp, synthetic construct
  source 1..15: mol_type = other DNA
tctggacatgatacc

SEQ ID NO: 4454 - DNA, 18 bp, synthetic construct
  source 1..18: mol_type = other DNA
gatcgtaattttcagtac

SEQ ID NO: 4455 - DNA, 15 bp, synthetic construct
  source 1..15: mol_type = other DNA
aataaccacaacaac

SEQ ID NO: 4456 - DNA, 18 bp, synthetic construct
  source 1..18: mol_type = other DNA
acctcagggttcaatggg

SEQ ID NO: 4457 - DNA, 15 bp, synthetic construct
  source 1..15: mol_type = other DNA
aataaccacaacaac

SEQ ID NO: 4458 - DNA, 21 bp, synthetic construct
  source 1..21: mol_type = other DNA
acccgggacagttcttacttc

SEQ ID NO: 4459 - DNA, 15 bp, synthetic construct
  source 1..15: mol_type = other DNA
aataaccatgactat

SEQ ID NO: 4460 - DNA, 18 bp, synthetic construct
  source 1..18: mol_type = other DNA
actacttactcacctttc

SEQ ID NO: 4461 - DNA, 15 bp, synthetic construct
  source 1..15: mol_type = other DNA
aataaccacaacaac

SEQ ID NO: 4462 - DNA, 15 bp, synthetic construct
  source 1..15: mol_type = other DNA
acatctttgaacagt

SEQ ID NO: 4463 - DNA, 15 bp, synthetic construct
  source 1..15: mol_type = other DNA
tctggacatgatacc

SEQ ID NO: 4464 - DNA, 18 bp, synthetic construct
  source 1..18: mol_type = other DNA
tactctgcgacaccttat

SEQ ID NO: 4465 - DNA, 15 bp, synthetic construct
  source 1..15: mol_type = other DNA
aataaccacaacaac

SEQ ID NO: 4466 - DNA, 18 bp, synthetic construct
  source 1..18: mol_type = other DNA
gcctcagggtacccaacc

SEQ ID NO: 4467 - DNA, 15 bp, synthetic construct
  source 1..15: mol_type = other DNA
ctaggccacaatgct

SEQ ID NO: 4468 - DNA, 18 bp, synthetic construct
  source 1..18: mol_type = other DNA
acctcagggttcaatggg

SEQ ID NO: 4469 - DNA, 15 bp, synthetic construct
  source 1..15: mol_type = other DNA
tcaggacatagtgct

SEQ ID NO: 4470 - DNA, 15 bp, synthetic construct
  source 1..15: mol_type = other DNA
accaccatgaggagt

SEQ ID NO: 4471 - DNA, 15 bp, synthetic construct
  source 1..15: mol_type = other DNA
aataaccacaacaac

SEQ ID NO: 4472 - DNA, 18 bp, synthetic construct
  source 1..18: mol_type = other DNA
tcctctgtgacaccttat

SEQ ID NO: 4473 - DNA, 15 bp, synthetic construct
  source 1..15: mol_type = other DNA
aataaccatgactat

SEQ ID NO: 4474 - DNA, 18 bp, synthetic construct
  source 1..18: mol_type = other DNA
gacagtgccactgcttac

SEQ ID NO: 4475 - DNA, 18 bp, synthetic construct
  source 1..18: mol_type = other DNA
aattcccagtatccctgg

SEQ ID NO: 4476 - DNA, 15 bp, synthetic construct
  source 1..15: mol_type = other DNA
acatccataactgcc

SEQ ID NO: 4477 - DNA, 18 bp, synthetic construct
  source 1..18: mol_type = other DNA
aattcccagtatccctgg

SEQ ID NO: 4478 - DNA, 18 bp, synthetic construct
  source 1..18: mol_type = other DNA
tcctctgtgacaccttat

SEQ ID NO: 4479 - DNA, 15 bp, synthetic construct
  source 1..15: mol_type = other DNA
ttcaatcatgataca

SEQ ID NO: 4480 - DNA, 18 bp, synthetic construct
  source 1..18: mol_type = other DNA
gatcgtaatgttgactac

SEQ ID NO: 4481 - DNA, 15 bp, synthetic construct
  source 1..15: mol_type = other DNA
ctaggccacaatgct

SEQ ID NO: 4482 - DNA, 18 bp, synthetic construct
  source 1..18: mol_type = other DNA
tcctctgggacaccttat

SEQ ID NO: 4483 - DNA, 15 bp, synthetic construct
  source 1..15: mol_type = other DNA
aataaccacaacaac

SEQ ID NO: 4484 - DNA, 15 bp, synthetic construct
  source 1..15: mol_type = other DNA
acatctttgaacagt

SEQ ID NO: 4485 - DNA, 15 bp, synthetic construct
  source 1..15: mol_type = other DNA
aataaccacaacaac

SEQ ID NO: 4486 - DNA, 18 bp, synthetic construct
  source 1..18: mol_type = other DNA
tcctctgtgacaccttat

SEQ ID NO: 4487 - DNA, 18 bp, synthetic construct
  source 1..18: mol_type = other DNA
gggaaatcaagccctaac

SEQ ID NO: 4488 - DNA, 18 bp, synthetic construct
  source 1..18: mol_type = other DNA
tactctgcgacaccttat

SEQ ID NO: 4489 - DNA, 15 bp, synthetic construct
  source 1..15: mol_type = other DNA
aatagccacaactac

SEQ ID NO: 4490 - DNA, 18 bp, synthetic construct
  source 1..18: mol_type = other DNA
accaaacagtacccaacc

SEQ ID NO: 4491 - DNA, 18 bp, synthetic construct
  source 1..18: mol_type = other DNA
gggaaatcaagccctaac

SEQ ID NO: 4492 - DNA, 18 bp, synthetic construct
  source 1..18: mol_type = other DNA
gacagtgccactgcttac

SEQ ID NO: 4493 - DNA, 15 bp, synthetic construct
  source 1..15: mol_type = other DNA
aataaccacaacaac

SEQ ID NO: 4494 - DNA, 18 bp, synthetic construct
  source 1..18: mol_type = other DNA
gaccctaacagttattac

SEQ ID NO: 4495 - DNA, 15 bp, synthetic construct
  source 1..15: mol_type = other DNA
aataaccacaacaac

SEQ ID NO: 4496 - DNA, 21 bp, synthetic construct
  source 1..21: mol_type = other DNA
acccgggacagttcttacttc

SEQ ID NO: 4497 - DNA, 15 bp, synthetic construct
  source 1..15: mol_type = other DNA
aataaccatgactat

SEQ ID NO: 4498 - DNA, 21 bp, synthetic construct
  source 1..21: mol_type = other DNA
actatttactcaaatcctttc

SEQ ID NO: 4499 - DNA, 15 bp, synthetic construct
  source 1..15: mol_type = other DNA
ttcaatcatgataca

SEQ ID NO: 4500 - DNA, 18 bp, synthetic construct
  source 1..18: mol_type = other DNA
gacagtgcctccaactac

SEQ ID NO: 4501 - DNA, 15 bp, synthetic construct
  source 1..15: mol_type = other DNA
aataaccatgactat

SEQ ID NO: 4502 - DNA, 18 bp, synthetic construct
  source 1..18: mol_type = other DNA
gaccctaacagttattac

SEQ ID NO: 4503 - DNA, 15 bp, synthetic construct
  source 1..15: mol_type = other DNA
aataaccatgactat

SEQ ID NO: 4504 - DNA, 18 bp, synthetic construct
  source 1..18: mol_type = other DNA
tactttgggacaccttat

SEQ ID NO: 4505 - DNA, 15 bp, synthetic construct
  source 1..15: mol_type = other DNA
aatagccacaactac

SEQ ID NO: 4506 - DNA, 18 bp, synthetic construct
  source 1..18: mol_type = other DNA
gatactgcctcatcatac

SEQ ID NO: 4507 - DNA, 15 bp, synthetic construct
  source 1..15: mol_type = other DNA
aataaccatgactat

SEQ ID NO: 4508 - DNA, 15 bp, synthetic construct
  source 1..15: mol_type = other DNA
acatctttgaacagt

SEQ ID NO: 4509 - DNA, 15 bp, synthetic construct
  source 1..15: mol_type = other DNA
ctaggccacaatgct

SEQ ID NO: 4510 - DNA, 18 bp, synthetic construct
  source 1..18: mol_type = other DNA
gatactgcttcatcatac

SEQ ID NO: 4511 - DNA, 15 bp, synthetic construct
  source 1..15: mol_type = other DNA
aataaccacaacaac

SEQ ID NO: 4512 - DNA, 24 bp, synthetic construct
  source 1..24: mol_type = other DNA
accacaagcatagcttaccctaat

SEQ ID NO: 4513 - DNA, 15 bp, synthetic construct
  source 1..15: mol_type = other DNA
aataaccatgactat

SEQ ID NO: 4514 - DNA, 18 bp, synthetic construct
  source 1..18: mol_type = other DNA
actgcttactcaactttc

SEQ ID NO: 4515 - DNA, 18 bp, synthetic construct
  source 1..18: mol_type = other DNA
gggaaatcaagccctaac

SEQ ID NO: 4516 - DNA, 18 bp, synthetic construct
  source 1..18: mol_type = other DNA
gatcgtaattttcagtac

SEQ ID NO: 4517 - DNA, 15 bp, synthetic construct
  source 1..15: mol_type = other DNA
ttcaatcatgataca

SEQ ID NO: 4518 - DNA, 21 bp, synthetic construct
  source 1..21: mol_type = other DNA
acccgggacagttcttacttc

SEQ ID NO: 4519 - DNA, 15 bp, synthetic construct
  source 1..15: mol_type = other DNA
tctggacatgatacc

SEQ ID NO: 4520 - DNA, 18 bp, synthetic construct
  source 1..18: mol_type = other DNA
gacagcacttttaactac

SEQ ID NO: 4521 - DNA, 15 bp, synthetic construct
  source 1..15: mol_type = other DNA
ctaggccacaatgct

SEQ ID NO: 4522 - DNA, 18 bp, synthetic construct
  source 1..18: mol_type = other DNA
actacttactcacctttc

SEQ ID NO: 4523 - DNA, 15 bp, synthetic construct
  source 1..15: mol_type = other DNA
aatagccacaactac

SEQ ID NO: 4524 - DNA, 18 bp, synthetic construct
  source 1..18: mol_type = other DNA
agtacttactcacctttc

SEQ ID NO: 4525 - DNA, 18 bp, synthetic construct
  source 1..18: mol_type = other DNA
gggaaatcaagccctaac

SEQ ID NO: 4526 - DNA, 18 bp, synthetic construct
  source 1..18: mol_type = other DNA
tactctgcgacaccttat

SEQ ID NO: 4527 - DNA, 18 bp, synthetic construct
  source 1..18: mol_type = other DNA
aattcccagtatccctgg

SEQ ID NO: 4528 - DNA, 18 bp, synthetic construct
  source 1..18: mol_type = other DNA
gacagtgcttctcagtat

SEQ ID NO: 4529 - DNA, 18 bp, synthetic construct
  source 1..18: mol_type = other DNA
aattcccagtatccctgg

SEQ ID NO: 4530 - DNA, 18 bp, synthetic construct
  source 1..18: mol_type = other DNA
aatgatatgtttgactat

SEQ ID NO: 4531 - DNA, 18 bp, synthetic construct
  source 1..18: mol_type = other DNA
ggttttcaggcaacttct

SEQ ID NO: 4532 - DNA, 15 bp, synthetic construct
  source 1..15: mol_type = other DNA
acttatacaactgtt

SEQ ID NO: 4533 - DNA, 15 bp, synthetic construct
  source 1..15: mol_type = other DNA
ctaggccacaatgct

SEQ ID NO: 4534 - DNA, 21 bp, synthetic construct
  source 1..21: mol_type = other DNA
acccgggacagttcttacttc

SEQ ID NO: 4535 - DNA, 15 bp, synthetic construct
  source 1..15: mol_type = other DNA
aatagccacaactac

SEQ ID NO: 4536 - DNA, 18 bp, synthetic construct
  source 1..18: mol_type = other DNA
aacagtgcttttgactac

SEQ ID NO: 4537 - DNA, 15 bp, synthetic construct
  source 1..15: mol_type = other DNA
ttcaatcatgataca

SEQ ID NO: 4538 - DNA, 18 bp, synthetic construct
  source 1..18: mol_type = other DNA
tactctgggacaccttat

SEQ ID NO: 4539 - DNA, 15 bp, synthetic construct
  source 1..15: mol_type = other DNA
aataaccatgactat

SEQ ID NO: 4540 - DNA, 21 bp, synthetic construct
  source 1..21: mol_type = other DNA
acccaggacagttcttacttc

SEQ ID NO: 4541 - DNA, 15 bp, synthetic construct
  source 1..15: mol_type = other DNA
aataaccatgactat

SEQ ID NO: 4542 - DNA, 18 bp, synthetic construct
  source 1..18: mol_type = other DNA
gacagtgccactgcttac

SEQ ID NO: 4543 - DNA, 15 bp, synthetic construct
  source 1..15: mol_type = other DNA
tctaatcacctatat

SEQ ID NO: 4544 - DNA, 18 bp, synthetic construct
  source 1..18: mol_type = other DNA
gatggtacttctaacaac

SEQ ID NO: 4545 - DNA, 18 bp, synthetic construct
  source 1..18: mol_type = other DNA
aattcccagtatccctgg

SEQ ID NO: 4546 - DNA, 15 bp, synthetic construct
  source 1..15: mol_type = other DNA
tccacagcaacccgg

SEQ ID NO: 4547 - DNA, 15 bp, synthetic construct
  source 1..15: mol_type = other DNA
ctgggacataatgct

SEQ ID NO: 4548 - DNA, 18 bp, synthetic construct
  source 1..18: mol_type = other DNA
aacagtgcttctcagtcc

SEQ ID NO: 4549 - DNA, 15 bp, synthetic construct
  source 1..15: mol_type = other DNA
ctgggacataatgct

SEQ ID NO: 4550 - DNA, 18 bp, synthetic construct
  source 1..18: mol_type = other DNA
agtacttactcacctttc

SEQ ID NO: 4551 - DNA, 15 bp, synthetic construct
  source 1..15: mol_type = other DNA
ctgggccacgatact

SEQ ID NO: 4552 - DNA, 18 bp, synthetic construct
  source 1..18: mol_type = other DNA
gacagtgccacagcttac

SEQ ID NO: 4553 - DNA, 15 bp, synthetic construct
  source 1..15: mol_type = other DNA
aataaccacaacaac

SEQ ID NO: 4554 - DNA, 18 bp, synthetic construct
  source 1..18: mol_type = other DNA
gaccctaacagttattac

SEQ ID NO: 4555 - DNA, 15 bp, synthetic construct
  source 1..15: mol_type = other DNA
aataaccatgactat

SEQ ID NO: 4556 - DNA, 21 bp, synthetic construct
  source 1..21: mol_type = other DNA
acaatcagtggaaacgagtac

SEQ ID NO: 4557 - DNA, 15 bp, synthetic construct
  source 1..15: mol_type = other DNA
ctgggacataatgct

SEQ ID NO: 4558 - DNA, 21 bp, synthetic construct
  source 1..21: mol_type = other DNA
aacattgctacaagcgagtac

SEQ ID NO: 4559 - DNA, 15 bp, synthetic construct
  source 1..15: mol_type = other DNA
ctaggccacaatgct

SEQ ID NO: 4560 - DNA, 18 bp, synthetic construct
  source 1..18: mol_type = other DNA
gaccctaacagttattac

SEQ ID NO: 4561 - DNA, 15 bp, synthetic construct
  source 1..15: mol_type = other DNA
aataaccacaacaac

SEQ ID NO: 4562 - DNA, 18 bp, synthetic construct
  source 1..18: mol_type = other DNA
tatggtggatccatttac

SEQ ID NO: 4563 - DNA, 15 bp, synthetic construct
  source 1..15: mol_type = other DNA
aataaccatgactat

SEQ ID NO: 4564 - DNA, 15 bp, synthetic construct
  source 1..15: mol_type = other DNA
accaccatgagggct

SEQ ID NO: 4565 - DNA, 15 bp, synthetic construct
  source 1..15: mol_type = other DNA
ctgggacataatgct

SEQ ID NO: 4566 - DNA, 18 bp, synthetic construct
  source 1..18: mol_type = other DNA
gcctcagggtacccagct

SEQ ID NO: 4567 - DNA, 15 bp, synthetic construct
  source 1..15: mol_type = other DNA
aataaccacaacaac

SEQ ID NO: 4568 - DNA, 21 bp, synthetic construct
  source 1..21: mol_type = other DNA
actacttatttaactattgcc

SEQ ID NO: 4569 - DNA, 15 bp, synthetic construct
  source 1..15: mol_type = other DNA
aataaccacaacaac

SEQ ID NO: 4570 - DNA, 21 bp, synthetic construct
  source 1..21: mol_type = other DNA
acccaggacagttcttacttc

SEQ ID NO: 4571 - DNA, 15 bp, synthetic construct
  source 1..15: mol_type = other DNA
aataaccacaacaac

SEQ ID NO: 4572 - DNA, 15 bp, synthetic construct
  source 1..15: mol_type = other DNA
acaactttgaacagt

SEQ ID NO: 4573 - DNA, 15 bp, synthetic construct
  source 1..15: mol_type = other DNA
tctaatcacctatat

SEQ ID NO: 4574 - DNA, 18 bp, synthetic construct
  source 1..18: mol_type = other DNA
tactctgggacaccttat

SEQ ID NO: 4575 - DNA, 15 bp, synthetic construct
  source 1..15: mol_type = other DNA
tctggacatgatacc

SEQ ID NO: 4576 - DNA, 18 bp, synthetic construct
  source 1..18: mol_type = other DNA
aacagtgcttttgactac

SEQ ID NO: 4577 - DNA, 15 bp, synthetic construct
  source 1..15: mol_type = other DNA
ctgggccacgatact

SEQ ID NO: 4578 - DNA, 15 bp, synthetic construct
  source 1..15: mol_type = other DNA
acatctttgaacagt

SEQ ID NO: 4579 - DNA, 15 bp, synthetic construct
  source 1..15: mol_type = other DNA
aataaccacaacaac

SEQ ID NO: 4580 - DNA, 18 bp, synthetic construct
  source 1..18: mol_type = other DNA
tactttgggacaccttat

SEQ ID NO: 4581 - DNA, 15 bp, synthetic construct
  source 1..15: mol_type = other DNA
aataaccacaacaac

SEQ ID NO: 4582 - DNA, 24 bp, synthetic construct
  source 1..24: mol_type = other DNA
gccacaagcatagcttaccctaat

SEQ ID NO: 4583 - DNA, 15 bp, synthetic construct
  source 1..15: mol_type = other DNA
aataaccacaacaac

SEQ ID NO: 4584 - DNA, 18 bp, synthetic construct
  source 1..18: mol_type = other DNA
gatcgtaattctcagtat

SEQ ID NO: 4585 - DNA, 15 bp, synthetic construct
  source 1..15: mol_type = other DNA
aataaccacaacaac

SEQ ID NO: 4586 - DNA, 24 bp, synthetic construct
  source 1..24: mol_type = other DNA
gccacaagcatagcttaccctaat

SEQ ID NO: 4587 - DNA, 15 bp, synthetic construct
  source 1..15: mol_type = other DNA
aataaccacaacaac

SEQ ID NO: 4588 - DNA, 18 bp, synthetic construct
  source 1..18: mol_type = other DNA
gacagtgcttctcagtat

SEQ ID NO: 4589 - DNA, 15 bp, synthetic construct
  source 1..15: mol_type = other DNA
aatagccacaactac

SEQ ID NO: 4590 - DNA, 18 bp, synthetic construct
  source 1..18: mol_type = other DNA
actacttactcacctttc

SEQ ID NO: 4591 - DNA, 18 bp, synthetic construct
  source 1..18: mol_type = other DNA
gggaaatcaagccctaac

SEQ ID NO: 4592 - DNA, 15 bp, synthetic construct
  source 1..15: mol_type = other DNA
acatctttgaacagt

SEQ ID NO: 4593 - DNA, 18 bp, synthetic construct
  source 1..18: mol_type = other DNA
gggaaatcaagccctaac

SEQ ID NO: 4594 - DNA, 18 bp, synthetic construct
  source 1..18: mol_type = other DNA
gatcgtaattttcagtac

SEQ ID NO: 4595 - DNA, 15 bp, synthetic construct
  source 1..15: mol_type = other DNA
tctaatcacctatat

SEQ ID NO: 4596 - DNA, 18 bp, synthetic construct
  source 1..18: mol_type = other DNA
tactctgggacgccttat

SEQ ID NO: 4597 - DNA, 18 bp, synthetic construct
  source 1..18: mol_type = other DNA
ggttttcaggcaacttct

SEQ ID NO: 4598 - DNA, 18 bp, synthetic construct
  source 1..18: mol_type = other DNA
tatggtggatccatttac

SEQ ID NO: 4599 - DNA, 15 bp, synthetic construct
  source 1..15: mol_type = other DNA
ttcaatcatgataca

SEQ ID NO: 4600 - DNA, 18 bp, synthetic construct
  source 1..18: mol_type = other DNA
gatactgcttcatcatac

SEQ ID NO: 4601 - DNA, 15 bp, synthetic construct
  source 1..15: mol_type = other DNA
ttcaatcatgataca

SEQ ID NO: 4602 - DNA, 18 bp, synthetic construct
  source 1..18: mol_type = other DNA
accacatggtacccgact

SEQ ID NO: 4603 - DNA, 15 bp, synthetic construct
  source 1..15: mol_type = other DNA
ttcaatcatgataca

SEQ ID NO: 4604 - DNA, 18 bp, synthetic construct
  source 1..18: mol_type = other DNA
gacagtgccacagcttac

SEQ ID NO: 4605 - DNA, 15 bp, synthetic construct
  source 1..15: mol_type = other DNA
ttcaatcatgataca

SEQ ID NO: 4606 - DNA, 15 bp, synthetic construct
  source 1..15: mol_type = other DNA
acttatacaactgtt

SEQ ID NO: 4607 - DNA, 15 bp, synthetic construct
  source 1..15: mol_type = other DNA
ctgggacataatgct

SEQ ID NO: 4608 - DNA, 15 bp, synthetic construct
  source 1..15: mol_type = other DNA
acatctttgaacagt

SEQ ID NO: 4609 - DNA, 15 bp, synthetic construct
  source 1..15: mol_type = other DNA
ctgggacataatgct

SEQ ID NO: 4610 - DNA, 15 bp, synthetic construct
  source 1..15: mol_type = other DNA
acttacacaactgtt

SEQ ID NO: 4611 - DNA, 15 bp, synthetic construct
  source 1..15: mol_type = other DNA
tctggacatgatacc

SEQ ID NO: 4612 - DNA, 18 bp, synthetic construct
  source 1..18: mol_type = other DNA
gacagtgcctctgtctac

SEQ ID NO: 4613 - DNA, 15 bp, synthetic construct
  source 1..15: mol_type = other DNA
tctggacatgatacc

SEQ ID NO: 4614 - DNA, 18 bp, synthetic construct
  source 1..18: mol_type = other DNA
gatcgtaattttcagtac

SEQ ID NO: 4615 - DNA, 15 bp, synthetic construct
  source 1..15: mol_type = other DNA
atgagccatgaaaca

SEQ ID NO: 4616 - DNA, 18 bp, synthetic construct
  source 1..18: mol_type = other DNA
gatactgcttcatcatac

SEQ ID NO: 4617 - DNA, 15 bp, synthetic construct
  source 1..15: mol_type = other DNA
ctgggccacgatact

SEQ ID NO: 4618 - DNA, 15 bp, synthetic construct
  source 1..15: mol_type = other DNA
atctttacaaaccag

SEQ ID NO: 4619 - DNA, 15 bp, synthetic construct
  source 1..15: mol_type = other DNA
aataaccacaacaac

SEQ ID NO: 4620 - DNA, 21 bp, synthetic construct
  source 1..21: mol_type = other DNA
acccaggacagttcttacttc

SEQ ID NO: 4621 - DNA, 15 bp, synthetic construct
  source 1..15: mol_type = other DNA
aataaccacaacaac

SEQ ID NO: 4622 - DNA, 18 bp, synthetic construct
  source 1..18: mol_type = other DNA
aacagtgcctccaactac

SEQ ID NO: 4623 - DNA, 15 bp, synthetic construct
  source 1..15: mol_type = other DNA
aataaccacaacaac

SEQ ID NO: 4624 - DNA, 18 bp, synthetic construct
  source 1..18: mol_type = other DNA
gacagtgcctccaactac

SEQ ID NO: 4625 - DNA, 15 bp, synthetic construct
  source 1..15: mol_type = other DNA
aataaccacaacaac

SEQ ID NO: 4626 - DNA, 18 bp, synthetic construct
  source 1..18: mol_type = other DNA
gacagtgccacagcttac

SEQ ID NO: 4627 - DNA, 15 bp, synthetic construct
  source 1..15: mol_type = other DNA
aataaccacaacaac

SEQ ID NO: 4628 - DNA, 21 bp, synthetic construct
  source 1..21: mol_type = other DNA
acccgggacagttcttacttc

SEQ ID NO: 4629 - DNA, 15 bp, synthetic construct
  source 1..15: mol_type = other DNA
aatagccacaactac

SEQ ID NO: 4630 - DNA, 18 bp, synthetic construct
  source 1..18: mol_type = other DNA
aacagtgcctccaactac

SEQ ID NO: 4631 - DNA, 15 bp, synthetic construct
  source 1..15: mol_type = other DNA
aataaccatgactat

SEQ ID NO: 4632 - DNA, 24 bp, synthetic construct
  source 1..24: mol_type = other DNA
gccacaagcatagcttaccctaat

SEQ ID NO: 4633 - DNA, 15 bp, synthetic construct
  source 1..15: mol_type = other DNA
aataaccatgactat

SEQ ID NO: 4634 - DNA, 18 bp, synthetic construct
  source 1..18: mol_type = other DNA
aacagtgcctccaactac

SEQ ID NO: 4635 - DNA, 18 bp, synthetic construct
  source 1..18: mol_type = other DNA
gggaaatcaagccctaac

SEQ ID NO: 4636 - DNA, 18 bp, synthetic construct
  source 1..18: mol_type = other DNA
gatcgtaattttcagtac

SEQ ID NO: 4637 - DNA, 18 bp, synthetic construct
  source 1..18: mol_type = other DNA
ggttttcaggcaacttct

SEQ ID NO: 4638 - DNA, 21 bp, synthetic construct
  source 1..21: mol_type = other DNA
acccaggacagttcttacttc

SEQ ID NO: 4639 - DNA, 15 bp, synthetic construct
  source 1..15: mol_type = other DNA
ttcaatcatgataca

SEQ ID NO: 4640 - DNA, 15 bp, synthetic construct
  source 1..15: mol_type = other DNA
acatccataactgcc

SEQ ID NO: 4641 - DNA, 15 bp, synthetic construct
  source 1..15: mol_type = other DNA
ttcaatcatgataca

SEQ ID NO: 4642 - DNA, 15 bp, synthetic construct
  source 1..15: mol_type = other DNA
acatccataactgcc

SEQ ID NO: 4643 - DNA, 18 bp, synthetic construct
  source 1..18: mol_type = other DNA
aattcccagtatccctgg

SEQ ID NO: 4644 - DNA, 18 bp, synthetic construct
  source 1..18: mol_type = other DNA
tactttgggacaccttat

SEQ ID NO: 4645 - DNA, 15 bp, synthetic construct
  source 1..15: mol_type = other DNA
ctgggacataatgct

SEQ ID NO: 4646 - DNA, 18 bp, synthetic construct
  source 1..18: mol_type = other DNA
gcctcagggtacccaacc

SEQ ID NO: 4647 - DNA, 15 bp, synthetic construct
  source 1..15: mol_type = other DNA
tctggacatgatacc

SEQ ID NO: 4648 - DNA, 15 bp, synthetic construct
  source 1..15: mol_type = other DNA
atctctacaaaccag

SEQ ID NO: 4649 - DNA, 15 bp, synthetic construct
  source 1..15: mol_type = other DNA
tctggacatgatacc

SEQ ID NO: 4650 - DNA, 15 bp, synthetic construct
  source 1..15: mol_type = other DNA
accaccatgagggct

SEQ ID NO: 4651 - DNA, 15 bp, synthetic construct
  source 1..15: mol_type = other DNA
ctaggccacaatgct

SEQ ID NO: 4652 - DNA, 15 bp, synthetic construct
  source 1..15: mol_type = other DNA
atctctacaaaccag

SEQ ID NO: 4653 - DNA, 15 bp, synthetic construct
  source 1..15: mol_type = other DNA
ctgggccacgatact

SEQ ID NO: 4654 - DNA, 15 bp, synthetic construct
  source 1..15: mol_type = other DNA
acatctttgaacagt

SEQ ID NO: 4655 - DNA, 15 bp, synthetic construct
  source 1..15: mol_type = other DNA
ctgggccacgatact

SEQ ID NO: 4656 - DNA, 15 bp, synthetic construct
  source 1..15: mol_type = other DNA
accaccacgaggagt

SEQ ID NO: 4657 - DNA, 15 bp, synthetic construct
  source 1..15: mol_type = other DNA
aataaccacaacaac

SEQ ID NO: 4658 - DNA, 21 bp, synthetic construct
  source 1..21: mol_type = other DNA
acccaggacagttcttacttc

SEQ ID NO: 4659 - DNA, 15 bp, synthetic construct
  source 1..15: mol_type = other DNA
aataaccacaacaac

SEQ ID NO: 4660 - DNA, 21 bp, synthetic construct
  source 1..21: mol_type = other DNA
actatttactcaaatcctttc

SEQ ID NO: 4661 - DNA, 15 bp, synthetic construct
  source 1..15: mol_type = other DNA
aataaccacaacaac

SEQ ID NO: 4662 - DNA, 18 bp, synthetic construct
  source 1..18: mol_type = other DNA
acctcagggttcaatggg

SEQ ID NO: 4663 - DNA, 15 bp, synthetic construct
  source 1..15: mol_type = other DNA
aatagccacaactac

SEQ ID NO: 4664 - DNA, 24 bp, synthetic construct
  source 1..24: mol_type = other DNA
gccacaagcatagcttaccctaat

SEQ ID NO: 4665 - DNA, 15 bp, synthetic construct
  source 1..15: mol_type = other DNA
aatagccacaactac

SEQ ID NO: 4666 - DNA, 18 bp, synthetic construct
  source 1..18: mol_type = other DNA
gacagtgcttctcagtat

SEQ ID NO: 4667 - DNA, 15 bp, synthetic construct
  source 1..15: mol_type = other DNA
aataaccatgactat

SEQ ID NO: 4668 - DNA, 18 bp, synthetic construct
  source 1..18: mol_type = other DNA
tactctgcgacaccttat

SEQ ID NO: 4669 - DNA, 15 bp, synthetic construct
  source 1..15: mol_type = other DNA
aataaccatgactat

SEQ ID NO: 4670 - DNA, 24 bp, synthetic construct
  source 1..24: mol_type = other DNA
accacaagcatagcttaccctaat

SEQ ID NO: 4671 - DNA, 18 bp, synthetic construct
  source 1..18: mol_type = other DNA
gggaaatcaagccctaac

SEQ ID NO: 4672 - DNA, 21 bp, synthetic construct
  source 1..21: mol_type = other DNA
acccgggacagttcttacttc

SEQ ID NO: 4673 - DNA, 18 bp, synthetic construct
  source 1..18: mol_type = other DNA
ggttttcaggcaacttct

SEQ ID NO: 4674 - DNA, 18 bp, synthetic construct
  source 1..18: mol_type = other DNA
gcctcagggtacccagct

SEQ ID NO: 4675 - DNA, 15 bp, synthetic construct
  source 1..15: mol_type = other DNA
ttcaatcatgataca

SEQ ID NO: 4676 - DNA, 18 bp, synthetic construct
  source 1..18: mol_type = other DNA
gaccctaacagttattac

SEQ ID NO: 4677 - DNA, 18 bp, synthetic construct
  source 1..18: mol_type = other DNA
aattcccagtatccctgg

SEQ ID NO: 4678 - DNA, 18 bp, synthetic construct
  source 1..18: mol_type = other DNA
aacagtgcttttgactac

SEQ ID NO: 4679 - DNA, 18 bp, synthetic construct
  source 1..18: mol_type = other DNA
aattcccagtatccctgg

SEQ ID NO: 4680 - DNA, 24 bp, synthetic construct
  source 1..24: mol_type = other DNA
accacaagcatagcttaccctaat

SEQ ID NO: 4681 - DNA, 18 bp, synthetic construct
  source 1..18: mol_type = other DNA
aattcccagtatccctgg

SEQ ID NO: 4682 - DNA, 21 bp, synthetic construct
  source 1..21: mol_type = other DNA
acccgggacagttcttacttc

SEQ ID NO: 4683 - DNA, 18 bp, synthetic construct
  source 1..18: mol_type = other DNA
aattcccagtatccctgg

SEQ ID NO: 4684 - DNA, 18 bp, synthetic construct
  source 1..18: mol_type = other DNA
gatcgtaatgttgactac

SEQ ID NO: 4685 - DNA, 15 bp, synthetic construct
  source 1..15: mol_type = other DNA
ctgggacataatgct

SEQ ID NO: 4686 - DNA, 15 bp, synthetic construct
  source 1..15: mol_type = other DNA
atctttacaaaccag

SEQ ID NO: 4687 - DNA, 15 bp, synthetic construct
  source 1..15: mol_type = other DNA
ctgggacataatgct

SEQ ID NO: 4688 - DNA, 24 bp, synthetic construct
  source 1..24: mol_type = other DNA
gccacaagcatagcttaccctaat

SEQ ID NO: 4689 - DNA, 15 bp, synthetic construct
  source 1..15: mol_type = other DNA
ctgggacataatgct

SEQ ID NO: 4690 - DNA, 18 bp, synthetic construct
  source 1..18: mol_type = other DNA
gacagcacttttaactac

SEQ ID NO: 4691 - DNA, 15 bp, synthetic construct
  source 1..15: mol_type = other DNA
tcaggacatagtgct

SEQ ID NO: 4692 - DNA, 18 bp, synthetic construct
  source 1..18: mol_type = other DNA
gacagcacttttgactac

SEQ ID NO: 4693 - DNA, 15 bp, synthetic construct
  source 1..15: mol_type = other DNA
tctggacatctctct

SEQ ID NO: 4694 - DNA, 18 bp, synthetic construct
  source 1..18: mol_type = other DNA
tactctgcgacaccttat

SEQ ID NO: 4695 - DNA, 15 bp, synthetic construct
  source 1..15: mol_type = other DNA
tctggacatgatacc

SEQ ID NO: 4696 - DNA, 18 bp, synthetic construct
  source 1..18: mol_type = other DNA
actacttactcacctttc

SEQ ID NO: 4697 - DNA, 15 bp, synthetic construct
  source 1..15: mol_type = other DNA
tctggacatgatacc

SEQ ID NO: 4698 - DNA, 24 bp, synthetic construct
  source 1..24: mol_type = other DNA
gccacaagcatagcttaccctaat

SEQ ID NO: 4699 - DNA, 15 bp, synthetic construct
  source 1..15: mol_type = other DNA
tctggacatgatacc

SEQ ID NO: 4700 - DNA, 18 bp, synthetic construct
  source 1..18: mol_type = other DNA
aatgatatgtttgactat

SEQ ID NO: 4701 - DNA, 15 bp, synthetic construct
  source 1..15: mol_type = other DNA
ctaggccacaatgct

SEQ ID NO: 4702 - DNA, 18 bp, synthetic construct
  source 1..18: mol_type = other DNA
tactttgggacaccttat

SEQ ID NO: 4703 - DNA, 15 bp, synthetic construct
  source 1..15: mol_type = other DNA
ctaggccacaatgct

SEQ ID NO: 4704 - DNA, 18 bp, synthetic construct
  source 1..18: mol_type = other DNA
accacagggtacccgact

SEQ ID NO: 4705 - DNA, 15 bp, synthetic construct
  source 1..15: mol_type = other DNA
ctaggccacaatgct

SEQ ID NO: 4706 - DNA, 18 bp, synthetic construct
  source 1..18: mol_type = other DNA
accacatggtacccgact

SEQ ID NO: 4707 - DNA, 15 bp, synthetic construct
  source 1..15: mol_type = other DNA
ctgggccacgatact

SEQ ID NO: 4708 - DNA, 15 bp, synthetic construct
  source 1..15: mol_type = other DNA
acatctttgaacagt

SEQ ID NO: 4709 - DNA, 15 bp, synthetic construct
  source 1..15: mol_type = other DNA
ctgggccacgatact

SEQ ID NO: 4710 - DNA, 15 bp, synthetic construct
  source 1..15: mol_type = other DNA
atcgccacaacaact

SEQ ID NO: 4711 - DNA, 15 bp, synthetic construct
  source 1..15: mol_type = other DNA
ctgggccacgatact

SEQ ID NO: 4712 - DNA, 21 bp, synthetic construct
  source 1..21: mol_type = other DNA
acccgggacagttcttacttc

SEQ ID NO: 4713 - DNA, 15 bp, synthetic construct
  source 1..15: mol_type = other DNA
aataaccacaacaac

SEQ ID NO: 4714 - DNA, 18 bp, synthetic construct
  source 1..18: mol_type = other DNA
gacagtgcttctcagtat

SEQ ID NO: 4715 - DNA, 15 bp, synthetic construct
  source 1..15: mol_type = other DNA
aataaccacaacaac

SEQ ID NO: 4716 - DNA, 18 bp, synthetic construct
  source 1..18: mol_type = other DNA
actgcttactcaactttc

SEQ ID NO: 4717 - DNA, 15 bp, synthetic construct
  source 1..15: mol_type = other DNA
aataaccacaacaac

SEQ ID NO: 4718 - DNA, 15 bp, synthetic construct
  source 1..15: mol_type = other DNA
tccacagcaacccgg

SEQ ID NO: 4719 - DNA, 15 bp, synthetic construct
  source 1..15: mol_type = other DNA
aataaccacaacaac

SEQ ID NO: 4720 - DNA, 18 bp, synthetic construct
  source 1..18: mol_type = other DNA
gaccctaacagttattac

SEQ ID NO: 4721 - DNA, 15 bp, synthetic construct
  source 1..15: mol_type = other DNA
aataaccacaacaac

SEQ ID NO: 4722 - DNA, 21 bp, synthetic construct
  source 1..21: mol_type = other DNA
acccaggacagttcttacttc

SEQ ID NO: 4723 - DNA, 15 bp, synthetic construct
  source 1..15: mol_type = other DNA
aatagccacaactac

SEQ ID NO: 4724 - DNA, 18 bp, synthetic construct
  source 1..18: mol_type = other DNA
gaccctaacagttattac

SEQ ID NO: 4725 - DNA, 15 bp, synthetic construct
  source 1..15: mol_type = other DNA
aatagccacaactac

SEQ ID NO: 4726 - DNA, 18 bp, synthetic construct
  source 1..18: mol_type = other DNA
gacagtgccactgcttac

SEQ ID NO: 4727 - DNA, 15 bp, synthetic construct
  source 1..15: mol_type = other DNA
aatagccacaactac

SEQ ID NO: 4728 - DNA, 21 bp, synthetic construct
  source 1..21: mol_type = other DNA
acccgggacagttcttacttc

SEQ ID NO: 4729 - DNA, 15 bp, synthetic construct
  source 1..15: mol_type = other DNA
aatagccacaactac

SEQ ID NO: 4730 - DNA, 18 bp, synthetic construct
  source 1..18: mol_type = other DNA
gaccctaacagttattac

SEQ ID NO: 4731 - DNA, 15 bp, synthetic construct
  source 1..15: mol_type = other DNA
aatagccacaactac

SEQ ID NO: 4732 - DNA, 18 bp, synthetic construct
  source 1..18: mol_type = other DNA
tacagtgcagcaccttac

SEQ ID NO: 4733 - DNA, 15 bp, synthetic construct
  source 1..15: mol_type = other DNA
aatagccacaactac

SEQ ID NO: 4734 - DNA, 18 bp, synthetic construct
  source 1..18: mol_type = other DNA
gacagcacttttgactac

SEQ ID NO: 4735 - DNA, 15 bp, synthetic construct
  source 1..15: mol_type = other DNA
aatagccacaactac

SEQ ID NO: 4736 - DNA, 18 bp, synthetic construct
  source 1..18: mol_type = other DNA
agtacttactcacctttc

SEQ ID NO: 4737 - DNA, 15 bp, synthetic construct
  source 1..15: mol_type = other DNA
aatagccacaactac

SEQ ID NO: 4738 - DNA, 15 bp, synthetic construct
  source 1..15: mol_type = other DNA
accaccatgagggct

SEQ ID NO: 4739 - DNA, 15 bp, synthetic construct
  source 1..15: mol_type = other DNA
aataaccatgactat

SEQ ID NO: 4740 - DNA, 15 bp, synthetic construct
  source 1..15: mol_type = other DNA
accaccatgaaaagt

SEQ ID NO: 4741 - DNA, 15 bp, synthetic construct
  source 1..15: mol_type = other DNA
aataaccatgactat

SEQ ID NO: 4742 - DNA, 21 bp, synthetic construct
  source 1..21: mol_type = other DNA
acccaggacagttcttacttc

SEQ ID NO: 4743 - DNA, 15 bp, synthetic construct
  source 1..15: mol_type = other DNA
aataaccatgactat

SEQ ID NO: 4744 - DNA, 18 bp, synthetic construct
  source 1..18: mol_type = other DNA
tactctgggacaccttat

SEQ ID NO: 4745 - DNA, 15 bp, synthetic construct
  source 1..15: mol_type = other DNA
aataaccatgactat

SEQ ID NO: 4746 - DNA, 18 bp, synthetic construct
  source 1..18: mol_type = other DNA
gacagtgccactgcttac

SEQ ID NO: 4747 - DNA, 15 bp, synthetic construct
  source 1..15: mol_type = other DNA
aataaccatgactat

SEQ ID NO: 4748 - DNA, 18 bp, synthetic construct
  source 1..18: mol_type = other DNA
aacagtgcttttgactac

SEQ ID NO: 4749 - DNA, 15 bp, synthetic construct
  source 1..15: mol_type = other DNA
aataaccatgactat

SEQ ID NO: 4750 - DNA, 15 bp, synthetic construct
  source 1..15: mol_type = other DNA
accaccatgaaaagt

SEQ ID NO: 4751 - DNA, 15 bp, synthetic construct
  source 1..15: mol_type = other DNA
atgaatcatgatacc

SEQ ID NO: 4752 - DNA, 21 bp, synthetic construct
  source 1..21: mol_type = other DNA
acccgggacagttcttacttc

SEQ ID NO: 4753 - DNA, 15 bp, synthetic construct
  source 1..15: mol_type = other DNA
atgaatcatgatacc

SEQ ID NO: 4754 - DNA, 21 bp, synthetic construct
  source 1..21: mol_type = other DNA
acccaggacagttcttacttc

SEQ ID NO: 4755 - DNA, 18 bp, synthetic construct
  source 1..18: mol_type = other DNA
gggaaatcaagccctaac

SEQ ID NO: 4756 - DNA, 18 bp, synthetic construct
  source 1..18: mol_type = other DNA
tactctgcgacaccttat

SEQ ID NO: 4757 - DNA, 18 bp, synthetic construct
  source 1..18: mol_type = other DNA
gggaaatcaagccctaac

SEQ ID NO: 4758 - DNA, 21 bp, synthetic construct
  source 1..21: mol_type = other DNA
aacattgctacaagcgagtac

SEQ ID NO: 4759 - DNA, 15 bp, synthetic construct
  source 1..15: mol_type = other DNA
tctaatcacctatat

SEQ ID NO: 4760 - DNA, 18 bp, synthetic construct
  source 1..18: mol_type = other DNA
aacagtgcttttgactac

SEQ ID NO: 4761 - DNA, 18 bp, synthetic construct
  source 1..18: mol_type = other DNA
ggttttcaggcaacttct

SEQ ID NO: 4762 - DNA, 21 bp, synthetic construct
  source 1..21: mol_type = other DNA
acaagtgaatacttctaccgt

SEQ ID NO: 4763 - DNA, 18 bp, synthetic construct
  source 1..18: mol_type = other DNA
ggttttcaggcaacttct

SEQ ID NO: 4764 - DNA, 18 bp, synthetic construct
  source 1..18: mol_type = other DNA
gatactgcttcatcatac

SEQ ID NO: 4765 - DNA, 15 bp, synthetic construct
  source 1..15: mol_type = other DNA
ttcaatcatgataca

SEQ ID NO: 4766 - DNA, 15 bp, synthetic construct
  source 1..15: mol_type = other DNA
atcgccacaacaact

SEQ ID NO: 4767 - DNA, 15 bp, synthetic construct
  source 1..15: mol_type = other DNA
ttcaatcatgataca

SEQ ID NO: 4768 - DNA, 18 bp, synthetic construct
  source 1..18: mol_type = other DNA
gaccctaacagttattac

SEQ ID NO: 4769 - DNA, 18 bp, synthetic construct
  source 1..18: mol_type = other DNA
aattcccagtatccctgg

SEQ ID NO: 4770 - DNA, 21 bp, synthetic construct
  source 1..21: mol_type = other DNA
acaagtgaatacttctaccgt

SEQ ID NO: 4771 - DNA, 18 bp, synthetic construct
  source 1..18: mol_type = other DNA
aattcccagtatccctgg

SEQ ID NO: 4772 - DNA, 18 bp, synthetic construct
  source 1..18: mol_type = other DNA
tactctgcgacaccttat

SEQ ID NO: 4773 - DNA, 18 bp, synthetic construct
  source 1..18: mol_type = other DNA
aattcccagtatccctgg

SEQ ID NO: 4774 - DNA, 15 bp, synthetic construct
  source 1..15: mol_type = other DNA
tccacagcaacccag

SEQ ID NO: 4775 - DNA, 15 bp, synthetic construct
  source 1..15: mol_type = other DNA
ctgggacataatgct

SEQ ID NO: 4776 - DNA, 18 bp, synthetic construct
  source 1..18: mol_type = other DNA
gatactgcttcatcatac

SEQ ID NO: 4777 - DNA, 15 bp, synthetic construct
  source 1..15: mol_type = other DNA
ctgggacataatgct

SEQ ID NO: 4778 - DNA, 18 bp, synthetic construct
  source 1..18: mol_type = other DNA
actacttactcacctttc

SEQ ID NO: 4779 - DNA, 15 bp, synthetic construct
  source 1..15: mol_type = other DNA
ctgggacataatgct

SEQ ID NO: 4780 - DNA, 24 bp, synthetic construct
  source 1..24: mol_type = other DNA
accacaagcatagcttaccctaat

SEQ ID NO: 4781 - DNA, 15 bp, synthetic construct
  source 1..15: mol_type = other DNA
ctgggacataatgct

SEQ ID NO: 4782 - DNA, 18 bp, synthetic construct
  source 1..18: mol_type = other DNA
actacttactcacctttc

SEQ ID NO: 4783 - DNA, 15 bp, synthetic construct
  source 1..15: mol_type = other DNA
ctgggacataatgct

SEQ ID NO: 4784 - DNA, 18 bp, synthetic construct
  source 1..18: mol_type = other DNA
accaaacagtacccaacc

SEQ ID NO: 4785 - DNA, 15 bp, synthetic construct
  source 1..15: mol_type = other DNA
ctgggacataatgct

SEQ ID NO: 4786 - DNA, 18 bp, synthetic construct
  source 1..18: mol_type = other DNA
gcctcagggtacccagct

SEQ ID NO: 4787 - DNA, 15 bp, synthetic construct
  source 1..15: mol_type = other DNA
tcaggacatagtgct

SEQ ID NO: 4788 - DNA, 18 bp, synthetic construct
  source 1..18: mol_type = other DNA
tatggtggatccatttac

SEQ ID NO: 4789 - DNA, 15 bp, synthetic construct
  source 1..15: mol_type = other DNA
tcaggacatagtgct

SEQ ID NO: 4790 - DNA, 18 bp, synthetic construct
  source 1..18: mol_type = other DNA
acctcagggttcaatggg

SEQ ID NO: 4791 - DNA, 15 bp, synthetic construct
  source 1..15: mol_type = other DNA
tcaggacatagtgct

SEQ ID NO: 4792 - DNA, 18 bp, synthetic construct
  source 1..18: mol_type = other DNA
tactttgggacaccttat

SEQ ID NO: 4793 - DNA, 15 bp, synthetic construct
  source 1..15: mol_type = other DNA
tctggacatgatacc

SEQ ID NO: 4794 - DNA, 18 bp, synthetic construct
  source 1..18: mol_type = other DNA
gatactgcttcatcatac

SEQ ID NO: 4795 - DNA, 15 bp, synthetic construct
  source 1..15: mol_type = other DNA
tctggacatgatacc

SEQ ID NO: 4796 - DNA, 21 bp, synthetic construct
  source 1..21: mol_type = other DNA
acaatcagtggaaacgagtac

SEQ ID NO: 4797 - DNA, 15 bp, synthetic construct
  source 1..15: mol_type = other DNA
tctggacatgatacc

SEQ ID NO: 4798 - DNA, 18 bp, synthetic construct
  source 1..18: mol_type = other DNA
gacagtgcttctcagtat

SEQ ID NO: 4799 - DNA, 15 bp, synthetic construct
  source 1..15: mol_type = other DNA
tctggacatgatacc

SEQ ID NO: 4800 - DNA, 18 bp, synthetic construct
  source 1..18: mol_type = other DNA
gatactgcttcatcatac

SEQ ID NO: 4801 - DNA, 15 bp, synthetic construct
  source 1..15: mol_type = other DNA
atgagccatgaaaca

SEQ ID NO: 4802 - DNA, 21 bp, synthetic construct
  source 1..21: mol_type = other DNA
acaagtcaggtcttataccat

SEQ ID NO: 4803 - DNA, 15 bp, synthetic construct
  source 1..15: mol_type = other DNA
ctaggccacaatgct

SEQ ID NO: 4804 - DNA, 18 bp, synthetic construct
  source 1..18: mol_type = other DNA
accacagggtacccgact

SEQ ID NO: 4805 - DNA, 15 bp, synthetic construct
  source 1..15: mol_type = other DNA
ctaggccacaatgct

SEQ ID NO: 4806 - DNA, 15 bp, synthetic construct
  source 1..15: mol_type = other DNA
tccacagcaacccag

SEQ ID NO: 4807 - DNA, 15 bp, synthetic construct
  source 1..15: mol_type = other DNA
ctaggccacaatgct

SEQ ID NO: 4808 - DNA, 18 bp, synthetic construct
  source 1..18: mol_type = other DNA
tactctgcgacaccttat

SEQ ID NO: 4809 - DNA, 15 bp, synthetic construct
  source 1..15: mol_type = other DNA
ctaggccacaatgct

SEQ ID NO: 4810 - DNA, 15 bp, synthetic construct
  source 1..15: mol_type = other DNA
tccacagcaacccgg

SEQ ID NO: 4811 - DNA, 15 bp, synthetic construct
  source 1..15: mol_type = other DNA
ctaggccacaatgct

SEQ ID NO: 4812 - DNA, 15 bp, synthetic construct
  source 1..15: mol_type = other DNA
acatctttgaacagt

SEQ ID NO: 4813 - DNA, 15 bp, synthetic construct
  source 1..15: mol_type = other DNA
ctaggccacaatgct

SEQ ID NO: 4814 - DNA, 24 bp, synthetic construct
  source 1..24: mol_type = other DNA
gccacaagcataggttaccctaat

SEQ ID NO: 4815 - DNA, 15 bp, synthetic construct
  source 1..15: mol_type = other DNA
ctgggccacgatact

SEQ ID NO: 4816 - DNA, 15 bp, synthetic construct
  source 1..15: mol_type = other DNA
tccacagcaacccag

SEQ ID NO: 4817 - DNA, 15 bp, synthetic construct
  source 1..15: mol_type = other DNA
ctgggccacgatact

SEQ ID NO: 4818 - DNA, 18 bp, synthetic construct
  source 1..18: mol_type = other DNA
gatactgcctcatcatac

SEQ ID NO: 4819 - DNA, 15 bp, synthetic construct
  source 1..15: mol_type = other DNA
ctgggccacgatact

SEQ ID NO: 4820 - DNA, 18 bp, synthetic construct
  source 1..18: mol_type = other DNA
gaccctaacagttattac

SEQ ID NO: 4821 - DNA, 15 bp, synthetic construct
  source 1..15: mol_type = other DNA
ctgggccacgatact

SEQ ID NO: 4822 - DNA, 18 bp, synthetic construct
  source 1..18: mol_type = other DNA
aacagtgcttttgactac

SEQ ID NO: 4823 - DNA, 15 bp, synthetic construct
  source 1..15: mol_type = other DNA
ctgggccacgatact

SEQ ID NO: 4824 - DNA, 15 bp, synthetic construct
  source 1..15: mol_type = other DNA
acatctttgaacagt

SEQ ID NO: 4825 - DNA, 15 bp, synthetic construct
  source 1..15: mol_type = other DNA
ctgggccacgatact

SEQ ID NO: 4826 - DNA, 18 bp, synthetic construct
  source 1..18: mol_type = other DNA
gacagcacttttaactac

SEQ ID NO: 4827 - DNA, 15 bp, synthetic construct
  source 1..15: mol_type = other DNA
ctgggccacgatact

SEQ ID NO: 4828 - DNA, 18 bp, synthetic construct
  source 1..18: mol_type = other DNA
gacagtgcttctcagtat

SEQ ID NO: 4829 - DNA, 15 bp, synthetic construct
  source 1..15: mol_type = other DNA
ctgggccacgatact

SEQ ID NO: 4830 - DNA, 18 bp, synthetic construct
  source 1..18: mol_type = other DNA
aacagtgcctccaactac

SEQ ID NO: 4831 - DNA, 15 bp, synthetic construct
  source 1..15: mol_type = other DNA
ctgggccacgatact

SEQ ID NO: 4832 - DNA, 21 bp, synthetic construct
  source 1..21: mol_type = other DNA
acccgggacagttcttacttc

SEQ ID NO: 4833 - DNA, 15 bp, synthetic construct
  source 1..15: mol_type = other DNA
aataaccacaacaac

SEQ ID NO: 4834 - DNA, 18 bp, synthetic construct
  source 1..18: mol_type = other DNA
tcctctgtgacaccttat

SEQ ID NO: 4835 - DNA, 15 bp, synthetic construct
  source 1..15: mol_type = other DNA
aataaccacaacaac

SEQ ID NO: 4836 - DNA, 18 bp, synthetic construct
  source 1..18: mol_type = other DNA
tactctgcgacaccttat

SEQ ID NO: 4837 - DNA, 15 bp, synthetic construct
  source 1..15: mol_type = other DNA
aataaccacaacaac

SEQ ID NO: 4838 - DNA, 21 bp, synthetic construct
  source 1..21: mol_type = other DNA
acccgggacagttcttacttc

SEQ ID NO: 4839 - DNA, 15 bp, synthetic construct
  source 1..15: mol_type = other DNA
aataaccacaacaac

SEQ ID NO: 4840 - DNA, 21 bp, synthetic construct
  source 1..21: mol_type = other DNA
acccgggacagttcttacttc

SEQ ID NO: 4841 - DNA, 15 bp, synthetic construct
  source 1..15: mol_type = other DNA
aataaccacaacaac

SEQ ID NO: 4842 - DNA, 15 bp, synthetic construct
  source 1..15: mol_type = other DNA
acatctttgaacagt

SEQ ID NO: 4843 - DNA, 15 bp, synthetic construct
  source 1..15: mol_type = other DNA
aataaccacaacaac

SEQ ID NO: 4844 - DNA, 18 bp, synthetic construct
  source 1..18: mol_type = other DNA
gatactgcctcatcatac

SEQ ID NO: 4845 - DNA, 15 bp, synthetic construct
  source 1..15: mol_type = other DNA
aataaccacaacaac

SEQ ID NO: 4846 - DNA, 21 bp, synthetic construct
  source 1..21: mol_type = other DNA
acaatcagtggaaacgagtac

SEQ ID NO: 4847 - DNA, 15 bp, synthetic construct
  source 1..15: mol_type = other DNA
aataaccacaacaac

SEQ ID NO: 4848 - DNA, 15 bp, synthetic construct
  source 1..15: mol_type = other DNA
tccacagcaacccgg

SEQ ID NO: 4849 - DNA, 15 bp, synthetic construct
  source 1..15: mol_type = other DNA
aatagccacaactac

SEQ ID NO: 4850 - DNA, 18 bp, synthetic construct
  source 1..18: mol_type = other DNA
tacagtgcagcaccttac

SEQ ID NO: 4851 - DNA, 15 bp, synthetic construct
  source 1..15: mol_type = other DNA
aatagccacaactac

SEQ ID NO: 4852 - DNA, 21 bp, synthetic construct
  source 1..21: mol_type = other DNA
acccaggacagttcttacttc

SEQ ID NO: 4853 - DNA, 15 bp, synthetic construct
  source 1..15: mol_type = other DNA
aatagccacaactac

SEQ ID NO: 4854 - DNA, 18 bp, synthetic construct
  source 1..18: mol_type = other DNA
gacagtgcctctgtctac

SEQ ID NO: 4855 - DNA, 15 bp, synthetic construct
  source 1..15: mol_type = other DNA
aatagccacaactac

SEQ ID NO: 4856 - DNA, 15 bp, synthetic construct
  source 1..15: mol_type = other DNA
atcgctgcgacaact

SEQ ID NO: 4857 - DNA, 15 bp, synthetic construct
  source 1..15: mol_type = other DNA
aatagccacaactac

SEQ ID NO: 4858 - DNA, 18 bp, synthetic construct
  source 1..18: mol_type = other DNA
gacagcacttttaactac

SEQ ID NO: 4859 - DNA, 15 bp, synthetic construct
  source 1..15: mol_type = other DNA
aatagccacaactac

SEQ ID NO: 4860 - DNA, 18 bp, synthetic construct
  source 1..18: mol_type = other DNA
gaccctaacagttattac

SEQ ID NO: 4861 - DNA, 15 bp, synthetic construct
  source 1..15: mol_type = other DNA
aatagccacaactac

SEQ ID NO: 4862 - DNA, 18 bp, synthetic construct
  source 1..18: mol_type = other DNA
accacatggtacccgact

SEQ ID NO: 4863 - DNA, 15 bp, synthetic construct
  source 1..15: mol_type = other DNA
aataaccatgactat

SEQ ID NO: 4864 - DNA, 18 bp, synthetic construct
  source 1..18: mol_type = other DNA
acctcagggttcaatggg

SEQ ID NO: 4865 - DNA, 15 bp, synthetic construct
  source 1..15: mol_type = other DNA
aataaccatgactat

SEQ ID NO: 4866 - DNA, 18 bp, synthetic construct
  source 1..18: mol_type = other DNA
gacagtgcttctcagtat

SEQ ID NO: 4867 - DNA, 15 bp, synthetic construct
  source 1..15: mol_type = other DNA
aataaccatgactat

SEQ ID NO: 4868 - DNA, 21 bp, synthetic construct
  source 1..21: mol_type = other DNA
acccgggacagttcttacttc

SEQ ID NO: 4869 - DNA, 15 bp, synthetic construct
  source 1..15: mol_type = other DNA
aataaccatgactat

SEQ ID NO: 4870 - DNA, 18 bp, synthetic construct
  source 1..18: mol_type = other DNA
gaccctaacagttattac

SEQ ID NO: 4871 - DNA, 15 bp, synthetic construct
  source 1..15: mol_type = other DNA
aataaccatgactat

SEQ ID NO: 4872 - DNA, 18 bp, synthetic construct
  source 1..18: mol_type = other DNA
tactctgcgacaccttat

SEQ ID NO: 4873 - DNA, 15 bp, synthetic construct
  source 1..15: mol_type = other DNA
aataaccatgactat

SEQ ID NO: 4874 - DNA, 18 bp, synthetic construct
  source 1..18: mol_type = other DNA
gacagcacttttaactac

SEQ ID NO: 4875 - DNA, 15 bp, synthetic construct
  source 1..15: mol_type = other DNA
aataaccatgactat

SEQ ID NO: 4876 - DNA, 18 bp, synthetic construct
  source 1..18: mol_type = other DNA
gacagtgcttctcagtat

SEQ ID NO: 4877 - DNA, 15 bp, synthetic construct
  source 1..15: mol_type = other DNA
aataaccatgactat

SEQ ID NO: 4878 - DNA, 18 bp, synthetic construct
  source 1..18: mol_type = other DNA
acctcagggttcaatggg

SEQ ID NO: 4879 - DNA, 15 bp, synthetic construct
  source 1..15: mol_type = other DNA
atgaatcatgatacc

SEQ ID NO: 4880 - DNA, 18 bp, synthetic construct
  source 1..18: mol_type = other DNA
aatgatatgtttgactat

SEQ ID NO: 4881 - DNA, 15 bp, synthetic construct
  source 1..15: mol_type = other DNA
atgaatcatgatacc

SEQ ID NO: 4882 - DNA, 18 bp, synthetic construct
  source 1..18: mol_type = other DNA
gacagtgccactgcttac

SEQ ID NO: 4883 - DNA, 18 bp, synthetic construct
  source 1..18: mol_type = other DNA
gggaaatcaagccctaac

SEQ ID NO: 4884 - DNA, 18 bp, synthetic construct
  source 1..18: mol_type = other DNA
gacagcacttttaactac

SEQ ID NO: 4885 - DNA, 18 bp, synthetic construct
  source 1..18: mol_type = other DNA
gggaaatcaagccctaac

SEQ ID NO: 4886 - DNA, 18 bp, synthetic construct
  source 1..18: mol_type = other DNA
aaacagtacccaaccctg

SEQ ID NO: 4887 - DNA, 18 bp, synthetic construct
  source 1..18: mol_type = other DNA
gggaaatcaagccctaac

SEQ ID NO: 4888 - DNA, 21 bp, synthetic construct
  source 1..21: mol_type = other DNA
acaagtcaggtcttataccat

SEQ ID NO: 4889 - DNA, 18 bp, synthetic construct
  source 1..18: mol_type = other DNA
gggaaatcaagccctaac

SEQ ID NO: 4890 - DNA, 18 bp, synthetic construct
  source 1..18: mol_type = other DNA
gatactgcctcatcatac

SEQ ID NO: 4891 - DNA, 18 bp, synthetic construct
  source 1..18: mol_type = other DNA
ggttttcaggcaacttct

SEQ ID NO: 4892 - DNA, 18 bp, synthetic construct
  source 1..18: mol_type = other DNA
gaccctaacagttattac

SEQ ID NO: 4893 - DNA, 18 bp, synthetic construct
  source 1..18: mol_type = other DNA
ggttttcaggcaacttct

SEQ ID NO: 4894 - DNA, 18 bp, synthetic construct
  source 1..18: mol_type = other DNA
aacagtgcctccaactac

SEQ ID NO: 4895 - DNA, 15 bp, synthetic construct
  source 1..15: mol_type = other DNA
ttcaatcatgataca

SEQ ID NO: 4896 - DNA, 18 bp, synthetic construct
  source 1..18: mol_type = other DNA
gcctcagggtacccagct

SEQ ID NO: 4897 - DNA, 15 bp, synthetic construct
  source 1..15: mol_type = other DNA
ttcaatcatgataca

SEQ ID NO: 4898 - DNA, 18 bp, synthetic construct
  source 1..18: mol_type = other DNA
gatactgcctcatcatac

SEQ ID NO: 4899 - DNA, 15 bp, synthetic construct
  source 1..15: mol_type = other DNA
ttcaatcatgataca

SEQ ID NO: 4900 - DNA, 15 bp, synthetic construct
  source 1..15: mol_type = other DNA
accaccatgagggct

SEQ ID NO: 4901 - DNA, 15 bp, synthetic construct
  source 1..15: mol_type = other DNA
ttcaatcatgataca

SEQ ID NO: 4902 - DNA, 18 bp, synthetic construct
  source 1..18: mol_type = other DNA
gacagcacttttgactac

SEQ ID NO: 4903 - DNA, 15 bp, synthetic construct
  source 1..15: mol_type = other DNA
ttcaatcatgataca

SEQ ID NO: 4904 - DNA, 18 bp, synthetic construct
  source 1..18: mol_type = other DNA
gcctcagggtacccaacc

SEQ ID NO: 4905 - DNA, 15 bp, synthetic construct
  source 1..15: mol_type = other DNA
ttcaatcatgataca

SEQ ID NO: 4906 - DNA, 18 bp, synthetic construct
  source 1..18: mol_type = other DNA
gaccctaacagttattac

SEQ ID NO: 4907 - DNA, 15 bp, synthetic construct
  source 1..15: mol_type = other DNA
ttcaatcatgataca

SEQ ID NO: 4908 - DNA, 18 bp, synthetic construct
  source 1..18: mol_type = other DNA
accacagggtacccgact

SEQ ID NO: 4909 - DNA, 15 bp, synthetic construct
  source 1..15: mol_type = other DNA
ttcaatcatgataca

SEQ ID NO: 4910 - DNA, 24 bp, synthetic construct
  source 1..24: mol_type = other DNA
gccacaagcatagcttaccctaat

SEQ ID NO: 4911 - DNA, 15 bp, synthetic construct
  source 1..15: mol_type = other DNA
ttcaatcatgataca

SEQ ID NO: 4912 - DNA, 18 bp, synthetic construct
  source 1..18: mol_type = other DNA
gaccctaacagttattac

SEQ ID NO: 4913 - DNA, 15 bp, synthetic construct
  source 1..15: mol_type = other DNA
ttcaatcatgataca

SEQ ID NO: 4914 - DNA, 18 bp, synthetic construct
  source 1..18: mol_type = other DNA
tactctgcgacaccttat

SEQ ID NO: 4915 - DNA, 15 bp, synthetic construct
  source 1..15: mol_type = other DNA
ttcaatcatgataca

SEQ ID NO: 4916 - DNA, 18 bp, synthetic construct
  source 1..18: mol_type = other DNA
actgcttactcaactttc

SEQ ID NO: 4917 - DNA, 15 bp, synthetic construct
  source 1..15: mol_type = other DNA
ttcaatcatgataca

SEQ ID NO: 4918 - DNA, 18 bp, synthetic construct
  source 1..18: mol_type = other DNA
tactctgggacaccttat

SEQ ID NO: 4919 - DNA, 15 bp, synthetic construct
  source 1..15: mol_type = other DNA
ttcaatcatgataca

SEQ ID NO: 4920 - DNA, 18 bp, synthetic construct
  source 1..18: mol_type = other DNA
gacagcacttttaactac

SEQ ID NO: 4921 - DNA, 18 bp, synthetic construct
  source 1..18: mol_type = other DNA
aattcccagtatccctgg

SEQ ID NO: 4922 - DNA, 18 bp, synthetic construct
  source 1..18: mol_type = other DNA
tcctctgtgacaccttat

SEQ ID NO: 4923 - DNA, 18 bp, synthetic construct
  source 1..18: mol_type = other DNA
aattcccagtatccctgg

SEQ ID NO: 4924 - DNA, 21 bp, synthetic construct
  source 1..21: mol_type = other DNA
acccaggacagttcttacttc

SEQ ID NO: 4925 - DNA, 18 bp, synthetic construct
  source 1..18: mol_type = other DNA
aattcccagtatccctgg

SEQ ID NO: 4926 - DNA, 18 bp, synthetic construct
  source 1..18: mol_type = other DNA
gatcgtaattttcagtac

SEQ ID NO: 4927 - DNA, 18 bp, synthetic construct
  source 1..18: mol_type = other DNA
aattcccagtatccctgg

SEQ ID NO: 4928 - DNA, 15 bp, synthetic construct
  source 1..15: mol_type = other DNA
atcgctgcgacaact

SEQ ID NO: 4929 - DNA, 18 bp, synthetic construct
  source 1..18: mol_type = other DNA
aattcccagtatccctgg

SEQ ID NO: 4930 - DNA, 24 bp, synthetic construct
  source 1..24: mol_type = other DNA
gccacaagcatagcttaccctaat

SEQ ID NO: 4931 - DNA, 18 bp, synthetic construct
  source 1..18: mol_type = other DNA
aattcccagtatccctgg

SEQ ID NO: 4932 - DNA, 18 bp, synthetic construct
  source 1..18: mol_type = other DNA
gacagtgcttctcagtat

SEQ ID NO: 4933 - DNA, 18 bp, synthetic construct
  source 1..18: mol_type = other DNA
aattcccagtatccctgg

SEQ ID NO: 4934 - DNA, 18 bp, synthetic construct
  source 1..18: mol_type = other DNA
tactctgggacgccttat

SEQ ID NO: 4935 - DNA, 15 bp, synthetic construct
  source 1..15: mol_type = other DNA
ctgggacataatgct

SEQ ID NO: 4936 - DNA, 21 bp, synthetic construct
  source 1..21: mol_type = other DNA
acaatcagtggaaacgagtac

SEQ ID NO: 4937 - DNA, 15 bp, synthetic construct
  source 1..15: mol_type = other DNA
ctgggacataatgct

SEQ ID NO: 4938 - DNA, 18 bp, synthetic construct
  source 1..18: mol_type = other DNA
tactctgggacgccttat

SEQ ID NO: 4939 - DNA, 15 bp, synthetic construct
  source 1..15: mol_type = other DNA
ctgggacataatgct

SEQ ID NO: 4940 - DNA, 18 bp, synthetic construct
  source 1..18: mol_type = other DNA
gaccctaacagttattac

SEQ ID NO: 4941 - DNA, 15 bp, synthetic construct
  source 1..15: mol_type = other DNA
ctgggacataatgct

SEQ ID NO: 4942 - DNA, 24 bp, synthetic construct
  source 1..24: mol_type = other DNA
accacaagcatagcttaccctaat

SEQ ID NO: 4943 - DNA, 15 bp, synthetic construct
  source 1..15: mol_type = other DNA
ctgggacataatgct

SEQ ID NO: 4944 - DNA, 24 bp, synthetic construct
  source 1..24: mol_type = other DNA
gccacaagcatagcttaccctaat

SEQ ID NO: 4945 - DNA, 15 bp, synthetic construct
  source 1..15: mol_type = other DNA
ctgggacataatgct

SEQ ID NO: 4946 - DNA, 15 bp, synthetic construct
  source 1..15: mol_type = other DNA
accaccatgagggct

SEQ ID NO: 4947 - DNA, 15 bp, synthetic construct
  source 1..15: mol_type = other DNA
ctgggacataatgct

SEQ ID NO: 4948 - DNA, 18 bp, synthetic construct
  source 1..18: mol_type = other DNA
acctcagggttcaatggg

SEQ ID NO: 4949 - DNA, 15 bp, synthetic construct
  source 1..15: mol_type = other DNA
ctgggacataatgct

SEQ ID NO: 4950 - DNA, 18 bp, synthetic construct
  source 1..18: mol_type = other DNA
gacagtgcttctcagtat

SEQ ID NO: 4951 - DNA, 15 bp, synthetic construct
  source 1..15: mol_type = other DNA
ctgggacataatgct

SEQ ID NO: 4952 - DNA, 24 bp, synthetic construct
  source 1..24: mol_type = other DNA
gccacaagcatagcttaccctaat

SEQ ID NO: 4953 - DNA, 15 bp, synthetic construct
  source 1..15: mol_type = other DNA
ctgggacataatgct

SEQ ID NO: 4954 - DNA, 18 bp, synthetic construct
  source 1..18: mol_type = other DNA
tatggtggatccatttac

SEQ ID NO: 4955 - DNA, 15 bp, synthetic construct
  source 1..15: mol_type = other DNA
ctgggacataatgct

SEQ ID NO: 4956 - DNA, 18 bp, synthetic construct
  source 1..18: mol_type = other DNA
aatgatatgtttgactat

SEQ ID NO: 4957 - DNA, 15 bp, synthetic construct
  source 1..15: mol_type = other DNA
ctgggacataatgct

SEQ ID NO: 4958 - DNA, 21 bp, synthetic construct
  source 1..21: mol_type = other DNA
acccaggacagttcttacttc

SEQ ID NO: 4959 - DNA, 15 bp, synthetic construct
  source 1..15: mol_type = other DNA
ctgggacataatgct

SEQ ID NO: 4960 - DNA, 24 bp, synthetic construct
  source 1..24: mol_type = other DNA
gccacaagcatagcttaccctaat

SEQ ID NO: 4961 - DNA, 15 bp, synthetic construct
  source 1..15: mol_type = other DNA
ctgggacataatgct

SEQ ID NO: 4962 - DNA, 18 bp, synthetic construct
  source 1..18: mol_type = other DNA
accacaacgtacccaact

SEQ ID NO: 4963 - DNA, 15 bp, synthetic construct
  source 1..15: mol_type = other DNA
ctgggacataatgct

SEQ ID NO: 4964 - DNA, 15 bp, synthetic construct
  source 1..15: mol_type = other DNA
tccacagcaacccag

SEQ ID NO: 4965 - DNA, 15 bp, synthetic construct
  source 1..15: mol_type = other DNA
ctgggacataatgct

SEQ ID NO: 4966 - DNA, 18 bp, synthetic construct
  source 1..18: mol_type = other DNA
tcctctgtgacaccttat

SEQ ID NO: 4967 - DNA, 15 bp, synthetic construct
  source 1..15: mol_type = other DNA
ctgggacataatgct

SEQ ID NO: 4968 - DNA, 24 bp, synthetic construct
  source 1..24: mol_type = other DNA
gccacaagcatagcttaccctaat

SEQ ID NO: 4969 - DNA, 15 bp, synthetic construct
  source 1..15: mol_type = other DNA
ctgggacataatgct

SEQ ID NO: 4970 - DNA, 18 bp, synthetic construct
  source 1..18: mol_type = other DNA
gcctcagggtacccagct

SEQ ID NO: 4971 - DNA, 15 bp, synthetic construct
  source 1..15: mol_type = other DNA
ctgggacataatgct

SEQ ID NO: 4972 - DNA, 18 bp, synthetic construct
  source 1..18: mol_type = other DNA
acctcagggttcaatggg

SEQ ID NO: 4973 - DNA, 15 bp, synthetic construct
  source 1..15: mol_type = other DNA
ctgggacataatgct

SEQ ID NO: 4974 - DNA, 21 bp, synthetic construct
  source 1..21: mol_type = other DNA
acccaggacagttcttacttc

SEQ ID NO: 4975 - DNA, 15 bp, synthetic construct
  source 1..15: mol_type = other DNA
ctgggacataatgct

SEQ ID NO: 4976 - DNA, 18 bp, synthetic construct
  source 1..18: mol_type = other DNA
gatcgtaattttcagtac

SEQ ID NO: 4977 - DNA, 15 bp, synthetic construct
  source 1..15: mol_type = other DNA
ctgggacataatgct

SEQ ID NO: 4978 - DNA, 18 bp, synthetic construct
  source 1..18: mol_type = other DNA
gacagtgcttctcagtat

SEQ ID NO: 4979 - DNA, 15 bp, synthetic construct
  source 1..15: mol_type = other DNA
ctgggacataatgct

SEQ ID NO: 4980 - DNA, 15 bp, synthetic construct
  source 1..15: mol_type = other DNA
acatctttgaacagt

SEQ ID NO: 4981 - DNA, 15 bp, synthetic construct
  source 1..15: mol_type = other DNA
ctgggacataatgct

SEQ ID NO: 4982 - DNA, 18 bp, synthetic construct
  source 1..18: mol_type = other DNA
gtgacccccgacaaccac

SEQ ID NO: 4983 - DNA, 15 bp, synthetic construct
  source 1..15: mol_type = other DNA
ctgggacataatgct

SEQ ID NO: 4984 - DNA, 18 bp, synthetic construct
  source 1..18: mol_type = other DNA
gacagcacttttaactac

SEQ ID NO: 4985 - DNA, 15 bp, synthetic construct
  source 1..15: mol_type = other DNA
ctgggacataatgct

SEQ ID NO: 4986 - DNA, 24 bp, synthetic construct
  source 1..24: mol_type = other DNA
gccacaagcatagcttaccctaat

SEQ ID NO: 4987 - DNA, 15 bp, synthetic construct
  source 1..15: mol_type = other DNA
ctgggacataatgct

SEQ ID NO: 4988 - DNA, 18 bp, synthetic construct
  source 1..18: mol_type = other DNA
agtacttactcacctttc

SEQ ID NO: 4989 - DNA, 15 bp, synthetic construct
  source 1..15: mol_type = other DNA
ctgggacataatgct

SEQ ID NO: 4990 - DNA, 18 bp, synthetic construct
  source 1..18: mol_type = other DNA
gaccctaacagttattac

SEQ ID NO: 4991 - DNA, 15 bp, synthetic construct
  source 1..15: mol_type = other DNA
ctgggacataatgct

SEQ ID NO: 4992 - DNA, 21 bp, synthetic construct
  source 1..21: mol_type = other DNA
aacattgctacaagcgagtac

SEQ ID NO: 4993 - DNA, 15 bp, synthetic construct
  source 1..15: mol_type = other DNA
ctgggacataatgct

SEQ ID NO: 4994 - DNA, 18 bp, synthetic construct
  source 1..18: mol_type = other DNA
tacagtgcagcaccttac

SEQ ID NO: 4995 - DNA, 15 bp, synthetic construct
  source 1..15: mol_type = other DNA
ctgggacataatgct

SEQ ID NO: 4996 - DNA, 18 bp, synthetic construct
  source 1..18: mol_type = other DNA
gatcgtaatgttgactac

SEQ ID NO: 4997 - DNA, 15 bp, synthetic construct
  source 1..15: mol_type = other DNA
ctgggacataatgct

SEQ ID NO: 4998 - DNA, 15 bp, synthetic construct
  source 1..15: mol_type = other DNA
atctttacaaaccag

SEQ ID NO: 4999 - DNA, 15 bp, synthetic construct
  source 1..15: mol_type = other DNA
ctgggacataatgct

SEQ ID NO: 5000 - DNA, 18 bp, synthetic construct
  source 1..18: mol_type = other DNA
tactctgggacaccttat

SEQ ID NO: 5001 - DNA, 15 bp, synthetic construct
  source 1..15: mol_type = other DNA
ctgggacataatgct

SEQ ID NO: 5002 - DNA, 15 bp, synthetic construct
  source 1..15: mol_type = other DNA
atcgccgcgacaact

SEQ ID NO: 5003 - DNA, 15 bp, synthetic construct
  source 1..15: mol_type = other DNA
ctgggacataatgct

SEQ ID NO: 5004 - DNA, 21 bp, synthetic construct
  source 1..21: mol_type = other DNA
acccgggacagttcttacttc

SEQ ID NO: 5005 - DNA, 15 bp, synthetic construct
  source 1..15: mol_type = other DNA
tcaggacatagtgct

SEQ ID NO: 5006 - DNA, 18 bp, synthetic construct
  source 1..18: mol_type = other DNA
tactttgggacaccttat

SEQ ID NO: 5007 - DNA, 15 bp, synthetic construct
  source 1..15: mol_type = other DNA
tcaggacatagtgct

SEQ ID NO: 5008 - DNA, 15 bp, synthetic construct
  source 1..15: mol_type = other DNA
acatccataactgcc

SEQ ID NO: 5009 - DNA, 15 bp, synthetic construct
  source 1..15: mol_type = other DNA
tcaggacatagtgct

SEQ ID NO: 5010 - DNA, 15 bp, synthetic construct
  source 1..15: mol_type = other DNA
acatccataactgcc

SEQ ID NO: 5011 - DNA, 15 bp, synthetic construct
  source 1..15: mol_type = other DNA
tcaggacatagtgct

SEQ ID NO: 5012 - DNA, 18 bp, synthetic construct
  source 1..18: mol_type = other DNA
tactctgggacaccttat

SEQ ID NO: 5013 - DNA, 15 bp, synthetic construct
  source 1..15: mol_type = other DNA
tcaggacatagtgct

SEQ ID NO: 5014 - DNA, 18 bp, synthetic construct
  source 1..18: mol_type = other DNA
gacagtgcttctcagtat

SEQ ID NO: 5015 - DNA, 15 bp, synthetic construct
  source 1..15: mol_type = other DNA
tcaggacatagtgct

SEQ ID NO: 5016 - DNA, 15 bp, synthetic construct
  source 1..15: mol_type = other DNA
accaccatgaggagt

SEQ ID NO: 5017 - DNA, 15 bp, synthetic construct
  source 1..15: mol_type = other DNA
tctggacatctctct

SEQ ID NO: 5018 - DNA, 15 bp, synthetic construct
  source 1..15: mol_type = other DNA
acatctttgaacagt

SEQ ID NO: 5019 - DNA, 15 bp, synthetic construct
  source 1..15: mol_type = other DNA
agtcaagttgtttcg

SEQ ID NO: 5020 - DNA, 18 bp, synthetic construct
  source 1..18: mol_type = other DNA
tactctgggacaccttat

SEQ ID NO: 5021 - DNA, 15 bp, synthetic construct
  source 1..15: mol_type = other DNA
agtcaagttgtttcg

SEQ ID NO: 5022 - DNA, 18 bp, synthetic construct
  source 1..18: mol_type = other DNA
aacagtgcctccaactac

SEQ ID NO: 5023 - DNA, 15 bp, synthetic construct
  source 1..15: mol_type = other DNA
agtcaagttgtttcg

SEQ ID NO: 5024 - DNA, 18 bp, synthetic construct
  source 1..18: mol_type = other DNA
gacagtgcttctcagtat

SEQ ID NO: 5025 - DNA, 15 bp, synthetic construct
  source 1..15: mol_type = other DNA
tctggacatgatacc

SEQ ID NO: 5026 - DNA, 18 bp, synthetic construct
  source 1..18: mol_type = other DNA
gatcgtaattttcagtac

SEQ ID NO: 5027 - DNA, 15 bp, synthetic construct
  source 1..15: mol_type = other DNA
tctggacatgatacc

SEQ ID NO: 5028 - DNA, 21 bp, synthetic construct
  source 1..21: mol_type = other DNA
acccgggacagttcttacttc

SEQ ID NO: 5029 - DNA, 15 bp, synthetic construct
  source 1..15: mol_type = other DNA
tctggacatgatacc

SEQ ID NO: 5030 - DNA, 18 bp, synthetic construct
  source 1..18: mol_type = other DNA
gcctcagggtacccagct

SEQ ID NO: 5031 - DNA, 15 bp, synthetic construct
  source 1..15: mol_type = other DNA
tctggacatgatacc

SEQ ID NO: 5032 - DNA, 18 bp, synthetic construct
  source 1..18: mol_type = other DNA
accaaacagtacccaacc

SEQ ID NO: 5033 - DNA, 15 bp, synthetic construct
  source 1..15: mol_type = other DNA
tctggacatgatacc

SEQ ID NO: 5034 - DNA, 18 bp, synthetic construct
  source 1..18: mol_type = other DNA
tatggtggatccatttac

SEQ ID NO: 5035 - DNA, 15 bp, synthetic construct
  source 1..15: mol_type = other DNA
tctggacatgatacc

SEQ ID NO: 5036 - DNA, 18 bp, synthetic construct
  source 1..18: mol_type = other DNA
aatgatatgtttgactat

SEQ ID NO: 5037 - DNA, 15 bp, synthetic construct
  source 1..15: mol_type = other DNA
tctggacatgatacc

SEQ ID NO: 5038 - DNA, 18 bp, synthetic construct
  source 1..18: mol_type = other DNA
gcctcagggtacccagct

SEQ ID NO: 5039 - DNA, 15 bp, synthetic construct
  source 1..15: mol_type = other DNA
tctggacatgatacc

SEQ ID NO: 5040 - DNA, 18 bp, synthetic construct
  source 1..18: mol_type = other DNA
accaaacagtacccaacc

SEQ ID NO: 5041 - DNA, 15 bp, synthetic construct
  source 1..15: mol_type = other DNA
tctggacatgatacc

SEQ ID NO: 5042 - DNA, 18 bp, synthetic construct
  source 1..18: mol_type = other DNA
tactctgcgacaccttat

SEQ ID NO: 5043 - DNA, 15 bp, synthetic construct
  source 1..15: mol_type = other DNA
tctggacatgatacc

SEQ ID NO: 5044 - DNA, 18 bp, synthetic construct
  source 1..18: mol_type = other DNA
tactctgcgacaccttat

SEQ ID NO: 5045 - DNA, 15 bp, synthetic construct
  source 1..15: mol_type = other DNA
tctggacatgatacc

SEQ ID NO: 5046 - DNA, 18 bp, synthetic construct
  source 1..18: mol_type = other DNA
aatgatatgtttgactat

SEQ ID NO: 5047 - DNA, 15 bp, synthetic construct
  source 1..15: mol_type = other DNA
tctggacatgatacc

SEQ ID NO: 5048 - DNA, 18 bp, synthetic construct
  source 1..18: mol_type = other DNA
gatcgtaatgttgactac

SEQ ID NO: 5049 - DNA, 15 bp, synthetic construct
  source 1..15: mol_type = other DNA
tctggacatgatacc

SEQ ID NO: 5050 - DNA, 18 bp, synthetic construct
  source 1..18: mol_type = other DNA
gatcgtaattttcagtac

SEQ ID NO: 5051 - DNA, 15 bp, synthetic construct
  source 1..15: mol_type = other DNA
tctggacatgatacc

SEQ ID NO: 5052 - DNA, 24 bp, synthetic construct
  source 1..24: mol_type = other DNA
accacaagcatagcttaccctaat

SEQ ID NO: 5053 - DNA, 15 bp, synthetic construct
  source 1..15: mol_type = other DNA
tctggacatgatacc

SEQ ID NO: 5054 - DNA, 18 bp, synthetic construct
  source 1..18: mol_type = other DNA
aacagtgcctccaactac

SEQ ID NO: 5055 - DNA, 15 bp, synthetic construct
  source 1..15: mol_type = other DNA
tctggacatgatacc

SEQ ID NO: 5056 - DNA, 15 bp, synthetic construct
  source 1..15: mol_type = other DNA
tccacagcaacccag

SEQ ID NO: 5057 - DNA, 15 bp, synthetic construct
  source 1..15: mol_type = other DNA
tctggacatgatacc

SEQ ID NO: 5058 - DNA, 18 bp, synthetic construct
  source 1..18: mol_type = other DNA
actacttactcacctttc

SEQ ID NO: 5059 - DNA, 15 bp, synthetic construct
  source 1..15: mol_type = other DNA
tctggacatgatacc

SEQ ID NO: 5060 - DNA, 24 bp, synthetic construct
  source 1..24: mol_type = other DNA
gccacaagcatagcttaccctaat

SEQ ID NO: 5061 - DNA, 15 bp, synthetic construct
  source 1..15: mol_type = other DNA
tctggacatgatacc

SEQ ID NO: 5062 - DNA, 21 bp, synthetic construct
  source 1..21: mol_type = other DNA
acccaggacagttcttacttc

SEQ ID NO: 5063 - DNA, 15 bp, synthetic construct
  source 1..15: mol_type = other DNA
tctggacatgatacc

SEQ ID NO: 5064 - DNA, 21 bp, synthetic construct
  source 1..21: mol_type = other DNA
acccaggacagttcttacttc

SEQ ID NO: 5065 - DNA, 15 bp, synthetic construct
  source 1..15: mol_type = other DNA
tctggacatgatacc

SEQ ID NO: 5066 - DNA, 15 bp, synthetic construct
  source 1..15: mol_type = other DNA
acatccataactgcc

SEQ ID NO: 5067 - DNA, 15 bp, synthetic construct
  source 1..15: mol_type = other DNA
tctggacatgatacc

SEQ ID NO: 5068 - DNA, 18 bp, synthetic construct
  source 1..18: mol_type = other DNA
tactctgggacaccttat

SEQ ID NO: 5069 - DNA, 15 bp, synthetic construct
  source 1..15: mol_type = other DNA
tctggacatgatacc

SEQ ID NO: 5070 - DNA, 18 bp, synthetic construct
  source 1..18: mol_type = other DNA
aacagtgcttttgactac

SEQ ID NO: 5071 - DNA, 15 bp, synthetic construct
  source 1..15: mol_type = other DNA
tctggacatgatacc

SEQ ID NO: 5072 - DNA, 15 bp, synthetic construct
  source 1..15: mol_type = other DNA
accaccacgaggagt

SEQ ID NO: 5073 - DNA, 15 bp, synthetic construct
  source 1..15: mol_type = other DNA
tctggacatgatacc

SEQ ID NO: 5074 - DNA, 18 bp, synthetic construct
  source 1..18: mol_type = other DNA
gcctcagggtacccagct

SEQ ID NO: 5075 - DNA, 15 bp, synthetic construct
  source 1..15: mol_type = other DNA
tctggacatgatacc

SEQ ID NO: 5076 - DNA, 18 bp, synthetic construct
  source 1..18: mol_type = other DNA
accaaacagtacccaacc

SEQ ID NO: 5077 - DNA, 15 bp, synthetic construct
  source 1..15: mol_type = other DNA
tctggacatgatacc

SEQ ID NO: 5078 - DNA, 18 bp, synthetic construct
  source 1..18: mol_type = other DNA
tactttgggacaccttat

SEQ ID NO: 5079 - DNA, 15 bp, synthetic construct
  source 1..15: mol_type = other DNA
tctggacatgatacc

SEQ ID NO: 5080 - DNA, 18 bp, synthetic construct
  source 1..18: mol_type = other DNA
aacagtgcctccaactac

SEQ ID NO: 5081 - DNA, 15 bp, synthetic construct
  source 1..15: mol_type = other DNA
tctggacatgatacc

SEQ ID NO: 5082 - DNA, 18 bp, synthetic construct
  source 1..18: mol_type = other DNA
tatggtggatccatttac

SEQ ID NO: 5083 - DNA, 15 bp, synthetic construct
  source 1..15: mol_type = other DNA
atgagccatgaaaca

SEQ ID NO: 5084 - DNA, 24 bp, synthetic construct
  source 1..24: mol_type = other DNA
gccacaagcatagcttaccctaat

SEQ ID NO: 5085 - DNA, 15 bp, synthetic construct
  source 1..15: mol_type = other DNA
atgagccatgaaaca

SEQ ID NO: 5086 - DNA, 18 bp, synthetic construct
  source 1..18: mol_type = other DNA
gacagtgcttctcagtat

SEQ ID NO: 5087 - DNA, 15 bp, synthetic construct
  source 1..15: mol_type = other DNA
atgagccatgaaaca

SEQ ID NO: 5088 - DNA, 18 bp, synthetic construct
  source 1..18: mol_type = other DNA
tactttgggacaccttat

SEQ ID NO: 5089 - DNA, 15 bp, synthetic construct
  source 1..15: mol_type = other DNA
atgagccatgaaaca

SEQ ID NO: 5090 - DNA, 15 bp, synthetic construct
  source 1..15: mol_type = other DNA
acatccataactgcc

SEQ ID NO: 5091 - DNA, 15 bp, synthetic construct
  source 1..15: mol_type = other DNA
atgagccatgaaaca

SEQ ID NO: 5092 - DNA, 18 bp, synthetic construct
  source 1..18: mol_type = other DNA
acctcagggttcaatggg

SEQ ID NO: 5093 - DNA, 15 bp, synthetic construct
  source 1..15: mol_type = other DNA
atgagccatgaaaca

SEQ ID NO: 5094 - DNA, 21 bp, synthetic construct
  source 1..21: mol_type = other DNA
actatttactcaaatcctttc

SEQ ID NO: 5095 - DNA, 15 bp, synthetic construct
  source 1..15: mol_type = other DNA
atgagccatgaaaca

SEQ ID NO: 5096 - DNA, 18 bp, synthetic construct
  source 1..18: mol_type = other DNA
accacatggtacccgact

SEQ ID NO: 5097 - DNA, 15 bp, synthetic construct
  source 1..15: mol_type = other DNA
ctaggccacaatgct

SEQ ID NO: 5098 - DNA, 15 bp, synthetic construct
  source 1..15: mol_type = other DNA
tccacagcaacccgg

SEQ ID NO: 5099 - DNA, 15 bp, synthetic construct
  source 1..15: mol_type = other DNA
ctaggccacaatgct

SEQ ID NO: 5100 - DNA, 18 bp, synthetic construct
  source 1..18: mol_type = other DNA
aacagtgcttttgactac

SEQ ID NO: 5101 - DNA, 15 bp, synthetic construct
  source 1..15: mol_type = other DNA
ctaggccacaatgct

SEQ ID NO: 5102 - DNA, 15 bp, synthetic construct
  source 1..15: mol_type = other DNA
acttacacaactgtt

SEQ ID NO: 5103 - DNA, 15 bp, synthetic construct
  source 1..15: mol_type = other DNA
ctaggccacaatgct

SEQ ID NO: 5104 - DNA, 18 bp, synthetic construct
  source 1..18: mol_type = other DNA
tactttgggacaccttat

SEQ ID NO: 5105 - DNA, 15 bp, synthetic construct
  source 1..15: mol_type = other DNA
ctaggccacaatgct

SEQ ID NO: 5106 - DNA, 18 bp, synthetic construct
  source 1..18: mol_type = other DNA
gatcgtaatgttgactac

SEQ ID NO: 5107 - DNA, 15 bp, synthetic construct
  source 1..15: mol_type = other DNA
ctaggccacaatgct

SEQ ID NO: 5108 - DNA, 18 bp, synthetic construct
  source 1..18: mol_type = other DNA
gatggtacttctgacaac

SEQ ID NO: 5109 - DNA, 15 bp, synthetic construct
  source 1..15: mol_type = other DNA
ctaggccacaatgct

SEQ ID NO: 5110 - DNA, 18 bp, synthetic construct
  source 1..18: mol_type = other DNA
gatcgtaattttcagtac

SEQ ID NO: 5111 - DNA, 15 bp, synthetic construct
  source 1..15: mol_type = other DNA
ctaggccacaatgct

SEQ ID NO: 5112 - DNA, 21 bp, synthetic construct
  source 1..21: mol_type = other DNA
acccaggacagttcttacttc

SEQ ID NO: 5113 - DNA, 15 bp, synthetic construct
  source 1..15: mol_type = other DNA
ctaggccacaatgct

SEQ ID NO: 5114 - DNA, 21 bp, synthetic construct
  source 1..21: mol_type = other DNA
acccgggacagttcttacttc

SEQ ID NO: 5115 - DNA, 15 bp, synthetic construct
  source 1..15: mol_type = other DNA
ctaggccacaatgct

SEQ ID NO: 5116 - DNA, 24 bp, synthetic construct
  source 1..24: mol_type = other DNA
gccacaagcatagcttaccctaat

SEQ ID NO: 5117 - DNA, 15 bp, synthetic construct
  source 1..15: mol_type = other DNA
ctaggccacaatgct

SEQ ID NO: 5118 - DNA, 18 bp, synthetic construct
  source 1..18: mol_type = other DNA
accacatggtacccgact

SEQ ID NO: 5119 - DNA, 15 bp, synthetic construct
  source 1..15: mol_type = other DNA
ctaggccacaatgct

SEQ ID NO: 5120 - DNA, 18 bp, synthetic construct
  source 1..18: mol_type = other DNA
gcctcagggtacccagct

SEQ ID NO: 5121 - DNA, 15 bp, synthetic construct
  source 1..15: mol_type = other DNA
ctaggccacaatgct

SEQ ID NO: 5122 - DNA, 18 bp, synthetic construct
  source 1..18: mol_type = other DNA
gatcgtaattctcagtat

SEQ ID NO: 5123 - DNA, 15 bp, synthetic construct
  source 1..15: mol_type = other DNA
ctaggccacaatgct

SEQ ID NO: 5124 - DNA, 18 bp, synthetic construct
  source 1..18: mol_type = other DNA
gatactgcttcatcatac

SEQ ID NO: 5125 - DNA, 15 bp, synthetic construct
  source 1..15: mol_type = other DNA
ctaggccacaatgct

SEQ ID NO: 5126 - DNA, 21 bp, synthetic construct
  source 1..21: mol_type = other DNA
acccgggacagttcttacttc

SEQ ID NO: 5127 - DNA, 15 bp, synthetic construct
  source 1..15: mol_type = other DNA
ctaggccacaatgct

SEQ ID NO: 5128 - DNA, 18 bp, synthetic construct
  source 1..18: mol_type = other DNA
tactctgggacaccttat

SEQ ID NO: 5129 - DNA, 15 bp, synthetic construct
  source 1..15: mol_type = other DNA
ctaggccacaatgct

SEQ ID NO: 5130 - DNA, 15 bp, synthetic construct
  source 1..15: mol_type = other DNA
acatccataactgcc

SEQ ID NO: 5131 - DNA, 15 bp, synthetic construct
  source 1..15: mol_type = other DNA
ctaggccacaatgct

SEQ ID NO: 5132 - DNA, 15 bp, synthetic construct
  source 1..15: mol_type = other DNA
tccacagcaacccag

SEQ ID NO: 5133 - DNA, 15 bp, synthetic construct
  source 1..15: mol_type = other DNA
ctaggccacaatgct

SEQ ID NO: 5134 - DNA, 18 bp, synthetic construct
  source 1..18: mol_type = other DNA
gaccctaacagttattac

SEQ ID NO: 5135 - DNA, 15 bp, synthetic construct
  source 1..15: mol_type = other DNA
ctaggccacaatgct

SEQ ID NO: 5136 - DNA, 18 bp, synthetic construct
  source 1..18: mol_type = other DNA
tactctgcgacaccttat

SEQ ID NO: 5137 - DNA, 15 bp, synthetic construct
  source 1..15: mol_type = other DNA
ctaggccacaatgct

SEQ ID NO: 5138 - DNA, 18 bp, synthetic construct
  source 1..18: mol_type = other DNA
gacagtgcttctcagtat

SEQ ID NO: 5139 - DNA, 15 bp, synthetic construct
  source 1..15: mol_type = other DNA
ctaggccacaatgct

SEQ ID NO: 5140 - DNA, 18 bp, synthetic construct
  source 1..18: mol_type = other DNA
aatgatatgtttgactat

SEQ ID NO: 5141 - DNA, 15 bp, synthetic construct
  source 1..15: mol_type = other DNA
ctaggccacaatgct

SEQ ID NO: 5142 - DNA, 15 bp, synthetic construct
  source 1..15: mol_type = other DNA
acatctttgaacagt

SEQ ID NO: 5143 - DNA, 15 bp, synthetic construct
  source 1..15: mol_type = other DNA
ctaggccacaatgct

SEQ ID NO: 5144 - DNA, 18 bp, synthetic construct
  source 1..18: mol_type = other DNA
gatcgtaatgttgactac

SEQ ID NO: 5145 - DNA, 15 bp, synthetic construct
  source 1..15: mol_type = other DNA
ctaggccacaatgct

SEQ ID NO: 5146 - DNA, 15 bp, synthetic construct
  source 1..15: mol_type = other DNA
tccacagcaacccag

SEQ ID NO: 5147 - DNA, 15 bp, synthetic construct
  source 1..15: mol_type = other DNA
ctaggccacaatgct

SEQ ID NO: 5148 - DNA, 18 bp, synthetic construct
  source 1..18: mol_type = other DNA
gacagtgcctccaactac

SEQ ID NO: 5149 - DNA, 15 bp, synthetic construct
  source 1..15: mol_type = other DNA
ctaggccacaatgct

SEQ ID NO: 5150 - DNA, 18 bp, synthetic construct
  source 1..18: mol_type = other DNA
accaaacagtacccaacc

SEQ ID NO: 5151 - DNA, 15 bp, synthetic construct
  source 1..15: mol_type = other DNA
ctaggccacaatgct

SEQ ID NO: 5152 - DNA, 21 bp, synthetic construct
  source 1..21: mol_type = other DNA
aacattgctacaagcgagtac

SEQ ID NO: 5153 - DNA, 15 bp, synthetic construct
  source 1..15: mol_type = other DNA
ctaggccacaatgct

SEQ ID NO: 5154 - DNA, 21 bp, synthetic construct
  source 1..21: mol_type = other DNA
aacattgctacaagcgagtac

SEQ ID NO: 5155 - DNA, 15 bp, synthetic construct
  source 1..15: mol_type = other DNA
ctaggccacaatgct

SEQ ID NO: 5156 - DNA, 18 bp, synthetic construct
  source 1..18: mol_type = other DNA
gatactgcttcatcatac

SEQ ID NO: 5157 - DNA, 15 bp, synthetic construct
  source 1..15: mol_type = other DNA
ctaggccacaatgct

SEQ ID NO: 5158 - DNA, 18 bp, synthetic construct
  source 1..18: mol_type = other DNA
gatactgcttcatcatac

SEQ ID NO: 5159 - DNA, 15 bp, synthetic construct
  source 1..15: mol_type = other DNA
ctaggccacaatgct

SEQ ID NO: 5160 - DNA, 18 bp, synthetic construct
  source 1..18: mol_type = other DNA
aatgatatgtttgactat

SEQ ID NO: 5161 - DNA, 15 bp, synthetic construct
  source 1..15: mol_type = other DNA
ctaggccacaatgct

SEQ ID NO: 5162 - DNA, 18 bp, synthetic construct
  source 1..18: mol_type = other DNA
gatactgcttcatcatac

SEQ ID NO: 5163 - DNA, 15 bp, synthetic construct
  source 1..15: mol_type = other DNA
ctgggccacgatact

SEQ ID NO: 5164 - DNA, 18 bp, synthetic construct
  source 1..18: mol_type = other DNA
gatcgtaatgttgactac

SEQ ID NO: 5165 - DNA, 15 bp, synthetic construct
  source 1..15: mol_type = other DNA
ctgggccacgatact

SEQ ID NO: 5166 - DNA, 24 bp, synthetic construct
  source 1..24: mol_type = other DNA
accacaagcatagcttaccctaat

SEQ ID NO: 5167 - DNA, 15 bp, synthetic construct
  source 1..15: mol_type = other DNA
ctgggccacgatact

SEQ ID NO: 5168 - DNA, 18 bp, synthetic construct
  source 1..18: mol_type = other DNA
accacagggtacccgact

SEQ ID NO: 5169 - DNA, 15 bp, synthetic construct
  source 1..15: mol_type = other DNA
ctgggccacgatact

SEQ ID NO: 5170 - DNA, 21 bp, synthetic construct
  source 1..21: mol_type = other DNA
actatttactcaaatcctttc

SEQ ID NO: 5171 - DNA, 15 bp, synthetic construct
  source 1..15: mol_type = other DNA
ctgggccacgatact

SEQ ID NO: 5172 - DNA, 21 bp, synthetic construct
  source 1..21: mol_type = other DNA
acccaggacagttcttacttc

SEQ ID NO: 5173 - DNA, 15 bp, synthetic construct
  source 1..15: mol_type = other DNA
ctgggccacgatact

SEQ ID NO: 5174 - DNA, 15 bp, synthetic construct
  source 1..15: mol_type = other DNA
tccacagcaacccgg

SEQ ID NO: 5175 - DNA, 15 bp, synthetic construct
  source 1..15: mol_type = other DNA
ctgggccacgatact

SEQ ID NO: 5176 - DNA, 18 bp, synthetic construct
  source 1..18: mol_type = other DNA
gatcgtaattttcagtac

SEQ ID NO: 5177 - DNA, 15 bp, synthetic construct
  source 1..15: mol_type = other DNA
ctgggccacgatact

SEQ ID NO: 5178 - DNA, 15 bp, synthetic construct
  source 1..15: mol_type = other DNA
tccacagcaacccgg

SEQ ID NO: 5179 - DNA, 15 bp, synthetic construct
  source 1..15: mol_type = other DNA
ctgggccacgatact

SEQ ID NO: 5180 - DNA, 15 bp, synthetic construct
  source 1..15: mol_type = other DNA
tccacagcaacccgg

SEQ ID NO: 5181 - DNA, 15 bp, synthetic construct
  source 1..15: mol_type = other DNA
ctgggccacgatact

SEQ ID NO: 5182 - DNA, 15 bp, synthetic construct
  source 1..15: mol_type = other DNA
acttacacaactgtt

SEQ ID NO: 5183 - DNA, 15 bp, synthetic construct
  source 1..15: mol_type = other DNA
ctgggccacgatact

SEQ ID NO: 5184 - DNA, 18 bp, synthetic construct
  source 1..18: mol_type = other DNA
tactttgggacaccttat

SEQ ID NO: 5185 - DNA, 15 bp, synthetic construct
  source 1..15: mol_type = other DNA
ctgggccacgatact

SEQ ID NO: 5186 - DNA, 21 bp, synthetic construct
  source 1..21: mol_type = other DNA
acccaggacagttcttacttc

SEQ ID NO: 5187 - DNA, 15 bp, synthetic construct
  source 1..15: mol_type = other DNA
ctgggccacgatact

SEQ ID NO: 5188 - DNA, 21 bp, synthetic construct
  source 1..21: mol_type = other DNA
acccgggacagttcttacttc

SEQ ID NO: 5189 - DNA, 15 bp, synthetic construct
  source 1..15: mol_type = other DNA
ctgggccacgatact

SEQ ID NO: 5190 - DNA, 18 bp, synthetic construct
  source 1..18: mol_type = other DNA
gacagcacttttaactac

SEQ ID NO: 5191 - DNA, 15 bp, synthetic construct
  source 1..15: mol_type = other DNA
ctgggccacgatact

SEQ ID NO: 5192 - DNA, 15 bp, synthetic construct
  source 1..15: mol_type = other DNA
tccacagcaacccag

SEQ ID NO: 5193 - DNA, 15 bp, synthetic construct
  source 1..15: mol_type = other DNA
ctgggccacgatact

SEQ ID NO: 5194 - DNA, 18 bp, synthetic construct
  source 1..18: mol_type = other DNA
gatggtacttctaacaac

SEQ ID NO: 5195 - DNA, 15 bp, synthetic construct
  source 1..15: mol_type = other DNA
ctgggccacgatact

SEQ ID NO: 5196 - DNA, 15 bp, synthetic construct
  source 1..15: mol_type = other DNA
acttacacaactgtt

SEQ ID NO: 5197 - DNA, 15 bp, synthetic construct
  source 1..15: mol_type = other DNA
ctgggccacgatact

SEQ ID NO: 5198 - DNA, 18 bp, synthetic construct
  source 1..18: mol_type = other DNA
gcctcagggtacccaacc

SEQ ID NO: 5199 - DNA, 15 bp, synthetic construct
  source 1..15: mol_type = other DNA
ctgggccacgatact

SEQ ID NO: 5200 - DNA, 18 bp, synthetic construct
  source 1..18: mol_type = other DNA
accaaacagtacccaacc

SEQ ID NO: 5201 - DNA, 15 bp, synthetic construct
  source 1..15: mol_type = other DNA
ctgggccacgatact

SEQ ID NO: 5202 - DNA, 24 bp, synthetic construct
  source 1..24: mol_type = other DNA
gccacaagcatagcttaccctaat

SEQ ID NO: 5203 - DNA, 15 bp, synthetic construct
  source 1..15: mol_type = other DNA
ctgggccacgatact

SEQ ID NO: 5204 - DNA, 21 bp, synthetic construct
  source 1..21: mol_type = other DNA
acccaggacagttcttacttc

SEQ ID NO: 5205 - DNA, 15 bp, synthetic construct
  source 1..15: mol_type = other DNA
ctgggccacgatact

SEQ ID NO: 5206 - DNA, 21 bp, synthetic construct
  source 1..21: mol_type = other DNA
actatttactcaaatcctttc

SEQ ID NO: 5207 - DNA, 15 bp, synthetic construct
  source 1..15: mol_type = other DNA
ctgggccacgatact

SEQ ID NO: 5208 - DNA, 18 bp, synthetic construct
  source 1..18: mol_type = other DNA
agtacttactcacctttc

SEQ ID NO: 5209 - DNA, 15 bp, synthetic construct
  source 1..15: mol_type = other DNA
ctgggccacgatact

SEQ ID NO: 5210 - DNA, 18 bp, synthetic construct
  source 1..18: mol_type = other DNA
gatcgtaattttcagtat

SEQ ID NO: 5211 - DNA, 15 bp, synthetic construct
  source 1..15: mol_type = other DNA
ctgggccacgatact

SEQ ID NO: 5212 - DNA, 18 bp, synthetic construct
  source 1..18: mol_type = other DNA
gaccctaacagttattac

SEQ ID NO: 5213 - DNA, 15 bp, synthetic construct
  source 1..15: mol_type = other DNA
ctgggccacgatact

SEQ ID NO: 5214 - DNA, 18 bp, synthetic construct
  source 1..18: mol_type = other DNA
gacagtgcctccaactac

SEQ ID NO: 5215 - DNA, 15 bp, synthetic construct
  source 1..15: mol_type = other DNA
aataaccacaacaac

SEQ ID NO: 5216 - DNA, 18 bp, synthetic construct
  source 1..18: mol_type = other DNA
acctcagggttcaacggg

SEQ ID NO: 5217 - DNA, 15 bp, synthetic construct
  source 1..15: mol_type = other DNA
aataaccacaacaac

SEQ ID NO: 5218 - DNA, 21 bp, synthetic construct
  source 1..21: mol_type = other DNA
acccaggacagttcttacttc

SEQ ID NO: 5219 - DNA, 15 bp, synthetic construct
  source 1..15: mol_type = other DNA
aataaccacaacaac

SEQ ID NO: 5220 - DNA, 18 bp, synthetic construct
  source 1..18: mol_type = other DNA
actgcttactcaactttc

SEQ ID NO: 5221 - DNA, 15 bp, synthetic construct
  source 1..15: mol_type = other DNA
aataaccacaacaac

SEQ ID NO: 5222 - DNA, 18 bp, synthetic construct
  source 1..18: mol_type = other DNA
tcctctgtgacaccttat

SEQ ID NO: 5223 - DNA, 15 bp, synthetic construct
  source 1..15: mol_type = other DNA
aataaccacaacaac

SEQ ID NO: 5224 - DNA, 18 bp, synthetic construct
  source 1..18: mol_type = other DNA
gcctcagggtacccaacc

SEQ ID NO: 5225 - DNA, 15 bp, synthetic construct
  source 1..15: mol_type = other DNA
aataaccacaacaac

SEQ ID NO: 5226 - DNA, 15 bp, synthetic construct
  source 1..15: mol_type = other DNA
acatctttgaacagt

SEQ ID NO: 5227 - DNA, 15 bp, synthetic construct
  source 1..15: mol_type = other DNA
aataaccacaacaac

SEQ ID NO: 5228 - DNA, 18 bp, synthetic construct
  source 1..18: mol_type = other DNA
tactctgggacgccttat

SEQ ID NO: 5229 - DNA, 15 bp, synthetic construct
  source 1..15: mol_type = other DNA
aataaccacaacaac

SEQ ID NO: 5230 - DNA, 18 bp, synthetic construct
  source 1..18: mol_type = other DNA
gacagtgcctccaactac

SEQ ID NO: 5231 - DNA, 15 bp, synthetic construct
  source 1..15: mol_type = other DNA
aataaccacaacaac

SEQ ID NO: 5232 - DNA, 21 bp, synthetic construct
  source 1..21: mol_type = other DNA
acccgggacagttcttacttc

SEQ ID NO: 5233 - DNA, 15 bp, synthetic construct
  source 1..15: mol_type = other DNA
aataaccacaacaac

SEQ ID NO: 5234 - DNA, 18 bp, synthetic construct
  source 1..18: mol_type = other DNA
aacagtgcttttgactac

SEQ ID NO: 5235 - DNA, 15 bp, synthetic construct
  source 1..15: mol_type = other DNA
aataaccacaacaac

SEQ ID NO: 5236 - DNA, 24 bp, synthetic construct
  source 1..24: mol_type = other DNA
gccacaagcatagcttaccctaat

SEQ ID NO: 5237 - DNA, 15 bp, synthetic construct
  source 1..15: mol_type = other DNA
aataaccacaacaac

SEQ ID NO: 5238 - DNA, 18 bp, synthetic construct
  source 1..18: mol_type = other DNA
gaccctaacagttattac

SEQ ID NO: 5239 - DNA, 15 bp, synthetic construct
  source 1..15: mol_type = other DNA
aataaccacaacaac

SEQ ID NO: 5240 - DNA, 18 bp, synthetic construct
  source 1..18: mol_type = other DNA
gacagcacttttaactac

SEQ ID NO: 5241 - DNA, 15 bp, synthetic construct
  source 1..15: mol_type = other DNA
aataaccacaacaac

SEQ ID NO: 5242 - DNA, 21 bp, synthetic construct
  source 1..21: mol_type = other DNA
acccaggacagttcttacttc

SEQ ID NO: 5243 - DNA, 15 bp, synthetic construct
  source 1..15: mol_type = other DNA
aataaccacaacaac

SEQ ID NO: 5244 - DNA, 15 bp, synthetic construct
  source 1..15: mol_type = other DNA
acatctttgaacagt

SEQ ID NO: 5245 - DNA, 15 bp, synthetic construct
  source 1..15: mol_type = other DNA
aataaccacaacaac

SEQ ID NO: 5246 - DNA, 18 bp, synthetic construct
  source 1..18: mol_type = other DNA
accacatggtacccgact

SEQ ID NO: 5247 - DNA, 15 bp, synthetic construct
  source 1..15: mol_type = other DNA
aataaccacaacaac

SEQ ID NO: 5248 - DNA, 18 bp, synthetic construct
  source 1..18: mol_type = other DNA
actacttactcacctttc

SEQ ID NO: 5249 - DNA, 15 bp, synthetic construct
  source 1..15: mol_type = other DNA
aataaccacaacaac

SEQ ID NO: 5250 - DNA, 18 bp, synthetic construct
  source 1..18: mol_type = other DNA
tactctgggacgccttat

SEQ ID NO: 5251 - DNA, 15 bp, synthetic construct
  source 1..15: mol_type = other DNA
aataaccacaacaac

SEQ ID NO: 5252 - DNA, 18 bp, synthetic construct
  source 1..18: mol_type = other DNA
actacttactcacctttc

SEQ ID NO: 5253 - DNA, 15 bp, synthetic construct
  source 1..15: mol_type = other DNA
aataaccacaacaac

SEQ ID NO: 5254 - DNA, 18 bp, synthetic construct
  source 1..18: mol_type = other DNA
gatcgttcttctgacaac

SEQ ID NO: 5255 - DNA, 15 bp, synthetic construct
  source 1..15: mol_type = other DNA
aataaccacaacaac

SEQ ID NO: 5256 - DNA, 18 bp, synthetic construct
  source 1..18: mol_type = other DNA
gacagtgcttctcagtat

SEQ ID NO: 5257 - DNA, 15 bp, synthetic construct
  source 1..15: mol_type = other DNA
aataaccacaacaac

SEQ ID NO: 5258 - DNA, 21 bp, synthetic construct
  source 1..21: mol_type = other DNA
actacttatttaactattgcc

SEQ ID NO: 5259 - DNA, 15 bp, synthetic construct
  source 1..15: mol_type = other DNA
aataaccacaacaac

SEQ ID NO: 5260 - DNA, 18 bp, synthetic construct
  source 1..18: mol_type = other DNA
gacagtgccactgcttac

SEQ ID NO: 5261 - DNA, 15 bp, synthetic construct
  source 1..15: mol_type = other DNA
aataaccacaacaac

SEQ ID NO: 5262 - DNA, 21 bp, synthetic construct
  source 1..21: mol_type = other DNA
acccgggacagttcttacttc

SEQ ID NO: 5263 - DNA, 15 bp, synthetic construct
  source 1..15: mol_type = other DNA
aataaccacaacaac

SEQ ID NO: 5264 - DNA, 21 bp, synthetic construct
  source 1..21: mol_type = other DNA
acccaggacagttcttacttc

SEQ ID NO: 5265 - DNA, 15 bp, synthetic construct
  source 1..15: mol_type = other DNA
aataaccacaacaac

SEQ ID NO: 5266 - DNA, 15 bp, synthetic construct
  source 1..15: mol_type = other DNA
tccacagcaacccgg

SEQ ID NO: 5267 - DNA, 15 bp, synthetic construct
  source 1..15: mol_type = other DNA
aataaccacaacaac

SEQ ID NO: 5268 - DNA, 21 bp, synthetic construct
  source 1..21: mol_type = other DNA
acccgggacagttcttacttc

SEQ ID NO: 5269 - DNA, 15 bp, synthetic construct
  source 1..15: mol_type = other DNA
aataaccacaacaac

SEQ ID NO: 5270 - DNA, 24 bp, synthetic construct
  source 1..24: mol_type = other DNA
gccacaagcatagcttaccctaat

SEQ ID NO: 5271 - DNA, 15 bp, synthetic construct
  source 1..15: mol_type = other DNA
aataaccacaacaac

SEQ ID NO: 5272 - DNA, 18 bp, synthetic construct
  source 1..18: mol_type = other DNA
gatggtacttctaacaac

SEQ ID NO: 5273 - DNA, 15 bp, synthetic construct
  source 1..15: mol_type = other DNA
aataaccacaacaac

SEQ ID NO: 5274 - DNA, 18 bp, synthetic construct
  source 1..18: mol_type = other DNA
gatcgttcttctgacaac

SEQ ID NO: 5275 - DNA, 15 bp, synthetic construct
  source 1..15: mol_type = other DNA
aataaccacaacaac

SEQ ID NO: 5276 - DNA, 21 bp, synthetic construct
  source 1..21: mol_type = other DNA
acccgggacagttcttacttc

SEQ ID NO: 5277 - DNA, 15 bp, synthetic construct
  source 1..15: mol_type = other DNA
aataaccacaacaac

SEQ ID NO: 5278 - DNA, 21 bp, synthetic construct
  source 1..21: mol_type = other DNA
acccgggacagttcttacttc

SEQ ID NO: 5279 - DNA, 15 bp, synthetic construct
  source 1..15: mol_type = other DNA
aataaccacaacaac

SEQ ID NO: 5280 - DNA, 21 bp, synthetic construct
  source 1..21: mol_type = other DNA
actgcttactcagatgttgcc

SEQ ID NO: 5281 - DNA, 15 bp, synthetic construct
  source 1..15: mol_type = other DNA
aataaccacaacaac

SEQ ID NO: 5282 - DNA, 21 bp, synthetic construct
  source 1..21: mol_type = other DNA
acccaggacagttcttacttc

SEQ ID NO: 5283 - DNA, 15 bp, synthetic construct
  source 1..15: mol_type = other DNA
aataaccacaacaac

SEQ ID NO: 5284 - DNA, 21 bp, synthetic construct
  source 1..21: mol_type = other DNA
acccgggacagttcttacttc

SEQ ID NO: 5285 - DNA, 15 bp, synthetic construct
  source 1..15: mol_type = other DNA
aataaccacaacaac

SEQ ID NO: 5286 - DNA, 18 bp, synthetic construct
  source 1..18: mol_type = other DNA
acctcagggttcaatggg

SEQ ID NO: 5287 - DNA, 15 bp, synthetic construct
  source 1..15: mol_type = other DNA
aataaccacaacaac

SEQ ID NO: 5288 - DNA, 18 bp, synthetic construct
  source 1..18: mol_type = other DNA
gaccctaacagttattac

SEQ ID NO: 5289 - DNA, 15 bp, synthetic construct
  source 1..15: mol_type = other DNA
aataaccacaacaac

SEQ ID NO: 5290 - DNA, 18 bp, synthetic construct
  source 1..18: mol_type = other DNA
gaccctaacagttattac

SEQ ID NO: 5291 - DNA, 15 bp, synthetic construct
  source 1..15: mol_type = other DNA
aataaccacaacaac

SEQ ID NO: 5292 - DNA, 18 bp, synthetic construct
  source 1..18: mol_type = other DNA
actacttactcacctttc

SEQ ID NO: 5293 - DNA, 15 bp, synthetic construct
  source 1..15: mol_type = other DNA
aataaccacaacaac

SEQ ID NO: 5294 - DNA, 18 bp, synthetic construct
  source 1..18: mol_type = other DNA
gaccctaacagttattac

SEQ ID NO: 5295 - DNA, 15 bp, synthetic construct
  source 1..15: mol_type = other DNA
aataaccacaacaac

SEQ ID NO: 5296 - DNA, 18 bp, synthetic construct
  source 1..18: mol_type = other DNA
actacttactcacctttc

SEQ ID NO: 5297 - DNA, 15 bp, synthetic construct
  source 1..15: mol_type = other DNA
aataaccacaacaac

SEQ ID NO: 5298 - DNA, 18 bp, synthetic construct
  source 1..18: mol_type = other DNA
gaccctaacagttattac

SEQ ID NO: 5299 - DNA, 15 bp, synthetic construct
  source 1..15: mol_type = other DNA
aataaccacaacaac

SEQ ID NO: 5300 - DNA, 18 bp, synthetic construct
  source 1..18: mol_type = other DNA
gatcgtaatgttgactac

SEQ ID NO: 5301 - DNA, 15 bp, synthetic construct
  source 1..15: mol_type = other DNA
aataaccacaacaac

SEQ ID NO: 5302 - DNA, 18 bp, synthetic construct
  source 1..18: mol_type = other DNA
accaaacagtacccaacc

SEQ ID NO: 5303 - DNA, 15 bp, synthetic construct
  source 1..15: mol_type = other DNA
aataaccacaacaac

SEQ ID NO: 5304 - DNA, 18 bp, synthetic construct
  source 1..18: mol_type = other DNA
acctcagggttcaacggg

SEQ ID NO: 5305 - DNA, 15 bp, synthetic construct
  source 1..15: mol_type = other DNA
aataaccacaacaac

SEQ ID NO: 5306 - DNA, 18 bp, synthetic construct
  source 1..18: mol_type = other DNA
gacagcacttttaactac

SEQ ID NO: 5307 - DNA, 15 bp, synthetic construct
  source 1..15: mol_type = other DNA
aataaccacaacaac

SEQ ID NO: 5308 - DNA, 18 bp, synthetic construct
  source 1..18: mol_type = other DNA
tatggtggatccatttac

SEQ ID NO: 5309 - DNA, 15 bp, synthetic construct
  source 1..15: mol_type = other DNA
aataaccacaacaac

SEQ ID NO: 5310 - DNA, 18 bp, synthetic construct
  source 1..18: mol_type = other DNA
acctcagggttcaatggg

SEQ ID NO: 5311 - DNA, 15 bp, synthetic construct
  source 1..15: mol_type = other DNA
aataaccacaacaac

SEQ ID NO: 5312 - DNA, 18 bp, synthetic construct
  source 1..18: mol_type = other DNA
gatactgcttcatcatac

SEQ ID NO: 5313 - DNA, 15 bp, synthetic construct
  source 1..15: mol_type = other DNA
aataaccacaacaac

SEQ ID NO: 5314 - DNA, 18 bp, synthetic construct
  source 1..18: mol_type = other DNA
tatggtggatccatttac

SEQ ID NO: 5315 - DNA, 15 bp, synthetic construct
  source 1..15: mol_type = other DNA
aataaccacaacaac

SEQ ID NO: 5316 - DNA, 18 bp, synthetic construct
  source 1..18: mol_type = other DNA
gcctcagggtacccaacc

SEQ ID NO: 5317 - DNA, 15 bp, synthetic construct
  source 1..15: mol_type = other DNA
aataaccacaacaac

SEQ ID NO: 5318 - DNA, 18 bp, synthetic construct
  source 1..18: mol_type = other DNA
gacagtgccactgcttac

SEQ ID NO: 5319 - DNA, 15 bp, synthetic construct
  source 1..15: mol_type = other DNA
aataaccacaacaac

SEQ ID NO: 5320 - DNA, 18 bp, synthetic construct
  source 1..18: mol_type = other DNA
gacagtgcttctcagtat

SEQ ID NO: 5321 - DNA, 15 bp, synthetic construct
  source 1..15: mol_type = other DNA
aataaccacaacaac

SEQ ID NO: 5322 - DNA, 21 bp, synthetic construct
  source 1..21: mol_type = other DNA
aacattgctacaagcgagtac

SEQ ID NO: 5323 - DNA, 15 bp, synthetic construct
  source 1..15: mol_type = other DNA
aataaccacaacaac

SEQ ID NO: 5324 - DNA, 18 bp, synthetic construct
  source 1..18: mol_type = other DNA
gaccctaacagttattac

SEQ ID NO: 5325 - DNA, 15 bp, synthetic construct
  source 1..15: mol_type = other DNA
aataaccacaacaac

SEQ ID NO: 5326 - DNA, 18 bp, synthetic construct
  source 1..18: mol_type = other DNA
aacagtgcttttgactac

SEQ ID NO: 5327 - DNA, 15 bp, synthetic construct
  source 1..15: mol_type = other DNA
aataaccacaacaac

SEQ ID NO: 5328 - DNA, 18 bp, synthetic construct
  source 1..18: mol_type = other DNA
accacaacgtacccaact

SEQ ID NO: 5329 - DNA, 15 bp, synthetic construct
  source 1..15: mol_type = other DNA
aataaccacaacaac

SEQ ID NO: 5330 - DNA, 18 bp, synthetic construct
  source 1..18: mol_type = other DNA
accacaacgtacccaact

SEQ ID NO: 5331 - DNA, 15 bp, synthetic construct
  source 1..15: mol_type = other DNA
aataaccacaacaac

SEQ ID NO: 5332 - DNA, 15 bp, synthetic construct
  source 1..15: mol_type = other DNA
acttacacaactgtt

SEQ ID NO: 5333 - DNA, 15 bp, synthetic construct
  source 1..15: mol_type = other DNA
aataaccacaacaac

SEQ ID NO: 5334 - DNA, 18 bp, synthetic construct
  source 1..18: mol_type = other DNA
accaaacagtacccaacc

SEQ ID NO: 5335 - DNA, 15 bp, synthetic construct
  source 1..15: mol_type = other DNA
aataaccacaacaac

SEQ ID NO: 5336 - DNA, 18 bp, synthetic construct
  source 1..18: mol_type = other DNA
gacagtgcctctgtctac

SEQ ID NO: 5337 - DNA, 15 bp, synthetic construct
  source 1..15: mol_type = other DNA
aataaccacaacaac

SEQ ID NO: 5338 - DNA, 18 bp, synthetic construct
  source 1..18: mol_type = other DNA
gacagtgcttctcagtat

SEQ ID NO: 5339 - DNA, 15 bp, synthetic construct
  source 1..15: mol_type = other DNA
aataaccacaacaac

SEQ ID NO: 5340 - DNA, 18 bp, synthetic construct
  source 1..18: mol_type = other DNA
gacagtgcctccaactac

SEQ ID NO: 5341 - DNA, 15 bp, synthetic construct
  source 1..15: mol_type = other DNA
aataaccacaacaac

SEQ ID NO: 5342 - DNA, 21 bp, synthetic construct
  source 1..21: mol_type = other DNA
actatttactcaaatgctttc

SEQ ID NO: 5343 - DNA, 15 bp, synthetic construct
  source 1..15: mol_type = other DNA
aataaccacaacaac

SEQ ID NO: 5344 - DNA, 18 bp, synthetic construct
  source 1..18: mol_type = other DNA
agtacttactcacctttc

SEQ ID NO: 5345 - DNA, 15 bp, synthetic construct
  source 1..15: mol_type = other DNA
aataaccacaacaac

SEQ ID NO: 5346 - DNA, 18 bp, synthetic construct
  source 1..18: mol_type = other DNA
aacagtgcttttgactac

SEQ ID NO: 5347 - DNA, 15 bp, synthetic construct
  source 1..15: mol_type = other DNA
aataaccacaacaac

SEQ ID NO: 5348 - DNA, 18 bp, synthetic construct
  source 1..18: mol_type = other DNA
gaccctaacagttattac

SEQ ID NO: 5349 - DNA, 15 bp, synthetic construct
  source 1..15: mol_type = other DNA
aataaccacaacaac

SEQ ID NO: 5350 - DNA, 21 bp, synthetic construct
  source 1..21: mol_type = other DNA
acccaggacagttcttacttc

SEQ ID NO: 5351 - DNA, 15 bp, synthetic construct
  source 1..15: mol_type = other DNA
aataaccacaacaac

SEQ ID NO: 5352 - DNA, 15 bp, synthetic construct
  source 1..15: mol_type = other DNA
acatctttgaacagt

SEQ ID NO: 5353 - DNA, 15 bp, synthetic construct
  source 1..15: mol_type = other DNA
aataaccacaacaac

SEQ ID NO: 5354 - DNA, 18 bp, synthetic construct
  source 1..18: mol_type = other DNA
actacttactcacctttc

SEQ ID NO: 5355 - DNA, 15 bp, synthetic construct
  source 1..15: mol_type = other DNA
aataaccacaacaac

SEQ ID NO: 5356 - DNA, 21 bp, synthetic construct
  source 1..21: mol_type = other DNA
actatttactcaaatgctttc

SEQ ID NO: 5357 - DNA, 15 bp, synthetic construct
  source 1..15: mol_type = other DNA
aataaccacaacaac

SEQ ID NO: 5358 - DNA, 21 bp, synthetic construct
  source 1..21: mol_type = other DNA
acccaggacagttcttacttc

SEQ ID NO: 5359 - DNA, 15 bp, synthetic construct
  source 1..15: mol_type = other DNA
aataaccacaacaac

SEQ ID NO: 5360 - DNA, 18 bp, synthetic construct
  source 1..18: mol_type = other DNA
agtacttactcacctttc

SEQ ID NO: 5361 - DNA, 15 bp, synthetic construct
  source 1..15: mol_type = other DNA
aataaccacaacaac

SEQ ID NO: 5362 - DNA, 18 bp, synthetic construct
  source 1..18: mol_type = other DNA
gacagtgccacagcttac

SEQ ID NO: 5363 - DNA, 15 bp, synthetic construct
  source 1..15: mol_type = other DNA
aataaccacaacaac

SEQ ID NO: 5364 - DNA, 18 bp, synthetic construct
  source 1..18: mol_type = other DNA
gcctcagggtacccagct

SEQ ID NO: 5365 - DNA, 15 bp, synthetic construct
  source 1..15: mol_type = other DNA
aataaccacaacaac

SEQ ID NO: 5366 - DNA, 18 bp, synthetic construct
  source 1..18: mol_type = other DNA
gatactgcttcatcatac

SEQ ID NO: 5367 - DNA, 15 bp, synthetic construct
  source 1..15: mol_type = other DNA
aataaccacaacaac

SEQ ID NO: 5368 - DNA, 15 bp, synthetic construct
  source 1..15: mol_type = other DNA
acatccataactgcc

SEQ ID NO: 5369 - DNA, 15 bp, synthetic construct
  source 1..15: mol_type = other DNA
aataaccacaacaac

SEQ ID NO: 5370 - DNA, 21 bp, synthetic construct
  source 1..21: mol_type = other DNA
acccgggacagttcttacttc

SEQ ID NO: 5371 - DNA, 15 bp, synthetic construct
  source 1..15: mol_type = other DNA
aataaccacaacaac

SEQ ID NO: 5372 - DNA, 18 bp, synthetic construct
  source 1..18: mol_type = other DNA
acctcagggttcaatggg

SEQ ID NO: 5373 - DNA, 15 bp, synthetic construct
  source 1..15: mol_type = other DNA
aataaccacaacaac

SEQ ID NO: 5374 - DNA, 21 bp, synthetic construct
  source 1..21: mol_type = other DNA
acccgggacagttcttacttc

SEQ ID NO: 5375 - DNA, 15 bp, synthetic construct
  source 1..15: mol_type = other DNA
aataaccacaacaac

SEQ ID NO: 5376 - DNA, 18 bp, synthetic construct
  source 1..18: mol_type = other DNA
tactctgggacaccttat

SEQ ID NO: 5377 - DNA, 15 bp, synthetic construct
  source 1..15: mol_type = other DNA
aataaccacaacaac

SEQ ID NO: 5378 - DNA, 18 bp, synthetic construct
  source 1..18: mol_type = other DNA
gatcgtaatgttgactac

SEQ ID NO: 5379 - DNA, 15 bp, synthetic construct
  source 1..15: mol_type = other DNA
aataaccacaacaac

SEQ ID NO: 5380 - DNA, 15 bp, synthetic construct
  source 1..15: mol_type = other DNA
acaactttgaacagt

SEQ ID NO: 5381 - DNA, 15 bp, synthetic construct
  source 1..15: mol_type = other DNA
aataaccacaacaac

SEQ ID NO: 5382 - DNA, 15 bp, synthetic construct
  source 1..15: mol_type = other DNA
acatctttgaacagt

SEQ ID NO: 5383 - DNA, 15 bp, synthetic construct
  source 1..15: mol_type = other DNA
aataaccacaacaac

SEQ ID NO: 5384 - DNA, 18 bp, synthetic construct
  source 1..18: mol_type = other DNA
accacatggtacccgact

SEQ ID NO: 5385 - DNA, 15 bp, synthetic construct
  source 1..15: mol_type = other DNA
aataaccacaacaac

SEQ ID NO: 5386 - DNA, 18 bp, synthetic construct
  source 1..18: mol_type = other DNA
gcctcagggtacccaacc

SEQ ID NO: 5387 - DNA, 15 bp, synthetic construct
  source 1..15: mol_type = other DNA
aataaccacaacaac

SEQ ID NO: 5388 - DNA, 21 bp, synthetic construct
  source 1..21: mol_type = other DNA
actatttactcaaatcctttc

SEQ ID NO: 5389 - DNA, 15 bp, synthetic construct
  source 1..15: mol_type = other DNA
aataaccacaacaac

SEQ ID NO: 5390 - DNA, 15 bp, synthetic construct
  source 1..15: mol_type = other DNA
atcgccgcgacaact

SEQ ID NO: 5391 - DNA, 15 bp, synthetic construct
  source 1..15: mol_type = other DNA
aataaccacaacaac

SEQ ID NO: 5392 - DNA, 15 bp, synthetic construct
  source 1..15: mol_type = other DNA
atcgccgcgacaact

SEQ ID NO: 5393 - DNA, 15 bp, synthetic construct
  source 1..15: mol_type = other DNA
aataaccacaacaac

SEQ ID NO: 5394 - DNA, 24 bp, synthetic construct
  source 1..24: mol_type = other DNA
accacaagcatagcttaccctaat

SEQ ID NO: 5395 - DNA, 15 bp, synthetic construct
  source 1..15: mol_type = other DNA
aataaccacaacaac

SEQ ID NO: 5396 - DNA, 24 bp, synthetic construct
  source 1..24: mol_type = other DNA
gccacaagcatagcttaccctaat

SEQ ID NO: 5397 - DNA, 15 bp, synthetic construct
  source 1..15: mol_type = other DNA
aataaccacaacaac

SEQ ID NO: 5398 - DNA, 18 bp, synthetic construct
  source 1..18: mol_type = other DNA
gaccctaacagttattac

SEQ ID NO: 5399 - DNA, 15 bp, synthetic construct
  source 1..15: mol_type = other DNA
aataaccacaacaac

SEQ ID NO: 5400 - DNA, 18 bp, synthetic construct
  source 1..18: mol_type = other DNA
aacagtgcctccaactac

SEQ ID NO: 5401 - DNA, 15 bp, synthetic construct
  source 1..15: mol_type = other DNA
aataaccacaacaac

SEQ ID NO: 5402 - DNA, 18 bp, synthetic construct
  source 1..18: mol_type = other DNA
aacagtgcctccaactac

SEQ ID NO: 5403 - DNA, 15 bp, synthetic construct
  source 1..15: mol_type = other DNA
aataaccacaacaac

SEQ ID NO: 5404 - DNA, 18 bp, synthetic construct
  source 1..18: mol_type = other DNA
gacagtgcttctcagtat

SEQ ID NO: 5405 - DNA, 15 bp, synthetic construct
  source 1..15: mol_type = other DNA
aataaccacaacaac

SEQ ID NO: 5406 - DNA, 21 bp, synthetic construct
  source 1..21: mol_type = other DNA
acccgggacagttcttacttc

SEQ ID NO: 5407 - DNA, 15 bp, synthetic construct
  source 1..15: mol_type = other DNA
aataaccacaacaac

SEQ ID NO: 5408 - DNA, 18 bp, synthetic construct
  source 1..18: mol_type = other DNA
gacagtgcttctcagtat

SEQ ID NO: 5409 - DNA, 15 bp, synthetic construct
  source 1..15: mol_type = other DNA
aataaccacaacaac

SEQ ID NO: 5410 - DNA, 15 bp, synthetic construct
  source 1..15: mol_type = other DNA
acatctttgaacagt

SEQ ID NO: 5411 - DNA, 15 bp, synthetic construct
  source 1..15: mol_type = other DNA
aatagccacaactac

SEQ ID NO: 5412 - DNA, 21 bp, synthetic construct
  source 1..21: mol_type = other DNA
acaatcagtggaaacgagtac

SEQ ID NO: 5413 - DNA, 15 bp, synthetic construct
  source 1..15: mol_type = other DNA
aatagccacaactac

SEQ ID NO: 5414 - DNA, 18 bp, synthetic construct
  source 1..18: mol_type = other DNA
acctcagggttcaatggg

SEQ ID NO: 5415 - DNA, 15 bp, synthetic construct
  source 1..15: mol_type = other DNA
aatagccacaactac

SEQ ID NO: 5416 - DNA, 18 bp, synthetic construct
  source 1..18: mol_type = other DNA
aatgatatgtttgactat

SEQ ID NO: 5417 - DNA, 15 bp, synthetic construct
  source 1..15: mol_type = other DNA
aatagccacaactac

SEQ ID NO: 5418 - DNA, 18 bp, synthetic construct
  source 1..18: mol_type = other DNA
gacagtgcttctcagtat

SEQ ID NO: 5419 - DNA, 15 bp, synthetic construct
  source 1..15: mol_type = other DNA
aatagccacaactac

SEQ ID NO: 5420 - DNA, 21 bp, synthetic construct
  source 1..21: mol_type = other DNA
actatttactcaaatcctttc

SEQ ID NO: 5421 - DNA, 15 bp, synthetic construct
  source 1..15: mol_type = other DNA
aatagccacaactac

SEQ ID NO: 5422 - DNA, 18 bp, synthetic construct
  source 1..18: mol_type = other DNA
gcctcagggtacccagct

SEQ ID NO: 5423 - DNA, 15 bp, synthetic construct
  source 1..15: mol_type = other DNA
aatagccacaactac

SEQ ID NO: 5424 - DNA, 18 bp, synthetic construct
  source 1..18: mol_type = other DNA
gaccctaacagttattac

SEQ ID NO: 5425 - DNA, 15 bp, synthetic construct
  source 1..15: mol_type = other DNA
aatagccacaactac

SEQ ID NO: 5426 - DNA, 18 bp, synthetic construct
  source 1..18: mol_type = other DNA
gacagtgcttctcagtat

SEQ ID NO: 5427 - DNA, 15 bp, synthetic construct
  source 1..15: mol_type = other DNA
aatagccacaactac

SEQ ID NO: 5428 - DNA, 15 bp, synthetic construct
  source 1..15: mol_type = other DNA
atcgctgcgacaact

SEQ ID NO: 5429 - DNA, 15 bp, synthetic construct
  source 1..15: mol_type = other DNA
aatagccacaactac

SEQ ID NO: 5430 - DNA, 21 bp, synthetic construct
  source 1..21: mol_type = other DNA
acccgggacagttcttacttc

SEQ ID NO: 5431 - DNA, 15 bp, synthetic construct
  source 1..15: mol_type = other DNA
aatagccacaactac

SEQ ID NO: 5432 - DNA, 21 bp, synthetic construct
  source 1..21: mol_type = other DNA
acccaggacagttcttacttc

SEQ ID NO: 5433 - DNA, 15 bp, synthetic construct
  source 1..15: mol_type = other DNA
aatagccacaactac

SEQ ID NO: 5434 - DNA, 18 bp, synthetic construct
  source 1..18: mol_type = other DNA
accaaacagtacccaacc

SEQ ID NO: 5435 - DNA, 15 bp, synthetic construct
  source 1..15: mol_type = other DNA
aatagccacaactac

SEQ ID NO: 5436 - DNA, 18 bp, synthetic construct
  source 1..18: mol_type = other DNA
gatactgcttcatcatac

SEQ ID NO: 5437 - DNA, 15 bp, synthetic construct
  source 1..15: mol_type = other DNA
aatagccacaactac

SEQ ID NO: 5438 - DNA, 18 bp, synthetic construct
  source 1..18: mol_type = other DNA
gacagtgcttctcagtat

SEQ ID NO: 5439 - DNA, 15 bp, synthetic construct
  source 1..15: mol_type = other DNA
aatagccacaactac

SEQ ID NO: 5440 - DNA, 15 bp, synthetic construct
  source 1..15: mol_type = other DNA
acatctttgaacagt

SEQ ID NO: 5441 - DNA, 15 bp, synthetic construct
  source 1..15: mol_type = other DNA
aatagccacaactac

SEQ ID NO: 5442 - DNA, 18 bp, synthetic construct
  source 1..18: mol_type = other DNA
gaccctaacagttattac

SEQ ID NO: 5443 - DNA, 15 bp, synthetic construct
  source 1..15: mol_type = other DNA
aatagccacaactac

SEQ ID NO: 5444 - DNA, 18 bp, synthetic construct
  source 1..18: mol_type = other DNA
gacagtgcctctgtctac

SEQ ID NO: 5445 - DNA, 15 bp, synthetic construct
  source 1..15: mol_type = other DNA
aatagccacaactac

SEQ ID NO: 5446 - DNA, 18 bp, synthetic construct
  source 1..18: mol_type = other DNA
tactctgggacaccttat

SEQ ID NO: 5447 - DNA, 15 bp, synthetic construct
  source 1..15: mol_type = other DNA
aatagccacaactac

SEQ ID NO: 5448 - DNA, 21 bp, synthetic construct
  source 1..21: mol_type = other DNA
acaatcagtggaaacgagtac

SEQ ID NO: 5449 - DNA, 15 bp, synthetic construct
  source 1..15: mol_type = other DNA
aatagccacaactac

SEQ ID NO: 5450 - DNA, 18 bp, synthetic construct
  source 1..18: mol_type = other DNA
gcctcagggtacccagct

SEQ ID NO: 5451 - DNA, 15 bp, synthetic construct
  source 1..15: mol_type = other DNA
aatagccacaactac

SEQ ID NO: 5452 - DNA, 18 bp, synthetic construct
  source 1..18: mol_type = other DNA
gcctcagggtacccaacc

SEQ ID NO: 5453 - DNA, 15 bp, synthetic construct
  source 1..15: mol_type = other DNA
aatagccacaactac

SEQ ID NO: 5454 - DNA, 18 bp, synthetic construct
  source 1..18: mol_type = other DNA
gaccctaacagttattac

SEQ ID NO: 5455 - DNA, 15 bp, synthetic construct
  source 1..15: mol_type = other DNA
aatagccacaactac

SEQ ID NO: 5456 - DNA, 18 bp, synthetic construct
  source 1..18: mol_type = other DNA
aaacagtacccaaccctg

SEQ ID NO: 5457 - DNA, 15 bp, synthetic construct
  source 1..15: mol_type = other DNA
aatagccacaactac

SEQ ID NO: 5458 - DNA, 18 bp, synthetic construct
  source 1..18: mol_type = other DNA
tactctgggacaccttat

SEQ ID NO: 5459 - DNA, 15 bp, synthetic construct
  source 1..15: mol_type = other DNA
aatagccacaactac

SEQ ID NO: 5460 - DNA, 18 bp, synthetic construct
  source 1..18: mol_type = other DNA
aacagtgcttttgactac

SEQ ID NO: 5461 - DNA, 15 bp, synthetic construct
  source 1..15: mol_type = other DNA
aatagccacaactac

SEQ ID NO: 5462 - DNA, 18 bp, synthetic construct
  source 1..18: mol_type = other DNA
gcctcagggtacccagct

SEQ ID NO: 5463 - DNA, 15 bp, synthetic construct
  source 1..15: mol_type = other DNA
aatagccacaactac

SEQ ID NO: 5464 - DNA, 21 bp, synthetic construct
  source 1..21: mol_type = other DNA
acccgggacagttcttacttc

SEQ ID NO: 5465 - DNA, 15 bp, synthetic construct
  source 1..15: mol_type = other DNA
aatagccacaactac

SEQ ID NO: 5466 - DNA, 18 bp, synthetic construct
  source 1..18: mol_type = other DNA
tatggtggatccatttac

SEQ ID NO: 5467 - DNA, 15 bp, synthetic construct
  source 1..15: mol_type = other DNA
aatagccacaactac

SEQ ID NO: 5468 - DNA, 18 bp, synthetic construct
  source 1..18: mol_type = other DNA
gacagtgcttctcagtat

SEQ ID NO: 5469 - DNA, 15 bp, synthetic construct
  source 1..15: mol_type = other DNA
aatagccacaactac

SEQ ID NO: 5470 - DNA, 24 bp, synthetic construct
  source 1..24: mol_type = other DNA
gccacaagcatagcttaccctaat

SEQ ID NO: 5471 - DNA, 15 bp, synthetic construct
  source 1..15: mol_type = other DNA
aatagccacaactac

SEQ ID NO: 5472 - DNA, 21 bp, synthetic construct
  source 1..21: mol_type = other DNA
acccaggacagttcttacttc

SEQ ID NO: 5473 - DNA, 15 bp, synthetic construct
  source 1..15: mol_type = other DNA
aatagccacaactac

SEQ ID NO: 5474 - DNA, 18 bp, synthetic construct
  source 1..18: mol_type = other DNA
gaccctaacagttattac

SEQ ID NO: 5475 - DNA, 15 bp, synthetic construct
  source 1..15: mol_type = other DNA
aatagccacaactac

SEQ ID NO: 5476 - DNA, 18 bp, synthetic construct
  source 1..18: mol_type = other DNA
gacagtgcctctgtctac

SEQ ID NO: 5477 - DNA, 15 bp, synthetic construct
  source 1..15: mol_type = other DNA
aatagccacaactac

SEQ ID NO: 5478 - DNA, 18 bp, synthetic construct
  source 1..18: mol_type = other DNA
actacttactcacctttc

SEQ ID NO: 5479 - DNA, 15 bp, synthetic construct
  source 1..15: mol_type = other DNA
aatagccacaactac

SEQ ID NO: 5480 - DNA, 24 bp, synthetic construct
  source 1..24: mol_type = other DNA
gccacaagcatagcttaccctaat

SEQ ID NO: 5481 - DNA, 15 bp, synthetic construct
  source 1..15: mol_type = other DNA
aatagccacaactac

SEQ ID NO: 5482 - DNA, 21 bp, synthetic construct
  source 1..21: mol_type = other DNA
acaatcagtggaaacgagtac

SEQ ID NO: 5483 - DNA, 15 bp, synthetic construct
  source 1..15: mol_type = other DNA
aatagccacaactac

SEQ ID NO: 5484 - DNA, 18 bp, synthetic construct
  source 1..18: mol_type = other DNA
actacttactcacctttc

SEQ ID NO: 5485 - DNA, 15 bp, synthetic construct
  source 1..15: mol_type = other DNA
aatagccacaactac

SEQ ID NO: 5486 - DNA, 18 bp, synthetic construct
  source 1..18: mol_type = other DNA
actgcttactcaactttc

SEQ ID NO: 5487 - DNA, 15 bp, synthetic construct
  source 1..15: mol_type = other DNA
aatagccacaactac

SEQ ID NO: 5488 - DNA, 18 bp, synthetic construct
  source 1..18: mol_type = other DNA
gcctcagggtacccagct

SEQ ID NO: 5489 - DNA, 15 bp, synthetic construct
  source 1..15: mol_type = other DNA
aatagccacaactac

SEQ ID NO: 5490 - DNA, 18 bp, synthetic construct
  source 1..18: mol_type = other DNA
gacagtgccacagcttac

SEQ ID NO: 5491 - DNA, 15 bp, synthetic construct
  source 1..15: mol_type = other DNA
aatagccacaactac

SEQ ID NO: 5492 - DNA, 24 bp, synthetic construct
  source 1..24: mol_type = other DNA
gccacaagcatagcttaccctaat

SEQ ID NO: 5493 - DNA, 15 bp, synthetic construct
  source 1..15: mol_type = other DNA
aatagccacaactac

SEQ ID NO: 5494 - DNA, 18 bp, synthetic construct
  source 1..18: mol_type = other DNA
tactctgggacgccttat

SEQ ID NO: 5495 - DNA, 15 bp, synthetic construct
  source 1..15: mol_type = other DNA
aatagccacaactac

SEQ ID NO: 5496 - DNA, 18 bp, synthetic construct
  source 1..18: mol_type = other DNA
gacagcacttttgactac

SEQ ID NO: 5497 - DNA, 15 bp, synthetic construct
  source 1..15: mol_type = other DNA
aatagccacaactac

SEQ ID NO: 5498 - DNA, 18 bp, synthetic construct
  source 1..18: mol_type = other DNA
accacagggtacccgact

SEQ ID NO: 5499 - DNA, 15 bp, synthetic construct
  source 1..15: mol_type = other DNA
aatagccacaactac

SEQ ID NO: 5500 - DNA, 21 bp, synthetic construct
  source 1..21: mol_type = other DNA
acaagtgaatacttctaccgt

SEQ ID NO: 5501 - DNA, 15 bp, synthetic construct
  source 1..15: mol_type = other DNA
aatagccacaactac

SEQ ID NO: 5502 - DNA, 18 bp, synthetic construct
  source 1..18: mol_type = other DNA
gacagtgccacagcttac

SEQ ID NO: 5503 - DNA, 15 bp, synthetic construct
  source 1..15: mol_type = other DNA
aataaccatgactat

SEQ ID NO: 5504 - DNA, 21 bp, synthetic construct
  source 1..21: mol_type = other DNA
acccgggacagttcttacttc

SEQ ID NO: 5505 - DNA, 15 bp, synthetic construct
  source 1..15: mol_type = other DNA
aataaccatgactat

SEQ ID NO: 5506 - DNA, 15 bp, synthetic construct
  source 1..15: mol_type = other DNA
tccacagcaacccag

SEQ ID NO: 5507 - DNA, 15 bp, synthetic construct
  source 1..15: mol_type = other DNA
aataaccatgactat

SEQ ID NO: 5508 - DNA, 15 bp, synthetic construct
  source 1..15: mol_type = other DNA
acatctttgaacagt

SEQ ID NO: 5509 - DNA, 15 bp, synthetic construct
  source 1..15: mol_type = other DNA
aataaccatgactat

SEQ ID NO: 5510 - DNA, 24 bp, synthetic construct
  source 1..24: mol_type = other DNA
accacaagcatagcttaccctaat

SEQ ID NO: 5511 - DNA, 15 bp, synthetic construct
  source 1..15: mol_type = other DNA
aataaccatgactat

SEQ ID NO: 5512 - DNA, 18 bp, synthetic construct
  source 1..18: mol_type = other DNA
gacagtgccacagcttac

SEQ ID NO: 5513 - DNA, 15 bp, synthetic construct
  source 1..15: mol_type = other DNA
aataaccatgactat

SEQ ID NO: 5514 - DNA, 18 bp, synthetic construct
  source 1..18: mol_type = other DNA
gatcgttcttctgacaac

SEQ ID NO: 5515 - DNA, 15 bp, synthetic construct
  source 1..15: mol_type = other DNA
aataaccatgactat

SEQ ID NO: 5516 - DNA, 18 bp, synthetic construct
  source 1..18: mol_type = other DNA
tactctgggacaccttat

SEQ ID NO: 5517 - DNA, 15 bp, synthetic construct
  source 1..15: mol_type = other DNA
aataaccatgactat

SEQ ID NO: 5518 - DNA, 21 bp, synthetic construct
  source 1..21: mol_type = other DNA
acccaggacagttcttacttc

SEQ ID NO: 5519 - DNA, 15 bp, synthetic construct
  source 1..15: mol_type = other DNA
aataaccatgactat

SEQ ID NO: 5520 - DNA, 21 bp, synthetic construct
  source 1..21: mol_type = other DNA
acccgggacagttcttacttc

SEQ ID NO: 5521 - DNA, 15 bp, synthetic construct
  source 1..15: mol_type = other DNA
aataaccatgactat

SEQ ID NO: 5522 - DNA, 21 bp, synthetic construct
  source 1..21: mol_type = other DNA
acccaggacagttcttacttc

SEQ ID NO: 5523 - DNA, 15 bp, synthetic construct
  source 1..15: mol_type = other DNA
aataaccatgactat

SEQ ID NO: 5524 - DNA, 18 bp, synthetic construct
  source 1..18: mol_type = other DNA
tacagtgcagcaccttac

SEQ ID NO: 5525 - DNA, 15 bp, synthetic construct
  source 1..15: mol_type = other DNA
aataaccatgactat

SEQ ID NO: 5526 - DNA, 21 bp, synthetic construct
  source 1..21: mol_type = other DNA
acaatcagtggaaacgagtac

SEQ ID NO: 5527 - DNA, 15 bp, synthetic construct
  source 1..15: mol_type = other DNA
aataaccatgactat

SEQ ID NO: 5528 - DNA, 18 bp, synthetic construct
  source 1..18: mol_type = other DNA
gcctcagggtacccagct

SEQ ID NO: 5529 - DNA, 15 bp, synthetic construct
  source 1..15: mol_type = other DNA
aataaccatgactat

SEQ ID NO: 5530 - DNA, 15 bp, synthetic construct
  source 1..15: mol_type = other DNA
acttatacaactgtt

SEQ ID NO: 5531 - DNA, 15 bp, synthetic construct
  source 1..15: mol_type = other DNA
aataaccatgactat

SEQ ID NO: 5532 - DNA, 24 bp, synthetic construct
  source 1..24: mol_type = other DNA
gccacaagcatagcttaccctaat

SEQ ID NO: 5533 - DNA, 15 bp, synthetic construct
  source 1..15: mol_type = other DNA
aataaccatgactat

SEQ ID NO: 5534 - DNA, 18 bp, synthetic construct
  source 1..18: mol_type = other DNA
tactctgggacaccttat

SEQ ID NO: 5535 - DNA, 15 bp, synthetic construct
  source 1..15: mol_type = other DNA
aataaccatgactat

SEQ ID NO: 5536 - DNA, 18 bp, synthetic construct
  source 1..18: mol_type = other DNA
tacagtgcagcaccttac

SEQ ID NO: 5537 - DNA, 15 bp, synthetic construct
  source 1..15: mol_type = other DNA
aataaccatgactat

SEQ ID NO: 5538 - DNA, 21 bp, synthetic construct
  source 1..21: mol_type = other DNA
acccaggacagttcttacttc

SEQ ID NO: 5539 - DNA, 15 bp, synthetic construct
  source 1..15: mol_type = other DNA
aataaccatgactat

SEQ ID NO: 5540 - DNA, 15 bp, synthetic construct
  source 1..15: mol_type = other DNA
acaactttgaacagt

SEQ ID NO: 5541 - DNA, 15 bp, synthetic construct
  source 1..15: mol_type = other DNA
aataaccatgactat

SEQ ID NO: 5542 - DNA, 21 bp, synthetic construct
  source 1..21: mol_type = other DNA
actatttactcaaatcctttc

SEQ ID NO: 5543 - DNA, 15 bp, synthetic construct
  source 1..15: mol_type = other DNA
aataaccatgactat

SEQ ID NO: 5544 - DNA, 18 bp, synthetic construct
  source 1..18: mol_type = other DNA
aatgatatgtttgactat

SEQ ID NO: 5545 - DNA, 15 bp, synthetic construct
  source 1..15: mol_type = other DNA
aataaccatgactat

SEQ ID NO: 5546 - DNA, 18 bp, synthetic construct
  source 1..18: mol_type = other DNA
gacagtgccactgcttac

SEQ ID NO: 5547 - DNA, 15 bp, synthetic construct
  source 1..15: mol_type = other DNA
aataaccatgactat

SEQ ID NO: 5548 - DNA, 18 bp, synthetic construct
  source 1..18: mol_type = other DNA
gacagtgccactgcttac

SEQ ID NO: 5549 - DNA, 15 bp, synthetic construct
  source 1..15: mol_type = other DNA
aataaccatgactat

SEQ ID NO: 5550 - DNA, 21 bp, synthetic construct
  source 1..21: mol_type = other DNA
acccaggacagttcttacttc

SEQ ID NO: 5551 - DNA, 15 bp, synthetic construct
  source 1..15: mol_type = other DNA
aataaccatgactat

SEQ ID NO: 5552 - DNA, 18 bp, synthetic construct
  source 1..18: mol_type = other DNA
gacagtgcttctcagtat

SEQ ID NO: 5553 - DNA, 15 bp, synthetic construct
  source 1..15: mol_type = other DNA
aataaccatgactat

SEQ ID NO: 5554 - DNA, 18 bp, synthetic construct
  source 1..18: mol_type = other DNA
gaccctaacagttattac

SEQ ID NO: 5555 - DNA, 15 bp, synthetic construct
  source 1..15: mol_type = other DNA
aataaccatgactat

SEQ ID NO: 5556 - DNA, 21 bp, synthetic construct
  source 1..21: mol_type = other DNA
acccaggacagttcttacttc

SEQ ID NO: 5557 - DNA, 15 bp, synthetic construct
  source 1..15: mol_type = other DNA
aataaccatgactat

SEQ ID NO: 5558 - DNA, 21 bp, synthetic construct
  source 1..21: mol_type = other DNA
acccaggacagttcttacttc

SEQ ID NO: 5559 - DNA, 15 bp, synthetic construct
  source 1..15: mol_type = other DNA
aataaccatgactat

SEQ ID NO: 5560 - DNA, 18 bp, synthetic construct
  source 1..18: mol_type = other DNA
aacagtgcttttgactac

SEQ ID NO: 5561 - DNA, 15 bp, synthetic construct
  source 1..15: mol_type = other DNA
aataaccatgactat

SEQ ID NO: 5562 - DNA, 18 bp, synthetic construct
  source 1..18: mol_type = other DNA
tactctgggacgccttat

SEQ ID NO: 5563 - DNA, 15 bp, synthetic construct
  source 1..15: mol_type = other DNA
aataaccatgactat

SEQ ID NO: 5564 - DNA, 18 bp, synthetic construct
  source 1..18: mol_type = other DNA
gacagcacttttaactac

SEQ ID NO: 5565 - DNA, 15 bp, synthetic construct
  source 1..15: mol_type = other DNA
aataaccatgactat

SEQ ID NO: 5566 - DNA, 18 bp, synthetic construct
  source 1..18: mol_type = other DNA
acctcagggttcaacggg

SEQ ID NO: 5567 - DNA, 15 bp, synthetic construct
  source 1..15: mol_type = other DNA
aataaccatgactat

SEQ ID NO: 5568 - DNA, 18 bp, synthetic construct
  source 1..18: mol_type = other DNA
gacagtgcttctcagtat

SEQ ID NO: 5569 - DNA, 15 bp, synthetic construct
  source 1..15: mol_type = other DNA
aataaccatgactat

SEQ ID NO: 5570 - DNA, 15 bp, synthetic construct
  source 1..15: mol_type = other DNA
acatccataactgcc

SEQ ID NO: 5571 - DNA, 15 bp, synthetic construct
  source 1..15: mol_type = other DNA
aataaccatgactat

SEQ ID NO: 5572 - DNA, 15 bp, synthetic construct
  source 1..15: mol_type = other DNA
acttacacaactgtt

SEQ ID NO: 5573 - DNA, 15 bp, synthetic construct
  source 1..15: mol_type = other DNA
aataaccatgactat

SEQ ID NO: 5574 - DNA, 18 bp, synthetic construct
  source 1..18: mol_type = other DNA
gcctcagggtacccagct

SEQ ID NO: 5575 - DNA, 15 bp, synthetic construct
  source 1..15: mol_type = other DNA
aataaccatgactat

SEQ ID NO: 5576 - DNA, 24 bp, synthetic construct
  source 1..24: mol_type = other DNA
gccacaagcatagcttaccctaat

SEQ ID NO: 5577 - DNA, 15 bp, synthetic construct
  source 1..15: mol_type = other DNA
aataaccatgactat

SEQ ID NO: 5578 - DNA, 15 bp, synthetic construct
  source 1..15: mol_type = other DNA
tccacagcaacccag

SEQ ID NO: 5579 - DNA, 15 bp, synthetic construct
  source 1..15: mol_type = other DNA
aataaccatgactat

SEQ ID NO: 5580 - DNA, 18 bp, synthetic construct
  source 1..18: mol_type = other DNA
gacagcacttttgactac

SEQ ID NO: 5581 - DNA, 15 bp, synthetic construct
  source 1..15: mol_type = other DNA
aataaccatgactat

SEQ ID NO: 5582 - DNA, 18 bp, synthetic construct
  source 1..18: mol_type = other DNA
actacttactcacctttc

SEQ ID NO: 5583 - DNA, 15 bp, synthetic construct
  source 1..15: mol_type = other DNA
aataaccatgactat

SEQ ID NO: 5584 - DNA, 15 bp, synthetic construct
  source 1..15: mol_type = other DNA
acatctttgaacagt

SEQ ID NO: 5585 - DNA, 15 bp, synthetic construct
  source 1..15: mol_type = other DNA
aataaccatgactat

SEQ ID NO: 5586 - DNA, 18 bp, synthetic construct
  source 1..18: mol_type = other DNA
aacagtgcttctcagtcc

SEQ ID NO: 5587 - DNA, 15 bp, synthetic construct
  source 1..15: mol_type = other DNA
aataaccatgactat

SEQ ID NO: 5588 - DNA, 21 bp, synthetic construct
  source 1..21: mol_type = other DNA
acccaggacagttcttacttc

SEQ ID NO: 5589 - DNA, 15 bp, synthetic construct
  source 1..15: mol_type = other DNA
aataaccatgactat

SEQ ID NO: 5590 - DNA, 21 bp, synthetic construct
  source 1..21: mol_type = other DNA
acccaggacagttcttacttc

SEQ ID NO: 5591 - DNA, 15 bp, synthetic construct
  source 1..15: mol_type = other DNA
aataaccatgactat

SEQ ID NO: 5592 - DNA, 18 bp, synthetic construct
  source 1..18: mol_type = other DNA
accacatggtacccgact

SEQ ID NO: 5593 - DNA, 15 bp, synthetic construct
  source 1..15: mol_type = other DNA
aataaccatgactat

SEQ ID NO: 5594 - DNA, 15 bp, synthetic construct
  source 1..15: mol_type = other DNA
acatctttgaacagt

SEQ ID NO: 5595 - DNA, 15 bp, synthetic construct
  source 1..15: mol_type = other DNA
aataaccatgactat

SEQ ID NO: 5596 - DNA, 18 bp, synthetic construct
  source 1..18: mol_type = other DNA
gcctcagggtacccagct

SEQ ID NO: 5597 - DNA, 15 bp, synthetic construct
  source 1..15: mol_type = other DNA
aataaccatgactat

SEQ ID NO: 5598 - DNA, 18 bp, synthetic construct
  source 1..18: mol_type = other DNA
gatcgtaattttcagtac

SEQ ID NO: 5599 - DNA, 15 bp, synthetic construct
  source 1..15: mol_type = other DNA
aataaccatgactat

SEQ ID NO: 5600 - DNA, 21 bp, synthetic construct
  source 1..21: mol_type = other DNA
actgcttactcagatgttgcc

SEQ ID NO: 5601 - DNA, 15 bp, synthetic construct
  source 1..15: mol_type = other DNA
aataaccatgactat

SEQ ID NO: 5602 - DNA, 15 bp, synthetic construct
  source 1..15: mol_type = other DNA
accaccatgagggct

SEQ ID NO: 5603 - DNA, 15 bp, synthetic construct
  source 1..15: mol_type = other DNA
aataaccatgactat

SEQ ID NO: 5604 - DNA, 18 bp, synthetic construct
  source 1..18: mol_type = other DNA
aacagtgcctccaactac

SEQ ID NO: 5605 - DNA, 15 bp, synthetic construct
  source 1..15: mol_type = other DNA
aataaccatgactat

SEQ ID NO: 5606 - DNA, 18 bp, synthetic construct
  source 1..18: mol_type = other DNA
gacagtgcttctcagtat

SEQ ID NO: 5607 - DNA, 15 bp, synthetic construct
  source 1..15: mol_type = other DNA
aataaccatgactat

SEQ ID NO: 5608 - DNA, 24 bp, synthetic construct
  source 1..24: mol_type = other DNA
gccacaagcatagcttaccctaat

SEQ ID NO: 5609 - DNA, 15 bp, synthetic construct
  source 1..15: mol_type = other DNA
aataaccatgactat

SEQ ID NO: 5610 - DNA, 18 bp, synthetic construct
  source 1..18: mol_type = other DNA
actacttactcacctttc

SEQ ID NO: 5611 - DNA, 15 bp, synthetic construct
  source 1..15: mol_type = other DNA
aataaccatgactat

SEQ ID NO: 5612 - DNA, 18 bp, synthetic construct
  source 1..18: mol_type = other DNA
aacagtgcttttgactac

SEQ ID NO: 5613 - DNA, 15 bp, synthetic construct
  source 1..15: mol_type = other DNA
aataaccatgactat

SEQ ID NO: 5614 - DNA, 18 bp, synthetic construct
  source 1..18: mol_type = other DNA
gacagtgccactgcttac

SEQ ID NO: 5615 - DNA, 15 bp, synthetic construct
  source 1..15: mol_type = other DNA
aataaccatgactat

SEQ ID NO: 5616 - DNA, 24 bp, synthetic construct
  source 1..24: mol_type = other DNA
gccacaagcatagcttaccctaat

SEQ ID NO: 5617 - DNA, 15 bp, synthetic construct
  source 1..15: mol_type = other DNA
aataaccatgactat

SEQ ID NO: 5618 - DNA, 18 bp, synthetic construct
  source 1..18: mol_type = other DNA
gatactgcctcatcatac

SEQ ID NO: 5619 - DNA, 15 bp, synthetic construct
  source 1..15: mol_type = other DNA
aataaccatgactat

SEQ ID NO: 5620 - DNA, 18 bp, synthetic construct
  source 1..18: mol_type = other DNA
gacagcacttttaactac

SEQ ID NO: 5621 - DNA, 15 bp, synthetic construct
  source 1..15: mol_type = other DNA
aataaccatgactat

SEQ ID NO: 5622 - DNA, 18 bp, synthetic construct
  source 1..18: mol_type = other DNA
accaaacagtacccaacc

SEQ ID NO: 5623 - DNA, 15 bp, synthetic construct
  source 1..15: mol_type = other DNA
aataaccatgactat

SEQ ID NO: 5624 - DNA, 18 bp, synthetic construct
  source 1..18: mol_type = other DNA
tactctgggacaccttat

SEQ ID NO: 5625 - DNA, 15 bp, synthetic construct
  source 1..15: mol_type = other DNA
aataaccatgactat

SEQ ID NO: 5626 - DNA, 21 bp, synthetic construct
  source 1..21: mol_type = other DNA
acccaggacagttcttacttc

SEQ ID NO: 5627 - DNA, 15 bp, synthetic construct
  source 1..15: mol_type = other DNA
aataaccatgactat

SEQ ID NO: 5628 - DNA, 18 bp, synthetic construct
  source 1..18: mol_type = other DNA
tatggtggatccatttac

SEQ ID NO: 5629 - DNA, 15 bp, synthetic construct
  source 1..15: mol_type = other DNA
aataaccatgactat

SEQ ID NO: 5630 - DNA, 24 bp, synthetic construct
  source 1..24: mol_type = other DNA
gccacaagcatagcttaccctaat

SEQ ID NO: 5631 - DNA, 15 bp, synthetic construct
  source 1..15: mol_type = other DNA
aataaccatgactat

SEQ ID NO: 5632 - DNA, 21 bp, synthetic construct
  source 1..21: mol_type = other DNA
acaagtcaggtcttataccat

SEQ ID NO: 5633 - DNA, 15 bp, synthetic construct
  source 1..15: mol_type = other DNA
aataaccatgactat

SEQ ID NO: 5634 - DNA, 24 bp, synthetic construct
  source 1..24: mol_type = other DNA
gccacaagcatagcttaccctaat

SEQ ID NO: 5635 - DNA, 15 bp, synthetic construct
  source 1..15: mol_type = other DNA
aataaccatgactat

SEQ ID NO: 5636 - DNA, 18 bp, synthetic construct
  source 1..18: mol_type = other DNA
gacagcacttttaactac

SEQ ID NO: 5637 - DNA, 15 bp, synthetic construct
  source 1..15: mol_type = other DNA
aataaccatgactat

SEQ ID NO: 5638 - DNA, 21 bp, synthetic construct
  source 1..21: mol_type = other DNA
acccgggacagttcttacttc

SEQ ID NO: 5639 - DNA, 15 bp, synthetic construct
  source 1..15: mol_type = other DNA
aataaccatgactat

SEQ ID NO: 5640 - DNA, 18 bp, synthetic construct
  source 1..18: mol_type = other DNA
aacagtgcctccaactac

SEQ ID NO: 5641 - DNA, 15 bp, synthetic construct
  source 1..15: mol_type = other DNA
aataaccatgactat

SEQ ID NO: 5642 - DNA, 15 bp, synthetic construct
  source 1..15: mol_type = other DNA
atcgctgcgacaact

SEQ ID NO: 5643 - DNA, 15 bp, synthetic construct
  source 1..15: mol_type = other DNA
aataaccatgactat

SEQ ID NO: 5644 - DNA, 15 bp, synthetic construct
  source 1..15: mol_type = other DNA
acatctttgaacagt

SEQ ID NO: 5645 - DNA, 15 bp, synthetic construct
  source 1..15: mol_type = other DNA
aataaccatgactat

SEQ ID NO: 5646 - DNA, 18 bp, synthetic construct
  source 1..18: mol_type = other DNA
gacagtgccactgcttac

SEQ ID NO: 5647 - DNA, 15 bp, synthetic construct
  source 1..15: mol_type = other DNA
aataaccatgactat

SEQ ID NO: 5648 - DNA, 15 bp, synthetic construct
  source 1..15: mol_type = other DNA
accaccatgaaaagt

SEQ ID NO: 5649 - DNA, 15 bp, synthetic construct
  source 1..15: mol_type = other DNA
aataaccatgactat

SEQ ID NO: 5650 - DNA, 18 bp, synthetic construct
  source 1..18: mol_type = other DNA
actacttactcacctttc

SEQ ID NO: 5651 - DNA, 15 bp, synthetic construct
  source 1..15: mol_type = other DNA
aataaccatgactat

SEQ ID NO: 5652 - DNA, 18 bp, synthetic construct
  source 1..18: mol_type = other DNA
aacagtgcctccaactac

SEQ ID NO: 5653 - DNA, 15 bp, synthetic construct
  source 1..15: mol_type = other DNA
aataaccatgactat

SEQ ID NO: 5654 - DNA, 21 bp, synthetic construct
  source 1..21: mol_type = other DNA
acccaggacagttcttacttc

SEQ ID NO: 5655 - DNA, 15 bp, synthetic construct
  source 1..15: mol_type = other DNA
aataaccatgactat

SEQ ID NO: 5656 - DNA, 18 bp, synthetic construct
  source 1..18: mol_type = other DNA
tactttgggacaccttat

SEQ ID NO: 5657 - DNA, 15 bp, synthetic construct
  source 1..15: mol_type = other DNA
aataaccatgactat

SEQ ID NO: 5658 - DNA, 21 bp, synthetic construct
  source 1..21: mol_type = other DNA
acccgggacagttcttacttc

SEQ ID NO: 5659 - DNA, 15 bp, synthetic construct
  source 1..15: mol_type = other DNA
aataaccatgactat

SEQ ID NO: 5660 - DNA, 21 bp, synthetic construct
  source 1..21: mol_type = other DNA
acccaggacagttcttacttc

SEQ ID NO: 5661 - DNA, 15 bp, synthetic construct
  source 1..15: mol_type = other DNA
aataaccatgactat

SEQ ID NO: 5662 - DNA, 21 bp, synthetic construct
  source 1..21: mol_type = other DNA
acccaggacagttcttacttc

SEQ ID NO: 5663 - DNA, 15 bp, synthetic construct
  source 1..15: mol_type = other DNA
atgaatcatgatacc

SEQ ID NO: 5664 - DNA, 18 bp, synthetic construct
  source 1..18: mol_type = other DNA
gaccctaacagttattac

SEQ ID NO: 5665 - DNA, 15 bp, synthetic construct
  source 1..15: mol_type = other DNA
atgaatcatgatacc

SEQ ID NO: 5666 - DNA, 21 bp, synthetic construct
  source 1..21: mol_type = other DNA
acccaggacagttcttacttc

SEQ ID NO: 5667 - DNA, 15 bp, synthetic construct
  source 1..15: mol_type = other DNA
atgaatcatgatacc

SEQ ID NO: 5668 - DNA, 24 bp, synthetic construct
  source 1..24: mol_type = other DNA
gccacaagcatagcttaccctaat

SEQ ID NO: 5669 - DNA, 15 bp, synthetic construct
  source 1..15: mol_type = other DNA
atgaatcatgatacc

SEQ ID NO: 5670 - DNA, 24 bp, synthetic construct
  source 1..24: mol_type = other DNA
gccacaagcatagcttaccctaat

SEQ ID NO: 5671 - DNA, 15 bp, synthetic construct
  source 1..15: mol_type = other DNA
atgaatcatgatacc

SEQ ID NO: 5672 - DNA, 18 bp, synthetic construct
  source 1..18: mol_type = other DNA
gatcgtaattttcagtac

SEQ ID NO: 5673 - DNA, 15 bp, synthetic construct
  source 1..15: mol_type = other DNA
atgaatcatgatacc

SEQ ID NO: 5674 - DNA, 18 bp, synthetic construct
  source 1..18: mol_type = other DNA
gatcgtaattttcagtac

SEQ ID NO: 5675 - DNA, 15 bp, synthetic construct
  source 1..15: mol_type = other DNA
atgaatcatgatacc

SEQ ID NO: 5676 - DNA, 18 bp, synthetic construct
  source 1..18: mol_type = other DNA
gatactgcttcatcatac

SEQ ID NO: 5677 - DNA, 15 bp, synthetic construct
  source 1..15: mol_type = other DNA
atgaatcatgatacc

SEQ ID NO: 5678 - DNA, 18 bp, synthetic construct
  source 1..18: mol_type = other DNA
tacagtgcagcaccttac

SEQ ID NO: 5679 - DNA, 15 bp, synthetic construct
  source 1..15: mol_type = other DNA
atgaatcatgatacc

SEQ ID NO: 5680 - DNA, 15 bp, synthetic construct
  source 1..15: mol_type = other DNA
acatctttgaacagt

SEQ ID NO: 5681 - DNA, 15 bp, synthetic construct
  source 1..15: mol_type = other DNA
atgaatcatgatacc

SEQ ID NO: 5682 - DNA, 21 bp, synthetic construct
  source 1..21: mol_type = other DNA
acccaggacagttcttacttc

SEQ ID NO: 5683 - DNA, 15 bp, synthetic construct
  source 1..15: mol_type = other DNA
atgaatcatgatacc

SEQ ID NO: 5684 - DNA, 24 bp, synthetic construct
  source 1..24: mol_type = other DNA
gccacaagcatagcttaccctaat

SEQ ID NO: 5685 - DNA, 15 bp, synthetic construct
  source 1..15: mol_type = other DNA
atgaatcatgatacc

SEQ ID NO: 5686 - DNA, 18 bp, synthetic construct
  source 1..18: mol_type = other DNA
acctcagggttcaatggg

SEQ ID NO: 5687 - DNA, 15 bp, synthetic construct
  source 1..15: mol_type = other DNA
atgaatcatgatacc

SEQ ID NO: 5688 - DNA, 18 bp, synthetic construct
  source 1..18: mol_type = other DNA
gaccctaacagttattac

SEQ ID NO: 5689 - DNA, 15 bp, synthetic construct
  source 1..15: mol_type = other DNA
atgaatcatgatacc

SEQ ID NO: 5690 - DNA, 21 bp, synthetic construct
  source 1..21: mol_type = other DNA
acccgggacagttcttacttc

SEQ ID NO: 5691 - DNA, 15 bp, synthetic construct
  source 1..15: mol_type = other DNA
tcaggccacaatgac

SEQ ID NO: 5692 - DNA, 21 bp, synthetic construct
  source 1..21: mol_type = other DNA
acccgggacagttcttacttc

SEQ ID NO: 5693 - DNA, 15 bp, synthetic construct
  source 1..15: mol_type = other DNA
tctggacatagcaat

SEQ ID NO: 5694 - DNA, 18 bp, synthetic construct
  source 1..18: mol_type = other DNA
tactttgggacaccttat

SEQ ID NO: 5695 - DNA, 18 bp, synthetic construct
  source 1..18: mol_type = other DNA
gggaaatcaagccctaac

SEQ ID NO: 5696 - DNA, 18 bp, synthetic construct
  source 1..18: mol_type = other DNA
gacagtgcttctcagtat

SEQ ID NO: 5697 - DNA, 18 bp, synthetic construct
  source 1..18: mol_type = other DNA
gggaaatcaagccctaac

SEQ ID NO: 5698 - DNA, 18 bp, synthetic construct
  source 1..18: mol_type = other DNA
gacagcacttttgactac

SEQ ID NO: 5699 - DNA, 18 bp, synthetic construct
  source 1..18: mol_type = other DNA
gggaaatcaagccctaac

SEQ ID NO: 5700 - DNA, 18 bp, synthetic construct
  source 1..18: mol_type = other DNA
gacagtgccactgcttac

SEQ ID NO: 5701 - DNA, 18 bp, synthetic construct
  source 1..18: mol_type = other DNA
gggaaatcaagccctaac

SEQ ID NO: 5702 - DNA, 18 bp, synthetic construct
  source 1..18: mol_type = other DNA
gacagtgcctccaactac

SEQ ID NO: 5703 - DNA, 18 bp, synthetic construct
  source 1..18: mol_type = other DNA
gggaaatcaagccctaac

SEQ ID NO: 5704 - DNA, 18 bp, synthetic construct
  source 1..18: mol_type = other DNA
gacagcacttttgactac

SEQ ID NO: 5705 - DNA, 18 bp, synthetic construct
  source 1..18: mol_type = other DNA
gggaaatcaagccctaac

SEQ ID NO: 5706 - DNA, 24 bp, synthetic construct
  source 1..24: mol_type = other DNA
gccacaagcatagcttaccctaat

SEQ ID NO: 5707 - DNA, 18 bp, synthetic construct
  source 1..18: mol_type = other DNA
gggaaatcaagccctaac

SEQ ID NO: 5708 - DNA, 21 bp, synthetic construct
  source 1..21: mol_type = other DNA
acccgggacagttcttacttc

SEQ ID NO: 5709 - DNA, 18 bp, synthetic construct
  source 1..18: mol_type = other DNA
gggaaatcaagccctaac

SEQ ID NO: 5710 - DNA, 18 bp, synthetic construct
  source 1..18: mol_type = other DNA
gaccctaacagttattac

SEQ ID NO: 5711 - DNA, 18 bp, synthetic construct
  source 1..18: mol_type = other DNA
gggaaatcaagccctaac

SEQ ID NO: 5712 - DNA, 18 bp, synthetic construct
  source 1..18: mol_type = other DNA
gatactgcttcatcatac

SEQ ID NO: 5713 - DNA, 18 bp, synthetic construct
  source 1..18: mol_type = other DNA
gggaaatcaagccctaac

SEQ ID NO: 5714 - DNA, 15 bp, synthetic construct
  source 1..15: mol_type = other DNA
acttatacaactgtt

SEQ ID NO: 5715 - DNA, 15 bp, synthetic construct
  source 1..15: mol_type = other DNA
tctaatcacctatat

SEQ ID NO: 5716 - DNA, 18 bp, synthetic construct
  source 1..18: mol_type = other DNA
tactttgggacaccttat

SEQ ID NO: 5717 - DNA, 15 bp, synthetic construct
  source 1..15: mol_type = other DNA
tctaatcacctatat

SEQ ID NO: 5718 - DNA, 15 bp, synthetic construct
  source 1..15: mol_type = other DNA
accaccatgagggct

SEQ ID NO: 5719 - DNA, 15 bp, synthetic construct
  source 1..15: mol_type = other DNA
tctaatcacctatat

SEQ ID NO: 5720 - DNA, 21 bp, synthetic construct
  source 1..21: mol_type = other DNA
acccaggacagttcttacttc

SEQ ID NO: 5721 - DNA, 15 bp, synthetic construct
  source 1..15: mol_type = other DNA
tctaatcacctatat

SEQ ID NO: 5722 - DNA, 18 bp, synthetic construct
  source 1..18: mol_type = other DNA
gacagcacttttaactac

SEQ ID NO: 5723 - DNA, 15 bp, synthetic construct
  source 1..15: mol_type = other DNA
tctaatcacctatat

SEQ ID NO: 5724 - DNA, 15 bp, synthetic construct
  source 1..15: mol_type = other DNA
accaccacgaggagt

SEQ ID NO: 5725 - DNA, 15 bp, synthetic construct
  source 1..15: mol_type = other DNA
tctaatcacctatat

SEQ ID NO: 5726 - DNA, 15 bp, synthetic construct
  source 1..15: mol_type = other DNA
acttacacaactgtt

SEQ ID NO: 5727 - DNA, 15 bp, synthetic construct
  source 1..15: mol_type = other DNA
tctaatcacctatat

SEQ ID NO: 5728 - DNA, 15 bp, synthetic construct
  source 1..15: mol_type = other DNA
acatctttgaacagt

SEQ ID NO: 5729 - DNA, 15 bp, synthetic construct
  source 1..15: mol_type = other DNA
tctaatcacctatat

SEQ ID NO: 5730 - DNA, 21 bp, synthetic construct
  source 1..21: mol_type = other DNA
acccgggacagttcttacttc

SEQ ID NO: 5731 - DNA, 15 bp, synthetic construct
  source 1..15: mol_type = other DNA
tctaatcacctatat

SEQ ID NO: 5732 - DNA, 18 bp, synthetic construct
  source 1..18: mol_type = other DNA
aatgatatgtttgactat

SEQ ID NO: 5733 - DNA, 15 bp, synthetic construct
  source 1..15: mol_type = other DNA
tctaatcacctatat

SEQ ID NO: 5734 - DNA, 18 bp, synthetic construct
  source 1..18: mol_type = other DNA
tactctgggacgccttat

SEQ ID NO: 5735 - DNA, 15 bp, synthetic construct
  source 1..15: mol_type = other DNA
tctaatcacctatat

SEQ ID NO: 5736 - DNA, 18 bp, synthetic construct
  source 1..18: mol_type = other DNA
tcctctgtgacaccttat

SEQ ID NO: 5737 - DNA, 15 bp, synthetic construct
  source 1..15: mol_type = other DNA
tctaatcacctatat

SEQ ID NO: 5738 - DNA, 18 bp, synthetic construct
  source 1..18: mol_type = other DNA
gatcgtaatgttgactac

SEQ ID NO: 5739 - DNA, 18 bp, synthetic construct
  source 1..18: mol_type = other DNA
ggttttcaggcaacttct

SEQ ID NO: 5740 - DNA, 15 bp, synthetic construct
  source 1..15: mol_type = other DNA
acatctttgaacagt

SEQ ID NO: 5741 - DNA, 18 bp, synthetic construct
  source 1..18: mol_type = other DNA
ggttttcaggcaacttct

SEQ ID NO: 5742 - DNA, 18 bp, synthetic construct
  source 1..18: mol_type = other DNA
gacagtgccactgcttac

SEQ ID NO: 5743 - DNA, 18 bp, synthetic construct
  source 1..18: mol_type = other DNA
ggttttcaggcaacttct

SEQ ID NO: 5744 - DNA, 15 bp, synthetic construct
  source 1..15: mol_type = other DNA
accaccacgaggagt

SEQ ID NO: 5745 - DNA, 18 bp, synthetic construct
  source 1..18: mol_type = other DNA
ggttttcaggcaacttct

SEQ ID NO: 5746 - DNA, 18 bp, synthetic construct
  source 1..18: mol_type = other DNA
actacttactcacctttc

SEQ ID NO: 5747 - DNA, 18 bp, synthetic construct
  source 1..18: mol_type = other DNA
ggttttcaggcaacttct

SEQ ID NO: 5748 - DNA, 18 bp, synthetic construct
  source 1..18: mol_type = other DNA
gatcgtaatgttgactac

SEQ ID NO: 5749 - DNA, 18 bp, synthetic construct
  source 1..18: mol_type = other DNA
ggttttcaggcaacttct

SEQ ID NO: 5750 - DNA, 18 bp, synthetic construct
  source 1..18: mol_type = other DNA
tactttgggacaccttat

SEQ ID NO: 5751 - DNA, 18 bp, synthetic construct
  source 1..18: mol_type = other DNA
ggttttcaggcaacttct

SEQ ID NO: 5752 - DNA, 18 bp, synthetic construct
  source 1..18: mol_type = other DNA
gatcgtaattttcagtac

SEQ ID NO: 5753 - DNA, 18 bp, synthetic construct
  source 1..18: mol_type = other DNA
ggttttcaggcaacttct

SEQ ID NO: 5754 - DNA, 18 bp, synthetic construct
  source 1..18: mol_type = other DNA
gcctcagggtacccaacc

SEQ ID NO: 5755 - DNA, 18 bp, synthetic construct
  source 1..18: mol_type = other DNA
ggttttcaggcaacttct

SEQ ID NO: 5756 - DNA, 15 bp, synthetic construct
  source 1..15: mol_type = other DNA
tccacagcaacccag

SEQ ID NO: 5757 - DNA, 18 bp, synthetic construct
  source 1..18: mol_type = other DNA
ggttttcaggcaacttct

SEQ ID NO: 5758 - DNA, 18 bp, synthetic construct
  source 1..18: mol_type = other DNA
gatcgtaattttcagtac

SEQ ID NO: 5759 - DNA, 18 bp, synthetic construct
  source 1..18: mol_type = other DNA
ggttttcaggcaacttct

SEQ ID NO: 5760 - DNA, 15 bp, synthetic construct
  source 1..15: mol_type = other DNA
acatccataactgcc

SEQ ID NO: 5761 - DNA, 18 bp, synthetic construct
  source 1..18: mol_type = other DNA
ggttttcaggcaacttct

SEQ ID NO: 5762 - DNA, 21 bp, synthetic construct
  source 1..21: mol_type = other DNA
acccgggacagttcttacttc

SEQ ID NO: 5763 - DNA, 18 bp, synthetic construct
  source 1..18: mol_type = other DNA
ggttttcaggcaacttct

SEQ ID NO: 5764 - DNA, 15 bp, synthetic construct
  source 1..15: mol_type = other DNA
atcgccgcgacaact

SEQ ID NO: 5765 - DNA, 18 bp, synthetic construct
  source 1..18: mol_type = other DNA
ggttttcaggcaacttct

SEQ ID NO: 5766 - DNA, 18 bp, synthetic construct
  source 1..18: mol_type = other DNA
gatactgcttcatcatac

SEQ ID NO: 5767 - DNA, 15 bp, synthetic construct
  source 1..15: mol_type = other DNA
ttcaatcatgataca

SEQ ID NO: 5768 - DNA, 15 bp, synthetic construct
  source 1..15: mol_type = other DNA
acatctttgaacagt

SEQ ID NO: 5769 - DNA, 15 bp, synthetic construct
  source 1..15: mol_type = other DNA
ttcaatcatgataca

SEQ ID NO: 5770 - DNA, 18 bp, synthetic construct
  source 1..18: mol_type = other DNA
gatggtacttctaacaac

SEQ ID NO: 5771 - DNA, 15 bp, synthetic construct
  source 1..15: mol_type = other DNA
ttcaatcatgataca

SEQ ID NO: 5772 - DNA, 18 bp, synthetic construct
  source 1..18: mol_type = other DNA
accacatggtacccgact

SEQ ID NO: 5773 - DNA, 15 bp, synthetic construct
  source 1..15: mol_type = other DNA
ttcaatcatgataca

SEQ ID NO: 5774 - DNA, 21 bp, synthetic construct
  source 1..21: mol_type = other DNA
aacattgctacaagcgagtac

SEQ ID NO: 5775 - DNA, 15 bp, synthetic construct
  source 1..15: mol_type = other DNA
ttcaatcatgataca

SEQ ID NO: 5776 - DNA, 21 bp, synthetic construct
  source 1..21: mol_type = other DNA
acccgggacagttcttacttc

SEQ ID NO: 5777 - DNA, 15 bp, synthetic construct
  source 1..15: mol_type = other DNA
ttcaatcatgataca

SEQ ID NO: 5778 - DNA, 18 bp, synthetic construct
  source 1..18: mol_type = other DNA
gcctcagggtacccagct

SEQ ID NO: 5779 - DNA, 15 bp, synthetic construct
  source 1..15: mol_type = other DNA
ttcaatcatgataca

SEQ ID NO: 5780 - DNA, 18 bp, synthetic construct
  source 1..18: mol_type = other DNA
tactctgggacgccttat

SEQ ID NO: 5781 - DNA, 15 bp, synthetic construct
  source 1..15: mol_type = other DNA
ttcaatcatgataca

SEQ ID NO: 5782 - DNA, 21 bp, synthetic construct
  source 1..21: mol_type = other DNA
acccgggacagttcttacttc

SEQ ID NO: 5783 - DNA, 15 bp, synthetic construct
  source 1..15: mol_type = other DNA
ttcaatcatgataca

SEQ ID NO: 5784 - DNA, 18 bp, synthetic construct
  source 1..18: mol_type = other DNA
actgcttactcaactttc

SEQ ID NO: 5785 - DNA, 15 bp, synthetic construct
  source 1..15: mol_type = other DNA
ttcaatcatgataca

SEQ ID NO: 5786 - DNA, 24 bp, synthetic construct
  source 1..24: mol_type = other DNA
gccacaagcatagcttaccctaat

SEQ ID NO: 5787 - DNA, 15 bp, synthetic construct
  source 1..15: mol_type = other DNA
ttcaatcatgataca

SEQ ID NO: 5788 - DNA, 18 bp, synthetic construct
  source 1..18: mol_type = other DNA
gaccctaacagttattac

SEQ ID NO: 5789 - DNA, 15 bp, synthetic construct
  source 1..15: mol_type = other DNA
ttcaatcatgataca

SEQ ID NO: 5790 - DNA, 18 bp, synthetic construct
  source 1..18: mol_type = other DNA
actgcttactcaactttc

SEQ ID NO: 5791 - DNA, 15 bp, synthetic construct
  source 1..15: mol_type = other DNA
ttcaatcatgataca

SEQ ID NO: 5792 - DNA, 18 bp, synthetic construct
  source 1..18: mol_type = other DNA
gacagtgccactgcttac

SEQ ID NO: 5793 - DNA, 15 bp, synthetic construct
  source 1..15: mol_type = other DNA
ttcaatcatgataca

SEQ ID NO: 5794 - DNA, 18 bp, synthetic construct
  source 1..18: mol_type = other DNA
accaaacagtacccaacc

SEQ ID NO: 5795 - DNA, 15 bp, synthetic construct
  source 1..15: mol_type = other DNA
ttcaatcatgataca

SEQ ID NO: 5796 - DNA, 15 bp, synthetic construct
  source 1..15: mol_type = other DNA
acatctttgaacagt

SEQ ID NO: 5797 - DNA, 15 bp, synthetic construct
  source 1..15: mol_type = other DNA
ttcaatcatgataca

SEQ ID NO: 5798 - DNA, 18 bp, synthetic construct
  source 1..18: mol_type = other DNA
aacagtgcttttgactac

SEQ ID NO: 5799 - DNA, 15 bp, synthetic construct
  source 1..15: mol_type = other DNA
ttcaatcatgataca

SEQ ID NO: 5800 - DNA, 18 bp, synthetic construct
  source 1..18: mol_type = other DNA
gaccctaacagttattac

SEQ ID NO: 5801 - DNA, 15 bp, synthetic construct
  source 1..15: mol_type = other DNA
ttcaatcatgataca

SEQ ID NO: 5802 - DNA, 18 bp, synthetic construct
  source 1..18: mol_type = other DNA
gatcgttcttctgacaac

SEQ ID NO: 5803 - DNA, 15 bp, synthetic construct
  source 1..15: mol_type = other DNA
ttcaatcatgataca

SEQ ID NO: 5804 - DNA, 18 bp, synthetic construct
  source 1..18: mol_type = other DNA
gatcgtaatgttgactac

SEQ ID NO: 5805 - DNA, 15 bp, synthetic construct
  source 1..15: mol_type = other DNA
ttcaatcatgataca

SEQ ID NO: 5806 - DNA, 15 bp, synthetic construct
  source 1..15: mol_type = other DNA
acttatacaactgtt

SEQ ID NO: 5807 - DNA, 15 bp, synthetic construct
  source 1..15: mol_type = other DNA
ttcaatcatgataca

SEQ ID NO: 5808 - DNA, 21 bp, synthetic construct
  source 1..21: mol_type = other DNA
acaatcagtggaaacgagtac

SEQ ID NO: 5809 - DNA, 15 bp, synthetic construct
  source 1..15: mol_type = other DNA
ttcaatcatgataca

SEQ ID NO: 5810 - DNA, 18 bp, synthetic construct
  source 1..18: mol_type = other DNA
tactctgggacaccttat

SEQ ID NO: 5811 - DNA, 15 bp, synthetic construct
  source 1..15: mol_type = other DNA
ttcaatcatgataca

SEQ ID NO: 5812 - DNA, 18 bp, synthetic construct
  source 1..18: mol_type = other DNA
agtacttactcacctttc

SEQ ID NO: 5813 - DNA, 15 bp, synthetic construct
  source 1..15: mol_type = other DNA
ttcaatcatgataca

SEQ ID NO: 5814 - DNA, 15 bp, synthetic construct
  source 1..15: mol_type = other DNA
acttacacaactgtt

SEQ ID NO: 5815 - DNA, 15 bp, synthetic construct
  source 1..15: mol_type = other DNA
ttcaatcatgataca

SEQ ID NO: 5816 - DNA, 15 bp, synthetic construct
  source 1..15: mol_type = other DNA
tccacagcaacccag

SEQ ID NO: 5817 - DNA, 15 bp, synthetic construct
  source 1..15: mol_type = other DNA
ttcaatcatgataca

SEQ ID NO: 5818 - DNA, 18 bp, synthetic construct
  source 1..18: mol_type = other DNA
agtacttactcacctttc

SEQ ID NO: 5819 - DNA, 15 bp, synthetic construct
  source 1..15: mol_type = other DNA
ttcaatcatgataca

SEQ ID NO: 5820 - DNA, 18 bp, synthetic construct
  source 1..18: mol_type = other DNA
actacttactcacctttc

SEQ ID NO: 5821 - DNA, 15 bp, synthetic construct
  source 1..15: mol_type = other DNA
ttcaatcatgataca

SEQ ID NO: 5822 - DNA, 18 bp, synthetic construct
  source 1..18: mol_type = other DNA
tactctgcgacaccttat

SEQ ID NO: 5823 - DNA, 15 bp, synthetic construct
  source 1..15: mol_type = other DNA
ttcaatcatgataca

SEQ ID NO: 5824 - DNA, 15 bp, synthetic construct
  source 1..15: mol_type = other DNA
tccacagcaacccgg

SEQ ID NO: 5825 - DNA, 15 bp, synthetic construct
  source 1..15: mol_type = other DNA
ttcaatcatgataca

SEQ ID NO: 5826 - DNA, 18 bp, synthetic construct
  source 1..18: mol_type = other DNA
gatcgtaattttcagtac

SEQ ID NO: 5827 - DNA, 15 bp, synthetic construct
  source 1..15: mol_type = other DNA
ttcaatcatgataca

SEQ ID NO: 5828 - DNA, 15 bp, synthetic construct
  source 1..15: mol_type = other DNA
acatctttgaacagt

SEQ ID NO: 5829 - DNA, 15 bp, synthetic construct
  source 1..15: mol_type = other DNA
ttcaatcatgataca

SEQ ID NO: 5830 - DNA, 21 bp, synthetic construct
  source 1..21: mol_type = other DNA
acccgggacagttcttacttc

SEQ ID NO: 5831 - DNA, 15 bp, synthetic construct
  source 1..15: mol_type = other DNA
ttcaatcatgataca

SEQ ID NO: 5832 - DNA, 15 bp, synthetic construct
  source 1..15: mol_type = other DNA
atcgccacaacaact

SEQ ID NO: 5833 - DNA, 15 bp, synthetic construct
  source 1..15: mol_type = other DNA
ttcaatcatgataca

SEQ ID NO: 5834 - DNA, 18 bp, synthetic construct
  source 1..18: mol_type = other DNA
gacagtgccacagcttac

SEQ ID NO: 5835 - DNA, 15 bp, synthetic construct
  source 1..15: mol_type = other DNA
ttcaatcatgataca

SEQ ID NO: 5836 - DNA, 18 bp, synthetic construct
  source 1..18: mol_type = other DNA
gacagtgcttctcagtat

SEQ ID NO: 5837 - DNA, 15 bp, synthetic construct
  source 1..15: mol_type = other DNA
ttcaatcatgataca

SEQ ID NO: 5838 - DNA, 24 bp, synthetic construct
  source 1..24: mol_type = other DNA
gccacaagcataggttaccctaat

SEQ ID NO: 5839 - DNA, 15 bp, synthetic construct
  source 1..15: mol_type = other DNA
ttcaatcatgataca

SEQ ID NO: 5840 - DNA, 21 bp, synthetic construct
  source 1..21: mol_type = other DNA
acccgggacagttcttacttc

SEQ ID NO: 5841 - DNA, 15 bp, synthetic construct
  source 1..15: mol_type = other DNA
ttcaatcatgataca

SEQ ID NO: 5842 - DNA, 21 bp, synthetic construct
  source 1..21: mol_type = other DNA
acccaggacagttcttacttc

SEQ ID NO: 5843 - DNA, 15 bp, synthetic construct
  source 1..15: mol_type = other DNA
ttcaatcatgataca

SEQ ID NO: 5844 - DNA, 18 bp, synthetic construct
  source 1..18: mol_type = other DNA
aacagtgcttttgactac

SEQ ID NO: 5845 - DNA, 15 bp, synthetic construct
  source 1..15: mol_type = other DNA
ttcaatcatgataca

SEQ ID NO: 5846 - DNA, 18 bp, synthetic construct
  source 1..18: mol_type = other DNA
tactctgggacgccttat

SEQ ID NO: 5847 - DNA, 15 bp, synthetic construct
  source 1..15: mol_type = other DNA
ttcaatcatgataca

SEQ ID NO: 5848 - DNA, 18 bp, synthetic construct
  source 1..18: mol_type = other DNA
accacaacgtacccaact

SEQ ID NO: 5849 - DNA, 15 bp, synthetic construct
  source 1..15: mol_type = other DNA
ttcaatcatgataca

SEQ ID NO: 5850 - DNA, 18 bp, synthetic construct
  source 1..18: mol_type = other DNA
gatactgcctcatcatac

SEQ ID NO: 5851 - DNA, 15 bp, synthetic construct
  source 1..15: mol_type = other DNA
ttcaatcatgataca

SEQ ID NO: 5852 - DNA, 18 bp, synthetic construct
  source 1..18: mol_type = other DNA
gacagtgccactgcttac

SEQ ID NO: 5853 - DNA, 15 bp, synthetic construct
  source 1..15: mol_type = other DNA
ttcaatcatgataca

SEQ ID NO: 5854 - DNA, 21 bp, synthetic construct
  source 1..21: mol_type = other DNA
actatttactcaaatcctttc

SEQ ID NO: 5855 - DNA, 15 bp, synthetic construct
  source 1..15: mol_type = other DNA
ttcaatcatgataca

SEQ ID NO: 5856 - DNA, 18 bp, synthetic construct
  source 1..18: mol_type = other DNA
accacagggtacccgact

SEQ ID NO: 5857 - DNA, 15 bp, synthetic construct
  source 1..15: mol_type = other DNA
ttcaatcatgataca

SEQ ID NO: 5858 - DNA, 18 bp, synthetic construct
  source 1..18: mol_type = other DNA
gatcgtaattttcagtac

SEQ ID NO: 5859 - DNA, 15 bp, synthetic construct
  source 1..15: mol_type = other DNA
ttcaatcatgataca

SEQ ID NO: 5860 - DNA, 24 bp, synthetic construct
  source 1..24: mol_type = other DNA
gccacaagcatagcttaccctaat

SEQ ID NO: 5861 - DNA, 15 bp, synthetic construct
  source 1..15: mol_type = other DNA
ttcaatcatgataca

SEQ ID NO: 5862 - DNA, 18 bp, synthetic construct
  source 1..18: mol_type = other DNA
gacagcacttttaactac

SEQ ID NO: 5863 - DNA, 15 bp, synthetic construct
  source 1..15: mol_type = other DNA
ttcaatcatgataca

SEQ ID NO: 5864 - DNA, 24 bp, synthetic construct
  source 1..24: mol_type = other DNA
gccacaagcatagcttaccctaat

SEQ ID NO: 5865 - DNA, 15 bp, synthetic construct
  source 1..15: mol_type = other DNA
ttcaatcatgataca

SEQ ID NO: 5866 - DNA, 18 bp, synthetic construct
  source 1..18: mol_type = other DNA
gacagtgcctccaactac

SEQ ID NO: 5867 - DNA, 15 bp, synthetic construct
  source 1..15: mol_type = other DNA
ttcaatcatgataca

SEQ ID NO: 5868 - DNA, 21 bp, synthetic construct
  source 1..21: mol_type = other DNA
aacattgctacaagcgagtac

SEQ ID NO: 5869 - DNA, 15 bp, synthetic construct
  source 1..15: mol_type = other DNA
ttcaatcatgataca

SEQ ID NO: 5870 - DNA, 18 bp, synthetic construct
  source 1..18: mol_type = other DNA
gaccctaacagttattac

SEQ ID NO: 5871 - DNA, 15 bp, synthetic construct
  source 1..15: mol_type = other DNA
ttcaatcatgataca

SEQ ID NO: 5872 - DNA, 18 bp, synthetic construct
  source 1..18: mol_type = other DNA
actgcttactcaactttc

SEQ ID NO: 5873 - DNA, 18 bp, synthetic construct
  source 1..18: mol_type = other DNA
aattcccagtatccctgg

SEQ ID NO: 5874 - DNA, 18 bp, synthetic construct
  source 1..18: mol_type = other DNA
tcctctgtgacaccttat

SEQ ID NO: 5875 - DNA, 18 bp, synthetic construct
  source 1..18: mol_type = other DNA
aattcccagtatccctgg

SEQ ID NO: 5876 - DNA, 18 bp, synthetic construct
  source 1..18: mol_type = other DNA
tcctctgtgacaccttat

SEQ ID NO: 5877 - DNA, 18 bp, synthetic construct
  source 1..18: mol_type = other DNA
aattcccagtatccctgg

SEQ ID NO: 5878 - DNA, 24 bp, synthetic construct
  source 1..24: mol_type = other DNA
gccacaagcataggttaccctaat

SEQ ID NO: 5879 - DNA, 18 bp, synthetic construct
  source 1..18: mol_type = other DNA
aattcccagtatccctgg

SEQ ID NO: 5880 - DNA, 18 bp, synthetic construct
  source 1..18: mol_type = other DNA
gacagtgccacagcttac

SEQ ID NO: 5881 - DNA, 18 bp, synthetic construct
  source 1..18: mol_type = other DNA
aattcccagtatccctgg

SEQ ID NO: 5882 - DNA, 21 bp, synthetic construct
  source 1..21: mol_type = other DNA
actatttactcaaatcctttc

SEQ ID NO: 5883 - DNA, 18 bp, synthetic construct
  source 1..18: mol_type = other DNA
aattcccagtatccctgg

SEQ ID NO: 5884 - DNA, 18 bp, synthetic construct
  source 1..18: mol_type = other DNA
tactttgggacaccttat

SEQ ID NO: 5885 - DNA, 18 bp, synthetic construct
  source 1..18: mol_type = other DNA
aattcccagtatccctgg

SEQ ID NO: 5886 - DNA, 18 bp, synthetic construct
  source 1..18: mol_type = other DNA
acctcagggttcaacggg

SEQ ID NO: 5887 - DNA, 18 bp, synthetic construct
  source 1..18: mol_type = other DNA
aattcccagtatccctgg

SEQ ID NO: 5888 - DNA, 18 bp, synthetic construct
  source 1..18: mol_type = other DNA
gtgacccccgacaaccac

SEQ ID NO: 5889 - DNA, 18 bp, synthetic construct
  source 1..18: mol_type = other DNA
aattcccagtatccctgg

SEQ ID NO: 5890 - DNA, 18 bp, synthetic construct
  source 1..18: mol_type = other DNA
agtacttactcacctttc

SEQ ID NO: 5891 - DNA, 18 bp, synthetic construct
  source 1..18: mol_type = other DNA
aattcccagtatccctgg

SEQ ID NO: 5892 - DNA, 18 bp, synthetic construct
  source 1..18: mol_type = other DNA
tactctgcgacaccttat

SEQ ID NO: 5893 - DNA, 18 bp, synthetic construct
  source 1..18: mol_type = other DNA
aattcccagtatccctgg

SEQ ID NO: 5894 - DNA, 18 bp, synthetic construct
  source 1..18: mol_type = other DNA
gacagcacttttaactac

SEQ ID NO: 5895 - DNA, 18 bp, synthetic construct
  source 1..18: mol_type = other DNA
aattcccagtatccctgg

SEQ ID NO: 5896 - DNA, 18 bp, synthetic construct
  source 1..18: mol_type = other DNA
aacagtgcctccaactac

SEQ ID NO: 5897 - DNA, 18 bp, synthetic construct
  source 1..18: mol_type = other DNA
aattcccagtatccctgg

SEQ ID NO: 5898 - DNA, 18 bp, synthetic construct
  source 1..18: mol_type = other DNA
tactctgggacaccttat

SEQ ID NO: 5899 - DNA, 18 bp, synthetic construct
  source 1..18: mol_type = other DNA
aattcccagtatccctgg

SEQ ID NO: 5900 - DNA, 15 bp, synthetic construct
  source 1..15: mol_type = other DNA
acatctttgaacagt

SEQ ID NO: 5901 - DNA, 18 bp, synthetic construct
  source 1..18: mol_type = other DNA
aattcccagtatccctgg

SEQ ID NO: 5902 - DNA, 18 bp, synthetic construct
  source 1..18: mol_type = other DNA
gaccctaacagttattac

SEQ ID NO: 5903 - DNA, 18 bp, synthetic construct
  source 1..18: mol_type = other DNA
aattcccagtatccctgg

SEQ ID NO: 5904 - DNA, 21 bp, synthetic construct
  source 1..21: mol_type = other DNA
acccaggacagttcttacttc

SEQ ID NO: 5905 - DNA, 18 bp, synthetic construct
  source 1..18: mol_type = other DNA
aattcccagtatccctgg

SEQ ID NO: 5906 - DNA, 15 bp, synthetic construct
  source 1..15: mol_type = other DNA
acttatacaactgtt

SEQ ID NO: 5907 - DNA, 18 bp, synthetic construct
  source 1..18: mol_type = other DNA
aattcccagtatccctgg

SEQ ID NO: 5908 - DNA, 18 bp, synthetic construct
  source 1..18: mol_type = other DNA
tactctgggacaccttat

SEQ ID NO: 5909 - DNA, 18 bp, synthetic construct
  source 1..18: mol_type = other DNA
aattcccagtatccctgg

SEQ ID NO: 5910 - DNA, 18 bp, synthetic construct
  source 1..18: mol_type = other DNA
gatcgtaattttcagtac

SEQ ID NO: 5911 - DNA, 18 bp, synthetic construct
  source 1..18: mol_type = other DNA
aattcccagtatccctgg

SEQ ID NO: 5912 - DNA, 15 bp, synthetic construct
  source 1..15: mol_type = other DNA
acatctttgaacagt

SEQ ID NO: 5913 - DNA, 18 bp, synthetic construct
  source 1..18: mol_type = other DNA
aattcccagtatccctgg

SEQ ID NO: 5914 - DNA, 24 bp, synthetic construct
  source 1..24: mol_type = other DNA
gccacaagcatagcttaccctaat

SEQ ID NO: 5915 - DNA, 18 bp, synthetic construct
  source 1..18: mol_type = other DNA
aattcccagtatccctgg

SEQ ID NO: 5916 - DNA, 24 bp, synthetic construct
  source 1..24: mol_type = other DNA
gccacaagcataggttaccctaat

SEQ ID NO: 5917 - DNA, 18 bp, synthetic construct
  source 1..18: mol_type = other DNA
aattcccagtatccctgg

SEQ ID NO: 5918 - DNA, 18 bp, synthetic construct
  source 1..18: mol_type = other DNA
gtgacccccgacaaccac

SEQ ID NO: 5919 - DNA, 18 bp, synthetic construct
  source 1..18: mol_type = other DNA
aattcccagtatccctgg

SEQ ID NO: 5920 - DNA, 18 bp, synthetic construct
  source 1..18: mol_type = other DNA
gaccctaacagttattac

SEQ ID NO: 5921 - DNA, 18 bp, synthetic construct
  source 1..18: mol_type = other DNA
aattcccagtatccctgg

SEQ ID NO: 5922 - DNA, 18 bp, synthetic construct
  source 1..18: mol_type = other DNA
gatcgtaattttcagtac

SEQ ID NO: 5923 - DNA, 18 bp, synthetic construct
  source 1..18: mol_type = other DNA
aattcccagtatccctgg

SEQ ID NO: 5924 - DNA, 18 bp, synthetic construct
  source 1..18: mol_type = other DNA
gacagtgcctccaactac

SEQ ID NO: 5925 - DNA, 18 bp, synthetic construct
  source 1..18: mol_type = other DNA
aattcccagtatccctgg

SEQ ID NO: 5926 - DNA, 18 bp, synthetic construct
  source 1..18: mol_type = other DNA
gcctcagggtacccagct

SEQ ID NO: 5927 - DNA, 18 bp, synthetic construct
  source 1..18: mol_type = other DNA
aattcccagtatccctgg

SEQ ID NO: 5928 - DNA, 18 bp, synthetic construct
  source 1..18: mol_type = other DNA
gcctcagggtacccagct

SEQ ID NO: 5929 - DNA, 18 bp, synthetic construct
  source 1..18: mol_type = other DNA
aattcccagtatccctgg

SEQ ID NO: 5930 - DNA, 18 bp, synthetic construct
  source 1..18: mol_type = other DNA
gacagtgcttctcagtat

SEQ ID NO: 5931 - DNA, 18 bp, synthetic construct
  source 1..18: mol_type = other DNA
aattcccagtatccctgg

SEQ ID NO: 5932 - DNA, 18 bp, synthetic construct
  source 1..18: mol_type = other DNA
tactctgggacaccttat

SEQ ID NO: 5933 - DNA, 18 bp, synthetic construct
  source 1..18: mol_type = other DNA
aattcccagtatccctgg

SEQ ID NO: 5934 - DNA, 18 bp, synthetic construct
  source 1..18: mol_type = other DNA
gacagcacttttgactac

SEQ ID NO: 5935 - DNA, 18 bp, synthetic construct
  source 1..18: mol_type = other DNA
aattcccagtatccctgg

SEQ ID NO: 5936 - DNA, 21 bp, synthetic construct
  source 1..21: mol_type = other DNA
actatttactcaaatcctttc

SEQ ID NO: 5937 - protein, 17 aa, synthetic construct
LYWYQQPRDQGPQLLVY

SEQ ID NO: 5938 - protein, 17 aa, synthetic construct
FWWYRQHSGEGPKALMS

SEQ ID NO: 5939 - protein, 17 aa, synthetic construct
MYWYRQDTGHGLRLIHY

SEQ ID NO: 5940 - protein, 17 aa, synthetic construct
LSWYQQREGHAPVFLSY

SEQ ID NO: 5941 - protein, 17 aa, synthetic construct
MYWYRQDTGHGLRLIHY

SEQ ID NO: 5942 - protein, 17 aa, synthetic construct
LFWYKQTASGEIVFLIR

SEQ ID NO: 5943 - protein, 17 aa, synthetic construct
MYWYRQDTGHGLRLIHY

SEQ ID NO: 5944 - protein, 17 aa, synthetic construct
LFWYVQHLNEAPKLLLK

SEQ ID NO: 5945 - protein, 17 aa, synthetic construct
MYWYRQDTGHGLRLIHY

SEQ ID NO: 5946 - protein, 17 aa, synthetic construct
MQWFYQRPGGSLVSLFY

SEQ ID NO: 5947 - protein, 17 aa, synthetic construct
LYWYQQPRDQGPQLLVY

SEQ ID NO: 5948 - protein, 17 aa, synthetic construct
LFWYVQYPRQGLQLLLK

SEQ ID NO: 5949 - protein, 17 aa, synthetic construct
MYWYRQDTGHGLRLIHY

SEQ ID NO: 5950 - protein, 17 aa, synthetic construct
LFWYVQYPGEGPQLLFR

SEQ ID NO: 5951 - protein, 17 aa, synthetic construct
MYWYRQSAKKPLEFMFS

SEQ ID NO: 5952 - protein, 17 aa, synthetic construct
LSWYQQREGHAPVFLSY

SEQ ID NO: 5953 - protein, 17 aa, synthetic construct
VFWYRQTIVQGLEFLTY

SEQ ID NO: 5954 - protein, 17 aa, synthetic construct
VQWFRQNSRGSLISLFY

SEQ ID NO: 5955 - protein, 17 aa, synthetic construct
MYWYRQDTGHGLRLIHY

SEQ ID NO: 5956 - protein, 17 aa, synthetic construct
LFWYVQYPRQGLQLLLK

SEQ ID NO: 5957 - protein, 17 aa, synthetic construct
MYWYRQDTGHGLRLIHY

SEQ ID NO: 5958 - protein, 17 aa, synthetic construct
FSWYKQEAGAGLQLLMS

SEQ ID NO: 5959 - protein, 17 aa, synthetic construct
MSWYQQDLQKQLQWLFT

SEQ ID NO: 5960 - protein, 17 aa, synthetic construct
LQWYRQKSGEGPAQLIL

SEQ ID NO: 5961 - protein, 17 aa, synthetic construct
MSWYQQDLQKQLQWLFT

SEQ ID NO: 5962 - protein, 17 aa, synthetic construct
LFWYVQYPRQGLQLLLK

SEQ ID NO: 5963 - protein, 17 aa, synthetic construct
MYWYRQDSGKGLRLIYY

SEQ ID NO: 5964 - protein, 17 aa, synthetic construct
FWWYRQHSGKSPKMLMS

SEQ ID NO: 5965 - protein, 17 aa, synthetic construct
MYWYRQSAKKPLEFMFS

SEQ ID NO: 5966 - protein, 17 aa, synthetic construct
LFWYVQYPRQGLQLLLK

SEQ ID NO: 5967 - protein, 17 aa, synthetic construct
MYWYRQDTGHGLRLIHY

SEQ ID NO: 5968 - protein, 17 aa, synthetic construct
MQWFYQRPGGSLVSLFY

SEQ ID NO: 5969 - protein, 17 aa, synthetic construct
MYWYRQDTGHGLRLIHY

SEQ ID NO: 5970 - protein, 17 aa, synthetic construct
LFWYVQYPRQGLQLLLK

SEQ ID NO: 5971 - protein, 17 aa, synthetic construct
LYWYWQATGGTLQQLFY

SEQ ID NO: 5972 - protein, 17 aa, synthetic construct
LFWYVQYPRQGLQLLLK

SEQ ID NO: 5973 - protein, 17 aa, synthetic construct
MYWYRQDTGHGLRLIHY

SEQ ID NO: 5974 - protein, 17 aa, synthetic construct
LFWYVQYPGEGPQLLFK

SEQ ID NO: 5975 - protein, 17 aa, synthetic construct
LYWYWQATGGTLQQLFY

SEQ ID NO: 5976 - protein, 17 aa, synthetic construct
FSWYKQEAGAGLQLLMS

SEQ ID NO: 5977 - protein, 17 aa, synthetic construct
MYWYRQDTGHGLRLIHY

SEQ ID NO: 5978 - protein, 17 aa, synthetic construct
FFWYKQEPGASLQLLMK

SEQ ID NO: 5979 - protein, 17 aa, synthetic construct
MYWYRQDTGHGLRLIHY

SEQ ID NO: 5980 - protein, 17 aa, synthetic construct
LFWYKQTASGEIVFLIR

SEQ ID NO: 5981 - protein, 17 aa, synthetic construct
MYWYRQDTGHGLRLIHY

SEQ ID NO: 5982 - protein, 17 aa, synthetic construct
LFWYVQHLNESPRLLLK

SEQ ID NO: 5983 - protein, 17 aa, synthetic construct
MYWYRQDSGKGLRLIYY

SEQ ID NO: 5984 - protein, 17 aa, synthetic construct
FPWYKQEPGENPKLIID

SEQ ID NO: 5985 - protein, 17 aa, synthetic construct
MYWYRQDTGHGLRLIHY

SEQ ID NO: 5986 - protein, 17 aa, synthetic construct
FFWYKQEPGASLQLLMK

SEQ ID NO: 5987 - protein, 17 aa, synthetic construct
MYWYRQDTGHGLRLIHY

SEQ ID NO: 5988 - protein, 17 aa, synthetic construct
LFWYVQYPRQGLQLLLK

SEQ ID NO: 5989 - protein, 17 aa, synthetic construct
MYWYRQDTGHGLRLIHY

SEQ ID NO: 5990 - protein, 17 aa, synthetic construct
FPWYKQEAGKSLHFVID

SEQ ID NO: 5991 - protein, 17 aa, synthetic construct
MYWYRQDTGHGLRLIHY

SEQ ID NO: 5992 - protein, 17 aa, synthetic construct
MQWFYQRPGGSLVSLFY

SEQ ID NO: 5993 - protein, 17 aa, synthetic construct
MYWYRQSAKKPLEFMFS

SEQ ID NO: 5994 - protein, 17 aa, synthetic construct
FPWYKQEAGKGLHFVID

SEQ ID NO: 5995 - protein, 17 aa, synthetic construct
MYWYRQDTGHGLRLIHY

SEQ ID NO: 5996 - protein, 17 aa, synthetic construct
LFWYVRYPGEGLQLLLK

SEQ ID NO: 5997 - protein, 17 aa, synthetic construct
MYWYRQDTGHGLRLIHY

SEQ ID NO: 5998 - protein, 17 aa, synthetic construct
LFWYVQHLNEAPKLLLK

SEQ ID NO: 5999 - protein, 17 aa, synthetic construct
LYWYWQATGGTLQQLFY

SEQ ID NO: 6000 - protein, 17 aa, synthetic construct
FWWYRQHSGEGPKALMS

SEQ ID NO: 6001 - protein, 17 aa, synthetic construct
MYWYRQDSGKGLRLIYY

SEQ ID NO: 6002 - protein, 17 aa, synthetic construct
LFWYKQTASGEIVFLIR

SEQ ID NO: 6003 - protein, 17 aa, synthetic construct
LYWYQQPRDQGPQLLVY

SEQ ID NO: 6004 - protein, 17 aa, synthetic construct
FPWYQQFPGEGPALLIS

SEQ ID NO: 6005 - protein, 17 aa, synthetic construct
MYWYRQSAKKPLEFMFS

SEQ ID NO: 6006 - protein, 17 aa, synthetic construct
LFWYVQHLNEAPKLLLK

SEQ ID NO: 6007 - protein, 17 aa, synthetic construct
MYWYRQDTGHGLRLIHY

SEQ ID NO: 6008 - protein, 17 aa, synthetic construct
LFWYVQHLNEAPKLLLK

SEQ ID NO: 6009 - protein, 17 aa, synthetic construct
LYWYWQATGGTLQQLFY

SEQ ID NO: 6010 - protein, 17 aa, synthetic construct
LFWYVQYPRQGLQMLLK

SEQ ID NO: 6011 - protein, 17 aa, synthetic construct
MSWYQQDLQKQLQWLFT

SEQ ID NO: 6012 - protein, 17 aa, synthetic construct
FWWYRQHSGKAPKALMS

SEQ ID NO: 6013 - protein, 17 aa, synthetic construct
MSWYQQDLQKQLQWLFT

SEQ ID NO: 6014 - protein, 17 aa, synthetic construct
FAWYKKYPDNSPTLLIS

SEQ ID NO: 6015 - protein, 17 aa, synthetic construct
VAWYRQSPQKTFELIAL

SEQ ID NO: 6016 - protein, 17 aa, synthetic construct
VHWYRQDSGRGPALIIL

SEQ ID NO: 6017 - protein, 17 aa, synthetic construct
MYWYRQSAKKPLEFMFS

SEQ ID NO: 6018 - protein, 17 aa, synthetic construct
LFWYKQTASGEIVFLIR

SEQ ID NO: 6019 - protein, 17 aa, synthetic construct
MYWYRQDTGHGLRLIHY

SEQ ID NO: 6020 - protein, 17 aa, synthetic construct
FPWYQQFPGEGPALLIA

SEQ ID NO: 6021 - protein, 17 aa, synthetic construct
MYWYRQDSGKGLRLIYY

SEQ ID NO: 6022 - protein, 17 aa, synthetic construct
LFWYVQYPRQGLQLLLK

SEQ ID NO: 6023 - protein, 17 aa, synthetic construct
MYWYRQDTGHGLRLIHY

SEQ ID NO: 6024 - protein, 17 aa, synthetic construct
LFWYKQTASGEIVFLIR

SEQ ID NO: 6025 - protein, 17 aa, synthetic construct
MYWYRQDTGHGLRLIHY

SEQ ID NO: 6026 - protein, 17 aa, synthetic construct
FSWYKQEAGAGLQLLMS

SEQ ID NO: 6027 - protein, 17 aa, synthetic construct
FYWYKQILGQQMEFLVN

SEQ ID NO: 6028 - protein, 17 aa, synthetic construct
FRWYRQHSAKGLEVLVS

SEQ ID NO: 6029 - protein, 17 aa, synthetic construct
MSWYQQDLQKQLQWLFT

SEQ ID NO: 6030 - protein, 17 aa, synthetic construct
LQWFYQHPGGRLVSLFY

SEQ ID NO: 6031 - protein, 17 aa, synthetic construct
MYWYKQSAEKPPELMFL

SEQ ID NO: 6032 - protein, 17 aa, synthetic construct
IWWYQQHPGKGPEALIS

SEQ ID NO: 6033 - protein, 17 aa, synthetic construct
MYWYKQSAEKPPELMFL

SEQ ID NO: 6034 - protein, 17 aa, synthetic construct
LFWYVQHLNEAPKLLLK

SEQ ID NO: 6035 - protein, 17 aa, synthetic construct
MYWYKQDSKKLLKIMFS

SEQ ID NO: 6036 - protein, 17 aa, synthetic construct
FYWYKQEPGAGLQLLMS

SEQ ID NO: 6037 - protein, 17 aa, synthetic construct
MYWYRQDTGHGLRLIHY

SEQ ID NO: 6038 - protein, 17 aa, synthetic construct
FFWYKQEPGASLQLLMK

SEQ ID NO: 6039 - protein, 17 aa, synthetic construct
MYWYRQDTGHGLRLIHY

SEQ ID NO: 6040 - protein, 17 aa, synthetic construct
IYWYRQVPLQGPEYVTH

SEQ ID NO: 6041 - protein, 17 aa, synthetic construct
MYWYKQSAEKPPELMFL

SEQ ID NO: 6042 - protein, 17 aa, synthetic construct
IYWYRQVPHQGPQFIIQ

SEQ ID NO: 6043 - protein, 17 aa, synthetic construct
MYWYRQSAKKPLEFMFS

SEQ ID NO: 6044 - protein, 17 aa, synthetic construct
FFWYKQEPGAGLQLLMK

SEQ ID NO: 6045 - protein, 17 aa, synthetic construct
MYWYRQDTGHGLRLIHY

SEQ ID NO: 6046 - protein, 17 aa, synthetic construct
LSWYIQHHGRGLQFLLK

SEQ ID NO: 6047 - protein, 17 aa, synthetic construct
MYWYRQDTGHGLRLIHY

SEQ ID NO: 6048 - protein, 17 aa, synthetic construct
VQWFRKNSRGSLINLFY

SEQ ID NO: 6049 - protein, 17 aa, synthetic construct
MYWYKQSAEKPPELMFL

SEQ ID NO: 6050 - protein, 17 aa, synthetic construct
LFWYVQYPGEGPQFLFR

SEQ ID NO: 6051 - protein, 17 aa, synthetic construct
MYWYRQDTGHGLRLIHY

SEQ ID NO: 6052 - protein, 17 aa, synthetic construct
FFWYVQYLNEAPQVLLK

SEQ ID NO: 6053 - protein, 17 aa, synthetic construct
MYWYRQDTGHGLRLIHY

SEQ ID NO: 6054 - protein, 17 aa, synthetic construct
LFWYKQTASGEIVFLIR

SEQ ID NO: 6055 - protein, 17 aa, synthetic construct
MYWYRQDTGHGLRLIHY

SEQ ID NO: 6056 - protein, 17 aa, synthetic construct
MQWFYQRPGGRLVSLLY

SEQ ID NO: 6057 - protein, 17 aa, synthetic construct
FYWYKQILGQQMEFLVN

SEQ ID NO: 6058 - protein, 17 aa, synthetic construct
LFWYVQYPRQGLQLLLK

SEQ ID NO: 6059 - protein, 17 aa, synthetic construct
LYWYQQPRDQGPQLLVY

SEQ ID NO: 6060 - protein, 17 aa, synthetic construct
FPWYQQFPGEGPALLIS

SEQ ID NO: 6061 - protein, 17 aa, synthetic construct
MYWYKQDSKKLLKIMFS

SEQ ID NO: 6062 - protein, 17 aa, synthetic construct
MQWFYQRPGGSLVSLFY

SEQ ID NO: 6063 - protein, 17 aa, synthetic construct
MYWYRQDTGHGLRLIHY

SEQ ID NO: 6064 - protein, 17 aa, synthetic construct
LFWYVQYPRQGLQLLLK

SEQ ID NO: 6065 - protein, 17 aa, synthetic construct
MYWYRQDTGHGLRLIHY

SEQ ID NO: 6066 - protein, 17 aa, synthetic construct
LFWYVRYPGEGLQLLLK

SEQ ID NO: 6067 - protein, 17 aa, synthetic construct
MYWYRQDTGHGLRLIHY

SEQ ID NO: 6068 - protein, 17 aa, synthetic construct
FWWYRQHSGEGPKALMS

SEQ ID NO: 6069 - protein, 17 aa, synthetic construct
MYWYRQDTGHGLRLIHY

SEQ ID NO: 6070 - protein, 17 aa, synthetic construct
LFWYVRYPGEGLQLLLK

SEQ ID NO: 6071 - protein, 17 aa, synthetic construct
MYWYRQDTGHGLRLIHY

SEQ ID NO: 6072 - protein, 17 aa, synthetic construct
FWWYRQHSGKAPKALMS

SEQ ID NO: 6073 - protein, 17 aa, synthetic construct
MYWYRQDTGHGLRLIHY

SEQ ID NO: 6074 - protein, 17 aa, synthetic construct
LFWYVQHLNEAPKLLLK

SEQ ID NO: 6075 - protein, 17 aa, synthetic construct
LYWYWQATGGTLQQLFY

SEQ ID NO: 6076 - protein, 17 aa, synthetic construct
MQWFYQRPGGSLVSLFY

SEQ ID NO: 6077 - protein, 17 aa, synthetic construct
LYWYWQATGGTLQQLFY

SEQ ID NO: 6078 - protein, 17 aa, synthetic construct
FWWYRQHSGEGPKALMS

SEQ ID NO: 6079 - protein, 17 aa, synthetic construct
FYWYKQILGQQMEFLVN

SEQ ID NO: 6080 - protein, 17 aa, synthetic construct
LFWYVQYPRQGLQLLLK

SEQ ID NO: 6081 - protein, 17 aa, synthetic construct
VAWYRQSPQKTFELIAL

SEQ ID NO: 6082 - protein, 17 aa, synthetic construct
LSWYIQHHGRGLQFLLK

SEQ ID NO: 6083 - protein, 17 aa, synthetic construct
MYWYRQDSGKGLRLIYY

SEQ ID NO: 6084 - protein, 17 aa, synthetic construct
FPWYKQEAGKGLHFVID

SEQ ID NO: 6085 - protein, 17 aa, synthetic construct
MYWYRQDSGKGLRLIYY

SEQ ID NO: 6086 - protein, 17 aa, synthetic construct
LFWYVQYPGEGPQLLLK

SEQ ID NO: 6087 - protein, 17 aa, synthetic construct
MYWYRQDSGKGLRLIYY

SEQ ID NO: 6088 - protein, 17 aa, synthetic construct
FYWYKQEPGAGLQLLMS

SEQ ID NO: 6089 - protein, 17 aa, synthetic construct
MYWYRQDSGKGLRLIYY

SEQ ID NO: 6090 - protein, 17 aa, synthetic construct
VHWYRQDSGRGPALIIL

SEQ ID NO: 6091 - protein, 17 aa, synthetic construct
MYWYKQSAEKPPELMFL

SEQ ID NO: 6092 - protein, 17 aa, synthetic construct
MQWFYQRPGGSLVSLFY

SEQ ID NO: 6093 - protein, 17 aa, synthetic construct
MYWYKQSAEKPPELMFL

SEQ ID NO: 6094 - protein, 17 aa, synthetic construct
VQWYRQKSGKGPALIIL

SEQ ID NO: 6095 - protein, 17 aa, synthetic construct
LYWYQQPRDQGPQLLVY

SEQ ID NO: 6096 - protein, 17 aa, synthetic construct
FPWYKQEPGKRLQFIID

SEQ ID NO: 6097 - protein, 17 aa, synthetic construct
LYWYQQPRDQGPQLLVY

SEQ ID NO: 6098 - protein, 17 aa, synthetic construct
FWWYRQHSGEGPKALMS

SEQ ID NO: 6099 - protein, 17 aa, synthetic construct
MYWYRQDPGLGLQLIYI

SEQ ID NO: 6100 - protein, 17 aa, synthetic construct
FPWYKQEAGKGLHFVID

SEQ ID NO: 6101 - protein, 17 aa, synthetic construct
MYWYKQDSKKLLKIMFS

SEQ ID NO: 6102 - protein, 17 aa, synthetic construct
VQWFYQRPGGRLVSLLY

SEQ ID NO: 6103 - protein, 17 aa, synthetic construct
MYWYRQDTGHGLRLIHY

SEQ ID NO: 6104 - protein, 17 aa, synthetic construct
LFWYKQTASGEIVFLIR

SEQ ID NO: 6105 - protein, 17 aa, synthetic construct
MYWYRQDTGHGLRLIHY

SEQ ID NO: 6106 - protein, 17 aa, synthetic construct
FPWYKQEPGENPKLIID

SEQ ID NO: 6107 - protein, 17 aa, synthetic construct
MYWYRQDTGHGLRLIHY

SEQ ID NO: 6108 - protein, 17 aa, synthetic construct
FPWYKQEPGENPKLIID

SEQ ID NO: 6109 - protein, 17 aa, synthetic construct
MYWYRQDTGHGLRLIHY

SEQ ID NO: 6110 - protein, 17 aa, synthetic construct
FYWYKQEPGAGLQLLMS

SEQ ID NO: 6111 - protein, 17 aa, synthetic construct
MYWYRQDTGHGLRLIHY

SEQ ID NO: 6112 - protein, 17 aa, synthetic construct
LFWYKQTASGEIVFLIR

SEQ ID NO: 6113 - protein, 17 aa, synthetic construct
MYWYRQDTGHGLRLIHY

SEQ ID NO: 6114 - protein, 17 aa, synthetic construct
FPWYKQEPGENPKLIID

SEQ ID NO: 6115 - protein, 17 aa, synthetic construct
MYWYRQDTGHGLRLIHY

SEQ ID NO: 6116 - protein, 17 aa, synthetic construct
LFWYVRYPGEGLQLLLK

SEQ ID NO: 6117 - protein, 17 aa, synthetic construct
MYWYRQDTGHGLRLIHY

SEQ ID NO: 6118 - protein, 17 aa, synthetic construct
FPWYKQEPGENPKLIID

SEQ ID NO: 6119 - protein, 17 aa, synthetic construct
LYWYWQATGGTLQQLFY

SEQ ID NO: 6120 - protein, 17 aa, synthetic construct
FWWYRQHSGEGPKALMS

SEQ ID NO: 6121 - protein, 17 aa, synthetic construct
VAWYRQSPQKTFELIAL

SEQ ID NO: 6122 - protein, 17 aa, synthetic construct
LFWYKQTASGEIVFLIR

SEQ ID NO: 6123 - protein, 17 aa, synthetic construct
MYWYRQDSGKGLRLIYY

SEQ ID NO: 6124 - protein, 17 aa, synthetic construct
LQWYRQKSGKGPAQLIL

SEQ ID NO: 6125 - protein, 17 aa, synthetic construct
MYWYRQDSGKGLRLIYY

SEQ ID NO: 6126 - protein, 17 aa, synthetic construct
LQWYRQKSGEGPAQLIL

SEQ ID NO: 6127 - protein, 17 aa, synthetic construct
MSWYQQDLQKQLQWLFT

SEQ ID NO: 6128 - protein, 17 aa, synthetic construct
LFWYVQYPRQGLQLLLK

SEQ ID NO: 6129 - protein, 17 aa, synthetic construct
MYWYKQSAEKPPELMFL

SEQ ID NO: 6130 - protein, 17 aa, synthetic construct
LFWYVQYPGEGPQLLFR

SEQ ID NO: 6131 - protein, 17 aa, synthetic construct
LYWYQQPRDQGPQLLVY

SEQ ID NO: 6132 - protein, 17 aa, synthetic construct
VQWFYQRPGGRLIGLSY

SEQ ID NO: 6133 - protein, 17 aa, synthetic construct
LYWYQQPRDQGPQLLVY

SEQ ID NO: 6134 - protein, 17 aa, synthetic construct
VQWFRKNSRGSLINLFY

SEQ ID NO: 6135 - protein, 17 aa, synthetic construct
MYWYRQSAKKPLEFMFS

SEQ ID NO: 6136 - protein, 17 aa, synthetic construct
VQWFYQRPGGRLIGLSY

SEQ ID NO: 6137 - protein, 17 aa, synthetic construct
MYWYKQDSKKLLKIMFS

SEQ ID NO: 6138 - protein, 17 aa, synthetic construct
MQWFYQRPGGSLVSLFY

SEQ ID NO: 6139 - protein, 17 aa, synthetic construct
MYWYKQDSKKLLKIMFS

SEQ ID NO: 6140 - protein, 17 aa, synthetic construct
VQWFRQNSRGSLINLFY

SEQ ID NO: 6141 - protein, 17 aa, synthetic construct
MYWYRQDTGHGLRLIHY

SEQ ID NO: 6142 - protein, 17 aa, synthetic construct
LFWYKQTASGEIVFLIR

SEQ ID NO: 6143 - protein, 17 aa, synthetic construct
MYWYRQDTGHGLRLIHY

SEQ ID NO: 6144 - protein, 17 aa, synthetic construct
LFWYVHYLNESPRLLLK

SEQ ID NO: 6145 - protein, 17 aa, synthetic construct
MYWYRQDTGHGLRLIHY

SEQ ID NO: 6146 - protein, 17 aa, synthetic construct
LSWYQQREGHAPVFLSY

SEQ ID NO: 6147 - protein, 17 aa, synthetic construct
MYWYRQDTGHGLRLIHY

SEQ ID NO: 6148 - protein, 17 aa, synthetic construct
LFWYVRYPGEGLQLLLK

SEQ ID NO: 6149 - protein, 17 aa, synthetic construct
MYWYRQDTGHGLRLIHY

SEQ ID NO: 6150 - protein, 17 aa, synthetic construct
FAWYRQHSGKAPKALMS

SEQ ID NO: 6151 - protein, 17 aa, synthetic construct
MYWYRQDTGHGLRLIHY

SEQ ID NO: 6152 - protein, 17 aa, synthetic construct
LFWYVQYPRQGLQLLLK

SEQ ID NO: 6153 - protein, 17 aa, synthetic construct
MYWYRQDTGHGLRLIHY

SEQ ID NO: 6154 - protein, 17 aa, synthetic construct
LFWYVRYPGEGLQLLLK

SEQ ID NO: 6155 - protein, 17 aa, synthetic construct
LYWYWQATGGTLQQLFY

SEQ ID NO: 6156 - protein, 17 aa, synthetic construct
LFWYKQTASGEIVFLIR

SEQ ID NO: 6157 - protein, 17 aa, synthetic construct
VAWYRQSPQKTFELIAL

SEQ ID NO: 6158 - protein, 17 aa, synthetic construct
LFWYVQYPGEGPQFLFR

SEQ ID NO: 6159 - protein, 17 aa, synthetic construct
MYWYRQDSGKGLRLIYY

SEQ ID NO: 6160 - protein, 17 aa, synthetic construct
FFWYKQEPGASLQLLMK

SEQ ID NO: 6161 - protein, 17 aa, synthetic construct
MSWYQQDLQKQLQWLFT

SEQ ID NO: 6162 - protein, 17 aa, synthetic construct
FPWYQQFPGEGPALLIS

SEQ ID NO: 6163 - protein, 17 aa, synthetic construct
MSWYQQDLQKQLQWLFT

SEQ ID NO: 6164 - protein, 17 aa, synthetic construct
LFWYVRYPGEGLQLLLK

SEQ ID NO: 6165 - protein, 17 aa, synthetic construct
MSWYQQDLQKQLQWLFT

SEQ ID NO: 6166 - protein, 17 aa, synthetic construct
LFWYKQTASGEIVFLIR

SEQ ID NO: 6167 - protein, 17 aa, synthetic construct
MSWYQQDLQKQLQWLFT

SEQ ID NO: 6168 - protein, 17 aa, synthetic construct
FWWYRQHSGKSPKMLMS

SEQ ID NO: 6169 - protein, 17 aa, synthetic construct
MYWYKQSAEKPPELMFL

SEQ ID NO: 6170 - protein, 17 aa, synthetic construct
VQWFYQRPGGRLVSLLY

SEQ ID NO: 6171 - protein, 17 aa, synthetic construct
MYWYKQSAEKPPELMFL

SEQ ID NO: 6172 - protein, 17 aa, synthetic construct
LFWYVRYPGEGLQLLLK

SEQ ID NO: 6173 - protein, 17 aa, synthetic construct
MYWYKQSAEKPPELMFL

SEQ ID NO: 6174 - protein, 17 aa, synthetic construct
FPWYQQFPGEGPALLIS

SEQ ID NO: 6175 - protein, 17 aa, synthetic construct
VFWYRQTIVQGLEFLTY

SEQ ID NO: 6176 - protein, 17 aa, synthetic construct
FPWYRLFPGESPALLIA

SEQ ID NO: 6177 - protein, 17 aa, synthetic construct
VAWYQQTQGQELKFFIQ

SEQ ID NO: 6178 - protein, 17 aa, synthetic construct
LFWYVQYPRQGLQLLLK

SEQ ID NO: 6179 - protein, 17 aa, synthetic construct
LYWYQQPRDQGPQLLVY

SEQ ID NO: 6180 - protein, 17 aa, synthetic construct
LFWYVQHLNEAPKLLLK

SEQ ID NO: 6181 - protein, 17 aa, synthetic construct
LYWYQQPRDQGPQLLVY

SEQ ID NO: 6182 - protein, 17 aa, synthetic construct
LFWYVRYPGEGLQLLLK

SEQ ID NO: 6183 - protein, 17 aa, synthetic construct
LYWYQQPRDQGPQLLVY

SEQ ID NO: 6184 - protein, 17 aa, synthetic construct
FAWYKKYPDNSPTLLIS

SEQ ID NO: 6185 - protein, 17 aa, synthetic construct
MYWYRQSAKKPLEFMFS

SEQ ID NO: 6186 - protein, 17 aa, synthetic construct
LFWYVQYPRQGLQLLLK

SEQ ID NO: 6187 - protein, 17 aa, synthetic construct
MYWYRQSAKKPLEFMFS

SEQ ID NO: 6188 - protein, 17 aa, synthetic construct
LFWYVQYPGEGPQLLLK

SEQ ID NO: 6189 - protein, 17 aa, synthetic construct
MYWYRQSAKKPLEFMFS

SEQ ID NO: 6190 - protein, 17 aa, synthetic construct
LFWYVQYPGEGPQLLLK

SEQ ID NO: 6191 - protein, 17 aa, synthetic construct
MYWYKQDSKKLLKIMFS

SEQ ID NO: 6192 - protein, 17 aa, synthetic construct
MQWFYQRPEGSLVSLFY

SEQ ID NO: 6193 - protein, 17 aa, synthetic construct
MYWYKQDSKKLLKIMFS

SEQ ID NO: 6194 - protein, 17 aa, synthetic construct
VQWFLQNPRGSLMNLFY

SEQ ID NO: 6195 - protein, 17 aa, synthetic construct
MYWYKQDSKKLLKIMFS

SEQ ID NO: 6196 - protein, 17 aa, synthetic construct
LFWYKQTASGEIVFLIR

SEQ ID NO: 6197 - protein, 17 aa, synthetic construct
MYWYRQDTGHGLRLIHY

SEQ ID NO: 6198 - protein, 17 aa, synthetic construct
FAWYRQHSGKAPKALMS

SEQ ID NO: 6199 - protein, 17 aa, synthetic construct
MYWYRQDTGHGLRLIHY

SEQ ID NO: 6200 - protein, 17 aa, synthetic construct
LFWYVQHLNEAPKLLLK

SEQ ID NO: 6201 - protein, 17 aa, synthetic construct
MYWYRQDTGHGLRLIHY

SEQ ID NO: 6202 - protein, 17 aa, synthetic construct
LQWFYQHPGGRLVSLFY

SEQ ID NO: 6203 - protein, 17 aa, synthetic construct
MYWYRQDTGHGLRLIHY

SEQ ID NO: 6204 - protein, 17 aa, synthetic construct
FFWYKQEPGASLQLLMK

SEQ ID NO: 6205 - protein, 17 aa, synthetic construct
MYWYRQDTGHGLRLIHY

SEQ ID NO: 6206 - protein, 17 aa, synthetic construct
LFWYKQTASGEIVFLIR

SEQ ID NO: 6207 - protein, 17 aa, synthetic construct
MYWYRQDTGHGLRLIHY

SEQ ID NO: 6208 - protein, 17 aa, synthetic construct
FFWYKQEPGAGLQLLMK

SEQ ID NO: 6209 - protein, 17 aa, synthetic construct
MYWYRQDTGHGLRLIHY

SEQ ID NO: 6210 - protein, 17 aa, synthetic construct
FSWYKQEAGAGLQLLMS

SEQ ID NO: 6211 - protein, 17 aa, synthetic construct
MYWYRQDTGHGLRLIHY

SEQ ID NO: 6212 - protein, 17 aa, synthetic construct
LFWYKQTASGEIVFLIR

SEQ ID NO: 6213 - protein, 17 aa, synthetic construct
MYWYRQDTGHGLRLIHY

SEQ ID NO: 6214 - protein, 17 aa, synthetic construct
FFWYKQEPGASLQLLMK

SEQ ID NO: 6215 - protein, 17 aa, synthetic construct
MYWYRQDTGHGLRLIHY

SEQ ID NO: 6216 - protein, 17 aa, synthetic construct
LFWYVQYPGQSLQFLLK

SEQ ID NO: 6217 - protein, 17 aa, synthetic construct
MYWYRQDTGHGLRLIHY

SEQ ID NO: 6218 - protein, 17 aa, synthetic construct
FPWYWQFPRESPALLIA

SEQ ID NO: 6219 - protein, 17 aa, synthetic construct
MYWYRQDTGHGLRLIHY

SEQ ID NO: 6220 - protein, 17 aa, synthetic construct
LFWYVQHLNEAPKLLLK

SEQ ID NO: 6221 - protein, 17 aa, synthetic construct
MYWYRQDTGHGLRLIHY

SEQ ID NO: 6222 - protein, 17 aa, synthetic construct
VQWFQQNSRGSLINLFY

SEQ ID NO: 6223 - protein, 17 aa, synthetic construct
MYWYRQDTGHGLRLIHY

SEQ ID NO: 6224 - protein, 17 aa, synthetic construct
VQWFQQNHRGRLITLFY

SEQ ID NO: 6225 - protein, 17 aa, synthetic construct
MYWYRQDTGHGLRLIHY

SEQ ID NO: 6226 - protein, 17 aa, synthetic construct
LFWYKQTASGEIVFLIR

SEQ ID NO: 6227 - protein, 17 aa, synthetic construct
MYWYRQDTGHGLRLIHY

SEQ ID NO: 6228 - protein, 17 aa, synthetic construct
LFWYVQYPRQGLQLLLK

SEQ ID NO: 6229 - protein, 17 aa, synthetic construct
MYWYRQDTGHGLRLIHY

SEQ ID NO: 6230 - protein, 17 aa, synthetic construct
FSWYKQEAGAGLQLLMS

SEQ ID NO: 6231 - protein, 17 aa, synthetic construct
MYWYRQDTGHGLRLIHY

SEQ ID NO: 6232 - protein, 17 aa, synthetic construct
FPWYQQFPGEGPALLIS

SEQ ID NO: 6233 - protein, 17 aa, synthetic construct
MYWYRQDTGHGLRLIHY

SEQ ID NO: 6234 - protein, 17 aa, synthetic construct
VQWFQQNHRGRLITLFY

SEQ ID NO: 6235 - protein, 17 aa, synthetic construct
MYWYQKKPNQAPKLLLF

SEQ ID NO: 6236 - protein, 17 aa, synthetic construct
LFWYKQTASGEIVFLIR

SEQ ID NO: 6237 - protein, 17 aa, synthetic construct
MYWYQKKPNQAPKLLLF

SEQ ID NO: 6238 - protein, 17 aa, synthetic construct
LFWYKQTASGEIVFLIR

SEQ ID NO: 6239 - protein, 17 aa, synthetic construct
LYWYWQATGGTLQQLFY

SEQ ID NO: 6240 - protein, 17 aa, synthetic construct
LFWYVQYPRQGLQLLLK

SEQ ID NO: 6241 - protein, 17 aa, synthetic construct
LYWYWQATGGTLQQLFY

SEQ ID NO: 6242 - protein, 17 aa, synthetic construct
IYWYRQVPHQGPQFIIQ

SEQ ID NO: 6243 - protein, 17 aa, synthetic construct
FYWYKQILGQQMEFLVN

SEQ ID NO: 6244 - protein, 17 aa, synthetic construct
FPWYQQFPGEGPALLIS

SEQ ID NO: 6245 - protein, 17 aa, synthetic construct
VAWYRQSPQKTFELIAL

SEQ ID NO: 6246 - protein, 17 aa, synthetic construct
IFWYRQLFSGEMVFLIY

SEQ ID NO: 6247 - protein, 17 aa, synthetic construct
VAWYRQSPQKTFELIAL

SEQ ID NO: 6248 - protein, 17 aa, synthetic construct
FPWYKQEAGKSLHFVID

SEQ ID NO: 6249 - protein, 17 aa, synthetic construct
MYWYRQDSGKGLRLIYY

SEQ ID NO: 6250 - protein, 17 aa, synthetic construct
VQWFLQNPRGSLMNLFY

SEQ ID NO: 6251 - protein, 17 aa, synthetic construct
MYWYRQDSGKGLRLIYY

SEQ ID NO: 6252 - protein, 17 aa, synthetic construct
FFWYKQEPGASLQLLMK

SEQ ID NO: 6253 - protein, 17 aa, synthetic construct
MSWYQQDLQKQLQWLFT

SEQ ID NO: 6254 - protein, 17 aa, synthetic construct
IFWYRQLFSGEMVFLIY

SEQ ID NO: 6255 - protein, 17 aa, synthetic construct
MSWYQQDLQKQLQWLFT

SEQ ID NO: 6256 - protein, 17 aa, synthetic construct
LFWYVQYPRQGLQLLLK

SEQ ID NO: 6257 - protein, 17 aa, synthetic construct
MSWYQQDLQKQLQWLFT

SEQ ID NO: 6258 - protein, 17 aa, synthetic construct
LQWFYQSPGGSLVSLLS

SEQ ID NO: 6259 - protein, 17 aa, synthetic construct
MYWYKQSAEKPPELMFL

SEQ ID NO: 6260 - protein, 17 aa, synthetic construct
FPWYKQEAGKGLHFVID

SEQ ID NO: 6261 - protein, 17 aa, synthetic construct
MYWYKQSAEKPPELMFL

SEQ ID NO: 6262 - protein, 17 aa, synthetic construct
LFWYVQHLNEAPKLLLK

SEQ ID NO: 6263 - protein, 17 aa, synthetic construct
MYWYKQSAEKPPELMFL

SEQ ID NO: 6264 - protein, 17 aa, synthetic construct
LFWYVRYPGEGLQLLLK

SEQ ID NO: 6265 - protein, 17 aa, synthetic construct
MYWYKQSAEKPPELMFL

SEQ ID NO: 6266 - protein, 17 aa, synthetic construct
LFWYVQHLNEAPKLLLK

SEQ ID NO: 6267 - protein, 17 aa, synthetic construct
MYWYKQSAEKPPELMFL

SEQ ID NO: 6268 - protein, 17 aa, synthetic construct
LFWYVQYPGEGPQLLFK

SEQ ID NO: 6269 - protein, 17 aa, synthetic construct
MYWYKQSAEKPPELMFL

SEQ ID NO: 6270 - protein, 17 aa, synthetic construct
LFWYVQYPGEGPQFLFR

SEQ ID NO: 6271 - protein, 17 aa, synthetic construct
VFWYRQTIVQGLEFLTY

SEQ ID NO: 6272 - protein, 17 aa, synthetic construct
LSWYIQHHGRGLQFLLK

SEQ ID NO: 6273 - protein, 17 aa, synthetic construct
VFWYRQTIVQGLEFLTY

SEQ ID NO: 6274 - protein, 17 aa, synthetic construct
LSWYQQREGHAPVFLSY

SEQ ID NO: 6275 - protein, 17 aa, synthetic construct
VFWYRQTIVQGLEFLTY

SEQ ID NO: 6276 - protein, 17 aa, synthetic construct
LFWYVQYPRQGLQLLLK

SEQ ID NO: 6277 - protein, 17 aa, synthetic construct
LYWYQQPRDQGPQLLVY

SEQ ID NO: 6278 - protein, 17 aa, synthetic construct
FPWYKQEAGKSLHFVID

SEQ ID NO: 6279 - protein, 17 aa, synthetic construct
LYWYQQPRDQGPQLLVY

SEQ ID NO: 6280 - protein, 17 aa, synthetic construct
IYWYRQVPLQGPEYVTH

SEQ ID NO: 6281 - protein, 17 aa, synthetic construct
LYWYQQPRDQGPQLLVY

SEQ ID NO: 6282 - protein, 17 aa, synthetic construct
FAWYRQHSGKAPKALMS

SEQ ID NO: 6283 - protein, 17 aa, synthetic construct
LYWYQQPRDQGPQLLVY

SEQ ID NO: 6284 - protein, 17 aa, synthetic construct
FPWYKQEAGKGLHFVID

SEQ ID NO: 6285 - protein, 17 aa, synthetic construct
MYWYRQDPGLGLQLIYI

SEQ ID NO: 6286 - protein, 17 aa, synthetic construct
LFWYKHLLSGEMVFLIR

SEQ ID NO: 6287 - protein, 17 aa, synthetic construct
MYWYRQSAKKPLEFMFS

SEQ ID NO: 6288 - protein, 17 aa, synthetic construct
LFWYVQYPGEGPQLLLK

SEQ ID NO: 6289 - protein, 17 aa, synthetic construct
MYWYRQSAKKPLEFMFS

SEQ ID NO: 6290 - protein, 17 aa, synthetic construct
LQWFYQSPGGSLVSLLS

SEQ ID NO: 6291 - protein, 17 aa, synthetic construct
MYWYRQSAKKPLEFMFS

SEQ ID NO: 6292 - protein, 17 aa, synthetic construct
LFWYVQYPRQGLQMLLK

SEQ ID NO: 6293 - protein, 17 aa, synthetic construct
MYWYRQSAKKPLEFMFS

SEQ ID NO: 6294 - protein, 17 aa, synthetic construct
LQWFYQRPGGSLVSLLY

SEQ ID NO: 6295 - protein, 17 aa, synthetic construct
MYWYRQSAKKPLEFMFS

SEQ ID NO: 6296 - protein, 17 aa, synthetic construct
MQWFYQRPEGSLVSLFY

SEQ ID NO: 6297 - protein, 17 aa, synthetic construct
MYWYRQSAKKPLEFMFS

SEQ ID NO: 6298 - protein, 17 aa, synthetic construct
LFWYVRYPGEGLQLLLK

SEQ ID NO: 6299 - protein, 17 aa, synthetic construct
MYWYKQDSKKLLKIMFS

SEQ ID NO: 6300 - protein, 17 aa, synthetic construct
LQWFYQSPGGSLVSLLS

SEQ ID NO: 6301 - protein, 17 aa, synthetic construct
MYWYKQDSKKLLKIMFS

SEQ ID NO: 6302 - protein, 17 aa, synthetic construct
FPWYKQEAGKSLHFVID

SEQ ID NO: 6303 - protein, 17 aa, synthetic construct
MYWYKQDSKKLLKIMFS

SEQ ID NO: 6304 - protein, 17 aa, synthetic construct
FFWYKQEPGAGLQLLMK

SEQ ID NO: 6305 - protein, 17 aa, synthetic construct
MYWYKQDSKKLLKIMFS

SEQ ID NO: 6306 - protein, 17 aa, synthetic construct
FPWYQQFPGEGPALLIA

SEQ ID NO: 6307 - protein, 17 aa, synthetic construct
MYWYKQDSKKLLKIMFS

SEQ ID NO: 6308 - protein, 17 aa, synthetic construct
MQWFYQRPGGSLVSLFY

SEQ ID NO: 6309 - protein, 17 aa, synthetic construct
MYWYKQDSKKLLKIMFS

SEQ ID NO: 6310 - protein, 17 aa, synthetic construct
FPWYQQFPGEGPALLIS

SEQ ID NO: 6311 - protein, 17 aa, synthetic construct
MYWYKQDSKKLLKIMFS

SEQ ID NO: 6312 - protein, 17 aa, synthetic construct
FAWYRQHSGKAPKALMS

SEQ ID NO: 6313 - protein, 17 aa, synthetic construct
MYWYKQDSKKLLKIMFS

SEQ ID NO: 6314 - protein, 17 aa, synthetic construct
FPWYKQEPGENPKLIID

SEQ ID NO: 6315 - protein, 17 aa, synthetic construct
MYWYKQDSKKLLKIMFS

SEQ ID NO: 6316 - protein, 17 aa, synthetic construct
LFWYKQTASGEIVFLIR

SEQ ID NO: 6317 - protein, 17 aa, synthetic construct
MYWYRQDTGHGLRLIHY

SEQ ID NO: 6318 - protein, 17 aa, synthetic construct
LFWYVQYPRQGLQLLLK

SEQ ID NO: 6319 - protein, 17 aa, synthetic construct
MYWYRQDTGHGLRLIHY

SEQ ID NO: 6320 - protein, 17 aa, synthetic construct
LFWYVQYPRQGLQLLLK

SEQ ID NO: 6321 - protein, 17 aa, synthetic construct
MYWYRQDTGHGLRLIHY

SEQ ID NO: 6322 - protein, 17 aa, synthetic construct
LFWYKQTASGEIVFLIR

SEQ ID NO: 6323 - protein, 17 aa, synthetic construct
MYWYRQDTGHGLRLIHY

SEQ ID NO: 6324 - protein, 17 aa, synthetic construct
LFWYKQTASGEIVFLIR

SEQ ID NO: 6325 - protein, 17 aa, synthetic construct
MYWYRQDTGHGLRLIHY

SEQ ID NO: 6326 - protein, 17 aa, synthetic construct
MQWFYQRPGGSLVSLFY

SEQ ID NO: 6327 - protein, 17 aa, synthetic construct
MYWYRQDTGHGLRLIHY

SEQ ID NO: 6328 - protein, 17 aa, synthetic construct
FPWYKQEAGKSLHFVID

SEQ ID NO: 6329 - protein, 17 aa, synthetic construct
MYWYRQDTGHGLRLIHY

SEQ ID NO: 6330 - protein, 17 aa, synthetic construct
IYWYRQVPLQGPEYVTH

SEQ ID NO: 6331 - protein, 17 aa, synthetic construct
MYWYRQDTGHGLRLIHY

SEQ ID NO: 6332 - protein, 17 aa, synthetic construct
LQWFYQRPGGSLVSLLY

SEQ ID NO: 6333 - protein, 17 aa, synthetic construct
MYWYRQDTGHGLRLIHY

SEQ ID NO: 6334 - protein, 17 aa, synthetic construct
LFWYVQYPGQSLQFLLK

SEQ ID NO: 6335 - protein, 17 aa, synthetic construct
MYWYRQDTGHGLRLIHY

SEQ ID NO: 6336 - protein, 17 aa, synthetic construct
LFWYKQTASGEIVFLIR

SEQ ID NO: 6337 - protein, 17 aa, synthetic construct
MYWYRQDTGHGLRLIHY

SEQ ID NO: 6338 - protein, 17 aa, synthetic construct
FPWYKQEPGKRLQFIID

SEQ ID NO: 6339 - protein, 17 aa, synthetic construct
MYWYRQDTGHGLRLIHY

SEQ ID NO: 6340 - protein, 17 aa, synthetic construct
VQWFLQNPRGSLMNLFY

SEQ ID NO: 6341 - protein, 17 aa, synthetic construct
MYWYRQDTGHGLRLIHY

SEQ ID NO: 6342 - protein, 17 aa, synthetic construct
FPWYQQFPGEGPALLIS

SEQ ID NO: 6343 - protein, 17 aa, synthetic construct
MYWYRQDTGHGLRLIHY

SEQ ID NO: 6344 - protein, 17 aa, synthetic construct
FFWYKQEPGAGLQLLMK

SEQ ID NO: 6345 - protein, 17 aa, synthetic construct
MYWYRQDTGHGLRLIHY

SEQ ID NO: 6346 - protein, 17 aa, synthetic construct
LFWYVQYPGEGPQLLLK

SEQ ID NO: 6347 - protein, 17 aa, synthetic construct
MYWYRQDTGHGLRLIHY

SEQ ID NO: 6348 - protein, 17 aa, synthetic construct
LSWYQQREGHAPVFLSY

SEQ ID NO: 6349 - protein, 17 aa, synthetic construct
MYWYRQDTGHGLRLIHY

SEQ ID NO: 6350 - protein, 17 aa, synthetic construct
FAWYRQHSGKAPKALMS

SEQ ID NO: 6351 - protein, 17 aa, synthetic construct
MYWYRQDTGHGLRLIHY

SEQ ID NO: 6352 - protein, 17 aa, synthetic construct
LFWYKQTASGEIVFLIR

SEQ ID NO: 6353 - protein, 17 aa, synthetic construct
MYWYRQDTGHGLRLIHY

SEQ ID NO: 6354 - protein, 17 aa, synthetic construct
FFWYKQEPGAGLQLLMK

SEQ ID NO: 6355 - protein, 17 aa, synthetic construct
MYWYRQDTGHGLRLIHY

SEQ ID NO: 6356 - protein, 17 aa, synthetic construct
LFWYVQYPRQGLQLLLK

SEQ ID NO: 6357 - protein, 17 aa, synthetic construct
MYWYRQDTGHGLRLIHY

SEQ ID NO: 6358 - protein, 17 aa, synthetic construct
FPWYQQFPGEGPALLIS

SEQ ID NO: 6359 - protein, 17 aa, synthetic construct
MYWYRQDTGHGLRLIHY

SEQ ID NO: 6360 - protein, 17 aa, synthetic construct
FAWYRQHSGKAPKALMS

SEQ ID NO: 6361 - protein, 17 aa, synthetic construct
MYWYRQDTGHGLRLIHY

SEQ ID NO: 6362 - protein, 17 aa, synthetic construct
LSWYQQREGHAPVFLSY

SEQ ID NO: 6363 - protein, 17 aa, synthetic construct
MYWYQKKPNQAPKLLLF

SEQ ID NO: 6364 - protein, 17 aa, synthetic construct
FAWYKKYPDNSPTLLIS

SEQ ID NO: 6365 - protein, 17 aa, synthetic construct
MYWYQKKPNQAPKLLLF

SEQ ID NO: 6366 - protein, 17 aa, synthetic construct
FSWYKQEAGAGLQLLMS

SEQ ID NO: 6367 - protein, 17 aa, synthetic construct
LYWYWQATGGTLQQLFY

SEQ ID NO: 6368 - protein, 17 aa, synthetic construct
FPWYQQFPGEGPALLIS

SEQ ID NO: 6369 - protein, 17 aa, synthetic construct
LYWYWQATGGTLQQLFY

SEQ ID NO: 6370 - protein, 17 aa, synthetic construct
FWYVQYPGEGPQLLFKV

SEQ ID NO: 6371 - protein, 17 aa, synthetic construct
LYWYWQATGGTLQQLFY

SEQ ID NO: 6372 - protein, 17 aa, synthetic construct
LFWYKHLLSGEMVFLIR

SEQ ID NO: 6373 - protein, 17 aa, synthetic construct
LYWYWQATGGTLQQLFY

SEQ ID NO: 6374 - protein, 17 aa, synthetic construct
FPWYKQEAGKSLHFVID

SEQ ID NO: 6375 - protein, 17 aa, synthetic construct
VAWYRQSPQKTFELIAL

SEQ ID NO: 6376 - protein, 17 aa, synthetic construct
FFWYKQEPGASLQLLMK

SEQ ID NO: 6377 - protein, 17 aa, synthetic construct
VAWYRQSPQKTFELIAL

SEQ ID NO: 6378 - protein, 17 aa, synthetic construct
FPWYKQEPGENPKLIID

SEQ ID NO: 6379 - protein, 17 aa, synthetic construct
MYWYRQDSGKGLRLIYY

SEQ ID NO: 6380 - protein, 17 aa, synthetic construct
LFWYVQYPGEGPQFLFR

SEQ ID NO: 6381 - protein, 17 aa, synthetic construct
MYWYRQDSGKGLRLIYY

SEQ ID NO: 6382 - protein, 17 aa, synthetic construct
FPWYKQEAGKSLHFVID

SEQ ID NO: 6383 - protein, 17 aa, synthetic construct
MYWYRQDSGKGLRLIYY

SEQ ID NO: 6384 - protein, 17 aa, synthetic construct
VQWFQQNSRGSLINLFY

SEQ ID NO: 6385 - protein, 17 aa, synthetic construct
MYWYRQDSGKGLRLIYY

SEQ ID NO: 6386 - protein, 17 aa, synthetic construct
FPWYHQFPGESPALLIA

SEQ ID NO: 6387 - protein, 17 aa, synthetic construct
MYWYRQDSGKGLRLIYY

SEQ ID NO: 6388 - protein, 17 aa, synthetic construct
LFWYVQYPGEGPQLLFR

SEQ ID NO: 6389 - protein, 17 aa, synthetic construct
MYWYRQDSGKGLRLIYY

SEQ ID NO: 6390 - protein, 17 aa, synthetic construct
FFWYKQEPGAGLQLLMK

SEQ ID NO: 6391 - protein, 17 aa, synthetic construct
MYWYRQDSGKGLRLIYY

SEQ ID NO: 6392 - protein, 17 aa, synthetic construct
LFWYVQYSGEGPQLLLQ

SEQ ID NO: 6393 - protein, 17 aa, synthetic construct
MYWYRQDSGKGLRLIYY

SEQ ID NO: 6394 - protein, 17 aa, synthetic construct
LFWYVRYPGEGLQLLLK

SEQ ID NO: 6395 - protein, 17 aa, synthetic construct
MYWYRQDSGKGLRLIYY

SEQ ID NO: 6396 - protein, 17 aa, synthetic construct
FFWYKQEPGAGLQLLMK

SEQ ID NO: 6397 - protein, 17 aa, synthetic construct
MYWYRQDSGKGLRLIYY

SEQ ID NO: 6398 - protein, 17 aa, synthetic construct
LFWYVQYPRQGLQLLLK

SEQ ID NO: 6399 - protein, 17 aa, synthetic construct
MYWYRQDSGKGLRLIYY

SEQ ID NO: 6400 - protein, 17 aa, synthetic construct
LFWYVQHLNEAPKLLLK

SEQ ID NO: 6401 - protein, 17 aa, synthetic construct
MYWYRQDSGKGLRLIYY

SEQ ID NO: 6402 - protein, 17 aa, synthetic construct
LFWYVQYPRQGLQLLLK

SEQ ID NO: 6403 - protein, 17 aa, synthetic construct
MYWYRQDSGKGLRLIYY

SEQ ID NO: 6404 - protein, 17 aa, synthetic construct
FPWYQQFPGEGPALLIS

SEQ ID NO: 6405 - protein, 17 aa, synthetic construct
MSWYQQDLQKQLQWLFT

SEQ ID NO: 6406 - protein, 17 aa, synthetic construct
LFWYVQYPRQGLQLLLK

SEQ ID NO: 6407 - protein, 17 aa, synthetic construct
MSWYQQDLQKQLQWLFT

SEQ ID NO: 6408 - protein, 17 aa, synthetic construct
LFWYKQTASGEIVFLIR

SEQ ID NO: 6409 - protein, 17 aa, synthetic construct
MSWYQQDLQKQLQWLFT

SEQ ID NO: 6410 - protein, 17 aa, synthetic construct
FWWYRQHSGEGPKALMS

SEQ ID NO: 6411 - protein, 17 aa, synthetic construct
MSWYQQDLQKQLQWLFT

SEQ ID NO: 6412 - protein, 17 aa, synthetic construct
VQWFLQNPRGSLMNLFY

SEQ ID NO: 6413 - protein, 17 aa, synthetic construct
MSWYQQDLQKQLQWLFT

SEQ ID NO: 6414 - protein, 17 aa, synthetic construct
LFWYVRYPGEGLQLLLK

SEQ ID NO: 6415 - protein, 17 aa, synthetic construct
MSWYQQDLQKQLQWLFT

SEQ ID NO: 6416 - protein, 17 aa, synthetic construct
FWWYRQHSGKAPKALMS

SEQ ID NO: 6417 - protein, 17 aa, synthetic construct
MSWYQQDLQKQLQWLFT

SEQ ID NO: 6418 - protein, 17 aa, synthetic construct
LFWYVQYPRQGLQLLLK

SEQ ID NO: 6419 - protein, 17 aa, synthetic construct
MYWYKQSAEKPPELMFL

SEQ ID NO: 6420 - protein, 17 aa, synthetic construct
IYWYRQVPLQGPEYVTH

SEQ ID NO: 6421 - protein, 17 aa, synthetic construct
MYWYKQSAEKPPELMFL

SEQ ID NO: 6422 - protein, 17 aa, synthetic construct
LFWYVQYPRQGLQLLLK

SEQ ID NO: 6423 - protein, 17 aa, synthetic construct
MYWYKQSAEKPPELMFL

SEQ ID NO: 6424 - protein, 17 aa, synthetic construct
FFWYKQEPGAGLQLLMK

SEQ ID NO: 6425 - protein, 17 aa, synthetic construct
MYWYKQSAEKPPELMFL

SEQ ID NO: 6426 - protein, 17 aa, synthetic construct
LFWYVRYPGEGLQLLLK

SEQ ID NO: 6427 - protein, 17 aa, synthetic construct
MYWYKQSAEKPPELMFL

SEQ ID NO: 6428 - protein, 17 aa, synthetic construct
LFWYVRYPGEGLQLLLK

SEQ ID NO: 6429 - protein, 17 aa, synthetic construct
MYWYKQSAEKPPELMFL

SEQ ID NO: 6430 - protein, 17 aa, synthetic construct
VQWFQQNSRGSLINLFY

SEQ ID NO: 6431 - protein, 17 aa, synthetic construct
MYWYKQSAEKPPELMFL

SEQ ID NO: 6432 - protein, 17 aa, synthetic construct
LSWYQQREGHAPVFLSY

SEQ ID NO: 6433 - protein, 17 aa, synthetic construct
MYWYKQSAEKPPELMFL

SEQ ID NO: 6434 - protein, 17 aa, synthetic construct
FWWYRQHSGKAPKALMS

SEQ ID NO: 6435 - protein, 17 aa, synthetic construct
MYWYKQSAEKPPELMFL

SEQ ID NO: 6436 - protein, 17 aa, synthetic construct
LFWYVRYPGEGLQLLLK

SEQ ID NO: 6437 - protein, 17 aa, synthetic construct
MYWYKQSAEKPPELMFL

SEQ ID NO: 6438 - protein, 17 aa, synthetic construct
LSWYIQHHGRGLQFLLK

SEQ ID NO: 6439 - protein, 17 aa, synthetic construct
MYWYKQSAEKPPELMFL

SEQ ID NO: 6440 - protein, 17 aa, synthetic construct
FAWYKKYPDNSPTLLIS

SEQ ID NO: 6441 - protein, 17 aa, synthetic construct
MYWYKQSAEKPPELMFL

SEQ ID NO: 6442 - protein, 17 aa, synthetic construct
LFWYKQTASGEIVFLIR

SEQ ID NO: 6443 - protein, 17 aa, synthetic construct
MYWYKQSAEKPPELMFL

SEQ ID NO: 6444 - protein, 17 aa, synthetic construct
LFWYVRYPGEGLQLLLK

SEQ ID NO: 6445 - protein, 17 aa, synthetic construct
MYWYKQSAEKPPELMFL

SEQ ID NO: 6446 - protein, 17 aa, synthetic construct
LFWYVQYPGQGPQLLLK

SEQ ID NO: 6447 - protein, 17 aa, synthetic construct
MYWYKQSAEKPPELMFL

SEQ ID NO: 6448 - protein, 17 aa, synthetic construct
LQWFYQSPGGSLVSLLS

SEQ ID NO: 6449 - protein, 17 aa, synthetic construct
MYWYKQSAEKPPELMFL

SEQ ID NO: 6450 - protein, 17 aa, synthetic construct
LFWYVQYPRQGLQLLLK

SEQ ID NO: 6451 - protein, 17 aa, synthetic construct
MYWYKQSAEKPPELMFL

SEQ ID NO: 6452 - protein, 17 aa, synthetic construct
LFWYVRYPGEGLQLLLK

SEQ ID NO: 6453 - protein, 17 aa, synthetic construct
MYWYKQSAEKPPELMFL

SEQ ID NO: 6454 - protein, 17 aa, synthetic construct
LFWYVQYPGEGPQFLFR

SEQ ID NO: 6455 - protein, 17 aa, synthetic construct
MYWYKQSAEKPPELMFL

SEQ ID NO: 6456 - protein, 17 aa, synthetic construct
LSWYQQREGHAPVFLSY

SEQ ID NO: 6457 - protein, 17 aa, synthetic construct
MYWYKQSAEKPPELMFL

SEQ ID NO: 6458 - protein, 17 aa, synthetic construct
LFWYKQTASGEIVFLIR

SEQ ID NO: 6459 - protein, 17 aa, synthetic construct
MYWYKQSAEKPPELMFL

SEQ ID NO: 6460 - protein, 17 aa, synthetic construct
FWWYRQHSGEGPKALMS

SEQ ID NO: 6461 - protein, 17 aa, synthetic construct
MYWYKQSAEKPPELMFL

SEQ ID NO: 6462 - protein, 17 aa, synthetic construct
FWWYRQHSGKAPKALMS

SEQ ID NO: 6463 - protein, 17 aa, synthetic construct
MYWYKQSAEKPPELMFL

SEQ ID NO: 6464 - protein, 17 aa, synthetic construct
MQWFYQRPGGSLVSVFY

SEQ ID NO: 6465 - protein, 17 aa, synthetic construct
MYWYKQSAEKPPELMFL

SEQ ID NO: 6466 - protein, 17 aa, synthetic construct
LRWFKQDTGKGLVSLTV

SEQ ID NO: 6467 - protein, 17 aa, synthetic construct
MYWYKQSAEKPPELMFL

SEQ ID NO: 6468 - protein, 17 aa, synthetic construct
FPWYQQFPGEGPALLIS

SEQ ID NO: 6469 - protein, 17 aa, synthetic construct
MYWYKQSAEKPPELMFL

SEQ ID NO: 6470 - protein, 17 aa, synthetic construct
LFWYVRYPGEGLQLLLK

SEQ ID NO: 6471 - protein, 17 aa, synthetic construct
MYWYKQSAEKPPELMFL

SEQ ID NO: 6472 - protein, 17 aa, synthetic construct
LFWYVQHLNEAPKLLLK

SEQ ID NO: 6473 - protein, 17 aa, synthetic construct
MYWYKQSAEKPPELMFL

SEQ ID NO: 6474 - protein, 17 aa, synthetic construct
FFWYKQEPGAGLQLLMK

SEQ ID NO: 6475 - protein, 17 aa, synthetic construct
MYWYKQSAEKPPELMFL

SEQ ID NO: 6476 - protein, 17 aa, synthetic construct
IYWYRQVPHQGPQFIIQ

SEQ ID NO: 6477 - protein, 17 aa, synthetic construct
MYWYKQSAEKPPELMFL

SEQ ID NO: 6478 - protein, 17 aa, synthetic construct
LFWYVQYPGQSLQFLLK

SEQ ID NO: 6479 - protein, 17 aa, synthetic construct
MYWYKQSAEKPPELMFL

SEQ ID NO: 6480 - protein, 17 aa, synthetic construct
FWWYRQHSGKSPKMLMS

SEQ ID NO: 6481 - protein, 17 aa, synthetic construct
MYWYKQSAEKPPELMFL

SEQ ID NO: 6482 - protein, 17 aa, synthetic construct
VQWFYQRPGGRLVSLLY

SEQ ID NO: 6483 - protein, 17 aa, synthetic construct
MYWYKQSAEKPPELMFL

SEQ ID NO: 6484 - protein, 17 aa, synthetic construct
LFWYVQYPRQGLQLLLK

SEQ ID NO: 6485 - protein, 17 aa, synthetic construct
MYWYKQSAEKPPELMFL

SEQ ID NO: 6486 - protein, 17 aa, synthetic construct
VQWFLQNPRGSLINLFY

SEQ ID NO: 6487 - protein, 17 aa, synthetic construct
MYWYKQSAEKPPELMFL

SEQ ID NO: 6488 - protein, 17 aa, synthetic construct
LFWYKQTASGEIVFLIR

SEQ ID NO: 6489 - protein, 17 aa, synthetic construct
VFWYRQTIVQGLEFLTY

SEQ ID NO: 6490 - protein, 17 aa, synthetic construct
LFWYVQYPRQGLQLLLK

SEQ ID NO: 6491 - protein, 17 aa, synthetic construct
VFWYRQTIVQGLEFLTY

SEQ ID NO: 6492 - protein, 17 aa, synthetic construct
LQWYRQKSGEGPAQLIL

SEQ ID NO: 6493 - protein, 17 aa, synthetic construct
VFWYRQTIVQGLEFLTY

SEQ ID NO: 6494 - protein, 17 aa, synthetic construct
LQWYRQKSGEGPAQLIL

SEQ ID NO: 6495 - protein, 17 aa, synthetic construct
VFWYRQTIVQGLEFLTY

SEQ ID NO: 6496 - protein, 17 aa, synthetic construct
LFWYVQYPRQGLQLLLK

SEQ ID NO: 6497 - protein, 17 aa, synthetic construct
VFWYRQTIVQGLEFLTY

SEQ ID NO: 6498 - protein, 17 aa, synthetic construct
FAWYRQHSGKAPKALMS

SEQ ID NO: 6499 - protein, 17 aa, synthetic construct
VFWYRQTIVQGLEFLTY

SEQ ID NO: 6500 - protein, 17 aa, synthetic construct
VQWFRQNSRGSLISLFY

SEQ ID NO: 6501 - protein, 17 aa, synthetic construct
VAWYQQTQGQELKFFIQ

SEQ ID NO: 6502 - protein, 17 aa, synthetic construct
MQWFYQRPGGSLVSLFY

SEQ ID NO: 6503 - protein, 17 aa, synthetic construct
MFWYQQFQEQSLMLMAT

SEQ ID NO: 6504 - protein, 17 aa, synthetic construct
LFWYVQYPRQGLQLLLK

SEQ ID NO: 6505 - protein, 17 aa, synthetic construct
MFWYQQFQEQSLMLMAT

SEQ ID NO: 6506 - protein, 17 aa, synthetic construct
FPWYKQEPGENPKLIID

SEQ ID NO: 6507 - protein, 17 aa, synthetic construct
MFWYQQFQEQSLMLMAT

SEQ ID NO: 6508 - protein, 17 aa, synthetic construct
FWWYRQHSGKAPKALMS

SEQ ID NO: 6509 - protein, 17 aa, synthetic construct
LYWYQQPRDQGPQLLVY

SEQ ID NO: 6510 - protein, 17 aa, synthetic construct
FWWYRQHSGEGPKALMS

SEQ ID NO: 6511 - protein, 17 aa, synthetic construct
LYWYQQPRDQGPQLLVY

SEQ ID NO: 6512 - protein, 17 aa, synthetic construct
LFWYKQTASGEIVFLIR

SEQ ID NO: 6513 - protein, 17 aa, synthetic construct
LYWYQQPRDQGPQLLVY

SEQ ID NO: 6514 - protein, 17 aa, synthetic construct
LFWYVQYPGEGPQFLFR

SEQ ID NO: 6515 - protein, 17 aa, synthetic construct
LYWYQQPRDQGPQLLVY

SEQ ID NO: 6516 - protein, 17 aa, synthetic construct
LFWYVQYPGEGPQLLFK

SEQ ID NO: 6517 - protein, 17 aa, synthetic construct
LYWYQQPRDQGPQLLVY

SEQ ID NO: 6518 - protein, 17 aa, synthetic construct
LSWYIQHHGHGLQFLLK

SEQ ID NO: 6519 - protein, 17 aa, synthetic construct
LYWYQQPRDQGPQLLVY

SEQ ID NO: 6520 - protein, 17 aa, synthetic construct
FAWYKKYPDNSPTLLIS

SEQ ID NO: 6521 - protein, 17 aa, synthetic construct
LYWYQQPRDQGPQLLVY

SEQ ID NO: 6522 - protein, 17 aa, synthetic construct
LFWYVQYPGEGPQFLFR

SEQ ID NO: 6523 - protein, 17 aa, synthetic construct
LYWYQQPRDQGPQLLVY

SEQ ID NO: 6524 - protein, 17 aa, synthetic construct
LFWYVQYPGEGPQLLFK

SEQ ID NO: 6525 - protein, 17 aa, synthetic construct
LYWYQQPRDQGPQLLVY

SEQ ID NO: 6526 - protein, 17 aa, synthetic construct
LFWYVQYPRQGLQLLLK

SEQ ID NO: 6527 - protein, 17 aa, synthetic construct
LYWYQQPRDQGPQLLVY

SEQ ID NO: 6528 - protein, 17 aa, synthetic construct
LFWYVQYPRQGLQLLLK

SEQ ID NO: 6529 - protein, 17 aa, synthetic construct
LYWYQQPRDQGPQLLVY

SEQ ID NO: 6530 - protein, 17 aa, synthetic construct
FAWYKKYPDNSPTLLIS

SEQ ID NO: 6531 - protein, 17 aa, synthetic construct
LYWYQQPRDQGPQLLVY

SEQ ID NO: 6532 - protein, 17 aa, synthetic construct
FWWYRQHSGEGPKALMS

SEQ ID NO: 6533 - protein, 17 aa, synthetic construct
LYWYQQPRDQGPQLLVY

SEQ ID NO: 6534 - protein, 17 aa, synthetic construct
FWWYRQHSGEGPKALMS

SEQ ID NO: 6535 - protein, 17 aa, synthetic construct
LYWYQQPRDQGPQLLVY

SEQ ID NO: 6536 - protein, 17 aa, synthetic construct
LFWYVRYPGEGLQLLLK

SEQ ID NO: 6537 - protein, 17 aa, synthetic construct
LYWYQQPRDQGPQLLVY

SEQ ID NO: 6538 - protein, 17 aa, synthetic construct
FPWYKQEPGENPKLIID

SEQ ID NO: 6539 - protein, 17 aa, synthetic construct
LYWYQQPRDQGPQLLVY

SEQ ID NO: 6540 - protein, 17 aa, synthetic construct
LQWFYQSPGGSLVSLLS

SEQ ID NO: 6541 - protein, 17 aa, synthetic construct
LYWYQQPRDQGPQLLVY

SEQ ID NO: 6542 - protein, 17 aa, synthetic construct
LFWYVQHLNEAPKLLLK

SEQ ID NO: 6543 - protein, 17 aa, synthetic construct
LYWYQQPRDQGPQLLVY

SEQ ID NO: 6544 - protein, 17 aa, synthetic construct
LFWYVRYPGEGLQLLLK

SEQ ID NO: 6545 - protein, 17 aa, synthetic construct
LYWYQQPRDQGPQLLVY

SEQ ID NO: 6546 - protein, 17 aa, synthetic construct
LFWYKQTASGEIVFLIR

SEQ ID NO: 6547 - protein, 17 aa, synthetic construct
LYWYQQPRDQGPQLLVY

SEQ ID NO: 6548 - protein, 17 aa, synthetic construct
LFWYKQTASGEIVFLIR

SEQ ID NO: 6549 - protein, 17 aa, synthetic construct
LYWYQQPRDQGPQLLVY

SEQ ID NO: 6550 - protein, 17 aa, synthetic construct
LQWYRQKSGKGPAQLIL

SEQ ID NO: 6551 - protein, 17 aa, synthetic construct
LYWYQQPRDQGPQLLVY

SEQ ID NO: 6552 - protein, 17 aa, synthetic construct
LFWYVQYPRQGLQLLLK

SEQ ID NO: 6553 - protein, 17 aa, synthetic construct
LYWYQQPRDQGPQLLVY

SEQ ID NO: 6554 - protein, 17 aa, synthetic construct
FPWYQQFPGEGPALLIA

SEQ ID NO: 6555 - protein, 17 aa, synthetic construct
LYWYQQPRDQGPQLLVY

SEQ ID NO: 6556 - protein, 17 aa, synthetic construct
VQWFRQNSRGSLINLFY

SEQ ID NO: 6557 - protein, 17 aa, synthetic construct
LYWYQQPRDQGPQLLVY

SEQ ID NO: 6558 - protein, 17 aa, synthetic construct
LFWYVQYPGEGPQFLFR

SEQ ID NO: 6559 - protein, 17 aa, synthetic construct
LYWYQQPRDQGPQLLVY

SEQ ID NO: 6560 - protein, 17 aa, synthetic construct
LFWYVQYPGEGPQLLFK

SEQ ID NO: 6561 - protein, 17 aa, synthetic construct
LYWYQQPRDQGPQLLVY

SEQ ID NO: 6562 - protein, 17 aa, synthetic construct
LFWYVQYPRQGLQLLLK

SEQ ID NO: 6563 - protein, 17 aa, synthetic construct
LYWYQQPRDQGPQLLVY

SEQ ID NO: 6564 - protein, 17 aa, synthetic construct
FPWYKQEPGENPKLIID

SEQ ID NO: 6565 - protein, 17 aa, synthetic construct
LYWYQQPRDQGPQLLVY

SEQ ID NO: 6566 - protein, 17 aa, synthetic construct
LSWYIQHHGHGLQFLLK

SEQ ID NO: 6567 - protein, 17 aa, synthetic construct
MYWYRQDPGLGLQLIYI

SEQ ID NO: 6568 - protein, 17 aa, synthetic construct
LFWYVRYPGEGLQLLLK

SEQ ID NO: 6569 - protein, 17 aa, synthetic construct
MYWYRQDPGLGLQLIYI

SEQ ID NO: 6570 - protein, 17 aa, synthetic construct
FAWYRQHSGKAPKALMS

SEQ ID NO: 6571 - protein, 17 aa, synthetic construct
MYWYRQDPGLGLQLIYI

SEQ ID NO: 6572 - protein, 17 aa, synthetic construct
LFWYVQYPRQGLQLLLK

SEQ ID NO: 6573 - protein, 17 aa, synthetic construct
MYWYRQDPGLGLQLIYI

SEQ ID NO: 6574 - protein, 17 aa, synthetic construct
LQWYRQKSGEGPAQLIL

SEQ ID NO: 6575 - protein, 17 aa, synthetic construct
MYWYRQDPGLGLQLIYI

SEQ ID NO: 6576 - protein, 17 aa, synthetic construct
LSWYQQREGHAPVFLSY

SEQ ID NO: 6577 - protein, 17 aa, synthetic construct
MYWYRQDPGLGLQLIYI

SEQ ID NO: 6578 - protein, 17 aa, synthetic construct
LFWYVHYLNESPRLLLK

SEQ ID NO: 6579 - protein, 17 aa, synthetic construct
MYWYRQDPGLGLQLIYI

SEQ ID NO: 6580 - protein, 17 aa, synthetic construct
LFWYVQYPGEGPQLLLK

SEQ ID NO: 6581 - protein, 17 aa, synthetic construct
MYWYRQSAKKPLEFMFS

SEQ ID NO: 6582 - protein, 17 aa, synthetic construct
LQWFYQHPGGRLVSLFY

SEQ ID NO: 6583 - protein, 17 aa, synthetic construct
MYWYRQSAKKPLEFMFS

SEQ ID NO: 6584 - protein, 17 aa, synthetic construct
FPWYQQFPGEGPALLIS

SEQ ID NO: 6585 - protein, 17 aa, synthetic construct
MYWYRQSAKKPLEFMFS

SEQ ID NO: 6586 - protein, 17 aa, synthetic construct
VQWYRQKSGKGPAQLIL

SEQ ID NO: 6587 - protein, 17 aa, synthetic construct
MYWYRQSAKKPLEFMFS

SEQ ID NO: 6588 - protein, 17 aa, synthetic construct
LFWYVQYPRQGLQLLLK

SEQ ID NO: 6589 - protein, 17 aa, synthetic construct
MYWYRQSAKKPLEFMFS

SEQ ID NO: 6590 - protein, 17 aa, synthetic construct
FWWYRQHSGKSPKMLMS

SEQ ID NO: 6591 - protein, 17 aa, synthetic construct
MYWYRQSAKKPLEFMFS

SEQ ID NO: 6592 - protein, 17 aa, synthetic construct
FRWYRQHSGKGLEVLVS

SEQ ID NO: 6593 - protein, 17 aa, synthetic construct
MYWYRQSAKKPLEFMFS

SEQ ID NO: 6594 - protein, 17 aa, synthetic construct
FWWYRQHSGEGPKALMS

SEQ ID NO: 6595 - protein, 17 aa, synthetic construct
MYWYRQSAKKPLEFMFS

SEQ ID NO: 6596 - protein, 17 aa, synthetic construct
LFWYKQTASGEIVFLIR

SEQ ID NO: 6597 - protein, 17 aa, synthetic construct
MYWYRQSAKKPLEFMFS

SEQ ID NO: 6598 - protein, 17 aa, synthetic construct
LFWYKQTASGEIVFLIR

SEQ ID NO: 6599 - protein, 17 aa, synthetic construct
MYWYRQSAKKPLEFMFS

SEQ ID NO: 6600 - protein, 17 aa, synthetic construct
LFWYVRYPGEGLQLLLK

SEQ ID NO: 6601 - protein, 17 aa, synthetic construct
MYWYRQSAKKPLEFMFS

SEQ ID NO: 6602 - protein, 17 aa, synthetic construct
LFWYVQYPGEGPQLLLK

SEQ ID NO: 6603 - protein, 17 aa, synthetic construct
MYWYRQSAKKPLEFMFS

SEQ ID NO: 6604 - protein, 17 aa, synthetic construct
LFWYVQYPGEGPQFLFR

SEQ ID NO: 6605 - protein, 17 aa, synthetic construct
MYWYRQSAKKPLEFMFS

SEQ ID NO: 6606 - protein, 17 aa, synthetic construct
FWWYRQHSGEGPKALMS

SEQ ID NO: 6607 - protein, 17 aa, synthetic construct
MYWYRQSAKKPLEFMFS

SEQ ID NO: 6608 - protein, 17 aa, synthetic construct
FPWYKQEAGKSLHFVID

SEQ ID NO: 6609 - protein, 17 aa, synthetic construct
MYWYRQSAKKPLEFMFS

SEQ ID NO: 6610 - protein, 17 aa, synthetic construct
LFWYKQTASGEIVFLIR

SEQ ID NO: 6611 - protein, 17 aa, synthetic construct
MYWYRQSAKKPLEFMFS

SEQ ID NO: 6612 - protein, 17 aa, synthetic construct
LFWYVQYPRQGLQLLLK

SEQ ID NO: 6613 - protein, 17 aa, synthetic construct
MYWYRQSAKKPLEFMFS

SEQ ID NO: 6614 - protein, 17 aa, synthetic construct
LQWYRQKSGEGPAQLIL

SEQ ID NO: 6615 - protein, 17 aa, synthetic construct
MYWYRQSAKKPLEFMFS

SEQ ID NO: 6616 - protein, 17 aa, synthetic construct
LQWFYQSPGGSLVSLLS

SEQ ID NO: 6617 - protein, 17 aa, synthetic construct
MYWYRQSAKKPLEFMFS

SEQ ID NO: 6618 - protein, 17 aa, synthetic construct
FFWYKQEPGAGLQLLMK

SEQ ID NO: 6619 - protein, 17 aa, synthetic construct
MYWYRQSAKKPLEFMFS

SEQ ID NO: 6620 - protein, 17 aa, synthetic construct
LFWYVQYPRQGLQMLLK

SEQ ID NO: 6621 - protein, 17 aa, synthetic construct
MYWYRQSAKKPLEFMFS

SEQ ID NO: 6622 - protein, 17 aa, synthetic construct
FAWYRQHSGKAPKALMS

SEQ ID NO: 6623 - protein, 17 aa, synthetic construct
MYWYRQSAKKPLEFMFS

SEQ ID NO: 6624 - protein, 17 aa, synthetic construct
FAWYKKYPDNSPTLLIS

SEQ ID NO: 6625 - protein, 17 aa, synthetic construct
MYWYRQSAKKPLEFMFS

SEQ ID NO: 6626 - protein, 17 aa, synthetic construct
MQWFYQRPEGSLVSLFY

SEQ ID NO: 6627 - protein, 17 aa, synthetic construct
MYWYRQSAKKPLEFMFS

SEQ ID NO: 6628 - protein, 17 aa, synthetic construct
FWWYRQHSGKSPKMLMS

SEQ ID NO: 6629 - protein, 17 aa, synthetic construct
MYWYRQSAKKPLEFMFS

SEQ ID NO: 6630 - protein, 17 aa, synthetic construct
LQWFYQRPGGSLVSLLY

SEQ ID NO: 6631 - protein, 17 aa, synthetic construct
MYWYRQSAKKPLEFMFS

SEQ ID NO: 6632 - protein, 17 aa, synthetic construct
FPWYKQEPGENPKLIID

SEQ ID NO: 6633 - protein, 17 aa, synthetic construct
MYWYRQSAKKPLEFMFS

SEQ ID NO: 6634 - protein, 17 aa, synthetic construct
LFWYVQYPGEGPQLLFK

SEQ ID NO: 6635 - protein, 17 aa, synthetic construct
MYWYRQSAKKPLEFMFS

SEQ ID NO: 6636 - protein, 17 aa, synthetic construct
IYWYRQVPHQGPQFIIQ

SEQ ID NO: 6637 - protein, 17 aa, synthetic construct
MYWYRQSAKKPLEFMFS

SEQ ID NO: 6638 - protein, 17 aa, synthetic construct
IYWYRQVPHQGPQFIIQ

SEQ ID NO: 6639 - protein, 17 aa, synthetic construct
MYWYRQSAKKPLEFMFS

SEQ ID NO: 6640 - protein, 17 aa, synthetic construct
FPWYKQEAGKGLHFVID

SEQ ID NO: 6641 - protein, 17 aa, synthetic construct
MYWYRQSAKKPLEFMFS

SEQ ID NO: 6642 - protein, 17 aa, synthetic construct
FPWYKQEAGKGLHFVID

SEQ ID NO: 6643 - protein, 17 aa, synthetic construct
MYWYRQSAKKPLEFMFS

SEQ ID NO: 6644 - protein, 17 aa, synthetic construct
FAWYKKYPDNSPTLLIS

SEQ ID NO: 6645 - protein, 17 aa, synthetic construct
MYWYRQSAKKPLEFMFS

SEQ ID NO: 6646 - protein, 17 aa, synthetic construct
FPWYKQEAGKGLHFVID

SEQ ID NO: 6647 - protein, 17 aa, synthetic construct
MYWYKQDSKKLLKIMFS

SEQ ID NO: 6648 - protein, 17 aa, synthetic construct
FWWYRQHSGKSPKMLMS

SEQ ID NO: 6649 - protein, 17 aa, synthetic construct
MYWYKQDSKKLLKIMFS

SEQ ID NO: 6650 - protein, 17 aa, synthetic construct
LFWYVRYPGEGLQLLLK

SEQ ID NO: 6651 - protein, 17 aa, synthetic construct
MYWYKQDSKKLLKIMFS

SEQ ID NO: 6652 - protein, 17 aa, synthetic construct
LFWYVQYPGEGPQLLLK

SEQ ID NO: 6653 - protein, 17 aa, synthetic construct
MYWYKQDSKKLLKIMFS

SEQ ID NO: 6654 - protein, 17 aa, synthetic construct
LFWYVHYLNESPRLLLK

SEQ ID NO: 6655 - protein, 17 aa, synthetic construct
MYWYKQDSKKLLKIMFS

SEQ ID NO: 6656 - protein, 17 aa, synthetic construct
LFWYKQTASGEIVFLIR

SEQ ID NO: 6657 - protein, 17 aa, synthetic construct
MYWYKQDSKKLLKIMFS

SEQ ID NO: 6658 - protein, 17 aa, synthetic construct
LQWFYQRPGGSLVSLLS

SEQ ID NO: 6659 - protein, 17 aa, synthetic construct
MYWYKQDSKKLLKIMFS

SEQ ID NO: 6660 - protein, 17 aa, synthetic construct
FWWYRQHSGEGPKALMS

SEQ ID NO: 6661 - protein, 17 aa, synthetic construct
MYWYKQDSKKLLKIMFS

SEQ ID NO: 6662 - protein, 17 aa, synthetic construct
LQWFYQHPGGRLVSLFY

SEQ ID NO: 6663 - protein, 17 aa, synthetic construct
MYWYKQDSKKLLKIMFS

SEQ ID NO: 6664 - protein, 17 aa, synthetic construct
LQWFYQRPGGSLVSLLY

SEQ ID NO: 6665 - protein, 17 aa, synthetic construct
MYWYKQDSKKLLKIMFS

SEQ ID NO: 6666 - protein, 17 aa, synthetic construct
VQWYRQKSGKGPALIIL

SEQ ID NO: 6667 - protein, 17 aa, synthetic construct
MYWYKQDSKKLLKIMFS

SEQ ID NO: 6668 - protein, 17 aa, synthetic construct
LFWYVQYPRQGLQLLLK

SEQ ID NO: 6669 - protein, 17 aa, synthetic construct
MYWYKQDSKKLLKIMFS

SEQ ID NO: 6670 - protein, 17 aa, synthetic construct
LFWYKQTASGEIVFLIR

SEQ ID NO: 6671 - protein, 17 aa, synthetic construct
MYWYKQDSKKLLKIMFS

SEQ ID NO: 6672 - protein, 17 aa, synthetic construct
LFWYKQTASGEIVFLIR

SEQ ID NO: 6673 - protein, 17 aa, synthetic construct
MYWYKQDSKKLLKIMFS

SEQ ID NO: 6674 - protein, 17 aa, synthetic construct
FPWYQQFPGEGPALLIS

SEQ ID NO: 6675 - protein, 17 aa, synthetic construct
MYWYKQDSKKLLKIMFS

SEQ ID NO: 6676 - protein, 17 aa, synthetic construct
LQWFYQRPGGSLVSLLY

SEQ ID NO: 6677 - protein, 17 aa, synthetic construct
MYWYKQDSKKLLKIMFS

SEQ ID NO: 6678 - protein, 17 aa, synthetic construct
FRWYRQHSAKGLEVLVS

SEQ ID NO: 6679 - protein, 17 aa, synthetic construct
MYWYKQDSKKLLKIMFS

SEQ ID NO: 6680 - protein, 17 aa, synthetic construct
VQWYRQKSGKGPALIIL

SEQ ID NO: 6681 - protein, 17 aa, synthetic construct
MYWYKQDSKKLLKIMFS

SEQ ID NO: 6682 - protein, 17 aa, synthetic construct
LFWYVQYPGEGPQLLFR

SEQ ID NO: 6683 - protein, 17 aa, synthetic construct
MYWYKQDSKKLLKIMFS

SEQ ID NO: 6684 - protein, 17 aa, synthetic construct
LFWYVQYPGEGPQLLFK

SEQ ID NO: 6685 - protein, 17 aa, synthetic construct
MYWYKQDSKKLLKIMFS

SEQ ID NO: 6686 - protein, 17 aa, synthetic construct
LFWYVRYPGEGLQLLLK

SEQ ID NO: 6687 - protein, 17 aa, synthetic construct
MYWYKQDSKKLLKIMFS

SEQ ID NO: 6688 - protein, 17 aa, synthetic construct
LFWYKQTASGEIVFLIR

SEQ ID NO: 6689 - protein, 17 aa, synthetic construct
MYWYKQDSKKLLKIMFS

SEQ ID NO: 6690 - protein, 17 aa, synthetic construct
LFWYVQHLNESPRLLLK

SEQ ID NO: 6691 - protein, 17 aa, synthetic construct
MYWYKQDSKKLLKIMFS

SEQ ID NO: 6692 - protein, 17 aa, synthetic construct
LFWYVQHLNEAPKLLLK

SEQ ID NO: 6693 - protein, 17 aa, synthetic construct
MYWYKQDSKKLLKIMFS

SEQ ID NO: 6694 - protein, 17 aa, synthetic construct
FWWYRQHSGEGPKALMS

SEQ ID NO: 6695 - protein, 17 aa, synthetic construct
MYWYKQDSKKLLKIMFS

SEQ ID NO: 6696 - protein, 17 aa, synthetic construct
FFWYKQEPGAGLQLLMK

SEQ ID NO: 6697 - protein, 17 aa, synthetic construct
MYWYKQDSKKLLKIMFS

SEQ ID NO: 6698 - protein, 17 aa, synthetic construct
FPWYKQEPGENPKLIID

SEQ ID NO: 6699 - protein, 17 aa, synthetic construct
MYWYRQDTGHGLRLIHY

SEQ ID NO: 6700 - protein, 17 aa, synthetic construct
LSWYQQREGQAPVFLSY

SEQ ID NO: 6701 - protein, 17 aa, synthetic construct
MYWYRQDTGHGLRLIHY

SEQ ID NO: 6702 - protein, 17 aa, synthetic construct
LFWYKQTASGEIVFLIR

SEQ ID NO: 6703 - protein, 17 aa, synthetic construct
MYWYRQDTGHGLRLIHY

SEQ ID NO: 6704 - protein, 17 aa, synthetic construct
LFWYVQHLNEAPKLLLK

SEQ ID NO: 6705 - protein, 17 aa, synthetic construct
MYWYRQDTGHGLRLIHY

SEQ ID NO: 6706 - protein, 17 aa, synthetic construct
LFWYVQYPRQGLQLLLK

SEQ ID NO: 6707 - protein, 17 aa, synthetic construct
MYWYRQDTGHGLRLIHY

SEQ ID NO: 6708 - protein, 17 aa, synthetic construct
LFWYVQYPGEGPQLLFR

SEQ ID NO: 6709 - protein, 17 aa, synthetic construct
MYWYRQDTGHGLRLIHY

SEQ ID NO: 6710 - protein, 17 aa, synthetic construct
MQWFYQRPGGSLISVFY

SEQ ID NO: 6711 - protein, 17 aa, synthetic construct
MYWYRQDTGHGLRLIHY

SEQ ID NO: 6712 - protein, 17 aa, synthetic construct
LFWYVQYPRQGLQLLLK

SEQ ID NO: 6713 - protein, 17 aa, synthetic construct
MYWYRQDTGHGLRLIHY

SEQ ID NO: 6714 - protein, 17 aa, synthetic construct
FPWYKQEPGENPKLIID

SEQ ID NO: 6715 - protein, 17 aa, synthetic construct
MYWYRQDTGHGLRLIHY

SEQ ID NO: 6716 - protein, 17 aa, synthetic construct
LFWYKQTASGEIVFLIR

SEQ ID NO: 6717 - protein, 17 aa, synthetic construct
MYWYRQDTGHGLRLIHY

SEQ ID NO: 6718 - protein, 17 aa, synthetic construct
FPWYQQFPGEGPALLIS

SEQ ID NO: 6719 - protein, 17 aa, synthetic construct
MYWYRQDTGHGLRLIHY

SEQ ID NO: 6720 - protein, 17 aa, synthetic construct
LFWYVRYPGEGLQLLLK

SEQ ID NO: 6721 - protein, 17 aa, synthetic construct
MYWYRQDTGHGLRLIHY

SEQ ID NO: 6722 - protein, 17 aa, synthetic construct
FFWYKQEPGASLQLLMK

SEQ ID NO: 6723 - protein, 17 aa, synthetic construct
MYWYRQDTGHGLRLIHY

SEQ ID NO: 6724 - protein, 17 aa, synthetic construct
FPWYQQFPGEGPALLIS

SEQ ID NO: 6725 - protein, 17 aa, synthetic construct
MYWYRQDTGHGLRLIHY

SEQ ID NO: 6726 - protein, 17 aa, synthetic construct
LFWYKQTASGEIVFLIR

SEQ ID NO: 6727 - protein, 17 aa, synthetic construct
MYWYRQDTGHGLRLIHY

SEQ ID NO: 6728 - protein, 17 aa, synthetic construct
MQWFYQRPEGSLVSLFY

SEQ ID NO: 6729 - protein, 17 aa, synthetic construct
MYWYRQDTGHGLRLIHY

SEQ ID NO: 6730 - protein, 17 aa, synthetic construct
LFWYVQYPGEGPQLLLK

SEQ ID NO: 6731 - protein, 17 aa, synthetic construct
MYWYRQDTGHGLRLIHY

SEQ ID NO: 6732 - protein, 17 aa, synthetic construct
LFWYVQHLNEAPKLLLK

SEQ ID NO: 6733 - protein, 17 aa, synthetic construct
MYWYRQDTGHGLRLIHY

SEQ ID NO: 6734 - protein, 17 aa, synthetic construct
LFWYVQYPRQGLQLLLK

SEQ ID NO: 6735 - protein, 17 aa, synthetic construct
MYWYRQDTGHGLRLIHY

SEQ ID NO: 6736 - protein, 17 aa, synthetic construct
LFWYVQHLNEAPKLLLK

SEQ ID NO: 6737 - protein, 17 aa, synthetic construct
MYWYRQDTGHGLRLIHY

SEQ ID NO: 6738 - protein, 17 aa, synthetic construct
FRWYRQHSGKGLEVLVS

SEQ ID NO: 6739 - protein, 17 aa, synthetic construct
MYWYRQDTGHGLRLIHY

SEQ ID NO: 6740 - protein, 17 aa, synthetic construct
FAWYRQHSGKAPKALMS

SEQ ID NO: 6741 - protein, 17 aa, synthetic construct
MYWYRQDTGHGLRLIHY

SEQ ID NO: 6742 - protein, 17 aa, synthetic construct
FFWYVQYLNEAPQVLLK

SEQ ID NO: 6743 - protein, 17 aa, synthetic construct
MYWYRQDTGHGLRLIHY

SEQ ID NO: 6744 - protein, 17 aa, synthetic construct
FSWYKQEAGAGLQLLMS

SEQ ID NO: 6745 - protein, 17 aa, synthetic construct
MYWYRQDTGHGLRLIHY

SEQ ID NO: 6746 - protein, 17 aa, synthetic construct
LFWYKQTASGEIVFLIR

SEQ ID NO: 6747 - protein, 17 aa, synthetic construct
MYWYRQDTGHGLRLIHY

SEQ ID NO: 6748 - protein, 17 aa, synthetic construct
LFWYKQTASGEIVFLIR

SEQ ID NO: 6749 - protein, 17 aa, synthetic construct
MYWYRQDTGHGLRLIHY

SEQ ID NO: 6750 - protein, 17 aa, synthetic construct
LQWFYQRPGGSLVSLLS

SEQ ID NO: 6751 - protein, 17 aa, synthetic construct
MYWYRQDTGHGLRLIHY

SEQ ID NO: 6752 - protein, 17 aa, synthetic construct
LFWYKQTASGEIVFLIR

SEQ ID NO: 6753 - protein, 17 aa, synthetic construct
MYWYRQDTGHGLRLIHY

SEQ ID NO: 6754 - protein, 17 aa, synthetic construct
LFWYVRYPGEGLQLLLK

SEQ ID NO: 6755 - protein, 17 aa, synthetic construct
MYWYRQDTGHGLRLIHY

SEQ ID NO: 6756 - protein, 17 aa, synthetic construct
FRWYRQHSAKGLEVLVS

SEQ ID NO: 6757 - protein, 17 aa, synthetic construct
MYWYRQDTGHGLRLIHY

SEQ ID NO: 6758 - protein, 17 aa, synthetic construct
FRWYRQHSGKGLEVLVS

SEQ ID NO: 6759 - protein, 17 aa, synthetic construct
MYWYRQDTGHGLRLIHY

SEQ ID NO: 6760 - protein, 17 aa, synthetic construct
LFWYKQTASGEIVFLIR

SEQ ID NO: 6761 - protein, 17 aa, synthetic construct
MYWYRQDTGHGLRLIHY

SEQ ID NO: 6762 - protein, 17 aa, synthetic construct
LFWYKQTASGEIVFLIR

SEQ ID NO: 6763 - protein, 17 aa, synthetic construct
MYWYRQDTGHGLRLIHY

SEQ ID NO: 6764 - protein, 17 aa, synthetic construct
FFWYVQYLNEAPKLLLR

SEQ ID NO: 6765 - protein, 17 aa, synthetic construct
MYWYRQDTGHGLRLIHY

SEQ ID NO: 6766 - protein, 17 aa, synthetic construct
LFWYKQTASGEIVFLIR

SEQ ID NO: 6767 - protein, 17 aa, synthetic construct
MYWYRQDTGHGLRLIHY

SEQ ID NO: 6768 - protein, 17 aa, synthetic construct
LFWYKQTASGEIVFLIR

SEQ ID NO: 6769 - protein, 17 aa, synthetic construct
MYWYRQDTGHGLRLIHY

SEQ ID NO: 6770 - protein, 17 aa, synthetic construct
LSWYQQREGHAPVFLSY

SEQ ID NO: 6771 - protein, 17 aa, synthetic construct
MYWYRQDTGHGLRLIHY

SEQ ID NO: 6772 - protein, 17 aa, synthetic construct
FFWYKQEPGASLQLLMK

SEQ ID NO: 6773 - protein, 17 aa, synthetic construct
MYWYRQDTGHGLRLIHY

SEQ ID NO: 6774 - protein, 17 aa, synthetic construct
FFWYKQEPGASLQLLMK

SEQ ID NO: 6775 - protein, 17 aa, synthetic construct
MYWYRQDTGHGLRLIHY

SEQ ID NO: 6776 - protein, 17 aa, synthetic construct
LFWYVQHLNEAPKLLLK

SEQ ID NO: 6777 - protein, 17 aa, synthetic construct
MYWYRQDTGHGLRLIHY

SEQ ID NO: 6778 - protein, 17 aa, synthetic construct
FFWYKQEPGASLQLLMK

SEQ ID NO: 6779 - protein, 17 aa, synthetic construct
MYWYRQDTGHGLRLIHY

SEQ ID NO: 6780 - protein, 17 aa, synthetic construct
LFWYVQHLNEAPKLLLK

SEQ ID NO: 6781 - protein, 17 aa, synthetic construct
MYWYRQDTGHGLRLIHY

SEQ ID NO: 6782 - protein, 17 aa, synthetic construct
FFWYKQEPGASLQLLMK

SEQ ID NO: 6783 - protein, 17 aa, synthetic construct
MYWYRQDTGHGLRLIHY

SEQ ID NO: 6784 - protein, 17 aa, synthetic construct
FWWYRQHSGKSPKMLMS

SEQ ID NO: 6785 - protein, 17 aa, synthetic construct
MYWYRQDTGHGLRLIHY

SEQ ID NO: 6786 - protein, 17 aa, synthetic construct
LFWYVQYPGEGPQLLFK

SEQ ID NO: 6787 - protein, 17 aa, synthetic construct
MYWYRQDTGHGLRLIHY

SEQ ID NO: 6788 - protein, 17 aa, synthetic construct
LSWYQQREGQAPVFLSY

SEQ ID NO: 6789 - protein, 17 aa, synthetic construct
MYWYRQDTGHGLRLIHY

SEQ ID NO: 6790 - protein, 17 aa, synthetic construct
FPWYQQFPGEGPALLIS

SEQ ID NO: 6791 - protein, 17 aa, synthetic construct
MYWYRQDTGHGLRLIHY

SEQ ID NO: 6792 - protein, 17 aa, synthetic construct
LSWYIQHHGRGLQFLLK

SEQ ID NO: 6793 - protein, 17 aa, synthetic construct
MYWYRQDTGHGLRLIHY

SEQ ID NO: 6794 - protein, 17 aa, synthetic construct
LSWYQQREGHAPVFLSY

SEQ ID NO: 6795 - protein, 17 aa, synthetic construct
MYWYRQDTGHGLRLIHY

SEQ ID NO: 6796 - protein, 17 aa, synthetic construct
FPWYKQEAGKSLHFVID

SEQ ID NO: 6797 - protein, 17 aa, synthetic construct
MYWYRQDTGHGLRLIHY

SEQ ID NO: 6798 - protein, 17 aa, synthetic construct
LSWYIQHHGRGLQFLLK

SEQ ID NO: 6799 - protein, 17 aa, synthetic construct
MYWYRQDTGHGLRLIHY

SEQ ID NO: 6800 - protein, 17 aa, synthetic construct
LFWYVQYPGEGPQLLFR

SEQ ID NO: 6801 - protein, 17 aa, synthetic construct
MYWYRQDTGHGLRLIHY

SEQ ID NO: 6802 - protein, 17 aa, synthetic construct
FSWYKQEAGAGLQLLMS

SEQ ID NO: 6803 - protein, 17 aa, synthetic construct
MYWYRQDTGHGLRLIHY

SEQ ID NO: 6804 - protein, 17 aa, synthetic construct
FWWYRQHSGKAPKALMS

SEQ ID NO: 6805 - protein, 17 aa, synthetic construct
MYWYRQDTGHGLRLIHY

SEQ ID NO: 6806 - protein, 17 aa, synthetic construct
IYWYRQVPHQGPQFIIQ

SEQ ID NO: 6807 - protein, 17 aa, synthetic construct
MYWYRQDTGHGLRLIHY

SEQ ID NO: 6808 - protein, 17 aa, synthetic construct
FFWYKQEPGASLQLLMK

SEQ ID NO: 6809 - protein, 17 aa, synthetic construct
MYWYRQDTGHGLRLIHY

SEQ ID NO: 6810 - protein, 17 aa, synthetic construct
FPWYQQFPGEGPALLIS

SEQ ID NO: 6811 - protein, 17 aa, synthetic construct
MYWYRQDTGHGLRLIHY

SEQ ID NO: 6812 - protein, 17 aa, synthetic construct
LFWYVQYPGQGPQLLLK

SEQ ID NO: 6813 - protein, 17 aa, synthetic construct
MYWYRQDTGHGLRLIHY

SEQ ID NO: 6814 - protein, 17 aa, synthetic construct
LFWYVQYPGQGPQLLLK

SEQ ID NO: 6815 - protein, 17 aa, synthetic construct
MYWYRQDTGHGLRLIHY

SEQ ID NO: 6816 - protein, 17 aa, synthetic construct
VQWYRQKSGKGPALIIL

SEQ ID NO: 6817 - protein, 17 aa, synthetic construct
MYWYRQDTGHGLRLIHY

SEQ ID NO: 6818 - protein, 17 aa, synthetic construct
LFWYVQYPGEGPQLLFK

SEQ ID NO: 6819 - protein, 17 aa, synthetic construct
MYWYRQDTGHGLRLIHY

SEQ ID NO: 6820 - protein, 17 aa, synthetic construct
FPWYKQEPGKRLQFIID

SEQ ID NO: 6821 - protein, 17 aa, synthetic construct
MYWYRQDTGHGLRLIHY

SEQ ID NO: 6822 - protein, 17 aa, synthetic construct
FAWYRQHSGKAPKALMS

SEQ ID NO: 6823 - protein, 17 aa, synthetic construct
MYWYRQDTGHGLRLIHY

SEQ ID NO: 6824 - protein, 17 aa, synthetic construct
FPWYKQEPGENPKLIID

SEQ ID NO: 6825 - protein, 17 aa, synthetic construct
MYWYRQDTGHGLRLIHY

SEQ ID NO: 6826 - protein, 17 aa, synthetic construct
LFWYVHYLNESPRLLLK

SEQ ID NO: 6827 - protein, 17 aa, synthetic construct
MYWYRQDTGHGLRLIHY

SEQ ID NO: 6828 - protein, 17 aa, synthetic construct
LFWYVQHLNEAPKLLLK

SEQ ID NO: 6829 - protein, 17 aa, synthetic construct
MYWYRQDTGHGLRLIHY

SEQ ID NO: 6830 - protein, 17 aa, synthetic construct
FPWYQQFPGEGPALLIA

SEQ ID NO: 6831 - protein, 17 aa, synthetic construct
MYWYRQDTGHGLRLIHY

SEQ ID NO: 6832 - protein, 17 aa, synthetic construct
FFWYKQEPGASLQLLMK

SEQ ID NO: 6833 - protein, 17 aa, synthetic construct
MYWYRQDTGHGLRLIHY

SEQ ID NO: 6834 - protein, 17 aa, synthetic construct
LFWYKQTASGEIVFLIR

SEQ ID NO: 6835 - protein, 17 aa, synthetic construct
MYWYRQDTGHGLRLIHY

SEQ ID NO: 6836 - protein, 17 aa, synthetic construct
MQWFYQRPGGSLVSLFY

SEQ ID NO: 6837 - protein, 17 aa, synthetic construct
MYWYRQDTGHGLRLIHY

SEQ ID NO: 6838 - protein, 17 aa, synthetic construct
LFWYVQHLNEAPKLLLK

SEQ ID NO: 6839 - protein, 17 aa, synthetic construct
MYWYRQDTGHGLRLIHY

SEQ ID NO: 6840 - protein, 17 aa, synthetic construct
LFWYVHYLNESPRLLLK

SEQ ID NO: 6841 - protein, 17 aa, synthetic construct
MYWYRQDTGHGLRLIHY

SEQ ID NO: 6842 - protein, 17 aa, synthetic construct
LFWYKQTASGEIVFLIR

SEQ ID NO: 6843 - protein, 17 aa, synthetic construct
MYWYRQDTGHGLRLIHY

SEQ ID NO: 6844 - protein, 17 aa, synthetic construct
LFWYVQHLNEAPKLLLK

SEQ ID NO: 6845 - protein, 17 aa, synthetic construct
MYWYRQDTGHGLRLIHY

SEQ ID NO: 6846 - protein, 17 aa, synthetic construct
FYWYKQEPGAGLQLLMS

SEQ ID NO: 6847 - protein, 17 aa, synthetic construct
MYWYRQDTGHGLRLIHY

SEQ ID NO: 6848 - protein, 17 aa, synthetic construct
LFWYVQYPGEGPQFLFR

SEQ ID NO: 6849 - protein, 17 aa, synthetic construct
MYWYRQDTGHGLRLIHY

SEQ ID NO: 6850 - protein, 17 aa, synthetic construct
FPWYKQEAGKGLHFVID

SEQ ID NO: 6851 - protein, 17 aa, synthetic construct
MYWYRQDTGHGLRLIHY

SEQ ID NO: 6852 - protein, 17 aa, synthetic construct
LQWYRQKSGEGPAQLIL

SEQ ID NO: 6853 - protein, 17 aa, synthetic construct
MYWYRQDTGHGLRLIHY

SEQ ID NO: 6854 - protein, 17 aa, synthetic construct
LFWYKQTASGEIVFLIR

SEQ ID NO: 6855 - protein, 17 aa, synthetic construct
MYWYRQDTGHGLRLIHY

SEQ ID NO: 6856 - protein, 17 aa, synthetic construct
LSWYQQREGHAPVFLSY

SEQ ID NO: 6857 - protein, 17 aa, synthetic construct
MYWYRQDTGHGLRLIHY

SEQ ID NO: 6858 - protein, 17 aa, synthetic construct
LFWYKQTASGEIVFLIR

SEQ ID NO: 6859 - protein, 17 aa, synthetic construct
MYWYRQDTGHGLRLIHY

SEQ ID NO: 6860 - protein, 17 aa, synthetic construct
LFWYVQYPRQGLQLLLK

SEQ ID NO: 6861 - protein, 17 aa, synthetic construct
MYWYRQDTGHGLRLIHY

SEQ ID NO: 6862 - protein, 17 aa, synthetic construct
FWWYRQHSGKSPKMLMS

SEQ ID NO: 6863 - protein, 17 aa, synthetic construct
MYWYRQDTGHGLRLIHY

SEQ ID NO: 6864 - protein, 17 aa, synthetic construct
MQWFYQRPGGRLVSLLY

SEQ ID NO: 6865 - protein, 17 aa, synthetic construct
MYWYRQDTGHGLRLIHY

SEQ ID NO: 6866 - protein, 17 aa, synthetic construct
MQWFYQRPEGSLVSLFY

SEQ ID NO: 6867 - protein, 17 aa, synthetic construct
MYWYRQDTGHGLRLIHY

SEQ ID NO: 6868 - protein, 17 aa, synthetic construct
LFWYVQYPGEGPQLLLK

SEQ ID NO: 6869 - protein, 17 aa, synthetic construct
MYWYRQDTGHGLRLIHY

SEQ ID NO: 6870 - protein, 17 aa, synthetic construct
LFWYVQYPGEGPQLLFR

SEQ ID NO: 6871 - protein, 17 aa, synthetic construct
MYWYRQDTGHGLRLIHY

SEQ ID NO: 6872 - protein, 17 aa, synthetic construct
LFWYVQHLNESPRLLLK

SEQ ID NO: 6873 - protein, 17 aa, synthetic construct
MYWYRQDTGHGLRLIHY

SEQ ID NO: 6874 - protein, 17 aa, synthetic construct
VQWFLQNPRGSLINLFY

SEQ ID NO: 6875 - protein, 17 aa, synthetic construct
MYWYRQDTGHGLRLIHY

SEQ ID NO: 6876 - protein, 17 aa, synthetic construct
VQWFLQNPRGSLINLFY

SEQ ID NO: 6877 - protein, 17 aa, synthetic construct
MYWYRQDTGHGLRLIHY

SEQ ID NO: 6878 - protein, 17 aa, synthetic construct
LFWYVRYPGEGLQLLLK

SEQ ID NO: 6879 - protein, 17 aa, synthetic construct
MYWYRQDTGHGLRLIHY

SEQ ID NO: 6880 - protein, 17 aa, synthetic construct
LFWYVRYPGEGLQLLLK

SEQ ID NO: 6881 - protein, 17 aa, synthetic construct
MYWYRQDTGHGLRLIHY

SEQ ID NO: 6882 - protein, 17 aa, synthetic construct
FFWYKQEPGASLQLLMK

SEQ ID NO: 6883 - protein, 17 aa, synthetic construct
MYWYRQDTGHGLRLIHY

SEQ ID NO: 6884 - protein, 17 aa, synthetic construct
FPWYKQEPGENPKLIID

SEQ ID NO: 6885 - protein, 17 aa, synthetic construct
MYWYRQDTGHGLRLIHY

SEQ ID NO: 6886 - protein, 17 aa, synthetic construct
FPWYKQEPGENPKLIID

SEQ ID NO: 6887 - protein, 17 aa, synthetic construct
MYWYRQDTGHGLRLIHY

SEQ ID NO: 6888 - protein, 17 aa, synthetic construct
FWWYRQHSGKAPKALMS

SEQ ID NO: 6889 - protein, 17 aa, synthetic construct
MYWYRQDTGHGLRLIHY

SEQ ID NO: 6890 - protein, 17 aa, synthetic construct
LFWYKQTASGEIVFLIR

SEQ ID NO: 6891 - protein, 17 aa, synthetic construct
MYWYRQDTGHGLRLIHY

SEQ ID NO: 6892 - protein, 17 aa, synthetic construct
FWWYRQHSGKAPKALMS

SEQ ID NO: 6893 - protein, 17 aa, synthetic construct
MYWYRQDTGHGLRLIHY

SEQ ID NO: 6894 - protein, 17 aa, synthetic construct
MQWFYQRPEGSLVSLFY

SEQ ID NO: 6895 - protein, 17 aa, synthetic construct
MYWYRQDTGHGLRLIHY

SEQ ID NO: 6896 - protein, 17 aa, synthetic construct
IYWYRQVPLQGPEYVTH

SEQ ID NO: 6897 - protein, 17 aa, synthetic construct
MYWYRQDTGHGLRLIHY

SEQ ID NO: 6898 - protein, 17 aa, synthetic construct
LSWYQQREGHAPVFLSY

SEQ ID NO: 6899 - protein, 17 aa, synthetic construct
MYWYRQDTGHGLRLIHY

SEQ ID NO: 6900 - protein, 17 aa, synthetic construct
FAWYKKYPDNSPTLLIS

SEQ ID NO: 6901 - protein, 17 aa, synthetic construct
MYWYRQDTGHGLRLIHY

SEQ ID NO: 6902 - protein, 17 aa, synthetic construct
FWWYRQHSGKAPKALMS

SEQ ID NO: 6903 - protein, 17 aa, synthetic construct
MYWYRQDTGHGLRLIHY

SEQ ID NO: 6904 - protein, 17 aa, synthetic construct
LFWYVQHLNESPRLLLK

SEQ ID NO: 6905 - protein, 17 aa, synthetic construct
MYWYRQDTGHGLRLIHY

SEQ ID NO: 6906 - protein, 17 aa, synthetic construct
LFWYVQYPGEGPQFLFR

SEQ ID NO: 6907 - protein, 17 aa, synthetic construct
MYWYRQDTGHGLRLIHY

SEQ ID NO: 6908 - protein, 17 aa, synthetic construct
FFWYKQEPGASLQLLMK

SEQ ID NO: 6909 - protein, 17 aa, synthetic construct
MYWYRQDTGHGLRLIHY

SEQ ID NO: 6910 - protein, 17 aa, synthetic construct
FWWYRQHSGKAPKALMS

SEQ ID NO: 6911 - protein, 17 aa, synthetic construct
MYWYRQDTGHGLRLIHY

SEQ ID NO: 6912 - protein, 17 aa, synthetic construct
VQWFLQNPRGSLMNLFY

SEQ ID NO: 6913 - protein, 17 aa, synthetic construct
MYWYRQDTGHGLRLIHY

SEQ ID NO: 6914 - protein, 17 aa, synthetic construct
LFWYKQTASGEIVFLIR

SEQ ID NO: 6915 - protein, 17 aa, synthetic construct
MYWYRQDTGHGLRLIHY

SEQ ID NO: 6916 - protein, 17 aa, synthetic construct
LFWYKQTASGEIVFLIR

SEQ ID NO: 6917 - protein, 17 aa, synthetic construct
MYWYRQDTGHGLRLIHY

SEQ ID NO: 6918 - protein, 17 aa, synthetic construct
LFWYVQYPGEGPQLLFK

SEQ ID NO: 6919 - protein, 17 aa, synthetic construct
MYWYRQDTGHGLRLIHY

SEQ ID NO: 6920 - protein, 17 aa, synthetic construct
FPWYKQEAGKSLHFVID

SEQ ID NO: 6921 - protein, 17 aa, synthetic construct
MYWYRQDTGHGLRLIHY

SEQ ID NO: 6922 - protein, 17 aa, synthetic construct
FAWYRQHSGKAPKALMS

SEQ ID NO: 6923 - protein, 17 aa, synthetic construct
MYWYRQDTGHGLRLIHY

SEQ ID NO: 6924 - protein, 17 aa, synthetic construct
MQWFYQRPGGSLVSLFY

SEQ ID NO: 6925 - protein, 17 aa, synthetic construct
MYWYRQDTGHGLRLIHY

SEQ ID NO: 6926 - protein, 17 aa, synthetic construct
FFWYKQEPGASLQLLMK

SEQ ID NO: 6927 - protein, 17 aa, synthetic construct
MYWYRQDTGHGLRLIHY

SEQ ID NO: 6928 - protein, 17 aa, synthetic construct
FPWYKQEPGKRLQFIID

SEQ ID NO: 6929 - protein, 17 aa, synthetic construct
MYWYRQDTGHGLRLIHY

SEQ ID NO: 6930 - protein, 17 aa, synthetic construct
LFWYVQYPRQGLQLLLK

SEQ ID NO: 6931 - protein, 17 aa, synthetic construct
MYWYRQDTGHGLRLIHY

SEQ ID NO: 6932 - protein, 17 aa, synthetic construct
IYWYRQVPLQGPEYVTH

SEQ ID NO: 6933 - protein, 17 aa, synthetic construct
MYWYRQDTGHGLRLIHY

SEQ ID NO: 6934 - protein, 17 aa, synthetic construct
LFWYVQYPGEGPQFLFR

SEQ ID NO: 6935 - protein, 17 aa, synthetic construct
MYWYRQDTGHGLRLIHY

SEQ ID NO: 6936 - protein, 17 aa, synthetic construct
LFWYVQYPGEGPQLLFR

SEQ ID NO: 6937 - protein, 17 aa, synthetic construct
MYWYRQDTGHGLRLIHY

SEQ ID NO: 6938 - protein, 17 aa, synthetic construct
FFWYKQEPGAGLQLLMK

SEQ ID NO: 6939 - protein, 17 aa, synthetic construct
MYWYRQDTGHGLRLIHY

SEQ ID NO: 6940 - protein, 17 aa, synthetic construct
FWYVQYPGEGPQLLFKV

SEQ ID NO: 6941 - protein, 17 aa, synthetic construct
MYWYRQDTGHGLRLIHY

SEQ ID NO: 6942 - protein, 17 aa, synthetic construct
LFWYVQYPRQGLQLLLK

SEQ ID NO: 6943 - protein, 17 aa, synthetic construct
MYWYRQDTGHGLRLIHY

SEQ ID NO: 6944 - protein, 17 aa, synthetic construct
FPWYQQFPGEGPALLIS

SEQ ID NO: 6945 - protein, 17 aa, synthetic construct
MYWYRQDTGHGLRLIHY

SEQ ID NO: 6946 - protein, 17 aa, synthetic construct
LFWYVQYPGEGPQFLFR

SEQ ID NO: 6947 - protein, 17 aa, synthetic construct
MYWYRQDTGHGLRLIHY

SEQ ID NO: 6948 - protein, 17 aa, synthetic construct
LFWYKQTASGEIVFLIR

SEQ ID NO: 6949 - protein, 17 aa, synthetic construct
MYWYRQDTGHGLRLIHY

SEQ ID NO: 6950 - protein, 17 aa, synthetic construct
LSWYIQHHGRGLQFLLK

SEQ ID NO: 6951 - protein, 17 aa, synthetic construct
MYWYRQDTGHGLRLIHY

SEQ ID NO: 6952 - protein, 17 aa, synthetic construct
FWWYRQHSGKAPKALMS

SEQ ID NO: 6953 - protein, 17 aa, synthetic construct
MYWYRQDTGHGLRLIHY

SEQ ID NO: 6954 - protein, 17 aa, synthetic construct
LFWYVRYPGEGLQLLLK

SEQ ID NO: 6955 - protein, 17 aa, synthetic construct
MYWYRQDTGHGLRLIHY

SEQ ID NO: 6956 - protein, 17 aa, synthetic construct
LFWYKQTASGEIVFLIR

SEQ ID NO: 6957 - protein, 17 aa, synthetic construct
MYWYRQDTGHGLRLIHY

SEQ ID NO: 6958 - protein, 17 aa, synthetic construct
FFWYKQEPGASLQLLMK

SEQ ID NO: 6959 - protein, 17 aa, synthetic construct
MYWYRQDTGHGLRLIHY

SEQ ID NO: 6960 - protein, 17 aa, synthetic construct
FPWYKQEPGKRLQFIID

SEQ ID NO: 6961 - protein, 17 aa, synthetic construct
MYWYRQDTGHGLRLIHY

SEQ ID NO: 6962 - protein, 17 aa, synthetic construct
LFWYVQHLNEAPKLLLK

SEQ ID NO: 6963 - protein, 17 aa, synthetic construct
MYWYRQDTGHGLRLIHY

SEQ ID NO: 6964 - protein, 17 aa, synthetic construct
LFWYVRYPGEGLQLLLK

SEQ ID NO: 6965 - protein, 17 aa, synthetic construct
MYWYRQDTGHGLRLIHY

SEQ ID NO: 6966 - protein, 17 aa, synthetic construct
IYWYRQVPLQGPEYVTH

SEQ ID NO: 6967 - protein, 17 aa, synthetic construct
MYWYRQDTGHGLRLIHY

SEQ ID NO: 6968 - protein, 17 aa, synthetic construct
LFWYVQHLNEAPKLLLK

SEQ ID NO: 6969 - protein, 17 aa, synthetic construct
MYWYRQDTGHGLRLIHY

SEQ ID NO: 6970 - protein, 17 aa, synthetic construct
LFWYVQHLNEAPKLLLK

SEQ ID NO: 6971 - protein, 17 aa, synthetic construct
MYWYRQDTGHGLRLIHY

SEQ ID NO: 6972 - protein, 17 aa, synthetic construct
LFWYVQYPGEGPQFLFR

SEQ ID NO: 6973 - protein, 17 aa, synthetic construct
MYWYRQDTGHGLRLIHY

SEQ ID NO: 6974 - protein, 17 aa, synthetic construct
FYWYKQEPGAGLQLLMS

SEQ ID NO: 6975 - protein, 17 aa, synthetic construct
MYWYRQDTGHGLRLIHY

SEQ ID NO: 6976 - protein, 17 aa, synthetic construct
LFWYVRYPGEGLQLLLK

SEQ ID NO: 6977 - protein, 17 aa, synthetic construct
MYWYRQDTGHGLRLIHY

SEQ ID NO: 6978 - protein, 17 aa, synthetic construct
LFWYVQYPRQGLQLLLK

SEQ ID NO: 6979 - protein, 17 aa, synthetic construct
MYWYRQDTGHGLRLIHY

SEQ ID NO: 6980 - protein, 17 aa, synthetic construct
FPWYRLFPGESPALLIA

SEQ ID NO: 6981 - protein, 17 aa, synthetic construct
MYWYRQDTGHGLRLIHY

SEQ ID NO: 6982 - protein, 17 aa, synthetic construct
LFWYVQYSGEGPQLLLQ

SEQ ID NO: 6983 - protein, 17 aa, synthetic construct
MYWYRQDTGHGLRLIHY

SEQ ID NO: 6984 - protein, 17 aa, synthetic construct
IFWYRQLFSGEMVFLIY

SEQ ID NO: 6985 - protein, 17 aa, synthetic construct
MYWYRQDTGHGLRLIHY

SEQ ID NO: 6986 - protein, 17 aa, synthetic construct
FYWYKQEPGAGLQLLMS

SEQ ID NO: 6987 - protein, 17 aa, synthetic construct
MYWYRQDTGHGLRLIHY

SEQ ID NO: 6988 - protein, 17 aa, synthetic construct
LFWYKQTASGEIVFLIR

SEQ ID NO: 6989 - protein, 17 aa, synthetic construct
MYWYRQDTGHGLRLIHY

SEQ ID NO: 6990 - protein, 17 aa, synthetic construct
LQWFYQSPGGSLVSLLS

SEQ ID NO: 6991 - protein, 17 aa, synthetic construct
MYWYRQDTGHGLRLIHY

SEQ ID NO: 6992 - protein, 17 aa, synthetic construct
MQWFYQRPGGSLVSLFY

SEQ ID NO: 6993 - protein, 17 aa, synthetic construct
MYWYRQDTGHGLRLIHY

SEQ ID NO: 6994 - protein, 17 aa, synthetic construct
LFWYVRYPGEGLQLLLK

SEQ ID NO: 6995 - protein, 17 aa, synthetic construct
MYWYRQDTGHGLRLIHY

SEQ ID NO: 6996 - protein, 17 aa, synthetic construct
FYWYKQEPGAGLQLLMS

SEQ ID NO: 6997 - protein, 17 aa, synthetic construct
MYWYRQDTGHGLRLIHY

SEQ ID NO: 6998 - protein, 17 aa, synthetic construct
FRWYRQHSGKGLEVLVS

SEQ ID NO: 6999 - protein, 17 aa, synthetic construct
MYWYRQDTGHGLRLIHY

SEQ ID NO: 7000 - protein, 17 aa, synthetic construct
LFWYVQYPRQGLQLLLK

SEQ ID NO: 7001 - protein, 17 aa, synthetic construct
MYWYRQDTGHGLRLIHY

SEQ ID NO: 7002 - protein, 17 aa, synthetic construct
LFWYKQTASGEIVFLIR

SEQ ID NO: 7003 - protein, 17 aa, synthetic construct
MYWYRQDTGHGLRLIHY

SEQ ID NO: 7004 - protein, 17 aa, synthetic construct
LFWYKQTASGEIVFLIR

SEQ ID NO: 7005 - protein, 17 aa, synthetic construct
MYWYRQDTGHGLRLIHY

SEQ ID NO: 7006 - protein, 17 aa, synthetic construct
LFWYKQTASGEIVFLIR

SEQ ID NO: 7007 - protein, 17 aa, synthetic construct
MYWYRQDTGHGLRLIHY

SEQ ID NO: 7008 - protein, 17 aa, synthetic construct
LFWYVQYPGQSLQFLLK

SEQ ID NO: 7009 - protein, 17 aa, synthetic construct
MYWYRQDTGHGLRLIHY

SEQ ID NO: 7010 - protein, 17 aa, synthetic construct
IYWYRQVPLQGPEYVTH

SEQ ID NO: 7011 - protein, 17 aa, synthetic construct
MYWYRQDTGHGLRLIHY

SEQ ID NO: 7012 - protein, 17 aa, synthetic construct
LFWYVQYPGEGPQFLFR

SEQ ID NO: 7013 - protein, 17 aa, synthetic construct
MYWYRQDTGHGLRLIHY

SEQ ID NO: 7014 - protein, 17 aa, synthetic construct
VHWYRQDSGRGPALIIL

SEQ ID NO: 7015 - protein, 17 aa, synthetic construct
MYWYRQDTGHGLRLIHY

SEQ ID NO: 7016 - protein, 17 aa, synthetic construct
LFWYVRYPGEGLQLLLK

SEQ ID NO: 7017 - protein, 17 aa, synthetic construct
MYWYRQDTGHGLRLIHY

SEQ ID NO: 7018 - protein, 17 aa, synthetic construct
LFWYVQYPRQGLQLLLK

SEQ ID NO: 7019 - protein, 17 aa, synthetic construct
MYWYRQDTGHGLRLIHY

SEQ ID NO: 7020 - protein, 17 aa, synthetic construct
LFWYVQYPGQSLQFLLK

SEQ ID NO: 7021 - protein, 17 aa, synthetic construct
MYWYRQDTGHGLRLIHY

SEQ ID NO: 7022 - protein, 17 aa, synthetic construct
LFWYKQTASGEIVFLIR

SEQ ID NO: 7023 - protein, 17 aa, synthetic construct
MYWYRQDTGHGLRLIHY

SEQ ID NO: 7024 - protein, 17 aa, synthetic construct
MQWFYQRPGGRLVSLLY

SEQ ID NO: 7025 - protein, 17 aa, synthetic construct
MYWYRQDTGHGLRLIHY

SEQ ID NO: 7026 - protein, 17 aa, synthetic construct
LFWYVHYLNESPRLLLK

SEQ ID NO: 7027 - protein, 17 aa, synthetic construct
MYWYRQDTGHGLRLIHY

SEQ ID NO: 7028 - protein, 17 aa, synthetic construct
FAWYKKYPDNSPTLLIS

SEQ ID NO: 7029 - protein, 17 aa, synthetic construct
MYWYRQDTGHGLRLIHY

SEQ ID NO: 7030 - protein, 17 aa, synthetic construct
FSWYKQEAGAGLQLLMS

SEQ ID NO: 7031 - protein, 17 aa, synthetic construct
MYWYRQDTGHGLRLIHY

SEQ ID NO: 7032 - protein, 17 aa, synthetic construct
FSWYKQEAGAGLQLLMS

SEQ ID NO: 7033 - protein, 17 aa, synthetic construct
MYWYRQDTGHGLRLIHY

SEQ ID NO: 7034 - protein, 17 aa, synthetic construct
LFWYKQTASGEIVFLIR

SEQ ID NO: 7035 - protein, 17 aa, synthetic construct
MYWYRQDTGHGLRLIHY

SEQ ID NO: 7036 - protein, 17 aa, synthetic construct
FWWYRQHSGKAPKALMS

SEQ ID NO: 7037 - protein, 17 aa, synthetic construct
MYWYRQDTGHGLRLIHY

SEQ ID NO: 7038 - protein, 17 aa, synthetic construct
FFWYKQEPGASLQLLMK

SEQ ID NO: 7039 - protein, 17 aa, synthetic construct
MYWYRQDTGHGLRLIHY

SEQ ID NO: 7040 - protein, 17 aa, synthetic construct
LFWYKQTASGEIVFLIR

SEQ ID NO: 7041 - protein, 17 aa, synthetic construct
MYWYRQDTGHGLRLIHY

SEQ ID NO: 7042 - protein, 17 aa, synthetic construct
LFWYKQTASGEIVFLIR

SEQ ID NO: 7043 - protein, 17 aa, synthetic construct
MYWYRQDTGHGLRLIHY

SEQ ID NO: 7044 - protein, 17 aa, synthetic construct
FPWYQQFPGEGPALLIA

SEQ ID NO: 7045 - protein, 17 aa, synthetic construct
MYWYRQDTGHGLRLIHY

SEQ ID NO: 7046 - protein, 17 aa, synthetic construct
LFWYVQYPRQGLQLLLK

SEQ ID NO: 7047 - protein, 17 aa, synthetic construct
MYWYRQDTGHGLRLIHY

SEQ ID NO: 7048 - protein, 17 aa, synthetic construct
FPWYQQFPGEGPALLIS

SEQ ID NO: 7049 - protein, 17 aa, synthetic construct
MYWYRQDTGHGLRLIHY

SEQ ID NO: 7050 - protein, 17 aa, synthetic construct
LSWYQQREGQAPVFLSY

SEQ ID NO: 7051 - protein, 17 aa, synthetic construct
MYWYRQDTGHGLRLIHY

SEQ ID NO: 7052 - protein, 17 aa, synthetic construct
FAWYRQHSGKAPKALMS

SEQ ID NO: 7053 - protein, 17 aa, synthetic construct
MYWYRQDTGHGLRLIHY

SEQ ID NO: 7054 - protein, 17 aa, synthetic construct
LQWYRQKSGEGPAQLIL

SEQ ID NO: 7055 - protein, 17 aa, synthetic construct
MYWYRQDTGHGLRLIHY

SEQ ID NO: 7056 - protein, 17 aa, synthetic construct
VQWYRQKSGKGPAQLIL

SEQ ID NO: 7057 - protein, 17 aa, synthetic construct
MYWYRQDTGHGLRLIHY

SEQ ID NO: 7058 - protein, 17 aa, synthetic construct
LFWYVQYPGEGPQFLFR

SEQ ID NO: 7059 - protein, 17 aa, synthetic construct
MYWYRQDTGHGLRLIHY

SEQ ID NO: 7060 - protein, 17 aa, synthetic construct
LFWYVRYPGEGLQLLLK

SEQ ID NO: 7061 - protein, 17 aa, synthetic construct
MYWYRQDTGHGLRLIHY

SEQ ID NO: 7062 - protein, 17 aa, synthetic construct
LQWFYQRPGGSLVSLLY

SEQ ID NO: 7063 - protein, 17 aa, synthetic construct
MYWYRQDTGHGLRLIHY

SEQ ID NO: 7064 - protein, 17 aa, synthetic construct
FPWYHQFPGESPALLIA

SEQ ID NO: 7065 - protein, 17 aa, synthetic construct
MYWYRQDTGHGLRLIHY

SEQ ID NO: 7066 - protein, 17 aa, synthetic construct
LFWYVQHLNEAPKLLLK

SEQ ID NO: 7067 - protein, 17 aa, synthetic construct
MYWYRQDTGHGLRLIHY

SEQ ID NO: 7068 - protein, 17 aa, synthetic construct
MQWFYQRPGGSLVSVFY

SEQ ID NO: 7069 - protein, 17 aa, synthetic construct
MYWYRQDTGHGLRLIHY

SEQ ID NO: 7070 - protein, 17 aa, synthetic construct
IWWYQQHPGKGPEALIS

SEQ ID NO: 7071 - protein, 17 aa, synthetic construct
MYWYRQDTGHGLRLIHY

SEQ ID NO: 7072 - protein, 17 aa, synthetic construct
LFWYKQTASGEIVFLIR

SEQ ID NO: 7073 - protein, 17 aa, synthetic construct
MYWYRQDTGHGLRLIHY

SEQ ID NO: 7074 - protein, 17 aa, synthetic construct
LFWYKQTASGEIVFLIR

SEQ ID NO: 7075 - protein, 17 aa, synthetic construct
MYWYRQDTGHGLRLIHY

SEQ ID NO: 7076 - protein, 17 aa, synthetic construct
LFWYVQYPGEGPQLLLK

SEQ ID NO: 7077 - protein, 17 aa, synthetic construct
MYWYRQDTGHGLRLIHY

SEQ ID NO: 7078 - protein, 17 aa, synthetic construct
MQWFYQRPEGSLVSLFY

SEQ ID NO: 7079 - protein, 17 aa, synthetic construct
MYWYRQDTGHGLRLIHY

SEQ ID NO: 7080 - protein, 17 aa, synthetic construct
LFWYVQYPGEGPQFLFR

SEQ ID NO: 7081 - protein, 17 aa, synthetic construct
MYWYRQDTGHGLRLIHY

SEQ ID NO: 7082 - protein, 17 aa, synthetic construct
FWWYRQHSGEGPKALMS

SEQ ID NO: 7083 - protein, 17 aa, synthetic construct
MYWYRQDTGHGLRLIHY

SEQ ID NO: 7084 - protein, 17 aa, synthetic construct
FFWYVQYLNEAPKLLLR

SEQ ID NO: 7085 - protein, 17 aa, synthetic construct
MYWYRQDTGHGLRLIHY

SEQ ID NO: 7086 - protein, 17 aa, synthetic construct
VQWFQQNSRGSLINLFY

SEQ ID NO: 7087 - protein, 17 aa, synthetic construct
MYWYRQDTGHGLRLIHY

SEQ ID NO: 7088 - protein, 17 aa, synthetic construct
FPWYKQEPGENPKLIID

SEQ ID NO: 7089 - protein, 17 aa, synthetic construct
MYWYRQDTGHGLRLIHY

SEQ ID NO: 7090 - protein, 17 aa, synthetic construct
FAWYRQHSGKAPKALMS

SEQ ID NO: 7091 - protein, 17 aa, synthetic construct
MYWYRQDTGHGLRLIHY

SEQ ID NO: 7092 - protein, 17 aa, synthetic construct
LFWYVRYPGEGLQLLLK

SEQ ID NO: 7093 - protein, 17 aa, synthetic construct
MYWYRQDTGHGLRLIHY

SEQ ID NO: 7094 - protein, 17 aa, synthetic construct
LFWYVQHLNEAPKLLLK

SEQ ID NO: 7095 - protein, 17 aa, synthetic construct
MYWYRQDTGHGLRLIHY

SEQ ID NO: 7096 - protein, 17 aa, synthetic construct
FPWYQQFPGEGPALLIS

SEQ ID NO: 7097 - protein, 17 aa, synthetic construct
MYWYRQDTGHGLRLIHY

SEQ ID NO: 7098 - protein, 17 aa, synthetic construct
FSWYKQEAGAGLQLLMS

SEQ ID NO: 7099 - protein, 17 aa, synthetic construct
MYWYRQDTGHGLRLIHY

SEQ ID NO: 7100 - protein, 17 aa, synthetic construct
LFWYVRYPGEGLQLLLK

SEQ ID NO: 7101 - protein, 17 aa, synthetic construct
MYWYRQDTGHGLRLIHY

SEQ ID NO: 7102 - protein, 17 aa, synthetic construct
FPWYKQEAGKSLHFVID

SEQ ID NO: 7103 - protein, 17 aa, synthetic construct
MYWYRQDTGHGLRLIHY

SEQ ID NO: 7104 - protein, 17 aa, synthetic construct
FPWYQQFPGEGPALLIS

SEQ ID NO: 7105 - protein, 17 aa, synthetic construct
MYWYRQDTGHGLRLIHY

SEQ ID NO: 7106 - protein, 17 aa, synthetic construct
LFWYVQYPGEGPQLLFK

SEQ ID NO: 7107 - protein, 17 aa, synthetic construct
MYWYRQDTGHGLRLIHY

SEQ ID NO: 7108 - protein, 17 aa, synthetic construct
LFWYVQYPRQGLQLLLK

SEQ ID NO: 7109 - protein, 17 aa, synthetic construct
MYWYRQDTGHGLRLIHY

SEQ ID NO: 7110 - protein, 17 aa, synthetic construct
LFWYKQTASGEIVFLIR

SEQ ID NO: 7111 - protein, 17 aa, synthetic construct
MYWYRQDTGHGLRLIHY

SEQ ID NO: 7112 - protein, 17 aa, synthetic construct
LSWYIQHHGRGLQFLLK

SEQ ID NO: 7113 - protein, 17 aa, synthetic construct
MYWYRQDTGHGLRLIHY

SEQ ID NO: 7114 - protein, 17 aa, synthetic construct
LFWYVRYPGEGLQLLLK

SEQ ID NO: 7115 - protein, 17 aa, synthetic construct
MYWYRQDTGHGLRLIHY

SEQ ID NO: 7116 - protein, 17 aa, synthetic construct
LFWYKHLLSGEMVFLIR

SEQ ID NO: 7117 - protein, 17 aa, synthetic construct
MYWYRQDTGHGLRLIHY

SEQ ID NO: 7118 - protein, 17 aa, synthetic construct
LFWYVRYPGEGLQLLLK

SEQ ID NO: 7119 - protein, 17 aa, synthetic construct
MYWYRQDTGHGLRLIHY

SEQ ID NO: 7120 - protein, 17 aa, synthetic construct
FPWYQQFPGEGPALLIS

SEQ ID NO: 7121 - protein, 17 aa, synthetic construct
MYWYRQDTGHGLRLIHY

SEQ ID NO: 7122 - protein, 17 aa, synthetic construct
LFWYKQTASGEIVFLIR

SEQ ID NO: 7123 - protein, 17 aa, synthetic construct
MYWYRQDTGHGLRLIHY

SEQ ID NO: 7124 - protein, 17 aa, synthetic construct
FPWYKQEPGENPKLIID

SEQ ID NO: 7125 - protein, 17 aa, synthetic construct
MYWYRQDTGHGLRLIHY

SEQ ID NO: 7126 - protein, 17 aa, synthetic construct
VQWFLQNPRGSLMNLFY

SEQ ID NO: 7127 - protein, 17 aa, synthetic construct
MYWYRQDTGHGLRLIHY

SEQ ID NO: 7128 - protein, 17 aa, synthetic construct
MQWFYQRPGGSLVSLFY

SEQ ID NO: 7129 - protein, 17 aa, synthetic construct
MYWYRQDTGHGLRLIHY

SEQ ID NO: 7130 - protein, 17 aa, synthetic construct
FYWYKQEPGAGLQLLMS

SEQ ID NO: 7131 - protein, 17 aa, synthetic construct
MYWYRQDTGHGLRLIHY

SEQ ID NO: 7132 - protein, 17 aa, synthetic construct
VQWFQQNHRGRLITLFY

SEQ ID NO: 7133 - protein, 17 aa, synthetic construct
MYWYRQDTGHGLRLIHY

SEQ ID NO: 7134 - protein, 17 aa, synthetic construct
LFWYVQHLNEAPKLLLK

SEQ ID NO: 7135 - protein, 17 aa, synthetic construct
MYWYRQDTGHGLRLIHY

SEQ ID NO: 7136 - protein, 17 aa, synthetic construct
FPWYKQEPGENPKLIID

SEQ ID NO: 7137 - protein, 17 aa, synthetic construct
MYWYRQDTGHGLRLIHY

SEQ ID NO: 7138 - protein, 17 aa, synthetic construct
LFWYKQTASGEIVFLIR

SEQ ID NO: 7139 - protein, 17 aa, synthetic construct
MYWYRQDTGHGLRLIHY

SEQ ID NO: 7140 - protein, 17 aa, synthetic construct
LFWYVQYPRQGLQLLLK

SEQ ID NO: 7141 - protein, 17 aa, synthetic construct
MYWYRQDTGHGLRLIHY

SEQ ID NO: 7142 - protein, 17 aa, synthetic construct
LFWYKQTASGEIVFLIR

SEQ ID NO: 7143 - protein, 17 aa, synthetic construct
MYWYRQDTGHGLRLIHY

SEQ ID NO: 7144 - protein, 17 aa, synthetic construct
LFWYKQTASGEIVFLIR

SEQ ID NO: 7145 - protein, 17 aa, synthetic construct
MYWYRQDTGHGLRLIHY

SEQ ID NO: 7146 - protein, 17 aa, synthetic construct
LFWYKQTASGEIVFLIR

SEQ ID NO: 7147 - protein, 17 aa, synthetic construct
MYWYQKKPNQAPKLLLF

SEQ ID NO: 7148 - protein, 17 aa, synthetic construct
FFWYKQEPGAGLQLLMK

SEQ ID NO: 7149 - protein, 17 aa, synthetic construct
MYWYQKKPNQAPKLLLF

SEQ ID NO: 7150 - protein, 17 aa, synthetic construct
LFWYKQTASGEIVFLIR

SEQ ID NO: 7151 - protein, 17 aa, synthetic construct
MYWYQKKPNQAPKLLLF

SEQ ID NO: 7152 - protein, 17 aa, synthetic construct
LFWYVRYPGEGLQLLLK

SEQ ID NO: 7153 - protein, 17 aa, synthetic construct
MYWYQKKPNQAPKLLLF

SEQ ID NO: 7154 - protein, 17 aa, synthetic construct
LFWYVRYPGEGLQLLLK

SEQ ID NO: 7155 - protein, 17 aa, synthetic construct
MYWYQKKPNQAPKLLLF

SEQ ID NO: 7156 - protein, 17 aa, synthetic construct
FWWYRQHSGEGPKALMS

SEQ ID NO: 7157 - protein, 17 aa, synthetic construct
MYWYQKKPNQAPKLLLF

SEQ ID NO: 7158 - protein, 17 aa, synthetic construct
FWWYRQHSGEGPKALMS

SEQ ID NO: 7159 - protein, 17 aa, synthetic construct
MYWYQKKPNQAPKLLLF

SEQ ID NO: 7160 - protein, 17 aa, synthetic construct
FPWYKQEAGKSLHFVID

SEQ ID NO: 7161 - protein, 17 aa, synthetic construct
MYWYQKKPNQAPKLLLF

SEQ ID NO: 7162 - protein, 17 aa, synthetic construct
LFWYVQYPGQSLQFLLK

SEQ ID NO: 7163 - protein, 17 aa, synthetic construct
MYWYQKKPNQAPKLLLF

SEQ ID NO: 7164 - protein, 17 aa, synthetic construct
MQWFYQRPGGSLVSLFY

SEQ ID NO: 7165 - protein, 17 aa, synthetic construct
MYWYQKKPNQAPKLLLF

SEQ ID NO: 7166 - protein, 17 aa, synthetic construct
LFWYKQTASGEIVFLIR

SEQ ID NO: 7167 - protein, 17 aa, synthetic construct
MYWYQKKPNQAPKLLLF

SEQ ID NO: 7168 - protein, 17 aa, synthetic construct
LFWYVRYPGEGLQLLLK

SEQ ID NO: 7169 - protein, 17 aa, synthetic construct
MYWYQKKPNQAPKLLLF

SEQ ID NO: 7170 - protein, 17 aa, synthetic construct
LSWYQQREGHAPVFLSY

SEQ ID NO: 7171 - protein, 17 aa, synthetic construct
MYWYQKKPNQAPKLLLF

SEQ ID NO: 7172 - protein, 17 aa, synthetic construct
FFWYKQEPGAGLQLLMK

SEQ ID NO: 7173 - protein, 17 aa, synthetic construct
MYWYQKKPNQAPKLLLF

SEQ ID NO: 7174 - protein, 17 aa, synthetic construct
LFWYKQTASGEIVFLIR

SEQ ID NO: 7175 - protein, 17 aa, synthetic construct
LFWYRQTKIQGLELLSY

SEQ ID NO: 7176 - protein, 17 aa, synthetic construct
LFWYKQTASGEIVFLIR

SEQ ID NO: 7177 - protein, 17 aa, synthetic construct
VVWYQQTLGKELKFLIQ

SEQ ID NO: 7178 - protein, 17 aa, synthetic construct
LFWYVQYPRQGLQLLLK

SEQ ID NO: 7179 - protein, 17 aa, synthetic construct
LYWYWQATGGTLQQLFY

SEQ ID NO: 7180 - protein, 17 aa, synthetic construct
FAWYRQHSGKAPKALMS

SEQ ID NO: 7181 - protein, 17 aa, synthetic construct
LYWYWQATGGTLQQLFY

SEQ ID NO: 7182 - protein, 17 aa, synthetic construct
FPWYHQFPGESPALLIA

SEQ ID NO: 7183 - protein, 17 aa, synthetic construct
LYWYWQATGGTLQQLFY

SEQ ID NO: 7184 - protein, 17 aa, synthetic construct
FSWYKQEAGAGLQLLMS

SEQ ID NO: 7185 - protein, 17 aa, synthetic construct
LYWYWQATGGTLQQLFY

SEQ ID NO: 7186 - protein, 17 aa, synthetic construct
FPWYKQEPGENPKLIID

SEQ ID NO: 7187 - protein, 17 aa, synthetic construct
LYWYWQATGGTLQQLFY

SEQ ID NO: 7188 - protein, 17 aa, synthetic construct
FPWYRLFPGESPALLIA

SEQ ID NO: 7189 - protein, 17 aa, synthetic construct
LYWYWQATGGTLQQLFY

SEQ ID NO: 7190 - protein, 17 aa, synthetic construct
LFWYVRYPGEGLQLLLK

SEQ ID NO: 7191 - protein, 17 aa, synthetic construct
LYWYWQATGGTLQQLFY

SEQ ID NO: 7192 - protein, 17 aa, synthetic construct
LFWYKQTASGEIVFLIR

SEQ ID NO: 7193 - protein, 17 aa, synthetic construct
LYWYWQATGGTLQQLFY

SEQ ID NO: 7194 - protein, 17 aa, synthetic construct
FFWYKQEPGASLQLLMK

SEQ ID NO: 7195 - protein, 17 aa, synthetic construct
LYWYWQATGGTLQQLFY

SEQ ID NO: 7196 - protein, 17 aa, synthetic construct
FPWYKQEAGKGLHFVID

SEQ ID NO: 7197 - protein, 17 aa, synthetic construct
LYWYWQATGGTLQQLFY

SEQ ID NO: 7198 - protein, 17 aa, synthetic construct
VHWYRQDSGRGPALIIL

SEQ ID NO: 7199 - protein, 17 aa, synthetic construct
FYWYKQILGQQMEFLVN

SEQ ID NO: 7200 - protein, 17 aa, synthetic construct
LFWYVQYPRQGLQLLLK

SEQ ID NO: 7201 - protein, 17 aa, synthetic construct
FYWYKQILGQQMEFLVN

SEQ ID NO: 7202 - protein, 17 aa, synthetic construct
VQWFRKNSRGSLINLFY

SEQ ID NO: 7203 - protein, 17 aa, synthetic construct
FYWYKQILGQQMEFLVN

SEQ ID NO: 7204 - protein, 17 aa, synthetic construct
LFWYKQTASGEIVFLIR

SEQ ID NO: 7205 - protein, 17 aa, synthetic construct
FYWYKQILGQQMEFLVN

SEQ ID NO: 7206 - protein, 17 aa, synthetic construct
FPWYQQFPGEGPALLIS

SEQ ID NO: 7207 - protein, 17 aa, synthetic construct
FYWYKQILGQQMEFLVN

SEQ ID NO: 7208 - protein, 17 aa, synthetic construct
VQWFRQNSRGSLINLFY

SEQ ID NO: 7209 - protein, 17 aa, synthetic construct
FYWYKQILGQQMEFLVN

SEQ ID NO: 7210 - protein, 17 aa, synthetic construct
VQWYRQKSGKGPALIIL

SEQ ID NO: 7211 - protein, 17 aa, synthetic construct
FYWYKQILGQQMEFLVN

SEQ ID NO: 7212 - protein, 17 aa, synthetic construct
MQWFYQRPGGSLISVFY

SEQ ID NO: 7213 - protein, 17 aa, synthetic construct
FYWYKQILGQQMEFLVN

SEQ ID NO: 7214 - protein, 17 aa, synthetic construct
LFWYKQTASGEIVFLIR

SEQ ID NO: 7215 - protein, 17 aa, synthetic construct
FYWYKQILGQQMEFLVN

SEQ ID NO: 7216 - protein, 17 aa, synthetic construct
FAWYKKYPDNSPTLLIS

SEQ ID NO: 7217 - protein, 17 aa, synthetic construct
FYWYKQILGQQMEFLVN

SEQ ID NO: 7218 - protein, 17 aa, synthetic construct
LFWYVQYPRQGLQLLLK

SEQ ID NO: 7219 - protein, 17 aa, synthetic construct
FYWYKQILGQQMEFLVN

SEQ ID NO: 7220 - protein, 17 aa, synthetic construct
LFWYVQYPRQGLQLLLK

SEQ ID NO: 7221 - protein, 17 aa, synthetic construct
FYWYKQILGQQMEFLVN

SEQ ID NO: 7222 - protein, 17 aa, synthetic construct
FWWYRQHSGKSPKMLMS

SEQ ID NO: 7223 - protein, 17 aa, synthetic construct
VAWYRQSPQKTFELIAL

SEQ ID NO: 7224 - protein, 17 aa, synthetic construct
MQWFYQRPGGSLVSLFY

SEQ ID NO: 7225 - protein, 17 aa, synthetic construct
VAWYRQSPQKTFELIAL

SEQ ID NO: 7226 - protein, 17 aa, synthetic construct
FSWYKQEAGAGLQLLMS

SEQ ID NO: 7227 - protein, 17 aa, synthetic construct
VAWYRQSPQKTFELIAL

SEQ ID NO: 7228 - protein, 17 aa, synthetic construct
VQWFRQNSRGSLINLFY

SEQ ID NO: 7229 - protein, 17 aa, synthetic construct
VAWYRQSPQKTFELIAL

SEQ ID NO: 7230 - protein, 17 aa, synthetic construct
LFWYVQHLNEAPKLLLK

SEQ ID NO: 7231 - protein, 17 aa, synthetic construct
VAWYRQSPQKTFELIAL

SEQ ID NO: 7232 - protein, 17 aa, synthetic construct
FWWYRQHSGKSPKMLMS

SEQ ID NO: 7233 - protein, 17 aa, synthetic construct
VAWYRQSPQKTFELIAL

SEQ ID NO: 7234 - protein, 17 aa, synthetic construct
LFWYVQYPRQGLQLLLK

SEQ ID NO: 7235 - protein, 17 aa, synthetic construct
VAWYRQSPQKTFELIAL

SEQ ID NO: 7236 - protein, 17 aa, synthetic construct
FWWYRQHSGEGPKALMS

SEQ ID NO: 7237 - protein, 17 aa, synthetic construct
VAWYRQSPQKTFELIAL

SEQ ID NO: 7238 - protein, 17 aa, synthetic construct
LFWYVQYPGEGPQLLFR

SEQ ID NO: 7239 - protein, 17 aa, synthetic construct
VAWYRQSPQKTFELIAL

SEQ ID NO: 7240 - protein, 17 aa, synthetic construct
LQWFYQSPGGSLVSLLS

SEQ ID NO: 7241 - protein, 17 aa, synthetic construct
VAWYRQSPQKTFELIAL

SEQ ID NO: 7242 - protein, 17 aa, synthetic construct
FWWYRQHSGEGPKALMS

SEQ ID NO: 7243 - protein, 17 aa, synthetic construct
VAWYRQSPQKTFELIAL

SEQ ID NO: 7244 - protein, 17 aa, synthetic construct
LQWYRQKSGEGPAQLIL

SEQ ID NO: 7245 - protein, 17 aa, synthetic construct
VAWYRQSPQKTFELIAL

SEQ ID NO: 7246 - protein, 17 aa, synthetic construct
LFWYKQTASGEIVFLIR

SEQ ID NO: 7247 - protein, 17 aa, synthetic construct
VAWYRQSPQKTFELIAL

SEQ ID NO: 7248 - protein, 17 aa, synthetic construct
VQWFLQNPRGSLINLFY

SEQ ID NO: 7249 - protein, 17 aa, synthetic construct
VAWYRQSPQKTFELIAL

SEQ ID NO: 7250 - protein, 17 aa, synthetic construct
FPWYKQEAGKGLHFVID

SEQ ID NO: 7251 - protein, 17 aa, synthetic construct
MYWYRQDSGKGLRLIYY

SEQ ID NO: 7252 - protein, 17 aa, synthetic construct
MQWFYQRPGGSLVSLFY

SEQ ID NO: 7253 - protein, 17 aa, synthetic construct
MYWYRQDSGKGLRLIYY

SEQ ID NO: 7254 - protein, 17 aa, synthetic construct
FRWYRQHSAKGLEVLVS

SEQ ID NO: 7255 - protein, 17 aa, synthetic construct
MYWYRQDSGKGLRLIYY

SEQ ID NO: 7256 - protein, 17 aa, synthetic construct
LFWYVQYPGEGPQLLLK

SEQ ID NO: 7257 - protein, 17 aa, synthetic construct
MYWYRQDSGKGLRLIYY

SEQ ID NO: 7258 - protein, 17 aa, synthetic construct
IYWYRQVPHQGPQFIIQ

SEQ ID NO: 7259 - protein, 17 aa, synthetic construct
MYWYRQDSGKGLRLIYY

SEQ ID NO: 7260 - protein, 17 aa, synthetic construct
LFWYKQTASGEIVFLIR

SEQ ID NO: 7261 - protein, 17 aa, synthetic construct
MYWYRQDSGKGLRLIYY

SEQ ID NO: 7262 - protein, 17 aa, synthetic construct
LFWYVQCPGEGPQFLFR

SEQ ID NO: 7263 - protein, 17 aa, synthetic construct
MYWYRQDSGKGLRLIYY

SEQ ID NO: 7264 - protein, 17 aa, synthetic construct
LFWYVQYPRQGLQLLLK

SEQ ID NO: 7265 - protein, 17 aa, synthetic construct
MYWYRQDSGKGLRLIYY

SEQ ID NO: 7266 - protein, 17 aa, synthetic construct
LFWYKQTASGEIVFLIR

SEQ ID NO: 7267 - protein, 17 aa, synthetic construct
MYWYRQDSGKGLRLIYY

SEQ ID NO: 7268 - protein, 17 aa, synthetic construct
LFWYVQHLNEAPKLLLK

SEQ ID NO: 7269 - protein, 17 aa, synthetic construct
MYWYRQDSGKGLRLIYY

SEQ ID NO: 7270 - protein, 17 aa, synthetic construct
LFWYVRYPGEGLQLLLK

SEQ ID NO: 7271 - protein, 17 aa, synthetic construct
MYWYRQDSGKGLRLIYY

SEQ ID NO: 7272 - protein, 17 aa, synthetic construct
FFWYKQEPGASLQLLMK

SEQ ID NO: 7273 - protein, 17 aa, synthetic construct
MYWYRQDSGKGLRLIYY

SEQ ID NO: 7274 - protein, 17 aa, synthetic construct
LFWYVQHLNEAPKLLLK

SEQ ID NO: 7275 - protein, 17 aa, synthetic construct
MYWYRQDSGKGLRLIYY

SEQ ID NO: 7276 - protein, 17 aa, synthetic construct
FSWYKQEAGAGLQLLMS

SEQ ID NO: 7277 - protein, 17 aa, synthetic construct
MYWYRQDSGKGLRLIYY

SEQ ID NO: 7278 - protein, 17 aa, synthetic construct
LFWYVQYPGEGPQLLFK

SEQ ID NO: 7279 - protein, 17 aa, synthetic construct
MYWYRQDSGKGLRLIYY

SEQ ID NO: 7280 - protein, 17 aa, synthetic construct
MQWFYQRPEGSLVSLFY

SEQ ID NO: 7281 - protein, 17 aa, synthetic construct
MYWYRQDSGKGLRLIYY

SEQ ID NO: 7282 - protein, 17 aa, synthetic construct
FPWYQQFPGEGPALLIS

SEQ ID NO: 7283 - protein, 17 aa, synthetic construct
MYWYRQDSGKGLRLIYY

SEQ ID NO: 7284 - protein, 17 aa, synthetic construct
FFWYKQEPGAGLQLLMK

SEQ ID NO: 7285 - protein, 17 aa, synthetic construct
MYWYRQDSGKGLRLIYY

SEQ ID NO: 7286 - protein, 17 aa, synthetic construct
FRWYRQHSGKGLEVLVS

SEQ ID NO: 7287 - protein, 17 aa, synthetic construct
MYWYRQDSGKGLRLIYY

SEQ ID NO: 7288 - protein, 17 aa, synthetic construct
FWWYRQHSGKSPKMLMS

SEQ ID NO: 7289 - protein, 17 aa, synthetic construct
MYWYRQDSGKGLRLIYY

SEQ ID NO: 7290 - protein, 17 aa, synthetic construct
VHWYRQDSGRGPALIIL

SEQ ID NO: 7291 - protein, 17 aa, synthetic construct
MYWYRQDSGKGLRLIYY

SEQ ID NO: 7292 - protein, 17 aa, synthetic construct
IYWYRQVPLQGPEYVTH

SEQ ID NO: 7293 - protein, 17 aa, synthetic construct
MYWYRQDSGKGLRLIYY

SEQ ID NO: 7294 - protein, 17 aa, synthetic construct
LFWYVQYPRQGLQLLLK

SEQ ID NO: 7295 - protein, 17 aa, synthetic construct
MYWYRQDSGKGLRLIYY

SEQ ID NO: 7296 - protein, 17 aa, synthetic construct
LFWYVQHLNEAPKLLLK

SEQ ID NO: 7297 - protein, 17 aa, synthetic construct
MYWYRQDSGKGLRLIYY

SEQ ID NO: 7298 - protein, 17 aa, synthetic construct
VQWYRQKSGKGPALIIL

SEQ ID NO: 7299 - protein, 17 aa, synthetic construct
MYWYRQDSGKGLRLIYY

SEQ ID NO: 7300 - protein, 17 aa, synthetic construct
LQWFYQSPGGSLVSLLS

SEQ ID NO: 7301 - protein, 17 aa, synthetic construct
MYWYRQDSGKGLRLIYY

SEQ ID NO: 7302 - protein, 17 aa, synthetic construct
LFWYVQHLNEAPKLLLK

SEQ ID NO: 7303 - protein, 17 aa, synthetic construct
MYWYRQDSGKGLRLIYY

SEQ ID NO: 7304 - protein, 17 aa, synthetic construct
LFWYVQHLNEAPKLLLK

SEQ ID NO: 7305 - protein, 17 aa, synthetic construct
MYWYRQDSGKGLRLIYY

SEQ ID NO: 7306 - protein, 17 aa, synthetic construct
LFWYVQYPRQGLQMLLK

SEQ ID NO: 7307 - protein, 17 aa, synthetic construct
MYWYRQDSGKGLRLIYY

SEQ ID NO: 7308 - protein, 17 aa, synthetic construct
LQWFYQHPGGRLVSLFY

SEQ ID NO: 7309 - protein, 17 aa, synthetic construct
MYWYRQDSGKGLRLIYY

SEQ ID NO: 7310 - protein, 17 aa, synthetic construct
FWWYRQHSGEGPKALMS

SEQ ID NO: 7311 - protein, 17 aa, synthetic construct
MYWYRQDSGKGLRLIYY

SEQ ID NO: 7312 - protein, 17 aa, synthetic construct
MQWFYQRPEGSLVSLFY

SEQ ID NO: 7313 - protein, 17 aa, synthetic construct
MYWYRQDSGKGLRLIYY

SEQ ID NO: 7314 - protein, 17 aa, synthetic construct
LFWYKQTASGEIVFLIR

SEQ ID NO: 7315 - protein, 17 aa, synthetic construct
MYWYRQDSGKGLRLIYY

SEQ ID NO: 7316 - protein, 17 aa, synthetic construct
VQWFLQNPRGSLMNLFY

SEQ ID NO: 7317 - protein, 17 aa, synthetic construct
MYWYRQDSGKGLRLIYY

SEQ ID NO: 7318 - protein, 17 aa, synthetic construct
FYWYKQEPGAGLQLLMS

SEQ ID NO: 7319 - protein, 17 aa, synthetic construct
MYWYRQDSGKGLRLIYY

SEQ ID NO: 7320 - protein, 17 aa, synthetic construct
FWWYRQHSGKAPKALMS

SEQ ID NO: 7321 - protein, 17 aa, synthetic construct
MYWYRQDSGKGLRLIYY

SEQ ID NO: 7322 - protein, 17 aa, synthetic construct
LFWYVRYPGEGLQLLLK

SEQ ID NO: 7323 - protein, 17 aa, synthetic construct
MYWYRQDSGKGLRLIYY

SEQ ID NO: 7324 - protein, 17 aa, synthetic construct
LFWYKQTASGEIVFLIR

SEQ ID NO: 7325 - protein, 17 aa, synthetic construct
MYWYRQDSGKGLRLIYY

SEQ ID NO: 7326 - protein, 17 aa, synthetic construct
LFWYKQTASGEIVFLIR

SEQ ID NO: 7327 - protein, 17 aa, synthetic construct
MYWYRQDSGKGLRLIYY

SEQ ID NO: 7328 - protein, 17 aa, synthetic construct
FPWYQQFPGEGPALLIS

SEQ ID NO: 7329 - protein, 17 aa, synthetic construct
MYWYRQDSGKGLRLIYY

SEQ ID NO: 7330 - protein, 17 aa, synthetic construct
LFWYVQYPRQGLQLLLK

SEQ ID NO: 7331 - protein, 17 aa, synthetic construct
MYWYRQDSGKGLRLIYY

SEQ ID NO: 7332 - protein, 17 aa, synthetic construct
LFWYVQYPGQGPQLLLK

SEQ ID NO: 7333 - protein, 17 aa, synthetic construct
MYWYRQDSGKGLRLIYY

SEQ ID NO: 7334 - protein, 17 aa, synthetic construct
FPWYKQEAGKSLHFVID

SEQ ID NO: 7335 - protein, 17 aa, synthetic construct
MYWYRQDSGKGLRLIYY

SEQ ID NO: 7336 - protein, 17 aa, synthetic construct
FSWYKQEAGAGLQLLMS

SEQ ID NO: 7337 - protein, 17 aa, synthetic construct
MYWYRQDSGKGLRLIYY

SEQ ID NO: 7338 - protein, 17 aa, synthetic construct
LFWYVQHLNESPRLLLK

SEQ ID NO: 7339 - protein, 17 aa, synthetic construct
MYWYRQDSGKGLRLIYY

SEQ ID NO: 7340 - protein, 17 aa, synthetic construct
LFWYVQYSGEGPQLLLQ

SEQ ID NO: 7341 - protein, 17 aa, synthetic construct
MYWYRQDSGKGLRLIYY

SEQ ID NO: 7342 - protein, 17 aa, synthetic construct
FWWYRQHSGEGPKALMS

SEQ ID NO: 7343 - protein, 17 aa, synthetic construct
MYWYRQDSGKGLRLIYY

SEQ ID NO: 7344 - protein, 17 aa, synthetic construct
LFWYVRYPGEGLQLLLK

SEQ ID NO: 7345 - protein, 17 aa, synthetic construct
MYWYRQDSGKGLRLIYY

SEQ ID NO: 7346 - protein, 17 aa, synthetic construct
FPWYQQFPGEGPALLIS

SEQ ID NO: 7347 - protein, 17 aa, synthetic construct
MYWYRQDSGKGLRLIYY

SEQ ID NO: 7348 - protein, 17 aa, synthetic construct
LFWYVRYPGEGLQLLLK

SEQ ID NO: 7349 - protein, 17 aa, synthetic construct
MYWYRQDSGKGLRLIYY

SEQ ID NO: 7350 - protein, 17 aa, synthetic construct
FPWYKQEPGENPKLIID

SEQ ID NO: 7351 - protein, 17 aa, synthetic construct
MYWYRQDSGKGLRLIYY

SEQ ID NO: 7352 - protein, 17 aa, synthetic construct
IYWYRQVPHQGPQFIIQ

SEQ ID NO: 7353 - protein, 17 aa, synthetic construct
MYWYRQDSGKGLRLIYY

SEQ ID NO: 7354 - protein, 17 aa, synthetic construct
FFWYKQEPGASLQLLMK

SEQ ID NO: 7355 - protein, 17 aa, synthetic construct
MYWYRQDSGKGLRLIYY

SEQ ID NO: 7356 - protein, 17 aa, synthetic construct
LFWYVQHLNEAPKLLLK

SEQ ID NO: 7357 - protein, 17 aa, synthetic construct
MSWYQQDLQKQLQWLFT

SEQ ID NO: 7358 - protein, 17 aa, synthetic construct
LFWYVQYPRQGLQLLLK

SEQ ID NO: 7359 - protein, 17 aa, synthetic construct
MSWYQQDLQKQLQWLFT

SEQ ID NO: 7360 - protein, 17 aa, synthetic construct
LFWYVQYPRQGLQLLLK

SEQ ID NO: 7361 - protein, 17 aa, synthetic construct
MSWYQQDLQKQLQWLFT

SEQ ID NO: 7362 - protein, 17 aa, synthetic construct
LFWYVRYPGEGLQLLLK

SEQ ID NO: 7363 - protein, 17 aa, synthetic construct
MSWYQQDLQKQLQWLFT

SEQ ID NO: 7364 - protein, 17 aa, synthetic construct
FYWYKQEPGAGLQLLMS

SEQ ID NO: 7365 - protein, 17 aa, synthetic construct
MSWYQQDLQKQLQWLFT

SEQ ID NO: 7366 - protein, 17 aa, synthetic construct
LFWYVHYLNESPRLLLK

SEQ ID NO: 7367 - protein, 17 aa, synthetic construct
MSWYQQDLQKQLQWLFT

SEQ ID NO: 7368 - protein, 17 aa, synthetic construct
LFWYVQYPRQGLQLLLK

SEQ ID NO: 7369 - protein, 17 aa, synthetic construct
MSWYQQDLQKQLQWLFT

SEQ ID NO: 7370 - protein, 17 aa, synthetic construct
LSWYQQREGQAPVFLSY

SEQ ID NO: 7371 - protein, 17 aa, synthetic construct
MSWYQQDLQKQLQWLFT

SEQ ID NO: 7372 - protein, 17 aa, synthetic construct
LRWFKQDTGKGLVSLTV

SEQ ID NO: 7373 - protein, 17 aa, synthetic construct
MSWYQQDLQKQLQWLFT

SEQ ID NO: 7374 - protein, 17 aa, synthetic construct
LFWYVQHLNEAPKLLLK

SEQ ID NO: 7375 - protein, 17 aa, synthetic construct
MSWYQQDLQKQLQWLFT

SEQ ID NO: 7376 - protein, 17 aa, synthetic construct
LFWYVQYPRQGLQLLLK

SEQ ID NO: 7377 - protein, 17 aa, synthetic construct
MSWYQQDLQKQLQWLFT

SEQ ID NO: 7378 - protein, 17 aa, synthetic construct
FPWYQQFPGEGPALLIS

SEQ ID NO: 7379 - protein, 17 aa, synthetic construct
MSWYQQDLQKQLQWLFT

SEQ ID NO: 7380 - protein, 17 aa, synthetic construct
FPWYKQEPGENPKLIID

SEQ ID NO: 7381 - protein, 17 aa, synthetic construct
MSWYQQDLQKQLQWLFT

SEQ ID NO: 7382 - protein, 17 aa, synthetic construct
LFWYVQYPRQGLQLLLK

SEQ ID NO: 7383 - protein, 17 aa, synthetic construct
MSWYQQDLQKQLQWLFT

SEQ ID NO: 7384 - protein, 17 aa, synthetic construct
MQWFYQRPGGSLVSLFY

SEQ ID NO: 7385 - protein, 17 aa, synthetic construct
MSWYQQDLQKQLQWLFT

SEQ ID NO: 7386 - protein, 17 aa, synthetic construct
FFWYKQEPGAGLQLLMK

SEQ ID NO: 7387 - protein, 17 aa, synthetic construct
MSWYQQDLQKQLQWLFT

SEQ ID NO: 7388 - protein, 17 aa, synthetic construct
LFWYKQTASGEIVFLIR

SEQ ID NO: 7389 - protein, 17 aa, synthetic construct
MSWYQQDLQKQLQWLFT

SEQ ID NO: 7390 - protein, 17 aa, synthetic construct
VHWYRQDSGRGPALIIL

SEQ ID NO: 7391 - protein, 17 aa, synthetic construct
MSWYQQDLQKQLQWLFT

SEQ ID NO: 7392 - protein, 17 aa, synthetic construct
LFWYVQYPRQGLQLLLK

SEQ ID NO: 7393 - protein, 17 aa, synthetic construct
MSWYQQDLQKQLQWLFT

SEQ ID NO: 7394 - protein, 17 aa, synthetic construct
FWWYRQHSGEGPKALMS

SEQ ID NO: 7395 - protein, 17 aa, synthetic construct
MSWYQQDLQKQLQWLFT

SEQ ID NO: 7396 - protein, 17 aa, synthetic construct
MQWFYQRPEGSLVSLFY

SEQ ID NO: 7397 - protein, 17 aa, synthetic construct
MSWYQQDLQKQLQWLFT

SEQ ID NO: 7398 - protein, 17 aa, synthetic construct
LFWYVRYPGEGLQLLLK

SEQ ID NO: 7399 - protein, 17 aa, synthetic construct
MSWYQQDLQKQLQWLFT

SEQ ID NO: 7400 - protein, 17 aa, synthetic construct
LFWYVRYPGEGLQLLLK

SEQ ID NO: 7401 - protein, 17 aa, synthetic construct
MSWYQQDLQKQLQWLFT

SEQ ID NO: 7402 - protein, 17 aa, synthetic construct
LRWFKQDTGKGLVSLTV

SEQ ID NO: 7403 - protein, 17 aa, synthetic construct
MSWYQQDLQKQLQWLFT

SEQ ID NO: 7404 - protein, 17 aa, synthetic construct
FFWYKQEPGASLQLLMK

SEQ ID NO: 7405 - protein, 17 aa, synthetic construct
MSWYQQDLQKQLQWLFT

SEQ ID NO: 7406 - protein, 17 aa, synthetic construct
FWWYRQHSGEGPKALMS

SEQ ID NO: 7407 - protein, 17 aa, synthetic construct
MSWYQQDLQKQLQWLFT

SEQ ID NO: 7408 - protein, 17 aa, synthetic construct
FPWYKQEPGENPKLIID

SEQ ID NO: 7409 - protein, 17 aa, synthetic construct
MSWYQQDLQKQLQWLFT

SEQ ID NO: 7410 - protein, 17 aa, synthetic construct
LFWYVQYPGEGPQFLFR

SEQ ID NO: 7411 - protein, 17 aa, synthetic construct
MSWYQQDLQKQLQWLFT

SEQ ID NO: 7412 - protein, 17 aa, synthetic construct
LFWYVQYPGEGPQFLFR

SEQ ID NO: 7413 - protein, 17 aa, synthetic construct
MSWYQQDLQKQLQWLFT

SEQ ID NO: 7414 - protein, 17 aa, synthetic construct
FWWYRQHSGKAPKALMS

SEQ ID NO: 7415 - protein, 17 aa, synthetic construct
MSWYQQDLQKQLQWLFT

SEQ ID NO: 7416 - protein, 17 aa, synthetic construct
LFWYVQYPRQGLQLLLK

SEQ ID NO: 7417 - protein, 17 aa, synthetic construct
MSWYQQDLQKQLQWLFT

SEQ ID NO: 7418 - protein, 17 aa, synthetic construct
FPWYHQFPGESPALLIA

SEQ ID NO: 7419 - protein, 17 aa, synthetic construct
MSWYQQDLQKQLQWLFT

SEQ ID NO: 7420 - protein, 17 aa, synthetic construct
LFWYVHYLNESPRLLLK

SEQ ID NO: 7421 - DNA, 51 bp, synthetic construct
  source 1..51: mol_type = other DNA
ctttactggtatcagcagcccagagaccaggggccccagcttctagtttac

SEQ ID NO: 7422 - DNA, 51 bp, synthetic construct
  source 1..51: mol_type = other DNA
ttctggtggtacagacagcattctggagaaggccccaaggcactgatgtca

SEQ ID NO: 7423 - DNA, 51 bp, synthetic construct
  source 1..51: mol_type = other DNA
atgtactggtatcggcaggacacggggcatgggctgaggctgatccattat

SEQ ID NO: 7424 - DNA, 51 bp, synthetic construct
  source 1..51: mol_type = other DNA
ttatcctggtaccagcaacgtgaaggccacgcccccgtatttctttcttat

SEQ ID NO: 7425 - DNA, 51 bp, synthetic construct; identical to SEQ ID NO: 7423
  source 1..51: mol_type = other DNA

SEQ ID NO: 7426 - DNA, 51 bp, synthetic construct
  source 1..51: mol_type = other DNA
ttattctggtacaagcaaacagcaagtggggaaatagttttccttattcgt

SEQ ID NO: 7427 - DNA, 51 bp, synthetic construct
  source 1..51: mol_type = other DNA
atgtactggtatcggcaggacacggggcatgggctgaggctgatccattac

SEQ ID NO: 7428 - DNA, 51 bp, synthetic construct
  source 1..51: mol_type = other DNA
cttttctggtatgtgcaacatctcaacgaagcccctaagctactcctgaag

SEQ ID NO: 7429 - DNA, 51 bp, synthetic construct; identical to SEQ ID NO: 7423
  source 1..51: mol_type = other DNA

SEQ ID NO: 7430 - DNA, 51 bp, synthetic construct
  source 1..51: mol_type = other DNA
atgcagtggttttaccaacgtcctgggggaagtctcgtcagcctgttctac

SEQ ID NO: 7431 - DNA, 51 bp, synthetic construct; identical to SEQ ID NO: 7421
  source 1..51: mol_type = other DNA

SEQ ID NO: 7432 - DNA, 51 bp, synthetic construct
  source 1..51: mol_type = other DNA
ctgttctggtatgtccagtacccgcggcaggggctgcagctgctcctcaag

SEQ ID NO: 7433 - DNA, 51 bp, synthetic construct; identical to SEQ ID NO: 7423
  source 1..51: mol_type = other DNA

SEQ ID NO: 7434 - DNA, 51 bp, synthetic construct
  source 1..51: mol_type = other DNA
ctgttctggtatgtgcagtatcccggagaagggccacagctcctctttaga

SEQ ID NO: 7435 - DNA, 51 bp, synthetic construct
  source 1..51: mol_type = other DNA
atgtattggtatagacaaagtgctaagaagcctctagagttcatgttttcc

SEQ ID NO: 7436 - DNA, 51 bp, synthetic construct; identical to SEQ ID NO: 7424
  source 1..51: mol_type = other DNA

SEQ ID NO: 7437 - DNA, 51 bp, synthetic construct
  source 1..51: mol_type = other DNA
gttttctggtacagacagaccattgtgcagggcctggagttcctgacttac

SEQ ID NO: 7438 - DNA, 51 bp, synthetic construct
  source 1..51: mol_type = other DNA
gtgcagtggttccgacagaattccaggggcagcctcatcagtttgttctac

SEQ ID NO: 7439 - DNA, 51 bp, synthetic construct; identical to SEQ ID NO: 7423
  source 1..51: mol_type = other DNA

SEQ ID NO: 7440 - DNA, 51 bp, synthetic construct; identical to SEQ ID NO: 7432
  source 1..51: mol_type = other DNA

SEQ ID NO: 7441 - DNA, 51 bp, synthetic construct; identical to SEQ ID NO: 7427
  source 1..51: mol_type = other DNA

SEQ ID NO: 7442 - DNA, 51 bp, synthetic construct
  source 1..51: mol_type = other DNA
ttctcctggtataagcaagaggcgggggcaggtcttcagttgcttatgagt

SEQ ID NO: 7443 - DNA, 51 bp, synthetic construct
  source 1..51: mol_type = other DNA
atgagctggtatcagcaggatctccaaaagcaactacagtggctgttcact

SEQ ID NO: 7444 - DNA, 51 bp, synthetic construct
  source 1..51: mol_type = other DNA
ctacagtggtacagacagaagtcaggcgaaggccctgcccagctaatctta

SEQ ID NO: 7445 - DNA, 51 bp, synthetic construct; identical to SEQ ID NO: 7443
  source 1..51: mol_type = other DNA

SEQ ID NO: 7446 - DNA, 51 bp, synthetic construct; identical to SEQ ID NO: 7432
  source 1..51: mol_type = other DNA

SEQ ID NO: 7447 - DNA, 51 bp, synthetic construct
  source 1..51: mol_type = other DNA
atgtactggtaccgacaggattcagggaaaggattgagactgatctactat

SEQ ID NO: 7448 - DNA, 51 bp, synthetic construct
  source 1..51: mol_type = other DNA
ttctggtggtacagacagcactctgggaaaagccccaagatgctgatgtct

SEQ ID NO: 7449 - DNA, 51 bp, synthetic construct; identical to SEQ ID NO: 7435
  source 1..51: mol_type = other DNA

SEQ ID NO: 7450 - DNA, 51 bp, synthetic construct; identical to SEQ ID NO: 7432
  source 1..51: mol_type = other DNA

SEQ ID NO: 7451 - DNA, 51 bp, synthetic construct; identical to SEQ ID NO: 7423
  source 1..51: mol_type = other DNA

SEQ ID NO: 7452 - DNA, 51 bp, synthetic construct; identical to SEQ ID NO: 7430
  source 1..51: mol_type = other DNA

SEQ ID NO: 7453 - DNA, 51 bp, synthetic construct; identical to SEQ ID NO: 7423
  source 1..51: mol_type = other DNA

SEQ ID NO: 7454 - DNA, 51 bp, synthetic construct; identical to SEQ ID NO: 7432
  source 1..51: mol_type = other DNA

SEQ ID NO: 7455 - DNA, 51 bp, synthetic construct
  source 1..51: mol_type = other DNA
ctctactggtactggcaggccacaggaggcaccctccagcaactcttctac

SEQ ID NO: 7456 - DNA, 51 bp, synthetic construct; identical to SEQ ID NO: 7432
  source 1..51: mol_type = other DNA

SEQ ID NO: 7457 - DNA, 51 bp, synthetic construct
  source 1..51: mol_type = other DNA
atgtactggtatcggcaggacactgggcatgggctgaggctgatccattac

SEQ ID NO: 7458 - DNA, 51 bp, synthetic construct
  source 1..51: mol_type = other DNA
ctgttctggtatgtgcagtatcccggagaaggtccacagctcctctttaaa

SEQ ID NO: 7459 - DNA, 51 bp, synthetic construct; identical to SEQ ID NO: 7455
  source 1..51: mol_type = other DNA

SEQ ID NO: 7460 - DNA, 51 bp, synthetic construct; identical to SEQ ID NO: 7442
  source 1..51: mol_type = other DNA

SEQ ID NO: 7461 - DNA, 51 bp, synthetic construct; identical to SEQ ID NO: 7423
  source 1..51: mol_type = other DNA

SEQ ID NO: 7462 - DNA, 51 bp, synthetic construct
  source 1..51: mol_type = other DNA
ttcttctggtacaagcaagagccgggggcaagtcttcagttgcttatgaag

SEQ ID NO: 7463 - DNA, 51 bp, synthetic construct; identical to SEQ ID NO: 7423
  source 1..51: mol_type = other DNA

SEQ ID NO: 7464 - DNA, 51 bp, synthetic construct; identical to SEQ ID NO: 7426
  source 1..51: mol_type = other DNA

SEQ ID NO: 7465 - DNA, 51 bp, synthetic construct; identical to SEQ ID NO: 7427
  source 1..51: mol_type = other DNA

SEQ ID NO: 7466 - DNA, 51 bp, synthetic construct
  source 1..51: mol_type = other DNA
cttttctggtatgtgcaacatctcaatgaatcccctcggctactcctgaag

SEQ ID NO: 7467 - DNA, 51 bp, synthetic construct; identical to SEQ ID NO: 7447
  source 1..51: mol_type = other DNA

SEQ ID NO: 7468 - DNA, 51 bp, synthetic construct
  source 1..51: mol_type = other DNA
ttcccttggtataagcaagaacctggagagaatcctaagctcatcattgac

SEQ ID NO: 7469 - DNA, 51 bp, synthetic construct; identical to SEQ ID NO: 7427
  source 1..51: mol_type = other DNA

SEQ ID NO: 7470 - DNA, 51 bp, synthetic construct; identical to SEQ ID NO: 7462
  source 1..51: mol_type = other DNA

SEQ ID NO: 7471 - DNA, 51 bp, synthetic construct; identical to SEQ ID NO: 7427
  source 1..51: mol_type = other DNA

SEQ ID NO: 7472 - DNA, 51 bp, synthetic construct; identical to SEQ ID NO: 7432
  source 1..51: mol_type = other DNA

SEQ ID NO: 7473 - DNA, 51 bp, synthetic construct; identical to SEQ ID NO: 7457
  source 1..51: mol_type = other DNA

SEQ ID NO: 7474 - DNA, 51 bp, synthetic construct
  source 1..51: mol_type = other DNA
ttcccttggtacaagcaagaagctggaaagagtctccactttgtgatagac

SEQ ID NO: 7475 - DNA, 51 bp, synthetic construct; identical to SEQ ID NO: 7427
  source 1..51: mol_type = other DNA

SEQ ID NO: 7476 - DNA, 51 bp, synthetic construct; identical to SEQ ID NO: 7430
  source 1..51: mol_type = other DNA

SEQ ID NO: 7477 - DNA, 51 bp, synthetic construct; identical to SEQ ID NO: 7435
  source 1..51: mol_type = other DNA

SEQ ID NO: 7478 - DNA, 51 bp, synthetic construct
  source 1..51: mol_type = other DNA
ttcccttggtacaagcaagaagctggaaagggtctccactttgtgatagac

SEQ ID NO: 7479 - DNA, 51 bp, synthetic construct; identical to SEQ ID NO: 7423
  source 1..51: mol_type = other DNA

SEQ ID NO: 7480 - DNA, 51 bp, synthetic construct
  source 1..51: mol_type = other DNA
cttttctggtatgttcgatatcctggagaaggtctacaactcctcctgaaa

SEQ ID NO: 7481 - DNA, 51 bp, synthetic construct; identical to SEQ ID NO: 7427
  source 1..51: mol_type = other DNA

SEQ ID NO: 7482 - DNA, 51 bp, synthetic construct
  source 1..51: mol_type = other DNA
cttttctggtatgtgcaacatctcaatgaagcccctaaactactcctgaag

SEQ ID NO: 7483 - DNA, 51 bp, synthetic construct; identical to SEQ ID NO: 7455
  source 1..51: mol_type = other DNA

SEQ ID NO: 7484 - DNA, 51 bp, synthetic construct; identical to SEQ ID NO: 7422
  source 1..51: mol_type = other DNA

SEQ ID NO: 7485 - DNA, 51 bp, synthetic construct; identical to SEQ ID NO: 7447
  source 1..51: mol_type = other DNA

SEQ ID NO: 7486 - DNA, 51 bp, synthetic construct; identical to SEQ ID NO: 7426
  source 1..51: mol_type = other DNA

SEQ ID NO: 7487 - DNA, 51 bp, synthetic construct; identical to SEQ ID NO: 7421
  source 1..51: mol_type = other DNA

SEQ ID NO: 7488 - DNA, 51 bp, synthetic construct
  source 1..51: mol_type = other DNA
ttcccatggtaccagcagttccctggggaaggccctgcactcctgatatcc

SEQ ID NO: 7489 - DNA, 51 bp, synthetic construct; identical to SEQ ID NO: 7435
  source 1..51: mol_type = other DNA

SEQ ID NO: 7490 - DNA, 51 bp, synthetic construct; identical to SEQ ID NO: 7428
  source 1..51: mol_type = other DNA

SEQ ID NO: 7491 - DNA, 51 bp, synthetic construct; identical to SEQ ID NO: 7457
  source 1..51: mol_type = other DNA

SEQ ID NO: 7492 - DNA, 51 bp, synthetic construct
  source 1..51: mol_type = other DNA
cttttctggtatgtgcaacatctcaacgaagcccctaagctacttttgaag

SEQ ID NO: 7493 - DNA, 51 bp, synthetic construct; identical to SEQ ID NO: 7455
  source 1..51: mol_type = other DNA

SEQ ID NO: 7494 - DNA, 51 bp, synthetic construct
  source 1..51: mol_type = other DNA
ctgttctggtatgtccagtacccgcggcaggggctgcagatgctcctcaag

SEQ ID NO: 7495 - DNA, 51 bp, synthetic construct; identical to SEQ ID NO: 7443
  source 1..51: mol_type = other DNA

SEQ ID NO: 7496 - DNA, 51 bp, synthetic construct
  source 1..51: mol_type = other DNA
ttctggtggtacagacagcattctgggaaagcccccaaggcactgatgtcc

SEQ ID NO: 7497 - DNA, 51 bp, synthetic construct; identical to SEQ ID NO: 7443
  source 1..51: mol_type = other DNA

SEQ ID NO: 7498 - DNA, 51 bp, synthetic construct
  source 1..51: mol_type = other DNA
tttgcctggtacaaaaaataccctgacaacagccccacactcctgatatcc

SEQ ID NO: 7499 - DNA, 51 bp, synthetic construct
  source 1..51: mol_type = other DNA
gtagcttggtatcgtcaatcgcctcaaaagacatttgaactgatagcactt

SEQ ID NO: 7500 - DNA, 51 bp, synthetic construct
  source 1..51: mol_type = other DNA
gtacactggtacaggcaagactcaggcagaggccctgccctgataatctta

SEQ ID NO: 7501 - DNA, 51 bp, synthetic construct; identical to SEQ ID NO: 7435
  source 1..51: mol_type = other DNA

SEQ ID NO: 7502 - DNA, 51 bp, synthetic construct; identical to SEQ ID NO: 7426
  source 1..51: mol_type = other DNA

SEQ ID NO: 7503 - DNA, 51 bp, synthetic construct; identical to SEQ ID NO: 7457
  source 1..51: mol_type = other DNA

SEQ ID NO: 7504 - DNA, 51 bp, synthetic construct
  source 1..51: mol_type = other DNA
ttcccatggtaccagcagttccctggggaaggccctgctctcctgatagcc

SEQ ID NO: 7505 - DNA, 51 bp, synthetic construct; identical to SEQ ID NO: 7447
  source 1..51: mol_type = other DNA

SEQ ID NO: 7506 - DNA, 51 bp, synthetic construct; identical to SEQ ID NO: 7432
  source 1..51: mol_type = other DNA

SEQ ID NO: 7507 - DNA, 51 bp, synthetic construct; identical to SEQ ID NO: 7427
  source 1..51: mol_type = other DNA

SEQ ID NO: 7508 - DNA, 51 bp, synthetic construct; identical to SEQ ID NO: 7426
  source 1..51: mol_type = other DNA

SEQ ID NO: 7509 - DNA, 51 bp, synthetic construct; identical to SEQ ID NO: 7427
  source 1..51: mol_type = other DNA

SEQ ID NO: 7510 - DNA, 51 bp, synthetic construct; identical to SEQ ID NO: 7442
  source 1..51: mol_type = other DNA

SEQ ID NO: 7511 - DNA, 51 bp, synthetic construct
  source 1..51: mol_type = other DNA
ttttattggtataaacagattttaggacagcagatggagtttctggttaat

SEQ ID NO: 7512 - DNA, 51 bp, synthetic construct
  source 1..51: mol_type = other DNA
ttcaggtggtacagacagcattctgcgaaaggccttgaggtgctagtgtcc

SEQ ID NO: 7513 - DNA, 51 bp, synthetic construct; identical to SEQ ID NO: 7443
  source 1..51: mol_type = other DNA

SEQ ID NO: 7514 - DNA, 51 bp, synthetic construct
  source 1..51: mol_type = other DNA
ctgcagtggttttaccaacatcctgggggaagactcgtcagcctgttctac

SEQ ID NO: 7515 - DNA, 51 bp, synthetic construct
  source 1..51: mol_type = other DNA
atgtactggtataaacagagcgctgagaagccgccagagctcatgtttctc

SEQ ID NO: 7516 - DNA, 51 bp, synthetic construct
  source 1..51: mol_type = other DNA
atctggtggtaccaacagcatcctgggaaaggccccgaagcactaatatcc

SEQ ID NO: 7517 - DNA, 51 bp, synthetic construct; identical to SEQ ID NO: 7515
  source 1..51: mol_type = other DNA

SEQ ID NO: 7518 - DNA, 51 bp, synthetic construct; identical to SEQ ID NO: 7492
  source 1..51: mol_type = other DNA

SEQ ID NO: 7519 - DNA, 51 bp, synthetic construct
  source 1..51: mol_type = other DNA
atgtattggtacaagcaagactctaagaaattgctgaagattatgtttagc

SEQ ID NO: 7520 - DNA, 51 bp, synthetic construct
  source 1..51: mol_type = other DNA
ttctactggtacaagcaagagccaggggcaggtcttcagttgcttatgagt

SEQ ID NO: 7521 - DNA, 51 bp, synthetic construct; identical to SEQ ID NO: 7423
  source 1..51: mol_type = other DNA

SEQ ID NO: 7522 - DNA, 51 bp, synthetic construct; identical to SEQ ID NO: 7462
  source 1..51: mol_type = other DNA

SEQ ID NO: 7523 - DNA, 51 bp, synthetic construct; identical to SEQ ID NO: 7427
  source 1..51: mol_type = other DNA

SEQ ID NO: 7524 - DNA, 51 bp, synthetic construct
  source 1..51: mol_type = other DNA
atctattggtaccgacaggttcctcttcagggtccagaatacgtgactcac

SEQ ID NO: 7525 - DNA, 51 bp, synthetic construct; identical to SEQ ID NO: 7515
  source 1..51: mol_type = other DNA

SEQ ID NO: 7526 - DNA, 51 bp, synthetic construct
  source 1..51: mol_type = other DNA
atctactggtaccgacaggttccccaccagggaccacagtttatcattcaa

SEQ ID NO: 7527 - DNA, 51 bp, synthetic construct; identical to SEQ ID NO: 7435
  source 1..51: mol_type = other DNA

SEQ ID NO: 7528 - DNA, 51 bp, synthetic construct
  source 1..51: mol_type = other DNA
ttcttctggtacaagcaagagccgggggcaggtcttcagttgcttatgaag

SEQ ID NO: 7529 - DNA, 51 bp, synthetic construct; identical to SEQ ID NO: 7423
  source 1..51: mol_type = other DNA

SEQ ID NO: 7530 - DNA, 51 bp, synthetic construct
  source 1..51: mol_type = other DNA
ctctcctggtacatccagcaccatggccgtggcctccagtttctcctcaag

SEQ ID NO: 7531 - DNA, 51 bp, synthetic construct; identical to SEQ ID NO: 7427
  source 1..51: mol_type = other DNA

SEQ ID NO: 7532 - DNA, 51 bp, synthetic construct
  source 1..51: mol_type = other DNA
gtgcagtggttccgaaagaattccaggggcagcctcatcaatctgttctac

SEQ ID NO: 7533 - DNA, 51 bp, synthetic construct; identical to SEQ ID NO: 7515
  source 1..51: mol_type = other DNA

SEQ ID NO: 7534 - DNA, 51 bp, synthetic construct
  source 1..51: mol_type = other DNA
ctgttctggtatgtgcagtatcccggagaaggtccacagttcctctttaga

SEQ ID NO: 7535 - DNA, 51 bp, synthetic construct; identical to SEQ ID NO: 7423
  source 1..51: mol_type = other DNA

SEQ ID NO: 7536 - DNA, 51 bp, synthetic construct
  source 1..51: mol_type = other DNA
tttttctggtatgtgcaatatctcaacgaagcccctcaggtactcctgaag

SEQ ID NO: 7537 - DNA, 51 bp, synthetic construct; identical to SEQ ID NO: 7423
  source 1..51: mol_type = other DNA

SEQ ID NO: 7538 - DNA, 51 bp, synthetic construct; identical to SEQ ID NO: 7426
  source 1..51: mol_type = other DNA

SEQ ID NO: 7539 - DNA, 51 bp, synthetic construct; identical to SEQ ID NO: 7423
  source 1..51: mol_type = other DNA

SEQ ID NO: 7540 - DNA, 51 bp, synthetic construct
  source 1..51: mol_type = other DNA
atgcagtggttttaccaacgtcctgggggaagactcgtcagcctgttgtac

SEQ ID NO: 7541 - DNA, 51 bp, synthetic construct; identical to SEQ ID NO: 7511
  source 1..51: mol_type = other DNA

SEQ ID NO: 7542 - DNA, 51 bp, synthetic construct; identical to SEQ ID NO: 7432
  source 1..51: mol_type = other DNA

SEQ ID NO: 7543 - DNA, 51 bp, synthetic construct; identical to SEQ ID NO: 7421
  source 1..51: mol_type = other DNA

SEQ ID NO: 7544 - DNA, 51 bp, synthetic construct
  source 1..51: mol_type = other DNA
ttcccatggtaccagcagttccctggggaaggtcccgctctcctgatatcc

SEQ ID NO: 7545 - DNA, 51 bp, synthetic construct; identical to SEQ ID NO: 7519
  source 1..51: mol_type = other DNA

SEQ ID NO: 7546 - DNA, 51 bp, synthetic construct; identical to SEQ ID NO: 7430
  source 1..51: mol_type = other DNA

SEQ ID NO: 7547 - DNA, 51 bp, synthetic construct; identical to SEQ ID NO: 7423
  source 1..51: mol_type = other DNA

SEQ ID NO: 7548 - DNA, 51 bp, synthetic construct; identical to SEQ ID NO: 7432
  source 1..51: mol_type = other DNA

SEQ ID NO: 7549 - DNA, 51 bp, synthetic construct; identical to SEQ ID NO: 7423
  source 1..51: mol_type = other DNA

SEQ ID NO: 7550 - DNA, 51 bp, synthetic construct; identical to SEQ ID NO: 7480
  source 1..51: mol_type = other DNA

SEQ ID NO: 7551 - DNA, 51 bp, synthetic construct; identical to SEQ ID NO: 7423
  source 1..51: mol_type = other DNA

SEQ ID NO: 7552 - DNA, 51 bp, synthetic construct
  source 1..51: mol_type = other DNA
ttctggtggtacagacagcattctggggaaggccccaaggcactgatgtcc

SEQ ID NO: 7553 - DNA, 51 bp, synthetic construct; identical to SEQ ID NO: 7423
  source 1..51: mol_type = other DNA

SEQ ID NO: 7554 - DNA, 51 bp, synthetic construct; identical to SEQ ID NO: 7480
  source 1..51: mol_type = other DNA

SEQ ID NO: 7555 - DNA, 51 bp, synthetic construct; identical to SEQ ID NO: 7423
  source 1..51: mol_type = other DNA

SEQ ID NO: 7556 - DNA, 51 bp, synthetic construct; identical to SEQ ID NO: 7496
  source 1..51: mol_type = other DNA

SEQ ID NO: 7557 - DNA, 51 bp, synthetic construct; identical to SEQ ID NO: 7457
  source 1..51: mol_type = other DNA

SEQ ID NO: 7558 - DNA, 51 bp, synthetic construct; identical to SEQ ID NO: 7428
  source 1..51: mol_type = other DNA

SEQ ID NO: 7559 - DNA, 51 bp, synthetic construct; identical to SEQ ID NO: 7455
  source 1..51: mol_type = other DNA

SEQ ID NO: 7560 - DNA, 51 bp, synthetic construct; identical to SEQ ID NO: 7430
  source 1..51: mol_type = other DNA

SEQ ID NO: 7561 - DNA, 51 bp, synthetic construct; identical to SEQ ID NO: 7455
  source 1..51: mol_type = other DNA

SEQ ID NO: 7562 - DNA, 51 bp, synthetic construct; identical to SEQ ID NO: 7422
  source 1..51: mol_type = other DNA

SEQ ID NO: 7563 - DNA, 51 bp, synthetic construct; identical to SEQ ID NO: 7511
  source 1..51: mol_type = other DNA

SEQ ID NO: 7564 - DNA, 51 bp, synthetic construct; identical to SEQ ID NO: 7432
  source 1..51: mol_type = other DNA

SEQ ID NO: 7565 - DNA, 51 bp, synthetic construct; identical to SEQ ID NO: 7499
  source 1..51: mol_type = other DNA

SEQ ID NO: 7566 - DNA, 51 bp, synthetic construct; identical to SEQ ID NO: 7530
  source 1..51: mol_type = other DNA

SEQ ID NO: 7567 - DNA, 51 bp, synthetic construct; identical to SEQ ID NO: 7447
  source 1..51: mol_type = other DNA

SEQ ID NO: 7568 - DNA, 51 bp, synthetic construct; identical to SEQ ID NO: 7478
  source 1..51: mol_type = other DNA

SEQ ID NO: 7569 - DNA, 51 bp, synthetic construct; identical to SEQ ID NO: 7447
  source 1..51: mol_type = other DNA

SEQ ID NO: 7570 - DNA, 51 bp, synthetic construct
  source 1..51: mol_type = other DNA
cttttctggtatgtccaatatcccggagaaggtccacagctccttttgaaa

SEQ ID NO: 7571 - DNA, 51 bp, synthetic construct; identical to SEQ ID NO: 7447
  source 1..51: mol_type = other DNA

SEQ ID NO: 7572 - DNA, 51 bp, synthetic construct; identical to SEQ ID NO: 7520
  source 1..51: mol_type = other DNA

SEQ ID NO: 7573 - DNA, 51 bp, synthetic construct; identical to SEQ ID NO: 7447
  source 1..51: mol_type = other DNA

SEQ ID NO: 7574 - DNA, 51 bp, synthetic construct; identical to SEQ ID NO: 7500
  source 1..51: mol_type = other DNA

SEQ ID NO: 7575 - DNA, 51 bp, synthetic construct; identical to SEQ ID NO: 7515
  source 1..51: mol_type = other DNA

SEQ ID NO: 7576 - DNA, 51 bp, synthetic construct; identical to SEQ ID NO: 7430
  source 1..51: mol_type = other DNA

SEQ ID NO: 7577 - DNA, 51 bp, synthetic construct; identical to SEQ ID NO: 7515
  source 1..51: mol_type = other DNA

SEQ ID NO: 7578 - DNA, 51 bp, synthetic construct
  source 1..51: mol_type = other DNA
gttcagtggtacagacagaagtcaggcaaaggccctgccctgataatctta

SEQ ID NO: 7579 - DNA, 51 bp, synthetic construct; identical to SEQ ID NO: 7421
  source 1..51: mol_type = other DNA

SEQ ID NO: 7580 - DNA, 51 bp, synthetic construct
  source 1..51: mol_type = other DNA
ttcccttggtataagcaagagcctgggaagcgtcttcagttcatcatagac

SEQ ID NO: 7581 - DNA, 51 bp, synthetic construct; identical to SEQ ID NO: 7421
  source 1..51: mol_type = other DNA

SEQ ID NO: 7582 - DNA, 51 bp, synthetic construct; identical to SEQ ID NO: 7422
  source 1..51: mol_type = other DNA

SEQ ID NO: 7583 - DNA, 51 bp, synthetic construct
  source 1..51: mol_type = other DNA
atgtactggtatcgacaagaccctggtctggggctacagctgatttatatc

SEQ ID NO: 7584 - DNA, 51 bp, synthetic construct; identical to SEQ ID NO: 7478
  source 1..51: mol_type = other DNA

SEQ ID NO: 7585 - DNA, 51 bp, synthetic construct; identical to SEQ ID NO: 7519
  source 1..51: mol_type = other DNA

SEQ ID NO: 7586 - DNA, 51 bp, synthetic construct
  source 1..51: mol_type = other DNA
gtgcagtggttttaccaacgtcctgggggaagactcgtcagcctgttgtac

SEQ ID NO: 7587 - DNA, 51 bp, synthetic construct; identical to SEQ ID NO: 7423
  source 1..51: mol_type = other DNA

SEQ ID NO: 7588 - DNA, 51 bp, synthetic construct; identical to SEQ ID NO: 7426
  source 1..51: mol_type = other DNA

SEQ ID NO: 7589 - DNA, 51 bp, synthetic construct; identical to SEQ ID NO: 7423
  source 1..51: mol_type = other DNA

SEQ ID NO: 7590 - DNA, 51 bp, synthetic construct; identical to SEQ ID NO: 7468
  source 1..51: mol_type = other DNA

SEQ ID NO: 7591 - DNA, 51 bp, synthetic construct; identical to SEQ ID NO: 7423
  source 1..51: mol_type = other DNA

SEQ ID NO: 7592 - DNA, 51 bp, synthetic construct; identical to SEQ ID NO: 7468
  source 1..51: mol_type = other DNA

SEQ ID NO: 7593 - DNA, 51 bp, synthetic construct; identical to SEQ ID NO: 7423
  source 1..51: mol_type = other DNA

SEQ ID NO: 7594 - DNA, 51 bp, synthetic construct; identical to SEQ ID NO: 7520
  source 1..51: mol_type = other DNA

SEQ ID NO: 7595 - DNA, 51 bp, synthetic construct; identical to SEQ ID NO: 7423
  source 1..51: mol_type = other DNA

SEQ ID NO: 7596 - DNA, 51 bp, synthetic construct; identical to SEQ ID NO: 7426
  source 1..51: mol_type = other DNA

SEQ ID NO: 7597 - DNA, 51 bp, synthetic construct; identical to SEQ ID NO: 7457
  source 1..51: mol_type = other DNA

SEQ ID NO: 7598 - DNA, 51 bp, synthetic construct; identical to SEQ ID NO: 7468
  source 1..51: mol_type = other DNA

SEQ ID NO: 7599 - DNA, 51 bp, synthetic construct; identical to SEQ ID NO: 7427
  source 1..51: mol_type = other DNA

SEQ ID NO: 7600 - DNA, 51 bp, synthetic construct; identical to SEQ ID NO: 7480
  source 1..51: mol_type = other DNA

SEQ ID NO: 7601 - DNA, 51 bp, synthetic construct; identical to SEQ ID NO: 7427
  source 1..51: mol_type = other DNA

SEQ ID NO: 7602 - DNA, 51 bp, synthetic construct; identical to SEQ ID NO: 7468
  source 1..51: mol_type = other DNA

SEQ ID NO: 7603 - DNA, 51 bp, synthetic construct; identical to SEQ ID NO: 7455
  source 1..51: mol_type = other DNA

SEQ ID NO: 7604 - DNA, 51 bp, synthetic construct; identical to SEQ ID NO: 7422
  source 1..51: mol_type = other DNA

SEQ ID NO: 7605 - DNA, 51 bp, synthetic construct; identical to SEQ ID NO: 7499
  source 1..51: mol_type = other DNA

SEQ ID NO: 7606 - DNA, 51 bp, synthetic construct; identical to SEQ ID NO: 7426
  source 1..51: mol_type = other DNA

SEQ ID NO: 7607 - DNA, 51 bp, synthetic construct; identical to SEQ ID NO: 7447
  source 1..51: mol_type = other DNA

SEQ ID NO: 7608 - DNA, 51 bp, synthetic construct
  source 1..51: mol_type = other DNA
ctacagtggtacagacagaagtcaggcaaaggccctgcccagctaatctta

SEQ ID NO: 7609 - DNA, 51 bp, synthetic construct; identical to SEQ ID NO: 7447
  source 1..51: mol_type = other DNA

SEQ ID NO: 7610 - DNA, 51 bp, synthetic construct; identical to SEQ ID NO: 7444
  source 1..51: mol_type = other DNA

SEQ ID NO: 7611 - DNA, 51 bp, synthetic construct; identical to SEQ ID NO: 7443
  source 1..51: mol_type = other DNA

SEQ ID NO: 7612 - DNA, 51 bp, synthetic construct; identical to SEQ ID NO: 7432
  source 1..51: mol_type = other DNA

SEQ ID NO: 7613 - DNA, 51 bp, synthetic construct; identical to SEQ ID NO: 7515
  source 1..51: mol_type = other DNA

SEQ ID NO: 7614 - DNA, 51 bp, synthetic construct; identical to SEQ ID NO: 7434
  source 1..51: mol_type = other DNA

SEQ ID NO: 7615 - DNA, 51 bp, synthetic construct; identical to SEQ ID NO: 7421
  source 1..51: mol_type = other DNA

SEQ ID NO: 7616 - DNA, 51 bp, synthetic construct
  source 1..51: mol_type = other DNA
gtgcagtggttttaccaacgtcctgggggacgcctcatcggcctgtcctac

SEQ ID NO: 7617 - DNA, 51 bp, synthetic construct; identical to SEQ ID NO: 7421
  source 1..51: mol_type = other DNA

SEQ ID NO: 7618 - DNA, 51 bp, synthetic construct; identical to SEQ ID NO: 7532
  source 1..51: mol_type = other DNA

SEQ ID NO: 7619 - DNA, 51 bp, synthetic construct; identical to SEQ ID NO: 7435
  source 1..51: mol_type = other DNA

SEQ ID NO: 7620 - DNA, 51 bp, synthetic construct; identical to SEQ ID NO: 7616
  source 1..51: mol_type = other DNA

SEQ ID NO: 7621 - DNA, 51 bp, synthetic construct; identical to SEQ ID NO: 7519
  source 1..51: mol_type = other DNA

SEQ ID NO: 7622 - DNA, 51 bp, synthetic construct; identical to SEQ ID NO: 7430
  source 1..51: mol_type = other DNA

SEQ ID NO: 7623 - DNA, 51 bp, synthetic construct; identical to SEQ ID NO: 7519
  source 1..51: mol_type = other DNA

SEQ ID NO: 7624 - DNA, 51 bp, synthetic construct
  source 1..51: mol_type = other DNA
gtgcagtggttccgacagaattccaggggcagcctcatcaatctgttctac

SEQ ID NO: 7625 - DNA, 51 bp, synthetic construct; identical to SEQ ID NO: 7423
  source 1..51: mol_type = other DNA

SEQ ID NO: 7626 - DNA, 51 bp, synthetic construct; identical to SEQ ID NO: 7426
  source 1..51: mol_type = other DNA

SEQ ID NO: 7627 - DNA, 51 bp, synthetic construct; identical to SEQ ID NO: 7423
  source 1..51: mol_type = other DNA

SEQ ID NO: 7628 - DNA, 51 bp, synthetic construct
  source 1..51: mol_type = other DNA
cttttctggtatgtgcactatctcaatgaatcccctcggttactcctgaag

SEQ ID NO: 7629 - DNA, 51 bp, synthetic construct; identical to SEQ ID NO: 7423
  source 1..51: mol_type = other DNA

SEQ ID NO: 7630 - DNA, 51 bp, synthetic construct; identical to SEQ ID NO: 7424
  source 1..51: mol_type = other DNA

SEQ ID NO: 7631 - DNA, 51 bp, synthetic construct; identical to SEQ ID NO: 7457
  source 1..51: mol_type = other DNA

SEQ ID NO: 7632 - DNA, 51 bp, synthetic construct; identical to SEQ ID NO: 7480
  source 1..51: mol_type = other DNA

SEQ ID NO: 7633 - DNA, 51 bp, synthetic construct; identical to SEQ ID NO: 7457
  source 1..51: mol_type = other DNA

SEQ ID NO: 7634 - DNA, 51 bp, synthetic construct
  source 1..51: mol_type = other DNA
tttgcatggtacagacagcattctgggaaagcccccaaggcactgatgtcc

SEQ ID NO: 7635 - DNA, 51 bp, synthetic construct; identical to SEQ ID NO: 7427
  source 1..51: mol_type = other DNA

SEQ ID NO: 7636 - DNA, 51 bp, synthetic construct; identical to SEQ ID NO: 7432
  source 1..51: mol_type = other DNA

SEQ ID NO: 7637 - DNA, 51 bp, synthetic construct; identical to SEQ ID NO: 7427
  source 1..51: mol_type = other DNA

SEQ ID NO: 7638 - DNA, 51 bp, synthetic construct; identical to SEQ ID NO: 7480
  source 1..51: mol_type = other DNA

SEQ ID NO: 7639 - DNA, 51 bp, synthetic construct; identical to SEQ ID NO: 7455
  source 1..51: mol_type = other DNA

SEQ ID NO: 7640 - DNA, 51 bp, synthetic construct; identical to SEQ ID NO: 7426
  source 1..51: mol_type = other DNA

SEQ ID NO: 7641 - DNA, 51 bp, synthetic construct; identical to SEQ ID NO: 7499
  source 1..51: mol_type = other DNA

SEQ ID NO: 7642 - DNA, 51 bp, synthetic construct
  source 1..51: mol_type = other DNA
ctgttctggtatgtgcagtatcccggagaagggccacagttcctctttaga

SEQ ID NO: 7643 - DNA, 51 bp, synthetic construct; identical to SEQ ID NO: 7447
  source 1..51: mol_type = other DNA

SEQ ID NO: 7644 - DNA, 51 bp, synthetic construct; identical to SEQ ID NO: 7462
  source 1..51: mol_type = other DNA

SEQ ID NO: 7645 - DNA, 51 bp, synthetic construct; identical to SEQ ID NO: 7443
  source 1..51: mol_type = other DNA

SEQ ID NO: 7646 - DNA, 51 bp, synthetic construct; identical to SEQ ID NO: 7544
  source 1..51: mol_type = other DNA

SEQ ID NO: 7647 - DNA, 51 bp, synthetic construct; identical to SEQ ID NO: 7443
  source 1..51: mol_type = other DNA

SEQ ID NO: 7648 - DNA, 51 bp, synthetic construct; identical to SEQ ID NO: 7480
  source 1..51: mol_type = other DNA

SEQ ID NO: 7649 - DNA, 51 bp, synthetic construct; identical to SEQ ID NO: 7443
  source 1..51: mol_type = other DNA

SEQ ID NO: 7650 - DNA, 51 bp, synthetic construct; identical to SEQ ID NO: 7426
  source 1..51: mol_type = other DNA

SEQ ID NO: 7651 - DNA, 51 bp, synthetic construct; identical to SEQ ID NO: 7443
  source 1..51: mol_type = other DNA

SEQ ID NO: 7652 - DNA, 51 bp, synthetic construct; identical to SEQ ID NO: 7448
  source 1..51: mol_type = other DNA

SEQ ID NO: 7653 - DNA, 51 bp, synthetic construct; identical to SEQ ID NO: 7515
  source 1..51: mol_type = other DNA

SEQ ID NO: 7654 - DNA, 51 bp, synthetic construct; identical to SEQ ID NO: 7586
  source 1..51: mol_type = other DNA

SEQ ID NO: 7655 - DNA, 51 bp, synthetic construct; identical to SEQ ID NO: 7515
  source 1..51: mol_type = other DNA

SEQ ID NO: 7656 - DNA, 51 bp, synthetic construct; identical to SEQ ID NO: 7480
  source 1..51: mol_type = other DNA

SEQ ID NO: 7657 - DNA, 51 bp, synthetic construct; identical to SEQ ID NO: 7515
  source 1..51: mol_type = other DNA

SEQ ID NO: 7658 - DNA, 51 bp, synthetic construct; identical to SEQ ID NO: 7488
  source 1..51: mol_type = other DNA

SEQ ID NO: 7659 - DNA, 51 bp, synthetic construct; identical to SEQ ID NO: 7437
  source 1..51: mol_type = other DNA

SEQ ID NO: 7660 - DNA, 51 bp, synthetic construct
  source 1..51: mol_type = other DNA
ttcccatggtaccgtctgttccctggggaaagccctgcactcctgatagcc

SEQ ID NO: 7661 - DNA, 51 bp, synthetic construct
  source 1..51: mol_type = other DNA
gtggcctggtatcaacagactcaggggcaggaactaaagttcttcattcag

SEQ ID NO: 7662 - DNA, 51 bp, synthetic construct; identical to SEQ ID NO: 7432
  source 1..51: mol_type = other DNA

SEQ ID NO: 7663 - DNA, 51 bp, synthetic construct; identical to SEQ ID NO: 7421
  source 1..51: mol_type = other DNA

SEQ ID NO: 7664 - DNA, 51 bp, synthetic construct; identical to SEQ ID NO: 7428
  source 1..51: mol_type = other DNA

SEQ ID NO: 7665 - DNA, 51 bp, synthetic construct; identical to SEQ ID NO: 7421
  source 1..51: mol_type = other DNA

SEQ ID NO: 7666 - DNA, 51 bp, synthetic construct; identical to SEQ ID NO: 7480
  source 1..51: mol_type = other DNA

SEQ ID NO: 7667 - DNA, 51 bp, synthetic construct; identical to SEQ ID NO: 7421
  source 1..51: mol_type = other DNA

SEQ ID NO: 7668 - DNA, 51 bp, synthetic construct; identical to SEQ ID NO: 7498
  source 1..51: mol_type = other DNA

SEQ ID NO: 7669 - DNA, 51 bp, synthetic construct; identical to SEQ ID NO: 7435
  source 1..51: mol_type = other DNA

SEQ ID NO: 7670 - DNA, 51 bp, synthetic construct; identical to SEQ ID NO: 7432
  source 1..51: mol_type = other DNA

SEQ ID NO: 7671 - DNA, 51 bp, synthetic construct; identical to SEQ ID NO: 7435
  source 1..51: mol_type = other DNA

SEQ ID NO: 7672 - DNA, 51 bp, synthetic construct
  source 1..51: mol_type = other DNA
cttttctggtatgtccaatatcctggagaaggtccacagctccttttgaaa

SEQ ID NO: 7673 - DNA, 51 bp, synthetic construct; identical to SEQ ID NO: 7435
  source 1..51: mol_type = other DNA

SEQ ID NO: 7674 - DNA, 51 bp, synthetic construct; identical to SEQ ID NO: 7672
  source 1..51: mol_type = other DNA

SEQ ID NO: 7675 - DNA, 51 bp, synthetic construct; identical to SEQ ID NO: 7519
  source 1..51: mol_type = other DNA

SEQ ID NO: 7676 - DNA, 51 bp, synthetic construct
  source 1..51: mol_type = other DNA
atgcagtggttttaccaacgtcctgagggaagtctcgtcagcctgttctac

SEQ ID NO: 7677 - DNA, 51 bp, synthetic construct; identical to SEQ ID NO: 7519
  source 1..51: mol_type = other DNA

SEQ ID NO: 7678 - DNA, 51 bp, synthetic construct
  source 1..51: mol_type = other DNA
gtgcagtggttcctacagaatcccaggggcagcctcatgaatcttttttac

SEQ ID NO: 7679 - DNA, 51 bp, synthetic construct; identical to SEQ ID NO: 7519
  source 1..51: mol_type = other DNA

SEQ ID NO: 7680 - DNA, 51 bp, synthetic construct; identical to SEQ ID NO: 7426
  source 1..51: mol_type = other DNA

SEQ ID NO: 7681 - DNA, 51 bp, synthetic construct; identical to SEQ ID NO: 7423
  source 1..51: mol_type = other DNA

SEQ ID NO: 7682 - DNA, 51 bp, synthetic construct; identical to SEQ ID NO: 7634
  source 1..51: mol_type = other DNA

SEQ ID NO: 7683 - DNA, 51 bp, synthetic construct; identical to SEQ ID NO: 7423
  source 1..51: mol_type = other DNA

SEQ ID NO: 7684 - DNA, 51 bp, synthetic construct; identical to SEQ ID NO: 7482
  source 1..51: mol_type = other DNA

SEQ ID NO: 7685 - DNA, 51 bp, synthetic construct; identical to SEQ ID NO: 7423
  source 1..51: mol_type = other DNA

SEQ ID NO: 7686 - DNA, 51 bp, synthetic construct; identical to SEQ ID NO: 7514
  source 1..51: mol_type = other DNA

SEQ ID NO: 7687 - DNA, 51 bp, synthetic construct; identical to SEQ ID NO: 7423
  source 1..51: mol_type = other DNA

SEQ ID NO: 7688 - DNA, 51 bp, synthetic construct; identical to SEQ ID NO: 7462
  source 1..51: mol_type = other DNA

SEQ ID NO: 7689 - DNA, 51 bp, synthetic construct; identical to SEQ ID NO: 7423
  source 1..51: mol_type = other DNA

SEQ ID NO: 7690 - DNA, 51 bp, synthetic construct; identical to SEQ ID NO: 7426
  source 1..51: mol_type = other DNA

SEQ ID NO: 7691 - DNA, 51 bp, synthetic construct; identical to SEQ ID NO: 7457
  source 1..51: mol_type = other DNA

SEQ ID NO: 7692 - DNA, 51 bp, synthetic construct; identical to SEQ ID NO: 7528
  source 1..51: mol_type = other DNA

SEQ ID NO: 7693 - DNA, 51 bp, synthetic construct; identical to SEQ ID NO: 7457
  source 1..51: mol_type = other DNA

SEQ ID NO: 7694 - DNA, 51 bp, synthetic construct; identical to SEQ ID NO: 7442
  source 1..51: mol_type = other DNA

SEQ ID NO: 7695 - DNA, 51 bp, synthetic construct; identical to SEQ ID NO: 7457
  source 1..51: mol_type = other DNA

SEQ ID NO: 7696 - DNA, 51 bp, synthetic construct; identical to SEQ ID NO: 7426
  source 1..51: mol_type = other DNA

SEQ ID NO: 7697 - DNA, 51 bp, synthetic construct; identical to SEQ ID NO: 7457
  source 1..51: mol_type = other DNA

SEQ ID NO: 7698 - DNA, 51 bp, synthetic construct; identical to SEQ ID NO: 7462
  source 1..51: mol_type = other DNA

SEQ ID NO: 7699 - DNA, 51 bp, synthetic construct; identical to SEQ ID NO: 7457
  source 1..51: mol_type = other DNA

SEQ ID NO: 7700 - DNA, 51 bp, synthetic construct
  source 1..51: mol_type = other DNA
ctcttctggtacgtgcagtatcctggccagagcctccagtttctcctcaaa

SEQ ID NO: 7701 - DNA, 51 bp, synthetic construct; identical to SEQ ID NO: 7457
  source 1..51: mol_type = other DNA

SEQ ID NO: 7702 - DNA, 51 bp, synthetic construct
  source 1..51: mol_type = other DNA
ttcccatggtactggcagttccctagggaaagccctgcactcctgatagcc

SEQ ID NO: 7703 - DNA, 51 bp, synthetic construct; identical to SEQ ID NO: 7457
  source 1..51: mol_type = other DNA

SEQ ID NO: 7704 - DNA, 51 bp, synthetic construct; identical to SEQ ID NO: 7492
  source 1..51: mol_type = other DNA

SEQ ID NO: 7705 - DNA, 51 bp, synthetic construct; identical to SEQ ID NO: 7457
  source 1..51: mol_type = other DNA

SEQ ID NO: 7706 - DNA, 51 bp, synthetic construct
  source 1..51: mol_type = other DNA
gtgcagtggttccaacagaattccaggggcagcctcatcaatctgttctac

SEQ ID NO: 7707 - DNA, 51 bp, synthetic construct; identical to SEQ ID NO: 7427
  source 1..51: mol_type = other DNA

SEQ ID NO: 7708 - DNA, 51 bp, synthetic construct
  source 1..51: mol_type = other DNA
gtccagtggtttcaacaaaatcacagaggcagacttatcactctgttttac

SEQ ID NO: 7709 - DNA, 51 bp, synthetic construct; identical to SEQ ID NO: 7427
  source 1..51: mol_type = other DNA

SEQ ID NO: 7710 - DNA, 51 bp, synthetic construct; identical to SEQ ID NO: 7426
  source 1..51: mol_type = other DNA

SEQ ID NO: 7711 - DNA, 51 bp, synthetic construct; identical to SEQ ID NO: 7427
  source 1..51: mol_type = other DNA

SEQ ID NO: 7712 - DNA, 51 bp, synthetic construct; identical to SEQ ID NO: 7432
  source 1..51: mol_type = other DNA

SEQ ID NO: 7713 - DNA, 51 bp, synthetic construct; identical to SEQ ID NO: 7427
  source 1..51: mol_type = other DNA

SEQ ID NO: 7714 - DNA, 51 bp, synthetic construct; identical to SEQ ID NO: 7442
  source 1..51: mol_type = other DNA

SEQ ID NO: 7715 - DNA, 51 bp, synthetic construct; identical to SEQ ID NO: 7427
  source 1..51: mol_type = other DNA

SEQ ID NO: 7716 - DNA, 51 bp, synthetic construct; identical to SEQ ID NO: 7544
  source 1..51: mol_type = other DNA

SEQ ID NO: 7717 - DNA, 51 bp, synthetic construct; identical to SEQ ID NO: 7427
  source 1..51: mol_type = other DNA

SEQ ID NO: 7718 - DNA, 51 bp, synthetic construct; identical to SEQ ID NO: 7708
  source 1..51: mol_type = other DNA

SEQ ID NO: 7719 - DNA, 51 bp, synthetic construct
  source 1..51: mol_type = other DNA
atgtactggtaccaaaagaagccaaaccaagcaccaaagcttcttcttttc

SEQ ID NO: 7720 - DNA, 51 bp, synthetic construct; identical to SEQ ID NO: 7426
  source 1..51: mol_type = other DNA

SEQ ID NO: 7721 - DNA, 51 bp, synthetic construct; identical to SEQ ID NO: 7719
  source 1..51: mol_type = other DNA

SEQ ID NO: 7722 - DNA, 51 bp, synthetic construct; identical to SEQ ID NO: 7426
  source 1..51: mol_type = other DNA

SEQ ID NO: 7723 - DNA, 51 bp, synthetic construct; identical to SEQ ID NO: 7455
  source 1..51: mol_type = other DNA

SEQ ID NO: 7724 - DNA, 51 bp, synthetic construct; identical to SEQ ID NO: 7432
  source 1..51: mol_type = other DNA

SEQ ID NO: 7725 - DNA, 51 bp, synthetic construct; identical to SEQ ID NO: 7455
  source 1..51: mol_type = other DNA

SEQ ID NO: 7726 - DNA, 51 bp, synthetic construct; identical to SEQ ID NO: 7526
  source 1..51: mol_type = other DNA

SEQ ID NO: 7727 - DNA, 51 bp, synthetic construct; identical to SEQ ID NO: 7511
  source 1..51: mol_type = other DNA

SEQ ID NO: 7728 - DNA, 51 bp, synthetic construct; identical to SEQ ID NO: 7544
  source 1..51: mol_type = other DNA

SEQ ID NO: 7729 - DNA, 51 bp, synthetic construct; identical to SEQ ID NO: 7499
  source 1..51: mol_type = other DNA

SEQ ID NO: 7730 - DNA, 51 bp, synthetic construct
  source 1..51: mol_type = other DNA
attttttggtacaggcagctttttagtggagagatggttttccttatttac

SEQ ID NO: 7731 - DNA, 51 bp, synthetic construct; identical to SEQ ID NO: 7499
  source 1..51: mol_type = other DNA

SEQ ID NO: 7732 - DNA, 51 bp, synthetic construct; identical to SEQ ID NO: 7474
  source 1..51: mol_type = other DNA

SEQ ID NO: 7733 - DNA, 51 bp, synthetic construct; identical to SEQ ID NO: 7447
  source 1..51: mol_type = other DNA

SEQ ID NO: 7734 - DNA, 51 bp, synthetic construct; identical to SEQ ID NO: 7678
  source 1..51: mol_type = other DNA

SEQ ID NO: 7735 - DNA, 51 bp, synthetic construct; identical to SEQ ID NO: 7447
  source 1..51: mol_type = other DNA

SEQ ID NO: 7736 - DNA, 51 bp, synthetic construct; identical to SEQ ID NO: 7462
  source 1..51: mol_type = other DNA

SEQ ID NO: 7737 - DNA, 51 bp, synthetic construct; identical to SEQ ID NO: 7443
  source 1..51: mol_type = other DNA

SEQ ID NO: 7738 - DNA, 51 bp, synthetic construct; identical to SEQ ID NO: 7730
  source 1..51: mol_type = other DNA

SEQ ID NO: 7739 - DNA, 51 bp, synthetic construct; identical to SEQ ID NO: 7443
  source 1..51: mol_type = other DNA

SEQ ID NO: 7740 - DNA, 51 bp, synthetic construct; identical to SEQ ID NO: 7432
  source 1..51: mol_type = other DNA

SEQ ID NO: 7741 - DNA, 51 bp, synthetic construct; identical to SEQ ID NO: 7443
  source 1..51: mol_type = other DNA

SEQ ID NO: 7742 - DNA, 51 bp, synthetic construct
  source 1..51: mol_type = other DNA
ctgcagtggttttaccaaagtcctgggggaagcctcgtcagcctgttgtcc

SEQ ID NO: 7743 - DNA, 51 bp, synthetic construct; identical to SEQ ID NO: 7515
  source 1..51: mol_type = other DNA

SEQ ID NO: 7744 - DNA, 51 bp, synthetic construct; identical to SEQ ID NO: 7478
  source 1..51: mol_type = other DNA

SEQ ID NO: 7745 - DNA, 51 bp, synthetic construct; identical to SEQ ID NO: 7515
  source 1..51: mol_type = other DNA

SEQ ID NO: 7746 - DNA, 51 bp, synthetic construct; identical to SEQ ID NO: 7428
  source 1..51: mol_type = other DNA

SEQ ID NO: 7747 - DNA, 51 bp, synthetic construct; identical to SEQ ID NO: 7515
  source 1..51: mol_type = other DNA

SEQ ID NO: 7748 - DNA, 51 bp, synthetic construct; identical to SEQ ID NO: 7480
  source 1..51: mol_type = other DNA

SEQ ID NO: 7749 - DNA, 51 bp, synthetic construct; identical to SEQ ID NO: 7515
  source 1..51: mol_type = other DNA

SEQ ID NO: 7750 - DNA, 51 bp, synthetic construct; identical to SEQ ID NO: 7428
  source 1..51: mol_type = other DNA

SEQ ID NO: 7751 - DNA, 51 bp, synthetic construct; identical to SEQ ID NO: 7515
  source 1..51: mol_type = other DNA

SEQ ID NO: 7752 - DNA, 51 bp, synthetic construct; identical to SEQ ID NO: 7458
  source 1..51: mol_type = other DNA

SEQ ID NO: 7753 - DNA, 51 bp, synthetic construct; identical to SEQ ID NO: 7515
  source 1..51: mol_type = other DNA

SEQ ID NO: 7754 - DNA, 51 bp, synthetic construct
  source 1..51: mol_type = other DNA
ctgttctggtatgtgcagtatcccggagaagggccacagttcctcttcaga

SEQ ID NO: 7755 - DNA, 51 bp, synthetic construct; identical to SEQ ID NO: 7437
  source 1..51: mol_type = other DNA

SEQ ID NO: 7756 - DNA, 51 bp, synthetic construct; identical to SEQ ID NO: 7530
  source 1..51: mol_type = other DNA

SEQ ID NO: 7757 - DNA, 51 bp, synthetic construct; identical to SEQ ID NO: 7437
  source 1..51: mol_type = other DNA

SEQ ID NO: 7758 - DNA, 51 bp, synthetic construct; identical to SEQ ID NO: 7424
  source 1..51: mol_type = other DNA

SEQ ID NO: 7759 - DNA, 51 bp, synthetic construct; identical to SEQ ID NO: 7437
  source 1..51: mol_type = other DNA

SEQ ID NO: 7760 - DNA, 51 bp, synthetic construct; identical to SEQ ID NO: 7432
  source 1..51: mol_type = other DNA

SEQ ID NO: 7761 - DNA, 51 bp, synthetic construct; identical to SEQ ID NO: 7421
  source 1..51: mol_type = other DNA

SEQ ID NO: 7762 - DNA, 51 bp, synthetic construct; identical to SEQ ID NO: 7474
  source 1..51: mol_type = other DNA

SEQ ID NO: 7763 - DNA, 51 bp, synthetic construct; identical to SEQ ID NO: 7421
  source 1..51: mol_type = other DNA

SEQ ID NO: 7764 - DNA, 51 bp, synthetic construct; identical to SEQ ID NO: 7524
  source 1..51: mol_type = other DNA

SEQ ID NO: 7765 - DNA, 51 bp, synthetic construct; identical to SEQ ID NO: 7421
  source 1..51: mol_type = other DNA

SEQ ID NO: 7766 - DNA, 51 bp, synthetic construct; identical to SEQ ID NO: 7634
  source 1..51: mol_type = other DNA

SEQ ID NO: 7767 - DNA, 51 bp, synthetic construct; identical to SEQ ID NO: 7421
  source 1..51: mol_type = other DNA

SEQ ID NO: 7768 - DNA, 51 bp, synthetic construct; identical to SEQ ID NO: 7478
  source 1..51: mol_type = other DNA

SEQ ID NO: 7769 - DNA, 51 bp, synthetic construct; identical to SEQ ID NO: 7583
  source 1..51: mol_type = other DNA

SEQ ID NO: 7770 - DNA, 51 bp, synthetic construct
  source 1..51: mol_type = other DNA
cttttctggtacaagcaccttcttagtggagagatggttttccttattcga

SEQ ID NO: 7771 - DNA, 51 bp, synthetic construct; identical to SEQ ID NO: 7435
  source 1..51: mol_type = other DNA

SEQ ID NO: 7772 - DNA, 51 bp, synthetic construct; identical to SEQ ID NO: 7672
  source 1..51: mol_type = other DNA

SEQ ID NO: 7773 - DNA, 51 bp, synthetic construct; identical to SEQ ID NO: 7435
  source 1..51: mol_type = other DNA

SEQ ID NO: 7774 - DNA, 51 bp, synthetic construct; identical to SEQ ID NO: 7742
  source 1..51: mol_type = other DNA

SEQ ID NO: 7775 - DNA, 51 bp, synthetic construct; identical to SEQ ID NO: 7435
  source 1..51: mol_type = other DNA

SEQ ID NO: 7776 - DNA, 51 bp, synthetic construct; identical to SEQ ID NO: 7494
  source 1..51: mol_type = other DNA

SEQ ID NO: 7777 - DNA, 51 bp, synthetic construct; identical to SEQ ID NO: 7435
  source 1..51: mol_type = other DNA

SEQ ID NO: 7778 - DNA, 51 bp, synthetic construct
  source 1..51: mol_type = other DNA
ctgcagtggttttaccaacgtcctgggggaagcctcgtcagcctgttgtac

SEQ ID NO: 7779 - DNA, 51 bp, synthetic construct; identical to SEQ ID NO: 7435
  source 1..51: mol_type = other DNA

SEQ ID NO: 7780 - DNA, 51 bp, synthetic construct; identical to SEQ ID NO: 7676
  source 1..51: mol_type = other DNA

SEQ ID NO: 7781 - DNA, 51 bp, synthetic construct; identical to SEQ ID NO: 7435
  source 1..51: mol_type = other DNA

SEQ ID NO: 7782 - DNA, 51 bp, synthetic construct; identical to SEQ ID NO: 7480
  source 1..51: mol_type = other DNA

SEQ ID NO: 7783 - DNA, 51 bp, synthetic construct; identical to SEQ ID NO: 7519
  source 1..51: mol_type = other DNA

SEQ ID NO: 7784 - DNA, 51 bp, synthetic construct; identical to SEQ ID NO: 7742
  source 1..51: mol_type = other DNA

SEQ ID NO: 7785 - DNA, 51 bp, synthetic construct; identical to SEQ ID NO: 7519
  source 1..51: mol_type = other DNA

SEQ ID NO: 7786 - DNA, 51 bp, synthetic construct; identical to SEQ ID NO: 7474
  source 1..51: mol_type = other DNA

SEQ ID NO: 7787 - DNA, 51 bp, synthetic construct; identical to SEQ ID NO: 7519
  source 1..51: mol_type = other DNA

SEQ ID NO: 7788 - DNA, 51 bp, synthetic construct; identical to SEQ ID NO: 7528
  source 1..51: mol_type = other DNA

SEQ ID NO: 7789 - DNA, 51 bp, synthetic construct; identical to SEQ ID NO: 7519
  source 1..51: mol_type = other DNA

SEQ ID NO: 7790 - DNA, 51 bp, synthetic construct; identical to SEQ ID NO: 7504
  source 1..51: mol_type = other DNA

SEQ ID NO: 7791 - DNA, 51 bp, synthetic construct; identical to SEQ ID NO: 7519
  source 1..51: mol_type = other DNA

SEQ ID NO: 7792 - DNA, 51 bp, synthetic construct; identical to SEQ ID NO: 7430
  source 1..51: mol_type = other DNA

SEQ ID NO: 7793 - DNA, 51 bp, synthetic construct; identical to SEQ ID NO: 7519
  source 1..51: mol_type = other DNA

SEQ ID NO: 7794 - DNA, 51 bp, synthetic construct
  source 1..51: mol_type = other DNA
ttcccatggtaccaacagttccctggggaaggccctgcacttctgatatcc

SEQ ID NO: 7795 - DNA, 51 bp, synthetic construct; identical to SEQ ID NO: 7519
  source 1..51: mol_type = other DNA

SEQ ID NO: 7796 - DNA, 51 bp, synthetic construct; identical to SEQ ID NO: 7634
  source 1..51: mol_type = other DNA

SEQ ID NO: 7797 - DNA, 51 bp, synthetic construct; identical to SEQ ID NO: 7519
  source 1..51: mol_type = other DNA

SEQ ID NO: 7798 - DNA, 51 bp, synthetic construct; identical to SEQ ID NO: 7468
  source 1..51: mol_type = other DNA

SEQ ID NO: 7799 - DNA, 51 bp, synthetic construct; identical to SEQ ID NO: 7519
  source 1..51: mol_type = other DNA

SEQ ID NO: 7800 - DNA, 51 bp, synthetic construct; identical to SEQ ID NO: 7426
  source 1..51: mol_type = other DNA

SEQ ID NO: 7801 - DNA, 51 bp, synthetic construct; identical to SEQ ID NO: 7423
  source 1..51: mol_type = other DNA

SEQ ID NO: 7802 - DNA, 51 bp, synthetic construct; identical to SEQ ID NO: 7432
  source 1..51: mol_type = other DNA

SEQ ID NO: 7803 - DNA, 51 bp, synthetic construct; identical to SEQ ID NO: 7423
  source 1..51: mol_type = other DNA

SEQ ID NO: 7804 - DNA, 51 bp, synthetic construct; identical to SEQ ID NO: 7432
  source 1..51: mol_type = other DNA

SEQ ID NO: 7805 - DNA, 51 bp, synthetic construct; identical to SEQ ID NO: 7423
  source 1..51: mol_type = other DNA

SEQ ID NO: 7806 - DNA, 51 bp, synthetic construct; identical to SEQ ID NO: 7426
  source 1..51: mol_type = other DNA

SEQ ID NO: 7807 - DNA, 51 bp, synthetic construct; identical to SEQ ID NO: 7423
  source 1..51: mol_type = other DNA

SEQ ID NO: 7808 - DNA, 51 bp, synthetic construct; identical to SEQ ID NO: 7426
  source 1..51: mol_type = other DNA

SEQ ID NO: 7809 - DNA, 51 bp, synthetic construct; identical to SEQ ID NO: 7423
  source 1..51: mol_type = other DNA

SEQ ID NO: 7810 - DNA, 51 bp, synthetic construct; identical to SEQ ID NO: 7430
  source 1..51: mol_type = other DNA

SEQ ID NO: 7811 - DNA, 51 bp, synthetic construct; identical to SEQ ID NO: 7423
  source 1..51: mol_type = other DNA

SEQ ID NO: 7812 - DNA, 51 bp, synthetic construct; identical to SEQ ID NO: 7474
  source 1..51: mol_type = other DNA

SEQ ID NO: 7813 - DNA, 51 bp, synthetic construct; identical to SEQ ID NO: 7423
  source 1..51: mol_type = other DNA

SEQ ID NO: 7814 - DNA, 51 bp, synthetic construct
  source 1..51: mol_type = other DNA
atctattggtaccgacaggttcctcttcagggtccagaatatgtgactcac

SEQ ID NO: 7815 - DNA, 51 bp, synthetic construct; identical to SEQ ID NO: 7423
  source 1..51: mol_type = other DNA

SEQ ID NO: 7816 - DNA, 51 bp, synthetic construct; identical to SEQ ID NO: 7778
  source 1..51: mol_type = other DNA

SEQ ID NO: 7817 - DNA, 51 bp, synthetic construct; identical to SEQ ID NO: 7457
  source 1..51: mol_type = other DNA

SEQ ID NO: 7818 - DNA, 51 bp, synthetic construct; identical to SEQ ID NO: 7700
  source 1..51: mol_type = other DNA

SEQ ID NO: 7819 - DNA, 51 bp, synthetic construct; identical to SEQ ID NO: 7457
  source 1..51: mol_type = other DNA

SEQ ID NO: 7820 - DNA, 51 bp, synthetic construct; identical to SEQ ID NO: 7426
  source 1..51: mol_type = other DNA

SEQ ID NO: 7821 - DNA, 51 bp, synthetic construct; identical to SEQ ID NO: 7457
  source 1..51: mol_type = other DNA

SEQ ID NO: 7822 - DNA, 51 bp, synthetic construct; identical to SEQ ID NO: 7580
  source 1..51: mol_type = other DNA

SEQ ID NO: 7823 - DNA, 51 bp, synthetic construct; identical to SEQ ID NO: 7457
  source 1..51: mol_type = other DNA

SEQ ID NO: 7824 - DNA, 51 bp, synthetic construct; identical to SEQ ID NO: 7678
  source 1..51: mol_type = other DNA

SEQ ID NO: 7825 - DNA, 51 bp, synthetic construct; identical to SEQ ID NO: 7457
  source 1..51: mol_type = other DNA

SEQ ID NO: 7826 - DNA, 51 bp, synthetic construct; identical to SEQ ID NO: 7488
  source 1..51: mol_type = other DNA

SEQ ID NO: 7827 - DNA, 51 bp, synthetic construct; identical to SEQ ID NO: 7457
  source 1..51: mol_type = other DNA

SEQ ID NO: 7828 - DNA, 51 bp, synthetic construct; identical to SEQ ID NO: 7528
  source 1..51: mol_type = other DNA

SEQ ID NO: 7829 - DNA, 51 bp, synthetic construct; identical to SEQ ID NO: 7457
  source 1..51: mol_type = other DNA

SEQ ID NO: 7830 - DNA, 51 bp, synthetic construct; identical to SEQ ID NO: 7672
  source 1..51: mol_type = other DNA

SEQ ID NO: 7831 - DNA, 51 bp, synthetic construct; identical to SEQ ID NO: 7427
  source 1..51: mol_type = other DNA

SEQ ID NO: 7832 - DNA, 51 bp, synthetic construct; identical to SEQ ID NO: 7424
  source 1..51: mol_type = other DNA

SEQ ID NO: 7833 - DNA, 51 bp, synthetic construct; identical to SEQ ID NO: 7427
  source 1..51: mol_type = other DNA

SEQ ID NO: 7834 - DNA, 51 bp, synthetic construct; identical to SEQ ID NO: 7634
  source 1..51: mol_type = other DNA

SEQ ID NO: 7835 - DNA, 51 bp, synthetic construct; identical to SEQ ID NO: 7427
  source 1..51: mol_type = other DNA

SEQ ID NO: 7836 - DNA, 51 bp, synthetic construct; identical to SEQ ID NO: 7426
  source 1..51: mol_type = other DNA

SEQ ID NO: 7837 - DNA, 51 bp, synthetic construct; identical to SEQ ID NO: 7427
  source 1..51: mol_type = other DNA

SEQ ID NO: 7838 - DNA, 51 bp, synthetic construct; identical to SEQ ID NO: 7528
  source 1..51: mol_type = other DNA

SEQ ID NO: 7839 - DNA, 51 bp, synthetic construct; identical to SEQ ID NO: 7427
  source 1..51: mol_type = other DNA

SEQ ID NO: 7840 - DNA, 51 bp, synthetic construct; identical to SEQ ID NO: 7432
  source 1..51: mol_type = other DNA

SEQ ID NO: 7841 - DNA, 51 bp, synthetic construct; identical to SEQ ID NO: 7427
  source 1..51: mol_type = other DNA

SEQ ID NO: 7842 - DNA, 51 bp, synthetic construct; identical to SEQ ID NO: 7488
  source 1..51: mol_type = other DNA

SEQ ID NO: 7843 - DNA, 51 bp, synthetic construct; identical to SEQ ID NO: 7427
  source 1..51: mol_type = other DNA

SEQ ID NO: 7844 - DNA, 51 bp, synthetic construct; identical to SEQ ID NO: 7634
  source 1..51: mol_type = other DNA

SEQ ID NO: 7845 - DNA, 51 bp, synthetic construct; identical to SEQ ID NO: 7427
  source 1..51: mol_type = other DNA

SEQ ID NO: 7846 - DNA, 51 bp, synthetic construct; identical to SEQ ID NO: 7424
  source 1..51: mol_type = other DNA

SEQ ID NO: 7847 - DNA, 51 bp, synthetic construct; identical to SEQ ID NO: 7719
  source 1..51: mol_type = other DNA

SEQ ID NO: 7848 - DNA, 51 bp, synthetic construct; identical to SEQ ID NO: 7498
  source 1..51: mol_type = other DNA

SEQ ID NO: 7849 - DNA, 51 bp, synthetic construct; identical to SEQ ID NO: 7719
  source 1..51: mol_type = other DNA

SEQ ID NO: 7850 - DNA, 51 bp, synthetic construct; identical to SEQ ID NO: 7442
  source 1..51: mol_type = other DNA

SEQ ID NO: 7851 - DNA, 51 bp, synthetic construct; identical to SEQ ID NO: 7455
  source 1..51: mol_type = other DNA

SEQ ID NO: 7852 - DNA, 51 bp, synthetic construct; identical to SEQ ID NO: 7488
  source 1..51: mol_type = other DNA

SEQ ID NO: 7853 - DNA, 51 bp, synthetic construct; identical to SEQ ID NO: 7455
  source 1..51: mol_type = other DNA

SEQ ID NO: 7854 - DNA, 51 bp, synthetic construct
  source 1..51: mol_type = other DNA
ttctggtatgtgcagtatcccggagaaggtccacagctcctctttaaagtc

SEQ ID NO: 7855 - DNA, 51 bp, synthetic construct; identical to SEQ ID NO: 7455
  source 1..51: mol_type = other DNA

SEQ ID NO: 7856 - DNA, 51 bp, synthetic construct; identical to SEQ ID NO: 7770
  source 1..51: mol_type = other DNA

SEQ ID NO: 7857 - DNA, 51 bp, synthetic construct; identical to SEQ ID NO: 7455
  source 1..51: mol_type = other DNA

SEQ ID NO: 7858 - DNA, 51 bp, synthetic construct; identical to SEQ ID NO: 7474
  source 1..51: mol_type = other DNA

SEQ ID NO: 7859 - DNA, 51 bp, synthetic construct; identical to SEQ ID NO: 7499
  source 1..51: mol_type = other DNA

SEQ ID NO: 7860 - DNA, 51 bp, synthetic construct; identical to SEQ ID NO: 7462
  source 1..51: mol_type = other DNA

SEQ ID NO: 7861 - DNA, 51 bp, synthetic construct; identical to SEQ ID NO: 7499
  source 1..51: mol_type = other DNA

SEQ ID NO: 7862 - DNA, 51 bp, synthetic construct; identical to SEQ ID NO: 7468
  source 1..51: mol_type = other DNA

SEQ ID NO: 7863 - DNA, 51 bp, synthetic construct; identical to SEQ ID NO: 7447
  source 1..51: mol_type = other DNA

SEQ ID NO: 7864 - DNA, 51 bp, synthetic construct; identical to SEQ ID NO: 7534
  source 1..51: mol_type = other DNA

SEQ ID NO: 7865 - DNA, 51 bp, synthetic construct; identical to SEQ ID NO: 7447
  source 1..51: mol_type = other DNA

SEQ ID NO: 7866 - DNA, 51 bp, synthetic construct; identical to SEQ ID NO: 7474
  source 1..51: mol_type = other DNA

SEQ ID NO: 7867 - DNA, 51 bp, synthetic construct; identical to SEQ ID NO: 7447
  source 1..51: mol_type = other DNA

SEQ ID NO: 7868 - DNA, 51 bp, synthetic construct; identical to SEQ ID NO: 7706
  source 1..51: mol_type = other DNA

SEQ ID NO: 7869 - DNA, 51 bp, synthetic construct; identical to SEQ ID NO: 7447
  source 1..51: mol_type = other DNA

SEQ ID NO: 7870 - DNA, 51 bp, synthetic construct
  source 1..51: mol_type = other DNA
ttcccatggtaccatcagttccctggggaaagccctgcactcctgatagcc

SEQ ID NO: 7871 - DNA, 51 bp, synthetic construct; identical to SEQ ID NO: 7447
  source 1..51: mol_type = other DNA

SEQ ID NO: 7872 - DNA, 51 bp, synthetic construct; identical to SEQ ID NO: 7434
  source 1..51: mol_type = other DNA

SEQ ID NO: 7873 - DNA, 51 bp, synthetic construct; identical to SEQ ID NO: 7447
  source 1..51: mol_type = other DNA

SEQ ID NO: 7874 - DNA, 51 bp, synthetic construct; identical to SEQ ID NO: 7528
  source 1..51: mol_type = other DNA

SEQ ID NO: 7875 - DNA, 51 bp, synthetic construct; identical to SEQ ID NO: 7447
  source 1..51: mol_type = other DNA

SEQ ID NO: 7876 - DNA, 51 bp, synthetic construct
  source 1..51: mol_type = other DNA
cttttctggtatgtccaatattctggagaaggtccacagctccttctgcaa

SEQ ID NO: 7877 - DNA, 51 bp, synthetic construct; identical to SEQ ID NO: 7447
  source 1..51: mol_type = other DNA

SEQ ID NO: 7878 - DNA, 51 bp, synthetic construct; identical to SEQ ID NO: 7480
  source 1..51: mol_type = other DNA

SEQ ID NO: 7879 - DNA, 51 bp, synthetic construct; identical to SEQ ID NO: 7447
  source 1..51: mol_type = other DNA

SEQ ID NO: 7880 - DNA, 51 bp, synthetic construct; identical to SEQ ID NO: 7528
  source 1..51: mol_type = other DNA

SEQ ID NO: 7881 - DNA, 51 bp, synthetic construct; identical to SEQ ID NO: 7447
  source 1..51: mol_type = other DNA

SEQ ID NO: 7882 - DNA, 51 bp, synthetic construct; identical to SEQ ID NO: 7432
  source 1..51: mol_type = other DNA

SEQ ID NO: 7883 - DNA, 51 bp, synthetic construct; identical to SEQ ID NO: 7447
  source 1..51: mol_type = other DNA

SEQ ID NO: 7884 - DNA, 51 bp, synthetic construct; identical to SEQ ID NO: 7482
  source 1..51: mol_type = other DNA

SEQ ID NO: 7885 - DNA, 51 bp, synthetic construct; identical to SEQ ID NO: 7447
  source 1..51: mol_type = other DNA

SEQ ID NO: 7886 - DNA, 51 bp, synthetic construct; identical to SEQ ID NO: 7432
  source 1..51: mol_type = other DNA

SEQ ID NO: 7887 - DNA, 51 bp, synthetic construct; identical to SEQ ID NO: 7447
  source 1..51: mol_type = other DNA

SEQ ID NO: 7888 - DNA, 51 bp, synthetic construct; identical to SEQ ID NO: 7488
  source 1..51: mol_type = other DNA

SEQ ID NO: 7889 - DNA, 51 bp, synthetic construct; identical to SEQ ID NO: 7443
  source 1..51: mol_type = other DNA

SEQ ID NO: 7890 - DNA, 51 bp, synthetic construct; identical to SEQ ID NO: 7432
  source 1..51: mol_type = other DNA

SEQ ID NO: 7891 - DNA, 51 bp, synthetic construct; identical to SEQ ID NO: 7443
  source 1..51: mol_type = other DNA

SEQ ID NO: 7892 - DNA, 51 bp, synthetic construct; identical to SEQ ID NO: 7426
  source 1..51: mol_type = other DNA

SEQ ID NO: 7893 - DNA, 51 bp, synthetic construct; identical to SEQ ID NO: 7443
  source 1..51: mol_type = other DNA

SEQ ID NO: 7894 - DNA, 51 bp, synthetic construct; identical to SEQ ID NO: 7422
  source 1..51: mol_type = other DNA

SEQ ID NO: 7895 - DNA, 51 bp, synthetic construct; identical to SEQ ID NO: 7443
  source 1..51: mol_type = other DNA

SEQ ID NO: 7896 - DNA, 51 bp, synthetic construct; identical to SEQ ID NO: 7678
  source 1..51: mol_type = other DNA

SEQ ID NO: 7897 - DNA, 51 bp, synthetic construct; identical to SEQ ID NO: 7443
  source 1..51: mol_type = other DNA

SEQ ID NO: 7898 - DNA, 51 bp, synthetic construct; identical to SEQ ID NO: 7480
  source 1..51: mol_type = other DNA

SEQ ID NO: 7899 - DNA, 51 bp, synthetic construct; identical to SEQ ID NO: 7443
  source 1..51: mol_type = other DNA

SEQ ID NO: 7900 - DNA, 51 bp, synthetic construct; identical to SEQ ID NO: 7496
  source 1..51: mol_type = other DNA

SEQ ID NO: 7901 - DNA, 51 bp, synthetic construct; identical to SEQ ID NO: 7443
  source 1..51: mol_type = other DNA

SEQ ID NO: 7902 - DNA, 51 bp, synthetic construct; identical to SEQ ID NO: 7432
  source 1..51: mol_type = other DNA

SEQ ID NO: 7903 - DNA, 51 bp, synthetic construct; identical to SEQ ID NO: 7515
  source 1..51: mol_type = other DNA

SEQ ID NO: 7904 - DNA, 51 bp, synthetic construct; identical to SEQ ID NO: 7814
  source 1..51: mol_type = other DNA

SEQ ID NO: 7905 - DNA, 51 bp, synthetic construct; identical to SEQ ID NO: 7515
  source 1..51: mol_type = other DNA

SEQ ID NO: 7906 - DNA, 51 bp, synthetic construct; identical to SEQ ID NO: 7432
  source 1..51: mol_type = other DNA

SEQ ID NO: 7907 - DNA, 51 bp, synthetic construct; identical to SEQ ID NO: 7515
  source 1..51: mol_type = other DNA

SEQ ID NO: 7908 - DNA, 51 bp, synthetic construct; identical to SEQ ID NO: 7528
  source 1..51: mol_type = other DNA

SEQ ID NO: 7909 - DNA, 51 bp, synthetic construct; identical to SEQ ID NO: 7515
  source 1..51: mol_type = other DNA

SEQ ID NO: 7910 - DNA, 51 bp, synthetic construct; identical to SEQ ID NO: 7480
  source 1..51: mol_type = other DNA

SEQ ID NO: 7911 - DNA, 51 bp, synthetic construct; identical to SEQ ID NO: 7515
  source 1..51: mol_type = other DNA

SEQ ID NO: 7912 - DNA, 51 bp, synthetic construct; identical to SEQ ID NO: 7480
  source 1..51: mol_type = other DNA

SEQ ID NO: 7913 - DNA, 51 bp, synthetic construct; identical to SEQ ID NO: 7515
  source 1..51: mol_type = other DNA

SEQ ID NO: 7914 - DNA, 51 bp, synthetic construct; identical to SEQ ID NO: 7706
  source 1..51: mol_type = other DNA

SEQ ID NO: 7915 - DNA, 51 bp, synthetic construct; identical to SEQ ID NO: 7515
  source 1..51: mol_type = other DNA

SEQ ID NO: 7916 - DNA, 51 bp, synthetic construct; identical to SEQ ID NO: 7424
  source 1..51: mol_type = other DNA

SEQ ID NO: 7917 - DNA, 51 bp, synthetic construct; identical to SEQ ID NO: 7515
  source 1..51: mol_type = other DNA

SEQ ID NO: 7918 - DNA, 51 bp, synthetic construct; identical to SEQ ID NO: 7496
  source 1..51: mol_type = other DNA

SEQ ID NO: 7919 - DNA, 51 bp, synthetic construct; identical to SEQ ID NO: 7515
  source 1..51: mol_type = other DNA

SEQ ID NO: 7920 - DNA, 51 bp, synthetic construct; identical to SEQ ID NO: 7480
  source 1..51: mol_type = other DNA

SEQ ID NO: 7921 - DNA, 51 bp, synthetic construct; identical to SEQ ID NO: 7515
  source 1..51: mol_type = other DNA

SEQ ID NO: 7922 - DNA, 51 bp, synthetic construct; identical to SEQ ID NO: 7530
  source 1..51: mol_type = other DNA

SEQ ID NO: 7923 - DNA, 51 bp, synthetic construct; identical to SEQ ID NO: 7515
  source 1..51: mol_type = other DNA

SEQ ID NO: 7924 - DNA, 51 bp, synthetic construct; identical to SEQ ID NO: 7498
  source 1..51: mol_type = other DNA

SEQ ID NO: 7925 - DNA, 51 bp, synthetic construct; identical to SEQ ID NO: 7515
  source 1..51: mol_type = other DNA

SEQ ID NO: 7926 - DNA, 51 bp, synthetic construct; identical to SEQ ID NO: 7426
  source 1..51: mol_type = other DNA

SEQ ID NO: 7927 - DNA, 51 bp, synthetic construct; identical to SEQ ID NO: 7515
  source 1..51: mol_type = other DNA

SEQ ID NO: 7928 - DNA, 51 bp, synthetic construct; identical to SEQ ID NO: 7480
  source 1..51: mol_type = other DNA

SEQ ID NO: 7929 - DNA, 51 bp, synthetic construct; identical to SEQ ID NO: 7515
  source 1..51: mol_type = other DNA

SEQ ID NO: 7930 - DNA, 51 bp, synthetic construct
  source 1..51: mol_type = other DNA
cttttctggtatgtccaatatcctggacaaggtccacagctccttctgaaa

SEQ ID NO: 7931 - DNA, 51 bp, synthetic construct; identical to SEQ ID NO: 7515
  source 1..51: mol_type = other DNA

SEQ ID NO: 7932 - DNA, 51 bp, synthetic construct; identical to SEQ ID NO: 7742
  source 1..51: mol_type = other DNA

SEQ ID NO: 7933 - DNA, 51 bp, synthetic construct; identical to SEQ ID NO: 7515
  source 1..51: mol_type = other DNA

SEQ ID NO: 7934 - DNA, 51 bp, synthetic construct; identical to SEQ ID NO: 7432
  source 1..51: mol_type = other DNA

SEQ ID NO: 7935 - DNA, 51 bp, synthetic construct; identical to SEQ ID NO: 7515
  source 1..51: mol_type = other DNA

SEQ ID NO: 7936 - DNA, 51 bp, synthetic construct; identical to SEQ ID NO: 7480
  source 1..51: mol_type = other DNA

SEQ ID NO: 7937 - DNA, 51 bp, synthetic construct; identical to SEQ ID NO: 7515
  source 1..51: mol_type = other DNA

SEQ ID NO: 7938 - DNA, 51 bp, synthetic construct; identical to SEQ ID NO: 7642
  source 1..51: mol_type = other DNA

SEQ ID NO: 7939 - DNA, 51 bp, synthetic construct; identical to SEQ ID NO: 7515
  source 1..51: mol_type = other DNA

SEQ ID NO: 7940 - DNA, 51 bp, synthetic construct; identical to SEQ ID NO: 7424
  source 1..51: mol_type = other DNA

SEQ ID NO: 7941 - DNA, 51 bp, synthetic construct; identical to SEQ ID NO: 7515
  source 1..51: mol_type = other DNA

SEQ ID NO: 7942 - DNA, 51 bp, synthetic construct; identical to SEQ ID NO: 7426
  source 1..51: mol_type = other DNA

SEQ ID NO: 7943 - DNA, 51 bp, synthetic construct; identical to SEQ ID NO: 7515
  source 1..51: mol_type = other DNA

SEQ ID NO: 7944 - DNA, 51 bp, synthetic construct
  source 1..51: mol_type = other DNA
ttctggtggtacagacagcattctggagaaggccccaaggcactgatgtcc

SEQ ID NO: 7945 - DNA, 51 bp, synthetic construct; identical to SEQ ID NO: 7515
  source 1..51: mol_type = other DNA

SEQ ID NO: 7946 - DNA, 51 bp, synthetic construct; identical to SEQ ID NO: 7496
  source 1..51: mol_type = other DNA

SEQ ID NO: 7947 - DNA, 51 bp, synthetic construct; identical to SEQ ID NO: 7515
  source 1..51: mol_type = other DNA

SEQ ID NO: 7948 - DNA, 51 bp, synthetic construct
  source 1..51: mol_type = other DNA
atgcagtggttttaccaacgtcctgggggaagtctcgtcagcgtgttctac

SEQ ID NO: 7949 - DNA, 51 bp, synthetic construct; identical to SEQ ID NO: 7515
  source 1..51: mol_type = other DNA

SEQ ID NO: 7950 - DNA, 51 bp, synthetic construct
  source 1..51: mol_type = other DNA
ttaaggtggttcaaacaggacacaggcaaaggtcttgtgtccctgacagtc

SEQ ID NO: 7951 - DNA, 51 bp, synthetic construct; identical to SEQ ID NO: 7515
  source 1..51: mol_type = other DNA

SEQ ID NO: 7952 - DNA, 51 bp, synthetic construct; identical to SEQ ID NO: 7488
  source 1..51: mol_type = other DNA

SEQ ID NO: 7953 - DNA, 51 bp, synthetic construct; identical to SEQ ID NO: 7515
  source 1..51: mol_type = other DNA

SEQ ID NO: 7954 - DNA, 51 bp, synthetic construct; identical to SEQ ID NO: 7480
  source 1..51: mol_type = other DNA

SEQ ID NO: 7955 - DNA, 51 bp, synthetic construct; identical to SEQ ID NO: 7515
  source 1..51: mol_type = other DNA

SEQ ID NO: 7956 - DNA, 51 bp, synthetic construct; identical to SEQ ID NO: 7492
  source 1..51: mol_type = other DNA

SEQ ID NO: 7957 - DNA, 51 bp, synthetic construct; identical to SEQ ID NO: 7515
  source 1..51: mol_type = other DNA

SEQ ID NO: 7958 - DNA, 51 bp, synthetic construct; identical to SEQ ID NO: 7528
  source 1..51: mol_type = other DNA

SEQ ID NO: 7959 - DNA, 51 bp, synthetic construct; identical to SEQ ID NO: 7515
  source 1..51: mol_type = other DNA

SEQ ID NO: 7960 - DNA, 51 bp, synthetic construct; identical to SEQ ID NO: 7526
  source 1..51: mol_type = other DNA

SEQ ID NO: 7961 - DNA, 51 bp, synthetic construct; identical to SEQ ID NO: 7515
  source 1..51: mol_type = other DNA

SEQ ID NO: 7962 - DNA, 51 bp, synthetic construct; identical to SEQ ID NO: 7700
  source 1..51: mol_type = other DNA

SEQ ID NO: 7963 - DNA, 51 bp, synthetic construct; identical to SEQ ID NO: 7515
  source 1..51: mol_type = other DNA

SEQ ID NO: 7964 - DNA, 51 bp, synthetic construct; identical to SEQ ID NO: 7448
  source 1..51: mol_type = other DNA

SEQ ID NO: 7965 - DNA, 51 bp, synthetic construct; identical to SEQ ID NO: 7515
  source 1..51: mol_type = other DNA

SEQ ID NO: 7966 - DNA, 51 bp, synthetic construct; identical to SEQ ID NO: 7586
  source 1..51: mol_type = other DNA

SEQ ID NO: 7967 - DNA, 51 bp, synthetic construct; identical to SEQ ID NO: 7515
  source 1..51: mol_type = other DNA

SEQ ID NO: 7968 - DNA, 51 bp, synthetic construct; identical to SEQ ID NO: 7432
  source 1..51: mol_type = other DNA

SEQ ID NO: 7969 - DNA, 51 bp, synthetic construct; identical to SEQ ID NO: 7515
  source 1..51: mol_type = other DNA

SEQ ID NO: 7970 - DNA, 51 bp, synthetic construct
  source 1..51: mol_type = other DNA
gtgcagtggttcctacagaatcccaggggcagcctcatcaatcttttttac

SEQ ID NO: 7971 - DNA, 51 bp, synthetic construct; identical to SEQ ID NO: 7515
  source 1..51: mol_type = other DNA

SEQ ID NO: 7972 - DNA, 51 bp, synthetic construct; identical to SEQ ID NO: 7426
  source 1..51: mol_type = other DNA

SEQ ID NO: 7973 - DNA, 51 bp, synthetic construct; identical to SEQ ID NO: 7437
  source 1..51: mol_type = other DNA

SEQ ID NO: 7974 - DNA, 51 bp, synthetic construct; identical to SEQ ID NO: 7432
  source 1..51: mol_type = other DNA

SEQ ID NO: 7975 - DNA, 51 bp, synthetic construct; identical to SEQ ID NO: 7437
  source 1..51: mol_type = other DNA

SEQ ID NO: 7976 - DNA, 51 bp, synthetic construct; identical to SEQ ID NO: 7444
  source 1..51: mol_type = other DNA

SEQ ID NO: 7977 - DNA, 51 bp, synthetic construct; identical to SEQ ID NO: 7437
  source 1..51: mol_type = other DNA

SEQ ID NO: 7978 - DNA, 51 bp, synthetic construct; identical to SEQ ID NO: 7444
  source 1..51: mol_type = other DNA

SEQ ID NO: 7979 - DNA, 51 bp, synthetic construct; identical to SEQ ID NO: 7437
  source 1..51: mol_type = other DNA

SEQ ID NO: 7980 - DNA, 51 bp, synthetic construct; identical to SEQ ID NO: 7432
  source 1..51: mol_type = other DNA

SEQ ID NO: 7981 - DNA, 51 bp, synthetic construct; identical to SEQ ID NO: 7437
  source 1..51: mol_type = other DNA

SEQ ID NO: 7982 - DNA, 51 bp, synthetic construct; identical to SEQ ID NO: 7634
  source 1..51: mol_type = other DNA

SEQ ID NO: 7983 - DNA, 51 bp, synthetic construct; identical to SEQ ID NO: 7437
  source 1..51: mol_type = other DNA

SEQ ID NO: 7984 - DNA, 51 bp, synthetic construct; identical to SEQ ID NO: 7438
  source 1..51: mol_type = other DNA

SEQ ID NO: 7985 - DNA, 51 bp, synthetic construct; identical to SEQ ID NO: 7661
  source 1..51: mol_type = other DNA

SEQ ID NO: 7986 - DNA, 51 bp, synthetic construct; identical to SEQ ID NO: 7430
  source 1..51: mol_type = other DNA

SEQ ID NO: 7987 - DNA, 51 bp, synthetic construct
  source 1..51: mol_type = other DNA
atgttttggtaccaacagttccaggaacagagcttgatgctcatggcaact

SEQ ID NO: 7988 - DNA, 51 bp, synthetic construct; identical to SEQ ID NO: 7432
  source 1..51: mol_type = other DNA

SEQ ID NO: 7989 - DNA, 51 bp, synthetic construct; identical to SEQ ID NO: 7987
  source 1..51: mol_type = other DNA

SEQ ID NO: 7990 - DNA, 51 bp, synthetic construct; identical to SEQ ID NO: 7468
  source 1..51: mol_type = other DNA

SEQ ID NO: 7991 - DNA, 51 bp, synthetic construct; identical to SEQ ID NO: 7987
  source 1..51: mol_type = other DNA

SEQ ID NO: 7992 - DNA, 51 bp, synthetic construct; identical to SEQ ID NO: 7496
  source 1..51: mol_type = other DNA

SEQ ID NO: 7993 - DNA, 51 bp, synthetic construct; identical to SEQ ID NO: 7421
  source 1..51: mol_type = other DNA

SEQ ID NO: 7994 - DNA, 51 bp, synthetic construct; identical to SEQ ID NO: 7422
  source 1..51: mol_type = other DNA

SEQ ID NO: 7995 - DNA, 51 bp, synthetic construct; identical to SEQ ID NO: 7421
  source 1..51: mol_type = other DNA

SEQ ID NO: 7996 - DNA, 51 bp, synthetic construct; identical to SEQ ID NO: 7426
  source 1..51: mol_type = other DNA

SEQ ID NO: 7997 - DNA, 51 bp, synthetic construct; identical to SEQ ID NO: 7421
  source 1..51: mol_type = other DNA

SEQ ID NO: 7998 - DNA, 51 bp, synthetic construct; identical to SEQ ID NO: 7534
  source 1..51: mol_type = other DNA

SEQ ID NO: 7999 - DNA, 51 bp, synthetic construct; identical to SEQ ID NO: 7421
  source 1..51: mol_type = other DNA

SEQ ID NO: 8000 - DNA, 51 bp, synthetic construct; identical to SEQ ID NO: 7458
  source 1..51: mol_type = other DNA

SEQ ID NO: 8001 - DNA, 51 bp, synthetic construct; identical to SEQ ID NO: 7421
  source 1..51: mol_type = other DNA

SEQ ID NO: 8002 - DNA, 51 bp, synthetic construct
  source 1..51: mol_type = other DNA
ctctcctggtacatccagcaccatggccatggcctccagtttctcctcaag

SEQ ID NO: 8003 - DNA, 51 bp, synthetic construct; identical to SEQ ID NO: 7421
  source 1..51: mol_type = other DNA

SEQ ID NO: 8004 - DNA, 51 bp, synthetic construct; identical to SEQ ID NO: 7498
  source 1..51: mol_type = other DNA

SEQ ID NO: 8005 - DNA, 51 bp, synthetic construct; identical to SEQ ID NO: 7421
  source 1..51: mol_type = other DNA

SEQ ID NO: 8006 - DNA, 51 bp, synthetic construct; identical to SEQ ID NO: 7754
  source 1..51: mol_type = other DNA

SEQ ID NO: 8007 - DNA, 51 bp, synthetic construct; identical to SEQ ID NO: 7421
  source 1..51: mol_type = other DNA

SEQ ID NO: 8008 - DNA, 51 bp, synthetic construct; identical to SEQ ID NO: 7458
  source 1..51: mol_type = other DNA

SEQ ID NO: 8009 - DNA, 51 bp, synthetic construct; identical to SEQ ID NO: 7421
  source 1..51: mol_type = other DNA

SEQ ID NO: 8010 - DNA, 51 bp, synthetic construct; identical to SEQ ID NO: 7432
  source 1..51: mol_type = other DNA

SEQ ID NO: 8011 - DNA, 51 bp, synthetic construct; identical to SEQ ID NO: 7421
  source 1..51: mol_type = other DNA

SEQ ID NO: 8012 - DNA, 51 bp, synthetic construct; identical to SEQ ID NO: 7432
  source 1..51: mol_type = other DNA

SEQ ID NO: 8013 - DNA, 51 bp, synthetic construct; identical to SEQ ID NO: 7421
  source 1..51: mol_type = other DNA

SEQ ID NO: 8014 - DNA, 51 bp, synthetic construct; identical to SEQ ID NO: 7498
  source 1..51: mol_type = other DNA

SEQ ID NO: 8015 - DNA, 51 bp, synthetic construct; identical to SEQ ID NO: 7421
  source 1..51: mol_type = other DNA

SEQ ID NO: 8016 - DNA, 51 bp, synthetic construct; identical to SEQ ID NO: 7422
  source 1..51: mol_type = other DNA

SEQ ID NO: 8017 - DNA, 51 bp, synthetic construct; identical to SEQ ID NO: 7421
  source 1..51: mol_type = other DNA

SEQ ID NO: 8018 - DNA, 51 bp, synthetic construct; identical to SEQ ID NO: 7422
  source 1..51: mol_type = other DNA

SEQ ID NO: 8019 - DNA, 51 bp, synthetic construct; identical to SEQ ID NO: 7421
  source 1..51: mol_type = other DNA

SEQ ID NO: 8020 - DNA, 51 bp, synthetic construct; identical to SEQ ID NO: 7480
  source 1..51: mol_type = other DNA

SEQ ID NO: 8021 - DNA, 51 bp, synthetic construct; identical to SEQ ID NO: 7421
  source 1..51: mol_type = other DNA

SEQ ID NO: 8022 - DNA, 51 bp, synthetic construct; identical to SEQ ID NO: 7468
  source 1..51: mol_type = other DNA

SEQ ID NO: 8023 - DNA, 51 bp, synthetic construct; identical to SEQ ID NO: 7421
  source 1..51: mol_type = other DNA

SEQ ID NO: 8024 - DNA, 51 bp, synthetic construct; identical to SEQ ID NO: 7742
  source 1..51: mol_type = other DNA

SEQ ID NO: 8025 - DNA, 51 bp, synthetic construct; identical to SEQ ID NO: 7421
  source 1..51: mol_type = other DNA

SEQ ID NO: 8026 - DNA, 51 bp, synthetic construct; identical to SEQ ID NO: 7428
  source 1..51: mol_type = other DNA

SEQ ID NO: 8027 - DNA, 51 bp, synthetic construct; identical to SEQ ID NO: 7421
  source 1..51: mol_type = other DNA

SEQ ID NO: 8028 - DNA, 51 bp, synthetic construct; identical to SEQ ID NO: 7480
  source 1..51: mol_type = other DNA

SEQ ID NO: 8029 - DNA, 51 bp, synthetic construct; identical to SEQ ID NO: 7421
  source 1..51: mol_type = other DNA

SEQ ID NO: 8030 - DNA, 51 bp, synthetic construct; identical to SEQ ID NO: 7426
  source 1..51: mol_type = other DNA

SEQ ID NO: 8031 - DNA, 51 bp, synthetic construct; identical to SEQ ID NO: 7421
  source 1..51: mol_type = other DNA

SEQ ID NO: 8032 - DNA, 51 bp, synthetic construct; identical to SEQ ID NO: 7426
  source 1..51: mol_type = other DNA

SEQ ID NO: 8033 - DNA, 51 bp, synthetic construct; identical to SEQ ID NO: 7421
  source 1..51: mol_type = other DNA

SEQ ID NO: 8034 - DNA, 51 bp, synthetic construct; identical to SEQ ID NO: 7608
  source 1..51: mol_type = other DNA

SEQ ID NO: 8035 - DNA, 51 bp, synthetic construct; identical to SEQ ID NO: 7421
  source 1..51: mol_type = other DNA

SEQ ID NO: 8036 - DNA, 51 bp, synthetic construct; identical to SEQ ID NO: 7432
  source 1..51: mol_type = other DNA

SEQ ID NO: 8037 - DNA, 51 bp, synthetic construct; identical to SEQ ID NO: 7421
  source 1..51: mol_type = other DNA

SEQ ID NO: 8038 - DNA, 51 bp, synthetic construct; identical to SEQ ID NO: 7504
  source 1..51: mol_type = other DNA

SEQ ID NO: 8039 - DNA, 51 bp, synthetic construct; identical to SEQ ID NO: 7421
  source 1..51: mol_type = other DNA

SEQ ID NO: 8040 - DNA, 51 bp, synthetic construct; identical to SEQ ID NO: 7624
  source 1..51: mol_type = other DNA

SEQ ID NO: 8041 - DNA, 51 bp, synthetic construct; identical to SEQ ID NO: 7421
  source 1..51: mol_type = other DNA

SEQ ID NO: 8042 - DNA, 51 bp, synthetic construct; identical to SEQ ID NO: 7754
  source 1..51: mol_type = other DNA

SEQ ID NO: 8043 - DNA, 51 bp, synthetic construct; identical to SEQ ID NO: 7421
  source 1..51: mol_type = other DNA

SEQ ID NO: 8044 - DNA, 51 bp, synthetic construct; identical to SEQ ID NO: 7458
  source 1..51: mol_type = other DNA

SEQ ID NO: 8045 - DNA, 51 bp, synthetic construct; identical to SEQ ID NO: 7421
  source 1..51: mol_type = other DNA

SEQ ID NO: 8046 - DNA, 51 bp, synthetic construct; identical to SEQ ID NO: 7432
  source 1..51: mol_type = other DNA

SEQ ID NO: 8047 - DNA, 51 bp, synthetic construct; identical to SEQ ID NO: 7421
  source 1..51: mol_type = other DNA

SEQ ID NO: 8048 - DNA, 51 bp, synthetic construct; identical to SEQ ID NO: 7468
  source 1..51: mol_type = other DNA

SEQ ID NO: 8049 - DNA, 51 bp, synthetic construct; identical to SEQ ID NO: 7421
  source 1..51: mol_type = other DNA

SEQ ID NO: 8050 - DNA, 51 bp, synthetic construct; identical to SEQ ID NO: 8002
  source 1..51: mol_type = other DNA

SEQ ID NO: 8051 - DNA, 51 bp, synthetic construct; identical to SEQ ID NO: 7583
  source 1..51: mol_type = other DNA

SEQ ID NO: 8052 - DNA, 51 bp, synthetic construct; identical to SEQ ID NO: 7480
  source 1..51: mol_type = other DNA

SEQ ID NO: 8053 - DNA, 51 bp, synthetic construct; identical to SEQ ID NO: 7583
  source 1..51: mol_type = other DNA

SEQ ID NO: 8054 - DNA, 51 bp, synthetic construct; identical to SEQ ID NO: 7634
  source 1..51: mol_type = other DNA

SEQ ID NO: 8055 - DNA, 51 bp, synthetic construct; identical to SEQ ID NO: 7583
  source 1..51: mol_type = other DNA

SEQ ID NO: 8056 - DNA, 51 bp, synthetic construct; identical to SEQ ID NO: 7432
  source 1..51: mol_type = other DNA

SEQ ID NO: 8057 - DNA, 51 bp, synthetic construct; identical to SEQ ID NO: 7583
  source 1..51: mol_type = other DNA

SEQ ID NO: 8058 - DNA, 51 bp, synthetic construct; identical to SEQ ID NO: 7444
  source 1..51: mol_type = other DNA

SEQ ID NO: 8059 - DNA, 51 bp, synthetic construct; identical to SEQ ID NO: 7583
  source 1..51: mol_type = other DNA

SEQ ID NO: 8060 - DNA, 51 bp, synthetic construct; identical to SEQ ID NO: 7424
  source 1..51: mol_type = other DNA

SEQ ID NO: 8061 - DNA, 51 bp, synthetic construct; identical to SEQ ID NO: 7583
  source 1..51: mol_type = other DNA

SEQ ID NO: 8062 - DNA, 51 bp, synthetic construct; identical to SEQ ID NO: 7628
  source 1..51: mol_type = other DNA

SEQ ID NO: 8063 - DNA, 51 bp, synthetic construct; identical to SEQ ID NO: 7583
  source 1..51: mol_type = other DNA

SEQ ID NO: 8064 - DNA, 51 bp, synthetic construct; identical to SEQ ID NO: 7570
  source 1..51: mol_type = other DNA

SEQ ID NO: 8065 - DNA, 51 bp, synthetic construct; identical to SEQ ID NO: 7435
  source 1..51: mol_type = other DNA

SEQ ID NO: 8066 - DNA, 51 bp, synthetic construct; identical to SEQ ID NO: 7514
  source 1..51: mol_type = other DNA

SEQ ID NO: 8067 - DNA, 51 bp, synthetic construct; identical to SEQ ID NO: 7435
  source 1..51: mol_type = other DNA

SEQ ID NO: 8068 - DNA, 51 bp, synthetic construct; identical to SEQ ID NO: 7544
  source 1..51: mol_type = other DNA

SEQ ID NO: 8069 - DNA, 51 bp, synthetic construct; identical to SEQ ID NO: 7435
  source 1..51: mol_type = other DNA

SEQ ID NO: 8070 - DNA, 51 bp, synthetic construct
  source 1..51: mol_type = other DNA
gttcagtggtacagacagaagtcaggcaaaggccctgcccagctaatctta

SEQ ID NO: 8071 - DNA, 51 bp, synthetic construct; identical to SEQ ID NO: 7435
  source 1..51: mol_type = other DNA

SEQ ID NO: 8072 - DNA, 51 bp, synthetic construct; identical to SEQ ID NO: 7432
  source 1..51: mol_type = other DNA

SEQ ID NO: 8073 - DNA, 51 bp, synthetic construct; identical to SEQ ID NO: 7435
  source 1..51: mol_type = other DNA

SEQ ID NO: 8074 - DNA, 51 bp, synthetic construct; identical to SEQ ID NO: 7448
  source 1..51: mol_type = other DNA

SEQ ID NO: 8075 - DNA, 51 bp, synthetic construct; identical to SEQ ID NO: 7435
  source 1..51: mol_type = other DNA

SEQ ID NO: 8076 - DNA, 51 bp, synthetic construct
  source 1..51: mol_type = other DNA
ttcaggtggtacagacagcattctgggaaaggccttgaggtgctagtgtcc

SEQ ID NO: 8077 - DNA, 51 bp, synthetic construct; identical to SEQ ID NO: 7435
  source 1..51: mol_type = other DNA

SEQ ID NO: 8078 - DNA, 51 bp, synthetic construct; identical to SEQ ID NO: 7944
  source 1..51: mol_type = other DNA

SEQ ID NO: 8079 - DNA, 51 bp, synthetic construct; identical to SEQ ID NO: 7435
  source 1..51: mol_type = other DNA

SEQ ID NO: 8080 - DNA, 51 bp, synthetic construct; identical to SEQ ID NO: 7426
  source 1..51: mol_type = other DNA

SEQ ID NO: 8081 - DNA, 51 bp, synthetic construct; identical to SEQ ID NO: 7435
  source 1..51: mol_type = other DNA

SEQ ID NO: 8082 - DNA, 51 bp, synthetic construct; identical to SEQ ID NO: 7426
  source 1..51: mol_type = other DNA

SEQ ID NO: 8083 - DNA, 51 bp, synthetic construct; identical to SEQ ID NO: 7435
  source 1..51: mol_type = other DNA

SEQ ID NO: 8084 - DNA, 51 bp, synthetic construct; identical to SEQ ID NO: 7480
  source 1..51: mol_type = other DNA

SEQ ID NO: 8085 - DNA, 51 bp, synthetic construct; identical to SEQ ID NO: 7435
  source 1..51: mol_type = other DNA

SEQ ID NO: 8086 - DNA, 51 bp, synthetic construct; identical to SEQ ID NO: 7672
  source 1..51: mol_type = other DNA

SEQ ID NO: 8087 - DNA, 51 bp, synthetic construct; identical to SEQ ID NO: 7435
  source 1..51: mol_type = other DNA

SEQ ID NO: 8088 - DNA, 51 bp, synthetic construct; identical to SEQ ID NO: 7642
  source 1..51: mol_type = other DNA

SEQ ID NO: 8089 - DNA, 51 bp, synthetic construct; identical to SEQ ID NO: 7435
  source 1..51: mol_type = other DNA

SEQ ID NO: 8090 - DNA, 51 bp, synthetic construct; identical to SEQ ID NO: 7552
  source 1..51: mol_type = other DNA

SEQ ID NO: 8091 - DNA, 51 bp, synthetic construct; identical to SEQ ID NO: 7435
  source 1..51: mol_type = other DNA

SEQ ID NO: 8092 - DNA, 51 bp, synthetic construct; identical to SEQ ID NO: 7474
  source 1..51: mol_type = other DNA

SEQ ID NO: 8093 - DNA, 51 bp, synthetic construct; identical to SEQ ID NO: 7435
  source 1..51: mol_type = other DNA

SEQ ID NO: 8094 - DNA, 51 bp, synthetic construct; identical to SEQ ID NO: 7426
  source 1..51: mol_type = other DNA

SEQ ID NO: 8095 - DNA, 51 bp, synthetic construct; identical to SEQ ID NO: 7435
  source 1..51: mol_type = other DNA

SEQ ID NO: 8096 - DNA, 51 bp, synthetic construct; identical to SEQ ID NO: 7432
  source 1..51: mol_type = other DNA

SEQ ID NO: 8097 - DNA, 51 bp, synthetic construct; identical to SEQ ID NO: 7435
  source 1..51: mol_type = other DNA

SEQ ID NO: 8098 - DNA, 51 bp, synthetic construct; identical to SEQ ID NO: 7444
  source 1..51: mol_type = other DNA

SEQ ID NO: 8099 - DNA, 51 bp, synthetic construct; identical to SEQ ID NO: 7435
  source 1..51: mol_type = other DNA

SEQ ID NO: 8100 - DNA, 51 bp, synthetic construct; identical to SEQ ID NO: 7742
  source 1..51: mol_type = other DNA

SEQ ID NO: 8101 - DNA, 51 bp, synthetic construct; identical to SEQ ID NO: 7435
  source 1..51: mol_type = other DNA

SEQ ID NO: 8102 - DNA, 51 bp, synthetic construct; identical to SEQ ID NO: 7528
  source 1..51: mol_type = other DNA

SEQ ID NO: 8103 - DNA, 51 bp, synthetic construct; identical to SEQ ID NO: 7435
  source 1..51: mol_type = other DNA

SEQ ID NO: 8104 - DNA, 51 bp, synthetic construct; identical to SEQ ID NO: 7494
  source 1..51: mol_type = other DNA

SEQ ID NO: 8105 - DNA, 51 bp, synthetic construct; identical to SEQ ID NO: 7435
  source 1..51: mol_type = other DNA

SEQ ID NO: 8106 - DNA, 51 bp, synthetic construct; identical to SEQ ID NO: 7634
  source 1..51: mol_type = other DNA

SEQ ID NO: 8107 - DNA, 51 bp, synthetic construct; identical to SEQ ID NO: 7435
  source 1..51: mol_type = other DNA

SEQ ID NO: 8108 - DNA, 51 bp, synthetic construct; identical to SEQ ID NO: 7498
  source 1..51: mol_type = other DNA

SEQ ID NO: 8109 - DNA, 51 bp, synthetic construct; identical to SEQ ID NO: 7435
  source 1..51: mol_type = other DNA

SEQ ID NO: 8110 - DNA, 51 bp, synthetic construct; identical to SEQ ID NO: 7676
  source 1..51: mol_type = other DNA

SEQ ID NO: 8111 - DNA, 51 bp, synthetic construct; identical to SEQ ID NO: 7435
  source 1..51: mol_type = other DNA

SEQ ID NO: 8112 - DNA, 51 bp, synthetic construct; identical to SEQ ID NO: 7448
  source 1..51: mol_type = other DNA

SEQ ID NO: 8113 - DNA, 51 bp, synthetic construct; identical to SEQ ID NO: 7435
  source 1..51: mol_type = other DNA

SEQ ID NO: 8114 - DNA, 51 bp, synthetic construct; identical to SEQ ID NO: 7778
  source 1..51: mol_type = other DNA

SEQ ID NO: 8115 - DNA, 51 bp, synthetic construct; identical to SEQ ID NO: 7435
  source 1..51: mol_type = other DNA

SEQ ID NO: 8116 - DNA, 51 bp, synthetic construct; identical to SEQ ID NO: 7468
  source 1..51: mol_type = other DNA

SEQ ID NO: 8117 - DNA, 51 bp, synthetic construct; identical to SEQ ID NO: 7435
  source 1..51: mol_type = other DNA

SEQ ID NO: 8118 - DNA, 51 bp, synthetic construct; identical to SEQ ID NO: 7458
  source 1..51: mol_type = other DNA

SEQ ID NO: 8119 - DNA, 51 bp, synthetic construct; identical to SEQ ID NO: 7435
  source 1..51: mol_type = other DNA

SEQ ID NO: 8120 - DNA, 51 bp, synthetic construct; identical to SEQ ID NO: 7526
  source 1..51: mol_type = other DNA

SEQ ID NO: 8121 - DNA, 51 bp, synthetic construct; identical to SEQ ID NO: 7435
  source 1..51: mol_type = other DNA

SEQ ID NO: 8122 - DNA, 51 bp, synthetic construct; identical to SEQ ID NO: 7526
  source 1..51: mol_type = other DNA

SEQ ID NO: 8123 - DNA, 51 bp, synthetic construct; identical to SEQ ID NO: 7435
  source 1..51: mol_type = other DNA

SEQ ID NO: 8124 - DNA, 51 bp, synthetic construct; identical to SEQ ID NO: 7478
  source 1..51: mol_type = other DNA

SEQ ID NO: 8125 - DNA, 51 bp, synthetic construct; identical to SEQ ID NO: 7435
  source 1..51: mol_type = other DNA

SEQ ID NO: 8126 - DNA, 51 bp, synthetic construct; identical to SEQ ID NO: 7478
  source 1..51: mol_type = other DNA

SEQ ID NO: 8127 - DNA, 51 bp, synthetic construct; identical to SEQ ID NO: 7435
  source 1..51: mol_type = other DNA

SEQ ID NO: 8128 - DNA, 51 bp, synthetic construct; identical to SEQ ID NO: 7498
  source 1..51: mol_type = other DNA

SEQ ID NO: 8129 - DNA, 51 bp, synthetic construct; identical to SEQ ID NO: 7435
  source 1..51: mol_type = other DNA

SEQ ID NO: 8130 - DNA, 51 bp, synthetic construct; identical to SEQ ID NO: 7478
  source 1..51: mol_type = other DNA

SEQ ID NO: 8131 - DNA, 51 bp, synthetic construct; identical to SEQ ID NO: 7519
  source 1..51: mol_type = other DNA

SEQ ID NO: 8132 - DNA, 51 bp, synthetic construct; identical to SEQ ID NO: 7448
  source 1..51: mol_type = other DNA

SEQ ID NO: 8133 - DNA, 51 bp, synthetic construct; identical to SEQ ID NO: 7519
  source 1..51: mol_type = other DNA

SEQ ID NO: 8134 - DNA, 51 bp, synthetic construct; identical to SEQ ID NO: 7480
  source 1..51: mol_type = other DNA

SEQ ID NO: 8135 - DNA, 51 bp, synthetic construct; identical to SEQ ID NO: 7519
  source 1..51: mol_type = other DNA

SEQ ID NO: 8136 - DNA, 51 bp, synthetic construct; identical to SEQ ID NO: 7672
  source 1..51: mol_type = other DNA

SEQ ID NO: 8137 - DNA, 51 bp, synthetic construct; identical to SEQ ID NO: 7519
  source 1..51: mol_type = other DNA

SEQ ID NO: 8138 - DNA, 51 bp, synthetic construct; identical to SEQ ID NO: 7628
  source 1..51: mol_type = other DNA

SEQ ID NO: 8139 - DNA, 51 bp, synthetic construct; identical to SEQ ID NO: 7519
  source 1..51: mol_type = other DNA

SEQ ID NO: 8140 - DNA, 51 bp, synthetic construct; identical to SEQ ID NO: 7426
  source 1..51: mol_type = other DNA

SEQ ID NO: 8141 - DNA, 51 bp, synthetic construct; identical to SEQ ID NO: 7519
  source 1..51: mol_type = other DNA

SEQ ID NO: 8142 - DNA, 51 bp, synthetic construct
  source 1..51: mol_type = other DNA
ctgcagtggttttaccaacgtcctgggggaagcctcgtcagcctgttgtcc

SEQ ID NO: 8143 - DNA, 51 bp, synthetic construct; identical to SEQ ID NO: 7519
  source 1..51: mol_type = other DNA

SEQ ID NO: 8144 - DNA, 51 bp, synthetic construct; identical to SEQ ID NO: 7422
  source 1..51: mol_type = other DNA

SEQ ID NO: 8145 - DNA, 51 bp, synthetic construct; identical to SEQ ID NO: 7519
  source 1..51: mol_type = other DNA

SEQ ID NO: 8146 - DNA, 51 bp, synthetic construct; identical to SEQ ID NO: 7514
  source 1..51: mol_type = other DNA

SEQ ID NO: 8147 - DNA, 51 bp, synthetic construct; identical to SEQ ID NO: 7519
  source 1..51: mol_type = other DNA

SEQ ID NO: 8148 - DNA, 51 bp, synthetic construct; identical to SEQ ID NO: 7778
  source 1..51: mol_type = other DNA

SEQ ID NO: 8149 - DNA, 51 bp, synthetic construct; identical to SEQ ID NO: 7519
  source 1..51: mol_type = other DNA

SEQ ID NO: 8150 - DNA, 51 bp, synthetic construct; identical to SEQ ID NO: 7578
  source 1..51: mol_type = other DNA

SEQ ID NO: 8151 - DNA, 51 bp, synthetic construct; identical to SEQ ID NO: 7519
  source 1..51: mol_type = other DNA

SEQ ID NO: 8152 - DNA, 51 bp, synthetic construct; identical to SEQ ID NO: 7432
  source 1..51: mol_type = other DNA

SEQ ID NO: 8153 - DNA, 51 bp, synthetic construct; identical to SEQ ID NO: 7519
  source 1..51: mol_type = other DNA

SEQ ID NO: 8154 - DNA, 51 bp, synthetic construct; identical to SEQ ID NO: 7426
  source 1..51: mol_type = other DNA

SEQ ID NO: 8155 - DNA, 51 bp, synthetic construct; identical to SEQ ID NO: 7519
  source 1..51: mol_type = other DNA

SEQ ID NO: 8156 - DNA, 51 bp, synthetic construct; identical to SEQ ID NO: 7426
  source 1..51: mol_type = other DNA

SEQ ID NO: 8157 - DNA, 51 bp, synthetic construct; identical to SEQ ID NO: 7519
  source 1..51: mol_type = other DNA

SEQ ID NO: 8158 - DNA, 51 bp, synthetic construct; identical to SEQ ID NO: 7488
  source 1..51: mol_type = other DNA

SEQ ID NO: 8159 - DNA, 51 bp, synthetic construct; identical to SEQ ID NO: 7519
  source 1..51: mol_type = other DNA

SEQ ID NO: 8160 - DNA, 51 bp, synthetic construct; identical to SEQ ID NO: 7778
  source 1..51: mol_type = other DNA

SEQ ID NO: 8161 - DNA, 51 bp, synthetic construct; identical to SEQ ID NO: 7519
  source 1..51: mol_type = other DNA

SEQ ID NO: 8162 - DNA, 51 bp, synthetic construct; identical to SEQ ID NO: 7512
  source 1..51: mol_type = other DNA

SEQ ID NO: 8163 - DNA, 51 bp, synthetic construct; identical to SEQ ID NO: 7519
  source 1..51: mol_type = other DNA

SEQ ID NO: 8164 - DNA, 51 bp, synthetic construct; identical to SEQ ID NO: 7578
  source 1..51: mol_type = other DNA

SEQ ID NO: 8165 - DNA, 51 bp, synthetic construct; identical to SEQ ID NO: 7519
  source 1..51: mol_type = other DNA

SEQ ID NO: 8166 - DNA, 51 bp, synthetic construct; identical to SEQ ID NO: 7434
  source 1..51: mol_type = other DNA

SEQ ID NO: 8167 - DNA, 51 bp, synthetic construct; identical to SEQ ID NO: 7519
  source 1..51: mol_type = other DNA

SEQ ID NO: 8168 - DNA, 51 bp, synthetic construct; identical to SEQ ID NO: 7458
  source 1..51: mol_type = other DNA

SEQ ID NO: 8169 - DNA, 51 bp, synthetic construct; identical to SEQ ID NO: 7519
  source 1..51: mol_type = other DNA

SEQ ID NO: 8170 - DNA, 51 bp, synthetic construct; identical to SEQ ID NO: 7480
  source 1..51: mol_type = other DNA

SEQ ID NO: 8171 - DNA, 51 bp, synthetic construct; identical to SEQ ID NO: 7519
  source 1..51: mol_type = other DNA

SEQ ID NO: 8172 - DNA, 51 bp, synthetic construct; identical to SEQ ID NO: 7426
  source 1..51: mol_type = other DNA

SEQ ID NO: 8173 - DNA, 51 bp, synthetic construct; identical to SEQ ID NO: 7519
  source 1..51: mol_type = other DNA

SEQ ID NO: 8174 - DNA, 51 bp, synthetic construct; identical to SEQ ID NO: 7466
  source 1..51: mol_type = other DNA

SEQ ID NO: 8175 - DNA, 51 bp, synthetic construct; identical to SEQ ID NO: 7519
  source 1..51: mol_type = other DNA

SEQ ID NO: 8176 - DNA, 51 bp, synthetic construct; identical to SEQ ID NO: 7492
  source 1..51: mol_type = other DNA

SEQ ID NO: 8177 - DNA, 51 bp, synthetic construct; identical to SEQ ID NO: 7519
  source 1..51: mol_type = other DNA

SEQ ID NO: 8178 - DNA, 51 bp, synthetic construct
  source 1..51: mol_type = other DNA
ttctggtggtacagacagcattctggagaaggccccaaagcactgatgtcc

SEQ ID NO: 8179 - DNA, 51 bp, synthetic construct; identical to SEQ ID NO: 7519
  source 1..51: mol_type = other DNA

SEQ ID NO: 8180 - DNA, 51 bp, synthetic construct; identical to SEQ ID NO: 7528
  source 1..51: mol_type = other DNA

SEQ ID NO: 8181 - DNA, 51 bp, synthetic construct; identical to SEQ ID NO: 7519
  source 1..51: mol_type = other DNA

SEQ ID NO: 8182 - DNA, 51 bp, synthetic construct; identical to SEQ ID NO: 7468
  source 1..51: mol_type = other DNA

SEQ ID NO: 8183 - DNA, 51 bp, synthetic construct; identical to SEQ ID NO: 7423
  source 1..51: mol_type = other DNA

SEQ ID NO: 8184 - DNA, 51 bp, synthetic construct
  source 1..51: mol_type = other DNA
ttatcctggtaccagcaacgtgaaggccaagcccctgtatttctttcttat

SEQ ID NO: 8185 - DNA, 51 bp, synthetic construct; identical to SEQ ID NO: 7423
  source 1..51: mol_type = other DNA

SEQ ID NO: 8186 - DNA, 51 bp, synthetic construct; identical to SEQ ID NO: 7426
  source 1..51: mol_type = other DNA

SEQ ID NO: 8187 - DNA, 51 bp, synthetic construct; identical to SEQ ID NO: 7423
  source 1..51: mol_type = other DNA

SEQ ID NO: 8188 - DNA, 51 bp, synthetic construct; identical to SEQ ID NO: 7482
  source 1..51: mol_type = other DNA

SEQ ID NO: 8189 - DNA, 51 bp, synthetic construct; identical to SEQ ID NO: 7423
  source 1..51: mol_type = other DNA

SEQ ID NO: 8190 - DNA, 51 bp, synthetic construct; identical to SEQ ID NO: 7432
  source 1..51: mol_type = other DNA

SEQ ID NO: 8191 - DNA, 51 bp, synthetic construct; identical to SEQ ID NO: 7423
  source 1..51: mol_type = other DNA

SEQ ID NO: 8192 - DNA, 51 bp, synthetic construct; identical to SEQ ID NO: 7434
  source 1..51: mol_type = other DNA

SEQ ID NO: 8193 - DNA, 51 bp, synthetic construct; identical to SEQ ID NO: 7423
  source 1..51: mol_type = other DNA

SEQ ID NO: 8194 - DNA, 51 bp, synthetic construct
  source 1..51: mol_type = other DNA
atgcagtggttttaccaacgtcctgggggaagtctcatcagcgtgttctac

SEQ ID NO: 8195 - DNA, 51 bp, synthetic construct; identical to SEQ ID NO: 7423
  source 1..51: mol_type = other DNA

SEQ ID NO: 8196 - DNA, 51 bp, synthetic construct; identical to SEQ ID NO: 7432
  source 1..51: mol_type = other DNA

SEQ ID NO: 8197 - DNA, 51 bp, synthetic construct; identical to SEQ ID NO: 7423
  source 1..51: mol_type = other DNA

SEQ ID NO: 8198 - DNA, 51 bp, synthetic construct; identical to SEQ ID NO: 7468
  source 1..51: mol_type = other DNA

SEQ ID NO: 8199 - DNA, 51 bp, synthetic construct; identical to SEQ ID NO: 7423
  source 1..51: mol_type = other DNA

SEQ ID NO: 8200 - DNA, 51 bp, synthetic construct; identical to SEQ ID NO: 7426
  source 1..51: mol_type = other DNA

SEQ ID NO: 8201 - DNA, 51 bp, synthetic construct; identical to SEQ ID NO: 7423
  source 1..51: mol_type = other DNA

SEQ ID NO: 8202 - DNA, 51 bp, synthetic construct; identical to SEQ ID NO: 7544
  source 1..51: mol_type = other DNA

SEQ ID NO: 8203 - DNA, 51 bp, synthetic construct; identical to SEQ ID NO: 7423
  source 1..51: mol_type = other DNA

SEQ ID NO: 8204 - DNA, 51 bp, synthetic construct; identical to SEQ ID NO: 7480
  source 1..51: mol_type = other DNA

SEQ ID NO: 8205 - DNA, 51 bp, synthetic construct; identical to SEQ ID NO: 7423
  source 1..51: mol_type = other DNA

SEQ ID NO: 8206 - DNA, 51 bp, synthetic construct; identical to SEQ ID NO: 7462
  source 1..51: mol_type = other DNA

SEQ ID NO: 8207 - DNA, 51 bp, synthetic construct; identical to SEQ ID NO: 7423
  source 1..51: mol_type = other DNA

SEQ ID NO: 8208 - DNA, 51 bp, synthetic construct; identical to SEQ ID NO: 7488
  source 1..51: mol_type = other DNA

SEQ ID NO: 8209 - DNA, 51 bp, synthetic construct; identical to SEQ ID NO: 7423
  source 1..51: mol_type = other DNA

SEQ ID NO: 8210 - DNA, 51 bp, synthetic construct; identical to SEQ ID NO: 7426
  source 1..51: mol_type = other DNA

SEQ ID NO: 8211 - DNA, 51 bp, synthetic construct; identical to SEQ ID NO: 7423
  source 1..51: mol_type = other DNA

SEQ ID NO: 8212 - DNA, 51 bp, synthetic construct; identical to SEQ ID NO: 7676
  source 1..51: mol_type = other DNA

SEQ ID NO: 8213 - DNA, 51 bp, synthetic construct; identical to SEQ ID NO: 7423
  source 1..51: mol_type = other DNA

SEQ ID NO: 8214 - DNA, 51 bp, synthetic construct; identical to SEQ ID NO: 7672
  source 1..51: mol_type = other DNA

SEQ ID NO: 8215 - DNA, 51 bp, synthetic construct; identical to SEQ ID NO: 7423
  source 1..51: mol_type = other DNA

SEQ ID NO: 8216 - DNA, 51 bp, synthetic construct; identical to SEQ ID NO: 7428
  source 1..51: mol_type = other DNA

SEQ ID NO: 8217 - DNA, 51 bp, synthetic construct; identical to SEQ ID NO: 7423
  source 1..51: mol_type = other DNA

SEQ ID NO: 8218 - DNA, 51 bp, synthetic construct; identical to SEQ ID NO: 7432
  source 1..51: mol_type = other DNA

SEQ ID NO: 8219 - DNA, 51 bp, synthetic construct; identical to SEQ ID NO: 7423
  source 1..51: mol_type = other DNA

SEQ ID NO: 8220 - DNA, 51 bp, synthetic construct; identical to SEQ ID NO: 7428
  source 1..51: mol_type = other DNA

SEQ ID NO: 8221 - DNA, 51 bp, synthetic construct; identical to SEQ ID NO: 7423
  source 1..51: mol_type = other DNA

SEQ ID NO: 8222 - DNA, 51 bp, synthetic construct
  source 1..51: mol_type = other DNA
ttcaggtggtacagacagcattctgggaaaggccttgaggtgctggtgtcc

SEQ ID NO: 8223 - DNA, 51 bp, synthetic construct; identical to SEQ ID NO: 7423
  source 1..51: mol_type = other DNA

SEQ ID NO: 8224 - DNA, 51 bp, synthetic construct; identical to SEQ ID NO: 7634
  source 1..51: mol_type = other DNA

SEQ ID NO: 8225 - DNA, 51 bp, synthetic construct; identical to SEQ ID NO: 7423
  source 1..51: mol_type = other DNA

SEQ ID NO: 8226 - DNA, 51 bp, synthetic construct; identical to SEQ ID NO: 7536
  source 1..51: mol_type = other DNA

SEQ ID NO: 8227 - DNA, 51 bp, synthetic construct; identical to SEQ ID NO: 7423
  source 1..51: mol_type = other DNA

SEQ ID NO: 8228 - DNA, 51 bp, synthetic construct; identical to SEQ ID NO: 7442
  source 1..51: mol_type = other DNA

SEQ ID NO: 8229 - DNA, 51 bp, synthetic construct; identical to SEQ ID NO: 7423
  source 1..51: mol_type = other DNA

SEQ ID NO: 8230 - DNA, 51 bp, synthetic construct; identical to SEQ ID NO: 7426
  source 1..51: mol_type = other DNA

SEQ ID NO: 8231 - DNA, 51 bp, synthetic construct; identical to SEQ ID NO: 7423
  source 1..51: mol_type = other DNA

SEQ ID NO: 8232 - DNA, 51 bp, synthetic construct; identical to SEQ ID NO: 7426
  source 1..51: mol_type = other DNA

SEQ ID NO: 8233 - DNA, 51 bp, synthetic construct; identical to SEQ ID NO: 7423
  source 1..51: mol_type = other DNA

SEQ ID NO: 8234 - DNA, 51 bp, synthetic construct; identical to SEQ ID NO: 8142
  source 1..51: mol_type = other DNA

SEQ ID NO: 8235 - DNA, 51 bp, synthetic construct; identical to SEQ ID NO: 7423
  source 1..51: mol_type = other DNA

SEQ ID NO: 8236 - DNA, 51 bp, synthetic construct; identical to SEQ ID NO: 7426
  source 1..51: mol_type = other DNA

SEQ ID NO: 8237 - DNA, 51 bp, synthetic construct; identical to SEQ ID NO: 7423
  source 1..51: mol_type = other DNA

SEQ ID NO: 8238 - DNA, 51 bp, synthetic construct; identical to SEQ ID NO: 7480
  source 1..51: mol_type = other DNA

SEQ ID NO: 8239 - DNA, 51 bp, synthetic construct; identical to SEQ ID NO: 7423
  source 1..51: mol_type = other DNA

SEQ ID NO: 8240 - DNA, 51 bp, synthetic construct; identical to SEQ ID NO: 7512
  source 1..51: mol_type = other DNA

SEQ ID NO: 8241 - DNA, 51 bp, synthetic construct; identical to SEQ ID NO: 7423
  source 1..51: mol_type = other DNA

SEQ ID NO: 8242 - DNA, 51 bp, synthetic construct; identical to SEQ ID NO: 8222
  source 1..51: mol_type = other DNA

SEQ ID NO: 8243 - DNA, 51 bp, synthetic construct; identical to SEQ ID NO: 7423
  source 1..51: mol_type = other DNA

SEQ ID NO: 8244 - DNA, 51 bp, synthetic construct; identical to SEQ ID NO: 7426
  source 1..51: mol_type = other DNA

SEQ ID NO: 8245 - DNA, 51 bp, synthetic construct; identical to SEQ ID NO: 7423
  source 1..51: mol_type = other DNA

SEQ ID NO: 8246 - DNA, 51 bp, synthetic construct; identical to SEQ ID NO: 7426
  source 1..51: mol_type = other DNA

SEQ ID NO: 8247 - DNA, 51 bp, synthetic construct; identical to SEQ ID NO: 7423
  source 1..51: mol_type = other DNA

SEQ ID NO: 8248 - DNA, 51 bp, synthetic construct
  source 1..51: mol_type = other DNA
tttttctggtatgtgcaatatctcaacgaagcccctaaactactcctgcgg

SEQ ID NO: 8249 - DNA, 51 bp, synthetic construct; identical to SEQ ID NO: 7423
  source 1..51: mol_type = other DNA

SEQ ID NO: 8250 - DNA, 51 bp, synthetic construct; identical to SEQ ID NO: 7426
  source 1..51: mol_type = other DNA

SEQ ID NO: 8251 - DNA, 51 bp, synthetic construct; identical to SEQ ID NO: 7423
  source 1..51: mol_type = other DNA

SEQ ID NO: 8252 - DNA, 51 bp, synthetic construct; identical to SEQ ID NO: 7426
  source 1..51: mol_type = other DNA

SEQ ID NO: 8253 - DNA, 51 bp, synthetic construct; identical to SEQ ID NO: 7423
  source 1..51: mol_type = other DNA

SEQ ID NO: 8254 - DNA, 51 bp, synthetic construct; identical to SEQ ID NO: 7424
  source 1..51: mol_type = other DNA

SEQ ID NO: 8255 - DNA, 51 bp, synthetic construct; identical to SEQ ID NO: 7423
  source 1..51: mol_type = other DNA

SEQ ID NO: 8256 - DNA, 51 bp, synthetic construct; identical to SEQ ID NO: 7462
  source 1..51: mol_type = other DNA

SEQ ID NO: 8257 - DNA, 51 bp, synthetic construct; identical to SEQ ID NO: 7423
  source 1..51: mol_type = other DNA

SEQ ID NO: 8258 - DNA, 51 bp, synthetic construct; identical to SEQ ID NO: 7462
  source 1..51: mol_type = other DNA

SEQ ID NO: 8259 - DNA, 51 bp, synthetic construct; identical to SEQ ID NO: 7423
  source 1..51: mol_type = other DNA

SEQ ID NO: 8260 - DNA, 51 bp, synthetic construct; identical to SEQ ID NO: 7428
  source 1..51: mol_type = other DNA

SEQ ID NO: 8261 - DNA, 51 bp, synthetic construct; identical to SEQ ID NO: 7423
  source 1..51: mol_type = other DNA

SEQ ID NO: 8262 - DNA, 51 bp, synthetic construct; identical to SEQ ID NO: 7462
  source 1..51: mol_type = other DNA

SEQ ID NO: 8263 - DNA, 51 bp, synthetic construct; identical to SEQ ID NO: 7423
  source 1..51: mol_type = other DNA

SEQ ID NO: 8264 - DNA, 51 bp, synthetic construct; identical to SEQ ID NO: 7428
  source 1..51: mol_type = other DNA

SEQ ID NO: 8265 - DNA, 51 bp, synthetic construct; identical to SEQ ID NO: 7423
  source 1..51: mol_type = other DNA

SEQ ID NO: 8266 - DNA, 51 bp, synthetic construct; identical to SEQ ID NO: 7462
  source 1..51: mol_type = other DNA

SEQ ID NO: 8267 - DNA, 51 bp, synthetic construct; identical to SEQ ID NO: 7423
  source 1..51: mol_type = other DNA

SEQ ID NO: 8268 - DNA, 51 bp, synthetic construct; identical to SEQ ID NO: 7448
  source 1..51: mol_type = other DNA

SEQ ID NO: 8269 - DNA, 51 bp, synthetic construct; identical to SEQ ID NO: 7423
  source 1..51: mol_type = other DNA

SEQ ID NO: 8270 - DNA, 51 bp, synthetic construct; identical to SEQ ID NO: 7458
  source 1..51: mol_type = other DNA

SEQ ID NO: 8271 - DNA, 51 bp, synthetic construct; identical to SEQ ID NO: 7423
  source 1..51: mol_type = other DNA

SEQ ID NO: 8272 - DNA, 51 bp, synthetic construct; identical to SEQ ID NO: 8184
  source 1..51: mol_type = other DNA

SEQ ID NO: 8273 - DNA, 51 bp, synthetic construct; identical to SEQ ID NO: 7423
  source 1..51: mol_type = other DNA

SEQ ID NO: 8274 - DNA, 51 bp, synthetic construct; identical to SEQ ID NO: 7488
  source 1..51: mol_type = other DNA

SEQ ID NO: 8275 - DNA, 51 bp, synthetic construct; identical to SEQ ID NO: 7423
  source 1..51: mol_type = other DNA

SEQ ID NO: 8276 - DNA, 51 bp, synthetic construct; identical to SEQ ID NO: 7530
  source 1..51: mol_type = other DNA

SEQ ID NO: 8277 - DNA, 51 bp, synthetic construct; identical to SEQ ID NO: 7423
  source 1..51: mol_type = other DNA

SEQ ID NO: 8278 - DNA, 51 bp, synthetic construct; identical to SEQ ID NO: 7424
  source 1..51: mol_type = other DNA

SEQ ID NO: 8279 - DNA, 51 bp, synthetic construct; identical to SEQ ID NO: 7423
  source 1..51: mol_type = other DNA

SEQ ID NO: 8280 - DNA, 51 bp, synthetic construct; identical to SEQ ID NO: 7474
  source 1..51: mol_type = other DNA

SEQ ID NO: 8281 - DNA, 51 bp, synthetic construct; identical to SEQ ID NO: 7423
  source 1..51: mol_type = other DNA

SEQ ID NO: 8282 - DNA, 51 bp, synthetic construct; identical to SEQ ID NO: 7530
  source 1..51: mol_type = other DNA

SEQ ID NO: 8283 - DNA, 51 bp, synthetic construct; identical to SEQ ID NO: 7423
  source 1..51: mol_type = other DNA

SEQ ID NO: 8284 - DNA, 51 bp, synthetic construct; identical to SEQ ID NO: 7434
  source 1..51: mol_type = other DNA

SEQ ID NO: 8285 - DNA, 51 bp, synthetic construct; identical to SEQ ID NO: 7423
  source 1..51: mol_type = other DNA

SEQ ID NO: 8286 - DNA, 51 bp, synthetic construct
  source 1..51: mol_type = other DNA
ttctcctggtacaagcaagaggcgggggcaggtcttcagttgcttatgagt

SEQ ID NO: 8287 - DNA, 51 bp, synthetic construct; identical to SEQ ID NO: 7423
  source 1..51: mol_type = other DNA

SEQ ID NO: 8288 - DNA, 51 bp, synthetic construct; identical to SEQ ID NO: 7496
  source 1..51: mol_type = other DNA

SEQ ID NO: 8289 - DNA, 51 bp, synthetic construct; identical to SEQ ID NO: 7423
  source 1..51: mol_type = other DNA

SEQ ID NO: 8290 - DNA, 51 bp, synthetic construct; identical to SEQ ID NO: 7526
  source 1..51: mol_type = other DNA

SEQ ID NO: 8291 - DNA, 51 bp, synthetic construct; identical to SEQ ID NO: 7423
  source 1..51: mol_type = other DNA

SEQ ID NO: 8292 - DNA, 51 bp, synthetic construct; identical to SEQ ID NO: 7462
  source 1..51: mol_type = other DNA

SEQ ID NO: 8293 - DNA, 51 bp, synthetic construct; identical to SEQ ID NO: 7423
  source 1..51: mol_type = other DNA

SEQ ID NO: 8294 - DNA, 51 bp, synthetic construct; identical to SEQ ID NO: 7544
  source 1..51: mol_type = other DNA

SEQ ID NO: 8295 - DNA, 51 bp, synthetic construct; identical to SEQ ID NO: 7423
  source 1..51: mol_type = other DNA

SEQ ID NO: 8296 - DNA, 51 bp, synthetic construct; identical to SEQ ID NO: 7930
  source 1..51: mol_type = other DNA

SEQ ID NO: 8297 - DNA, 51 bp, synthetic construct; identical to SEQ ID NO: 7423
  source 1..51: mol_type = other DNA

SEQ ID NO: 8298 - DNA, 51 bp, synthetic construct; identical to SEQ ID NO: 7930
  source 1..51: mol_type = other DNA

SEQ ID NO: 8299 - DNA, 51 bp, synthetic construct; identical to SEQ ID NO: 7423
  source 1..51: mol_type = other DNA

SEQ ID NO: 8300 - DNA, 51 bp, synthetic construct; identical to SEQ ID NO: 7578
  source 1..51: mol_type = other DNA

SEQ ID NO: 8301 - DNA, 51 bp, synthetic construct; identical to SEQ ID NO: 7423
  source 1..51: mol_type = other DNA

SEQ ID NO: 8302 - DNA, 51 bp, synthetic construct; identical to SEQ ID NO: 7458
  source 1..51: mol_type = other DNA

SEQ ID NO: 8303 - DNA, 51 bp, synthetic construct; identical to SEQ ID NO: 7423
  source 1..51: mol_type = other DNA

SEQ ID NO: 8304 - DNA, 51 bp, synthetic construct; identical to SEQ ID NO: 7580
  source 1..51: mol_type = other DNA

SEQ ID NO: 8305 - DNA, 51 bp, synthetic construct; identical to SEQ ID NO: 7423
  source 1..51: mol_type = other DNA

SEQ ID NO: 8306 - DNA, 51 bp, synthetic construct; identical to SEQ ID NO: 7634
  source 1..51: mol_type = other DNA

SEQ ID NO: 8307 - DNA, 51 bp, synthetic construct; identical to SEQ ID NO: 7423
  source 1..51: mol_type = other DNA

SEQ ID NO: 8308 - DNA, 51 bp, synthetic construct; identical to SEQ ID NO: 7468
  source 1..51: mol_type = other DNA

SEQ ID NO: 8309 - DNA, 51 bp, synthetic construct; identical to SEQ ID NO: 7423
  source 1..51: mol_type = other DNA

SEQ ID NO: 8310 - DNA, 51 bp, synthetic construct
  source 1..51: mol_type = other DNA
cttttctggtatgtgcactatctcaatgaatcccctcggctactcctgaag

SEQ ID NO: 8311 - DNA, 51 bp, synthetic construct; identical to SEQ ID NO: 7423
  source 1..51: mol_type = other DNA

SEQ ID NO: 8312 - DNA, 51 bp, synthetic construct; identical to SEQ ID NO: 7492
  source 1..51: mol_type = other DNA

SEQ ID NO: 8313 - DNA, 51 bp, synthetic construct; identical to SEQ ID NO: 7423
  source 1..51: mol_type = other DNA

SEQ ID NO: 8314 - DNA, 51 bp, synthetic construct; identical to SEQ ID NO: 7504
  source 1..51: mol_type = other DNA

SEQ ID NO: 8315 - DNA, 51 bp, synthetic construct; identical to SEQ ID NO: 7423
  source 1..51: mol_type = other DNA

SEQ ID NO: 8316 - DNA, 51 bp, synthetic construct; identical to SEQ ID NO: 7462
  source 1..51: mol_type = other DNA

SEQ ID NO: 8317 - DNA, 51 bp, synthetic construct; identical to SEQ ID NO: 7423
  source 1..51: mol_type = other DNA

SEQ ID NO: 8318 - DNA, 51 bp, synthetic construct; identical to SEQ ID NO: 7426
  source 1..51: mol_type = other DNA

SEQ ID NO: 8319 - DNA, 51 bp, synthetic construct; identical to SEQ ID NO: 7423
  source 1..51: mol_type = other DNA

SEQ ID NO: 8320 - DNA, 51 bp, synthetic construct; identical to SEQ ID NO: 7430
  source 1..51: mol_type = other DNA

SEQ ID NO: 8321 - DNA, 51 bp, synthetic construct; identical to SEQ ID NO: 7423
  source 1..51: mol_type = other DNA

SEQ ID NO: 8322 - DNA, 51 bp, synthetic construct; identical to SEQ ID NO: 7428
  source 1..51: mol_type = other DNA

SEQ ID NO: 8323 - DNA, 51 bp, synthetic construct; identical to SEQ ID NO: 7423
  source 1..51: mol_type = other DNA

SEQ ID NO: 8324 - DNA, 51 bp, synthetic construct; identical to SEQ ID NO: 8310
  source 1..51: mol_type = other DNA

SEQ ID NO: 8325 - DNA, 51 bp, synthetic construct; identical to SEQ ID NO: 7423
  source 1..51: mol_type = other DNA

SEQ ID NO: 8326 - DNA, 51 bp, synthetic construct; identical to SEQ ID NO: 7426
  source 1..51: mol_type = other DNA

SEQ ID NO: 8327 - DNA, 51 bp, synthetic construct; identical to SEQ ID NO: 7423
  source 1..51: mol_type = other DNA

SEQ ID NO: 8328 - DNA, 51 bp, synthetic construct; identical to SEQ ID NO: 7492
  source 1..51: mol_type = other DNA

SEQ ID NO: 8329 - DNA, 51 bp, synthetic construct; identical to SEQ ID NO: 7423
  source 1..51: mol_type = other DNA

SEQ ID NO: 8330 - DNA, 51 bp, synthetic construct; identical to SEQ ID NO: 7520
  source 1..51: mol_type = other DNA

SEQ ID NO: 8331 - DNA, 51 bp, synthetic construct; identical to SEQ ID NO: 7423
  source 1..51: mol_type = other DNA

SEQ ID NO: 8332 - DNA, 51 bp, synthetic construct; identical to SEQ ID NO: 7754
  source 1..51: mol_type = other DNA

SEQ ID NO: 8333 - DNA, 51 bp, synthetic construct; identical to SEQ ID NO: 7423
  source 1..51: mol_type = other DNA

SEQ ID NO: 8334 - DNA, 51 bp, synthetic construct; identical to SEQ ID NO: 7478
  source 1..51: mol_type = other DNA

SEQ ID NO: 8335 - DNA, 51 bp, synthetic construct; identical to SEQ ID NO: 7423
  source 1..51: mol_type = other DNA

SEQ ID NO: 8336 - DNA, 51 bp, synthetic construct; identical to SEQ ID NO: 7444
  source 1..51: mol_type = other DNA

SEQ ID NO: 8337 - DNA, 51 bp, synthetic construct; identical to SEQ ID NO: 7423
  source 1..51: mol_type = other DNA

SEQ ID NO: 8338 - DNA, 51 bp, synthetic construct; identical to SEQ ID NO: 7426
  source 1..51: mol_type = other DNA

SEQ ID NO: 8339 - DNA, 51 bp, synthetic construct; identical to SEQ ID NO: 7423
  source 1..51: mol_type = other DNA

SEQ ID NO: 8340 - DNA, 51 bp, synthetic construct; identical to SEQ ID NO: 7424
  source 1..51: mol_type = other DNA

SEQ ID NO: 8341 - DNA, 51 bp, synthetic construct; identical to SEQ ID NO: 7423
  source 1..51: mol_type = other DNA

SEQ ID NO: 8342 - DNA, 51 bp, synthetic construct; identical to SEQ ID NO: 7426
  source 1..51: mol_type = other DNA

SEQ ID NO: 8343 - DNA, 51 bp, synthetic construct; identical to SEQ ID NO: 7423
  source 1..51: mol_type = other DNA

SEQ ID NO: 8344 - DNA, 51 bp, synthetic construct; identical to SEQ ID NO: 7432
  source 1..51: mol_type = other DNA

SEQ ID NO: 8345 - DNA, 51 bp, synthetic construct; identical to SEQ ID NO: 7423
  source 1..51: mol_type = other DNA

SEQ ID NO: 8346 - DNA, 51 bp, synthetic construct; identical to SEQ ID NO: 7448
  source 1..51: mol_type = other DNA

SEQ ID NO: 8347 - DNA, 51 bp, synthetic construct; identical to SEQ ID NO: 7423
  source 1..51: mol_type = other DNA

SEQ ID NO: 8348 - DNA, 51 bp, synthetic construct; identical to SEQ ID NO: 7540
  source 1..51: mol_type = other DNA

SEQ ID NO: 8349 - DNA, 51 bp, synthetic construct; identical to SEQ ID NO: 7423
  source 1..51: mol_type = other DNA

SEQ ID NO: 8350 - DNA, 51 bp, synthetic construct; identical to SEQ ID NO: 7676
  source 1..51: mol_type = other DNA

SEQ ID NO: 8351 - DNA, 51 bp, synthetic construct; identical to SEQ ID NO: 7423
  source 1..51: mol_type = other DNA

SEQ ID NO: 8352 - DNA, 51 bp, synthetic construct; identical to SEQ ID NO: 7672
  source 1..51: mol_type = other DNA

SEQ ID NO: 8353 - DNA, 51 bp, synthetic construct; identical to SEQ ID NO: 7423
  source 1..51: mol_type = other DNA

SEQ ID NO: 8354 - DNA, 51 bp, synthetic construct; identical to SEQ ID NO: 7434
  source 1..51: mol_type = other DNA

SEQ ID NO: 8355 - DNA, 51 bp, synthetic construct; identical to SEQ ID NO: 7423
  source 1..51: mol_type = other DNA

SEQ ID NO: 8356 - DNA, 51 bp, synthetic construct; identical to SEQ ID NO: 7466
  source 1..51: mol_type = other DNA

SEQ ID NO: 8357 - DNA, 51 bp, synthetic construct; identical to SEQ ID NO: 7423
  source 1..51: mol_type = other DNA

SEQ ID NO: 8358 - DNA, 51 bp, synthetic construct; identical to SEQ ID NO: 7970
  source 1..51: mol_type = other DNA

SEQ ID NO: 8359 - DNA, 51 bp, synthetic construct; identical to SEQ ID NO: 7423
  source 1..51: mol_type = other DNA

SEQ ID NO: 8360 - DNA, 51 bp, synthetic construct; identical to SEQ ID NO: 7970
  source 1..51: mol_type = other DNA

SEQ ID NO: 8361 - DNA, 51 bp, synthetic construct; identical to SEQ ID NO: 7423
  source 1..51: mol_type = other DNA

SEQ ID NO: 8362 - DNA, 51 bp, synthetic construct; identical to SEQ ID NO: 7480
  source 1..51: mol_type = other DNA

SEQ ID NO: 8363 - DNA, 51 bp, synthetic construct; identical to SEQ ID NO: 7423
  source 1..51: mol_type = other DNA

SEQ ID NO: 8364 - DNA, 51 bp, synthetic construct; identical to SEQ ID NO: 7480
  source 1..51: mol_type = other DNA

SEQ ID NO: 8365 - DNA, 51 bp, synthetic construct; identical to SEQ ID NO: 7423
  source 1..51: mol_type = other DNA

SEQ ID NO: 8366 - DNA, 51 bp, synthetic construct; identical to SEQ ID NO: 7462
  source 1..51: mol_type = other DNA

SEQ ID NO: 8367 - DNA, 51 bp, synthetic construct; identical to SEQ ID NO: 7423
  source 1..51: mol_type = other DNA

SEQ ID NO: 8368 - DNA, 51 bp, synthetic construct; identical to SEQ ID NO: 7468
  source 1..51: mol_type = other DNA

SEQ ID NO: 8369 - DNA, 51 bp, synthetic construct; identical to SEQ ID NO: 7423
  source 1..51: mol_type = other DNA

SEQ ID NO: 8370 - DNA, 51 bp, synthetic construct; identical to SEQ ID NO: 7468
  source 1..51: mol_type = other DNA

SEQ ID NO: 8371 - DNA, 51 bp, synthetic construct; identical to SEQ ID NO: 7423
  source 1..51: mol_type = other DNA

SEQ ID NO: 8372 - DNA, 51 bp, synthetic construct; identical to SEQ ID NO: 7496
  source 1..51: mol_type = other DNA

SEQ ID NO: 8373 - DNA, 51 bp, synthetic construct; identical to SEQ ID NO: 7423
  source 1..51: mol_type = other DNA

SEQ ID NO: 8374 - DNA, 51 bp, synthetic construct; identical to SEQ ID NO: 7426
  source 1..51: mol_type = other DNA

SEQ ID NO: 8375 - DNA, 51 bp, synthetic construct; identical to SEQ ID NO: 7423
  source 1..51: mol_type = other DNA

SEQ ID NO: 8376 - DNA, 51 bp, synthetic construct; identical to SEQ ID NO: 7496
  source 1..51: mol_type = other DNA

SEQ ID NO: 8377 - DNA, 51 bp, synthetic construct; identical to SEQ ID NO: 7423
  source 1..51: mol_type = other DNA

SEQ ID NO: 8378 - DNA, 51 bp, synthetic construct; identical to SEQ ID NO: 7676
  source 1..51: mol_type = other DNA

SEQ ID NO: 8379 - DNA, 51 bp, synthetic construct; identical to SEQ ID NO: 7457
  source 1..51: mol_type = other DNA

SEQ ID NO: 8380 - DNA, 51 bp, synthetic construct; identical to SEQ ID NO: 7524
  source 1..51: mol_type = other DNA

SEQ ID NO: 8381 - DNA, 51 bp, synthetic construct; identical to SEQ ID NO: 7457
  source 1..51: mol_type = other DNA

SEQ ID NO: 8382 - DNA, 51 bp, synthetic construct; identical to SEQ ID NO: 7424
  source 1..51: mol_type = other DNA

SEQ ID NO: 8383 - DNA, 51 bp, synthetic construct; identical to SEQ ID NO: 7457
  source 1..51: mol_type = other DNA

SEQ ID NO: 8384 - DNA, 51 bp, synthetic construct; identical to SEQ ID NO: 7498
  source 1..51: mol_type = other DNA

SEQ ID NO: 8385 - DNA, 51 bp, synthetic construct; identical to SEQ ID NO: 7457
  source 1..51: mol_type = other DNA

SEQ ID NO: 8386 - DNA, 51 bp, synthetic construct; identical to SEQ ID NO: 7496
  source 1..51: mol_type = other DNA

SEQ ID NO: 8387 - DNA, 51 bp, synthetic construct; identical to SEQ ID NO: 7457
  source 1..51: mol_type = other DNA

SEQ ID NO: 8388 - DNA, 51 bp, synthetic construct; identical to SEQ ID NO: 7466
  source 1..51: mol_type = other DNA

SEQ ID NO: 8389 - DNA, 51 bp, synthetic construct; identical to SEQ ID NO: 7457
  source 1..51: mol_type = other DNA

SEQ ID NO: 8390 - DNA, 51 bp, synthetic construct; identical to SEQ ID NO: 7534
  source 1..51: mol_type = other DNA

SEQ ID NO: 8391 - DNA, 51 bp, synthetic construct; identical to SEQ ID NO: 7457
  source 1..51: mol_type = other DNA

SEQ ID NO: 8392 - DNA, 51 bp, synthetic construct; identical to SEQ ID NO: 7462
  source 1..51: mol_type = other DNA

SEQ ID NO: 8393 - DNA, 51 bp, synthetic construct; identical to SEQ ID NO: 7457
  source 1..51: mol_type = other DNA

SEQ ID NO: 8394 - DNA, 51 bp, synthetic construct; identical to SEQ ID NO: 7496
  source 1..51: mol_type = other DNA

SEQ ID NO: 8395 - DNA, 51 bp, synthetic construct; identical to SEQ ID NO: 7457
  source 1..51: mol_type = other DNA

SEQ ID NO: 8396 - DNA, 51 bp, synthetic construct; identical to SEQ ID NO: 7678
  source 1..51: mol_type = other DNA

SEQ ID NO: 8397 - DNA, 51 bp, synthetic construct; identical to SEQ ID NO: 7457
  source 1..51: mol_type = other DNA

SEQ ID NO: 8398 - DNA, 51 bp, synthetic construct; identical to SEQ ID NO: 7426
  source 1..51: mol_type = other DNA

SEQ ID NO: 8399 - DNA, 51 bp, synthetic construct; identical to SEQ ID NO: 7457
  source 1..51: mol_type = other DNA

SEQ ID NO: 8400 - DNA, 51 bp, synthetic construct; identical to SEQ ID NO: 7426
  source 1..51: mol_type = other DNA

SEQ ID NO: 8401 - DNA, 51 bp, synthetic construct; identical to SEQ ID NO: 7457
  source 1..51: mol_type = other DNA

SEQ ID NO: 8402 - DNA, 51 bp, synthetic construct; identical to SEQ ID NO: 7458
  source 1..51: mol_type = other DNA

SEQ ID NO: 8403 - DNA, 51 bp, synthetic construct; identical to SEQ ID NO: 7457
  source 1..51: mol_type = other DNA

SEQ ID NO: 8404 - DNA, 51 bp, synthetic construct; identical to SEQ ID NO: 7474
  source 1..51: mol_type = other DNA

SEQ ID NO: 8405 - DNA, 51 bp, synthetic construct; identical to SEQ ID NO: 7457
  source 1..51: mol_type = other DNA

SEQ ID NO: 8406 - DNA, 51 bp, synthetic construct; identical to SEQ ID NO: 7634
  source 1..51: mol_type = other DNA

SEQ ID NO: 8407 - DNA, 51 bp, synthetic construct; identical to SEQ ID NO: 7457
  source 1..51: mol_type = other DNA

SEQ ID NO: 8408 - DNA, 51 bp, synthetic construct; identical to SEQ ID NO: 7430
  source 1..51: mol_type = other DNA

SEQ ID NO: 8409 - DNA, 51 bp, synthetic construct; identical to SEQ ID NO: 7457
  source 1..51: mol_type = other DNA

SEQ ID NO: 8410 - DNA, 51 bp, synthetic construct; identical to SEQ ID NO: 7462
  source 1..51: mol_type = other DNA

SEQ ID NO: 8411 - DNA, 51 bp, synthetic construct; identical to SEQ ID NO: 7457
  source 1..51: mol_type = other DNA

SEQ ID NO: 8412 - DNA, 51 bp, synthetic construct; identical to SEQ ID NO: 7580
  source 1..51: mol_type = other DNA

SEQ ID NO: 8413 - DNA, 51 bp, synthetic construct; identical to SEQ ID NO: 7457
  source 1..51: mol_type = other DNA

SEQ ID NO: 8414 - DNA, 51 bp, synthetic construct; identical to SEQ ID NO: 7432
  source 1..51: mol_type = other DNA

SEQ ID NO: 8415 - DNA, 51 bp, synthetic construct; identical to SEQ ID NO: 7457
  source 1..51: mol_type = other DNA

SEQ ID NO: 8416 - DNA, 51 bp, synthetic construct; identical to SEQ ID NO: 7524
  source 1..51: mol_type = other DNA

SEQ ID NO: 8417 - DNA, 51 bp, synthetic construct; identical to SEQ ID NO: 7457
  source 1..51: mol_type = other DNA

SEQ ID NO: 8418 - DNA, 51 bp, synthetic construct; identical to SEQ ID NO: 7754
  source 1..51: mol_type = other DNA

SEQ ID NO: 8419 - DNA, 51 bp, synthetic construct; identical to SEQ ID NO: 7457
  source 1..51: mol_type = other DNA

SEQ ID NO: 8420 - DNA, 51 bp, synthetic construct; identical to SEQ ID NO: 7434
  source 1..51: mol_type = other DNA

SEQ ID NO: 8421 - DNA, 51 bp, synthetic construct; identical to SEQ ID NO: 7457
  source 1..51: mol_type = other DNA

SEQ ID NO: 8422 - DNA, 51 bp, synthetic construct; identical to SEQ ID NO: 7528
  source 1..51: mol_type = other DNA

SEQ ID NO: 8423 - DNA, 51 bp, synthetic construct; identical to SEQ ID NO: 7457
  source 1..51: mol_type = other DNA

SEQ ID NO: 8424 - DNA, 51 bp, synthetic construct; identical to SEQ ID NO: 7854
  source 1..51: mol_type = other DNA

SEQ ID NO: 8425 - DNA, 51 bp, synthetic construct; identical to SEQ ID NO: 7457
  source 1..51: mol_type = other DNA

SEQ ID NO: 8426 - DNA, 51 bp, synthetic construct; identical to SEQ ID NO: 7432
  source 1..51: mol_type = other DNA

SEQ ID NO: 8427 - DNA, 51 bp, synthetic construct; identical to SEQ ID NO: 7457
  source 1..51: mol_type = other DNA

SEQ ID NO: 8428 - DNA, 51 bp, synthetic construct; identical to SEQ ID NO: 7544
  source 1..51: mol_type = other DNA

SEQ ID NO: 8429 - DNA, 51 bp, synthetic construct; identical to SEQ ID NO: 7457
  source 1..51: mol_type = other DNA

SEQ ID NO: 8430 - DNA, 51 bp, synthetic construct; identical to SEQ ID NO: 7534
  source 1..51: mol_type = other DNA

SEQ ID NO: 8431 - DNA, 51 bp, synthetic construct; identical to SEQ ID NO: 7457
  source 1..51: mol_type = other DNA

SEQ ID NO: 8432 - DNA, 51 bp, synthetic construct; identical to SEQ ID NO: 7426
  source 1..51: mol_type = other DNA

SEQ ID NO: 8433 - DNA, 51 bp, synthetic construct; identical to SEQ ID NO: 7457
  source 1..51: mol_type = other DNA

SEQ ID NO: 8434 - DNA, 51 bp, synthetic construct; identical to SEQ ID NO: 7530
  source 1..51: mol_type = other DNA

SEQ ID NO: 8435 - DNA, 51 bp, synthetic construct; identical to SEQ ID NO: 7457
  source 1..51: mol_type = other DNA

SEQ ID NO: 8436 - DNA, 51 bp, synthetic construct; identical to SEQ ID NO: 7496
  source 1..51: mol_type = other DNA

SEQ ID NO: 8437 - DNA, 51 bp, synthetic construct; identical to SEQ ID NO: 7457
  source 1..51: mol_type = other DNA

SEQ ID NO: 8438 - DNA, 51 bp, synthetic construct; identical to SEQ ID NO: 7480
  source 1..51: mol_type = other DNA

SEQ ID NO: 8439 - DNA, 51 bp, synthetic construct; identical to SEQ ID NO: 7457
  source 1..51: mol_type = other DNA

SEQ ID NO: 8440 - DNA, 51 bp, synthetic construct; identical to SEQ ID NO: 7426
  source 1..51: mol_type = other DNA

SEQ ID NO: 8441 - DNA, 51 bp, synthetic construct; identical to SEQ ID NO: 7457
  source 1..51: mol_type = other DNA

SEQ ID NO: 8442 - DNA, 51 bp, synthetic construct; identical to SEQ ID NO: 7462
  source 1..51: mol_type = other DNA

SEQ ID NO: 8443 - DNA, 51 bp, synthetic construct; identical to SEQ ID NO: 7457
  source 1..51: mol_type = other DNA

SEQ ID NO: 8444 - DNA, 51 bp, synthetic construct; identical to SEQ ID NO: 7580
  source 1..51: mol_type = other DNA

SEQ ID NO: 8445 - DNA, 51 bp, synthetic construct; identical to SEQ ID NO: 7457
  source 1..51: mol_type = other DNA

SEQ ID NO: 8446 - DNA, 51 bp, synthetic construct; identical to SEQ ID NO: 7428
  source 1..51: mol_type = other DNA

SEQ ID NO: 8447 - DNA, 51 bp, synthetic construct; identical to SEQ ID NO: 7457
  source 1..51: mol_type = other DNA

SEQ ID NO: 8448 - DNA, 51 bp, synthetic construct; identical to SEQ ID NO: 7480
  source 1..51: mol_type = other DNA

SEQ ID NO: 8449 - DNA, 51 bp, synthetic construct; identical to SEQ ID NO: 7457
  source 1..51: mol_type = other DNA

SEQ ID NO: 8450 - DNA, 51 bp, synthetic construct; identical to SEQ ID NO: 7524
  source 1..51: mol_type = other DNA

SEQ ID NO: 8451 - DNA, 51 bp, synthetic construct; identical to SEQ ID NO: 7457
  source 1..51: mol_type = other DNA

SEQ ID NO: 8452 - DNA, 51 bp, synthetic construct; identical to SEQ ID NO: 7428
  source 1..51: mol_type = other DNA

SEQ ID NO: 8453 - DNA, 51 bp, synthetic construct; identical to SEQ ID NO: 7457
  source 1..51: mol_type = other DNA

SEQ ID NO: 8454 - DNA, 51 bp, synthetic construct; identical to SEQ ID NO: 7482
  source 1..51: mol_type = other DNA

SEQ ID NO: 8455 - DNA, 51 bp, synthetic construct; identical to SEQ ID NO: 7457
  source 1..51: mol_type = other DNA

SEQ ID NO: 8456 - DNA, 51 bp, synthetic construct; identical to SEQ ID NO: 7754
  source 1..51: mol_type = other DNA

SEQ ID NO: 8457 - DNA, 51 bp, synthetic construct; identical to SEQ ID NO: 7457
  source 1..51: mol_type = other DNA

SEQ ID NO: 8458 - DNA, 51 bp, synthetic construct; identical to SEQ ID NO: 7520
  source 1..51: mol_type = other DNA

SEQ ID NO: 8459 - DNA, 51 bp, synthetic construct; identical to SEQ ID NO: 7457
  source 1..51: mol_type = other DNA

SEQ ID NO: 8460 - DNA, 51 bp, synthetic construct; identical to SEQ ID NO: 7480
  source 1..51: mol_type = other DNA

SEQ ID NO: 8461 - DNA, 51 bp, synthetic construct; identical to SEQ ID NO: 7457
  source 1..51: mol_type = other DNA

SEQ ID NO: 8462 - DNA, 51 bp, synthetic construct; identical to SEQ ID NO: 7432
  source 1..51: mol_type = other DNA

SEQ ID NO: 8463 - DNA, 51 bp, synthetic construct; identical to SEQ ID NO: 7457
  source 1..51: mol_type = other DNA

SEQ ID NO: 8464 - DNA, 51 bp, synthetic construct; identical to SEQ ID NO: 7660
  source 1..51: mol_type = other DNA

SEQ ID NO: 8465 - DNA, 51 bp, synthetic construct; identical to SEQ ID NO: 7457
  source 1..51: mol_type = other DNA

SEQ ID NO: 8466 - DNA, 51 bp, synthetic construct; identical to SEQ ID NO: 7876
  source 1..51: mol_type = other DNA

SEQ ID NO: 8467 - DNA, 51 bp, synthetic construct; identical to SEQ ID NO: 7457
  source 1..51: mol_type = other DNA

SEQ ID NO: 8468 - DNA, 51 bp, synthetic construct; identical to SEQ ID NO: 7730
  source 1..51: mol_type = other DNA

SEQ ID NO: 8469 - DNA, 51 bp, synthetic construct; identical to SEQ ID NO: 7457
  source 1..51: mol_type = other DNA

SEQ ID NO: 8470 - DNA, 51 bp, synthetic construct; identical to SEQ ID NO: 7520
  source 1..51: mol_type = other DNA

SEQ ID NO: 8471 - DNA, 51 bp, synthetic construct; identical to SEQ ID NO: 7427
  source 1..51: mol_type = other DNA

SEQ ID NO: 8472 - DNA, 51 bp, synthetic construct; identical to SEQ ID NO: 7426
  source 1..51: mol_type = other DNA

SEQ ID NO: 8473 - DNA, 51 bp, synthetic construct; identical to SEQ ID NO: 7427
  source 1..51: mol_type = other DNA

SEQ ID NO: 8474 - DNA, 51 bp, synthetic construct; identical to SEQ ID NO: 7742
  source 1..51: mol_type = other DNA

SEQ ID NO: 8475 - DNA, 51 bp, synthetic construct; identical to SEQ ID NO: 7427
  source 1..51: mol_type = other DNA

SEQ ID NO: 8476 - DNA, 51 bp, synthetic construct; identical to SEQ ID NO: 7430
  source 1..51: mol_type = other DNA

SEQ ID NO: 8477 - DNA, 51 bp, synthetic construct; identical to SEQ ID NO: 7427
  source 1..51: mol_type = other DNA

SEQ ID NO: 8478 - DNA, 51 bp, synthetic construct; identical to SEQ ID NO: 7480
  source 1..51: mol_type = other DNA

SEQ ID NO: 8479 - DNA, 51 bp, synthetic construct; identical to SEQ ID NO: 7427
  source 1..51: mol_type = other DNA

SEQ ID NO: 8480 - DNA, 51 bp, synthetic construct; identical to SEQ ID NO: 7520
  source 1..51: mol_type = other DNA

SEQ ID NO: 8481 - DNA, 51 bp, synthetic construct; identical to SEQ ID NO: 7427
  source 1..51: mol_type = other DNA

SEQ ID NO: 8482 - DNA, 51 bp, synthetic construct; identical to SEQ ID NO: 8222
  source 1..51: mol_type = other DNA

SEQ ID NO: 8483 - DNA, 51 bp, synthetic construct; identical to SEQ ID NO: 7427
  source 1..51: mol_type = other DNA

SEQ ID NO: 8484 - DNA, 51 bp, synthetic construct; identical to SEQ ID NO: 7432
  source 1..51: mol_type = other DNA

SEQ ID NO: 8485 - DNA, 51 bp, synthetic construct; identical to SEQ ID NO: 7427
  source 1..51: mol_type = other DNA

SEQ ID NO: 8486 - DNA, 51 bp, synthetic construct; identical to SEQ ID NO: 7426
  source 1..51: mol_type = other DNA

SEQ ID NO: 8487 - DNA, 51 bp, synthetic construct; identical to SEQ ID NO: 7427
  source 1..51: mol_type = other DNA

SEQ ID NO: 8488 - DNA, 51 bp, synthetic construct; identical to SEQ ID NO: 7426
  source 1..51: mol_type = other DNA

SEQ ID NO: 8489 - DNA, 51 bp, synthetic construct; identical to SEQ ID NO: 7427
  source 1..51: mol_type = other DNA

SEQ ID NO: 8490 - DNA, 51 bp, synthetic construct; identical to SEQ ID NO: 7426
  source 1..51: mol_type = other DNA

SEQ ID NO: 8491 - DNA, 51 bp, synthetic construct; identical to SEQ ID NO: 7427
  source 1..51: mol_type = other DNA

SEQ ID NO: 8492 - DNA, 51 bp, synthetic construct; identical to SEQ ID NO: 7700
  source 1..51: mol_type = other DNA

SEQ ID NO: 8493 - DNA, 51 bp, synthetic construct; identical to SEQ ID NO: 7427
  source 1..51: mol_type = other DNA

SEQ ID NO: 8494 - DNA, 51 bp, synthetic construct; identical to SEQ ID NO: 7814
  source 1..51: mol_type = other DNA

SEQ ID NO: 8495 - DNA, 51 bp, synthetic construct; identical to SEQ ID NO: 7427
  source 1..51: mol_type = other DNA

SEQ ID NO: 8496 - DNA, 51 bp, synthetic construct; identical to SEQ ID NO: 7534
  source 1..51: mol_type = other DNA

SEQ ID NO: 8497 - DNA, 51 bp, synthetic construct; identical to SEQ ID NO: 7427
  source 1..51: mol_type = other DNA

SEQ ID NO: 8498 - DNA, 51 bp, synthetic construct
  source 1..51: mol_type = other DNA
gtacactggtacaggcaagactcaggcagaggcccggccctgataatctta

SEQ ID NO: 8499 - DNA, 51 bp, synthetic construct; identical to SEQ ID NO: 7427
  source 1..51: mol_type = other DNA

SEQ ID NO: 8500 - DNA, 51 bp, synthetic construct; identical to SEQ ID NO: 7480
  source 1..51: mol_type = other DNA

SEQ ID NO: 8501 - DNA, 51 bp, synthetic construct; identical to SEQ ID NO: 7427
  source 1..51: mol_type = other DNA

SEQ ID NO: 8502 - DNA, 51 bp, synthetic construct; identical to SEQ ID NO: 7432
  source 1..51: mol_type = other DNA

SEQ ID NO: 8503 - DNA, 51 bp, synthetic construct; identical to SEQ ID NO: 7427
  source 1..51: mol_type = other DNA

SEQ ID NO: 8504 - DNA, 51 bp, synthetic construct; identical to SEQ ID NO: 7700
  source 1..51: mol_type = other DNA

SEQ ID NO: 8505 - DNA, 51 bp, synthetic construct; identical to SEQ ID NO: 7427
  source 1..51: mol_type = other DNA

SEQ ID NO: 8506 - DNA, 51 bp, synthetic construct; identical to SEQ ID NO: 7426
  source 1..51: mol_type = other DNA

SEQ ID NO: 8507 - DNA, 51 bp, synthetic construct; identical to SEQ ID NO: 7427
  source 1..51: mol_type = other DNA

SEQ ID NO: 8508 - DNA, 51 bp, synthetic construct; identical to SEQ ID NO: 7540
  source 1..51: mol_type = other DNA

SEQ ID NO: 8509 - DNA, 51 bp, synthetic construct; identical to SEQ ID NO: 7427
  source 1..51: mol_type = other DNA

SEQ ID NO: 8510 - DNA, 51 bp, synthetic construct; identical to SEQ ID NO: 7628
  source 1..51: mol_type = other DNA

SEQ ID NO: 8511 - DNA, 51 bp, synthetic construct; identical to SEQ ID NO: 7427
  source 1..51: mol_type = other DNA

SEQ ID NO: 8512 - DNA, 51 bp, synthetic construct; identical to SEQ ID NO: 7498
  source 1..51: mol_type = other DNA

SEQ ID NO: 8513 - DNA, 51 bp, synthetic construct; identical to SEQ ID NO: 7427
  source 1..51: mol_type = other DNA

SEQ ID NO: 8514 - DNA, 51 bp, synthetic construct; identical to SEQ ID NO: 7442
  source 1..51: mol_type = other DNA

SEQ ID NO: 8515 - DNA, 51 bp, synthetic construct; identical to SEQ ID NO: 7427
  source 1..51: mol_type = other DNA

SEQ ID NO: 8516 - DNA, 51 bp, synthetic construct; identical to SEQ ID NO: 7442
  source 1..51: mol_type = other DNA

SEQ ID NO: 8517 - DNA, 51 bp, synthetic construct; identical to SEQ ID NO: 7427
  source 1..51: mol_type = other DNA

SEQ ID NO: 8518 - DNA, 51 bp, synthetic construct; identical to SEQ ID NO: 7426
  source 1..51: mol_type = other DNA

SEQ ID NO: 8519 - DNA, 51 bp, synthetic construct; identical to SEQ ID NO: 7427
  source 1..51: mol_type = other DNA

SEQ ID NO: 8520 - DNA, 51 bp, synthetic construct; identical to SEQ ID NO: 7496
  source 1..51: mol_type = other DNA

SEQ ID NO: 8521 - DNA, 51 bp, synthetic construct; identical to SEQ ID NO: 7427
  source 1..51: mol_type = other DNA

SEQ ID NO: 8522 - DNA, 51 bp, synthetic construct; identical to SEQ ID NO: 7462
  source 1..51: mol_type = other DNA

SEQ ID NO: 8523 - DNA, 51 bp, synthetic construct; identical to SEQ ID NO: 7427
  source 1..51: mol_type = other DNA

SEQ ID NO: 8524 - DNA, 51 bp, synthetic construct; identical to SEQ ID NO: 7426
  source 1..51: mol_type = other DNA

SEQ ID NO: 8525 - DNA, 51 bp, synthetic construct; identical to SEQ ID NO: 7427
  source 1..51: mol_type = other DNA

SEQ ID NO: 8526 - DNA, 51 bp, synthetic construct; identical to SEQ ID NO: 7426
  source 1..51: mol_type = other DNA

SEQ ID NO: 8527 - DNA, 51 bp, synthetic construct; identical to SEQ ID NO: 7427
  source 1..51: mol_type = other DNA

SEQ ID NO: 8528 - DNA, 51 bp, synthetic construct; identical to SEQ ID NO: 7504
  source 1..51: mol_type = other DNA

SEQ ID NO: 8529 - DNA, 51 bp, synthetic construct; identical to SEQ ID NO: 7427
  source 1..51: mol_type = other DNA

SEQ ID NO: 8530 - DNA, 51 bp, synthetic construct; identical to SEQ ID NO: 7432
  source 1..51: mol_type = other DNA

SEQ ID NO: 8531 - DNA, 51 bp, synthetic construct; identical to SEQ ID NO: 7427
  source 1..51: mol_type = other DNA

SEQ ID NO: 8532 - DNA, 51 bp, synthetic construct; identical to SEQ ID NO: 7488
  source 1..51: mol_type = other DNA

SEQ ID NO: 8533 - DNA, 51 bp, synthetic construct; identical to SEQ ID NO: 7427
  source 1..51: mol_type = other DNA

SEQ ID NO: 8534 - DNA, 51 bp, synthetic construct; identical to SEQ ID NO: 8184
  source 1..51: mol_type = other DNA

SEQ ID NO: 8535 - DNA, 51 bp, synthetic construct; identical to SEQ ID NO: 7427
  source 1..51: mol_type = other DNA

SEQ ID NO: 8536 - DNA, 51 bp, synthetic construct; identical to SEQ ID NO: 7634
  source 1..51: mol_type = other DNA

SEQ ID NO: 8537 - DNA, 51 bp, synthetic construct; identical to SEQ ID NO: 7427
  source 1..51: mol_type = other DNA

SEQ ID NO: 8538 - DNA, 51 bp, synthetic construct; identical to SEQ ID NO: 7444
  source 1..51: mol_type = other DNA

SEQ ID NO: 8539 - DNA, 51 bp, synthetic construct; identical to SEQ ID NO: 7427
  source 1..51: mol_type = other DNA

SEQ ID NO: 8540 - DNA, 51 bp, synthetic construct; identical to SEQ ID NO: 8070
  source 1..51: mol_type = other DNA

SEQ ID NO: 8541 - DNA, 51 bp, synthetic construct; identical to SEQ ID NO: 7427
  source 1..51: mol_type = other DNA

SEQ ID NO: 8542 - DNA, 51 bp, synthetic construct; identical to SEQ ID NO: 7754
  source 1..51: mol_type = other DNA

SEQ ID NO: 8543 - DNA, 51 bp, synthetic construct; identical to SEQ ID NO: 7427
  source 1..51: mol_type = other DNA

SEQ ID NO: 8544 - DNA, 51 bp, synthetic construct; identical to SEQ ID NO: 7480
  source 1..51: mol_type = other DNA

SEQ ID NO: 8545 - DNA, 51 bp, synthetic construct; identical to SEQ ID NO: 7427
  source 1..51: mol_type = other DNA

SEQ ID NO: 8546 - DNA, 51 bp, synthetic construct; identical to SEQ ID NO: 7778
  source 1..51: mol_type = other DNA

SEQ ID NO: 8547 - DNA, 51 bp, synthetic construct; identical to SEQ ID NO: 7427
  source 1..51: mol_type = other DNA

SEQ ID NO: 8548 - DNA, 51 bp, synthetic construct; identical to SEQ ID NO: 7870
  source 1..51: mol_type = other DNA

SEQ ID NO: 8549 - DNA, 51 bp, synthetic construct; identical to SEQ ID NO: 7427
  source 1..51: mol_type = other DNA

SEQ ID NO: 8550 - DNA, 51 bp, synthetic construct; identical to SEQ ID NO: 7428
  source 1..51: mol_type = other DNA

SEQ ID NO: 8551 - DNA, 51 bp, synthetic construct; identical to SEQ ID NO: 7427
  source 1..51: mol_type = other DNA

SEQ ID NO: 8552 - DNA, 51 bp, synthetic construct; identical to SEQ ID NO: 7948
  source 1..51: mol_type = other DNA

SEQ ID NO: 8553 - DNA, 51 bp, synthetic construct; identical to SEQ ID NO: 7427
  source 1..51: mol_type = other DNA

SEQ ID NO: 8554 - DNA, 51 bp, synthetic construct; identical to SEQ ID NO: 7516
  source 1..51: mol_type = other DNA

SEQ ID NO: 8555 - DNA, 51 bp, synthetic construct; identical to SEQ ID NO: 7427
  source 1..51: mol_type = other DNA

SEQ ID NO: 8556 - DNA, 51 bp, synthetic construct; identical to SEQ ID NO: 7426
  source 1..51: mol_type = other DNA

SEQ ID NO: 8557 - DNA, 51 bp, synthetic construct; identical to SEQ ID NO: 7427
  source 1..51: mol_type = other DNA

SEQ ID NO: 8558 - DNA, 51 bp, synthetic construct; identical to SEQ ID NO: 7426
  source 1..51: mol_type = other DNA

SEQ ID NO: 8559 - DNA, 51 bp, synthetic construct; identical to SEQ ID NO: 7427
  source 1..51: mol_type = other DNA

SEQ ID NO: 8560 - DNA, 51 bp, synthetic construct; identical to SEQ ID NO: 7570
  source 1..51: mol_type = other DNA

SEQ ID NO: 8561 - DNA, 51 bp, synthetic construct; identical to SEQ ID NO: 7427
  source 1..51: mol_type = other DNA

SEQ ID NO: 8562 - DNA, 51 bp, synthetic construct; identical to SEQ ID NO: 7676
  source 1..51: mol_type = other DNA

SEQ ID NO: 8563 - DNA, 51 bp, synthetic construct; identical to SEQ ID NO: 7427
  source 1..51: mol_type = other DNA

SEQ ID NO: 8564 - DNA, 51 bp, synthetic construct; identical to SEQ ID NO: 7754
  source 1..51: mol_type = other DNA

SEQ ID NO: 8565 - DNA, 51 bp, synthetic construct; identical to SEQ ID NO: 7427
  source 1..51: mol_type = other DNA

SEQ ID NO: 8566 - DNA, 51 bp, synthetic construct; identical to SEQ ID NO: 7944
  source 1..51: mol_type = other DNA

SEQ ID NO: 8567 - DNA, 51 bp, synthetic construct; identical to SEQ ID NO: 7427
  source 1..51: mol_type = other DNA

SEQ ID NO: 8568 - DNA, 51 bp, synthetic construct; identical to SEQ ID NO: 8248
  source 1..51: mol_type = other DNA

SEQ ID NO: 8569 - DNA, 51 bp, synthetic construct; identical to SEQ ID NO: 7427
  source 1..51: mol_type = other DNA

SEQ ID NO: 8570 - DNA, 51 bp, synthetic construct; identical to SEQ ID NO: 7706
  source 1..51: mol_type = other DNA

SEQ ID NO: 8571 - DNA, 51 bp, synthetic construct; identical to SEQ ID NO: 7427
  source 1..51: mol_type = other DNA

SEQ ID NO: 8572 - DNA, 51 bp, synthetic construct; identical to SEQ ID NO: 7468
  source 1..51: mol_type = other DNA

SEQ ID NO: 8573 - DNA, 51 bp, synthetic construct; identical to SEQ ID NO: 7427
  source 1..51: mol_type = other DNA

SEQ ID NO: 8574 - DNA, 51 bp, synthetic construct; identical to SEQ ID NO: 7634
  source 1..51: mol_type = other DNA

SEQ ID NO: 8575 - DNA, 51 bp, synthetic construct; identical to SEQ ID NO: 7427
  source 1..51: mol_type = other DNA

SEQ ID NO: 8576 - DNA, 51 bp, synthetic construct; identical to SEQ ID NO: 7480
  source 1..51: mol_type = other DNA

SEQ ID NO: 8577 - DNA, 51 bp, synthetic construct; identical to SEQ ID NO: 7427
  source 1..51: mol_type = other DNA

SEQ ID NO: 8578 - DNA, 51 bp, synthetic construct; identical to SEQ ID NO: 7428
  source 1..51: mol_type = other DNA

SEQ ID NO: 8579 - DNA, 51 bp, synthetic construct; identical to SEQ ID NO: 7427
  source 1..51: mol_type = other DNA

SEQ ID NO: 8580 - DNA, 51 bp, synthetic construct; identical to SEQ ID NO: 7544
  source 1..51: mol_type = other DNA

SEQ ID NO: 8581 - DNA, 51 bp, synthetic construct; identical to SEQ ID NO: 7427
  source 1..51: mol_type = other DNA

SEQ ID NO: 8582 - DNA, 51 bp, synthetic construct; identical to SEQ ID NO: 7442
  source 1..51: mol_type = other DNA

SEQ ID NO: 8583 - DNA, 51 bp, synthetic construct; identical to SEQ ID NO: 7427
  source 1..51: mol_type = other DNA

SEQ ID NO: 8584 - DNA, 51 bp, synthetic construct; identical to SEQ ID NO: 7480
  source 1..51: mol_type = other DNA

SEQ ID NO: 8585 - DNA, 51 bp, synthetic construct; identical to SEQ ID NO: 7427
  source 1..51: mol_type = other DNA

SEQ ID NO: 8586 - DNA, 51 bp, synthetic construct; identical to SEQ ID NO: 7474
  source 1..51: mol_type = other DNA

SEQ ID NO: 8587 - DNA, 51 bp, synthetic construct; identical to SEQ ID NO: 7427
  source 1..51: mol_type = other DNA

SEQ ID NO: 8588 - DNA, 51 bp, synthetic construct; identical to SEQ ID NO: 7488
  source 1..51: mol_type = other DNA

SEQ ID NO: 8589 - DNA, 51 bp, synthetic construct; identical to SEQ ID NO: 7427
  source 1..51: mol_type = other DNA

SEQ ID NO: 8590 - DNA, 51 bp, synthetic construct; identical to SEQ ID NO: 7458
  source 1..51: mol_type = other DNA

SEQ ID NO: 8591 - DNA, 51 bp, synthetic construct; identical to SEQ ID NO: 7427
  source 1..51: mol_type = other DNA

SEQ ID NO: 8592 - DNA, 51 bp, synthetic construct; identical to SEQ ID NO: 7432
  source 1..51: mol_type = other DNA

SEQ ID NO: 8593 - DNA, 51 bp, synthetic construct; identical to SEQ ID NO: 7427
  source 1..51: mol_type = other DNA

SEQ ID NO: 8594 - DNA, 51 bp, synthetic construct; identical to SEQ ID NO: 7426
  source 1..51: mol_type = other DNA

SEQ ID NO: 8595 - DNA, 51 bp, synthetic construct; identical to SEQ ID NO: 7427
  source 1..51: mol_type = other DNA

SEQ ID NO: 8596 - DNA, 51 bp, synthetic construct; identical to SEQ ID NO: 7530
  source 1..51: mol_type = other DNA

SEQ ID NO: 8597 - DNA, 51 bp, synthetic construct; identical to SEQ ID NO: 7427
  source 1..51: mol_type = other DNA

SEQ ID NO: 8598 - DNA, 51 bp, synthetic construct; identical to SEQ ID NO: 7480
  source 1..51: mol_type = other DNA

SEQ ID NO: 8599 - DNA, 51 bp, synthetic construct; identical to SEQ ID NO: 7427
  source 1..51: mol_type = other DNA

SEQ ID NO: 8600 - DNA, 51 bp, synthetic construct; identical to SEQ ID NO: 7770
  source 1..51: mol_type = other DNA

SEQ ID NO: 8601 - DNA, 51 bp, synthetic construct; identical to SEQ ID NO: 7427
  source 1..51: mol_type = other DNA

SEQ ID NO: 8602 - DNA, 51 bp, synthetic construct; identical to SEQ ID NO: 7480
  source 1..51: mol_type = other DNA

SEQ ID NO: 8603 - DNA, 51 bp, synthetic construct; identical to SEQ ID NO: 7427
  source 1..51: mol_type = other DNA

SEQ ID NO: 8604 - DNA, 51 bp, synthetic construct; identical to SEQ ID NO: 7794
  source 1..51: mol_type = other DNA

SEQ ID NO: 8605 - DNA, 51 bp, synthetic construct; identical to SEQ ID NO: 7427
  source 1..51: mol_type = other DNA

SEQ ID NO: 8606 - DNA, 51 bp, synthetic construct; identical to SEQ ID NO: 7426
  source 1..51: mol_type = other DNA

SEQ ID NO: 8607 - DNA, 51 bp, synthetic construct; identical to SEQ ID NO: 7427
  source 1..51: mol_type = other DNA

SEQ ID NO: 8608 - DNA, 51 bp, synthetic construct; identical to SEQ ID NO: 7468
  source 1..51: mol_type = other DNA

SEQ ID NO: 8609 - DNA, 51 bp, synthetic construct; identical to SEQ ID NO: 7427
  source 1..51: mol_type = other DNA

SEQ ID NO: 8610 - DNA, 51 bp, synthetic construct; identical to SEQ ID NO: 7678
  source 1..51: mol_type = other DNA

SEQ ID NO: 8611 - DNA, 51 bp, synthetic construct; identical to SEQ ID NO: 7427
  source 1..51: mol_type = other DNA

SEQ ID NO: 8612 - DNA, 51 bp, synthetic construct; identical to SEQ ID NO: 7430
  source 1..51: mol_type = other DNA

SEQ ID NO: 8613 - DNA, 51 bp, synthetic construct; identical to SEQ ID NO: 7427
  source 1..51: mol_type = other DNA

SEQ ID NO: 8614 - DNA, 51 bp, synthetic construct; identical to SEQ ID NO: 7520
  source 1..51: mol_type = other DNA

SEQ ID NO: 8615 - DNA, 51 bp, synthetic construct; identical to SEQ ID NO: 7427
  source 1..51: mol_type = other DNA

SEQ ID NO: 8616 - DNA, 51 bp, synthetic construct; identical to SEQ ID NO: 7708
  source 1..51: mol_type = other DNA

SEQ ID NO: 8617 - DNA, 51 bp, synthetic construct; identical to SEQ ID NO: 7427
  source 1..51: mol_type = other DNA

SEQ ID NO: 8618 - DNA, 51 bp, synthetic construct; identical to SEQ ID NO: 7428
  source 1..51: mol_type = other DNA

SEQ ID NO: 8619 - DNA, 51 bp, synthetic construct; identical to SEQ ID NO: 7427
  source 1..51: mol_type = other DNA

SEQ ID NO: 8620 - DNA, 51 bp, synthetic construct; identical to SEQ ID NO: 7468
  source 1..51: mol_type = other DNA

SEQ ID NO: 8621 - DNA, 51 bp, synthetic construct; identical to SEQ ID NO: 7427
  source 1..51: mol_type = other DNA

SEQ ID NO: 8622 - DNA, 51 bp, synthetic construct; identical to SEQ ID NO: 7426
  source 1..51: mol_type = other DNA

SEQ ID NO: 8623 - DNA, 51 bp, synthetic construct; identical to SEQ ID NO: 7427
  source 1..51: mol_type = other DNA

SEQ ID NO: 8624 - DNA, 51 bp, synthetic construct; identical to SEQ ID NO: 7432
  source 1..51: mol_type = other DNA

SEQ ID NO: 8625 - DNA, 51 bp, synthetic construct; identical to SEQ ID NO: 7427
  source 1..51: mol_type = other DNA

SEQ ID NO: 8626 - DNA, 51 bp, synthetic construct; identical to SEQ ID NO: 7426
  source 1..51: mol_type = other DNA

SEQ ID NO: 8627 - DNA, 51 bp, synthetic construct; identical to SEQ ID NO: 7427
  source 1..51: mol_type = other DNA

SEQ ID NO: 8628 - DNA, 51 bp, synthetic construct; identical to SEQ ID NO: 7426
  source 1..51: mol_type = other DNA

SEQ ID NO: 8629 - DNA, 51 bp, synthetic construct; identical to SEQ ID NO: 7427
  source 1..51: mol_type = other DNA

SEQ ID NO: 8630 - DNA, 51 bp, synthetic construct; identical to SEQ ID NO: 7426
  source 1..51: mol_type = other DNA

SEQ ID NO: 8631 - DNA, 51 bp, synthetic construct; identical to SEQ ID NO: 7719
  source 1..51: mol_type = other DNA

SEQ ID NO: 8632 - DNA, 51 bp, synthetic construct; identical to SEQ ID NO: 7528
  source 1..51: mol_type = other DNA

SEQ ID NO: 8633 - DNA, 51 bp, synthetic construct; identical to SEQ ID NO: 7719
  source 1..51: mol_type = other DNA

SEQ ID NO: 8634 - DNA, 51 bp, synthetic construct; identical to SEQ ID NO: 7426
  source 1..51: mol_type = other DNA

SEQ ID NO: 8635 - DNA, 51 bp, synthetic construct; identical to SEQ ID NO: 7719
  source 1..51: mol_type = other DNA

SEQ ID NO: 8636 - DNA, 51 bp, synthetic construct; identical to SEQ ID NO: 7480
  source 1..51: mol_type = other DNA

SEQ ID NO: 8637 - DNA, 51 bp, synthetic construct; identical to SEQ ID NO: 7719
  source 1..51: mol_type = other DNA

SEQ ID NO: 8638 - DNA, 51 bp, synthetic construct; identical to SEQ ID NO: 7480
  source 1..51: mol_type = other DNA

SEQ ID NO: 8639 - DNA, 51 bp, synthetic construct; identical to SEQ ID NO: 7719
  source 1..51: mol_type = other DNA

SEQ ID NO: 8640 - DNA, 51 bp, synthetic construct; identical to SEQ ID NO: 7422
  source 1..51: mol_type = other DNA

SEQ ID NO: 8641 - DNA, 51 bp, synthetic construct; identical to SEQ ID NO: 7719
  source 1..51: mol_type = other DNA

SEQ ID NO: 8642 - DNA, 51 bp, synthetic construct; identical to SEQ ID NO: 7422
  source 1..51: mol_type = other DNA

SEQ ID NO: 8643 - DNA, 51 bp, synthetic construct; identical to SEQ ID NO: 7719
  source 1..51: mol_type = other DNA

SEQ ID NO: 8644 - DNA, 51 bp, synthetic construct; identical to SEQ ID NO: 7474
  source 1..51: mol_type = other DNA

SEQ ID NO: 8645 - DNA, 51 bp, synthetic construct; identical to SEQ ID NO: 7719
  source 1..51: mol_type = other DNA

SEQ ID NO: 8646 - DNA, 51 bp, synthetic construct; identical to SEQ ID NO: 7700
  source 1..51: mol_type = other DNA

SEQ ID NO: 8647 - DNA, 51 bp, synthetic construct; identical to SEQ ID NO: 7719
  source 1..51: mol_type = other DNA

SEQ ID NO: 8648 - DNA, 51 bp, synthetic construct; identical to SEQ ID NO: 7430
  source 1..51: mol_type = other DNA

SEQ ID NO: 8649 - DNA, 51 bp, synthetic construct; identical to SEQ ID NO: 7719
  source 1..51: mol_type = other DNA

SEQ ID NO: 8650 - DNA, 51 bp, synthetic construct; identical to SEQ ID NO: 7426
  source 1..51: mol_type = other DNA

SEQ ID NO: 8651 - DNA, 51 bp, synthetic construct; identical to SEQ ID NO: 7719
  source 1..51: mol_type = other DNA

SEQ ID NO: 8652 - DNA, 51 bp, synthetic construct; identical to SEQ ID NO: 7480
  source 1..51: mol_type = other DNA

SEQ ID NO: 8653 - DNA, 51 bp, synthetic construct; identical to SEQ ID NO: 7719
  source 1..51: mol_type = other DNA

SEQ ID NO: 8654 - DNA, 51 bp, synthetic construct; identical to SEQ ID NO: 7424
  source 1..51: mol_type = other DNA

SEQ ID NO: 8655 - DNA, 51 bp, synthetic construct; identical to SEQ ID NO: 7719
  source 1..51: mol_type = other DNA

SEQ ID NO: 8656 - DNA, 51 bp, synthetic construct; identical to SEQ ID NO: 7528
  source 1..51: mol_type = other DNA

SEQ ID NO: 8657 - DNA, 51 bp, synthetic construct; identical to SEQ ID NO: 7719
  source 1..51: mol_type = other DNA

SEQ ID NO: 8658 - DNA, 51 bp, synthetic construct; identical to SEQ ID NO: 7426
  source 1..51: mol_type = other DNA

SEQ ID NO: 8659 - DNA, 51 bp, synthetic construct
  source 1..51: mol_type = other DNA
cttttctggtacagacagaccaagatacagggactagagttgctgagctac

SEQ ID NO: 8660 - DNA, 51 bp, synthetic construct; identical to SEQ ID NO: 7426
  source 1..51: mol_type = other DNA

SEQ ID NO: 8661 - DNA, 51 bp, synthetic construct
  source 1..51: mol_type = other DNA
gtggtctggtaccagcagactctggggaaggaattaaagttccttattcag

SEQ ID NO: 8662 - DNA, 51 bp, synthetic construct; identical to SEQ ID NO: 7432
  source 1..51: mol_type = other DNA

SEQ ID NO: 8663 - DNA, 51 bp, synthetic construct; identical to SEQ ID NO: 7455
  source 1..51: mol_type = other DNA

SEQ ID NO: 8664 - DNA, 51 bp, synthetic construct; identical to SEQ ID NO: 7634
  source 1..51: mol_type = other DNA

SEQ ID NO: 8665 - DNA, 51 bp, synthetic construct; identical to SEQ ID NO: 7455
  source 1..51: mol_type = other DNA

SEQ ID NO: 8666 - DNA, 51 bp, synthetic construct; identical to SEQ ID NO: 7870
  source 1..51: mol_type = other DNA

SEQ ID NO: 8667 - DNA, 51 bp, synthetic construct; identical to SEQ ID NO: 7455
  source 1..51: mol_type = other DNA

SEQ ID NO: 8668 - DNA, 51 bp, synthetic construct; identical to SEQ ID NO: 7442
  source 1..51: mol_type = other DNA

SEQ ID NO: 8669 - DNA, 51 bp, synthetic construct; identical to SEQ ID NO: 7455
  source 1..51: mol_type = other DNA

SEQ ID NO: 8670 - DNA, 51 bp, synthetic construct; identical to SEQ ID NO: 7468
  source 1..51: mol_type = other DNA

SEQ ID NO: 8671 - DNA, 51 bp, synthetic construct; identical to SEQ ID NO: 7455
  source 1..51: mol_type = other DNA

SEQ ID NO: 8672 - DNA, 51 bp, synthetic construct; identical to SEQ ID NO: 7660
  source 1..51: mol_type = other DNA

SEQ ID NO: 8673 - DNA, 51 bp, synthetic construct; identical to SEQ ID NO: 7455
  source 1..51: mol_type = other DNA

SEQ ID NO: 8674 - DNA, 51 bp, synthetic construct; identical to SEQ ID NO: 7480
  source 1..51: mol_type = other DNA

SEQ ID NO: 8675 - DNA, 51 bp, synthetic construct; identical to SEQ ID NO: 7455
  source 1..51: mol_type = other DNA

SEQ ID NO: 8676 - DNA, 51 bp, synthetic construct; identical to SEQ ID NO: 7426
  source 1..51: mol_type = other DNA

SEQ ID NO: 8677 - DNA, 51 bp, synthetic construct; identical to SEQ ID NO: 7455
  source 1..51: mol_type = other DNA

SEQ ID NO: 8678 - DNA, 51 bp, synthetic construct; identical to SEQ ID NO: 7462
  source 1..51: mol_type = other DNA

SEQ ID NO: 8679 - DNA, 51 bp, synthetic construct; identical to SEQ ID NO: 7455
  source 1..51: mol_type = other DNA

SEQ ID NO: 8680 - DNA, 51 bp, synthetic construct; identical to SEQ ID NO: 7478
  source 1..51: mol_type = other DNA

SEQ ID NO: 8681 - DNA, 51 bp, synthetic construct; identical to SEQ ID NO: 7455
  source 1..51: mol_type = other DNA

SEQ ID NO: 8682 - DNA, 51 bp, synthetic construct; identical to SEQ ID NO: 7500
  source 1..51: mol_type = other DNA

SEQ ID NO: 8683 - DNA, 51 bp, synthetic construct; identical to SEQ ID NO: 7511
  source 1..51: mol_type = other DNA

SEQ ID NO: 8684 - DNA, 51 bp, synthetic construct; identical to SEQ ID NO: 7432
  source 1..51: mol_type = other DNA

SEQ ID NO: 8685 - DNA, 51 bp, synthetic construct; identical to SEQ ID NO: 7511
  source 1..51: mol_type = other DNA

SEQ ID NO: 8686 - DNA, 51 bp, synthetic construct; identical to SEQ ID NO: 7532
  source 1..51: mol_type = other DNA

SEQ ID NO: 8687 - DNA, 51 bp, synthetic construct; identical to SEQ ID NO: 7511
  source 1..51: mol_type = other DNA

SEQ ID NO: 8688 - DNA, 51 bp, synthetic construct; identical to SEQ ID NO: 7426
  source 1..51: mol_type = other DNA

SEQ ID NO: 8689 - DNA, 51 bp, synthetic construct; identical to SEQ ID NO: 7511
  source 1..51: mol_type = other DNA

SEQ ID NO: 8690 - DNA, 51 bp, synthetic construct; identical to SEQ ID NO: 7488
  source 1..51: mol_type = other DNA

SEQ ID NO: 8691 - DNA, 51 bp, synthetic construct; identical to SEQ ID NO: 7511
  source 1..51: mol_type = other DNA

SEQ ID NO: 8692 - DNA, 51 bp, synthetic construct; identical to SEQ ID NO: 7624
  source 1..51: mol_type = other DNA

SEQ ID NO: 8693 - DNA, 51 bp, synthetic construct; identical to SEQ ID NO: 7511
  source 1..51: mol_type = other DNA

SEQ ID NO: 8694 - DNA, 51 bp, synthetic construct; identical to SEQ ID NO: 7578
  source 1..51: mol_type = other DNA

SEQ ID NO: 8695 - DNA, 51 bp, synthetic construct; identical to SEQ ID NO: 7511
  source 1..51: mol_type = other DNA

SEQ ID NO: 8696 - DNA, 51 bp, synthetic construct; identical to SEQ ID NO: 8194
  source 1..51: mol_type = other DNA

SEQ ID NO: 8697 - DNA, 51 bp, synthetic construct; identical to SEQ ID NO: 7511
  source 1..51: mol_type = other DNA

SEQ ID NO: 8698 - DNA, 51 bp, synthetic construct; identical to SEQ ID NO: 7426
  source 1..51: mol_type = other DNA

SEQ ID NO: 8699 - DNA, 51 bp, synthetic construct; identical to SEQ ID NO: 7511
  source 1..51: mol_type = other DNA

SEQ ID NO: 8700 - DNA, 51 bp, synthetic construct; identical to SEQ ID NO: 7498
  source 1..51: mol_type = other DNA

SEQ ID NO: 8701 - DNA, 51 bp, synthetic construct; identical to SEQ ID NO: 7511
  source 1..51: mol_type = other DNA

SEQ ID NO: 8702 - DNA, 51 bp, synthetic construct; identical to SEQ ID NO: 7432
  source 1..51: mol_type = other DNA

SEQ ID NO: 8703 - DNA, 51 bp, synthetic construct; identical to SEQ ID NO: 7511
  source 1..51: mol_type = other DNA

SEQ ID NO: 8704 - DNA, 51 bp, synthetic construct; identical to SEQ ID NO: 7432
  source 1..51: mol_type = other DNA

SEQ ID NO: 8705 - DNA, 51 bp, synthetic construct; identical to SEQ ID NO: 7511
  source 1..51: mol_type = other DNA

SEQ ID NO: 8706 - DNA, 51 bp, synthetic construct; identical to SEQ ID NO: 7448
  source 1..51: mol_type = other DNA

SEQ ID NO: 8707 - DNA, 51 bp, synthetic construct; identical to SEQ ID NO: 7499
  source 1..51: mol_type = other DNA

SEQ ID NO: 8708 - DNA, 51 bp, synthetic construct; identical to SEQ ID NO: 7430
  source 1..51: mol_type = other DNA

SEQ ID NO: 8709 - DNA, 51 bp, synthetic construct; identical to SEQ ID NO: 7499
  source 1..51: mol_type = other DNA

SEQ ID NO: 8710 - DNA, 51 bp, synthetic construct; identical to SEQ ID NO: 7442
  source 1..51: mol_type = other DNA

SEQ ID NO: 8711 - DNA, 51 bp, synthetic construct; identical to SEQ ID NO: 7499
  source 1..51: mol_type = other DNA

SEQ ID NO: 8712 - DNA, 51 bp, synthetic construct; identical to SEQ ID NO: 7624
  source 1..51: mol_type = other DNA

SEQ ID NO: 8713 - DNA, 51 bp, synthetic construct; identical to SEQ ID NO: 7499
  source 1..51: mol_type = other DNA

SEQ ID NO: 8714 - DNA, 51 bp, synthetic construct; identical to SEQ ID NO: 7428
  source 1..51: mol_type = other DNA

SEQ ID NO: 8715 - DNA, 51 bp, synthetic construct; identical to SEQ ID NO: 7499
  source 1..51: mol_type = other DNA

SEQ ID NO: 8716 - DNA, 51 bp, synthetic construct; identical to SEQ ID NO: 7448
  source 1..51: mol_type = other DNA

SEQ ID NO: 8717 - DNA, 51 bp, synthetic construct; identical to SEQ ID NO: 7499
  source 1..51: mol_type = other DNA

SEQ ID NO: 8718 - DNA, 51 bp, synthetic construct; identical to SEQ ID NO: 7432
  source 1..51: mol_type = other DNA

SEQ ID NO: 8719 - DNA, 51 bp, synthetic construct; identical to SEQ ID NO: 7499
  source 1..51: mol_type = other DNA

SEQ ID NO: 8720 - DNA, 51 bp, synthetic construct; identical to SEQ ID NO: 7944
  source 1..51: mol_type = other DNA

SEQ ID NO: 8721 - DNA, 51 bp, synthetic construct; identical to SEQ ID NO: 7499
  source 1..51: mol_type = other DNA

SEQ ID NO: 8722 - DNA, 51 bp, synthetic construct; identical to SEQ ID NO: 7434
  source 1..51: mol_type = other DNA

SEQ ID NO: 8723 - DNA, 51 bp, synthetic construct; identical to SEQ ID NO: 7499
  source 1..51: mol_type = other DNA

SEQ ID NO: 8724 - DNA, 51 bp, synthetic construct; identical to SEQ ID NO: 7742
  source 1..51: mol_type = other DNA

SEQ ID NO: 8725 - DNA, 51 bp, synthetic construct; identical to SEQ ID NO: 7499
  source 1..51: mol_type = other DNA

SEQ ID NO: 8726 - DNA, 51 bp, synthetic construct; identical to SEQ ID NO: 7944
  source 1..51: mol_type = other DNA

SEQ ID NO: 8727 - DNA, 51 bp, synthetic construct; identical to SEQ ID NO: 7499
  source 1..51: mol_type = other DNA

SEQ ID NO: 8728 - DNA, 51 bp, synthetic construct; identical to SEQ ID NO: 7444
  source 1..51: mol_type = other DNA

SEQ ID NO: 8729 - DNA, 51 bp, synthetic construct; identical to SEQ ID NO: 7499
  source 1..51: mol_type = other DNA

SEQ ID NO: 8730 - DNA, 51 bp, synthetic construct; identical to SEQ ID NO: 7426
  source 1..51: mol_type = other DNA

SEQ ID NO: 8731 - DNA, 51 bp, synthetic construct; identical to SEQ ID NO: 7499
  source 1..51: mol_type = other DNA

SEQ ID NO: 8732 - DNA, 51 bp, synthetic construct; identical to SEQ ID NO: 7970
  source 1..51: mol_type = other DNA

SEQ ID NO: 8733 - DNA, 51 bp, synthetic construct; identical to SEQ ID NO: 7499
  source 1..51: mol_type = other DNA

SEQ ID NO: 8734 - DNA, 51 bp, synthetic construct; identical to SEQ ID NO: 7478
  source 1..51: mol_type = other DNA

SEQ ID NO: 8735 - DNA, 51 bp, synthetic construct; identical to SEQ ID NO: 7447
  source 1..51: mol_type = other DNA

SEQ ID NO: 8736 - DNA, 51 bp, synthetic construct; identical to SEQ ID NO: 7430
  source 1..51: mol_type = other DNA

SEQ ID NO: 8737 - DNA, 51 bp, synthetic construct; identical to SEQ ID NO: 7447
  source 1..51: mol_type = other DNA

SEQ ID NO: 8738 - DNA, 51 bp, synthetic construct; identical to SEQ ID NO: 7512
  source 1..51: mol_type = other DNA

SEQ ID NO: 8739 - DNA, 51 bp, synthetic construct; identical to SEQ ID NO: 7447
  source 1..51: mol_type = other DNA

SEQ ID NO: 8740 - DNA, 51 bp, synthetic construct; identical to SEQ ID NO: 7570
  source 1..51: mol_type = other DNA

SEQ ID NO: 8741 - DNA, 51 bp, synthetic construct; identical to SEQ ID NO: 7447
  source 1..51: mol_type = other DNA

SEQ ID NO: 8742 - DNA, 51 bp, synthetic construct; identical to SEQ ID NO: 7526
  source 1..51: mol_type = other DNA

SEQ ID NO: 8743 - DNA, 51 bp, synthetic construct; identical to SEQ ID NO: 7447
  source 1..51: mol_type = other DNA

SEQ ID NO: 8744 - DNA, 51 bp, synthetic construct; identical to SEQ ID NO: 7426
  source 1..51: mol_type = other DNA

SEQ ID NO: 8745 - DNA, 51 bp, synthetic construct; identical to SEQ ID NO: 7447
  source 1..51: mol_type = other DNA

SEQ ID NO: 8746 - DNA, 51 bp, synthetic construct
  source 1..51: mol_type = other DNA
ctgttctggtatgtgcagtgtcccggagaaggtccacagttcctctttaga

SEQ ID NO: 8747 - DNA, 51 bp, synthetic construct; identical to SEQ ID NO: 7447
  source 1..51: mol_type = other DNA

SEQ ID NO: 8748 - DNA, 51 bp, synthetic construct; identical to SEQ ID NO: 7432
  source 1..51: mol_type = other DNA

SEQ ID NO: 8749 - DNA, 51 bp, synthetic construct; identical to SEQ ID NO: 7447
  source 1..51: mol_type = other DNA

SEQ ID NO: 8750 - DNA, 51 bp, synthetic construct; identical to SEQ ID NO: 7426
  source 1..51: mol_type = other DNA

SEQ ID NO: 8751 - DNA, 51 bp, synthetic construct; identical to SEQ ID NO: 7447
  source 1..51: mol_type = other DNA

SEQ ID NO: 8752 - DNA, 51 bp, synthetic construct; identical to SEQ ID NO: 7482
  source 1..51: mol_type = other DNA

SEQ ID NO: 8753 - DNA, 51 bp, synthetic construct; identical to SEQ ID NO: 7447
  source 1..51: mol_type = other DNA

SEQ ID NO: 8754 - DNA, 51 bp, synthetic construct; identical to SEQ ID NO: 7480
  source 1..51: mol_type = other DNA

SEQ ID NO: 8755 - DNA, 51 bp, synthetic construct; identical to SEQ ID NO: 7447
  source 1..51: mol_type = other DNA

SEQ ID NO: 8756 - DNA, 51 bp, synthetic construct; identical to SEQ ID NO: 7462
  source 1..51: mol_type = other DNA

SEQ ID NO: 8757 - DNA, 51 bp, synthetic construct; identical to SEQ ID NO: 7447
  source 1..51: mol_type = other DNA

SEQ ID NO: 8758 - DNA, 51 bp, synthetic construct; identical to SEQ ID NO: 7482
  source 1..51: mol_type = other DNA

SEQ ID NO: 8759 - DNA, 51 bp, synthetic construct; identical to SEQ ID NO: 7447
  source 1..51: mol_type = other DNA

SEQ ID NO: 8760 - DNA, 51 bp, synthetic construct; identical to SEQ ID NO: 7442
  source 1..51: mol_type = other DNA

SEQ ID NO: 8761 - DNA, 51 bp, synthetic construct; identical to SEQ ID NO: 7447
  source 1..51: mol_type = other DNA

SEQ ID NO: 8762 - DNA, 51 bp, synthetic construct; identical to SEQ ID NO: 7458
  source 1..51: mol_type = other DNA

SEQ ID NO: 8763 - DNA, 51 bp, synthetic construct; identical to SEQ ID NO: 7447
  source 1..51: mol_type = other DNA

SEQ ID NO: 8764 - DNA, 51 bp, synthetic construct; identical to SEQ ID NO: 7676
  source 1..51: mol_type = other DNA

SEQ ID NO: 8765 - DNA, 51 bp, synthetic construct; identical to SEQ ID NO: 7447
  source 1..51: mol_type = other DNA

SEQ ID NO: 8766 - DNA, 51 bp, synthetic construct; identical to SEQ ID NO: 7544
  source 1..51: mol_type = other DNA

SEQ ID NO: 8767 - DNA, 51 bp, synthetic construct; identical to SEQ ID NO: 7447
  source 1..51: mol_type = other DNA

SEQ ID NO: 8768 - DNA, 51 bp, synthetic construct; identical to SEQ ID NO: 7528
  source 1..51: mol_type = other DNA

SEQ ID NO: 8769 - DNA, 51 bp, synthetic construct; identical to SEQ ID NO: 7447
  source 1..51: mol_type = other DNA

SEQ ID NO: 8770 - DNA, 51 bp, synthetic construct; identical to SEQ ID NO: 8222
  source 1..51: mol_type = other DNA

SEQ ID NO: 8771 - DNA, 51 bp, synthetic construct; identical to SEQ ID NO: 7447
  source 1..51: mol_type = other DNA

SEQ ID NO: 8772 - DNA, 51 bp, synthetic construct; identical to SEQ ID NO: 7448
  source 1..51: mol_type = other DNA

SEQ ID NO: 8773 - DNA, 51 bp, synthetic construct; identical to SEQ ID NO: 7447
  source 1..51: mol_type = other DNA

SEQ ID NO: 8774 - DNA, 51 bp, synthetic construct; identical to SEQ ID NO: 7500
  source 1..51: mol_type = other DNA

SEQ ID NO: 8775 - DNA, 51 bp, synthetic construct; identical to SEQ ID NO: 7447
  source 1..51: mol_type = other DNA

SEQ ID NO: 8776 - DNA, 51 bp, synthetic construct; identical to SEQ ID NO: 7524
  source 1..51: mol_type = other DNA

SEQ ID NO: 8777 - DNA, 51 bp, synthetic construct; identical to SEQ ID NO: 7447
  source 1..51: mol_type = other DNA

SEQ ID NO: 8778 - DNA, 51 bp, synthetic construct; identical to SEQ ID NO: 7432
  source 1..51: mol_type = other DNA

SEQ ID NO: 8779 - DNA, 51 bp, synthetic construct; identical to SEQ ID NO: 7447
  source 1..51: mol_type = other DNA

SEQ ID NO: 8780 - DNA, 51 bp, synthetic construct; identical to SEQ ID NO: 7492
  source 1..51: mol_type = other DNA

SEQ ID NO: 8781 - DNA, 51 bp, synthetic construct; identical to SEQ ID NO: 7447
  source 1..51: mol_type = other DNA

SEQ ID NO: 8782 - DNA, 51 bp, synthetic construct; identical to SEQ ID NO: 7578
  source 1..51: mol_type = other DNA

SEQ ID NO: 8783 - DNA, 51 bp, synthetic construct; identical to SEQ ID NO: 7447
  source 1..51: mol_type = other DNA

SEQ ID NO: 8784 - DNA, 51 bp, synthetic construct; identical to SEQ ID NO: 7742
  source 1..51: mol_type = other DNA

SEQ ID NO: 8785 - DNA, 51 bp, synthetic construct; identical to SEQ ID NO: 7447
  source 1..51: mol_type = other DNA

SEQ ID NO: 8786 - DNA, 51 bp, synthetic construct; identical to SEQ ID NO: 7492
  source 1..51: mol_type = other DNA

SEQ ID NO: 8787 - DNA, 51 bp, synthetic construct; identical to SEQ ID NO: 7447
  source 1..51: mol_type = other DNA

SEQ ID NO: 8788 - DNA, 51 bp, synthetic construct; identical to SEQ ID NO: 7428
  source 1..51: mol_type = other DNA

SEQ ID NO: 8789 - DNA, 51 bp, synthetic construct; identical to SEQ ID NO: 7447
  source 1..51: mol_type = other DNA

SEQ ID NO: 8790 - DNA, 51 bp, synthetic construct; identical to SEQ ID NO: 7494
  source 1..51: mol_type = other DNA

SEQ ID NO: 8791 - DNA, 51 bp, synthetic construct; identical to SEQ ID NO: 7447
  source 1..51: mol_type = other DNA

SEQ ID NO: 8792 - DNA, 51 bp, synthetic construct; identical to SEQ ID NO: 7514
  source 1..51: mol_type = other DNA

SEQ ID NO: 8793 - DNA, 51 bp, synthetic construct; identical to SEQ ID NO: 7447
  source 1..51: mol_type = other DNA

SEQ ID NO: 8794 - DNA, 51 bp, synthetic construct; identical to SEQ ID NO: 7422
  source 1..51: mol_type = other DNA

SEQ ID NO: 8795 - DNA, 51 bp, synthetic construct; identical to SEQ ID NO: 7447
  source 1..51: mol_type = other DNA

SEQ ID NO: 8796 - DNA, 51 bp, synthetic construct; identical to SEQ ID NO: 7676
  source 1..51: mol_type = other DNA

SEQ ID NO: 8797 - DNA, 51 bp, synthetic construct; identical to SEQ ID NO: 7447
  source 1..51: mol_type = other DNA

SEQ ID NO: 8798 - DNA, 51 bp, synthetic construct; identical to SEQ ID NO: 7426
  source 1..51: mol_type = other DNA

SEQ ID NO: 8799 - DNA, 51 bp, synthetic construct; identical to SEQ ID NO: 7447
  source 1..51: mol_type = other DNA

SEQ ID NO: 8800 - DNA, 51 bp, synthetic construct; identical to SEQ ID NO: 7678
  source 1..51: mol_type = other DNA

SEQ ID NO: 8801 - DNA, 51 bp, synthetic construct; identical to SEQ ID NO: 7447
  source 1..51: mol_type = other DNA

SEQ ID NO: 8802 - DNA, 51 bp, synthetic construct; identical to SEQ ID NO: 7520
  source 1..51: mol_type = other DNA

SEQ ID NO: 8803 - DNA, 51 bp, synthetic construct; identical to SEQ ID NO: 7447
  source 1..51: mol_type = other DNA

SEQ ID NO: 8804 - DNA, 51 bp, synthetic construct; identical to SEQ ID NO: 7496
  source 1..51: mol_type = other DNA

SEQ ID NO: 8805 - DNA, 51 bp, synthetic construct; identical to SEQ ID NO: 7447
  source 1..51: mol_type = other DNA

SEQ ID NO: 8806 - DNA, 51 bp, synthetic construct; identical to SEQ ID NO: 7480
  source 1..51: mol_type = other DNA

SEQ ID NO: 8807 - DNA, 51 bp, synthetic construct; identical to SEQ ID NO: 7447
  source 1..51: mol_type = other DNA

SEQ ID NO: 8808 - DNA, 51 bp, synthetic construct; identical to SEQ ID NO: 7426
  source 1..51: mol_type = other DNA

SEQ ID NO: 8809 - DNA, 51 bp, synthetic construct; identical to SEQ ID NO: 7447
  source 1..51: mol_type = other DNA

SEQ ID NO: 8810 - DNA, 51 bp, synthetic construct; identical to SEQ ID NO: 7426
  source 1..51: mol_type = other DNA

SEQ ID NO: 8811 - DNA, 51 bp, synthetic construct; identical to SEQ ID NO: 7447
  source 1..51: mol_type = other DNA

SEQ ID NO: 8812 - DNA, 51 bp, synthetic construct; identical to SEQ ID NO: 7544
  source 1..51: mol_type = other DNA

SEQ ID NO: 8813 - DNA, 51 bp, synthetic construct; identical to SEQ ID NO: 7447
  source 1..51: mol_type = other DNA

SEQ ID NO: 8814 - DNA, 51 bp, synthetic construct; identical to SEQ ID NO: 7432
  source 1..51: mol_type = other DNA

SEQ ID NO: 8815 - DNA, 51 bp, synthetic construct; identical to SEQ ID NO: 7447
  source 1..51: mol_type = other DNA

SEQ ID NO: 8816 - DNA, 51 bp, synthetic construct; identical to SEQ ID NO: 7930
  source 1..51: mol_type = other DNA

SEQ ID NO: 8817 - DNA, 51 bp, synthetic construct; identical to SEQ ID NO: 7447
  source 1..51: mol_type = other DNA

SEQ ID NO: 8818 - DNA, 51 bp, synthetic construct; identical to SEQ ID NO: 7474
  source 1..51: mol_type = other DNA

SEQ ID NO: 8819 - DNA, 51 bp, synthetic construct; identical to SEQ ID NO: 7447
  source 1..51: mol_type = other DNA

SEQ ID NO: 8820 - DNA, 51 bp, synthetic construct; identical to SEQ ID NO: 8286
  source 1..51: mol_type = other DNA

SEQ ID NO: 8821 - DNA, 51 bp, synthetic construct; identical to SEQ ID NO: 7447
  source 1..51: mol_type = other DNA

SEQ ID NO: 8822 - DNA, 51 bp, synthetic construct; identical to SEQ ID NO: 7466
  source 1..51: mol_type = other DNA

SEQ ID NO: 8823 - DNA, 51 bp, synthetic construct; identical to SEQ ID NO: 7447
  source 1..51: mol_type = other DNA

SEQ ID NO: 8824 - DNA, 51 bp, synthetic construct; identical to SEQ ID NO: 7876
  source 1..51: mol_type = other DNA

SEQ ID NO: 8825 - DNA, 51 bp, synthetic construct; identical to SEQ ID NO: 7447
  source 1..51: mol_type = other DNA

SEQ ID NO: 8826 - DNA, 51 bp, synthetic construct; identical to SEQ ID NO: 7944
  source 1..51: mol_type = other DNA

SEQ ID NO: 8827 - DNA, 51 bp, synthetic construct; identical to SEQ ID NO: 7447
  source 1..51: mol_type = other DNA

SEQ ID NO: 8828 - DNA, 51 bp, synthetic construct; identical to SEQ ID NO: 7480
  source 1..51: mol_type = other DNA

SEQ ID NO: 8829 - DNA, 51 bp, synthetic construct; identical to SEQ ID NO: 7447
  source 1..51: mol_type = other DNA

SEQ ID NO: 8830 - DNA, 51 bp, synthetic construct; identical to SEQ ID NO: 7488
  source 1..51: mol_type = other DNA

SEQ ID NO: 8831 - DNA, 51 bp, synthetic construct; identical to SEQ ID NO: 7447
  source 1..51: mol_type = other DNA

SEQ ID NO: 8832 - DNA, 51 bp, synthetic construct; identical to SEQ ID NO: 7480
  source 1..51: mol_type = other DNA

SEQ ID NO: 8833 - DNA, 51 bp, synthetic construct; identical to SEQ ID NO: 7447
  source 1..51: mol_type = other DNA

SEQ ID NO: 8834 - DNA, 51 bp, synthetic construct; identical to SEQ ID NO: 7468
  source 1..51: mol_type = other DNA

SEQ ID NO: 8835 - DNA, 51 bp, synthetic construct; identical to SEQ ID NO: 7447
  source 1..51: mol_type = other DNA

SEQ ID NO: 8836 - DNA, 51 bp, synthetic construct; identical to SEQ ID NO: 7526
  source 1..51: mol_type = other DNA

SEQ ID NO: 8837 - DNA, 51 bp, synthetic construct; identical to SEQ ID NO: 7447
  source 1..51: mol_type = other DNA

SEQ ID NO: 8838 - DNA, 51 bp, synthetic construct; identical to SEQ ID NO: 7462
  source 1..51: mol_type = other DNA

SEQ ID NO: 8839 - DNA, 51 bp, synthetic construct; identical to SEQ ID NO: 7447
  source 1..51: mol_type = other DNA

SEQ ID NO: 8840 - DNA, 51 bp, synthetic construct; identical to SEQ ID NO: 7482
  source 1..51: mol_type = other DNA

SEQ ID NO: 8841 - DNA, 51 bp, synthetic construct; identical to SEQ ID NO: 7443
  source 1..51: mol_type = other DNA

SEQ ID NO: 8842 - DNA, 51 bp, synthetic construct; identical to SEQ ID NO: 7432
  source 1..51: mol_type = other DNA

SEQ ID NO: 8843 - DNA, 51 bp, synthetic construct; identical to SEQ ID NO: 7443
  source 1..51: mol_type = other DNA

SEQ ID NO: 8844 - DNA, 51 bp, synthetic construct; identical to SEQ ID NO: 7432
  source 1..51: mol_type = other DNA

SEQ ID NO: 8845 - DNA, 51 bp, synthetic construct; identical to SEQ ID NO: 7443
  source 1..51: mol_type = other DNA

SEQ ID NO: 8846 - DNA, 51 bp, synthetic construct; identical to SEQ ID NO: 7480
  source 1..51: mol_type = other DNA

SEQ ID NO: 8847 - DNA, 51 bp, synthetic construct; identical to SEQ ID NO: 7443
  source 1..51: mol_type = other DNA

SEQ ID NO: 8848 - DNA, 51 bp, synthetic construct; identical to SEQ ID NO: 7520
  source 1..51: mol_type = other DNA

SEQ ID NO: 8849 - DNA, 51 bp, synthetic construct; identical to SEQ ID NO: 7443
  source 1..51: mol_type = other DNA

SEQ ID NO: 8850 - DNA, 51 bp, synthetic construct; identical to SEQ ID NO: 7628
  source 1..51: mol_type = other DNA

SEQ ID NO: 8851 - DNA, 51 bp, synthetic construct; identical to SEQ ID NO: 7443
  source 1..51: mol_type = other DNA

SEQ ID NO: 8852 - DNA, 51 bp, synthetic construct; identical to SEQ ID NO: 7432
  source 1..51: mol_type = other DNA

SEQ ID NO: 8853 - DNA, 51 bp, synthetic construct; identical to SEQ ID NO: 7443
  source 1..51: mol_type = other DNA

SEQ ID NO: 8854 - DNA, 51 bp, synthetic construct; identical to SEQ ID NO: 8184
  source 1..51: mol_type = other DNA

SEQ ID NO: 8855 - DNA, 51 bp, synthetic construct; identical to SEQ ID NO: 7443
  source 1..51: mol_type = other DNA

SEQ ID NO: 8856 - DNA, 51 bp, synthetic construct; identical to SEQ ID NO: 7950
  source 1..51: mol_type = other DNA

SEQ ID NO: 8857 - DNA, 51 bp, synthetic construct; identical to SEQ ID NO: 7443
  source 1..51: mol_type = other DNA

SEQ ID NO: 8858 - DNA, 51 bp, synthetic construct; identical to SEQ ID NO: 7492
  source 1..51: mol_type = other DNA

SEQ ID NO: 8859 - DNA, 51 bp, synthetic construct; identical to SEQ ID NO: 7443
  source 1..51: mol_type = other DNA

SEQ ID NO: 8860 - DNA, 51 bp, synthetic construct; identical to SEQ ID NO: 7432
  source 1..51: mol_type = other DNA

SEQ ID NO: 8861 - DNA, 51 bp, synthetic construct; identical to SEQ ID NO: 7443
  source 1..51: mol_type = other DNA

SEQ ID NO: 8862 - DNA, 51 bp, synthetic construct; identical to SEQ ID NO: 7488
  source 1..51: mol_type = other DNA

SEQ ID NO: 8863 - DNA, 51 bp, synthetic construct; identical to SEQ ID NO: 7443
  source 1..51: mol_type = other DNA

SEQ ID NO: 8864 - DNA, 51 bp, synthetic construct; identical to SEQ ID NO: 7468
  source 1..51: mol_type = other DNA

SEQ ID NO: 8865 - DNA, 51 bp, synthetic construct; identical to SEQ ID NO: 7443
  source 1..51: mol_type = other DNA

SEQ ID NO: 8866 - DNA, 51 bp, synthetic construct; identical to SEQ ID NO: 7432
  source 1..51: mol_type = other DNA

SEQ ID NO: 8867 - DNA, 51 bp, synthetic construct; identical to SEQ ID NO: 7443
  source 1..51: mol_type = other DNA

SEQ ID NO: 8868 - DNA, 51 bp, synthetic construct; identical to SEQ ID NO: 7430
  source 1..51: mol_type = other DNA

SEQ ID NO: 8869 - DNA, 51 bp, synthetic construct; identical to SEQ ID NO: 7443
  source 1..51: mol_type = other DNA

SEQ ID NO: 8870 - DNA, 51 bp, synthetic construct; identical to SEQ ID NO: 7528
  source 1..51: mol_type = other DNA

SEQ ID NO: 8871 - DNA, 51 bp, synthetic construct; identical to SEQ ID NO: 7443
  source 1..51: mol_type = other DNA

SEQ ID NO: 8872 - DNA, 51 bp, synthetic construct; identical to SEQ ID NO: 7426
  source 1..51: mol_type = other DNA

SEQ ID NO: 8873 - DNA, 51 bp, synthetic construct; identical to SEQ ID NO: 7443
  source 1..51: mol_type = other DNA

SEQ ID NO: 8874 - DNA, 51 bp, synthetic construct; identical to SEQ ID NO: 8498
  source 1..51: mol_type = other DNA

SEQ ID NO: 8875 - DNA, 51 bp, synthetic construct; identical to SEQ ID NO: 7443
  source 1..51: mol_type = other DNA

SEQ ID NO: 8876 - DNA, 51 bp, synthetic construct; identical to SEQ ID NO: 7432
  source 1..51: mol_type = other DNA

SEQ ID NO: 8877 - DNA, 51 bp, synthetic construct; identical to SEQ ID NO: 7443
  source 1..51: mol_type = other DNA

SEQ ID NO: 8878 - DNA, 51 bp, synthetic construct; identical to SEQ ID NO: 7944
  source 1..51: mol_type = other DNA

SEQ ID NO: 8879 - DNA, 51 bp, synthetic construct; identical to SEQ ID NO: 7443
  source 1..51: mol_type = other DNA

SEQ ID NO: 8880 - DNA, 51 bp, synthetic construct; identical to SEQ ID NO: 7676
  source 1..51: mol_type = other DNA

SEQ ID NO: 8881 - DNA, 51 bp, synthetic construct; identical to SEQ ID NO: 7443
  source 1..51: mol_type = other DNA

SEQ ID NO: 8882 - DNA, 51 bp, synthetic construct; identical to SEQ ID NO: 7480
  source 1..51: mol_type = other DNA

SEQ ID NO: 8883 - DNA, 51 bp, synthetic construct; identical to SEQ ID NO: 7443
  source 1..51: mol_type = other DNA

SEQ ID NO: 8884 - DNA, 51 bp, synthetic construct; identical to SEQ ID NO: 7480
  source 1..51: mol_type = other DNA

SEQ ID NO: 8885 - DNA, 51 bp, synthetic construct; identical to SEQ ID NO: 7443
  source 1..51: mol_type = other DNA

SEQ ID NO: 8886 - DNA, 51 bp, synthetic construct; identical to SEQ ID NO: 7950
  source 1..51: mol_type = other DNA

SEQ ID NO: 8887 - DNA, 51 bp, synthetic construct; identical to SEQ ID NO: 7443
  source 1..51: mol_type = other DNA

SEQ ID NO: 8888 - DNA, 51 bp, synthetic construct; identical to SEQ ID NO: 7462
  source 1..51: mol_type = other DNA

SEQ ID NO: 8889 - DNA, 51 bp, synthetic construct; identical to SEQ ID NO: 7443
  source 1..51: mol_type = other DNA

SEQ ID NO: 8890 - DNA, 51 bp, synthetic construct; identical to SEQ ID NO: 7944
  source 1..51: mol_type = other DNA

SEQ ID NO: 8891 - DNA, 51 bp, synthetic construct; identical to SEQ ID NO: 7443
  source 1..51: mol_type = other DNA

SEQ ID NO: 8892 - DNA, 51 bp, synthetic construct; identical to SEQ ID NO: 7468
  source 1..51: mol_type = other DNA

SEQ ID NO: 8893 - DNA, 51 bp, synthetic construct; identical to SEQ ID NO: 7443
  source 1..51: mol_type = other DNA

SEQ ID NO: 8894 - DNA, 51 bp, synthetic construct; identical to SEQ ID NO: 7754
  source 1..51: mol_type = other DNA

SEQ ID NO: 8895 - DNA, 51 bp, synthetic construct; identical to SEQ ID NO: 7443
  source 1..51: mol_type = other DNA

SEQ ID NO: 8896 - DNA, 51 bp, synthetic construct; identical to SEQ ID NO: 7642
  source 1..51: mol_type = other DNA

SEQ ID NO: 8897 - DNA, 51 bp, synthetic construct; identical to SEQ ID NO: 7443
  source 1..51: mol_type = other DNA

SEQ ID NO: 8898 - DNA, 51 bp, synthetic construct; identical to SEQ ID NO: 7496
  source 1..51: mol_type = other DNA

SEQ ID NO: 8899 - DNA, 51 bp, synthetic construct; identical to SEQ ID NO: 7443
  source 1..51: mol_type = other DNA

SEQ ID NO: 8900 - DNA, 51 bp, synthetic construct; identical to SEQ ID NO: 7432
  source 1..51: mol_type = other DNA

SEQ ID NO: 8901 - DNA, 51 bp, synthetic construct; identical to SEQ ID NO: 7443
  source 1..51: mol_type = other DNA

SEQ ID NO: 8902 - DNA, 51 bp, synthetic construct; identical to SEQ ID NO: 7870
  source 1..51: mol_type = other DNA

SEQ ID NO: 8903 - DNA, 51 bp, synthetic construct; identical to SEQ ID NO: 7443
  source 1..51: mol_type = other DNA

SEQ ID NO: 8904 - DNA, 51 bp, synthetic construct; identical to SEQ ID NO: 7628
  source 1..51: mol_type = other DNA

SEQ ID NO: 8905 - protein, 6 aa, synthetic construct
FRDEAV

SEQ ID NO: 8906 - protein, 6 aa, synthetic construct
IFSDGD

SEQ ID NO: 8907 - protein, 6 aa, synthetic construct
SYGAGS

SEQ ID NO: 8908 - protein, 6 aa, synthetic construct
VVLDGL

SEQ ID NO: 8909 - protein, 6 aa, synthetic construct
SYGAGS

SEQ ID NO: 8910 - protein, 8 aa, synthetic construct
QDSYKKEN

SEQ ID NO: 8911 - protein, 6 aa, synthetic construct
SYVADS

SEQ ID NO: 8912 - protein, 7 aa, synthetic construct
SSTDNKR

SEQ ID NO: 8913 - protein, 6 aa, synthetic construct
SYGAGS

SEQ ID NO: 8914 - protein, 5 aa, synthetic construct
NPSGT

SEQ ID NO: 8915 - protein, 6 aa, synthetic construct
FRDEAV

SEQ ID NO: 8916 - protein, 8 aa, synthetic construct
YYSGDPVV

SEQ ID NO: 8917 - protein, 6 aa, synthetic construct
SYGAGS

SEQ ID NO: 8918 - protein, 7 aa, synthetic construct
ASRDKEK

SEQ ID NO: 8919 - protein, 6 aa, synthetic construct
YSYQKL

SEQ ID NO: 8920 - protein, 6 aa, synthetic construct
VVLDGL

SEQ ID NO: 8921 - protein, 6 aa, synthetic construct
FRNQAP

SEQ ID NO: 8922 - protein, 5 aa, synthetic construct
LASGT

SEQ ID NO: 8923 - protein, 6 aa, synthetic construct
SYGAGS

SEQ ID NO: 8924 - protein, 8 aa, synthetic construct
YYSGDPVV

SEQ ID NO: 8925 - protein, 6 aa, synthetic construct
SYVADS

SEQ ID NO: 8926 - protein, 7 aa, synthetic construct
VLSNVDR

SEQ ID NO: 8927 - protein, 6 aa, synthetic construct
LRSPGD

SEQ ID NO: 8928 - protein, 7 aa, synthetic construct
IRSNERE

SEQ ID NO: 8929 - protein, 6 aa, synthetic construct
LRSPGD

SEQ ID NO: 8930 - protein, 8 aa, synthetic construct
YYSGDPVV

SEQ ID NO: 8931 - protein, 6 aa, synthetic construct
SITEND

SEQ ID NO: 8932 - protein, 6 aa, synthetic construct
IFSNGE

SEQ ID NO: 8933 - protein, 6 aa, synthetic construct
YSYQKL

SEQ ID NO: 8934 - protein, 8 aa, synthetic construct
YYSGDPVV

SEQ ID NO: 8935 - protein, 6 aa, synthetic construct
SYGAGS

SEQ ID NO: 8936 - protein, 5 aa, synthetic construct
NPSGT

SEQ ID NO: 8937 - protein, 6 aa, synthetic construct
SYGAGS

SEQ ID NO: 8938 - protein, 8 aa, synthetic construct
YYSGDPVV

SEQ ID NO: 8939 - protein, 5 aa, synthetic construct
SITVG

SEQ ID NO: 8940 - protein, 8 aa, synthetic construct
YYSGDPVV

SEQ ID NO: 8941 - protein, 6 aa, synthetic construct
SYGAGN

SEQ ID NO: 8942 - protein, 7 aa, synthetic construct
VPKANEK

SEQ ID NO: 8943 - protein, 5 aa, synthetic construct
SITVG

SEQ ID NO: 8944 - protein, 7 aa, synthetic construct
VLSNVDR

SEQ ID NO: 8945 - protein, 6 aa, synthetic construct
SYGAGS

SEQ ID NO: 8946 - protein, 7 aa, synthetic construct
VFSSTEI

SEQ ID NO: 8947 - protein, 6 aa, synthetic construct
SYGAGS

SEQ ID NO: 8948 - protein, 8 aa, synthetic construct
QDSYKKEN

SEQ ID NO: 8949 - protein, 6 aa, synthetic construct
SYVADS

SEQ ID NO: 8950 - protein, 7 aa, synthetic construct
SFTDNKR

SEQ ID NO: 8951 - protein, 6 aa, synthetic construct
SITEND

SEQ ID NO: 8952 - protein, 7 aa, synthetic construct
IRSNMER

SEQ ID NO: 8953 - protein, 6 aa, synthetic construct
SYVADS

SEQ ID NO: 8954 - protein, 7 aa, synthetic construct
VFSSTEI

SEQ ID NO: 8955 - protein, 6 aa, synthetic construct
SYVADS

SEQ ID NO: 8956 - protein, 8 aa, synthetic construct
YYPGDPVV

SEQ ID NO: 8957 - protein, 6 aa, synthetic construct
SYGAGN

SEQ ID NO: 8958 - protein, 7 aa, synthetic construct
IRSNVDR

SEQ ID NO: 8959 - protein, 6 aa, synthetic construct
SYVADS

SEQ ID NO: 8960 - protein, 5 aa, synthetic construct
NPSGT

SEQ ID NO: 8961 - protein, 6 aa, synthetic construct
YSYQKL

SEQ ID NO: 8962 - protein, 7 aa, synthetic construct
IRSNVDR

SEQ ID NO: 8963 - protein, 6 aa, synthetic construct
SYGAGS

SEQ ID NO: 8964 - protein, 7 aa, synthetic construct
VITAGQK

SEQ ID NO: 8965 - protein, 6 aa, synthetic construct
SYVADS

SEQ ID NO: 8966 - protein, 7 aa, synthetic construct
SSTDNKR

SEQ ID NO: 8967 - protein, 5 aa, synthetic construct
SITVG

SEQ ID NO: 8968 - protein, 6 aa, synthetic construct
IFSDGD

SEQ ID NO: 8969 - protein, 6 aa, synthetic construct
SITEND

SEQ ID NO: 8970 - protein, 8 aa, synthetic construct
QDSYKKEN

SEQ ID NO: 8971 - protein, 6 aa, synthetic construct
FRDEAV

SEQ ID NO: 8972 - protein, 7 aa, synthetic construct
ISSVSDK

SEQ ID NO: 8973 - protein, 6 aa, synthetic construct
YSYQKL

SEQ ID NO: 8974 - protein, 7 aa, synthetic construct
SSTDNKR

SEQ ID NO: 8975 - protein, 6 aa, synthetic construct
SYGAGN

SEQ ID NO: 8976 - protein, 7 aa, synthetic construct
SFTDNKR

SEQ ID NO: 8977 - protein, 5 aa, synthetic construct
SITVG

SEQ ID NO: 8978 - protein, 8 aa, synthetic construct
YYSGDPVV

SEQ ID NO: 8979 - protein, 6 aa, synthetic construct
LRSPGD

SEQ ID NO: 8980 - protein, 6 aa, synthetic construct
IFSNGE

SEQ ID NO: 8981 - protein, 6 aa, synthetic construct
LRSPGD

SEQ ID NO: 8982 - protein, 7 aa, synthetic construct
VRSNVDK

SEQ ID NO: 8983 - protein, 7 aa, synthetic construct
STVNSAI

SEQ ID NO: 8984 - protein, 7 aa, synthetic construct
IRSNERE

SEQ ID NO: 8985 - protein, 6 aa, synthetic construct
YSYQKL

SEQ ID NO: 8986 - protein, 8 aa, synthetic construct
QDSYKKEN

SEQ ID NO: 8987 - protein, 6 aa, synthetic construct
SYGAGN

SEQ ID NO: 8988 - protein, 7 aa, synthetic construct
IRSVSDK

SEQ ID NO: 8989 - protein, 6 aa, synthetic construct
SITEND

SEQ ID NO: 8990 - protein, 8 aa, synthetic construct
YYSGDPVV

SEQ ID NO: 8991 - protein, 6 aa, synthetic construct
SYVADS

SEQ ID NO: 8992 - protein, 8 aa, synthetic construct
QDSYKKEN

SEQ ID NO: 8993 - protein, 6 aa, synthetic construct
SYVADS

SEQ ID NO: 8994 - protein, 7 aa, synthetic construct
VLSNVDR

SEQ ID NO: 8995 - protein, 6 aa, synthetic construct
FYNGKV

SEQ ID NO: 8996 - protein, 6 aa, synthetic construct
IFSDGE

SEQ ID NO: 8997 - protein, 6 aa, synthetic construct
LRSPGD

SEQ ID NO: 8998 - protein, 5 aa, synthetic construct
NPSGT

SEQ ID NO: 8999 - protein, 6 aa, synthetic construct
YNLKQL

SEQ ID NO: 9000 - protein, 6 aa, synthetic construct
IFSNGN

SEQ ID NO: 9001 - protein, 6 aa, synthetic construct
YNLKQL

SEQ ID NO: 9002 - protein, 7 aa, synthetic construct
SFTDNKR

SEQ ID NO: 9003 - protein, 6 aa, synthetic construct
YNNKQL

SEQ ID NO: 9004 - protein, 7 aa, synthetic construct
VFSNVDR

SEQ ID NO: 9005 - protein, 6 aa, synthetic construct
SYGAGS

SEQ ID NO: 9006 - protein, 7 aa, synthetic construct
VFSSTEI

SEQ ID NO: 9007 - protein, 6 aa, synthetic construct
SYVADS

SEQ ID NO: 9008 - protein, 5 aa, synthetic construct
GLQQN

SEQ ID NO: 9009 - protein, 6 aa, synthetic construct
YNLKQL

SEQ ID NO: 9010 - protein, 7 aa, synthetic construct
GYKDYVV

SEQ ID NO: 9011 - protein, 6 aa, synthetic construct
YSYQKL

SEQ ID NO: 9012 - protein, 7 aa, synthetic construct
VFSSTEI

SEQ ID NO: 9013 - protein, 6 aa, synthetic construct
SYGAGS

SEQ ID NO: 9014 - protein, 8 aa, synthetic construct
YYSGNPVV

SEQ ID NO: 9015 - protein, 6 aa, synthetic construct
SYVADS

SEQ ID NO: 9016 - protein, 5 aa, synthetic construct
LASGT

SEQ ID NO: 9017 - protein, 6 aa, synthetic construct
YNLKQL

SEQ ID NO: 9018 - protein, 7 aa, synthetic construct
ASRDKEK

SEQ ID NO: 9019 - protein, 6 aa, synthetic construct
SYGAGS

SEQ ID NO: 9020 - protein, 7 aa, synthetic construct
SSTDNKR

SEQ ID NO: 9021 - protein, 6 aa, synthetic construct
SYGAGS

SEQ ID NO: 9022 - protein, 8 aa, synthetic construct
QDSYKKEN

SEQ ID NO: 9023 - protein, 6 aa, synthetic construct
SYGAGS

SEQ ID NO: 9024 - protein, 6 aa, synthetic construct
SPSWAE

SEQ ID NO: 9025 - protein, 6 aa, synthetic construct
FYNGKV

SEQ ID NO: 9026 - protein, 8 aa, synthetic construct
YYSGDPVV

SEQ ID NO: 9027 - protein, 6 aa, synthetic construct
FRDEAV

SEQ ID NO: 9028 - protein, 7 aa, synthetic construct
ILSVSNK

SEQ ID NO: 9029 - protein, 6 aa, synthetic construct
YNNKQL

SEQ ID NO: 9030 - protein, 5 aa, synthetic construct
NPSGT

SEQ ID NO: 9031 - protein, 6 aa, synthetic construct
SYGAGS

SEQ ID NO: 9032 - protein, 8 aa, synthetic construct
YYPGDPVV

SEQ ID NO: 9033 - protein, 6 aa, synthetic construct
SYGAGS

SEQ ID NO: 9034 - protein, 7 aa, synthetic construct
VITAGQK

SEQ ID NO: 9035 - protein, 6 aa, synthetic construct
SYGAGS

SEQ ID NO: 9036 - protein, 6 aa, synthetic construct
IFSNGD

SEQ ID NO: 9037 - protein, 6 aa, synthetic construct
SYGAGS

SEQ ID NO: 9038 - protein, 7 aa, synthetic construct
VITAGQK

SEQ ID NO: 9039 - protein, 6 aa, synthetic construct
SYGAGS

SEQ ID NO: 9040 - protein, 6 aa, synthetic construct
IFSNGE

SEQ ID NO: 9041 - protein, 6 aa, synthetic construct
SYGAGN

SEQ ID NO: 9042 - protein, 7 aa, synthetic construct
SSTDNKR

SEQ ID NO: 9043 - protein, 5 aa, synthetic construct
SITVG

SEQ ID NO: 9044 - protein, 5 aa, synthetic construct
NPSGT

SEQ ID NO: 9045 - protein, 5 aa, synthetic construct
SITVG

SEQ ID NO: 9046 - protein, 6 aa, synthetic construct
IFSDGD

SEQ ID NO: 9047 - protein, 6 aa, synthetic construct
FYNGKV

SEQ ID NO: 9048 - protein, 8 aa, synthetic construct
YYSGDPVV

SEQ ID NO: 9049 - protein, 7 aa, synthetic construct
STVNSAI

SEQ ID NO: 9050 - protein, 8 aa, synthetic construct
YYSGNPVV

SEQ ID NO: 9051 - protein, 6 aa, synthetic construct
SITEND

SEQ ID NO: 9052 - protein, 7 aa, synthetic construct
IRSNVDR

SEQ ID NO: 9053 - protein, 6 aa, synthetic construct
SITEND

SEQ ID NO: 9054 - protein, 7 aa, synthetic construct
VTTANNK

SEQ ID NO: 9055 - protein, 6 aa, synthetic construct
SITEND

SEQ ID NO: 9056 - protein, 7 aa, synthetic construct
VFSNVDR

SEQ ID NO: 9057 - protein, 6 aa, synthetic construct
SITEND

SEQ ID NO: 9058 - protein, 7 aa, synthetic construct
IRSNERE

SEQ ID NO: 9059 - protein, 6 aa, synthetic construct
YNLKQL

SEQ ID NO: 9060 - protein, 5 aa, synthetic construct
NPSGT

SEQ ID NO: 9061 - protein, 6 aa, synthetic construct
YNLKQL

SEQ ID NO: 9062 - protein, 7 aa, synthetic construct
IRSNERE

SEQ ID NO: 9063 - protein, 6 aa, synthetic construct
FRDEAV

SEQ ID NO: 9064 - protein, 7 aa, synthetic construct
IRSNMER

SEQ ID NO: 9065 - protein, 6 aa, synthetic construct
FRDEAV

SEQ ID NO: 9066 - protein, 6 aa, synthetic construct
IFSDGD

SEQ ID NO: 9067 - protein, 6 aa, synthetic construct
SYDVDS

SEQ ID NO: 9068 - protein, 7 aa, synthetic construct
IRSNVDR

SEQ ID NO: 9069 - protein, 6 aa, synthetic construct
YNNKQL

SEQ ID NO: 9070 - protein, 5 aa, synthetic construct
NPSGT

SEQ ID NO: 9071 - protein, 6 aa, synthetic construct
SYGAGS

SEQ ID NO: 9072 - protein, 8 aa, synthetic construct
QDSYKKEN

SEQ ID NO: 9073 - protein, 6 aa, synthetic construct
SYGAGS

SEQ ID NO: 9074 - protein, 7 aa, synthetic construct
IRSNMER

SEQ ID NO: 9075 - protein, 6 aa, synthetic construct
SYGAGS

SEQ ID NO: 9076 - protein, 7 aa, synthetic construct
IRSNMER

SEQ ID NO: 9077 - protein, 6 aa, synthetic construct
SYGAGS

SEQ ID NO: 9078 - protein, 7 aa, synthetic construct
VFSNVDR

SEQ ID NO: 9079 - protein, 6 aa, synthetic construct
SYGAGS

SEQ ID NO: 9080 - protein, 8 aa, synthetic construct
QDSYKKEN

SEQ ID NO: 9081 - protein, 6 aa, synthetic construct
SYGAGN

SEQ ID NO: 9082 - protein, 7 aa, synthetic construct
IRSNMER

SEQ ID NO: 9083 - protein, 6 aa, synthetic construct
SYVADS

SEQ ID NO: 9084 - protein, 7 aa, synthetic construct
VITAGQK

SEQ ID NO: 9085 - protein, 6 aa, synthetic construct
SYVADS

SEQ ID NO: 9086 - protein, 7 aa, synthetic construct
IRSNMER

SEQ ID NO: 9087 - protein, 5 aa, synthetic construct
SITVG

SEQ ID NO: 9088 - protein, 6 aa, synthetic construct
IFSDGD

SEQ ID NO: 9089 - protein, 7 aa, synthetic construct
STVNSAI

SEQ ID NO: 9090 - protein, 8 aa, synthetic construct
QDSYKKEN

SEQ ID NO: 9091 - protein, 6 aa, synthetic construct
SITEND

SEQ ID NO: 9092 - protein, 7 aa, synthetic construct
IRSNERE

SEQ ID NO: 9093 - protein, 6 aa, synthetic construct
SITEND

SEQ ID NO: 9094 - protein, 7 aa, synthetic construct
IRSNERE

SEQ ID NO: 9095 - protein, 6 aa, synthetic construct
LRSPGD

SEQ ID NO: 9096 - protein, 8 aa, synthetic construct
YYPGDPVV

SEQ ID NO: 9097 - protein, 6 aa, synthetic construct
YNLKQL

SEQ ID NO: 9098 - protein, 7 aa, synthetic construct
ASRDKEK

SEQ ID NO: 9099 - protein, 6 aa, synthetic construct
FRDEAV

SEQ ID NO: 9100 - protein, 5 aa, synthetic construct
IPGMK

SEQ ID NO: 9101 - protein, 6 aa, synthetic construct
FRDEAV

SEQ ID NO: 9102 - protein, 5 aa, synthetic construct
LASGT

SEQ ID NO: 9103 - protein, 6 aa, synthetic construct
YSYQKL

SEQ ID NO: 9104 - protein, 5 aa, synthetic construct
IPGMK

SEQ ID NO: 9105 - protein, 6 aa, synthetic construct
YNNKQL

SEQ ID NO: 9106 - protein, 5 aa, synthetic construct
NPSGT

SEQ ID NO: 9107 - protein, 6 aa, synthetic construct
YNNKQL

SEQ ID NO: 9108 - protein, 5 aa, synthetic construct
LASGT

SEQ ID NO: 9109 - protein, 6 aa, synthetic construct
SYGAGS

SEQ ID NO: 9110 - protein, 8 aa, synthetic construct
QDSYKKEN

SEQ ID NO: 9111 - protein, 6 aa, synthetic construct
SYGAGS

SEQ ID NO: 9112 - protein, 7 aa, synthetic construct
SSTDNKR

SEQ ID NO: 9113 - protein, 6 aa, synthetic construct
SYGAGS

SEQ ID NO: 9114 - protein, 6 aa, synthetic construct
VVLDGL

SEQ ID NO: 9115 - protein, 6 aa, synthetic construct
SYGAGN

SEQ ID NO: 9116 - protein, 7 aa, synthetic construct
VITAGQK

SEQ ID NO: 9117 - protein, 6 aa, synthetic construct
SYGAGN

SEQ ID NO: 9118 - protein, 6 aa, synthetic construct
IFSNGE

SEQ ID NO: 9119 - protein, 6 aa, synthetic construct
SYVADS

SEQ ID NO: 9120 - protein, 8 aa, synthetic construct
YYSGDPVV

SEQ ID NO: 9121 - protein, 6 aa, synthetic construct
SYVADS

SEQ ID NO: 9122 - protein, 7 aa, synthetic construct
VITAGQK

SEQ ID NO: 9123 - protein, 5 aa, synthetic construct
SITVG

SEQ ID NO: 9124 - protein, 8 aa, synthetic construct
QDSYKKEN

SEQ ID NO: 9125 - protein, 7 aa, synthetic construct
STVNSAI

SEQ ID NO: 9126 - protein, 7 aa, synthetic construct
ASRDKEK

SEQ ID NO: 9127 - protein, 6 aa, synthetic construct
SITEND

SEQ ID NO: 9128 - protein, 7 aa, synthetic construct
VFSSTEI

SEQ ID NO: 9129 - protein, 6 aa, synthetic construct
LRSPGD

SEQ ID NO: 9130 - protein, 7 aa, synthetic construct
ILSVSNK

SEQ ID NO: 9131 - protein, 6 aa, synthetic construct
LRSPGD

SEQ ID NO: 9132 - protein, 7 aa, synthetic construct
VITAGQK

SEQ ID NO: 9133 - protein, 6 aa, synthetic construct
LRSPGD

SEQ ID NO: 9134 - protein, 8 aa, synthetic construct
QDSYKKEN

SEQ ID NO: 9135 - protein, 6 aa, synthetic construct
LRSPGD

SEQ ID NO: 9136 - protein, 6 aa, synthetic construct
IFSNGE

SEQ ID NO: 9137 - protein, 6 aa, synthetic construct
YNLKQL

SEQ ID NO: 9138 - protein, 5 aa, synthetic construct
NPSGT

SEQ ID NO: 9139 - protein, 6 aa, synthetic construct
YNLKQL

SEQ ID NO: 9140 - protein, 7 aa, synthetic construct
VITAGQK

SEQ ID NO: 9141 - protein, 6 aa, synthetic construct
YNLKQL

SEQ ID NO: 9142 - protein, 7 aa, synthetic construct
ISSVSDK

SEQ ID NO: 9143 - protein, 6 aa, synthetic construct
FRNQAP

SEQ ID NO: 9144 - protein, 7 aa, synthetic construct
IRPVSNK

SEQ ID NO: 9145 - protein, 6 aa, synthetic construct
HYDKME

SEQ ID NO: 9146 - protein, 8 aa, synthetic construct
YYSGDPVV

SEQ ID NO: 9147 - protein, 6 aa, synthetic construct
FRDEAV

SEQ ID NO: 9148 - protein, 7 aa, synthetic construct
SSTDNKR

SEQ ID NO: 9149 - protein, 6 aa, synthetic construct
FRDEAV

SEQ ID NO: 9150 - protein, 7 aa, synthetic construct
VITAGQK

SEQ ID NO: 9151 - protein, 6 aa, synthetic construct
FRDEAV

SEQ ID NO: 9152 - protein, 7 aa, synthetic construct
VRSNVDK

SEQ ID NO: 9153 - protein, 6 aa, synthetic construct
YSYQKL

SEQ ID NO: 9154 - protein, 8 aa, synthetic construct
YYPGDPVV

SEQ ID NO: 9155 - protein, 6 aa, synthetic construct
YSYQKL

SEQ ID NO: 9156 - protein, 7 aa, synthetic construct
VTTANNK

SEQ ID NO: 9157 - protein, 6 aa, synthetic construct
YSYQKL

SEQ ID NO: 9158 - protein, 7 aa, synthetic construct
VTTANNK

SEQ ID NO: 9159 - protein, 6 aa, synthetic construct
YNNKQL

SEQ ID NO: 9160 - protein, 5 aa, synthetic construct
NPSGT

SEQ ID NO: 9161 - protein, 6 aa, synthetic construct
YNNKQL

SEQ ID NO: 9162 - protein, 5 aa, synthetic construct
LVPGT

SEQ ID NO: 9163 - protein, 6 aa, synthetic construct
YNNKQL

SEQ ID NO: 9164 - protein, 8 aa, synthetic construct
QDSYKKEN

SEQ ID NO: 9165 - protein, 6 aa, synthetic construct
SYGAGS

SEQ ID NO: 9166 - protein, 6 aa, synthetic construct
IFSNGE

SEQ ID NO: 9167 - protein, 6 aa, synthetic construct
SYGAGS

SEQ ID NO: 9168 - protein, 7 aa, synthetic construct
SSTDNKR

SEQ ID NO: 9169 - protein, 6 aa, synthetic construct
SYGAGS

SEQ ID NO: 9170 - protein, 5 aa, synthetic construct
NPSGT

SEQ ID NO: 9171 - protein, 6 aa, synthetic construct
SYGAGS

SEQ ID NO: 9172 - protein, 7 aa, synthetic construct
VFSSTEI

SEQ ID NO: 9173 - protein, 6 aa, synthetic construct
SYGAGS

SEQ ID NO: 9174 - protein, 8 aa, synthetic construct
QDSYKKEN

SEQ ID NO: 9175 - protein, 6 aa, synthetic construct
SYGAGN

SEQ ID NO: 9176 - protein, 7 aa, synthetic construct
VFSSTEI

SEQ ID NO: 9177 - protein, 6 aa, synthetic construct
SYGAGN

SEQ ID NO: 9178 - protein, 7 aa, synthetic construct
VLSNVDR

SEQ ID NO: 9179 - protein, 6 aa, synthetic construct
SYGAGN

SEQ ID NO: 9180 - protein, 8 aa, synthetic construct
QDSYKKEN

SEQ ID NO: 9181 - protein, 6 aa, synthetic construct
SYGAGN

SEQ ID NO: 9182 - protein, 7 aa, synthetic construct
VFSSTEI

SEQ ID NO: 9183 - protein, 6 aa, synthetic construct
SYGAGN

SEQ ID NO: 9184 - protein, 8 aa, synthetic construct
YITGDTVV

SEQ ID NO: 9185 - protein, 6 aa, synthetic construct
SYGAGN

SEQ ID NO: 9186 - protein, 7 aa, synthetic construct
IRPVSNK

SEQ ID NO: 9187 - protein, 6 aa, synthetic construct
SYGAGN

SEQ ID NO: 9188 - protein, 7 aa, synthetic construct
SFTDNKR

SEQ ID NO: 9189 - protein, 6 aa, synthetic construct
SYGAGN

SEQ ID NO: 9190 - protein, 5 aa, synthetic construct
LASGT

SEQ ID NO: 9191 - protein, 6 aa, synthetic construct
SYVADS

SEQ ID NO: 9192 - protein, 5 aa, synthetic construct
LAQGT

SEQ ID NO: 9193 - protein, 6 aa, synthetic construct
SYVADS

SEQ ID NO: 9194 - protein, 8 aa, synthetic construct
QDSYKKEN

SEQ ID NO: 9195 - protein, 6 aa, synthetic construct
SYVADS

SEQ ID NO: 9196 - protein, 8 aa, synthetic construct
YYSGDPVV

SEQ ID NO: 9197 - protein, 6 aa, synthetic construct
SYVADS

SEQ ID NO: 9198 - protein, 7 aa, synthetic construct
VLSNVDR

SEQ ID NO: 9199 - protein, 6 aa, synthetic construct
SYVADS

SEQ ID NO: 9200 - protein, 7 aa, synthetic construct
ILSVSDK

SEQ ID NO: 9201 - protein, 6 aa, synthetic construct
SYVADS

SEQ ID NO: 9202 - protein, 5 aa, synthetic construct
LAQGT

SEQ ID NO: 9203 - protein, 6 aa, synthetic construct
YYDKIL

SEQ ID NO: 9204 - protein, 8 aa, synthetic construct
QDSYKKEN

SEQ ID NO: 9205 - protein, 6 aa, synthetic construct
YYDKIL

SEQ ID NO: 9206 - protein, 8 aa, synthetic construct
QDSYKKEN

SEQ ID NO: 9207 - protein, 5 aa, synthetic construct
SITVG

SEQ ID NO: 9208 - protein, 8 aa, synthetic construct
YYSGDPVV

SEQ ID NO: 9209 - protein, 5 aa, synthetic construct
SITVG

SEQ ID NO: 9210 - protein, 7 aa, synthetic construct
GYKDYVV

SEQ ID NO: 9211 - protein, 6 aa, synthetic construct
FYNGKV

SEQ ID NO: 9212 - protein, 7 aa, synthetic construct
ILSVSNK

SEQ ID NO: 9213 - protein, 7 aa, synthetic construct
STVNSAI

SEQ ID NO: 9214 - protein, 8 aa, synthetic construct
QPSFDTQN

SEQ ID NO: 9215 - protein, 7 aa, synthetic construct
STVNSAI

SEQ ID NO: 9216 - protein, 7 aa, synthetic construct
IRSNVDR

SEQ ID NO: 9217 - protein, 6 aa, synthetic construct
SITEND

SEQ ID NO: 9218 - protein, 5 aa, synthetic construct
LVPGT

SEQ ID NO: 9219 - protein, 6 aa, synthetic construct
SITEND

SEQ ID NO: 9220 - protein, 7 aa, synthetic construct
VFSSTEI

SEQ ID NO: 9221 - protein, 6 aa, synthetic construct
LRSPGD

SEQ ID NO: 9222 - protein, 8 aa, synthetic construct
QPSFDTQN

SEQ ID NO: 9223 - protein, 6 aa, synthetic construct
LRSPGD

SEQ ID NO: 9224 - protein, 8 aa, synthetic construct
YYSGDPVV

SEQ ID NO: 9225 - protein, 6 aa, synthetic construct
LRSPGD

SEQ ID NO: 9226 - protein, 5 aa, synthetic construct
NPSGT

SEQ ID NO: 9227 - protein, 6 aa, synthetic construct
YNLKQL

SEQ ID NO: 9228 - protein, 7 aa, synthetic construct
IRSNVDR

SEQ ID NO: 9229 - protein, 6 aa, synthetic construct
YNLKQL

SEQ ID NO: 9230 - protein, 7 aa, synthetic construct
SSTDNKR

SEQ ID NO: 9231 - protein, 6 aa, synthetic construct
YNLKQL

SEQ ID NO: 9232 - protein, 7 aa, synthetic construct
VITAGQK

SEQ ID NO: 9233 - protein, 6 aa, synthetic construct
YNLKQL

SEQ ID NO: 9234 - protein, 7 aa, synthetic construct
SSTDNKR

SEQ ID NO: 9235 - protein, 6 aa, synthetic construct
YNLKQL

SEQ ID NO: 9236 - protein, 7 aa, synthetic construct
VPKANEK

SEQ ID NO: 9237 - protein, 6 aa, synthetic construct
YNLKQL

SEQ ID NO: 9238 - protein, 7 aa, synthetic construct
ASRDKEK

SEQ ID NO: 9239 - protein, 6 aa, synthetic construct
FRNQAP

SEQ ID NO: 9240 - protein, 8 aa, synthetic construct
YYSGNPVV

SEQ ID NO: 9241 - protein, 6 aa, synthetic construct
FRNQAP

SEQ ID NO: 9242 - protein, 6 aa, synthetic construct
VVLDGL

SEQ ID NO: 9243 - protein, 6 aa, synthetic construct
FRNQAP

SEQ ID NO: 9244 - protein, 8 aa, synthetic construct
YYPGDPVV

SEQ ID NO: 9245 - protein, 6 aa, synthetic construct
FRDEAV

SEQ ID NO: 9246 - protein, 7 aa, synthetic construct
IRSNVDR

SEQ ID NO: 9247 - protein, 6 aa, synthetic construct
FRDEAV

SEQ ID NO: 9248 - protein, 5 aa, synthetic construct
GLQQN

SEQ ID NO: 9249 - protein, 6 aa, synthetic construct
FRDEAV

SEQ ID NO: 9250 - protein, 6 aa, synthetic construct
IFSNGE

SEQ ID NO: 9251 - protein, 6 aa, synthetic construct
FRDEAV

SEQ ID NO: 9252 - protein, 7 aa, synthetic construct
IRSNVDR

SEQ ID NO: 9253 - protein, 6 aa, synthetic construct
SYDVDS

SEQ ID NO: 9254 - protein, 8 aa, synthetic construct
QTSSSTAK

SEQ ID NO: 9255 - protein, 6 aa, synthetic construct
YSYQKL

SEQ ID NO: 9256 - protein, 7 aa, synthetic construct
VTTANNK

SEQ ID NO: 9257 - protein, 6 aa, synthetic construct
YSYQKL

SEQ ID NO: 9258 - protein, 5 aa, synthetic construct
NPSGT

SEQ ID NO: 9259 - protein, 6 aa, synthetic construct
YSYQKL

SEQ ID NO: 9260 - protein, 8 aa, synthetic construct
YYSGDPVV

SEQ ID NO: 9261 - protein, 6 aa, synthetic construct
YSYQKL

SEQ ID NO: 9262 - protein, 5 aa, synthetic construct
NPSGT

SEQ ID NO: 9263 - protein, 6 aa, synthetic construct
YSYQKL

SEQ ID NO: 9264 - protein, 5 aa, synthetic construct
NPSGT

SEQ ID NO: 9265 - protein, 6 aa, synthetic construct
YSYQKL

SEQ ID NO: 9266 - protein, 7 aa, synthetic construct
VITAGQK

SEQ ID NO: 9267 - protein, 6 aa, synthetic construct
YNNKQL

SEQ ID NO: 9268 - protein, 5 aa, synthetic construct
NPSGT

SEQ ID NO: 9269 - protein, 6 aa, synthetic construct
YNNKQL

SEQ ID NO: 9270 - protein, 7 aa, synthetic construct
IRSNVDR

SEQ ID NO: 9271 - protein, 6 aa, synthetic construct
YNNKQL

SEQ ID NO: 9272 - protein, 7 aa, synthetic construct
VFSSTEI

SEQ ID NO: 9273 - protein, 6 aa, synthetic construct
YNNKQL

SEQ ID NO: 9274 - protein, 7 aa, synthetic construct
IRSVSDK

SEQ ID NO: 9275 - protein, 6 aa, synthetic construct
YNNKQL

SEQ ID NO: 9276 - protein, 5 aa, synthetic construct
NPSGT

SEQ ID NO: 9277 - protein, 6 aa, synthetic construct
YNNKQL

SEQ ID NO: 9278 - protein, 7 aa, synthetic construct
ILSVSDK

SEQ ID NO: 9279 - protein, 6 aa, synthetic construct
YNNKQL

SEQ ID NO: 9280 - protein, 6 aa, synthetic construct
IFSNGE

SEQ ID NO: 9281 - protein, 6 aa, synthetic construct
YNNKQL

SEQ ID NO: 9282 - protein, 7 aa, synthetic construct
IRSNMER

SEQ ID NO: 9283 - protein, 6 aa, synthetic construct
YNNKQL

SEQ ID NO: 9284 - protein, 8 aa, synthetic construct
QDSYKKEN

SEQ ID NO: 9285 - protein, 6 aa, synthetic construct
SYGAGS

SEQ ID NO: 9286 - protein, 8 aa, synthetic construct
YYSGDPVV

SEQ ID NO: 9287 - protein, 6 aa, synthetic construct
SYGAGS

SEQ ID NO: 9288 - protein, 8 aa, synthetic construct
YYSGDPVV

SEQ ID NO: 9289 - protein, 6 aa, synthetic construct
SYGAGS

SEQ ID NO: 9290 - protein, 8 aa, synthetic construct
QDSYKKEN

SEQ ID NO: 9291 - protein, 6 aa, synthetic construct
SYGAGS

SEQ ID NO: 9292 - protein, 8 aa, synthetic construct
QDSYKKEN

SEQ ID NO: 9293 - protein, 6 aa, synthetic construct
SYGAGS

SEQ ID NO: 9294 - protein, 5 aa, synthetic construct
NPSGT

SEQ ID NO: 9295 - protein, 6 aa, synthetic construct
SYGAGS

SEQ ID NO: 9296 - protein, 7 aa, synthetic construct
IRSNVDR

SEQ ID NO: 9297 - protein, 6 aa, synthetic construct
SYGAGS

SEQ ID NO: 9298 - protein, 5 aa, synthetic construct
GLQQN

SEQ ID NO: 9299 - protein, 6 aa, synthetic construct
SYGAGS

SEQ ID NO: 9300 - protein, 5 aa, synthetic construct
NPSGT

SEQ ID NO: 9301 - protein, 6 aa, synthetic construct
SYGAGN

SEQ ID NO: 9302 - protein, 8 aa, synthetic construct
YITGDAVV

SEQ ID NO: 9303 - protein, 6 aa, synthetic construct
SYGAGN

SEQ ID NO: 9304 - protein, 8 aa, synthetic construct
QDSYKKEN

SEQ ID NO: 9305 - protein, 6 aa, synthetic construct
SYGAGN

SEQ ID NO: 9306 - protein, 7 aa, synthetic construct
IRSNMER

SEQ ID NO: 9307 - protein, 6 aa, synthetic construct
SYGAGN

SEQ ID NO: 9308 - protein, 5 aa, synthetic construct
LVPGT

SEQ ID NO: 9309 - protein, 6 aa, synthetic construct
SYGAGN

SEQ ID NO: 9310 - protein, 7 aa, synthetic construct
IRSVSDK

SEQ ID NO: 9311 - protein, 6 aa, synthetic construct
SYGAGN

SEQ ID NO: 9312 - protein, 7 aa, synthetic construct
VFSSTEI

SEQ ID NO: 9313 - protein, 6 aa, synthetic construct
SYGAGN

SEQ ID NO: 9314 - protein, 7 aa, synthetic construct
VTTANNK

SEQ ID NO: 9315 - protein, 6 aa, synthetic construct
SYVADS

SEQ ID NO: 9316 - protein, 6 aa, synthetic construct
VVLDGL

SEQ ID NO: 9317 - protein, 6 aa, synthetic construct
SYVADS

SEQ ID NO: 9318 - protein, 6 aa, synthetic construct
IFSNGE

SEQ ID NO: 9319 - protein, 6 aa, synthetic construct
SYVADS

SEQ ID NO: 9320 - protein, 8 aa, synthetic construct
QDSYKKEN

SEQ ID NO: 9321 - protein, 6 aa, synthetic construct
SYVADS

SEQ ID NO: 9322 - protein, 7 aa, synthetic construct
VFSSTEI

SEQ ID NO: 9323 - protein, 6 aa, synthetic construct
SYVADS

SEQ ID NO: 9324 - protein, 8 aa, synthetic construct
YYSGDPVV

SEQ ID NO: 9325 - protein, 6 aa, synthetic construct
SYVADS

SEQ ID NO: 9326 - protein, 7 aa, synthetic construct
ISSVSDK

SEQ ID NO: 9327 - protein, 6 aa, synthetic construct
SYVADS

SEQ ID NO: 9328 - protein, 6 aa, synthetic construct
IFSNGE

SEQ ID NO: 9329 - protein, 6 aa, synthetic construct
SYVADS

SEQ ID NO: 9330 - protein, 6 aa, synthetic construct
VVLDGL

SEQ ID NO: 9331 - protein, 6 aa, synthetic construct
YYDKIL

SEQ ID NO: 9332 - protein, 7 aa, synthetic construct
VRSNVDK

SEQ ID NO: 9333 - protein, 6 aa, synthetic construct
YYDKIL

SEQ ID NO: 9334 - protein, 7 aa, synthetic construct
VLSNVDR

SEQ ID NO: 9335 - protein, 5 aa, synthetic construct
SITVG

SEQ ID NO: 9336 - protein, 7 aa, synthetic construct
IRSVSDK

SEQ ID NO: 9337 - protein, 5 aa, synthetic construct
SITVG

SEQ ID NO: 9338 - protein, 7 aa, synthetic construct
PKANEKG

SEQ ID NO: 9339 - protein, 5 aa, synthetic construct
SITVG

SEQ ID NO: 9340 - protein, 8 aa, synthetic construct
QTSSSTAK

SEQ ID NO: 9341 - protein, 5 aa, synthetic construct
SITVG

SEQ ID NO: 9342 - protein, 7 aa, synthetic construct
IRSNVDR

SEQ ID NO: 9343 - protein, 7 aa, synthetic construct
STVNSAI

SEQ ID NO: 9344 - protein, 7 aa, synthetic construct
VFSSTEI

SEQ ID NO: 9345 - protein, 7 aa, synthetic construct
STVNSAI

SEQ ID NO: 9346 - protein, 7 aa, synthetic construct
IRSNMER

SEQ ID NO: 9347 - protein, 6 aa, synthetic construct
SITEND

SEQ ID NO: 9348 - protein, 7 aa, synthetic construct
ASRDKEK

SEQ ID NO: 9349 - protein, 6 aa, synthetic construct
SITEND

SEQ ID NO: 9350 - protein, 7 aa, synthetic construct
IRSNVDR

SEQ ID NO: 9351 - protein, 6 aa, synthetic construct
SITEND

SEQ ID NO: 9352 - protein, 5 aa, synthetic construct
LASGT

SEQ ID NO: 9353 - protein, 6 aa, synthetic construct
SITEND

SEQ ID NO: 9354 - protein, 7 aa, synthetic construct
IRPVSNK

SEQ ID NO: 9355 - protein, 6 aa, synthetic construct
SITEND

SEQ ID NO: 9356 - protein, 7 aa, synthetic construct
ASRDKEK

SEQ ID NO: 9357 - protein, 6 aa, synthetic construct
SITEND

SEQ ID NO: 9358 - protein, 7 aa, synthetic construct
VFSSTEI

SEQ ID NO: 9359 - protein, 6 aa, synthetic construct
SITEND

SEQ ID NO: 9360 - protein, 7 aa, synthetic construct
VTTANNK

SEQ ID NO: 9361 - protein, 6 aa, synthetic construct
SITEND

SEQ ID NO: 9362 - protein, 7 aa, synthetic construct
VITAGQK

SEQ ID NO: 9363 - protein, 6 aa, synthetic construct
SITEND

SEQ ID NO: 9364 - protein, 7 aa, synthetic construct
VFSSTEI

SEQ ID NO: 9365 - protein, 6 aa, synthetic construct
SITEND

SEQ ID NO: 9366 - protein, 8 aa, synthetic construct
YYSGDPVV

SEQ ID NO: 9367 - protein, 6 aa, synthetic construct
SITEND

SEQ ID NO: 9368 - protein, 7 aa, synthetic construct
SSTDNKR

SEQ ID NO: 9369 - protein, 6 aa, synthetic construct
SITEND

SEQ ID NO: 9370 - protein, 8 aa, synthetic construct
YYSGDPVV

SEQ ID NO: 9371 - protein, 6 aa, synthetic construct
SITEND

SEQ ID NO: 9372 - protein, 7 aa, synthetic construct
IRSVSDK

SEQ ID NO: 9373 - protein, 6 aa, synthetic construct
LRSPGD

SEQ ID NO: 9374 - protein, 8 aa, synthetic construct
YYSGDPVV

SEQ ID NO: 9375 - protein, 6 aa, synthetic construct
LRSPGD

SEQ ID NO: 9376 - protein, 8 aa, synthetic construct
QDSYKKEN

SEQ ID NO: 9377 - protein, 6 aa, synthetic construct
LRSPGD

SEQ ID NO: 9378 - protein, 6 aa, synthetic construct
IFSDGD

SEQ ID NO: 9379 - protein, 6 aa, synthetic construct
LRSPGD

SEQ ID NO: 9380 - protein, 5 aa, synthetic construct
LVPGT

SEQ ID NO: 9381 - protein, 6 aa, synthetic construct
LRSPGD

SEQ ID NO: 9382 - protein, 7 aa, synthetic construct
VITAGQK

SEQ ID NO: 9383 - protein, 6 aa, synthetic construct
LRSPGD

SEQ ID NO: 9384 - protein, 6 aa, synthetic construct
IFSNGE

SEQ ID NO: 9385 - protein, 6 aa, synthetic construct
LRSPGD

SEQ ID NO: 9386 - protein, 8 aa, synthetic construct
YYSGDPVV

SEQ ID NO: 9387 - protein, 6 aa, synthetic construct
YNLKQL

SEQ ID NO: 9388 - protein, 5 aa, synthetic construct
GLQQN

SEQ ID NO: 9389 - protein, 6 aa, synthetic construct
YNLKQL

SEQ ID NO: 9390 - protein, 8 aa, synthetic construct
YYSGDPVV

SEQ ID NO: 9391 - protein, 6 aa, synthetic construct
YNLKQL

SEQ ID NO: 9392 - protein, 7 aa, synthetic construct
VFSSTEI

SEQ ID NO: 9393 - protein, 6 aa, synthetic construct
YNLKQL

SEQ ID NO: 9394 - protein, 7 aa, synthetic construct
VITAGQK

SEQ ID NO: 9395 - protein, 6 aa, synthetic construct
YNLKQL

SEQ ID NO: 9396 - protein, 7 aa, synthetic construct
VITAGQK

SEQ ID NO: 9397 - protein, 6 aa, synthetic construct
YNLKQL

SEQ ID NO: 9398 - protein, 5 aa, synthetic construct
LASGT

SEQ ID NO: 9399 - protein, 6 aa, synthetic construct
YNLKQL

SEQ ID NO: 9400 - protein, 6 aa, synthetic construct
VVLDGL

SEQ ID NO: 9401 - protein, 6 aa, synthetic construct
YNLKQL

SEQ ID NO: 9402 - protein, 6 aa, synthetic construct
IFSNGE

SEQ ID NO: 9403 - protein, 6 aa, synthetic construct
YNLKQL

SEQ ID NO: 9404 - protein, 7 aa, synthetic construct
VITAGQK

SEQ ID NO: 9405 - protein, 6 aa, synthetic construct
YNLKQL

SEQ ID NO: 9406 - protein, 8 aa, synthetic construct
YYSGNPVV

SEQ ID NO: 9407 - protein, 6 aa, synthetic construct
YNLKQL

SEQ ID NO: 9408 - protein, 7 aa, synthetic construct
VRSNVDK

SEQ ID NO: 9409 - protein, 6 aa, synthetic construct
YNLKQL

SEQ ID NO: 9410 - protein, 8 aa, synthetic construct
QDSYKKEN

SEQ ID NO: 9411 - protein, 6 aa, synthetic construct
YNLKQL

SEQ ID NO: 9412 - protein, 7 aa, synthetic construct
VITAGQK

SEQ ID NO: 9413 - protein, 6 aa, synthetic construct
YNLKQL

SEQ ID NO: 9414 - protein, 7 aa, synthetic construct
VTTANNK

SEQ ID NO: 9415 - protein, 6 aa, synthetic construct
YNLKQL

SEQ ID NO: 9416 - protein, 5 aa, synthetic construct
NPSGT

SEQ ID NO: 9417 - protein, 6 aa, synthetic construct
YNLKQL

SEQ ID NO: 9418 - protein, 8 aa, synthetic construct
YYSGDPVV

SEQ ID NO: 9419 - protein, 6 aa, synthetic construct
YNLKQL

SEQ ID NO: 9420 - protein, 7 aa, synthetic construct
VITAGQK

SEQ ID NO: 9421 - protein, 6 aa, synthetic construct
YNLKQL

SEQ ID NO: 9422 - protein, 7 aa, synthetic construct
ASRDKEK

SEQ ID NO: 9423 - protein, 6 aa, synthetic construct
YNLKQL

SEQ ID NO: 9424 - protein, 6 aa, synthetic construct
VVLDGL

SEQ ID NO: 9425 - protein, 6 aa, synthetic construct
YNLKQL

SEQ ID NO: 9426 - protein, 8 aa, synthetic construct
QDSYKKEN

SEQ ID NO: 9427 - protein, 6 aa, synthetic construct
YNLKQL

SEQ ID NO: 9428 - protein, 6 aa, synthetic construct
IFSDGD

SEQ ID NO: 9429 - protein, 6 aa, synthetic construct
YNLKQL

SEQ ID NO: 9430 - protein, 6 aa, synthetic construct
IFSNGE

SEQ ID NO: 9431 - protein, 6 aa, synthetic construct
YNLKQL

SEQ ID NO: 9432 - protein, 5 aa, synthetic construct
NPSGT

SEQ ID NO: 9433 - protein, 6 aa, synthetic construct
YNLKQL

SEQ ID NO: 9434 - protein, 7 aa, synthetic construct
LVDQKDK

SEQ ID NO: 9435 - protein, 6 aa, synthetic construct
YNLKQL

SEQ ID NO: 9436 - protein, 7 aa, synthetic construct
ISSVSDK

SEQ ID NO: 9437 - protein, 6 aa, synthetic construct
YNLKQL

SEQ ID NO: 9438 - protein, 7 aa, synthetic construct
VITAGQK

SEQ ID NO: 9439 - protein, 6 aa, synthetic construct
YNLKQL

SEQ ID NO: 9440 - protein, 7 aa, synthetic construct
SFTDNKR

SEQ ID NO: 9441 - protein, 6 aa, synthetic construct
YNLKQL

SEQ ID NO: 9442 - protein, 7 aa, synthetic construct
VFSSTEI

SEQ ID NO: 9443 - protein, 6 aa, synthetic construct
YNLKQL

SEQ ID NO: 9444 - protein, 7 aa, synthetic construct
GYKDYVV

SEQ ID NO: 9445 - protein, 6 aa, synthetic construct
YNLKQL

SEQ ID NO: 9446 - protein, 8 aa, synthetic construct
YITGDTVV

SEQ ID NO: 9447 - protein, 6 aa, synthetic construct
YNLKQL

SEQ ID NO: 9448 - protein, 6 aa, synthetic construct
IFSNGE

SEQ ID NO: 9449 - protein, 6 aa, synthetic construct
YNLKQL

SEQ ID NO: 9450 - protein, 5 aa, synthetic construct
NPSGT

SEQ ID NO: 9451 - protein, 6 aa, synthetic construct
YNLKQL

SEQ ID NO: 9452 - protein, 8 aa, synthetic construct
YYSGDPVV

SEQ ID NO: 9453 - protein, 6 aa, synthetic construct
YNLKQL

SEQ ID NO: 9454 - protein, 5 aa, synthetic construct
LVPGT

SEQ ID NO: 9455 - protein, 6 aa, synthetic construct
YNLKQL

SEQ ID NO: 9456 - protein, 8 aa, synthetic construct
QDSYKKEN

SEQ ID NO: 9457 - protein, 6 aa, synthetic construct
FRNQAP

SEQ ID NO: 9458 - protein, 8 aa, synthetic construct
YYPGDPVV

SEQ ID NO: 9459 - protein, 6 aa, synthetic construct
FRNQAP

SEQ ID NO: 9460 - protein, 7 aa, synthetic construct
IRSNERE

SEQ ID NO: 9461 - protein, 6 aa, synthetic construct
FRNQAP

SEQ ID NO: 9462 - protein, 7 aa, synthetic construct
IRSNERE

SEQ ID NO: 9463 - protein, 6 aa, synthetic construct
FRNQAP

SEQ ID NO: 9464 - protein, 8 aa, synthetic construct
YYSGDPVV

SEQ ID NO: 9465 - protein, 6 aa, synthetic construct
FRNQAP

SEQ ID NO: 9466 - protein, 6 aa, synthetic construct
IFSNGE

SEQ ID NO: 9467 - protein, 6 aa, synthetic construct
FRNQAP

SEQ ID NO: 9468 - protein, 5 aa, synthetic construct
LASGT

SEQ ID NO: 9469 - protein, 6 aa, synthetic construct
HYDKME

SEQ ID NO: 9470 - protein, 5 aa, synthetic construct
NPSGT

SEQ ID NO: 9471 - protein, 7 aa, synthetic construct
ANEGSEA

SEQ ID NO: 9472 - protein, 8 aa, synthetic construct
YYSGDPVV

SEQ ID NO: 9473 - protein, 7 aa, synthetic construct
ANEGSEA

SEQ ID NO: 9474 - protein, 7 aa, synthetic construct
IRSNMER

SEQ ID NO: 9475 - protein, 7 aa, synthetic construct
ANEGSEA

SEQ ID NO: 9476 - protein, 6 aa, synthetic construct
IFSNGE

SEQ ID NO: 9477 - protein, 6 aa, synthetic construct
FRDEAV

SEQ ID NO: 9478 - protein, 6 aa, synthetic construct
IFSDGD

SEQ ID NO: 9479 - protein, 6 aa, synthetic construct
FRDEAV

SEQ ID NO: 9480 - protein, 8 aa, synthetic construct
QDSYKKEN

SEQ ID NO: 9481 - protein, 6 aa, synthetic construct
FRDEAV

SEQ ID NO: 9482 - protein, 7 aa, synthetic construct
ASRDKEK

SEQ ID NO: 9483 - protein, 6 aa, synthetic construct
FRDEAV

SEQ ID NO: 9484 - protein, 7 aa, synthetic construct
VPKANEK

SEQ ID NO: 9485 - protein, 6 aa, synthetic construct
FRDEAV

SEQ ID NO: 9486 - protein, 8 aa, synthetic construct
YYSGNPVV

SEQ ID NO: 9487 - protein, 6 aa, synthetic construct
FRDEAV

SEQ ID NO: 9488 - protein, 7 aa, synthetic construct
VRSNVDK

SEQ ID NO: 9489 - protein, 6 aa, synthetic construct
FRDEAV

SEQ ID NO: 9490 - protein, 7 aa, synthetic construct
ASRDKEK

SEQ ID NO: 9491 - protein, 6 aa, synthetic construct
FRDEAV

SEQ ID NO: 9492 - protein, 7 aa, synthetic construct
VPKANEK

SEQ ID NO: 9493 - protein, 6 aa, synthetic construct
FRDEAV

SEQ ID NO: 9494 - protein, 8 aa, synthetic construct
YYSGDPVV

SEQ ID NO: 9495 - protein, 6 aa, synthetic construct
FRDEAV

SEQ ID NO: 9496 - protein, 8 aa, synthetic construct
YYSGDPVV

SEQ ID NO: 9497 - protein, 6 aa, synthetic construct
FRDEAV

SEQ ID NO: 9498 - protein, 7 aa, synthetic construct
VRSNVDK

SEQ ID NO: 9499 - protein, 6 aa, synthetic construct
FRDEAV

SEQ ID NO: 9500 - protein, 6 aa, synthetic construct
IFSDGD

SEQ ID NO: 9501 - protein, 6 aa, synthetic construct
FRDEAV

SEQ ID NO: 9502 - protein, 6 aa, synthetic construct
IFSDGD

SEQ ID NO: 9503 - protein, 6 aa, synthetic construct
FRDEAV

SEQ ID NO: 9504 - protein, 7 aa, synthetic construct
VITAGQK

SEQ ID NO: 9505 - protein, 6 aa, synthetic construct
FRDEAV

SEQ ID NO: 9506 - protein, 7 aa, synthetic construct
IRSNMER

SEQ ID NO: 9507 - protein, 6 aa, synthetic construct
FRDEAV

SEQ ID NO: 9508 - protein, 5 aa, synthetic construct
NPSGT

SEQ ID NO: 9509 - protein, 6 aa, synthetic construct
FRDEAV

SEQ ID NO: 9510 - protein, 7 aa, synthetic construct
SSTDNKR

SEQ ID NO: 9511 - protein, 6 aa, synthetic construct
FRDEAV

SEQ ID NO: 9512 - protein, 7 aa, synthetic construct
VITAGQK

SEQ ID NO: 9513 - protein, 6 aa, synthetic construct
FRDEAV

SEQ ID NO: 9514 - protein, 8 aa, synthetic construct
QDSYKKEN

SEQ ID NO: 9515 - protein, 6 aa, synthetic construct
FRDEAV

SEQ ID NO: 9516 - protein, 8 aa, synthetic construct
QDSYKKEN

SEQ ID NO: 9517 - protein, 6 aa, synthetic construct
FRDEAV

SEQ ID NO: 9518 - protein, 7 aa, synthetic construct
IRSNERE

SEQ ID NO: 9519 - protein, 6 aa, synthetic construct
FRDEAV

SEQ ID NO: 9520 - protein, 8 aa, synthetic construct
YYSGDPVV

SEQ ID NO: 9521 - protein, 6 aa, synthetic construct
FRDEAV

SEQ ID NO: 9522 - protein, 7 aa, synthetic construct
IRSVSDK

SEQ ID NO: 9523 - protein, 6 aa, synthetic construct
FRDEAV

SEQ ID NO: 9524 - protein, 5 aa, synthetic construct
LASGT

SEQ ID NO: 9525 - protein, 6 aa, synthetic construct
FRDEAV

SEQ ID NO: 9526 - protein, 7 aa, synthetic construct
ASRDKEK

SEQ ID NO: 9527 - protein, 6 aa, synthetic construct
FRDEAV

SEQ ID NO: 9528 - protein, 7 aa, synthetic construct
VPKANEK

SEQ ID NO: 9529 - protein, 6 aa, synthetic construct
FRDEAV

SEQ ID NO: 9530 - protein, 8 aa, synthetic construct
YYPGDPVV

SEQ ID NO: 9531 - protein, 6 aa, synthetic construct
FRDEAV

SEQ ID NO: 9532 - protein, 7 aa, synthetic construct
IRSNMER

SEQ ID NO: 9533 - protein, 6 aa, synthetic construct
FRDEAV

SEQ ID NO: 9534 - protein, 8 aa, synthetic construct
YYSGNPVV

SEQ ID NO: 9535 - protein, 6 aa, synthetic construct
SYDVDS

SEQ ID NO: 9536 - protein, 7 aa, synthetic construct
VITAGQK

SEQ ID NO: 9537 - protein, 6 aa, synthetic construct
SYDVDS

SEQ ID NO: 9538 - protein, 6 aa, synthetic construct
IFSNGE

SEQ ID NO: 9539 - protein, 6 aa, synthetic construct
SYDVDS

SEQ ID NO: 9540 - protein, 8 aa, synthetic construct
YYPGDPVV

SEQ ID NO: 9541 - protein, 6 aa, synthetic construct
SYDVDS

SEQ ID NO: 9542 - protein, 7 aa, synthetic construct
IRSNERE

SEQ ID NO: 9543 - protein, 6 aa, synthetic construct
SYDVDS

SEQ ID NO: 9544 - protein, 6 aa, synthetic construct
VVLDGL

SEQ ID NO: 9545 - protein, 6 aa, synthetic construct
SYDVDS

SEQ ID NO: 9546 - protein, 7 aa, synthetic construct
SSTDNKR

SEQ ID NO: 9547 - protein, 6 aa, synthetic construct
SYDVDS

SEQ ID NO: 9548 - protein, 7 aa, synthetic construct
VTTANNK

SEQ ID NO: 9549 - protein, 6 aa, synthetic construct
YSYQKL

SEQ ID NO: 9550 - protein, 5 aa, synthetic construct
NPSGT

SEQ ID NO: 9551 - protein, 6 aa, synthetic construct
YSYQKL

SEQ ID NO: 9552 - protein, 7 aa, synthetic construct
ILSVSNK

SEQ ID NO: 9553 - protein, 6 aa, synthetic construct
YSYQKL

SEQ ID NO: 9554 - protein, 7 aa, synthetic construct
IRSNERE

SEQ ID NO: 9555 - protein, 6 aa, synthetic construct
YSYQKL

SEQ ID NO: 9556 - protein, 8 aa, synthetic construct
YYPGDPVV

SEQ ID NO: 9557 - protein, 6 aa, synthetic construct
YSYQKL

SEQ ID NO: 9558 - protein, 6 aa, synthetic construct
IFSNGE

SEQ ID NO: 9559 - protein, 6 aa, synthetic construct
YSYQKL

SEQ ID NO: 9560 - protein, 6 aa, synthetic construct
IFSDGE

SEQ ID NO: 9561 - protein, 6 aa, synthetic construct
YSYQKL

SEQ ID NO: 9562 - protein, 6 aa, synthetic construct
IFSDGD

SEQ ID NO: 9563 - protein, 6 aa, synthetic construct
YSYQKL

SEQ ID NO: 9564 - protein, 8 aa, synthetic construct
QDSYKKEN

SEQ ID NO: 9565 - protein, 6 aa, synthetic construct
YSYQKL

SEQ ID NO: 9566 - protein, 8 aa, synthetic construct
QDSYKKEN

SEQ ID NO: 9567 - protein, 6 aa, synthetic construct
YSYQKL

SEQ ID NO: 9568 - protein, 7 aa, synthetic construct
VITAGQK

SEQ ID NO: 9569 - protein, 6 aa, synthetic construct
YSYQKL

SEQ ID NO: 9570 - protein, 7 aa, synthetic construct
VTTANNK

SEQ ID NO: 9571 - protein, 6 aa, synthetic construct
YSYQKL

SEQ ID NO: 9572 - protein, 7 aa, synthetic construct
ASRDKEK

SEQ ID NO: 9573 - protein, 6 aa, synthetic construct
YSYQKL

SEQ ID NO: 9574 - protein, 6 aa, synthetic construct
IFSNGD

SEQ ID NO: 9575 - protein, 6 aa, synthetic construct
YSYQKL

SEQ ID NO: 9576 - protein, 7 aa, synthetic construct
IRSNVDR

SEQ ID NO: 9577 - protein, 6 aa, synthetic construct
YSYQKL

SEQ ID NO: 9578 - protein, 8 aa, synthetic construct
QDSYKKEN

SEQ ID NO: 9579 - protein, 6 aa, synthetic construct
YSYQKL

SEQ ID NO: 9580 - protein, 8 aa, synthetic construct
YYSGDPVV

SEQ ID NO: 9581 - protein, 6 aa, synthetic construct
YSYQKL

SEQ ID NO: 9582 - protein, 7 aa, synthetic construct
IRSNERE

SEQ ID NO: 9583 - protein, 6 aa, synthetic construct
YSYQKL

SEQ ID NO: 9584 - protein, 5 aa, synthetic construct
NPSGT

SEQ ID NO: 9585 - protein, 6 aa, synthetic construct
YSYQKL

SEQ ID NO: 9586 - protein, 7 aa, synthetic construct
VFSSTEI

SEQ ID NO: 9587 - protein, 6 aa, synthetic construct
YSYQKL

SEQ ID NO: 9588 - protein, 8 aa, synthetic construct
YYSGDPVV

SEQ ID NO: 9589 - protein, 6 aa, synthetic construct
YSYQKL

SEQ ID NO: 9590 - protein, 6 aa, synthetic construct
IFSNGE

SEQ ID NO: 9591 - protein, 6 aa, synthetic construct
YSYQKL

SEQ ID NO: 9592 - protein, 7 aa, synthetic construct
VRSNVDK

SEQ ID NO: 9593 - protein, 6 aa, synthetic construct
YSYQKL

SEQ ID NO: 9594 - protein, 5 aa, synthetic construct
NPSGT

SEQ ID NO: 9595 - protein, 6 aa, synthetic construct
YSYQKL

SEQ ID NO: 9596 - protein, 6 aa, synthetic construct
IFSNGE

SEQ ID NO: 9597 - protein, 6 aa, synthetic construct
YSYQKL

SEQ ID NO: 9598 - protein, 5 aa, synthetic construct
NPSGT

SEQ ID NO: 9599 - protein, 6 aa, synthetic construct
YSYQKL

SEQ ID NO: 9600 - protein, 7 aa, synthetic construct
IRSNMER

SEQ ID NO: 9601 - protein, 6 aa, synthetic construct
YSYQKL

SEQ ID NO: 9602 - protein, 7 aa, synthetic construct
VPKANEK

SEQ ID NO: 9603 - protein, 6 aa, synthetic construct
YSYQKL

SEQ ID NO: 9604 - protein, 7 aa, synthetic construct
GYKDYVV

SEQ ID NO: 9605 - protein, 6 aa, synthetic construct
YSYQKL

SEQ ID NO: 9606 - protein, 7 aa, synthetic construct
GYKDYVV

SEQ ID NO: 9607 - protein, 6 aa, synthetic construct
YSYQKL

SEQ ID NO: 9608 - protein, 7 aa, synthetic construct
IRSNVDR

SEQ ID NO: 9609 - protein, 6 aa, synthetic construct
YSYQKL

SEQ ID NO: 9610 - protein, 7 aa, synthetic construct
IRSNVDR

SEQ ID NO: 9611 - protein, 6 aa, synthetic construct
YSYQKL

SEQ ID NO: 9612 - protein, 7 aa, synthetic construct
VRSNVDK

SEQ ID NO: 9613 - protein, 6 aa, synthetic construct
YSYQKL

SEQ ID NO: 9614 - protein, 7 aa, synthetic construct
IRSNVDR

SEQ ID NO: 9615 - protein, 6 aa, synthetic construct
YNNKQL

SEQ ID NO: 9616 - protein, 6 aa, synthetic construct
IFSNGE

SEQ ID NO: 9617 - protein, 6 aa, synthetic construct
YNNKQL

SEQ ID NO: 9618 - protein, 7 aa, synthetic construct
VITAGQK

SEQ ID NO: 9619 - protein, 6 aa, synthetic construct
YNNKQL

SEQ ID NO: 9620 - protein, 7 aa, synthetic construct
VTTANNK

SEQ ID NO: 9621 - protein, 6 aa, synthetic construct
YNNKQL

SEQ ID NO: 9622 - protein, 7 aa, synthetic construct
SSTDNKR

SEQ ID NO: 9623 - protein, 6 aa, synthetic construct
YNNKQL

SEQ ID NO: 9624 - protein, 8 aa, synthetic construct
QDSYKKEN

SEQ ID NO: 9625 - protein, 6 aa, synthetic construct
YNNKQL

SEQ ID NO: 9626 - protein, 5 aa, synthetic construct
NPSGT

SEQ ID NO: 9627 - protein, 6 aa, synthetic construct
YNNKQL

SEQ ID NO: 9628 - protein, 6 aa, synthetic construct
IFSDGD

SEQ ID NO: 9629 - protein, 6 aa, synthetic construct
YNNKQL

SEQ ID NO: 9630 - protein, 5 aa, synthetic construct
NPSGT

SEQ ID NO: 9631 - protein, 6 aa, synthetic construct
YNNKQL

SEQ ID NO: 9632 - protein, 5 aa, synthetic construct
NPSGT

SEQ ID NO: 9633 - protein, 6 aa, synthetic construct
YNNKQL

SEQ ID NO: 9634 - protein, 7 aa, synthetic construct
IRSNERE

SEQ ID NO: 9635 - protein, 6 aa, synthetic construct
YNNKQL

SEQ ID NO: 9636 - protein, 8 aa, synthetic construct
YYPGDPVV

SEQ ID NO: 9637 - protein, 6 aa, synthetic construct
YNNKQL

SEQ ID NO: 9638 - protein, 8 aa, synthetic construct
QDSYKKEN

SEQ ID NO: 9639 - protein, 6 aa, synthetic construct
YNNKQL

SEQ ID NO: 9640 - protein, 8 aa, synthetic construct
QDSYKKEN

SEQ ID NO: 9641 - protein, 6 aa, synthetic construct
YNNKQL

SEQ ID NO: 9642 - protein, 7 aa, synthetic construct
IRSVSDK

SEQ ID NO: 9643 - protein, 6 aa, synthetic construct
YNNKQL

SEQ ID NO: 9644 - protein, 5 aa, synthetic construct
NPSGT

SEQ ID NO: 9645 - protein, 6 aa, synthetic construct
YNNKQL

SEQ ID NO: 9646 - protein, 6 aa, synthetic construct
IFSDGE

SEQ ID NO: 9647 - protein, 6 aa, synthetic construct
YNNKQL

SEQ ID NO: 9648 - protein, 7 aa, synthetic construct
IRSNERE

SEQ ID NO: 9649 - protein, 6 aa, synthetic construct
YNNKQL

SEQ ID NO: 9650 - protein, 7 aa, synthetic construct
ASRDKEK

SEQ ID NO: 9651 - protein, 6 aa, synthetic construct
YNNKQL

SEQ ID NO: 9652 - protein, 7 aa, synthetic construct
VPKANEK

SEQ ID NO: 9653 - protein, 6 aa, synthetic construct
YNNKQL

SEQ ID NO: 9654 - protein, 7 aa, synthetic construct
VITAGQK

SEQ ID NO: 9655 - protein, 6 aa, synthetic construct
YNNKQL

SEQ ID NO: 9656 - protein, 8 aa, synthetic construct
QDSYKKEN

SEQ ID NO: 9657 - protein, 6 aa, synthetic construct
YNNKQL

SEQ ID NO: 9658 - protein, 7 aa, synthetic construct
SFTDNKR

SEQ ID NO: 9659 - protein, 6 aa, synthetic construct
YNNKQL

SEQ ID NO: 9660 - protein, 7 aa, synthetic construct
SFTDNKR

SEQ ID NO: 9661 - protein, 6 aa, synthetic construct
YNNKQL

SEQ ID NO: 9662 - protein, 6 aa, synthetic construct
IFSDGD

SEQ ID NO: 9663 - protein, 6 aa, synthetic construct
YNNKQL

SEQ ID NO: 9664 - protein, 7 aa, synthetic construct
VFSSTEI

SEQ ID NO: 9665 - protein, 6 aa, synthetic construct
YNNKQL

SEQ ID NO: 9666 - protein, 7 aa, synthetic construct
IRSNMER

SEQ ID NO: 9667 - protein, 6 aa, synthetic construct
SYGAGS

SEQ ID NO: 9668 - protein, 6 aa, synthetic construct
VVLDGL

SEQ ID NO: 9669 - protein, 6 aa, synthetic construct
SYGAGS

SEQ ID NO: 9670 - protein, 8 aa, synthetic construct
QDSYKKEN

SEQ ID NO: 9671 - protein, 6 aa, synthetic construct
SYGAGS

SEQ ID NO: 9672 - protein, 7 aa, synthetic construct
SSTDNKR

SEQ ID NO: 9673 - protein, 6 aa, synthetic construct
SYGAGS

SEQ ID NO: 9674 - protein, 8 aa, synthetic construct
YYSGDPVV

SEQ ID NO: 9675 - protein, 6 aa, synthetic construct
SYGAGS

SEQ ID NO: 9676 - protein, 7 aa, synthetic construct
ASRDKEK

SEQ ID NO: 9677 - protein, 6 aa, synthetic construct
SYGAGS

SEQ ID NO: 9678 - protein, 5 aa, synthetic construct
NPSGT

SEQ ID NO: 9679 - protein, 6 aa, synthetic construct
SYGAGS

SEQ ID NO: 9680 - protein, 8 aa, synthetic construct
YYSGDPVV

SEQ ID NO: 9681 - protein, 6 aa, synthetic construct
SYGAGS

SEQ ID NO: 9682 - protein, 7 aa, synthetic construct
IRSNMER

SEQ ID NO: 9683 - protein, 6 aa, synthetic construct
SYGAGS

SEQ ID NO: 9684 - protein, 8 aa, synthetic construct
QDSYKKEN

SEQ ID NO: 9685 - protein, 6 aa, synthetic construct
SYGAGS

SEQ ID NO: 9686 - protein, 7 aa, synthetic construct
ILSVSDK

SEQ ID NO: 9687 - protein, 6 aa, synthetic construct
SYGAGS

SEQ ID NO: 9688 - protein, 7 aa, synthetic construct
VITAGQK

SEQ ID NO: 9689 - protein, 6 aa, synthetic construct
SYGAGS

SEQ ID NO: 9690 - protein, 7 aa, synthetic construct
VFSSTEI

SEQ ID NO: 9691 - protein, 6 aa, synthetic construct
SYGAGS

SEQ ID NO: 9692 - protein, 7 aa, synthetic construct
ISSVSDK

SEQ ID NO: 9693 - protein, 6 aa, synthetic construct
SYGAGS

SEQ ID NO: 9694 - protein, 8 aa, synthetic construct
QDSYKKEN

SEQ ID NO: 9695 - protein, 6 aa, synthetic construct
SYGAGS

SEQ ID NO: 9696 - protein, 5 aa, synthetic construct
NPSGT

SEQ ID NO: 9697 - protein, 6 aa, synthetic construct
SYGAGS

SEQ ID NO: 9698 - protein, 7 aa, synthetic construct
VTTANNK

SEQ ID NO: 9699 - protein, 6 aa, synthetic construct
SYGAGS

SEQ ID NO: 9700 - protein, 7 aa, synthetic construct
SSTDNKR

SEQ ID NO: 9701 - protein, 6 aa, synthetic construct
SYGAGS

SEQ ID NO: 9702 - protein, 8 aa, synthetic construct
YYSGDPVV

SEQ ID NO: 9703 - protein, 6 aa, synthetic construct
SYGAGS

SEQ ID NO: 9704 - protein, 7 aa, synthetic construct
SSTDNKR

SEQ ID NO: 9705 - protein, 6 aa, synthetic construct
SYGAGS

SEQ ID NO: 9706 - protein, 6 aa, synthetic construct
IFSDGE

SEQ ID NO: 9707 - protein, 6 aa, synthetic construct
SYGAGS

SEQ ID NO: 9708 - protein, 6 aa, synthetic construct
IFSNGE

SEQ ID NO: 9709 - protein, 6 aa, synthetic construct
SYGAGS

SEQ ID NO: 9710 - protein, 7 aa, synthetic construct
SSTDNKR

SEQ ID NO: 9711 - protein, 6 aa, synthetic construct
SYGAGS

SEQ ID NO: 9712 - protein, 7 aa, synthetic construct
VLSNVDR

SEQ ID NO: 9713 - protein, 6 aa, synthetic construct
SYGAGS

SEQ ID NO: 9714 - protein, 8 aa, synthetic construct
QDSYKKEN

SEQ ID NO: 9715 - protein, 6 aa, synthetic construct
SYGAGS

SEQ ID NO: 9716 - protein, 8 aa, synthetic construct
QDSYKKEN

SEQ ID NO: 9717 - protein, 6 aa, synthetic construct
SYGAGS

SEQ ID NO: 9718 - protein, 5 aa, synthetic construct
NPSGT

SEQ ID NO: 9719 - protein, 6 aa, synthetic construct
SYGAGS

SEQ ID NO: 9720 - protein, 8 aa, synthetic construct
QDSYKKEN

SEQ ID NO: 9721 - protein, 6 aa, synthetic construct
SYGAGS

SEQ ID NO: 9722 - protein, 7 aa, synthetic construct
VITAGQK

SEQ ID NO: 9723 - protein, 6 aa, synthetic construct
SYGAGS

SEQ ID NO: 9724 - protein, 6 aa, synthetic construct
IFSDGE

SEQ ID NO: 9725 - protein, 6 aa, synthetic construct
SYGAGS

SEQ ID NO: 9726 - protein, 6 aa, synthetic construct
IFSDGE

SEQ ID NO: 9727 - protein, 6 aa, synthetic construct
SYGAGS

SEQ ID NO: 9728 - protein, 8 aa, synthetic construct
QDSYKKEN

SEQ ID NO: 9729 - protein, 6 aa, synthetic construct
SYGAGS

SEQ ID NO: 9730 - protein, 8 aa, synthetic construct
QDSYKKEN

SEQ ID NO: 9731 - protein, 6 aa, synthetic construct
SYGAGS

SEQ ID NO: 9732 - protein, 7 aa, synthetic construct
SSTDNKR

SEQ ID NO: 9733 - protein, 6 aa, synthetic construct
SYGAGS

SEQ ID NO: 9734 - protein, 8 aa, synthetic construct
QDSYKKEN

SEQ ID NO: 9735 - protein, 6 aa, synthetic construct
SYGAGS

SEQ ID NO: 9736 - protein, 8 aa, synthetic construct
QDSYKKEN

SEQ ID NO: 9737 - protein, 6 aa, synthetic construct
SYGAGS

SEQ ID NO: 9738 - protein, 6 aa, synthetic construct
VVLDGL

SEQ ID NO: 9739 - protein, 6 aa, synthetic construct
SYGAGS

SEQ ID NO: 9740 - protein, 7 aa, synthetic construct
VFSSTEI

SEQ ID NO: 9741 - protein, 6 aa, synthetic construct
SYGAGS

SEQ ID NO: 9742 - protein, 7 aa, synthetic construct
VFSSTEI

SEQ ID NO: 9743 - protein, 6 aa, synthetic construct
SYGAGS

SEQ ID NO: 9744 - protein, 7 aa, synthetic construct
SSTDNKR

SEQ ID NO: 9745 - protein, 6 aa, synthetic construct
SYGAGS

SEQ ID NO: 9746 - protein, 7 aa, synthetic construct
VFSSTEI

SEQ ID NO: 9747 - protein, 6 aa, synthetic construct
SYGAGS

SEQ ID NO: 9748 - protein, 7 aa, synthetic construct
SSTDNKR

SEQ ID NO: 9749 - protein, 6 aa, synthetic construct
SYGAGS

SEQ ID NO: 9750 - protein, 7 aa, synthetic construct
VFSSTEI

SEQ ID NO: 9751 - protein, 6 aa, synthetic construct
SYGAGS

SEQ ID NO: 9752 - protein, 6 aa, synthetic construct
IFSNGE

SEQ ID NO: 9753 - protein, 6 aa, synthetic construct
SYGAGS

SEQ ID NO: 9754 - protein, 7 aa, synthetic construct
VPKANEK

SEQ ID NO: 9755 - protein, 6 aa, synthetic construct
SYGAGS

SEQ ID NO: 9756 - protein, 6 aa, synthetic construct
VVLDGL

SEQ ID NO: 9757 - protein, 6 aa, synthetic construct
SYGAGS

SEQ ID NO: 9758 - protein, 7 aa, synthetic construct
ISSVSDK

SEQ ID NO: 9759 - protein, 6 aa, synthetic construct
SYGAGS

SEQ ID NO: 9760 - protein, 8 aa, synthetic construct
YYSGNPVV

SEQ ID NO: 9761 - protein, 6 aa, synthetic construct
SYGAGS

SEQ ID NO: 9762 - protein, 6 aa, synthetic construct
VVLDGL

SEQ ID NO: 9763 - protein, 6 aa, synthetic construct
SYGAGS

SEQ ID NO: 9764 - protein, 7 aa, synthetic construct
IRSNVDR

SEQ ID NO: 9765 - protein, 6 aa, synthetic construct
SYGAGS

SEQ ID NO: 9766 - protein, 8 aa, synthetic construct
YYSGNPVV

SEQ ID NO: 9767 - protein, 6 aa, synthetic construct
SYGAGS

SEQ ID NO: 9768 - protein, 7 aa, synthetic construct
ASRDKEK

SEQ ID NO: 9769 - protein, 6 aa, synthetic construct
SYGAGS

SEQ ID NO: 9770 - protein, 7 aa, synthetic construct
VLSNVDR

SEQ ID NO: 9771 - protein, 6 aa, synthetic construct
SYGAGS

SEQ ID NO: 9772 - protein, 6 aa, synthetic construct
IFSNGE

SEQ ID NO: 9773 - protein, 6 aa, synthetic construct
SYGAGS

SEQ ID NO: 9774 - protein, 7 aa, synthetic construct
GYKDYVV

SEQ ID NO: 9775 - protein, 6 aa, synthetic construct
SYGAGS

SEQ ID NO: 9776 - protein, 7 aa, synthetic construct
VFSSTEI

SEQ ID NO: 9777 - protein, 6 aa, synthetic construct
SYGAGS

SEQ ID NO: 9778 - protein, 7 aa, synthetic construct
ILSVSDK

SEQ ID NO: 9779 - protein, 6 aa, synthetic construct
SYGAGS

SEQ ID NO: 9780 - protein, 7 aa, synthetic construct
VTTANNK

SEQ ID NO: 9781 - protein, 6 aa, synthetic construct
SYGAGS

SEQ ID NO: 9782 - protein, 7 aa, synthetic construct
VTTANNK

SEQ ID NO: 9783 - protein, 6 aa, synthetic construct
SYGAGS

SEQ ID NO: 9784 - protein, 7 aa, synthetic construct
IRSNERE

SEQ ID NO: 9785 - protein, 6 aa, synthetic construct
SYGAGS

SEQ ID NO: 9786 - protein, 7 aa, synthetic construct
VPKANEK

SEQ ID NO: 9787 - protein, 6 aa, synthetic construct
SYGAGS

SEQ ID NO: 9788 - protein, 7 aa, synthetic construct
IRSNMER

SEQ ID NO: 9789 - protein, 6 aa, synthetic construct
SYGAGS

SEQ ID NO: 9790 - protein, 6 aa, synthetic construct
IFSNGE

SEQ ID NO: 9791 - protein, 6 aa, synthetic construct
SYGAGS

SEQ ID NO: 9792 - protein, 7 aa, synthetic construct
IRSNMER

SEQ ID NO: 9793 - protein, 6 aa, synthetic construct
SYGAGS

SEQ ID NO: 9794 - protein, 7 aa, synthetic construct
SSTDNKR

SEQ ID NO: 9795 - protein, 6 aa, synthetic construct
SYGAGS

SEQ ID NO: 9796 - protein, 7 aa, synthetic construct
SFTDNKR

SEQ ID NO: 9797 - protein, 6 aa, synthetic construct
SYGAGS

SEQ ID NO: 9798 - protein, 7 aa, synthetic construct
IRSVSDK

SEQ ID NO: 9799 - protein, 6 aa, synthetic construct
SYGAGS

SEQ ID NO: 9800 - protein, 7 aa, synthetic construct
VFSSTEI

SEQ ID NO: 9801 - protein, 6 aa, synthetic construct
SYGAGS

SEQ ID NO: 9802 - protein, 8 aa, synthetic construct
QDSYKKEN

SEQ ID NO: 9803 - protein, 6 aa, synthetic construct
SYGAGS

SEQ ID NO: 9804 - protein, 5 aa, synthetic construct
NPSGT

SEQ ID NO: 9805 - protein, 6 aa, synthetic construct
SYGAGS

SEQ ID NO: 9806 - protein, 7 aa, synthetic construct
SSTDNKR

SEQ ID NO: 9807 - protein, 6 aa, synthetic construct
SYGAGS

SEQ ID NO: 9808 - protein, 7 aa, synthetic construct
SSTDNKR

SEQ ID NO: 9809 - protein, 6 aa, synthetic construct
SYGAGS

SEQ ID NO: 9810 - protein, 8 aa, synthetic construct
QDSYKKEN

SEQ ID NO: 9811 - protein, 6 aa, synthetic construct
SYGAGS

SEQ ID NO: 9812 - protein, 7 aa, synthetic construct
SFTDNKR

SEQ ID NO: 9813 - protein, 6 aa, synthetic construct
SYGAGS

SEQ ID NO: 9814 - protein, 7 aa, synthetic construct
VFSNVDR

SEQ ID NO: 9815 - protein, 6 aa, synthetic construct
SYGAGS

SEQ ID NO: 9816 - protein, 7 aa, synthetic construct
ASRDKEK

SEQ ID NO: 9817 - protein, 6 aa, synthetic construct
SYGAGS

SEQ ID NO: 9818 - protein, 7 aa, synthetic construct
IRSNVDR

SEQ ID NO: 9819 - protein, 6 aa, synthetic construct
SYGAGS

SEQ ID NO: 9820 - protein, 7 aa, synthetic construct
IRSNERE

SEQ ID NO: 9821 - protein, 6 aa, synthetic construct
SYGAGS

SEQ ID NO: 9822 - protein, 8 aa, synthetic construct
QDSYKKEN

SEQ ID NO: 9823 - protein, 6 aa, synthetic construct
SYGAGS

SEQ ID NO: 9824 - protein, 6 aa, synthetic construct
VVLDGL

SEQ ID NO: 9825 - protein, 6 aa, synthetic construct
SYGAGS

SEQ ID NO: 9826 - protein, 8 aa, synthetic construct
QDSYKKEN

SEQ ID NO: 9827 - protein, 6 aa, synthetic construct
SYGAGS

SEQ ID NO: 9828 - protein, 8 aa, synthetic construct
YYSGDPVV

SEQ ID NO: 9829 - protein, 6 aa, synthetic construct
SYGAGS

SEQ ID NO: 9830 - protein, 6 aa, synthetic construct
IFSNGE

SEQ ID NO: 9831 - protein, 6 aa, synthetic construct
SYGAGS

SEQ ID NO: 9832 - protein, 6 aa, synthetic construct
SPSWAE

SEQ ID NO: 9833 - protein, 6 aa, synthetic construct
SYGAGS

SEQ ID NO: 9834 - protein, 5 aa, synthetic construct
NPSGT

SEQ ID NO: 9835 - protein, 6 aa, synthetic construct
SYGAGS

SEQ ID NO: 9836 - protein, 7 aa, synthetic construct
VTTANNK

SEQ ID NO: 9837 - protein, 6 aa, synthetic construct
SYGAGS

SEQ ID NO: 9838 - protein, 7 aa, synthetic construct
ASRDKEK

SEQ ID NO: 9839 - protein, 6 aa, synthetic construct
SYGAGS

SEQ ID NO: 9840 - protein, 7 aa, synthetic construct
SFTDNKR

SEQ ID NO: 9841 - protein, 6 aa, synthetic construct
SYGAGS

SEQ ID NO: 9842 - protein, 5 aa, synthetic construct
LVPGT

SEQ ID NO: 9843 - protein, 6 aa, synthetic construct
SYGAGS

SEQ ID NO: 9844 - protein, 5 aa, synthetic construct
LVPGT

SEQ ID NO: 9845 - protein, 6 aa, synthetic construct
SYGAGS

SEQ ID NO: 9846 - protein, 7 aa, synthetic construct
VITAGQK

SEQ ID NO: 9847 - protein, 6 aa, synthetic construct
SYGAGS

SEQ ID NO: 9848 - protein, 7 aa, synthetic construct
VITAGQK

SEQ ID NO: 9849 - protein, 6 aa, synthetic construct
SYGAGS

SEQ ID NO: 9850 - protein, 7 aa, synthetic construct
VFSSTEI

SEQ ID NO: 9851 - protein, 6 aa, synthetic construct
SYGAGS

SEQ ID NO: 9852 - protein, 7 aa, synthetic construct
IRSNMER

SEQ ID NO: 9853 - protein, 6 aa, synthetic construct
SYGAGS

SEQ ID NO: 9854 - protein, 7 aa, synthetic construct
IRSNMER

SEQ ID NO: 9855 - protein, 6 aa, synthetic construct
SYGAGS

SEQ ID NO: 9856 - protein, 6 aa, synthetic construct
IFSNGE

SEQ ID NO: 9857 - protein, 6 aa, synthetic construct
SYGAGS

SEQ ID NO: 9858 - protein, 8 aa, synthetic construct
QDSYKKEN

SEQ ID NO: 9859 - protein, 6 aa, synthetic construct
SYGAGS

SEQ ID NO: 9860 - protein, 6 aa, synthetic construct
IFSNGE

SEQ ID NO: 9861 - protein, 6 aa, synthetic construct
SYGAGS

SEQ ID NO: 9862 - protein, 5 aa, synthetic construct
NPSGT

SEQ ID NO: 9863 - protein, 6 aa, synthetic construct
SYGAGN

SEQ ID NO: 9864 - protein, 5 aa, synthetic construct
GLQQN

SEQ ID NO: 9865 - protein, 6 aa, synthetic construct
SYGAGN

SEQ ID NO: 9866 - protein, 6 aa, synthetic construct
VVLDGL

SEQ ID NO: 9867 - protein, 6 aa, synthetic construct
SYGAGN

SEQ ID NO: 9868 - protein, 7 aa, synthetic construct
VRSNVDK

SEQ ID NO: 9869 - protein, 6 aa, synthetic construct
SYGAGN

SEQ ID NO: 9870 - protein, 6 aa, synthetic construct
IFSNGE

SEQ ID NO: 9871 - protein, 6 aa, synthetic construct
SYGAGN

SEQ ID NO: 9872 - protein, 7 aa, synthetic construct
SFTDNKR

SEQ ID NO: 9873 - protein, 6 aa, synthetic construct
SYGAGN

SEQ ID NO: 9874 - protein, 7 aa, synthetic construct
ASRDKEK

SEQ ID NO: 9875 - protein, 6 aa, synthetic construct
SYGAGN

SEQ ID NO: 9876 - protein, 7 aa, synthetic construct
VFSSTEI

SEQ ID NO: 9877 - protein, 6 aa, synthetic construct
SYGAGN

SEQ ID NO: 9878 - protein, 6 aa, synthetic construct
IFSNGE

SEQ ID NO: 9879 - protein, 6 aa, synthetic construct
SYGAGN

SEQ ID NO: 9880 - protein, 5 aa, synthetic construct
LVPGT

SEQ ID NO: 9881 - protein, 6 aa, synthetic construct
SYGAGN

SEQ ID NO: 9882 - protein, 8 aa, synthetic construct
QDSYKKEN

SEQ ID NO: 9883 - protein, 6 aa, synthetic construct
SYGAGN

SEQ ID NO: 9884 - protein, 8 aa, synthetic construct
QDSYKKEN

SEQ ID NO: 9885 - protein, 6 aa, synthetic construct
SYGAGN

SEQ ID NO: 9886 - protein, 7 aa, synthetic construct
VPKANEK

SEQ ID NO: 9887 - protein, 6 aa, synthetic construct
SYGAGN

SEQ ID NO: 9888 - protein, 7 aa, synthetic construct
IRSNVDR

SEQ ID NO: 9889 - protein, 6 aa, synthetic construct
SYGAGN

SEQ ID NO: 9890 - protein, 6 aa, synthetic construct
IFSNGE

SEQ ID NO: 9891 - protein, 6 aa, synthetic construct
SYGAGN

SEQ ID NO: 9892 - protein, 5 aa, synthetic construct
NPSGT

SEQ ID NO: 9893 - protein, 6 aa, synthetic construct
SYGAGN

SEQ ID NO: 9894 - protein, 7 aa, synthetic construct
VFSSTEI

SEQ ID NO: 9895 - protein, 6 aa, synthetic construct
SYGAGN

SEQ ID NO: 9896 - protein, 7 aa, synthetic construct
IRSNMER

SEQ ID NO: 9897 - protein, 6 aa, synthetic construct
SYGAGN

SEQ ID NO: 9898 - protein, 8 aa, synthetic construct
YYSGDPVV

SEQ ID NO: 9899 - protein, 6 aa, synthetic construct
SYGAGN

SEQ ID NO: 9900 - protein, 5 aa, synthetic construct
GLQQN

SEQ ID NO: 9901 - protein, 6 aa, synthetic construct
SYGAGN

SEQ ID NO: 9902 - protein, 7 aa, synthetic construct
ASRDKEK

SEQ ID NO: 9903 - protein, 6 aa, synthetic construct
SYGAGN

SEQ ID NO: 9904 - protein, 7 aa, synthetic construct
ASRDKEK

SEQ ID NO: 9905 - protein, 6 aa, synthetic construct
SYGAGN

SEQ ID NO: 9906 - protein, 7 aa, synthetic construct
VFSSTEI

SEQ ID NO: 9907 - protein, 6 aa, synthetic construct
SYGAGN

SEQ ID NO: 9908 - protein, 7 aa, synthetic construct
PKANEKG

SEQ ID NO: 9909 - protein, 6 aa, synthetic construct
SYGAGN

SEQ ID NO: 9910 - protein, 8 aa, synthetic construct
YYSGDPVV

SEQ ID NO: 9911 - protein, 6 aa, synthetic construct
SYGAGN

SEQ ID NO: 9912 - protein, 7 aa, synthetic construct
ILSVSNK

SEQ ID NO: 9913 - protein, 6 aa, synthetic construct
SYGAGN

SEQ ID NO: 9914 - protein, 7 aa, synthetic construct
ASRDKEK

SEQ ID NO: 9915 - protein, 6 aa, synthetic construct
SYGAGN

SEQ ID NO: 9916 - protein, 8 aa, synthetic construct
QDSYKKEN

SEQ ID NO: 9917 - protein, 6 aa, synthetic construct
SYGAGN

SEQ ID NO: 9918 - protein, 8 aa, synthetic construct
YYSGNPVV

SEQ ID NO: 9919 - protein, 6 aa, synthetic construct
SYGAGN

SEQ ID NO: 9920 - protein, 6 aa, synthetic construct
IFSNGE

SEQ ID NO: 9921 - protein, 6 aa, synthetic construct
SYGAGN

SEQ ID NO: 9922 - protein, 7 aa, synthetic construct
VITAGQK

SEQ ID NO: 9923 - protein, 6 aa, synthetic construct
SYGAGN

SEQ ID NO: 9924 - protein, 8 aa, synthetic construct
QDSYKKEN

SEQ ID NO: 9925 - protein, 6 aa, synthetic construct
SYGAGN

SEQ ID NO: 9926 - protein, 7 aa, synthetic construct
VFSSTEI

SEQ ID NO: 9927 - protein, 6 aa, synthetic construct
SYGAGN

SEQ ID NO: 9928 - protein, 7 aa, synthetic construct
IRSNMER

SEQ ID NO: 9929 - protein, 6 aa, synthetic construct
SYGAGN

SEQ ID NO: 9930 - protein, 7 aa, synthetic construct
SSTDNKR

SEQ ID NO: 9931 - protein, 6 aa, synthetic construct
SYGAGN

SEQ ID NO: 9932 - protein, 7 aa, synthetic construct
VITAGQK

SEQ ID NO: 9933 - protein, 6 aa, synthetic construct
SYGAGN

SEQ ID NO: 9934 - protein, 5 aa, synthetic construct
GLQQN

SEQ ID NO: 9935 - protein, 6 aa, synthetic construct
SYGAGN

SEQ ID NO: 9936 - protein, 7 aa, synthetic construct
SSTDNKR

SEQ ID NO: 9937 - protein, 6 aa, synthetic construct
SYGAGN

SEQ ID NO: 9938 - protein, 7 aa, synthetic construct
SSTDNKR

SEQ ID NO: 9939 - protein, 6 aa, synthetic construct
SYGAGN

SEQ ID NO: 9940 - protein, 7 aa, synthetic construct
ASRDKEK

SEQ ID NO: 9941 - protein, 6 aa, synthetic construct
SYGAGN

SEQ ID NO: 9942 - protein, 7 aa, synthetic construct
VFSNVDR

SEQ ID NO: 9943 - protein, 6 aa, synthetic construct
SYGAGN

SEQ ID NO: 9944 - protein, 7 aa, synthetic construct
VITAGQK

SEQ ID NO: 9945 - protein, 6 aa, synthetic construct
SYGAGN

SEQ ID NO: 9946 - protein, 8 aa, synthetic construct
YYSGDPVV

SEQ ID NO: 9947 - protein, 6 aa, synthetic construct
SYGAGN

SEQ ID NO: 9948 - protein, 7 aa, synthetic construct
IRPVSNK

SEQ ID NO: 9949 - protein, 6 aa, synthetic construct
SYGAGN

SEQ ID NO: 9950 - protein, 7 aa, synthetic construct
VTTANNK

SEQ ID NO: 9951 - protein, 6 aa, synthetic construct
SYGAGN

SEQ ID NO: 9952 - protein, 8 aa, synthetic construct
QPSFDTQN

SEQ ID NO: 9953 - protein, 6 aa, synthetic construct
SYGAGN

SEQ ID NO: 9954 - protein, 7 aa, synthetic construct
VFSNVDR

SEQ ID NO: 9955 - protein, 6 aa, synthetic construct
SYVADS

SEQ ID NO: 9956 - protein, 8 aa, synthetic construct
QDSYKKEN

SEQ ID NO: 9957 - protein, 6 aa, synthetic construct
SYVADS

SEQ ID NO: 9958 - protein, 5 aa, synthetic construct
NPSGT

SEQ ID NO: 9959 - protein, 6 aa, synthetic construct
SYVADS

SEQ ID NO: 9960 - protein, 5 aa, synthetic construct
NPSGT

SEQ ID NO: 9961 - protein, 6 aa, synthetic construct
SYVADS

SEQ ID NO: 9962 - protein, 7 aa, synthetic construct
VITAGQK

SEQ ID NO: 9963 - protein, 6 aa, synthetic construct
SYVADS

SEQ ID NO: 9964 - protein, 7 aa, synthetic construct
VFSNVDR

SEQ ID NO: 9965 - protein, 6 aa, synthetic construct
SYVADS

SEQ ID NO: 9966 - protein, 6 aa, synthetic construct
IFSDGE

SEQ ID NO: 9967 - protein, 6 aa, synthetic construct
SYVADS

SEQ ID NO: 9968 - protein, 8 aa, synthetic construct
YYSGDPVV

SEQ ID NO: 9969 - protein, 6 aa, synthetic construct
SYVADS

SEQ ID NO: 9970 - protein, 8 aa, synthetic construct
QDSYKKEN

SEQ ID NO: 9971 - protein, 6 aa, synthetic construct
SYVADS

SEQ ID NO: 9972 - protein, 8 aa, synthetic construct
QDSYKKEN

SEQ ID NO: 9973 - protein, 6 aa, synthetic construct
SYVADS

SEQ ID NO: 9974 - protein, 8 aa, synthetic construct
QDSYKKEN

SEQ ID NO: 9975 - protein, 6 aa, synthetic construct
SYVADS

SEQ ID NO: 9976 - protein, 8 aa, synthetic construct
YITGDTVV

SEQ ID NO: 9977 - protein, 6 aa, synthetic construct
SYVADS

SEQ ID NO: 9978 - protein, 5 aa, synthetic construct
GLQQN

SEQ ID NO: 9979 - protein, 6 aa, synthetic construct
SYVADS

SEQ ID NO: 9980 - protein, 7 aa, synthetic construct
ASRDKEK

SEQ ID NO: 9981 - protein, 6 aa, synthetic construct
SYVADS

SEQ ID NO: 9982 - protein, 7 aa, synthetic construct
IRSNERE

SEQ ID NO: 9983 - protein, 6 aa, synthetic construct
SYVADS

SEQ ID NO: 9984 - protein, 7 aa, synthetic construct
VITAGQK

SEQ ID NO: 9985 - protein, 6 aa, synthetic construct
SYVADS

SEQ ID NO: 9986 - protein, 8 aa, synthetic construct
YYSGDPVV

SEQ ID NO: 9987 - protein, 6 aa, synthetic construct
SYVADS

SEQ ID NO: 9988 - protein, 8 aa, synthetic construct
YITGDTVV

SEQ ID NO: 9989 - protein, 6 aa, synthetic construct
SYVADS

SEQ ID NO: 9990 - protein, 8 aa, synthetic construct
QDSYKKEN

SEQ ID NO: 9991 - protein, 6 aa, synthetic construct
SYVADS

SEQ ID NO: 9992 - protein, 6 aa, synthetic construct
SPSWAE

SEQ ID NO: 9993 - protein, 6 aa, synthetic construct
SYVADS

SEQ ID NO: 9994 - protein, 7 aa, synthetic construct
SSTDNKR

SEQ ID NO: 9995 - protein, 6 aa, synthetic construct
SYVADS

SEQ ID NO: 9996 - protein, 7 aa, synthetic construct
VRSNVDK

SEQ ID NO: 9997 - protein, 6 aa, synthetic construct
SYVADS

SEQ ID NO: 9998 - protein, 7 aa, synthetic construct
VLSNVDR

SEQ ID NO: 9999 - protein, 6 aa, synthetic construct
SYVADS

SEQ ID NO: 10000 - protein, 7 aa, synthetic construct
VLSNVDR

SEQ ID NO: 10001 - protein, 6 aa, synthetic construct
SYVADS

SEQ ID NO: 10002 - protein, 8 aa, synthetic construct
QDSYKKEN

SEQ ID NO: 10003 - protein, 6 aa, synthetic construct
SYVADS

SEQ ID NO: 10004 - protein, 6 aa, synthetic construct
IFSNGE

SEQ ID NO: 10005 - protein, 6 aa, synthetic construct
SYVADS

SEQ ID NO: 10006 - protein, 7 aa, synthetic construct
VFSSTEI

SEQ ID NO: 10007 - protein, 6 aa, synthetic construct
SYVADS

SEQ ID NO: 10008 - protein, 8 aa, synthetic construct
QDSYKKEN

SEQ ID NO: 10009 - protein, 6 aa, synthetic construct
SYVADS

SEQ ID NO: 10010 - protein, 8 aa, synthetic construct
QDSYKKEN

SEQ ID NO: 10011 - protein, 6 aa, synthetic construct
SYVADS

SEQ ID NO: 10012 - protein, 7 aa, synthetic construct
IRSVSDK

SEQ ID NO: 10013 - protein, 6 aa, synthetic construct
SYVADS

SEQ ID NO: 10014 - protein, 8 aa, synthetic construct
YYSGDPVV

SEQ ID NO: 10015 - protein, 6 aa, synthetic construct
SYVADS

SEQ ID NO: 10016 - protein, 7 aa, synthetic construct
IRSVSDK

SEQ ID NO: 10017 - protein, 6 aa, synthetic construct
SYVADS

SEQ ID NO: 10018 - protein, 6 aa, synthetic construct
VVLDGL

SEQ ID NO: 10019 - protein, 6 aa, synthetic construct
SYVADS

SEQ ID NO: 10020 - protein, 6 aa, synthetic construct
IFSNGE

SEQ ID NO: 10021 - protein, 6 aa, synthetic construct
SYVADS

SEQ ID NO: 10022 - protein, 7 aa, synthetic construct
IRSNERE

SEQ ID NO: 10023 - protein, 6 aa, synthetic construct
SYVADS

SEQ ID NO: 10024 - protein, 7 aa, synthetic construct
IRSNERE

SEQ ID NO: 10025 - protein, 6 aa, synthetic construct
SYVADS

SEQ ID NO: 10026 - protein, 7 aa, synthetic construct
ASRDKEK

SEQ ID NO: 10027 - protein, 6 aa, synthetic construct
SYVADS

SEQ ID NO: 10028 - protein, 7 aa, synthetic construct
VITAGQK

SEQ ID NO: 10029 - protein, 6 aa, synthetic construct
SYVADS

SEQ ID NO: 10030 - protein, 5 aa, synthetic construct
NPSGT

SEQ ID NO: 10031 - protein, 6 aa, synthetic construct
SYVADS

SEQ ID NO: 10032 - protein, 7 aa, synthetic construct
IRPVSNK

SEQ ID NO: 10033 - protein, 6 aa, synthetic construct
SYVADS

SEQ ID NO: 10034 - protein, 7 aa, synthetic construct
SSTDNKR

SEQ ID NO: 10035 - protein, 6 aa, synthetic construct
SYVADS

SEQ ID NO: 10036 - protein, 5 aa, synthetic construct
NPSGT

SEQ ID NO: 10037 - protein, 6 aa, synthetic construct
SYVADS

SEQ ID NO: 10038 - protein, 6 aa, synthetic construct
IFSNGN

SEQ ID NO: 10039 - protein, 6 aa, synthetic construct
SYVADS

SEQ ID NO: 10040 - protein, 8 aa, synthetic construct
QDSYKKEN

SEQ ID NO: 10041 - protein, 6 aa, synthetic construct
SYVADS

SEQ ID NO: 10042 - protein, 8 aa, synthetic construct
QDSYKKEN

SEQ ID NO: 10043 - protein, 6 aa, synthetic construct
SYVADS

SEQ ID NO: 10044 - protein, 7 aa, synthetic construct
VTTANNK

SEQ ID NO: 10045 - protein, 6 aa, synthetic construct
SYVADS

SEQ ID NO: 10046 - protein, 5 aa, synthetic construct
NPSGT

SEQ ID NO: 10047 - protein, 6 aa, synthetic construct
SYVADS

SEQ ID NO: 10048 - protein, 7 aa, synthetic construct
ASRDKEK

SEQ ID NO: 10049 - protein, 6 aa, synthetic construct
SYVADS

SEQ ID NO: 10050 - protein, 6 aa, synthetic construct
IFSDGD

SEQ ID NO: 10051 - protein, 6 aa, synthetic construct
SYVADS

SEQ ID NO: 10052 - protein, 7 aa, synthetic construct
SSTDNKR

SEQ ID NO: 10053 - protein, 6 aa, synthetic construct
SYVADS

SEQ ID NO: 10054 - protein, 5 aa, synthetic construct
LASGT

SEQ ID NO: 10055 - protein, 6 aa, synthetic construct
SYVADS

SEQ ID NO: 10056 - protein, 7 aa, synthetic construct
IRSNMER

SEQ ID NO: 10057 - protein, 6 aa, synthetic construct
SYVADS

SEQ ID NO: 10058 - protein, 6 aa, synthetic construct
IFSNGE

SEQ ID NO: 10059 - protein, 6 aa, synthetic construct
SYVADS

SEQ ID NO: 10060 - protein, 7 aa, synthetic construct
VITAGQK

SEQ ID NO: 10061 - protein, 6 aa, synthetic construct
SYVADS

SEQ ID NO: 10062 - protein, 7 aa, synthetic construct
SSTDNKR

SEQ ID NO: 10063 - protein, 6 aa, synthetic construct
SYVADS

SEQ ID NO: 10064 - protein, 7 aa, synthetic construct
ILSVSNK

SEQ ID NO: 10065 - protein, 6 aa, synthetic construct
SYVADS

SEQ ID NO: 10066 - protein, 7 aa, synthetic construct
VLSNVDR

SEQ ID NO: 10067 - protein, 6 aa, synthetic construct
SYVADS

SEQ ID NO: 10068 - protein, 7 aa, synthetic construct
VITAGQK

SEQ ID NO: 10069 - protein, 6 aa, synthetic construct
SYVADS

SEQ ID NO: 10070 - protein, 7 aa, synthetic construct
IRSNVDR

SEQ ID NO: 10071 - protein, 6 aa, synthetic construct
SYVADS

SEQ ID NO: 10072 - protein, 7 aa, synthetic construct
ISSVSDK

SEQ ID NO: 10073 - protein, 6 aa, synthetic construct
SYVADS

SEQ ID NO: 10074 - protein, 7 aa, synthetic construct
VPKANEK

SEQ ID NO: 10075 - protein, 6 aa, synthetic construct
SYVADS

SEQ ID NO: 10076 - protein, 8 aa, synthetic construct
YYSGDPVV

SEQ ID NO: 10077 - protein, 6 aa, synthetic construct
SYVADS

SEQ ID NO: 10078 - protein, 8 aa, synthetic construct
QDSYKKEN

SEQ ID NO: 10079 - protein, 6 aa, synthetic construct
SYVADS

SEQ ID NO: 10080 - protein, 8 aa, synthetic construct
YYSGNPVV

SEQ ID NO: 10081 - protein, 6 aa, synthetic construct
SYVADS

SEQ ID NO: 10082 - protein, 7 aa, synthetic construct
VITAGQK

SEQ ID NO: 10083 - protein, 6 aa, synthetic construct
SYVADS

SEQ ID NO: 10084 - protein, 8 aa, synthetic construct
QMSSSTAK

SEQ ID NO: 10085 - protein, 6 aa, synthetic construct
SYVADS

SEQ ID NO: 10086 - protein, 7 aa, synthetic construct
VITAGQK

SEQ ID NO: 10087 - protein, 6 aa, synthetic construct
SYVADS

SEQ ID NO: 10088 - protein, 7 aa, synthetic construct
ILSVSDK

SEQ ID NO: 10089 - protein, 6 aa, synthetic construct
SYVADS

SEQ ID NO: 10090 - protein, 8 aa, synthetic construct
QDSYKKEN

SEQ ID NO: 10091 - protein, 6 aa, synthetic construct
SYVADS

SEQ ID NO: 10092 - protein, 7 aa, synthetic construct
IRSNMER

SEQ ID NO: 10093 - protein, 6 aa, synthetic construct
SYVADS

SEQ ID NO: 10094 - protein, 5 aa, synthetic construct
LVPGT

SEQ ID NO: 10095 - protein, 6 aa, synthetic construct
SYVADS

SEQ ID NO: 10096 - protein, 5 aa, synthetic construct
NPSGT

SEQ ID NO: 10097 - protein, 6 aa, synthetic construct
SYVADS

SEQ ID NO: 10098 - protein, 7 aa, synthetic construct
VFSNVDR

SEQ ID NO: 10099 - protein, 6 aa, synthetic construct
SYVADS

SEQ ID NO: 10100 - protein, 5 aa, synthetic construct
LAQGT

SEQ ID NO: 10101 - protein, 6 aa, synthetic construct
SYVADS

SEQ ID NO: 10102 - protein, 7 aa, synthetic construct
SSTDNKR

SEQ ID NO: 10103 - protein, 6 aa, synthetic construct
SYVADS

SEQ ID NO: 10104 - protein, 7 aa, synthetic construct
IRSNMER

SEQ ID NO: 10105 - protein, 6 aa, synthetic construct
SYVADS

SEQ ID NO: 10106 - protein, 8 aa, synthetic construct
QDSYKKEN

SEQ ID NO: 10107 - protein, 6 aa, synthetic construct
SYVADS

SEQ ID NO: 10108 - protein, 8 aa, synthetic construct
YYPGDPVV

SEQ ID NO: 10109 - protein, 6 aa, synthetic construct
SYVADS

SEQ ID NO: 10110 - protein, 8 aa, synthetic construct
QDSYKKEN

SEQ ID NO: 10111 - protein, 6 aa, synthetic construct
SYVADS

SEQ ID NO: 10112 - protein, 8 aa, synthetic construct
QDSYKKEN

SEQ ID NO: 10113 - protein, 6 aa, synthetic construct
SYVADS

SEQ ID NO: 10114 - protein, 8 aa, synthetic construct
QDSYKKEN

SEQ ID NO: 10115 - protein, 6 aa, synthetic construct
YYDKIL

SEQ ID NO: 10116 - protein, 7 aa, synthetic construct
VFSSTEI

SEQ ID NO: 10117 - protein, 6 aa, synthetic construct
YYDKIL

SEQ ID NO: 10118 - protein, 8 aa, synthetic construct
QDSYKKEN

SEQ ID NO: 10119 - protein, 6 aa, synthetic construct
YYDKIL

SEQ ID NO: 10120 - protein, 7 aa, synthetic construct
VITAGQK

SEQ ID NO: 10121 - protein, 6 aa, synthetic construct
YYDKIL

SEQ ID NO: 10122 - protein, 7 aa, synthetic construct
VITAGQK

SEQ ID NO: 10123 - protein, 6 aa, synthetic construct
YYDKIL

SEQ ID NO: 10124 - protein, 6 aa, synthetic construct
IFSDGD

SEQ ID NO: 10125 - protein, 6 aa, synthetic construct
YYDKIL

SEQ ID NO: 10126 - protein, 6 aa, synthetic construct
IFSDGD

SEQ ID NO: 10127 - protein, 6 aa, synthetic construct
YYDKIL

SEQ ID NO: 10128 - protein, 7 aa, synthetic construct
IRSNVDR

SEQ ID NO: 10129 - protein, 6 aa, synthetic construct
YYDKIL

SEQ ID NO: 10130 - protein, 8 aa, synthetic construct
YITGDTVV

SEQ ID NO: 10131 - protein, 6 aa, synthetic construct
YYDKIL

SEQ ID NO: 10132 - protein, 5 aa, synthetic construct
NPSGT

SEQ ID NO: 10133 - protein, 6 aa, synthetic construct
YYDKIL

SEQ ID NO: 10134 - protein, 8 aa, synthetic construct
QDSYKKEN

SEQ ID NO: 10135 - protein, 6 aa, synthetic construct
YYDKIL

SEQ ID NO: 10136 - protein, 7 aa, synthetic construct
VITAGQK

SEQ ID NO: 10137 - protein, 6 aa, synthetic construct
YYDKIL

SEQ ID NO: 10138 - protein, 6 aa, synthetic construct
VVLDGL

SEQ ID NO: 10139 - protein, 6 aa, synthetic construct
YYDKIL

SEQ ID NO: 10140 - protein, 7 aa, synthetic construct
VFSSTEI

SEQ ID NO: 10141 - protein, 6 aa, synthetic construct
YYDKIL

SEQ ID NO: 10142 - protein, 8 aa, synthetic construct
QDSYKKEN

SEQ ID NO: 10143 - protein, 6 aa, synthetic construct
FRSKSL

SEQ ID NO: 10144 - protein, 8 aa, synthetic construct
QDSYKKEN

SEQ ID NO: 10145 - protein, 6 aa, synthetic construct
HYEKVE

SEQ ID NO: 10146 - protein, 8 aa, synthetic construct
YYPGDPVV

SEQ ID NO: 10147 - protein, 5 aa, synthetic construct
SITVG

SEQ ID NO: 10148 - protein, 6 aa, synthetic construct
IFSNGE

SEQ ID NO: 10149 - protein, 5 aa, synthetic construct
SITVG

SEQ ID NO: 10150 - protein, 7 aa, synthetic construct
IRPVSNK

SEQ ID NO: 10151 - protein, 5 aa, synthetic construct
SITVG

SEQ ID NO: 10152 - protein, 7 aa, synthetic construct
VLSNVDR

SEQ ID NO: 10153 - protein, 5 aa, synthetic construct
SITVG

SEQ ID NO: 10154 - protein, 7 aa, synthetic construct
IRSNMER

SEQ ID NO: 10155 - protein, 5 aa, synthetic construct
SITVG

SEQ ID NO: 10156 - protein, 7 aa, synthetic construct
IRPVSNK

SEQ ID NO: 10157 - protein, 5 aa, synthetic construct
SITVG

SEQ ID NO: 10158 - protein, 7 aa, synthetic construct
VITAGQK

SEQ ID NO: 10159 - protein, 5 aa, synthetic construct
SITVG

SEQ ID NO: 10160 - protein, 8 aa, synthetic construct
QDSYKKEN

SEQ ID NO: 10161 - protein, 5 aa, synthetic construct
SITVG

SEQ ID NO: 10162 - protein, 7 aa, synthetic construct
VFSSTEI

SEQ ID NO: 10163 - protein, 5 aa, synthetic construct
SITVG

SEQ ID NO: 10164 - protein, 7 aa, synthetic construct
IRSNVDR

SEQ ID NO: 10165 - protein, 5 aa, synthetic construct
SITVG

SEQ ID NO: 10166 - protein, 7 aa, synthetic construct
IRSNERE

SEQ ID NO: 10167 - protein, 6 aa, synthetic construct
FYNGKV

SEQ ID NO: 10168 - protein, 8 aa, synthetic construct
YYPGDPVV

SEQ ID NO: 10169 - protein, 6 aa, synthetic construct
FYNGKV

SEQ ID NO: 10170 - protein, 5 aa, synthetic construct
LASGT

SEQ ID NO: 10171 - protein, 6 aa, synthetic construct
FYNGKV

SEQ ID NO: 10172 - protein, 8 aa, synthetic construct
QDSYKKEN

SEQ ID NO: 10173 - protein, 6 aa, synthetic construct
FYNGKV

SEQ ID NO: 10174 - protein, 7 aa, synthetic construct
ISSVSDK

SEQ ID NO: 10175 - protein, 6 aa, synthetic construct
FYNGKV

SEQ ID NO: 10176 - protein, 5 aa, synthetic construct
LASGT

SEQ ID NO: 10177 - protein, 6 aa, synthetic construct
FYNGKV

SEQ ID NO: 10178 - protein, 7 aa, synthetic construct
IRSNERE

SEQ ID NO: 10179 - protein, 6 aa, synthetic construct
FYNGKV

SEQ ID NO: 10180 - protein, 5 aa, synthetic construct
NPSGT

SEQ ID NO: 10181 - protein, 6 aa, synthetic construct
FYNGKV

SEQ ID NO: 10182 - protein, 8 aa, synthetic construct
QDSYKKEN

SEQ ID NO: 10183 - protein, 6 aa, synthetic construct
FYNGKV

SEQ ID NO: 10184 - protein, 7 aa, synthetic construct
VRSNVDK

SEQ ID NO: 10185 - protein, 6 aa, synthetic construct
FYNGKV

SEQ ID NO: 10186 - protein, 8 aa, synthetic construct
YYSGDPVV

SEQ ID NO: 10187 - protein, 6 aa, synthetic construct
FYNGKV

SEQ ID NO: 10188 - protein, 8 aa, synthetic construct
YYSGDPVV

SEQ ID NO: 10189 - protein, 6 aa, synthetic construct
FYNGKV

SEQ ID NO: 10190 - protein, 6 aa, synthetic construct
IFSNGE

SEQ ID NO: 10191 - protein, 7 aa, synthetic construct
STVNSAI

SEQ ID NO: 10192 - protein, 5 aa, synthetic construct
NPSGT

SEQ ID NO: 10193 - protein, 7 aa, synthetic construct
STVNSAI

SEQ ID NO: 10194 - protein, 7 aa, synthetic construct
VLSNVDR

SEQ ID NO: 10195 - protein, 7 aa, synthetic construct
STVNSAI

SEQ ID NO: 10196 - protein, 5 aa, synthetic construct
LASGT

SEQ ID NO: 10197 - protein, 7 aa, synthetic construct
STVNSAI

SEQ ID NO: 10198 - protein, 7 aa, synthetic construct
SSTDNKR

SEQ ID NO: 10199 - protein, 7 aa, synthetic construct
STVNSAI

SEQ ID NO: 10200 - protein, 6 aa, synthetic construct
IFSNGE

SEQ ID NO: 10201 - protein, 7 aa, synthetic construct
STVNSAI

SEQ ID NO: 10202 - protein, 8 aa, synthetic construct
YYPGDPVV

SEQ ID NO: 10203 - protein, 7 aa, synthetic construct
STVNSAI

SEQ ID NO: 10204 - protein, 6 aa, synthetic construct
IFSDGD

SEQ ID NO: 10205 - protein, 7 aa, synthetic construct
STVNSAI

SEQ ID NO: 10206 - protein, 7 aa, synthetic construct
ASRDKEK

SEQ ID NO: 10207 - protein, 7 aa, synthetic construct
STVNSAI

SEQ ID NO: 10208 - protein, 5 aa, synthetic construct
NPSGT

SEQ ID NO: 10209 - protein, 7 aa, synthetic construct
STVNSAI

SEQ ID NO: 10210 - protein, 6 aa, synthetic construct
IFSDGD

SEQ ID NO: 10211 - protein, 7 aa, synthetic construct
STVNSAI

SEQ ID NO: 10212 - protein, 7 aa, synthetic construct
IRSNERE

SEQ ID NO: 10213 - protein, 7 aa, synthetic construct
STVNSAI

SEQ ID NO: 10214 - protein, 8 aa, synthetic construct
QDSYKKEN

SEQ ID NO: 10215 - protein, 7 aa, synthetic construct
STVNSAI

SEQ ID NO: 10216 - protein, 5 aa, synthetic construct
LVPGT

SEQ ID NO: 10217 - protein, 7 aa, synthetic construct
STVNSAI

SEQ ID NO: 10218 - protein, 7 aa, synthetic construct
IRSNVDR

SEQ ID NO: 10219 - protein, 6 aa, synthetic construct
SITEND

SEQ ID NO: 10220 - protein, 5 aa, synthetic construct
NPSGT

SEQ ID NO: 10221 - protein, 6 aa, synthetic construct
SITEND

SEQ ID NO: 10222 - protein, 6 aa, synthetic construct
IFSDGE

SEQ ID NO: 10223 - protein, 6 aa, synthetic construct
SITEND

SEQ ID NO: 10224 - protein, 7 aa, synthetic construct
VTTANNK

SEQ ID NO: 10225 - protein, 6 aa, synthetic construct
SITEND

SEQ ID NO: 10226 - protein, 7 aa, synthetic construct
GYKDYVV

SEQ ID NO: 10227 - protein, 6 aa, synthetic construct
SITEND

SEQ ID NO: 10228 - protein, 8 aa, synthetic construct
QDSYKKEN

SEQ ID NO: 10229 - protein, 6 aa, synthetic construct
SITEND

SEQ ID NO: 10230 - protein, 7 aa, synthetic construct
ASRDKEK

SEQ ID NO: 10231 - protein, 6 aa, synthetic construct
SITEND

SEQ ID NO: 10232 - protein, 8 aa, synthetic construct
YYSGDPVV

SEQ ID NO: 10233 - protein, 6 aa, synthetic construct
SITEND

SEQ ID NO: 10234 - protein, 8 aa, synthetic construct
QDSYKKEN

SEQ ID NO: 10235 - protein, 6 aa, synthetic construct
SITEND

SEQ ID NO: 10236 - protein, 7 aa, synthetic construct
SSTDNKR

SEQ ID NO: 10237 - protein, 6 aa, synthetic construct
SITEND

SEQ ID NO: 10238 - protein, 7 aa, synthetic construct
VITAGQK

SEQ ID NO: 10239 - protein, 6 aa, synthetic construct
SITEND

SEQ ID NO: 10240 - protein, 7 aa, synthetic construct
VFSSTEI

SEQ ID NO: 10241 - protein, 6 aa, synthetic construct
SITEND

SEQ ID NO: 10242 - protein, 7 aa, synthetic construct
SSTDNKR

SEQ ID NO: 10243 - protein, 6 aa, synthetic construct
SITEND

SEQ ID NO: 10244 - protein, 7 aa, synthetic construct
VLSNVDR

SEQ ID NO: 10245 - protein, 6 aa, synthetic construct
SITEND

SEQ ID NO: 10246 - protein, 7 aa, synthetic construct
VPKANEK

SEQ ID NO: 10247 - protein, 6 aa, synthetic construct
SITEND

SEQ ID NO: 10248 - protein, 5 aa, synthetic construct
NPSGT

SEQ ID NO: 10249 - protein, 6 aa, synthetic construct
SITEND

SEQ ID NO: 10250 - protein, 7 aa, synthetic construct
ILSVSNK

SEQ ID NO: 10251 - protein, 6 aa, synthetic construct
SITEND

SEQ ID NO: 10252 - protein, 7 aa, synthetic construct
VFSSTEI

SEQ ID NO: 10253 - protein, 6 aa, synthetic construct
SITEND

SEQ ID NO: 10254 - protein, 6 aa, synthetic construct
IFSDGE

SEQ ID NO: 10255 - protein, 6 aa, synthetic construct
SITEND

SEQ ID NO: 10256 - protein, 6 aa, synthetic construct
IFSNGE

SEQ ID NO: 10257 - protein, 6 aa, synthetic construct
SITEND

SEQ ID NO: 10258 - protein, 7 aa, synthetic construct
IRSNERE

SEQ ID NO: 10259 - protein, 6 aa, synthetic construct
SITEND

SEQ ID NO: 10260 - protein, 5 aa, synthetic construct
GLQQN

SEQ ID NO: 10261 - protein, 6 aa, synthetic construct
SITEND

SEQ ID NO: 10262 - protein, 8 aa, synthetic construct
YYSGDPVV

SEQ ID NO: 10263 - protein, 6 aa, synthetic construct
SITEND

SEQ ID NO: 10264 - protein, 7 aa, synthetic construct
SFTDNKR

SEQ ID NO: 10265 - protein, 6 aa, synthetic construct
SITEND

SEQ ID NO: 10266 - protein, 7 aa, synthetic construct
IRSNERE

SEQ ID NO: 10267 - protein, 6 aa, synthetic construct
SITEND

SEQ ID NO: 10268 - protein, 5 aa, synthetic construct
NPSGT

SEQ ID NO: 10269 - protein, 6 aa, synthetic construct
SITEND

SEQ ID NO: 10270 - protein, 7 aa, synthetic construct
SFTDNKR

SEQ ID NO: 10271 - protein, 6 aa, synthetic construct
SITEND

SEQ ID NO: 10272 - protein, 7 aa, synthetic construct
SSTDNKR

SEQ ID NO: 10273 - protein, 6 aa, synthetic construct
SITEND

SEQ ID NO: 10274 - protein, 8 aa, synthetic construct
YYSGDPVV

SEQ ID NO: 10275 - protein, 6 aa, synthetic construct
SITEND

SEQ ID NO: 10276 - protein, 5 aa, synthetic construct
NPSGT

SEQ ID NO: 10277 - protein, 6 aa, synthetic construct
SITEND

SEQ ID NO: 10278 - protein, 6 aa, synthetic construct
IFSDGD

SEQ ID NO: 10279 - protein, 6 aa, synthetic construct
SITEND

SEQ ID NO: 10280 - protein, 5 aa, synthetic construct
NPSGT

SEQ ID NO: 10281 - protein, 6 aa, synthetic construct
SITEND

SEQ ID NO: 10282 - protein, 8 aa, synthetic construct
QDSYKKEN

SEQ ID NO: 10283 - protein, 6 aa, synthetic construct
SITEND

SEQ ID NO: 10284 - protein, 5 aa, synthetic construct
LVPGT

SEQ ID NO: 10285 - protein, 6 aa, synthetic construct
SITEND

SEQ ID NO: 10286 - protein, 7 aa, synthetic construct
VFSNVDR

SEQ ID NO: 10287 - protein, 6 aa, synthetic construct
SITEND

SEQ ID NO: 10288 - protein, 6 aa, synthetic construct
IFSNGE

SEQ ID NO: 10289 - protein, 6 aa, synthetic construct
SITEND

SEQ ID NO: 10290 - protein, 7 aa, synthetic construct
VITAGQK

SEQ ID NO: 10291 - protein, 6 aa, synthetic construct
SITEND

SEQ ID NO: 10292 - protein, 8 aa, synthetic construct
QDSYKKEN

SEQ ID NO: 10293 - protein, 6 aa, synthetic construct
SITEND

SEQ ID NO: 10294 - protein, 8 aa, synthetic construct
QDSYKKEN

SEQ ID NO: 10295 - protein, 6 aa, synthetic construct
SITEND

SEQ ID NO: 10296 - protein, 7 aa, synthetic construct
ILSVSNK

SEQ ID NO: 10297 - protein, 6 aa, synthetic construct
SITEND

SEQ ID NO: 10298 - protein, 8 aa, synthetic construct
YYSGDPVV

SEQ ID NO: 10299 - protein, 6 aa, synthetic construct
SITEND

SEQ ID NO: 10300 - protein, 7 aa, synthetic construct
VTTANNK

SEQ ID NO: 10301 - protein, 6 aa, synthetic construct
SITEND

SEQ ID NO: 10302 - protein, 7 aa, synthetic construct
IRSNVDR

SEQ ID NO: 10303 - protein, 6 aa, synthetic construct
SITEND

SEQ ID NO: 10304 - protein, 7 aa, synthetic construct
VLSNVDR

SEQ ID NO: 10305 - protein, 6 aa, synthetic construct
SITEND

SEQ ID NO: 10306 - protein, 7 aa, synthetic construct
SFTDNKR

SEQ ID NO: 10307 - protein, 6 aa, synthetic construct
SITEND

SEQ ID NO: 10308 - protein, 7 aa, synthetic construct
VTTANNK

SEQ ID NO: 10309 - protein, 6 aa, synthetic construct
SITEND

SEQ ID NO: 10310 - protein, 6 aa, synthetic construct
IFSDGD

SEQ ID NO: 10311 - protein, 6 aa, synthetic construct
SITEND

SEQ ID NO: 10312 - protein, 7 aa, synthetic construct
VITAGQK

SEQ ID NO: 10313 - protein, 6 aa, synthetic construct
SITEND

SEQ ID NO: 10314 - protein, 7 aa, synthetic construct
ISSVSDK

SEQ ID NO: 10315 - protein, 6 aa, synthetic construct
SITEND

SEQ ID NO: 10316 - protein, 7 aa, synthetic construct
VITAGQK

SEQ ID NO: 10317 - protein, 6 aa, synthetic construct
SITEND

SEQ ID NO: 10318 - protein, 7 aa, synthetic construct
IRSNMER

SEQ ID NO: 10319 - protein, 6 aa, synthetic construct
SITEND

SEQ ID NO: 10320 - protein, 7 aa, synthetic construct
GYKDYVV

SEQ ID NO: 10321 - protein, 6 aa, synthetic construct
SITEND

SEQ ID NO: 10322 - protein, 7 aa, synthetic construct
VFSSTEI

SEQ ID NO: 10323 - protein, 6 aa, synthetic construct
SITEND

SEQ ID NO: 10324 - protein, 7 aa, synthetic construct
SSTDNKR

SEQ ID NO: 10325 - protein, 6 aa, synthetic construct
LRSPGD

SEQ ID NO: 10326 - protein, 8 aa, synthetic construct
YYSGDPVV

SEQ ID NO: 10327 - protein, 6 aa, synthetic construct
LRSPGD

SEQ ID NO: 10328 - protein, 8 aa, synthetic construct
YYSGDPVV

SEQ ID NO: 10329 - protein, 6 aa, synthetic construct
LRSPGD

SEQ ID NO: 10330 - protein, 7 aa, synthetic construct
VITAGQK

SEQ ID NO: 10331 - protein, 6 aa, synthetic construct
LRSPGD

SEQ ID NO: 10332 - protein, 7 aa, synthetic construct
VFSNVDR

SEQ ID NO: 10333 - protein, 6 aa, synthetic construct
LRSPGD

SEQ ID NO: 10334 - protein, 7 aa, synthetic construct
SSTDNKR

SEQ ID NO: 10335 - protein, 6 aa, synthetic construct
LRSPGD

SEQ ID NO: 10336 - protein, 8 aa, synthetic construct
YYPGDPVV

SEQ ID NO: 10337 - protein, 6 aa, synthetic construct
LRSPGD

SEQ ID NO: 10338 - protein, 6 aa, synthetic construct
VVLDGL

SEQ ID NO: 10339 - protein, 6 aa, synthetic construct
LRSPGD

SEQ ID NO: 10340 - protein, 7 aa, synthetic construct
LVDQKDK

SEQ ID NO: 10341 - protein, 6 aa, synthetic construct
LRSPGD

SEQ ID NO: 10342 - protein, 7 aa, synthetic construct
SFTDNKR

SEQ ID NO: 10343 - protein, 6 aa, synthetic construct
LRSPGD

SEQ ID NO: 10344 - protein, 8 aa, synthetic construct
YYSGDPVV

SEQ ID NO: 10345 - protein, 6 aa, synthetic construct
LRSPGD

SEQ ID NO: 10346 - protein, 7 aa, synthetic construct
ISSVSDK

SEQ ID NO: 10347 - protein, 6 aa, synthetic construct
LRSPGD

SEQ ID NO: 10348 - protein, 7 aa, synthetic construct
IRSNMER

SEQ ID NO: 10349 - protein, 6 aa, synthetic construct
LRSPGD

SEQ ID NO: 10350 - protein, 8 aa, synthetic construct
YYSGDPVV

SEQ ID NO: 10351 - protein, 6 aa, synthetic construct
LRSPGD

SEQ ID NO: 10352 - protein, 5 aa, synthetic construct
NPSGT

SEQ ID NO: 10353 - protein, 6 aa, synthetic construct
LRSPGD

SEQ ID NO: 10354 - protein, 7 aa, synthetic construct
VFSSTEI

SEQ ID NO: 10355 - protein, 6 aa, synthetic construct
LRSPGD

SEQ ID NO: 10356 - protein, 8 aa, synthetic construct
QDSYKKEN

SEQ ID NO: 10357 - protein, 6 aa, synthetic construct
LRSPGD

SEQ ID NO: 10358 - protein, 7 aa, synthetic construct
IRSNERE

SEQ ID NO: 10359 - protein, 6 aa, synthetic construct
LRSPGD

SEQ ID NO: 10360 - protein, 8 aa, synthetic construct
YYSGDPVV

SEQ ID NO: 10361 - protein, 6 aa, synthetic construct
LRSPGD

SEQ ID NO: 10362 - protein, 6 aa, synthetic construct
IFSDGD

SEQ ID NO: 10363 - protein, 6 aa, synthetic construct
LRSPGD

SEQ ID NO: 10364 - protein, 5 aa, synthetic construct
NPSGT

SEQ ID NO: 10365 - protein, 6 aa, synthetic construct
LRSPGD

SEQ ID NO: 10366 - protein, 7 aa, synthetic construct
VITAGQK

SEQ ID NO: 10367 - protein, 6 aa, synthetic construct
LRSPGD

SEQ ID NO: 10368 - protein, 7 aa, synthetic construct
VITAGQK

SEQ ID NO: 10369 - protein, 6 aa, synthetic construct
LRSPGD

SEQ ID NO: 10370 - protein, 7 aa, synthetic construct
LVDQKDK

SEQ ID NO: 10371 - protein, 6 aa, synthetic construct
LRSPGD

SEQ ID NO: 10372 - protein, 7 aa, synthetic construct
VFSSTEI

SEQ ID NO: 10373 - protein, 6 aa, synthetic construct
LRSPGD

SEQ ID NO: 10374 - protein, 6 aa, synthetic construct
IFSDGD

SEQ ID NO: 10375 - protein, 6 aa, synthetic construct
LRSPGD

SEQ ID NO: 10376 - protein, 7 aa, synthetic construct
IRSNMER

SEQ ID NO: 10377 - protein, 6 aa, synthetic construct
LRSPGD

SEQ ID NO: 10378 - protein, 7 aa, synthetic construct
ASRDKEK

SEQ ID NO: 10379 - protein, 6 aa, synthetic construct
LRSPGD

SEQ ID NO: 10380 - protein, 7 aa, synthetic construct
ASRDKEK

SEQ ID NO: 10381 - protein, 6 aa, synthetic construct
LRSPGD

SEQ ID NO: 10382 - protein, 6 aa, synthetic construct
IFSNGE

SEQ ID NO: 10383 - protein, 6 aa, synthetic construct
LRSPGD

SEQ ID NO: 10384 - protein, 8 aa, synthetic construct
YYSGDPVV

SEQ ID NO: 10385 - protein, 6 aa, synthetic construct
LRSPGD

SEQ ID NO: 10386 - protein, 7 aa, synthetic construct
IRPVSNK

SEQ ID NO: 10387 - protein, 6 aa, synthetic construct
LRSPGD

SEQ ID NO: 10388 - protein, 7 aa, synthetic construct
SSTDNKR

SEQ ID NO: 10389 - DNA, 18 bp, synthetic construct
  source 1..18: mol_type = other DNA
tttcgggatgaggctgtt

SEQ ID NO: 10390 - DNA, 18 bp, synthetic construct
  source 1..18: mol_type = other DNA
atcttctctgatggtgac

SEQ ID NO: 10391 - DNA, 18 bp, synthetic construct
  source 1..18: mol_type = other DNA
tcatatggtgctggcagc

SEQ ID NO: 10392 - DNA, 18 bp, synthetic construct
  source 1..18: mol_type = other DNA
gttgttttggatggtttg

SEQ ID NO: 10393 - DNA, 18 bp, synthetic construct
  source 1..18: mol_type = other DNA
tcatatggtgctggcagc

SEQ ID NO: 10394 - DNA, 24 bp, synthetic construct
  source 1..24: mol_type = other DNA
caggactcttacaaaaaggaaaat

SEQ ID NO: 10395 - DNA, 18 bp, synthetic construct
  source 1..18: mol_type = other DNA
tcatatgtcgctgacagc

SEQ ID NO: 10396 - DNA, 21 bp, synthetic construct
  source 1..21: mol_type = other DNA
agctccacagacaacaagagg

SEQ ID NO: 10397 - DNA, 18 bp, synthetic construct
  source 1..18: mol_type = other DNA
tcatatggtgctggcagc

SEQ ID NO: 10398 - DNA, 15 bp, synthetic construct
  source 1..15: mol_type = other DNA
aatccttctgggaca

SEQ ID NO: 10399 - DNA, 18 bp, synthetic construct
  source 1..18: mol_type = other DNA
tttcgggatgaggctgtt

SEQ ID NO: 10400 - DNA, 24 bp, synthetic construct
  source 1..24: mol_type = other DNA
tactattcaggagacccagtggtt

SEQ ID NO: 10401 - DNA, 18 bp, synthetic construct
  source 1..18: mol_type = other DNA
tcatatggtgctggcagc

SEQ ID NO: 10402 - DNA, 21 bp, synthetic construct
  source 1..21: mol_type = other DNA
gcctcaagggacaaagagaaa

SEQ ID NO: 10403 - DNA, 18 bp, synthetic construct
  source 1..18: mol_type = other DNA
tacagctatcaaaaactt

SEQ ID NO: 10404 - DNA, 18 bp, synthetic construct
  source 1..18: mol_type = other DNA
gttgttttggatggtttg

SEQ ID NO: 10405 - DNA, 18 bp, synthetic construct
  source 1..18: mol_type = other DNA
tttcgaaatcaagctcct

SEQ ID NO: 10406 - DNA, 15 bp, synthetic construct
  source 1..15: mol_type = other DNA
ttggcttcaggaaca

SEQ ID NO: 10407 - DNA, 18 bp, synthetic construct
  source 1..18: mol_type = other DNA
tcatatggtgctggcagc

SEQ ID NO: 10408 - DNA, 24 bp, synthetic construct
  source 1..24: mol_type = other DNA
tactattccggagacccagtggtt

SEQ ID NO: 10409 - DNA, 18 bp, synthetic construct
  source 1..18: mol_type = other DNA
tcatatgtcgctgacagc

SEQ ID NO: 10410 - DNA, 21 bp, synthetic construct
  source 1..21: mol_type = other DNA
gtcctttcaaatgtggacaga

SEQ ID NO: 10411 - DNA, 18 bp, synthetic construct
  source 1..18: mol_type = other DNA
ctgcggagtcctggggac

SEQ ID NO: 10412 - DNA, 21 bp, synthetic construct
  source 1..21: mol_type = other DNA
atacgttcaaatgagagagag

SEQ ID NO: 10413 - DNA, 18 bp, synthetic construct
  source 1..18: mol_type = other DNA
ctgcggagtcctggggac

SEQ ID NO: 10414 - DNA, 24 bp, synthetic construct
  source 1..24: mol_type = other DNA
tactattccggagacccagtggtt

SEQ ID NO: 10415 - DNA, 18 bp, synthetic construct
  source 1..18: mol_type = other DNA
tcaataactgaaaacgat

SEQ ID NO: 10416 - DNA, 18 bp, synthetic construct
  source 1..18: mol_type = other DNA
atcttctccaatggtgaa

SEQ ID NO: 10417 - DNA, 18 bp, synthetic construct
  source 1..18: mol_type = other DNA
tacagctatcaaaaactt

SEQ ID NO: 10418 - DNA, 24 bp, synthetic construct
  source 1..24: mol_type = other DNA
tactattccggagacccagtggtt

SEQ ID NO: 10419 - DNA, 18 bp, synthetic construct
  source 1..18: mol_type = other DNA
tcatatggtgctggcagc

SEQ ID NO: 10420 - DNA, 15 bp, synthetic construct
  source 1..15: mol_type = other DNA
aatccttctgggaca

SEQ ID NO: 10421 - DNA, 18 bp, synthetic construct
  source 1..18: mol_type = other DNA
tcatatggtgctggcagc

SEQ ID NO: 10422 - DNA, 24 bp, synthetic construct
  source 1..24: mol_type = other DNA
tactattccggagacccagtggtt

SEQ ID NO: 10423 - DNA, 15 bp, synthetic construct
  source 1..15: mol_type = other DNA
tctattactgttggc

SEQ ID NO: 10424 - DNA, 24 bp, synthetic construct
  source 1..24: mol_type = other DNA
tactattccggagacccagtggtt

SEQ ID NO: 10425 - DNA, 18 bp, synthetic construct
  source 1..18: mol_type = other DNA
tcatatggtgctggcaac

SEQ ID NO: 10426 - DNA, 21 bp, synthetic construct
  source 1..21: mol_type = other DNA
gtcccaaaggccaacgagaag

SEQ ID NO: 10427 - DNA, 15 bp, synthetic construct
  source 1..15: mol_type = other DNA
tctattactgttggc

SEQ ID NO: 10428 - DNA, 21 bp, synthetic construct
  source 1..21: mol_type = other DNA
gtcctttcaaatgtggacaga

SEQ ID NO: 10429 - DNA, 18 bp, synthetic construct
  source 1..18: mol_type = other DNA
tcatatggtgctggcagc

SEQ ID NO: 10430 - DNA, 21 bp, synthetic construct
  source 1..21: mol_type = other DNA
gttttctcaagtacggaaata

SEQ ID NO: 10431 - DNA, 18 bp, synthetic construct
  source 1..18: mol_type = other DNA
tcatatggtgctggcagc

SEQ ID NO: 10432 - DNA, 24 bp, synthetic construct
  source 1..24: mol_type = other DNA
caggactcttacaaaaaggaaaat

SEQ ID NO: 10433 - DNA, 18 bp, synthetic construct
  source 1..18: mol_type = other DNA
tcatatgtcgctgacagc

SEQ ID NO: 10434 - DNA, 21 bp, synthetic construct
  source 1..21: mol_type = other DNA
agcttcacagacaacaagagg

SEQ ID NO: 10435 - DNA, 18 bp, synthetic construct
  source 1..18: mol_type = other DNA
tcaataactgaaaacgat

SEQ ID NO: 10436 - DNA, 21 bp, synthetic construct
  source 1..21: mol_type = other DNA
attcgttcaaatatggaaaga

SEQ ID NO: 10437 - DNA, 18 bp, synthetic construct
  source 1..18: mol_type = other DNA
tcatatgtcgctgacagc

SEQ ID NO: 10438 - DNA, 21 bp, synthetic construct
  source 1..21: mol_type = other DNA
gttttctcaagtacggaaata

SEQ ID NO: 10439 - DNA, 18 bp, synthetic construct
  source 1..18: mol_type = other DNA
tcatatgtcgctgacagc

SEQ ID NO: 10440 - DNA, 24 bp, synthetic construct
  source 1..24: mol_type = other DNA
tactatccaggagacccagtggtt

SEQ ID NO: 10441 - DNA, 18 bp, synthetic construct
  source 1..18: mol_type = other DNA
tcatatggtgctggcaac

SEQ ID NO: 10442 - DNA, 21 bp, synthetic construct
  source 1..21: mol_type = other DNA
attcgttcaaatgtggacaga

SEQ ID NO: 10443 - DNA, 18 bp, synthetic construct
  source 1..18: mol_type = other DNA
tcatatgtcgctgacagc

SEQ ID NO: 10444 - DNA, 15 bp, synthetic construct
  source 1..15: mol_type = other DNA
aatccttctgggaca

SEQ ID NO: 10445 - DNA, 18 bp, synthetic construct
  source 1..18: mol_type = other DNA
tacagctatcaaaaactt

SEQ ID NO: 10446 - DNA, 21 bp, synthetic construct
  source 1..21: mol_type = other DNA
attcgttcaaatgtggacaga

SEQ ID NO: 10447 - DNA, 18 bp, synthetic construct
  source 1..18: mol_type = other DNA
tcatatggtgctggcagc

SEQ ID NO: 10448 - DNA, 21 bp, synthetic construct
  source 1..21: mol_type = other DNA
gtcattacggctggccagaag

SEQ ID NO: 10449 - DNA, 18 bp, synthetic construct
  source 1..18: mol_type = other DNA
tcatatgtcgctgacagc

SEQ ID NO: 10450 - DNA, 21 bp, synthetic construct
  source 1..21: mol_type = other DNA
agctccacagacaacaagagg

SEQ ID NO: 10451 - DNA, 15 bp, synthetic construct
  source 1..15: mol_type = other DNA
tctattactgttggc

SEQ ID NO: 10452 - DNA, 18 bp, synthetic construct
  source 1..18: mol_type = other DNA
atcttctctgatggtgac

SEQ ID NO: 10453 - DNA, 18 bp, synthetic construct
  source 1..18: mol_type = other DNA
tcaataactgaaaacgat

SEQ ID NO: 10454 - DNA, 24 bp, synthetic construct
  source 1..24: mol_type = other DNA
caggactcttacaaaaaggaaaat

SEQ ID NO: 10455 - DNA, 18 bp, synthetic construct
  source 1..18: mol_type = other DNA
tttcgggatgaggctgtt

SEQ ID NO: 10456 - DNA, 21 bp, synthetic construct
  source 1..21: mol_type = other DNA
ataagttcagtgtccgataaa

SEQ ID NO: 10457 - DNA, 18 bp, synthetic construct
  source 1..18: mol_type = other DNA
tacagctatcaaaaactt

SEQ ID NO: 10458 - DNA, 21 bp, synthetic construct
  source 1..21: mol_type = other DNA
agctccacagacaacaagagg

SEQ ID NO: 10459 - DNA, 18 bp, synthetic construct
  source 1..18: mol_type = other DNA
tcatatggtgctggcaac

SEQ ID NO: 10460 - DNA, 21 bp, synthetic construct
  source 1..21: mol_type = other DNA
agcttcacagacaacaagagg

SEQ ID NO: 10461 - DNA, 15 bp, synthetic construct
  source 1..15: mol_type = other DNA
tctattactgttggc

SEQ ID NO: 10462 - DNA, 24 bp, synthetic construct
  source 1..24: mol_type = other DNA
tactattctggagacccagtggtt

SEQ ID NO: 10463 - DNA, 18 bp, synthetic construct
  source 1..18: mol_type = other DNA
ctgcggagtcctggggac

SEQ ID NO: 10464 - DNA, 18 bp, synthetic construct
  source 1..18: mol_type = other DNA
atcttctccaatggtgaa

SEQ ID NO: 10465 - DNA, 18 bp, synthetic construct
  source 1..18: mol_type = other DNA
ctgcggagtcctggggac

SEQ ID NO: 10466 - DNA, 21 bp, synthetic construct
  source 1..21: mol_type = other DNA
gtacgctcaaatgtggataag

SEQ ID NO: 10467 - DNA, 21 bp, synthetic construct
  source 1..21: mol_type = other DNA
tctactgtgaactcagcaatc

SEQ ID NO: 10468 - DNA, 21 bp, synthetic construct
  source 1..21: mol_type = other DNA
atacgttcaaatgagcgagag

SEQ ID NO: 10469 - DNA, 18 bp, synthetic construct
  source 1..18: mol_type = other DNA
tacagctatcaaaaactt

SEQ ID NO: 10470 - DNA, 24 bp, synthetic construct
  source 1..24: mol_type = other DNA
caggactcttacaaaaaggaaaat

SEQ ID NO: 10471 - DNA, 18 bp, synthetic construct
  source 1..18: mol_type = other DNA
tcatatggtgctggcaac

SEQ ID NO: 10472 - DNA, 21 bp, synthetic construct
  source 1..21: mol_type = other DNA
atacgttcagtgtccgataaa

SEQ ID NO: 10473 - DNA, 18 bp, synthetic construct
  source 1..18: mol_type = other DNA
tcaataactgaaaacgat

SEQ ID NO: 10474 - DNA, 24 bp, synthetic construct
  source 1..24: mol_type = other DNA
tactattccggagacccagtggtt

SEQ ID NO: 10475 - DNA, 18 bp, synthetic construct
  source 1..18: mol_type = other DNA
tcatatgtcgctgacagc

SEQ ID NO: 10476 - DNA, 24 bp, synthetic construct
  source 1..24: mol_type = other DNA
caggactcttacaaaaaggaaaat

SEQ ID NO: 10477 - DNA, 18 bp, synthetic construct
  source 1..18: mol_type = other DNA
tcatatgtcgctgacagc

SEQ ID NO: 10478 - DNA, 21 bp, synthetic construct
  source 1..21: mol_type = other DNA
gtcctttcaaatgtggacaga

SEQ ID NO: 10479 - DNA, 18 bp, synthetic construct
  source 1..18: mol_type = other DNA
ttctacaatggtaaagtc

SEQ ID NO: 10480 - DNA, 18 bp, synthetic construct
  source 1..18: mol_type = other DNA
atcttctctgatggtgaa

SEQ ID NO: 10481 - DNA, 18 bp, synthetic construct
  source 1..18: mol_type = other DNA
ctgcggagtcctggggac

SEQ ID NO: 10482 - DNA, 15 bp, synthetic construct
  source 1..15: mol_type = other DNA
aatccttctgggaca

SEQ ID NO: 10483 - DNA, 18 bp, synthetic construct
  source 1..18: mol_type = other DNA
tacaatcttaaacagttg

SEQ ID NO: 10484 - DNA, 18 bp, synthetic construct
  source 1..18: mol_type = other DNA
atattctctaatggcaac

SEQ ID NO: 10485 - DNA, 18 bp, synthetic construct
  source 1..18: mol_type = other DNA
tacaatcttaaacagttg

SEQ ID NO: 10486 - DNA, 21 bp, synthetic construct
  source 1..21: mol_type = other DNA
agcttcacagacaacaagagg

SEQ ID NO: 10487 - DNA, 18 bp, synthetic construct
  source 1..18: mol_type = other DNA
tacaataataagcaactc

SEQ ID NO: 10488 - DNA, 21 bp, synthetic construct
  source 1..21: mol_type = other DNA
gtcttttcaaatgtggacaga

SEQ ID NO: 10489 - DNA, 18 bp, synthetic construct
  source 1..18: mol_type = other DNA
tcatatggtgctggcagc

SEQ ID NO: 10490 - DNA, 21 bp, synthetic construct
  source 1..21: mol_type = other DNA
gttttctcaagtacggaaata

SEQ ID NO: 10491 - DNA, 18 bp, synthetic construct
  source 1..18: mol_type = other DNA
tcatatgtcgctgacagc

SEQ ID NO: 10492 - DNA, 15 bp, synthetic construct
  source 1..15: mol_type = other DNA
ggtctacaacaaaat

SEQ ID NO: 10493 - DNA, 18 bp, synthetic construct
  source 1..18: mol_type = other DNA
tacaatcttaaacagttg

SEQ ID NO: 10494 - DNA, 21 bp, synthetic construct
  source 1..21: mol_type = other DNA
ggatataaggactatgtggta

SEQ ID NO: 10495 - DNA, 18 bp, synthetic construct
  source 1..18: mol_type = other DNA
tacagctatcaaaaactt

SEQ ID NO: 10496 - DNA, 21 bp, synthetic construct
  source 1..21: mol_type = other DNA
gttttctcaagtacggaaata

SEQ ID NO: 10497 - DNA, 18 bp, synthetic construct
  source 1..18: mol_type = other DNA
tcatatggtgctggcagc

SEQ ID NO: 10498 - DNA, 24 bp, synthetic construct
  source 1..24: mol_type = other DNA
tactattcgggaaacccagtggtt

SEQ ID NO: 10499 - DNA, 18 bp, synthetic construct
  source 1..18: mol_type = other DNA
tcatatgtcgctgacagc

SEQ ID NO: 10500 - DNA, 15 bp, synthetic construct
  source 1..15: mol_type = other DNA
ttggcttcaggaaca

SEQ ID NO: 10501 - DNA, 18 bp, synthetic construct
  source 1..18: mol_type = other DNA
tacaatcttaaacagttg

SEQ ID NO: 10502 - DNA, 21 bp, synthetic construct
  source 1..21: mol_type = other DNA
gcctcaagggacaaagagaaa

SEQ ID NO: 10503 - DNA, 18 bp, synthetic construct
  source 1..18: mol_type = other DNA
tcatatggtgctggcagc

SEQ ID NO: 10504 - DNA, 21 bp, synthetic construct
  source 1..21: mol_type = other DNA
agctccacagacaacaagagg

SEQ ID NO: 10505 - DNA, 18 bp, synthetic construct
  source 1..18: mol_type = other DNA
tcatatggtgctggcagc

SEQ ID NO: 10506 - DNA, 24 bp, synthetic construct
  source 1..24: mol_type = other DNA
caggactcttacaaaaaggaaaat

SEQ ID NO: 10507 - DNA, 18 bp, synthetic construct
  source 1..18: mol_type = other DNA
tcatatggtgctggcagc

SEQ ID NO: 10508 - DNA, 18 bp, synthetic construct
  source 1..18: mol_type = other DNA
agtccttcttgggcagag

SEQ ID NO: 10509 - DNA, 18 bp, synthetic construct
  source 1..18: mol_type = other DNA
ttctacaatggtaaagtc

SEQ ID NO: 10510 - DNA, 24 bp, synthetic construct
  source 1..24: mol_type = other DNA
tactattccggagacccagtggtt

SEQ ID NO: 10511 - DNA, 18 bp, synthetic construct
  source 1..18: mol_type = other DNA
tttcgggatgaggctgtt

SEQ ID NO: 10512 - DNA, 21 bp, synthetic construct
  source 1..21: mol_type = other DNA
atactttcagtgtccaataaa

SEQ ID NO: 10513 - DNA, 18 bp, synthetic construct
  source 1..18: mol_type = other DNA
tacaataataagcaactc

SEQ ID NO: 10514 - DNA, 15 bp, synthetic construct
  source 1..15: mol_type = other DNA
aatccttctgggaca

SEQ ID NO: 10515 - DNA, 18 bp, synthetic construct
  source 1..18: mol_type = other DNA
tcatatggtgctggcagc

SEQ ID NO: 10516 - DNA, 24 bp, synthetic construct
  source 1..24: mol_type = other DNA
tactatccaggagacccagtggtt

SEQ ID NO: 10517 - DNA, 18 bp, synthetic construct
  source 1..18: mol_type = other DNA
tcatatggtgctggcagc

SEQ ID NO: 10518 - DNA, 21 bp, synthetic construct
  source 1..21: mol_type = other DNA
gtcattacggctggccagaag

SEQ ID NO: 10519 - DNA, 18 bp, synthetic construct
  source 1..18: mol_type = other DNA
tcatatggtgctggcagc

SEQ ID NO: 10520 - DNA, 18 bp, synthetic construct
  source 1..18: mol_type = other DNA
atcttctccaatggtgac

SEQ ID NO: 10521 - DNA, 18 bp, synthetic construct
  source 1..18: mol_type = other DNA
tcatatggtgctggcagc

SEQ ID NO: 10522 - DNA, 21 bp, synthetic construct
  source 1..21: mol_type = other DNA
gtcattacggctggccagaag

SEQ ID NO: 10523 - DNA, 18 bp, synthetic construct
  source 1..18: mol_type = other DNA
tcatatggtgctggcagc

SEQ ID NO: 10524 - DNA, 18 bp, synthetic construct
  source 1..18: mol_type = other DNA
atcttctccaatggtgaa

SEQ ID NO: 10525 - DNA, 18 bp, synthetic construct
  source 1..18: mol_type = other DNA
tcatatggtgctggcaac

SEQ ID NO: 10526 - DNA, 21 bp, synthetic construct
  source 1..21: mol_type = other DNA
agctccacagacaacaagagg

SEQ ID NO: 10527 - DNA, 15 bp, synthetic construct
  source 1..15: mol_type = other DNA
tctattactgttggc

SEQ ID NO: 10528 - DNA, 15 bp, synthetic construct
  source 1..15: mol_type = other DNA
aatccttctgggaca

SEQ ID NO: 10529 - DNA, 15 bp, synthetic construct
  source 1..15: mol_type = other DNA
tctattactgttggc

SEQ ID NO: 10530 - DNA, 18 bp, synthetic construct
  source 1..18: mol_type = other DNA
atcttctctgatggtgac

SEQ ID NO: 10531 - DNA, 18 bp, synthetic construct
  source 1..18: mol_type = other DNA
ttctacaatggtaaagtc

SEQ ID NO: 10532 - DNA, 24 bp, synthetic construct
  source 1..24: mol_type = other DNA
tactattccggagacccagtggtt

SEQ ID NO: 10533 - DNA, 21 bp, synthetic construct
  source 1..21: mol_type = other DNA
tctactgtgaactcagcaatc

SEQ ID NO: 10534 - DNA, 24 bp, synthetic construct
  source 1..24: mol_type = other DNA
tactattcgggaaacccagtggtt

SEQ ID NO: 10535 - DNA, 18 bp, synthetic construct
  source 1..18: mol_type = other DNA
tcaataactgaaaacgat

SEQ ID NO: 10536 - DNA, 21 bp, synthetic construct
  source 1..21: mol_type = other DNA
attcgttcaaatgtggacaga

SEQ ID NO: 10537 - DNA, 18 bp, synthetic construct
  source 1..18: mol_type = other DNA
tcaataactgaaaacgat

SEQ ID NO: 10538 - DNA, 21 bp, synthetic construct
  source 1..21: mol_type = other DNA
gtcacaacagccaacaacaag

SEQ ID NO: 10539 - DNA, 18 bp, synthetic construct
  source 1..18: mol_type = other DNA
tcaataactgaaaacgat

SEQ ID NO: 10540 - DNA, 21 bp, synthetic construct
  source 1..21: mol_type = other DNA
gtcttttcaaatgtggacaga

SEQ ID NO: 10541 - DNA, 18 bp, synthetic construct
  source 1..18: mol_type = other DNA
tcaataactgaaaacgat

SEQ ID NO: 10542 - DNA, 21 bp, synthetic construct
  source 1..21: mol_type = other DNA
atacgttcaaatgagcgagag

SEQ ID NO: 10543 - DNA, 18 bp, synthetic construct
  source 1..18: mol_type = other DNA
tacaatcttaaacagttg

SEQ ID NO: 10544 - DNA, 15 bp, synthetic construct
  source 1..15: mol_type = other DNA
aatccttctgggaca

SEQ ID NO: 10545 - DNA, 18 bp, synthetic construct
  source 1..18: mol_type = other DNA
tacaatcttaaacagttg

SEQ ID NO: 10546 - DNA, 21 bp, synthetic construct
  source 1..21: mol_type = other DNA
atacgttcaaatgagcgagag

SEQ ID NO: 10547 - DNA, 18 bp, synthetic construct
  source 1..18: mol_type = other DNA
tttcgggatgaggctgtt

SEQ ID NO: 10548 - DNA, 21 bp, synthetic construct
  source 1..21: mol_type = other DNA
atccgttcaaatatggaaaga

SEQ ID NO: 10549 - DNA, 18 bp, synthetic construct
  source 1..18: mol_type = other DNA
tttcgggatgaggctgtt

SEQ ID NO: 10550 - DNA, 18 bp, synthetic construct
  source 1..18: mol_type = other DNA
atcttctctgatggtgac

SEQ ID NO: 10551 - DNA, 18 bp, synthetic construct
  source 1..18: mol_type = other DNA
tcatacgatgttgatagt

SEQ ID NO: 10552 - DNA, 21 bp, synthetic construct
  source 1..21: mol_type = other DNA
attcgttcaaatgtggacaga

SEQ ID NO: 10553 - DNA, 18 bp, synthetic construct
  source 1..18: mol_type = other DNA
tacaataataagcaactc

SEQ ID NO: 10554 - DNA, 15 bp, synthetic construct
  source 1..15: mol_type = other DNA
aatccttctgggaca

SEQ ID NO: 10555 - DNA, 18 bp, synthetic construct
  source 1..18: mol_type = other DNA
tcatatggtgctggcagc

SEQ ID NO: 10556 - DNA, 24 bp, synthetic construct
  source 1..24: mol_type = other DNA
caggactcttacaaaaaggaaaat

SEQ ID NO: 10557 - DNA, 18 bp, synthetic construct
  source 1..18: mol_type = other DNA
tcatatggtgctggcagc

SEQ ID NO: 10558 - DNA, 21 bp, synthetic construct
  source 1..21: mol_type = other DNA
attcgttcaaatatggaaaga

SEQ ID NO: 10559 - DNA, 18 bp, synthetic construct
  source 1..18: mol_type = other DNA
tcatatggtgctggcagc

SEQ ID NO: 10560 - DNA, 21 bp, synthetic construct
  source 1..21: mol_type = other DNA
attcgttcaaatatggaaaga

SEQ ID NO: 10561 - DNA, 18 bp, synthetic construct
  source 1..18: mol_type = other DNA
tcatatggtgctggcagc

SEQ ID NO: 10562 - DNA, 21 bp, synthetic construct
  source 1..21: mol_type = other DNA
gtcttttcaaatgtggacaga

SEQ ID NO: 10563 - DNA, 18 bp, synthetic construct
  source 1..18: mol_type = other DNA
tcatatggtgctggcagc

SEQ ID NO: 10564 - DNA, 24 bp, synthetic construct
  source 1..24: mol_type = other DNA
caggactcttacaaaaaggaaaat

SEQ ID NO: 10565 - DNA, 18 bp, synthetic construct
  source 1..18: mol_type = other DNA
tcatatggtgctggcaac

SEQ ID NO: 10566 - DNA, 21 bp, synthetic construct
  source 1..21: mol_type = other DNA
attcgttcaaatatggaaaga

SEQ ID NO: 10567 - DNA, 18 bp, synthetic construct
  source 1..18: mol_type = other DNA
tcatatgtcgctgacagc

SEQ ID NO: 10568 - DNA, 21 bp, synthetic construct
  source 1..21: mol_type = other DNA
gtcattacggctggccagaag

SEQ ID NO: 10569 - DNA, 18 bp, synthetic construct
  source 1..18: mol_type = other DNA
tcatatgtcgctgacagc

SEQ ID NO: 10570 - DNA, 21 bp, synthetic construct
  source 1..21: mol_type = other DNA
attcgttcaaatatggaaaga

SEQ ID NO: 10571 - DNA, 15 bp, synthetic construct
  source 1..15: mol_type = other DNA
tctattactgttggc

SEQ ID NO: 10572 - DNA, 18 bp, synthetic construct
  source 1..18: mol_type = other DNA
atcttctctgatggtgac

SEQ ID NO: 10573 - DNA, 21 bp, synthetic construct
  source 1..21: mol_type = other DNA
tctactgtgaactcagcaatc

SEQ ID NO: 10574 - DNA, 24 bp, synthetic construct
  source 1..24: mol_type = other DNA
caggactcttacaaaaaggaaaat

SEQ ID NO: 10575 - DNA, 18 bp, synthetic construct
  source 1..18: mol_type = other DNA
tcaataactgaaaacgat

SEQ ID NO: 10576 - DNA, 21 bp, synthetic construct
  source 1..21: mol_type = other DNA
atacgttcaaatgagagagag

SEQ ID NO: 10577 - DNA, 18 bp, synthetic construct
  source 1..18: mol_type = other DNA
tcaataactgaaaacgat

SEQ ID NO: 10578 - DNA, 21 bp, synthetic construct
  source 1..21: mol_type = other DNA
atacgttcaaatgagagagag

SEQ ID NO: 10579 - DNA, 18 bp, synthetic construct
  source 1..18: mol_type = other DNA
ctgcggagtcctggggac

SEQ ID NO: 10580 - DNA, 24 bp, synthetic construct
  source 1..24: mol_type = other DNA
tactatccaggagacccagtggtt

SEQ ID NO: 10581 - DNA, 18 bp, synthetic construct
  source 1..18: mol_type = other DNA
tacaatcttaaacagttg

SEQ ID NO: 10582 - DNA, 21 bp, synthetic construct
  source 1..21: mol_type = other DNA
gcctcaagggacaaagagaaa

SEQ ID NO: 10583 - DNA, 18 bp, synthetic construct
  source 1..18: mol_type = other DNA
tttcgggatgaggctgtt

SEQ ID NO: 10584 - DNA, 15 bp, synthetic construct
  source 1..15: mol_type = other DNA
attcctggaatgaag

SEQ ID NO: 10585 - DNA, 18 bp, synthetic construct
  source 1..18: mol_type = other DNA
tttcgggatgaggctgtt

SEQ ID NO: 10586 - DNA, 15 bp, synthetic construct
  source 1..15: mol_type = other DNA
ttggcttcaggaaca

SEQ ID NO: 10587 - DNA, 18 bp, synthetic construct
  source 1..18: mol_type = other DNA
tacagctatcaaaaactt

SEQ ID NO: 10588 - DNA, 15 bp, synthetic construct
  source 1..15: mol_type = other DNA
attcctggaatgaag

SEQ ID NO: 10589 - DNA, 18 bp, synthetic construct
  source 1..18: mol_type = other DNA
tacaataataagcaactc

SEQ ID NO: 10590 - DNA, 15 bp, synthetic construct
  source 1..15: mol_type = other DNA
aatccttctgggaca

SEQ ID NO: 10591 - DNA, 18 bp, synthetic construct
  source 1..18: mol_type = other DNA
tacaataataagcaactc

SEQ ID NO: 10592 - DNA, 15 bp, synthetic construct
  source 1..15: mol_type = other DNA
ttggcttcaggaaca

SEQ ID NO: 10593 - DNA, 18 bp, synthetic construct
  source 1..18: mol_type = other DNA
tcatatggtgctggcagc

SEQ ID NO: 10594 - DNA, 24 bp, synthetic construct
  source 1..24: mol_type = other DNA
caggactcttacaaaaaggaaaat

SEQ ID NO: 10595 - DNA, 18 bp, synthetic construct
  source 1..18: mol_type = other DNA
tcatatggtgctggcagc

SEQ ID NO: 10596 - DNA, 21 bp, synthetic construct
  source 1..21: mol_type = other DNA
agctccacagacaacaagagg

SEQ ID NO: 10597 - DNA, 18 bp, synthetic construct
  source 1..18: mol_type = other DNA
tcatatggtgctggcagc

SEQ ID NO: 10598 - DNA, 18 bp, synthetic construct
  source 1..18: mol_type = other DNA
gttgttttggatggtttg

SEQ ID NO: 10599 - DNA, 18 bp, synthetic construct
  source 1..18: mol_type = other DNA
tcatatggtgctggcaac

SEQ ID NO: 10600 - DNA, 21 bp, synthetic construct
  source 1..21: mol_type = other DNA
gtcattacggctggccagaag

SEQ ID NO: 10601 - DNA, 18 bp, synthetic construct
  source 1..18: mol_type = other DNA
tcatatggtgctggcaac

SEQ ID NO: 10602 - DNA, 18 bp, synthetic construct
  source 1..18: mol_type = other DNA
atcttctccaatggtgaa

SEQ ID NO: 10603 - DNA, 18 bp, synthetic construct
  source 1..18: mol_type = other DNA
tcatatgtcgctgacagc

SEQ ID NO: 10604 - DNA, 24 bp, synthetic construct
  source 1..24: mol_type = other DNA
tactattccggagacccagtggtt

SEQ ID NO: 10605 - DNA, 18 bp, synthetic construct
  source 1..18: mol_type = other DNA
tcatatgtcgctgacagc

SEQ ID NO: 10606 - DNA, 21 bp, synthetic construct
  source 1..21: mol_type = other DNA
gtcattacggctggccagaag

SEQ ID NO: 10607 - DNA, 15 bp, synthetic construct
  source 1..15: mol_type = other DNA
tctattactgttggc

SEQ ID NO: 10608 - DNA, 24 bp, synthetic construct
  source 1..24: mol_type = other DNA
caggactcttacaaaaaggaaaat

SEQ ID NO: 10609 - DNA, 21 bp, synthetic construct
  source 1..21: mol_type = other DNA
tctactgtgaactcagcaatc

SEQ ID NO: 10610 - DNA, 21 bp, synthetic construct
  source 1..21: mol_type = other DNA
gcctcaagggacaaagagaaa

SEQ ID NO: 10611 - DNA, 18 bp, synthetic construct
  source 1..18: mol_type = other DNA
tcaataactgaaaacgat

SEQ ID NO: 10612 - DNA, 21 bp, synthetic construct
  source 1..21: mol_type = other DNA
gttttctcaagtacggaaata

SEQ ID NO: 10613 - DNA, 18 bp, synthetic construct
  source 1..18: mol_type = other DNA
ctgcggagtcctggggac

SEQ ID NO: 10614 - DNA, 21 bp, synthetic construct
  source 1..21: mol_type = other DNA
atactttcagtgtccaataaa

SEQ ID NO: 10615 - DNA, 18 bp, synthetic construct
  source 1..18: mol_type = other DNA
ctgcggagtcctggggac

SEQ ID NO: 10616 - DNA, 21 bp, synthetic construct
  source 1..21: mol_type = other DNA
gtcattacggctggccagaag

SEQ ID NO: 10617 - DNA, 18 bp, synthetic construct
  source 1..18: mol_type = other DNA
ctgcggagtcctggggac

SEQ ID NO: 10618 - DNA, 24 bp, synthetic construct
  source 1..24: mol_type = other DNA
caggactcttacaaaaaggaaaat

SEQ ID NO: 10619 - DNA, 18 bp, synthetic construct
  source 1..18: mol_type = other DNA
ctgcggagtcctggggac

SEQ ID NO: 10620 - DNA, 18 bp, synthetic construct
  source 1..18: mol_type = other DNA
atcttctccaatggtgaa

SEQ ID NO: 10621 - DNA, 18 bp, synthetic construct
  source 1..18: mol_type = other DNA
tacaatcttaaacagttg

SEQ ID NO: 10622 - DNA, 15 bp, synthetic construct
  source 1..15: mol_type = other DNA
aatccttctgggaca

SEQ ID NO: 10623 - DNA, 18 bp, synthetic construct
  source 1..18: mol_type = other DNA
tacaatcttaaacagttg

SEQ ID NO: 10624 - DNA, 21 bp, synthetic construct
  source 1..21: mol_type = other DNA
gtcattacggctggccagaag

SEQ ID NO: 10625 - DNA, 18 bp, synthetic construct
  source 1..18: mol_type = other DNA
tacaatcttaaacagttg

SEQ ID NO: 10626 - DNA, 21 bp, synthetic construct
  source 1..21: mol_type = other DNA
ataagttcagtgtccgataaa

SEQ ID NO: 10627 - DNA, 18 bp, synthetic construct
  source 1..18: mol_type = other DNA
tttcgaaatcaagctcct

SEQ ID NO: 10628 - DNA, 21 bp, synthetic construct
  source 1..21: mol_type = other DNA
atacgtccagtgtccaataaa

SEQ ID NO: 10629 - DNA, 18 bp, synthetic construct
  source 1..18: mol_type = other DNA
cattatgataaaatggag

SEQ ID NO: 10630 - DNA, 24 bp, synthetic construct
  source 1..24: mol_type = other DNA
tactattcaggagacccagtggtt

SEQ ID NO: 10631 - DNA, 18 bp, synthetic construct
  source 1..18: mol_type = other DNA
tttcgggatgaggctgtt

SEQ ID NO: 10632 - DNA, 21 bp, synthetic construct
  source 1..21: mol_type = other DNA
agctccacagacaacaagagg

SEQ ID NO: 10633 - DNA, 18 bp, synthetic construct
  source 1..18: mol_type = other DNA
tttcgggatgaggctgtt

SEQ ID NO: 10634 - DNA, 21 bp, synthetic construct
  source 1..21: mol_type = other DNA
gtcattacggctggccagaag

SEQ ID NO: 10635 - DNA, 18 bp, synthetic construct
  source 1..18: mol_type = other DNA
tttcgggatgaggctgtt

SEQ ID NO: 10636 - DNA, 21 bp, synthetic construct
  source 1..21: mol_type = other DNA
gtacgctcaaatgtggataag

SEQ ID NO: 10637 - DNA, 18 bp, synthetic construct
  source 1..18: mol_type = other DNA
tacagctatcaaaaactt

SEQ ID NO: 10638 - DNA, 24 bp, synthetic construct
  source 1..24: mol_type = other DNA
tactatccaggagacccagtggtt

SEQ ID NO: 10639 - DNA, 18 bp, synthetic construct
  source 1..18: mol_type = other DNA
tacagctatcaaaaactt

SEQ ID NO: 10640 - DNA, 21 bp, synthetic construct
  source 1..21: mol_type = other DNA
gtcacaacagccaacaataag

SEQ ID NO: 10641 - DNA, 18 bp, synthetic construct
  source 1..18: mol_type = other DNA
tacagctatcaaaaactt

SEQ ID NO: 10642 - DNA, 21 bp, synthetic construct
  source 1..21: mol_type = other DNA
gtcacaacagccaacaacaag

SEQ ID NO: 10643 - DNA, 18 bp, synthetic construct
  source 1..18: mol_type = other DNA
tacaataataagcaactc

SEQ ID NO: 10644 - DNA, 15 bp, synthetic construct
  source 1..15: mol_type = other DNA
aatccttctgggaca

SEQ ID NO: 10645 - DNA, 18 bp, synthetic construct
  source 1..18: mol_type = other DNA
tacaataataagcaactc

SEQ ID NO: 10646 - DNA, 15 bp, synthetic construct
  source 1..15: mol_type = other DNA
ctggttccaggaaca

SEQ ID NO: 10647 - DNA, 18 bp, synthetic construct
  source 1..18: mol_type = other DNA
tacaataataagcaactc

SEQ ID NO: 10648 - DNA, 24 bp, synthetic construct
  source 1..24: mol_type = other DNA
caggactcttacaaaaaggaaaat

SEQ ID NO: 10649 - DNA, 18 bp, synthetic construct
  source 1..18: mol_type = other DNA
tcatatggtgctggcagc

SEQ ID NO: 10650 - DNA, 18 bp, synthetic construct
  source 1..18: mol_type = other DNA
atcttctccaatggtgaa

SEQ ID NO: 10651 - DNA, 18 bp, synthetic construct
  source 1..18: mol_type = other DNA
tcatatggtgctggcagc

SEQ ID NO: 10652 - DNA, 21 bp, synthetic construct
  source 1..21: mol_type = other DNA
agctccacagacaacaagagg

SEQ ID NO: 10653 - DNA, 18 bp, synthetic construct
  source 1..18: mol_type = other DNA
tcatatggtgctggcagc

SEQ ID NO: 10654 - DNA, 15 bp, synthetic construct
  source 1..15: mol_type = other DNA
aatccttctgggaca

SEQ ID NO: 10655 - DNA, 18 bp, synthetic construct
  source 1..18: mol_type = other DNA
tcatatggtgctggcagc

SEQ ID NO: 10656 - DNA, 21 bp, synthetic construct
  source 1..21: mol_type = other DNA
gttttctcaagtacggaaata

SEQ ID NO: 10657 - DNA, 18 bp, synthetic construct
  source 1..18: mol_type = other DNA
tcatatggtgctggcagc

SEQ ID NO: 10658 - DNA, 24 bp, synthetic construct
  source 1..24: mol_type = other DNA
caggactcttacaaaaaggaaaat

SEQ ID NO: 10659 - DNA, 18 bp, synthetic construct
  source 1..18: mol_type = other DNA
tcatatggtgctggcaac

SEQ ID NO: 10660 - DNA, 21 bp, synthetic construct
  source 1..21: mol_type = other DNA
gttttctcaagtacggaaata

SEQ ID NO: 10661 - DNA, 18 bp, synthetic construct
  source 1..18: mol_type = other DNA
tcatatggtgctggcaac

SEQ ID NO: 10662 - DNA, 21 bp, synthetic construct
  source 1..21: mol_type = other DNA
gtcctttcaaatgtggacaga

SEQ ID NO: 10663 - DNA, 18 bp, synthetic construct
  source 1..18: mol_type = other DNA
tcatatggtgctggcaac

SEQ ID NO: 10664 - DNA, 24 bp, synthetic construct
  source 1..24: mol_type = other DNA
caggactcttacaaaaaggaaaat

SEQ ID NO: 10665 - DNA, 18 bp, synthetic construct
  source 1..18: mol_type = other DNA
tcatatggtgctggcaac

SEQ ID NO: 10666 - DNA, 21 bp, synthetic construct
  source 1..21: mol_type = other DNA
gttttctcaagtacggaaata

SEQ ID NO: 10667 - DNA, 18 bp, synthetic construct
  source 1..18: mol_type = other DNA
tcatatggtgctggcaac

SEQ ID NO: 10668 - DNA, 24 bp, synthetic construct
  source 1..24: mol_type = other DNA
tacatcacaggagacaccgttgtt

SEQ ID NO: 10669 - DNA, 18 bp, synthetic construct
  source 1..18: mol_type = other DNA
tcatatggtgctggcaac

SEQ ID NO: 10670 - DNA, 21 bp, synthetic construct
  source 1..21: mol_type = other DNA
atacgtccagtgtccaataaa

SEQ ID NO: 10671 - DNA, 18 bp, synthetic construct
  source 1..18: mol_type = other DNA
tcatatggtgctggcaac

SEQ ID NO: 10672 - DNA, 21 bp, synthetic construct
  source 1..21: mol_type = other DNA
agcttcacagacaacaagagg

SEQ ID NO: 10673 - DNA, 18 bp, synthetic construct
  source 1..18: mol_type = other DNA
tcatatggtgctggcaac

SEQ ID NO: 10674 - DNA, 15 bp, synthetic construct
  source 1..15: mol_type = other DNA
ttggcttcaggaaca

SEQ ID NO: 10675 - DNA, 18 bp, synthetic construct
  source 1..18: mol_type = other DNA
tcatatgtcgctgacagc

SEQ ID NO: 10676 - DNA, 15 bp, synthetic construct
  source 1..15: mol_type = other DNA
ctggctcaaggaaca

SEQ ID NO: 10677 - DNA, 18 bp, synthetic construct
  source 1..18: mol_type = other DNA
tcatatgtcgctgacagc

SEQ ID NO: 10678 - DNA, 24 bp, synthetic construct
  source 1..24: mol_type = other DNA
caggactcttacaaaaaggaaaat

SEQ ID NO: 10679 - DNA, 18 bp, synthetic construct
  source 1..18: mol_type = other DNA
tcatatgtcgctgacagc

SEQ ID NO: 10680 - DNA, 24 bp, synthetic construct
  source 1..24: mol_type = other DNA
tactattccggagacccagtggtt

SEQ ID NO: 10681 - DNA, 18 bp, synthetic construct
  source 1..18: mol_type = other DNA
tcatatgtcgctgacagc

SEQ ID NO: 10682 - DNA, 21 bp, synthetic construct
  source 1..21: mol_type = other DNA
gtcctttcaaatgtggacaga

SEQ ID NO: 10683 - DNA, 18 bp, synthetic construct
  source 1..18: mol_type = other DNA
tcatatgtcgctgacagc

SEQ ID NO: 10684 - DNA, 21 bp, synthetic construct
  source 1..21: mol_type = other DNA
atactttcagtgtccgataaa

SEQ ID NO: 10685 - DNA, 18 bp, synthetic construct
  source 1..18: mol_type = other DNA
tcatatgtcgctgacagc

SEQ ID NO: 10686 - DNA, 15 bp, synthetic construct
  source 1..15: mol_type = other DNA
ctggctcaaggaaca

SEQ ID NO: 10687 - DNA, 18 bp, synthetic construct
  source 1..18: mol_type = other DNA
tactatgataagattttg

SEQ ID NO: 10688 - DNA, 24 bp, synthetic construct
  source 1..24: mol_type = other DNA
caggactcttacaaaaaggaaaat

SEQ ID NO: 10689 - DNA, 18 bp, synthetic construct
  source 1..18: mol_type = other DNA
tactatgataagattttg

SEQ ID NO: 10690 - DNA, 24 bp, synthetic construct
  source 1..24: mol_type = other DNA
caggactcttacaaaaaggaaaat

SEQ ID NO: 10691 - DNA, 15 bp, synthetic construct
  source 1..15: mol_type = other DNA
tctattactgttggc

SEQ ID NO: 10692 - DNA, 24 bp, synthetic construct
  source 1..24: mol_type = other DNA
tactattcaggagacccagtggtt

SEQ ID NO: 10693 - DNA, 15 bp, synthetic construct
  source 1..15: mol_type = other DNA
tctattactgttggc

SEQ ID NO: 10694 - DNA, 21 bp, synthetic construct
  source 1..21: mol_type = other DNA
ggatataaggactatgtggta

SEQ ID NO: 10695 - DNA, 18 bp, synthetic construct
  source 1..18: mol_type = other DNA
ttctacaatggtaaagtc

SEQ ID NO: 10696 - DNA, 21 bp, synthetic construct
  source 1..21: mol_type = other DNA
atactttcagtgtccaataaa

SEQ ID NO: 10697 - DNA, 21 bp, synthetic construct
  source 1..21: mol_type = other DNA
tctactgtgaactcagcaatc

SEQ ID NO: 10698 - DNA, 24 bp, synthetic construct
  source 1..24: mol_type = other DNA
caaccttcttttgacactcagaac

SEQ ID NO: 10699 - DNA, 21 bp, synthetic construct
  source 1..21: mol_type = other DNA
tctactgtgaactcagcaatc

SEQ ID NO: 10700 - DNA, 21 bp, synthetic construct
  source 1..21: mol_type = other DNA
attcgttcaaatgtggacaga

SEQ ID NO: 10701 - DNA, 18 bp, synthetic construct
  source 1..18: mol_type = other DNA
tcaataactgaaaacgat

SEQ ID NO: 10702 - DNA, 15 bp, synthetic construct
  source 1..15: mol_type = other DNA
ctggttccaggaaca

SEQ ID NO: 10703 - DNA, 18 bp, synthetic construct
  source 1..18: mol_type = other DNA
tcaataactgaaaacgat

SEQ ID NO: 10704 - DNA, 21 bp, synthetic construct
  source 1..21: mol_type = other DNA
gttttctcaagtacggaaata

SEQ ID NO: 10705 - DNA, 18 bp, synthetic construct
  source 1..18: mol_type = other DNA
ctgcggagtcctggggac

SEQ ID NO: 10706 - DNA, 24 bp, synthetic construct
  source 1..24: mol_type = other DNA
caaccttcttttgacactcagaac

SEQ ID NO: 10707 - DNA, 18 bp, synthetic construct
  source 1..18: mol_type = other DNA
ctgcggagtcctggggac

SEQ ID NO: 10708 - DNA, 24 bp, synthetic construct
  source 1..24: mol_type = other DNA
tactattcaggagacccagtggtt

SEQ ID NO: 10709 - DNA, 18 bp, synthetic construct
  source 1..18: mol_type = other DNA
ctgcggagtcctggggac

SEQ ID NO: 10710 - DNA, 15 bp, synthetic construct
  source 1..15: mol_type = other DNA
aatccttctgggaca

SEQ ID NO: 10711 - DNA, 18 bp, synthetic construct
  source 1..18: mol_type = other DNA
tacaatcttaaacagttg

SEQ ID NO: 10712 - DNA, 21 bp, synthetic construct
  source 1..21: mol_type = other DNA
attcgttcaaatgtggacaga

SEQ ID NO: 10713 - DNA, 18 bp, synthetic construct
  source 1..18: mol_type = other DNA
tacaatcttaaacagttg

SEQ ID NO: 10714 - DNA, 21 bp, synthetic construct
  source 1..21: mol_type = other DNA
agctccacagacaacaagagg

SEQ ID NO: 10715 - DNA, 18 bp, synthetic construct
  source 1..18: mol_type = other DNA
tacaatcttaaacagttg

SEQ ID NO: 10716 - DNA, 21 bp, synthetic construct
  source 1..21: mol_type = other DNA
gtcattacggctggccagaag

SEQ ID NO: 10717 - DNA, 18 bp, synthetic construct
  source 1..18: mol_type = other DNA
tacaatcttaaacagttg

SEQ ID NO: 10718 - DNA, 21 bp, synthetic construct
  source 1..21: mol_type = other DNA
agctccacagacaacaagagg

SEQ ID NO: 10719 - DNA, 18 bp, synthetic construct
  source 1..18: mol_type = other DNA
tacaatcttaaacagttg

SEQ ID NO: 10720 - DNA, 21 bp, synthetic construct
  source 1..21: mol_type = other DNA
gtcccaaaggccaacgagaag

SEQ ID NO: 10721 - DNA, 18 bp, synthetic construct
  source 1..18: mol_type = other DNA
tacaatcttaaacagttg

SEQ ID NO: 10722 - DNA, 21 bp, synthetic construct
  source 1..21: mol_type = other DNA
gcctcaagggacaaagagaaa

SEQ ID NO: 10723 - DNA, 18 bp, synthetic construct
  source 1..18: mol_type = other DNA
tttcgaaatcaagctcct

SEQ ID NO: 10724 - DNA, 24 bp, synthetic construct
  source 1..24: mol_type = other DNA
tactattcgggaaacccagtggtt

SEQ ID NO: 10725 - DNA, 18 bp, synthetic construct
  source 1..18: mol_type = other DNA
tttcgaaatcaagctcct

SEQ ID NO: 10726 - DNA, 18 bp, synthetic construct
  source 1..18: mol_type = other DNA
gttgttttggatggtttg

SEQ ID NO: 10727 - DNA, 18 bp, synthetic construct
  source 1..18: mol_type = other DNA
tttcgaaatcaagctcct

SEQ ID NO: 10728 - DNA, 24 bp, synthetic construct
  source 1..24: mol_type = other DNA
tactatccaggagacccagtggtt

SEQ ID NO: 10729 - DNA, 18 bp, synthetic construct
  source 1..18: mol_type = other DNA
tttcgggatgaggctgtt

SEQ ID NO: 10730 - DNA, 21 bp, synthetic construct
  source 1..21: mol_type = other DNA
attcgttcaaatgtggacaga

SEQ ID NO: 10731 - DNA, 18 bp, synthetic construct
  source 1..18: mol_type = other DNA
tttcgggatgaggctgtt

SEQ ID NO: 10732 - DNA, 15 bp, synthetic construct
  source 1..15: mol_type = other DNA
ggtctacaacaaaat

SEQ ID NO: 10733 - DNA, 18 bp, synthetic construct
  source 1..18: mol_type = other DNA
tttcgggatgaggctgtt

SEQ ID NO: 10734 - DNA, 18 bp, synthetic construct
  source 1..18: mol_type = other DNA
atcttctccaatggtgaa

SEQ ID NO: 10735 - DNA, 18 bp, synthetic construct
  source 1..18: mol_type = other DNA
tttcgggatgaggctgtt

SEQ ID NO: 10736 - DNA, 21 bp, synthetic construct
  source 1..21: mol_type = other DNA
attcgttcaaatgtggacaga

SEQ ID NO: 10737 - DNA, 18 bp, synthetic construct
  source 1..18: mol_type = other DNA
tcatacgatgttgatagt

SEQ ID NO: 10738 - DNA, 24 bp, synthetic construct
  source 1..24: mol_type = other DNA
caaacgtcttcttctactgcaaaa

SEQ ID NO: 10739 - DNA, 18 bp, synthetic construct
  source 1..18: mol_type = other DNA
tacagctatcaaaaactt

SEQ ID NO: 10740 - DNA, 21 bp, synthetic construct
  source 1..21: mol_type = other DNA
gtcacaacagccaacaataag

SEQ ID NO: 10741 - DNA, 18 bp, synthetic construct
  source 1..18: mol_type = other DNA
tacagctatcaaaaactt

SEQ ID NO: 10742 - DNA, 15 bp, synthetic construct
  source 1..15: mol_type = other DNA
aatccttctgggaca

SEQ ID NO: 10743 - DNA, 18 bp, synthetic construct
  source 1..18: mol_type = other DNA
tacagctatcaaaaactt

SEQ ID NO: 10744 - DNA, 24 bp, synthetic construct
  source 1..24: mol_type = other DNA
tactattctggagacccagtggtt

SEQ ID NO: 10745 - DNA, 18 bp, synthetic construct
  source 1..18: mol_type = other DNA
tacagctatcaaaaactt

SEQ ID NO: 10746 - DNA, 15 bp, synthetic construct
  source 1..15: mol_type = other DNA
aatccttctgggaca

SEQ ID NO: 10747 - DNA, 18 bp, synthetic construct
  source 1..18: mol_type = other DNA
tacagctatcaaaaactt

SEQ ID NO: 10748 - DNA, 15 bp, synthetic construct
  source 1..15: mol_type = other DNA
aatccttctgggaca

SEQ ID NO: 10749 - DNA, 18 bp, synthetic construct
  source 1..18: mol_type = other DNA
tacagctatcaaaaactt

SEQ ID NO: 10750 - DNA, 21 bp, synthetic construct
  source 1..21: mol_type = other DNA
gtcattacggctggccagaag

SEQ ID NO: 10751 - DNA, 18 bp, synthetic construct
  source 1..18: mol_type = other DNA
tacaataataagcaactc

SEQ ID NO: 10752 - DNA, 15 bp, synthetic construct
  source 1..15: mol_type = other DNA
aatccttctgggaca

SEQ ID NO: 10753 - DNA, 18 bp, synthetic construct
  source 1..18: mol_type = other DNA
tacaataataagcaactc

SEQ ID NO: 10754 - DNA, 21 bp, synthetic construct
  source 1..21: mol_type = other DNA
attcgttcaaatgtggacaga

SEQ ID NO: 10755 - DNA, 18 bp, synthetic construct
  source 1..18: mol_type = other DNA
tacaataataagcaactc

SEQ ID NO: 10756 - DNA, 21 bp, synthetic construct
  source 1..21: mol_type = other DNA
gttttctcaagtacggaaata

SEQ ID NO: 10757 - DNA, 18 bp, synthetic construct
  source 1..18: mol_type = other DNA
tacaataataagcaactc

SEQ ID NO: 10758 - DNA, 21 bp, synthetic construct
  source 1..21: mol_type = other DNA
atacgttcagtgtccgataaa

SEQ ID NO: 10759 - DNA, 18 bp, synthetic construct
  source 1..18: mol_type = other DNA
tacaataataagcaactc

SEQ ID NO: 10760 - DNA, 15 bp, synthetic construct
  source 1..15: mol_type = other DNA
aatccttctgggaca

SEQ ID NO: 10761 - DNA, 18 bp, synthetic construct
  source 1..18: mol_type = other DNA
tacaataataagcaactc

SEQ ID NO: 10762 - DNA, 21 bp, synthetic construct
  source 1..21: mol_type = other DNA
atactttcagtgtccgataaa

SEQ ID NO: 10763 - DNA, 18 bp, synthetic construct
  source 1..18: mol_type = other DNA
tacaataataagcaactc

SEQ ID NO: 10764 - DNA, 18 bp, synthetic construct
  source 1..18: mol_type = other DNA
atcttctccaatggtgaa

SEQ ID NO: 10765 - DNA, 18 bp, synthetic construct
  source 1..18: mol_type = other DNA
tacaataataagcaactc

SEQ ID NO: 10766 - DNA, 21 bp, synthetic construct
  source 1..21: mol_type = other DNA
attcgttcaaatatggaaaga

SEQ ID NO: 10767 - DNA, 18 bp, synthetic construct
  source 1..18: mol_type = other DNA
tacaataataagcaactc

SEQ ID NO: 10768 - DNA, 24 bp, synthetic construct
  source 1..24: mol_type = other DNA
caggactcttacaaaaaggaaaat

SEQ ID NO: 10769 - DNA, 18 bp, synthetic construct
  source 1..18: mol_type = other DNA
tcatatggtgctggcagc

SEQ ID NO: 10770 - DNA, 24 bp, synthetic construct
  source 1..24: mol_type = other DNA
tactattccggagacccagtggtt

SEQ ID NO: 10771 - DNA, 18 bp, synthetic construct
  source 1..18: mol_type = other DNA
tcatatggtgctggcagc

SEQ ID NO: 10772 - DNA, 24 bp, synthetic construct
  source 1..24: mol_type = other DNA
tactattcaggagacccagtggtt

SEQ ID NO: 10773 - DNA, 18 bp, synthetic construct
  source 1..18: mol_type = other DNA
tcatatggtgctggcagc

SEQ ID NO: 10774 - DNA, 24 bp, synthetic construct
  source 1..24: mol_type = other DNA
caggactcttacaaaaaggaaaat

SEQ ID NO: 10775 - DNA, 18 bp, synthetic construct
  source 1..18: mol_type = other DNA
tcatatggtgctggcagc

SEQ ID NO: 10776 - DNA, 24 bp, synthetic construct
  source 1..24: mol_type = other DNA
caggactcttacaaaaaggaaaat

SEQ ID NO: 10777 - DNA, 18 bp, synthetic construct
  source 1..18: mol_type = other DNA
tcatatggtgctggcagc

SEQ ID NO: 10778 - DNA, 15 bp, synthetic construct
  source 1..15: mol_type = other DNA
aatccttctgggaca

SEQ ID NO: 10779 - DNA, 18 bp, synthetic construct
  source 1..18: mol_type = other DNA
tcatatggtgctggcagc

SEQ ID NO: 10780 - DNA, 21 bp, synthetic construct
  source 1..21: mol_type = other DNA
attcgttcaaatgtggacaga

SEQ ID NO: 10781 - DNA, 18 bp, synthetic construct
  source 1..18: mol_type = other DNA
tcatatggtgctggcagc

SEQ ID NO: 10782 - DNA, 15 bp, synthetic construct
  source 1..15: mol_type = other DNA
ggtctacaacaaaat

SEQ ID NO: 10783 - DNA, 18 bp, synthetic construct
  source 1..18: mol_type = other DNA
tcatatggtgctggcagc

SEQ ID NO: 10784 - DNA, 15 bp, synthetic construct
  source 1..15: mol_type = other DNA
aatccttctgggaca

SEQ ID NO: 10785 - DNA, 18 bp, synthetic construct
  source 1..18: mol_type = other DNA
tcatatggtgctggcaac

SEQ ID NO: 10786 - DNA, 24 bp, synthetic construct
  source 1..24: mol_type = other DNA
tacatcacaggagacgccgttgtt

SEQ ID NO: 10787 - DNA, 18 bp, synthetic construct
  source 1..18: mol_type = other DNA
tcatatggtgctggcaac

SEQ ID NO: 10788 - DNA, 24 bp, synthetic construct
  source 1..24: mol_type = other DNA
caggactcttacaaaaaggaaaat

SEQ ID NO: 10789 - DNA, 18 bp, synthetic construct
  source 1..18: mol_type = other DNA
tcatatggtgctggcaac

SEQ ID NO: 10790 - DNA, 21 bp, synthetic construct
  source 1..21: mol_type = other DNA
atccgttcaaatatggaaaga

SEQ ID NO: 10791 - DNA, 18 bp, synthetic construct
  source 1..18: mol_type = other DNA
tcatatggtgctggcaac

SEQ ID NO: 10792 - DNA, 15 bp, synthetic construct
  source 1..15: mol_type = other DNA
ctggtgccaggaaca

SEQ ID NO: 10793 - DNA, 18 bp, synthetic construct
  source 1..18: mol_type = other DNA
tcatatggtgctggcaac

SEQ ID NO: 10794 - DNA, 21 bp, synthetic construct
  source 1..21: mol_type = other DNA
atacgttcagtgtccgataaa

SEQ ID NO: 10795 - DNA, 18 bp, synthetic construct
  source 1..18: mol_type = other DNA
tcatatggtgctggcaac

SEQ ID NO: 10796 - DNA, 21 bp, synthetic construct
  source 1..21: mol_type = other DNA
gttttctcaagtacggaaata

SEQ ID NO: 10797 - DNA, 18 bp, synthetic construct
  source 1..18: mol_type = other DNA
tcatatggtgctggcaac

SEQ ID NO: 10798 - DNA, 21 bp, synthetic construct
  source 1..21: mol_type = other DNA
gtcacaacagccaacaacaag

SEQ ID NO: 10799 - DNA, 18 bp, synthetic construct
  source 1..18: mol_type = other DNA
tcatatgtcgctgacagc

SEQ ID NO: 10800 - DNA, 18 bp, synthetic construct
  source 1..18: mol_type = other DNA
gttgttttggatggtttg

SEQ ID NO: 10801 - DNA, 18 bp, synthetic construct
  source 1..18: mol_type = other DNA
tcatatgtcgctgacagc

SEQ ID NO: 10802 - DNA, 18 bp, synthetic construct
  source 1..18: mol_type = other DNA
atcttctccaatggtgaa

SEQ ID NO: 10803 - DNA, 18 bp, synthetic construct
  source 1..18: mol_type = other DNA
tcatatgtcgctgacagc

SEQ ID NO: 10804 - DNA, 24 bp, synthetic construct
  source 1..24: mol_type = other DNA
caggactcttacaaaaaggaaaat

SEQ ID NO: 10805 - DNA, 18 bp, synthetic construct
  source 1..18: mol_type = other DNA
tcatatgtcgctgacagc

SEQ ID NO: 10806 - DNA, 21 bp, synthetic construct
  source 1..21: mol_type = other DNA
gttttctcaagtacggaaata

SEQ ID NO: 10807 - DNA, 18 bp, synthetic construct
  source 1..18: mol_type = other DNA
tcatatgtcgctgacagc

SEQ ID NO: 10808 - DNA, 24 bp, synthetic construct
  source 1..24: mol_type = other DNA
tactattccggagacccagtggtt

SEQ ID NO: 10809 - DNA, 18 bp, synthetic construct
  source 1..18: mol_type = other DNA
tcatatgtcgctgacagc

SEQ ID NO: 10810 - DNA, 21 bp, synthetic construct
  source 1..21: mol_type = other DNA
ataagttcagtgtccgataaa

SEQ ID NO: 10811 - DNA, 18 bp, synthetic construct
  source 1..18: mol_type = other DNA
tcatatgtcgctgacagc

SEQ ID NO: 10812 - DNA, 18 bp, synthetic construct
  source 1..18: mol_type = other DNA
atcttctccaatggtgaa

SEQ ID NO: 10813 - DNA, 18 bp, synthetic construct
  source 1..18: mol_type = other DNA
tcatatgtcgctgacagc

SEQ ID NO: 10814 - DNA, 18 bp, synthetic construct
  source 1..18: mol_type = other DNA
gttgttttggatggtttg

SEQ ID NO: 10815 - DNA, 18 bp, synthetic construct
  source 1..18: mol_type = other DNA
tactatgataagattttg

SEQ ID NO: 10816 - DNA, 21 bp, synthetic construct
  source 1..21: mol_type = other DNA
gtacgctcaaatgtggataag

SEQ ID NO: 10817 - DNA, 18 bp, synthetic construct
  source 1..18: mol_type = other DNA
tactatgataagattttg

SEQ ID NO: 10818 - DNA, 21 bp, synthetic construct
  source 1..21: mol_type = other DNA
gtcctttcaaatgtggacaga

SEQ ID NO: 10819 - DNA, 15 bp, synthetic construct
  source 1..15: mol_type = other DNA
tctattactgttggc

SEQ ID NO: 10820 - DNA, 21 bp, synthetic construct
  source 1..21: mol_type = other DNA
atacgttcagtgtccgataaa

SEQ ID NO: 10821 - DNA, 15 bp, synthetic construct
  source 1..15: mol_type = other DNA
tctattactgttggc

SEQ ID NO: 10822 - DNA, 21 bp, synthetic construct
  source 1..21: mol_type = other DNA
ccaaaggccaacgagaaggga

SEQ ID NO: 10823 - DNA, 15 bp, synthetic construct
  source 1..15: mol_type = other DNA
tctattactgttggc

SEQ ID NO: 10824 - DNA, 24 bp, synthetic construct
  source 1..24: mol_type = other DNA
caaacgtcttcttctactgcaaaa

SEQ ID NO: 10825 - DNA, 15 bp, synthetic construct
  source 1..15: mol_type = other DNA
tctattactgttggc

SEQ ID NO: 10826 - DNA, 21 bp, synthetic construct
  source 1..21: mol_type = other DNA
attcgttcaaatgtggacaga

SEQ ID NO: 10827 - DNA, 21 bp, synthetic construct
  source 1..21: mol_type = other DNA
tctactgtgaactcagcaatc

SEQ ID NO: 10828 - DNA, 21 bp, synthetic construct
  source 1..21: mol_type = other DNA
gttttctcaagtacggaaata

SEQ ID NO: 10829 - DNA, 21 bp, synthetic construct
  source 1..21: mol_type = other DNA
tctactgtgaactcagcaatc

SEQ ID NO: 10830 - DNA, 21 bp, synthetic construct
  source 1..21: mol_type = other DNA
attcgttcaaatatggaaaga

SEQ ID NO: 10831 - DNA, 18 bp, synthetic construct
  source 1..18: mol_type = other DNA
tcaataactgaaaacgat

SEQ ID NO: 10832 - DNA, 21 bp, synthetic construct
  source 1..21: mol_type = other DNA
gcctcaagggacaaagagaaa

SEQ ID NO: 10833 - DNA, 18 bp, synthetic construct
  source 1..18: mol_type = other DNA
tcaataactgaaaacgat

SEQ ID NO: 10834 - DNA, 21 bp, synthetic construct
  source 1..21: mol_type = other DNA
attcgttcaaatgtggacaga

SEQ ID NO: 10835 - DNA, 18 bp, synthetic construct
  source 1..18: mol_type = other DNA
tcaataactgaaaacgat

SEQ ID NO: 10836 - DNA, 15 bp, synthetic construct
  source 1..15: mol_type = other DNA
ttggcttcaggaaca

SEQ ID NO: 10837 - DNA, 18 bp, synthetic construct
  source 1..18: mol_type = other DNA
tcaataactgaaaacgat

SEQ ID NO: 10838 - DNA, 21 bp, synthetic construct
  source 1..21: mol_type = other DNA
atacgtccagtgtccaataaa

SEQ ID NO: 10839 - DNA, 18 bp, synthetic construct
  source 1..18: mol_type = other DNA
tcaataactgaaaacgat

SEQ ID NO: 10840 - DNA, 21 bp, synthetic construct
  source 1..21: mol_type = other DNA
gcctcaagggacaaagagaaa

SEQ ID NO: 10841 - DNA, 18 bp, synthetic construct
  source 1..18: mol_type = other DNA
tcaataactgaaaacgat

SEQ ID NO: 10842 - DNA, 21 bp, synthetic construct
  source 1..21: mol_type = other DNA
gttttctcaagtacggaaata

SEQ ID NO: 10843 - DNA, 18 bp, synthetic construct
  source 1..18: mol_type = other DNA
tcaataactgaaaacgat

SEQ ID NO: 10844 - DNA, 21 bp, synthetic construct
  source 1..21: mol_type = other DNA
gtcacaactgccaacaacaag

SEQ ID NO: 10845 - DNA, 18 bp, synthetic construct
  source 1..18: mol_type = other DNA
tcaataactgaaaacgat

SEQ ID NO: 10846 - DNA, 21 bp, synthetic construct
  source 1..21: mol_type = other DNA
gtcattacggctggccagaag

SEQ ID NO: 10847 - DNA, 18 bp, synthetic construct
  source 1..18: mol_type = other DNA
tcaataactgaaaacgat

SEQ ID NO: 10848 - DNA, 21 bp, synthetic construct
  source 1..21: mol_type = other DNA
gttttctcaagtacggaaata

SEQ ID NO: 10849 - DNA, 18 bp, synthetic construct
  source 1..18: mol_type = other DNA
tcaataactgaaaacgat

SEQ ID NO: 10850 - DNA, 24 bp, synthetic construct
  source 1..24: mol_type = other DNA
tactattcaggagacccagtggtt

SEQ ID NO: 10851 - DNA, 18 bp, synthetic construct
  source 1..18: mol_type = other DNA
tcaataactgaaaacgat

SEQ ID NO: 10852 - DNA, 21 bp, synthetic construct
  source 1..21: mol_type = other DNA
agctccacagacaacaagagg

SEQ ID NO: 10853 - DNA, 18 bp, synthetic construct
  source 1..18: mol_type = other DNA
tcaataactgaaaacgat

SEQ ID NO: 10854 - DNA, 24 bp, synthetic construct
  source 1..24: mol_type = other DNA
tactattcaggagacccagtggtt

SEQ ID NO: 10855 - DNA, 18 bp, synthetic construct
  source 1..18: mol_type = other DNA
tcaataactgaaaacgat

SEQ ID NO: 10856 - DNA, 21 bp, synthetic construct
  source 1..21: mol_type = other DNA
atacgttcagtgtccgataaa

SEQ ID NO: 10857 - DNA, 18 bp, synthetic construct
  source 1..18: mol_type = other DNA
ctgcggagtcctggggac

SEQ ID NO: 10858 - DNA, 24 bp, synthetic construct
  source 1..24: mol_type = other DNA
tactattccggagacccagtggtt

SEQ ID NO: 10859 - DNA, 18 bp, synthetic construct
  source 1..18: mol_type = other DNA
ctgcggagtcctggggac

SEQ ID NO: 10860 - DNA, 24 bp, synthetic construct
  source 1..24: mol_type = other DNA
caggactcttacaaaaaggaaaat

SEQ ID NO: 10861 - DNA, 18 bp, synthetic construct
  source 1..18: mol_type = other DNA
ctgcggagtcctggggac

SEQ ID NO: 10862 - DNA, 18 bp, synthetic construct
  source 1..18: mol_type = other DNA
atcttctctgatggtgac

SEQ ID NO: 10863 - DNA, 18 bp, synthetic construct
  source 1..18: mol_type = other DNA
ctgcggagtcctggggac

SEQ ID NO: 10864 - DNA, 15 bp, synthetic construct
  source 1..15: mol_type = other DNA
ctggtgccaggaaca

SEQ ID NO: 10865 - DNA, 18 bp, synthetic construct
  source 1..18: mol_type = other DNA
ctgcggagtcctggggac

SEQ ID NO: 10866 - DNA, 21 bp, synthetic construct
  source 1..21: mol_type = other DNA
gtcattacggctggccagaag

SEQ ID NO: 10867 - DNA, 18 bp, synthetic construct
  source 1..18: mol_type = other DNA
ctgcggagtcctggggac

SEQ ID NO: 10868 - DNA, 18 bp, synthetic construct
  source 1..18: mol_type = other DNA
atcttctccaatggtgaa

SEQ ID NO: 10869 - DNA, 18 bp, synthetic construct
  source 1..18: mol_type = other DNA
ctgcggagtcctggggac

SEQ ID NO: 10870 - DNA, 24 bp, synthetic construct
  source 1..24: mol_type = other DNA
tactattccggagacccagtggtt

SEQ ID NO: 10871 - DNA, 18 bp, synthetic construct
  source 1..18: mol_type = other DNA
tacaatcttaaacagttg

SEQ ID NO: 10872 - DNA, 15 bp, synthetic construct
  source 1..15: mol_type = other DNA
ggtctacaacaaaat

SEQ ID NO: 10873 - DNA, 18 bp, synthetic construct
  source 1..18: mol_type = other DNA
tacaatcttaaacagttg

SEQ ID NO: 10874 - DNA, 24 bp, synthetic construct
  source 1..24: mol_type = other DNA
tactattccggagacccagtggtt

SEQ ID NO: 10875 - DNA, 18 bp, synthetic construct
  source 1..18: mol_type = other DNA
tacaatcttaaacagttg

SEQ ID NO: 10876 - DNA, 21 bp, synthetic construct
  source 1..21: mol_type = other DNA
gttttctcaagtacggaaata

SEQ ID NO: 10877 - DNA, 18 bp, synthetic construct
  source 1..18: mol_type = other DNA
tacaatcttaaacagttg

SEQ ID NO: 10878 - DNA, 21 bp, synthetic construct
  source 1..21: mol_type = other DNA
gtcattacggctggccagaag

SEQ ID NO: 10879 - DNA, 18 bp, synthetic construct
  source 1..18: mol_type = other DNA
tacaatcttaaacagttg

SEQ ID NO: 10880 - DNA, 21 bp, synthetic construct
  source 1..21: mol_type = other DNA
gtcattacggctggccagaag

SEQ ID NO: 10881 - DNA, 18 bp, synthetic construct
  source 1..18: mol_type = other DNA
tacaatcttaaacagttg

SEQ ID NO: 10882 - DNA, 15 bp, synthetic construct
  source 1..15: mol_type = other DNA
ttggcttcaggaaca

SEQ ID NO: 10883 - DNA, 18 bp, synthetic construct
  source 1..18: mol_type = other DNA
tacaatcttaaacagttg

SEQ ID NO: 10884 - DNA, 18 bp, synthetic construct
  source 1..18: mol_type = other DNA
gttgttttggatggtttg

SEQ ID NO: 10885 - DNA, 18 bp, synthetic construct
  source 1..18: mol_type = other DNA
tacaatcttaaacagttg

SEQ ID NO: 10886 - DNA, 18 bp, synthetic construct
  source 1..18: mol_type = other DNA
atcttctccaatggtgaa

SEQ ID NO: 10887 - DNA, 18 bp, synthetic construct
  source 1..18: mol_type = other DNA
tacaatcttaaacagttg

SEQ ID NO: 10888 - DNA, 21 bp, synthetic construct
  source 1..21: mol_type = other DNA
gtcattacggctggccagaag

SEQ ID NO: 10889 - DNA, 18 bp, synthetic construct
  source 1..18: mol_type = other DNA
tacaatcttaaacagttg

SEQ ID NO: 10890 - DNA, 24 bp, synthetic construct
  source 1..24: mol_type = other DNA
tactattcgggaaacccagtggtt

SEQ ID NO: 10891 - DNA, 18 bp, synthetic construct
  source 1..18: mol_type = other DNA
tacaatcttaaacagttg

SEQ ID NO: 10892 - DNA, 21 bp, synthetic construct
  source 1..21: mol_type = other DNA
gtacgctcaaatgtggataag

SEQ ID NO: 10893 - DNA, 18 bp, synthetic construct
  source 1..18: mol_type = other DNA
tacaatcttaaacagttg

SEQ ID NO: 10894 - DNA, 24 bp, synthetic construct
  source 1..24: mol_type = other DNA
caggactcttacaaaaaggaaaat

SEQ ID NO: 10895 - DNA, 18 bp, synthetic construct
  source 1..18: mol_type = other DNA
tacaatcttaaacagttg

SEQ ID NO: 10896 - DNA, 21 bp, synthetic construct
  source 1..21: mol_type = other DNA
gtcattacggctggccagaag

SEQ ID NO: 10897 - DNA, 18 bp, synthetic construct
  source 1..18: mol_type = other DNA
tacaatcttaaacagttg

SEQ ID NO: 10898 - DNA, 21 bp, synthetic construct
  source 1..21: mol_type = other DNA
gtcacaactgccaacaacaag

SEQ ID NO: 10899 - DNA, 18 bp, synthetic construct
  source 1..18: mol_type = other DNA
tacaatcttaaacagttg

SEQ ID NO: 10900 - DNA, 15 bp, synthetic construct
  source 1..15: mol_type = other DNA
aatccttctgggaca

SEQ ID NO: 10901 - DNA, 18 bp, synthetic construct
  source 1..18: mol_type = other DNA
tacaatcttaaacagttg

SEQ ID NO: 10902 - DNA, 24 bp, synthetic construct
  source 1..24: mol_type = other DNA
tactattccggagacccagtggtt

SEQ ID NO: 10903 - DNA, 18 bp, synthetic construct
  source 1..18: mol_type = other DNA
tacaatcttaaacagttg

SEQ ID NO: 10904 - DNA, 21 bp, synthetic construct
  source 1..21: mol_type = other DNA
gtcattacggctggccagaag

SEQ ID NO: 10905 - DNA, 18 bp, synthetic construct
  source 1..18: mol_type = other DNA
tacaatcttaaacagttg

SEQ ID NO: 10906 - DNA, 21 bp, synthetic construct
  source 1..21: mol_type = other DNA
gcctcaagggacaaagagaaa

SEQ ID NO: 10907 - DNA, 18 bp, synthetic construct
  source 1..18: mol_type = other DNA
tacaatcttaaacagttg

SEQ ID NO: 10908 - DNA, 18 bp, synthetic construct
  source 1..18: mol_type = other DNA
gttgttttggatggtttg

SEQ ID NO: 10909 - DNA, 18 bp, synthetic construct
  source 1..18: mol_type = other DNA
tacaatcttaaacagttg

SEQ ID NO: 10910 - DNA, 24 bp, synthetic construct
  source 1..24: mol_type = other DNA
caggactcttacaaaaaggaaaat

SEQ ID NO: 10911 - DNA, 18 bp, synthetic construct
  source 1..18: mol_type = other DNA
tacaatcttaaacagttg

SEQ ID NO: 10912 - DNA, 18 bp, synthetic construct
  source 1..18: mol_type = other DNA
atcttctctgatggtgac

SEQ ID NO: 10913 - DNA, 18 bp, synthetic construct
  source 1..18: mol_type = other DNA
tacaatcttaaacagttg

SEQ ID NO: 10914 - DNA, 18 bp, synthetic construct
  source 1..18: mol_type = other DNA
atcttctccaatggtgaa

SEQ ID NO: 10915 - DNA, 18 bp, synthetic construct
  source 1..18: mol_type = other DNA
tacaatcttaaacagttg

SEQ ID NO: 10916 - DNA, 15 bp, synthetic construct
  source 1..15: mol_type = other DNA
aatccttctgggaca

SEQ ID NO: 10917 - DNA, 18 bp, synthetic construct
  source 1..18: mol_type = other DNA
tacaatcttaaacagttg

SEQ ID NO: 10918 - DNA, 21 bp, synthetic construct
  source 1..21: mol_type = other DNA
ctggttgaccaaaaagacaaa

SEQ ID NO: 10919 - DNA, 18 bp, synthetic construct
  source 1..18: mol_type = other DNA
tacaatcttaaacagttg

SEQ ID NO: 10920 - DNA, 21 bp, synthetic construct
  source 1..21: mol_type = other DNA
ataagttcagtgtccgataaa

SEQ ID NO: 10921 - DNA, 18 bp, synthetic construct
  source 1..18: mol_type = other DNA
tacaatcttaaacagttg

SEQ ID NO: 10922 - DNA, 21 bp, synthetic construct
  source 1..21: mol_type = other DNA
gtcattacggctggccagaag

SEQ ID NO: 10923 - DNA, 18 bp, synthetic construct
  source 1..18: mol_type = other DNA
tacaatcttaaacagttg

SEQ ID NO: 10924 - DNA, 21 bp, synthetic construct
  source 1..21: mol_type = other DNA
agcttcacagacaacaagagg

SEQ ID NO: 10925 - DNA, 18 bp, synthetic construct
  source 1..18: mol_type = other DNA
tacaatcttaaacagttg

SEQ ID NO: 10926 - DNA, 21 bp, synthetic construct
  source 1..21: mol_type = other DNA
gttttctcaagtacggaaata

SEQ ID NO: 10927 - DNA, 18 bp, synthetic construct
  source 1..18: mol_type = other DNA
tacaatcttaaacagttg

SEQ ID NO: 10928 - DNA, 21 bp, synthetic construct
  source 1..21: mol_type = other DNA
ggatataaggactatgtggta

SEQ ID NO: 10929 - DNA, 18 bp, synthetic construct
  source 1..18: mol_type = other DNA
tacaatcttaaacagttg

SEQ ID NO: 10930 - DNA, 24 bp, synthetic construct
  source 1..24: mol_type = other DNA
tacatcacaggagacaccgttgtt

SEQ ID NO: 10931 - DNA, 18 bp, synthetic construct
  source 1..18: mol_type = other DNA
tacaatcttaaacagttg

SEQ ID NO: 10932 - DNA, 18 bp, synthetic construct
  source 1..18: mol_type = other DNA
atcttctccaatggtgaa

SEQ ID NO: 10933 - DNA, 18 bp, synthetic construct
  source 1..18: mol_type = other DNA
tacaatcttaaacagttg

SEQ ID NO: 10934 - DNA, 15 bp, synthetic construct
  source 1..15: mol_type = other DNA
aatccttctgggaca

SEQ ID NO: 10935 - DNA, 18 bp, synthetic construct
  source 1..18: mol_type = other DNA
tacaatcttaaacagttg

SEQ ID NO: 10936 - DNA, 24 bp, synthetic construct
  source 1..24: mol_type = other DNA
tactattcaggagacccagtggtt

SEQ ID NO: 10937 - DNA, 18 bp, synthetic construct
  source 1..18: mol_type = other DNA
tacaatcttaaacagttg

SEQ ID NO: 10938 - DNA, 15 bp, synthetic construct
  source 1..15: mol_type = other DNA
ctggttccaggaaca

SEQ ID NO: 10939 - DNA, 18 bp, synthetic construct
  source 1..18: mol_type = other DNA
tacaatcttaaacagttg

SEQ ID NO: 10940 - DNA, 24 bp, synthetic construct
  source 1..24: mol_type = other DNA
caggactcttacaaaaaggaaaat

SEQ ID NO: 10941 - DNA, 18 bp, synthetic construct
  source 1..18: mol_type = other DNA
tttcgaaatcaagctcct

SEQ ID NO: 10942 - DNA, 24 bp, synthetic construct
  source 1..24: mol_type = other DNA
tactatccaggagacccagtggtt

SEQ ID NO: 10943 - DNA, 18 bp, synthetic construct
  source 1..18: mol_type = other DNA
tttcgaaatcaagctcct

SEQ ID NO: 10944 - DNA, 21 bp, synthetic construct
  source 1..21: mol_type = other DNA
atacgttcaaatgagagagag

SEQ ID NO: 10945 - DNA, 18 bp, synthetic construct
  source 1..18: mol_type = other DNA
tttcgaaatcaagctcct

SEQ ID NO: 10946 - DNA, 21 bp, synthetic construct
  source 1..21: mol_type = other DNA
atacgttcaaatgagagagag

SEQ ID NO: 10947 - DNA, 18 bp, synthetic construct
  source 1..18: mol_type = other DNA
tttcgaaatcaagctcct

SEQ ID NO: 10948 - DNA, 24 bp, synthetic construct
  source 1..24: mol_type = other DNA
tactattcaggagacccagtggtt

SEQ ID NO: 10949 - DNA, 18 bp, synthetic construct
  source 1..18: mol_type = other DNA
tttcgaaatcaagctcct

SEQ ID NO: 10950 - DNA, 18 bp, synthetic construct
  source 1..18: mol_type = other DNA
atcttctccaatggtgaa

SEQ ID NO: 10951 - DNA, 18 bp, synthetic construct
  source 1..18: mol_type = other DNA
tttcgaaatcaagctcct

SEQ ID NO: 10952 - DNA, 15 bp, synthetic construct
  source 1..15: mol_type = other DNA
ttggcttcaggaaca

SEQ ID NO: 10953 - DNA, 18 bp, synthetic construct
  source 1..18: mol_type = other DNA
cattatgataaaatggag

SEQ ID NO: 10954 - DNA, 15 bp, synthetic construct
  source 1..15: mol_type = other DNA
aatccttctgggaca

SEQ ID NO: 10955 - DNA, 21 bp, synthetic construct
  source 1..21: mol_type = other DNA
gcaaatgaaggctctgaagcc

SEQ ID NO: 10956 - DNA, 24 bp, synthetic construct
  source 1..24: mol_type = other DNA
tactattcaggagacccagtggtt

SEQ ID NO: 10957 - DNA, 21 bp, synthetic construct
  source 1..21: mol_type = other DNA
gcaaatgaaggctctgaagcc

SEQ ID NO: 10958 - DNA, 21 bp, synthetic construct
  source 1..21: mol_type = other DNA
attcgttcaaatatggaaaga

SEQ ID NO: 10959 - DNA, 21 bp, synthetic construct
  source 1..21: mol_type = other DNA
gcaaatgaaggctctgaagcc

SEQ ID NO: 10960 - DNA, 18 bp, synthetic construct
  source 1..18: mol_type = other DNA
atcttctccaatggtgaa

SEQ ID NO: 10961 - DNA, 18 bp, synthetic construct
  source 1..18: mol_type = other DNA
tttcgggatgaggctgtt

SEQ ID NO: 10962 - DNA, 18 bp, synthetic construct
  source 1..18: mol_type = other DNA
atcttctctgatggtgac

SEQ ID NO: 10963 - DNA, 18 bp, synthetic construct
  source 1..18: mol_type = other DNA
tttcgggatgaggctgtt

SEQ ID NO: 10964 - DNA, 24 bp, synthetic construct
  source 1..24: mol_type = other DNA
caggactcttacaaaaaggaaaat

SEQ ID NO: 10965 - DNA, 18 bp, synthetic construct
  source 1..18: mol_type = other DNA
tttcgggatgaggctgtt

SEQ ID NO: 10966 - DNA, 21 bp, synthetic construct
  source 1..21: mol_type = other DNA
gcctcaagggacaaagagaaa

SEQ ID NO: 10967 - DNA, 18 bp, synthetic construct
  source 1..18: mol_type = other DNA
tttcgggatgaggctgtt

SEQ ID NO: 10968 - DNA, 21 bp, synthetic construct
  source 1..21: mol_type = other DNA
gtcccaaaggccaacgagaag

SEQ ID NO: 10969 - DNA, 18 bp, synthetic construct
  source 1..18: mol_type = other DNA
tttcgggatgaggctgtt

SEQ ID NO: 10970 - DNA, 24 bp, synthetic construct
  source 1..24: mol_type = other DNA
tactattcgggaaacccagtggtt

SEQ ID NO: 10971 - DNA, 18 bp, synthetic construct
  source 1..18: mol_type = other DNA
tttcgggatgaggctgtt

SEQ ID NO: 10972 - DNA, 21 bp, synthetic construct
  source 1..21: mol_type = other DNA
gtacgctcaaatgtggataag

SEQ ID NO: 10973 - DNA, 18 bp, synthetic construct
  source 1..18: mol_type = other DNA
tttcgggatgaggctgtt

SEQ ID NO: 10974 - DNA, 21 bp, synthetic construct
  source 1..21: mol_type = other DNA
gcctcaagggacaaagagaaa

SEQ ID NO: 10975 - DNA, 18 bp, synthetic construct
  source 1..18: mol_type = other DNA
tttcgggatgaggctgtt

SEQ ID NO: 10976 - DNA, 21 bp, synthetic construct
  source 1..21: mol_type = other DNA
gtcccaaaggccaacgagaag

SEQ ID NO: 10977 - DNA, 18 bp, synthetic construct
  source 1..18: mol_type = other DNA
tttcgggatgaggctgtt

SEQ ID NO: 10978 - DNA, 24 bp, synthetic construct
  source 1..24: mol_type = other DNA
tactattcaggagacccagtggtt

SEQ ID NO: 10979 - DNA, 18 bp, synthetic construct
  source 1..18: mol_type = other DNA
tttcgggatgaggctgtt

SEQ ID NO: 10980 - DNA, 24 bp, synthetic construct
  source 1..24: mol_type = other DNA
tactattcaggagacccagtggtt

SEQ ID NO: 10981 - DNA, 18 bp, synthetic construct
  source 1..18: mol_type = other DNA
tttcgggatgaggctgtt

SEQ ID NO: 10982 - DNA, 21 bp, synthetic construct
  source 1..21: mol_type = other DNA
gtacgctcaaatgtggataag

SEQ ID NO: 10983 - DNA, 18 bp, synthetic construct
  source 1..18: mol_type = other DNA
tttcgggatgaggctgtt

SEQ ID NO: 10984 - DNA, 18 bp, synthetic construct
  source 1..18: mol_type = other DNA
atcttctctgatggtgac

SEQ ID NO: 10985 - DNA, 18 bp, synthetic construct
  source 1..18: mol_type = other DNA
tttcgggatgaggctgtt

SEQ ID NO: 10986 - DNA, 18 bp, synthetic construct
  source 1..18: mol_type = other DNA
atcttctctgatggtgac

SEQ ID NO: 10987 - DNA, 18 bp, synthetic construct
  source 1..18: mol_type = other DNA
tttcgggatgaggctgtt

SEQ ID NO: 10988 - DNA, 21 bp, synthetic construct
  source 1..21: mol_type = other DNA
gtcattacggctggccagaag

SEQ ID NO: 10989 - DNA, 18 bp, synthetic construct
  source 1..18: mol_type = other DNA
tttcgggatgaggctgtt

SEQ ID NO: 10990 - DNA, 21 bp, synthetic construct
  source 1..21: mol_type = other DNA
attcgttcaaatatggaaaga

SEQ ID NO: 10991 - DNA, 18 bp, synthetic construct
  source 1..18: mol_type = other DNA
tttcgggatgaggctgtt

SEQ ID NO: 10992 - DNA, 15 bp, synthetic construct
  source 1..15: mol_type = other DNA
aatccttctgggaca

SEQ ID NO: 10993 - DNA, 18 bp, synthetic construct
  source 1..18: mol_type = other DNA
tttcgggatgaggctgtt

SEQ ID NO: 10994 - DNA, 21 bp, synthetic construct
  source 1..21: mol_type = other DNA
agctccacagacaacaagagg

SEQ ID NO: 10995 - DNA, 18 bp, synthetic construct
  source 1..18: mol_type = other DNA
tttcgggatgaggctgtt

SEQ ID NO: 10996 - DNA, 21 bp, synthetic construct
  source 1..21: mol_type = other DNA
gtcattacggctggccagaag

SEQ ID NO: 10997 - DNA, 18 bp, synthetic construct
  source 1..18: mol_type = other DNA
tttcgggatgaggctgtt

SEQ ID NO: 10998 - DNA, 24 bp, synthetic construct
  source 1..24: mol_type = other DNA
caggactcttacaaaaaggaaaat

SEQ ID NO: 10999 - DNA, 18 bp, synthetic construct
  source 1..18: mol_type = other DNA
tttcgggatgaggctgtt

SEQ ID NO: 11000 - DNA, 24 bp, synthetic construct
  source 1..24: mol_type = other DNA
caggactcttacaaaaaggaaaat

SEQ ID NO: 11001 - DNA, 18 bp, synthetic construct
  source 1..18: mol_type = other DNA
tttcgggatgaggctgtt

SEQ ID NO: 11002 - DNA, 21 bp, synthetic construct
  source 1..21: mol_type = other DNA
atacgttcaaatgagagagag

SEQ ID NO: 11003 - DNA, 18 bp, synthetic construct
  source 1..18: mol_type = other DNA
tttcgggatgaggctgtt

SEQ ID NO: 11004 - DNA, 24 bp, synthetic construct
  source 1..24: mol_type = other DNA
tactattcaggagacccagtggtt

SEQ ID NO: 11005 - DNA, 18 bp, synthetic construct
  source 1..18: mol_type = other DNA
tttcgggatgaggctgtt

SEQ ID NO: 11006 - DNA, 21 bp, synthetic construct
  source 1..21: mol_type = other DNA
atacgttcagtgtccgataaa

SEQ ID NO: 11007 - DNA, 18 bp, synthetic construct
  source 1..18: mol_type = other DNA
tttcgggatgaggctgtt

SEQ ID NO: 11008 - DNA, 15 bp, synthetic construct
  source 1..15: mol_type = other DNA
ttggcttcaggaaca

SEQ ID NO: 11009 - DNA, 18 bp, synthetic construct
  source 1..18: mol_type = other DNA
tttcgggatgaggctgtt

SEQ ID NO: 11010 - DNA, 21 bp, synthetic construct
  source 1..21: mol_type = other DNA
gcctcaagggacaaagagaaa

SEQ ID NO: 11011 - DNA, 18 bp, synthetic construct
  source 1..18: mol_type = other DNA
tttcgggatgaggctgtt

SEQ ID NO: 11012 - DNA, 21 bp, synthetic construct
  source 1..21: mol_type = other DNA
gtcccaaaggccaacgagaag

SEQ ID NO: 11013 - DNA, 18 bp, synthetic construct
  source 1..18: mol_type = other DNA
tttcgggatgaggctgtt

SEQ ID NO: 11014 - DNA, 24 bp, synthetic construct
  source 1..24: mol_type = other DNA
tactatccaggagacccagtggtt

SEQ ID NO: 11015 - DNA, 18 bp, synthetic construct
  source 1..18: mol_type = other DNA
tttcgggatgaggctgtt

SEQ ID NO: 11016 - DNA, 21 bp, synthetic construct
  source 1..21: mol_type = other DNA
attcgttcaaatatggaaaga

SEQ ID NO: 11017 - DNA, 18 bp, synthetic construct
  source 1..18: mol_type = other DNA
tttcgggatgaggctgtt

SEQ ID NO: 11018 - DNA, 24 bp, synthetic construct
  source 1..24: mol_type = other DNA
tactattcgggaaacccagtggtt

SEQ ID NO: 11019 - DNA, 18 bp, synthetic construct
  source 1..18: mol_type = other DNA
tcatacgatgttgatagt

SEQ ID NO: 11020 - DNA, 21 bp, synthetic construct
  source 1..21: mol_type = other DNA
gtcattacggctggccagaag

SEQ ID NO: 11021 - DNA, 18 bp, synthetic construct
  source 1..18: mol_type = other DNA
tcatacgatgttgatagt

SEQ ID NO: 11022 - DNA, 18 bp, synthetic construct
  source 1..18: mol_type = other DNA
atcttctccaatggtgaa

SEQ ID NO: 11023 - DNA, 18 bp, synthetic construct
  source 1..18: mol_type = other DNA
tcatacgatgttgatagt

SEQ ID NO: 11024 - DNA, 24 bp, synthetic construct
  source 1..24: mol_type = other DNA
tactatccaggagacccagtggtt

SEQ ID NO: 11025 - DNA, 18 bp, synthetic construct
  source 1..18: mol_type = other DNA
tcatacgatgttgatagt

SEQ ID NO: 11026 - DNA, 21 bp, synthetic construct
  source 1..21: mol_type = other DNA
atacgttcaaatgagagagag

SEQ ID NO: 11027 - DNA, 18 bp, synthetic construct
  source 1..18: mol_type = other DNA
tcatacgatgttgatagt

SEQ ID NO: 11028 - DNA, 18 bp, synthetic construct
  source 1..18: mol_type = other DNA
gttgttttggatggtttg

SEQ ID NO: 11029 - DNA, 18 bp, synthetic construct
  source 1..18: mol_type = other DNA
tcatacgatgttgatagt

SEQ ID NO: 11030 - DNA, 21 bp, synthetic construct
  source 1..21: mol_type = other DNA
agctccacagacaacaagagg

SEQ ID NO: 11031 - DNA, 18 bp, synthetic construct
  source 1..18: mol_type = other DNA
tcatacgatgttgatagt

SEQ ID NO: 11032 - DNA, 21 bp, synthetic construct
  source 1..21: mol_type = other DNA
gtcacaacagccaacaacaag

SEQ ID NO: 11033 - DNA, 18 bp, synthetic construct
  source 1..18: mol_type = other DNA
tacagctatcaaaaactt

SEQ ID NO: 11034 - DNA, 15 bp, synthetic construct
  source 1..15: mol_type = other DNA
aatccttctgggaca

SEQ ID NO: 11035 - DNA, 18 bp, synthetic construct
  source 1..18: mol_type = other DNA
tacagctatcaaaaactt

SEQ ID NO: 11036 - DNA, 21 bp, synthetic construct
  source 1..21: mol_type = other DNA
atactttcagtgtccaataaa

SEQ ID NO: 11037 - DNA, 18 bp, synthetic construct
  source 1..18: mol_type = other DNA
tacagctatcaaaaactt

SEQ ID NO: 11038 - DNA, 21 bp, synthetic construct
  source 1..21: mol_type = other DNA
atacgttcaaatgagcgagag

SEQ ID NO: 11039 - DNA, 18 bp, synthetic construct
  source 1..18: mol_type = other DNA
tacagctatcaaaaactt

SEQ ID NO: 11040 - DNA, 24 bp, synthetic construct
  source 1..24: mol_type = other DNA
tactatccaggagacccagtggtt

SEQ ID NO: 11041 - DNA, 18 bp, synthetic construct
  source 1..18: mol_type = other DNA
tacagctatcaaaaactt

SEQ ID NO: 11042 - DNA, 18 bp, synthetic construct
  source 1..18: mol_type = other DNA
atcttctccaatggtgaa

SEQ ID NO: 11043 - DNA, 18 bp, synthetic construct
  source 1..18: mol_type = other DNA
tacagctatcaaaaactt

SEQ ID NO: 11044 - DNA, 18 bp, synthetic construct
  source 1..18: mol_type = other DNA
atcttctctgatggtgaa

SEQ ID NO: 11045 - DNA, 18 bp, synthetic construct
  source 1..18: mol_type = other DNA
tacagctatcaaaaactt

SEQ ID NO: 11046 - DNA, 18 bp, synthetic construct
  source 1..18: mol_type = other DNA
atcttctctgatggtgac

SEQ ID NO: 11047 - DNA, 18 bp, synthetic construct
  source 1..18: mol_type = other DNA
tacagctatcaaaaactt

SEQ ID NO: 11048 - DNA, 24 bp, synthetic construct
  source 1..24: mol_type = other DNA
caggactcttacaaaaaggaaaat

SEQ ID NO: 11049 - DNA, 18 bp, synthetic construct
  source 1..18: mol_type = other DNA
tacagctatcaaaaactt

SEQ ID NO: 11050 - DNA, 24 bp, synthetic construct
  source 1..24: mol_type = other DNA
caggactcttacaaaaaggaaaat

SEQ ID NO: 11051 - DNA, 18 bp, synthetic construct
  source 1..18: mol_type = other DNA
tacagctatcaaaaactt

SEQ ID NO: 11052 - DNA, 21 bp, synthetic construct
  source 1..21: mol_type = other DNA
gtcattacggctggccagaag

SEQ ID NO: 11053 - DNA, 18 bp, synthetic construct
  source 1..18: mol_type = other DNA
tacagctatcaaaaactt

SEQ ID NO: 11054 - DNA, 21 bp, synthetic construct
  source 1..21: mol_type = other DNA
gtcacaacagccaacaacaag

SEQ ID NO: 11055 - DNA, 18 bp, synthetic construct
  source 1..18: mol_type = other DNA
tacagctatcaaaaactt

SEQ ID NO: 11056 - DNA, 21 bp, synthetic construct
  source 1..21: mol_type = other DNA
gcctcaagggacaaagagaaa

SEQ ID NO: 11057 - DNA, 18 bp, synthetic construct
  source 1..18: mol_type = other DNA
tacagctatcaaaaactt

SEQ ID NO: 11058 - DNA, 18 bp, synthetic construct
  source 1..18: mol_type = other DNA
atcttctccaatggtgac

SEQ ID NO: 11059 - DNA, 18 bp, synthetic construct
  source 1..18: mol_type = other DNA
tacagctatcaaaaactt

SEQ ID NO: 11060 - DNA, 21 bp, synthetic construct
  source 1..21: mol_type = other DNA
attcgttcaaatgtggacaga

SEQ ID NO: 11061 - DNA, 18 bp, synthetic construct
  source 1..18: mol_type = other DNA
tacagctatcaaaaactt

SEQ ID NO: 11062 - DNA, 24 bp, synthetic construct
  source 1..24: mol_type = other DNA
caggactcttacaaaaaggaaaat

SEQ ID NO: 11063 - DNA, 18 bp, synthetic construct
  source 1..18: mol_type = other DNA
tacagctatcaaaaactt

SEQ ID NO: 11064 - DNA, 24 bp, synthetic construct
  source 1..24: mol_type = other DNA
tactattcaggagacccagtggtt

SEQ ID NO: 11065 - DNA, 18 bp, synthetic construct
  source 1..18: mol_type = other DNA
tacagctatcaaaaactt

SEQ ID NO: 11066 - DNA, 21 bp, synthetic construct
  source 1..21: mol_type = other DNA
atacgttcaaatgagagagag

SEQ ID NO: 11067 - DNA, 18 bp, synthetic construct
  source 1..18: mol_type = other DNA
tacagctatcaaaaactt

SEQ ID NO: 11068 - DNA, 15 bp, synthetic construct
  source 1..15: mol_type = other DNA
aatccttctgggaca

SEQ ID NO: 11069 - DNA, 18 bp, synthetic construct
  source 1..18: mol_type = other DNA
tacagctatcaaaaactt

SEQ ID NO: 11070 - DNA, 21 bp, synthetic construct
  source 1..21: mol_type = other DNA
gttttctcaagtacggaaata

SEQ ID NO: 11071 - DNA, 18 bp, synthetic construct
  source 1..18: mol_type = other DNA
tacagctatcaaaaactt

SEQ ID NO: 11072 - DNA, 24 bp, synthetic construct
  source 1..24: mol_type = other DNA
tactattctggagacccagtggtt

SEQ ID NO: 11073 - DNA, 18 bp, synthetic construct
  source 1..18: mol_type = other DNA
tacagctatcaaaaactt

SEQ ID NO: 11074 - DNA, 18 bp, synthetic construct
  source 1..18: mol_type = other DNA
atcttctccaatggtgaa

SEQ ID NO: 11075 - DNA, 18 bp, synthetic construct
  source 1..18: mol_type = other DNA
tacagctatcaaaaactt

SEQ ID NO: 11076 - DNA, 21 bp, synthetic construct
  source 1..21: mol_type = other DNA
gtacgctcaaatgtggataag

SEQ ID NO: 11077 - DNA, 18 bp, synthetic construct
  source 1..18: mol_type = other DNA
tacagctatcaaaaactt

SEQ ID NO: 11078 - DNA, 15 bp, synthetic construct
  source 1..15: mol_type = other DNA
aatccttctgggaca

SEQ ID NO: 11079 - DNA, 18 bp, synthetic construct
  source 1..18: mol_type = other DNA
tacagctatcaaaaactt

SEQ ID NO: 11080 - DNA, 18 bp, synthetic construct
  source 1..18: mol_type = other DNA
atcttctccaatggtgaa

SEQ ID NO: 11081 - DNA, 18 bp, synthetic construct
  source 1..18: mol_type = other DNA
tacagctatcaaaaactt

SEQ ID NO: 11082 - DNA, 15 bp, synthetic construct
  source 1..15: mol_type = other DNA
aatccttctgggaca

SEQ ID NO: 11083 - DNA, 18 bp, synthetic construct
  source 1..18: mol_type = other DNA
tacagctatcaaaaactt

SEQ ID NO: 11084 - DNA, 21 bp, synthetic construct
  source 1..21: mol_type = other DNA
attcgttcaaatatggaaaga

SEQ ID NO: 11085 - DNA, 18 bp, synthetic construct
  source 1..18: mol_type = other DNA
tacagctatcaaaaactt

SEQ ID NO: 11086 - DNA, 21 bp, synthetic construct
  source 1..21: mol_type = other DNA
gtcccaaaggccaacgagaag

SEQ ID NO: 11087 - DNA, 18 bp, synthetic construct
  source 1..18: mol_type = other DNA
tacagctatcaaaaactt

SEQ ID NO: 11088 - DNA, 21 bp, synthetic construct
  source 1..21: mol_type = other DNA
ggatataaggactatgtggta

SEQ ID NO: 11089 - DNA, 18 bp, synthetic construct
  source 1..18: mol_type = other DNA
tacagctatcaaaaactt

SEQ ID NO: 11090 - DNA, 21 bp, synthetic construct
  source 1..21: mol_type = other DNA
ggatataaggactatgtggta

SEQ ID NO: 11091 - DNA, 18 bp, synthetic construct
  source 1..18: mol_type = other DNA
tacagctatcaaaaactt

SEQ ID NO: 11092 - DNA, 21 bp, synthetic construct
  source 1..21: mol_type = other DNA
attcgttcaaatgtggacaga

SEQ ID NO: 11093 - DNA, 18 bp, synthetic construct
  source 1..18: mol_type = other DNA
tacagctatcaaaaactt

SEQ ID NO: 11094 - DNA, 21 bp, synthetic construct
  source 1..21: mol_type = other DNA
attcgttcaaatgtggacaga

SEQ ID NO: 11095 - DNA, 18 bp, synthetic construct
  source 1..18: mol_type = other DNA
tacagctatcaaaaactt

SEQ ID NO: 11096 - DNA, 21 bp, synthetic construct
  source 1..21: mol_type = other DNA
gtacgctcaaatgtggataag

SEQ ID NO: 11097 - DNA, 18 bp, synthetic construct
  source 1..18: mol_type = other DNA
tacagctatcaaaaactt

SEQ ID NO: 11098 - DNA, 21 bp, synthetic construct
  source 1..21: mol_type = other DNA
attcgttcaaatgtggacaga

SEQ ID NO: 11099 - DNA, 18 bp, synthetic construct
  source 1..18: mol_type = other DNA
tacaataataagcaactc

SEQ ID NO: 11100 - DNA, 18 bp, synthetic construct
  source 1..18: mol_type = other DNA
atcttctccaatggtgaa

SEQ ID NO: 11101 - DNA, 18 bp, synthetic construct
  source 1..18: mol_type = other DNA
tacaataataagcaactc

SEQ ID NO: 11102 - DNA, 21 bp, synthetic construct
  source 1..21: mol_type = other DNA
gtcattacggctggccagaag

SEQ ID NO: 11103 - DNA, 18 bp, synthetic construct
  source 1..18: mol_type = other DNA
tacaataataagcaactc

SEQ ID NO: 11104 - DNA, 21 bp, synthetic construct
  source 1..21: mol_type = other DNA
gtcacaacagccaacaataag

SEQ ID NO: 11105 - DNA, 18 bp, synthetic construct
  source 1..18: mol_type = other DNA
tacaataataagcaactc

SEQ ID NO: 11106 - DNA, 21 bp, synthetic construct
  source 1..21: mol_type = other DNA
agctccacagacaacaagagg

SEQ ID NO: 11107 - DNA, 18 bp, synthetic construct
  source 1..18: mol_type = other DNA
tacaataataagcaactc

SEQ ID NO: 11108 - DNA, 24 bp, synthetic construct
  source 1..24: mol_type = other DNA
caggactcttacaaaaaggaaaat

SEQ ID NO: 11109 - DNA, 18 bp, synthetic construct
  source 1..18: mol_type = other DNA
tacaataataagcaactc

SEQ ID NO: 11110 - DNA, 15 bp, synthetic construct
  source 1..15: mol_type = other DNA
aatccttctgggaca

SEQ ID NO: 11111 - DNA, 18 bp, synthetic construct
  source 1..18: mol_type = other DNA
tacaataataagcaactc

SEQ ID NO: 11112 - DNA, 18 bp, synthetic construct
  source 1..18: mol_type = other DNA
atcttctctgatggtgac

SEQ ID NO: 11113 - DNA, 18 bp, synthetic construct
  source 1..18: mol_type = other DNA
tacaataataagcaactc

SEQ ID NO: 11114 - DNA, 15 bp, synthetic construct
  source 1..15: mol_type = other DNA
aatccttctgggaca

SEQ ID NO: 11115 - DNA, 18 bp, synthetic construct
  source 1..18: mol_type = other DNA
tacaataataagcaactc

SEQ ID NO: 11116 - DNA, 15 bp, synthetic construct
  source 1..15: mol_type = other DNA
aatccttctgggaca

SEQ ID NO: 11117 - DNA, 18 bp, synthetic construct
  source 1..18: mol_type = other DNA
tacaataataagcaactc

SEQ ID NO: 11118 - DNA, 21 bp, synthetic construct
  source 1..21: mol_type = other DNA
atacgttcaaatgagcgagag

SEQ ID NO: 11119 - DNA, 18 bp, synthetic construct
  source 1..18: mol_type = other DNA
tacaataataagcaactc

SEQ ID NO: 11120 - DNA, 24 bp, synthetic construct
  source 1..24: mol_type = other DNA
tactatccaggagacccagtggtt

SEQ ID NO: 11121 - DNA, 18 bp, synthetic construct
  source 1..18: mol_type = other DNA
tacaataataagcaactc

SEQ ID NO: 11122 - DNA, 24 bp, synthetic construct
  source 1..24: mol_type = other DNA
caggactcttacaaaaaggaaaat

SEQ ID NO: 11123 - DNA, 18 bp, synthetic construct
  source 1..18: mol_type = other DNA
tacaataataagcaactc

SEQ ID NO: 11124 - DNA, 24 bp, synthetic construct
  source 1..24: mol_type = other DNA
caggactcttacaaaaaggaaaat

SEQ ID NO: 11125 - DNA, 18 bp, synthetic construct
  source 1..18: mol_type = other DNA
tacaataataagcaactc

SEQ ID NO: 11126 - DNA, 21 bp, synthetic construct
  source 1..21: mol_type = other DNA
atacgttcagtgtccgataaa

SEQ ID NO: 11127 - DNA, 18 bp, synthetic construct
  source 1..18: mol_type = other DNA
tacaataataagcaactc

SEQ ID NO: 11128 - DNA, 15 bp, synthetic construct
  source 1..15: mol_type = other DNA
aatccttctgggaca

SEQ ID NO: 11129 - DNA, 18 bp, synthetic construct
  source 1..18: mol_type = other DNA
tacaataataagcaactc

SEQ ID NO: 11130 - DNA, 18 bp, synthetic construct
  source 1..18: mol_type = other DNA
atcttctctgatggtgaa

SEQ ID NO: 11131 - DNA, 18 bp, synthetic construct
  source 1..18: mol_type = other DNA
tacaataataagcaactc

SEQ ID NO: 11132 - DNA, 21 bp, synthetic construct
  source 1..21: mol_type = other DNA
atacgttcaaatgagcgagag

SEQ ID NO: 11133 - DNA, 18 bp, synthetic construct
  source 1..18: mol_type = other DNA
tacaataataagcaactc

SEQ ID NO: 11134 - DNA, 21 bp, synthetic construct
  source 1..21: mol_type = other DNA
gcctcaagggacaaagagaaa

SEQ ID NO: 11135 - DNA, 18 bp, synthetic construct
  source 1..18: mol_type = other DNA
tacaataataagcaactc

SEQ ID NO: 11136 - DNA, 21 bp, synthetic construct
  source 1..21: mol_type = other DNA
gtcccaaaggccaacgagaag

SEQ ID NO: 11137 - DNA, 18 bp, synthetic construct
  source 1..18: mol_type = other DNA
tacaataataagcaactc

SEQ ID NO: 11138 - DNA, 21 bp, synthetic construct
  source 1..21: mol_type = other DNA
gtcattacggctggccagaag

SEQ ID NO: 11139 - DNA, 18 bp, synthetic construct
  source 1..18: mol_type = other DNA
tacaataataagcaactc

SEQ ID NO: 11140 - DNA, 24 bp, synthetic construct
  source 1..24: mol_type = other DNA
caggactcttacaaaaaggaaaat

SEQ ID NO: 11141 - DNA, 18 bp, synthetic construct
  source 1..18: mol_type = other DNA
tacaataataagcaactc

SEQ ID NO: 11142 - DNA, 21 bp, synthetic construct
  source 1..21: mol_type = other DNA
agcttcacagacaacaagagg

SEQ ID NO: 11143 - DNA, 18 bp, synthetic construct
  source 1..18: mol_type = other DNA
tacaataataagcaactc

SEQ ID NO: 11144 - DNA, 21 bp, synthetic construct
  source 1..21: mol_type = other DNA
agcttcacagacaacaagagg

SEQ ID NO: 11145 - DNA, 18 bp, synthetic construct
  source 1..18: mol_type = other DNA
tacaataataagcaactc

SEQ ID NO: 11146 - DNA, 18 bp, synthetic construct
  source 1..18: mol_type = other DNA
atcttctctgatggtgac

SEQ ID NO: 11147 - DNA, 18 bp, synthetic construct
  source 1..18: mol_type = other DNA
tacaataataagcaactc

SEQ ID NO: 11148 - DNA, 21 bp, synthetic construct
  source 1..21: mol_type = other DNA
gttttctcaagtacggaaata

SEQ ID NO: 11149 - DNA, 18 bp, synthetic construct
  source 1..18: mol_type = other DNA
tacaataataagcaactc

SEQ ID NO: 11150 - DNA, 21 bp, synthetic construct
  source 1..21: mol_type = other DNA
attcgttcaaatatggaaaga

SEQ ID NO: 11151 - DNA, 18 bp, synthetic construct
  source 1..18: mol_type = other DNA
tcatatggtgctggcagc

SEQ ID NO: 11152 - DNA, 18 bp, synthetic construct
  source 1..18: mol_type = other DNA
gttgttttggatggtttg

SEQ ID NO: 11153 - DNA, 18 bp, synthetic construct
  source 1..18: mol_type = other DNA
tcatatggtgctggcagc

SEQ ID NO: 11154 - DNA, 24 bp, synthetic construct
  source 1..24: mol_type = other DNA
caggactcttacaaaaaggaaaat

SEQ ID NO: 11155 - DNA, 18 bp, synthetic construct
  source 1..18: mol_type = other DNA
tcatatggtgctggcagc

SEQ ID NO: 11156 - DNA, 21 bp, synthetic construct
  source 1..21: mol_type = other DNA
agctccacagacaacaagagg

SEQ ID NO: 11157 - DNA, 18 bp, synthetic construct
  source 1..18: mol_type = other DNA
tcatatggtgctggcagc

SEQ ID NO: 11158 - DNA, 24 bp, synthetic construct
  source 1..24: mol_type = other DNA
tactattccggagacccagtggtt

SEQ ID NO: 11159 - DNA, 18 bp, synthetic construct
  source 1..18: mol_type = other DNA
tcatatggtgctggcagc

SEQ ID NO: 11160 - DNA, 21 bp, synthetic construct
  source 1..21: mol_type = other DNA
gcctcaagggacaaagagaaa

SEQ ID NO: 11161 - DNA, 18 bp, synthetic construct
  source 1..18: mol_type = other DNA
tcatatggtgctggcagc

SEQ ID NO: 11162 - DNA, 15 bp, synthetic construct
  source 1..15: mol_type = other DNA
aatccttctgggaca

SEQ ID NO: 11163 - DNA, 18 bp, synthetic construct
  source 1..18: mol_type = other DNA
tcatatggtgctggcagc

SEQ ID NO: 11164 - DNA, 24 bp, synthetic construct
  source 1..24: mol_type = other DNA
tactattccggagacccagtggtt

SEQ ID NO: 11165 - DNA, 18 bp, synthetic construct
  source 1..18: mol_type = other DNA
tcatatggtgctggcagc

SEQ ID NO: 11166 - DNA, 21 bp, synthetic construct
  source 1..21: mol_type = other DNA
attcgttcaaatatggaaaga

SEQ ID NO: 11167 - DNA, 18 bp, synthetic construct
  source 1..18: mol_type = other DNA
tcatatggtgctggcagc

SEQ ID NO: 11168 - DNA, 24 bp, synthetic construct
  source 1..24: mol_type = other DNA
caggactcttacaaaaaggaaaat

SEQ ID NO: 11169 - DNA, 18 bp, synthetic construct
  source 1..18: mol_type = other DNA
tcatatggtgctggcagc

SEQ ID NO: 11170 - DNA, 21 bp, synthetic construct
  source 1..21: mol_type = other DNA
atactttcagtgtccgataaa

SEQ ID NO: 11171 - DNA, 18 bp, synthetic construct
  source 1..18: mol_type = other DNA
tcatatggtgctggcagc

SEQ ID NO: 11172 - DNA, 21 bp, synthetic construct
  source 1..21: mol_type = other DNA
gtcattacggctggccagaag

SEQ ID NO: 11173 - DNA, 18 bp, synthetic construct
  source 1..18: mol_type = other DNA
tcatatggtgctggcagc

SEQ ID NO: 11174 - DNA, 21 bp, synthetic construct
  source 1..21: mol_type = other DNA
gttttctcaagtacggaaata

SEQ ID NO: 11175 - DNA, 18 bp, synthetic construct
  source 1..18: mol_type = other DNA
tcatatggtgctggcagc

SEQ ID NO: 11176 - DNA, 21 bp, synthetic construct
  source 1..21: mol_type = other DNA
ataagttcagtgtccgataaa

SEQ ID NO: 11177 - DNA, 18 bp, synthetic construct
  source 1..18: mol_type = other DNA
tcatatggtgctggcagc

SEQ ID NO: 11178 - DNA, 24 bp, synthetic construct
  source 1..24: mol_type = other DNA
caggactcttacaaaaaggaaaat

SEQ ID NO: 11179 - DNA, 18 bp, synthetic construct
  source 1..18: mol_type = other DNA
tcatatggtgctggcagc

SEQ ID NO: 11180 - DNA, 15 bp, synthetic construct
  source 1..15: mol_type = other DNA
aatccttctgggaca

SEQ ID NO: 11181 - DNA, 18 bp, synthetic construct
  source 1..18: mol_type = other DNA
tcatatggtgctggcagc

SEQ ID NO: 11182 - DNA, 21 bp, synthetic construct
  source 1..21: mol_type = other DNA
gtcacaacagccaacaacaag

SEQ ID NO: 11183 - DNA, 18 bp, synthetic construct
  source 1..18: mol_type = other DNA
tcatatggtgctggcagc

SEQ ID NO: 11184 - DNA, 21 bp, synthetic construct
  source 1..21: mol_type = other DNA
agctccacagacaacaagagg

SEQ ID NO: 11185 - DNA, 18 bp, synthetic construct
  source 1..18: mol_type = other DNA
tcatatggtgctggcagc

SEQ ID NO: 11186 - DNA, 24 bp, synthetic construct
  source 1..24: mol_type = other DNA
tactattccggagacccagtggtt

SEQ ID NO: 11187 - DNA, 18 bp, synthetic construct
  source 1..18: mol_type = other DNA
tcatatggtgctggcagc

SEQ ID NO: 11188 - DNA, 21 bp, synthetic construct
  source 1..21: mol_type = other DNA
agctccacagacaacaagagg

SEQ ID NO: 11189 - DNA, 18 bp, synthetic construct
  source 1..18: mol_type = other DNA
tcatatggtgctggcagc

SEQ ID NO: 11190 - DNA, 18 bp, synthetic construct
  source 1..18: mol_type = other DNA
atcttctctgatggtgaa

SEQ ID NO: 11191 - DNA, 18 bp, synthetic construct
  source 1..18: mol_type = other DNA
tcatatggtgctggcagc

SEQ ID NO: 11192 - DNA, 18 bp, synthetic construct
  source 1..18: mol_type = other DNA
atcttctccaatggtgaa

SEQ ID NO: 11193 - DNA, 18 bp, synthetic construct
  source 1..18: mol_type = other DNA
tcatatggtgctggcagc

SEQ ID NO: 11194 - DNA, 21 bp, synthetic construct
  source 1..21: mol_type = other DNA
agctccacagacaacaagagg

SEQ ID NO: 11195 - DNA, 18 bp, synthetic construct
  source 1..18: mol_type = other DNA
tcatatggtgctggcagc

SEQ ID NO: 11196 - DNA, 21 bp, synthetic construct
  source 1..21: mol_type = other DNA
gtcctttcaaatgtggacaga

SEQ ID NO: 11197 - DNA, 18 bp, synthetic construct
  source 1..18: mol_type = other DNA
tcatatggtgctggcagc

SEQ ID NO: 11198 - DNA, 24 bp, synthetic construct
  source 1..24: mol_type = other DNA
caggactcttacaaaaaggaaaat

SEQ ID NO: 11199 - DNA, 18 bp, synthetic construct
  source 1..18: mol_type = other DNA
tcatatggtgctggcagc

SEQ ID NO: 11200 - DNA, 24 bp, synthetic construct
  source 1..24: mol_type = other DNA
caggactcttacaaaaaggaaaat

SEQ ID NO: 11201 - DNA, 18 bp, synthetic construct
  source 1..18: mol_type = other DNA
tcatatggtgctggcagc

SEQ ID NO: 11202 - DNA, 15 bp, synthetic construct
  source 1..15: mol_type = other DNA
aatccttctgggaca

SEQ ID NO: 11203 - DNA, 18 bp, synthetic construct
  source 1..18: mol_type = other DNA
tcatatggtgctggcagc

SEQ ID NO: 11204 - DNA, 24 bp, synthetic construct
  source 1..24: mol_type = other DNA
caggactcttacaaaaaggaaaat

SEQ ID NO: 11205 - DNA, 18 bp, synthetic construct
  source 1..18: mol_type = other DNA
tcatatggtgctggcagc

SEQ ID NO: 11206 - DNA, 21 bp, synthetic construct
  source 1..21: mol_type = other DNA
gtcattacggctggccagaag

SEQ ID NO: 11207 - DNA, 18 bp, synthetic construct
  source 1..18: mol_type = other DNA
tcatatggtgctggcagc

SEQ ID NO: 11208 - DNA, 18 bp, synthetic construct
  source 1..18: mol_type = other DNA
atcttctctgatggtgaa

SEQ ID NO: 11209 - DNA, 18 bp, synthetic construct
  source 1..18: mol_type = other DNA
tcatatggtgctggcagc

SEQ ID NO: 11210 - DNA, 18 bp, synthetic construct
  source 1..18: mol_type = other DNA
atcttctctgatggtgaa

SEQ ID NO: 11211 - DNA, 18 bp, synthetic construct
  source 1..18: mol_type = other DNA
tcatatggtgctggcagc

SEQ ID NO: 11212 - DNA, 24 bp, synthetic construct
  source 1..24: mol_type = other DNA
caggactcttacaaaaaggaaaat

SEQ ID NO: 11213 - DNA, 18 bp, synthetic construct
  source 1..18: mol_type = other DNA
tcatatggtgctggcagc

SEQ ID NO: 11214 - DNA, 24 bp, synthetic construct
  source 1..24: mol_type = other DNA
caggactcttacaaaaaggaaaat

SEQ ID NO: 11215 - DNA, 18 bp, synthetic construct
  source 1..18: mol_type = other DNA
tcatatggtgctggcagc

SEQ ID NO: 11216 - DNA, 21 bp, synthetic construct
  source 1..21: mol_type = other DNA
agctccacagacaacaagagg

SEQ ID NO: 11217 - DNA, 18 bp, synthetic construct
  source 1..18: mol_type = other DNA
tcatatggtgctggcagc

SEQ ID NO: 11218 - DNA, 24 bp, synthetic construct
  source 1..24: mol_type = other DNA
caggactcttacaaaaaggaaaat

SEQ ID NO: 11219 - DNA, 18 bp, synthetic construct
  source 1..18: mol_type = other DNA
tcatatggtgctggcagc

SEQ ID NO: 11220 - DNA, 24 bp, synthetic construct
  source 1..24: mol_type = other DNA
caggactcttacaaaaaggaaaat

SEQ ID NO: 11221 - DNA, 18 bp, synthetic construct
  source 1..18: mol_type = other DNA
tcatatggtgctggcagc

SEQ ID NO: 11222 - DNA, 18 bp, synthetic construct
  source 1..18: mol_type = other DNA
gttgttttggatggtttg

SEQ ID NO: 11223 - DNA, 18 bp, synthetic construct
  source 1..18: mol_type = other DNA
tcatatggtgctggcagc

SEQ ID NO: 11224 - DNA, 21 bp, synthetic construct
  source 1..21: mol_type = other DNA
gttttctcaagtacggaaata

SEQ ID NO: 11225 - DNA, 18 bp, synthetic construct
  source 1..18: mol_type = other DNA
tcatatggtgctggcagc

SEQ ID NO: 11226 - DNA, 21 bp, synthetic construct
  source 1..21: mol_type = other DNA
gttttctcaagtacggaaata

SEQ ID NO: 11227 - DNA, 18 bp, synthetic construct
  source 1..18: mol_type = other DNA
tcatatggtgctggcagc

SEQ ID NO: 11228 - DNA, 21 bp, synthetic construct
  source 1..21: mol_type = other DNA
agctccacagacaacaagagg

SEQ ID NO: 11229 - DNA, 18 bp, synthetic construct
  source 1..18: mol_type = other DNA
tcatatggtgctggcagc

SEQ ID NO: 11230 - DNA, 21 bp, synthetic construct
  source 1..21: mol_type = other DNA
gttttctcaagtacggaaata

SEQ ID NO: 11231 - DNA, 18 bp, synthetic construct
  source 1..18: mol_type = other DNA
tcatatggtgctggcagc

SEQ ID NO: 11232 - DNA, 21 bp, synthetic construct
  source 1..21: mol_type = other DNA
agctccacagacaacaagagg

SEQ ID NO: 11233 - DNA, 18 bp, synthetic construct
  source 1..18: mol_type = other DNA
tcatatggtgctggcagc

SEQ ID NO: 11234 - DNA, 21 bp, synthetic construct
  source 1..21: mol_type = other DNA
gttttctcaagtacggaaata

SEQ ID NO: 11235 - DNA, 18 bp, synthetic construct
  source 1..18: mol_type = other DNA
tcatatggtgctggcagc

SEQ ID NO: 11236 - DNA, 18 bp, synthetic construct
  source 1..18: mol_type = other DNA
atcttctccaatggtgaa

SEQ ID NO: 11237 - DNA, 18 bp, synthetic construct
  source 1..18: mol_type = other DNA
tcatatggtgctggcagc

SEQ ID NO: 11238 - DNA, 21 bp, synthetic construct
  source 1..21: mol_type = other DNA
gtcccaaaggccaacgagaag

SEQ ID NO: 11239 - DNA, 18 bp, synthetic construct
  source 1..18: mol_type = other DNA
tcatatggtgctggcagc

SEQ ID NO: 11240 - DNA, 18 bp, synthetic construct
  source 1..18: mol_type = other DNA
gttgttttggatggtttg

SEQ ID NO: 11241 - DNA, 18 bp, synthetic construct
  source 1..18: mol_type = other DNA
tcatatggtgctggcagc

SEQ ID NO: 11242 - DNA, 21 bp, synthetic construct
  source 1..21: mol_type = other DNA
ataagttcagtgtccgataaa

SEQ ID NO: 11243 - DNA, 18 bp, synthetic construct
  source 1..18: mol_type = other DNA
tcatatggtgctggcagc

SEQ ID NO: 11244 - DNA, 24 bp, synthetic construct
  source 1..24: mol_type = other DNA
tactattcgggaaacccagtggtt

SEQ ID NO: 11245 - DNA, 18 bp, synthetic construct
  source 1..18: mol_type = other DNA
tcatatggtgctggcagc

SEQ ID NO: 11246 - DNA, 18 bp, synthetic construct
  source 1..18: mol_type = other DNA
gttgttttggatggtttg

SEQ ID NO: 11247 - DNA, 18 bp, synthetic construct
  source 1..18: mol_type = other DNA
tcatatggtgctggcagc

SEQ ID NO: 11248 - DNA, 21 bp, synthetic construct
  source 1..21: mol_type = other DNA
attcgttcaaatgtggacaga

SEQ ID NO: 11249 - DNA, 18 bp, synthetic construct
  source 1..18: mol_type = other DNA
tcatatggtgctggcagc

SEQ ID NO: 11250 - DNA, 24 bp, synthetic construct
  source 1..24: mol_type = other DNA
tactattcgggaaacccagtggtt

SEQ ID NO: 11251 - DNA, 18 bp, synthetic construct
  source 1..18: mol_type = other DNA
tcatatggtgctggcagc

SEQ ID NO: 11252 - DNA, 21 bp, synthetic construct
  source 1..21: mol_type = other DNA
gcctcaagggacaaagagaaa

SEQ ID NO: 11253 - DNA, 18 bp, synthetic construct
  source 1..18: mol_type = other DNA
tcatatggtgctggcagc

SEQ ID NO: 11254 - DNA, 21 bp, synthetic construct
  source 1..21: mol_type = other DNA
gtcctttcaaatgtggacaga

SEQ ID NO: 11255 - DNA, 18 bp, synthetic construct
  source 1..18: mol_type = other DNA
tcatatggtgctggcagc

SEQ ID NO: 11256 - DNA, 18 bp, synthetic construct
  source 1..18: mol_type = other DNA
atcttctccaatggtgaa

SEQ ID NO: 11257 - DNA, 18 bp, synthetic construct
  source 1..18: mol_type = other DNA
tcatatggtgctggcagc

SEQ ID NO: 11258 - DNA, 21 bp, synthetic construct
  source 1..21: mol_type = other DNA
ggatataaggactatgtggta

SEQ ID NO: 11259 - DNA, 18 bp, synthetic construct
  source 1..18: mol_type = other DNA
tcatatggtgctggcagc

SEQ ID NO: 11260 - DNA, 21 bp, synthetic construct
  source 1..21: mol_type = other DNA
gttttctcaagtacggaaata

SEQ ID NO: 11261 - DNA, 18 bp, synthetic construct
  source 1..18: mol_type = other DNA
tcatatggtgctggcagc

SEQ ID NO: 11262 - DNA, 21 bp, synthetic construct
  source 1..21: mol_type = other DNA
atactttcagtgtccgataaa

SEQ ID NO: 11263 - DNA, 18 bp, synthetic construct
  source 1..18: mol_type = other DNA
tcatatggtgctggcagc

SEQ ID NO: 11264 - DNA, 21 bp, synthetic construct
  source 1..21: mol_type = other DNA
gtcacaactgccaacaacaag

SEQ ID NO: 11265 - DNA, 18 bp, synthetic construct
  source 1..18: mol_type = other DNA
tcatatggtgctggcagc

SEQ ID NO: 11266 - DNA, 21 bp, synthetic construct
  source 1..21: mol_type = other DNA
gtcacaactgccaacaacaag

SEQ ID NO: 11267 - DNA, 18 bp, synthetic construct
  source 1..18: mol_type = other DNA
tcatatggtgctggcagc

SEQ ID NO: 11268 - DNA, 21 bp, synthetic construct
  source 1..21: mol_type = other DNA
atacgttcaaatgagcgagag

SEQ ID NO: 11269 - DNA, 18 bp, synthetic construct
  source 1..18: mol_type = other DNA
tcatatggtgctggcagc

SEQ ID NO: 11270 - DNA, 21 bp, synthetic construct
  source 1..21: mol_type = other DNA
gtcccaaaggccaacgagaag

SEQ ID NO: 11271 - DNA, 18 bp, synthetic construct
  source 1..18: mol_type = other DNA
tcatatggtgctggcagc

SEQ ID NO: 11272 - DNA, 21 bp, synthetic construct
  source 1..21: mol_type = other DNA
atccgttcaaatatggaaaga

SEQ ID NO: 11273 - DNA, 18 bp, synthetic construct
  source 1..18: mol_type = other DNA
tcatatggtgctggcagc

SEQ ID NO: 11274 - DNA, 18 bp, synthetic construct
  source 1..18: mol_type = other DNA
atcttctccaatggtgaa

SEQ ID NO: 11275 - DNA, 18 bp, synthetic construct
  source 1..18: mol_type = other DNA
tcatatggtgctggcagc

SEQ ID NO: 11276 - DNA, 21 bp, synthetic construct
  source 1..21: mol_type = other DNA
attcgttcaaatatggaaaga

SEQ ID NO: 11277 - DNA, 18 bp, synthetic construct
  source 1..18: mol_type = other DNA
tcatatggtgctggcagc

SEQ ID NO: 11278 - DNA, 21 bp, synthetic construct
  source 1..21: mol_type = other DNA
agctccacagacaacaagagg

SEQ ID NO: 11279 - DNA, 18 bp, synthetic construct
  source 1..18: mol_type = other DNA
tcatatggtgctggcagc

SEQ ID NO: 11280 - DNA, 21 bp, synthetic construct
  source 1..21: mol_type = other DNA
agcttcacagacaacaagagg

SEQ ID NO: 11281 - DNA, 18 bp, synthetic construct
  source 1..18: mol_type = other DNA
tcatatggtgctggcagc

SEQ ID NO: 11282 - DNA, 21 bp, synthetic construct
  source 1..21: mol_type = other DNA
atacgttcagtgtccgataaa

SEQ ID NO: 11283 - DNA, 18 bp, synthetic construct
  source 1..18: mol_type = other DNA
tcatatggtgctggcagc

SEQ ID NO: 11284 - DNA, 21 bp, synthetic construct
  source 1..21: mol_type = other DNA
gttttctcaagtacggaaata

SEQ ID NO: 11285 - DNA, 18 bp, synthetic construct
  source 1..18: mol_type = other DNA
tcatatggtgctggcagc

SEQ ID NO: 11286 - DNA, 24 bp, synthetic construct
  source 1..24: mol_type = other DNA
caggactcttacaaaaaggaaaat

SEQ ID NO: 11287 - DNA, 18 bp, synthetic construct
  source 1..18: mol_type = other DNA
tcatatggtgctggcagc

SEQ ID NO: 11288 - DNA, 15 bp, synthetic construct
  source 1..15: mol_type = other DNA
aatccttctgggaca

SEQ ID NO: 11289 - DNA, 18 bp, synthetic construct
  source 1..18: mol_type = other DNA
tcatatggtgctggcagc

SEQ ID NO: 11290 - DNA, 21 bp, synthetic construct
  source 1..21: mol_type = other DNA
agctccacagacaacaagagg

SEQ ID NO: 11291 - DNA, 18 bp, synthetic construct
  source 1..18: mol_type = other DNA
tcatatggtgctggcagc

SEQ ID NO: 11292 - DNA, 21 bp, synthetic construct
  source 1..21: mol_type = other DNA
agctccacagacaacaagagg

SEQ ID NO: 11293 - DNA, 18 bp, synthetic construct
  source 1..18: mol_type = other DNA
tcatatggtgctggcagc

SEQ ID NO: 11294 - DNA, 24 bp, synthetic construct
  source 1..24: mol_type = other DNA
caggactcttacaaaaaggaaaat

SEQ ID NO: 11295 - DNA, 18 bp, synthetic construct
  source 1..18: mol_type = other DNA
tcatatggtgctggcagc

SEQ ID NO: 11296 - DNA, 21 bp, synthetic construct
  source 1..21: mol_type = other DNA
agcttcacagacaacaagagg

SEQ ID NO: 11297 - DNA, 18 bp, synthetic construct
  source 1..18: mol_type = other DNA
tcatatggtgctggcagc

SEQ ID NO: 11298 - DNA, 21 bp, synthetic construct
  source 1..21: mol_type = other DNA
gtcttttcaaatgtggacaga

SEQ ID NO: 11299 - DNA, 18 bp, synthetic construct
  source 1..18: mol_type = other DNA
tcatatggtgctggcagc

SEQ ID NO: 11300 - DNA, 21 bp, synthetic construct
  source 1..21: mol_type = other DNA
gcctcaagggacaaagagaaa

SEQ ID NO: 11301 - DNA, 18 bp, synthetic construct
  source 1..18: mol_type = other DNA
tcatatggtgctggcagc

SEQ ID NO: 11302 - DNA, 21 bp, synthetic construct
  source 1..21: mol_type = other DNA
attcgttcaaatgtggacaga

SEQ ID NO: 11303 - DNA, 18 bp, synthetic construct
  source 1..18: mol_type = other DNA
tcatatggtgctggcagc

SEQ ID NO: 11304 - DNA, 21 bp, synthetic construct
  source 1..21: mol_type = other DNA
atacgttcaaatgagagagag

SEQ ID NO: 11305 - DNA, 18 bp, synthetic construct
  source 1..18: mol_type = other DNA
tcatatggtgctggcagc

SEQ ID NO: 11306 - DNA, 24 bp, synthetic construct
  source 1..24: mol_type = other DNA
caggactcttacaaaaaggaaaat

SEQ ID NO: 11307 - DNA, 18 bp, synthetic construct
  source 1..18: mol_type = other DNA
tcatatggtgctggcagc

SEQ ID NO: 11308 - DNA, 18 bp, synthetic construct
  source 1..18: mol_type = other DNA
gttgttttggatggtttg

SEQ ID NO: 11309 - DNA, 18 bp, synthetic construct
  source 1..18: mol_type = other DNA
tcatatggtgctggcagc

SEQ ID NO: 11310 - DNA, 24 bp, synthetic construct
  source 1..24: mol_type = other DNA
caggactcttacaaaaaggaaaat

SEQ ID NO: 11311 - DNA, 18 bp, synthetic construct
  source 1..18: mol_type = other DNA
tcatatggtgctggcagc

SEQ ID NO: 11312 - DNA, 24 bp, synthetic construct
  source 1..24: mol_type = other DNA
tactattccggagacccagtggtt

SEQ ID NO: 11313 - DNA, 18 bp, synthetic construct
  source 1..18: mol_type = other DNA
tcatatggtgctggcagc

SEQ ID NO: 11314 - DNA, 18 bp, synthetic construct
  source 1..18: mol_type = other DNA
atcttctccaatggtgaa

SEQ ID NO: 11315 - DNA, 18 bp, synthetic construct
  source 1..18: mol_type = other DNA
tcatatggtgctggcagc

SEQ ID NO: 11316 - DNA, 18 bp, synthetic construct
  source 1..18: mol_type = other DNA
agtccttcttgggcagag

SEQ ID NO: 11317 - DNA, 18 bp, synthetic construct
  source 1..18: mol_type = other DNA
tcatatggtgctggcagc

SEQ ID NO: 11318 - DNA, 15 bp, synthetic construct
  source 1..15: mol_type = other DNA
aatccttctgggaca

SEQ ID NO: 11319 - DNA, 18 bp, synthetic construct
  source 1..18: mol_type = other DNA
tcatatggtgctggcagc

SEQ ID NO: 11320 - DNA, 21 bp, synthetic construct
  source 1..21: mol_type = other DNA
gtcacaacagccaacaacaag

SEQ ID NO: 11321 - DNA, 18 bp, synthetic construct
  source 1..18: mol_type = other DNA
tcatatggtgctggcagc

SEQ ID NO: 11322 - DNA, 21 bp, synthetic construct
  source 1..21: mol_type = other DNA
gcctcaagggacaaagagaaa

SEQ ID NO: 11323 - DNA, 18 bp, synthetic construct
  source 1..18: mol_type = other DNA
tcatatggtgctggcagc

SEQ ID NO: 11324 - DNA, 21 bp, synthetic construct
  source 1..21: mol_type = other DNA
agcttcacagacaacaagagg

SEQ ID NO: 11325 - DNA, 18 bp, synthetic construct
  source 1..18: mol_type = other DNA
tcatatggtgctggcagc

SEQ ID NO: 11326 - DNA, 15 bp, synthetic construct
  source 1..15: mol_type = other DNA
ctggttccaggaaca

SEQ ID NO: 11327 - DNA, 18 bp, synthetic construct
  source 1..18: mol_type = other DNA
tcatatggtgctggcagc

SEQ ID NO: 11328 - DNA, 15 bp, synthetic construct
  source 1..15: mol_type = other DNA
ctggttccaggaaca

SEQ ID NO: 11329 - DNA, 18 bp, synthetic construct
  source 1..18: mol_type = other DNA
tcatatggtgctggcagc

SEQ ID NO: 11330 - DNA, 21 bp, synthetic construct
  source 1..21: mol_type = other DNA
gtcattacggctggccagaag

SEQ ID NO: 11331 - DNA, 18 bp, synthetic construct
  source 1..18: mol_type = other DNA
tcatatggtgctggcagc

SEQ ID NO: 11332 - DNA, 21 bp, synthetic construct
  source 1..21: mol_type = other DNA
gtcattacggctggccagaag

SEQ ID NO: 11333 - DNA, 18 bp, synthetic construct
  source 1..18: mol_type = other DNA
tcatatggtgctggcagc

SEQ ID NO: 11334 - DNA, 21 bp, synthetic construct
  source 1..21: mol_type = other DNA
gttttctcaagtacggaaata

SEQ ID NO: 11335 - DNA, 18 bp, synthetic construct
  source 1..18: mol_type = other DNA
tcatatggtgctggcagc

SEQ ID NO: 11336 - DNA, 21 bp, synthetic construct
  source 1..21: mol_type = other DNA
attcgttcaaatatggaaaga

SEQ ID NO: 11337 - DNA, 18 bp, synthetic construct
  source 1..18: mol_type = other DNA
tcatatggtgctggcagc

SEQ ID NO: 11338 - DNA, 21 bp, synthetic construct
  source 1..21: mol_type = other DNA
attcgttcaaatatggaaaga

SEQ ID NO: 11339 - DNA, 18 bp, synthetic construct
  source 1..18: mol_type = other DNA
tcatatggtgctggcagc

SEQ ID NO: 11340 - DNA, 18 bp, synthetic construct
  source 1..18: mol_type = other DNA
atcttctccaatggtgaa

SEQ ID NO: 11341 - DNA, 18 bp, synthetic construct
  source 1..18: mol_type = other DNA
tcatatggtgctggcagc

SEQ ID NO: 11342 - DNA, 24 bp, synthetic construct
  source 1..24: mol_type = other DNA
caggactcttacaaaaaggaaaat

SEQ ID NO: 11343 - DNA, 18 bp, synthetic construct
  source 1..18: mol_type = other DNA
tcatatggtgctggcagc

SEQ ID NO: 11344 - DNA, 18 bp, synthetic construct
  source 1..18: mol_type = other DNA
atcttctccaatggtgaa

SEQ ID NO: 11345 - DNA, 18 bp, synthetic construct
  source 1..18: mol_type = other DNA
tcatatggtgctggcagc

SEQ ID NO: 11346 - DNA, 15 bp, synthetic construct
  source 1..15: mol_type = other DNA
aatccttctgggaca

SEQ ID NO: 11347 - DNA, 18 bp, synthetic construct
  source 1..18: mol_type = other DNA
tcatatggtgctggcaac

SEQ ID NO: 11348 - DNA, 15 bp, synthetic construct
  source 1..15: mol_type = other DNA
ggtctacaacaaaat

SEQ ID NO: 11349 - DNA, 18 bp, synthetic construct
  source 1..18: mol_type = other DNA
tcatatggtgctggcaac

SEQ ID NO: 11350 - DNA, 18 bp, synthetic construct
  source 1..18: mol_type = other DNA
gttgttttggatggtttg

SEQ ID NO: 11351 - DNA, 18 bp, synthetic construct
  source 1..18: mol_type = other DNA
tcatatggtgctggcaac

SEQ ID NO: 11352 - DNA, 21 bp, synthetic construct
  source 1..21: mol_type = other DNA
gtacgctcaaatgtggataag

SEQ ID NO: 11353 - DNA, 18 bp, synthetic construct
  source 1..18: mol_type = other DNA
tcatatggtgctggcaac

SEQ ID NO: 11354 - DNA, 18 bp, synthetic construct
  source 1..18: mol_type = other DNA
atcttctccaatggtgaa

SEQ ID NO: 11355 - DNA, 18 bp, synthetic construct
  source 1..18: mol_type = other DNA
tcatatggtgctggcaac

SEQ ID NO: 11356 - DNA, 21 bp, synthetic construct
  source 1..21: mol_type = other DNA
agcttcacagacaacaagagg

SEQ ID NO: 11357 - DNA, 18 bp, synthetic construct
  source 1..18: mol_type = other DNA
tcatatggtgctggcaac

SEQ ID NO: 11358 - DNA, 21 bp, synthetic construct
  source 1..21: mol_type = other DNA
gcctcaagggacaaagagaaa

SEQ ID NO: 11359 - DNA, 18 bp, synthetic construct
  source 1..18: mol_type = other DNA
tcatatggtgctggcaac

SEQ ID NO: 11360 - DNA, 21 bp, synthetic construct
  source 1..21: mol_type = other DNA
gttttctcaagtacggaaata

SEQ ID NO: 11361 - DNA, 18 bp, synthetic construct
  source 1..18: mol_type = other DNA
tcatatggtgctggcaac

SEQ ID NO: 11362 - DNA, 18 bp, synthetic construct
  source 1..18: mol_type = other DNA
atcttctccaatggtgaa

SEQ ID NO: 11363 - DNA, 18 bp, synthetic construct
  source 1..18: mol_type = other DNA
tcatatggtgctggcaac

SEQ ID NO: 11364 - DNA, 15 bp, synthetic construct
  source 1..15: mol_type = other DNA
ctggtgccaggaaca

SEQ ID NO: 11365 - DNA, 18 bp, synthetic construct
  source 1..18: mol_type = other DNA
tcatatggtgctggcaac

SEQ ID NO: 11366 - DNA, 24 bp, synthetic construct
  source 1..24: mol_type = other DNA
caggactcttacaaaaaggaaaat

SEQ ID NO: 11367 - DNA, 18 bp, synthetic construct
  source 1..18: mol_type = other DNA
tcatatggtgctggcaac

SEQ ID NO: 11368 - DNA, 24 bp, synthetic construct
  source 1..24: mol_type = other DNA
caggactcttacaaaaaggaaaat

SEQ ID NO: 11369 - DNA, 18 bp, synthetic construct
  source 1..18: mol_type = other DNA
tcatatggtgctggcaac

SEQ ID NO: 11370 - DNA, 21 bp, synthetic construct
  source 1..21: mol_type = other DNA
gtcccaaaggccaacgagaag

SEQ ID NO: 11371 - DNA, 18 bp, synthetic construct
  source 1..18: mol_type = other DNA
tcatatggtgctggcaac

SEQ ID NO: 11372 - DNA, 21 bp, synthetic construct
  source 1..21: mol_type = other DNA
attcgttcaaatgtggacaga

SEQ ID NO: 11373 - DNA, 18 bp, synthetic construct
  source 1..18: mol_type = other DNA
tcatatggtgctggcaac

SEQ ID NO: 11374 - DNA, 18 bp, synthetic construct
  source 1..18: mol_type = other DNA
atcttctccaatggtgaa

SEQ ID NO: 11375 - DNA, 18 bp, synthetic construct
  source 1..18: mol_type = other DNA
tcatatggtgctggcaac

SEQ ID NO: 11376 - DNA, 15 bp, synthetic construct
  source 1..15: mol_type = other DNA
aatccttctgggaca

SEQ ID NO: 11377 - DNA, 18 bp, synthetic construct
  source 1..18: mol_type = other DNA
tcatatggtgctggcaac

SEQ ID NO: 11378 - DNA, 21 bp, synthetic construct
  source 1..21: mol_type = other DNA
gttttctcaagtacggaaata

SEQ ID NO: 11379 - DNA, 18 bp, synthetic construct
  source 1..18: mol_type = other DNA
tcatatggtgctggcaac

SEQ ID NO: 11380 - DNA, 21 bp, synthetic construct
  source 1..21: mol_type = other DNA
atccgttcaaatatggaaaga

SEQ ID NO: 11381 - DNA, 18 bp, synthetic construct
  source 1..18: mol_type = other DNA
tcatatggtgctggcaac

SEQ ID NO: 11382 - DNA, 24 bp, synthetic construct
  source 1..24: mol_type = other DNA
tactattcaggagacccagtggtt

SEQ ID NO: 11383 - DNA, 18 bp, synthetic construct
  source 1..18: mol_type = other DNA
tcatatggtgctggcaac

SEQ ID NO: 11384 - DNA, 15 bp, synthetic construct
  source 1..15: mol_type = other DNA
ggtctacaacaaaat

SEQ ID NO: 11385 - DNA, 18 bp, synthetic construct
  source 1..18: mol_type = other DNA
tcatatggtgctggcaac

SEQ ID NO: 11386 - DNA, 21 bp, synthetic construct
  source 1..21: mol_type = other DNA
gcctcaagggacaaagagaaa

SEQ ID NO: 11387 - DNA, 18 bp, synthetic construct
  source 1..18: mol_type = other DNA
tcatatggtgctggcaac

SEQ ID NO: 11388 - DNA, 21 bp, synthetic construct
  source 1..21: mol_type = other DNA
gcctcaagggacaaagagaaa

SEQ ID NO: 11389 - DNA, 18 bp, synthetic construct
  source 1..18: mol_type = other DNA
tcatatggtgctggcaac

SEQ ID NO: 11390 - DNA, 21 bp, synthetic construct
  source 1..21: mol_type = other DNA
gttttctcaagtacggaaata

SEQ ID NO: 11391 - DNA, 18 bp, synthetic construct
  source 1..18: mol_type = other DNA
tcatatggtgctggcaac

SEQ ID NO: 11392 - DNA, 21 bp, synthetic construct
  source 1..21: mol_type = other DNA
ccaaaggccaacgagaaggga

SEQ ID NO: 11393 - DNA, 18 bp, synthetic construct
  source 1..18: mol_type = other DNA
tcatatggtgctggcaac

SEQ ID NO: 11394 - DNA, 24 bp, synthetic construct
  source 1..24: mol_type = other DNA
tactattccggagacccagtggtt

SEQ ID NO: 11395 - DNA, 18 bp, synthetic construct
  source 1..18: mol_type = other DNA
tcatatggtgctggcaac

SEQ ID NO: 11396 - DNA, 21 bp, synthetic construct
  source 1..21: mol_type = other DNA
atactttcagtgtccaataaa

SEQ ID NO: 11397 - DNA, 18 bp, synthetic construct
  source 1..18: mol_type = other DNA
tcatatggtgctggcaac

SEQ ID NO: 11398 - DNA, 21 bp, synthetic construct
  source 1..21: mol_type = other DNA
gcctcaagggacaaagagaaa

SEQ ID NO: 11399 - DNA, 18 bp, synthetic construct
  source 1..18: mol_type = other DNA
tcatatggtgctggcaac

SEQ ID NO: 11400 - DNA, 24 bp, synthetic construct
  source 1..24: mol_type = other DNA
caggactcttacaaaaaggaaaat

SEQ ID NO: 11401 - DNA, 18 bp, synthetic construct
  source 1..18: mol_type = other DNA
tcatatggtgctggcaac

SEQ ID NO: 11402 - DNA, 24 bp, synthetic construct
  source 1..24: mol_type = other DNA
tactattcgggaaacccagtggtt

SEQ ID NO: 11403 - DNA, 18 bp, synthetic construct
  source 1..18: mol_type = other DNA
tcatatggtgctggcaac

SEQ ID NO: 11404 - DNA, 18 bp, synthetic construct
  source 1..18: mol_type = other DNA
atcttctccaatggtgaa

SEQ ID NO: 11405 - DNA, 18 bp, synthetic construct
  source 1..18: mol_type = other DNA
tcatatggtgctggcaac

SEQ ID NO: 11406 - DNA, 21 bp, synthetic construct
  source 1..21: mol_type = other DNA
gtcattacggctggccagaag

SEQ ID NO: 11407 - DNA, 18 bp, synthetic construct
  source 1..18: mol_type = other DNA
tcatatggtgctggcaac

SEQ ID NO: 11408 - DNA, 24 bp, synthetic construct
  source 1..24: mol_type = other DNA
caggactcttacaaaaaggaaaat

SEQ ID NO: 11409 - DNA, 18 bp, synthetic construct
  source 1..18: mol_type = other DNA
tcatatggtgctggcaac

SEQ ID NO: 11410 - DNA, 21 bp, synthetic construct
  source 1..21: mol_type = other DNA
gttttctcaagtacggaaata

SEQ ID NO: 11411 - DNA, 18 bp, synthetic construct
  source 1..18: mol_type = other DNA
tcatatggtgctggcaac

SEQ ID NO: 11412 - DNA, 21 bp, synthetic construct
  source 1..21: mol_type = other DNA
atccgttcaaatatggaaaga

SEQ ID NO: 11413 - DNA, 18 bp, synthetic construct
  source 1..18: mol_type = other DNA
tcatatggtgctggcaac

SEQ ID NO: 11414 - DNA, 21 bp, synthetic construct
  source 1..21: mol_type = other DNA
agctccacagacaacaagagg

SEQ ID NO: 11415 - DNA, 18 bp, synthetic construct
  source 1..18: mol_type = other DNA
tcatatggtgctggcaac

SEQ ID NO: 11416 - DNA, 21 bp, synthetic construct
  source 1..21: mol_type = other DNA
gtcattacggctggccagaag

SEQ ID NO: 11417 - DNA, 18 bp, synthetic construct
  source 1..18: mol_type = other DNA
tcatatggtgctggcaac

SEQ ID NO: 11418 - DNA, 15 bp, synthetic construct
  source 1..15: mol_type = other DNA
ggtctacaacaaaat

SEQ ID NO: 11419 - DNA, 18 bp, synthetic construct
  source 1..18: mol_type = other DNA
tcatatggtgctggcaac

SEQ ID NO: 11420 - DNA, 21 bp, synthetic construct
  source 1..21: mol_type = other DNA
agctccacagacaacaagagg

SEQ ID NO: 11421 - DNA, 18 bp, synthetic construct
  source 1..18: mol_type = other DNA
tcatatggtgctggcaac

SEQ ID NO: 11422 - DNA, 21 bp, synthetic construct
  source 1..21: mol_type = other DNA
agctccacagacaacaagagg

SEQ ID NO: 11423 - DNA, 18 bp, synthetic construct
  source 1..18: mol_type = other DNA
tcatatggtgctggcaac

SEQ ID NO: 11424 - DNA, 21 bp, synthetic construct
  source 1..21: mol_type = other DNA
gcctcaagggacaaagagaaa

SEQ ID NO: 11425 - DNA, 18 bp, synthetic construct
  source 1..18: mol_type = other DNA
tcatatggtgctggcaac

SEQ ID NO: 11426 - DNA, 21 bp, synthetic construct
  source 1..21: mol_type = other DNA
gtcttttcaaatgtggacaga

SEQ ID NO: 11427 - DNA, 18 bp, synthetic construct
  source 1..18: mol_type = other DNA
tcatatggtgctggcaac

SEQ ID NO: 11428 - DNA, 21 bp, synthetic construct
  source 1..21: mol_type = other DNA
gtcattacggctggccagaag

SEQ ID NO: 11429 - DNA, 18 bp, synthetic construct
  source 1..18: mol_type = other DNA
tcatatggtgctggcaac

SEQ ID NO: 11430 - DNA, 24 bp, synthetic construct
  source 1..24: mol_type = other DNA
tactattccggagacccagtggtt

SEQ ID NO: 11431 - DNA, 18 bp, synthetic construct
  source 1..18: mol_type = other DNA
tcatatggtgctggcaac

SEQ ID NO: 11432 - DNA, 21 bp, synthetic construct
  source 1..21: mol_type = other DNA
atacgtccagtgtccaataaa

SEQ ID NO: 11433 - DNA, 18 bp, synthetic construct
  source 1..18: mol_type = other DNA
tcatatggtgctggcaac

SEQ ID NO: 11434 - DNA, 21 bp, synthetic construct
  source 1..21: mol_type = other DNA
gtcacaactgccaacaacaag

SEQ ID NO: 11435 - DNA, 18 bp, synthetic construct
  source 1..18: mol_type = other DNA
tcatatggtgctggcaac

SEQ ID NO: 11436 - DNA, 24 bp, synthetic construct
  source 1..24: mol_type = other DNA
caaccttcttttgacactcagaac

SEQ ID NO: 11437 - DNA, 18 bp, synthetic construct
  source 1..18: mol_type = other DNA
tcatatggtgctggcaac

SEQ ID NO: 11438 - DNA, 21 bp, synthetic construct
  source 1..21: mol_type = other DNA
gtcttttcaaatgtggacaga

SEQ ID NO: 11439 - DNA, 18 bp, synthetic construct
  source 1..18: mol_type = other DNA
tcatatgtcgctgacagc

SEQ ID NO: 11440 - DNA, 24 bp, synthetic construct
  source 1..24: mol_type = other DNA
caggactcttacaaaaaggaaaat

SEQ ID NO: 11441 - DNA, 18 bp, synthetic construct
  source 1..18: mol_type = other DNA
tcatatgtcgctgacagc

SEQ ID NO: 11442 - DNA, 15 bp, synthetic construct
  source 1..15: mol_type = other DNA
aatccttctgggaca

SEQ ID NO: 11443 - DNA, 18 bp, synthetic construct
  source 1..18: mol_type = other DNA
tcatatgtcgctgacagc

SEQ ID NO: 11444 - DNA, 15 bp, synthetic construct
  source 1..15: mol_type = other DNA
aatccttctgggaca

SEQ ID NO: 11445 - DNA, 18 bp, synthetic construct
  source 1..18: mol_type = other DNA
tcatatgtcgctgacagc

SEQ ID NO: 11446 - DNA, 21 bp, synthetic construct
  source 1..21: mol_type = other DNA
gtcattacggctggccagaag

SEQ ID NO: 11447 - DNA, 18 bp, synthetic construct
  source 1..18: mol_type = other DNA
tcatatgtcgctgacagc

SEQ ID NO: 11448 - DNA, 21 bp, synthetic construct
  source 1..21: mol_type = other DNA
gtcttttcaaatgtggacaga

SEQ ID NO: 11449 - DNA, 18 bp, synthetic construct
  source 1..18: mol_type = other DNA
tcatatgtcgctgacagc

SEQ ID NO: 11450 - DNA, 18 bp, synthetic construct
  source 1..18: mol_type = other DNA
atcttctctgatggtgaa

SEQ ID NO: 11451 - DNA, 18 bp, synthetic construct
  source 1..18: mol_type = other DNA
tcatatgtcgctgacagc

SEQ ID NO: 11452 - DNA, 24 bp, synthetic construct
  source 1..24: mol_type = other DNA
tactattcaggagacccagtggtt

SEQ ID NO: 11453 - DNA, 18 bp, synthetic construct
  source 1..18: mol_type = other DNA
tcatatgtcgctgacagc

SEQ ID NO: 11454 - DNA, 24 bp, synthetic construct
  source 1..24: mol_type = other DNA
caggactcttacaaaaaggaaaat

SEQ ID NO: 11455 - DNA, 18 bp, synthetic construct
  source 1..18: mol_type = other DNA
tcatatgtcgctgacagc

SEQ ID NO: 11456 - DNA, 24 bp, synthetic construct
  source 1..24: mol_type = other DNA
caggactcttacaaaaaggaaaat

SEQ ID NO: 11457 - DNA, 18 bp, synthetic construct
  source 1..18: mol_type = other DNA
tcatatgtcgctgacagc

SEQ ID NO: 11458 - DNA, 24 bp, synthetic construct
  source 1..24: mol_type = other DNA
caggactcttacaaaaaggaaaat

SEQ ID NO: 11459 - DNA, 18 bp, synthetic construct
  source 1..18: mol_type = other DNA
tcatatgtcgctgacagc

SEQ ID NO: 11460 - DNA, 24 bp, synthetic construct
  source 1..24: mol_type = other DNA
tacatcacaggagacaccgttgtt

SEQ ID NO: 11461 - DNA, 18 bp, synthetic construct
  source 1..18: mol_type = other DNA
tcatatgtcgctgacagc

SEQ ID NO: 11462 - DNA, 15 bp, synthetic construct
  source 1..15: mol_type = other DNA
ggtctacaacaaaat

SEQ ID NO: 11463 - DNA, 18 bp, synthetic construct
  source 1..18: mol_type = other DNA
tcatatgtcgctgacagc

SEQ ID NO: 11464 - DNA, 21 bp, synthetic construct
  source 1..21: mol_type = other DNA
gcctcaagggacaaagagaaa

SEQ ID NO: 11465 - DNA, 18 bp, synthetic construct
  source 1..18: mol_type = other DNA
tcatatgtcgctgacagc

SEQ ID NO: 11466 - DNA, 21 bp, synthetic construct
  source 1..21: mol_type = other DNA
atacgttcaaatgagcgagag

SEQ ID NO: 11467 - DNA, 18 bp, synthetic construct
  source 1..18: mol_type = other DNA
tcatatgtcgctgacagc

SEQ ID NO: 11468 - DNA, 21 bp, synthetic construct
  source 1..21: mol_type = other DNA
gtcattacggctggccagaag

SEQ ID NO: 11469 - DNA, 18 bp, synthetic construct
  source 1..18: mol_type = other DNA
tcatatgtcgctgacagc

SEQ ID NO: 11470 - DNA, 24 bp, synthetic construct
  source 1..24: mol_type = other DNA
tactattcaggagacccagtggtt

SEQ ID NO: 11471 - DNA, 18 bp, synthetic construct
  source 1..18: mol_type = other DNA
tcatatgtcgctgacagc

SEQ ID NO: 11472 - DNA, 24 bp, synthetic construct
  source 1..24: mol_type = other DNA
tacatcacaggagacaccgttgtt

SEQ ID NO: 11473 - DNA, 18 bp, synthetic construct
  source 1..18: mol_type = other DNA
tcatatgtcgctgacagc

SEQ ID NO: 11474 - DNA, 24 bp, synthetic construct
  source 1..24: mol_type = other DNA
caggactcttacaaaaaggaaaat

SEQ ID NO: 11475 - DNA, 18 bp, synthetic construct
  source 1..18: mol_type = other DNA
tcatatgtcgctgacagc

SEQ ID NO: 11476 - DNA, 18 bp, synthetic construct
  source 1..18: mol_type = other DNA
agtccttcttgggcagag

SEQ ID NO: 11477 - DNA, 18 bp, synthetic construct
  source 1..18: mol_type = other DNA
tcatatgtcgctgacagc

SEQ ID NO: 11478 - DNA, 21 bp, synthetic construct
  source 1..21: mol_type = other DNA
agctccacagacaacaagagg

SEQ ID NO: 11479 - DNA, 18 bp, synthetic construct
  source 1..18: mol_type = other DNA
tcatatgtcgctgacagc

SEQ ID NO: 11480 - DNA, 21 bp, synthetic construct
  source 1..21: mol_type = other DNA
gtacgctcaaatgtggataag

SEQ ID NO: 11481 - DNA, 18 bp, synthetic construct
  source 1..18: mol_type = other DNA
tcatatgtcgctgacagc

SEQ ID NO: 11482 - DNA, 21 bp, synthetic construct
  source 1..21: mol_type = other DNA
gtcctttcaaatgtggacaga

SEQ ID NO: 11483 - DNA, 18 bp, synthetic construct
  source 1..18: mol_type = other DNA
tcatatgtcgctgacagc

SEQ ID NO: 11484 - DNA, 21 bp, synthetic construct
  source 1..21: mol_type = other DNA
gtcctttcaaatgtggacaga

SEQ ID NO: 11485 - DNA, 18 bp, synthetic construct
  source 1..18: mol_type = other DNA
tcatatgtcgctgacagc

SEQ ID NO: 11486 - DNA, 24 bp, synthetic construct
  source 1..24: mol_type = other DNA
caggactcttacaaaaaggaaaat

SEQ ID NO: 11487 - DNA, 18 bp, synthetic construct
  source 1..18: mol_type = other DNA
tcatatgtcgctgacagc

SEQ ID NO: 11488 - DNA, 18 bp, synthetic construct
  source 1..18: mol_type = other DNA
atcttctccaatggtgaa

SEQ ID NO: 11489 - DNA, 18 bp, synthetic construct
  source 1..18: mol_type = other DNA
tcatatgtcgctgacagc

SEQ ID NO: 11490 - DNA, 21 bp, synthetic construct
  source 1..21: mol_type = other DNA
gttttctcaagtacggaaata

SEQ ID NO: 11491 - DNA, 18 bp, synthetic construct
  source 1..18: mol_type = other DNA
tcatatgtcgctgacagc

SEQ ID NO: 11492 - DNA, 24 bp, synthetic construct
  source 1..24: mol_type = other DNA
caggactcttacaaaaaggaaaat

SEQ ID NO: 11493 - DNA, 18 bp, synthetic construct
  source 1..18: mol_type = other DNA
tcatatgtcgctgacagc

SEQ ID NO: 11494 - DNA, 24 bp, synthetic construct
  source 1..24: mol_type = other DNA
caggactcttacaaaaaggaaaat

SEQ ID NO: 11495 - DNA, 18 bp, synthetic construct
  source 1..18: mol_type = other DNA
tcatatgtcgctgacagc

SEQ ID NO: 11496 - DNA, 21 bp, synthetic construct
  source 1..21: mol_type = other DNA
atacgttcagtgtccgataaa

SEQ ID NO: 11497 - DNA, 18 bp, synthetic construct
  source 1..18: mol_type = other DNA
tcatatgtcgctgacagc

SEQ ID NO: 11498 - DNA, 24 bp, synthetic construct
  source 1..24: mol_type = other DNA
tactattccggagacccagtggtt

SEQ ID NO: 11499 - DNA, 18 bp, synthetic construct
  source 1..18: mol_type = other DNA
tcatatgtcgctgacagc

SEQ ID NO: 11500 - DNA, 21 bp, synthetic construct
  source 1..21: mol_type = other DNA
atacgttcagtgtccgataaa

SEQ ID NO: 11501 - DNA, 18 bp, synthetic construct
  source 1..18: mol_type = other DNA
tcatatgtcgctgacagc

SEQ ID NO: 11502 - DNA, 18 bp, synthetic construct
  source 1..18: mol_type = other DNA
gttgttttggatggtttg

SEQ ID NO: 11503 - DNA, 18 bp, synthetic construct
  source 1..18: mol_type = other DNA
tcatatgtcgctgacagc

SEQ ID NO: 11504 - DNA, 18 bp, synthetic construct
  source 1..18: mol_type = other DNA
atcttctccaatggtgaa

SEQ ID NO: 11505 - DNA, 18 bp, synthetic construct
  source 1..18: mol_type = other DNA
tcatatgtcgctgacagc

SEQ ID NO: 11506 - DNA, 21 bp, synthetic construct
  source 1..21: mol_type = other DNA
atacgttcaaatgagagagag

SEQ ID NO: 11507 - DNA, 18 bp, synthetic construct
  source 1..18: mol_type = other DNA
tcatatgtcgctgacagc

SEQ ID NO: 11508 - DNA, 21 bp, synthetic construct
  source 1..21: mol_type = other DNA
atacgttcaaatgagcgagag

SEQ ID NO: 11509 - DNA, 18 bp, synthetic construct
  source 1..18: mol_type = other DNA
tcatatgtcgctgacagc

SEQ ID NO: 11510 - DNA, 21 bp, synthetic construct
  source 1..21: mol_type = other DNA
gcctcaagggacaaagagaaa

SEQ ID NO: 11511 - DNA, 18 bp, synthetic construct
  source 1..18: mol_type = other DNA
tcatatgtcgctgacagc

SEQ ID NO: 11512 - DNA, 21 bp, synthetic construct
  source 1..21: mol_type = other DNA
gtcattacggctggccagaag

SEQ ID NO: 11513 - DNA, 18 bp, synthetic construct
  source 1..18: mol_type = other DNA
tcatatgtcgctgacagc

SEQ ID NO: 11514 - DNA, 15 bp, synthetic construct
  source 1..15: mol_type = other DNA
aatccttctgggaca

SEQ ID NO: 11515 - DNA, 18 bp, synthetic construct
  source 1..18: mol_type = other DNA
tcatatgtcgctgacagc

SEQ ID NO: 11516 - DNA, 21 bp, synthetic construct
  source 1..21: mol_type = other DNA
atacgtccagtgtccaataaa

SEQ ID NO: 11517 - DNA, 18 bp, synthetic construct
  source 1..18: mol_type = other DNA
tcatatgtcgctgacagc

SEQ ID NO: 11518 - DNA, 21 bp, synthetic construct
  source 1..21: mol_type = other DNA
agctccacagacaacaagagg

SEQ ID NO: 11519 - DNA, 18 bp, synthetic construct
  source 1..18: mol_type = other DNA
tcatatgtcgctgacagc

SEQ ID NO: 11520 - DNA, 15 bp, synthetic construct
  source 1..15: mol_type = other DNA
aatccttctgggaca

SEQ ID NO: 11521 - DNA, 18 bp, synthetic construct
  source 1..18: mol_type = other DNA
tcatatgtcgctgacagc

SEQ ID NO: 11522 - DNA, 18 bp, synthetic construct
  source 1..18: mol_type = other DNA
atattctctaatggcaac

SEQ ID NO: 11523 - DNA, 18 bp, synthetic construct
  source 1..18: mol_type = other DNA
tcatatgtcgctgacagc

SEQ ID NO: 11524 - DNA, 24 bp, synthetic construct
  source 1..24: mol_type = other DNA
caggactcttacaaaaaggaaaat

SEQ ID NO: 11525 - DNA, 18 bp, synthetic construct
  source 1..18: mol_type = other DNA
tcatatgtcgctgacagc

SEQ ID NO: 11526 - DNA, 24 bp, synthetic construct
  source 1..24: mol_type = other DNA
caggactcttacaaaaaggaaaat

SEQ ID NO: 11527 - DNA, 18 bp, synthetic construct
  source 1..18: mol_type = other DNA
tcatatgtcgctgacagc

SEQ ID NO: 11528 - DNA, 21 bp, synthetic construct
  source 1..21: mol_type = other DNA
gtcacaacagccaacaacaag

SEQ ID NO: 11529 - DNA, 18 bp, synthetic construct
  source 1..18: mol_type = other DNA
tcatatgtcgctgacagc

SEQ ID NO: 11530 - DNA, 15 bp, synthetic construct
  source 1..15: mol_type = other DNA
aatccttctgggaca

SEQ ID NO: 11531 - DNA, 18 bp, synthetic construct
  source 1..18: mol_type = other DNA
tcatatgtcgctgacagc

SEQ ID NO: 11532 - DNA, 21 bp, synthetic construct
  source 1..21: mol_type = other DNA
gcctcaagggacaaagagaaa

SEQ ID NO: 11533 - DNA, 18 bp, synthetic construct
  source 1..18: mol_type = other DNA
tcatatgtcgctgacagc

SEQ ID NO: 11534 - DNA, 18 bp, synthetic construct
  source 1..18: mol_type = other DNA
atcttctctgatggtgac

SEQ ID NO: 11535 - DNA, 18 bp, synthetic construct
  source 1..18: mol_type = other DNA
tcatatgtcgctgacagc

SEQ ID NO: 11536 - DNA, 21 bp, synthetic construct
  source 1..21: mol_type = other DNA
agctccacagacaacaagagg

SEQ ID NO: 11537 - DNA, 18 bp, synthetic construct
  source 1..18: mol_type = other DNA
tcatatgtcgctgacagc

SEQ ID NO: 11538 - DNA, 15 bp, synthetic construct
  source 1..15: mol_type = other DNA
ttggcttcaggaaca

SEQ ID NO: 11539 - DNA, 18 bp, synthetic construct
  source 1..18: mol_type = other DNA
tcatatgtcgctgacagc

SEQ ID NO: 11540 - DNA, 21 bp, synthetic construct
  source 1..21: mol_type = other DNA
attcgttcaaatatggaaaga

SEQ ID NO: 11541 - DNA, 18 bp, synthetic construct
  source 1..18: mol_type = other DNA
tcatatgtcgctgacagc

SEQ ID NO: 11542 - DNA, 18 bp, synthetic construct
  source 1..18: mol_type = other DNA
atcttctccaatggtgaa

SEQ ID NO: 11543 - DNA, 18 bp, synthetic construct
  source 1..18: mol_type = other DNA
tcatatgtcgctgacagc

SEQ ID NO: 11544 - DNA, 21 bp, synthetic construct
  source 1..21: mol_type = other DNA
gtcattacggctggccagaag

SEQ ID NO: 11545 - DNA, 18 bp, synthetic construct
  source 1..18: mol_type = other DNA
tcatatgtcgctgacagc

SEQ ID NO: 11546 - DNA, 21 bp, synthetic construct
  source 1..21: mol_type = other DNA
agctccacagacaacaagagg

SEQ ID NO: 11547 - DNA, 18 bp, synthetic construct
  source 1..18: mol_type = other DNA
tcatatgtcgctgacagc

SEQ ID NO: 11548 - DNA, 21 bp, synthetic construct
  source 1..21: mol_type = other DNA
atactttcagtgtccaataaa

SEQ ID NO: 11549 - DNA, 18 bp, synthetic construct
  source 1..18: mol_type = other DNA
tcatatgtcgctgacagc

SEQ ID NO: 11550 - DNA, 21 bp, synthetic construct
  source 1..21: mol_type = other DNA
gtcctttcaaatgtggacaga

SEQ ID NO: 11551 - DNA, 18 bp, synthetic construct
  source 1..18: mol_type = other DNA
tcatatgtcgctgacagc

SEQ ID NO: 11552 - DNA, 21 bp, synthetic construct
  source 1..21: mol_type = other DNA
gtcattacggctggccagaag

SEQ ID NO: 11553 - DNA, 18 bp, synthetic construct
  source 1..18: mol_type = other DNA
tcatatgtcgctgacagc

SEQ ID NO: 11554 - DNA, 21 bp, synthetic construct
  source 1..21: mol_type = other DNA
attcgttcaaatgtggacaga

SEQ ID NO: 11555 - DNA, 18 bp, synthetic construct
  source 1..18: mol_type = other DNA
tcatatgtcgctgacagc

SEQ ID NO: 11556 - DNA, 21 bp, synthetic construct
  source 1..21: mol_type = other DNA
ataagttcagtgtccgataaa

SEQ ID NO: 11557 - DNA, 18 bp, synthetic construct
  source 1..18: mol_type = other DNA
tcatatgtcgctgacagc

SEQ ID NO: 11558 - DNA, 21 bp, synthetic construct
  source 1..21: mol_type = other DNA
gtcccaaaggccaacgagaag

SEQ ID NO: 11559 - DNA, 18 bp, synthetic construct
  source 1..18: mol_type = other DNA
tcatatgtcgctgacagc

SEQ ID NO: 11560 - DNA, 24 bp, synthetic construct
  source 1..24: mol_type = other DNA
tactattcaggagacccagtggtt

SEQ ID NO: 11561 - DNA, 18 bp, synthetic construct
  source 1..18: mol_type = other DNA
tcatatgtcgctgacagc

SEQ ID NO: 11562 - DNA, 24 bp, synthetic construct
  source 1..24: mol_type = other DNA
caggactcttacaaaaaggaaaat

SEQ ID NO: 11563 - DNA, 18 bp, synthetic construct
  source 1..18: mol_type = other DNA
tcatatgtcgctgacagc

SEQ ID NO: 11564 - DNA, 24 bp, synthetic construct
  source 1..24: mol_type = other DNA
tactattcgggaaacccagtggtt

SEQ ID NO: 11565 - DNA, 18 bp, synthetic construct
  source 1..18: mol_type = other DNA
tcatatgtcgctgacagc

SEQ ID NO: 11566 - DNA, 21 bp, synthetic construct
  source 1..21: mol_type = other DNA
gtcattacggctggccagaag

SEQ ID NO: 11567 - DNA, 18 bp, synthetic construct
  source 1..18: mol_type = other DNA
tcatatgtcgctgacagc

SEQ ID NO: 11568 - DNA, 24 bp, synthetic construct
  source 1..24: mol_type = other DNA
caaatgtcttcttctactgcaaaa

SEQ ID NO: 11569 - DNA, 18 bp, synthetic construct
  source 1..18: mol_type = other DNA
tcatatgtcgctgacagc

SEQ ID NO: 11570 - DNA, 21 bp, synthetic construct
  source 1..21: mol_type = other DNA
gtcattacggctggccagaag

SEQ ID NO: 11571 - DNA, 18 bp, synthetic construct
  source 1..18: mol_type = other DNA
tcatatgtcgctgacagc

SEQ ID NO: 11572 - DNA, 21 bp, synthetic construct
  source 1..21: mol_type = other DNA
atactttcagtgtccgataaa

SEQ ID NO: 11573 - DNA, 18 bp, synthetic construct
  source 1..18: mol_type = other DNA
tcatatgtcgctgacagc

SEQ ID NO: 11574 - DNA, 24 bp, synthetic construct
  source 1..24: mol_type = other DNA
caggactcttacaaaaaggaaaat

SEQ ID NO: 11575 - DNA, 18 bp, synthetic construct
  source 1..18: mol_type = other DNA
tcatatgtcgctgacagc

SEQ ID NO: 11576 - DNA, 21 bp, synthetic construct
  source 1..21: mol_type = other DNA
attcgttcaaatatggaaaga

SEQ ID NO: 11577 - DNA, 18 bp, synthetic construct
  source 1..18: mol_type = other DNA
tcatatgtcgctgacagc

SEQ ID NO: 11578 - DNA, 15 bp, synthetic construct
  source 1..15: mol_type = other DNA
ctggtgccaggaaca

SEQ ID NO: 11579 - DNA, 18 bp, synthetic construct
  source 1..18: mol_type = other DNA
tcatatgtcgctgacagc

SEQ ID NO: 11580 - DNA, 15 bp, synthetic construct
  source 1..15: mol_type = other DNA
aatccttctgggaca

SEQ ID NO: 11581 - DNA, 18 bp, synthetic construct
  source 1..18: mol_type = other DNA
tcatatgtcgctgacagc

SEQ ID NO: 11582 - DNA, 21 bp, synthetic construct
  source 1..21: mol_type = other DNA
gtcttttcaaatgtggacaga

SEQ ID NO: 11583 - DNA, 18 bp, synthetic construct
  source 1..18: mol_type = other DNA
tcatatgtcgctgacagc

SEQ ID NO: 11584 - DNA, 15 bp, synthetic construct
  source 1..15: mol_type = other DNA
ctggctcaaggaaca

SEQ ID NO: 11585 - DNA, 18 bp, synthetic construct
  source 1..18: mol_type = other DNA
tcatatgtcgctgacagc

SEQ ID NO: 11586 - DNA, 21 bp, synthetic construct
  source 1..21: mol_type = other DNA
agctccacagacaacaagagg

SEQ ID NO: 11587 - DNA, 18 bp, synthetic construct
  source 1..18: mol_type = other DNA
tcatatgtcgctgacagc

SEQ ID NO: 11588 - DNA, 21 bp, synthetic construct
  source 1..21: mol_type = other DNA
attcgttcaaatatggaaaga

SEQ ID NO: 11589 - DNA, 18 bp, synthetic construct
  source 1..18: mol_type = other DNA
tcatatgtcgctgacagc

SEQ ID NO: 11590 - DNA, 24 bp, synthetic construct
  source 1..24: mol_type = other DNA
caggactcttacaaaaaggaaaat

SEQ ID NO: 11591 - DNA, 18 bp, synthetic construct
  source 1..18: mol_type = other DNA
tcatatgtcgctgacagc

SEQ ID NO: 11592 - DNA, 24 bp, synthetic construct
  source 1..24: mol_type = other DNA
tactatccaggagacccagtggtt

SEQ ID NO: 11593 - DNA, 18 bp, synthetic construct
  source 1..18: mol_type = other DNA
tcatatgtcgctgacagc

SEQ ID NO: 11594 - DNA, 24 bp, synthetic construct
  source 1..24: mol_type = other DNA
caggactcttacaaaaaggaaaat

SEQ ID NO: 11595 - DNA, 18 bp, synthetic construct
  source 1..18: mol_type = other DNA
tcatatgtcgctgacagc

SEQ ID NO: 11596 - DNA, 24 bp, synthetic construct
  source 1..24: mol_type = other DNA
caggactcttacaaaaaggaaaat

SEQ ID NO: 11597 - DNA, 18 bp, synthetic construct
  source 1..18: mol_type = other DNA
tcatatgtcgctgacagc

SEQ ID NO: 11598 - DNA, 24 bp, synthetic construct
  source 1..24: mol_type = other DNA
caggactcttacaaaaaggaaaat

SEQ ID NO: 11599 - DNA, 18 bp, synthetic construct
  source 1..18: mol_type = other DNA
tactatgataagattttg

SEQ ID NO: 11600 - DNA, 21 bp, synthetic construct
  source 1..21: mol_type = other DNA
gttttctcaagtacggaaata

SEQ ID NO: 11601 - DNA, 18 bp, synthetic construct
  source 1..18: mol_type = other DNA
tactatgataagattttg

SEQ ID NO: 11602 - DNA, 24 bp, synthetic construct
  source 1..24: mol_type = other DNA
caggactcttacaaaaaggaaaat

SEQ ID NO: 11603 - DNA, 18 bp, synthetic construct
  source 1..18: mol_type = other DNA
tactatgataagattttg

SEQ ID NO: 11604 - DNA, 21 bp, synthetic construct
  source 1..21: mol_type = other DNA
gtcattacggctggccagaag

SEQ ID NO: 11605 - DNA, 18 bp, synthetic construct
  source 1..18: mol_type = other DNA
tactatgataagattttg

SEQ ID NO: 11606 - DNA, 21 bp, synthetic construct
  source 1..21: mol_type = other DNA
gtcattacggctggccagaag

SEQ ID NO: 11607 - DNA, 18 bp, synthetic construct
  source 1..18: mol_type = other DNA
tactatgataagattttg

SEQ ID NO: 11608 - DNA, 18 bp, synthetic construct
  source 1..18: mol_type = other DNA
atcttctctgatggtgac

SEQ ID NO: 11609 - DNA, 18 bp, synthetic construct
  source 1..18: mol_type = other DNA
tactatgataagattttg

SEQ ID NO: 11610 - DNA, 18 bp, synthetic construct
  source 1..18: mol_type = other DNA
atcttctctgatggtgac

SEQ ID NO: 11611 - DNA, 18 bp, synthetic construct
  source 1..18: mol_type = other DNA
tactatgataagattttg

SEQ ID NO: 11612 - DNA, 21 bp, synthetic construct
  source 1..21: mol_type = other DNA
attcgttcaaatgtggacaga

SEQ ID NO: 11613 - DNA, 18 bp, synthetic construct
  source 1..18: mol_type = other DNA
tactatgataagattttg

SEQ ID NO: 11614 - DNA, 24 bp, synthetic construct
  source 1..24: mol_type = other DNA
tacatcacaggagacaccgttgtt

SEQ ID NO: 11615 - DNA, 18 bp, synthetic construct
  source 1..18: mol_type = other DNA
tactatgataagattttg

SEQ ID NO: 11616 - DNA, 15 bp, synthetic construct
  source 1..15: mol_type = other DNA
aatccttctgggaca

SEQ ID NO: 11617 - DNA, 18 bp, synthetic construct
  source 1..18: mol_type = other DNA
tactatgataagattttg

SEQ ID NO: 11618 - DNA, 24 bp, synthetic construct
  source 1..24: mol_type = other DNA
caggactcttacaaaaaggaaaat

SEQ ID NO: 11619 - DNA, 18 bp, synthetic construct
  source 1..18: mol_type = other DNA
tactatgataagattttg

SEQ ID NO: 11620 - DNA, 21 bp, synthetic construct
  source 1..21: mol_type = other DNA
gtcattacggctggccagaag

SEQ ID NO: 11621 - DNA, 18 bp, synthetic construct
  source 1..18: mol_type = other DNA
tactatgataagattttg

SEQ ID NO: 11622 - DNA, 18 bp, synthetic construct
  source 1..18: mol_type = other DNA
gttgttttggatggtttg

SEQ ID NO: 11623 - DNA, 18 bp, synthetic construct
  source 1..18: mol_type = other DNA
tactatgataagattttg

SEQ ID NO: 11624 - DNA, 21 bp, synthetic construct
  source 1..21: mol_type = other DNA
gttttctcaagtacggaaata

SEQ ID NO: 11625 - DNA, 18 bp, synthetic construct
  source 1..18: mol_type = other DNA
tactatgataagattttg

SEQ ID NO: 11626 - DNA, 24 bp, synthetic construct
  source 1..24: mol_type = other DNA
caggactcttacaaaaaggaaaat

SEQ ID NO: 11627 - DNA, 18 bp, synthetic construct
  source 1..18: mol_type = other DNA
ttccgcagcaagtctctt

SEQ ID NO: 11628 - DNA, 24 bp, synthetic construct
  source 1..24: mol_type = other DNA
caggactcttacaaaaaggaaaat

SEQ ID NO: 11629 - DNA, 18 bp, synthetic construct
  source 1..18: mol_type = other DNA
cattatgaaaaggtggag

SEQ ID NO: 11630 - DNA, 24 bp, synthetic construct
  source 1..24: mol_type = other DNA
tactatccaggagacccagtggtt

SEQ ID NO: 11631 - DNA, 15 bp, synthetic construct
  source 1..15: mol_type = other DNA
tctattactgttggc

SEQ ID NO: 11632 - DNA, 18 bp, synthetic construct
  source 1..18: mol_type = other DNA
atcttctccaatggtgaa

SEQ ID NO: 11633 - DNA, 15 bp, synthetic construct
  source 1..15: mol_type = other DNA
tctattactgttggc

SEQ ID NO: 11634 - DNA, 21 bp, synthetic construct
  source 1..21: mol_type = other DNA
atacgtccagtgtccaataaa

SEQ ID NO: 11635 - DNA, 15 bp, synthetic construct
  source 1..15: mol_type = other DNA
tctattactgttggc

SEQ ID NO: 11636 - DNA, 21 bp, synthetic construct
  source 1..21: mol_type = other DNA
gtcctttcaaatgtggacaga

SEQ ID NO: 11637 - DNA, 15 bp, synthetic construct
  source 1..15: mol_type = other DNA
tctattactgttggc

SEQ ID NO: 11638 - DNA, 21 bp, synthetic construct
  source 1..21: mol_type = other DNA
attcgttcaaatatggaaaga

SEQ ID NO: 11639 - DNA, 15 bp, synthetic construct
  source 1..15: mol_type = other DNA
tctattactgttggc

SEQ ID NO: 11640 - DNA, 21 bp, synthetic construct
  source 1..21: mol_type = other DNA
atacgtccagtgtccaataaa

SEQ ID NO: 11641 - DNA, 15 bp, synthetic construct
  source 1..15: mol_type = other DNA
tctattactgttggc

SEQ ID NO: 11642 - DNA, 21 bp, synthetic construct
  source 1..21: mol_type = other DNA
gtcattacggctggccagaag

SEQ ID NO: 11643 - DNA, 15 bp, synthetic construct
  source 1..15: mol_type = other DNA
tctattactgttggc

SEQ ID NO: 11644 - DNA, 24 bp, synthetic construct
  source 1..24: mol_type = other DNA
caggactcttacaaaaaggaaaat

SEQ ID NO: 11645 - DNA, 15 bp, synthetic construct
  source 1..15: mol_type = other DNA
tctattactgttggc

SEQ ID NO: 11646 - DNA, 21 bp, synthetic construct
  source 1..21: mol_type = other DNA
gttttctcaagtacggaaata

SEQ ID NO: 11647 - DNA, 15 bp, synthetic construct
  source 1..15: mol_type = other DNA
tctattactgttggc

SEQ ID NO: 11648 - DNA, 21 bp, synthetic construct
  source 1..21: mol_type = other DNA
attcgttcaaatgtggacaga

SEQ ID NO: 11649 - DNA, 15 bp, synthetic construct
  source 1..15: mol_type = other DNA
tctattactgttggc

SEQ ID NO: 11650 - DNA, 21 bp, synthetic construct
  source 1..21: mol_type = other DNA
atacgttcaaatgagcgagag

SEQ ID NO: 11651 - DNA, 18 bp, synthetic construct
  source 1..18: mol_type = other DNA
ttctacaatggtaaagtc

SEQ ID NO: 11652 - DNA, 24 bp, synthetic construct
  source 1..24: mol_type = other DNA
tactatccaggagacccagtggtt

SEQ ID NO: 11653 - DNA, 18 bp, synthetic construct
  source 1..18: mol_type = other DNA
ttctacaatggtaaagtc

SEQ ID NO: 11654 - DNA, 15 bp, synthetic construct
  source 1..15: mol_type = other DNA
ttggcttcaggaaca

SEQ ID NO: 11655 - DNA, 18 bp, synthetic construct
  source 1..18: mol_type = other DNA
ttctacaatggtaaagtc

SEQ ID NO: 11656 - DNA, 24 bp, synthetic construct
  source 1..24: mol_type = other DNA
caggactcttacaaaaaggaaaat

SEQ ID NO: 11657 - DNA, 18 bp, synthetic construct
  source 1..18: mol_type = other DNA
ttctacaatggtaaagtc

SEQ ID NO: 11658 - DNA, 21 bp, synthetic construct
  source 1..21: mol_type = other DNA
ataagttcagtgtccgataaa

SEQ ID NO: 11659 - DNA, 18 bp, synthetic construct
  source 1..18: mol_type = other DNA
ttctacaatggtaaagtc

SEQ ID NO: 11660 - DNA, 15 bp, synthetic construct
  source 1..15: mol_type = other DNA
ttggcttcaggaaca

SEQ ID NO: 11661 - DNA, 18 bp, synthetic construct
  source 1..18: mol_type = other DNA
ttctacaatggtaaagtc

SEQ ID NO: 11662 - DNA, 21 bp, synthetic construct
  source 1..21: mol_type = other DNA
atacgttcaaatgagcgagag

SEQ ID NO: 11663 - DNA, 18 bp, synthetic construct
  source 1..18: mol_type = other DNA
ttctacaatggtaaagtc

SEQ ID NO: 11664 - DNA, 15 bp, synthetic construct
  source 1..15: mol_type = other DNA
aatccttctgggaca

SEQ ID NO: 11665 - DNA, 18 bp, synthetic construct
  source 1..18: mol_type = other DNA
ttctacaatggtaaagtc

SEQ ID NO: 11666 - DNA, 24 bp, synthetic construct
  source 1..24: mol_type = other DNA
caggactcttacaaaaaggaaaat

SEQ ID NO: 11667 - DNA, 18 bp, synthetic construct
  source 1..18: mol_type = other DNA
ttctacaatggtaaagtc

SEQ ID NO: 11668 - DNA, 21 bp, synthetic construct
  source 1..21: mol_type = other DNA
gtacgctcaaatgtggataag

SEQ ID NO: 11669 - DNA, 18 bp, synthetic construct
  source 1..18: mol_type = other DNA
ttctacaatggtaaagtc

SEQ ID NO: 11670 - DNA, 24 bp, synthetic construct
  source 1..24: mol_type = other DNA
tactattccggagacccagtggtt

SEQ ID NO: 11671 - DNA, 18 bp, synthetic construct
  source 1..18: mol_type = other DNA
ttctacaatggtaaagtc

SEQ ID NO: 11672 - DNA, 24 bp, synthetic construct
  source 1..24: mol_type = other DNA
tactattccggagacccagtggtt

SEQ ID NO: 11673 - DNA, 18 bp, synthetic construct
  source 1..18: mol_type = other DNA
ttctacaatggtaaagtc

SEQ ID NO: 11674 - DNA, 18 bp, synthetic construct
  source 1..18: mol_type = other DNA
atcttctccaatggtgaa

SEQ ID NO: 11675 - DNA, 21 bp, synthetic construct
  source 1..21: mol_type = other DNA
tctactgtgaactcagcaatc

SEQ ID NO: 11676 - DNA, 15 bp, synthetic construct
  source 1..15: mol_type = other DNA
aatccttctgggaca

SEQ ID NO: 11677 - DNA, 21 bp, synthetic construct
  source 1..21: mol_type = other DNA
tctactgtgaactcagcaatc

SEQ ID NO: 11678 - DNA, 21 bp, synthetic construct
  source 1..21: mol_type = other DNA
gtcctttcaaatgtggacaga

SEQ ID NO: 11679 - DNA, 21 bp, synthetic construct
  source 1..21: mol_type = other DNA
tctactgtgaactcagcaatc

SEQ ID NO: 11680 - DNA, 15 bp, synthetic construct
  source 1..15: mol_type = other DNA
ttggcttcaggaaca

SEQ ID NO: 11681 - DNA, 21 bp, synthetic construct
  source 1..21: mol_type = other DNA
tctactgtgaactcagcaatc

SEQ ID NO: 11682 - DNA, 21 bp, synthetic construct
  source 1..21: mol_type = other DNA
agctccacagacaacaagagg

SEQ ID NO: 11683 - DNA, 21 bp, synthetic construct
  source 1..21: mol_type = other DNA
tctactgtgaactcagcaatc

SEQ ID NO: 11684 - DNA, 18 bp, synthetic construct
  source 1..18: mol_type = other DNA
atcttctccaatggtgaa

SEQ ID NO: 11685 - DNA, 21 bp, synthetic construct
  source 1..21: mol_type = other DNA
tctactgtgaactcagcaatc

SEQ ID NO: 11686 - DNA, 24 bp, synthetic construct
  source 1..24: mol_type = other DNA
tactatccaggagacccagtggtt

SEQ ID NO: 11687 - DNA, 21 bp, synthetic construct
  source 1..21: mol_type = other DNA
tctactgtgaactcagcaatc

SEQ ID NO: 11688 - DNA, 18 bp, synthetic construct
  source 1..18: mol_type = other DNA
atcttctctgatggtgac

SEQ ID NO: 11689 - DNA, 21 bp, synthetic construct
  source 1..21: mol_type = other DNA
tctactgtgaactcagcaatc

SEQ ID NO: 11690 - DNA, 21 bp, synthetic construct
  source 1..21: mol_type = other DNA
gcctcaagggacaaagagaaa

SEQ ID NO: 11691 - DNA, 21 bp, synthetic construct
  source 1..21: mol_type = other DNA
tctactgtgaactcagcaatc

SEQ ID NO: 11692 - DNA, 15 bp, synthetic construct
  source 1..15: mol_type = other DNA
aatccttctgggaca

SEQ ID NO: 11693 - DNA, 21 bp, synthetic construct
  source 1..21: mol_type = other DNA
tctactgtgaactcagcaatc

SEQ ID NO: 11694 - DNA, 18 bp, synthetic construct
  source 1..18: mol_type = other DNA
atcttctctgatggtgac

SEQ ID NO: 11695 - DNA, 21 bp, synthetic construct
  source 1..21: mol_type = other DNA
tctactgtgaactcagcaatc

SEQ ID NO: 11696 - DNA, 21 bp, synthetic construct
  source 1..21: mol_type = other DNA
atacgttcaaatgagagagag

SEQ ID NO: 11697 - DNA, 21 bp, synthetic construct
  source 1..21: mol_type = other DNA
tctactgtgaactcagcaatc

SEQ ID NO: 11698 - DNA, 24 bp, synthetic construct
  source 1..24: mol_type = other DNA
caggactcttacaaaaaggaaaat

SEQ ID NO: 11699 - DNA, 21 bp, synthetic construct
  source 1..21: mol_type = other DNA
tctactgtgaactcagcaatc

SEQ ID NO: 11700 - DNA, 15 bp, synthetic construct
  source 1..15: mol_type = other DNA
ctggttccaggaaca

SEQ ID NO: 11701 - DNA, 21 bp, synthetic construct
  source 1..21: mol_type = other DNA
tctactgtgaactcagcaatc

SEQ ID NO: 11702 - DNA, 21 bp, synthetic construct
  source 1..21: mol_type = other DNA
attcgttcaaatgtggacaga

SEQ ID NO: 11703 - DNA, 18 bp, synthetic construct
  source 1..18: mol_type = other DNA
tcaataactgaaaacgat

SEQ ID NO: 11704 - DNA, 15 bp, synthetic construct
  source 1..15: mol_type = other DNA
aatccttctgggaca

SEQ ID NO: 11705 - DNA, 18 bp, synthetic construct
  source 1..18: mol_type = other DNA
tcaataactgaaaacgat

SEQ ID NO: 11706 - DNA, 18 bp, synthetic construct
  source 1..18: mol_type = other DNA
atcttctctgatggtgaa

SEQ ID NO: 11707 - DNA, 18 bp, synthetic construct
  source 1..18: mol_type = other DNA
tcaataactgaaaacgat

SEQ ID NO: 11708 - DNA, 21 bp, synthetic construct
  source 1..21: mol_type = other DNA
gtcacaacagccaacaacaag

SEQ ID NO: 11709 - DNA, 18 bp, synthetic construct
  source 1..18: mol_type = other DNA
tcaataactgaaaacgat

SEQ ID NO: 11710 - DNA, 21 bp, synthetic construct
  source 1..21: mol_type = other DNA
ggatataaggactatgtggta

SEQ ID NO: 11711 - DNA, 18 bp, synthetic construct
  source 1..18: mol_type = other DNA
tcaataactgaaaacgat

SEQ ID NO: 11712 - DNA, 24 bp, synthetic construct
  source 1..24: mol_type = other DNA
caggactcttacaaaaaggaaaat

SEQ ID NO: 11713 - DNA, 18 bp, synthetic construct
  source 1..18: mol_type = other DNA
tcaataactgaaaacgat

SEQ ID NO: 11714 - DNA, 21 bp, synthetic construct
  source 1..21: mol_type = other DNA
gcctcaagggacaaagagaaa

SEQ ID NO: 11715 - DNA, 18 bp, synthetic construct
  source 1..18: mol_type = other DNA
tcaataactgaaaacgat

SEQ ID NO: 11716 - DNA, 24 bp, synthetic construct
  source 1..24: mol_type = other DNA
tactattccggagacccagtggtt

SEQ ID NO: 11717 - DNA, 18 bp, synthetic construct
  source 1..18: mol_type = other DNA
tcaataactgaaaacgat

SEQ ID NO: 11718 - DNA, 24 bp, synthetic construct
  source 1..24: mol_type = other DNA
caggactcttacaaaaaggaaaat

SEQ ID NO: 11719 - DNA, 18 bp, synthetic construct
  source 1..18: mol_type = other DNA
tcaataactgaaaacgat

SEQ ID NO: 11720 - DNA, 21 bp, synthetic construct
  source 1..21: mol_type = other DNA
agctccacagacaacaagagg

SEQ ID NO: 11721 - DNA, 18 bp, synthetic construct
  source 1..18: mol_type = other DNA
tcaataactgaaaacgat

SEQ ID NO: 11722 - DNA, 21 bp, synthetic construct
  source 1..21: mol_type = other DNA
gtcattacggctggccagaag

SEQ ID NO: 11723 - DNA, 18 bp, synthetic construct
  source 1..18: mol_type = other DNA
tcaataactgaaaacgat

SEQ ID NO: 11724 - DNA, 21 bp, synthetic construct
  source 1..21: mol_type = other DNA
gttttctcaagtacggaaata

SEQ ID NO: 11725 - DNA, 18 bp, synthetic construct
  source 1..18: mol_type = other DNA
tcaataactgaaaacgat

SEQ ID NO: 11726 - DNA, 21 bp, synthetic construct
  source 1..21: mol_type = other DNA
agctccacagacaacaagagg

SEQ ID NO: 11727 - DNA, 18 bp, synthetic construct
  source 1..18: mol_type = other DNA
tcaataactgaaaacgat

SEQ ID NO: 11728 - DNA, 21 bp, synthetic construct
  source 1..21: mol_type = other DNA
gtcctttcaaatgtggacaga

SEQ ID NO: 11729 - DNA, 18 bp, synthetic construct
  source 1..18: mol_type = other DNA
tcaataactgaaaacgat

SEQ ID NO: 11730 - DNA, 21 bp, synthetic construct
  source 1..21: mol_type = other DNA
gtcccaaaggccaacgagaag

SEQ ID NO: 11731 - DNA, 18 bp, synthetic construct
  source 1..18: mol_type = other DNA
tcaataactgaaaacgat

SEQ ID NO: 11732 - DNA, 15 bp, synthetic construct
  source 1..15: mol_type = other DNA
aatccttctgggaca

SEQ ID NO: 11733 - DNA, 18 bp, synthetic construct
  source 1..18: mol_type = other DNA
tcaataactgaaaacgat

SEQ ID NO: 11734 - DNA, 21 bp, synthetic construct
  source 1..21: mol_type = other DNA
atactttcagtgtccaataaa

SEQ ID NO: 11735 - DNA, 18 bp, synthetic construct
  source 1..18: mol_type = other DNA
tcaataactgaaaacgat

SEQ ID NO: 11736 - DNA, 21 bp, synthetic construct
  source 1..21: mol_type = other DNA
gttttctcaagtacggaaata

SEQ ID NO: 11737 - DNA, 18 bp, synthetic construct
  source 1..18: mol_type = other DNA
tcaataactgaaaacgat

SEQ ID NO: 11738 - DNA, 18 bp, synthetic construct
  source 1..18: mol_type = other DNA
atcttctctgatggtgaa

SEQ ID NO: 11739 - DNA, 18 bp, synthetic construct
  source 1..18: mol_type = other DNA
tcaataactgaaaacgat

SEQ ID NO: 11740 - DNA, 18 bp, synthetic construct
  source 1..18: mol_type = other DNA
atcttctccaatggtgaa

SEQ ID NO: 11741 - DNA, 18 bp, synthetic construct
  source 1..18: mol_type = other DNA
tcaataactgaaaacgat

SEQ ID NO: 11742 - DNA, 21 bp, synthetic construct
  source 1..21: mol_type = other DNA
atacgttcaaatgagcgagag

SEQ ID NO: 11743 - DNA, 18 bp, synthetic construct
  source 1..18: mol_type = other DNA
tcaataactgaaaacgat

SEQ ID NO: 11744 - DNA, 15 bp, synthetic construct
  source 1..15: mol_type = other DNA
ggtctacaacaaaat

SEQ ID NO: 11745 - DNA, 18 bp, synthetic construct
  source 1..18: mol_type = other DNA
tcaataactgaaaacgat

SEQ ID NO: 11746 - DNA, 24 bp, synthetic construct
  source 1..24: mol_type = other DNA
tactattccggagacccagtggtt

SEQ ID NO: 11747 - DNA, 18 bp, synthetic construct
  source 1..18: mol_type = other DNA
tcaataactgaaaacgat

SEQ ID NO: 11748 - DNA, 21 bp, synthetic construct
  source 1..21: mol_type = other DNA
agcttcacagacaacaagagg

SEQ ID NO: 11749 - DNA, 18 bp, synthetic construct
  source 1..18: mol_type = other DNA
tcaataactgaaaacgat

SEQ ID NO: 11750 - DNA, 21 bp, synthetic construct
  source 1..21: mol_type = other DNA
atacgttcaaatgagcgagag

SEQ ID NO: 11751 - DNA, 18 bp, synthetic construct
  source 1..18: mol_type = other DNA
tcaataactgaaaacgat

SEQ ID NO: 11752 - DNA, 15 bp, synthetic construct
  source 1..15: mol_type = other DNA
aatccttctgggaca

SEQ ID NO: 11753 - DNA, 18 bp, synthetic construct
  source 1..18: mol_type = other DNA
tcaataactgaaaacgat

SEQ ID NO: 11754 - DNA, 21 bp, synthetic construct
  source 1..21: mol_type = other DNA
agcttcacagacaacaagagg

SEQ ID NO: 11755 - DNA, 18 bp, synthetic construct
  source 1..18: mol_type = other DNA
tcaataactgaaaacgat

SEQ ID NO: 11756 - DNA, 21 bp, synthetic construct
  source 1..21: mol_type = other DNA
agctccacagacaacaagagg

SEQ ID NO: 11757 - DNA, 18 bp, synthetic construct
  source 1..18: mol_type = other DNA
tcaataactgaaaacgat

SEQ ID NO: 11758 - DNA, 24 bp, synthetic construct
  source 1..24: mol_type = other DNA
tactattctggagacccagtggtt

SEQ ID NO: 11759 - DNA, 18 bp, synthetic construct
  source 1..18: mol_type = other DNA
tcaataactgaaaacgat

SEQ ID NO: 11760 - DNA, 15 bp, synthetic construct
  source 1..15: mol_type = other DNA
aatccttctgggaca

SEQ ID NO: 11761 - DNA, 18 bp, synthetic construct
  source 1..18: mol_type = other DNA
tcaataactgaaaacgat

SEQ ID NO: 11762 - DNA, 18 bp, synthetic construct
  source 1..18: mol_type = other DNA
atcttctctgatggtgac

SEQ ID NO: 11763 - DNA, 18 bp, synthetic construct
  source 1..18: mol_type = other DNA
tcaataactgaaaacgat

SEQ ID NO: 11764 - DNA, 15 bp, synthetic construct
  source 1..15: mol_type = other DNA
aatccttctgggaca

SEQ ID NO: 11765 - DNA, 18 bp, synthetic construct
  source 1..18: mol_type = other DNA
tcaataactgaaaacgat

SEQ ID NO: 11766 - DNA, 24 bp, synthetic construct
  source 1..24: mol_type = other DNA
caggactcttacaaaaaggaaaat

SEQ ID NO: 11767 - DNA, 18 bp, synthetic construct
  source 1..18: mol_type = other DNA
tcaataactgaaaacgat

SEQ ID NO: 11768 - DNA, 15 bp, synthetic construct
  source 1..15: mol_type = other DNA
ctggttccaggaaca

SEQ ID NO: 11769 - DNA, 18 bp, synthetic construct
  source 1..18: mol_type = other DNA
tcaataactgaaaacgat

SEQ ID NO: 11770 - DNA, 21 bp, synthetic construct
  source 1..21: mol_type = other DNA
gtcttttcaaatgtggacaga

SEQ ID NO: 11771 - DNA, 18 bp, synthetic construct
  source 1..18: mol_type = other DNA
tcaataactgaaaacgat

SEQ ID NO: 11772 - DNA, 18 bp, synthetic construct
  source 1..18: mol_type = other DNA
atcttctccaatggtgaa

SEQ ID NO: 11773 - DNA, 18 bp, synthetic construct
  source 1..18: mol_type = other DNA
tcaataactgaaaacgat

SEQ ID NO: 11774 - DNA, 21 bp, synthetic construct
  source 1..21: mol_type = other DNA
gtcattacggctggccagaag

SEQ ID NO: 11775 - DNA, 18 bp, synthetic construct
  source 1..18: mol_type = other DNA
tcaataactgaaaacgat

SEQ ID NO: 11776 - DNA, 24 bp, synthetic construct
  source 1..24: mol_type = other DNA
caggactcttacaaaaaggaaaat

SEQ ID NO: 11777 - DNA, 18 bp, synthetic construct
  source 1..18: mol_type = other DNA
tcaataactgaaaacgat

SEQ ID NO: 11778 - DNA, 24 bp, synthetic construct
  source 1..24: mol_type = other DNA
caggactcttacaaaaaggaaaat

SEQ ID NO: 11779 - DNA, 18 bp, synthetic construct
  source 1..18: mol_type = other DNA
tcaataactgaaaacgat

SEQ ID NO: 11780 - DNA, 21 bp, synthetic construct
  source 1..21: mol_type = other DNA
atactttcagtgtccaataaa

SEQ ID NO: 11781 - DNA, 18 bp, synthetic construct
  source 1..18: mol_type = other DNA
tcaataactgaaaacgat

SEQ ID NO: 11782 - DNA, 24 bp, synthetic construct
  source 1..24: mol_type = other DNA
tactattccggagacccagtggtt

SEQ ID NO: 11783 - DNA, 18 bp, synthetic construct
  source 1..18: mol_type = other DNA
tcaataactgaaaacgat

SEQ ID NO: 11784 - DNA, 21 bp, synthetic construct
  source 1..21: mol_type = other DNA
gtcacaactgccaacaacaag

SEQ ID NO: 11785 - DNA, 18 bp, synthetic construct
  source 1..18: mol_type = other DNA
tcaataactgaaaacgat

SEQ ID NO: 11786 - DNA, 21 bp, synthetic construct
  source 1..21: mol_type = other DNA
attcgttcaaatgtggacaga

SEQ ID NO: 11787 - DNA, 18 bp, synthetic construct
  source 1..18: mol_type = other DNA
tcaataactgaaaacgat

SEQ ID NO: 11788 - DNA, 21 bp, synthetic construct
  source 1..21: mol_type = other DNA
gtcctttcaaatgtggacaga

SEQ ID NO: 11789 - DNA, 18 bp, synthetic construct
  source 1..18: mol_type = other DNA
tcaataactgaaaacgat

SEQ ID NO: 11790 - DNA, 21 bp, synthetic construct
  source 1..21: mol_type = other DNA
agcttcacagacaacaagagg

SEQ ID NO: 11791 - DNA, 18 bp, synthetic construct
  source 1..18: mol_type = other DNA
tcaataactgaaaacgat

SEQ ID NO: 11792 - DNA, 21 bp, synthetic construct
  source 1..21: mol_type = other DNA
gtcacaactgccaacaacaag

SEQ ID NO: 11793 - DNA, 18 bp, synthetic construct
  source 1..18: mol_type = other DNA
tcaataactgaaaacgat

SEQ ID NO: 11794 - DNA, 18 bp, synthetic construct
  source 1..18: mol_type = other DNA
atcttctctgatggtgac

SEQ ID NO: 11795 - DNA, 18 bp, synthetic construct
  source 1..18: mol_type = other DNA
tcaataactgaaaacgat

SEQ ID NO: 11796 - DNA, 21 bp, synthetic construct
  source 1..21: mol_type = other DNA
gtcattacggctggccagaag

SEQ ID NO: 11797 - DNA, 18 bp, synthetic construct
  source 1..18: mol_type = other DNA
tcaataactgaaaacgat

SEQ ID NO: 11798 - DNA, 21 bp, synthetic construct
  source 1..21: mol_type = other DNA
ataagttcagtgtccgataaa

SEQ ID NO: 11799 - DNA, 18 bp, synthetic construct
  source 1..18: mol_type = other DNA
tcaataactgaaaacgat

SEQ ID NO: 11800 - DNA, 21 bp, synthetic construct
  source 1..21: mol_type = other DNA
gtcattacggctggccagaag

SEQ ID NO: 11801 - DNA, 18 bp, synthetic construct
  source 1..18: mol_type = other DNA
tcaataactgaaaacgat

SEQ ID NO: 11802 - DNA, 21 bp, synthetic construct
  source 1..21: mol_type = other DNA
attcgttcaaatatggaaaga

SEQ ID NO: 11803 - DNA, 18 bp, synthetic construct
  source 1..18: mol_type = other DNA
tcaataactgaaaacgat

SEQ ID NO: 11804 - DNA, 21 bp, synthetic construct
  source 1..21: mol_type = other DNA
ggatataaggactatgtggta

SEQ ID NO: 11805 - DNA, 18 bp, synthetic construct
  source 1..18: mol_type = other DNA
tcaataactgaaaacgat

SEQ ID NO: 11806 - DNA, 21 bp, synthetic construct
  source 1..21: mol_type = other DNA
gttttctcaagtacggaaata

SEQ ID NO: 11807 - DNA, 18 bp, synthetic construct
  source 1..18: mol_type = other DNA
tcaataactgaaaacgat

SEQ ID NO: 11808 - DNA, 21 bp, synthetic construct
  source 1..21: mol_type = other DNA
agctccacagacaacaagagg

SEQ ID NO: 11809 - DNA, 18 bp, synthetic construct
  source 1..18: mol_type = other DNA
ctgcggagtcctggggac

SEQ ID NO: 11810 - DNA, 24 bp, synthetic construct
  source 1..24: mol_type = other DNA
tactattccggagacccagtggtt

SEQ ID NO: 11811 - DNA, 18 bp, synthetic construct
  source 1..18: mol_type = other DNA
ctgcggagtcctggggac

SEQ ID NO: 11812 - DNA, 24 bp, synthetic construct
  source 1..24: mol_type = other DNA
tactattccggagacccagtggtt

SEQ ID NO: 11813 - DNA, 18 bp, synthetic construct
  source 1..18: mol_type = other DNA
ctgcggagtcctggggac

SEQ ID NO: 11814 - DNA, 21 bp, synthetic construct
  source 1..21: mol_type = other DNA
gtcattacggctggccagaag

SEQ ID NO: 11815 - DNA, 18 bp, synthetic construct
  source 1..18: mol_type = other DNA
ctgcggagtcctggggac

SEQ ID NO: 11816 - DNA, 21 bp, synthetic construct
  source 1..21: mol_type = other DNA
gtcttttcaaatgtggacaga

SEQ ID NO: 11817 - DNA, 18 bp, synthetic construct
  source 1..18: mol_type = other DNA
ctgcggagtcctggggac

SEQ ID NO: 11818 - DNA, 21 bp, synthetic construct
  source 1..21: mol_type = other DNA
agctccacagacaacaagagg

SEQ ID NO: 11819 - DNA, 18 bp, synthetic construct
  source 1..18: mol_type = other DNA
ctgcggagtcctggggac

SEQ ID NO: 11820 - DNA, 24 bp, synthetic construct
  source 1..24: mol_type = other DNA
tactatccaggagacccagtggtt

SEQ ID NO: 11821 - DNA, 18 bp, synthetic construct
  source 1..18: mol_type = other DNA
ctgcggagtcctggggac

SEQ ID NO: 11822 - DNA, 18 bp, synthetic construct
  source 1..18: mol_type = other DNA
gttgttttggatggtttg

SEQ ID NO: 11823 - DNA, 18 bp, synthetic construct
  source 1..18: mol_type = other DNA
ctgcggagtcctggggac

SEQ ID NO: 11824 - DNA, 21 bp, synthetic construct
  source 1..21: mol_type = other DNA
ctggttgaccaaaaagacaaa

SEQ ID NO: 11825 - DNA, 18 bp, synthetic construct
  source 1..18: mol_type = other DNA
ctgcggagtcctggggac

SEQ ID NO: 11826 - DNA, 21 bp, synthetic construct
  source 1..21: mol_type = other DNA
agcttcacagacaacaagagg

SEQ ID NO: 11827 - DNA, 18 bp, synthetic construct
  source 1..18: mol_type = other DNA
ctgcggagtcctggggac

SEQ ID NO: 11828 - DNA, 24 bp, synthetic construct
  source 1..24: mol_type = other DNA
tactattccggagacccagtggtt

SEQ ID NO: 11829 - DNA, 18 bp, synthetic construct
  source 1..18: mol_type = other DNA
ctgcggagtcctggggac

SEQ ID NO: 11830 - DNA, 21 bp, synthetic construct
  source 1..21: mol_type = other DNA
ataagttcagtgtccgataaa

SEQ ID NO: 11831 - DNA, 18 bp, synthetic construct
  source 1..18: mol_type = other DNA
ctgcggagtcctggggac

SEQ ID NO: 11832 - DNA, 21 bp, synthetic construct
  source 1..21: mol_type = other DNA
attcgttcaaatatggaaaga

SEQ ID NO: 11833 - DNA, 18 bp, synthetic construct
  source 1..18: mol_type = other DNA
ctgcggagtcctggggac

SEQ ID NO: 11834 - DNA, 24 bp, synthetic construct
  source 1..24: mol_type = other DNA
tactattcaggagacccagtggtt

SEQ ID NO: 11835 - DNA, 18 bp, synthetic construct
  source 1..18: mol_type = other DNA
ctgcggagtcctggggac

SEQ ID NO: 11836 - DNA, 15 bp, synthetic construct
  source 1..15: mol_type = other DNA
aatccttctgggaca

SEQ ID NO: 11837 - DNA, 18 bp, synthetic construct
  source 1..18: mol_type = other DNA
ctgcggagtcctggggac

SEQ ID NO: 11838 - DNA, 21 bp, synthetic construct
  source 1..21: mol_type = other DNA
gttttctcaagtacggaaata

SEQ ID NO: 11839 - DNA, 18 bp, synthetic construct
  source 1..18: mol_type = other DNA
ctgcggagtcctggggac

SEQ ID NO: 11840 - DNA, 24 bp, synthetic construct
  source 1..24: mol_type = other DNA
caggactcttacaaaaaggaaaat

SEQ ID NO: 11841 - DNA, 18 bp, synthetic construct
  source 1..18: mol_type = other DNA
ctgcggagtcctggggac

SEQ ID NO: 11842 - DNA, 21 bp, synthetic construct
  source 1..21: mol_type = other DNA
atacgttcaaatgagcgagag

SEQ ID NO: 11843 - DNA, 18 bp, synthetic construct
  source 1..18: mol_type = other DNA
ctgcggagtcctggggac

SEQ ID NO: 11844 - DNA, 24 bp, synthetic construct
  source 1..24: mol_type = other DNA
tactattcaggagacccagtggtt

SEQ ID NO: 11845 - DNA, 18 bp, synthetic construct
  source 1..18: mol_type = other DNA
ctgcggagtcctggggac

SEQ ID NO: 11846 - DNA, 18 bp, synthetic construct
  source 1..18: mol_type = other DNA
atcttctctgatggtgac

SEQ ID NO: 11847 - DNA, 18 bp, synthetic construct
  source 1..18: mol_type = other DNA
ctgcggagtcctggggac

SEQ ID NO: 11848 - DNA, 15 bp, synthetic construct
  source 1..15: mol_type = other DNA
aatccttctgggaca

SEQ ID NO: 11849 - DNA, 18 bp, synthetic construct
  source 1..18: mol_type = other DNA
ctgcggagtcctggggac

SEQ ID NO: 11850 - DNA, 21 bp, synthetic construct
  source 1..21: mol_type = other DNA
gtcattacggctggccagaag

SEQ ID NO: 11851 - DNA, 18 bp, synthetic construct
  source 1..18: mol_type = other DNA
ctgcggagtcctggggac

SEQ ID NO: 11852 - DNA, 21 bp, synthetic construct
  source 1..21: mol_type = other DNA
gtcattacggctggccagaag

SEQ ID NO: 11853 - DNA, 18 bp, synthetic construct
  source 1..18: mol_type = other DNA
ctgcggagtcctggggac

SEQ ID NO: 11854 - DNA, 21 bp, synthetic construct
  source 1..21: mol_type = other DNA
ctggttgaccaaaaagacaaa

SEQ ID NO: 11855 - DNA, 18 bp, synthetic construct
  source 1..18: mol_type = other DNA
ctgcggagtcctggggac

SEQ ID NO: 11856 - DNA, 21 bp, synthetic construct
  source 1..21: mol_type = other DNA
gttttctcaagtacggaaata

SEQ ID NO: 11857 - DNA, 18 bp, synthetic construct
  source 1..18: mol_type = other DNA
ctgcggagtcctggggac

SEQ ID NO: 11858 - DNA, 18 bp, synthetic construct
  source 1..18: mol_type = other DNA
atcttctctgatggtgac

SEQ ID NO: 11859 - DNA, 18 bp, synthetic construct
  source 1..18: mol_type = other DNA
ctgcggagtcctggggac

SEQ ID NO: 11860 - DNA, 21 bp, synthetic construct
  source 1..21: mol_type = other DNA
attcgttcaaatatggaaaga

SEQ ID NO: 11861 - DNA, 18 bp, synthetic construct
  source 1..18: mol_type = other DNA
ctgcggagtcctggggac

SEQ ID NO: 11862 - DNA, 21 bp, synthetic construct
  source 1..21: mol_type = other DNA
gcctcaagggacaaagagaaa

SEQ ID NO: 11863 - DNA, 18 bp, synthetic construct
  source 1..18: mol_type = other DNA
ctgcggagtcctggggac

SEQ ID NO: 11864 - DNA, 21 bp, synthetic construct
  source 1..21: mol_type = other DNA
gcctcaagggacaaagagaaa

SEQ ID NO: 11865 - DNA, 18 bp, synthetic construct
  source 1..18: mol_type = other DNA
ctgcggagtcctggggac

SEQ ID NO: 11866 - DNA, 18 bp, synthetic construct
  source 1..18: mol_type = other DNA
atcttctccaatggtgaa

SEQ ID NO: 11867 - DNA, 18 bp, synthetic construct
  source 1..18: mol_type = other DNA
ctgcggagtcctggggac

SEQ ID NO: 11868 - DNA, 24 bp, synthetic construct
  source 1..24: mol_type = other DNA
tactattcaggagacccagtggtt

SEQ ID NO: 11869 - DNA, 18 bp, synthetic construct
  source 1..18: mol_type = other DNA
ctgcggagtcctggggac

SEQ ID NO: 11870 - DNA, 21 bp, synthetic construct
  source 1..21: mol_type = other DNA
atacgtccagtgtccaataaa

SEQ ID NO: 11871 - DNA, 18 bp, synthetic construct
  source 1..18: mol_type = other DNA
ctgcggagtcctggggac

SEQ ID NO: 11872 - DNA, 21 bp, synthetic construct
  source 1..21: mol_type = other DNA
agctccacagacaacaagagg

SEQ ID NO: 11873 - protein, 37 aa, synthetic construct
IDNSQLPSDRFSAVRPKGTNSTLKIQSAKQGDTATYL

SEQ ID NO: 11874 - protein, 33 aa, synthetic construct
KKEGRFTAHLNKASLHVSLHIRDSQPSDSALYF

SEQ ID NO: 11875 - protein, 36 aa, synthetic construct
TEKGDIPDGYKASRPSQENFSLILELATPSQTSVYF

SEQ ID NO: 11876 - protein, 33 aa, synthetic construct
KDSGHFSTFLSRSNGYSYLLLTELQIKDSASYL

SEQ ID NO: 11877 - protein, 36 aa, synthetic construct; identical to SEQ ID NO: 11875

SEQ ID NO: 11878 - protein, 33 aa, synthetic construct
ATVGHYSLNFQKPKSSIGLIITATQIEDSAVYF

SEQ ID NO: 11879 - protein, 36 aa, synthetic construct
TEKGDIPDGYKASRPSQENFSLILELASLSQTAVYF

SEQ ID NO: 11880 - protein, 33 aa, synthetic construct
TEHQGFYATLHKSSSSFHLQKSSVQLSDSALYF

SEQ ID NO: 11881 - protein, 36 aa, synthetic construct; identical to SEQ ID NO: 11875

SEQ ID NO: 11882 - protein, 33 aa, synthetic construct
KQSGRLTSTTVIKERRSSLHISSSQTTDSGTYL

SEQ ID NO: 11883 - protein, 37 aa, synthetic construct; identical to SEQ ID NO: 11873

SEQ ID NO: 11884 - protein, 33 aa, synthetic construct
QGVNSFEAEFSKSNSSFHLQKASVHWSDSAVYF

SEQ ID NO: 11885 - protein, 36 aa, synthetic construct; identical to SEQ ID NO: 11875

SEQ ID NO: 11886 - protein, 33 aa, synthetic construct
GSSRGFEATYDKGTTSFHLRKASVQESDSAVYY

SEQ ID NO: 11887 - protein, 36 aa, synthetic construct
MDNQTASSRFQPQSSKKNHLDLQITALKPDDSATYF

SEQ ID NO: 11888 - protein, 33 aa, synthetic construct; identical to SEQ ID NO: 11876

SEQ ID NO: 11889 - protein, 37 aa, synthetic construct
IDDSGMPKERFSAQMPNQSHSTLKIQSTQPQDSAVYL

SEQ ID NO: 11890 - protein, 34 aa, synthetic construct
KENGRLKSAFDSKERRYSTLHIRDAQLEDSGTYF

SEQ ID NO: 11891 - protein, 36 aa, synthetic construct; identical to SEQ ID NO: 11875

SEQ ID NO: 11892 - protein, 33 aa, synthetic construct
QGVNGFEAEFSKSNSSFHLRKASVHWSDSAVYF

SEQ ID NO: 11893 - protein, 36 aa, synthetic construct; identical to SEQ ID NO: 11879

SEQ ID NO: 11894 - protein, 33 aa, synthetic construct
KEEQGLTVLLNKKDKRLSLNLTAAHPGDSAVYF

SEQ ID NO: 11895 - protein, 35 aa, synthetic construct
KEVKSLPGADYLATRVTDTELRLQVANMSQGRTLY

SEQ ID NO: 11896 - protein, 33 aa, synthetic construct
KRNGRLRATLDTSSQSSSLSITATRCEDTAVYF

SEQ ID NO: 11897 - protein, 35 aa, synthetic construct; identical to SEQ ID NO: 11895

SEQ ID NO: 11898 - protein, 33 aa, synthetic construct; identical to SEQ ID NO: 11892

SEQ ID NO: 11899 - protein, 36 aa, synthetic construct
LQKGDLSEGYDASREKKSSFSLTVTSAQKNEMAVFL

SEQ ID NO: 11900 - protein, 33 aa, synthetic construct
KEEGRFTVHLNKASLHTSLHIRDSQPSDSALYL

SEQ ID NO: 11901 - protein, 36 aa, synthetic construct; identical to SEQ ID NO: 11887

SEQ ID NO: 11902 - protein, 33 aa, synthetic construct; identical to SEQ ID NO: 11892

SEQ ID NO: 11903 - protein, 36 aa, synthetic construct; identical to SEQ ID NO: 11875

SEQ ID NO: 11904 - protein, 33 aa, synthetic construct; identical to SEQ ID NO: 11882

SEQ ID NO: 11905 - protein, 36 aa, synthetic construct; identical to SEQ ID NO: 11875

SEQ ID NO: 11906 - protein, 33 aa, synthetic construct; identical to SEQ ID NO: 11892

SEQ ID NO: 11907 - protein, 36 aa, synthetic construct
QVESVVQLNLSASRPKDDQFILSTEKLLLSHSGFYL

SEQ ID NO: 11908 - protein, 33 aa, synthetic construct; identical to SEQ ID NO: 11892

SEQ ID NO: 11909 - protein, 36 aa, synthetic construct
LQIGDVPDGYKATRTTQEDFFLLLELASPSQTSLYF

SEQ ID NO: 11910 - protein, 33 aa, synthetic construct
GSNRGFEATYNKEATSFHLQKASVQESDSAVYY

SEQ ID NO: 11911 - protein, 36 aa, synthetic construct; identical to SEQ ID NO: 11907

SEQ ID NO: 11912 - protein, 33 aa, synthetic construct; identical to SEQ ID NO: 11894

SEQ ID NO: 11913 - protein, 36 aa, synthetic construct; identical to SEQ ID NO: 11875

SEQ ID NO: 11914 - protein, 33 aa, synthetic construct
NEGQGFTVLLNKKDKRLSLNLTAAHPGDSAAYF

SEQ ID NO: 11915 - protein, 36 aa, synthetic construct; identical to SEQ ID NO: 11875

SEQ ID NO: 11916 - protein, 33 aa, synthetic construct
ATEGHYSLNFQKPKSSIGLIITATQIEDSAVYF

SEQ ID NO: 11917 - protein, 36 aa, synthetic construct; identical to SEQ ID NO: 11879

SEQ ID NO: 11918 - protein, 33 aa, synthetic construct
TEHQGFHATLHKSSSSFHLQKSSAQLSDSALYY

SEQ ID NO: 11919 - protein, 36 aa, synthetic construct; identical to SEQ ID NO: 11899

SEQ ID NO: 11920 - protein, 33 aa, synthetic construct
KQIQELIVLLDKKAKRFSLHITDTQPGDSAMYF

SEQ ID NO: 11921 - protein, 36 aa, synthetic construct; identical to SEQ ID NO: 11879

SEQ ID NO: 11922 - protein, 33 aa, synthetic construct; identical to SEQ ID NO: 11914

SEQ ID NO: 11923 - protein, 36 aa, synthetic construct; identical to SEQ ID NO: 11879

SEQ ID NO: 11924 - protein, 33 aa, synthetic construct
QGVNGFEAEFSKSNSSFHLRKASVHWSDWAVYF

SEQ ID NO: 11925 - protein, 36 aa, synthetic construct; identical to SEQ ID NO: 11909

SEQ ID NO: 11926 - protein, 33 aa, synthetic construct
KQSQRLIVLLDKKAKRFSLHITATQPEDSAIYF

SEQ ID NO: 11927 - protein, 36 aa, synthetic construct; identical to SEQ ID NO: 11879

SEQ ID NO: 11928 - protein, 33 aa, synthetic construct
KHSGRLTSTTVIKERRSSLHISSSQTTDSGTYL

SEQ ID NO: 11929 - protein, 36 aa, synthetic construct; identical to SEQ ID NO: 11887

SEQ ID NO: 11930 - protein, 33 aa, synthetic construct; identical to SEQ ID NO: 11926

SEQ ID NO: 11931 - protein, 36 aa, synthetic construct; identical to SEQ ID NO: 11875

SEQ ID NO: 11932 - protein, 33 aa, synthetic construct
GSSRGFEATYNKETTSFHLQKASVQESDSAVYY

SEQ ID NO: 11933 - protein, 36 aa, synthetic construct; identical to SEQ ID NO: 11879

SEQ ID NO: 11934 - protein, 33 aa, synthetic construct; identical to SEQ ID NO: 11918

SEQ ID NO: 11935 - protein, 36 aa, synthetic construct; identical to SEQ ID NO: 11907

SEQ ID NO: 11936 - protein, 33 aa, synthetic construct; identical to SEQ ID NO: 11874

SEQ ID NO: 11937 - protein, 36 aa, synthetic construct; identical to SEQ ID NO: 11899

SEQ ID NO: 11938 - protein, 33 aa, synthetic construct; identical to SEQ ID NO: 11916

SEQ ID NO: 11939 - protein, 37 aa, synthetic construct; identical to SEQ ID NO: 11873

SEQ ID NO: 11940 - protein, 33 aa, synthetic construct
KEDGRFTIFFNKREKKLSLHITDSQPGDSATYF

SEQ ID NO: 11941 - protein, 36 aa, synthetic construct; identical to SEQ ID NO: 11887

SEQ ID NO: 11942 - protein, 33 aa, synthetic construct; identical to SEQ ID NO: 11880

SEQ ID NO: 11943 - protein, 36 aa, synthetic construct; identical to SEQ ID NO: 11909

SEQ ID NO: 11944 - protein, 33 aa, synthetic construct
PEHQGFHATLHKSSSSFHLQKSSAQLSDSALYY

SEQ ID NO: 11945 - protein, 36 aa, synthetic construct; identical to SEQ ID NO: 11907

SEQ ID NO: 11946 - protein, 33 aa, synthetic construct
QGVNGFEAEFSKSDSSFHLRKASVHWSDSAVYF

SEQ ID NO: 11947 - protein, 35 aa, synthetic construct; identical to SEQ ID NO: 11895

SEQ ID NO: 11948 - protein, 33 aa, synthetic construct
KEEGRFTIHLNKASLHFSLHIRDSQPSDSALYL

SEQ ID NO: 11949 - protein, 35 aa, synthetic construct; identical to SEQ ID NO: 11895

SEQ ID NO: 11950 - protein, 33 aa, synthetic construct
REDGRFTVFLNKSGKHFSLHITASQPEDTAVYL

SEQ ID NO: 11951 - protein, 37 aa, synthetic construct
KYEQNFTQEKFPISHPNLSFSSMTVLNAYLEDRGLYL

SEQ ID NO: 11952 - protein, 33 aa, synthetic construct
KRSGRLRATLDTSSQSSSLSITAAQCEDTAVYF

SEQ ID NO: 11953 - protein, 36 aa, synthetic construct; identical to SEQ ID NO: 11887

SEQ ID NO: 11954 - protein, 33 aa, synthetic construct; identical to SEQ ID NO: 11916

SEQ ID NO: 11955 - protein, 36 aa, synthetic construct; identical to SEQ ID NO: 11909

SEQ ID NO: 11956 - protein, 33 aa, synthetic construct
KEDGRFTIFFNKREKNLSLHIKDSQPGDSATYF

SEQ ID NO: 11957 - protein, 36 aa, synthetic construct; identical to SEQ ID NO: 11899

SEQ ID NO: 11958 - protein, 33 aa, synthetic construct; identical to SEQ ID NO: 11946

SEQ ID NO: 11959 - protein, 36 aa, synthetic construct; identical to SEQ ID NO: 11879

SEQ ID NO: 11960 - protein, 33 aa, synthetic construct; identical to SEQ ID NO: 11878

SEQ ID NO: 11961 - protein, 36 aa, synthetic construct; identical to SEQ ID NO: 11879

SEQ ID NO: 11962 - protein, 33 aa, synthetic construct; identical to SEQ ID NO: 11894

SEQ ID NO: 11963 - protein, 37 aa, synthetic construct
MEKSKLFKDQFSVERPDGSYFTLKIQPTALEDSAVYF

SEQ ID NO: 11964 - protein, 33 aa, synthetic construct
KEEGRFTAHLNRANLHVSLHIREPQPSDSAVYL

SEQ ID NO: 11965 - protein, 35 aa, synthetic construct; identical to SEQ ID NO: 11895

SEQ ID NO: 11966 - protein, 33 aa, synthetic construct
KHTGRLTSTTVTNERRGSLHISSSQTTDSGTYF

SEQ ID NO: 11967 - protein, 36 aa, synthetic construct
IRNETVPSRFIPECPDSSKLLLHISAVDPEDSAVYF

SEQ ID NO: 11968 - protein, 33 aa, synthetic construct
KKEGRLTVYLNRASLHVSLHIRDSQPSDSAVYL

SEQ ID NO: 11969 - protein, 36 aa, synthetic construct; identical to SEQ ID NO: 11967

SEQ ID NO: 11970 - protein, 33 aa, synthetic construct; identical to SEQ ID NO: 11944

SEQ ID NO: 11971 - protein, 36 aa, synthetic construct
IVNETVPRRFSPQSSDKAHLNLRIKSVEPEDSAVYL

SEQ ID NO: 11972 - protein, 33 aa, synthetic construct
KEEQGLTVLLNKKDKQLSLNLTAAHPGDSAVYF

SEQ ID NO: 11973 - protein, 36 aa, synthetic construct; identical to SEQ ID NO: 11875

SEQ ID NO: 11974 - protein, 33 aa, synthetic construct; identical to SEQ ID NO: 11914

SEQ ID NO: 11975 - protein, 36 aa, synthetic construct; identical to SEQ ID NO: 11879

SEQ ID NO: 11976 - protein, 33 aa, synthetic construct
TTNSMAFLAIASDRKSSTLILTHVSLRDAAVYH

SEQ ID NO: 11977 - protein, 36 aa, synthetic construct; identical to SEQ ID NO: 11967

SEQ ID NO: 11978 - protein, 31 aa, synthetic construct
NEVASLFISADRKLSTLSLPWVSLRDAAVYY

SEQ ID NO: 11979 - protein, 36 aa, synthetic construct; identical to SEQ ID NO: 11887

SEQ ID NO: 11980 - protein, 33 aa, synthetic construct
NEGQGFTVLLNKKDKQLSLNLTAAHPGDSAVYF

SEQ ID NO: 11981 - protein, 36 aa, synthetic construct; identical to SEQ ID NO: 11875

SEQ ID NO: 11982 - protein, 33 aa, synthetic construct; identical to SEQ ID NO: 11946

SEQ ID NO: 11983 - protein, 36 aa, synthetic construct; identical to SEQ ID NO: 11879

SEQ ID NO: 11984 - protein, 33 aa, synthetic construct
KENGRLKSAFDSKERYSTLHIRDAQLEDSGTYF

SEQ ID NO: 11985 - protein, 36 aa, synthetic construct; identical to SEQ ID NO: 11967

SEQ ID NO: 11986 - protein, 33 aa, synthetic construct; identical to SEQ ID NO: 11886

SEQ ID NO: 11987 - protein, 36 aa, synthetic construct; identical to SEQ ID NO: 11875

SEQ ID NO: 11988 - protein, 33 aa, synthetic construct; identical to SEQ ID NO: 11918

SEQ ID NO: 11989 - protein, 36 aa, synthetic construct; identical to SEQ ID NO: 11875

SEQ ID NO: 11990 - protein, 33 aa, synthetic construct; identical to SEQ ID NO: 11878

SEQ ID NO: 11991 - protein, 36 aa, synthetic construct; identical to SEQ ID NO: 11875

SEQ ID NO: 11992 - protein, 33 aa, synthetic construct
QRGGRLTSSAASNESRSSLHISSSQITDSGTYL

SEQ ID NO: 11993 - protein, 37 aa, synthetic construct; identical to SEQ ID NO: 11963

SEQ ID NO: 11994 - protein, 33 aa, synthetic construct; identical to SEQ ID NO: 11946

SEQ ID NO: 11995 - protein, 37 aa, synthetic construct; identical to SEQ ID NO: 11873

SEQ ID NO: 11996 - protein, 33 aa, synthetic construct
KEDGRFTIFFNKREKKLSLHIADSQPGDSATYF

SEQ ID NO: 11997 - protein, 36 aa, synthetic construct; identical to SEQ ID NO: 11971

SEQ ID NO: 11998 - protein, 33 aa, synthetic construct; identical to SEQ ID NO: 11882

SEQ ID NO: 11999 - protein, 36 aa, synthetic construct; identical to SEQ ID NO: 11875

SEQ ID NO: 12000 - protein, 33 aa, synthetic construct; identical to SEQ ID NO: 11924

SEQ ID NO: 12001 - protein, 36 aa, synthetic construct; identical to SEQ ID NO: 11875

SEQ ID NO: 12002 - protein, 33 aa, synthetic construct; identical to SEQ ID NO: 11932

SEQ ID NO: 12003 - protein, 36 aa, synthetic construct; identical to SEQ ID NO: 11875

SEQ ID NO: 12004 - protein, 33 aa, synthetic construct
KKEGRFTAHLNKASLHVSLHIKDSQPSDSALYF

SEQ ID NO: 12005 - protein, 36 aa, synthetic construct; identical to SEQ ID NO: 11875

SEQ ID NO: 12006 - protein, 33 aa, synthetic construct; identical to SEQ ID NO: 11932

SEQ ID NO: 12007 - protein, 36 aa, synthetic construct; identical to SEQ ID NO: 11875

SEQ ID NO: 12008 - protein, 33 aa, synthetic construct; identical to SEQ ID NO: 11948

SEQ ID NO: 12009 - protein, 36 aa, synthetic construct; identical to SEQ ID NO: 11909

SEQ ID NO: 12010 - protein, 33 aa, synthetic construct; identical to SEQ ID NO: 11880

SEQ ID NO: 12011 - protein, 36 aa, synthetic construct; identical to SEQ ID NO: 11907

SEQ ID NO: 12012 - protein, 33 aa, synthetic construct; identical to SEQ ID NO: 11928

SEQ ID NO: 12013 - protein, 36 aa, synthetic construct; identical to SEQ ID NO: 11907

SEQ ID NO: 12014 - protein, 33 aa, synthetic construct; identical to SEQ ID NO: 11874

SEQ ID NO: 12015 - protein, 37 aa, synthetic construct; identical to SEQ ID NO: 11963

SEQ ID NO: 12016 - protein, 33 aa, synthetic construct
QGVNGFEAEFIKSNSSFHLRKASVHWSDSAVYF

SEQ ID NO: 12017 - protein, 37 aa, synthetic construct; identical to SEQ ID NO: 11951

SEQ ID NO: 12018 - protein, 33 aa, synthetic construct; identical to SEQ ID NO: 11946

SEQ ID NO: 12019 - protein, 36 aa, synthetic construct; identical to SEQ ID NO: 11899

SEQ ID NO: 12020 - protein, 33 aa, synthetic construct; identical to SEQ ID NO: 11926

SEQ ID NO: 12021 - protein, 36 aa, synthetic construct; identical to SEQ ID NO: 11899

SEQ ID NO: 12022 - protein, 33 aa, synthetic construct
GISRGFEATYDKRTTSFHLQKASVQESDSAVYY

SEQ ID NO: 12023 - protein, 36 aa, synthetic construct; identical to SEQ ID NO: 11899

SEQ ID NO: 12024 - protein, 33 aa, synthetic construct; identical to SEQ ID NO: 11972

SEQ ID NO: 12025 - protein, 36 aa, synthetic construct; identical to SEQ ID NO: 11899

SEQ ID NO: 12026 - protein, 33 aa, synthetic construct; identical to SEQ ID NO: 11952

SEQ ID NO: 12027 - protein, 36 aa, synthetic construct; identical to SEQ ID NO: 11967

SEQ ID NO: 12028 - protein, 33 aa, synthetic construct; identical to SEQ ID NO: 11882

SEQ ID NO: 12029 - protein, 36 aa, synthetic construct; identical to SEQ ID NO: 11967

SEQ ID NO: 12030 - protein, 33 aa, synthetic construct
KRSGRLRATLDTSSQSSSLSITGTLATDTAVYF

SEQ ID NO: 12031 - protein, 37 aa, synthetic construct; identical to SEQ ID NO: 11873

SEQ ID NO: 12032 - protein, 33 aa, synthetic construct
KQNQRLTLLFDKKTKHLSLHITATQPGDSAIYF

SEQ ID NO: 12033 - protein, 37 aa, synthetic construct; identical to SEQ ID NO: 11873

SEQ ID NO: 12034 - protein, 33 aa, synthetic construct; identical to SEQ ID NO: 11874

SEQ ID NO: 12035 - protein, 36 aa, synthetic construct
NSEGDIPKGYRVSRKKREHFSLILDSAKTNQTSVYF

SEQ ID NO: 12036 - protein, 33 aa, synthetic construct; identical to SEQ ID NO: 11926

SEQ ID NO: 12037 - protein, 36 aa, synthetic construct; identical to SEQ ID NO: 11971

SEQ ID NO: 12038 - protein, 33 aa, synthetic construct
KQSGRLTSTTVIKERRSSLHISSSQITDSGTYL

SEQ ID NO: 12039 - protein, 36 aa, synthetic construct; identical to SEQ ID NO: 11875

SEQ ID NO: 12040 - protein, 33 aa, synthetic construct; identical to SEQ ID NO: 11878

SEQ ID NO: 12041 - protein, 36 aa, synthetic construct; identical to SEQ ID NO: 11875

SEQ ID NO: 12042 - protein, 33 aa, synthetic construct
KQTQGLIVLLDKKAKRFSLHITDTQPGDSAMYF

SEQ ID NO: 12043 - protein, 36 aa, synthetic construct; identical to SEQ ID NO: 11875

SEQ ID NO: 12044 - protein, 33 aa, synthetic construct; identical to SEQ ID NO: 11920

SEQ ID NO: 12045 - protein, 36 aa, synthetic construct; identical to SEQ ID NO: 11875

SEQ ID NO: 12046 - protein, 33 aa, synthetic construct; identical to SEQ ID NO: 11972

SEQ ID NO: 12047 - protein, 36 aa, synthetic construct; identical to SEQ ID NO: 11875

SEQ ID NO: 12048 - protein, 33 aa, synthetic construct; identical to SEQ ID NO: 11878

SEQ ID NO: 12049 - protein, 36 aa, synthetic construct; identical to SEQ ID NO: 11909

SEQ ID NO: 12050 - protein, 33 aa, synthetic construct; identical to SEQ ID NO: 12042

SEQ ID NO: 12051 - protein, 36 aa, synthetic construct; identical to SEQ ID NO: 11879

SEQ ID NO: 12052 - protein, 33 aa, synthetic construct; identical to SEQ ID NO: 11932

SEQ ID NO: 12053 - protein, 36 aa, synthetic construct; identical to SEQ ID NO: 11879

SEQ ID NO: 12054 - protein, 33 aa, synthetic construct
KQIQGLIVLLDKKAKRFSLHITDTQPADSAMYF

SEQ ID NO: 12055 - protein, 36 aa, synthetic construct; identical to SEQ ID NO: 11907

SEQ ID NO: 12056 - protein, 33 aa, synthetic construct; identical to SEQ ID NO: 11874

SEQ ID NO: 12057 - protein, 37 aa, synthetic construct; identical to SEQ ID NO: 11951

SEQ ID NO: 12058 - protein, 33 aa, synthetic construct; identical to SEQ ID NO: 11878

SEQ ID NO: 12059 - protein, 36 aa, synthetic construct; identical to SEQ ID NO: 11899

SEQ ID NO: 12060 - protein, 33 aa, synthetic construct; identical to SEQ ID NO: 11896

SEQ ID NO: 12061 - protein, 36 aa, synthetic construct; identical to SEQ ID NO: 11899

SEQ ID NO: 12062 - protein, 33 aa, synthetic construct; identical to SEQ ID NO: 11896

SEQ ID NO: 12063 - protein, 35 aa, synthetic construct; identical to SEQ ID NO: 11895

SEQ ID NO: 12064 - protein, 33 aa, synthetic construct; identical to SEQ ID NO: 11924

SEQ ID NO: 12065 - protein, 36 aa, synthetic construct; identical to SEQ ID NO: 11967

SEQ ID NO: 12066 - protein, 33 aa, synthetic construct; identical to SEQ ID NO: 11886

SEQ ID NO: 12067 - protein, 37 aa, synthetic construct; identical to SEQ ID NO: 11873

SEQ ID NO: 12068 - protein, 32 aa, synthetic construct
PTGKQTSSTVTKGRHSSLTISSSQTTDSGTYF

SEQ ID NO: 12069 - protein, 37 aa, synthetic construct; identical to SEQ ID NO: 11873

SEQ ID NO: 12070 - protein, 33 aa, synthetic construct; identical to SEQ ID NO: 11984

SEQ ID NO: 12071 - protein, 36 aa, synthetic construct; identical to SEQ ID NO: 11887

SEQ ID NO: 12072 - protein, 32 aa, synthetic construct; identical to SEQ ID NO: 12068

SEQ ID NO: 12073 - protein, 36 aa, synthetic construct; identical to SEQ ID NO: 11971

SEQ ID NO: 12074 - protein, 33 aa, synthetic construct; identical to SEQ ID NO: 11928

SEQ ID NO: 12075 - protein, 36 aa, synthetic construct; identical to SEQ ID NO: 11971

SEQ ID NO: 12076 - protein, 33 aa, synthetic construct
KENGRLKSAFDSKELYSTLHIRDAQLEDSGTYF

SEQ ID NO: 12077 - protein, 36 aa, synthetic construct; identical to SEQ ID NO: 11875

SEQ ID NO: 12078 - protein, 33 aa, synthetic construct; identical to SEQ ID NO: 11878

SEQ ID NO: 12079 - protein, 36 aa, synthetic construct; identical to SEQ ID NO: 11875

SEQ ID NO: 12080 - protein, 33 aa, synthetic construct; identical to SEQ ID NO: 11918

SEQ ID NO: 12081 - protein, 36 aa, synthetic construct; identical to SEQ ID NO: 11875

SEQ ID NO: 12082 - protein, 33 aa, synthetic construct; identical to SEQ ID NO: 11876

SEQ ID NO: 12083 - protein, 36 aa, synthetic construct; identical to SEQ ID NO: 11909

SEQ ID NO: 12084 - protein, 33 aa, synthetic construct; identical to SEQ ID NO: 11932

SEQ ID NO: 12085 - protein, 36 aa, synthetic construct; identical to SEQ ID NO: 11909

SEQ ID NO: 12086 - protein, 33 aa, synthetic construct; identical to SEQ ID NO: 11948

SEQ ID NO: 12087 - protein, 36 aa, synthetic construct; identical to SEQ ID NO: 11879

SEQ ID NO: 12088 - protein, 33 aa, synthetic construct; identical to SEQ ID NO: 11892

SEQ ID NO: 12089 - protein, 36 aa, synthetic construct; identical to SEQ ID NO: 11879

SEQ ID NO: 12090 - protein, 33 aa, synthetic construct; identical to SEQ ID NO: 11932

SEQ ID NO: 12091 - protein, 36 aa, synthetic construct; identical to SEQ ID NO: 11907

SEQ ID NO: 12092 - protein, 33 aa, synthetic construct; identical to SEQ ID NO: 11916

SEQ ID NO: 12093 - protein, 37 aa, synthetic construct; identical to SEQ ID NO: 11951

SEQ ID NO: 12094 - protein, 33 aa, synthetic construct
GSSRGFEATYNKEATSFHLQKASVQESDSAVYY

SEQ ID NO: 12095 - protein, 36 aa, synthetic construct; identical to SEQ ID NO: 11899

SEQ ID NO: 12096 - protein, 33 aa, synthetic construct; identical to SEQ ID NO: 11914

SEQ ID NO: 12097 - protein, 35 aa, synthetic construct; identical to SEQ ID NO: 11895

SEQ ID NO: 12098 - protein, 33 aa, synthetic construct; identical to SEQ ID NO: 11996

SEQ ID NO: 12099 - protein, 35 aa, synthetic construct; identical to SEQ ID NO: 11895

SEQ ID NO: 12100 - protein, 33 aa, synthetic construct; identical to SEQ ID NO: 11932

SEQ ID NO: 12101 - protein, 35 aa, synthetic construct; identical to SEQ ID NO: 11895

SEQ ID NO: 12102 - protein, 33 aa, synthetic construct; identical to SEQ ID NO: 11916

SEQ ID NO: 12103 - protein, 35 aa, synthetic construct; identical to SEQ ID NO: 11895

SEQ ID NO: 12104 - protein, 33 aa, synthetic construct; identical to SEQ ID NO: 11900

SEQ ID NO: 12105 - protein, 36 aa, synthetic construct; identical to SEQ ID NO: 11967

SEQ ID NO: 12106 - protein, 33 aa, synthetic construct; identical to SEQ ID NO: 12038

SEQ ID NO: 12107 - protein, 36 aa, synthetic construct; identical to SEQ ID NO: 11967

SEQ ID NO: 12108 - protein, 33 aa, synthetic construct; identical to SEQ ID NO: 11932

SEQ ID NO: 12109 - protein, 36 aa, synthetic construct; identical to SEQ ID NO: 11967

SEQ ID NO: 12110 - protein, 33 aa, synthetic construct; identical to SEQ ID NO: 11940

SEQ ID NO: 12111 - protein, 37 aa, synthetic construct; identical to SEQ ID NO: 11889

SEQ ID NO: 12112 - protein, 33 aa, synthetic construct; identical to SEQ ID NO: 11940

SEQ ID NO: 12113 - protein, 36 aa, synthetic construct
RDKGNLPSRFSVQQFDDYHSEMNMSALELEDSAVYF

SEQ ID NO: 12114 - protein, 33 aa, synthetic construct; identical to SEQ ID NO: 11884

SEQ ID NO: 12115 - protein, 37 aa, synthetic construct; identical to SEQ ID NO: 11873

SEQ ID NO: 12116 - protein, 33 aa, synthetic construct; identical to SEQ ID NO: 11880

SEQ ID NO: 12117 - protein, 37 aa, synthetic construct; identical to SEQ ID NO: 11873

SEQ ID NO: 12118 - protein, 33 aa, synthetic construct; identical to SEQ ID NO: 11932

SEQ ID NO: 12119 - protein, 37 aa, synthetic construct; identical to SEQ ID NO: 11873

SEQ ID NO: 12120 - protein, 33 aa, synthetic construct
REDGRLTVFLNKSGKHFSLHITASQPEDTAVYL

SEQ ID NO: 12121 - protein, 36 aa, synthetic construct; identical to SEQ ID NO: 11887

SEQ ID NO: 12122 - protein, 33 aa, synthetic construct; identical to SEQ ID NO: 11924

SEQ ID NO: 12123 - protein, 36 aa, synthetic construct; identical to SEQ ID NO: 11887

SEQ ID NO: 12124 - protein, 33 aa, synthetic construct
GSSRGFEATYDKGTTSFHLQKASVQESDSAVYY

SEQ ID NO: 12125 - protein, 36 aa, synthetic construct; identical to SEQ ID NO: 11887

SEQ ID NO: 12126 - protein, 33 aa, synthetic construct
GISRGFEATYDKGTTSFHLQKASVQESDSAVYY

SEQ ID NO: 12127 - protein, 36 aa, synthetic construct; identical to SEQ ID NO: 11971

SEQ ID NO: 12128 - protein, 33 aa, synthetic construct; identical to SEQ ID NO: 12038

SEQ ID NO: 12129 - protein, 36 aa, synthetic construct; identical to SEQ ID NO: 11971

SEQ ID NO: 12130 - protein, 33 aa, synthetic construct
KENGRLKSTFNSKESYSTLHIRDAQLEDSGTYF

SEQ ID NO: 12131 - protein, 36 aa, synthetic construct; identical to SEQ ID NO: 11971

SEQ ID NO: 12132 - protein, 33 aa, synthetic construct; identical to SEQ ID NO: 11878

SEQ ID NO: 12133 - protein, 36 aa, synthetic construct; identical to SEQ ID NO: 11875

SEQ ID NO: 12134 - protein, 33 aa, synthetic construct; identical to SEQ ID NO: 11948

SEQ ID NO: 12135 - protein, 36 aa, synthetic construct; identical to SEQ ID NO: 11875

SEQ ID NO: 12136 - protein, 33 aa, synthetic construct; identical to SEQ ID NO: 11918

SEQ ID NO: 12137 - protein, 36 aa, synthetic construct; identical to SEQ ID NO: 11875

SEQ ID NO: 12138 - protein, 33 aa, synthetic construct
KHTGRLTSTTVTNERRSSLHISSSQTTDSGTYF

SEQ ID NO: 12139 - protein, 36 aa, synthetic construct; identical to SEQ ID NO: 11875

SEQ ID NO: 12140 - protein, 33 aa, synthetic construct; identical to SEQ ID NO: 11914

SEQ ID NO: 12141 - protein, 36 aa, synthetic construct; identical to SEQ ID NO: 11875

SEQ ID NO: 12142 - protein, 33 aa, synthetic construct; identical to SEQ ID NO: 11878

SEQ ID NO: 12143 - protein, 36 aa, synthetic construct; identical to SEQ ID NO: 11909

SEQ ID NO: 12144 - protein, 33 aa, synthetic construct; identical to SEQ ID NO: 11980

SEQ ID NO: 12145 - protein, 36 aa, synthetic construct; identical to SEQ ID NO: 11909

SEQ ID NO: 12146 - protein, 33 aa, synthetic construct; identical to SEQ ID NO: 11894

SEQ ID NO: 12147 - protein, 36 aa, synthetic construct; identical to SEQ ID NO: 11909

SEQ ID NO: 12148 - protein, 33 aa, synthetic construct; identical to SEQ ID NO: 11916

SEQ ID NO: 12149 - protein, 36 aa, synthetic construct; identical to SEQ ID NO: 11909

SEQ ID NO: 12150 - protein, 33 aa, synthetic construct; identical to SEQ ID NO: 11914

SEQ ID NO: 12151 - protein, 36 aa, synthetic construct; identical to SEQ ID NO: 11909

SEQ ID NO: 12152 - protein, 33 aa, synthetic construct
KGTKGFEAEFRKSNSSFNLKKSPAHWSDSAKYF

SEQ ID NO: 12153 - protein, 36 aa, synthetic construct; identical to SEQ ID NO: 11909

SEQ ID NO: 12154 - protein, 33 aa, synthetic construct; identical to SEQ ID NO: 11940

SEQ ID NO: 12155 - protein, 36 aa, synthetic construct; identical to SEQ ID NO: 11909

SEQ ID NO: 12156 - protein, 33 aa, synthetic construct; identical to SEQ ID NO: 11944

SEQ ID NO: 12157 - protein, 36 aa, synthetic construct; identical to SEQ ID NO: 11909

SEQ ID NO: 12158 - protein, 33 aa, synthetic construct; identical to SEQ ID NO: 12130

SEQ ID NO: 12159 - protein, 36 aa, synthetic construct; identical to SEQ ID NO: 11879

SEQ ID NO: 12160 - protein, 33 aa, synthetic construct
KENGRLKSTFNSKERYSTLHIKDAQLEDSGTYF

SEQ ID NO: 12161 - protein, 36 aa, synthetic construct; identical to SEQ ID NO: 11879

SEQ ID NO: 12162 - protein, 33 aa, synthetic construct; identical to SEQ ID NO: 11878

SEQ ID NO: 12163 - protein, 36 aa, synthetic construct; identical to SEQ ID NO: 11879

SEQ ID NO: 12164 - protein, 33 aa, synthetic construct; identical to SEQ ID NO: 11946

SEQ ID NO: 12165 - protein, 36 aa, synthetic construct; identical to SEQ ID NO: 11879

SEQ ID NO: 12166 - protein, 33 aa, synthetic construct; identical to SEQ ID NO: 11894

SEQ ID NO: 12167 - protein, 36 aa, synthetic construct; identical to SEQ ID NO: 11879

SEQ ID NO: 12168 - protein, 33 aa, synthetic construct; identical to SEQ ID NO: 11996

SEQ ID NO: 12169 - protein, 36 aa, synthetic construct; identical to SEQ ID NO: 11879

SEQ ID NO: 12170 - protein, 33 aa, synthetic construct; identical to SEQ ID NO: 12160

SEQ ID NO: 12171 - protein, 36 aa, synthetic construct
NREADTFEKFQSSRPNNSFCSLYIGSAGLEYSAMYL

SEQ ID NO: 12172 - protein, 33 aa, synthetic construct; identical to SEQ ID NO: 11878

SEQ ID NO: 12173 - protein, 36 aa, synthetic construct; identical to SEQ ID NO: 12171

SEQ ID NO: 12174 - protein, 33 aa, synthetic construct; identical to SEQ ID NO: 11878

SEQ ID NO: 12175 - protein, 36 aa, synthetic construct; identical to SEQ ID NO: 11907

SEQ ID NO: 12176 - protein, 33 aa, synthetic construct; identical to SEQ ID NO: 11884

SEQ ID NO: 12177 - protein, 36 aa, synthetic construct; identical to SEQ ID NO: 11907

SEQ ID NO: 12178 - protein, 31 aa, synthetic construct; identical to SEQ ID NO: 11978

SEQ ID NO: 12179 - protein, 37 aa, synthetic construct; identical to SEQ ID NO: 11963

SEQ ID NO: 12180 - protein, 33 aa, synthetic construct; identical to SEQ ID NO: 11996

SEQ ID NO: 12181 - protein, 37 aa, synthetic construct; identical to SEQ ID NO: 11951

SEQ ID NO: 12182 - protein, 33 aa, synthetic construct
QRSGRYSVVFQKSFKSISLVISASQPEDSGTYF

SEQ ID NO: 12183 - protein, 37 aa, synthetic construct; identical to SEQ ID NO: 11951

SEQ ID NO: 12184 - protein, 33 aa, synthetic construct; identical to SEQ ID NO: 11926

SEQ ID NO: 12185 - protein, 36 aa, synthetic construct; identical to SEQ ID NO: 11899

SEQ ID NO: 12186 - protein, 33 aa, synthetic construct; identical to SEQ ID NO: 12130

SEQ ID NO: 12187 - protein, 36 aa, synthetic construct; identical to SEQ ID NO: 11899

SEQ ID NO: 12188 - protein, 33 aa, synthetic construct
NEGQGFTVLLNKKDTRLSLNLTAAHPGDSAAYF

SEQ ID NO: 12189 - protein, 35 aa, synthetic construct; identical to SEQ ID NO: 11895

SEQ ID NO: 12190 - protein, 33 aa, synthetic construct; identical to SEQ ID NO: 12182

SEQ ID NO: 12191 - protein, 35 aa, synthetic construct; identical to SEQ ID NO: 11895

SEQ ID NO: 12192 - protein, 33 aa, synthetic construct; identical to SEQ ID NO: 11884

SEQ ID NO: 12193 - protein, 35 aa, synthetic construct; identical to SEQ ID NO: 11895

SEQ ID NO: 12194 - protein, 33 aa, synthetic construct
KHTGRLTSTTVTKERRSSLHISSSQTTDSGTYL

SEQ ID NO: 12195 - protein, 36 aa, synthetic construct; identical to SEQ ID NO: 11967

SEQ ID NO: 12196 - protein, 33 aa, synthetic construct; identical to SEQ ID NO: 11926

SEQ ID NO: 12197 - protein, 36 aa, synthetic construct; identical to SEQ ID NO: 11967

SEQ ID NO: 12198 - protein, 33 aa, synthetic construct; identical to SEQ ID NO: 11880

SEQ ID NO: 12199 - protein, 36 aa, synthetic construct; identical to SEQ ID NO: 11967

SEQ ID NO: 12200 - protein, 33 aa, synthetic construct; identical to SEQ ID NO: 11932

SEQ ID NO: 12201 - protein, 36 aa, synthetic construct; identical to SEQ ID NO: 11967

SEQ ID NO: 12202 - protein, 33 aa, synthetic construct; identical to SEQ ID NO: 11880

SEQ ID NO: 12203 - protein, 36 aa, synthetic construct; identical to SEQ ID NO: 11967

SEQ ID NO: 12204 - protein, 33 aa, synthetic construct; identical to SEQ ID NO: 11910

SEQ ID NO: 12205 - protein, 36 aa, synthetic construct; identical to SEQ ID NO: 11967

SEQ ID NO: 12206 - protein, 33 aa, synthetic construct; identical to SEQ ID NO: 11932

SEQ ID NO: 12207 - protein, 37 aa, synthetic construct; identical to SEQ ID NO: 11889

SEQ ID NO: 12208 - protein, 33 aa, synthetic construct; identical to SEQ ID NO: 11946

SEQ ID NO: 12209 - protein, 37 aa, synthetic construct; identical to SEQ ID NO: 11889

SEQ ID NO: 12210 - protein, 33 aa, synthetic construct; identical to SEQ ID NO: 11876

SEQ ID NO: 12211 - protein, 37 aa, synthetic construct; identical to SEQ ID NO: 11889

SEQ ID NO: 12212 - protein, 33 aa, synthetic construct; identical to SEQ ID NO: 11924

SEQ ID NO: 12213 - protein, 37 aa, synthetic construct; identical to SEQ ID NO: 11873

SEQ ID NO: 12214 - protein, 33 aa, synthetic construct; identical to SEQ ID NO: 11926

SEQ ID NO: 12215 - protein, 37 aa, synthetic construct; identical to SEQ ID NO: 11873

SEQ ID NO: 12216 - protein, 33 aa, synthetic construct; identical to SEQ ID NO: 11976

SEQ ID NO: 12217 - protein, 37 aa, synthetic construct; identical to SEQ ID NO: 11873

SEQ ID NO: 12218 - protein, 33 aa, synthetic construct; identical to SEQ ID NO: 11948

SEQ ID NO: 12219 - protein, 37 aa, synthetic construct; identical to SEQ ID NO: 11873

SEQ ID NO: 12220 - protein, 33 aa, synthetic construct; identical to SEQ ID NO: 11926

SEQ ID NO: 12221 - protein, 36 aa, synthetic construct; identical to SEQ ID NO: 12035

SEQ ID NO: 12222 - protein, 33 aa, synthetic construct
ERSGRYSVVFQKSLKSISLIISALQPDDSGKYF

SEQ ID NO: 12223 - protein, 36 aa, synthetic construct; identical to SEQ ID NO: 11887

SEQ ID NO: 12224 - protein, 33 aa, synthetic construct; identical to SEQ ID NO: 12124

SEQ ID NO: 12225 - protein, 36 aa, synthetic construct; identical to SEQ ID NO: 11887

SEQ ID NO: 12226 - protein, 33 aa, synthetic construct; identical to SEQ ID NO: 12194

SEQ ID NO: 12227 - protein, 36 aa, synthetic construct; identical to SEQ ID NO: 11887

SEQ ID NO: 12228 - protein, 33 aa, synthetic construct; identical to SEQ ID NO: 11946

SEQ ID NO: 12229 - protein, 36 aa, synthetic construct; identical to SEQ ID NO: 11887

SEQ ID NO: 12230 - protein, 33 aa, synthetic construct
KHTGRLTSTTVTKERRSSLHISSSQTTDSGTYF

SEQ ID NO: 12231 - protein, 36 aa, synthetic construct; identical to SEQ ID NO: 11887

SEQ ID NO: 12232 - protein, 33 aa, synthetic construct; identical to SEQ ID NO: 12038

SEQ ID NO: 12233 - protein, 36 aa, synthetic construct; identical to SEQ ID NO: 11887

SEQ ID NO: 12234 - protein, 33 aa, synthetic construct; identical to SEQ ID NO: 12094

SEQ ID NO: 12235 - protein, 36 aa, synthetic construct; identical to SEQ ID NO: 11971

SEQ ID NO: 12236 - protein, 33 aa, synthetic construct; identical to SEQ ID NO: 12194

SEQ ID NO: 12237 - protein, 36 aa, synthetic construct; identical to SEQ ID NO: 11971

SEQ ID NO: 12238 - protein, 33 aa, synthetic construct
KQSQRLTVLLDKKAKRFSLHITATQPEDSAIYF

SEQ ID NO: 12239 - protein, 36 aa, synthetic construct; identical to SEQ ID NO: 11971

SEQ ID NO: 12240 - protein, 33 aa, synthetic construct; identical to SEQ ID NO: 11980

SEQ ID NO: 12241 - protein, 36 aa, synthetic construct; identical to SEQ ID NO: 11971

SEQ ID NO: 12242 - protein, 33 aa, synthetic construct; identical to SEQ ID NO: 11956

SEQ ID NO: 12243 - protein, 36 aa, synthetic construct; identical to SEQ ID NO: 11971

SEQ ID NO: 12244 - protein, 33 aa, synthetic construct; identical to SEQ ID NO: 11928

SEQ ID NO: 12245 - protein, 36 aa, synthetic construct; identical to SEQ ID NO: 11971

SEQ ID NO: 12246 - protein, 33 aa, synthetic construct
KEDGRFTTFFNKREKKLSLHIIDSQPGDSATYF

SEQ ID NO: 12247 - protein, 36 aa, synthetic construct; identical to SEQ ID NO: 11971

SEQ ID NO: 12248 - protein, 33 aa, synthetic construct; identical to SEQ ID NO: 11948

SEQ ID NO: 12249 - protein, 36 aa, synthetic construct; identical to SEQ ID NO: 11971

SEQ ID NO: 12250 - protein, 33 aa, synthetic construct; identical to SEQ ID NO: 12042

SEQ ID NO: 12251 - protein, 36 aa, synthetic construct; identical to SEQ ID NO: 11971

SEQ ID NO: 12252 - protein, 33 aa, synthetic construct; identical to SEQ ID NO: 11878

SEQ ID NO: 12253 - protein, 36 aa, synthetic construct; identical to SEQ ID NO: 11875

SEQ ID NO: 12254 - protein, 33 aa, synthetic construct; identical to SEQ ID NO: 11892

SEQ ID NO: 12255 - protein, 36 aa, synthetic construct; identical to SEQ ID NO: 11875

SEQ ID NO: 12256 - protein, 33 aa, synthetic construct; identical to SEQ ID NO: 11884

SEQ ID NO: 12257 - protein, 36 aa, synthetic construct; identical to SEQ ID NO: 11875

SEQ ID NO: 12258 - protein, 33 aa, synthetic construct; identical to SEQ ID NO: 11916

SEQ ID NO: 12259 - protein, 36 aa, synthetic construct; identical to SEQ ID NO: 11875

SEQ ID NO: 12260 - protein, 33 aa, synthetic construct; identical to SEQ ID NO: 11878

SEQ ID NO: 12261 - protein, 36 aa, synthetic construct; identical to SEQ ID NO: 11875

SEQ ID NO: 12262 - protein, 33 aa, synthetic construct; identical to SEQ ID NO: 11928

SEQ ID NO: 12263 - protein, 36 aa, synthetic construct; identical to SEQ ID NO: 11875

SEQ ID NO: 12264 - protein, 33 aa, synthetic construct; identical to SEQ ID NO: 12238

SEQ ID NO: 12265 - protein, 36 aa, synthetic construct; identical to SEQ ID NO: 11875

SEQ ID NO: 12266 - protein, 33 aa, synthetic construct
TTNSMAFLAIASDRKSSTLILPHVSLRDAAVYH

SEQ ID NO: 12267 - protein, 36 aa, synthetic construct; identical to SEQ ID NO: 11875

SEQ ID NO: 12268 - protein, 33 aa, synthetic construct; identical to SEQ ID NO: 12230

SEQ ID NO: 12269 - protein, 36 aa, synthetic construct; identical to SEQ ID NO: 11909

SEQ ID NO: 12270 - protein, 33 aa, synthetic construct; identical to SEQ ID NO: 12152

SEQ ID NO: 12271 - protein, 36 aa, synthetic construct; identical to SEQ ID NO: 11909

SEQ ID NO: 12272 - protein, 33 aa, synthetic construct; identical to SEQ ID NO: 11878

SEQ ID NO: 12273 - protein, 36 aa, synthetic construct; identical to SEQ ID NO: 11909

SEQ ID NO: 12274 - protein, 33 aa, synthetic construct; identical to SEQ ID NO: 12032

SEQ ID NO: 12275 - protein, 36 aa, synthetic construct; identical to SEQ ID NO: 11909

SEQ ID NO: 12276 - protein, 33 aa, synthetic construct
KENGRLKSAFDSKESYSTLHIRDAQLEDSGTYF

SEQ ID NO: 12277 - protein, 36 aa, synthetic construct; identical to SEQ ID NO: 11909

SEQ ID NO: 12278 - protein, 33 aa, synthetic construct; identical to SEQ ID NO: 11940

SEQ ID NO: 12279 - protein, 36 aa, synthetic construct; identical to SEQ ID NO: 11909

SEQ ID NO: 12280 - protein, 33 aa, synthetic construct; identical to SEQ ID NO: 11980

SEQ ID NO: 12281 - protein, 36 aa, synthetic construct; identical to SEQ ID NO: 11909

SEQ ID NO: 12282 - protein, 33 aa, synthetic construct; identical to SEQ ID NO: 12126

SEQ ID NO: 12283 - protein, 36 aa, synthetic construct; identical to SEQ ID NO: 11879

SEQ ID NO: 12284 - protein, 33 aa, synthetic construct; identical to SEQ ID NO: 11876

SEQ ID NO: 12285 - protein, 36 aa, synthetic construct; identical to SEQ ID NO: 11879

SEQ ID NO: 12286 - protein, 33 aa, synthetic construct; identical to SEQ ID NO: 11948

SEQ ID NO: 12287 - protein, 36 aa, synthetic construct; identical to SEQ ID NO: 11879

SEQ ID NO: 12288 - protein, 33 aa, synthetic construct; identical to SEQ ID NO: 11916

SEQ ID NO: 12289 - protein, 36 aa, synthetic construct; identical to SEQ ID NO: 11879

SEQ ID NO: 12290 - protein, 33 aa, synthetic construct; identical to SEQ ID NO: 11980

SEQ ID NO: 12291 - protein, 36 aa, synthetic construct; identical to SEQ ID NO: 11879

SEQ ID NO: 12292 - protein, 33 aa, synthetic construct; identical to SEQ ID NO: 11892

SEQ ID NO: 12293 - protein, 36 aa, synthetic construct; identical to SEQ ID NO: 11879

SEQ ID NO: 12294 - protein, 33 aa, synthetic construct; identical to SEQ ID NO: 11940

SEQ ID NO: 12295 - protein, 36 aa, synthetic construct; identical to SEQ ID NO: 11879

SEQ ID NO: 12296 - protein, 33 aa, synthetic construct; identical to SEQ ID NO: 11948

SEQ ID NO: 12297 - protein, 36 aa, synthetic construct; identical to SEQ ID NO: 11879

SEQ ID NO: 12298 - protein, 33 aa, synthetic construct; identical to SEQ ID NO: 11876

SEQ ID NO: 12299 - protein, 36 aa, synthetic construct; identical to SEQ ID NO: 12171

SEQ ID NO: 12300 - protein, 33 aa, synthetic construct; identical to SEQ ID NO: 11950

SEQ ID NO: 12301 - protein, 36 aa, synthetic construct; identical to SEQ ID NO: 12171

SEQ ID NO: 12302 - protein, 33 aa, synthetic construct; identical to SEQ ID NO: 11894

SEQ ID NO: 12303 - protein, 36 aa, synthetic construct; identical to SEQ ID NO: 11907

SEQ ID NO: 12304 - protein, 33 aa, synthetic construct; identical to SEQ ID NO: 11940

SEQ ID NO: 12305 - protein, 36 aa, synthetic construct; identical to SEQ ID NO: 11907

SEQ ID NO: 12306 - protein, 32 aa, synthetic construct
SNRGFEATYNKEATSFHLQKASVQESDSAVYY

SEQ ID NO: 12307 - protein, 36 aa, synthetic construct; identical to SEQ ID NO: 11907

SEQ ID NO: 12308 - protein, 33 aa, synthetic construct; identical to SEQ ID NO: 12222

SEQ ID NO: 12309 - protein, 36 aa, synthetic construct; identical to SEQ ID NO: 11907

SEQ ID NO: 12310 - protein, 33 aa, synthetic construct; identical to SEQ ID NO: 11926

SEQ ID NO: 12311 - protein, 37 aa, synthetic construct; identical to SEQ ID NO: 11951

SEQ ID NO: 12312 - protein, 33 aa, synthetic construct; identical to SEQ ID NO: 11914

SEQ ID NO: 12313 - protein, 37 aa, synthetic construct; identical to SEQ ID NO: 11951

SEQ ID NO: 12314 - protein, 33 aa, synthetic construct; identical to SEQ ID NO: 12042

SEQ ID NO: 12315 - protein, 36 aa, synthetic construct; identical to SEQ ID NO: 11899

SEQ ID NO: 12316 - protein, 33 aa, synthetic construct; identical to SEQ ID NO: 11886

SEQ ID NO: 12317 - protein, 36 aa, synthetic construct; identical to SEQ ID NO: 11899

SEQ ID NO: 12318 - protein, 33 aa, synthetic construct; identical to SEQ ID NO: 12238

SEQ ID NO: 12319 - protein, 36 aa, synthetic construct; identical to SEQ ID NO: 11899

SEQ ID NO: 12320 - protein, 33 aa, synthetic construct; identical to SEQ ID NO: 12130

SEQ ID NO: 12321 - protein, 36 aa, synthetic construct; identical to SEQ ID NO: 11899

SEQ ID NO: 12322 - protein, 33 aa, synthetic construct
KEDGRFTIFFNKREKKFSLHIADSQPGDSATYF

SEQ ID NO: 12323 - protein, 36 aa, synthetic construct; identical to SEQ ID NO: 11899

SEQ ID NO: 12324 - protein, 33 aa, synthetic construct; identical to SEQ ID NO: 11886

SEQ ID NO: 12325 - protein, 36 aa, synthetic construct; identical to SEQ ID NO: 11899

SEQ ID NO: 12326 - protein, 33 aa, synthetic construct; identical to SEQ ID NO: 11980

SEQ ID NO: 12327 - protein, 36 aa, synthetic construct; identical to SEQ ID NO: 11899

SEQ ID NO: 12328 - protein, 33 aa, synthetic construct
GSSRGFEATYDKGTTSFHLQKTSVQEIDSAVYY

SEQ ID NO: 12329 - protein, 36 aa, synthetic construct; identical to SEQ ID NO: 11899

SEQ ID NO: 12330 - protein, 33 aa, synthetic construct; identical to SEQ ID NO: 11932

SEQ ID NO: 12331 - protein, 36 aa, synthetic construct; identical to SEQ ID NO: 11899

SEQ ID NO: 12332 - protein, 33 aa, synthetic construct; identical to SEQ ID NO: 11980

SEQ ID NO: 12333 - protein, 36 aa, synthetic construct; identical to SEQ ID NO: 11899

SEQ ID NO: 12334 - protein, 33 aa, synthetic construct; identical to SEQ ID NO: 11884

SEQ ID NO: 12335 - protein, 36 aa, synthetic construct; identical to SEQ ID NO: 11899

SEQ ID NO: 12336 - protein, 33 aa, synthetic construct; identical to SEQ ID NO: 11918

SEQ ID NO: 12337 - protein, 36 aa, synthetic construct; identical to SEQ ID NO: 11899

SEQ ID NO: 12338 - protein, 33 aa, synthetic construct; identical to SEQ ID NO: 11892

SEQ ID NO: 12339 - protein, 36 aa, synthetic construct; identical to SEQ ID NO: 11899

SEQ ID NO: 12340 - protein, 33 aa, synthetic construct; identical to SEQ ID NO: 11940

SEQ ID NO: 12341 - protein, 35 aa, synthetic construct; identical to SEQ ID NO: 11895

SEQ ID NO: 12342 - protein, 33 aa, synthetic construct; identical to SEQ ID NO: 11892

SEQ ID NO: 12343 - protein, 35 aa, synthetic construct; identical to SEQ ID NO: 11895

SEQ ID NO: 12344 - protein, 33 aa, synthetic construct; identical to SEQ ID NO: 11878

SEQ ID NO: 12345 - protein, 35 aa, synthetic construct; identical to SEQ ID NO: 11895

SEQ ID NO: 12346 - protein, 33 aa, synthetic construct; identical to SEQ ID NO: 11874

SEQ ID NO: 12347 - protein, 35 aa, synthetic construct; identical to SEQ ID NO: 11895

SEQ ID NO: 12348 - protein, 33 aa, synthetic construct; identical to SEQ ID NO: 12276

SEQ ID NO: 12349 - protein, 35 aa, synthetic construct; identical to SEQ ID NO: 11895

SEQ ID NO: 12350 - protein, 33 aa, synthetic construct; identical to SEQ ID NO: 11932

SEQ ID NO: 12351 - protein, 35 aa, synthetic construct; identical to SEQ ID NO: 11895

SEQ ID NO: 12352 - protein, 33 aa, synthetic construct; identical to SEQ ID NO: 11948

SEQ ID NO: 12353 - protein, 35 aa, synthetic construct; identical to SEQ ID NO: 11895

SEQ ID NO: 12354 - protein, 33 aa, synthetic construct; identical to SEQ ID NO: 12016

SEQ ID NO: 12355 - protein, 36 aa, synthetic construct; identical to SEQ ID NO: 11967

SEQ ID NO: 12356 - protein, 33 aa, synthetic construct; identical to SEQ ID NO: 12266

SEQ ID NO: 12357 - protein, 36 aa, synthetic construct; identical to SEQ ID NO: 11967

SEQ ID NO: 12358 - protein, 33 aa, synthetic construct; identical to SEQ ID NO: 12016

SEQ ID NO: 12359 - protein, 36 aa, synthetic construct; identical to SEQ ID NO: 11967

SEQ ID NO: 12360 - protein, 33 aa, synthetic construct; identical to SEQ ID NO: 11980

SEQ ID NO: 12361 - protein, 36 aa, synthetic construct; identical to SEQ ID NO: 11967

SEQ ID NO: 12362 - protein, 33 aa, synthetic construct; identical to SEQ ID NO: 11932

SEQ ID NO: 12363 - protein, 36 aa, synthetic construct; identical to SEQ ID NO: 11967

SEQ ID NO: 12364 - protein, 33 aa, synthetic construct; identical to SEQ ID NO: 11932

SEQ ID NO: 12365 - protein, 36 aa, synthetic construct; identical to SEQ ID NO: 11967

SEQ ID NO: 12366 - protein, 33 aa, synthetic construct; identical to SEQ ID NO: 12130

SEQ ID NO: 12367 - protein, 36 aa, synthetic construct; identical to SEQ ID NO: 11967

SEQ ID NO: 12368 - protein, 33 aa, synthetic construct; identical to SEQ ID NO: 11876

SEQ ID NO: 12369 - protein, 36 aa, synthetic construct; identical to SEQ ID NO: 11967

SEQ ID NO: 12370 - protein, 33 aa, synthetic construct; identical to SEQ ID NO: 11948

SEQ ID NO: 12371 - protein, 36 aa, synthetic construct; identical to SEQ ID NO: 11967

SEQ ID NO: 12372 - protein, 33 aa, synthetic construct; identical to SEQ ID NO: 11932

SEQ ID NO: 12373 - protein, 36 aa, synthetic construct; identical to SEQ ID NO: 11967

SEQ ID NO: 12374 - protein, 33 aa, synthetic construct; identical to SEQ ID NO: 11946

SEQ ID NO: 12375 - protein, 36 aa, synthetic construct; identical to SEQ ID NO: 11967

SEQ ID NO: 12376 - protein, 33 aa, synthetic construct; identical to SEQ ID NO: 12120

SEQ ID NO: 12377 - protein, 36 aa, synthetic construct; identical to SEQ ID NO: 11967

SEQ ID NO: 12378 - protein, 33 aa, synthetic construct; identical to SEQ ID NO: 11878

SEQ ID NO: 12379 - protein, 36 aa, synthetic construct; identical to SEQ ID NO: 11967

SEQ ID NO: 12380 - protein, 33 aa, synthetic construct; identical to SEQ ID NO: 11932

SEQ ID NO: 12381 - protein, 36 aa, synthetic construct; identical to SEQ ID NO: 11967

SEQ ID NO: 12382 - protein, 33 aa, synthetic construct
GISRGFEATYDKGTTSFHLQKASVQESDSAVYF

SEQ ID NO: 12383 - protein, 36 aa, synthetic construct; identical to SEQ ID NO: 11967

SEQ ID NO: 12384 - protein, 33 aa, synthetic construct; identical to SEQ ID NO: 12194

SEQ ID NO: 12385 - protein, 36 aa, synthetic construct; identical to SEQ ID NO: 11967

SEQ ID NO: 12386 - protein, 33 aa, synthetic construct; identical to SEQ ID NO: 11892

SEQ ID NO: 12387 - protein, 36 aa, synthetic construct; identical to SEQ ID NO: 11967

SEQ ID NO: 12388 - protein, 33 aa, synthetic construct; identical to SEQ ID NO: 11932

SEQ ID NO: 12389 - protein, 36 aa, synthetic construct; identical to SEQ ID NO: 11967

SEQ ID NO: 12390 - protein, 33 aa, synthetic construct; identical to SEQ ID NO: 12094

SEQ ID NO: 12391 - protein, 36 aa, synthetic construct; identical to SEQ ID NO: 11967

SEQ ID NO: 12392 - protein, 33 aa, synthetic construct; identical to SEQ ID NO: 11876

SEQ ID NO: 12393 - protein, 36 aa, synthetic construct; identical to SEQ ID NO: 11967

SEQ ID NO: 12394 - protein, 33 aa, synthetic construct; identical to SEQ ID NO: 11878

SEQ ID NO: 12395 - protein, 36 aa, synthetic construct; identical to SEQ ID NO: 11967

SEQ ID NO: 12396 - protein, 33 aa, synthetic construct; identical to SEQ ID NO: 11874

SEQ ID NO: 12397 - protein, 36 aa, synthetic construct; identical to SEQ ID NO: 11967

SEQ ID NO: 12398 - protein, 33 aa, synthetic construct; identical to SEQ ID NO: 11948

SEQ ID NO: 12399 - protein, 36 aa, synthetic construct; identical to SEQ ID NO: 11967

SEQ ID NO: 12400 - protein, 33 aa, synthetic construct; identical to SEQ ID NO: 12038

SEQ ID NO: 12401 - protein, 36 aa, synthetic construct; identical to SEQ ID NO: 11967

SEQ ID NO: 12402 - protein, 33 aa, synthetic construct
TSNGRYSATLDKDAKHSTLHITATLLDDTATYI

SEQ ID NO: 12403 - protein, 36 aa, synthetic construct; identical to SEQ ID NO: 11967

SEQ ID NO: 12404 - protein, 33 aa, synthetic construct; identical to SEQ ID NO: 11940

SEQ ID NO: 12405 - protein, 36 aa, synthetic construct; identical to SEQ ID NO: 11967

SEQ ID NO: 12406 - protein, 33 aa, synthetic construct; identical to SEQ ID NO: 11932

SEQ ID NO: 12407 - protein, 36 aa, synthetic construct; identical to SEQ ID NO: 11967

SEQ ID NO: 12408 - protein, 33 aa, synthetic construct; identical to SEQ ID NO: 11944

SEQ ID NO: 12409 - protein, 36 aa, synthetic construct; identical to SEQ ID NO: 11967

SEQ ID NO: 12410 - protein, 33 aa, synthetic construct; identical to SEQ ID NO: 11980

SEQ ID NO: 12411 - protein, 36 aa, synthetic construct; identical to SEQ ID NO: 11967

SEQ ID NO: 12412 - protein, 31 aa, synthetic construct; identical to SEQ ID NO: 11978

SEQ ID NO: 12413 - protein, 36 aa, synthetic construct; identical to SEQ ID NO: 11967

SEQ ID NO: 12414 - protein, 33 aa, synthetic construct; identical to SEQ ID NO: 12152

SEQ ID NO: 12415 - protein, 36 aa, synthetic construct; identical to SEQ ID NO: 11967

SEQ ID NO: 12416 - protein, 33 aa, synthetic construct; identical to SEQ ID NO: 11900

SEQ ID NO: 12417 - protein, 36 aa, synthetic construct; identical to SEQ ID NO: 11967

SEQ ID NO: 12418 - protein, 33 aa, synthetic construct; identical to SEQ ID NO: 12038

SEQ ID NO: 12419 - protein, 36 aa, synthetic construct; identical to SEQ ID NO: 11967

SEQ ID NO: 12420 - protein, 33 aa, synthetic construct; identical to SEQ ID NO: 11892

SEQ ID NO: 12421 - protein, 36 aa, synthetic construct; identical to SEQ ID NO: 11967

SEQ ID NO: 12422 - protein, 33 aa, synthetic construct; identical to SEQ ID NO: 12130

SEQ ID NO: 12423 - protein, 36 aa, synthetic construct; identical to SEQ ID NO: 11967

SEQ ID NO: 12424 - protein, 33 aa, synthetic construct; identical to SEQ ID NO: 11916

SEQ ID NO: 12425 - protein, 37 aa, synthetic construct; identical to SEQ ID NO: 11889

SEQ ID NO: 12426 - protein, 33 aa, synthetic construct; identical to SEQ ID NO: 11924

SEQ ID NO: 12427 - protein, 37 aa, synthetic construct; identical to SEQ ID NO: 11889

SEQ ID NO: 12428 - protein, 33 aa, synthetic construct; identical to SEQ ID NO: 11896

SEQ ID NO: 12429 - protein, 37 aa, synthetic construct; identical to SEQ ID NO: 11889

SEQ ID NO: 12430 - protein, 33 aa, synthetic construct; identical to SEQ ID NO: 11896

SEQ ID NO: 12431 - protein, 37 aa, synthetic construct; identical to SEQ ID NO: 11889

SEQ ID NO: 12432 - protein, 33 aa, synthetic construct; identical to SEQ ID NO: 11892

SEQ ID NO: 12433 - protein, 37 aa, synthetic construct; identical to SEQ ID NO: 11889

SEQ ID NO: 12434 - protein, 33 aa, synthetic construct; identical to SEQ ID NO: 11948

SEQ ID NO: 12435 - protein, 37 aa, synthetic construct; identical to SEQ ID NO: 11889

SEQ ID NO: 12436 - protein, 34 aa, synthetic construct; identical to SEQ ID NO: 11890

SEQ ID NO: 12437 - protein, 36 aa, synthetic construct; identical to SEQ ID NO: 12113

SEQ ID NO: 12438 - protein, 33 aa, synthetic construct; identical to SEQ ID NO: 11928

SEQ ID NO: 12439 - protein, 37 aa, synthetic construct
TYESGFTKDKFPISRPNLTFSTLTVNNARPGDSSIYF

SEQ ID NO: 12440 - protein, 33 aa, synthetic construct; identical to SEQ ID NO: 11892

SEQ ID NO: 12441 - protein, 37 aa, synthetic construct; identical to SEQ ID NO: 12439

SEQ ID NO: 12442 - protein, 33 aa, synthetic construct; identical to SEQ ID NO: 12054

SEQ ID NO: 12443 - protein, 37 aa, synthetic construct; identical to SEQ ID NO: 12439

SEQ ID NO: 12444 - protein, 33 aa, synthetic construct; identical to SEQ ID NO: 11948

SEQ ID NO: 12445 - protein, 37 aa, synthetic construct; identical to SEQ ID NO: 11873

SEQ ID NO: 12446 - protein, 33 aa, synthetic construct; identical to SEQ ID NO: 11874

SEQ ID NO: 12447 - protein, 37 aa, synthetic construct; identical to SEQ ID NO: 11873

SEQ ID NO: 12448 - protein, 33 aa, synthetic construct; identical to SEQ ID NO: 11878

SEQ ID NO: 12449 - protein, 37 aa, synthetic construct; identical to SEQ ID NO: 11873

SEQ ID NO: 12450 - protein, 33 aa, synthetic construct; identical to SEQ ID NO: 11886

SEQ ID NO: 12451 - protein, 37 aa, synthetic construct; identical to SEQ ID NO: 11873

SEQ ID NO: 12452 - protein, 33 aa, synthetic construct; identical to SEQ ID NO: 11910

SEQ ID NO: 12453 - protein, 37 aa, synthetic construct; identical to SEQ ID NO: 11873

SEQ ID NO: 12454 - protein, 33 aa, synthetic construct; identical to SEQ ID NO: 11946

SEQ ID NO: 12455 - protein, 37 aa, synthetic construct; identical to SEQ ID NO: 11873

SEQ ID NO: 12456 - protein, 33 aa, synthetic construct; identical to SEQ ID NO: 12120

SEQ ID NO: 12457 - protein, 37 aa, synthetic construct; identical to SEQ ID NO: 11873

SEQ ID NO: 12458 - protein, 33 aa, synthetic construct; identical to SEQ ID NO: 11932

SEQ ID NO: 12459 - protein, 37 aa, synthetic construct; identical to SEQ ID NO: 11873

SEQ ID NO: 12460 - protein, 33 aa, synthetic construct; identical to SEQ ID NO: 12094

SEQ ID NO: 12461 - protein, 37 aa, synthetic construct; identical to SEQ ID NO: 11873

SEQ ID NO: 12462 - protein, 33 aa, synthetic construct; identical to SEQ ID NO: 11884

SEQ ID NO: 12463 - protein, 37 aa, synthetic construct; identical to SEQ ID NO: 11873

SEQ ID NO: 12464 - protein, 33 aa, synthetic construct
QGVNSFEAEFSKSNSSFHLQTASVHWSDSAVYF

SEQ ID NO: 12465 - protein, 37 aa, synthetic construct; identical to SEQ ID NO: 11873

SEQ ID NO: 12466 - protein, 33 aa, synthetic construct; identical to SEQ ID NO: 12120

SEQ ID NO: 12467 - protein, 37 aa, synthetic construct; identical to SEQ ID NO: 11873

SEQ ID NO: 12468 - protein, 33 aa, synthetic construct; identical to SEQ ID NO: 11874

SEQ ID NO: 12469 - protein, 37 aa, synthetic construct; identical to SEQ ID NO: 11873

SEQ ID NO: 12470 - protein, 33 aa, synthetic construct; identical to SEQ ID NO: 11874

SEQ ID NO: 12471 - protein, 37 aa, synthetic construct; identical to SEQ ID NO: 11873

SEQ ID NO: 12472 - protein, 33 aa, synthetic construct; identical to SEQ ID NO: 11932

SEQ ID NO: 12473 - protein, 37 aa, synthetic construct; identical to SEQ ID NO: 11873

SEQ ID NO: 12474 - protein, 33 aa, synthetic construct; identical to SEQ ID NO: 12054

SEQ ID NO: 12475 - protein, 37 aa, synthetic construct; identical to SEQ ID NO: 11873

SEQ ID NO: 12476 - protein, 33 aa, synthetic construct; identical to SEQ ID NO: 12194

SEQ ID NO: 12477 - protein, 37 aa, synthetic construct; identical to SEQ ID NO: 11873

SEQ ID NO: 12478 - protein, 33 aa, synthetic construct; identical to SEQ ID NO: 11880

SEQ ID NO: 12479 - protein, 37 aa, synthetic construct; identical to SEQ ID NO: 11873

SEQ ID NO: 12480 - protein, 33 aa, synthetic construct; identical to SEQ ID NO: 11932

SEQ ID NO: 12481 - protein, 37 aa, synthetic construct; identical to SEQ ID NO: 11873

SEQ ID NO: 12482 - protein, 33 aa, synthetic construct; identical to SEQ ID NO: 11878

SEQ ID NO: 12483 - protein, 37 aa, synthetic construct; identical to SEQ ID NO: 11873

SEQ ID NO: 12484 - protein, 33 aa, synthetic construct; identical to SEQ ID NO: 11878

SEQ ID NO: 12485 - protein, 37 aa, synthetic construct; identical to SEQ ID NO: 11873

SEQ ID NO: 12486 - protein, 33 aa, synthetic construct; identical to SEQ ID NO: 11896

SEQ ID NO: 12487 - protein, 37 aa, synthetic construct; identical to SEQ ID NO: 11873

SEQ ID NO: 12488 - protein, 33 aa, synthetic construct; identical to SEQ ID NO: 11892

SEQ ID NO: 12489 - protein, 37 aa, synthetic construct; identical to SEQ ID NO: 11873

SEQ ID NO: 12490 - protein, 33 aa, synthetic construct; identical to SEQ ID NO: 11940

SEQ ID NO: 12491 - protein, 37 aa, synthetic construct; identical to SEQ ID NO: 11873

SEQ ID NO: 12492 - protein, 33 aa, synthetic construct; identical to SEQ ID NO: 12076

SEQ ID NO: 12493 - protein, 37 aa, synthetic construct; identical to SEQ ID NO: 11873

SEQ ID NO: 12494 - protein, 33 aa, synthetic construct; identical to SEQ ID NO: 11932

SEQ ID NO: 12495 - protein, 37 aa, synthetic construct; identical to SEQ ID NO: 11873

SEQ ID NO: 12496 - protein, 33 aa, synthetic construct; identical to SEQ ID NO: 11910

SEQ ID NO: 12497 - protein, 37 aa, synthetic construct; identical to SEQ ID NO: 11873

SEQ ID NO: 12498 - protein, 33 aa, synthetic construct; identical to SEQ ID NO: 11924

SEQ ID NO: 12499 - protein, 37 aa, synthetic construct; identical to SEQ ID NO: 11873

SEQ ID NO: 12500 - protein, 33 aa, synthetic construct; identical to SEQ ID NO: 12042

SEQ ID NO: 12501 - protein, 37 aa, synthetic construct; identical to SEQ ID NO: 11873

SEQ ID NO: 12502 - protein, 33 aa, synthetic construct; identical to SEQ ID NO: 11946

SEQ ID NO: 12503 - protein, 36 aa, synthetic construct; identical to SEQ ID NO: 12035

SEQ ID NO: 12504 - protein, 33 aa, synthetic construct; identical to SEQ ID NO: 11932

SEQ ID NO: 12505 - protein, 36 aa, synthetic construct; identical to SEQ ID NO: 12035

SEQ ID NO: 12506 - protein, 33 aa, synthetic construct; identical to SEQ ID NO: 11948

SEQ ID NO: 12507 - protein, 36 aa, synthetic construct; identical to SEQ ID NO: 12035

SEQ ID NO: 12508 - protein, 33 aa, synthetic construct; identical to SEQ ID NO: 11924

SEQ ID NO: 12509 - protein, 36 aa, synthetic construct; identical to SEQ ID NO: 12035

SEQ ID NO: 12510 - protein, 33 aa, synthetic construct; identical to SEQ ID NO: 11896

SEQ ID NO: 12511 - protein, 36 aa, synthetic construct; identical to SEQ ID NO: 12035

SEQ ID NO: 12512 - protein, 33 aa, synthetic construct; identical to SEQ ID NO: 11876

SEQ ID NO: 12513 - protein, 36 aa, synthetic construct; identical to SEQ ID NO: 12035

SEQ ID NO: 12514 - protein, 33 aa, synthetic construct; identical to SEQ ID NO: 11918

SEQ ID NO: 12515 - protein, 36 aa, synthetic construct; identical to SEQ ID NO: 12035

SEQ ID NO: 12516 - protein, 33 aa, synthetic construct; identical to SEQ ID NO: 12022

SEQ ID NO: 12517 - protein, 36 aa, synthetic construct; identical to SEQ ID NO: 11887

SEQ ID NO: 12518 - protein, 33 aa, synthetic construct; identical to SEQ ID NO: 12138

SEQ ID NO: 12519 - protein, 36 aa, synthetic construct; identical to SEQ ID NO: 11887

SEQ ID NO: 12520 - protein, 33 aa, synthetic construct; identical to SEQ ID NO: 11996

SEQ ID NO: 12521 - protein, 36 aa, synthetic construct; identical to SEQ ID NO: 11887

SEQ ID NO: 12522 - protein, 33 aa, synthetic construct; identical to SEQ ID NO: 12030

SEQ ID NO: 12523 - protein, 36 aa, synthetic construct; identical to SEQ ID NO: 11887

SEQ ID NO: 12524 - protein, 33 aa, synthetic construct; identical to SEQ ID NO: 11924

SEQ ID NO: 12525 - protein, 36 aa, synthetic construct; identical to SEQ ID NO: 11887

SEQ ID NO: 12526 - protein, 33 aa, synthetic construct; identical to SEQ ID NO: 11900

SEQ ID NO: 12527 - protein, 36 aa, synthetic construct; identical to SEQ ID NO: 11887

SEQ ID NO: 12528 - protein, 33 aa, synthetic construct
KEEGRFTAHLNRASLHVSLHIREPQPSDSAVYL

SEQ ID NO: 12529 - protein, 36 aa, synthetic construct; identical to SEQ ID NO: 11887

SEQ ID NO: 12530 - protein, 33 aa, synthetic construct; identical to SEQ ID NO: 11874

SEQ ID NO: 12531 - protein, 36 aa, synthetic construct; identical to SEQ ID NO: 11887

SEQ ID NO: 12532 - protein, 33 aa, synthetic construct; identical to SEQ ID NO: 11878

SEQ ID NO: 12533 - protein, 36 aa, synthetic construct; identical to SEQ ID NO: 11887

SEQ ID NO: 12534 - protein, 33 aa, synthetic construct; identical to SEQ ID NO: 11878

SEQ ID NO: 12535 - protein, 36 aa, synthetic construct; identical to SEQ ID NO: 11887

SEQ ID NO: 12536 - protein, 33 aa, synthetic construct; identical to SEQ ID NO: 11932

SEQ ID NO: 12537 - protein, 36 aa, synthetic construct; identical to SEQ ID NO: 11887

SEQ ID NO: 12538 - protein, 33 aa, synthetic construct; identical to SEQ ID NO: 12126

SEQ ID NO: 12539 - protein, 36 aa, synthetic construct; identical to SEQ ID NO: 11887

SEQ ID NO: 12540 - protein, 33 aa, synthetic construct; identical to SEQ ID NO: 12094

SEQ ID NO: 12541 - protein, 36 aa, synthetic construct; identical to SEQ ID NO: 11887

SEQ ID NO: 12542 - protein, 33 aa, synthetic construct
KKEGRFTAHLNKASLYVSLHIKDSQPSDSALYF

SEQ ID NO: 12543 - protein, 36 aa, synthetic construct; identical to SEQ ID NO: 11887

SEQ ID NO: 12544 - protein, 33 aa, synthetic construct; identical to SEQ ID NO: 11926

SEQ ID NO: 12545 - protein, 36 aa, synthetic construct; identical to SEQ ID NO: 11887

SEQ ID NO: 12546 - protein, 33 aa, synthetic construct; identical to SEQ ID NO: 11878

SEQ ID NO: 12547 - protein, 36 aa, synthetic construct; identical to SEQ ID NO: 11887

SEQ ID NO: 12548 - protein, 33 aa, synthetic construct; identical to SEQ ID NO: 11892

SEQ ID NO: 12549 - protein, 36 aa, synthetic construct; identical to SEQ ID NO: 11887

SEQ ID NO: 12550 - protein, 33 aa, synthetic construct; identical to SEQ ID NO: 11896

SEQ ID NO: 12551 - protein, 36 aa, synthetic construct; identical to SEQ ID NO: 11887

SEQ ID NO: 12552 - protein, 33 aa, synthetic construct; identical to SEQ ID NO: 12194

SEQ ID NO: 12553 - protein, 36 aa, synthetic construct; identical to SEQ ID NO: 11887

SEQ ID NO: 12554 - protein, 33 aa, synthetic construct; identical to SEQ ID NO: 11980

SEQ ID NO: 12555 - protein, 36 aa, synthetic construct; identical to SEQ ID NO: 11887

SEQ ID NO: 12556 - protein, 33 aa, synthetic construct; identical to SEQ ID NO: 11946

SEQ ID NO: 12557 - protein, 36 aa, synthetic construct; identical to SEQ ID NO: 11887

SEQ ID NO: 12558 - protein, 33 aa, synthetic construct; identical to SEQ ID NO: 11948

SEQ ID NO: 12559 - protein, 36 aa, synthetic construct; identical to SEQ ID NO: 11887

SEQ ID NO: 12560 - protein, 33 aa, synthetic construct; identical to SEQ ID NO: 11950

SEQ ID NO: 12561 - protein, 36 aa, synthetic construct; identical to SEQ ID NO: 11887

SEQ ID NO: 12562 - protein, 33 aa, synthetic construct; identical to SEQ ID NO: 12038

SEQ ID NO: 12563 - protein, 36 aa, synthetic construct; identical to SEQ ID NO: 11887

SEQ ID NO: 12564 - protein, 33 aa, synthetic construct; identical to SEQ ID NO: 11900

SEQ ID NO: 12565 - protein, 36 aa, synthetic construct; identical to SEQ ID NO: 11887

SEQ ID NO: 12566 - protein, 33 aa, synthetic construct
KHTGRLTSTTVTKERRSSLHISSSQITDSGTYF

SEQ ID NO: 12567 - protein, 36 aa, synthetic construct; identical to SEQ ID NO: 11887

SEQ ID NO: 12568 - protein, 33 aa, synthetic construct; identical to SEQ ID NO: 11920

SEQ ID NO: 12569 - protein, 36 aa, synthetic construct; identical to SEQ ID NO: 11887

SEQ ID NO: 12570 - protein, 33 aa, synthetic construct; identical to SEQ ID NO: 11910

SEQ ID NO: 12571 - protein, 36 aa, synthetic construct; identical to SEQ ID NO: 11887

SEQ ID NO: 12572 - protein, 31 aa, synthetic construct; identical to SEQ ID NO: 11978

SEQ ID NO: 12573 - protein, 36 aa, synthetic construct; identical to SEQ ID NO: 11887

SEQ ID NO: 12574 - protein, 31 aa, synthetic construct; identical to SEQ ID NO: 11978

SEQ ID NO: 12575 - protein, 36 aa, synthetic construct; identical to SEQ ID NO: 11887

SEQ ID NO: 12576 - protein, 33 aa, synthetic construct; identical to SEQ ID NO: 11926

SEQ ID NO: 12577 - protein, 36 aa, synthetic construct; identical to SEQ ID NO: 11887

SEQ ID NO: 12578 - protein, 33 aa, synthetic construct; identical to SEQ ID NO: 11926

SEQ ID NO: 12579 - protein, 36 aa, synthetic construct; identical to SEQ ID NO: 11887

SEQ ID NO: 12580 - protein, 33 aa, synthetic construct; identical to SEQ ID NO: 12120

SEQ ID NO: 12581 - protein, 36 aa, synthetic construct; identical to SEQ ID NO: 11887

SEQ ID NO: 12582 - protein, 33 aa, synthetic construct; identical to SEQ ID NO: 11926

SEQ ID NO: 12583 - protein, 36 aa, synthetic construct; identical to SEQ ID NO: 11971

SEQ ID NO: 12584 - protein, 33 aa, synthetic construct; identical to SEQ ID NO: 11900

SEQ ID NO: 12585 - protein, 36 aa, synthetic construct; identical to SEQ ID NO: 11971

SEQ ID NO: 12586 - protein, 33 aa, synthetic construct; identical to SEQ ID NO: 11932

SEQ ID NO: 12587 - protein, 36 aa, synthetic construct; identical to SEQ ID NO: 11971

SEQ ID NO: 12588 - protein, 33 aa, synthetic construct; identical to SEQ ID NO: 12124

SEQ ID NO: 12589 - protein, 36 aa, synthetic construct; identical to SEQ ID NO: 11971

SEQ ID NO: 12590 - protein, 33 aa, synthetic construct; identical to SEQ ID NO: 11918

SEQ ID NO: 12591 - protein, 36 aa, synthetic construct; identical to SEQ ID NO: 11971

SEQ ID NO: 12592 - protein, 33 aa, synthetic construct; identical to SEQ ID NO: 11878

SEQ ID NO: 12593 - protein, 36 aa, synthetic construct; identical to SEQ ID NO: 11971

SEQ ID NO: 12594 - protein, 33 aa, synthetic construct
KHTGRLTSTTVTKERRGSLHISSSQITDSGTYL

SEQ ID NO: 12595 - protein, 36 aa, synthetic construct; identical to SEQ ID NO: 11971

SEQ ID NO: 12596 - protein, 33 aa, synthetic construct; identical to SEQ ID NO: 11874

SEQ ID NO: 12597 - protein, 36 aa, synthetic construct; identical to SEQ ID NO: 11971

SEQ ID NO: 12598 - protein, 33 aa, synthetic construct; identical to SEQ ID NO: 12138

SEQ ID NO: 12599 - protein, 36 aa, synthetic construct; identical to SEQ ID NO: 11971

SEQ ID NO: 12600 - protein, 33 aa, synthetic construct; identical to SEQ ID NO: 12230

SEQ ID NO: 12601 - protein, 36 aa, synthetic construct; identical to SEQ ID NO: 11971

SEQ ID NO: 12602 - protein, 33 aa, synthetic construct; identical to SEQ ID NO: 12030

SEQ ID NO: 12603 - protein, 36 aa, synthetic construct; identical to SEQ ID NO: 11971

SEQ ID NO: 12604 - protein, 33 aa, synthetic construct; identical to SEQ ID NO: 11924

SEQ ID NO: 12605 - protein, 36 aa, synthetic construct; identical to SEQ ID NO: 11971

SEQ ID NO: 12606 - protein, 33 aa, synthetic construct; identical to SEQ ID NO: 11878

SEQ ID NO: 12607 - protein, 36 aa, synthetic construct; identical to SEQ ID NO: 11971

SEQ ID NO: 12608 - protein, 33 aa, synthetic construct; identical to SEQ ID NO: 11878

SEQ ID NO: 12609 - protein, 36 aa, synthetic construct; identical to SEQ ID NO: 11971

SEQ ID NO: 12610 - protein, 33 aa, synthetic construct; identical to SEQ ID NO: 11940

SEQ ID NO: 12611 - protein, 36 aa, synthetic construct; identical to SEQ ID NO: 11971

SEQ ID NO: 12612 - protein, 33 aa, synthetic construct; identical to SEQ ID NO: 12566

SEQ ID NO: 12613 - protein, 36 aa, synthetic construct; identical to SEQ ID NO: 11971

SEQ ID NO: 12614 - protein, 33 aa, synthetic construct; identical to SEQ ID NO: 11964

SEQ ID NO: 12615 - protein, 36 aa, synthetic construct; identical to SEQ ID NO: 11971

SEQ ID NO: 12616 - protein, 33 aa, synthetic construct; identical to SEQ ID NO: 12030

SEQ ID NO: 12617 - protein, 36 aa, synthetic construct; identical to SEQ ID NO: 11971

SEQ ID NO: 12618 - protein, 33 aa, synthetic construct; identical to SEQ ID NO: 11886

SEQ ID NO: 12619 - protein, 36 aa, synthetic construct; identical to SEQ ID NO: 11971

SEQ ID NO: 12620 - protein, 33 aa, synthetic construct; identical to SEQ ID NO: 11910

SEQ ID NO: 12621 - protein, 36 aa, synthetic construct; identical to SEQ ID NO: 11971

SEQ ID NO: 12622 - protein, 33 aa, synthetic construct; identical to SEQ ID NO: 11932

SEQ ID NO: 12623 - protein, 36 aa, synthetic construct; identical to SEQ ID NO: 11971

SEQ ID NO: 12624 - protein, 33 aa, synthetic construct; identical to SEQ ID NO: 11878

SEQ ID NO: 12625 - protein, 36 aa, synthetic construct; identical to SEQ ID NO: 11971

SEQ ID NO: 12626 - protein, 33 aa, synthetic construct; identical to SEQ ID NO: 11918

SEQ ID NO: 12627 - protein, 36 aa, synthetic construct; identical to SEQ ID NO: 11971

SEQ ID NO: 12628 - protein, 33 aa, synthetic construct; identical to SEQ ID NO: 11944

SEQ ID NO: 12629 - protein, 36 aa, synthetic construct; identical to SEQ ID NO: 11971

SEQ ID NO: 12630 - protein, 33 aa, synthetic construct; identical to SEQ ID NO: 11874

SEQ ID NO: 12631 - protein, 36 aa, synthetic construct; identical to SEQ ID NO: 11971

SEQ ID NO: 12632 - protein, 33 aa, synthetic construct; identical to SEQ ID NO: 11980

SEQ ID NO: 12633 - protein, 36 aa, synthetic construct; identical to SEQ ID NO: 11971

SEQ ID NO: 12634 - protein, 33 aa, synthetic construct; identical to SEQ ID NO: 11920

SEQ ID NO: 12635 - protein, 36 aa, synthetic construct; identical to SEQ ID NO: 11875

SEQ ID NO: 12636 - protein, 33 aa, synthetic construct; identical to SEQ ID NO: 11876

SEQ ID NO: 12637 - protein, 36 aa, synthetic construct; identical to SEQ ID NO: 11875

SEQ ID NO: 12638 - protein, 33 aa, synthetic construct; identical to SEQ ID NO: 11878

SEQ ID NO: 12639 - protein, 36 aa, synthetic construct; identical to SEQ ID NO: 11875

SEQ ID NO: 12640 - protein, 33 aa, synthetic construct; identical to SEQ ID NO: 11918

SEQ ID NO: 12641 - protein, 36 aa, synthetic construct; identical to SEQ ID NO: 11875

SEQ ID NO: 12642 - protein, 33 aa, synthetic construct; identical to SEQ ID NO: 11892

SEQ ID NO: 12643 - protein, 36 aa, synthetic construct; identical to SEQ ID NO: 11875

SEQ ID NO: 12644 - protein, 33 aa, synthetic construct; identical to SEQ ID NO: 11886

SEQ ID NO: 12645 - protein, 36 aa, synthetic construct; identical to SEQ ID NO: 11875

SEQ ID NO: 12646 - protein, 33 aa, synthetic construct; identical to SEQ ID NO: 12038

SEQ ID NO: 12647 - protein, 36 aa, synthetic construct; identical to SEQ ID NO: 11875

SEQ ID NO: 12648 - protein, 33 aa, synthetic construct; identical to SEQ ID NO: 12016

SEQ ID NO: 12649 - protein, 36 aa, synthetic construct; identical to SEQ ID NO: 11875

SEQ ID NO: 12650 - protein, 33 aa, synthetic construct; identical to SEQ ID NO: 11920

SEQ ID NO: 12651 - protein, 36 aa, synthetic construct; identical to SEQ ID NO: 11875

SEQ ID NO: 12652 - protein, 33 aa, synthetic construct; identical to SEQ ID NO: 11916

SEQ ID NO: 12653 - protein, 36 aa, synthetic construct; identical to SEQ ID NO: 11875

SEQ ID NO: 12654 - protein, 33 aa, synthetic construct; identical to SEQ ID NO: 11996

SEQ ID NO: 12655 - protein, 36 aa, synthetic construct; identical to SEQ ID NO: 11875

SEQ ID NO: 12656 - protein, 33 aa, synthetic construct; identical to SEQ ID NO: 11932

SEQ ID NO: 12657 - protein, 36 aa, synthetic construct; identical to SEQ ID NO: 11875

SEQ ID NO: 12658 - protein, 33 aa, synthetic construct; identical to SEQ ID NO: 11914

SEQ ID NO: 12659 - protein, 36 aa, synthetic construct; identical to SEQ ID NO: 11875

SEQ ID NO: 12660 - protein, 33 aa, synthetic construct; identical to SEQ ID NO: 11940

SEQ ID NO: 12661 - protein, 36 aa, synthetic construct; identical to SEQ ID NO: 11875

SEQ ID NO: 12662 - protein, 33 aa, synthetic construct; identical to SEQ ID NO: 11878

SEQ ID NO: 12663 - protein, 36 aa, synthetic construct; identical to SEQ ID NO: 11875

SEQ ID NO: 12664 - protein, 33 aa, synthetic construct; identical to SEQ ID NO: 12038

SEQ ID NO: 12665 - protein, 36 aa, synthetic construct; identical to SEQ ID NO: 11875

SEQ ID NO: 12666 - protein, 33 aa, synthetic construct; identical to SEQ ID NO: 12126

SEQ ID NO: 12667 - protein, 36 aa, synthetic construct; identical to SEQ ID NO: 11875

SEQ ID NO: 12668 - protein, 33 aa, synthetic construct; identical to SEQ ID NO: 11880

SEQ ID NO: 12669 - protein, 36 aa, synthetic construct; identical to SEQ ID NO: 11875

SEQ ID NO: 12670 - protein, 33 aa, synthetic construct; identical to SEQ ID NO: 12016

SEQ ID NO: 12671 - protein, 36 aa, synthetic construct; identical to SEQ ID NO: 11875

SEQ ID NO: 12672 - protein, 33 aa, synthetic construct; identical to SEQ ID NO: 11880

SEQ ID NO: 12673 - protein, 36 aa, synthetic construct; identical to SEQ ID NO: 11875

SEQ ID NO: 12674 - protein, 33 aa, synthetic construct
KEEGSFTAHLNRASLHVFLHIREPQPSDSALYL

SEQ ID NO: 12675 - protein, 36 aa, synthetic construct; identical to SEQ ID NO: 11875

SEQ ID NO: 12676 - protein, 33 aa, synthetic construct; identical to SEQ ID NO: 11948

SEQ ID NO: 12677 - protein, 36 aa, synthetic construct; identical to SEQ ID NO: 11875

SEQ ID NO: 12678 - protein, 33 aa, synthetic construct; identical to SEQ ID NO: 11918

SEQ ID NO: 12679 - protein, 36 aa, synthetic construct; identical to SEQ ID NO: 11875

SEQ ID NO: 12680 - protein, 33 aa, synthetic construct; identical to SEQ ID NO: 11894

SEQ ID NO: 12681 - protein, 36 aa, synthetic construct; identical to SEQ ID NO: 11875

SEQ ID NO: 12682 - protein, 33 aa, synthetic construct; identical to SEQ ID NO: 11916

SEQ ID NO: 12683 - protein, 36 aa, synthetic construct; identical to SEQ ID NO: 11875

SEQ ID NO: 12684 - protein, 33 aa, synthetic construct; identical to SEQ ID NO: 11878

SEQ ID NO: 12685 - protein, 36 aa, synthetic construct; identical to SEQ ID NO: 11875

SEQ ID NO: 12686 - protein, 33 aa, synthetic construct; identical to SEQ ID NO: 12594

SEQ ID NO: 12687 - protein, 36 aa, synthetic construct; identical to SEQ ID NO: 11875

SEQ ID NO: 12688 - protein, 33 aa, synthetic construct; identical to SEQ ID NO: 11878

SEQ ID NO: 12689 - protein, 36 aa, synthetic construct; identical to SEQ ID NO: 11875

SEQ ID NO: 12690 - protein, 33 aa, synthetic construct; identical to SEQ ID NO: 11932

SEQ ID NO: 12691 - protein, 36 aa, synthetic construct; identical to SEQ ID NO: 11875

SEQ ID NO: 12692 - protein, 33 aa, synthetic construct; identical to SEQ ID NO: 11964

SEQ ID NO: 12693 - protein, 36 aa, synthetic construct; identical to SEQ ID NO: 11875

SEQ ID NO: 12694 - protein, 33 aa, synthetic construct
KEEGRFTAHLNRASLHVFLHIREPQPSDSAVYL

SEQ ID NO: 12695 - protein, 36 aa, synthetic construct; identical to SEQ ID NO: 11875

SEQ ID NO: 12696 - protein, 33 aa, synthetic construct; identical to SEQ ID NO: 11878

SEQ ID NO: 12697 - protein, 36 aa, synthetic construct; identical to SEQ ID NO: 11875

SEQ ID NO: 12698 - protein, 33 aa, synthetic construct; identical to SEQ ID NO: 11878

SEQ ID NO: 12699 - protein, 36 aa, synthetic construct; identical to SEQ ID NO: 11875

SEQ ID NO: 12700 - protein, 33 aa, synthetic construct
TEHQGFHATLHKSSSSFHLQKSSVQLSDSALYY

SEQ ID NO: 12701 - protein, 36 aa, synthetic construct; identical to SEQ ID NO: 11875

SEQ ID NO: 12702 - protein, 33 aa, synthetic construct; identical to SEQ ID NO: 11878

SEQ ID NO: 12703 - protein, 36 aa, synthetic construct; identical to SEQ ID NO: 11875

SEQ ID NO: 12704 - protein, 33 aa, synthetic construct; identical to SEQ ID NO: 11878

SEQ ID NO: 12705 - protein, 36 aa, synthetic construct; identical to SEQ ID NO: 11875

SEQ ID NO: 12706 - protein, 33 aa, synthetic construct; identical to SEQ ID NO: 11876

SEQ ID NO: 12707 - protein, 36 aa, synthetic construct; identical to SEQ ID NO: 11875

SEQ ID NO: 12708 - protein, 33 aa, synthetic construct; identical to SEQ ID NO: 11914

SEQ ID NO: 12709 - protein, 36 aa, synthetic construct; identical to SEQ ID NO: 11875

SEQ ID NO: 12710 - protein, 33 aa, synthetic construct; identical to SEQ ID NO: 11914

SEQ ID NO: 12711 - protein, 36 aa, synthetic construct; identical to SEQ ID NO: 11875

SEQ ID NO: 12712 - protein, 33 aa, synthetic construct; identical to SEQ ID NO: 11880

SEQ ID NO: 12713 - protein, 36 aa, synthetic construct; identical to SEQ ID NO: 11875

SEQ ID NO: 12714 - protein, 33 aa, synthetic construct; identical to SEQ ID NO: 11914

SEQ ID NO: 12715 - protein, 36 aa, synthetic construct; identical to SEQ ID NO: 11875

SEQ ID NO: 12716 - protein, 33 aa, synthetic construct; identical to SEQ ID NO: 11880

SEQ ID NO: 12717 - protein, 36 aa, synthetic construct; identical to SEQ ID NO: 11875

SEQ ID NO: 12718 - protein, 33 aa, synthetic construct; identical to SEQ ID NO: 11914

SEQ ID NO: 12719 - protein, 36 aa, synthetic construct; identical to SEQ ID NO: 11875

SEQ ID NO: 12720 - protein, 33 aa, synthetic construct; identical to SEQ ID NO: 11900

SEQ ID NO: 12721 - protein, 36 aa, synthetic construct; identical to SEQ ID NO: 11875

SEQ ID NO: 12722 - protein, 33 aa, synthetic construct; identical to SEQ ID NO: 11910

SEQ ID NO: 12723 - protein, 36 aa, synthetic construct; identical to SEQ ID NO: 11875

SEQ ID NO: 12724 - protein, 33 aa, synthetic construct; identical to SEQ ID NO: 11876

SEQ ID NO: 12725 - protein, 36 aa, synthetic construct; identical to SEQ ID NO: 11875

SEQ ID NO: 12726 - protein, 33 aa, synthetic construct; identical to SEQ ID NO: 11940

SEQ ID NO: 12727 - protein, 36 aa, synthetic construct; identical to SEQ ID NO: 11875

SEQ ID NO: 12728 - protein, 33 aa, synthetic construct; identical to SEQ ID NO: 11946

SEQ ID NO: 12729 - protein, 36 aa, synthetic construct; identical to SEQ ID NO: 11875

SEQ ID NO: 12730 - protein, 33 aa, synthetic construct; identical to SEQ ID NO: 11876

SEQ ID NO: 12731 - protein, 36 aa, synthetic construct; identical to SEQ ID NO: 11875

SEQ ID NO: 12732 - protein, 33 aa, synthetic construct; identical to SEQ ID NO: 11926

SEQ ID NO: 12733 - protein, 36 aa, synthetic construct; identical to SEQ ID NO: 11875

SEQ ID NO: 12734 - protein, 33 aa, synthetic construct; identical to SEQ ID NO: 11946

SEQ ID NO: 12735 - protein, 36 aa, synthetic construct; identical to SEQ ID NO: 11875

SEQ ID NO: 12736 - protein, 33 aa, synthetic construct; identical to SEQ ID NO: 11886

SEQ ID NO: 12737 - protein, 36 aa, synthetic construct; identical to SEQ ID NO: 11875

SEQ ID NO: 12738 - protein, 33 aa, synthetic construct
KEEQGLTVLLNKKEKRLSLNLTAAHPGDSAVYF

SEQ ID NO: 12739 - protein, 36 aa, synthetic construct; identical to SEQ ID NO: 11875

SEQ ID NO: 12740 - protein, 33 aa, synthetic construct; identical to SEQ ID NO: 11948

SEQ ID NO: 12741 - protein, 36 aa, synthetic construct; identical to SEQ ID NO: 11875

SEQ ID NO: 12742 - protein, 31 aa, synthetic construct; identical to SEQ ID NO: 11978

SEQ ID NO: 12743 - protein, 36 aa, synthetic construct; identical to SEQ ID NO: 11875

SEQ ID NO: 12744 - protein, 33 aa, synthetic construct; identical to SEQ ID NO: 11914

SEQ ID NO: 12745 - protein, 36 aa, synthetic construct; identical to SEQ ID NO: 11875

SEQ ID NO: 12746 - protein, 33 aa, synthetic construct; identical to SEQ ID NO: 11996

SEQ ID NO: 12747 - protein, 36 aa, synthetic construct; identical to SEQ ID NO: 11875

SEQ ID NO: 12748 - protein, 33 aa, synthetic construct; identical to SEQ ID NO: 12382

SEQ ID NO: 12749 - protein, 36 aa, synthetic construct; identical to SEQ ID NO: 11875

SEQ ID NO: 12750 - protein, 33 aa, synthetic construct; identical to SEQ ID NO: 12382

SEQ ID NO: 12751 - protein, 36 aa, synthetic construct; identical to SEQ ID NO: 11875

SEQ ID NO: 12752 - protein, 33 aa, synthetic construct; identical to SEQ ID NO: 12030

SEQ ID NO: 12753 - protein, 36 aa, synthetic construct; identical to SEQ ID NO: 11875

SEQ ID NO: 12754 - protein, 33 aa, synthetic construct; identical to SEQ ID NO: 12094

SEQ ID NO: 12755 - protein, 36 aa, synthetic construct; identical to SEQ ID NO: 11875

SEQ ID NO: 12756 - protein, 33 aa, synthetic construct; identical to SEQ ID NO: 12032

SEQ ID NO: 12757 - protein, 36 aa, synthetic construct; identical to SEQ ID NO: 11875

SEQ ID NO: 12758 - protein, 33 aa, synthetic construct; identical to SEQ ID NO: 11948

SEQ ID NO: 12759 - protein, 36 aa, synthetic construct; identical to SEQ ID NO: 11875

SEQ ID NO: 12760 - protein, 33 aa, synthetic construct; identical to SEQ ID NO: 11920

SEQ ID NO: 12761 - protein, 36 aa, synthetic construct; identical to SEQ ID NO: 11875

SEQ ID NO: 12762 - protein, 33 aa, synthetic construct; identical to SEQ ID NO: 11918

SEQ ID NO: 12763 - protein, 36 aa, synthetic construct; identical to SEQ ID NO: 11875

SEQ ID NO: 12764 - protein, 33 aa, synthetic construct; identical to SEQ ID NO: 11944

SEQ ID NO: 12765 - protein, 36 aa, synthetic construct; identical to SEQ ID NO: 11875

SEQ ID NO: 12766 - protein, 33 aa, synthetic construct; identical to SEQ ID NO: 11956

SEQ ID NO: 12767 - protein, 36 aa, synthetic construct; identical to SEQ ID NO: 11875

SEQ ID NO: 12768 - protein, 33 aa, synthetic construct; identical to SEQ ID NO: 11914

SEQ ID NO: 12769 - protein, 36 aa, synthetic construct; identical to SEQ ID NO: 11875

SEQ ID NO: 12770 - protein, 33 aa, synthetic construct; identical to SEQ ID NO: 11878

SEQ ID NO: 12771 - protein, 36 aa, synthetic construct; identical to SEQ ID NO: 11875

SEQ ID NO: 12772 - protein, 33 aa, synthetic construct; identical to SEQ ID NO: 11882

SEQ ID NO: 12773 - protein, 36 aa, synthetic construct; identical to SEQ ID NO: 11875

SEQ ID NO: 12774 - protein, 33 aa, synthetic construct; identical to SEQ ID NO: 11880

SEQ ID NO: 12775 - protein, 36 aa, synthetic construct; identical to SEQ ID NO: 11875

SEQ ID NO: 12776 - protein, 33 aa, synthetic construct; identical to SEQ ID NO: 11918

SEQ ID NO: 12777 - protein, 36 aa, synthetic construct; identical to SEQ ID NO: 11875

SEQ ID NO: 12778 - protein, 33 aa, synthetic construct; identical to SEQ ID NO: 11878

SEQ ID NO: 12779 - protein, 36 aa, synthetic construct; identical to SEQ ID NO: 11875

SEQ ID NO: 12780 - protein, 33 aa, synthetic construct; identical to SEQ ID NO: 11944

SEQ ID NO: 12781 - protein, 36 aa, synthetic construct; identical to SEQ ID NO: 11875

SEQ ID NO: 12782 - protein, 33 aa, synthetic construct; identical to SEQ ID NO: 11972

SEQ ID NO: 12783 - protein, 36 aa, synthetic construct; identical to SEQ ID NO: 11875

SEQ ID NO: 12784 - protein, 33 aa, synthetic construct; identical to SEQ ID NO: 11932

SEQ ID NO: 12785 - protein, 36 aa, synthetic construct; identical to SEQ ID NO: 11875

SEQ ID NO: 12786 - protein, 33 aa, synthetic construct; identical to SEQ ID NO: 11926

SEQ ID NO: 12787 - protein, 36 aa, synthetic construct; identical to SEQ ID NO: 11875

SEQ ID NO: 12788 - protein, 33 aa, synthetic construct; identical to SEQ ID NO: 11896

SEQ ID NO: 12789 - protein, 36 aa, synthetic construct; identical to SEQ ID NO: 11875

SEQ ID NO: 12790 - protein, 33 aa, synthetic construct; identical to SEQ ID NO: 11878

SEQ ID NO: 12791 - protein, 36 aa, synthetic construct; identical to SEQ ID NO: 11875

SEQ ID NO: 12792 - protein, 33 aa, synthetic construct; identical to SEQ ID NO: 11876

SEQ ID NO: 12793 - protein, 36 aa, synthetic construct; identical to SEQ ID NO: 11875

SEQ ID NO: 12794 - protein, 33 aa, synthetic construct; identical to SEQ ID NO: 11878

SEQ ID NO: 12795 - protein, 36 aa, synthetic construct; identical to SEQ ID NO: 11875

SEQ ID NO: 12796 - protein, 33 aa, synthetic construct; identical to SEQ ID NO: 11946

SEQ ID NO: 12797 - protein, 36 aa, synthetic construct; identical to SEQ ID NO: 11875

SEQ ID NO: 12798 - protein, 33 aa, synthetic construct; identical to SEQ ID NO: 11900

SEQ ID NO: 12799 - protein, 36 aa, synthetic construct; identical to SEQ ID NO: 11875

SEQ ID NO: 12800 - protein, 33 aa, synthetic construct; identical to SEQ ID NO: 11992

SEQ ID NO: 12801 - protein, 36 aa, synthetic construct; identical to SEQ ID NO: 11875

SEQ ID NO: 12802 - protein, 33 aa, synthetic construct; identical to SEQ ID NO: 12038

SEQ ID NO: 12803 - protein, 36 aa, synthetic construct; identical to SEQ ID NO: 11875

SEQ ID NO: 12804 - protein, 33 aa, synthetic construct; identical to SEQ ID NO: 12126

SEQ ID NO: 12805 - protein, 36 aa, synthetic construct; identical to SEQ ID NO: 11875

SEQ ID NO: 12806 - protein, 33 aa, synthetic construct; identical to SEQ ID NO: 11886

SEQ ID NO: 12807 - protein, 36 aa, synthetic construct; identical to SEQ ID NO: 11875

SEQ ID NO: 12808 - protein, 33 aa, synthetic construct; identical to SEQ ID NO: 11918

SEQ ID NO: 12809 - protein, 36 aa, synthetic construct; identical to SEQ ID NO: 11875

SEQ ID NO: 12810 - protein, 33 aa, synthetic construct; identical to SEQ ID NO: 12276

SEQ ID NO: 12811 - protein, 36 aa, synthetic construct; identical to SEQ ID NO: 11875

SEQ ID NO: 12812 - protein, 33 aa, synthetic construct; identical to SEQ ID NO: 12130

SEQ ID NO: 12813 - protein, 36 aa, synthetic construct; identical to SEQ ID NO: 11875

SEQ ID NO: 12814 - protein, 33 aa, synthetic construct; identical to SEQ ID NO: 11932

SEQ ID NO: 12815 - protein, 36 aa, synthetic construct; identical to SEQ ID NO: 11875

SEQ ID NO: 12816 - protein, 33 aa, synthetic construct; identical to SEQ ID NO: 11932

SEQ ID NO: 12817 - protein, 36 aa, synthetic construct; identical to SEQ ID NO: 11875

SEQ ID NO: 12818 - protein, 33 aa, synthetic construct; identical to SEQ ID NO: 11914

SEQ ID NO: 12819 - protein, 36 aa, synthetic construct; identical to SEQ ID NO: 11875

SEQ ID NO: 12820 - protein, 33 aa, synthetic construct; identical to SEQ ID NO: 12042

SEQ ID NO: 12821 - protein, 36 aa, synthetic construct; identical to SEQ ID NO: 11875

SEQ ID NO: 12822 - protein, 33 aa, synthetic construct; identical to SEQ ID NO: 12054

SEQ ID NO: 12823 - protein, 36 aa, synthetic construct; identical to SEQ ID NO: 11875

SEQ ID NO: 12824 - protein, 33 aa, synthetic construct; identical to SEQ ID NO: 11948

SEQ ID NO: 12825 - protein, 36 aa, synthetic construct; identical to SEQ ID NO: 11875

SEQ ID NO: 12826 - protein, 33 aa, synthetic construct; identical to SEQ ID NO: 11878

SEQ ID NO: 12827 - protein, 36 aa, synthetic construct; identical to SEQ ID NO: 11875

SEQ ID NO: 12828 - protein, 33 aa, synthetic construct; identical to SEQ ID NO: 11948

SEQ ID NO: 12829 - protein, 36 aa, synthetic construct; identical to SEQ ID NO: 11875

SEQ ID NO: 12830 - protein, 33 aa, synthetic construct; identical to SEQ ID NO: 12038

SEQ ID NO: 12831 - protein, 36 aa, synthetic construct; identical to SEQ ID NO: 11909

SEQ ID NO: 12832 - protein, 33 aa, synthetic construct; identical to SEQ ID NO: 11976

SEQ ID NO: 12833 - protein, 36 aa, synthetic construct; identical to SEQ ID NO: 11909

SEQ ID NO: 12834 - protein, 33 aa, synthetic construct; identical to SEQ ID NO: 11876

SEQ ID NO: 12835 - protein, 36 aa, synthetic construct; identical to SEQ ID NO: 11909

SEQ ID NO: 12836 - protein, 33 aa, synthetic construct; identical to SEQ ID NO: 12120

SEQ ID NO: 12837 - protein, 36 aa, synthetic construct; identical to SEQ ID NO: 11909

SEQ ID NO: 12838 - protein, 33 aa, synthetic construct; identical to SEQ ID NO: 11948

SEQ ID NO: 12839 - protein, 36 aa, synthetic construct; identical to SEQ ID NO: 11909

SEQ ID NO: 12840 - protein, 33 aa, synthetic construct; identical to SEQ ID NO: 11918

SEQ ID NO: 12841 - protein, 36 aa, synthetic construct; identical to SEQ ID NO: 11909

SEQ ID NO: 12842 - protein, 33 aa, synthetic construct; identical to SEQ ID NO: 11886

SEQ ID NO: 12843 - protein, 36 aa, synthetic construct; identical to SEQ ID NO: 11909

SEQ ID NO: 12844 - protein, 33 aa, synthetic construct; identical to SEQ ID NO: 11914

SEQ ID NO: 12845 - protein, 36 aa, synthetic construct; identical to SEQ ID NO: 11909

SEQ ID NO: 12846 - protein, 33 aa, synthetic construct; identical to SEQ ID NO: 11948

SEQ ID NO: 12847 - protein, 36 aa, synthetic construct; identical to SEQ ID NO: 11909

SEQ ID NO: 12848 - protein, 33 aa, synthetic construct; identical to SEQ ID NO: 12276

SEQ ID NO: 12849 - protein, 36 aa, synthetic construct; identical to SEQ ID NO: 11909

SEQ ID NO: 12850 - protein, 33 aa, synthetic construct; identical to SEQ ID NO: 11916

SEQ ID NO: 12851 - protein, 36 aa, synthetic construct; identical to SEQ ID NO: 11909

SEQ ID NO: 12852 - protein, 33 aa, synthetic construct; identical to SEQ ID NO: 11878

SEQ ID NO: 12853 - protein, 36 aa, synthetic construct; identical to SEQ ID NO: 11909

SEQ ID NO: 12854 - protein, 33 aa, synthetic construct; identical to SEQ ID NO: 11910

SEQ ID NO: 12855 - protein, 36 aa, synthetic construct; identical to SEQ ID NO: 11909

SEQ ID NO: 12856 - protein, 33 aa, synthetic construct; identical to SEQ ID NO: 11926

SEQ ID NO: 12857 - protein, 36 aa, synthetic construct; identical to SEQ ID NO: 11909

SEQ ID NO: 12858 - protein, 33 aa, synthetic construct; identical to SEQ ID NO: 11948

SEQ ID NO: 12859 - protein, 36 aa, synthetic construct; identical to SEQ ID NO: 11909

SEQ ID NO: 12860 - protein, 33 aa, synthetic construct; identical to SEQ ID NO: 11928

SEQ ID NO: 12861 - protein, 36 aa, synthetic construct; identical to SEQ ID NO: 11909

SEQ ID NO: 12862 - protein, 33 aa, synthetic construct; identical to SEQ ID NO: 11914

SEQ ID NO: 12863 - protein, 36 aa, synthetic construct; identical to SEQ ID NO: 11909

SEQ ID NO: 12864 - protein, 33 aa, synthetic construct; identical to SEQ ID NO: 12032

SEQ ID NO: 12865 - protein, 36 aa, synthetic construct; identical to SEQ ID NO: 11909

SEQ ID NO: 12866 - protein, 33 aa, synthetic construct; identical to SEQ ID NO: 11892

SEQ ID NO: 12867 - protein, 36 aa, synthetic construct; identical to SEQ ID NO: 11909

SEQ ID NO: 12868 - protein, 33 aa, synthetic construct; identical to SEQ ID NO: 11976

SEQ ID NO: 12869 - protein, 36 aa, synthetic construct; identical to SEQ ID NO: 11909

SEQ ID NO: 12870 - protein, 33 aa, synthetic construct; identical to SEQ ID NO: 11932

SEQ ID NO: 12871 - protein, 36 aa, synthetic construct; identical to SEQ ID NO: 11909

SEQ ID NO: 12872 - protein, 33 aa, synthetic construct; identical to SEQ ID NO: 11886

SEQ ID NO: 12873 - protein, 36 aa, synthetic construct; identical to SEQ ID NO: 11909

SEQ ID NO: 12874 - protein, 33 aa, synthetic construct; identical to SEQ ID NO: 11980

SEQ ID NO: 12875 - protein, 36 aa, synthetic construct; identical to SEQ ID NO: 11909

SEQ ID NO: 12876 - protein, 32 aa, synthetic construct; identical to SEQ ID NO: 12306

SEQ ID NO: 12877 - protein, 36 aa, synthetic construct; identical to SEQ ID NO: 11909

SEQ ID NO: 12878 - protein, 33 aa, synthetic construct; identical to SEQ ID NO: 11946

SEQ ID NO: 12879 - protein, 36 aa, synthetic construct; identical to SEQ ID NO: 11909

SEQ ID NO: 12880 - protein, 33 aa, synthetic construct; identical to SEQ ID NO: 11996

SEQ ID NO: 12881 - protein, 36 aa, synthetic construct; identical to SEQ ID NO: 11909

SEQ ID NO: 12882 - protein, 33 aa, synthetic construct; identical to SEQ ID NO: 11886

SEQ ID NO: 12883 - protein, 36 aa, synthetic construct; identical to SEQ ID NO: 11909

SEQ ID NO: 12884 - protein, 33 aa, synthetic construct; identical to SEQ ID NO: 11878

SEQ ID NO: 12885 - protein, 36 aa, synthetic construct; identical to SEQ ID NO: 11909

SEQ ID NO: 12886 - protein, 33 aa, synthetic construct; identical to SEQ ID NO: 11946

SEQ ID NO: 12887 - protein, 36 aa, synthetic construct; identical to SEQ ID NO: 11909

SEQ ID NO: 12888 - protein, 33 aa, synthetic construct; identical to SEQ ID NO: 11948

SEQ ID NO: 12889 - protein, 36 aa, synthetic construct; identical to SEQ ID NO: 11909

SEQ ID NO: 12890 - protein, 33 aa, synthetic construct; identical to SEQ ID NO: 11932

SEQ ID NO: 12891 - protein, 36 aa, synthetic construct; identical to SEQ ID NO: 11909

SEQ ID NO: 12892 - protein, 33 aa, synthetic construct; identical to SEQ ID NO: 11878

SEQ ID NO: 12893 - protein, 36 aa, synthetic construct; identical to SEQ ID NO: 11909

SEQ ID NO: 12894 - protein, 33 aa, synthetic construct; identical to SEQ ID NO: 11914

SEQ ID NO: 12895 - protein, 36 aa, synthetic construct; identical to SEQ ID NO: 11909

SEQ ID NO: 12896 - protein, 33 aa, synthetic construct; identical to SEQ ID NO: 12032

SEQ ID NO: 12897 - protein, 36 aa, synthetic construct; identical to SEQ ID NO: 11909

SEQ ID NO: 12898 - protein, 33 aa, synthetic construct; identical to SEQ ID NO: 11880

SEQ ID NO: 12899 - protein, 36 aa, synthetic construct; identical to SEQ ID NO: 11909

SEQ ID NO: 12900 - protein, 33 aa, synthetic construct; identical to SEQ ID NO: 11932

SEQ ID NO: 12901 - protein, 36 aa, synthetic construct; identical to SEQ ID NO: 11909

SEQ ID NO: 12902 - protein, 33 aa, synthetic construct; identical to SEQ ID NO: 11976

SEQ ID NO: 12903 - protein, 36 aa, synthetic construct; identical to SEQ ID NO: 11909

SEQ ID NO: 12904 - protein, 33 aa, synthetic construct; identical to SEQ ID NO: 11880

SEQ ID NO: 12905 - protein, 36 aa, synthetic construct; identical to SEQ ID NO: 11909

SEQ ID NO: 12906 - protein, 33 aa, synthetic construct; identical to SEQ ID NO: 11918

SEQ ID NO: 12907 - protein, 36 aa, synthetic construct; identical to SEQ ID NO: 11909

SEQ ID NO: 12908 - protein, 33 aa, synthetic construct; identical to SEQ ID NO: 11932

SEQ ID NO: 12909 - protein, 36 aa, synthetic construct; identical to SEQ ID NO: 11909

SEQ ID NO: 12910 - protein, 33 aa, synthetic construct; identical to SEQ ID NO: 11972

SEQ ID NO: 12911 - protein, 36 aa, synthetic construct; identical to SEQ ID NO: 11909

SEQ ID NO: 12912 - protein, 33 aa, synthetic construct; identical to SEQ ID NO: 11932

SEQ ID NO: 12913 - protein, 36 aa, synthetic construct; identical to SEQ ID NO: 11909

SEQ ID NO: 12914 - protein, 33 aa, synthetic construct; identical to SEQ ID NO: 12016

SEQ ID NO: 12915 - protein, 36 aa, synthetic construct; identical to SEQ ID NO: 11909

SEQ ID NO: 12916 - protein, 33 aa, synthetic construct; identical to SEQ ID NO: 11940

SEQ ID NO: 12917 - protein, 36 aa, synthetic construct; identical to SEQ ID NO: 11909

SEQ ID NO: 12918 - protein, 33 aa, synthetic construct; identical to SEQ ID NO: 12328

SEQ ID NO: 12919 - protein, 36 aa, synthetic construct; identical to SEQ ID NO: 11909

SEQ ID NO: 12920 - protein, 33 aa, synthetic construct; identical to SEQ ID NO: 12182

SEQ ID NO: 12921 - protein, 36 aa, synthetic construct; identical to SEQ ID NO: 11909

SEQ ID NO: 12922 - protein, 33 aa, synthetic construct; identical to SEQ ID NO: 11972

SEQ ID NO: 12923 - protein, 36 aa, synthetic construct; identical to SEQ ID NO: 11879

SEQ ID NO: 12924 - protein, 33 aa, synthetic construct; identical to SEQ ID NO: 11916

SEQ ID NO: 12925 - protein, 36 aa, synthetic construct; identical to SEQ ID NO: 11879

SEQ ID NO: 12926 - protein, 33 aa, synthetic construct; identical to SEQ ID NO: 12194

SEQ ID NO: 12927 - protein, 36 aa, synthetic construct; identical to SEQ ID NO: 11879

SEQ ID NO: 12928 - protein, 33 aa, synthetic construct; identical to SEQ ID NO: 11882

SEQ ID NO: 12929 - protein, 36 aa, synthetic construct; identical to SEQ ID NO: 11879

SEQ ID NO: 12930 - protein, 33 aa, synthetic construct; identical to SEQ ID NO: 11932

SEQ ID NO: 12931 - protein, 36 aa, synthetic construct; identical to SEQ ID NO: 11879

SEQ ID NO: 12932 - protein, 33 aa, synthetic construct; identical to SEQ ID NO: 11972

SEQ ID NO: 12933 - protein, 36 aa, synthetic construct; identical to SEQ ID NO: 11879

SEQ ID NO: 12934 - protein, 33 aa, synthetic construct; identical to SEQ ID NO: 12674

SEQ ID NO: 12935 - protein, 36 aa, synthetic construct; identical to SEQ ID NO: 11879

SEQ ID NO: 12936 - protein, 33 aa, synthetic construct; identical to SEQ ID NO: 11892

SEQ ID NO: 12937 - protein, 36 aa, synthetic construct; identical to SEQ ID NO: 11879

SEQ ID NO: 12938 - protein, 33 aa, synthetic construct; identical to SEQ ID NO: 11878

SEQ ID NO: 12939 - protein, 36 aa, synthetic construct; identical to SEQ ID NO: 11879

SEQ ID NO: 12940 - protein, 33 aa, synthetic construct; identical to SEQ ID NO: 11916

SEQ ID NO: 12941 - protein, 36 aa, synthetic construct; identical to SEQ ID NO: 11879

SEQ ID NO: 12942 - protein, 33 aa, synthetic construct; identical to SEQ ID NO: 11878

SEQ ID NO: 12943 - protein, 36 aa, synthetic construct; identical to SEQ ID NO: 11879

SEQ ID NO: 12944 - protein, 33 aa, synthetic construct; identical to SEQ ID NO: 12152

SEQ ID NO: 12945 - protein, 36 aa, synthetic construct; identical to SEQ ID NO: 11879

SEQ ID NO: 12946 - protein, 33 aa, synthetic construct; identical to SEQ ID NO: 12266

SEQ ID NO: 12947 - protein, 36 aa, synthetic construct; identical to SEQ ID NO: 11879

SEQ ID NO: 12948 - protein, 33 aa, synthetic construct; identical to SEQ ID NO: 11886

SEQ ID NO: 12949 - protein, 36 aa, synthetic construct; identical to SEQ ID NO: 11879

SEQ ID NO: 12950 - protein, 33 aa, synthetic construct; identical to SEQ ID NO: 11952

SEQ ID NO: 12951 - protein, 36 aa, synthetic construct; identical to SEQ ID NO: 11879

SEQ ID NO: 12952 - protein, 33 aa, synthetic construct; identical to SEQ ID NO: 11932

SEQ ID NO: 12953 - protein, 36 aa, synthetic construct; identical to SEQ ID NO: 11879

SEQ ID NO: 12954 - protein, 33 aa, synthetic construct; identical to SEQ ID NO: 11892

SEQ ID NO: 12955 - protein, 36 aa, synthetic construct; identical to SEQ ID NO: 11879

SEQ ID NO: 12956 - protein, 33 aa, synthetic construct; identical to SEQ ID NO: 12152

SEQ ID NO: 12957 - protein, 36 aa, synthetic construct; identical to SEQ ID NO: 11879

SEQ ID NO: 12958 - protein, 33 aa, synthetic construct; identical to SEQ ID NO: 11878

SEQ ID NO: 12959 - protein, 36 aa, synthetic construct; identical to SEQ ID NO: 11879

SEQ ID NO: 12960 - protein, 33 aa, synthetic construct; identical to SEQ ID NO: 11992

SEQ ID NO: 12961 - protein, 36 aa, synthetic construct; identical to SEQ ID NO: 11879

SEQ ID NO: 12962 - protein, 33 aa, synthetic construct; identical to SEQ ID NO: 11918

SEQ ID NO: 12963 - protein, 36 aa, synthetic construct; identical to SEQ ID NO: 11879

SEQ ID NO: 12964 - protein, 33 aa, synthetic construct; identical to SEQ ID NO: 11950

SEQ ID NO: 12965 - protein, 36 aa, synthetic construct; identical to SEQ ID NO: 11879

SEQ ID NO: 12966 - protein, 33 aa, synthetic construct
KEEQGLTVLLNKKQKRLSLNLTAAHPGDSAVYF

SEQ ID NO: 12967 - protein, 36 aa, synthetic construct; identical to SEQ ID NO: 11879

SEQ ID NO: 12968 - protein, 33 aa, synthetic construct
KEEQGLTVLLNKKHKRLSLNLTAAHPGDSAVYF

SEQ ID NO: 12969 - protein, 36 aa, synthetic construct; identical to SEQ ID NO: 11879

SEQ ID NO: 12970 - protein, 33 aa, synthetic construct; identical to SEQ ID NO: 11878

SEQ ID NO: 12971 - protein, 36 aa, synthetic construct; identical to SEQ ID NO: 11879

SEQ ID NO: 12972 - protein, 33 aa, synthetic construct; identical to SEQ ID NO: 11948

SEQ ID NO: 12973 - protein, 36 aa, synthetic construct; identical to SEQ ID NO: 11879

SEQ ID NO: 12974 - protein, 33 aa, synthetic construct; identical to SEQ ID NO: 12188

SEQ ID NO: 12975 - protein, 36 aa, synthetic construct; identical to SEQ ID NO: 11879

SEQ ID NO: 12976 - protein, 33 aa, synthetic construct; identical to SEQ ID NO: 11878

SEQ ID NO: 12977 - protein, 36 aa, synthetic construct; identical to SEQ ID NO: 11879

SEQ ID NO: 12978 - protein, 33 aa, synthetic construct; identical to SEQ ID NO: 11878

SEQ ID NO: 12979 - protein, 36 aa, synthetic construct; identical to SEQ ID NO: 11879

SEQ ID NO: 12980 - protein, 33 aa, synthetic construct; identical to SEQ ID NO: 11940

SEQ ID NO: 12981 - protein, 36 aa, synthetic construct; identical to SEQ ID NO: 11879

SEQ ID NO: 12982 - protein, 33 aa, synthetic construct; identical to SEQ ID NO: 12016

SEQ ID NO: 12983 - protein, 36 aa, synthetic construct; identical to SEQ ID NO: 11879

SEQ ID NO: 12984 - protein, 33 aa, synthetic construct; identical to SEQ ID NO: 11940

SEQ ID NO: 12985 - protein, 36 aa, synthetic construct; identical to SEQ ID NO: 11879

SEQ ID NO: 12986 - protein, 33 aa, synthetic construct; identical to SEQ ID NO: 11876

SEQ ID NO: 12987 - protein, 36 aa, synthetic construct; identical to SEQ ID NO: 11879

SEQ ID NO: 12988 - protein, 33 aa, synthetic construct; identical to SEQ ID NO: 11948

SEQ ID NO: 12989 - protein, 36 aa, synthetic construct; identical to SEQ ID NO: 11879

SEQ ID NO: 12990 - protein, 33 aa, synthetic construct; identical to SEQ ID NO: 11896

SEQ ID NO: 12991 - protein, 36 aa, synthetic construct; identical to SEQ ID NO: 11879

SEQ ID NO: 12992 - protein, 33 aa, synthetic construct; identical to SEQ ID NO: 12030

SEQ ID NO: 12993 - protein, 36 aa, synthetic construct; identical to SEQ ID NO: 11879

SEQ ID NO: 12994 - protein, 33 aa, synthetic construct; identical to SEQ ID NO: 11932

SEQ ID NO: 12995 - protein, 36 aa, synthetic construct; identical to SEQ ID NO: 11879

SEQ ID NO: 12996 - protein, 33 aa, synthetic construct; identical to SEQ ID NO: 11932

SEQ ID NO: 12997 - protein, 36 aa, synthetic construct; identical to SEQ ID NO: 11879

SEQ ID NO: 12998 - protein, 33 aa, synthetic construct; identical to SEQ ID NO: 12566

SEQ ID NO: 12999 - protein, 36 aa, synthetic construct; identical to SEQ ID NO: 11879

SEQ ID NO: 13000 - protein, 33 aa, synthetic construct; identical to SEQ ID NO: 12322

SEQ ID NO: 13001 - protein, 36 aa, synthetic construct; identical to SEQ ID NO: 11879

SEQ ID NO: 13002 - protein, 33 aa, synthetic construct; identical to SEQ ID NO: 11880

SEQ ID NO: 13003 - protein, 36 aa, synthetic construct; identical to SEQ ID NO: 11879

SEQ ID NO: 13004 - protein, 33 aa, synthetic construct; identical to SEQ ID NO: 12038

SEQ ID NO: 13005 - protein, 36 aa, synthetic construct; identical to SEQ ID NO: 11879

SEQ ID NO: 13006 - protein, 33 aa, synthetic construct
KKEGRLTVYLNRASLHVSLHIRDSQPTDSAIYL

SEQ ID NO: 13007 - protein, 36 aa, synthetic construct; identical to SEQ ID NO: 11879

SEQ ID NO: 13008 - protein, 33 aa, synthetic construct; identical to SEQ ID NO: 11878

SEQ ID NO: 13009 - protein, 36 aa, synthetic construct; identical to SEQ ID NO: 11879

SEQ ID NO: 13010 - protein, 33 aa, synthetic construct; identical to SEQ ID NO: 11878

SEQ ID NO: 13011 - protein, 36 aa, synthetic construct; identical to SEQ ID NO: 11879

SEQ ID NO: 13012 - protein, 33 aa, synthetic construct; identical to SEQ ID NO: 12022

SEQ ID NO: 13013 - protein, 36 aa, synthetic construct; identical to SEQ ID NO: 11879

SEQ ID NO: 13014 - protein, 33 aa, synthetic construct; identical to SEQ ID NO: 12038

SEQ ID NO: 13015 - protein, 36 aa, synthetic construct; identical to SEQ ID NO: 11879

SEQ ID NO: 13016 - protein, 33 aa, synthetic construct; identical to SEQ ID NO: 11932

SEQ ID NO: 13017 - protein, 36 aa, synthetic construct; identical to SEQ ID NO: 11879

SEQ ID NO: 13018 - protein, 33 aa, synthetic construct; identical to SEQ ID NO: 11874

SEQ ID NO: 13019 - protein, 36 aa, synthetic construct; identical to SEQ ID NO: 11879

SEQ ID NO: 13020 - protein, 33 aa, synthetic construct; identical to SEQ ID NO: 12700

SEQ ID NO: 13021 - protein, 36 aa, synthetic construct; identical to SEQ ID NO: 11879

SEQ ID NO: 13022 - protein, 33 aa, synthetic construct; identical to SEQ ID NO: 12130

SEQ ID NO: 13023 - protein, 36 aa, synthetic construct; identical to SEQ ID NO: 11879

SEQ ID NO: 13024 - protein, 33 aa, synthetic construct; identical to SEQ ID NO: 12054

SEQ ID NO: 13025 - protein, 36 aa, synthetic construct; identical to SEQ ID NO: 11879

SEQ ID NO: 13026 - protein, 33 aa, synthetic construct; identical to SEQ ID NO: 11948

SEQ ID NO: 13027 - protein, 36 aa, synthetic construct; identical to SEQ ID NO: 11879

SEQ ID NO: 13028 - protein, 33 aa, synthetic construct; identical to SEQ ID NO: 11932

SEQ ID NO: 13029 - protein, 36 aa, synthetic construct; identical to SEQ ID NO: 11879

SEQ ID NO: 13030 - protein, 33 aa, synthetic construct; identical to SEQ ID NO: 11880

SEQ ID NO: 13031 - protein, 36 aa, synthetic construct; identical to SEQ ID NO: 11879

SEQ ID NO: 13032 - protein, 33 aa, synthetic construct; identical to SEQ ID NO: 11996

SEQ ID NO: 13033 - protein, 36 aa, synthetic construct; identical to SEQ ID NO: 11879

SEQ ID NO: 13034 - protein, 33 aa, synthetic construct; identical to SEQ ID NO: 12968

SEQ ID NO: 13035 - protein, 36 aa, synthetic construct; identical to SEQ ID NO: 11879

SEQ ID NO: 13036 - protein, 33 aa, synthetic construct; identical to SEQ ID NO: 11932

SEQ ID NO: 13037 - protein, 36 aa, synthetic construct; identical to SEQ ID NO: 11879

SEQ ID NO: 13038 - protein, 33 aa, synthetic construct; identical to SEQ ID NO: 12238

SEQ ID NO: 13039 - protein, 36 aa, synthetic construct; identical to SEQ ID NO: 11879

SEQ ID NO: 13040 - protein, 33 aa, synthetic construct; identical to SEQ ID NO: 11940

SEQ ID NO: 13041 - protein, 36 aa, synthetic construct; identical to SEQ ID NO: 11879

SEQ ID NO: 13042 - protein, 33 aa, synthetic construct; identical to SEQ ID NO: 11910

SEQ ID NO: 13043 - protein, 36 aa, synthetic construct; identical to SEQ ID NO: 11879

SEQ ID NO: 13044 - protein, 33 aa, synthetic construct; identical to SEQ ID NO: 11892

SEQ ID NO: 13045 - protein, 36 aa, synthetic construct; identical to SEQ ID NO: 11879

SEQ ID NO: 13046 - protein, 33 aa, synthetic construct; identical to SEQ ID NO: 11878

SEQ ID NO: 13047 - protein, 36 aa, synthetic construct; identical to SEQ ID NO: 11879

SEQ ID NO: 13048 - protein, 33 aa, synthetic construct
QGVNGFEADFSKSDSSFHLRKASVHWSDSAVYF

SEQ ID NO: 13049 - protein, 36 aa, synthetic construct; identical to SEQ ID NO: 11879

SEQ ID NO: 13050 - protein, 33 aa, synthetic construct; identical to SEQ ID NO: 11932

SEQ ID NO: 13051 - protein, 36 aa, synthetic construct; identical to SEQ ID NO: 11879

SEQ ID NO: 13052 - protein, 33 aa, synthetic construct
ERSGRYSVVFQKSLKSISLVISALQPDDSGKYF

SEQ ID NO: 13053 - protein, 36 aa, synthetic construct; identical to SEQ ID NO: 11879

SEQ ID NO: 13054 - protein, 33 aa, synthetic construct; identical to SEQ ID NO: 11932

SEQ ID NO: 13055 - protein, 36 aa, synthetic construct; identical to SEQ ID NO: 11879

SEQ ID NO: 13056 - protein, 33 aa, synthetic construct; identical to SEQ ID NO: 12246

SEQ ID NO: 13057 - protein, 36 aa, synthetic construct; identical to SEQ ID NO: 11879

SEQ ID NO: 13058 - protein, 33 aa, synthetic construct; identical to SEQ ID NO: 11878

SEQ ID NO: 13059 - protein, 36 aa, synthetic construct; identical to SEQ ID NO: 11879

SEQ ID NO: 13060 - protein, 33 aa, synthetic construct; identical to SEQ ID NO: 12042

SEQ ID NO: 13061 - protein, 36 aa, synthetic construct; identical to SEQ ID NO: 11879

SEQ ID NO: 13062 - protein, 33 aa, synthetic construct; identical to SEQ ID NO: 12276

SEQ ID NO: 13063 - protein, 36 aa, synthetic construct; identical to SEQ ID NO: 11879

SEQ ID NO: 13064 - protein, 33 aa, synthetic construct; identical to SEQ ID NO: 11928

SEQ ID NO: 13065 - protein, 36 aa, synthetic construct; identical to SEQ ID NO: 11879

SEQ ID NO: 13066 - protein, 33 aa, synthetic construct; identical to SEQ ID NO: 11894

SEQ ID NO: 13067 - protein, 36 aa, synthetic construct; identical to SEQ ID NO: 11879

SEQ ID NO: 13068 - protein, 33 aa, synthetic construct; identical to SEQ ID NO: 12160

SEQ ID NO: 13069 - protein, 36 aa, synthetic construct; identical to SEQ ID NO: 11879

SEQ ID NO: 13070 - protein, 33 aa, synthetic construct; identical to SEQ ID NO: 11880

SEQ ID NO: 13071 - protein, 36 aa, synthetic construct; identical to SEQ ID NO: 11879

SEQ ID NO: 13072 - protein, 33 aa, synthetic construct; identical to SEQ ID NO: 12042

SEQ ID NO: 13073 - protein, 36 aa, synthetic construct; identical to SEQ ID NO: 11879

SEQ ID NO: 13074 - protein, 33 aa, synthetic construct; identical to SEQ ID NO: 11878

SEQ ID NO: 13075 - protein, 36 aa, synthetic construct; identical to SEQ ID NO: 11879

SEQ ID NO: 13076 - protein, 33 aa, synthetic construct; identical to SEQ ID NO: 11924

SEQ ID NO: 13077 - protein, 36 aa, synthetic construct; identical to SEQ ID NO: 11879

SEQ ID NO: 13078 - protein, 33 aa, synthetic construct; identical to SEQ ID NO: 11878

SEQ ID NO: 13079 - protein, 36 aa, synthetic construct; identical to SEQ ID NO: 11879

SEQ ID NO: 13080 - protein, 33 aa, synthetic construct; identical to SEQ ID NO: 11878

SEQ ID NO: 13081 - protein, 36 aa, synthetic construct; identical to SEQ ID NO: 11879

SEQ ID NO: 13082 - protein, 33 aa, synthetic construct; identical to SEQ ID NO: 11878

SEQ ID NO: 13083 - protein, 36 aa, synthetic construct; identical to SEQ ID NO: 12171

SEQ ID NO: 13084 - protein, 33 aa, synthetic construct; identical to SEQ ID NO: 11980

SEQ ID NO: 13085 - protein, 36 aa, synthetic construct; identical to SEQ ID NO: 12171

SEQ ID NO: 13086 - protein, 33 aa, synthetic construct; identical to SEQ ID NO: 11878

SEQ ID NO: 13087 - protein, 36 aa, synthetic construct; identical to SEQ ID NO: 12171

SEQ ID NO: 13088 - protein, 33 aa, synthetic construct; identical to SEQ ID NO: 11932

SEQ ID NO: 13089 - protein, 36 aa, synthetic construct; identical to SEQ ID NO: 12171

SEQ ID NO: 13090 - protein, 33 aa, synthetic construct; identical to SEQ ID NO: 11932

SEQ ID NO: 13091 - protein, 36 aa, synthetic construct; identical to SEQ ID NO: 12171

SEQ ID NO: 13092 - protein, 33 aa, synthetic construct; identical to SEQ ID NO: 11874

SEQ ID NO: 13093 - protein, 36 aa, synthetic construct; identical to SEQ ID NO: 12171

SEQ ID NO: 13094 - protein, 33 aa, synthetic construct; identical to SEQ ID NO: 11874

SEQ ID NO: 13095 - protein, 36 aa, synthetic construct; identical to SEQ ID NO: 12171

SEQ ID NO: 13096 - protein, 33 aa, synthetic construct; identical to SEQ ID NO: 11926

SEQ ID NO: 13097 - protein, 36 aa, synthetic construct; identical to SEQ ID NO: 12171

SEQ ID NO: 13098 - protein, 33 aa, synthetic construct; identical to SEQ ID NO: 12152

SEQ ID NO: 13099 - protein, 36 aa, synthetic construct; identical to SEQ ID NO: 12171

SEQ ID NO: 13100 - protein, 33 aa, synthetic construct; identical to SEQ ID NO: 11928

SEQ ID NO: 13101 - protein, 36 aa, synthetic construct; identical to SEQ ID NO: 12171

SEQ ID NO: 13102 - protein, 33 aa, synthetic construct; identical to SEQ ID NO: 11878

SEQ ID NO: 13103 - protein, 36 aa, synthetic construct; identical to SEQ ID NO: 12171

SEQ ID NO: 13104 - protein, 33 aa, synthetic construct; identical to SEQ ID NO: 11932

SEQ ID NO: 13105 - protein, 36 aa, synthetic construct; identical to SEQ ID NO: 12171

SEQ ID NO: 13106 - protein, 33 aa, synthetic construct; identical to SEQ ID NO: 11876

SEQ ID NO: 13107 - protein, 36 aa, synthetic construct; identical to SEQ ID NO: 12171

SEQ ID NO: 13108 - protein, 33 aa, synthetic construct; identical to SEQ ID NO: 11980

SEQ ID NO: 13109 - protein, 36 aa, synthetic construct; identical to SEQ ID NO: 12171

SEQ ID NO: 13110 - protein, 33 aa, synthetic construct; identical to SEQ ID NO: 11878

SEQ ID NO: 13111 - protein, 37 aa, synthetic construct
MEDGGAFKDRFKAEMLNSSFSTLKIQPTEPKDSAVYL

SEQ ID NO: 13112 - protein, 33 aa, synthetic construct; identical to SEQ ID NO: 11916

SEQ ID NO: 13113 - protein, 36 aa, synthetic construct
RDKGFLPSRFSVQQFDDYHSEMNMSALELEDSAMYF

SEQ ID NO: 13114 - protein, 33 aa, synthetic construct; identical to SEQ ID NO: 11924

SEQ ID NO: 13115 - protein, 36 aa, synthetic construct; identical to SEQ ID NO: 11907

SEQ ID NO: 13116 - protein, 33 aa, synthetic construct; identical to SEQ ID NO: 11948

SEQ ID NO: 13117 - protein, 36 aa, synthetic construct; identical to SEQ ID NO: 11907

SEQ ID NO: 13118 - protein, 33 aa, synthetic construct; identical to SEQ ID NO: 12322

SEQ ID NO: 13119 - protein, 36 aa, synthetic construct; identical to SEQ ID NO: 11907

SEQ ID NO: 13120 - protein, 33 aa, synthetic construct
KEEQGLTVLLNKKDTRLSLNLTAAHPGDSAVYF

SEQ ID NO: 13121 - protein, 36 aa, synthetic construct; identical to SEQ ID NO: 11907

SEQ ID NO: 13122 - protein, 33 aa, synthetic construct; identical to SEQ ID NO: 11920

SEQ ID NO: 13123 - protein, 36 aa, synthetic construct; identical to SEQ ID NO: 11907

SEQ ID NO: 13124 - protein, 33 aa, synthetic construct; identical to SEQ ID NO: 11940

SEQ ID NO: 13125 - protein, 36 aa, synthetic construct; identical to SEQ ID NO: 11907

SEQ ID NO: 13126 - protein, 33 aa, synthetic construct; identical to SEQ ID NO: 11932

SEQ ID NO: 13127 - protein, 36 aa, synthetic construct; identical to SEQ ID NO: 11907

SEQ ID NO: 13128 - protein, 33 aa, synthetic construct; identical to SEQ ID NO: 11878

SEQ ID NO: 13129 - protein, 36 aa, synthetic construct; identical to SEQ ID NO: 11907

SEQ ID NO: 13130 - protein, 33 aa, synthetic construct; identical to SEQ ID NO: 11914

SEQ ID NO: 13131 - protein, 36 aa, synthetic construct; identical to SEQ ID NO: 11907

SEQ ID NO: 13132 - protein, 33 aa, synthetic construct; identical to SEQ ID NO: 11926

SEQ ID NO: 13133 - protein, 36 aa, synthetic construct; identical to SEQ ID NO: 11907

SEQ ID NO: 13134 - protein, 33 aa, synthetic construct; identical to SEQ ID NO: 11952

SEQ ID NO: 13135 - protein, 37 aa, synthetic construct; identical to SEQ ID NO: 11963

SEQ ID NO: 13136 - protein, 33 aa, synthetic construct; identical to SEQ ID NO: 11924

SEQ ID NO: 13137 - protein, 37 aa, synthetic construct; identical to SEQ ID NO: 11963

SEQ ID NO: 13138 - protein, 33 aa, synthetic construct; identical to SEQ ID NO: 11984

SEQ ID NO: 13139 - protein, 37 aa, synthetic construct; identical to SEQ ID NO: 11963

SEQ ID NO: 13140 - protein, 33 aa, synthetic construct; identical to SEQ ID NO: 11878

SEQ ID NO: 13141 - protein, 37 aa, synthetic construct; identical to SEQ ID NO: 11963

SEQ ID NO: 13142 - protein, 33 aa, synthetic construct; identical to SEQ ID NO: 11940

SEQ ID NO: 13143 - protein, 37 aa, synthetic construct; identical to SEQ ID NO: 11963

SEQ ID NO: 13144 - protein, 33 aa, synthetic construct; identical to SEQ ID NO: 12076

SEQ ID NO: 13145 - protein, 37 aa, synthetic construct; identical to SEQ ID NO: 11963

SEQ ID NO: 13146 - protein, 33 aa, synthetic construct; identical to SEQ ID NO: 12030

SEQ ID NO: 13147 - protein, 37 aa, synthetic construct; identical to SEQ ID NO: 11963

SEQ ID NO: 13148 - protein, 33 aa, synthetic construct; identical to SEQ ID NO: 12038

SEQ ID NO: 13149 - protein, 37 aa, synthetic construct; identical to SEQ ID NO: 11963

SEQ ID NO: 13150 - protein, 33 aa, synthetic construct; identical to SEQ ID NO: 11916

SEQ ID NO: 13151 - protein, 37 aa, synthetic construct; identical to SEQ ID NO: 11963

SEQ ID NO: 13152 - protein, 33 aa, synthetic construct; identical to SEQ ID NO: 12120

SEQ ID NO: 13153 - protein, 37 aa, synthetic construct; identical to SEQ ID NO: 11963

SEQ ID NO: 13154 - protein, 33 aa, synthetic construct; identical to SEQ ID NO: 11892

SEQ ID NO: 13155 - protein, 37 aa, synthetic construct; identical to SEQ ID NO: 11963

SEQ ID NO: 13156 - protein, 33 aa, synthetic construct; identical to SEQ ID NO: 11946

SEQ ID NO: 13157 - protein, 37 aa, synthetic construct; identical to SEQ ID NO: 11963

SEQ ID NO: 13158 - protein, 33 aa, synthetic construct; identical to SEQ ID NO: 11900

SEQ ID NO: 13159 - protein, 37 aa, synthetic construct; identical to SEQ ID NO: 11951

SEQ ID NO: 13160 - protein, 33 aa, synthetic construct; identical to SEQ ID NO: 11882

SEQ ID NO: 13161 - protein, 37 aa, synthetic construct; identical to SEQ ID NO: 11951

SEQ ID NO: 13162 - protein, 33 aa, synthetic construct; identical to SEQ ID NO: 11894

SEQ ID NO: 13163 - protein, 37 aa, synthetic construct; identical to SEQ ID NO: 11951

SEQ ID NO: 13164 - protein, 33 aa, synthetic construct; identical to SEQ ID NO: 12076

SEQ ID NO: 13165 - protein, 37 aa, synthetic construct; identical to SEQ ID NO: 11951

SEQ ID NO: 13166 - protein, 33 aa, synthetic construct; identical to SEQ ID NO: 11880

SEQ ID NO: 13167 - protein, 37 aa, synthetic construct; identical to SEQ ID NO: 11951

SEQ ID NO: 13168 - protein, 33 aa, synthetic construct; identical to SEQ ID NO: 11900

SEQ ID NO: 13169 - protein, 37 aa, synthetic construct; identical to SEQ ID NO: 11951

SEQ ID NO: 13170 - protein, 33 aa, synthetic construct; identical to SEQ ID NO: 11924

SEQ ID NO: 13171 - protein, 37 aa, synthetic construct; identical to SEQ ID NO: 11951

SEQ ID NO: 13172 - protein, 33 aa, synthetic construct; identical to SEQ ID NO: 11874

SEQ ID NO: 13173 - protein, 37 aa, synthetic construct; identical to SEQ ID NO: 11951

SEQ ID NO: 13174 - protein, 33 aa, synthetic construct; identical to SEQ ID NO: 11886

SEQ ID NO: 13175 - protein, 37 aa, synthetic construct; identical to SEQ ID NO: 11951

SEQ ID NO: 13176 - protein, 33 aa, synthetic construct; identical to SEQ ID NO: 12194

SEQ ID NO: 13177 - protein, 37 aa, synthetic construct; identical to SEQ ID NO: 11951

SEQ ID NO: 13178 - protein, 33 aa, synthetic construct; identical to SEQ ID NO: 11874

SEQ ID NO: 13179 - protein, 37 aa, synthetic construct; identical to SEQ ID NO: 11951

SEQ ID NO: 13180 - protein, 33 aa, synthetic construct; identical to SEQ ID NO: 11896

SEQ ID NO: 13181 - protein, 37 aa, synthetic construct; identical to SEQ ID NO: 11951

SEQ ID NO: 13182 - protein, 33 aa, synthetic construct; identical to SEQ ID NO: 11878

SEQ ID NO: 13183 - protein, 37 aa, synthetic construct; identical to SEQ ID NO: 11951

SEQ ID NO: 13184 - protein, 33 aa, synthetic construct; identical to SEQ ID NO: 12130

SEQ ID NO: 13185 - protein, 37 aa, synthetic construct; identical to SEQ ID NO: 11951

SEQ ID NO: 13186 - protein, 33 aa, synthetic construct; identical to SEQ ID NO: 11926

SEQ ID NO: 13187 - protein, 36 aa, synthetic construct; identical to SEQ ID NO: 11899

SEQ ID NO: 13188 - protein, 33 aa, synthetic construct; identical to SEQ ID NO: 11928

SEQ ID NO: 13189 - protein, 36 aa, synthetic construct; identical to SEQ ID NO: 11899

SEQ ID NO: 13190 - protein, 33 aa, synthetic construct; identical to SEQ ID NO: 11964

SEQ ID NO: 13191 - protein, 36 aa, synthetic construct; identical to SEQ ID NO: 11899

SEQ ID NO: 13192 - protein, 33 aa, synthetic construct; identical to SEQ ID NO: 12022

SEQ ID NO: 13193 - protein, 36 aa, synthetic construct; identical to SEQ ID NO: 11899

SEQ ID NO: 13194 - protein, 31 aa, synthetic construct; identical to SEQ ID NO: 11978

SEQ ID NO: 13195 - protein, 36 aa, synthetic construct; identical to SEQ ID NO: 11899

SEQ ID NO: 13196 - protein, 33 aa, synthetic construct; identical to SEQ ID NO: 11916

SEQ ID NO: 13197 - protein, 36 aa, synthetic construct; identical to SEQ ID NO: 11899

SEQ ID NO: 13198 - protein, 33 aa, synthetic construct; identical to SEQ ID NO: 11886

SEQ ID NO: 13199 - protein, 36 aa, synthetic construct; identical to SEQ ID NO: 11899

SEQ ID NO: 13200 - protein, 33 aa, synthetic construct; identical to SEQ ID NO: 12016

SEQ ID NO: 13201 - protein, 36 aa, synthetic construct; identical to SEQ ID NO: 11899

SEQ ID NO: 13202 - protein, 33 aa, synthetic construct; identical to SEQ ID NO: 11916

SEQ ID NO: 13203 - protein, 36 aa, synthetic construct; identical to SEQ ID NO: 11899

SEQ ID NO: 13204 - protein, 33 aa, synthetic construct; identical to SEQ ID NO: 11918

SEQ ID NO: 13205 - protein, 36 aa, synthetic construct; identical to SEQ ID NO: 11899

SEQ ID NO: 13206 - protein, 33 aa, synthetic construct; identical to SEQ ID NO: 11932

SEQ ID NO: 13207 - protein, 36 aa, synthetic construct; identical to SEQ ID NO: 11899

SEQ ID NO: 13208 - protein, 33 aa, synthetic construct; identical to SEQ ID NO: 11914

SEQ ID NO: 13209 - protein, 36 aa, synthetic construct; identical to SEQ ID NO: 11899

SEQ ID NO: 13210 - protein, 33 aa, synthetic construct; identical to SEQ ID NO: 11918

SEQ ID NO: 13211 - protein, 36 aa, synthetic construct; identical to SEQ ID NO: 11899

SEQ ID NO: 13212 - protein, 33 aa, synthetic construct; identical to SEQ ID NO: 13120

SEQ ID NO: 13213 - protein, 36 aa, synthetic construct; identical to SEQ ID NO: 11899

SEQ ID NO: 13214 - protein, 33 aa, synthetic construct; identical to SEQ ID NO: 11910

SEQ ID NO: 13215 - protein, 36 aa, synthetic construct; identical to SEQ ID NO: 11899

SEQ ID NO: 13216 - protein, 33 aa, synthetic construct; identical to SEQ ID NO: 12038

SEQ ID NO: 13217 - protein, 36 aa, synthetic construct; identical to SEQ ID NO: 11899

SEQ ID NO: 13218 - protein, 33 aa, synthetic construct; identical to SEQ ID NO: 11996

SEQ ID NO: 13219 - protein, 36 aa, synthetic construct; identical to SEQ ID NO: 11899

SEQ ID NO: 13220 - protein, 33 aa, synthetic construct; identical to SEQ ID NO: 11980

SEQ ID NO: 13221 - protein, 36 aa, synthetic construct; identical to SEQ ID NO: 11899

SEQ ID NO: 13222 - protein, 33 aa, synthetic construct; identical to SEQ ID NO: 12674

SEQ ID NO: 13223 - protein, 36 aa, synthetic construct; identical to SEQ ID NO: 11899

SEQ ID NO: 13224 - protein, 33 aa, synthetic construct; identical to SEQ ID NO: 11900

SEQ ID NO: 13225 - protein, 36 aa, synthetic construct; identical to SEQ ID NO: 11899

SEQ ID NO: 13226 - protein, 33 aa, synthetic construct; identical to SEQ ID NO: 11952

SEQ ID NO: 13227 - protein, 36 aa, synthetic construct; identical to SEQ ID NO: 11899

SEQ ID NO: 13228 - protein, 33 aa, synthetic construct; identical to SEQ ID NO: 11976

SEQ ID NO: 13229 - protein, 36 aa, synthetic construct; identical to SEQ ID NO: 11899

SEQ ID NO: 13230 - protein, 33 aa, synthetic construct; identical to SEQ ID NO: 11946

SEQ ID NO: 13231 - protein, 36 aa, synthetic construct; identical to SEQ ID NO: 11899

SEQ ID NO: 13232 - protein, 33 aa, synthetic construct; identical to SEQ ID NO: 11944

SEQ ID NO: 13233 - protein, 36 aa, synthetic construct; identical to SEQ ID NO: 11899

SEQ ID NO: 13234 - protein, 33 aa, synthetic construct; identical to SEQ ID NO: 12030

SEQ ID NO: 13235 - protein, 36 aa, synthetic construct; identical to SEQ ID NO: 11899

SEQ ID NO: 13236 - protein, 33 aa, synthetic construct; identical to SEQ ID NO: 12194

SEQ ID NO: 13237 - protein, 36 aa, synthetic construct; identical to SEQ ID NO: 11899

SEQ ID NO: 13238 - protein, 33 aa, synthetic construct; identical to SEQ ID NO: 11944

SEQ ID NO: 13239 - protein, 36 aa, synthetic construct; identical to SEQ ID NO: 11899

SEQ ID NO: 13240 - protein, 33 aa, synthetic construct; identical to SEQ ID NO: 11880

SEQ ID NO: 13241 - protein, 36 aa, synthetic construct; identical to SEQ ID NO: 11899

SEQ ID NO: 13242 - protein, 33 aa, synthetic construct; identical to SEQ ID NO: 11946

SEQ ID NO: 13243 - protein, 36 aa, synthetic construct; identical to SEQ ID NO: 11899

SEQ ID NO: 13244 - protein, 33 aa, synthetic construct; identical to SEQ ID NO: 11966

SEQ ID NO: 13245 - protein, 36 aa, synthetic construct; identical to SEQ ID NO: 11899

SEQ ID NO: 13246 - protein, 33 aa, synthetic construct; identical to SEQ ID NO: 11874

SEQ ID NO: 13247 - protein, 36 aa, synthetic construct; identical to SEQ ID NO: 11899

SEQ ID NO: 13248 - protein, 33 aa, synthetic construct; identical to SEQ ID NO: 12038

SEQ ID NO: 13249 - protein, 36 aa, synthetic construct; identical to SEQ ID NO: 11899

SEQ ID NO: 13250 - protein, 33 aa, synthetic construct; identical to SEQ ID NO: 11916

SEQ ID NO: 13251 - protein, 36 aa, synthetic construct; identical to SEQ ID NO: 11899

SEQ ID NO: 13252 - protein, 33 aa, synthetic construct; identical to SEQ ID NO: 12130

SEQ ID NO: 13253 - protein, 36 aa, synthetic construct; identical to SEQ ID NO: 11899

SEQ ID NO: 13254 - protein, 33 aa, synthetic construct; identical to SEQ ID NO: 11972

SEQ ID NO: 13255 - protein, 36 aa, synthetic construct; identical to SEQ ID NO: 11899

SEQ ID NO: 13256 - protein, 33 aa, synthetic construct; identical to SEQ ID NO: 11948

SEQ ID NO: 13257 - protein, 36 aa, synthetic construct; identical to SEQ ID NO: 11899

SEQ ID NO: 13258 - protein, 33 aa, synthetic construct; identical to SEQ ID NO: 12094

SEQ ID NO: 13259 - protein, 36 aa, synthetic construct; identical to SEQ ID NO: 11899

SEQ ID NO: 13260 - protein, 33 aa, synthetic construct; identical to SEQ ID NO: 11878

SEQ ID NO: 13261 - protein, 36 aa, synthetic construct; identical to SEQ ID NO: 11899

SEQ ID NO: 13262 - protein, 33 aa, synthetic construct; identical to SEQ ID NO: 11878

SEQ ID NO: 13263 - protein, 36 aa, synthetic construct; identical to SEQ ID NO: 11899

SEQ ID NO: 13264 - protein, 33 aa, synthetic construct; identical to SEQ ID NO: 11996

SEQ ID NO: 13265 - protein, 36 aa, synthetic construct; identical to SEQ ID NO: 11899

SEQ ID NO: 13266 - protein, 33 aa, synthetic construct; identical to SEQ ID NO: 11892

SEQ ID NO: 13267 - protein, 36 aa, synthetic construct; identical to SEQ ID NO: 11899

SEQ ID NO: 13268 - protein, 33 aa, synthetic construct; identical to SEQ ID NO: 12382

SEQ ID NO: 13269 - protein, 36 aa, synthetic construct; identical to SEQ ID NO: 11899

SEQ ID NO: 13270 - protein, 33 aa, synthetic construct; identical to SEQ ID NO: 12238

SEQ ID NO: 13271 - protein, 36 aa, synthetic construct; identical to SEQ ID NO: 11899

SEQ ID NO: 13272 - protein, 33 aa, synthetic construct; identical to SEQ ID NO: 11894

SEQ ID NO: 13273 - protein, 36 aa, synthetic construct; identical to SEQ ID NO: 11899

SEQ ID NO: 13274 - protein, 33 aa, synthetic construct; identical to SEQ ID NO: 11918

SEQ ID NO: 13275 - protein, 36 aa, synthetic construct; identical to SEQ ID NO: 11899

SEQ ID NO: 13276 - protein, 33 aa, synthetic construct; identical to SEQ ID NO: 12328

SEQ ID NO: 13277 - protein, 36 aa, synthetic construct; identical to SEQ ID NO: 11899

SEQ ID NO: 13278 - protein, 33 aa, synthetic construct; identical to SEQ ID NO: 11874

SEQ ID NO: 13279 - protein, 36 aa, synthetic construct; identical to SEQ ID NO: 11899

SEQ ID NO: 13280 - protein, 33 aa, synthetic construct; identical to SEQ ID NO: 11932

SEQ ID NO: 13281 - protein, 36 aa, synthetic construct; identical to SEQ ID NO: 11899

SEQ ID NO: 13282 - protein, 33 aa, synthetic construct; identical to SEQ ID NO: 11940

SEQ ID NO: 13283 - protein, 36 aa, synthetic construct; identical to SEQ ID NO: 11899

SEQ ID NO: 13284 - protein, 33 aa, synthetic construct; identical to SEQ ID NO: 11932

SEQ ID NO: 13285 - protein, 36 aa, synthetic construct; identical to SEQ ID NO: 11899

SEQ ID NO: 13286 - protein, 33 aa, synthetic construct; identical to SEQ ID NO: 11920

SEQ ID NO: 13287 - protein, 36 aa, synthetic construct; identical to SEQ ID NO: 11899

SEQ ID NO: 13288 - protein, 31 aa, synthetic construct; identical to SEQ ID NO: 11978

SEQ ID NO: 13289 - protein, 36 aa, synthetic construct; identical to SEQ ID NO: 11899

SEQ ID NO: 13290 - protein, 33 aa, synthetic construct; identical to SEQ ID NO: 11914

SEQ ID NO: 13291 - protein, 36 aa, synthetic construct; identical to SEQ ID NO: 11899

SEQ ID NO: 13292 - protein, 33 aa, synthetic construct; identical to SEQ ID NO: 11918

SEQ ID NO: 13293 - protein, 35 aa, synthetic construct; identical to SEQ ID NO: 11895

SEQ ID NO: 13294 - protein, 33 aa, synthetic construct; identical to SEQ ID NO: 11892

SEQ ID NO: 13295 - protein, 35 aa, synthetic construct; identical to SEQ ID NO: 11895

SEQ ID NO: 13296 - protein, 33 aa, synthetic construct; identical to SEQ ID NO: 11892

SEQ ID NO: 13297 - protein, 35 aa, synthetic construct; identical to SEQ ID NO: 11895

SEQ ID NO: 13298 - protein, 33 aa, synthetic construct; identical to SEQ ID NO: 12094

SEQ ID NO: 13299 - protein, 35 aa, synthetic construct; identical to SEQ ID NO: 11895

SEQ ID NO: 13300 - protein, 33 aa, synthetic construct; identical to SEQ ID NO: 11972

SEQ ID NO: 13301 - protein, 35 aa, synthetic construct; identical to SEQ ID NO: 11895

SEQ ID NO: 13302 - protein, 33 aa, synthetic construct; identical to SEQ ID NO: 11918

SEQ ID NO: 13303 - protein, 35 aa, synthetic construct; identical to SEQ ID NO: 11895

SEQ ID NO: 13304 - protein, 33 aa, synthetic construct
QGVNGFEAEFSKSNSSCPRRKASVHWSDWAVYC

SEQ ID NO: 13305 - protein, 35 aa, synthetic construct; identical to SEQ ID NO: 11895

SEQ ID NO: 13306 - protein, 33 aa, synthetic construct; identical to SEQ ID NO: 11876

SEQ ID NO: 13307 - protein, 35 aa, synthetic construct; identical to SEQ ID NO: 11895

SEQ ID NO: 13308 - protein, 33 aa, synthetic construct; identical to SEQ ID NO: 12402

SEQ ID NO: 13309 - protein, 35 aa, synthetic construct; identical to SEQ ID NO: 11895

SEQ ID NO: 13310 - protein, 33 aa, synthetic construct; identical to SEQ ID NO: 11944

SEQ ID NO: 13311 - protein, 35 aa, synthetic construct; identical to SEQ ID NO: 11895

SEQ ID NO: 13312 - protein, 33 aa, synthetic construct; identical to SEQ ID NO: 11892

SEQ ID NO: 13313 - protein, 35 aa, synthetic construct; identical to SEQ ID NO: 11895

SEQ ID NO: 13314 - protein, 33 aa, synthetic construct; identical to SEQ ID NO: 11940

SEQ ID NO: 13315 - protein, 35 aa, synthetic construct; identical to SEQ ID NO: 11895

SEQ ID NO: 13316 - protein, 33 aa, synthetic construct; identical to SEQ ID NO: 12054

SEQ ID NO: 13317 - protein, 35 aa, synthetic construct; identical to SEQ ID NO: 11895

SEQ ID NO: 13318 - protein, 33 aa, synthetic construct; identical to SEQ ID NO: 11892

SEQ ID NO: 13319 - protein, 35 aa, synthetic construct; identical to SEQ ID NO: 11895

SEQ ID NO: 13320 - protein, 33 aa, synthetic construct; identical to SEQ ID NO: 11928

SEQ ID NO: 13321 - protein, 35 aa, synthetic construct; identical to SEQ ID NO: 11895

SEQ ID NO: 13322 - protein, 33 aa, synthetic construct; identical to SEQ ID NO: 11980

SEQ ID NO: 13323 - protein, 35 aa, synthetic construct; identical to SEQ ID NO: 11895

SEQ ID NO: 13324 - protein, 33 aa, synthetic construct; identical to SEQ ID NO: 11878

SEQ ID NO: 13325 - protein, 35 aa, synthetic construct; identical to SEQ ID NO: 11895

SEQ ID NO: 13326 - protein, 33 aa, synthetic construct; identical to SEQ ID NO: 11952

SEQ ID NO: 13327 - protein, 35 aa, synthetic construct; identical to SEQ ID NO: 11895

SEQ ID NO: 13328 - protein, 33 aa, synthetic construct; identical to SEQ ID NO: 11892

SEQ ID NO: 13329 - protein, 35 aa, synthetic construct; identical to SEQ ID NO: 11895

SEQ ID NO: 13330 - protein, 33 aa, synthetic construct; identical to SEQ ID NO: 11874

SEQ ID NO: 13331 - protein, 35 aa, synthetic construct; identical to SEQ ID NO: 11895

SEQ ID NO: 13332 - protein, 33 aa, synthetic construct; identical to SEQ ID NO: 12038

SEQ ID NO: 13333 - protein, 35 aa, synthetic construct; identical to SEQ ID NO: 11895

SEQ ID NO: 13334 - protein, 33 aa, synthetic construct; identical to SEQ ID NO: 11932

SEQ ID NO: 13335 - protein, 35 aa, synthetic construct; identical to SEQ ID NO: 11895

SEQ ID NO: 13336 - protein, 33 aa, synthetic construct; identical to SEQ ID NO: 12094

SEQ ID NO: 13337 - protein, 35 aa, synthetic construct; identical to SEQ ID NO: 11895

SEQ ID NO: 13338 - protein, 33 aa, synthetic construct; identical to SEQ ID NO: 12402

SEQ ID NO: 13339 - protein, 35 aa, synthetic construct; identical to SEQ ID NO: 11895

SEQ ID NO: 13340 - protein, 33 aa, synthetic construct; identical to SEQ ID NO: 11914

SEQ ID NO: 13341 - protein, 35 aa, synthetic construct; identical to SEQ ID NO: 11895

SEQ ID NO: 13342 - protein, 33 aa, synthetic construct; identical to SEQ ID NO: 11874

SEQ ID NO: 13343 - protein, 35 aa, synthetic construct; identical to SEQ ID NO: 11895

SEQ ID NO: 13344 - protein, 33 aa, synthetic construct; identical to SEQ ID NO: 11920

SEQ ID NO: 13345 - protein, 35 aa, synthetic construct; identical to SEQ ID NO: 11895

SEQ ID NO: 13346 - protein, 33 aa, synthetic construct; identical to SEQ ID NO: 11932

SEQ ID NO: 13347 - protein, 35 aa, synthetic construct; identical to SEQ ID NO: 11895

SEQ ID NO: 13348 - protein, 33 aa, synthetic construct; identical to SEQ ID NO: 12094

SEQ ID NO: 13349 - protein, 35 aa, synthetic construct; identical to SEQ ID NO: 11895

SEQ ID NO: 13350 - protein, 33 aa, synthetic construct; identical to SEQ ID NO: 11948

SEQ ID NO: 13351 - protein, 35 aa, synthetic construct; identical to SEQ ID NO: 11895

SEQ ID NO: 13352 - protein, 33 aa, synthetic construct; identical to SEQ ID NO: 11892

SEQ ID NO: 13353 - protein, 35 aa, synthetic construct; identical to SEQ ID NO: 11895

SEQ ID NO: 13354 - protein, 33 aa, synthetic construct; identical to SEQ ID NO: 12322

SEQ ID NO: 13355 - protein, 35 aa, synthetic construct; identical to SEQ ID NO: 11895

SEQ ID NO: 13356 - protein, 33 aa, synthetic construct; identical to SEQ ID NO: 11918

SEQ ID NO: 13357 - DNA, 111 bp, synthetic construct
  source 1..111: mol_type = other DNA
atagataattcacagttgccctcggatcgattttctgctgtgaggcctaaaggaactaactccactctcaagatccagtctgcaaagcagggcgacacagccacctatctc

SEQ ID NO: 13358 - DNA, 99 bp, synthetic construct
  source 1..99: mol_type = other DNA
aagaaagaaggcagattcacagctcacctcaataaggccagcctgcatgtttccctgcacatcagagactcccagcccagtgactccgctctctacttc

SEQ ID NO: 13359 - DNA, 108 bp, synthetic construct
  source 1..108: mol_type = other DNA
actgagaaaggagatatccctgatggatacaaggcctccagaccaagccaagagaacttctccctcattctggagttggctaccccctctcagacatcagtgtacttc

SEQ ID NO: 13360 - DNA, 99 bp, synthetic construct
  source 1..99: mol_type = other DNA
aaggacagtgggcatttctccacattcctgagccgctcgaatgggtacagttacctgcttctgacagagctccagatcaaagactctgcctcatacctc

SEQ ID NO: 13361 - DNA, 108 bp, synthetic construct; identical to SEQ ID NO: 13359
  source 1..108: mol_type = other DNA

SEQ ID NO: 13362 - DNA, 99 bp, synthetic construct
  source 1..99: mol_type = other DNA
gcaacagtgggtcattattctctgaactttcagaagccaaaaagttccatcggactcatcatcaccgccacacagattgaggactcagcagtatatttc

SEQ ID NO: 13363 - DNA, 108 bp, synthetic construct
  source 1..108: mol_type = other DNA
acggagaaaggagatatccctgatgggtacaaggcctccagaccaagccaagagaatttctctctcattctggagttggcttccctttctcagacagctgtatatttc

SEQ ID NO: 13364 - DNA, 99 bp, synthetic construct
  source 1..99: mol_type = other DNA
accgagcaccaagggttctacgccactctccataagagcagcagctccttccatctgcagaagtcctcagtgcagctgtcagactctgccctgtacttc

SEQ ID NO: 13365 - DNA, 108 bp, synthetic construct; identical to SEQ ID NO: 13359
  source 1..108: mol_type = other DNA

SEQ ID NO: 13366 - DNA, 99 bp, synthetic construct
  source 1..99: mol_type = other DNA
aagcagagtgggagactgacatccactacagtcatcaaagaacgtcgcagctctttgcacatttcctcctcccagacaacagactcaggcacttatctc

SEQ ID NO: 13367 - DNA, 111 bp, synthetic construct; identical to SEQ ID NO: 13357
  source 1..111: mol_type = other DNA

SEQ ID NO: 13368 - DNA, 99 bp, synthetic construct
  source 1..99: mol_type = other DNA
caaggagtgaacagcttcgaggctgagttcagcaagagtaactcttccttccacctgcagaaagcctctgtgcactggagcgactcggctgtgtacttc

SEQ ID NO: 13369 - DNA, 108 bp, synthetic construct; identical to SEQ ID NO: 13359
  source 1..108: mol_type = other DNA

SEQ ID NO: 13370 - DNA, 99 bp, synthetic construct
  source 1..99: mol_type = other DNA
ggaagcagcagaggttttgaagctacatatgataaagggaccacctccttccacttgcggaaagcttcagtgcaagagtcagactcggctgtgtactac

SEQ ID NO: 13371 - DNA, 108 bp, synthetic construct
  source 1..108: mol_type = other DNA
atggacaatcagactgcctcaagtcgcttccaacctcaaagttcaaagaaaaaccatttagaccttcagatcacagctctaaagcctgatgactcggccacatacttc

SEQ ID NO: 13372 - DNA, 99 bp, synthetic construct; identical to SEQ ID NO: 13360
  source 1..99: mol_type = other DNA

SEQ ID NO: 13373 - DNA, 111 bp, synthetic construct
  source 1..111: mol_type = other DNA
atagatgattcagggatgcccaaggaacgattctcagctcagatgcccaatcagtcgcactcaactctgaagatccagagcacgcaaccccaggactcagcggtgtatctt

SEQ ID NO: 13374 - DNA, 102 bp, synthetic construct
  source 1..102: mol_type = other DNA
aaggagaatgggaggctaaagtcagcatttgattctaaggagcggcgctacagcaccctgcacatcagggatgcccagctggaggactcaggcacttacttc

SEQ ID NO: 13375 - DNA, 108 bp, synthetic construct; identical to SEQ ID NO: 13359
  source 1..108: mol_type = other DNA

SEQ ID NO: 13376 - DNA, 99 bp, synthetic construct
  source 1..99: mol_type = other DNA
caaggagtgaatggctttgaggctgagttcagcaagagtaactcttccttccacctgcggaaagcctccgtgcactggagcgactcggctgtgtacttc

SEQ ID NO: 13377 - DNA, 108 bp, synthetic construct; identical to SEQ ID NO: 13363
  source 1..108: mol_type = other DNA

SEQ ID NO: 13378 - DNA, 99 bp, synthetic construct
  source 1..99: mol_type = other DNA
aaagaagaacaaggactcactgtcttactgaacaagaaagacaaacgactctctctgaacctcacagctgcccatcctggggactcagccgtgtacttc

SEQ ID NO: 13379 - DNA, 105 bp, synthetic construct
  source 1..105: mol_type = other DNA
aaagaggtcaaatctcttcccggtgctgattacctggccacacgggtcactgatacggagctgaggctgcaagtggccaacatgagccagggcagaaccttgtac

SEQ ID NO: 13380 - DNA, 99 bp, synthetic construct
  source 1..99: mol_type = other DNA
aagcgcaatggaagactcagagccacccttgacacctccagccagagcagctccttgtccatcactgctactcggtgtgaagacaccgctgtgtacttc

SEQ ID NO: 13381 - DNA, 105 bp, synthetic construct; identical to SEQ ID NO: 13379
  source 1..105: mol_type = other DNA

SEQ ID NO: 13382 - DNA, 99 bp, synthetic construct; identical to SEQ ID NO: 13376
  source 1..99: mol_type = other DNA

SEQ ID NO: 13383 - DNA, 108 bp, synthetic construct
  source 1..108: mol_type = other DNA
cttcaaaaaggcgatctatctgaaggctatgatgcgtctcgagagaagaagtcatctttttctctcactgtgacatctgcccagaagaacgagatggccgtttttctc

SEQ ID NO: 13384 - DNA, 99 bp, synthetic construct
  source 1..99: mol_type = other DNA
aaggaagaaggcagattcacagttcacctcaataaagccagcctgcatacttccctgcacatcagagactcccagcccagtgactctgctctctacctc

SEQ ID NO: 13385 - DNA, 108 bp, synthetic construct; identical to SEQ ID NO: 13371
  source 1..108: mol_type = other DNA

SEQ ID NO: 13386 - DNA, 99 bp, synthetic construct
  source 1..99: mol_type = other DNA
caaggagtgaatggctttgaggctgagttcagcaagagtaactcttccttccacctgcggaaagcctctgtgcactggagcgactcggctgtgtacttc

SEQ ID NO: 13387 - DNA, 108 bp, synthetic construct; identical to SEQ ID NO: 13359
  source 1..108: mol_type = other DNA

SEQ ID NO: 13388 - DNA, 99 bp, synthetic construct; identical to SEQ ID NO: 13366
  source 1..99: mol_type = other DNA

SEQ ID NO: 13389 - DNA, 108 bp, synthetic construct; identical to SEQ ID NO: 13359
  source 1..108: mol_type = other DNA

SEQ ID NO: 13390 - DNA, 99 bp, synthetic construct; identical to SEQ ID NO: 13376
  source 1..99: mol_type = other DNA

SEQ ID NO: 13391 - DNA, 108 bp, synthetic construct
  source 1..108: mol_type = other DNA
caggtagagtcggtggtgcaactgaacctctcagcttccaggccgaaggacgaccaattcatcctaagcacggagaagctgcttctcagccactctggcttctacctc

SEQ ID NO: 13392 - DNA, 99 bp, synthetic construct
  source 1..99: mol_type = other DNA
caaggagtgaatggctttgaggctgagttcagcaagagcaactcttccttccacctgcggaaagcctccgtgcactggagcgactcggctgtgtacttc

SEQ ID NO: 13393 - DNA, 108 bp, synthetic construct
  source 1..108: mol_type = other DNA
cttcaaataggagatgtccctgatgggtacaaggccaccagaacaacgcaagaagacttcttcctcctgctggaattggcttctccctctcagacatctttgtacttc

SEQ ID NO: 13394 - DNA, 99 bp, synthetic construct
  source 1..99: mol_type = other DNA
ggaagcaacagaggttttgaagctacatacaataaagaagccacctccttccacttgcagaaagcctcagtgcaagagtcagactcggctgtgtactac

SEQ ID NO: 13395 - DNA, 108 bp, synthetic construct; identical to SEQ ID NO: 13391
  source 1..108: mol_type = other DNA

SEQ ID NO: 13396 - DNA, 99 bp, synthetic construct; identical to SEQ ID NO: 13378
  source 1..99: mol_type = other DNA

SEQ ID NO: 13397 - DNA, 108 bp, synthetic construct; identical to SEQ ID NO: 13359
  source 1..108: mol_type = other DNA

SEQ ID NO: 13398 - DNA, 99 bp, synthetic construct
  source 1..99: mol_type = other DNA
aacgaaggacaaggattcactgtcctactgaacaagaaagacaaacgactctctctgaacctcacagctgcccatcctggggactcagccgcgtacttc

SEQ ID NO: 13399 - DNA, 108 bp, synthetic construct; identical to SEQ ID NO: 13359
  source 1..108: mol_type = other DNA

SEQ ID NO: 13400 - DNA, 99 bp, synthetic construct
  source 1..99: mol_type = other DNA
gcaacagaaggtcattattctctgaactttcagaagccaaaaagttccatcggactcatcatcactgccacacagattgaggactcagcagtatatttc

SEQ ID NO: 13401 - DNA, 108 bp, synthetic construct; identical to SEQ ID NO: 13363
  source 1..108: mol_type = other DNA

SEQ ID NO: 13402 - DNA, 99 bp, synthetic construct
  source 1..99: mol_type = other DNA
accgagcaccaagggttccacgccactctccataagagcagcagctccttccatctgcagaagtcctcagcgcagctgtcagactctgccctgtactac

SEQ ID NO: 13403 - DNA, 108 bp, synthetic construct; identical to SEQ ID NO: 13383
  source 1..108: mol_type = other DNA

SEQ ID NO: 13404 - DNA, 99 bp, synthetic construct
  source 1..99: mol_type = other DNA
aagcagatccaagaactcatcgttttactggataagaaagccaaacgcttctccctgcacatcacagacacccagcctggagactcagccatgtacttc

SEQ ID NO: 13405 - DNA, 108 bp, synthetic construct; identical to SEQ ID NO: 13363
  source 1..108: mol_type = other DNA

SEQ ID NO: 13406 - DNA, 99 bp, synthetic construct; identical to SEQ ID NO: 13398
  source 1..99: mol_type = other DNA

SEQ ID NO: 13407 - DNA, 108 bp, synthetic construct; identical to SEQ ID NO: 13363
  source 1..108: mol_type = other DNA

SEQ ID NO: 13408 - DNA, 99 bp, synthetic construct
  source 1..99: mol_type = other DNA
caaggagtgaatggctttgaggctgagttcagcaagagtaactcttccttccacctgcggaaagcctctgtgcactggagcgactgggctgtgtacttc

SEQ ID NO: 13409 - DNA, 108 bp, synthetic construct; identical to SEQ ID NO: 13393
  source 1..108: mol_type = other DNA

SEQ ID NO: 13410 - DNA, 99 bp, synthetic construct
  source 1..99: mol_type = other DNA
aaacagagccaaagacttatagttttgttggataagaaagccaaacgattctccctgcacatcacagccacacagcctgaagattcagccatctacttc

SEQ ID NO: 13411 - DNA, 108 bp, synthetic construct; identical to SEQ ID NO: 13363
  source 1..108: mol_type = other DNA

SEQ ID NO: 13412 - DNA, 99 bp, synthetic construct
  source 1..99: mol_type = other DNA
aagcatagtgggagactgacatccactacagtcatcaaagaacgtcgcagctctttgcacatttcctcctcccagacaacagactcaggcacttatctc

SEQ ID NO: 13413 - DNA, 108 bp, synthetic construct; identical to SEQ ID NO: 13371
  source 1..108: mol_type = other DNA

SEQ ID NO: 13414 - DNA, 99 bp, synthetic construct; identical to SEQ ID NO: 13410
  source 1..99: mol_type = other DNA

SEQ ID NO: 13415 - DNA, 108 bp, synthetic construct; identical to SEQ ID NO: 13359
  source 1..108: mol_type = other DNA

SEQ ID NO: 13416 - DNA, 99 bp, synthetic construct
  source 1..99: mol_type = other DNA
ggaagcagcagagggtttgaagccacatacaataaagaaaccacctccttccacttgcagaaagcctcagtgcaagagtcagactcggctgtgtactac

SEQ ID NO: 13417 - DNA, 108 bp, synthetic construct; identical to SEQ ID NO: 13363
  source 1..108: mol_type = other DNA

SEQ ID NO: 13418 - DNA, 99 bp, synthetic construct; identical to SEQ ID NO: 13402
  source 1..99: mol_type = other DNA

SEQ ID NO: 13419 - DNA, 108 bp, synthetic construct; identical to SEQ ID NO: 13391
  source 1..108: mol_type = other DNA

SEQ ID NO: 13420 - DNA, 99 bp, synthetic construct; identical to SEQ ID NO: 13358
  source 1..99: mol_type = other DNA

SEQ ID NO: 13421 - DNA, 108 bp, synthetic construct; identical to SEQ ID NO: 13383
  source 1..108: mol_type = other DNA

SEQ ID NO: 13422 - DNA, 99 bp, synthetic construct; identical to SEQ ID NO: 13400
  source 1..99: mol_type = other DNA

SEQ ID NO: 13423 - DNA, 111 bp, synthetic construct; identical to SEQ ID NO: 13357
  source 1..111: mol_type = other DNA

SEQ ID NO: 13424 - DNA, 99 bp, synthetic construct
  source 1..99: mol_type = other DNA
aaggaagatggacgattcacaatcttcttcaataaaagggagaaaaagctctccttgcacatcacagactctcagcctggagactcagccacctacttc

SEQ ID NO: 13425 - DNA, 108 bp, synthetic construct; identical to SEQ ID NO: 13371
  source 1..108: mol_type = other DNA

SEQ ID NO: 13426 - DNA, 99 bp, synthetic construct; identical to SEQ ID NO: 13364
  source 1..99: mol_type = other DNA

SEQ ID NO: 13427 - DNA, 108 bp, synthetic construct; identical to SEQ ID NO: 13393
  source 1..108: mol_type = other DNA

SEQ ID NO: 13428 - DNA, 99 bp, synthetic construct
  source 1..99: mol_type = other DNA
cccgagcaccaagggttccacgccactctccataagagcagcagctccttccatctgcagaagtcctcagcgcagctgtcagactctgccctgtactac

SEQ ID NO: 13429 - DNA, 108 bp, synthetic construct; identical to SEQ ID NO: 13391
  source 1..108: mol_type = other DNA

SEQ ID NO: 13430 - DNA, 99 bp, synthetic construct
  source 1..99: mol_type = other DNA
caaggagtgaacggcttcgaggctgagttcagcaagagcgactcttccttccacctgcggaaagcctccgtgcactggagcgactcggctgtgtacttc

SEQ ID NO: 13431 - DNA, 105 bp, synthetic construct; identical to SEQ ID NO: 13379
  source 1..105: mol_type = other DNA

SEQ ID NO: 13432 - DNA, 99 bp, synthetic construct
  source 1..99: mol_type = other DNA
aaagaagaagggagattcacaattcacctcaataaagccagtctgcatttctccctgcacatcagagactcccagcccagtgactctgctctctatctc

SEQ ID NO: 13433 - DNA, 105 bp, synthetic construct; identical to SEQ ID NO: 13379
  source 1..105: mol_type = other DNA

SEQ ID NO: 13434 - DNA, 99 bp, synthetic construct
  source 1..99: mol_type = other DNA
agggaagacggaagattcacagttttcttgaacaaaagcggcaaacacttctcactgcacatcacagcctcccagcctgaagacacagcagtgtacctc

SEQ ID NO: 13435 - DNA, 111 bp, synthetic construct
  source 1..111: mol_type = other DNA
aaatatgaacaaaattttacccaggaaaaatttcccatcagtcatcccaacttatccttttcatctatgacagttttaaatgcatatcttgaagacagaggcttatatctc

SEQ ID NO: 13436 - DNA, 99 bp, synthetic construct
  source 1..99: mol_type = other DNA
aagcgcagtggaagactaagagccacccttgacacctccagccaaagtagctctctgtccatcactgctgctcagtgtgaagacactgctgtgtacttc

SEQ ID NO: 13437 - DNA, 108 bp, synthetic construct; identical to SEQ ID NO: 13371
  source 1..108: mol_type = other DNA

SEQ ID NO: 13438 - DNA, 99 bp, synthetic construct; identical to SEQ ID NO: 13400
  source 1..99: mol_type = other DNA

SEQ ID NO: 13439 - DNA, 108 bp, synthetic construct; identical to SEQ ID NO: 13393
  source 1..108: mol_type = other DNA

SEQ ID NO: 13440 - DNA, 99 bp, synthetic construct
  source 1..99: mol_type = other DNA
aaggaagatggacgattcacaatcttcttcaataaaagggagaaaaatctctccttgcacatcaaagactctcagcctggagactcagccacctacttc

SEQ ID NO: 13441 - DNA, 108 bp, synthetic construct; identical to SEQ ID NO: 13383
  source 1..108: mol_type = other DNA

SEQ ID NO: 13442 - DNA, 99 bp, synthetic construct
  source 1..99: mol_type = other DNA
caaggagtgaatggctttgaggctgagttcagcaagagcgactcttccttccacctgcggaaagcctccgtgcactggagcgactcggctgtgtacttc

SEQ ID NO: 13443 - DNA, 108 bp, synthetic construct; identical to SEQ ID NO: 13363
  source 1..108: mol_type = other DNA

SEQ ID NO: 13444 - DNA, 99 bp, synthetic construct
  source 1..99: mol_type = other DNA
gcaacagtgggtcattattctctgaactttcagaagccaaaaagttccatcggactcatcatcaccgccacacagattgaggactcggcagtatatttc

SEQ ID NO: 13445 - DNA, 108 bp, synthetic construct; identical to SEQ ID NO: 13363
  source 1..108: mol_type = other DNA

SEQ ID NO: 13446 - DNA, 99 bp, synthetic construct; identical to SEQ ID NO: 13378
  source 1..99: mol_type = other DNA

SEQ ID NO: 13447 - DNA, 111 bp, synthetic construct
  source 1..111: mol_type = other DNA
atggagaagtctaaactgtttaaggatcagttttcagttgaaagaccagatggttcatatttcactctgaaaatccaacccacagcactggaggactcagctgtgtacttc

SEQ ID NO: 13448 - DNA, 99 bp, synthetic construct
  source 1..99: mol_type = other DNA
aaggaagaaggcagatttacagctcacctcaatagagccaacttgcatgtttccctacacatcagagaaccacaacccagtgactctgctgtctacctc

SEQ ID NO: 13449 - DNA, 105 bp, synthetic construct; identical to SEQ ID NO: 13379
  source 1..105: mol_type = other DNA

SEQ ID NO: 13450 - DNA, 99 bp, synthetic construct
  source 1..99: mol_type = other DNA
aagcacactggaagactgacatccaccacagtcactaacgaacgtcgcggctctttgcacatttcctcctcccagacaacagactcaggcacttatttc

SEQ ID NO: 13451 - DNA, 108 bp, synthetic construct
  source 1..108: mol_type = other DNA
attcgaaatgagacggtgcccagtcgttttatacctgaatgcccagacagctccaagctacttttacatatatctgccgtggatccagaagactcagctgtctatttt

SEQ ID NO: 13452 - DNA, 99 bp, synthetic construct
  source 1..99: mol_type = other DNA
aagaaagaaggcagattgacagtttacctcaatagagccagcctgcatgtttccctgcacatcagagactcccagcccagtgactctgccgtctacctc

SEQ ID NO: 13453 - DNA, 108 bp, synthetic construct; identical to SEQ ID NO: 13451
  source 1..108: mol_type = other DNA

SEQ ID NO: 13454 - DNA, 99 bp, synthetic construct; identical to SEQ ID NO: 13428
  source 1..99: mol_type = other DNA

SEQ ID NO: 13455 - DNA, 108 bp, synthetic construct
  source 1..108: mol_type = other DNA
attgtaaacgaaacagttccaaggcgcttctcacctcagtcttcagataaagctcatttgaatcttcgaatcaagtctgtagagccggaggactctgctgtgtatctc

SEQ ID NO: 13456 - DNA, 99 bp, synthetic construct
  source 1..99: mol_type = other DNA
aaagaagaacaaggactcactgtcttactgaacaagaaagacaaacaactctctctgaacctcacagctgcccatcctggggactcagccgtgtacttc

SEQ ID NO: 13457 - DNA, 108 bp, synthetic construct; identical to SEQ ID NO: 13359
  source 1..108: mol_type = other DNA

SEQ ID NO: 13458 - DNA, 99 bp, synthetic construct; identical to SEQ ID NO: 13398
  source 1..99: mol_type = other DNA

SEQ ID NO: 13459 - DNA, 108 bp, synthetic construct; identical to SEQ ID NO: 13363
  source 1..108: mol_type = other DNA

SEQ ID NO: 13460 - DNA, 99 bp, synthetic construct
  source 1..99: mol_type = other DNA
acaaccaatagtatggctttcctggctattgcctctgacagaaagtcaagcaccttgatcctgactcatgtcagcctgagagacgcggctgtgtaccac

SEQ ID NO: 13461 - DNA, 108 bp, synthetic construct; identical to SEQ ID NO: 13451
  source 1..108: mol_type = other DNA

SEQ ID NO: 13462 - DNA, 93 bp, synthetic construct
  source 1..93: mol_type = other DNA
aatgaagtggcatctctgtttatctctgctgaccggaagctcagcactctgagcctgccctgggtttccctgagagatgctgctgtgtattac

SEQ ID NO: 13463 - DNA, 108 bp, synthetic construct; identical to SEQ ID NO: 13371
  source 1..108: mol_type = other DNA

SEQ ID NO: 13464 - DNA, 99 bp, synthetic construct
  source 1..99: mol_type = other DNA
aacgaaggacaaggattcactgtcctactgaacaagaaagacaaacaactctctctgaacctcacagctgcccatcctggggactcagccgtgtacttc

SEQ ID NO: 13465 - DNA, 108 bp, synthetic construct; identical to SEQ ID NO: 13359
  source 1..108: mol_type = other DNA

SEQ ID NO: 13466 - DNA, 99 bp, synthetic construct; identical to SEQ ID NO: 13430
  source 1..99: mol_type = other DNA

SEQ ID NO: 13467 - DNA, 108 bp, synthetic construct; identical to SEQ ID NO: 13363
  source 1..108: mol_type = other DNA

SEQ ID NO: 13468 - DNA, 99 bp, synthetic construct
  source 1..99: mol_type = other DNA
aaggagaatgggaggctaaagtcagcatttgattctaaggagcgctacagcaccctgcacatcagggatgcccagctggaggactcaggcacttacttc

SEQ ID NO: 13469 - DNA, 108 bp, synthetic construct; identical to SEQ ID NO: 13451
  source 1..108: mol_type = other DNA

SEQ ID NO: 13470 - DNA, 99 bp, synthetic construct
  source 1..99: mol_type = other DNA
ggaagcagcagaggttttgaagctacatatgataaagggaccacctccttccacttgcggaaagcctcagtgcaagagtcagactcggctgtgtactac

SEQ ID NO: 13471 - DNA, 108 bp, synthetic construct; identical to SEQ ID NO: 13359
  source 1..108: mol_type = other DNA

SEQ ID NO: 13472 - DNA, 99 bp, synthetic construct; identical to SEQ ID NO: 13402
  source 1..99: mol_type = other DNA

SEQ ID NO: 13473 - DNA, 108 bp, synthetic construct; identical to SEQ ID NO: 13359
  source 1..108: mol_type = other DNA

SEQ ID NO: 13474 - DNA, 99 bp, synthetic construct; identical to SEQ ID NO: 13362
  source 1..99: mol_type = other DNA

SEQ ID NO: 13475 - DNA, 108 bp, synthetic construct; identical to SEQ ID NO: 13359
  source 1..108: mol_type = other DNA

SEQ ID NO: 13476 - DNA, 99 bp, synthetic construct
  source 1..99: mol_type = other DNA
cagagaggtggaagactgacatcctccgcagccagtaacgaaagtcgcagctctttgcacatttcctcctcccagatcacagactcaggcacttatctc

SEQ ID NO: 13477 - DNA, 111 bp, synthetic construct; identical to SEQ ID NO: 13447
  source 1..111: mol_type = other DNA

SEQ ID NO: 13478 - DNA, 99 bp, synthetic construct; identical to SEQ ID NO: 13442
  source 1..99: mol_type = other DNA

SEQ ID NO: 13479 - DNA, 111 bp, synthetic construct; identical to SEQ ID NO: 13357
  source 1..111: mol_type = other DNA

SEQ ID NO: 13480 - DNA, 99 bp, synthetic construct
  source 1..99: mol_type = other DNA
aaggaagatggacgattcacaatcttcttcaataaaagggagaaaaagctctccttgcacattgcagactctcagcctggagactcagccacctacttc

SEQ ID NO: 13481 - DNA, 108 bp, synthetic construct; identical to SEQ ID NO: 13455
  source 1..108: mol_type = other DNA

SEQ ID NO: 13482 - DNA, 99 bp, synthetic construct; identical to SEQ ID NO: 13366
  source 1..99: mol_type = other DNA

SEQ ID NO: 13483 - DNA, 108 bp, synthetic construct; identical to SEQ ID NO: 13359
  source 1..108: mol_type = other DNA

SEQ ID NO: 13484 - DNA, 99 bp, synthetic construct; identical to SEQ ID NO: 13408
  source 1..99: mol_type = other DNA

SEQ ID NO: 13485 - DNA, 108 bp, synthetic construct; identical to SEQ ID NO: 13359
  source 1..108: mol_type = other DNA

SEQ ID NO: 13486 - DNA, 99 bp, synthetic construct; identical to SEQ ID NO: 13416
  source 1..99: mol_type = other DNA

SEQ ID NO: 13487 - DNA, 108 bp, synthetic construct; identical to SEQ ID NO: 13359
  source 1..108: mol_type = other DNA

SEQ ID NO: 13488 - DNA, 99 bp, synthetic construct
  source 1..99: mol_type = other DNA
aagaaggaaggcagattcacagctcacctcaataaggccagcctgcatgtatccctgcacatcaaagactcccaacccagtgactctgctctctacttc

SEQ ID NO: 13489 - DNA, 108 bp, synthetic construct; identical to SEQ ID NO: 13359
  source 1..108: mol_type = other DNA

SEQ ID NO: 13490 - DNA, 99 bp, synthetic construct; identical to SEQ ID NO: 13416
  source 1..99: mol_type = other DNA

SEQ ID NO: 13491 - DNA, 108 bp, synthetic construct; identical to SEQ ID NO: 13359
  source 1..108: mol_type = other DNA

SEQ ID NO: 13492 - DNA, 99 bp, synthetic construct; identical to SEQ ID NO: 13432
  source 1..99: mol_type = other DNA

SEQ ID NO: 13493 - DNA, 108 bp, synthetic construct; identical to SEQ ID NO: 13393
  source 1..108: mol_type = other DNA

SEQ ID NO: 13494 - DNA, 99 bp, synthetic construct; identical to SEQ ID NO: 13364
  source 1..99: mol_type = other DNA

SEQ ID NO: 13495 - DNA, 108 bp, synthetic construct; identical to SEQ ID NO: 13391
  source 1..108: mol_type = other DNA

SEQ ID NO: 13496 - DNA, 99 bp, synthetic construct; identical to SEQ ID NO: 13412
  source 1..99: mol_type = other DNA

SEQ ID NO: 13497 - DNA, 108 bp, synthetic construct; identical to SEQ ID NO: 13391
  source 1..108: mol_type = other DNA

SEQ ID NO: 13498 - DNA, 99 bp, synthetic construct; identical to SEQ ID NO: 13358
  source 1..99: mol_type = other DNA

SEQ ID NO: 13499 - DNA, 111 bp, synthetic construct; identical to SEQ ID NO: 13447
  source 1..111: mol_type = other DNA

SEQ ID NO: 13500 - DNA, 99 bp, synthetic construct
  source 1..99: mol_type = other DNA
caaggagtgaatggctttgaggctgagttcatcaagagtaactcttccttccacctgcggaaagcctctgtgcactggagcgactcggctgtgtacttc

SEQ ID NO: 13501 - DNA, 111 bp, synthetic construct; identical to SEQ ID NO: 13435
  source 1..111: mol_type = other DNA

SEQ ID NO: 13502 - DNA, 99 bp, synthetic construct; identical to SEQ ID NO: 13430
  source 1..99: mol_type = other DNA

SEQ ID NO: 13503 - DNA, 108 bp, synthetic construct; identical to SEQ ID NO: 13383
  source 1..108: mol_type = other DNA

SEQ ID NO: 13504 - DNA, 99 bp, synthetic construct; identical to SEQ ID NO: 13410
  source 1..99: mol_type = other DNA

SEQ ID NO: 13505 - DNA, 108 bp, synthetic construct; identical to SEQ ID NO: 13383
  source 1..108: mol_type = other DNA

SEQ ID NO: 13506 - DNA, 99 bp, synthetic construct
  source 1..99: mol_type = other DNA
ggaatcagcagaggttttgaagctacatatgataaaagaacaacgtccttccacttgcagaaagcctcagtgcaggagtcagactctgctgtgtactac

SEQ ID NO: 13507 - DNA, 108 bp, synthetic construct; identical to SEQ ID NO: 13383
  source 1..108: mol_type = other DNA

SEQ ID NO: 13508 - DNA, 99 bp, synthetic construct; identical to SEQ ID NO: 13456
  source 1..99: mol_type = other DNA

SEQ ID NO: 13509 - DNA, 108 bp, synthetic construct; identical to SEQ ID NO: 13383
  source 1..108: mol_type = other DNA

SEQ ID NO: 13510 - DNA, 99 bp, synthetic construct; identical to SEQ ID NO: 13436
  source 1..99: mol_type = other DNA

SEQ ID NO: 13511 - DNA, 108 bp, synthetic construct; identical to SEQ ID NO: 13451
  source 1..108: mol_type = other DNA

SEQ ID NO: 13512 - DNA, 99 bp, synthetic construct; identical to SEQ ID NO: 13366
  source 1..99: mol_type = other DNA

SEQ ID NO: 13513 - DNA, 108 bp, synthetic construct; identical to SEQ ID NO: 13451
  source 1..108: mol_type = other DNA

SEQ ID NO: 13514 - DNA, 99 bp, synthetic construct
  source 1..99: mol_type = other DNA
aagcgcagtggaagactcagagccacccttgacacttccagccagagcagctccctgtccatcactggtactctagctacagacactgctgtgtacttc

SEQ ID NO: 13515 - DNA, 111 bp, synthetic construct; identical to SEQ ID NO: 13357
  source 1..111: mol_type = other DNA

SEQ ID NO: 13516 - DNA, 99 bp, synthetic construct
  source 1..99: mol_type = other DNA
aaacagaatcaaagactcacccttttatttgataagaaaaccaaacacctttccctgcacattacagccactcagcctggagactcagccatctacttc

SEQ ID NO: 13517 - DNA, 111 bp, synthetic construct; identical to SEQ ID NO: 13357
  source 1..111: mol_type = other DNA

SEQ ID NO: 13518 - DNA, 99 bp, synthetic construct; identical to SEQ ID NO: 13358
  source 1..99: mol_type = other DNA

SEQ ID NO: 13519 - DNA, 108 bp, synthetic construct
  source 1..108: mol_type = other DNA
aacagcgaaggagacatccctaaaggatacagggtctcacggaagaagcgggagcatttctccctgattctggattctgctaaaacaaaccagacatctgtgtacttc

SEQ ID NO: 13520 - DNA, 99 bp, synthetic construct; identical to SEQ ID NO: 13410
  source 1..99: mol_type = other DNA

SEQ ID NO: 13521 - DNA, 108 bp, synthetic construct; identical to SEQ ID NO: 13455
  source 1..108: mol_type = other DNA

SEQ ID NO: 13522 - DNA, 99 bp, synthetic construct
  source 1..99: mol_type = other DNA
aagcagagtgggagactgacatccacaacagtcattaaagaacgtcgcagctctttgcacatttcctcctcccagatcacagactcaggcacttatctc

SEQ ID NO: 13523 - DNA, 108 bp, synthetic construct; identical to SEQ ID NO: 13359
  source 1..108: mol_type = other DNA

SEQ ID NO: 13524 - DNA, 99 bp, synthetic construct; identical to SEQ ID NO: 13362
  source 1..99: mol_type = other DNA

SEQ ID NO: 13525 - DNA, 108 bp, synthetic construct; identical to SEQ ID NO: 13359
  source 1..108: mol_type = other DNA

SEQ ID NO: 13526 - DNA, 99 bp, synthetic construct
  source 1..99: mol_type = other DNA
aagcagacccaaggactcatcgttttactggataagaaagccaaacgcttctccctgcacatcacagacacccagcctggagactcagccatgtacttc

SEQ ID NO: 13527 - DNA, 108 bp, synthetic construct; identical to SEQ ID NO: 13359
  source 1..108: mol_type = other DNA

SEQ ID NO: 13528 - DNA, 99 bp, synthetic construct; identical to SEQ ID NO: 13404
  source 1..99: mol_type = other DNA

SEQ ID NO: 13529 - DNA, 108 bp, synthetic construct; identical to SEQ ID NO: 13359
  source 1..108: mol_type = other DNA

SEQ ID NO: 13530 - DNA, 99 bp, synthetic construct; identical to SEQ ID NO: 13456
  source 1..99: mol_type = other DNA

SEQ ID NO: 13531 - DNA, 108 bp, synthetic construct; identical to SEQ ID NO: 13359
  source 1..108: mol_type = other DNA

SEQ ID NO: 13532 - DNA, 99 bp, synthetic construct; identical to SEQ ID NO: 13362
  source 1..99: mol_type = other DNA

SEQ ID NO: 13533 - DNA, 108 bp, synthetic construct; identical to SEQ ID NO: 13393
  source 1..108: mol_type = other DNA

SEQ ID NO: 13534 - DNA, 99 bp, synthetic construct; identical to SEQ ID NO: 13526
  source 1..99: mol_type = other DNA

SEQ ID NO: 13535 - DNA, 108 bp, synthetic construct; identical to SEQ ID NO: 13363
  source 1..108: mol_type = other DNA

SEQ ID NO: 13536 - DNA, 99 bp, synthetic construct; identical to SEQ ID NO: 13416
  source 1..99: mol_type = other DNA

SEQ ID NO: 13537 - DNA, 108 bp, synthetic construct; identical to SEQ ID NO: 13363
  source 1..108: mol_type = other DNA

SEQ ID NO: 13538 - DNA, 99 bp, synthetic construct
  source 1..99: mol_type = other DNA
aagcagatccaaggactcatcgttttactggataagaaagccaaacgcttctccctgcacatcacagacacccagcctgcagactcagccatgtacttc

SEQ ID NO: 13539 - DNA, 108 bp, synthetic construct; identical to SEQ ID NO: 13391
  source 1..108: mol_type = other DNA

SEQ ID NO: 13540 - DNA, 99 bp, synthetic construct; identical to SEQ ID NO: 13358
  source 1..99: mol_type = other DNA

SEQ ID NO: 13541 - DNA, 111 bp, synthetic construct; identical to SEQ ID NO: 13435
  source 1..111: mol_type = other DNA

SEQ ID NO: 13542 - DNA, 99 bp, synthetic construct; identical to SEQ ID NO: 13362
  source 1..99: mol_type = other DNA

SEQ ID NO: 13543 - DNA, 108 bp, synthetic construct; identical to SEQ ID NO: 13383
  source 1..108: mol_type = other DNA

SEQ ID NO: 13544 - DNA, 99 bp, synthetic construct; identical to SEQ ID NO: 13380
  source 1..99: mol_type = other DNA

SEQ ID NO: 13545 - DNA, 108 bp, synthetic construct; identical to SEQ ID NO: 13383
  source 1..108: mol_type = other DNA

SEQ ID NO: 13546 - DNA, 99 bp, synthetic construct; identical to SEQ ID NO: 13380
  source 1..99: mol_type = other DNA

SEQ ID NO: 13547 - DNA, 105 bp, synthetic construct; identical to SEQ ID NO: 13379
  source 1..105: mol_type = other DNA

SEQ ID NO: 13548 - DNA, 99 bp, synthetic construct; identical to SEQ ID NO: 13408
  source 1..99: mol_type = other DNA

SEQ ID NO: 13549 - DNA, 108 bp, synthetic construct; identical to SEQ ID NO: 13451
  source 1..108: mol_type = other DNA

SEQ ID NO: 13550 - DNA, 99 bp, synthetic construct; identical to SEQ ID NO: 13370
  source 1..99: mol_type = other DNA

SEQ ID NO: 13551 - DNA, 111 bp, synthetic construct; identical to SEQ ID NO: 13357
  source 1..111: mol_type = other DNA

SEQ ID NO: 13552 - DNA, 96 bp, synthetic construct
  source 1..96: mol_type = other DNA
cctactggaaaacagacatcctcaacagtcactaagggacgtcacagctctttgactatatcctcctcccagaccacagactcaggcacttatttc

SEQ ID NO: 13553 - DNA, 111 bp, synthetic construct; identical to SEQ ID NO: 13357
  source 1..111: mol_type = other DNA

SEQ ID NO: 13554 - DNA, 99 bp, synthetic construct; identical to SEQ ID NO: 13468
  source 1..99: mol_type = other DNA

SEQ ID NO: 13555 - DNA, 108 bp, synthetic construct; identical to SEQ ID NO: 13371
  source 1..108: mol_type = other DNA

SEQ ID NO: 13556 - DNA, 96 bp, synthetic construct; identical to SEQ ID NO: 13552
  source 1..96: mol_type = other DNA

SEQ ID NO: 13557 - DNA, 108 bp, synthetic construct; identical to SEQ ID NO: 13455
  source 1..108: mol_type = other DNA

SEQ ID NO: 13558 - DNA, 99 bp, synthetic construct; identical to SEQ ID NO: 13412
  source 1..99: mol_type = other DNA

SEQ ID NO: 13559 - DNA, 108 bp, synthetic construct; identical to SEQ ID NO: 13455
  source 1..108: mol_type = other DNA

SEQ ID NO: 13560 - DNA, 99 bp, synthetic construct
  source 1..99: mol_type = other DNA
aaggagaatgggaggctaaagtcagcatttgattctaaggagctctacagcaccctgcacatcagggatgcccagctggaggactcaggcacttacttc

SEQ ID NO: 13561 - DNA, 108 bp, synthetic construct; identical to SEQ ID NO: 13359
  source 1..108: mol_type = other DNA

SEQ ID NO: 13562 - DNA, 99 bp, synthetic construct; identical to SEQ ID NO: 13444
  source 1..99: mol_type = other DNA

SEQ ID NO: 13563 - DNA, 108 bp, synthetic construct; identical to SEQ ID NO: 13359
  source 1..108: mol_type = other DNA

SEQ ID NO: 13564 - DNA, 99 bp, synthetic construct; identical to SEQ ID NO: 13402
  source 1..99: mol_type = other DNA

SEQ ID NO: 13565 - DNA, 108 bp, synthetic construct; identical to SEQ ID NO: 13359
  source 1..108: mol_type = other DNA

SEQ ID NO: 13566 - DNA, 99 bp, synthetic construct; identical to SEQ ID NO: 13360
  source 1..99: mol_type = other DNA

SEQ ID NO: 13567 - DNA, 108 bp, synthetic construct; identical to SEQ ID NO: 13393
  source 1..108: mol_type = other DNA

SEQ ID NO: 13568 - DNA, 99 bp, synthetic construct; identical to SEQ ID NO: 13416
  source 1..99: mol_type = other DNA

SEQ ID NO: 13569 - DNA, 108 bp, synthetic construct; identical to SEQ ID NO: 13393
  source 1..108: mol_type = other DNA

SEQ ID NO: 13570 - DNA, 99 bp, synthetic construct
  source 1..99: mol_type = other DNA
aaagaagaaggcagattcacaattcacctcaataaagccagtctgcatttctcgctacacatcagagactcccagcccagtgactctgctctctacctc

SEQ ID NO: 13571 - DNA, 108 bp, synthetic construct; identical to SEQ ID NO: 13363
  source 1..108: mol_type = other DNA

SEQ ID NO: 13572 - DNA, 99 bp, synthetic construct; identical to SEQ ID NO: 13392
  source 1..99: mol_type = other DNA

SEQ ID NO: 13573 - DNA, 108 bp, synthetic construct; identical to SEQ ID NO: 13363
  source 1..108: mol_type = other DNA

SEQ ID NO: 13574 - DNA, 99 bp, synthetic construct; identical to SEQ ID NO: 13416
  source 1..99: mol_type = other DNA

SEQ ID NO: 13575 - DNA, 108 bp, synthetic construct; identical to SEQ ID NO: 13391
  source 1..108: mol_type = other DNA

SEQ ID NO: 13576 - DNA, 99 bp, synthetic construct; identical to SEQ ID NO: 13400
  source 1..99: mol_type = other DNA

SEQ ID NO: 13577 - DNA, 111 bp, synthetic construct; identical to SEQ ID NO: 13435
  source 1..111: mol_type = other DNA

SEQ ID NO: 13578 - DNA, 99 bp, synthetic construct
  source 1..99: mol_type = other DNA
ggaagcagcagagggtttgaagccacatacaataaagaagccacctccttccacttgcagaaagcctcagtgcaagagtcagactcggctgtgtactac

SEQ ID NO: 13579 - DNA, 108 bp, synthetic construct; identical to SEQ ID NO: 13383
  source 1..108: mol_type = other DNA

SEQ ID NO: 13580 - DNA, 99 bp, synthetic construct; identical to SEQ ID NO: 13398
  source 1..99: mol_type = other DNA

SEQ ID NO: 13581 - DNA, 105 bp, synthetic construct; identical to SEQ ID NO: 13379
  source 1..105: mol_type = other DNA

SEQ ID NO: 13582 - DNA, 99 bp, synthetic construct; identical to SEQ ID NO: 13480
  source 1..99: mol_type = other DNA

SEQ ID NO: 13583 - DNA, 105 bp, synthetic construct; identical to SEQ ID NO: 13379
  source 1..105: mol_type = other DNA

SEQ ID NO: 13584 - DNA, 99 bp, synthetic construct; identical to SEQ ID NO: 13416
  source 1..99: mol_type = other DNA

SEQ ID NO: 13585 - DNA, 105 bp, synthetic construct; identical to SEQ ID NO: 13379
  source 1..105: mol_type = other DNA

SEQ ID NO: 13586 - DNA, 99 bp, synthetic construct; identical to SEQ ID NO: 13400
  source 1..99: mol_type = other DNA

SEQ ID NO: 13587 - DNA, 105 bp, synthetic construct; identical to SEQ ID NO: 13379
  source 1..105: mol_type = other DNA

SEQ ID NO: 13588 - DNA, 99 bp, synthetic construct; identical to SEQ ID NO: 13384
  source 1..99: mol_type = other DNA

SEQ ID NO: 13589 - DNA, 108 bp, synthetic construct; identical to SEQ ID NO: 13451
  source 1..108: mol_type = other DNA

SEQ ID NO: 13590 - DNA, 99 bp, synthetic construct; identical to SEQ ID NO: 13522
  source 1..99: mol_type = other DNA

SEQ ID NO: 13591 - DNA, 108 bp, synthetic construct; identical to SEQ ID NO: 13451
  source 1..108: mol_type = other DNA

SEQ ID NO: 13592 - DNA, 99 bp, synthetic construct; identical to SEQ ID NO: 13416
  source 1..99: mol_type = other DNA

SEQ ID NO: 13593 - DNA, 108 bp, synthetic construct; identical to SEQ ID NO: 13451
  source 1..108: mol_type = other DNA

SEQ ID NO: 13594 - DNA, 99 bp, synthetic construct; identical to SEQ ID NO: 13424
  source 1..99: mol_type = other DNA

SEQ ID NO: 13595 - DNA, 111 bp, synthetic construct; identical to SEQ ID NO: 13373
  source 1..111: mol_type = other DNA

SEQ ID NO: 13596 - DNA, 99 bp, synthetic construct
  source 1..99: mol_type = other DNA
aaggaagatggacgattcacaatcttcttcaataaaagggagaaaaagctctccttgcacatcacagactctcagcctggagactcagctacctacttc

SEQ ID NO: 13597 - DNA, 108 bp, synthetic construct
  source 1..108: mol_type = other DNA
agagataaaggaaacctgcccagcagattctcagtccaacagtttgatgactatcactctgagatgaacatgagtgccttggagctagaggactctgccgtgtacttc

SEQ ID NO: 13598 - DNA, 99 bp, synthetic construct; identical to SEQ ID NO: 13368
  source 1..99: mol_type = other DNA

SEQ ID NO: 13599 - DNA, 111 bp, synthetic construct; identical to SEQ ID NO: 13357
  source 1..111: mol_type = other DNA

SEQ ID NO: 13600 - DNA, 99 bp, synthetic construct; identical to SEQ ID NO: 13364
  source 1..99: mol_type = other DNA

SEQ ID NO: 13601 - DNA, 111 bp, synthetic construct; identical to SEQ ID NO: 13357
  source 1..111: mol_type = other DNA

SEQ ID NO: 13602 - DNA, 99 bp, synthetic construct; identical to SEQ ID NO: 13416
  source 1..99: mol_type = other DNA

SEQ ID NO: 13603 - DNA, 111 bp, synthetic construct; identical to SEQ ID NO: 13357
  source 1..111: mol_type = other DNA

SEQ ID NO: 13604 - DNA, 99 bp, synthetic construct
  source 1..99: mol_type = other DNA
agggaagacggaagactcacagttttcttgaacaaaagcggcaaacacttctcactgcacatcacagcctcccagcctgaagacacagcagtgtacctc

SEQ ID NO: 13605 - DNA, 108 bp, synthetic construct; identical to SEQ ID NO: 13371
  source 1..108: mol_type = other DNA

SEQ ID NO: 13606 - DNA, 99 bp, synthetic construct; identical to SEQ ID NO: 13408
  source 1..99: mol_type = other DNA

SEQ ID NO: 13607 - DNA, 108 bp, synthetic construct; identical to SEQ ID NO: 13371
  source 1..108: mol_type = other DNA

SEQ ID NO: 13608 - DNA, 99 bp, synthetic construct
  source 1..99: mol_type = other DNA
ggaagcagcagaggttttgaagctacatatgataaagggaccacgtccttccacttgcagaaagcctcagtgcaggaatcagactcggctgtgtactac

SEQ ID NO: 13609 - DNA, 108 bp, synthetic construct; identical to SEQ ID NO: 13371
  source 1..108: mol_type = other DNA

SEQ ID NO: 13610 - DNA, 99 bp, synthetic construct
  source 1..99: mol_type = other DNA
ggaatcagcagaggttttgaagctacatatgataaaggaacaacgtccttccacttgcagaaagcctcagtgcaggagtcagactctgctgtgtactac

SEQ ID NO: 13611 - DNA, 108 bp, synthetic construct; identical to SEQ ID NO: 13455
  source 1..108: mol_type = other DNA

SEQ ID NO: 13612 - DNA, 99 bp, synthetic construct
  source 1..99: mol_type = other DNA
aagcagagtgggagactgacatccacaacagtcatcaaagaacgtcgcagctctttgcacatttcctcctcccagatcacagactcaggcacttatctc

SEQ ID NO: 13613 - DNA, 108 bp, synthetic construct; identical to SEQ ID NO: 13455
  source 1..108: mol_type = other DNA

SEQ ID NO: 13614 - DNA, 99 bp, synthetic construct
  source 1..99: mol_type = other DNA
aaggagaatgggaggttaaagtcaacattcaattctaaggagagctacagcaccctgcacatcagggatgcccagctggaggactcaggcacttacttc

SEQ ID NO: 13615 - DNA, 108 bp, synthetic construct; identical to SEQ ID NO: 13455
  source 1..108: mol_type = other DNA

SEQ ID NO: 13616 - DNA, 99 bp, synthetic construct; identical to SEQ ID NO: 13362
  source 1..99: mol_type = other DNA

SEQ ID NO: 13617 - DNA, 108 bp, synthetic construct; identical to SEQ ID NO: 13359
  source 1..108: mol_type = other DNA

SEQ ID NO: 13618 - DNA, 99 bp, synthetic construct; identical to SEQ ID NO: 13570
  source 1..99: mol_type = other DNA

SEQ ID NO: 13619 - DNA, 108 bp, synthetic construct; identical to SEQ ID NO: 13359
  source 1..108: mol_type = other DNA

SEQ ID NO: 13620 - DNA, 99 bp, synthetic construct; identical to SEQ ID NO: 13402
  source 1..99: mol_type = other DNA

SEQ ID NO: 13621 - DNA, 108 bp, synthetic construct; identical to SEQ ID NO: 13359
  source 1..108: mol_type = other DNA

SEQ ID NO: 13622 - DNA, 99 bp, synthetic construct
  source 1..99: mol_type = other DNA
aagcacactggaagactgacatccaccacagtcactaacgaacgtcgcagctctttgcacatttcctcctcccagacaacagactcaggcacttatttc

SEQ ID NO: 13623 - DNA, 108 bp, synthetic construct; identical to SEQ ID NO: 13359
  source 1..108: mol_type = other DNA

SEQ ID NO: 13624 - DNA, 99 bp, synthetic construct; identical to SEQ ID NO: 13398
  source 1..99: mol_type = other DNA

SEQ ID NO: 13625 - DNA, 108 bp, synthetic construct; identical to SEQ ID NO: 13359
  source 1..108: mol_type = other DNA

SEQ ID NO: 13626 - DNA, 99 bp, synthetic construct; identical to SEQ ID NO: 13362
  source 1..99: mol_type = other DNA

SEQ ID NO: 13627 - DNA, 108 bp, synthetic construct; identical to SEQ ID NO: 13393
  source 1..108: mol_type = other DNA

SEQ ID NO: 13628 - DNA, 99 bp, synthetic construct; identical to SEQ ID NO: 13464
  source 1..99: mol_type = other DNA

SEQ ID NO: 13629 - DNA, 108 bp, synthetic construct; identical to SEQ ID NO: 13393
  source 1..108: mol_type = other DNA

SEQ ID NO: 13630 - DNA, 99 bp, synthetic construct; identical to SEQ ID NO: 13378
  source 1..99: mol_type = other DNA

SEQ ID NO: 13631 - DNA, 108 bp, synthetic construct; identical to SEQ ID NO: 13393
  source 1..108: mol_type = other DNA

SEQ ID NO: 13632 - DNA, 99 bp, synthetic construct; identical to SEQ ID NO: 13400
  source 1..99: mol_type = other DNA

SEQ ID NO: 13633 - DNA, 108 bp, synthetic construct; identical to SEQ ID NO: 13393
  source 1..108: mol_type = other DNA

SEQ ID NO: 13634 - DNA, 99 bp, synthetic construct; identical to SEQ ID NO: 13398
  source 1..99: mol_type = other DNA

SEQ ID NO: 13635 - DNA, 108 bp, synthetic construct; identical to SEQ ID NO: 13393
  source 1..108: mol_type = other DNA

SEQ ID NO: 13636 - DNA, 99 bp, synthetic construct
  source 1..99: mol_type = other DNA
aaaggcaccaagggctttgaggccgagtttaggaagagtaactcctctttcaacctgaagaaatccccagcccattggagcgactcagccaagtacttc

SEQ ID NO: 13637 - DNA, 108 bp, synthetic construct; identical to SEQ ID NO: 13393
  source 1..108: mol_type = other DNA

SEQ ID NO: 13638 - DNA, 99 bp, synthetic construct; identical to SEQ ID NO: 13596
  source 1..99: mol_type = other DNA

SEQ ID NO: 13639 - DNA, 108 bp, synthetic construct; identical to SEQ ID NO: 13393
  source 1..108: mol_type = other DNA

SEQ ID NO: 13640 - DNA, 99 bp, synthetic construct; identical to SEQ ID NO: 13428
  source 1..99: mol_type = other DNA

SEQ ID NO: 13641 - DNA, 108 bp, synthetic construct; identical to SEQ ID NO: 13393
  source 1..108: mol_type = other DNA

SEQ ID NO: 13642 - DNA, 99 bp, synthetic construct; identical to SEQ ID NO: 13614
  source 1..99: mol_type = other DNA

SEQ ID NO: 13643 - DNA, 108 bp, synthetic construct; identical to SEQ ID NO: 13363
  source 1..108: mol_type = other DNA

SEQ ID NO: 13644 - DNA, 99 bp, synthetic construct
  source 1..99: mol_type = other DNA
aaggagaatggaaggttaaagtcaacattcaattctaaggagcgctacagcaccctgcacatcaaggatgcacagctggaggactcaggcacttacttc

SEQ ID NO: 13645 - DNA, 108 bp, synthetic construct; identical to SEQ ID NO: 13363
  source 1..108: mol_type = other DNA

SEQ ID NO: 13646 - DNA, 99 bp, synthetic construct; identical to SEQ ID NO: 13444
  source 1..99: mol_type = other DNA

SEQ ID NO: 13647 - DNA, 108 bp, synthetic construct; identical to SEQ ID NO: 13363
  source 1..108: mol_type = other DNA

SEQ ID NO: 13648 - DNA, 99 bp, synthetic construct; identical to SEQ ID NO: 13442
  source 1..99: mol_type = other DNA

SEQ ID NO: 13649 - DNA, 108 bp, synthetic construct; identical to SEQ ID NO: 13363
  source 1..108: mol_type = other DNA

SEQ ID NO: 13650 - DNA, 99 bp, synthetic construct; identical to SEQ ID NO: 13378
  source 1..99: mol_type = other DNA

SEQ ID NO: 13651 - DNA, 108 bp, synthetic construct; identical to SEQ ID NO: 13363
  source 1..108: mol_type = other DNA

SEQ ID NO: 13652 - DNA, 99 bp, synthetic construct; identical to SEQ ID NO: 13480
  source 1..99: mol_type = other DNA

SEQ ID NO: 13653 - DNA, 108 bp, synthetic construct; identical to SEQ ID NO: 13363
  source 1..108: mol_type = other DNA

SEQ ID NO: 13654 - DNA, 99 bp, synthetic construct; identical to SEQ ID NO: 13644
  source 1..99: mol_type = other DNA

SEQ ID NO: 13655 - DNA, 108 bp, synthetic construct
  source 1..108: mol_type = other DNA
aacagggaagctgacacttttgagaagttccaatccagtcggcctaacaattctttctgctctctctacattggctctgcaggcctagagtattctgccatgtacctc

SEQ ID NO: 13656 - DNA, 99 bp, synthetic construct; identical to SEQ ID NO: 13362
  source 1..99: mol_type = other DNA

SEQ ID NO: 13657 - DNA, 108 bp, synthetic construct; identical to SEQ ID NO: 13655
  source 1..108: mol_type = other DNA

SEQ ID NO: 13658 - DNA, 99 bp, synthetic construct; identical to SEQ ID NO: 13362
  source 1..99: mol_type = other DNA

SEQ ID NO: 13659 - DNA, 108 bp, synthetic construct; identical to SEQ ID NO: 13391
  source 1..108: mol_type = other DNA

SEQ ID NO: 13660 - DNA, 99 bp, synthetic construct; identical to SEQ ID NO: 13368
  source 1..99: mol_type = other DNA

SEQ ID NO: 13661 - DNA, 108 bp, synthetic construct; identical to SEQ ID NO: 13391
  source 1..108: mol_type = other DNA

SEQ ID NO: 13662 - DNA, 93 bp, synthetic construct; identical to SEQ ID NO: 13462
  source 1..93: mol_type = other DNA

SEQ ID NO: 13663 - DNA, 111 bp, synthetic construct; identical to SEQ ID NO: 13447
  source 1..111: mol_type = other DNA

SEQ ID NO: 13664 - DNA, 99 bp, synthetic construct; identical to SEQ ID NO: 13480
  source 1..99: mol_type = other DNA

SEQ ID NO: 13665 - DNA, 111 bp, synthetic construct; identical to SEQ ID NO: 13435
  source 1..111: mol_type = other DNA

SEQ ID NO: 13666 - DNA, 99 bp, synthetic construct
  source 1..99: mol_type = other DNA
cagaggagcggccgctactctgtagtcttccagaaatcattcaagtccatcagccttgtcatttcagcctcacagccagaggattcagggacgtacttc

SEQ ID NO: 13667 - DNA, 111 bp, synthetic construct; identical to SEQ ID NO: 13435
  source 1..111: mol_type = other DNA

SEQ ID NO: 13668 - DNA, 99 bp, synthetic construct; identical to SEQ ID NO: 13410
  source 1..99: mol_type = other DNA

SEQ ID NO: 13669 - DNA, 108 bp, synthetic construct; identical to SEQ ID NO: 13383
  source 1..108: mol_type = other DNA

SEQ ID NO: 13670 - DNA, 99 bp, synthetic construct; identical to SEQ ID NO: 13614
  source 1..99: mol_type = other DNA

SEQ ID NO: 13671 - DNA, 108 bp, synthetic construct; identical to SEQ ID NO: 13383
  source 1..108: mol_type = other DNA

SEQ ID NO: 13672 - DNA, 99 bp, synthetic construct
  source 1..99: mol_type = other DNA
aacgaaggacaaggattcactgtcctactgaacaagaaagacacacgactctctctgaacctcacagctgcccatcctggggactcagccgcgtacttc

SEQ ID NO: 13673 - DNA, 105 bp, synthetic construct; identical to SEQ ID NO: 13379
  source 1..105: mol_type = other DNA

SEQ ID NO: 13674 - DNA, 99 bp, synthetic construct; identical to SEQ ID NO: 13666
  source 1..99: mol_type = other DNA

SEQ ID NO: 13675 - DNA, 105 bp, synthetic construct; identical to SEQ ID NO: 13379
  source 1..105: mol_type = other DNA

SEQ ID NO: 13676 - DNA, 99 bp, synthetic construct; identical to SEQ ID NO: 13368
  source 1..99: mol_type = other DNA

SEQ ID NO: 13677 - DNA, 105 bp, synthetic construct; identical to SEQ ID NO: 13379
  source 1..105: mol_type = other DNA

SEQ ID NO: 13678 - DNA, 99 bp, synthetic construct
  source 1..99: mol_type = other DNA
aagcacactggaagactgacatccaccacagtcactaaggaacgtcgcagctctttgcacatttcctcctcccagacaacagactcaggcacttatctc

SEQ ID NO: 13679 - DNA, 108 bp, synthetic construct; identical to SEQ ID NO: 13451
  source 1..108: mol_type = other DNA

SEQ ID NO: 13680 - DNA, 99 bp, synthetic construct; identical to SEQ ID NO: 13410
  source 1..99: mol_type = other DNA

SEQ ID NO: 13681 - DNA, 108 bp, synthetic construct; identical to SEQ ID NO: 13451
  source 1..108: mol_type = other DNA

SEQ ID NO: 13682 - DNA, 99 bp, synthetic construct; identical to SEQ ID NO: 13364
  source 1..99: mol_type = other DNA

SEQ ID NO: 13683 - DNA, 108 bp, synthetic construct; identical to SEQ ID NO: 13451
  source 1..108: mol_type = other DNA

SEQ ID NO: 13684 - DNA, 99 bp, synthetic construct; identical to SEQ ID NO: 13416
  source 1..99: mol_type = other DNA

SEQ ID NO: 13685 - DNA, 108 bp, synthetic construct; identical to SEQ ID NO: 13451
  source 1..108: mol_type = other DNA

SEQ ID NO: 13686 - DNA, 99 bp, synthetic construct; identical to SEQ ID NO: 13364
  source 1..99: mol_type = other DNA

SEQ ID NO: 13687 - DNA, 108 bp, synthetic construct; identical to SEQ ID NO: 13451
  source 1..108: mol_type = other DNA

SEQ ID NO: 13688 - DNA, 99 bp, synthetic construct; identical to SEQ ID NO: 13394
  source 1..99: mol_type = other DNA

SEQ ID NO: 13689 - DNA, 108 bp, synthetic construct; identical to SEQ ID NO: 13451
  source 1..108: mol_type = other DNA

SEQ ID NO: 13690 - DNA, 99 bp, synthetic construct; identical to SEQ ID NO: 13416
  source 1..99: mol_type = other DNA

SEQ ID NO: 13691 - DNA, 111 bp, synthetic construct; identical to SEQ ID NO: 13373
  source 1..111: mol_type = other DNA

SEQ ID NO: 13692 - DNA, 99 bp, synthetic construct; identical to SEQ ID NO: 13430
  source 1..99: mol_type = other DNA

SEQ ID NO: 13693 - DNA, 111 bp, synthetic construct; identical to SEQ ID NO: 13373
  source 1..111: mol_type = other DNA

SEQ ID NO: 13694 - DNA, 99 bp, synthetic construct; identical to SEQ ID NO: 13360
  source 1..99: mol_type = other DNA

SEQ ID NO: 13695 - DNA, 111 bp, synthetic construct; identical to SEQ ID NO: 13373
  source 1..111: mol_type = other DNA

SEQ ID NO: 13696 - DNA, 99 bp, synthetic construct; identical to SEQ ID NO: 13408
  source 1..99: mol_type = other DNA

SEQ ID NO: 13697 - DNA, 111 bp, synthetic construct; identical to SEQ ID NO: 13357
  source 1..111: mol_type = other DNA

SEQ ID NO: 13698 - DNA, 99 bp, synthetic construct; identical to SEQ ID NO: 13410
  source 1..99: mol_type = other DNA

SEQ ID NO: 13699 - DNA, 111 bp, synthetic construct; identical to SEQ ID NO: 13357
  source 1..111: mol_type = other DNA

SEQ ID NO: 13700 - DNA, 99 bp, synthetic construct; identical to SEQ ID NO: 13460
  source 1..99: mol_type = other DNA

SEQ ID NO: 13701 - DNA, 111 bp, synthetic construct; identical to SEQ ID NO: 13357
  source 1..111: mol_type = other DNA

SEQ ID NO: 13702 - DNA, 99 bp, synthetic construct; identical to SEQ ID NO: 13570
  source 1..99: mol_type = other DNA

SEQ ID NO: 13703 - DNA, 111 bp, synthetic construct; identical to SEQ ID NO: 13357
  source 1..111: mol_type = other DNA

SEQ ID NO: 13704 - DNA, 99 bp, synthetic construct; identical to SEQ ID NO: 13410
  source 1..99: mol_type = other DNA

SEQ ID NO: 13705 - DNA, 108 bp, synthetic construct; identical to SEQ ID NO: 13519
  source 1..108: mol_type = other DNA

SEQ ID NO: 13706 - DNA, 99 bp, synthetic construct
  source 1..99: mol_type = other DNA
gagaggagcggccgctattctgtagtcttccagaaatcactcaaatccatcagccttatcatttcagctttacaaccagacgattcgggaaagtatttc

SEQ ID NO: 13707 - DNA, 108 bp, synthetic construct; identical to SEQ ID NO: 13371
  source 1..108: mol_type = other DNA

SEQ ID NO: 13708 - DNA, 99 bp, synthetic construct; identical to SEQ ID NO: 13608
  source 1..99: mol_type = other DNA

SEQ ID NO: 13709 - DNA, 108 bp, synthetic construct; identical to SEQ ID NO: 13371
  source 1..108: mol_type = other DNA

SEQ ID NO: 13710 - DNA, 99 bp, synthetic construct; identical to SEQ ID NO: 13678
  source 1..99: mol_type = other DNA

SEQ ID NO: 13711 - DNA, 108 bp, synthetic construct; identical to SEQ ID NO: 13371
  source 1..108: mol_type = other DNA

SEQ ID NO: 13712 - DNA, 99 bp, synthetic construct; identical to SEQ ID NO: 13430
  source 1..99: mol_type = other DNA

SEQ ID NO: 13713 - DNA, 108 bp, synthetic construct; identical to SEQ ID NO: 13371
  source 1..108: mol_type = other DNA

SEQ ID NO: 13714 - DNA, 99 bp, synthetic construct
  source 1..99: mol_type = other DNA
aagcacactggaagactgacatccaccacagtcactaaagaacgtcgcagctctttgcacatttcctcctcccagacaacagactcaggcacttatttc

SEQ ID NO: 13715 - DNA, 108 bp, synthetic construct; identical to SEQ ID NO: 13371
  source 1..108: mol_type = other DNA

SEQ ID NO: 13716 - DNA, 99 bp, synthetic construct; identical to SEQ ID NO: 13612
  source 1..99: mol_type = other DNA

SEQ ID NO: 13717 - DNA, 108 bp, synthetic construct; identical to SEQ ID NO: 13371
  source 1..108: mol_type = other DNA

SEQ ID NO: 13718 - DNA, 99 bp, synthetic construct; identical to SEQ ID NO: 13578
  source 1..99: mol_type = other DNA

SEQ ID NO: 13719 - DNA, 108 bp, synthetic construct; identical to SEQ ID NO: 13455
  source 1..108: mol_type = other DNA

SEQ ID NO: 13720 - DNA, 99 bp, synthetic construct; identical to SEQ ID NO: 13678
  source 1..99: mol_type = other DNA

SEQ ID NO: 13721 - DNA, 108 bp, synthetic construct; identical to SEQ ID NO: 13455
  source 1..108: mol_type = other DNA

SEQ ID NO: 13722 - DNA, 99 bp, synthetic construct
  source 1..99: mol_type = other DNA
aaacagagccaaagacttacagttttattggataagaaagccaaacgattctccctgcacatcacagccacacagcctgaagattcagccatctacttc

SEQ ID NO: 13723 - DNA, 108 bp, synthetic construct; identical to SEQ ID NO: 13455
  source 1..108: mol_type = other DNA

SEQ ID NO: 13724 - DNA, 99 bp, synthetic construct; identical to SEQ ID NO: 13464
  source 1..99: mol_type = other DNA

SEQ ID NO: 13725 - DNA, 108 bp, synthetic construct; identical to SEQ ID NO: 13455
  source 1..108: mol_type = other DNA

SEQ ID NO: 13726 - DNA, 99 bp, synthetic construct; identical to SEQ ID NO: 13440
  source 1..99: mol_type = other DNA

SEQ ID NO: 13727 - DNA, 108 bp, synthetic construct; identical to SEQ ID NO: 13455
  source 1..108: mol_type = other DNA

SEQ ID NO: 13728 - DNA, 99 bp, synthetic construct; identical to SEQ ID NO: 13412
  source 1..99: mol_type = other DNA

SEQ ID NO: 13729 - DNA, 108 bp, synthetic construct; identical to SEQ ID NO: 13455
  source 1..108: mol_type = other DNA

SEQ ID NO: 13730 - DNA, 99 bp, synthetic construct
  source 1..99: mol_type = other DNA
aaggaagatggacgattcacaaccttcttcaataaaagggagaaaaagctctccttgcacatcatagactctcagcctggagactcagccacctacttc

SEQ ID NO: 13731 - DNA, 108 bp, synthetic construct; identical to SEQ ID NO: 13455
  source 1..108: mol_type = other DNA

SEQ ID NO: 13732 - DNA, 99 bp, synthetic construct
  source 1..99: mol_type = other DNA
aaagaagaaggcagattcacaattcacctcaataaagccagtctgcatttctccctgcacatcagagactcccagcccagtgactctgctctctacctc

SEQ ID NO: 13733 - DNA, 108 bp, synthetic construct; identical to SEQ ID NO: 13455
  source 1..108: mol_type = other DNA

SEQ ID NO: 13734 - DNA, 99 bp, synthetic construct; identical to SEQ ID NO: 13526
  source 1..99: mol_type = other DNA

SEQ ID NO: 13735 - DNA, 108 bp, synthetic construct; identical to SEQ ID NO: 13455
  source 1..108: mol_type = other DNA

SEQ ID NO: 13736 - DNA, 99 bp, synthetic construct; identical to SEQ ID NO: 13362
  source 1..99: mol_type = other DNA

SEQ ID NO: 13737 - DNA, 108 bp, synthetic construct; identical to SEQ ID NO: 13359
  source 1..108: mol_type = other DNA

SEQ ID NO: 13738 - DNA, 99 bp, synthetic construct; identical to SEQ ID NO: 13376
  source 1..99: mol_type = other DNA

SEQ ID NO: 13739 - DNA, 108 bp, synthetic construct; identical to SEQ ID NO: 13359
  source 1..108: mol_type = other DNA

SEQ ID NO: 13740 - DNA, 99 bp, synthetic construct; identical to SEQ ID NO: 13368
  source 1..99: mol_type = other DNA

SEQ ID NO: 13741 - DNA, 108 bp, synthetic construct; identical to SEQ ID NO: 13359
  source 1..108: mol_type = other DNA

SEQ ID NO: 13742 - DNA, 99 bp, synthetic construct; identical to SEQ ID NO: 13400
  source 1..99: mol_type = other DNA

SEQ ID NO: 13743 - DNA, 108 bp, synthetic construct; identical to SEQ ID NO: 13359
  source 1..108: mol_type = other DNA

SEQ ID NO: 13744 - DNA, 99 bp, synthetic construct; identical to SEQ ID NO: 13362
  source 1..99: mol_type = other DNA

SEQ ID NO: 13745 - DNA, 108 bp, synthetic construct; identical to SEQ ID NO: 13359
  source 1..108: mol_type = other DNA

SEQ ID NO: 13746 - DNA, 99 bp, synthetic construct; identical to SEQ ID NO: 13412
  source 1..99: mol_type = other DNA

SEQ ID NO: 13747 - DNA, 108 bp, synthetic construct; identical to SEQ ID NO: 13359
  source 1..108: mol_type = other DNA

SEQ ID NO: 13748 - DNA, 99 bp, synthetic construct; identical to SEQ ID NO: 13722
  source 1..99: mol_type = other DNA

SEQ ID NO: 13749 - DNA, 108 bp, synthetic construct; identical to SEQ ID NO: 13359
  source 1..108: mol_type = other DNA

SEQ ID NO: 13750 - DNA, 99 bp, synthetic construct
  source 1..99: mol_type = other DNA
acaaccaatagtatggctttcctggctattgcctctgacagaaagtcaagcaccttgatcctgcctcatgtcagcctgagagacgcggctgtgtaccac

SEQ ID NO: 13751 - DNA, 108 bp, synthetic construct; identical to SEQ ID NO: 13359
  source 1..108: mol_type = other DNA

SEQ ID NO: 13752 - DNA, 99 bp, synthetic construct; identical to SEQ ID NO: 13714
  source 1..99: mol_type = other DNA

SEQ ID NO: 13753 - DNA, 108 bp, synthetic construct; identical to SEQ ID NO: 13393
  source 1..108: mol_type = other DNA

SEQ ID NO: 13754 - DNA, 99 bp, synthetic construct; identical to SEQ ID NO: 13636
  source 1..99: mol_type = other DNA

SEQ ID NO: 13755 - DNA, 108 bp, synthetic construct; identical to SEQ ID NO: 13393
  source 1..108: mol_type = other DNA

SEQ ID NO: 13756 - DNA, 99 bp, synthetic construct; identical to SEQ ID NO: 13362
  source 1..99: mol_type = other DNA

SEQ ID NO: 13757 - DNA, 108 bp, synthetic construct; identical to SEQ ID NO: 13393
  source 1..108: mol_type = other DNA

SEQ ID NO: 13758 - DNA, 99 bp, synthetic construct; identical to SEQ ID NO: 13516
  source 1..99: mol_type = other DNA

SEQ ID NO: 13759 - DNA, 108 bp, synthetic construct; identical to SEQ ID NO: 13393
  source 1..108: mol_type = other DNA

SEQ ID NO: 13760 - DNA, 99 bp, synthetic construct
  source 1..99: mol_type = other DNA
aaggagaatgggaggttaaagtcagcatttgattctaaggagagctacagcaccctgcacattagggatgcccagctggaggactcaggcacttacttc

SEQ ID NO: 13761 - DNA, 108 bp, synthetic construct; identical to SEQ ID NO: 13393
  source 1..108: mol_type = other DNA

SEQ ID NO: 13762 - DNA, 99 bp, synthetic construct; identical to SEQ ID NO: 13596
  source 1..99: mol_type = other DNA

SEQ ID NO: 13763 - DNA, 108 bp, synthetic construct; identical to SEQ ID NO: 13393
  source 1..108: mol_type = other DNA

SEQ ID NO: 13764 - DNA, 99 bp, synthetic construct; identical to SEQ ID NO: 13464
  source 1..99: mol_type = other DNA

SEQ ID NO: 13765 - DNA, 108 bp, synthetic construct; identical to SEQ ID NO: 13393
  source 1..108: mol_type = other DNA

SEQ ID NO: 13766 - DNA, 99 bp, synthetic construct; identical to SEQ ID NO: 13610
  source 1..99: mol_type = other DNA

SEQ ID NO: 13767 - DNA, 108 bp, synthetic construct; identical to SEQ ID NO: 13363
  source 1..108: mol_type = other DNA

SEQ ID NO: 13768 - DNA, 99 bp, synthetic construct; identical to SEQ ID NO: 13360
  source 1..99: mol_type = other DNA

SEQ ID NO: 13769 - DNA, 108 bp, synthetic construct; identical to SEQ ID NO: 13363
  source 1..108: mol_type = other DNA

SEQ ID NO: 13770 - DNA, 99 bp, synthetic construct; identical to SEQ ID NO: 13570
  source 1..99: mol_type = other DNA

SEQ ID NO: 13771 - DNA, 108 bp, synthetic construct; identical to SEQ ID NO: 13363
  source 1..108: mol_type = other DNA

SEQ ID NO: 13772 - DNA, 99 bp, synthetic construct; identical to SEQ ID NO: 13400
  source 1..99: mol_type = other DNA

SEQ ID NO: 13773 - DNA, 108 bp, synthetic construct; identical to SEQ ID NO: 13363
  source 1..108: mol_type = other DNA

SEQ ID NO: 13774 - DNA, 99 bp, synthetic construct; identical to SEQ ID NO: 13464
  source 1..99: mol_type = other DNA

SEQ ID NO: 13775 - DNA, 108 bp, synthetic construct; identical to SEQ ID NO: 13363
  source 1..108: mol_type = other DNA

SEQ ID NO: 13776 - DNA, 99 bp, synthetic construct; identical to SEQ ID NO: 13392
  source 1..99: mol_type = other DNA

SEQ ID NO: 13777 - DNA, 108 bp, synthetic construct; identical to SEQ ID NO: 13363
  source 1..108: mol_type = other DNA

SEQ ID NO: 13778 - DNA, 99 bp, synthetic construct; identical to SEQ ID NO: 13424
  source 1..99: mol_type = other DNA

SEQ ID NO: 13779 - DNA, 108 bp, synthetic construct; identical to SEQ ID NO: 13363
  source 1..108: mol_type = other DNA

SEQ ID NO: 13780 - DNA, 99 bp, synthetic construct; identical to SEQ ID NO: 13732
  source 1..99: mol_type = other DNA

SEQ ID NO: 13781 - DNA, 108 bp, synthetic construct; identical to SEQ ID NO: 13363
  source 1..108: mol_type = other DNA

SEQ ID NO: 13782 - DNA, 99 bp, synthetic construct; identical to SEQ ID NO: 13360
  source 1..99: mol_type = other DNA

SEQ ID NO: 13783 - DNA, 108 bp, synthetic construct; identical to SEQ ID NO: 13655
  source 1..108: mol_type = other DNA

SEQ ID NO: 13784 - DNA, 99 bp, synthetic construct; identical to SEQ ID NO: 13434
  source 1..99: mol_type = other DNA

SEQ ID NO: 13785 - DNA, 108 bp, synthetic construct; identical to SEQ ID NO: 13655
  source 1..108: mol_type = other DNA

SEQ ID NO: 13786 - DNA, 99 bp, synthetic construct; identical to SEQ ID NO: 13378
  source 1..99: mol_type = other DNA

SEQ ID NO: 13787 - DNA, 108 bp, synthetic construct; identical to SEQ ID NO: 13391
  source 1..108: mol_type = other DNA

SEQ ID NO: 13788 - DNA, 99 bp, synthetic construct; identical to SEQ ID NO: 13596
  source 1..99: mol_type = other DNA

SEQ ID NO: 13789 - DNA, 108 bp, synthetic construct; identical to SEQ ID NO: 13391
  source 1..108: mol_type = other DNA

SEQ ID NO: 13790 - DNA, 96 bp, synthetic construct
  source 1..96: mol_type = other DNA
agcaacagaggttttgaagctacatacaataaagaagccacctccttccacttgcagaaagcctcagtgcaagagtcagactcggctgtgtactac

SEQ ID NO: 13791 - DNA, 108 bp, synthetic construct; identical to SEQ ID NO: 13391
  source 1..108: mol_type = other DNA

SEQ ID NO: 13792 - DNA, 99 bp, synthetic construct; identical to SEQ ID NO: 13706
  source 1..99: mol_type = other DNA

SEQ ID NO: 13793 - DNA, 108 bp, synthetic construct; identical to SEQ ID NO: 13391
  source 1..108: mol_type = other DNA

SEQ ID NO: 13794 - DNA, 99 bp, synthetic construct; identical to SEQ ID NO: 13410
  source 1..99: mol_type = other DNA

SEQ ID NO: 13795 - DNA, 111 bp, synthetic construct; identical to SEQ ID NO: 13435
  source 1..111: mol_type = other DNA

SEQ ID NO: 13796 - DNA, 99 bp, synthetic construct; identical to SEQ ID NO: 13398
  source 1..99: mol_type = other DNA

SEQ ID NO: 13797 - DNA, 111 bp, synthetic construct; identical to SEQ ID NO: 13435
  source 1..111: mol_type = other DNA

SEQ ID NO: 13798 - DNA, 99 bp, synthetic construct; identical to SEQ ID NO: 13526
  source 1..99: mol_type = other DNA

SEQ ID NO: 13799 - DNA, 108 bp, synthetic construct; identical to SEQ ID NO: 13383
  source 1..108: mol_type = other DNA

SEQ ID NO: 13800 - DNA, 99 bp, synthetic construct; identical to SEQ ID NO: 13470
  source 1..99: mol_type = other DNA

SEQ ID NO: 13801 - DNA, 108 bp, synthetic construct; identical to SEQ ID NO: 13383
  source 1..108: mol_type = other DNA

SEQ ID NO: 13802 - DNA, 99 bp, synthetic construct; identical to SEQ ID NO: 13722
  source 1..99: mol_type = other DNA

SEQ ID NO: 13803 - DNA, 108 bp, synthetic construct; identical to SEQ ID NO: 13383
  source 1..108: mol_type = other DNA

SEQ ID NO: 13804 - DNA, 99 bp, synthetic construct; identical to SEQ ID NO: 13614
  source 1..99: mol_type = other DNA

SEQ ID NO: 13805 - DNA, 108 bp, synthetic construct; identical to SEQ ID NO: 13383
  source 1..108: mol_type = other DNA

SEQ ID NO: 13806 - DNA, 99 bp, synthetic construct
  source 1..99: mol_type = other DNA
aaggaagatggacgattcacaatcttcttcaataaaagggagaaaaagttctccttgcacatcgcagactctcagcctggagactcagccacctacttc

SEQ ID NO: 13807 - DNA, 108 bp, synthetic construct; identical to SEQ ID NO: 13383
  source 1..108: mol_type = other DNA

SEQ ID NO: 13808 - DNA, 99 bp, synthetic construct; identical to SEQ ID NO: 13370
  source 1..99: mol_type = other DNA

SEQ ID NO: 13809 - DNA, 108 bp, synthetic construct; identical to SEQ ID NO: 13383
  source 1..108: mol_type = other DNA

SEQ ID NO: 13810 - DNA, 99 bp, synthetic construct; identical to SEQ ID NO: 13464
  source 1..99: mol_type = other DNA

SEQ ID NO: 13811 - DNA, 108 bp, synthetic construct; identical to SEQ ID NO: 13383
  source 1..108: mol_type = other DNA

SEQ ID NO: 13812 - DNA, 99 bp, synthetic construct
  source 1..99: mol_type = other DNA
ggaagcagcagaggttttgaagctacatatgataaaggaaccacttccttccacttgcagaaaacctcagtgcaagagatagattcggctgtgtactac

SEQ ID NO: 13813 - DNA, 108 bp, synthetic construct; identical to SEQ ID NO: 13383
  source 1..108: mol_type = other DNA

SEQ ID NO: 13814 - DNA, 99 bp, synthetic construct; identical to SEQ ID NO: 13416
  source 1..99: mol_type = other DNA

SEQ ID NO: 13815 - DNA, 108 bp, synthetic construct; identical to SEQ ID NO: 13383
  source 1..108: mol_type = other DNA

SEQ ID NO: 13816 - DNA, 99 bp, synthetic construct; identical to SEQ ID NO: 13464
  source 1..99: mol_type = other DNA

SEQ ID NO: 13817 - DNA, 108 bp, synthetic construct; identical to SEQ ID NO: 13383
  source 1..108: mol_type = other DNA

SEQ ID NO: 13818 - DNA, 99 bp, synthetic construct; identical to SEQ ID NO: 13368
  source 1..99: mol_type = other DNA

SEQ ID NO: 13819 - DNA, 108 bp, synthetic construct; identical to SEQ ID NO: 13383
  source 1..108: mol_type = other DNA

SEQ ID NO: 13820 - DNA, 99 bp, synthetic construct; identical to SEQ ID NO: 13402
  source 1..99: mol_type = other DNA

SEQ ID NO: 13821 - DNA, 108 bp, synthetic construct; identical to SEQ ID NO: 13383
  source 1..108: mol_type = other DNA

SEQ ID NO: 13822 - DNA, 99 bp, synthetic construct
  source 1..99: mol_type = other DNA
caaggagtgaatggcttcgaggctgagttcagcaagagtaactcttccttccacctgcggaaagcctctgtgcactggagcgactctgctgtgtacttc

SEQ ID NO: 13823 - DNA, 108 bp, synthetic construct; identical to SEQ ID NO: 13383
  source 1..108: mol_type = other DNA

SEQ ID NO: 13824 - DNA, 99 bp, synthetic construct; identical to SEQ ID NO: 13596
  source 1..99: mol_type = other DNA

SEQ ID NO: 13825 - DNA, 105 bp, synthetic construct; identical to SEQ ID NO: 13379
  source 1..105: mol_type = other DNA

SEQ ID NO: 13826 - DNA, 99 bp, synthetic construct; identical to SEQ ID NO: 13376
  source 1..99: mol_type = other DNA

SEQ ID NO: 13827 - DNA, 105 bp, synthetic construct; identical to SEQ ID NO: 13379
  source 1..105: mol_type = other DNA

SEQ ID NO: 13828 - DNA, 99 bp, synthetic construct; identical to SEQ ID NO: 13362
  source 1..99: mol_type = other DNA

SEQ ID NO: 13829 - DNA, 105 bp, synthetic construct; identical to SEQ ID NO: 13379
  source 1..105: mol_type = other DNA

SEQ ID NO: 13830 - DNA, 99 bp, synthetic construct; identical to SEQ ID NO: 13358
  source 1..99: mol_type = other DNA

SEQ ID NO: 13831 - DNA, 105 bp, synthetic construct; identical to SEQ ID NO: 13379
  source 1..105: mol_type = other DNA

SEQ ID NO: 13832 - DNA, 99 bp, synthetic construct; identical to SEQ ID NO: 13760
  source 1..99: mol_type = other DNA

SEQ ID NO: 13833 - DNA, 105 bp, synthetic construct; identical to SEQ ID NO: 13379
  source 1..105: mol_type = other DNA

SEQ ID NO: 13834 - DNA, 99 bp, synthetic construct; identical to SEQ ID NO: 13416
  source 1..99: mol_type = other DNA

SEQ ID NO: 13835 - DNA, 105 bp, synthetic construct; identical to SEQ ID NO: 13379
  source 1..105: mol_type = other DNA

SEQ ID NO: 13836 - DNA, 99 bp, synthetic construct; identical to SEQ ID NO: 13432
  source 1..99: mol_type = other DNA

SEQ ID NO: 13837 - DNA, 105 bp, synthetic construct; identical to SEQ ID NO: 13379
  source 1..105: mol_type = other DNA

SEQ ID NO: 13838 - DNA, 99 bp, synthetic construct; identical to SEQ ID NO: 13500
  source 1..99: mol_type = other DNA

SEQ ID NO: 13839 - DNA, 108 bp, synthetic construct; identical to SEQ ID NO: 13451
  source 1..108: mol_type = other DNA

SEQ ID NO: 13840 - DNA, 99 bp, synthetic construct; identical to SEQ ID NO: 13750
  source 1..99: mol_type = other DNA

SEQ ID NO: 13841 - DNA, 108 bp, synthetic construct; identical to SEQ ID NO: 13451
  source 1..108: mol_type = other DNA

SEQ ID NO: 13842 - DNA, 99 bp, synthetic construct; identical to SEQ ID NO: 13500
  source 1..99: mol_type = other DNA

SEQ ID NO: 13843 - DNA, 108 bp, synthetic construct; identical to SEQ ID NO: 13451
  source 1..108: mol_type = other DNA

SEQ ID NO: 13844 - DNA, 99 bp, synthetic construct; identical to SEQ ID NO: 13464
  source 1..99: mol_type = other DNA

SEQ ID NO: 13845 - DNA, 108 bp, synthetic construct; identical to SEQ ID NO: 13451
  source 1..108: mol_type = other DNA

SEQ ID NO: 13846 - DNA, 99 bp, synthetic construct; identical to SEQ ID NO: 13416
  source 1..99: mol_type = other DNA

SEQ ID NO: 13847 - DNA, 108 bp, synthetic construct; identical to SEQ ID NO: 13451
  source 1..108: mol_type = other DNA

SEQ ID NO: 13848 - DNA, 99 bp, synthetic construct; identical to SEQ ID NO: 13416
  source 1..99: mol_type = other DNA

SEQ ID NO: 13849 - DNA, 108 bp, synthetic construct; identical to SEQ ID NO: 13451
  source 1..108: mol_type = other DNA

SEQ ID NO: 13850 - DNA, 99 bp, synthetic construct; identical to SEQ ID NO: 13614
  source 1..99: mol_type = other DNA

SEQ ID NO: 13851 - DNA, 108 bp, synthetic construct; identical to SEQ ID NO: 13451
  source 1..108: mol_type = other DNA

SEQ ID NO: 13852 - DNA, 99 bp, synthetic construct; identical to SEQ ID NO: 13360
  source 1..99: mol_type = other DNA

SEQ ID NO: 13853 - DNA, 108 bp, synthetic construct; identical to SEQ ID NO: 13451
  source 1..108: mol_type = other DNA

SEQ ID NO: 13854 - DNA, 99 bp, synthetic construct; identical to SEQ ID NO: 13432
  source 1..99: mol_type = other DNA

SEQ ID NO: 13855 - DNA, 108 bp, synthetic construct; identical to SEQ ID NO: 13451
  source 1..108: mol_type = other DNA

SEQ ID NO: 13856 - DNA, 99 bp, synthetic construct; identical to SEQ ID NO: 13416
  source 1..99: mol_type = other DNA

SEQ ID NO: 13857 - DNA, 108 bp, synthetic construct; identical to SEQ ID NO: 13451
  source 1..108: mol_type = other DNA

SEQ ID NO: 13858 - DNA, 99 bp, synthetic construct; identical to SEQ ID NO: 13430
  source 1..99: mol_type = other DNA

SEQ ID NO: 13859 - DNA, 108 bp, synthetic construct; identical to SEQ ID NO: 13451
  source 1..108: mol_type = other DNA

SEQ ID NO: 13860 - DNA, 99 bp, synthetic construct; identical to SEQ ID NO: 13604
  source 1..99: mol_type = other DNA

SEQ ID NO: 13861 - DNA, 108 bp, synthetic construct; identical to SEQ ID NO: 13451
  source 1..108: mol_type = other DNA

SEQ ID NO: 13862 - DNA, 99 bp, synthetic construct; identical to SEQ ID NO: 13444
  source 1..99: mol_type = other DNA

SEQ ID NO: 13863 - DNA, 108 bp, synthetic construct; identical to SEQ ID NO: 13451
  source 1..108: mol_type = other DNA

SEQ ID NO: 13864 - DNA, 99 bp, synthetic construct; identical to SEQ ID NO: 13416
  source 1..99: mol_type = other DNA

SEQ ID NO: 13865 - DNA, 108 bp, synthetic construct; identical to SEQ ID NO: 13451
  source 1..108: mol_type = other DNA

SEQ ID NO: 13866 - DNA, 99 bp, synthetic construct
  source 1..99: mol_type = other DNA
ggaatcagcagaggctttgaagctacatatgacaaagggaccacctccttccacttacagaaagcctcagtgcaggagtcagactcagccgtgtacttc

SEQ ID NO: 13867 - DNA, 108 bp, synthetic construct; identical to SEQ ID NO: 13451
  source 1..108: mol_type = other DNA

SEQ ID NO: 13868 - DNA, 99 bp, synthetic construct; identical to SEQ ID NO: 13678
  source 1..99: mol_type = other DNA

SEQ ID NO: 13869 - DNA, 108 bp, synthetic construct; identical to SEQ ID NO: 13451
  source 1..108: mol_type = other DNA

SEQ ID NO: 13870 - DNA, 99 bp, synthetic construct; identical to SEQ ID NO: 13376
  source 1..99: mol_type = other DNA

SEQ ID NO: 13871 - DNA, 108 bp, synthetic construct; identical to SEQ ID NO: 13451
  source 1..108: mol_type = other DNA

SEQ ID NO: 13872 - DNA, 99 bp, synthetic construct; identical to SEQ ID NO: 13416
  source 1..99: mol_type = other DNA

SEQ ID NO: 13873 - DNA, 108 bp, synthetic construct; identical to SEQ ID NO: 13451
  source 1..108: mol_type = other DNA

SEQ ID NO: 13874 - DNA, 99 bp, synthetic construct; identical to SEQ ID NO: 13578
  source 1..99: mol_type = other DNA

SEQ ID NO: 13875 - DNA, 108 bp, synthetic construct; identical to SEQ ID NO: 13451
  source 1..108: mol_type = other DNA

SEQ ID NO: 13876 - DNA, 99 bp, synthetic construct; identical to SEQ ID NO: 13360
  source 1..99: mol_type = other DNA

SEQ ID NO: 13877 - DNA, 108 bp, synthetic construct; identical to SEQ ID NO: 13451
  source 1..108: mol_type = other DNA

SEQ ID NO: 13878 - DNA, 99 bp, synthetic construct; identical to SEQ ID NO: 13444
  source 1..99: mol_type = other DNA

SEQ ID NO: 13879 - DNA, 108 bp, synthetic construct; identical to SEQ ID NO: 13451
  source 1..108: mol_type = other DNA

SEQ ID NO: 13880 - DNA, 99 bp, synthetic construct; identical to SEQ ID NO: 13358
  source 1..99: mol_type = other DNA

SEQ ID NO: 13881 - DNA, 108 bp, synthetic construct; identical to SEQ ID NO: 13451
  source 1..108: mol_type = other DNA

SEQ ID NO: 13882 - DNA, 99 bp, synthetic construct; identical to SEQ ID NO: 13432
  source 1..99: mol_type = other DNA

SEQ ID NO: 13883 - DNA, 108 bp, synthetic construct; identical to SEQ ID NO: 13451
  source 1..108: mol_type = other DNA

SEQ ID NO: 13884 - DNA, 99 bp, synthetic construct
  source 1..99: mol_type = other DNA
aagcagagtgggagactgacatccacaacagtcattaaagaacgccgcagctctttgcacatttcctcctcccagatcacagactcaggcacttatctc

SEQ ID NO: 13885 - DNA, 108 bp, synthetic construct; identical to SEQ ID NO: 13451
  source 1..108: mol_type = other DNA

SEQ ID NO: 13886 - DNA, 99 bp, synthetic construct
  source 1..99: mol_type = other DNA
acgtcaaatgggagatactcagcaactctggataaagatgctaagcacagcacgctgcacatcacagccaccctgctggatgacactgccacctacatc

SEQ ID NO: 13887 - DNA, 108 bp, synthetic construct; identical to SEQ ID NO: 13451
  source 1..108: mol_type = other DNA

SEQ ID NO: 13888 - DNA, 99 bp, synthetic construct; identical to SEQ ID NO: 13424
  source 1..99: mol_type = other DNA

SEQ ID NO: 13889 - DNA, 108 bp, synthetic construct; identical to SEQ ID NO: 13451
  source 1..108: mol_type = other DNA

SEQ ID NO: 13890 - DNA, 99 bp, synthetic construct; identical to SEQ ID NO: 13416
  source 1..99: mol_type = other DNA

SEQ ID NO: 13891 - DNA, 108 bp, synthetic construct; identical to SEQ ID NO: 13451
  source 1..108: mol_type = other DNA

SEQ ID NO: 13892 - DNA, 99 bp, synthetic construct; identical to SEQ ID NO: 13428
  source 1..99: mol_type = other DNA

SEQ ID NO: 13893 - DNA, 108 bp, synthetic construct; identical to SEQ ID NO: 13451
  source 1..108: mol_type = other DNA

SEQ ID NO: 13894 - DNA, 99 bp, synthetic construct; identical to SEQ ID NO: 13464
  source 1..99: mol_type = other DNA

SEQ ID NO: 13895 - DNA, 108 bp, synthetic construct; identical to SEQ ID NO: 13451
  source 1..108: mol_type = other DNA

SEQ ID NO: 13896 - DNA, 93 bp, synthetic construct; identical to SEQ ID NO: 13462
  source 1..93: mol_type = other DNA

SEQ ID NO: 13897 - DNA, 108 bp, synthetic construct; identical to SEQ ID NO: 13451
  source 1..108: mol_type = other DNA

SEQ ID NO: 13898 - DNA, 99 bp, synthetic construct; identical to SEQ ID NO: 13636
  source 1..99: mol_type = other DNA

SEQ ID NO: 13899 - DNA, 108 bp, synthetic construct; identical to SEQ ID NO: 13451
  source 1..108: mol_type = other DNA

SEQ ID NO: 13900 - DNA, 99 bp, synthetic construct
  source 1..99: mol_type = other DNA
aaggaagaaggcagattcacagtacacctcaataaagccagcctgcatacttccctgcacatcagagactcccagcccagtgactctgctctctacctc

SEQ ID NO: 13901 - DNA, 108 bp, synthetic construct; identical to SEQ ID NO: 13451
  source 1..108: mol_type = other DNA

SEQ ID NO: 13902 - DNA, 99 bp, synthetic construct; identical to SEQ ID NO: 13522
  source 1..99: mol_type = other DNA

SEQ ID NO: 13903 - DNA, 108 bp, synthetic construct; identical to SEQ ID NO: 13451
  source 1..108: mol_type = other DNA

SEQ ID NO: 13904 - DNA, 99 bp, synthetic construct; identical to SEQ ID NO: 13822
  source 1..99: mol_type = other DNA

SEQ ID NO: 13905 - DNA, 108 bp, synthetic construct; identical to SEQ ID NO: 13451
  source 1..108: mol_type = other DNA

SEQ ID NO: 13906 - DNA, 99 bp, synthetic construct; identical to SEQ ID NO: 13614
  source 1..99: mol_type = other DNA

SEQ ID NO: 13907 - DNA, 108 bp, synthetic construct; identical to SEQ ID NO: 13451
  source 1..108: mol_type = other DNA

SEQ ID NO: 13908 - DNA, 99 bp, synthetic construct; identical to SEQ ID NO: 13400
  source 1..99: mol_type = other DNA

SEQ ID NO: 13909 - DNA, 111 bp, synthetic construct; identical to SEQ ID NO: 13373
  source 1..111: mol_type = other DNA

SEQ ID NO: 13910 - DNA, 99 bp, synthetic construct; identical to SEQ ID NO: 13408
  source 1..99: mol_type = other DNA

SEQ ID NO: 13911 - DNA, 111 bp, synthetic construct; identical to SEQ ID NO: 13373
  source 1..111: mol_type = other DNA

SEQ ID NO: 13912 - DNA, 99 bp, synthetic construct; identical to SEQ ID NO: 13380
  source 1..99: mol_type = other DNA

SEQ ID NO: 13913 - DNA, 111 bp, synthetic construct; identical to SEQ ID NO: 13373
  source 1..111: mol_type = other DNA

SEQ ID NO: 13914 - DNA, 99 bp, synthetic construct; identical to SEQ ID NO: 13380
  source 1..99: mol_type = other DNA

SEQ ID NO: 13915 - DNA, 111 bp, synthetic construct; identical to SEQ ID NO: 13373
  source 1..111: mol_type = other DNA

SEQ ID NO: 13916 - DNA, 99 bp, synthetic construct; identical to SEQ ID NO: 13822
  source 1..99: mol_type = other DNA

SEQ ID NO: 13917 - DNA, 111 bp, synthetic construct; identical to SEQ ID NO: 13373
  source 1..111: mol_type = other DNA

SEQ ID NO: 13918 - DNA, 99 bp, synthetic construct; identical to SEQ ID NO: 13570
  source 1..99: mol_type = other DNA

SEQ ID NO: 13919 - DNA, 111 bp, synthetic construct; identical to SEQ ID NO: 13373
  source 1..111: mol_type = other DNA

SEQ ID NO: 13920 - DNA, 102 bp, synthetic construct; identical to SEQ ID NO: 13374
  source 1..102: mol_type = other DNA

SEQ ID NO: 13921 - DNA, 108 bp, synthetic construct; identical to SEQ ID NO: 13597
  source 1..108: mol_type = other DNA

SEQ ID NO: 13922 - DNA, 99 bp, synthetic construct; identical to SEQ ID NO: 13412
  source 1..99: mol_type = other DNA

SEQ ID NO: 13923 - DNA, 111 bp, synthetic construct
  source 1..111: mol_type = other DNA
acatacgagagtggattcaccaaggacaagtttccaatcagccggccaaacctaacattctcaacgttgacagtgaacaatgcaaggcctggagacagcagtatctatttc

SEQ ID NO: 13924 - DNA, 99 bp, synthetic construct; identical to SEQ ID NO: 13822
  source 1..99: mol_type = other DNA

SEQ ID NO: 13925 - DNA, 111 bp, synthetic construct; identical to SEQ ID NO: 13923
  source 1..111: mol_type = other DNA

SEQ ID NO: 13926 - DNA, 99 bp, synthetic construct; identical to SEQ ID NO: 13538
  source 1..99: mol_type = other DNA

SEQ ID NO: 13927 - DNA, 111 bp, synthetic construct; identical to SEQ ID NO: 13923
  source 1..111: mol_type = other DNA

SEQ ID NO: 13928 - DNA, 99 bp, synthetic construct; identical to SEQ ID NO: 13432
  source 1..99: mol_type = other DNA

SEQ ID NO: 13929 - DNA, 111 bp, synthetic construct; identical to SEQ ID NO: 13357
  source 1..111: mol_type = other DNA

SEQ ID NO: 13930 - DNA, 99 bp, synthetic construct; identical to SEQ ID NO: 13358
  source 1..99: mol_type = other DNA

SEQ ID NO: 13931 - DNA, 111 bp, synthetic construct; identical to SEQ ID NO: 13357
  source 1..111: mol_type = other DNA

SEQ ID NO: 13932 - DNA, 99 bp, synthetic construct; identical to SEQ ID NO: 13362
  source 1..99: mol_type = other DNA

SEQ ID NO: 13933 - DNA, 111 bp, synthetic construct; identical to SEQ ID NO: 13357
  source 1..111: mol_type = other DNA

SEQ ID NO: 13934 - DNA, 99 bp, synthetic construct; identical to SEQ ID NO: 13470
  source 1..99: mol_type = other DNA

SEQ ID NO: 13935 - DNA, 111 bp, synthetic construct; identical to SEQ ID NO: 13357
  source 1..111: mol_type = other DNA

SEQ ID NO: 13936 - DNA, 99 bp, synthetic construct; identical to SEQ ID NO: 13394
  source 1..99: mol_type = other DNA

SEQ ID NO: 13937 - DNA, 111 bp, synthetic construct; identical to SEQ ID NO: 13357
  source 1..111: mol_type = other DNA

SEQ ID NO: 13938 - DNA, 99 bp, synthetic construct
  source 1..99: mol_type = other DNA
caaggagtgaacggcttcgaggctgagttcagcaagagcgactcttccttccaccttcggaaagcctctgtgcactggagcgactcggctgtgtacttc

SEQ ID NO: 13939 - DNA, 111 bp, synthetic construct; identical to SEQ ID NO: 13357
  source 1..111: mol_type = other DNA

SEQ ID NO: 13940 - DNA, 99 bp, synthetic construct; identical to SEQ ID NO: 13604
  source 1..99: mol_type = other DNA

SEQ ID NO: 13941 - DNA, 111 bp, synthetic construct; identical to SEQ ID NO: 13357
  source 1..111: mol_type = other DNA

SEQ ID NO: 13942 - DNA, 99 bp, synthetic construct; identical to SEQ ID NO: 13416
  source 1..99: mol_type = other DNA

SEQ ID NO: 13943 - DNA, 111 bp, synthetic construct; identical to SEQ ID NO: 13357
  source 1..111: mol_type = other DNA

SEQ ID NO: 13944 - DNA, 99 bp, synthetic construct; identical to SEQ ID NO: 13578
  source 1..99: mol_type = other DNA

SEQ ID NO: 13945 - DNA, 111 bp, synthetic construct; identical to SEQ ID NO: 13357
  source 1..111: mol_type = other DNA

SEQ ID NO: 13946 - DNA, 99 bp, synthetic construct; identical to SEQ ID NO: 13368
  source 1..99: mol_type = other DNA

SEQ ID NO: 13947 - DNA, 111 bp, synthetic construct; identical to SEQ ID NO: 13357
  source 1..111: mol_type = other DNA

SEQ ID NO: 13948 - DNA, 99 bp, synthetic construct
  source 1..99: mol_type = other DNA
caaggagtgaacagcttcgaggctgagttcagcaagagtaactcttccttccacctgcagacagcctctgtgcactggagcgactcggctgtgtacttc

SEQ ID NO: 13949 - DNA, 111 bp, synthetic construct; identical to SEQ ID NO: 13357
  source 1..111: mol_type = other DNA

SEQ ID NO: 13950 - DNA, 99 bp, synthetic construct; identical to SEQ ID NO: 13604
  source 1..99: mol_type = other DNA

SEQ ID NO: 13951 - DNA, 111 bp, synthetic construct; identical to SEQ ID NO: 13357
  source 1..111: mol_type = other DNA

SEQ ID NO: 13952 - DNA, 99 bp, synthetic construct; identical to SEQ ID NO: 13358
  source 1..99: mol_type = other DNA

SEQ ID NO: 13953 - DNA, 111 bp, synthetic construct; identical to SEQ ID NO: 13357
  source 1..111: mol_type = other DNA

SEQ ID NO: 13954 - DNA, 99 bp, synthetic construct; identical to SEQ ID NO: 13358
  source 1..99: mol_type = other DNA

SEQ ID NO: 13955 - DNA, 111 bp, synthetic construct; identical to SEQ ID NO: 13357
  source 1..111: mol_type = other DNA

SEQ ID NO: 13956 - DNA, 99 bp, synthetic construct; identical to SEQ ID NO: 13416
  source 1..99: mol_type = other DNA

SEQ ID NO: 13957 - DNA, 111 bp, synthetic construct; identical to SEQ ID NO: 13357
  source 1..111: mol_type = other DNA

SEQ ID NO: 13958 - DNA, 99 bp, synthetic construct; identical to SEQ ID NO: 13538
  source 1..99: mol_type = other DNA

SEQ ID NO: 13959 - DNA, 111 bp, synthetic construct; identical to SEQ ID NO: 13357
  source 1..111: mol_type = other DNA

SEQ ID NO: 13960 - DNA, 99 bp, synthetic construct; identical to SEQ ID NO: 13678
  source 1..99: mol_type = other DNA

SEQ ID NO: 13961 - DNA, 111 bp, synthetic construct; identical to SEQ ID NO: 13357
  source 1..111: mol_type = other DNA

SEQ ID NO: 13962 - DNA, 99 bp, synthetic construct; identical to SEQ ID NO: 13364
  source 1..99: mol_type = other DNA

SEQ ID NO: 13963 - DNA, 111 bp, synthetic construct; identical to SEQ ID NO: 13357
  source 1..111: mol_type = other DNA

SEQ ID NO: 13964 - DNA, 99 bp, synthetic construct; identical to SEQ ID NO: 13416
  source 1..99: mol_type = other DNA

SEQ ID NO: 13965 - DNA, 111 bp, synthetic construct; identical to SEQ ID NO: 13357
  source 1..111: mol_type = other DNA

SEQ ID NO: 13966 - DNA, 99 bp, synthetic construct; identical to SEQ ID NO: 13444
  source 1..99: mol_type = other DNA

SEQ ID NO: 13967 - DNA, 111 bp, synthetic construct; identical to SEQ ID NO: 13357
  source 1..111: mol_type = other DNA

SEQ ID NO: 13968 - DNA, 99 bp, synthetic construct; identical to SEQ ID NO: 13444
  source 1..99: mol_type = other DNA

SEQ ID NO: 13969 - DNA, 111 bp, synthetic construct; identical to SEQ ID NO: 13357
  source 1..111: mol_type = other DNA

SEQ ID NO: 13970 - DNA, 99 bp, synthetic construct; identical to SEQ ID NO: 13380
  source 1..99: mol_type = other DNA

SEQ ID NO: 13971 - DNA, 111 bp, synthetic construct; identical to SEQ ID NO: 13357
  source 1..111: mol_type = other DNA

SEQ ID NO: 13972 - DNA, 99 bp, synthetic construct; identical to SEQ ID NO: 13822
  source 1..99: mol_type = other DNA

SEQ ID NO: 13973 - DNA, 111 bp, synthetic construct; identical to SEQ ID NO: 13357
  source 1..111: mol_type = other DNA

SEQ ID NO: 13974 - DNA, 99 bp, synthetic construct
  source 1..99: mol_type = other DNA
aaggaagatggacgattcacaatcttcttcaataaaagggagaaaaagctctccttgcacatcacagactctcagcctggagactcagccacttacttc

SEQ ID NO: 13975 - DNA, 111 bp, synthetic construct; identical to SEQ ID NO: 13357
  source 1..111: mol_type = other DNA

SEQ ID NO: 13976 - DNA, 99 bp, synthetic construct; identical to SEQ ID NO: 13560
  source 1..99: mol_type = other DNA

SEQ ID NO: 13977 - DNA, 111 bp, synthetic construct; identical to SEQ ID NO: 13357
  source 1..111: mol_type = other DNA

SEQ ID NO: 13978 - DNA, 99 bp, synthetic construct; identical to SEQ ID NO: 13416
  source 1..99: mol_type = other DNA

SEQ ID NO: 13979 - DNA, 111 bp, synthetic construct; identical to SEQ ID NO: 13357
  source 1..111: mol_type = other DNA

SEQ ID NO: 13980 - DNA, 99 bp, synthetic construct; identical to SEQ ID NO: 13394
  source 1..99: mol_type = other DNA

SEQ ID NO: 13981 - DNA, 111 bp, synthetic construct; identical to SEQ ID NO: 13357
  source 1..111: mol_type = other DNA

SEQ ID NO: 13982 - DNA, 99 bp, synthetic construct; identical to SEQ ID NO: 13408
  source 1..99: mol_type = other DNA

SEQ ID NO: 13983 - DNA, 111 bp, synthetic construct; identical to SEQ ID NO: 13357
  source 1..111: mol_type = other DNA

SEQ ID NO: 13984 - DNA, 99 bp, synthetic construct; identical to SEQ ID NO: 13526
  source 1..99: mol_type = other DNA

SEQ ID NO: 13985 - DNA, 111 bp, synthetic construct; identical to SEQ ID NO: 13357
  source 1..111: mol_type = other DNA

SEQ ID NO: 13986 - DNA, 99 bp, synthetic construct; identical to SEQ ID NO: 13938
  source 1..99: mol_type = other DNA

SEQ ID NO: 13987 - DNA, 108 bp, synthetic construct; identical to SEQ ID NO: 13519
  source 1..108: mol_type = other DNA

SEQ ID NO: 13988 - DNA, 99 bp, synthetic construct; identical to SEQ ID NO: 13416
  source 1..99: mol_type = other DNA

SEQ ID NO: 13989 - DNA, 108 bp, synthetic construct; identical to SEQ ID NO: 13519
  source 1..108: mol_type = other DNA

SEQ ID NO: 13990 - DNA, 99 bp, synthetic construct; identical to SEQ ID NO: 13732
  source 1..99: mol_type = other DNA

SEQ ID NO: 13991 - DNA, 108 bp, synthetic construct; identical to SEQ ID NO: 13519
  source 1..108: mol_type = other DNA

SEQ ID NO: 13992 - DNA, 99 bp, synthetic construct; identical to SEQ ID NO: 13408
  source 1..99: mol_type = other DNA

SEQ ID NO: 13993 - DNA, 108 bp, synthetic construct; identical to SEQ ID NO: 13519
  source 1..108: mol_type = other DNA

SEQ ID NO: 13994 - DNA, 99 bp, synthetic construct; identical to SEQ ID NO: 13380
  source 1..99: mol_type = other DNA

SEQ ID NO: 13995 - DNA, 108 bp, synthetic construct; identical to SEQ ID NO: 13519
  source 1..108: mol_type = other DNA

SEQ ID NO: 13996 - DNA, 99 bp, synthetic construct; identical to SEQ ID NO: 13360
  source 1..99: mol_type = other DNA

SEQ ID NO: 13997 - DNA, 108 bp, synthetic construct; identical to SEQ ID NO: 13519
  source 1..108: mol_type = other DNA

SEQ ID NO: 13998 - DNA, 99 bp, synthetic construct; identical to SEQ ID NO: 13402
  source 1..99: mol_type = other DNA

SEQ ID NO: 13999 - DNA, 108 bp, synthetic construct; identical to SEQ ID NO: 13519
  source 1..108: mol_type = other DNA

SEQ ID NO: 14000 - DNA, 99 bp, synthetic construct; identical to SEQ ID NO: 13506
  source 1..99: mol_type = other DNA

SEQ ID NO: 14001 - DNA, 108 bp, synthetic construct; identical to SEQ ID NO: 13371
  source 1..108: mol_type = other DNA

SEQ ID NO: 14002 - DNA, 99 bp, synthetic construct; identical to SEQ ID NO: 13622
  source 1..99: mol_type = other DNA

SEQ ID NO: 14003 - DNA, 108 bp, synthetic construct; identical to SEQ ID NO: 13371
  source 1..108: mol_type = other DNA

SEQ ID NO: 14004 - DNA, 99 bp, synthetic construct; identical to SEQ ID NO: 13480
  source 1..99: mol_type = other DNA

SEQ ID NO: 14005 - DNA, 108 bp, synthetic construct; identical to SEQ ID NO: 13371
  source 1..108: mol_type = other DNA

SEQ ID NO: 14006 - DNA, 99 bp, synthetic construct; identical to SEQ ID NO: 13514
  source 1..99: mol_type = other DNA

SEQ ID NO: 14007 - DNA, 108 bp, synthetic construct; identical to SEQ ID NO: 13371
  source 1..108: mol_type = other DNA

SEQ ID NO: 14008 - DNA, 99 bp, synthetic construct; identical to SEQ ID NO: 13408
  source 1..99: mol_type = other DNA

SEQ ID NO: 14009 - DNA, 108 bp, synthetic construct; identical to SEQ ID NO: 13371
  source 1..108: mol_type = other DNA

SEQ ID NO: 14010 - DNA, 99 bp, synthetic construct; identical to SEQ ID NO: 13900
  source 1..99: mol_type = other DNA

SEQ ID NO: 14011 - DNA, 108 bp, synthetic construct; identical to SEQ ID NO: 13371
  source 1..108: mol_type = other DNA

SEQ ID NO: 14012 - DNA, 99 bp, synthetic construct
  source 1..99: mol_type = other DNA
aaggaagaaggcagatttacagctcacctcaatagagccagcctgcatgtttccctacacatcagagagccgcaacccagtgactctgctgtctacctc

SEQ ID NO: 14013 - DNA, 108 bp, synthetic construct; identical to SEQ ID NO: 13371
  source 1..108: mol_type = other DNA

SEQ ID NO: 14014 - DNA, 99 bp, synthetic construct; identical to SEQ ID NO: 13358
  source 1..99: mol_type = other DNA

SEQ ID NO: 14015 - DNA, 108 bp, synthetic construct; identical to SEQ ID NO: 13371
  source 1..108: mol_type = other DNA

SEQ ID NO: 14016 - DNA, 99 bp, synthetic construct; identical to SEQ ID NO: 13444
  source 1..99: mol_type = other DNA

SEQ ID NO: 14017 - DNA, 108 bp, synthetic construct; identical to SEQ ID NO: 13371
  source 1..108: mol_type = other DNA

SEQ ID NO: 14018 - DNA, 99 bp, synthetic construct; identical to SEQ ID NO: 13362
  source 1..99: mol_type = other DNA

SEQ ID NO: 14019 - DNA, 108 bp, synthetic construct; identical to SEQ ID NO: 13371
  source 1..108: mol_type = other DNA

SEQ ID NO: 14020 - DNA, 99 bp, synthetic construct; identical to SEQ ID NO: 13416
  source 1..99: mol_type = other DNA

SEQ ID NO: 14021 - DNA, 108 bp, synthetic construct; identical to SEQ ID NO: 13371
  source 1..108: mol_type = other DNA

SEQ ID NO: 14022 - DNA, 99 bp, synthetic construct; identical to SEQ ID NO: 13610
  source 1..99: mol_type = other DNA

SEQ ID NO: 14023 - DNA, 108 bp, synthetic construct; identical to SEQ ID NO: 13371
  source 1..108: mol_type = other DNA

SEQ ID NO: 14024 - DNA, 99 bp, synthetic construct; identical to SEQ ID NO: 13578
  source 1..99: mol_type = other DNA

SEQ ID NO: 14025 - DNA, 108 bp, synthetic construct; identical to SEQ ID NO: 13371
  source 1..108: mol_type = other DNA

SEQ ID NO: 14026 - DNA, 99 bp, synthetic construct
  source 1..99: mol_type = other DNA
aagaaggaaggcagattcacagctcacctcaataaggccagcctgtatgtatccctgcacatcaaagactcccaacccagtgactctgctctctacttc

SEQ ID NO: 14027 - DNA, 108 bp, synthetic construct; identical to SEQ ID NO: 13371
  source 1..108: mol_type = other DNA

SEQ ID NO: 14028 - DNA, 99 bp, synthetic construct; identical to SEQ ID NO: 13410
  source 1..99: mol_type = other DNA

SEQ ID NO: 14029 - DNA, 108 bp, synthetic construct; identical to SEQ ID NO: 13371
  source 1..108: mol_type = other DNA

SEQ ID NO: 14030 - DNA, 99 bp, synthetic construct; identical to SEQ ID NO: 13362
  source 1..99: mol_type = other DNA

SEQ ID NO: 14031 - DNA, 108 bp, synthetic construct; identical to SEQ ID NO: 13371
  source 1..108: mol_type = other DNA

SEQ ID NO: 14032 - DNA, 99 bp, synthetic construct; identical to SEQ ID NO: 13822
  source 1..99: mol_type = other DNA

SEQ ID NO: 14033 - DNA, 108 bp, synthetic construct; identical to SEQ ID NO: 13371
  source 1..108: mol_type = other DNA

SEQ ID NO: 14034 - DNA, 99 bp, synthetic construct; identical to SEQ ID NO: 13380
  source 1..99: mol_type = other DNA

SEQ ID NO: 14035 - DNA, 108 bp, synthetic construct; identical to SEQ ID NO: 13371
  source 1..108: mol_type = other DNA

SEQ ID NO: 14036 - DNA, 99 bp, synthetic construct; identical to SEQ ID NO: 13678
  source 1..99: mol_type = other DNA

SEQ ID NO: 14037 - DNA, 108 bp, synthetic construct; identical to SEQ ID NO: 13371
  source 1..108: mol_type = other DNA

SEQ ID NO: 14038 - DNA, 99 bp, synthetic construct; identical to SEQ ID NO: 13464
  source 1..99: mol_type = other DNA

SEQ ID NO: 14039 - DNA, 108 bp, synthetic construct; identical to SEQ ID NO: 13371
  source 1..108: mol_type = other DNA

SEQ ID NO: 14040 - DNA, 99 bp, synthetic construct; identical to SEQ ID NO: 13430
  source 1..99: mol_type = other DNA

SEQ ID NO: 14041 - DNA, 108 bp, synthetic construct; identical to SEQ ID NO: 13371
  source 1..108: mol_type = other DNA

SEQ ID NO: 14042 - DNA, 99 bp, synthetic construct; identical to SEQ ID NO: 13570
  source 1..99: mol_type = other DNA

SEQ ID NO: 14043 - DNA, 108 bp, synthetic construct; identical to SEQ ID NO: 13371
  source 1..108: mol_type = other DNA

SEQ ID NO: 14044 - DNA, 99 bp, synthetic construct; identical to SEQ ID NO: 13434
  source 1..99: mol_type = other DNA

SEQ ID NO: 14045 - DNA, 108 bp, synthetic construct; identical to SEQ ID NO: 13371
  source 1..108: mol_type = other DNA

SEQ ID NO: 14046 - DNA, 99 bp, synthetic construct; identical to SEQ ID NO: 13612
  source 1..99: mol_type = other DNA

SEQ ID NO: 14047 - DNA, 108 bp, synthetic construct; identical to SEQ ID NO: 13371
  source 1..108: mol_type = other DNA

SEQ ID NO: 14048 - DNA, 99 bp, synthetic construct; identical to SEQ ID NO: 13900
  source 1..99: mol_type = other DNA

SEQ ID NO: 14049 - DNA, 108 bp, synthetic construct; identical to SEQ ID NO: 13371
  source 1..108: mol_type = other DNA

SEQ ID NO: 14050 - DNA, 99 bp, synthetic construct
  source 1..99: mol_type = other DNA
aagcacactggaagactgacatccaccacagtcactaaagaacgtcgcagctctttgcacatttcctcctcccagatcacagactcaggcacttatttc

SEQ ID NO: 14051 - DNA, 108 bp, synthetic construct; identical to SEQ ID NO: 13371
  source 1..108: mol_type = other DNA

SEQ ID NO: 14052 - DNA, 99 bp, synthetic construct; identical to SEQ ID NO: 13404
  source 1..99: mol_type = other DNA

SEQ ID NO: 14053 - DNA, 108 bp, synthetic construct; identical to SEQ ID NO: 13371
  source 1..108: mol_type = other DNA

SEQ ID NO: 14054 - DNA, 99 bp, synthetic construct; identical to SEQ ID NO: 13394
  source 1..99: mol_type = other DNA

SEQ ID NO: 14055 - DNA, 108 bp, synthetic construct; identical to SEQ ID NO: 13371
  source 1..108: mol_type = other DNA

SEQ ID NO: 14056 - DNA, 93 bp, synthetic construct; identical to SEQ ID NO: 13462
  source 1..93: mol_type = other DNA

SEQ ID NO: 14057 - DNA, 108 bp, synthetic construct; identical to SEQ ID NO: 13371
  source 1..108: mol_type = other DNA

SEQ ID NO: 14058 - DNA, 93 bp, synthetic construct; identical to SEQ ID NO: 13462
  source 1..93: mol_type = other DNA

SEQ ID NO: 14059 - DNA, 108 bp, synthetic construct; identical to SEQ ID NO: 13371
  source 1..108: mol_type = other DNA

SEQ ID NO: 14060 - DNA, 99 bp, synthetic construct; identical to SEQ ID NO: 13410
  source 1..99: mol_type = other DNA

SEQ ID NO: 14061 - DNA, 108 bp, synthetic construct; identical to SEQ ID NO: 13371
  source 1..108: mol_type = other DNA

SEQ ID NO: 14062 - DNA, 99 bp, synthetic construct; identical to SEQ ID NO: 13410
  source 1..99: mol_type = other DNA

SEQ ID NO: 14063 - DNA, 108 bp, synthetic construct; identical to SEQ ID NO: 13371
  source 1..108: mol_type = other DNA

SEQ ID NO: 14064 - DNA, 99 bp, synthetic construct; identical to SEQ ID NO: 13604
  source 1..99: mol_type = other DNA

SEQ ID NO: 14065 - DNA, 108 bp, synthetic construct; identical to SEQ ID NO: 13371
  source 1..108: mol_type = other DNA

SEQ ID NO: 14066 - DNA, 99 bp, synthetic construct; identical to SEQ ID NO: 13410
  source 1..99: mol_type = other DNA

SEQ ID NO: 14067 - DNA, 108 bp, synthetic construct; identical to SEQ ID NO: 13455
  source 1..108: mol_type = other DNA

SEQ ID NO: 14068 - DNA, 99 bp, synthetic construct; identical to SEQ ID NO: 13384
  source 1..99: mol_type = other DNA

SEQ ID NO: 14069 - DNA, 108 bp, synthetic construct; identical to SEQ ID NO: 13455
  source 1..108: mol_type = other DNA

SEQ ID NO: 14070 - DNA, 99 bp, synthetic construct; identical to SEQ ID NO: 13416
  source 1..99: mol_type = other DNA

SEQ ID NO: 14071 - DNA, 108 bp, synthetic construct; identical to SEQ ID NO: 13455
  source 1..108: mol_type = other DNA

SEQ ID NO: 14072 - DNA, 99 bp, synthetic construct
  source 1..99: mol_type = other DNA
ggaagcagcagaggttttgaagctacatatgataaagggaccacgtccttccacttgcagaaagcctcagtgcaggagtcagactcggctgtgtactac

SEQ ID NO: 14073 - DNA, 108 bp, synthetic construct; identical to SEQ ID NO: 13455
  source 1..108: mol_type = other DNA

SEQ ID NO: 14074 - DNA, 99 bp, synthetic construct; identical to SEQ ID NO: 13402
  source 1..99: mol_type = other DNA

SEQ ID NO: 14075 - DNA, 108 bp, synthetic construct; identical to SEQ ID NO: 13455
  source 1..108: mol_type = other DNA

SEQ ID NO: 14076 - DNA, 99 bp, synthetic construct; identical to SEQ ID NO: 13444
  source 1..99: mol_type = other DNA

SEQ ID NO: 14077 - DNA, 108 bp, synthetic construct; identical to SEQ ID NO: 13455
  source 1..108: mol_type = other DNA

SEQ ID NO: 14078 - DNA, 99 bp, synthetic construct
  source 1..99: mol_type = other DNA
aagcacactggaagactgacatccaccacagtcactaaagaacgtcgcggctctttgcacatttcctcctcccagatcacagactcaggcacttatctc

SEQ ID NO: 14079 - DNA, 108 bp, synthetic construct; identical to SEQ ID NO: 13455
  source 1..108: mol_type = other DNA

SEQ ID NO: 14080 - DNA, 99 bp, synthetic construct; identical to SEQ ID NO: 13358
  source 1..99: mol_type = other DNA

SEQ ID NO: 14081 - DNA, 108 bp, synthetic construct; identical to SEQ ID NO: 13455
  source 1..108: mol_type = other DNA

SEQ ID NO: 14082 - DNA, 99 bp, synthetic construct; identical to SEQ ID NO: 13622
  source 1..99: mol_type = other DNA

SEQ ID NO: 14083 - DNA, 108 bp, synthetic construct; identical to SEQ ID NO: 13455
  source 1..108: mol_type = other DNA

SEQ ID NO: 14084 - DNA, 99 bp, synthetic construct; identical to SEQ ID NO: 13714
  source 1..99: mol_type = other DNA

SEQ ID NO: 14085 - DNA, 108 bp, synthetic construct; identical to SEQ ID NO: 13455
  source 1..108: mol_type = other DNA

SEQ ID NO: 14086 - DNA, 99 bp, synthetic construct; identical to SEQ ID NO: 13514
  source 1..99: mol_type = other DNA

SEQ ID NO: 14087 - DNA, 108 bp, synthetic construct; identical to SEQ ID NO: 13455
  source 1..108: mol_type = other DNA

SEQ ID NO: 14088 - DNA, 99 bp, synthetic construct; identical to SEQ ID NO: 13408
  source 1..99: mol_type = other DNA

SEQ ID NO: 14089 - DNA, 108 bp, synthetic construct; identical to SEQ ID NO: 13455
  source 1..108: mol_type = other DNA

SEQ ID NO: 14090 - DNA, 99 bp, synthetic construct; identical to SEQ ID NO: 13444
  source 1..99: mol_type = other DNA

SEQ ID NO: 14091 - DNA, 108 bp, synthetic construct; identical to SEQ ID NO: 13455
  source 1..108: mol_type = other DNA

SEQ ID NO: 14092 - DNA, 99 bp, synthetic construct; identical to SEQ ID NO: 13362
  source 1..99: mol_type = other DNA

SEQ ID NO: 14093 - DNA, 108 bp, synthetic construct; identical to SEQ ID NO: 13455
  source 1..108: mol_type = other DNA

SEQ ID NO: 14094 - DNA, 99 bp, synthetic construct; identical to SEQ ID NO: 13596
  source 1..99: mol_type = other DNA

SEQ ID NO: 14095 - DNA, 108 bp, synthetic construct; identical to SEQ ID NO: 13455
  source 1..108: mol_type = other DNA

SEQ ID NO: 14096 - DNA, 99 bp, synthetic construct; identical to SEQ ID NO: 14050
  source 1..99: mol_type = other DNA

SEQ ID NO: 14097 - DNA, 108 bp, synthetic construct; identical to SEQ ID NO: 13455
  source 1..108: mol_type = other DNA

SEQ ID NO: 14098 - DNA, 99 bp, synthetic construct; identical to SEQ ID NO: 13448
  source 1..99: mol_type = other DNA

SEQ ID NO: 14099 - DNA, 108 bp, synthetic construct; identical to SEQ ID NO: 13455
  source 1..108: mol_type = other DNA

SEQ ID NO: 14100 - DNA, 99 bp, synthetic construct; identical to SEQ ID NO: 13514
  source 1..99: mol_type = other DNA

SEQ ID NO: 14101 - DNA, 108 bp, synthetic construct; identical to SEQ ID NO: 13455
  source 1..108: mol_type = other DNA

SEQ ID NO: 14102 - DNA, 99 bp, synthetic construct; identical to SEQ ID NO: 13370
  source 1..99: mol_type = other DNA

SEQ ID NO: 14103 - DNA, 108 bp, synthetic construct; identical to SEQ ID NO: 13455
  source 1..108: mol_type = other DNA

SEQ ID NO: 14104 - DNA, 99 bp, synthetic construct; identical to SEQ ID NO: 13394
  source 1..99: mol_type = other DNA

SEQ ID NO: 14105 - DNA, 108 bp, synthetic construct; identical to SEQ ID NO: 13455
  source 1..108: mol_type = other DNA

SEQ ID NO: 14106 - DNA, 99 bp, synthetic construct; identical to SEQ ID NO: 13416
  source 1..99: mol_type = other DNA

SEQ ID NO: 14107 - DNA, 108 bp, synthetic construct; identical to SEQ ID NO: 13455
  source 1..108: mol_type = other DNA

SEQ ID NO: 14108 - DNA, 99 bp, synthetic construct; identical to SEQ ID NO: 13444
  source 1..99: mol_type = other DNA

SEQ ID NO: 14109 - DNA, 108 bp, synthetic construct; identical to SEQ ID NO: 13455
  source 1..108: mol_type = other DNA

SEQ ID NO: 14110 - DNA, 99 bp, synthetic construct; identical to SEQ ID NO: 13402
  source 1..99: mol_type = other DNA

SEQ ID NO: 14111 - DNA, 108 bp, synthetic construct; identical to SEQ ID NO: 13455
  source 1..108: mol_type = other DNA

SEQ ID NO: 14112 - DNA, 99 bp, synthetic construct; identical to SEQ ID NO: 13428
  source 1..99: mol_type = other DNA

SEQ ID NO: 14113 - DNA, 108 bp, synthetic construct; identical to SEQ ID NO: 13455
  source 1..108: mol_type = other DNA

SEQ ID NO: 14114 - DNA, 99 bp, synthetic construct; identical to SEQ ID NO: 13358
  source 1..99: mol_type = other DNA

SEQ ID NO: 14115 - DNA, 108 bp, synthetic construct; identical to SEQ ID NO: 13455
  source 1..108: mol_type = other DNA

SEQ ID NO: 14116 - DNA, 99 bp, synthetic construct; identical to SEQ ID NO: 13464
  source 1..99: mol_type = other DNA

SEQ ID NO: 14117 - DNA, 108 bp, synthetic construct; identical to SEQ ID NO: 13455
  source 1..108: mol_type = other DNA

SEQ ID NO: 14118 - DNA, 99 bp, synthetic construct; identical to SEQ ID NO: 13404
  source 1..99: mol_type = other DNA

SEQ ID NO: 14119 - DNA, 108 bp, synthetic construct; identical to SEQ ID NO: 13359
  source 1..108: mol_type = other DNA

SEQ ID NO: 14120 - DNA, 99 bp, synthetic construct
  source 1..99: mol_type = other DNA
aaggacagtgggcatttctccactttcctgagccgctcgaatgggtacagttacctgcttctgacagagctccagatcaaagactctgcctcatacctc

SEQ ID NO: 14121 - DNA, 108 bp, synthetic construct; identical to SEQ ID NO: 13359
  source 1..108: mol_type = other DNA

SEQ ID NO: 14122 - DNA, 99 bp, synthetic construct; identical to SEQ ID NO: 13362
  source 1..99: mol_type = other DNA

SEQ ID NO: 14123 - DNA, 108 bp, synthetic construct; identical to SEQ ID NO: 13359
  source 1..108: mol_type = other DNA

SEQ ID NO: 14124 - DNA, 99 bp, synthetic construct; identical to SEQ ID NO: 13402
  source 1..99: mol_type = other DNA

SEQ ID NO: 14125 - DNA, 108 bp, synthetic construct; identical to SEQ ID NO: 13359
  source 1..108: mol_type = other DNA

SEQ ID NO: 14126 - DNA, 99 bp, synthetic construct; identical to SEQ ID NO: 13376
  source 1..99: mol_type = other DNA

SEQ ID NO: 14127 - DNA, 108 bp, synthetic construct; identical to SEQ ID NO: 13359
  source 1..108: mol_type = other DNA

SEQ ID NO: 14128 - DNA, 99 bp, synthetic construct; identical to SEQ ID NO: 13370
  source 1..99: mol_type = other DNA

SEQ ID NO: 14129 - DNA, 108 bp, synthetic construct; identical to SEQ ID NO: 13359
  source 1..108: mol_type = other DNA

SEQ ID NO: 14130 - DNA, 99 bp, synthetic construct; identical to SEQ ID NO: 13884
  source 1..99: mol_type = other DNA

SEQ ID NO: 14131 - DNA, 108 bp, synthetic construct; identical to SEQ ID NO: 13359
  source 1..108: mol_type = other DNA

SEQ ID NO: 14132 - DNA, 99 bp, synthetic construct; identical to SEQ ID NO: 13500
  source 1..99: mol_type = other DNA

SEQ ID NO: 14133 - DNA, 108 bp, synthetic construct; identical to SEQ ID NO: 13359
  source 1..108: mol_type = other DNA

SEQ ID NO: 14134 - DNA, 99 bp, synthetic construct; identical to SEQ ID NO: 13404
  source 1..99: mol_type = other DNA

SEQ ID NO: 14135 - DNA, 108 bp, synthetic construct; identical to SEQ ID NO: 13359
  source 1..108: mol_type = other DNA

SEQ ID NO: 14136 - DNA, 99 bp, synthetic construct; identical to SEQ ID NO: 13400
  source 1..99: mol_type = other DNA

SEQ ID NO: 14137 - DNA, 108 bp, synthetic construct; identical to SEQ ID NO: 13359
  source 1..108: mol_type = other DNA

SEQ ID NO: 14138 - DNA, 99 bp, synthetic construct; identical to SEQ ID NO: 13480
  source 1..99: mol_type = other DNA

SEQ ID NO: 14139 - DNA, 108 bp, synthetic construct; identical to SEQ ID NO: 13359
  source 1..108: mol_type = other DNA

SEQ ID NO: 14140 - DNA, 99 bp, synthetic construct; identical to SEQ ID NO: 13416
  source 1..99: mol_type = other DNA

SEQ ID NO: 14141 - DNA, 108 bp, synthetic construct; identical to SEQ ID NO: 13359
  source 1..108: mol_type = other DNA

SEQ ID NO: 14142 - DNA, 99 bp, synthetic construct; identical to SEQ ID NO: 13398
  source 1..99: mol_type = other DNA

SEQ ID NO: 14143 - DNA, 108 bp, synthetic construct; identical to SEQ ID NO: 13359
  source 1..108: mol_type = other DNA

SEQ ID NO: 14144 - DNA, 99 bp, synthetic construct; identical to SEQ ID NO: 13424
  source 1..99: mol_type = other DNA

SEQ ID NO: 14145 - DNA, 108 bp, synthetic construct; identical to SEQ ID NO: 13359
  source 1..108: mol_type = other DNA

SEQ ID NO: 14146 - DNA, 99 bp, synthetic construct; identical to SEQ ID NO: 13444
  source 1..99: mol_type = other DNA

SEQ ID NO: 14147 - DNA, 108 bp, synthetic construct; identical to SEQ ID NO: 13359
  source 1..108: mol_type = other DNA

SEQ ID NO: 14148 - DNA, 99 bp, synthetic construct; identical to SEQ ID NO: 13612
  source 1..99: mol_type = other DNA

SEQ ID NO: 14149 - DNA, 108 bp, synthetic construct; identical to SEQ ID NO: 13359
  source 1..108: mol_type = other DNA

SEQ ID NO: 14150 - DNA, 99 bp, synthetic construct; identical to SEQ ID NO: 13610
  source 1..99: mol_type = other DNA

SEQ ID NO: 14151 - DNA, 108 bp, synthetic construct; identical to SEQ ID NO: 13359
  source 1..108: mol_type = other DNA

SEQ ID NO: 14152 - DNA, 99 bp, synthetic construct; identical to SEQ ID NO: 13364
  source 1..99: mol_type = other DNA

SEQ ID NO: 14153 - DNA, 108 bp, synthetic construct; identical to SEQ ID NO: 13359
  source 1..108: mol_type = other DNA

SEQ ID NO: 14154 - DNA, 99 bp, synthetic construct; identical to SEQ ID NO: 13500
  source 1..99: mol_type = other DNA

SEQ ID NO: 14155 - DNA, 108 bp, synthetic construct; identical to SEQ ID NO: 13359
  source 1..108: mol_type = other DNA

SEQ ID NO: 14156 - DNA, 99 bp, synthetic construct; identical to SEQ ID NO: 13364
  source 1..99: mol_type = other DNA

SEQ ID NO: 14157 - DNA, 108 bp, synthetic construct; identical to SEQ ID NO: 13359
  source 1..108: mol_type = other DNA

SEQ ID NO: 14158 - DNA, 99 bp, synthetic construct
  source 1..99: mol_type = other DNA
aaggaagaaggcagttttacagctcacctcaatagagccagcctgcatgttttcctacacatcagagagccgcaacccagtgactctgctctctacctc

SEQ ID NO: 14159 - DNA, 108 bp, synthetic construct; identical to SEQ ID NO: 13359
  source 1..108: mol_type = other DNA

SEQ ID NO: 14160 - DNA, 99 bp, synthetic construct; identical to SEQ ID NO: 13732
  source 1..99: mol_type = other DNA

SEQ ID NO: 14161 - DNA, 108 bp, synthetic construct; identical to SEQ ID NO: 13359
  source 1..108: mol_type = other DNA

SEQ ID NO: 14162 - DNA, 99 bp, synthetic construct; identical to SEQ ID NO: 13402
  source 1..99: mol_type = other DNA

SEQ ID NO: 14163 - DNA, 108 bp, synthetic construct; identical to SEQ ID NO: 13359
  source 1..108: mol_type = other DNA

SEQ ID NO: 14164 - DNA, 99 bp, synthetic construct; identical to SEQ ID NO: 13378
  source 1..99: mol_type = other DNA

SEQ ID NO: 14165 - DNA, 108 bp, synthetic construct; identical to SEQ ID NO: 13359
  source 1..108: mol_type = other DNA

SEQ ID NO: 14166 - DNA, 99 bp, synthetic construct; identical to SEQ ID NO: 13400
  source 1..99: mol_type = other DNA

SEQ ID NO: 14167 - DNA, 108 bp, synthetic construct; identical to SEQ ID NO: 13359
  source 1..108: mol_type = other DNA

SEQ ID NO: 14168 - DNA, 99 bp, synthetic construct; identical to SEQ ID NO: 13362
  source 1..99: mol_type = other DNA

SEQ ID NO: 14169 - DNA, 108 bp, synthetic construct; identical to SEQ ID NO: 13359
  source 1..108: mol_type = other DNA

SEQ ID NO: 14170 - DNA, 99 bp, synthetic construct; identical to SEQ ID NO: 14078
  source 1..99: mol_type = other DNA

SEQ ID NO: 14171 - DNA, 108 bp, synthetic construct; identical to SEQ ID NO: 13359
  source 1..108: mol_type = other DNA

SEQ ID NO: 14172 - DNA, 99 bp, synthetic construct; identical to SEQ ID NO: 13362
  source 1..99: mol_type = other DNA

SEQ ID NO: 14173 - DNA, 108 bp, synthetic construct; identical to SEQ ID NO: 13359
  source 1..108: mol_type = other DNA

SEQ ID NO: 14174 - DNA, 99 bp, synthetic construct; identical to SEQ ID NO: 13416
  source 1..99: mol_type = other DNA

SEQ ID NO: 14175 - DNA, 108 bp, synthetic construct; identical to SEQ ID NO: 13359
  source 1..108: mol_type = other DNA

SEQ ID NO: 14176 - DNA, 99 bp, synthetic construct; identical to SEQ ID NO: 13448
  source 1..99: mol_type = other DNA

SEQ ID NO: 14177 - DNA, 108 bp, synthetic construct; identical to SEQ ID NO: 13359
  source 1..108: mol_type = other DNA

SEQ ID NO: 14178 - DNA, 99 bp, synthetic construct
  source 1..99: mol_type = other DNA
aaggaagaaggcagatttacagctcacctcaatagagccagcctgcatgttttcctacacatcagagagccgcaacccagtgactctgctgtctacctc

SEQ ID NO: 14179 - DNA, 108 bp, synthetic construct; identical to SEQ ID NO: 13359
  source 1..108: mol_type = other DNA

SEQ ID NO: 14180 - DNA, 99 bp, synthetic construct; identical to SEQ ID NO: 13362
  source 1..99: mol_type = other DNA

SEQ ID NO: 14181 - DNA, 108 bp, synthetic construct; identical to SEQ ID NO: 13359
  source 1..108: mol_type = other DNA

SEQ ID NO: 14182 - DNA, 99 bp, synthetic construct; identical to SEQ ID NO: 13362
  source 1..99: mol_type = other DNA

SEQ ID NO: 14183 - DNA, 108 bp, synthetic construct; identical to SEQ ID NO: 13359
  source 1..108: mol_type = other DNA

SEQ ID NO: 14184 - DNA, 99 bp, synthetic construct
  source 1..99: mol_type = other DNA
accgagcaccaagggttccacgccactctccataagagcagcagctccttccatctgcagaagtcctcagtgcagctgtcagactctgccctgtactac

SEQ ID NO: 14185 - DNA, 108 bp, synthetic construct; identical to SEQ ID NO: 13359
  source 1..108: mol_type = other DNA

SEQ ID NO: 14186 - DNA, 99 bp, synthetic construct; identical to SEQ ID NO: 13362
  source 1..99: mol_type = other DNA

SEQ ID NO: 14187 - DNA, 108 bp, synthetic construct; identical to SEQ ID NO: 13359
  source 1..108: mol_type = other DNA

SEQ ID NO: 14188 - DNA, 99 bp, synthetic construct; identical to SEQ ID NO: 13362
  source 1..99: mol_type = other DNA

SEQ ID NO: 14189 - DNA, 108 bp, synthetic construct; identical to SEQ ID NO: 13359
  source 1..108: mol_type = other DNA

SEQ ID NO: 14190 - DNA, 99 bp, synthetic construct; identical to SEQ ID NO: 13360
  source 1..99: mol_type = other DNA

SEQ ID NO: 14191 - DNA, 108 bp, synthetic construct; identical to SEQ ID NO: 13359
  source 1..108: mol_type = other DNA

SEQ ID NO: 14192 - DNA, 99 bp, synthetic construct; identical to SEQ ID NO: 13398
  source 1..99: mol_type = other DNA

SEQ ID NO: 14193 - DNA, 108 bp, synthetic construct; identical to SEQ ID NO: 13359
  source 1..108: mol_type = other DNA

SEQ ID NO: 14194 - DNA, 99 bp, synthetic construct; identical to SEQ ID NO: 13398
  source 1..99: mol_type = other DNA

SEQ ID NO: 14195 - DNA, 108 bp, synthetic construct; identical to SEQ ID NO: 13359
  source 1..108: mol_type = other DNA

SEQ ID NO: 14196 - DNA, 99 bp, synthetic construct; identical to SEQ ID NO: 13364
  source 1..99: mol_type = other DNA

SEQ ID NO: 14197 - DNA, 108 bp, synthetic construct; identical to SEQ ID NO: 13359
  source 1..108: mol_type = other DNA

SEQ ID NO: 14198 - DNA, 99 bp, synthetic construct; identical to SEQ ID NO: 13398
  source 1..99: mol_type = other DNA

SEQ ID NO: 14199 - DNA, 108 bp, synthetic construct; identical to SEQ ID NO: 13359
  source 1..108: mol_type = other DNA

SEQ ID NO: 14200 - DNA, 99 bp, synthetic construct; identical to SEQ ID NO: 13364
  source 1..99: mol_type = other DNA

SEQ ID NO: 14201 - DNA, 108 bp, synthetic construct; identical to SEQ ID NO: 13359
  source 1..108: mol_type = other DNA

SEQ ID NO: 14202 - DNA, 99 bp, synthetic construct; identical to SEQ ID NO: 13398
  source 1..99: mol_type = other DNA

SEQ ID NO: 14203 - DNA, 108 bp, synthetic construct; identical to SEQ ID NO: 13359
  source 1..108: mol_type = other DNA

SEQ ID NO: 14204 - DNA, 99 bp, synthetic construct; identical to SEQ ID NO: 13384
  source 1..99: mol_type = other DNA

SEQ ID NO: 14205 - DNA, 108 bp, synthetic construct; identical to SEQ ID NO: 13359
  source 1..108: mol_type = other DNA

SEQ ID NO: 14206 - DNA, 99 bp, synthetic construct; identical to SEQ ID NO: 13394
  source 1..99: mol_type = other DNA

SEQ ID NO: 14207 - DNA, 108 bp, synthetic construct; identical to SEQ ID NO: 13359
  source 1..108: mol_type = other DNA

SEQ ID NO: 14208 - DNA, 99 bp, synthetic construct; identical to SEQ ID NO: 14120
  source 1..99: mol_type = other DNA

SEQ ID NO: 14209 - DNA, 108 bp, synthetic construct; identical to SEQ ID NO: 13359
  source 1..108: mol_type = other DNA

SEQ ID NO: 14210 - DNA, 99 bp, synthetic construct; identical to SEQ ID NO: 13424
  source 1..99: mol_type = other DNA

SEQ ID NO: 14211 - DNA, 108 bp, synthetic construct; identical to SEQ ID NO: 13359
  source 1..108: mol_type = other DNA

SEQ ID NO: 14212 - DNA, 99 bp, synthetic construct
  source 1..99: mol_type = other DNA
caaggagtgaacggcttcgaggctgagttcagcaagagcgactcttccttccaccttcggaaagcctccgtgcactggagcgactcggctgtgtacttc

SEQ ID NO: 14213 - DNA, 108 bp, synthetic construct; identical to SEQ ID NO: 13359
  source 1..108: mol_type = other DNA

SEQ ID NO: 14214 - DNA, 99 bp, synthetic construct; identical to SEQ ID NO: 13360
  source 1..99: mol_type = other DNA

SEQ ID NO: 14215 - DNA, 108 bp, synthetic construct; identical to SEQ ID NO: 13359
  source 1..108: mol_type = other DNA

SEQ ID NO: 14216 - DNA, 99 bp, synthetic construct; identical to SEQ ID NO: 13410
  source 1..99: mol_type = other DNA

SEQ ID NO: 14217 - DNA, 108 bp, synthetic construct; identical to SEQ ID NO: 13359
  source 1..108: mol_type = other DNA

SEQ ID NO: 14218 - DNA, 99 bp, synthetic construct; identical to SEQ ID NO: 13430
  source 1..99: mol_type = other DNA

SEQ ID NO: 14219 - DNA, 108 bp, synthetic construct; identical to SEQ ID NO: 13359
  source 1..108: mol_type = other DNA

SEQ ID NO: 14220 - DNA, 99 bp, synthetic construct; identical to SEQ ID NO: 13370
  source 1..99: mol_type = other DNA

SEQ ID NO: 14221 - DNA, 108 bp, synthetic construct; identical to SEQ ID NO: 13359
  source 1..108: mol_type = other DNA

SEQ ID NO: 14222 - DNA, 99 bp, synthetic construct
  source 1..99: mol_type = other DNA
aaagaagaacaaggactcactgtcttactgaacaagaaagaaaaacgactctctctgaacctcacagctgcccatcctggggactcagccgtgtacttc

SEQ ID NO: 14223 - DNA, 108 bp, synthetic construct; identical to SEQ ID NO: 13359
  source 1..108: mol_type = other DNA

SEQ ID NO: 14224 - DNA, 99 bp, synthetic construct; identical to SEQ ID NO: 13432
  source 1..99: mol_type = other DNA

SEQ ID NO: 14225 - DNA, 108 bp, synthetic construct; identical to SEQ ID NO: 13359
  source 1..108: mol_type = other DNA

SEQ ID NO: 14226 - DNA, 93 bp, synthetic construct; identical to SEQ ID NO: 13462
  source 1..93: mol_type = other DNA

SEQ ID NO: 14227 - DNA, 108 bp, synthetic construct; identical to SEQ ID NO: 13359
  source 1..108: mol_type = other DNA

SEQ ID NO: 14228 - DNA, 99 bp, synthetic construct; identical to SEQ ID NO: 13398
  source 1..99: mol_type = other DNA

SEQ ID NO: 14229 - DNA, 108 bp, synthetic construct; identical to SEQ ID NO: 13359
  source 1..108: mol_type = other DNA

SEQ ID NO: 14230 - DNA, 99 bp, synthetic construct; identical to SEQ ID NO: 13480
  source 1..99: mol_type = other DNA

SEQ ID NO: 14231 - DNA, 108 bp, synthetic construct; identical to SEQ ID NO: 13359
  source 1..108: mol_type = other DNA

SEQ ID NO: 14232 - DNA, 99 bp, synthetic construct; identical to SEQ ID NO: 13866
  source 1..99: mol_type = other DNA

SEQ ID NO: 14233 - DNA, 108 bp, synthetic construct; identical to SEQ ID NO: 13359
  source 1..108: mol_type = other DNA

SEQ ID NO: 14234 - DNA, 99 bp, synthetic construct; identical to SEQ ID NO: 13866
  source 1..99: mol_type = other DNA

SEQ ID NO: 14235 - DNA, 108 bp, synthetic construct; identical to SEQ ID NO: 13359
  source 1..108: mol_type = other DNA

SEQ ID NO: 14236 - DNA, 99 bp, synthetic construct; identical to SEQ ID NO: 13514
  source 1..99: mol_type = other DNA

SEQ ID NO: 14237 - DNA, 108 bp, synthetic construct; identical to SEQ ID NO: 13359
  source 1..108: mol_type = other DNA

SEQ ID NO: 14238 - DNA, 99 bp, synthetic construct; identical to SEQ ID NO: 13578
  source 1..99: mol_type = other DNA

SEQ ID NO: 14239 - DNA, 108 bp, synthetic construct; identical to SEQ ID NO: 13359
  source 1..108: mol_type = other DNA

SEQ ID NO: 14240 - DNA, 99 bp, synthetic construct; identical to SEQ ID NO: 13516
  source 1..99: mol_type = other DNA

SEQ ID NO: 14241 - DNA, 108 bp, synthetic construct; identical to SEQ ID NO: 13359
  source 1..108: mol_type = other DNA

SEQ ID NO: 14242 - DNA, 99 bp, synthetic construct; identical to SEQ ID NO: 13732
  source 1..99: mol_type = other DNA

SEQ ID NO: 14243 - DNA, 108 bp, synthetic construct; identical to SEQ ID NO: 13359
  source 1..108: mol_type = other DNA

SEQ ID NO: 14244 - DNA, 99 bp, synthetic construct; identical to SEQ ID NO: 13404
  source 1..99: mol_type = other DNA

SEQ ID NO: 14245 - DNA, 108 bp, synthetic construct; identical to SEQ ID NO: 13359
  source 1..108: mol_type = other DNA

SEQ ID NO: 14246 - DNA, 99 bp, synthetic construct; identical to SEQ ID NO: 13402
  source 1..99: mol_type = other DNA

SEQ ID NO: 14247 - DNA, 108 bp, synthetic construct; identical to SEQ ID NO: 13359
  source 1..108: mol_type = other DNA

SEQ ID NO: 14248 - DNA, 99 bp, synthetic construct; identical to SEQ ID NO: 13428
  source 1..99: mol_type = other DNA

SEQ ID NO: 14249 - DNA, 108 bp, synthetic construct; identical to SEQ ID NO: 13359
  source 1..108: mol_type = other DNA

SEQ ID NO: 14250 - DNA, 99 bp, synthetic construct; identical to SEQ ID NO: 13440
  source 1..99: mol_type = other DNA

SEQ ID NO: 14251 - DNA, 108 bp, synthetic construct; identical to SEQ ID NO: 13359
  source 1..108: mol_type = other DNA

SEQ ID NO: 14252 - DNA, 99 bp, synthetic construct; identical to SEQ ID NO: 13398
  source 1..99: mol_type = other DNA

SEQ ID NO: 14253 - DNA, 108 bp, synthetic construct; identical to SEQ ID NO: 13359
  source 1..108: mol_type = other DNA

SEQ ID NO: 14254 - DNA, 99 bp, synthetic construct; identical to SEQ ID NO: 13362
  source 1..99: mol_type = other DNA

SEQ ID NO: 14255 - DNA, 108 bp, synthetic construct; identical to SEQ ID NO: 13359
  source 1..108: mol_type = other DNA

SEQ ID NO: 14256 - DNA, 99 bp, synthetic construct; identical to SEQ ID NO: 13366
  source 1..99: mol_type = other DNA

SEQ ID NO: 14257 - DNA, 108 bp, synthetic construct; identical to SEQ ID NO: 13359
  source 1..108: mol_type = other DNA

SEQ ID NO: 14258 - DNA, 99 bp, synthetic construct; identical to SEQ ID NO: 13364
  source 1..99: mol_type = other DNA

SEQ ID NO: 14259 - DNA, 108 bp, synthetic construct; identical to SEQ ID NO: 13359
  source 1..108: mol_type = other DNA

SEQ ID NO: 14260 - DNA, 99 bp, synthetic construct; identical to SEQ ID NO: 13402
  source 1..99: mol_type = other DNA

SEQ ID NO: 14261 - DNA, 108 bp, synthetic construct; identical to SEQ ID NO: 13359
  source 1..108: mol_type = other DNA

SEQ ID NO: 14262 - DNA, 99 bp, synthetic construct; identical to SEQ ID NO: 13444
  source 1..99: mol_type = other DNA

SEQ ID NO: 14263 - DNA, 108 bp, synthetic construct; identical to SEQ ID NO: 13359
  source 1..108: mol_type = other DNA

SEQ ID NO: 14264 - DNA, 99 bp, synthetic construct; identical to SEQ ID NO: 13428
  source 1..99: mol_type = other DNA

SEQ ID NO: 14265 - DNA, 108 bp, synthetic construct; identical to SEQ ID NO: 13359
  source 1..108: mol_type = other DNA

SEQ ID NO: 14266 - DNA, 99 bp, synthetic construct; identical to SEQ ID NO: 13456
  source 1..99: mol_type = other DNA

SEQ ID NO: 14267 - DNA, 108 bp, synthetic construct; identical to SEQ ID NO: 13359
  source 1..108: mol_type = other DNA

SEQ ID NO: 14268 - DNA, 99 bp, synthetic construct; identical to SEQ ID NO: 13416
  source 1..99: mol_type = other DNA

SEQ ID NO: 14269 - DNA, 108 bp, synthetic construct; identical to SEQ ID NO: 13359
  source 1..108: mol_type = other DNA

SEQ ID NO: 14270 - DNA, 99 bp, synthetic construct; identical to SEQ ID NO: 13410
  source 1..99: mol_type = other DNA

SEQ ID NO: 14271 - DNA, 108 bp, synthetic construct; identical to SEQ ID NO: 13359
  source 1..108: mol_type = other DNA

SEQ ID NO: 14272 - DNA, 99 bp, synthetic construct; identical to SEQ ID NO: 13380
  source 1..99: mol_type = other DNA

SEQ ID NO: 14273 - DNA, 108 bp, synthetic construct; identical to SEQ ID NO: 13359
  source 1..108: mol_type = other DNA

SEQ ID NO: 14274 - DNA, 99 bp, synthetic construct; identical to SEQ ID NO: 13362
  source 1..99: mol_type = other DNA

SEQ ID NO: 14275 - DNA, 108 bp, synthetic construct; identical to SEQ ID NO: 13359
  source 1..108: mol_type = other DNA

SEQ ID NO: 14276 - DNA, 99 bp, synthetic construct; identical to SEQ ID NO: 13360
  source 1..99: mol_type = other DNA

SEQ ID NO: 14277 - DNA, 108 bp, synthetic construct; identical to SEQ ID NO: 13359
  source 1..108: mol_type = other DNA

SEQ ID NO: 14278 - DNA, 99 bp, synthetic construct; identical to SEQ ID NO: 13362
  source 1..99: mol_type = other DNA

SEQ ID NO: 14279 - DNA, 108 bp, synthetic construct; identical to SEQ ID NO: 13359
  source 1..108: mol_type = other DNA

SEQ ID NO: 14280 - DNA, 99 bp, synthetic construct; identical to SEQ ID NO: 13442
  source 1..99: mol_type = other DNA

SEQ ID NO: 14281 - DNA, 108 bp, synthetic construct; identical to SEQ ID NO: 13359
  source 1..108: mol_type = other DNA

SEQ ID NO: 14282 - DNA, 99 bp, synthetic construct; identical to SEQ ID NO: 13384
  source 1..99: mol_type = other DNA

SEQ ID NO: 14283 - DNA, 108 bp, synthetic construct; identical to SEQ ID NO: 13359
  source 1..108: mol_type = other DNA

SEQ ID NO: 14284 - DNA, 99 bp, synthetic construct; identical to SEQ ID NO: 13476
  source 1..99: mol_type = other DNA

SEQ ID NO: 14285 - DNA, 108 bp, synthetic construct; identical to SEQ ID NO: 13359
  source 1..108: mol_type = other DNA

SEQ ID NO: 14286 - DNA, 99 bp, synthetic construct; identical to SEQ ID NO: 13612
  source 1..99: mol_type = other DNA

SEQ ID NO: 14287 - DNA, 108 bp, synthetic construct; identical to SEQ ID NO: 13359
  source 1..108: mol_type = other DNA

SEQ ID NO: 14288 - DNA, 99 bp, synthetic construct; identical to SEQ ID NO: 13610
  source 1..99: mol_type = other DNA

SEQ ID NO: 14289 - DNA, 108 bp, synthetic construct; identical to SEQ ID NO: 13359
  source 1..108: mol_type = other DNA

SEQ ID NO: 14290 - DNA, 99 bp, synthetic construct; identical to SEQ ID NO: 13370
  source 1..99: mol_type = other DNA

SEQ ID NO: 14291 - DNA, 108 bp, synthetic construct; identical to SEQ ID NO: 13359
  source 1..108: mol_type = other DNA

SEQ ID NO: 14292 - DNA, 99 bp, synthetic construct; identical to SEQ ID NO: 13402
  source 1..99: mol_type = other DNA

SEQ ID NO: 14293 - DNA, 108 bp, synthetic construct; identical to SEQ ID NO: 13359
  source 1..108: mol_type = other DNA

SEQ ID NO: 14294 - DNA, 99 bp, synthetic construct
  source 1..99: mol_type = other DNA
aaggagaatgggaggttaaagtcagcattcgattctaaggagagctacagcaccctgcacatcagggatgcccagctggaggactcaggcacttacttc

SEQ ID NO: 14295 - DNA, 108 bp, synthetic construct; identical to SEQ ID NO: 13359
  source 1..108: mol_type = other DNA

SEQ ID NO: 14296 - DNA, 99 bp, synthetic construct; identical to SEQ ID NO: 13614
  source 1..99: mol_type = other DNA

SEQ ID NO: 14297 - DNA, 108 bp, synthetic construct; identical to SEQ ID NO: 13359
  source 1..108: mol_type = other DNA

SEQ ID NO: 14298 - DNA, 99 bp, synthetic construct; identical to SEQ ID NO: 13416
  source 1..99: mol_type = other DNA

SEQ ID NO: 14299 - DNA, 108 bp, synthetic construct; identical to SEQ ID NO: 13359
  source 1..108: mol_type = other DNA

SEQ ID NO: 14300 - DNA, 99 bp, synthetic construct; identical to SEQ ID NO: 13416
  source 1..99: mol_type = other DNA

SEQ ID NO: 14301 - DNA, 108 bp, synthetic construct; identical to SEQ ID NO: 13359
  source 1..108: mol_type = other DNA

SEQ ID NO: 14302 - DNA, 99 bp, synthetic construct; identical to SEQ ID NO: 13398
  source 1..99: mol_type = other DNA

SEQ ID NO: 14303 - DNA, 108 bp, synthetic construct; identical to SEQ ID NO: 13359
  source 1..108: mol_type = other DNA

SEQ ID NO: 14304 - DNA, 99 bp, synthetic construct; identical to SEQ ID NO: 13526
  source 1..99: mol_type = other DNA

SEQ ID NO: 14305 - DNA, 108 bp, synthetic construct; identical to SEQ ID NO: 13359
  source 1..108: mol_type = other DNA

SEQ ID NO: 14306 - DNA, 99 bp, synthetic construct; identical to SEQ ID NO: 13538
  source 1..99: mol_type = other DNA

SEQ ID NO: 14307 - DNA, 108 bp, synthetic construct; identical to SEQ ID NO: 13359
  source 1..108: mol_type = other DNA

SEQ ID NO: 14308 - DNA, 99 bp, synthetic construct; identical to SEQ ID NO: 13432
  source 1..99: mol_type = other DNA

SEQ ID NO: 14309 - DNA, 108 bp, synthetic construct; identical to SEQ ID NO: 13359
  source 1..108: mol_type = other DNA

SEQ ID NO: 14310 - DNA, 99 bp, synthetic construct; identical to SEQ ID NO: 13362
  source 1..99: mol_type = other DNA

SEQ ID NO: 14311 - DNA, 108 bp, synthetic construct; identical to SEQ ID NO: 13359
  source 1..108: mol_type = other DNA

SEQ ID NO: 14312 - DNA, 99 bp, synthetic construct; identical to SEQ ID NO: 13432
  source 1..99: mol_type = other DNA

SEQ ID NO: 14313 - DNA, 108 bp, synthetic construct; identical to SEQ ID NO: 13359
  source 1..108: mol_type = other DNA

SEQ ID NO: 14314 - DNA, 99 bp, synthetic construct; identical to SEQ ID NO: 13612
  source 1..99: mol_type = other DNA

SEQ ID NO: 14315 - DNA, 108 bp, synthetic construct; identical to SEQ ID NO: 13393
  source 1..108: mol_type = other DNA

SEQ ID NO: 14316 - DNA, 99 bp, synthetic construct; identical to SEQ ID NO: 13460
  source 1..99: mol_type = other DNA

SEQ ID NO: 14317 - DNA, 108 bp, synthetic construct; identical to SEQ ID NO: 13393
  source 1..108: mol_type = other DNA

SEQ ID NO: 14318 - DNA, 99 bp, synthetic construct; identical to SEQ ID NO: 13360
  source 1..99: mol_type = other DNA

SEQ ID NO: 14319 - DNA, 108 bp, synthetic construct; identical to SEQ ID NO: 13393
  source 1..108: mol_type = other DNA

SEQ ID NO: 14320 - DNA, 99 bp, synthetic construct; identical to SEQ ID NO: 13604
  source 1..99: mol_type = other DNA

SEQ ID NO: 14321 - DNA, 108 bp, synthetic construct; identical to SEQ ID NO: 13393
  source 1..108: mol_type = other DNA

SEQ ID NO: 14322 - DNA, 99 bp, synthetic construct; identical to SEQ ID NO: 13432
  source 1..99: mol_type = other DNA

SEQ ID NO: 14323 - DNA, 108 bp, synthetic construct; identical to SEQ ID NO: 13393
  source 1..108: mol_type = other DNA

SEQ ID NO: 14324 - DNA, 99 bp, synthetic construct; identical to SEQ ID NO: 13402
  source 1..99: mol_type = other DNA

SEQ ID NO: 14325 - DNA, 108 bp, synthetic construct; identical to SEQ ID NO: 13393
  source 1..108: mol_type = other DNA

SEQ ID NO: 14326 - DNA, 99 bp, synthetic construct; identical to SEQ ID NO: 13470
  source 1..99: mol_type = other DNA

SEQ ID NO: 14327 - DNA, 108 bp, synthetic construct; identical to SEQ ID NO: 13393
  source 1..108: mol_type = other DNA

SEQ ID NO: 14328 - DNA, 99 bp, synthetic construct; identical to SEQ ID NO: 13398
  source 1..99: mol_type = other DNA

SEQ ID NO: 14329 - DNA, 108 bp, synthetic construct; identical to SEQ ID NO: 13393
  source 1..108: mol_type = other DNA

SEQ ID NO: 14330 - DNA, 99 bp, synthetic construct; identical to SEQ ID NO: 13432
  source 1..99: mol_type = other DNA

SEQ ID NO: 14331 - DNA, 108 bp, synthetic construct; identical to SEQ ID NO: 13393
  source 1..108: mol_type = other DNA

SEQ ID NO: 14332 - DNA, 99 bp, synthetic construct; identical to SEQ ID NO: 13760
  source 1..99: mol_type = other DNA

SEQ ID NO: 14333 - DNA, 108 bp, synthetic construct; identical to SEQ ID NO: 13393
  source 1..108: mol_type = other DNA

SEQ ID NO: 14334 - DNA, 99 bp, synthetic construct; identical to SEQ ID NO: 13400
  source 1..99: mol_type = other DNA

SEQ ID NO: 14335 - DNA, 108 bp, synthetic construct; identical to SEQ ID NO: 13393
  source 1..108: mol_type = other DNA

SEQ ID NO: 14336 - DNA, 99 bp, synthetic construct; identical to SEQ ID NO: 13362
  source 1..99: mol_type = other DNA

SEQ ID NO: 14337 - DNA, 108 bp, synthetic construct; identical to SEQ ID NO: 13393
  source 1..108: mol_type = other DNA

SEQ ID NO: 14338 - DNA, 99 bp, synthetic construct; identical to SEQ ID NO: 13394
  source 1..99: mol_type = other DNA

SEQ ID NO: 14339 - DNA, 108 bp, synthetic construct; identical to SEQ ID NO: 13393
  source 1..108: mol_type = other DNA

SEQ ID NO: 14340 - DNA, 99 bp, synthetic construct; identical to SEQ ID NO: 13410
  source 1..99: mol_type = other DNA

SEQ ID NO: 14341 - DNA, 108 bp, synthetic construct; identical to SEQ ID NO: 13393
  source 1..108: mol_type = other DNA

SEQ ID NO: 14342 - DNA, 99 bp, synthetic construct; identical to SEQ ID NO: 13732
  source 1..99: mol_type = other DNA

SEQ ID NO: 14343 - DNA, 108 bp, synthetic construct; identical to SEQ ID NO: 13393
  source 1..108: mol_type = other DNA

SEQ ID NO: 14344 - DNA, 99 bp, synthetic construct; identical to SEQ ID NO: 13412
  source 1..99: mol_type = other DNA

SEQ ID NO: 14345 - DNA, 108 bp, synthetic construct; identical to SEQ ID NO: 13393
  source 1..108: mol_type = other DNA

SEQ ID NO: 14346 - DNA, 99 bp, synthetic construct; identical to SEQ ID NO: 13398
  source 1..99: mol_type = other DNA

SEQ ID NO: 14347 - DNA, 108 bp, synthetic construct; identical to SEQ ID NO: 13393
  source 1..108: mol_type = other DNA

SEQ ID NO: 14348 - DNA, 99 bp, synthetic construct; identical to SEQ ID NO: 13516
  source 1..99: mol_type = other DNA

SEQ ID NO: 14349 - DNA, 108 bp, synthetic construct; identical to SEQ ID NO: 13393
  source 1..108: mol_type = other DNA

SEQ ID NO: 14350 - DNA, 99 bp, synthetic construct; identical to SEQ ID NO: 13822
  source 1..99: mol_type = other DNA

SEQ ID NO: 14351 - DNA, 108 bp, synthetic construct; identical to SEQ ID NO: 13393
  source 1..108: mol_type = other DNA

SEQ ID NO: 14352 - DNA, 99 bp, synthetic construct; identical to SEQ ID NO: 13460
  source 1..99: mol_type = other DNA

SEQ ID NO: 14353 - DNA, 108 bp, synthetic construct; identical to SEQ ID NO: 13393
  source 1..108: mol_type = other DNA

SEQ ID NO: 14354 - DNA, 99 bp, synthetic construct; identical to SEQ ID NO: 13416
  source 1..99: mol_type = other DNA

SEQ ID NO: 14355 - DNA, 108 bp, synthetic construct; identical to SEQ ID NO: 13393
  source 1..108: mol_type = other DNA

SEQ ID NO: 14356 - DNA, 99 bp, synthetic construct; identical to SEQ ID NO: 13370
  source 1..99: mol_type = other DNA

SEQ ID NO: 14357 - DNA, 108 bp, synthetic construct; identical to SEQ ID NO: 13393
  source 1..108: mol_type = other DNA

SEQ ID NO: 14358 - DNA, 99 bp, synthetic construct; identical to SEQ ID NO: 13464
  source 1..99: mol_type = other DNA

SEQ ID NO: 14359 - DNA, 108 bp, synthetic construct; identical to SEQ ID NO: 13393
  source 1..108: mol_type = other DNA

SEQ ID NO: 14360 - DNA, 96 bp, synthetic construct; identical to SEQ ID NO: 13790
  source 1..96: mol_type = other DNA

SEQ ID NO: 14361 - DNA, 108 bp, synthetic construct; identical to SEQ ID NO: 13393
  source 1..108: mol_type = other DNA

SEQ ID NO: 14362 - DNA, 99 bp, synthetic construct; identical to SEQ ID NO: 13442
  source 1..99: mol_type = other DNA

SEQ ID NO: 14363 - DNA, 108 bp, synthetic construct; identical to SEQ ID NO: 13393
  source 1..108: mol_type = other DNA

SEQ ID NO: 14364 - DNA, 99 bp, synthetic construct; identical to SEQ ID NO: 13480
  source 1..99: mol_type = other DNA

SEQ ID NO: 14365 - DNA, 108 bp, synthetic construct; identical to SEQ ID NO: 13393
  source 1..108: mol_type = other DNA

SEQ ID NO: 14366 - DNA, 99 bp, synthetic construct; identical to SEQ ID NO: 13470
  source 1..99: mol_type = other DNA

SEQ ID NO: 14367 - DNA, 108 bp, synthetic construct; identical to SEQ ID NO: 13393
  source 1..108: mol_type = other DNA

SEQ ID NO: 14368 - DNA, 99 bp, synthetic construct; identical to SEQ ID NO: 13362
  source 1..99: mol_type = other DNA

SEQ ID NO: 14369 - DNA, 108 bp, synthetic construct; identical to SEQ ID NO: 13393
  source 1..108: mol_type = other DNA

SEQ ID NO: 14370 - DNA, 99 bp, synthetic construct; identical to SEQ ID NO: 13430
  source 1..99: mol_type = other DNA

SEQ ID NO: 14371 - DNA, 108 bp, synthetic construct; identical to SEQ ID NO: 13393
  source 1..108: mol_type = other DNA

SEQ ID NO: 14372 - DNA, 99 bp, synthetic construct; identical to SEQ ID NO: 13432
  source 1..99: mol_type = other DNA

SEQ ID NO: 14373 - DNA, 108 bp, synthetic construct; identical to SEQ ID NO: 13393
  source 1..108: mol_type = other DNA

SEQ ID NO: 14374 - DNA, 99 bp, synthetic construct; identical to SEQ ID NO: 13416
  source 1..99: mol_type = other DNA

SEQ ID NO: 14375 - DNA, 108 bp, synthetic construct; identical to SEQ ID NO: 13393
  source 1..108: mol_type = other DNA

SEQ ID NO: 14376 - DNA, 99 bp, synthetic construct; identical to SEQ ID NO: 13362
  source 1..99: mol_type = other DNA

SEQ ID NO: 14377 - DNA, 108 bp, synthetic construct; identical to SEQ ID NO: 13393
  source 1..108: mol_type = other DNA

SEQ ID NO: 14378 - DNA, 99 bp, synthetic construct; identical to SEQ ID NO: 13398
  source 1..99: mol_type = other DNA

SEQ ID NO: 14379 - DNA, 108 bp, synthetic construct; identical to SEQ ID NO: 13393
  source 1..108: mol_type = other DNA

SEQ ID NO: 14380 - DNA, 99 bp, synthetic construct; identical to SEQ ID NO: 13516
  source 1..99: mol_type = other DNA

SEQ ID NO: 14381 - DNA, 108 bp, synthetic construct; identical to SEQ ID NO: 13393
  source 1..108: mol_type = other DNA

SEQ ID NO: 14382 - DNA, 99 bp, synthetic construct; identical to SEQ ID NO: 13364
  source 1..99: mol_type = other DNA

SEQ ID NO: 14383 - DNA, 108 bp, synthetic construct; identical to SEQ ID NO: 13393
  source 1..108: mol_type = other DNA

SEQ ID NO: 14384 - DNA, 99 bp, synthetic construct; identical to SEQ ID NO: 13416
  source 1..99: mol_type = other DNA

SEQ ID NO: 14385 - DNA, 108 bp, synthetic construct; identical to SEQ ID NO: 13393
  source 1..108: mol_type = other DNA

SEQ ID NO: 14386 - DNA, 99 bp, synthetic construct; identical to SEQ ID NO: 13460
  source 1..99: mol_type = other DNA

SEQ ID NO: 14387 - DNA, 108 bp, synthetic construct; identical to SEQ ID NO: 13393
  source 1..108: mol_type = other DNA

SEQ ID NO: 14388 - DNA, 99 bp, synthetic construct; identical to SEQ ID NO: 13364
  source 1..99: mol_type = other DNA

SEQ ID NO: 14389 - DNA, 108 bp, synthetic construct; identical to SEQ ID NO: 13393
  source 1..108: mol_type = other DNA

SEQ ID NO: 14390 - DNA, 99 bp, synthetic construct; identical to SEQ ID NO: 13402
  source 1..99: mol_type = other DNA

SEQ ID NO: 14391 - DNA, 108 bp, synthetic construct; identical to SEQ ID NO: 13393
  source 1..108: mol_type = other DNA

SEQ ID NO: 14392 - DNA, 99 bp, synthetic construct; identical to SEQ ID NO: 13416
  source 1..99: mol_type = other DNA

SEQ ID NO: 14393 - DNA, 108 bp, synthetic construct; identical to SEQ ID NO: 13393
  source 1..108: mol_type = other DNA

SEQ ID NO: 14394 - DNA, 99 bp, synthetic construct; identical to SEQ ID NO: 13456
  source 1..99: mol_type = other DNA

SEQ ID NO: 14395 - DNA, 108 bp, synthetic construct; identical to SEQ ID NO: 13393
  source 1..108: mol_type = other DNA

SEQ ID NO: 14396 - DNA, 99 bp, synthetic construct; identical to SEQ ID NO: 13416
  source 1..99: mol_type = other DNA

SEQ ID NO: 14397 - DNA, 108 bp, synthetic construct; identical to SEQ ID NO: 13393
  source 1..108: mol_type = other DNA

SEQ ID NO: 14398 - DNA, 99 bp, synthetic construct; identical to SEQ ID NO: 13500
  source 1..99: mol_type = other DNA

SEQ ID NO: 14399 - DNA, 108 bp, synthetic construct; identical to SEQ ID NO: 13393
  source 1..108: mol_type = other DNA

SEQ ID NO: 14400 - DNA, 99 bp, synthetic construct; identical to SEQ ID NO: 13596
  source 1..99: mol_type = other DNA

SEQ ID NO: 14401 - DNA, 108 bp, synthetic construct; identical to SEQ ID NO: 13393
  source 1..108: mol_type = other DNA

SEQ ID NO: 14402 - DNA, 99 bp, synthetic construct; identical to SEQ ID NO: 13812
  source 1..99: mol_type = other DNA

SEQ ID NO: 14403 - DNA, 108 bp, synthetic construct; identical to SEQ ID NO: 13393
  source 1..108: mol_type = other DNA

SEQ ID NO: 14404 - DNA, 99 bp, synthetic construct; identical to SEQ ID NO: 13666
  source 1..99: mol_type = other DNA

SEQ ID NO: 14405 - DNA, 108 bp, synthetic construct; identical to SEQ ID NO: 13393
  source 1..108: mol_type = other DNA

SEQ ID NO: 14406 - DNA, 99 bp, synthetic construct; identical to SEQ ID NO: 13456
  source 1..99: mol_type = other DNA

SEQ ID NO: 14407 - DNA, 108 bp, synthetic construct; identical to SEQ ID NO: 13363
  source 1..108: mol_type = other DNA

SEQ ID NO: 14408 - DNA, 99 bp, synthetic construct; identical to SEQ ID NO: 13400
  source 1..99: mol_type = other DNA

SEQ ID NO: 14409 - DNA, 108 bp, synthetic construct; identical to SEQ ID NO: 13363
  source 1..108: mol_type = other DNA

SEQ ID NO: 14410 - DNA, 99 bp, synthetic construct; identical to SEQ ID NO: 13678
  source 1..99: mol_type = other DNA

SEQ ID NO: 14411 - DNA, 108 bp, synthetic construct; identical to SEQ ID NO: 13363
  source 1..108: mol_type = other DNA

SEQ ID NO: 14412 - DNA, 99 bp, synthetic construct; identical to SEQ ID NO: 13366
  source 1..99: mol_type = other DNA

SEQ ID NO: 14413 - DNA, 108 bp, synthetic construct; identical to SEQ ID NO: 13363
  source 1..108: mol_type = other DNA

SEQ ID NO: 14414 - DNA, 99 bp, synthetic construct; identical to SEQ ID NO: 13416
  source 1..99: mol_type = other DNA

SEQ ID NO: 14415 - DNA, 108 bp, synthetic construct; identical to SEQ ID NO: 13363
  source 1..108: mol_type = other DNA

SEQ ID NO: 14416 - DNA, 99 bp, synthetic construct; identical to SEQ ID NO: 13456
  source 1..99: mol_type = other DNA

SEQ ID NO: 14417 - DNA, 108 bp, synthetic construct; identical to SEQ ID NO: 13363
  source 1..108: mol_type = other DNA

SEQ ID NO: 14418 - DNA, 99 bp, synthetic construct; identical to SEQ ID NO: 14158
  source 1..99: mol_type = other DNA

SEQ ID NO: 14419 - DNA, 108 bp, synthetic construct; identical to SEQ ID NO: 13363
  source 1..108: mol_type = other DNA

SEQ ID NO: 14420 - DNA, 99 bp, synthetic construct; identical to SEQ ID NO: 13822
  source 1..99: mol_type = other DNA

SEQ ID NO: 14421 - DNA, 108 bp, synthetic construct; identical to SEQ ID NO: 13363
  source 1..108: mol_type = other DNA

SEQ ID NO: 14422 - DNA, 99 bp, synthetic construct; identical to SEQ ID NO: 13444
  source 1..99: mol_type = other DNA

SEQ ID NO: 14423 - DNA, 108 bp, synthetic construct; identical to SEQ ID NO: 13363
  source 1..108: mol_type = other DNA

SEQ ID NO: 14424 - DNA, 99 bp, synthetic construct; identical to SEQ ID NO: 13400
  source 1..99: mol_type = other DNA

SEQ ID NO: 14425 - DNA, 108 bp, synthetic construct; identical to SEQ ID NO: 13363
  source 1..108: mol_type = other DNA

SEQ ID NO: 14426 - DNA, 99 bp, synthetic construct; identical to SEQ ID NO: 13444
  source 1..99: mol_type = other DNA

SEQ ID NO: 14427 - DNA, 108 bp, synthetic construct; identical to SEQ ID NO: 13363
  source 1..108: mol_type = other DNA

SEQ ID NO: 14428 - DNA, 99 bp, synthetic construct; identical to SEQ ID NO: 13636
  source 1..99: mol_type = other DNA

SEQ ID NO: 14429 - DNA, 108 bp, synthetic construct; identical to SEQ ID NO: 13363
  source 1..108: mol_type = other DNA

SEQ ID NO: 14430 - DNA, 99 bp, synthetic construct; identical to SEQ ID NO: 13750
  source 1..99: mol_type = other DNA

SEQ ID NO: 14431 - DNA, 108 bp, synthetic construct; identical to SEQ ID NO: 13363
  source 1..108: mol_type = other DNA

SEQ ID NO: 14432 - DNA, 99 bp, synthetic construct; identical to SEQ ID NO: 13470
  source 1..99: mol_type = other DNA

SEQ ID NO: 14433 - DNA, 108 bp, synthetic construct; identical to SEQ ID NO: 13363
  source 1..108: mol_type = other DNA

SEQ ID NO: 14434 - DNA, 99 bp, synthetic construct; identical to SEQ ID NO: 13436
  source 1..99: mol_type = other DNA

SEQ ID NO: 14435 - DNA, 108 bp, synthetic construct; identical to SEQ ID NO: 13363
  source 1..108: mol_type = other DNA

SEQ ID NO: 14436 - DNA, 99 bp, synthetic construct; identical to SEQ ID NO: 13416
  source 1..99: mol_type = other DNA

SEQ ID NO: 14437 - DNA, 108 bp, synthetic construct; identical to SEQ ID NO: 13363
  source 1..108: mol_type = other DNA

SEQ ID NO: 14438 - DNA, 99 bp, synthetic construct; identical to SEQ ID NO: 13822
  source 1..99: mol_type = other DNA

SEQ ID NO: 14439 - DNA, 108 bp, synthetic construct; identical to SEQ ID NO: 13363
  source 1..108: mol_type = other DNA

SEQ ID NO: 14440 - DNA, 99 bp, synthetic construct; identical to SEQ ID NO: 13636
  source 1..99: mol_type = other DNA

SEQ ID NO: 14441 - DNA, 108 bp, synthetic construct; identical to SEQ ID NO: 13363
  source 1..108: mol_type = other DNA

SEQ ID NO: 14442 - DNA, 99 bp, synthetic construct; identical to SEQ ID NO: 13444
  source 1..99: mol_type = other DNA

SEQ ID NO: 14443 - DNA, 108 bp, synthetic construct; identical to SEQ ID NO: 13363
  source 1..108: mol_type = other DNA

SEQ ID NO: 14444 - DNA, 99 bp, synthetic construct
  source 1..99: mol_type = other DNA
cagagaggtggaagactgacatcctccgcagccagtaatgaaagtcgcagctctttgcacatttcctcctcccagatcacagactcaggcacttatctc

SEQ ID NO: 14445 - DNA, 108 bp, synthetic construct; identical to SEQ ID NO: 13363
  source 1..108: mol_type = other DNA

SEQ ID NO: 14446 - DNA, 99 bp, synthetic construct; identical to SEQ ID NO: 13402
  source 1..99: mol_type = other DNA

SEQ ID NO: 14447 - DNA, 108 bp, synthetic construct; identical to SEQ ID NO: 13363
  source 1..108: mol_type = other DNA

SEQ ID NO: 14448 - DNA, 99 bp, synthetic construct; identical to SEQ ID NO: 13434
  source 1..99: mol_type = other DNA

SEQ ID NO: 14449 - DNA, 108 bp, synthetic construct; identical to SEQ ID NO: 13363
  source 1..108: mol_type = other DNA

SEQ ID NO: 14450 - DNA, 99 bp, synthetic construct
  source 1..99: mol_type = other DNA
aaagaagaacaaggactcactgtcttactgaacaagaaacaaaaacgactctctctgaacctcacagctgcccatcctggggactcagccgtgtacttc

SEQ ID NO: 14451 - DNA, 108 bp, synthetic construct; identical to SEQ ID NO: 13363
  source 1..108: mol_type = other DNA

SEQ ID NO: 14452 - DNA, 99 bp, synthetic construct
  source 1..99: mol_type = other DNA
aaagaagaacaaggactcactgtcttactgaacaagaaacacaaacgactctctctgaacctcacagctgcccatcctggggactcagccgtgtacttc

SEQ ID NO: 14453 - DNA, 108 bp, synthetic construct; identical to SEQ ID NO: 13363
  source 1..108: mol_type = other DNA

SEQ ID NO: 14454 - DNA, 99 bp, synthetic construct; identical to SEQ ID NO: 13362
  source 1..99: mol_type = other DNA

SEQ ID NO: 14455 - DNA, 108 bp, synthetic construct; identical to SEQ ID NO: 13363
  source 1..108: mol_type = other DNA

SEQ ID NO: 14456 - DNA, 99 bp, synthetic construct; identical to SEQ ID NO: 13432
  source 1..99: mol_type = other DNA

SEQ ID NO: 14457 - DNA, 108 bp, synthetic construct; identical to SEQ ID NO: 13363
  source 1..108: mol_type = other DNA

SEQ ID NO: 14458 - DNA, 99 bp, synthetic construct; identical to SEQ ID NO: 13672
  source 1..99: mol_type = other DNA

SEQ ID NO: 14459 - DNA, 108 bp, synthetic construct; identical to SEQ ID NO: 13363
  source 1..108: mol_type = other DNA

SEQ ID NO: 14460 - DNA, 99 bp, synthetic construct; identical to SEQ ID NO: 13362
  source 1..99: mol_type = other DNA

SEQ ID NO: 14461 - DNA, 108 bp, synthetic construct; identical to SEQ ID NO: 13363
  source 1..108: mol_type = other DNA

SEQ ID NO: 14462 - DNA, 99 bp, synthetic construct; identical to SEQ ID NO: 13362
  source 1..99: mol_type = other DNA

SEQ ID NO: 14463 - DNA, 108 bp, synthetic construct; identical to SEQ ID NO: 13363
  source 1..108: mol_type = other DNA

SEQ ID NO: 14464 - DNA, 99 bp, synthetic construct; identical to SEQ ID NO: 13974
  source 1..99: mol_type = other DNA

SEQ ID NO: 14465 - DNA, 108 bp, synthetic construct; identical to SEQ ID NO: 13363
  source 1..108: mol_type = other DNA

SEQ ID NO: 14466 - DNA, 99 bp, synthetic construct; identical to SEQ ID NO: 13500
  source 1..99: mol_type = other DNA

SEQ ID NO: 14467 - DNA, 108 bp, synthetic construct; identical to SEQ ID NO: 13363
  source 1..108: mol_type = other DNA

SEQ ID NO: 14468 - DNA, 99 bp, synthetic construct; identical to SEQ ID NO: 13596
  source 1..99: mol_type = other DNA

SEQ ID NO: 14469 - DNA, 108 bp, synthetic construct; identical to SEQ ID NO: 13363
  source 1..108: mol_type = other DNA

SEQ ID NO: 14470 - DNA, 99 bp, synthetic construct; identical to SEQ ID NO: 14120
  source 1..99: mol_type = other DNA

SEQ ID NO: 14471 - DNA, 108 bp, synthetic construct; identical to SEQ ID NO: 13363
  source 1..108: mol_type = other DNA

SEQ ID NO: 14472 - DNA, 99 bp, synthetic construct; identical to SEQ ID NO: 13570
  source 1..99: mol_type = other DNA

SEQ ID NO: 14473 - DNA, 108 bp, synthetic construct; identical to SEQ ID NO: 13363
  source 1..108: mol_type = other DNA

SEQ ID NO: 14474 - DNA, 99 bp, synthetic construct; identical to SEQ ID NO: 13380
  source 1..99: mol_type = other DNA

SEQ ID NO: 14475 - DNA, 108 bp, synthetic construct; identical to SEQ ID NO: 13363
  source 1..108: mol_type = other DNA

SEQ ID NO: 14476 - DNA, 99 bp, synthetic construct; identical to SEQ ID NO: 13514
  source 1..99: mol_type = other DNA

SEQ ID NO: 14477 - DNA, 108 bp, synthetic construct; identical to SEQ ID NO: 13363
  source 1..108: mol_type = other DNA

SEQ ID NO: 14478 - DNA, 99 bp, synthetic construct; identical to SEQ ID NO: 13416
  source 1..99: mol_type = other DNA

SEQ ID NO: 14479 - DNA, 108 bp, synthetic construct; identical to SEQ ID NO: 13363
  source 1..108: mol_type = other DNA

SEQ ID NO: 14480 - DNA, 99 bp, synthetic construct; identical to SEQ ID NO: 13416
  source 1..99: mol_type = other DNA

SEQ ID NO: 14481 - DNA, 108 bp, synthetic construct; identical to SEQ ID NO: 13363
  source 1..108: mol_type = other DNA

SEQ ID NO: 14482 - DNA, 99 bp, synthetic construct; identical to SEQ ID NO: 14050
  source 1..99: mol_type = other DNA

SEQ ID NO: 14483 - DNA, 108 bp, synthetic construct; identical to SEQ ID NO: 13363
  source 1..108: mol_type = other DNA

SEQ ID NO: 14484 - DNA, 99 bp, synthetic construct; identical to SEQ ID NO: 13806
  source 1..99: mol_type = other DNA

SEQ ID NO: 14485 - DNA, 108 bp, synthetic construct; identical to SEQ ID NO: 13363
  source 1..108: mol_type = other DNA

SEQ ID NO: 14486 - DNA, 99 bp, synthetic construct; identical to SEQ ID NO: 13364
  source 1..99: mol_type = other DNA

SEQ ID NO: 14487 - DNA, 108 bp, synthetic construct; identical to SEQ ID NO: 13363
  source 1..108: mol_type = other DNA

SEQ ID NO: 14488 - DNA, 99 bp, synthetic construct; identical to SEQ ID NO: 13884
  source 1..99: mol_type = other DNA

SEQ ID NO: 14489 - DNA, 108 bp, synthetic construct; identical to SEQ ID NO: 13363
  source 1..108: mol_type = other DNA

SEQ ID NO: 14490 - DNA, 99 bp, synthetic construct
  source 1..99: mol_type = other DNA
aagaaagaaggcagattgacagtttacctcaatagagccagcctgcatgtttccctgcacatcagagactcccagcccactgactccgccatctacctc

SEQ ID NO: 14491 - DNA, 108 bp, synthetic construct; identical to SEQ ID NO: 13363
  source 1..108: mol_type = other DNA

SEQ ID NO: 14492 - DNA, 99 bp, synthetic construct; identical to SEQ ID NO: 13362
  source 1..99: mol_type = other DNA

SEQ ID NO: 14493 - DNA, 108 bp, synthetic construct; identical to SEQ ID NO: 13363
  source 1..108: mol_type = other DNA

SEQ ID NO: 14494 - DNA, 99 bp, synthetic construct; identical to SEQ ID NO: 13444
  source 1..99: mol_type = other DNA

SEQ ID NO: 14495 - DNA, 108 bp, synthetic construct; identical to SEQ ID NO: 13363
  source 1..108: mol_type = other DNA

SEQ ID NO: 14496 - DNA, 99 bp, synthetic construct; identical to SEQ ID NO: 13506
  source 1..99: mol_type = other DNA

SEQ ID NO: 14497 - DNA, 108 bp, synthetic construct; identical to SEQ ID NO: 13363
  source 1..108: mol_type = other DNA

SEQ ID NO: 14498 - DNA, 99 bp, synthetic construct; identical to SEQ ID NO: 13612
  source 1..99: mol_type = other DNA

SEQ ID NO: 14499 - DNA, 108 bp, synthetic construct; identical to SEQ ID NO: 13363
  source 1..108: mol_type = other DNA

SEQ ID NO: 14500 - DNA, 99 bp, synthetic construct; identical to SEQ ID NO: 13416
  source 1..99: mol_type = other DNA

SEQ ID NO: 14501 - DNA, 108 bp, synthetic construct; identical to SEQ ID NO: 13363
  source 1..108: mol_type = other DNA

SEQ ID NO: 14502 - DNA, 99 bp, synthetic construct; identical to SEQ ID NO: 13358
  source 1..99: mol_type = other DNA

SEQ ID NO: 14503 - DNA, 108 bp, synthetic construct; identical to SEQ ID NO: 13363
  source 1..108: mol_type = other DNA

SEQ ID NO: 14504 - DNA, 99 bp, synthetic construct; identical to SEQ ID NO: 14184
  source 1..99: mol_type = other DNA

SEQ ID NO: 14505 - DNA, 108 bp, synthetic construct; identical to SEQ ID NO: 13363
  source 1..108: mol_type = other DNA

SEQ ID NO: 14506 - DNA, 99 bp, synthetic construct; identical to SEQ ID NO: 13614
  source 1..99: mol_type = other DNA

SEQ ID NO: 14507 - DNA, 108 bp, synthetic construct; identical to SEQ ID NO: 13363
  source 1..108: mol_type = other DNA

SEQ ID NO: 14508 - DNA, 99 bp, synthetic construct; identical to SEQ ID NO: 13538
  source 1..99: mol_type = other DNA

SEQ ID NO: 14509 - DNA, 108 bp, synthetic construct; identical to SEQ ID NO: 13363
  source 1..108: mol_type = other DNA

SEQ ID NO: 14510 - DNA, 99 bp, synthetic construct; identical to SEQ ID NO: 13732
  source 1..99: mol_type = other DNA

SEQ ID NO: 14511 - DNA, 108 bp, synthetic construct; identical to SEQ ID NO: 13363
  source 1..108: mol_type = other DNA

SEQ ID NO: 14512 - DNA, 99 bp, synthetic construct; identical to SEQ ID NO: 13416
  source 1..99: mol_type = other DNA

SEQ ID NO: 14513 - DNA, 108 bp, synthetic construct; identical to SEQ ID NO: 13363
  source 1..108: mol_type = other DNA

SEQ ID NO: 14514 - DNA, 99 bp, synthetic construct; identical to SEQ ID NO: 13364
  source 1..99: mol_type = other DNA

SEQ ID NO: 14515 - DNA, 108 bp, synthetic construct; identical to SEQ ID NO: 13363
  source 1..108: mol_type = other DNA

SEQ ID NO: 14516 - DNA, 99 bp, synthetic construct; identical to SEQ ID NO: 13480
  source 1..99: mol_type = other DNA

SEQ ID NO: 14517 - DNA, 108 bp, synthetic construct; identical to SEQ ID NO: 13363
  source 1..108: mol_type = other DNA

SEQ ID NO: 14518 - DNA, 99 bp, synthetic construct; identical to SEQ ID NO: 14452
  source 1..99: mol_type = other DNA

SEQ ID NO: 14519 - DNA, 108 bp, synthetic construct; identical to SEQ ID NO: 13363
  source 1..108: mol_type = other DNA

SEQ ID NO: 14520 - DNA, 99 bp, synthetic construct; identical to SEQ ID NO: 13416
  source 1..99: mol_type = other DNA

SEQ ID NO: 14521 - DNA, 108 bp, synthetic construct; identical to SEQ ID NO: 13363
  source 1..108: mol_type = other DNA

SEQ ID NO: 14522 - DNA, 99 bp, synthetic construct; identical to SEQ ID NO: 13722
  source 1..99: mol_type = other DNA

SEQ ID NO: 14523 - DNA, 108 bp, synthetic construct; identical to SEQ ID NO: 13363
  source 1..108: mol_type = other DNA

SEQ ID NO: 14524 - DNA, 99 bp, synthetic construct; identical to SEQ ID NO: 13424
  source 1..99: mol_type = other DNA

SEQ ID NO: 14525 - DNA, 108 bp, synthetic construct; identical to SEQ ID NO: 13363
  source 1..108: mol_type = other DNA

SEQ ID NO: 14526 - DNA, 99 bp, synthetic construct; identical to SEQ ID NO: 13394
  source 1..99: mol_type = other DNA

SEQ ID NO: 14527 - DNA, 108 bp, synthetic construct; identical to SEQ ID NO: 13363
  source 1..108: mol_type = other DNA

SEQ ID NO: 14528 - DNA, 99 bp, synthetic construct; identical to SEQ ID NO: 13822
  source 1..99: mol_type = other DNA

SEQ ID NO: 14529 - DNA, 108 bp, synthetic construct; identical to SEQ ID NO: 13363
  source 1..108: mol_type = other DNA

SEQ ID NO: 14530 - DNA, 99 bp, synthetic construct; identical to SEQ ID NO: 13444
  source 1..99: mol_type = other DNA

SEQ ID NO: 14531 - DNA, 108 bp, synthetic construct; identical to SEQ ID NO: 13363
  source 1..108: mol_type = other DNA

SEQ ID NO: 14532 - DNA, 99 bp, synthetic construct
  source 1..99: mol_type = other DNA
caaggagtgaacggcttcgaggctgatttcagcaagagcgactcttccttccaccttcggaaagcctccgtgcactggagcgactcggctgtgtacttc

SEQ ID NO: 14533 - DNA, 108 bp, synthetic construct; identical to SEQ ID NO: 13363
  source 1..108: mol_type = other DNA

SEQ ID NO: 14534 - DNA, 99 bp, synthetic construct; identical to SEQ ID NO: 13416
  source 1..99: mol_type = other DNA

SEQ ID NO: 14535 - DNA, 108 bp, synthetic construct; identical to SEQ ID NO: 13363
  source 1..108: mol_type = other DNA

SEQ ID NO: 14536 - DNA, 99 bp, synthetic construct
  source 1..99: mol_type = other DNA
gagaggagcggccgctattctgtagtcttccagaaatcactcaaatccatcagccttgtcatttcagccttacaaccagacgattcgggaaagtatttc

SEQ ID NO: 14537 - DNA, 108 bp, synthetic construct; identical to SEQ ID NO: 13363
  source 1..108: mol_type = other DNA

SEQ ID NO: 14538 - DNA, 99 bp, synthetic construct; identical to SEQ ID NO: 13416
  source 1..99: mol_type = other DNA

SEQ ID NO: 14539 - DNA, 108 bp, synthetic construct; identical to SEQ ID NO: 13363
  source 1..108: mol_type = other DNA

SEQ ID NO: 14540 - DNA, 99 bp, synthetic construct; identical to SEQ ID NO: 13730
  source 1..99: mol_type = other DNA

SEQ ID NO: 14541 - DNA, 108 bp, synthetic construct; identical to SEQ ID NO: 13363
  source 1..108: mol_type = other DNA

SEQ ID NO: 14542 - DNA, 99 bp, synthetic construct; identical to SEQ ID NO: 13362
  source 1..99: mol_type = other DNA

SEQ ID NO: 14543 - DNA, 108 bp, synthetic construct; identical to SEQ ID NO: 13363
  source 1..108: mol_type = other DNA

SEQ ID NO: 14544 - DNA, 99 bp, synthetic construct; identical to SEQ ID NO: 13526
  source 1..99: mol_type = other DNA

SEQ ID NO: 14545 - DNA, 108 bp, synthetic construct; identical to SEQ ID NO: 13363
  source 1..108: mol_type = other DNA

SEQ ID NO: 14546 - DNA, 99 bp, synthetic construct; identical to SEQ ID NO: 13760
  source 1..99: mol_type = other DNA

SEQ ID NO: 14547 - DNA, 108 bp, synthetic construct; identical to SEQ ID NO: 13363
  source 1..108: mol_type = other DNA

SEQ ID NO: 14548 - DNA, 99 bp, synthetic construct; identical to SEQ ID NO: 13412
  source 1..99: mol_type = other DNA

SEQ ID NO: 14549 - DNA, 108 bp, synthetic construct; identical to SEQ ID NO: 13363
  source 1..108: mol_type = other DNA

SEQ ID NO: 14550 - DNA, 99 bp, synthetic construct
  source 1..99: mol_type = other DNA
aaagaagaacaaggactcactgtcttactgaacaagaaagacaaacgactctctctgaacctcacagctgcccatcctggggactcagctgtgtacttc

SEQ ID NO: 14551 - DNA, 108 bp, synthetic construct; identical to SEQ ID NO: 13363
  source 1..108: mol_type = other DNA

SEQ ID NO: 14552 - DNA, 99 bp, synthetic construct; identical to SEQ ID NO: 13644
  source 1..99: mol_type = other DNA

SEQ ID NO: 14553 - DNA, 108 bp, synthetic construct; identical to SEQ ID NO: 13363
  source 1..108: mol_type = other DNA

SEQ ID NO: 14554 - DNA, 99 bp, synthetic construct; identical to SEQ ID NO: 13364
  source 1..99: mol_type = other DNA

SEQ ID NO: 14555 - DNA, 108 bp, synthetic construct; identical to SEQ ID NO: 13363
  source 1..108: mol_type = other DNA

SEQ ID NO: 14556 - DNA, 99 bp, synthetic construct; identical to SEQ ID NO: 13526
  source 1..99: mol_type = other DNA

SEQ ID NO: 14557 - DNA, 108 bp, synthetic construct; identical to SEQ ID NO: 13363
  source 1..108: mol_type = other DNA

SEQ ID NO: 14558 - DNA, 99 bp, synthetic construct; identical to SEQ ID NO: 13444
  source 1..99: mol_type = other DNA

SEQ ID NO: 14559 - DNA, 108 bp, synthetic construct; identical to SEQ ID NO: 13363
  source 1..108: mol_type = other DNA

SEQ ID NO: 14560 - DNA, 99 bp, synthetic construct; identical to SEQ ID NO: 13408
  source 1..99: mol_type = other DNA

SEQ ID NO: 14561 - DNA, 108 bp, synthetic construct; identical to SEQ ID NO: 13363
  source 1..108: mol_type = other DNA

SEQ ID NO: 14562 - DNA, 99 bp, synthetic construct; identical to SEQ ID NO: 13362
  source 1..99: mol_type = other DNA

SEQ ID NO: 14563 - DNA, 108 bp, synthetic construct; identical to SEQ ID NO: 13363
  source 1..108: mol_type = other DNA

SEQ ID NO: 14564 - DNA, 99 bp, synthetic construct; identical to SEQ ID NO: 13444
  source 1..99: mol_type = other DNA

SEQ ID NO: 14565 - DNA, 108 bp, synthetic construct; identical to SEQ ID NO: 13363
  source 1..108: mol_type = other DNA

SEQ ID NO: 14566 - DNA, 99 bp, synthetic construct; identical to SEQ ID NO: 13444
  source 1..99: mol_type = other DNA

SEQ ID NO: 14567 - DNA, 108 bp, synthetic construct; identical to SEQ ID NO: 13655
  source 1..108: mol_type = other DNA

SEQ ID NO: 14568 - DNA, 99 bp, synthetic construct; identical to SEQ ID NO: 13464
  source 1..99: mol_type = other DNA

SEQ ID NO: 14569 - DNA, 108 bp, synthetic construct; identical to SEQ ID NO: 13655
  source 1..108: mol_type = other DNA

SEQ ID NO: 14570 - DNA, 99 bp, synthetic construct; identical to SEQ ID NO: 13444
  source 1..99: mol_type = other DNA

SEQ ID NO: 14571 - DNA, 108 bp, synthetic construct; identical to SEQ ID NO: 13655
  source 1..108: mol_type = other DNA

SEQ ID NO: 14572 - DNA, 99 bp, synthetic construct; identical to SEQ ID NO: 13416
  source 1..99: mol_type = other DNA

SEQ ID NO: 14573 - DNA, 108 bp, synthetic construct; identical to SEQ ID NO: 13655
  source 1..108: mol_type = other DNA

SEQ ID NO: 14574 - DNA, 99 bp, synthetic construct; identical to SEQ ID NO: 13416
  source 1..99: mol_type = other DNA

SEQ ID NO: 14575 - DNA, 108 bp, synthetic construct; identical to SEQ ID NO: 13655
  source 1..108: mol_type = other DNA

SEQ ID NO: 14576 - DNA, 99 bp, synthetic construct; identical to SEQ ID NO: 13358
  source 1..99: mol_type = other DNA

SEQ ID NO: 14577 - DNA, 108 bp, synthetic construct; identical to SEQ ID NO: 13655
  source 1..108: mol_type = other DNA

SEQ ID NO: 14578 - DNA, 99 bp, synthetic construct; identical to SEQ ID NO: 13358
  source 1..99: mol_type = other DNA

SEQ ID NO: 14579 - DNA, 108 bp, synthetic construct; identical to SEQ ID NO: 13655
  source 1..108: mol_type = other DNA

SEQ ID NO: 14580 - DNA, 99 bp, synthetic construct; identical to SEQ ID NO: 13410
  source 1..99: mol_type = other DNA

SEQ ID NO: 14581 - DNA, 108 bp, synthetic construct; identical to SEQ ID NO: 13655
  source 1..108: mol_type = other DNA

SEQ ID NO: 14582 - DNA, 99 bp, synthetic construct; identical to SEQ ID NO: 13636
  source 1..99: mol_type = other DNA

SEQ ID NO: 14583 - DNA, 108 bp, synthetic construct; identical to SEQ ID NO: 13655
  source 1..108: mol_type = other DNA

SEQ ID NO: 14584 - DNA, 99 bp, synthetic construct; identical to SEQ ID NO: 13412
  source 1..99: mol_type = other DNA

SEQ ID NO: 14585 - DNA, 108 bp, synthetic construct; identical to SEQ ID NO: 13655
  source 1..108: mol_type = other DNA

SEQ ID NO: 14586 - DNA, 99 bp, synthetic construct; identical to SEQ ID NO: 13362
  source 1..99: mol_type = other DNA

SEQ ID NO: 14587 - DNA, 108 bp, synthetic construct; identical to SEQ ID NO: 13655
  source 1..108: mol_type = other DNA

SEQ ID NO: 14588 - DNA, 99 bp, synthetic construct; identical to SEQ ID NO: 13416
  source 1..99: mol_type = other DNA

SEQ ID NO: 14589 - DNA, 108 bp, synthetic construct; identical to SEQ ID NO: 13655
  source 1..108: mol_type = other DNA

SEQ ID NO: 14590 - DNA, 99 bp, synthetic construct; identical to SEQ ID NO: 13360
  source 1..99: mol_type = other DNA

SEQ ID NO: 14591 - DNA, 108 bp, synthetic construct; identical to SEQ ID NO: 13655
  source 1..108: mol_type = other DNA

SEQ ID NO: 14592 - DNA, 99 bp, synthetic construct; identical to SEQ ID NO: 13464
  source 1..99: mol_type = other DNA

SEQ ID NO: 14593 - DNA, 108 bp, synthetic construct; identical to SEQ ID NO: 13655
  source 1..108: mol_type = other DNA

SEQ ID NO: 14594 - DNA, 99 bp, synthetic construct; identical to SEQ ID NO: 13362
  source 1..99: mol_type = other DNA

SEQ ID NO: 14595 - DNA, 111 bp, synthetic construct
  source 1..111: mol_type = other DNA
atggaagatggtggggctttcaaggatcgattcaaagctgagatgctaaattcatccttctccactctgaagattcaacctacagaacccaaggactcagctgtgtatctg

SEQ ID NO: 14596 - DNA, 99 bp, synthetic construct; identical to SEQ ID NO: 13400
  source 1..99: mol_type = other DNA

SEQ ID NO: 14597 - DNA, 108 bp, synthetic construct
  source 1..108: mol_type = other DNA
agagacaaaggattcctacccagcagattctcagtccaacagtttgatgactatcactctgaaatgaacatgagtgccttggaactggaggactctgctatgtacttc

SEQ ID NO: 14598 - DNA, 99 bp, synthetic construct; identical to SEQ ID NO: 13408
  source 1..99: mol_type = other DNA

SEQ ID NO: 14599 - DNA, 108 bp, synthetic construct; identical to SEQ ID NO: 13391
  source 1..108: mol_type = other DNA

SEQ ID NO: 14600 - DNA, 99 bp, synthetic construct; identical to SEQ ID NO: 13570
  source 1..99: mol_type = other DNA

SEQ ID NO: 14601 - DNA, 108 bp, synthetic construct; identical to SEQ ID NO: 13391
  source 1..108: mol_type = other DNA

SEQ ID NO: 14602 - DNA, 99 bp, synthetic construct; identical to SEQ ID NO: 13806
  source 1..99: mol_type = other DNA

SEQ ID NO: 14603 - DNA, 108 bp, synthetic construct; identical to SEQ ID NO: 13391
  source 1..108: mol_type = other DNA

SEQ ID NO: 14604 - DNA, 99 bp, synthetic construct
  source 1..99: mol_type = other DNA
aaagaagaacaaggactcactgtcttactgaacaagaaagacacacgactctctctgaacctcacagctgcccatcctggggactcagccgtgtacttc

SEQ ID NO: 14605 - DNA, 108 bp, synthetic construct; identical to SEQ ID NO: 13391
  source 1..108: mol_type = other DNA

SEQ ID NO: 14606 - DNA, 99 bp, synthetic construct; identical to SEQ ID NO: 13404
  source 1..99: mol_type = other DNA

SEQ ID NO: 14607 - DNA, 108 bp, synthetic construct; identical to SEQ ID NO: 13391
  source 1..108: mol_type = other DNA

SEQ ID NO: 14608 - DNA, 99 bp, synthetic construct; identical to SEQ ID NO: 13596
  source 1..99: mol_type = other DNA

SEQ ID NO: 14609 - DNA, 108 bp, synthetic construct; identical to SEQ ID NO: 13391
  source 1..108: mol_type = other DNA

SEQ ID NO: 14610 - DNA, 99 bp, synthetic construct; identical to SEQ ID NO: 13416
  source 1..99: mol_type = other DNA

SEQ ID NO: 14611 - DNA, 108 bp, synthetic construct; identical to SEQ ID NO: 13391
  source 1..108: mol_type = other DNA

SEQ ID NO: 14612 - DNA, 99 bp, synthetic construct; identical to SEQ ID NO: 13362
  source 1..99: mol_type = other DNA

SEQ ID NO: 14613 - DNA, 108 bp, synthetic construct; identical to SEQ ID NO: 13391
  source 1..108: mol_type = other DNA

SEQ ID NO: 14614 - DNA, 99 bp, synthetic construct; identical to SEQ ID NO: 13398
  source 1..99: mol_type = other DNA

SEQ ID NO: 14615 - DNA, 108 bp, synthetic construct; identical to SEQ ID NO: 13391
  source 1..108: mol_type = other DNA

SEQ ID NO: 14616 - DNA, 99 bp, synthetic construct; identical to SEQ ID NO: 13410
  source 1..99: mol_type = other DNA

SEQ ID NO: 14617 - DNA, 108 bp, synthetic construct; identical to SEQ ID NO: 13391
  source 1..108: mol_type = other DNA

SEQ ID NO: 14618 - DNA, 99 bp, synthetic construct; identical to SEQ ID NO: 13436
  source 1..99: mol_type = other DNA

SEQ ID NO: 14619 - DNA, 111 bp, synthetic construct; identical to SEQ ID NO: 13447
  source 1..111: mol_type = other DNA

SEQ ID NO: 14620 - DNA, 99 bp, synthetic construct; identical to SEQ ID NO: 13408
  source 1..99: mol_type = other DNA

SEQ ID NO: 14621 - DNA, 111 bp, synthetic construct; identical to SEQ ID NO: 13447
  source 1..111: mol_type = other DNA

SEQ ID NO: 14622 - DNA, 99 bp, synthetic construct; identical to SEQ ID NO: 13468
  source 1..99: mol_type = other DNA

SEQ ID NO: 14623 - DNA, 111 bp, synthetic construct; identical to SEQ ID NO: 13447
  source 1..111: mol_type = other DNA

SEQ ID NO: 14624 - DNA, 99 bp, synthetic construct; identical to SEQ ID NO: 13362
  source 1..99: mol_type = other DNA

SEQ ID NO: 14625 - DNA, 111 bp, synthetic construct; identical to SEQ ID NO: 13447
  source 1..111: mol_type = other DNA

SEQ ID NO: 14626 - DNA, 99 bp, synthetic construct; identical to SEQ ID NO: 13424
  source 1..99: mol_type = other DNA

SEQ ID NO: 14627 - DNA, 111 bp, synthetic construct; identical to SEQ ID NO: 13447
  source 1..111: mol_type = other DNA

SEQ ID NO: 14628 - DNA, 99 bp, synthetic construct; identical to SEQ ID NO: 13560
  source 1..99: mol_type = other DNA

SEQ ID NO: 14629 - DNA, 111 bp, synthetic construct; identical to SEQ ID NO: 13447
  source 1..111: mol_type = other DNA

SEQ ID NO: 14630 - DNA, 99 bp, synthetic construct; identical to SEQ ID NO: 13514
  source 1..99: mol_type = other DNA

SEQ ID NO: 14631 - DNA, 111 bp, synthetic construct; identical to SEQ ID NO: 13447
  source 1..111: mol_type = other DNA

SEQ ID NO: 14632 - DNA, 99 bp, synthetic construct; identical to SEQ ID NO: 13884
  source 1..99: mol_type = other DNA

SEQ ID NO: 14633 - DNA, 111 bp, synthetic construct; identical to SEQ ID NO: 13447
  source 1..111: mol_type = other DNA

SEQ ID NO: 14634 - DNA, 99 bp, synthetic construct; identical to SEQ ID NO: 13400
  source 1..99: mol_type = other DNA

SEQ ID NO: 14635 - DNA, 111 bp, synthetic construct; identical to SEQ ID NO: 13447
  source 1..111: mol_type = other DNA

SEQ ID NO: 14636 - DNA, 99 bp, synthetic construct; identical to SEQ ID NO: 13604
  source 1..99: mol_type = other DNA

SEQ ID NO: 14637 - DNA, 111 bp, synthetic construct; identical to SEQ ID NO: 13447
  source 1..111: mol_type = other DNA

SEQ ID NO: 14638 - DNA, 99 bp, synthetic construct; identical to SEQ ID NO: 13376
  source 1..99: mol_type = other DNA

SEQ ID NO: 14639 - DNA, 111 bp, synthetic construct; identical to SEQ ID NO: 13447
  source 1..111: mol_type = other DNA

SEQ ID NO: 14640 - DNA, 99 bp, synthetic construct; identical to SEQ ID NO: 13442
  source 1..99: mol_type = other DNA

SEQ ID NO: 14641 - DNA, 111 bp, synthetic construct; identical to SEQ ID NO: 13447
  source 1..111: mol_type = other DNA

SEQ ID NO: 14642 - DNA, 99 bp, synthetic construct; identical to SEQ ID NO: 13900
  source 1..99: mol_type = other DNA

SEQ ID NO: 14643 - DNA, 111 bp, synthetic construct; identical to SEQ ID NO: 13435
  source 1..111: mol_type = other DNA

SEQ ID NO: 14644 - DNA, 99 bp, synthetic construct; identical to SEQ ID NO: 13366
  source 1..99: mol_type = other DNA

SEQ ID NO: 14645 - DNA, 111 bp, synthetic construct; identical to SEQ ID NO: 13435
  source 1..111: mol_type = other DNA

SEQ ID NO: 14646 - DNA, 99 bp, synthetic construct; identical to SEQ ID NO: 13378
  source 1..99: mol_type = other DNA

SEQ ID NO: 14647 - DNA, 111 bp, synthetic construct; identical to SEQ ID NO: 13435
  source 1..111: mol_type = other DNA

SEQ ID NO: 14648 - DNA, 99 bp, synthetic construct; identical to SEQ ID NO: 13560
  source 1..99: mol_type = other DNA

SEQ ID NO: 14649 - DNA, 111 bp, synthetic construct; identical to SEQ ID NO: 13435
  source 1..111: mol_type = other DNA

SEQ ID NO: 14650 - DNA, 99 bp, synthetic construct; identical to SEQ ID NO: 13364
  source 1..99: mol_type = other DNA

SEQ ID NO: 14651 - DNA, 111 bp, synthetic construct; identical to SEQ ID NO: 13435
  source 1..111: mol_type = other DNA

SEQ ID NO: 14652 - DNA, 99 bp, synthetic construct; identical to SEQ ID NO: 13384
  source 1..99: mol_type = other DNA

SEQ ID NO: 14653 - DNA, 111 bp, synthetic construct; identical to SEQ ID NO: 13435
  source 1..111: mol_type = other DNA

SEQ ID NO: 14654 - DNA, 99 bp, synthetic construct; identical to SEQ ID NO: 13408
  source 1..99: mol_type = other DNA

SEQ ID NO: 14655 - DNA, 111 bp, synthetic construct; identical to SEQ ID NO: 13435
  source 1..111: mol_type = other DNA

SEQ ID NO: 14656 - DNA, 99 bp, synthetic construct; identical to SEQ ID NO: 13358
  source 1..99: mol_type = other DNA

SEQ ID NO: 14657 - DNA, 111 bp, synthetic construct; identical to SEQ ID NO: 13435
  source 1..111: mol_type = other DNA

SEQ ID NO: 14658 - DNA, 99 bp, synthetic construct; identical to SEQ ID NO: 13370
  source 1..99: mol_type = other DNA

SEQ ID NO: 14659 - DNA, 111 bp, synthetic construct; identical to SEQ ID NO: 13435
  source 1..111: mol_type = other DNA

SEQ ID NO: 14660 - DNA, 99 bp, synthetic construct; identical to SEQ ID NO: 13678
  source 1..99: mol_type = other DNA

SEQ ID NO: 14661 - DNA, 111 bp, synthetic construct; identical to SEQ ID NO: 13435
  source 1..111: mol_type = other DNA

SEQ ID NO: 14662 - DNA, 99 bp, synthetic construct; identical to SEQ ID NO: 13358
  source 1..99: mol_type = other DNA

SEQ ID NO: 14663 - DNA, 111 bp, synthetic construct; identical to SEQ ID NO: 13435
  source 1..111: mol_type = other DNA

SEQ ID NO: 14664 - DNA, 99 bp, synthetic construct; identical to SEQ ID NO: 13380
  source 1..99: mol_type = other DNA

SEQ ID NO: 14665 - DNA, 111 bp, synthetic construct; identical to SEQ ID NO: 13435
  source 1..111: mol_type = other DNA

SEQ ID NO: 14666 - DNA, 99 bp, synthetic construct; identical to SEQ ID NO: 13362
  source 1..99: mol_type = other DNA

SEQ ID NO: 14667 - DNA, 111 bp, synthetic construct; identical to SEQ ID NO: 13435
  source 1..111: mol_type = other DNA

SEQ ID NO: 14668 - DNA, 99 bp, synthetic construct; identical to SEQ ID NO: 13614
  source 1..99: mol_type = other DNA

SEQ ID NO: 14669 - DNA, 111 bp, synthetic construct; identical to SEQ ID NO: 13435
  source 1..111: mol_type = other DNA

SEQ ID NO: 14670 - DNA, 99 bp, synthetic construct; identical to SEQ ID NO: 13410
  source 1..99: mol_type = other DNA

SEQ ID NO: 14671 - DNA, 108 bp, synthetic construct; identical to SEQ ID NO: 13383
  source 1..108: mol_type = other DNA

SEQ ID NO: 14672 - DNA, 99 bp, synthetic construct; identical to SEQ ID NO: 13412
  source 1..99: mol_type = other DNA

SEQ ID NO: 14673 - DNA, 108 bp, synthetic construct; identical to SEQ ID NO: 13383
  source 1..108: mol_type = other DNA

SEQ ID NO: 14674 - DNA, 99 bp, synthetic construct; identical to SEQ ID NO: 13448
  source 1..99: mol_type = other DNA

SEQ ID NO: 14675 - DNA, 108 bp, synthetic construct; identical to SEQ ID NO: 13383
  source 1..108: mol_type = other DNA

SEQ ID NO: 14676 - DNA, 99 bp, synthetic construct; identical to SEQ ID NO: 13506
  source 1..99: mol_type = other DNA

SEQ ID NO: 14677 - DNA, 108 bp, synthetic construct; identical to SEQ ID NO: 13383
  source 1..108: mol_type = other DNA

SEQ ID NO: 14678 - DNA, 93 bp, synthetic construct; identical to SEQ ID NO: 13462
  source 1..93: mol_type = other DNA

SEQ ID NO: 14679 - DNA, 108 bp, synthetic construct; identical to SEQ ID NO: 13383
  source 1..108: mol_type = other DNA

SEQ ID NO: 14680 - DNA, 99 bp, synthetic construct; identical to SEQ ID NO: 13400
  source 1..99: mol_type = other DNA

SEQ ID NO: 14681 - DNA, 108 bp, synthetic construct; identical to SEQ ID NO: 13383
  source 1..108: mol_type = other DNA

SEQ ID NO: 14682 - DNA, 99 bp, synthetic construct; identical to SEQ ID NO: 13470
  source 1..99: mol_type = other DNA

SEQ ID NO: 14683 - DNA, 108 bp, synthetic construct; identical to SEQ ID NO: 13383
  source 1..108: mol_type = other DNA

SEQ ID NO: 14684 - DNA, 99 bp, synthetic construct; identical to SEQ ID NO: 13500
  source 1..99: mol_type = other DNA

SEQ ID NO: 14685 - DNA, 108 bp, synthetic construct; identical to SEQ ID NO: 13383
  source 1..108: mol_type = other DNA

SEQ ID NO: 14686 - DNA, 99 bp, synthetic construct; identical to SEQ ID NO: 13400
  source 1..99: mol_type = other DNA

SEQ ID NO: 14687 - DNA, 108 bp, synthetic construct; identical to SEQ ID NO: 13383
  source 1..108: mol_type = other DNA

SEQ ID NO: 14688 - DNA, 99 bp, synthetic construct; identical to SEQ ID NO: 13402
  source 1..99: mol_type = other DNA

SEQ ID NO: 14689 - DNA, 108 bp, synthetic construct; identical to SEQ ID NO: 13383
  source 1..108: mol_type = other DNA

SEQ ID NO: 14690 - DNA, 99 bp, synthetic construct; identical to SEQ ID NO: 13416
  source 1..99: mol_type = other DNA

SEQ ID NO: 14691 - DNA, 108 bp, synthetic construct; identical to SEQ ID NO: 13383
  source 1..108: mol_type = other DNA

SEQ ID NO: 14692 - DNA, 99 bp, synthetic construct; identical to SEQ ID NO: 13398
  source 1..99: mol_type = other DNA

SEQ ID NO: 14693 - DNA, 108 bp, synthetic construct; identical to SEQ ID NO: 13383
  source 1..108: mol_type = other DNA

SEQ ID NO: 14694 - DNA, 99 bp, synthetic construct; identical to SEQ ID NO: 13402
  source 1..99: mol_type = other DNA

SEQ ID NO: 14695 - DNA, 108 bp, synthetic construct; identical to SEQ ID NO: 13383
  source 1..108: mol_type = other DNA

SEQ ID NO: 14696 - DNA, 99 bp, synthetic construct; identical to SEQ ID NO: 14604
  source 1..99: mol_type = other DNA

SEQ ID NO: 14697 - DNA, 108 bp, synthetic construct; identical to SEQ ID NO: 13383
  source 1..108: mol_type = other DNA

SEQ ID NO: 14698 - DNA, 99 bp, synthetic construct; identical to SEQ ID NO: 13394
  source 1..99: mol_type = other DNA

SEQ ID NO: 14699 - DNA, 108 bp, synthetic construct; identical to SEQ ID NO: 13383
  source 1..108: mol_type = other DNA

SEQ ID NO: 14700 - DNA, 99 bp, synthetic construct; identical to SEQ ID NO: 13612
  source 1..99: mol_type = other DNA

SEQ ID NO: 14701 - DNA, 108 bp, synthetic construct; identical to SEQ ID NO: 13383
  source 1..108: mol_type = other DNA

SEQ ID NO: 14702 - DNA, 99 bp, synthetic construct; identical to SEQ ID NO: 13480
  source 1..99: mol_type = other DNA

SEQ ID NO: 14703 - DNA, 108 bp, synthetic construct; identical to SEQ ID NO: 13383
  source 1..108: mol_type = other DNA

SEQ ID NO: 14704 - DNA, 99 bp, synthetic construct; identical to SEQ ID NO: 13464
  source 1..99: mol_type = other DNA

SEQ ID NO: 14705 - DNA, 108 bp, synthetic construct; identical to SEQ ID NO: 13383
  source 1..108: mol_type = other DNA

SEQ ID NO: 14706 - DNA, 99 bp, synthetic construct; identical to SEQ ID NO: 14158
  source 1..99: mol_type = other DNA

SEQ ID NO: 14707 - DNA, 108 bp, synthetic construct; identical to SEQ ID NO: 13383
  source 1..108: mol_type = other DNA

SEQ ID NO: 14708 - DNA, 99 bp, synthetic construct; identical to SEQ ID NO: 13384
  source 1..99: mol_type = other DNA

SEQ ID NO: 14709 - DNA, 108 bp, synthetic construct; identical to SEQ ID NO: 13383
  source 1..108: mol_type = other DNA

SEQ ID NO: 14710 - DNA, 99 bp, synthetic construct; identical to SEQ ID NO: 13436
  source 1..99: mol_type = other DNA

SEQ ID NO: 14711 - DNA, 108 bp, synthetic construct; identical to SEQ ID NO: 13383
  source 1..108: mol_type = other DNA

SEQ ID NO: 14712 - DNA, 99 bp, synthetic construct; identical to SEQ ID NO: 13460
  source 1..99: mol_type = other DNA

SEQ ID NO: 14713 - DNA, 108 bp, synthetic construct; identical to SEQ ID NO: 13383
  source 1..108: mol_type = other DNA

SEQ ID NO: 14714 - DNA, 99 bp, synthetic construct; identical to SEQ ID NO: 13442
  source 1..99: mol_type = other DNA

SEQ ID NO: 14715 - DNA, 108 bp, synthetic construct; identical to SEQ ID NO: 13383
  source 1..108: mol_type = other DNA

SEQ ID NO: 14716 - DNA, 99 bp, synthetic construct; identical to SEQ ID NO: 13428
  source 1..99: mol_type = other DNA

SEQ ID NO: 14717 - DNA, 108 bp, synthetic construct; identical to SEQ ID NO: 13383
  source 1..108: mol_type = other DNA

SEQ ID NO: 14718 - DNA, 99 bp, synthetic construct; identical to SEQ ID NO: 13514
  source 1..99: mol_type = other DNA

SEQ ID NO: 14719 - DNA, 108 bp, synthetic construct; identical to SEQ ID NO: 13383
  source 1..108: mol_type = other DNA

SEQ ID NO: 14720 - DNA, 99 bp, synthetic construct; identical to SEQ ID NO: 13678
  source 1..99: mol_type = other DNA

SEQ ID NO: 14721 - DNA, 108 bp, synthetic construct; identical to SEQ ID NO: 13383
  source 1..108: mol_type = other DNA

SEQ ID NO: 14722 - DNA, 99 bp, synthetic construct; identical to SEQ ID NO: 13428
  source 1..99: mol_type = other DNA

SEQ ID NO: 14723 - DNA, 108 bp, synthetic construct; identical to SEQ ID NO: 13383
  source 1..108: mol_type = other DNA

SEQ ID NO: 14724 - DNA, 99 bp, synthetic construct; identical to SEQ ID NO: 13364
  source 1..99: mol_type = other DNA

SEQ ID NO: 14725 - DNA, 108 bp, synthetic construct; identical to SEQ ID NO: 13383
  source 1..108: mol_type = other DNA

SEQ ID NO: 14726 - DNA, 99 bp, synthetic construct; identical to SEQ ID NO: 13430
  source 1..99: mol_type = other DNA

SEQ ID NO: 14727 - DNA, 108 bp, synthetic construct; identical to SEQ ID NO: 13383
  source 1..108: mol_type = other DNA

SEQ ID NO: 14728 - DNA, 99 bp, synthetic construct; identical to SEQ ID NO: 13450
  source 1..99: mol_type = other DNA

SEQ ID NO: 14729 - DNA, 108 bp, synthetic construct; identical to SEQ ID NO: 13383
  source 1..108: mol_type = other DNA

SEQ ID NO: 14730 - DNA, 99 bp, synthetic construct; identical to SEQ ID NO: 13358
  source 1..99: mol_type = other DNA

SEQ ID NO: 14731 - DNA, 108 bp, synthetic construct; identical to SEQ ID NO: 13383
  source 1..108: mol_type = other DNA

SEQ ID NO: 14732 - DNA, 99 bp, synthetic construct; identical to SEQ ID NO: 13612
  source 1..99: mol_type = other DNA

SEQ ID NO: 14733 - DNA, 108 bp, synthetic construct; identical to SEQ ID NO: 13383
  source 1..108: mol_type = other DNA

SEQ ID NO: 14734 - DNA, 99 bp, synthetic construct; identical to SEQ ID NO: 13400
  source 1..99: mol_type = other DNA

SEQ ID NO: 14735 - DNA, 108 bp, synthetic construct; identical to SEQ ID NO: 13383
  source 1..108: mol_type = other DNA

SEQ ID NO: 14736 - DNA, 99 bp, synthetic construct; identical to SEQ ID NO: 13614
  source 1..99: mol_type = other DNA

SEQ ID NO: 14737 - DNA, 108 bp, synthetic construct; identical to SEQ ID NO: 13383
  source 1..108: mol_type = other DNA

SEQ ID NO: 14738 - DNA, 99 bp, synthetic construct; identical to SEQ ID NO: 13456
  source 1..99: mol_type = other DNA

SEQ ID NO: 14739 - DNA, 108 bp, synthetic construct; identical to SEQ ID NO: 13383
  source 1..108: mol_type = other DNA

SEQ ID NO: 14740 - DNA, 99 bp, synthetic construct; identical to SEQ ID NO: 13432
  source 1..99: mol_type = other DNA

SEQ ID NO: 14741 - DNA, 108 bp, synthetic construct; identical to SEQ ID NO: 13383
  source 1..108: mol_type = other DNA

SEQ ID NO: 14742 - DNA, 99 bp, synthetic construct; identical to SEQ ID NO: 13578
  source 1..99: mol_type = other DNA

SEQ ID NO: 14743 - DNA, 108 bp, synthetic construct; identical to SEQ ID NO: 13383
  source 1..108: mol_type = other DNA

SEQ ID NO: 14744 - DNA, 99 bp, synthetic construct; identical to SEQ ID NO: 13362
  source 1..99: mol_type = other DNA

SEQ ID NO: 14745 - DNA, 108 bp, synthetic construct; identical to SEQ ID NO: 13383
  source 1..108: mol_type = other DNA

SEQ ID NO: 14746 - DNA, 99 bp, synthetic construct; identical to SEQ ID NO: 13444
  source 1..99: mol_type = other DNA

SEQ ID NO: 14747 - DNA, 108 bp, synthetic construct; identical to SEQ ID NO: 13383
  source 1..108: mol_type = other DNA

SEQ ID NO: 14748 - DNA, 99 bp, synthetic construct; identical to SEQ ID NO: 13480
  source 1..99: mol_type = other DNA

SEQ ID NO: 14749 - DNA, 108 bp, synthetic construct; identical to SEQ ID NO: 13383
  source 1..108: mol_type = other DNA

SEQ ID NO: 14750 - DNA, 99 bp, synthetic construct; identical to SEQ ID NO: 13376
  source 1..99: mol_type = other DNA

SEQ ID NO: 14751 - DNA, 108 bp, synthetic construct; identical to SEQ ID NO: 13383
  source 1..108: mol_type = other DNA

SEQ ID NO: 14752 - DNA, 99 bp, synthetic construct; identical to SEQ ID NO: 13866
  source 1..99: mol_type = other DNA

SEQ ID NO: 14753 - DNA, 108 bp, synthetic construct; identical to SEQ ID NO: 13383
  source 1..108: mol_type = other DNA

SEQ ID NO: 14754 - DNA, 99 bp, synthetic construct; identical to SEQ ID NO: 13722
  source 1..99: mol_type = other DNA

SEQ ID NO: 14755 - DNA, 108 bp, synthetic construct; identical to SEQ ID NO: 13383
  source 1..108: mol_type = other DNA

SEQ ID NO: 14756 - DNA, 99 bp, synthetic construct; identical to SEQ ID NO: 13378
  source 1..99: mol_type = other DNA

SEQ ID NO: 14757 - DNA, 108 bp, synthetic construct; identical to SEQ ID NO: 13383
  source 1..108: mol_type = other DNA

SEQ ID NO: 14758 - DNA, 99 bp, synthetic construct; identical to SEQ ID NO: 13402
  source 1..99: mol_type = other DNA

SEQ ID NO: 14759 - DNA, 108 bp, synthetic construct; identical to SEQ ID NO: 13383
  source 1..108: mol_type = other DNA

SEQ ID NO: 14760 - DNA, 99 bp, synthetic construct; identical to SEQ ID NO: 13812
  source 1..99: mol_type = other DNA

SEQ ID NO: 14761 - DNA, 108 bp, synthetic construct; identical to SEQ ID NO: 13383
  source 1..108: mol_type = other DNA

SEQ ID NO: 14762 - DNA, 99 bp, synthetic construct; identical to SEQ ID NO: 13358
  source 1..99: mol_type = other DNA

SEQ ID NO: 14763 - DNA, 108 bp, synthetic construct; identical to SEQ ID NO: 13383
  source 1..108: mol_type = other DNA

SEQ ID NO: 14764 - DNA, 99 bp, synthetic construct; identical to SEQ ID NO: 13416
  source 1..99: mol_type = other DNA

SEQ ID NO: 14765 - DNA, 108 bp, synthetic construct; identical to SEQ ID NO: 13383
  source 1..108: mol_type = other DNA

SEQ ID NO: 14766 - DNA, 99 bp, synthetic construct; identical to SEQ ID NO: 13424
  source 1..99: mol_type = other DNA

SEQ ID NO: 14767 - DNA, 108 bp, synthetic construct; identical to SEQ ID NO: 13383
  source 1..108: mol_type = other DNA

SEQ ID NO: 14768 - DNA, 99 bp, synthetic construct; identical to SEQ ID NO: 13416
  source 1..99: mol_type = other DNA

SEQ ID NO: 14769 - DNA, 108 bp, synthetic construct; identical to SEQ ID NO: 13383
  source 1..108: mol_type = other DNA

SEQ ID NO: 14770 - DNA, 99 bp, synthetic construct; identical to SEQ ID NO: 13404
  source 1..99: mol_type = other DNA

SEQ ID NO: 14771 - DNA, 108 bp, synthetic construct; identical to SEQ ID NO: 13383
  source 1..108: mol_type = other DNA

SEQ ID NO: 14772 - DNA, 93 bp, synthetic construct; identical to SEQ ID NO: 13462
  source 1..93: mol_type = other DNA

SEQ ID NO: 14773 - DNA, 108 bp, synthetic construct; identical to SEQ ID NO: 13383
  source 1..108: mol_type = other DNA

SEQ ID NO: 14774 - DNA, 99 bp, synthetic construct; identical to SEQ ID NO: 13398
  source 1..99: mol_type = other DNA

SEQ ID NO: 14775 - DNA, 108 bp, synthetic construct; identical to SEQ ID NO: 13383
  source 1..108: mol_type = other DNA

SEQ ID NO: 14776 - DNA, 99 bp, synthetic construct; identical to SEQ ID NO: 13402
  source 1..99: mol_type = other DNA

SEQ ID NO: 14777 - DNA, 105 bp, synthetic construct; identical to SEQ ID NO: 13379
  source 1..105: mol_type = other DNA

SEQ ID NO: 14778 - DNA, 99 bp, synthetic construct; identical to SEQ ID NO: 13376
  source 1..99: mol_type = other DNA

SEQ ID NO: 14779 - DNA, 105 bp, synthetic construct; identical to SEQ ID NO: 13379
  source 1..105: mol_type = other DNA

SEQ ID NO: 14780 - DNA, 99 bp, synthetic construct; identical to SEQ ID NO: 13376
  source 1..99: mol_type = other DNA

SEQ ID NO: 14781 - DNA, 105 bp, synthetic construct; identical to SEQ ID NO: 13379
  source 1..105: mol_type = other DNA

SEQ ID NO: 14782 - DNA, 99 bp, synthetic construct; identical to SEQ ID NO: 13578
  source 1..99: mol_type = other DNA

SEQ ID NO: 14783 - DNA, 105 bp, synthetic construct; identical to SEQ ID NO: 13379
  source 1..105: mol_type = other DNA

SEQ ID NO: 14784 - DNA, 99 bp, synthetic construct; identical to SEQ ID NO: 13456
  source 1..99: mol_type = other DNA

SEQ ID NO: 14785 - DNA, 105 bp, synthetic construct; identical to SEQ ID NO: 13379
  source 1..105: mol_type = other DNA

SEQ ID NO: 14786 - DNA, 99 bp, synthetic construct; identical to SEQ ID NO: 13402
  source 1..99: mol_type = other DNA

SEQ ID NO: 14787 - DNA, 105 bp, synthetic construct; identical to SEQ ID NO: 13379
  source 1..105: mol_type = other DNA

SEQ ID NO: 14788 - DNA, 99 bp, synthetic construct
  source 1..99: mol_type = other DNA
caaggagtgaatggctttgaggctgagttcagcaagagtaactcttcctgcccccggcggaaagcctctgtgcactggagcgactgggctgtgtactgc

SEQ ID NO: 14789 - DNA, 105 bp, synthetic construct; identical to SEQ ID NO: 13379
  source 1..105: mol_type = other DNA

SEQ ID NO: 14790 - DNA, 99 bp, synthetic construct; identical to SEQ ID NO: 14120
  source 1..99: mol_type = other DNA

SEQ ID NO: 14791 - DNA, 105 bp, synthetic construct; identical to SEQ ID NO: 13379
  source 1..105: mol_type = other DNA

SEQ ID NO: 14792 - DNA, 99 bp, synthetic construct; identical to SEQ ID NO: 13886
  source 1..99: mol_type = other DNA

SEQ ID NO: 14793 - DNA, 105 bp, synthetic construct; identical to SEQ ID NO: 13379
  source 1..105: mol_type = other DNA

SEQ ID NO: 14794 - DNA, 99 bp, synthetic construct; identical to SEQ ID NO: 13428
  source 1..99: mol_type = other DNA

SEQ ID NO: 14795 - DNA, 105 bp, synthetic construct; identical to SEQ ID NO: 13379
  source 1..105: mol_type = other DNA

SEQ ID NO: 14796 - DNA, 99 bp, synthetic construct; identical to SEQ ID NO: 13392
  source 1..99: mol_type = other DNA

SEQ ID NO: 14797 - DNA, 105 bp, synthetic construct; identical to SEQ ID NO: 13379
  source 1..105: mol_type = other DNA

SEQ ID NO: 14798 - DNA, 99 bp, synthetic construct; identical to SEQ ID NO: 13424
  source 1..99: mol_type = other DNA

SEQ ID NO: 14799 - DNA, 105 bp, synthetic construct; identical to SEQ ID NO: 13379
  source 1..105: mol_type = other DNA

SEQ ID NO: 14800 - DNA, 99 bp, synthetic construct; identical to SEQ ID NO: 13538
  source 1..99: mol_type = other DNA

SEQ ID NO: 14801 - DNA, 105 bp, synthetic construct; identical to SEQ ID NO: 13379
  source 1..105: mol_type = other DNA

SEQ ID NO: 14802 - DNA, 99 bp, synthetic construct; identical to SEQ ID NO: 13822
  source 1..99: mol_type = other DNA

SEQ ID NO: 14803 - DNA, 105 bp, synthetic construct; identical to SEQ ID NO: 13379
  source 1..105: mol_type = other DNA

SEQ ID NO: 14804 - DNA, 99 bp, synthetic construct; identical to SEQ ID NO: 13412
  source 1..99: mol_type = other DNA

SEQ ID NO: 14805 - DNA, 105 bp, synthetic construct; identical to SEQ ID NO: 13379
  source 1..105: mol_type = other DNA

SEQ ID NO: 14806 - DNA, 99 bp, synthetic construct; identical to SEQ ID NO: 13464
  source 1..99: mol_type = other DNA

SEQ ID NO: 14807 - DNA, 105 bp, synthetic construct; identical to SEQ ID NO: 13379
  source 1..105: mol_type = other DNA

SEQ ID NO: 14808 - DNA, 99 bp, synthetic construct; identical to SEQ ID NO: 13444
  source 1..99: mol_type = other DNA

SEQ ID NO: 14809 - DNA, 105 bp, synthetic construct; identical to SEQ ID NO: 13379
  source 1..105: mol_type = other DNA

SEQ ID NO: 14810 - DNA, 99 bp, synthetic construct; identical to SEQ ID NO: 13436
  source 1..99: mol_type = other DNA

SEQ ID NO: 14811 - DNA, 105 bp, synthetic construct; identical to SEQ ID NO: 13379
  source 1..105: mol_type = other DNA

SEQ ID NO: 14812 - DNA, 99 bp, synthetic construct; identical to SEQ ID NO: 13822
  source 1..99: mol_type = other DNA

SEQ ID NO: 14813 - DNA, 105 bp, synthetic construct; identical to SEQ ID NO: 13379
  source 1..105: mol_type = other DNA

SEQ ID NO: 14814 - DNA, 99 bp, synthetic construct; identical to SEQ ID NO: 13358
  source 1..99: mol_type = other DNA

SEQ ID NO: 14815 - DNA, 105 bp, synthetic construct; identical to SEQ ID NO: 13379
  source 1..105: mol_type = other DNA

SEQ ID NO: 14816 - DNA, 99 bp, synthetic construct; identical to SEQ ID NO: 13612
  source 1..99: mol_type = other DNA

SEQ ID NO: 14817 - DNA, 105 bp, synthetic construct; identical to SEQ ID NO: 13379
  source 1..105: mol_type = other DNA

SEQ ID NO: 14818 - DNA, 99 bp, synthetic construct; identical to SEQ ID NO: 13416
  source 1..99: mol_type = other DNA

SEQ ID NO: 14819 - DNA, 105 bp, synthetic construct; identical to SEQ ID NO: 13379
  source 1..105: mol_type = other DNA

SEQ ID NO: 14820 - DNA, 99 bp, synthetic construct; identical to SEQ ID NO: 13578
  source 1..99: mol_type = other DNA

SEQ ID NO: 14821 - DNA, 105 bp, synthetic construct; identical to SEQ ID NO: 13379
  source 1..105: mol_type = other DNA

SEQ ID NO: 14822 - DNA, 99 bp, synthetic construct; identical to SEQ ID NO: 13886
  source 1..99: mol_type = other DNA

SEQ ID NO: 14823 - DNA, 105 bp, synthetic construct; identical to SEQ ID NO: 13379
  source 1..105: mol_type = other DNA

SEQ ID NO: 14824 - DNA, 99 bp, synthetic construct; identical to SEQ ID NO: 13398
  source 1..99: mol_type = other DNA

SEQ ID NO: 14825 - DNA, 105 bp, synthetic construct; identical to SEQ ID NO: 13379
  source 1..105: mol_type = other DNA

SEQ ID NO: 14826 - DNA, 99 bp, synthetic construct; identical to SEQ ID NO: 13358
  source 1..99: mol_type = other DNA

SEQ ID NO: 14827 - DNA, 105 bp, synthetic construct; identical to SEQ ID NO: 13379
  source 1..105: mol_type = other DNA

SEQ ID NO: 14828 - DNA, 99 bp, synthetic construct; identical to SEQ ID NO: 13404
  source 1..99: mol_type = other DNA

SEQ ID NO: 14829 - DNA, 105 bp, synthetic construct; identical to SEQ ID NO: 13379
  source 1..105: mol_type = other DNA

SEQ ID NO: 14830 - DNA, 99 bp, synthetic construct; identical to SEQ ID NO: 13416
  source 1..99: mol_type = other DNA

SEQ ID NO: 14831 - DNA, 105 bp, synthetic construct; identical to SEQ ID NO: 13379
  source 1..105: mol_type = other DNA

SEQ ID NO: 14832 - DNA, 99 bp, synthetic construct; identical to SEQ ID NO: 13578
  source 1..99: mol_type = other DNA

SEQ ID NO: 14833 - DNA, 105 bp, synthetic construct; identical to SEQ ID NO: 13379
  source 1..105: mol_type = other DNA

SEQ ID NO: 14834 - DNA, 99 bp, synthetic construct; identical to SEQ ID NO: 13432
  source 1..99: mol_type = other DNA

SEQ ID NO: 14835 - DNA, 105 bp, synthetic construct; identical to SEQ ID NO: 13379
  source 1..105: mol_type = other DNA

SEQ ID NO: 14836 - DNA, 99 bp, synthetic construct; identical to SEQ ID NO: 13822
  source 1..99: mol_type = other DNA

SEQ ID NO: 14837 - DNA, 105 bp, synthetic construct; identical to SEQ ID NO: 13379
  source 1..105: mol_type = other DNA

SEQ ID NO: 14838 - DNA, 99 bp, synthetic construct; identical to SEQ ID NO: 13806
  source 1..99: mol_type = other DNA

SEQ ID NO: 14839 - DNA, 105 bp, synthetic construct; identical to SEQ ID NO: 13379
  source 1..105: mol_type = other DNA

SEQ ID NO: 14840 - DNA, 99 bp, synthetic construct; identical to SEQ ID NO: 13402
  source 1..99: mol_type = other DNA

SEQ ID NO: 14841 - protein, 11 aa, synthetic construct
CASSAGKTLYF

SEQ ID NO: 14842 - protein, 15 aa, synthetic construct
CAASESTGNTRKLIF

SEQ ID NO: 14843 - protein, 16 aa, synthetic construct
CASGGPGQGASYEQYF

SEQ ID NO: 14844 - protein, 14 aa, synthetic construct
CAVREGNNNNRIFF

SEQ ID NO: 14845 - protein, 16 aa, synthetic construct
CASGGPGQGASYEQYF

SEQ ID NO: 14846 - protein, 14 aa, synthetic construct
CAMREDTNAYKVIF

SEQ ID NO: 14847 - protein, 14 aa, synthetic construct
CASSGDTSAETLYF

SEQ ID NO: 14848 - protein, 14 aa, synthetic construct
CALSENYNQGKLIF

SEQ ID NO: 14849 - protein, 13 aa, synthetic construct
CASGDGDNTEVFF

SEQ ID NO: 14850 - protein, 14 aa, synthetic construct
CAMATGGLSGKLTF

SEQ ID NO: 14851 - protein, 13 aa, synthetic construct
CASSQGQGYEQYF

SEQ ID NO: 14852 - protein, 13 aa, synthetic construct
CALSMSNYNVLYF

SEQ ID NO: 14853 - protein, 14 aa, synthetic construct
CASGSGTANSDYTF

SEQ ID NO: 14854 - protein, 13 aa, synthetic construct
CALSYNAGAKLTF

SEQ ID NO: 14855 - protein, 16 aa, synthetic construct
CASSPHRGQANSDYTF

SEQ ID NO: 14856 - protein, 14 aa, synthetic construct
CAVRVMPNYNVLYF

SEQ ID NO: 14857 - protein, 15 aa, synthetic construct
CASRSTGDNQDTQYF

SEQ ID NO: 14858 - protein, 15 aa, synthetic construct
CAAEVFGGSNAKLTF

SEQ ID NO: 14859 - protein, 14 aa, synthetic construct
CASGPGTANSDYTF

SEQ ID NO: 14860 - protein, 13 aa, synthetic construct
CAVSHNYAQGLTF

SEQ ID NO: 14861 - protein, 14 aa, synthetic construct
CASRDWGSAETLYF

SEQ ID NO: 14862 - protein, 12 aa, synthetic construct
CAVKNNNNRIFF

SEQ ID NO: 14863 - protein, 15 aa, synthetic construct
CTCSAEGADTGQLYF

SEQ ID NO: 14864 - protein, 11 aa, synthetic construct
CATEGGRALIF

SEQ ID NO: 14865 - protein, 14 aa, synthetic construct
CTCSAGQGNTEVFF

SEQ ID NO: 14866 - protein, 12 aa, synthetic construct
CADGGSGNKLIF

SEQ ID NO: 14867 - protein, 14 aa, synthetic construct
CASSITDNQDTQYF

SEQ ID NO: 14868 - protein, 13 aa, synthetic construct
CAASGNYAQGLTF

SEQ ID NO: 14869 - protein, 15 aa, synthetic construct
CASSLGTGGALEQYF

SEQ ID NO: 14870 - protein, 12 aa, synthetic construct
CVLETGGYKVVF

SEQ ID NO: 14871 - protein, 12 aa, synthetic construct
CASGDAWYEQYF

SEQ ID NO: 14872 - protein, 17 aa, synthetic construct
CAMELWGTGANTGKLTF

SEQ ID NO: 14873 - protein, 14 aa, synthetic construct
CASGSGTANSDYTF

SEQ ID NO: 14874 - protein, 13 aa, synthetic construct
CAVTHNYAQGLTF

SEQ ID NO: 14875 - protein, 10 aa, synthetic construct
CAWSPAEVFF

SEQ ID NO: 14876 - protein, 15 aa, synthetic construct
CAVTLGTGGADRLTF

SEQ ID NO: 14877 - protein, 13 aa, synthetic construct
CASSDRTYAEQFF

SEQ ID NO: 14878 - protein, 13 aa, synthetic construct
CALSEGGADRLTF

SEQ ID NO: 14879 - protein, 13 aa, synthetic construct
CAWRGGRTGQLYF

SEQ ID NO: 14880 - protein, 13 aa, synthetic construct
CAVTYQGGRALIF

SEQ ID NO: 14881 - protein, 12 aa, synthetic construct
CASGGSQNTLYF

SEQ ID NO: 14882 - protein, 13 aa, synthetic construct
CAVKSTGYQNFYF

SEQ ID NO: 14883 - protein, 15 aa, synthetic construct
CASGEGWGASETLYF

SEQ ID NO: 14884 - protein, 17 aa, synthetic construct
CAMREGRATGGNNKLTF

SEQ ID NO: 14885 - protein, 14 aa, synthetic construct
CASSDWGGAETLYF

SEQ ID NO: 14886 - protein, 14 aa, synthetic construct
CALSGRQGGRALIF

SEQ ID NO: 14887 - protein, 13 aa, synthetic construct
CASSRTAYAEQFF

SEQ ID NO: 14888 - protein, 12 aa, synthetic construct
CAASWGNYQLIW

SEQ ID NO: 14889 - protein, 15 aa, synthetic construct
CASSNRGRNTGQLYF

SEQ ID NO: 14890 - protein, 12 aa, synthetic construct
CAVSSNTDKVVF

SEQ ID NO: 14891 - protein, 13 aa, synthetic construct
CASGVGGQNTLYF

SEQ ID NO: 14892 - protein, 13 aa, synthetic construct
CAVKNTGYQNFYF

SEQ ID NO: 14893 - protein, 15 aa, synthetic construct
CASSDAGGDAETLYF

SEQ ID NO: 14894 - protein, 13 aa, synthetic construct
CAASDSGYNKLTF

SEQ ID NO: 14895 - protein, 14 aa, synthetic construct
CASSDAGGGNEQYF

SEQ ID NO: 14896 - protein, 13 aa, synthetic construct
CALEDTGNYKYVF

SEQ ID NO: 14897 - protein, 15 aa, synthetic construct
CASSHGTGYNSPLYF

SEQ ID NO: 14898 - protein, 13 aa, synthetic construct
CAASGGGADRLTF

SEQ ID NO: 14899 - protein, 10 aa, synthetic construct
CASGGYEQYF

SEQ ID NO: 14900 - protein, 15 aa, synthetic construct
CALGGNQGGSAKLIF

SEQ ID NO: 14901 - protein, 12 aa, synthetic construct
CASSEGGSDYTF

SEQ ID NO: 14902 - protein, 14 aa, synthetic construct
CALSVDTNAYKVIF

SEQ ID NO: 14903 - protein, 11 aa, synthetic construct
CAWSLGLDKYF

SEQ ID NO: 14904 - protein, 12 aa, synthetic construct
CAASDSNYQLIW

SEQ ID NO: 14905 - protein, 13 aa, synthetic construct
CASSIWEDTEVFF

SEQ ID NO: 14906 - protein, 17 aa, synthetic construct
CAMREANTGANTGKLTF

SEQ ID NO: 14907 - protein, 15 aa, synthetic construct
CASSPDGGRPDTQYF

SEQ ID NO: 14908 - protein, 9 aa, synthetic construct
CAAHNRIFF

SEQ ID NO: 14909 - protein, 14 aa, synthetic construct
CASSDPRYAETLYF

SEQ ID NO: 14910 - protein, 14 aa, synthetic construct
CALRGSGGNYKPTF

SEQ ID NO: 14911 - protein, 12 aa, synthetic construct
CASSDDAETLYF

SEQ ID NO: 14912 - protein, 16 aa, synthetic construct
CALSAGITGNTGKLIF

SEQ ID NO: 14913 - protein, 11 aa, synthetic construct
CAWRNSYEQYF

SEQ ID NO: 14914 - protein, 13 aa, synthetic construct
CAVSWNMGYKLTF

SEQ ID NO: 14915 - protein, 14 aa, synthetic construct
CTCSRGQGDTEVFF

SEQ ID NO: 14916 - protein, 13 aa, synthetic construct
CAVSMRGSWQLIF

SEQ ID NO: 14917 - protein, 15 aa, synthetic construct
CTCSAADSSNERLFF

SEQ ID NO: 14918 - protein, 14 aa, synthetic construct
CAAGLSSGSWQLIF

SEQ ID NO: 14919 - protein, 15 aa, synthetic construct
CGARDRLGGRYEQYF

SEQ ID NO: 14920 - protein, 14 aa, synthetic construct
CATDAGTGGYKVVF

SEQ ID NO: 14921 - protein, 16 aa, synthetic construct
CASSQLGTPNQDTQYF

SEQ ID NO: 14922 - protein, 15 aa, synthetic construct
CAMRNTGANTGKLTF

SEQ ID NO: 14923 - protein, 13 aa, synthetic construct
CASSDDSAETLYF

SEQ ID NO: 14924 - protein, 13 aa, synthetic construct
CAALTGNTGKLIF

SEQ ID NO: 14925 - protein, 15 aa, synthetic construct
CASSIRTLSNERLFF

SEQ ID NO: 14926 - protein, 15 aa, synthetic construct
CAASIYTGGADRLTF

SEQ ID NO: 14927 - protein, 14 aa, synthetic construct
CASSDPGRDTEVFF

SEQ ID NO: 14928 - protein, 15 aa, synthetic construct
CAMREGGGGADRLTF

SEQ ID NO: 14929 - protein, 14 aa, synthetic construct
CASSDWGGAETLYF

SEQ ID NO: 14930 - protein, 14 aa, synthetic construct
CAVSATSSGQKLVF

SEQ ID NO: 14931 - protein, 15 aa, synthetic construct
CASSRDKLSAETLYF

SEQ ID NO: 14932 - protein, 12 aa, synthetic construct
CAEGDYANKMIF

SEQ ID NO: 14933 - protein, 11 aa, synthetic construct
CTCSEDREQYF

SEQ ID NO: 14934 - protein, 12 aa, synthetic construct
CAIAPYNNRIFF

SEQ ID NO: 14935 - protein, 15 aa, synthetic construct
CASSQGLGDYAEQFF

SEQ ID NO: 14936 - protein, 13 aa, synthetic construct
CASRTQVVGQLTF

SEQ ID NO: 14937 - protein, 12 aa, synthetic construct
CASSQGNTEVFF

SEQ ID NO: 14938 - protein, 14 aa, synthetic construct
CALSASSSFSKLVF

SEQ ID NO: 14939 - protein, 15 aa, synthetic construct
CASSQGQYNYAEQFF

SEQ ID NO: 14940 - protein, 13 aa, synthetic construct
CAVRENNNNAPRF

SEQ ID NO: 14941 - protein, 13 aa, synthetic construct
CASGLTGEETLYF

SEQ ID NO: 14942 - protein, 13 aa, synthetic construct
CAVSAGNNNAPRF

SEQ ID NO: 14943 - protein, 13 aa, synthetic construct
CASSEGIQDTQYF

SEQ ID NO: 14944 - protein, 14 aa, synthetic construct
CILMTGGSNAKLTF

SEQ ID NO: 14945 - protein, 14 aa, synthetic construct
CASSQDQGAETLYF

SEQ ID NO: 14946 - protein, 17 aa, synthetic construct
CIVTDILTSGGNYKPTF

SEQ ID NO: 14947 - protein, 15 aa, synthetic construct
CASSQVWGNQDTQYF

SEQ ID NO: 14948 - protein, 12 aa, synthetic construct
CAVSASGTYQRF

SEQ ID NO: 14949 - protein, 14 aa, synthetic construct
CASGEQGQGYEQYF

SEQ ID NO: 14950 - protein, 12 aa, synthetic construct
CAVSPWGTYQRF

SEQ ID NO: 14951 - protein, 16 aa, synthetic construct
CASSGDRGFSNERLFF

SEQ ID NO: 14952 - protein, 15 aa, synthetic construct
CAAGDGTGNTGKLIF

SEQ ID NO: 14953 - protein, 15 aa, synthetic construct
CASSQEWQGGTEVFF

SEQ ID NO: 14954 - protein, 12 aa, synthetic construct
CALGGGGRALIF

SEQ ID NO: 14955 - protein, 14 aa, synthetic construct
CASGSRVSNERLFF

SEQ ID NO: 14956 - protein, 13 aa, synthetic construct
CALSPNSNYQLIW

SEQ ID NO: 14957 - protein, 15 aa, synthetic construct
CASGEGTGDNQAPLF

SEQ ID NO: 14958 - protein, 12 aa, synthetic construct
CAMRVNNNRIFF

SEQ ID NO: 14959 - protein, 15 aa, synthetic construct
CASGEGTGDNQAPLF

SEQ ID NO: 14960 - protein, 12 aa, synthetic construct
CVLGYNQGKLIF

SEQ ID NO: 14961 - protein, 14 aa, synthetic construct
CASSLGGSSYEQYF

SEQ ID NO: 14962 - protein, 14 aa, synthetic construct
CAASHDTNAYKVIF

SEQ ID NO: 14963 - protein, 15 aa, synthetic construct
CASSSDWGNTGQLYF

SEQ ID NO: 14964 - protein, 13 aa, synthetic construct
CAAITGSGGKLTL

SEQ ID NO: 14965 - protein, 15 aa, synthetic construct
CASSLGLFNYAEQFF

SEQ ID NO: 14966 - protein, 14 aa, synthetic construct
CAMEPNNYAQGLTF

SEQ ID NO: 14967 - protein, 12 aa, synthetic construct
CASGKNTGQLYF

SEQ ID NO: 14968 - protein, 14 aa, synthetic construct
CAVSQMDSNYQLIW

SEQ ID NO: 14969 - protein, 15 aa, synthetic construct
CASGEGLVSQNTLYF

SEQ ID NO: 14970 - protein, 15 aa, synthetic construct
CALGNTGANTGKLTF

SEQ ID NO: 14971 - protein, 15 aa, synthetic construct
CASGDPGQGWAEQFF

SEQ ID NO: 14972 - protein, 15 aa, synthetic construct
CAVRTYGSSGNKLIF

SEQ ID NO: 14973 - protein, 12 aa, synthetic construct
CASGDADYEQYF

SEQ ID NO: 14974 - protein, 14 aa, synthetic construct
CALGDFYNQGKLIF

SEQ ID NO: 14975 - protein, 15 aa, synthetic construct
CASGDAGGGYAEQFF

SEQ ID NO: 14976 - protein, 12 aa, synthetic construct
CAVNPGYQNFYF

SEQ ID NO: 14977 - protein, 11 aa, synthetic construct
CASTDNTEVFF

SEQ ID NO: 14978 - protein, 14 aa, synthetic construct
CALSAPSGSWQLIF

SEQ ID NO: 14979 - protein, 16 aa, synthetic construct
CAWSPDWGASAETLYF

SEQ ID NO: 14980 - protein, 13 aa, synthetic construct
CALGNNAGAKLTF

SEQ ID NO: 14981 - protein, 15 aa, synthetic construct
CAWSLRLGSQNTLYF

SEQ ID NO: 14982 - protein, 15 aa, synthetic construct
CAASDGAGNTRKLIF

SEQ ID NO: 14983 - protein, 13 aa, synthetic construct
CASSLGLGDTQYF

SEQ ID NO: 14984 - protein, 16 aa, synthetic construct
CAVSAEASSSFSKLVF

SEQ ID NO: 14985 - protein, 12 aa, synthetic construct
CGARDGGGEQYF

SEQ ID NO: 14986 - protein, 11 aa, synthetic construct
CAVRNNNAPRF

SEQ ID NO: 14987 - protein, 14 aa, synthetic construct
CASSRTGERNTLYF

SEQ ID NO: 14988 - protein, 14 aa, synthetic construct
CAASSRNMGYKLTF

SEQ ID NO: 14989 - protein, 14 aa, synthetic construct
CASSTGGTNSDYTF

SEQ ID NO: 14990 - protein, 14 aa, synthetic construct
CVLGATGGADRLTF

SEQ ID NO: 14991 - protein, 12 aa, synthetic construct
CASSDRVYEQYF

SEQ ID NO: 14992 - protein, 12 aa, synthetic construct
CAGNTGYQNFYF

SEQ ID NO: 14993 - protein, 12 aa, synthetic construct
CASQTGGDEQYF

SEQ ID NO: 14994 - protein, 13 aa, synthetic construct
CATDDTNAYKVIF

SEQ ID NO: 14995 - protein, 14 aa, synthetic construct
CASSQTISNERLFF

SEQ ID NO: 14996 - protein, 13 aa, synthetic construct
CAMEGSALGRLHF

SEQ ID NO: 14997 - protein, 15 aa, synthetic construct
CASSQDPVSNERLFF

SEQ ID NO: 14998 - protein, 14 aa, synthetic construct
CAMNYGGSGNKLIF

SEQ ID NO: 14999 - protein, 14 aa, synthetic construct
CASSPTGTTGQLYF

SEQ ID NO: 15000 - protein, 16 aa, synthetic construct
CSASRDRGSALGRLHF

SEQ ID NO: 15001 - protein, 15 aa, synthetic construct
CASSWGTGGAETLYF

SEQ ID NO: 15002 - protein, 14 aa, synthetic construct
CAASEDTNAYKVIF

SEQ ID NO: 15003 - protein, 14 aa, synthetic construct
CASKQGARDTEVFF

SEQ ID NO: 15004 - protein, 14 aa, synthetic construct
CAASKTASLGKLQF

SEQ ID NO: 15005 - protein, 14 aa, synthetic construct
CASSYDRSGNTLYF

SEQ ID NO: 15006 - protein, 15 aa, synthetic construct
CAMEDPNTGYQNFYF

SEQ ID NO: 15007 - protein, 14 aa, synthetic construct
CASGDRGSQNTLYF

SEQ ID NO: 15008 - protein, 13 aa, synthetic construct
CAMREGGTDKVVF

SEQ ID NO: 15009 - protein, 13 aa, synthetic construct
CASGDPTNSDYTF

SEQ ID NO: 15010 - protein, 13 aa, synthetic construct
CAASGRNNNAPRF

SEQ ID NO: 15011 - protein, 16 aa, synthetic construct
CASGDETGEPNTEVFF

SEQ ID NO: 15012 - protein, 14 aa, synthetic construct
CAASDNTGNYKYVF

SEQ ID NO: 15013 - protein, 12 aa, synthetic construct
CASGDSGLGVPF

SEQ ID NO: 15014 - protein, 14 aa, synthetic construct
CAVSATSSGQKLVF

SEQ ID NO: 15015 - protein, 14 aa, synthetic construct
CASGGGGSQNTLYF

SEQ ID NO: 15016 - protein, 15 aa, synthetic construct
CAMRGNNNAGAKLTF

SEQ ID NO: 15017 - protein, 14 aa, synthetic construct
CASSPQGGNTEVFF

SEQ ID NO: 15018 - protein, 14 aa, synthetic construct
CAASNTGGADRLTF

SEQ ID NO: 15019 - protein, 16 aa, synthetic construct
CASSAGTGGYNSPLYF

SEQ ID NO: 15020 - protein, 17 aa, synthetic construct
CALGDPEATGGNNKLTF

SEQ ID NO: 15021 - protein, 13 aa, synthetic construct
CASGTGEGNTLYF

SEQ ID NO: 15022 - protein, 14 aa, synthetic construct
CAASAGGGADRLTF

SEQ ID NO: 15023 - protein, 12 aa, synthetic construct
CAWSIRQNTLYF

SEQ ID NO: 15024 - protein, 13 aa, synthetic construct
CAATSTGYQNFYF

SEQ ID NO: 15025 - protein, 15 aa, synthetic construct
CGASPGLGGLVEQYF

SEQ ID NO: 15026 - protein, 15 aa, synthetic construct
CAMREGSSSFSKLVF

SEQ ID NO: 15027 - protein, 14 aa, synthetic construct
CASSTGTGGYEQYF

SEQ ID NO: 15028 - protein, 14 aa, synthetic construct
CATAANYGNEKITF

SEQ ID NO: 15029 - protein, 13 aa, synthetic construct
CASGTASAETLYF

SEQ ID NO: 15030 - protein, 13 aa, synthetic construct
CATVSSGSWQLIF

SEQ ID NO: 15031 - protein, 11 aa, synthetic construct
CTCSAQTEVFF

SEQ ID NO: 15032 - protein, 14 aa, synthetic construct
CAVSPLTNTGKLTF

SEQ ID NO: 15033 - protein, 14 aa, synthetic construct
CASSQDNNYAEQFF

SEQ ID NO: 15034 - protein, 16 aa, synthetic construct
CALSDLPSSGSWQLIF

SEQ ID NO: 15035 - protein, 12 aa, synthetic construct
CASSSGVAEQFF

SEQ ID NO: 15036 - protein, 12 aa, synthetic construct
CVLMDYANKMIF

SEQ ID NO: 15037 - protein, 16 aa, synthetic construct
CASSSLDRESAETLYF

SEQ ID NO: 15038 - protein, 13 aa, synthetic construct
CAATSNMGYKLTF

SEQ ID NO: 15039 - protein, 15 aa, synthetic construct
CASSQVWGRSYEQYF

SEQ ID NO: 15040 - protein, 17 aa, synthetic construct
CVLSIGGRQGTGSKLSF

SEQ ID NO: 15041 - protein, 12 aa, synthetic construct
CASNGGSYEQYF

SEQ ID NO: 15042 - protein, 12 aa, synthetic construct
CALDPNAYKVIF

SEQ ID NO: 15043 - protein, 12 aa, synthetic construct
CASSWGQQAPLF

SEQ ID NO: 15044 - protein, 12 aa, synthetic construct
CAARDSNYQLIW

SEQ ID NO: 15045 - protein, 14 aa, synthetic construct
CASGEGRANTEVFF

SEQ ID NO: 15046 - protein, 14 aa, synthetic construct
CAMREGDYANKMIF

SEQ ID NO: 15047 - protein, 13 aa, synthetic construct
CASGALGKDTQYF

SEQ ID NO: 15048 - protein, 11 aa, synthetic construct
CGQGTGSKLSF

SEQ ID NO: 15049 - protein, 12 aa, synthetic construct
CASSTGGAEQFF

SEQ ID NO: 15050 - protein, 12 aa, synthetic construct
CAVREGTDKVVF

SEQ ID NO: 15051 - protein, 12 aa, synthetic construct
CASSEGEYEQYF

SEQ ID NO: 15052 - protein, 13 aa, synthetic construct
CALTPGGNYKPTF

SEQ ID NO: 15053 - protein, 14 aa, synthetic construct
CASSDQAGVDTQYF

SEQ ID NO: 15054 - protein, 16 aa, synthetic construct
CAVTPPASSSFSKLVF

SEQ ID NO: 15055 - protein, 12 aa, synthetic construct
CASRTSNSDYTF

SEQ ID NO: 15056 - protein, 12 aa, synthetic construct
CAGGGSGNKLIF

SEQ ID NO: 15057 - protein, 16 aa, synthetic construct
CASSDASQGYNQAPLF

SEQ ID NO: 15058 - protein, 14 aa, synthetic construct
CALGEQGGSAKLIF

SEQ ID NO: 15059 - protein, 14 aa, synthetic construct
CAWSLEDRQDTQYF

SEQ ID NO: 15060 - protein, 15 aa, synthetic construct
CAMRDSNYGNEKITF

SEQ ID NO: 15061 - protein, 15 aa, synthetic construct
CGASGGGAFQDTQYF

SEQ ID NO: 15062 - protein, 14 aa, synthetic construct
CALSPDTNAYKVIF

SEQ ID NO: 15063 - protein, 13 aa, synthetic construct
CASSIGANSDYTF

SEQ ID NO: 15064 - protein, 16 aa, synthetic construct
CAVSPPYTGGADRLTF

SEQ ID NO: 15065 - protein, 16 aa, synthetic construct
CTCSAGLGGNTGQLYF

SEQ ID NO: 15066 - protein, 13 aa, synthetic construct
CAAAGANTGKLTF

SEQ ID NO: 15067 - protein, 13 aa, synthetic construct
CTCSAGQDYEQYF

SEQ ID NO: 15068 - protein, 13 aa, synthetic construct
CALANTGYQNFYF

SEQ ID NO: 15069 - protein, 12 aa, synthetic construct
CTCSGTAYEQYF

SEQ ID NO: 15070 - protein, 15 aa, synthetic construct
CAMRETGANTGKLTF

SEQ ID NO: 15071 - protein, 15 aa, synthetic construct
CTCSGDRANTGQLYF

SEQ ID NO: 15072 - protein, 15 aa, synthetic construct
CAALNYGSSGNKLIF

SEQ ID NO: 15073 - protein, 15 aa, synthetic construct
CASSQEGTDNQAPLF

SEQ ID NO: 15074 - protein, 13 aa, synthetic construct
CAMRGSALGRLHF

SEQ ID NO: 15075 - protein, 11 aa, synthetic construct
CASSQDNKQYF

SEQ ID NO: 15076 - protein, 15 aa, synthetic construct
CALGSLNTGYQNFYF

SEQ ID NO: 15077 - protein, 14 aa, synthetic construct
CASSQAGGGDTQYF

SEQ ID NO: 15078 - protein, 12 aa, synthetic construct
CAARNMGYKLTF

SEQ ID NO: 15079 - protein, 13 aa, synthetic construct
CASSRDWGETLYF

SEQ ID NO: 15080 - protein, 14 aa, synthetic construct
CAASVDTGYQNFYF

SEQ ID NO: 15081 - protein, 14 aa, synthetic construct
CASSNWSSAETLYF

SEQ ID NO: 15082 - protein, 13 aa, synthetic construct
CALSYYYANKMIF

SEQ ID NO: 15083 - protein, 13 aa, synthetic construct
CASSGTGNTEVFF

SEQ ID NO: 15084 - protein, 12 aa, synthetic construct
CALEGNNNRIFF

SEQ ID NO: 15085 - protein, 14 aa, synthetic construct
CASSFSDSSYEQYF

SEQ ID NO: 15086 - protein, 11 aa, synthetic construct
CAFTGYQNFYF

SEQ ID NO: 15087 - protein, 11 aa, synthetic construct
CASSFRDTQYF

SEQ ID NO: 15088 - protein, 15 aa, synthetic construct
CAAGEGAGGNNKLTF

SEQ ID NO: 15089 - protein, 12 aa, synthetic construct
CASSQEKAGGAW

SEQ ID NO: 15090 - protein, 14 aa, synthetic construct
CAVSIWSNYNVLYF

SEQ ID NO: 15091 - protein, 15 aa, synthetic construct
CASSQGRTGNERLFF

SEQ ID NO: 15092 - protein, 13 aa, synthetic construct
CVLGEGGNYKPTF

SEQ ID NO: 15093 - protein, 15 aa, synthetic construct
CASSPGTGGNAEQFF

SEQ ID NO: 15094 - protein, 12 aa, synthetic construct
CVLDTGNYKYVF

SEQ ID NO: 15095 - protein, 16 aa, synthetic construct
CASSPGWGGSSYEQYF

SEQ ID NO: 15096 - protein, 12 aa, synthetic construct
CAMDSAGNKLTF

SEQ ID NO: 15097 - protein, 10 aa, synthetic construct
CASSSYEQYF

SEQ ID NO: 15098 - protein, 11 aa, synthetic construct
CAADGGYKVVF

SEQ ID NO: 15099 - protein, 15 aa, synthetic construct
CASSLGLFNYAEQFF

SEQ ID NO: 15100 - protein, 16 aa, synthetic construct
CAMREVTTASLGKLQF

SEQ ID NO: 15101 - protein, 16 aa, synthetic construct
CASGEVTGYNYAEQFF

SEQ ID NO: 15102 - protein, 12 aa, synthetic construct
CAVNDYAQGLTF

SEQ ID NO: 15103 - protein, 12 aa, synthetic construct
CASGEDSTEVFF

SEQ ID NO: 15104 - protein, 15 aa, synthetic construct
CALTGTSGGNYKPTF

SEQ ID NO: 15105 - protein, 14 aa, synthetic construct
CASGEGLGQDTQYF

SEQ ID NO: 15106 - protein, 12 aa, synthetic construct
CAIDTNTGKLTF

SEQ ID NO: 15107 - protein, 14 aa, synthetic construct
CASGDQDSGNTLYF

SEQ ID NO: 15108 - protein, 16 aa, synthetic construct
CAVRSNYGGSGNKLIF

SEQ ID NO: 15109 - protein, 14 aa, synthetic construct
CASGDGGGSYEQYF

SEQ ID NO: 15110 - protein, 17 aa, synthetic construct
CAMREKNSGGSNAKLTF

SEQ ID NO: 15111 - protein, 12 aa, synthetic construct
CASTGVSTEVFF

SEQ ID NO: 15112 - protein, 11 aa, synthetic construct
CAGTGGYKVVF

SEQ ID NO: 15113 - protein, 14 aa, synthetic construct
CASRTGAFSYEQYF

SEQ ID NO: 15114 - protein, 12 aa, synthetic construct
CAVRNNNNRIFF

SEQ ID NO: 15115 - protein, 12 aa, synthetic construct
CASRDRVGEQYF

SEQ ID NO: 15116 - protein, 16 aa, synthetic construct
CAMRVNTGANTGKLTF

SEQ ID NO: 15117 - protein, 15 aa, synthetic construct
CASSDAGQGAETLYF

SEQ ID NO: 15118 - protein, 12 aa, synthetic construct
CAVDTNAYKVIF

SEQ ID NO: 15119 - protein, 13 aa, synthetic construct
CASSEAANTEVFF

SEQ ID NO: 15120 - protein, 14 aa, synthetic construct
CALGTGANTGKLTF

SEQ ID NO: 15121 - protein, 12 aa, synthetic construct
CASSEGQYEQYF

SEQ ID NO: 15122 - protein, 15 aa, synthetic construct
CAASANTEGADRLTF

SEQ ID NO: 15123 - protein, 14 aa, synthetic construct
CASSDPGSQNTLYF

SEQ ID NO: 15124 - protein, 16 aa, synthetic construct
CALSDRPGTGSNRLTF

SEQ ID NO: 15125 - protein, 11 aa, synthetic construct
CASSDAGTLYF

SEQ ID NO: 15126 - protein, 15 aa, synthetic construct
CAAEAYGSSGNKLIF

SEQ ID NO: 15127 - protein, 15 aa, synthetic construct
CASKGTGVNTGQLYF

SEQ ID NO: 15128 - protein, 15 aa, synthetic construct
CAAPRANYGNEKITF

SEQ ID NO: 15129 - protein, 14 aa, synthetic construct
CASTQTGSAETLYF

SEQ ID NO: 15130 - protein, 14 aa, synthetic construct
CAMRKGGSNAKLTF

SEQ ID NO: 15131 - protein, 14 aa, synthetic construct
CASRDRGDRAEQFF

SEQ ID NO: 15132 - protein, 11 aa, synthetic construct
CAASPYQNFYF

SEQ ID NO: 15133 - protein, 14 aa, synthetic construct
CASRDWGSQNTLYF

SEQ ID NO: 15134 - protein, 12 aa, synthetic construct
CAVKNNNNRIFF

SEQ ID NO: 15135 - protein, 13 aa, synthetic construct
CASSPGQDAEQFF

SEQ ID NO: 15136 - protein, 13 aa, synthetic construct
CAATTQVVGQLTF

SEQ ID NO: 15137 - protein, 14 aa, synthetic construct
CASSDAGLGETLYF

SEQ ID NO: 15138 - protein, 16 aa, synthetic construct
CAAEALSSGGNYKPTF

SEQ ID NO: 15139 - protein, 14 aa, synthetic construct
CASSRRDRGTEVFF

SEQ ID NO: 15140 - protein, 13 aa, synthetic construct
CAMREGYAQGLTF

SEQ ID NO: 15141 - protein, 14 aa, synthetic construct
CASSRGGRNTEVFF

SEQ ID NO: 15142 - protein, 16 aa, synthetic construct
CAMREGGNNYAQGLTF

SEQ ID NO: 15143 - protein, 10 aa, synthetic construct
CAWRGGEQYF

SEQ ID NO: 15144 - protein, 14 aa, synthetic construct
CALSGTEGADRLTF

SEQ ID NO: 15145 - protein, 12 aa, synthetic construct
CAWSLLADTQYF

SEQ ID NO: 15146 - protein, 15 aa, synthetic construct
CIVTDDSSGSWQLIF

SEQ ID NO: 15147 - protein, 15 aa, synthetic construct
CASSRDKLSAETLYF

SEQ ID NO: 15148 - protein, 12 aa, synthetic construct
CGTAGSGGKLTL

SEQ ID NO: 15149 - protein, 14 aa, synthetic construct
CGAGDRAFSYEQYF

SEQ ID NO: 15150 - protein, 12 aa, synthetic construct
CALFNMGYKLTF

SEQ ID NO: 15151 - protein, 16 aa, synthetic construct
CGARDLDRGHNSPLYF

SEQ ID NO: 15152 - protein, 13 aa, synthetic construct
CAASMDYANKMIF

SEQ ID NO: 15153 - protein, 13 aa, synthetic construct
CASSIRGNTEVFF

SEQ ID NO: 15154 - protein, 13 aa, synthetic construct
CAADNYGNEKITF

SEQ ID NO: 15155 - protein, 13 aa, synthetic construct
CASSIGANSDYTF

SEQ ID NO: 15156 - protein, 16 aa, synthetic construct
CAVSPPYTGGADRLTF

SEQ ID NO: 15157 - protein, 15 aa, synthetic construct
CTCSADRGYNSPLYF

SEQ ID NO: 15158 - protein, 17 aa, synthetic construct
CALSERGSGGSNYKLTF

SEQ ID NO: 15159 - protein, 11 aa, synthetic construct
CTCSAPDTQYF

SEQ ID NO: 15160 - protein, 15 aa, synthetic construct
CALSMRGYSNNRLTL

SEQ ID NO: 15161 - protein, 16 aa, synthetic construct
CTCSASRQGPGNTLYF

SEQ ID NO: 15162 - protein, 12 aa, synthetic construct
CAIGAGYQNFYF

SEQ ID NO: 15163 - protein, 15 aa, synthetic construct
CASSQDWGVSYEQYF

SEQ ID NO: 15164 - protein, 13 aa, synthetic construct
CAADDTNAYKVIF

SEQ ID NO: 15165 - protein, 16 aa, synthetic construct
CASSQDRTSSAETLYF

SEQ ID NO: 15166 - protein, 15 aa, synthetic construct
CALSDLPGGADRLTF

SEQ ID NO: 15167 - protein, 13 aa, synthetic construct
CASSQVGGQAPLF

SEQ ID NO: 15168 - protein, 14 aa, synthetic construct
CALGDPGNTRKLIF

SEQ ID NO: 15169 - protein, 14 aa, synthetic construct
CASSPGTGGREQYF

SEQ ID NO: 15170 - protein, 14 aa, synthetic construct
CALSPHNYAQGLTF

SEQ ID NO: 15171 - protein, 17 aa, synthetic construct
CASSRDWGGANQDTQYF

SEQ ID NO: 15172 - protein, 11 aa, synthetic construct
CALGGNEKITF

SEQ ID NO: 15173 - protein, 15 aa, synthetic construct
CASRGDWGGRGQLYF

SEQ ID NO: 15174 - protein, 16 aa, synthetic construct
CALGPMATGGNNKLTF

SEQ ID NO: 15175 - protein, 15 aa, synthetic construct
CASSPGGADRDTQYF

SEQ ID NO: 15176 - protein, 13 aa, synthetic construct
CAVSLSAGNKLTF

SEQ ID NO: 15177 - protein, 14 aa, synthetic construct
CASSSTGANTEVFF

SEQ ID NO: 15178 - protein, 14 aa, synthetic construct
CAVREGNNNNRIFF

SEQ ID NO: 15179 - protein, 15 aa, synthetic construct
CASSLEDTANSDYTF

SEQ ID NO: 15180 - protein, 14 aa, synthetic construct
CAVSMGYSNNRLTL

SEQ ID NO: 15181 - protein, 11 aa, synthetic construct
CASSAGKTLYF

SEQ ID NO: 15182 - protein, 13 aa, synthetic construct
CAASISNYNVLYF

SEQ ID NO: 15183 - protein, 14 aa, synthetic construct
CASSFGGSAETLYF

SEQ ID NO: 15184 - protein, 14 aa, synthetic construct
CILGLNTGNYKYVF

SEQ ID NO: 15185 - protein, 17 aa, synthetic construct
CASSLQGGTISNERLFF

SEQ ID NO: 15186 - protein, 13 aa, synthetic construct
CAVTPDYANKMIF

SEQ ID NO: 15187 - protein, 16 aa, synthetic construct
CASSFGTGGNTGQLYF

SEQ ID NO: 15188 - protein, 13 aa, synthetic construct
CAASGGGADRLTF

SEQ ID NO: 15189 - protein, 14 aa, synthetic construct
CASKQGARDTEVFF

SEQ ID NO: 15190 - protein, 16 aa, synthetic construct
CALWELAGSALGRLHF

SEQ ID NO: 15191 - protein, 15 aa, synthetic construct
CASSQERVNNQAPLF

SEQ ID NO: 15192 - protein, 12 aa, synthetic construct
CVLGDNNNAPRF

SEQ ID NO: 15193 - protein, 16 aa, synthetic construct
CASSQESGLIQDTQYF

SEQ ID NO: 15194 - protein, 13 aa, synthetic construct
CAIDPSGSWQLIF

SEQ ID NO: 15195 - protein, 12 aa, synthetic construct
CASSQELYEQYF

SEQ ID NO: 15196 - protein, 13 aa, synthetic construct
CAVTSGGNYKPTF

SEQ ID NO: 15197 - protein, 15 aa, synthetic construct
CASSQDTGYNERLFF

SEQ ID NO: 15198 - protein, 13 aa, synthetic construct
CAMTNSAGNKLTF

SEQ ID NO: 15199 - protein, 17 aa, synthetic construct
CASSQVPRGQANTEVFF

SEQ ID NO: 15200 - protein, 12 aa, synthetic construct
CANTGGADRLTF

SEQ ID NO: 15201 - protein, 15 aa, synthetic construct
CASSQGLGDSYEQYF

SEQ ID NO: 15202 - protein, 13 aa, synthetic construct
CALSDTNTGKLTF

SEQ ID NO: 15203 - protein, 14 aa, synthetic construct
CASSTTGGAETLYF

SEQ ID NO: 15204 - protein, 12 aa, synthetic construct
CALSYMGYKLTF

SEQ ID NO: 15205 - protein, 13 aa, synthetic construct
CASSQRDTDTQYF

SEQ ID NO: 15206 - protein, 16 aa, synthetic construct
CAASLMTTASLGKLQF

SEQ ID NO: 15207 - protein, 14 aa, synthetic construct
CASSLGQGDAEQFF

SEQ ID NO: 15208 - protein, 15 aa, synthetic construct
CAVSVLSGSFNKLTF

SEQ ID NO: 15209 - protein, 15 aa, synthetic construct
CASSSGTGGGAEQFF

SEQ ID NO: 15210 - protein, 14 aa, synthetic construct
CAARLSGSFNKLTF

SEQ ID NO: 15211 - protein, 11 aa, synthetic construct
CASSSLYEQYF

SEQ ID NO: 15212 - protein, 13 aa, synthetic construct
CALGYTGNYKYVF

SEQ ID NO: 15213 - protein, 13 aa, synthetic construct
CASRDNNNQAPLF

SEQ ID NO: 15214 - protein, 12 aa, synthetic construct
CAASSNTNKVVF

SEQ ID NO: 15215 - protein, 13 aa, synthetic construct
CASRDRGDQAPLF

SEQ ID NO: 15216 - protein, 11 aa, synthetic construct
CAVSPLNKVVF

SEQ ID NO: 15217 - protein, 14 aa, synthetic construct
CASSSGGNTGQLYF

SEQ ID NO: 15218 - protein, 15 aa, synthetic construct
CAASGAGTGSNRLTF

SEQ ID NO: 15219 - protein, 13 aa, synthetic construct
CASSSGTLTEVFF

SEQ ID NO: 15220 - protein, 12 aa, synthetic construct
CAMHSGSWQLIF

SEQ ID NO: 15221 - protein, 14 aa, synthetic construct
CASGPGTANSDYTF

SEQ ID NO: 15222 - protein, 13 aa, synthetic construct
CAVSHNYAQGLTF

SEQ ID NO: 15223 - protein, 14 aa, synthetic construct
CASGENGGQDTQYF

SEQ ID NO: 15224 - protein, 15 aa, synthetic construct
CALSPASSGSWQLIF

SEQ ID NO: 15225 - protein, 14 aa, synthetic construct
CASGEDWGGATQYF

SEQ ID NO: 15226 - protein, 16 aa, synthetic construct
CAMREGATGGNNKLTF

SEQ ID NO: 15227 - protein, 13 aa, synthetic construct
CASGEGGQDTQYF

SEQ ID NO: 15228 - protein, 13 aa, synthetic construct
CAMRGNSNNRIFF

SEQ ID NO: 15229 - protein, 14 aa, synthetic construct
CASGDQDSGNTLYF

SEQ ID NO: 15230 - protein, 18 aa, synthetic construct
CALASRINSGGSNAKLTF

SEQ ID NO: 15231 - protein, 13 aa, synthetic construct
CASGAGSGNTLYF

SEQ ID NO: 15232 - protein, 13 aa, synthetic construct
CAASKIDANKMIF

SEQ ID NO: 15233 - protein, 13 aa, synthetic construct
CASGALGKDTQYF

SEQ ID NO: 15234 - protein, 16 aa, synthetic construct
CILRVSQQGTGSKLSF

SEQ ID NO: 15235 - protein, 14 aa, synthetic construct
CASGGEQGAYEQYF

SEQ ID NO: 15236 - protein, 14 aa, synthetic construct
CAMNSGGSNYKLTF

SEQ ID NO: 15237 - protein, 14 aa, synthetic construct
CASKLGFNQDTQYF

SEQ ID NO: 15238 - protein, 17 aa, synthetic construct
CALEGRNSGGSNYKLTF

SEQ ID NO: 15239 - protein, 12 aa, synthetic construct
CASSQGSEAPLF

SEQ ID NO: 15240 - protein, 14 aa, synthetic construct
CAMREVEGGRALIF

SEQ ID NO: 15241 - protein, 13 aa, synthetic construct
CASSDARQYEQYF

SEQ ID NO: 15242 - protein, 12 aa, synthetic construct
CSAMGNNNAPRF

SEQ ID NO: 15243 - protein, 14 aa, synthetic construct
CASSDADNQDTQYF

SEQ ID NO: 15244 - protein, 14 aa, synthetic construct
CAAEPHQGGRALIF

SEQ ID NO: 15245 - protein, 12 aa, synthetic construct
CASSDVNTEVFF

SEQ ID NO: 15246 - protein, 14 aa, synthetic construct
CAAAASSGSWQLIF

SEQ ID NO: 15247 - protein, 14 aa, synthetic construct
CASSGTGANSDYTF

SEQ ID NO: 15248 - protein, 12 aa, synthetic construct
CAVRDSGTYQRF

SEQ ID NO: 15249 - protein, 14 aa, synthetic construct
CASSGDNSQNTLYF

SEQ ID NO: 15250 - protein, 14 aa, synthetic construct
CVLVTTASLGKLQF

SEQ ID NO: 15251 - protein, 13 aa, synthetic construct
CASRDRANSPLYF

SEQ ID NO: 15252 - protein, 14 aa, synthetic construct
CAVREGNNNNRIFF

SEQ ID NO: 15253 - protein, 15 aa, synthetic construct
CASRAGGESAETLYF

SEQ ID NO: 15254 - protein, 11 aa, synthetic construct
CAGNMGYKLTF

SEQ ID NO: 15255 - protein, 16 aa, synthetic construct
CASSDRGQGTNERLFF

SEQ ID NO: 15256 - protein, 14 aa, synthetic construct
CAMRGQGGSAKLIF

SEQ ID NO: 15257 - protein, 15 aa, synthetic construct
CASSDRDTSNERLFF

SEQ ID NO: 15258 - protein, 13 aa, synthetic construct
CAVRDTNAYKVIF

SEQ ID NO: 15259 - protein, 15 aa, synthetic construct
CASSDRDSLNERLFF

SEQ ID NO: 15260 - protein, 12 aa, synthetic construct
CAAHNAGAKLTF

SEQ ID NO: 15261 - protein, 15 aa, synthetic construct
CASSDAARNTGQLYF

SEQ ID NO: 15262 - protein, 17 aa, synthetic construct
CAASSRGGQGGSAKLIF

SEQ ID NO: 15263 - protein, 14 aa, synthetic construct
CASSGTGGVDTQYF

SEQ ID NO: 15264 - protein, 13 aa, synthetic construct
CADSTSSGQKLVF

SEQ ID NO: 15265 - protein, 16 aa, synthetic construct
CASSGDWGASAETLYF

SEQ ID NO: 15266 - protein, 14 aa, synthetic construct
CAVREGNNNNRIFF

SEQ ID NO: 15267 - protein, 15 aa, synthetic construct
CASSSRGANTGQLYF

SEQ ID NO: 15268 - protein, 11 aa, synthetic construct
CAAGESAKLIF

SEQ ID NO: 15269 - protein, 15 aa, synthetic construct
CASSSRGANTGQLYF

SEQ ID NO: 15270 - protein, 12 aa, synthetic construct
CAVKNNNNRIFF

SEQ ID NO: 15271 - protein, 14 aa, synthetic construct
CAWSPAGGSAEQFF

SEQ ID NO: 15272 - protein, 15 aa, synthetic construct
CAASRTSGGNYKPTF

SEQ ID NO: 15273 - protein, 14 aa, synthetic construct
CAWSLGYNNQAPLF

SEQ ID NO: 15274 - protein, 15 aa, synthetic construct
CALGDRVNMGYKLTF

SEQ ID NO: 15275 - protein, 15 aa, synthetic construct
CAWSLRLGSQNTLYF

SEQ ID NO: 15276 - protein, 15 aa, synthetic construct
CALWELGGAGAKLTF

SEQ ID NO: 15277 - protein, 12 aa, synthetic construct
CAWSLLHTEVFF

SEQ ID NO: 15278 - protein, 12 aa, synthetic construct
CAAEDSNYQLIW

SEQ ID NO: 15279 - protein, 12 aa, synthetic construct
CGARDRFQAPLF

SEQ ID NO: 15280 - protein, 16 aa, synthetic construct
CAVSWNSGGSNYKLTF

SEQ ID NO: 15281 - protein, 14 aa, synthetic construct
CGAREGQSNERLFF

SEQ ID NO: 15282 - protein, 15 aa, synthetic construct
CAASLYGSSGNKLIF

SEQ ID NO: 15283 - protein, 13 aa, synthetic construct
CASRVNSQNTLYF

SEQ ID NO: 15284 - protein, 12 aa, synthetic construct
CALDYNQGKLIF

SEQ ID NO: 15285 - protein, 13 aa, synthetic construct
CASSMGQGGEQYF

SEQ ID NO: 15286 - protein, 13 aa, synthetic construct
CAASGDYAQGLTF

SEQ ID NO: 15287 - protein, 13 aa, synthetic construct
CASSIRDSYEQYF

SEQ ID NO: 15288 - protein, 13 aa, synthetic construct
CAAEQYSGTYQRF

SEQ ID NO: 15289 - protein, 11 aa, synthetic construct
CASSIQKEVFF

SEQ ID NO: 15290 - protein, 15 aa, synthetic construct
CAARLASSSFSKLVF

SEQ ID NO: 15291 - protein, 14 aa, synthetic construct
CASSIAGGDYEQYF

SEQ ID NO: 15292 - protein, 16 aa, synthetic construct
CALSDRSGGSNYKLTF

SEQ ID NO: 15293 - protein, 13 aa, synthetic construct
CASSIGSNSDYTF

SEQ ID NO: 15294 - protein, 16 aa, synthetic construct
CAVSLNTGGLSGKLTF

SEQ ID NO: 15295 - protein, 14 aa, synthetic construct
CASSIWDNQDTQYF

SEQ ID NO: 15296 - protein, 13 aa, synthetic construct
CAMRDNYAQGLTF

SEQ ID NO: 15297 - protein, 14 aa, synthetic construct
CASSIGTAFAEQFF

SEQ ID NO: 15298 - protein, 16 aa, synthetic construct
CALSDDSGGSNYKLTF

SEQ ID NO: 15299 - protein, 14 aa, synthetic construct
CASSMGSSQNTLYF

SEQ ID NO: 15300 - protein, 12 aa, synthetic construct
CAVGTNTGKLTF

SEQ ID NO: 15301 - protein, 12 aa, synthetic construct
CASSMGGDTQYF

SEQ ID NO: 15302 - protein, 14 aa, synthetic construct
CALSFMSNYNVLYF

SEQ ID NO: 15303 - protein, 14 aa, synthetic construct
CASSIKGSYAEQFF

SEQ ID NO: 15304 - protein, 12 aa, synthetic construct
CALTSNTDKVVF

SEQ ID NO: 15305 - protein, 15 aa, synthetic construct
CASSPRGTNTGQLYF

SEQ ID NO: 15306 - protein, 12 aa, synthetic construct
CVLRPGYQNFYF

SEQ ID NO: 15307 - protein, 17 aa, synthetic construct
CASSVGTGGASAETLYF

SEQ ID NO: 15308 - protein, 13 aa, synthetic construct
CAASYYSNNRLTL

SEQ ID NO: 15309 - protein, 14 aa, synthetic construct
CTCSIGGGSYEQYF

SEQ ID NO: 15310 - protein, 15 aa, synthetic construct
CAVSMGAGNTRKLIF

SEQ ID NO: 15311 - protein, 14 aa, synthetic construct
CTCSEGTGPYEQYF

SEQ ID NO: 15312 - protein, 17 aa, synthetic construct
CAMREGLQQGTGSKLSF

SEQ ID NO: 15313 - protein, 16 aa, synthetic construct
CTCSASPTGGNSPLYF

SEQ ID NO: 15314 - protein, 15 aa, synthetic construct
CAASEPNSAGNKLTF

SEQ ID NO: 15315 - protein, 16 aa, synthetic construct
CTCSASPTGGNSPLYF

SEQ ID NO: 15316 - protein, 14 aa, synthetic construct
CAAGYGSSGNKLIF

SEQ ID NO: 15317 - protein, 12 aa, synthetic construct
CTCSADPETLYF

SEQ ID NO: 15318 - protein, 15 aa, synthetic construct
CALSDRGSALGRLHF

SEQ ID NO: 15319 - protein, 16 aa, synthetic construct
CTCSAGTPGQGTEVFF

SEQ ID NO: 15320 - protein, 14 aa, synthetic construct
CAVLASSSFSKLVF

SEQ ID NO: 15321 - protein, 11 aa, synthetic construct
CTCSAPDTQYF

SEQ ID NO: 15322 - protein, 16 aa, synthetic construct
CAVSADSGGSNYKLTF

SEQ ID NO: 15323 - protein, 15 aa, synthetic construct
CASSKQGAVTGQLYF

SEQ ID NO: 15324 - protein, 16 aa, synthetic construct
CILRVMQQGTGSKLSF

SEQ ID NO: 15325 - protein, 16 aa, synthetic construct
CASSQTQGGSGNTLYF

SEQ ID NO: 15326 - protein, 14 aa, synthetic construct
CAVSANYGNEKITF

SEQ ID NO: 15327 - protein, 15 aa, synthetic construct
CASSQRTFSQNTLYF

SEQ ID NO: 15328 - protein, 14 aa, synthetic construct
CAVSEAEGADRLTF

SEQ ID NO: 15329 - protein, 14 aa, synthetic construct
CASSQETGITEVFF

SEQ ID NO: 15330 - protein, 14 aa, synthetic construct
CALGLNTGYQNFYF

SEQ ID NO: 15331 - protein, 14 aa, synthetic construct
CASSQELAEDTQYF

SEQ ID NO: 15332 - protein, 13 aa, synthetic construct
CALGMSNYNVLYF

SEQ ID NO: 15333 - protein, 12 aa, synthetic construct
CASSQDQDTQYF

SEQ ID NO: 15334 - protein, 13 aa, synthetic construct
CAADSSSFSKLVF

SEQ ID NO: 15335 - protein, 15 aa, synthetic construct
CASSQDPGAQDTQYF

SEQ ID NO: 15336 - protein, 14 aa, synthetic construct
CAVRVMPNYNVLYF

SEQ ID NO: 15337 - protein, 14 aa, synthetic construct
CASSQDAGAETLYF

SEQ ID NO: 15338 - protein, 12 aa, synthetic construct
CAVRGYAQGLTF

SEQ ID NO: 15339 - protein, 15 aa, synthetic construct
CASSQETGGAETLYF

SEQ ID NO: 15340 - protein, 12 aa, synthetic construct
CALSSNNNRIFF

SEQ ID NO: 15341 - protein, 15 aa, synthetic construct
CASSQEGGANTEVFF

SEQ ID NO: 15342 - protein, 16 aa, synthetic construct
CAVSALTSSSFSKLVF

SEQ ID NO: 15343 - protein, 14 aa, synthetic construct
CASSQDTGGAEQYF

SEQ ID NO: 15344 - protein, 15 aa, synthetic construct
CAAGGSGGSNYKLTF

SEQ ID NO: 15345 - protein, 15 aa, synthetic construct
CASSQDDWGVYEQYF

SEQ ID NO: 15346 - protein, 17 aa, synthetic construct
CAMREGGSGGSNYKLTF

SEQ ID NO: 15347 - protein, 17 aa, synthetic construct
CASSQDGTGFSGNTLYF

SEQ ID NO: 15348 - protein, 13 aa, synthetic construct
CALGSQVVGQLTF

SEQ ID NO: 15349 - protein, 14 aa, synthetic construct
CASSQDSQIYEQYF

SEQ ID NO: 15350 - protein, 14 aa, synthetic construct
CALVDSGGNYKPTF

SEQ ID NO: 15351 - protein, 15 aa, synthetic construct
CASSQDLGSAETLYF

SEQ ID NO: 15352 - protein, 14 aa, synthetic construct
CAIGSGGSNAKLTF

SEQ ID NO: 15353 - protein, 16 aa, synthetic construct
CASSQGLGGSQNTLYF

SEQ ID NO: 15354 - protein, 14 aa, synthetic construct
CAVTFTGGADRLTF

SEQ ID NO: 15355 - protein, 16 aa, synthetic construct
CASSQGLGGSQNTLYF

SEQ ID NO: 15356 - protein, 14 aa, synthetic construct
CALAPTEGADRLTF

SEQ ID NO: 15357 - protein, 15 aa, synthetic construct
CASSQGTGGDERLFF

SEQ ID NO: 15358 - protein, 13 aa, synthetic construct
CALRSSNTDKVVF

SEQ ID NO: 15359 - protein, 14 aa, synthetic construct
CASSQGTGTYEQYF

SEQ ID NO: 15360 - protein, 14 aa, synthetic construct
CAVREGNNNNRIFF

SEQ ID NO: 15361 - protein, 15 aa, synthetic construct
CASSQGQVNYAEQFF

SEQ ID NO: 15362 - protein, 16 aa, synthetic construct
CAMRDFASSSFSKLVF

SEQ ID NO: 15363 - protein, 14 aa, synthetic construct
CASSQGDRSSPLYF

SEQ ID NO: 15364 - protein, 15 aa, synthetic construct
CAAPNTGANTGKLTF

SEQ ID NO: 15365 - protein, 14 aa, synthetic construct
CASSQVGGGDTLYF

SEQ ID NO: 15366 - protein, 13 aa, synthetic construct
CAVRNTGYQNFYF

SEQ ID NO: 15367 - protein, 15 aa, synthetic construct
CASSQVRGSQNTLYF

SEQ ID NO: 15368 - protein, 11 aa, synthetic construct
CAHTNTGKLTF

SEQ ID NO: 15369 - protein, 13 aa, synthetic construct
CASSQTTNTEVFF

SEQ ID NO: 15370 - protein, 13 aa, synthetic construct
CVVGFSNTNKVVF

SEQ ID NO: 15371 - protein, 12 aa, synthetic construct
CASSQTGYEQYF

SEQ ID NO: 15372 - protein, 15 aa, synthetic construct
CAASATGANTGKLTF

SEQ ID NO: 15373 - protein, 17 aa, synthetic construct
CASSHTPTGGLSYEQYF

SEQ ID NO: 15374 - protein, 12 aa, synthetic construct
CALGGTGSKLSF

SEQ ID NO: 15375 - protein, 14 aa, synthetic construct
CASSPDRGDERLFF

SEQ ID NO: 15376 - protein, 12 aa, synthetic construct
CAQYTNAYKVIF

SEQ ID NO: 15377 - protein, 16 aa, synthetic construct
CASSPTGGENTGQLYF

SEQ ID NO: 15378 - protein, 13 aa, synthetic construct
CAVRWTNAYKVIF

SEQ ID NO: 15379 - protein, 15 aa, synthetic construct
CASSPRDRGYAEQFF

SEQ ID NO: 15380 - protein, 13 aa, synthetic construct
CIVTDSGGYKVVF

SEQ ID NO: 15381 - protein, 14 aa, synthetic construct
CASSPTGGALEQYF

SEQ ID NO: 15382 - protein, 16 aa, synthetic construct
CALEGRASSSFSKLVF

SEQ ID NO: 15383 - protein, 16 aa, synthetic construct
CASSPQTGGSQDTQYF

SEQ ID NO: 15384 - protein, 15 aa, synthetic construct
CAASRAGGLSGKLTF

SEQ ID NO: 15385 - protein, 15 aa, synthetic construct
CASSRGLGVQDTQYF

SEQ ID NO: 15386 - protein, 13 aa, synthetic construct
CAMERGNTRKLIF

SEQ ID NO: 15387 - protein, 15 aa, synthetic construct
CASSRGLGVQDTQYF

SEQ ID NO: 15388 - protein, 14 aa, synthetic construct
CVLSAGTNAYKLIF

SEQ ID NO: 15389 - protein, 14 aa, synthetic construct
CASSGQVSGNTLYF

SEQ ID NO: 15390 - protein, 11 aa, synthetic construct
CAADSNYQLIW

SEQ ID NO: 15391 - protein, 15 aa, synthetic construct
CASSSGTGPNERLFF

SEQ ID NO: 15392 - protein, 14 aa, synthetic construct
CAMRGGNNNNAPRF

SEQ ID NO: 15393 - protein, 14 aa, synthetic construct
CASSSTGANTEVFF

SEQ ID NO: 15394 - protein, 13 aa, synthetic construct
CAVSMDMGYKLTF

SEQ ID NO: 15395 - protein, 16 aa, synthetic construct
CASSLEPGGSAETLYF

SEQ ID NO: 15396 - protein, 14 aa, synthetic construct
CATDASSGSWQLIF

SEQ ID NO: 15397 - protein, 16 aa, synthetic construct
CASSLDRGGTNSDYTF

SEQ ID NO: 15398 - protein, 13 aa, synthetic construct
CATDNYGNEKITF

SEQ ID NO: 15399 - protein, 16 aa, synthetic construct
CASSLDDRGRYAEQFF

SEQ ID NO: 15400 - protein, 14 aa, synthetic construct
CVSLTNSAGNKLTF

SEQ ID NO: 15401 - protein, 15 aa, synthetic construct
CASRSTGDNQDTQYF

SEQ ID NO: 15402 - protein, 13 aa, synthetic construct
CAVKAHMGYKLTF

SEQ ID NO: 15403 - protein, 15 aa, synthetic construct
CASRSTGDNQDTQYF

SEQ ID NO: 15404 - protein, 15 aa, synthetic construct
CAAEVFGVSNAYLTF

SEQ ID NO: 15405 - protein, 14 aa, synthetic construct
CASSLGQGEDEQYF

SEQ ID NO: 15406 - protein, 13 aa, synthetic construct
CARPYTGYQNFYF

SEQ ID NO: 15407 - protein, 11 aa, synthetic construct
CSSRNGAEQFF

SEQ ID NO: 15408 - protein, 14 aa, synthetic construct
CVLSGSSGSWQLIF

SEQ ID NO: 15409 - protein, 12 aa, synthetic construct
CSSSSRETEVFF

SEQ ID NO: 15410 - protein, 14 aa, synthetic construct
CAASPYYGNEKITF

SEQ ID NO: 15411 - protein, 13 aa, synthetic construct
CSSSGGGQNTLYF

SEQ ID NO: 15412 - protein, 13 aa, synthetic construct
CAVGGSALGRLHF

SEQ ID NO: 15413 - protein, 12 aa, synthetic construct
CASRSKNSDYTF

SEQ ID NO: 15414 - protein, 12 aa, synthetic construct
CGASSGSWQLIF

SEQ ID NO: 15415 - protein, 12 aa, synthetic construct
CASRSKNSDYTF

SEQ ID NO: 15416 - protein, 14 aa, synthetic construct
CAMREDTNAYKVIF

SEQ ID NO: 15417 - protein, 13 aa, synthetic construct
CASSPREDSDYTF

SEQ ID NO: 15418 - protein, 9 aa, synthetic construct
CALGDRIFF

SEQ ID NO: 15419 - protein, 15 aa, synthetic construct
CASSPLKFSAETLYF

SEQ ID NO: 15420 - protein, 12 aa, synthetic construct
CALSDGGYKVVF

SEQ ID NO: 15421 - protein, 15 aa, synthetic construct
CASSSGTGGYAEQFF

SEQ ID NO: 15422 - protein, 12 aa, synthetic construct
CAAHYNQGKLIF

SEQ ID NO: 15423 - protein, 13 aa, synthetic construct
CASSFNRGTEVFF

SEQ ID NO: 15424 - protein, 14 aa, synthetic construct
CAARATGGNNKLTF

SEQ ID NO: 15425 - protein, 14 aa, synthetic construct
CASRPTGVQDTQYF

SEQ ID NO: 15426 - protein, 15 aa, synthetic construct
CALGLSGGSNYKLTF

SEQ ID NO: 15427 - protein, 13 aa, synthetic construct
CASSHLQGYEQYF

SEQ ID NO: 15428 - protein, 14 aa, synthetic construct
CALSASYGNEKITF

SEQ ID NO: 15429 - protein, 13 aa, synthetic construct
CASSQGQGYEQYF

SEQ ID NO: 15430 - protein, 13 aa, synthetic construct
CALSMSNDNVLYF

SEQ ID NO: 15431 - protein, 13 aa, synthetic construct
CASSQGQGYEQYF

SEQ ID NO: 15432 - protein, 13 aa, synthetic construct
CALTMYNYNVLYF

SEQ ID NO: 15433 - protein, 18 aa, synthetic construct
CASSPLGLGGRDAETLYF

SEQ ID NO: 15434 - protein, 16 aa, synthetic construct
CAAGPNSGGSNAKLTF

SEQ ID NO: 15435 - protein, 11 aa, synthetic construct
CASSAGKTLYF

SEQ ID NO: 15436 - protein, 15 aa, synthetic construct
CAASESTGNTRKLIF

SEQ ID NO: 15437 - protein, 11 aa, synthetic construct
CASSAGKTLYF

SEQ ID NO: 15438 - protein, 15 aa, synthetic construct
CAASESAGNTRKLIF

SEQ ID NO: 15439 - protein, 13 aa, synthetic construct
CASSAGANTEVFF

SEQ ID NO: 15440 - protein, 17 aa, synthetic construct
CALGDSHSGGSNYKLTF

SEQ ID NO: 15441 - protein, 14 aa, synthetic construct
CASSAGLGGLEQYF

SEQ ID NO: 15442 - protein, 13 aa, synthetic construct
CAASYTGYQNFYF

SEQ ID NO: 15443 - protein, 15 aa, synthetic construct
CASSGDWGNQDTQYF

SEQ ID NO: 15444 - protein, 15 aa, synthetic construct
CAIDRMDTGYQNFYF

SEQ ID NO: 15445 - protein, 13 aa, synthetic construct
CASSYRIQDTQYF

SEQ ID NO: 15446 - protein, 14 aa, synthetic construct
CALSDDTNAYKVIF

SEQ ID NO: 15447 - protein, 11 aa, synthetic construct
CASSSGGEQYF

SEQ ID NO: 15448 - protein, 14 aa, synthetic construct
CALGTTASLGKLQF

SEQ ID NO: 15449 - protein, 14 aa, synthetic construct
CASSSSGSSYEQYF

SEQ ID NO: 15450 - protein, 13 aa, synthetic construct
CAMREGGDNRIFF

SEQ ID NO: 15451 - protein, 14 aa, synthetic construct
CASSLRESQNTLYF

SEQ ID NO: 15452 - protein, 18 aa, synthetic construct
CAMREGRMQQGTGSKLSF

SEQ ID NO: 15453 - protein, 12 aa, synthetic construct
CASSFKEPEVFF

SEQ ID NO: 15454 - protein, 14 aa, synthetic construct
CATAASSGSWQLIF

SEQ ID NO: 15455 - protein, 12 aa, synthetic construct
CASSFRGDTQYF

SEQ ID NO: 15456 - protein, 14 aa, synthetic construct
CVLSESSGSWQLIF

SEQ ID NO: 15457 - protein, 14 aa, synthetic construct
CASSFGGGQNTLYF

SEQ ID NO: 15458 - protein, 13 aa, synthetic construct
CAASADYANKMIF

SEQ ID NO: 15459 - protein, 14 aa, synthetic construct
CASSLNWGEDTQYF

SEQ ID NO: 15460 - protein, 12 aa, synthetic construct
CADTGGADRLTF

SEQ ID NO: 15461 - protein, 14 aa, synthetic construct
CASSLQGTNSDYTF

SEQ ID NO: 15462 - protein, 14 aa, synthetic construct
CALGLTGGNNKLTF

SEQ ID NO: 15463 - protein, 13 aa, synthetic construct
CASSLGTGDTLYF

SEQ ID NO: 15464 - protein, 13 aa, synthetic construct
CALGENAGAKLTF

SEQ ID NO: 15465 - protein, 15 aa, synthetic construct
CASSFTTGGAETLYF

SEQ ID NO: 15466 - protein, 12 aa, synthetic construct
CAVSMTGTYQRF

SEQ ID NO: 15467 - protein, 16 aa, synthetic construct
CASSFGTGGNTGQLYF

SEQ ID NO: 15468 - protein, 10 aa, synthetic construct
CAAYAQGLTF

SEQ ID NO: 15469 - protein, 12 aa, synthetic construct
CASSFWTGEVFF

SEQ ID NO: 15470 - protein, 16 aa, synthetic construct
CAVSDNSGGSNAKLTF

SEQ ID NO: 15471 - protein, 15 aa, synthetic construct
CASSGDRGNTGQLYF

SEQ ID NO: 15472 - protein, 14 aa, synthetic construct
CALGDPSSGQKLVF

SEQ ID NO: 15473 - protein, 14 aa, synthetic construct
CASSSGTGNSDYTF

SEQ ID NO: 15474 - protein, 13 aa, synthetic construct
CAVSMWGGRALIF

SEQ ID NO: 15475 - protein, 16 aa, synthetic construct
CASSPGTGGAAETLYF

SEQ ID NO: 15476 - protein, 14 aa, synthetic construct
CAVSMWVPGSKLSF

SEQ ID NO: 15477 - protein, 12 aa, synthetic construct
CASSGGNTEVFF

SEQ ID NO: 15478 - protein, 13 aa, synthetic construct
CATDAYMGYKLTF

SEQ ID NO: 15479 - protein, 12 aa, synthetic construct
CASSGGNTEVFF

SEQ ID NO: 15480 - protein, 14 aa, synthetic construct
CAVREGNNNNRIFF

SEQ ID NO: 15481 - protein, 14 aa, synthetic construct
CASSLPGGAYEQYF

SEQ ID NO: 15482 - protein, 12 aa, synthetic construct
CASKGTGSKLSF

SEQ ID NO: 15483 - protein, 15 aa, synthetic construct
CASSLVGLYNSPLYF

SEQ ID NO: 15484 - protein, 14 aa, synthetic construct
CVLGGTSSGQKLVF

SEQ ID NO: 15485 - protein, 15 aa, synthetic construct
CASSNRQGHYAEQFF

SEQ ID NO: 15486 - protein, 10 aa, synthetic construct
CGGTGSKLSF

SEQ ID NO: 15487 - protein, 11 aa, synthetic construct
CASSSRPDYTF

SEQ ID NO: 15488 - protein, 10 aa, synthetic construct
CAPNTDKVVF

SEQ ID NO: 15489 - protein, 15 aa, synthetic construct
CASSQKLGGRDEQYF

SEQ ID NO: 15490 - protein, 14 aa, synthetic construct
CATDATQVVGQLTF

SEQ ID NO: 15491 - protein, 15 aa, synthetic construct
CASSQRGRVGNTLYF

SEQ ID NO: 15492 - protein, 15 aa, synthetic construct
CAVSMQQGTGSKLSF

SEQ ID NO: 15493 - protein, 15 aa, synthetic construct
CASSQETRANSDYTF

SEQ ID NO: 15494 - protein, 13 aa, synthetic construct
CAAANYGNEKITF

SEQ ID NO: 15495 - protein, 15 aa, synthetic construct
CASSQERTSNERLFF

SEQ ID NO: 15496 - protein, 14 aa, synthetic construct
CAMNTGGLSGKLTF

SEQ ID NO: 15497 - protein, 15 aa, synthetic construct
CASSQEETNLYEQYF

SEQ ID NO: 15498 - protein, 13 aa, synthetic construct
CAALFNAGAKLTF

SEQ ID NO: 15499 - protein, 15 aa, synthetic construct
CASSQESGSQNTLYF

SEQ ID NO: 15500 - protein, 14 aa, synthetic construct
CAMRESTGYQNFYF

SEQ ID NO: 15501 - protein, 15 aa, synthetic construct
CASSQDRDNYAEQFF

SEQ ID NO: 15502 - protein, 15 aa, synthetic construct
CAMSPHDSGYNKLTF

SEQ ID NO: 15503 - protein, 15 aa, synthetic construct
CASSQDGLGENTLYF

SEQ ID NO: 15504 - protein, 11 aa, synthetic construct
CALGGNNRIFF

SEQ ID NO: 15505 - protein, 15 aa, synthetic construct
CASSQDWGSSYEQYF

SEQ ID NO: 15506 - protein, 16 aa, synthetic construct
CVLGEGDNNAGAKLTF

SEQ ID NO: 15507 - protein, 17 aa, synthetic construct
CASSQDWGGESAETLYF

SEQ ID NO: 15508 - protein, 14 aa, synthetic construct
CALVASSSFSKLVF

SEQ ID NO: 15509 - protein, 14 aa, synthetic construct
CASSQERQNSDYTF

SEQ ID NO: 15510 - protein, 12 aa, synthetic construct
CAVYQGGRALIF

SEQ ID NO: 15511 - protein, 14 aa, synthetic construct
CASSQERQNSDYTF

SEQ ID NO: 15512 - protein, 13 aa, synthetic construct
CAASISNYNVLYF

SEQ ID NO: 15513 - protein, 12 aa, synthetic construct
CASSQEHTEVFF

SEQ ID NO: 15514 - protein, 17 aa, synthetic construct
CAMREPNYGSSGNKLIF

SEQ ID NO: 15515 - protein, 15 aa, synthetic construct
CASSQEPRGQDTQYF

SEQ ID NO: 15516 - protein, 14 aa, synthetic construct
CVLSAWDSNYQLIW

SEQ ID NO: 15517 - protein, 12 aa, synthetic construct
CASSQEDERLFF

SEQ ID NO: 15518 - protein, 13 aa, synthetic construct
CATPPPNAYKVIF

SEQ ID NO: 15519 - protein, 18 aa, synthetic construct
CASSQEGTGGVNQDTQYF

SEQ ID NO: 15520 - protein, 15 aa, synthetic construct
CAIDRQTGFASALTF

SEQ ID NO: 15521 - protein, 14 aa, synthetic construct
CASSQDMGEREQYF

SEQ ID NO: 15522 - protein, 14 aa, synthetic construct
CAHYRGSALGRLHF

SEQ ID NO: 15523 - protein, 14 aa, synthetic construct
CASSQDQGYSDYTF

SEQ ID NO: 15524 - protein, 13 aa, synthetic construct
CAVSPSNTDKVVF

SEQ ID NO: 15525 - protein, 15 aa, synthetic construct
CASSQDRLGNYEQYF

SEQ ID NO: 15526 - protein, 16 aa, synthetic construct
CAVSIGSGGSNYKLTF

SEQ ID NO: 15527 - protein, 15 aa, synthetic construct
CASSQDRASGNTLYF

SEQ ID NO: 15528 - protein, 14 aa, synthetic construct
CAAGNQGGSAKLIF

SEQ ID NO: 15529 - protein, 16 aa, synthetic construct
CASSQDVGWGQNTLYF

SEQ ID NO: 15530 - protein, 14 aa, synthetic construct
CAMGASSSFSKLVF

SEQ ID NO: 15531 - protein, 17 aa, synthetic construct
CASSQDWTGGGQDTQYF

SEQ ID NO: 15532 - protein, 15 aa, synthetic construct
CAASGRGSALGRLHF

SEQ ID NO: 15533 - protein, 15 aa, synthetic construct
CASSQGQANTGQLYF

SEQ ID NO: 15534 - protein, 14 aa, synthetic construct
CAMEANNAGAKLTF

SEQ ID NO: 15535 - protein, 15 aa, synthetic construct
CASSQGQGANSDYTF

SEQ ID NO: 15536 - protein, 15 aa, synthetic construct
CAASARPGSGGKLTL

SEQ ID NO: 15537 - protein, 13 aa, synthetic construct
CASSQGLEYEQYF

SEQ ID NO: 15538 - protein, 12 aa, synthetic construct
CAVNNYAQGLTF

SEQ ID NO: 15539 - protein, 17 aa, synthetic construct
CASSHGQGWNSGNTLYF

SEQ ID NO: 15540 - protein, 14 aa, synthetic construct
CIVTDRSGGYKVVF

SEQ ID NO: 15541 - protein, 14 aa, synthetic construct
CASSPGPSAETLYF

SEQ ID NO: 15542 - protein, 14 aa, synthetic construct
CIVTDTSGSWQLIF

SEQ ID NO: 15543 - protein, 16 aa, synthetic construct
CASSPHRGQANSDYTF

SEQ ID NO: 15544 - protein, 13 aa, synthetic construct
CAASNDNTDKVVF

SEQ ID NO: 15545 - protein, 14 aa, synthetic construct
CASSPRLGQDTQYF

SEQ ID NO: 15546 - protein, 15 aa, synthetic construct
CAASGGGSALGRLHF

SEQ ID NO: 15547 - protein, 14 aa, synthetic construct
CASSLRGNYAEQFF

SEQ ID NO: 15548 - protein, 11 aa, synthetic construct
CAAGESAKLIF

SEQ ID NO: 15549 - protein, 15 aa, synthetic construct
CASSLGTGGALEQYF

SEQ ID NO: 15550 - protein, 16 aa, synthetic construct
CAASVGYGGSGNKLIF

SEQ ID NO: 15551 - protein, 15 aa, synthetic construct
CASTSTPGKYAEQFF

SEQ ID NO: 15552 - protein, 13 aa, synthetic construct
CAASGNYAQGLTF

SEQ ID NO: 15553 - protein, 14 aa, synthetic construct
CASRSGSSAETLYF

SEQ ID NO: 15554 - protein, 13 aa, synthetic construct
CALGANSGTYQRF

SEQ ID NO: 15555 - protein, 14 aa, synthetic construct
CASSTGTGGYEQYF

SEQ ID NO: 15556 - protein, 11 aa, synthetic construct
CVLGSNYQLIW

SEQ ID NO: 15557 - protein, 15 aa, synthetic construct
CASSQDWGGYAEQFF

SEQ ID NO: 15558 - protein, 15 aa, synthetic construct
CALRTITGNTRKLIF

SEQ ID NO: 15559 - protein, 14 aa, synthetic construct
CASSQGFGNERLFF

SEQ ID NO: 15560 - protein, 16 aa, synthetic construct
CAMRAIASSSFSKLVF

SEQ ID NO: 15561 - protein, 16 aa, synthetic construct
CASSPTGGAAQDTQYF

SEQ ID NO: 15562 - protein, 13 aa, synthetic construct
CAMRAGGSAKLIF

SEQ ID NO: 15563 - protein, 15 aa, synthetic construct
CASSPRLGGRYEQYF

SEQ ID NO: 15564 - protein, 16 aa, synthetic construct
CAASEHYGGSNAKLTF

SEQ ID NO: 15565 - protein, 13 aa, synthetic construct
CASSRQANTEVFF

SEQ ID NO: 15566 - protein, 13 aa, synthetic construct
CAIASSSFSKLVF

SEQ ID NO: 15567 - protein, 12 aa, synthetic construct
CASSRTGKEVFF

SEQ ID NO: 15568 - protein, 13 aa, synthetic construct
CAMGPGSFNKLTF

SEQ ID NO: 15569 - protein, 12 aa, synthetic construct
CASSRDRETLYF

SEQ ID NO: 15570 - protein, 12 aa, synthetic construct
CAPDTNAYKVIF

SEQ ID NO: 15571 - protein, 14 aa, synthetic construct
CASSRGDRDERLFF

SEQ ID NO: 15572 - protein, 11 aa, synthetic construct
CAVPNAYKVIF

SEQ ID NO: 15573 - protein, 14 aa, synthetic construct
CASSLDRGLYEQYF

SEQ ID NO: 15574 - protein, 14 aa, synthetic construct
CAMREAAGYQNFYF

SEQ ID NO: 15575 - protein, 14 aa, synthetic construct
CASSLDRGLYEQYF

SEQ ID NO: 15576 - protein, 14 aa, synthetic construct
CAMREDTNAYKVIF

SEQ ID NO: 15577 - protein, 14 aa, synthetic construct
CASSLGLGGYEQYF

SEQ ID NO: 15578 - protein, 14 aa, synthetic construct
CAASASSGSWQLIF

SEQ ID NO: 15579 - protein, 14 aa, synthetic construct
CASSLGVNQDTQYF

SEQ ID NO: 15580 - protein, 13 aa, synthetic construct
CAMGRNNNNAPRF

SEQ ID NO: 15581 - protein, 13 aa, synthetic construct
CASSYDNQNTLYF

SEQ ID NO: 15582 - protein, 12 aa, synthetic construct
CAVGDSNYQLIW

SEQ ID NO: 15583 - protein, 15 aa, synthetic construct
CASSSDRVSAETLYF

SEQ ID NO: 15584 - protein, 13 aa, synthetic construct
CATDTSSGQKLVF

SEQ ID NO: 15585 - protein, 15 aa, synthetic construct
CASSSDWGVSYEQYF

SEQ ID NO: 15586 - protein, 14 aa, synthetic construct
CALSGGGSNAKLTF

SEQ ID NO: 15587 - protein, 16 aa, synthetic construct
CASSSGLGDGYAEQFF

SEQ ID NO: 15588 - protein, 12 aa, synthetic construct
CALGEGGNKLTF

SEQ ID NO: 15589 - protein, 12 aa, synthetic construct
CASSWGQQAPLF

SEQ ID NO: 15590 - protein, 14 aa, synthetic construct
CALGPMDSNYQLIW

SEQ ID NO: 15591 - protein, 10 aa, synthetic construct
CASSLETLYF

SEQ ID NO: 15592 - protein, 16 aa, synthetic construct
CAMREGGGTNAYKVIF

SEQ ID NO: 15593 - protein, 14 aa, synthetic construct
CASSFWGGADTQYF

SEQ ID NO: 15594 - protein, 16 aa, synthetic construct
CALSDGSGGSNAKLTF

SEQ ID NO: 15595 - protein, 14 aa, synthetic construct
CASSFDNSGNTLYF

SEQ ID NO: 15596 - protein, 14 aa, synthetic construct
CALSVTGGNNKLTF

SEQ ID NO: 15597 - protein, 13 aa, synthetic construct
CASSWTANSDYTF

SEQ ID NO: 15598 - protein, 13 aa, synthetic construct
CAVSNTNAYKVIF

SEQ ID NO: 15599 - protein, 13 aa, synthetic construct
CASGGQGNTEVFF

SEQ ID NO: 15600 - protein, 12 aa, synthetic construct
CAVRAGYQNFYF

SEQ ID NO: 15601 - protein, 11 aa, synthetic construct
CAAGTEQAPLF

SEQ ID NO: 15602 - protein, 14 aa, synthetic construct
CAARPNYNQGKLIF

SEQ ID NO: 15603 - protein, 14 aa, synthetic construct
CASAGTASQNTLYF

SEQ ID NO: 15604 - protein, 12 aa, synthetic construct
CAVTDSNYQLIW

SEQ ID NO: 15605 - protein, 14 aa, synthetic construct
CASGDRGSQNTLYF

SEQ ID NO: 15606 - protein, 13 aa, synthetic construct
CAMREGGTDKVVF

SEQ ID NO: 15607 - protein, 11 aa, synthetic construct
CASGQNERLFF

SEQ ID NO: 15608 - protein, 13 aa, synthetic construct
CALNQGGSAKLIF

SEQ ID NO: 15609 - protein, 14 aa, synthetic construct
CASGPGTANSDYTF

SEQ ID NO: 15610 - protein, 13 aa, synthetic construct
CAVSHNYAQGLTF

SEQ ID NO: 15611 - protein, 13 aa, synthetic construct
CASGSGGAREQYF

SEQ ID NO: 15612 - protein, 13 aa, synthetic construct
CALLSSNTNKVVF

SEQ ID NO: 15613 - protein, 13 aa, synthetic construct
CASGTAANTEVFF

SEQ ID NO: 15614 - protein, 13 aa, synthetic construct
CAMERAGYNKLTF

SEQ ID NO: 15615 - protein, 12 aa, synthetic construct
CASGTFYAEQFF

SEQ ID NO: 15616 - protein, 16 aa, synthetic construct
CAVSAMQQGTGSKLSF

SEQ ID NO: 15617 - protein, 11 aa, synthetic construct
CASGIQDTQYF

SEQ ID NO: 15618 - protein, 13 aa, synthetic construct
CAASNTGYQNFYF

SEQ ID NO: 15619 - protein, 13 aa, synthetic construct
CASGDRGENTLYF

SEQ ID NO: 15620 - protein, 16 aa, synthetic construct
CAMRETQQGTGSKLSF

SEQ ID NO: 15621 - protein, 14 aa, synthetic construct
CASGEDNSNERLFF

SEQ ID NO: 15622 - protein, 11 aa, synthetic construct
CAASEGNVLYF

SEQ ID NO: 15623 - protein, 15 aa, synthetic construct
CASGDARDIYAEQFF

SEQ ID NO: 15624 - protein, 15 aa, synthetic construct
CALGDLDGSGGKLTL

SEQ ID NO: 15625 - protein, 12 aa, synthetic construct
CASGGHQDTQYF

SEQ ID NO: 15626 - protein, 13 aa, synthetic construct
CAPPYQGGRALIF

SEQ ID NO: 15627 - protein, 13 aa, synthetic construct
CASGGTDYAEQFF

SEQ ID NO: 15628 - protein, 14 aa, synthetic construct
CAASADYGNEKITF

SEQ ID NO: 15629 - protein, 15 aa, synthetic construct
CASGTTGTSNERLFF

SEQ ID NO: 15630 - protein, 14 aa, synthetic construct
CAMRESTGYQNFYF

SEQ ID NO: 15631 - protein, 11 aa, synthetic construct
CASGQGAEVFF

SEQ ID NO: 15632 - protein, 12 aa, synthetic construct
CAMDTGYQNFYF

SEQ ID NO: 15633 - protein, 13 aa, synthetic construct
CASGLTGEETLYF

SEQ ID NO: 15634 - protein, 16 aa, synthetic construct
CVLGEGDNNAGAKLTF

SEQ ID NO: 15635 - protein, 12 aa, synthetic construct
CASGEKNTEVFF

SEQ ID NO: 15636 - protein, 12 aa, synthetic construct
CALSSGSWQLIF

SEQ ID NO: 15637 - protein, 11 aa, synthetic construct
CASGENTEVFF

SEQ ID NO: 15638 - protein, 16 aa, synthetic construct
CAVSYNSGGSNAKLTF

SEQ ID NO: 15639 - protein, 13 aa, synthetic construct
CASGETANSDYTF

SEQ ID NO: 15640 - protein, 15 aa, synthetic construct
CALSHTGGLSGKLTF

SEQ ID NO: 15641 - protein, 12 aa, synthetic construct
CASGERNSDYTF

SEQ ID NO: 15642 - protein, 12 aa, synthetic construct
CATMSNYNVLYF

SEQ ID NO: 15643 - protein, 8 aa, synthetic construct
CASGEQYF

SEQ ID NO: 15644 - protein, 12 aa, synthetic construct
CGPSSSFSKLVF

SEQ ID NO: 15645 - protein, 15 aa, synthetic construct
CASGERGLNQDTQYF

SEQ ID NO: 15646 - protein, 16 aa, synthetic construct
CALSDLWGSSGNKLIF

SEQ ID NO: 15647 - protein, 15 aa, synthetic construct
CASGEAGYSNERLFF

SEQ ID NO: 15648 - protein, 12 aa, synthetic construct
CAVKNNNNRIFF

SEQ ID NO: 15649 - protein, 15 aa, synthetic construct
CASGEGWGASETLYF

SEQ ID NO: 15650 - protein, 17 aa, synthetic construct
CTMREGRATGGNNKLTF

SEQ ID NO: 15651 - protein, 14 aa, synthetic construct
CASGDRGSQNTLYF

SEQ ID NO: 15652 - protein, 13 aa, synthetic construct
CAMREGGTDKVVF

SEQ ID NO: 15653 - protein, 11 aa, synthetic construct
CASGDRVEQYF

SEQ ID NO: 15654 - protein, 14 aa, synthetic construct
CAMERTEGADRLTF

SEQ ID NO: 15655 - protein, 15 aa, synthetic construct
CASGDLGGSQNTLYF

SEQ ID NO: 15656 - protein, 12 aa, synthetic construct
CAMREGGNRIFF

SEQ ID NO: 15657 - protein, 11 aa, synthetic construct
CASGENAEQFF

SEQ ID NO: 15658 - protein, 14 aa, synthetic construct
CALALTGNTGKLIF

SEQ ID NO: 15659 - protein, 13 aa, synthetic construct
CASGETGVAEQFF

SEQ ID NO: 15660 - protein, 12 aa, synthetic construct
CAVMSNYNVLYF

SEQ ID NO: 15661 - protein, 14 aa, synthetic construct
CASGEQGQGYEQYF

SEQ ID NO: 15662 - protein, 11 aa, synthetic construct
CAMSNNNRIFF

SEQ ID NO: 15663 - protein, 14 aa, synthetic construct
CASGEQGQGYEQYF

SEQ ID NO: 15664 - protein, 14 aa, synthetic construct
CAMREGNYAQGLTF

SEQ ID NO: 15665 - protein, 14 aa, synthetic construct
CASGEQGQGYEQYF

SEQ ID NO: 15666 - protein, 14 aa, synthetic construct
CAMRDNTNTGKLTF

SEQ ID NO: 15667 - protein, 14 aa, synthetic construct
CASGEQGQGYEQYF

SEQ ID NO: 15668 - protein, 12 aa, synthetic construct
CALGTNAYKVIF

SEQ ID NO: 15669 - protein, 12 aa, synthetic construct
CASGEQGAEVFF

SEQ ID NO: 15670 - protein, 15 aa, synthetic construct
CAMREGNSAGNKLTF

SEQ ID NO: 15671 - protein, 14 aa, synthetic construct
CASGERKGAETLYF

SEQ ID NO: 15672 - protein, 14 aa, synthetic construct
CAMREDTNAYKVIF

SEQ ID NO: 15673 - protein, 14 aa, synthetic construct
CASGERKGAETLYF

SEQ ID NO: 15674 - protein, 14 aa, synthetic construct
CAVREGNNNNRIFF

SEQ ID NO: 15675 - protein, 14 aa, synthetic construct
CASGERKGAETLYF

SEQ ID NO: 15676 - protein, 14 aa, synthetic construct
CAVSETGFASALTF

SEQ ID NO: 15677 - protein, 14 aa, synthetic construct
CASGEAGGGTEVFF

SEQ ID NO: 15678 - protein, 14 aa, synthetic construct
CAVSGSSSGQKLVF

SEQ ID NO: 15679 - protein, 14 aa, synthetic construct
CASGEGNSGNTLYF

SEQ ID NO: 15680 - protein, 14 aa, synthetic construct
CALRTTASLGKLQF

SEQ ID NO: 15681 - protein, 14 aa, synthetic construct
CASGDQDSGNTLYF

SEQ ID NO: 15682 - protein, 16 aa, synthetic construct
CAVRALYGGSGNKLIF

SEQ ID NO: 15683 - protein, 15 aa, synthetic construct
CASGDQGNSAETLYF

SEQ ID NO: 15684 - protein, 16 aa, synthetic construct
CALSDGATSSFSKLVF

SEQ ID NO: 15685 - protein, 11 aa, synthetic construct
CASGDQGEVFF

SEQ ID NO: 15686 - protein, 13 aa, synthetic construct
CAVPNSAGNKLTF

SEQ ID NO: 15687 - protein, 14 aa, synthetic construct
CASGDQGEDSPLYF

SEQ ID NO: 15688 - protein, 14 aa, synthetic construct
CAASKDSGYNKLTF

SEQ ID NO: 15689 - protein, 14 aa, synthetic construct
CASGDQGAGERLFF

SEQ ID NO: 15690 - protein, 14 aa, synthetic construct
CALSKNTGNYKYVF

SEQ ID NO: 15691 - protein, 14 aa, synthetic construct
CASGDPASAETLYF

SEQ ID NO: 15692 - protein, 13 aa, synthetic construct
CAVNMTNYNVLYF

SEQ ID NO: 15693 - protein, 14 aa, synthetic construct
CASGDPSSAETLYF

SEQ ID NO: 15694 - protein, 14 aa, synthetic construct
CAASEYTNAYKVIF

SEQ ID NO: 15695 - protein, 15 aa, synthetic construct
CASGDPGQGWAEQFF

SEQ ID NO: 15696 - protein, 16 aa, synthetic construct
CAASPNTGGLSGKLTF

SEQ ID NO: 15697 - protein, 15 aa, synthetic construct
CASGDPGQGWAEQFF

SEQ ID NO: 15698 - protein, 14 aa, synthetic construct
CAVRVMPNYNVLYF

SEQ ID NO: 15699 - protein, 15 aa, synthetic construct
CASGDPGQGWAEQFF

SEQ ID NO: 15700 - protein, 14 aa, synthetic construct
CAASSGGSNYKLTF

SEQ ID NO: 15701 - protein, 17 aa, synthetic construct
CASGDPRTGTNTGQLYF

SEQ ID NO: 15702 - protein, 15 aa, synthetic construct
CAVSAEDYSNNRLTL

SEQ ID NO: 15703 - protein, 15 aa, synthetic construct
CASGDPYWGGAEQYF

SEQ ID NO: 15704 - protein, 13 aa, synthetic construct
CALSYNAGAKLTF

SEQ ID NO: 15705 - protein, 15 aa, synthetic construct
CASGDPYWGGAEQYF

SEQ ID NO: 15706 - protein, 13 aa, synthetic construct
CAALTGNTGKLIF

SEQ ID NO: 15707 - protein, 14 aa, synthetic construct
CASGDLGGVYEQYF

SEQ ID NO: 15708 - protein, 14 aa, synthetic construct
CAVSINTGYQNFYF

SEQ ID NO: 15709 - protein, 13 aa, synthetic construct
CASGDLGGIEQYF

SEQ ID NO: 15710 - protein, 13 aa, synthetic construct
CIVTDMDTDKVVF

SEQ ID NO: 15711 - protein, 12 aa, synthetic construct
CASGDELYEQYF

SEQ ID NO: 15712 - protein, 12 aa, synthetic construct
CALANSGTYQRF

SEQ ID NO: 15713 - protein, 15 aa, synthetic construct
CASGDEGGSDTEVFF

SEQ ID NO: 15714 - protein, 14 aa, synthetic construct
CAASGNTGYQNFYF

SEQ ID NO: 15715 - protein, 14 aa, synthetic construct
CASGDEGNQDTQYF

SEQ ID NO: 15716 - protein, 12 aa, synthetic construct
CALRNMGYKLTF

SEQ ID NO: 15717 - protein, 15 aa, synthetic construct
CASGDDGGNYAEQFF

SEQ ID NO: 15718 - protein, 12 aa, synthetic construct
CALVNYAQGLTF

SEQ ID NO: 15719 - protein, 15 aa, synthetic construct
CASGDAKGAGNTLYF

SEQ ID NO: 15720 - protein, 13 aa, synthetic construct
CATAPTGGYKVVF

SEQ ID NO: 15721 - protein, 13 aa, synthetic construct
CASGDAGGWEQYF

SEQ ID NO: 15722 - protein, 14 aa, synthetic construct
CALSVSGSGGKLTL

SEQ ID NO: 15723 - protein, 13 aa, synthetic construct
CASGDAGFTEVFF

SEQ ID NO: 15724 - protein, 10 aa, synthetic construct
CTEAGAKLTF

SEQ ID NO: 15725 - protein, 12 aa, synthetic construct
CASGDAQYEQYF

SEQ ID NO: 15726 - protein, 11 aa, synthetic construct
CAVPNTNKVVF

SEQ ID NO: 15727 - protein, 16 aa, synthetic construct
CASGDAGTPSAETLYF

SEQ ID NO: 15728 - protein, 12 aa, synthetic construct
CAAGSNTNKVVF

SEQ ID NO: 15729 - protein, 18 aa, synthetic construct
CASGDAGWGGLNTGQLYF

SEQ ID NO: 15730 - protein, 13 aa, synthetic construct
CALSDTNAYKVIF

SEQ ID NO: 15731 - protein, 12 aa, synthetic construct
CASGDASTEVFF

SEQ ID NO: 15732 - protein, 14 aa, synthetic construct
CALSANTGNYKYVF

SEQ ID NO: 15733 - protein, 15 aa, synthetic construct
CASGDAGRENTEVFF

SEQ ID NO: 15734 - protein, 14 aa, synthetic construct
CAASASYGNEKITF

SEQ ID NO: 15735 - protein, 16 aa, synthetic construct
CASGDGTGVYQDTQYF

SEQ ID NO: 15736 - protein, 16 aa, synthetic construct
CAVSAGTGANTGKLTF

SEQ ID NO: 15737 - protein, 13 aa, synthetic construct
CASGDGDNTEVFF

SEQ ID NO: 15738 - protein, 15 aa, synthetic construct
CAMREGSYGNEKITF

SEQ ID NO: 15739 - protein, 13 aa, synthetic construct
CASGDGDNTEVFF

SEQ ID NO: 15740 - protein, 13 aa, synthetic construct
CAMCGGSGNKLIF

SEQ ID NO: 15741 - protein, 13 aa, synthetic construct
CASGDGDNTEVFF

SEQ ID NO: 15742 - protein, 15 aa, synthetic construct
CALSRPDYSNNRLTL

SEQ ID NO: 15743 - protein, 14 aa, synthetic construct
CASGDGGSAETLYF

SEQ ID NO: 15744 - protein, 17 aa, synthetic construct
CALSGPIASSSFSKLVF

SEQ ID NO: 15745 - protein, 14 aa, synthetic construct
CASGDGGGQDTQYF

SEQ ID NO: 15746 - protein, 12 aa, synthetic construct
CAMRTGGYKVVF

SEQ ID NO: 15747 - protein, 14 aa, synthetic construct
CASGDGGSNERLFF

SEQ ID NO: 15748 - protein, 12 aa, synthetic construct
CASNTGYQNFYF

SEQ ID NO: 15749 - protein, 15 aa, synthetic construct
CASGDVRLGGYEQYF

SEQ ID NO: 15750 - protein, 14 aa, synthetic construct
CAVSGTGGADRLTF

SEQ ID NO: 15751 - protein, 14 aa, synthetic construct
CASGDVGGAETLYF

SEQ ID NO: 15752 - protein, 14 aa, synthetic construct
CALAHDTNAYKVIF

SEQ ID NO: 15753 - protein, 11 aa, synthetic construct
CASGDFKEVFF

SEQ ID NO: 15754 - protein, 13 aa, synthetic construct
CAENQGGSAKLIF

SEQ ID NO: 15755 - protein, 15 aa, synthetic construct
CASGDFGVSAETLYF

SEQ ID NO: 15756 - protein, 14 aa, synthetic construct
CATDLDTNAYKVIF

SEQ ID NO: 15757 - protein, 15 aa, synthetic construct
CASGDFGVSAETLYF

SEQ ID NO: 15758 - protein, 14 aa, synthetic construct
CAMREDTNAYKVIF

SEQ ID NO: 15759 - protein, 15 aa, synthetic construct
CASGDFGVSAETLYF

SEQ ID NO: 15760 - protein, 14 aa, synthetic construct
CAVREGNNNNRIFF

SEQ ID NO: 15761 - protein, 16 aa, synthetic construct
CASGAGTGGNQDTQYF

SEQ ID NO: 15762 - protein, 15 aa, synthetic construct
CAMRDSSSGSWQLIF

SEQ ID NO: 15763 - protein, 15 aa, synthetic construct
CASGGPGQAPSDYTF

SEQ ID NO: 15764 - protein, 15 aa, synthetic construct
CAASIYTGGADRLTF

SEQ ID NO: 15765 - protein, 16 aa, synthetic construct
CASGGPGQGASYEQYF

SEQ ID NO: 15766 - protein, 14 aa, synthetic construct
CAASLNYNQGKLIF

SEQ ID NO: 15767 - protein, 16 aa, synthetic construct
CASGGPGQGASYEQYF

SEQ ID NO: 15768 - protein, 13 aa, synthetic construct
CAMERSNTNKVVF

SEQ ID NO: 15769 - protein, 16 aa, synthetic construct
CASGGPGQGASYEQYF

SEQ ID NO: 15770 - protein, 13 aa, synthetic construct
CAMENNYAQGLTF

SEQ ID NO: 15771 - protein, 16 aa, synthetic construct
CASGGPGQGASYEQYF

SEQ ID NO: 15772 - protein, 16 aa, synthetic construct
CVLGEGDNNAGAKLTF

SEQ ID NO: 15773 - protein, 16 aa, synthetic construct
CASGGPGQGASYEQYF

SEQ ID NO: 15774 - protein, 16 aa, synthetic construct
CALSPNSGGSNAKLTF

SEQ ID NO: 15775 - protein, 16 aa, synthetic construct
CASGGPGQGASYEQYF

SEQ ID NO: 15776 - protein, 12 aa, synthetic construct
CAPNTNTGKLTF

SEQ ID NO: 15777 - protein, 16 aa, synthetic construct
CASGGPGQGASYEQYF

SEQ ID NO: 15778 - protein, 12 aa, synthetic construct
CAAHNAGAKLTF

SEQ ID NO: 15779 - protein, 16 aa, synthetic construct
CASGGPGQGASYEQYF

SEQ ID NO: 15780 - protein, 12 aa, synthetic construct
CAEGEYANKMIF

SEQ ID NO: 15781 - protein, 16 aa, synthetic construct
CASGGPGQGASYEQYF

SEQ ID NO: 15782 - protein, 13 aa, synthetic construct
CALANTGYQNFYF

SEQ ID NO: 15783 - protein, 16 aa, synthetic construct
CASGGPGQGASYEQYF

SEQ ID NO: 15784 - protein, 14 aa, synthetic construct
CALALTGNTGKLIF

SEQ ID NO: 15785 - protein, 16 aa, synthetic construct
CASGGPGQGASYEQYF

SEQ ID NO: 15786 - protein, 14 aa, synthetic construct
CAVSETGFASALTF

SEQ ID NO: 15787 - protein, 16 aa, synthetic construct
CASGGPGQGASYEQYF

SEQ ID NO: 15788 - protein, 12 aa, synthetic construct
CAAGTGYQNFYF

SEQ ID NO: 15789 - protein, 14 aa, synthetic construct
CASGGDWGGAEQYF

SEQ ID NO: 15790 - protein, 14 aa, synthetic construct
CAASRAGGADRLTF

SEQ ID NO: 15791 - protein, 10 aa, synthetic construct
CASGGYEQYF

SEQ ID NO: 15792 - protein, 15 aa, synthetic construct
CAVSMATGGNNKLTF

SEQ ID NO: 15793 - protein, 15 aa, synthetic construct
CASGSGGLNQDTQYF

SEQ ID NO: 15794 - protein, 14 aa, synthetic construct
CAMRDDSGYNKLTF

SEQ ID NO: 15795 - protein, 12 aa, synthetic construct
CASVSGNSDYTF

SEQ ID NO: 15796 - protein, 13 aa, synthetic construct
CAVKNYGNEKITF

SEQ ID NO: 15797 - protein, 13 aa, synthetic construct
CASWTGGDAEQFF

SEQ ID NO: 15798 - protein, 14 aa, synthetic construct
CAPPRGSALGRLHF

SEQ ID NO: 15799 - protein, 12 aa, synthetic construct
CATGTGSYEQYF

SEQ ID NO: 15800 - protein, 12 aa, synthetic construct
CIPYTGYQNFYF

SEQ ID NO: 15801 - protein, 14 aa, synthetic construct
CASKDWGNSYEQYF

SEQ ID NO: 15802 - protein, 14 aa, synthetic construct
CAVREGNNNNRIFF

SEQ ID NO: 15803 - protein, 14 aa, synthetic construct
CASKDWGNSYEQYF

SEQ ID NO: 15804 - protein, 14 aa, synthetic construct
CAAGAQGGSAKLIF

SEQ ID NO: 15805 - protein, 11 aa, synthetic construct
CASTDNTEVFF

SEQ ID NO: 15806 - protein, 14 aa, synthetic construct
CAVSRGSALGRLHF

SEQ ID NO: 15807 - protein, 14 aa, synthetic construct
CASRGTVNQDTQYF

SEQ ID NO: 15808 - protein, 15 aa, synthetic construct
CALSDQDGDNSKLIW

SEQ ID NO: 15809 - protein, 14 aa, synthetic construct
CASSPGGGYAEQFF

SEQ ID NO: 15810 - protein, 15 aa, synthetic construct
CALGDSGGSNAKLTF

SEQ ID NO: 15811 - protein, 11 aa, synthetic construct
CASRRENTLYF

SEQ ID NO: 15812 - protein, 14 aa, synthetic construct
CAVSADTGNYKYVF

SEQ ID NO: 15813 - protein, 12 aa, synthetic construct
CASRGPGNTLYF

SEQ ID NO: 15814 - protein, 15 aa, synthetic construct
CAVSPSNSAGNKLTF

SEQ ID NO: 15815 - protein, 13 aa, synthetic construct
CASSKGQGGEQYF

SEQ ID NO: 15816 - protein, 15 aa, synthetic construct
CAARPVSGSFNKLTF

SEQ ID NO: 15817 - protein, 15 aa, synthetic construct
CASSRDRGNTGQLYF

SEQ ID NO: 15818 - protein, 12 aa, synthetic construct
CALEGGYQNFYF

SEQ ID NO: 15819 - protein, 14 aa, synthetic construct
CASSEDNANSDYTF

SEQ ID NO: 15820 - protein, 15 aa, synthetic construct
CAMREGDTNAYKVIF

SEQ ID NO: 15821 - protein, 16 aa, synthetic construct
CASSEDWGENTGQLYF

SEQ ID NO: 15822 - protein, 12 aa, synthetic construct
CASNTGYQNFYF

SEQ ID NO: 15823 - protein, 16 aa, synthetic construct
CASSEDWGENTGQLYF

SEQ ID NO: 15824 - protein, 15 aa, synthetic construct
CAASYASSSFSKLVF

SEQ ID NO: 15825 - protein, 14 aa, synthetic construct
CASSEGTTNTEVFF

SEQ ID NO: 15826 - protein, 12 aa, synthetic construct
CAVENSGTYQRF

SEQ ID NO: 15827 - protein, 14 aa, synthetic construct
CASSEYQGSSDYTF

SEQ ID NO: 15828 - protein, 12 aa, synthetic construct
CALAANTNKVVF

SEQ ID NO: 15829 - protein, 13 aa, synthetic construct
CASSDRSNTEVFF

SEQ ID NO: 15830 - protein, 13 aa, synthetic construct
CAVRNTNAYKVIF

SEQ ID NO: 15831 - protein, 15 aa, synthetic construct
CASSDPGRGDTEVFF

SEQ ID NO: 15832 - protein, 13 aa, synthetic construct
CSVAGTGGYKVVF

SEQ ID NO: 15833 - protein, 16 aa, synthetic construct
CASSDEGQQLPERLFF

SEQ ID NO: 15834 - protein, 12 aa, synthetic construct
CVLSGSNYQLIW

SEQ ID NO: 15835 - protein, 12 aa, synthetic construct
CASSDGGYEQYF

SEQ ID NO: 15836 - protein, 12 aa, synthetic construct
CILSPGYQNFYF

SEQ ID NO: 15837 - protein, 15 aa, synthetic construct
CASSERQGYNSPLYF

SEQ ID NO: 15838 - protein, 13 aa, synthetic construct
CALGNYGNEKITF

SEQ ID NO: 15839 - protein, 15 aa, synthetic construct
CASSELGGSAETLYF

SEQ ID NO: 15840 - protein, 15 aa, synthetic construct
CALSERGGSNAKLTF

SEQ ID NO: 15841 - protein, 13 aa, synthetic construct
CASSEGVSYEQYF

SEQ ID NO: 15842 - protein, 15 aa, synthetic construct
CAVRPWGAGNYKYVF

SEQ ID NO: 15843 - protein, 10 aa, synthetic construct
CASSDKEVFF

SEQ ID NO: 15844 - protein, 13 aa, synthetic construct
CALGGPGYQNFYF

SEQ ID NO: 15845 - protein, 14 aa, synthetic construct
CASSDTGYTGQLYF

SEQ ID NO: 15846 - protein, 13 aa, synthetic construct
CAARTGGNNKLTF

SEQ ID NO: 15847 - protein, 14 aa, synthetic construct
CASSDTTSQNTLYF

SEQ ID NO: 15848 - protein, 15 aa, synthetic construct
CAAREGGGSGNKLIF

SEQ ID NO: 15849 - protein, 14 aa, synthetic construct
CASSDTGGADTQYF

SEQ ID NO: 15850 - protein, 12 aa, synthetic construct
CALGSNYNVLYF

SEQ ID NO: 15851 - protein, 16 aa, synthetic construct
CASSDRGQGSAETLYF

SEQ ID NO: 15852 - protein, 15 aa, synthetic construct
CAMRGGGTGGYKVVF

SEQ ID NO: 15853 - protein, 13 aa, synthetic construct
CASSDPGHTEVFF

SEQ ID NO: 15854 - protein, 15 aa, synthetic construct
CAVSPASSSFSKLVF

SEQ ID NO: 15855 - protein, 14 aa, synthetic construct
CASSDLTGPETLYF

SEQ ID NO: 15856 - protein, 12 aa, synthetic construct
CAVRGGGRALIF

SEQ ID NO: 15857 - protein, 12 aa, synthetic construct
CASSDEEYEQYF

SEQ ID NO: 15858 - protein, 13 aa, synthetic construct
CALGEANTNKVVF

SEQ ID NO: 15859 - protein, 15 aa, synthetic construct
CASSDARDNQDTQYF

SEQ ID NO: 15860 - protein, 16 aa, synthetic construct
CAMREGGDYGNEKITF

SEQ ID NO: 15861 - protein, 15 aa, synthetic construct
CASSDALGGGYEQYF

SEQ ID NO: 15862 - protein, 13 aa, synthetic construct
CAVTSSNTNKVVF

SEQ ID NO: 15863 - protein, 12 aa, synthetic construct
CASSDADSDYTF

SEQ ID NO: 15864 - protein, 11 aa, synthetic construct
CSGTGSNRLTF

SEQ ID NO: 15865 - protein, 13 aa, synthetic construct
CASSDAGDERLFF

SEQ ID NO: 15866 - protein, 15 aa, synthetic construct
CALSDRGNYAQGLTF

SEQ ID NO: 15867 - protein, 13 aa, synthetic construct
CASSDAGGREQYF

SEQ ID NO: 15868 - protein, 13 aa, synthetic construct
CALSESMGYKLTF

SEQ ID NO: 15869 - protein, 14 aa, synthetic construct
CASSDGGANTEVFF

SEQ ID NO: 15870 - protein, 12 aa, synthetic construct
CILRVGNYKLTF

SEQ ID NO: 15871 - protein, 12 aa, synthetic construct
CASSDGSYEQYF

SEQ ID NO: 15872 - protein, 15 aa, synthetic construct
CALSDREQGGRALIF

SEQ ID NO: 15873 - protein, 13 aa, synthetic construct
CASSDGQGGEQYF

SEQ ID NO: 15874 - protein, 14 aa, synthetic construct
CALRTNSAGNKLTF

SEQ ID NO: 15875 - protein, 16 aa, synthetic construct
CASSDVGLGSQDTQYF

SEQ ID NO: 15876 - protein, 13 aa, synthetic construct
CALGAYGNEKITF

SEQ ID NO: 15877 - protein, 12 aa, synthetic construct
CASSDVGDEQYF

SEQ ID NO: 15878 - protein, 14 aa, synthetic construct
CAVSANTGNYKYVF

SEQ ID NO: 15879 - protein, 15 aa, synthetic construct
CASSDVGGNQDTQYF

SEQ ID NO: 15880 - protein, 14 aa, synthetic construct
CALSDGTGGYKVVF

SEQ ID NO: 15881 - protein, 15 aa, synthetic construct
CASSAGTGGFAEQFF

SEQ ID NO: 15882 - protein, 12 aa, synthetic construct
CAVRPGSWQLIF

SEQ ID NO: 15883 - protein, 14 aa, synthetic construct
CASSGDSANTEVFF

SEQ ID NO: 15884 - protein, 15 aa, synthetic construct
CAASRATGGNNKLTF

SEQ ID NO: 15885 - protein, 14 aa, synthetic construct
CASSGGLSNSDYTF

SEQ ID NO: 15886 - protein, 14 aa, synthetic construct
CAMRDSNSGTYQRF

SEQ ID NO: 15887 - protein, 14 aa, synthetic construct
CASSGGGENSDYTF

SEQ ID NO: 15888 - protein, 15 aa, synthetic construct
CALSAPSNMGYKLTF

SEQ ID NO: 15889 - protein, 13 aa, synthetic construct
CASSGGTGNTLYF

SEQ ID NO: 15890 - protein, 15 aa, synthetic construct
CAVKNTGANTGKLTF

SEQ ID NO: 15891 - protein, 11 aa, synthetic construct
CASKGANEQYF

SEQ ID NO: 15892 - protein, 17 aa, synthetic construct
CAMREANTGANTGKLTF

SEQ ID NO: 15893 - protein, 12 aa, synthetic construct
CASTNSGNTLYF

SEQ ID NO: 15894 - protein, 16 aa, synthetic construct
CAIDRNTGGLSGKLTF

SEQ ID NO: 15895 - protein, 13 aa, synthetic construct
CASTGTTNSDYTF

SEQ ID NO: 15896 - protein, 13 aa, synthetic construct
CAMEQNYAQGLTF

SEQ ID NO: 15897 - protein, 14 aa, synthetic construct
CASTHRGSQNTLYF

SEQ ID NO: 15898 - protein, 14 aa, synthetic construct
CALGATGGNNKLTF

SEQ ID NO: 15899 - protein, 11 aa, synthetic construct
CASSISYEQYF

SEQ ID NO: 15900 - protein, 14 aa, synthetic construct
CATMQQGTGSKLSF

SEQ ID NO: 15901 - protein, 14 aa, synthetic construct
CASSPGGWNSPLYF

SEQ ID NO: 15902 - protein, 16 aa, synthetic construct
CAVSPRAGTGSNRLTF

SEQ ID NO: 15903 - protein, 15 aa, synthetic construct
CASSPSDRSQNTLYF

SEQ ID NO: 15904 - protein, 13 aa, synthetic construct
CVLSAGSNNRIFF

SEQ ID NO: 15905 - protein, 14 aa, synthetic construct
CASSDRGNQDTQYF

SEQ ID NO: 15906 - protein, 15 aa, synthetic construct
CAMRGGGYGNEKITF

SEQ ID NO: 15907 - protein, 13 aa, synthetic construct
CASSADRNERLFF

SEQ ID NO: 15908 - protein, 13 aa, synthetic construct
CAMRGNNNNAPRF

SEQ ID NO: 15909 - protein, 15 aa, synthetic construct
CASSSLGGRQNTLYF

SEQ ID NO: 15910 - protein, 16 aa, synthetic construct
CAMREGPNTGYQNFYF

SEQ ID NO: 15911 - protein, 13 aa, synthetic construct
CASSWTANTEVFF

SEQ ID NO: 15912 - protein, 15 aa, synthetic construct
CALEGIQGTGSKLSF

SEQ ID NO: 15913 - protein, 16 aa, synthetic construct
CASRRGTGGLQDTQYF

SEQ ID NO: 15914 - protein, 15 aa, synthetic construct
CILRSFTGSGGKLTL

SEQ ID NO: 15915 - protein, 11 aa, synthetic construct
CASRRQTEVFF

SEQ ID NO: 15916 - protein, 14 aa, synthetic construct
CALGETGSGGKLTL

SEQ ID NO: 15917 - protein, 13 aa, synthetic construct
CASRPGLNQAPLF

SEQ ID NO: 15918 - protein, 14 aa, synthetic construct
CATDTDTNAYKVIF

SEQ ID NO: 15919 - protein, 13 aa, synthetic construct
CASRDRANSPLYF

SEQ ID NO: 15920 - protein, 14 aa, synthetic construct
CALGASSSFSKLVF

SEQ ID NO: 15921 - protein, 13 aa, synthetic construct
CASRDRGRAEQFF

SEQ ID NO: 15922 - protein, 13 aa, synthetic construct
CVLSTGGNNKLTF

SEQ ID NO: 15923 - protein, 12 aa, synthetic construct
CASRDRGNEQYF

SEQ ID NO: 15924 - protein, 16 aa, synthetic construct
CALEGIASSSFSKLVF

SEQ ID NO: 15925 - protein, 14 aa, synthetic construct
CASRDRGSQNTLYF

SEQ ID NO: 15926 - protein, 13 aa, synthetic construct
CAMREGGNNKLTF

SEQ ID NO: 15927 - protein, 14 aa, synthetic construct
CASRDRGSQNTLYF

SEQ ID NO: 15928 - protein, 14 aa, synthetic construct
CAMPHQGGSAKLIF

SEQ ID NO: 15929 - protein, 12 aa, synthetic construct
CASRDSQNTLYF

SEQ ID NO: 15930 - protein, 16 aa, synthetic construct
CALSDLANSAGNKLTF

SEQ ID NO: 15931 - protein, 14 aa, synthetic construct
CASRDWGSAETLYF

SEQ ID NO: 15932 - protein, 11 aa, synthetic construct
CAAGESAKLIF

SEQ ID NO: 15933 - protein, 14 aa, synthetic construct
CASRDWGSAETLYF

SEQ ID NO: 15934 - protein, 12 aa, synthetic construct
CAVKNNNNRIFF

SEQ ID NO: 15935 - protein, 14 aa, synthetic construct
CASRDWGSAETLYF

SEQ ID NO: 15936 - protein, 12 aa, synthetic construct
CAVKNNNNRIFF

SEQ ID NO: 15937 - protein, 15 aa, synthetic construct
CASRGTGSYNSPLYF

SEQ ID NO: 15938 - protein, 13 aa, synthetic construct
CAMREGGNNRIFF

SEQ ID NO: 15939 - protein, 15 aa, synthetic construct
CASSNRGRLSYEQYF

SEQ ID NO: 15940 - protein, 8 aa, synthetic construct
CAVHVLYF

SEQ ID NO: 15941 - protein, 15 aa, synthetic construct
CASSNRGRNTGQLYF

SEQ ID NO: 15942 - protein, 12 aa, synthetic construct
CAVSSNTDKVVF

SEQ ID NO: 15943 - protein, 14 aa, synthetic construct
CASSQGTGDSPLYF

SEQ ID NO: 15944 - protein, 14 aa, synthetic construct
CAMRAPSNTDKVVF

SEQ ID NO: 15945 - protein, 13 aa, synthetic construct
CASSPGGNQAPLF

SEQ ID NO: 15946 - protein, 14 aa, synthetic construct
CAMREASNTDKVVF

SEQ ID NO: 15947 - protein, 14 aa, synthetic construct
CASSPGINNQAPLF

SEQ ID NO: 15948 - protein, 14 aa, synthetic construct
CAASPGANTGKLTF

SEQ ID NO: 15949 - protein, 15 aa, synthetic construct
CASSRQGISNERLFF

SEQ ID NO: 15950 - protein, 15 aa, synthetic construct
CAVSATNTGNYKYVF

SEQ ID NO: 15951 - protein, 16 aa, synthetic construct
CASSLRAGRSAETLYF

SEQ ID NO: 15952 - protein, 14 aa, synthetic construct
CAASTSGGNYKPTF

SEQ ID NO: 15953 - protein, 12 aa, synthetic construct
CASSEKDSDYTF

SEQ ID NO: 15954 - protein, 14 aa, synthetic construct
CAVMTNSAGNKLTF

SEQ ID NO: 15955 - protein, 15 aa, synthetic construct
CASSETESSAETLYF

SEQ ID NO: 15956 - protein, 13 aa, synthetic construct
CAVSMTGSWQLIF

SEQ ID NO: 15957 - protein, 12 aa, synthetic construct
CASSERYGQLYF

SEQ ID NO: 15958 - protein, 13 aa, synthetic construct
CATDTGGADRLTF

SEQ ID NO: 15959 - protein, 12 aa, synthetic construct
CASSEGNSDYTF

SEQ ID NO: 15960 - protein, 11 aa, synthetic construct
CATGGNNRLTL

SEQ ID NO: 15961 - protein, 13 aa, synthetic construct
CASSEGVNTEVFF

SEQ ID NO: 15962 - protein, 16 aa, synthetic construct
CALGDRVYTGNYKYVF

SEQ ID NO: 15963 - protein, 13 aa, synthetic construct
CASSDRIGNTLYF

SEQ ID NO: 15964 - protein, 13 aa, synthetic construct
CALGDYNQGKLIF

SEQ ID NO: 15965 - protein, 13 aa, synthetic construct
CASSETGGYEQYF

SEQ ID NO: 15966 - protein, 13 aa, synthetic construct
CAMQQGTGSKLSF

SEQ ID NO: 15967 - protein, 15 aa, synthetic construct
CASSEAGTGGREQYF

SEQ ID NO: 15968 - protein, 14 aa, synthetic construct
CAASTDYNQGKLIF

SEQ ID NO: 15969 - protein, 15 aa, synthetic construct
CASSEGGANTGQLYF

SEQ ID NO: 15970 - protein, 14 aa, synthetic construct
CALSEGNYAQGLTF

SEQ ID NO: 15971 - protein, 15 aa, synthetic construct
CASSDTGEGDYEQYF

SEQ ID NO: 15972 - protein, 14 aa, synthetic construct
CAMDGSSGSWQLIF

SEQ ID NO: 15973 - protein, 13 aa, synthetic construct
CASSDRGNTEVFF

SEQ ID NO: 15974 - protein, 12 aa, synthetic construct
CAVTGGNNKLTF

SEQ ID NO: 15975 - protein, 13 aa, synthetic construct
CASSDHANTEVFF

SEQ ID NO: 15976 - protein, 15 aa, synthetic construct
CAMRGADSGYNKLTF

SEQ ID NO: 15977 - protein, 15 aa, synthetic construct
CASSDPGQGNTEVFF

SEQ ID NO: 15978 - protein, 14 aa, synthetic construct
CAMRETGGNNKLTF

SEQ ID NO: 15979 - protein, 14 aa, synthetic construct
CASSDEKGAETLYF

SEQ ID NO: 15980 - protein, 14 aa, synthetic construct
CVLGITGNTRKLIF

SEQ ID NO: 15981 - protein, 15 aa, synthetic construct
CASSDDWGNYAEQFF

SEQ ID NO: 15982 - protein, 12 aa, synthetic construct
CAVNSAGNKLTF

SEQ ID NO: 15983 - protein, 15 aa, synthetic construct
CASSDEGRDAETLYF

SEQ ID NO: 15984 - protein, 14 aa, synthetic construct
CALGETGFASALTF

SEQ ID NO: 15985 - protein, 14 aa, synthetic construct
CASSDEGGRDTQYF

SEQ ID NO: 15986 - protein, 12 aa, synthetic construct
CAASDGAYKVIF

SEQ ID NO: 15987 - protein, 11 aa, synthetic construct
CASSDADEQYF

SEQ ID NO: 15988 - protein, 11 aa, synthetic construct
CALDNAYKVIF

SEQ ID NO: 15989 - protein, 13 aa, synthetic construct
CASSDAANSDYTF

SEQ ID NO: 15990 - protein, 13 aa, synthetic construct
CAAESTGYQNFYF

SEQ ID NO: 15991 - protein, 16 aa, synthetic construct
CASSDASQGYNQAPLF

SEQ ID NO: 15992 - protein, 12 aa, synthetic construct
CAAKGGSAKLIF

SEQ ID NO: 15993 - protein, 16 aa, synthetic construct
CASSDAYRGVGNTLYF

SEQ ID NO: 15994 - protein, 14 aa, synthetic construct
CAVSMTGNTGKLIF

SEQ ID NO: 15995 - protein, 13 aa, synthetic construct
CASSDAGSERLFF

SEQ ID NO: 15996 - protein, 13 aa, synthetic construct
CALGENSNNRIFF

SEQ ID NO: 15997 - protein, 15 aa, synthetic construct
CASSDVQISNERLFF

SEQ ID NO: 15998 - protein, 15 aa, synthetic construct
CALSRPDYSNNRLTL

SEQ ID NO: 15999 - protein, 14 aa, synthetic construct
CASSDWGGAETLYF

SEQ ID NO: 16000 - protein, 15 aa, synthetic construct
CAAREGGGSGNKLIF

SEQ ID NO: 16001 - protein, 14 aa, synthetic construct
CASSDWGGAETLYF

SEQ ID NO: 16002 - protein, 14 aa, synthetic construct
CAVSATSSGQKLVF

SEQ ID NO: 16003 - protein, 15 aa, synthetic construct
CASSDLEDVQNTLYF

SEQ ID NO: 16004 - protein, 14 aa, synthetic construct
CALALNYNQGKLIF

SEQ ID NO: 16005 - protein, 12 aa, synthetic construct
CASSAGGSDYTF

SEQ ID NO: 16006 - protein, 13 aa, synthetic construct
CAASGNNNNRIFF

SEQ ID NO: 16007 - protein, 15 aa, synthetic construct
CASSASGQGALEQYF

SEQ ID NO: 16008 - protein, 15 aa, synthetic construct
CAASGASSSFSKLVF

SEQ ID NO: 16009 - protein, 16 aa, synthetic construct
CASSADWGGAEAEQFF

SEQ ID NO: 16010 - protein, 14 aa, synthetic construct
CALSPNTGNYKYVF

SEQ ID NO: 16011 - protein, 13 aa, synthetic construct
CASSAAANSDYTF

SEQ ID NO: 16012 - protein, 15 aa, synthetic construct
CVLSRVNTGNYKYVF

SEQ ID NO: 16013 - protein, 14 aa, synthetic construct
CASSAGGVQDTQYF

SEQ ID NO: 16014 - protein, 15 aa, synthetic construct
CAMRENNNAGAKLTF

SEQ ID NO: 16015 - protein, 15 aa, synthetic construct
CASSGQGGSQNTLYF

SEQ ID NO: 16016 - protein, 14 aa, synthetic construct
CAARSYQGGRALIF

SEQ ID NO: 16017 - protein, 13 aa, synthetic construct
CASSGQYNSPLYF

SEQ ID NO: 16018 - protein, 12 aa, synthetic construct
CALGEDNNRIFF

SEQ ID NO: 16019 - protein, 12 aa, synthetic construct
CASSGPQDTQYF

SEQ ID NO: 16020 - protein, 16 aa, synthetic construct
CALWELADNYAQGLTF

SEQ ID NO: 16021 - protein, 12 aa, synthetic construct
CASSGPQDTQYF

SEQ ID NO: 16022 - protein, 16 aa, synthetic construct
CALGDPLNSAGNKLTF

SEQ ID NO: 16023 - protein, 13 aa, synthetic construct
CASSGEENSDYTF

SEQ ID NO: 16024 - protein, 14 aa, synthetic construct
CAASPSSNTNKVVF

SEQ ID NO: 16025 - protein, 16 aa, synthetic construct
CASSGDWGASAETLYF

SEQ ID NO: 16026 - protein, 14 aa, synthetic construct
CAMREDTNAYKVIF

SEQ ID NO: 16027 - protein, 16 aa, synthetic construct
CASSGDWGASAETLYF

SEQ ID NO: 16028 - protein, 12 aa, synthetic construct
CAAGTGYQNFYF

SEQ ID NO: 16029 - protein, 15 aa, synthetic construct
CASSGQGALDERLFF

SEQ ID NO: 16030 - protein, 13 aa, synthetic construct
CAADDNYAQGLTF

SEQ ID NO: 16031 - protein, 12 aa, synthetic construct
CASSGDSYEQYF

SEQ ID NO: 16032 - protein, 14 aa, synthetic construct
CALELAEGADRLTF

SEQ ID NO: 16033 - protein, 15 aa, synthetic construct
CASSGDRDYNSPLYF

SEQ ID NO: 16034 - protein, 12 aa, synthetic construct
CAVSDNNNAPRF

SEQ ID NO: 16035 - protein, 14 aa, synthetic construct
CASSGDTSAETLYF

SEQ ID NO: 16036 - protein, 15 aa, synthetic construct
CAAPRANYGNEKITF

SEQ ID NO: 16037 - protein, 14 aa, synthetic construct
CASSGDTSAETLYF

SEQ ID NO: 16038 - protein, 14 aa, synthetic construct
CALSPNNYAQGLTF

SEQ ID NO: 16039 - protein, 13 aa, synthetic construct
CASSVGGENTLYF

SEQ ID NO: 16040 - protein, 13 aa, synthetic construct
CAAPSSGSWQLIF

SEQ ID NO: 16041 - protein, 14 aa, synthetic construct
CASSSGTGDQAPLF

SEQ ID NO: 16042 - protein, 16 aa, synthetic construct
CAMREPNQGGSAKLIF

SEQ ID NO: 16043 - protein, 15 aa, synthetic construct
CASSWTGGSAETLYF

SEQ ID NO: 16044 - protein, 12 aa, synthetic construct
CAVKGGSAKLIF

SEQ ID NO: 16045 - protein, 12 aa, synthetic construct
CASSWANSDYTF

SEQ ID NO: 16046 - protein, 16 aa, synthetic construct
CAMREDSGGSNYKLTF

SEQ ID NO: 16047 - protein, 13 aa, synthetic construct
CASAGGDNERLFF

SEQ ID NO: 16048 - protein, 14 aa, synthetic construct
CAMRENTGYQNFYF

SEQ ID NO: 16049 - protein, 11 aa, synthetic construct
CASGGNTEVFF

SEQ ID NO: 16050 - protein, 17 aa, synthetic construct
CAMREAYSGGSNYKLTF

SEQ ID NO: 16051 - protein, 14 aa, synthetic construct
CASSPGTDYAEQFF

SEQ ID NO: 16052 - protein, 14 aa, synthetic construct
CAVSSYQGGRALIF

SEQ ID NO: 16053 - protein, 13 aa, synthetic construct
CASSTDSGNTLYF

SEQ ID NO: 16054 - protein, 16 aa, synthetic construct
CAMRGNSGGSNAKLTF

SEQ ID NO: 16055 - protein, 14 aa, synthetic construct
CASSRRDRGTEVFF

SEQ ID NO: 16056 - protein, 15 aa, synthetic construct
CALGNTGANTGKLTF

SEQ ID NO: 16057 - protein, 17 aa, synthetic construct
CASSRRLGGPSAETLYF

SEQ ID NO: 16058 - protein, 17 aa, synthetic construct
CALSDRVASSSFSKLVF

SEQ ID NO: 16059 - protein, 13 aa, synthetic construct
CASSRDNSYEQYF

SEQ ID NO: 16060 - protein, 13 aa, synthetic construct
CAANYQGGRALIF

SEQ ID NO: 16061 - protein, 15 aa, synthetic construct
CASSRAPTIQNTLYF

SEQ ID NO: 16062 - protein, 15 aa, synthetic construct
CAASGGTGFASALTF

SEQ ID NO: 16063 - protein, 13 aa, synthetic construct
CASSRGNQDTQYF

SEQ ID NO: 16064 - protein, 13 aa, synthetic construct
CAGGGGSNNRIFF

SEQ ID NO: 16065 - protein, 11 aa, synthetic construct
CASSSQYEQYF

SEQ ID NO: 16066 - protein, 12 aa, synthetic construct
CALEQGGRALIF

SEQ ID NO: 16067 - protein, 14 aa, synthetic construct
CASSRDRGYAEQFF

SEQ ID NO: 16068 - protein, 13 aa, synthetic construct
CALENNYAQGLTF

SEQ ID NO: 16069 - protein, 15 aa, synthetic construct
CASSSTGTSGNTLYF

SEQ ID NO: 16070 - protein, 14 aa, synthetic construct
CAMRRGNNNNRIFF

SEQ ID NO: 16071 - protein, 15 aa, synthetic construct
CASSSGGRNYAEQFF

SEQ ID NO: 16072 - protein, 13 aa, synthetic construct
CALAYNAGAKLTF

SEQ ID NO: 16073 - protein, 10 aa, synthetic construct
CASSGREVFF

SEQ ID NO: 16074 - protein, 14 aa, synthetic construct
CAVREGNNNNRIFF

SEQ ID NO: 16075 - protein, 12 aa, synthetic construct
CASSVPGHEQYF

SEQ ID NO: 16076 - protein, 14 aa, synthetic construct
CAVRAMSNYNVLYF

SEQ ID NO: 16077 - protein, 13 aa, synthetic construct
CAGGTGGDGQLYF

SEQ ID NO: 16078 - protein, 14 aa, synthetic construct
CAMREAGNTGKLIF

SEQ ID NO: 16079 - protein, 7 aa, synthetic construct
CAGEQYF

SEQ ID NO: 16080 - protein, 15 aa, synthetic construct
CAMRLPNYGNEKITF

SEQ ID NO: 16081 - protein, 12 aa, synthetic construct
CASSLEADTQYF

SEQ ID NO: 16082 - protein, 15 aa, synthetic construct
CAVSAQGGTGSKLSF

SEQ ID NO: 16083 - protein, 15 aa, synthetic construct
CAWRSTGRNAETLYF

SEQ ID NO: 16084 - protein, 14 aa, synthetic construct
CAVTLYQGGRALIF

SEQ ID NO: 16085 - protein, 17 aa, synthetic construct
CAWSPRGLGGPTGQLYF

SEQ ID NO: 16086 - protein, 14 aa, synthetic construct
CAASEAGTGSKLSF

SEQ ID NO: 16087 - protein, 13 aa, synthetic construct
CAWRGGRTGQLYF

SEQ ID NO: 16088 - protein, 13 aa, synthetic construct
CAVTYQGGRALIF

SEQ ID NO: 16089 - protein, 13 aa, synthetic construct
CAWSQASAETLYF

SEQ ID NO: 16090 - protein, 12 aa, synthetic construct
CAASDYANKMIF

SEQ ID NO: 16091 - protein, 16 aa, synthetic construct
CAWSPDWGASAETLYF

SEQ ID NO: 16092 - protein, 13 aa, synthetic construct
CAAVTGSGGKLTL

SEQ ID NO: 16093 - protein, 12 aa, synthetic construct
CAWSLRDKEVFF

SEQ ID NO: 16094 - protein, 15 aa, synthetic construct
CALGAGGSALGRLHF

SEQ ID NO: 16095 - protein, 17 aa, synthetic construct
CAWSLVTGGALYAEQFF

SEQ ID NO: 16096 - protein, 17 aa, synthetic construct
CAMREVNSGGSNAKLTF

SEQ ID NO: 16097 - protein, 14 aa, synthetic construct
CAWSLLSNYAEQFF

SEQ ID NO: 16098 - protein, 14 aa, synthetic construct
CAVRPTGGNNKLTF

SEQ ID NO: 16099 - protein, 15 aa, synthetic construct
CAWSLREKGNERLFF

SEQ ID NO: 16100 - protein, 14 aa, synthetic construct
CAASSRNMGYKLTF

SEQ ID NO: 16101 - protein, 12 aa, synthetic construct
CAWLGDQDTQYF

SEQ ID NO: 16102 - protein, 13 aa, synthetic construct
CAPHDTNAYKVIF

SEQ ID NO: 16103 - protein, 17 aa, synthetic construct
CASSPRDRGSSAETLYF

SEQ ID NO: 16104 - protein, 13 aa, synthetic construct
CAVSNYNQGKLIF

SEQ ID NO: 16105 - protein, 12 aa, synthetic construct
CASSPAGDEQYF

SEQ ID NO: 16106 - protein, 14 aa, synthetic construct
CAAPPMSNYNVLYF

SEQ ID NO: 16107 - protein, 15 aa, synthetic construct
CASSSGLGDYAEQFF

SEQ ID NO: 16108 - protein, 14 aa, synthetic construct
CAMSGGDSGTYQRF

SEQ ID NO: 16109 - protein, 16 aa, synthetic construct
CASSLEGGRGAETLYF

SEQ ID NO: 16110 - protein, 15 aa, synthetic construct
CAVEDSGGSNYKLTF

SEQ ID NO: 16111 - protein, 16 aa, synthetic construct
CASSLARDRGFAEQFF

SEQ ID NO: 16112 - protein, 14 aa, synthetic construct
CAAEASSGSWQLIF

SEQ ID NO: 16113 - protein, 16 aa, synthetic construct
CASSLALGDGAETLYF

SEQ ID NO: 16114 - protein, 14 aa, synthetic construct
CATDATSGSWQLIF

SEQ ID NO: 16115 - protein, 16 aa, synthetic construct
CASSLGRDRNYAEQFF

SEQ ID NO: 16116 - protein, 12 aa, synthetic construct
CAMENMGYKLTF

SEQ ID NO: 16117 - protein, 15 aa, synthetic construct
CASSLGTANTGQLYF

SEQ ID NO: 16118 - protein, 16 aa, synthetic construct
CAMREDSGGSNYKLTF

SEQ ID NO: 16119 - protein, 14 aa, synthetic construct
CASSLGTANSDYTF

SEQ ID NO: 16120 - protein, 15 aa, synthetic construct
CAAGAATGGNNKLTF

SEQ ID NO: 16121 - protein, 17 aa, synthetic construct
CASSLGTGDSYNSPLYF

SEQ ID NO: 16122 - protein, 14 aa, synthetic construct
CALSPSSGSWQLIF

SEQ ID NO: 16123 - protein, 14 aa, synthetic construct
CASSLGGSSYEQYF

SEQ ID NO: 16124 - protein, 14 aa, synthetic construct
CAASHDTNAYKVIF

SEQ ID NO: 16125 - protein, 14 aa, synthetic construct
CASSFGTGAYEQYF

SEQ ID NO: 16126 - protein, 16 aa, synthetic construct
CAASRGSGGSNAKLTF

SEQ ID NO: 16127 - protein, 14 aa, synthetic construct
CGAGDRAFSYEQYF

SEQ ID NO: 16128 - protein, 14 aa, synthetic construct
CAMATGGLSGKLTF

SEQ ID NO: 16129 - protein, 14 aa, synthetic construct
CGAGDRAFSYEQYF

SEQ ID NO: 16130 - protein, 12 aa, synthetic construct
CAAYQGGRALIF

SEQ ID NO: 16131 - protein, 14 aa, synthetic construct
CGARQGVNQDTQYF

SEQ ID NO: 16132 - protein, 12 aa, synthetic construct
CADTGGADRLTF

SEQ ID NO: 16133 - protein, 12 aa, synthetic construct
CGARRGGTEVFF

SEQ ID NO: 16134 - protein, 14 aa, synthetic construct
CALSPSNMGYKLTF

SEQ ID NO: 16135 - protein, 15 aa, synthetic construct
CGASGGGAFQDTQYF

SEQ ID NO: 16136 - protein, 13 aa, synthetic construct
CAARGSALGRLHF

SEQ ID NO: 16137 - protein, 15 aa, synthetic construct
CGARDQRTNYAEQFF

SEQ ID NO: 16138 - protein, 13 aa, synthetic construct
CAVKNTGYQNFYF

SEQ ID NO: 16139 - protein, 14 aa, synthetic construct
CGARDRGRGTEVFF

SEQ ID NO: 16140 - protein, 13 aa, synthetic construct
CAASENYAQGLTF

SEQ ID NO: 16141 - protein, 15 aa, synthetic construct
CGARDRGYNNQAPLF

SEQ ID NO: 16142 - protein, 16 aa, synthetic construct
CALSPNSGGSNAKLTF

SEQ ID NO: 16143 - protein, 12 aa, synthetic construct
CGARDGGGEQYF

SEQ ID NO: 16144 - protein, 14 aa, synthetic construct
CAIEPNTNTGKLTF

SEQ ID NO: 16145 - protein, 16 aa, synthetic construct
CGARASWDRDSYEQYF

SEQ ID NO: 16146 - protein, 14 aa, synthetic construct
CAASGSSNTNKVVF

SEQ ID NO: 16147 - protein, 12 aa, synthetic construct
CGARGSGNTLYF

SEQ ID NO: 16148 - protein, 12 aa, synthetic construct
CATESGYNKLTF

SEQ ID NO: 16149 - protein, 12 aa, synthetic construct
CGASVGAGEQYF

SEQ ID NO: 16150 - protein, 14 aa, synthetic construct
CAMREDTNAYKVIF

SEQ ID NO: 16151 - protein, 12 aa, synthetic construct
CGASVGAGEQYF

SEQ ID NO: 16152 - protein, 12 aa, synthetic construct
CAEGEYANKMIF

SEQ ID NO: 16153 - protein, 12 aa, synthetic construct
CGAREGTGQLYF

SEQ ID NO: 16154 - protein, 13 aa, synthetic construct
CAASENNNNRIFF

SEQ ID NO: 16155 - protein, 14 aa, synthetic construct
CATRDWGDSYEQYF

SEQ ID NO: 16156 - protein, 13 aa, synthetic construct
CALKGYGNEKITF

SEQ ID NO: 16157 - protein, 14 aa, synthetic construct
CASTPGGAGNTLYF

SEQ ID NO: 16158 - protein, 14 aa, synthetic construct
CAVKTGANTGKLTF

SEQ ID NO: 16159 - protein, 14 aa, synthetic construct
CASTSGGSNERLFF

SEQ ID NO: 16160 - protein, 13 aa, synthetic construct
CVLGRDSNYQLIW

SEQ ID NO: 16161 - protein, 12 aa, synthetic construct
CASRQGRDTQYF

SEQ ID NO: 16162 - protein, 15 aa, synthetic construct
CIVTDMEGGNYKPTF

SEQ ID NO: 16163 - protein, 14 aa, synthetic construct
CASRRLGGAETLYF

SEQ ID NO: 16164 - protein, 16 aa, synthetic construct
CAMREDTGANTGKLTF

SEQ ID NO: 16165 - protein, 14 aa, synthetic construct
CASSQSGGQDTQYF

SEQ ID NO: 16166 - protein, 12 aa, synthetic construct
CALGSNYNVLYF

SEQ ID NO: 16167 - protein, 12 aa, synthetic construct
CASSPGQYEQYF

SEQ ID NO: 16168 - protein, 14 aa, synthetic construct
CAVSDNTNTGKLTF

SEQ ID NO: 16169 - protein, 14 aa, synthetic construct
CASSPGTANTEVFF

SEQ ID NO: 16170 - protein, 14 aa, synthetic construct
CAMREPSNTNKVVF

SEQ ID NO: 16171 - protein, 12 aa, synthetic construct
CASSPRLDTQYF

SEQ ID NO: 16172 - protein, 15 aa, synthetic construct
CALSLATGGNNKLTF

SEQ ID NO: 16173 - protein, 14 aa, synthetic construct
CASSAGTGQDTQYF

SEQ ID NO: 16174 - protein, 15 aa, synthetic construct
CALSDRGTNAYKVIF

SEQ ID NO: 16175 - protein, 16 aa, synthetic construct
CASRRGLGGNYAEQFF

SEQ ID NO: 16176 - protein, 14 aa, synthetic construct
CAVSAPTNTGKLTF

SEQ ID NO: 16177 - protein, 11 aa, synthetic construct
CASRDSYEQYF

SEQ ID NO: 16178 - protein, 13 aa, synthetic construct
CALRGNNNNRIFF

SEQ ID NO: 16179 - protein, 11 aa, synthetic construct
CASRGNTEVFF

SEQ ID NO: 16180 - protein, 12 aa, synthetic construct
CAVGTGNYKYVF

SEQ ID NO: 16181 - protein, 11 aa, synthetic construct
CASRGEDTQYF

SEQ ID NO: 16182 - protein, 15 aa, synthetic construct
CALSDPRQGGRALIF

SEQ ID NO: 16183 - protein, 15 aa, synthetic construct
CASSKYRRSSYEQYF

SEQ ID NO: 16184 - protein, 14 aa, synthetic construct
CAMEASSSFSKLVF

SEQ ID NO: 16185 - protein, 13 aa, synthetic construct
CASSTGEDSDYTF

SEQ ID NO: 16186 - protein, 14 aa, synthetic construct
CAASGGGGNNKLTF

SEQ ID NO: 16187 - protein, 15 aa, synthetic construct
CASSTDRDGQDTQYF

SEQ ID NO: 16188 - protein, 12 aa, synthetic construct
CAVSSGSWQLIF

SEQ ID NO: 16189 - protein, 12 aa, synthetic construct
CASSTGTDTQYF

SEQ ID NO: 16190 - protein, 16 aa, synthetic construct
CAVSNSYGSSGNKLIF

SEQ ID NO: 16191 - protein, 14 aa, synthetic construct
CASSITENQDTQYF

SEQ ID NO: 16192 - protein, 13 aa, synthetic construct
CAASGNYAQGLTF

SEQ ID NO: 16193 - protein, 15 aa, synthetic construct
CASSITGGSAETLYF

SEQ ID NO: 16194 - protein, 14 aa, synthetic construct
CATDANYSNNRLTL

SEQ ID NO: 16195 - protein, 13 aa, synthetic construct
CASSIHRAAEQFF

SEQ ID NO: 16196 - protein, 16 aa, synthetic construct
CILRVAPTGGNNKLTF

SEQ ID NO: 16197 - protein, 13 aa, synthetic construct
CASSIDWGYEQYF

SEQ ID NO: 16198 - protein, 15 aa, synthetic construct
CAASMRGDYANKMIF

SEQ ID NO: 16199 - protein, 14 aa, synthetic construct
CASSIATGNERLFF

SEQ ID NO: 16200 - protein, 12 aa, synthetic construct
CACFYGNEKITF

SEQ ID NO: 16201 - protein, 12 aa, synthetic construct
CASSIAGSPLYF

SEQ ID NO: 16202 - protein, 12 aa, synthetic construct
CATDAGYQNFYF

SEQ ID NO: 16203 - protein, 13 aa, synthetic construct
CASSIGRVSPLYF

SEQ ID NO: 16204 - protein, 16 aa, synthetic construct
CAIDGEASSSFSKLVF

SEQ ID NO: 16205 - protein, 16 aa, synthetic construct
CASSIGGQGANERLFF

SEQ ID NO: 16206 - protein, 12 aa, synthetic construct
CALNNAGAKLTF

SEQ ID NO: 16207 - protein, 15 aa, synthetic construct
CASSIGGTSAETLYF

SEQ ID NO: 16208 - protein, 14 aa, synthetic construct
CALSPNNYAQGLTF

SEQ ID NO: 16209 - protein, 12 aa, synthetic construct
CASSIGGWEQYF

SEQ ID NO: 16210 - protein, 14 aa, synthetic construct
CAVSLTGGNNKLTF

SEQ ID NO: 16211 - protein, 12 aa, synthetic construct
CASSISNERLFF

SEQ ID NO: 16212 - protein, 12 aa, synthetic construct
CAIDPNTGKLTF

SEQ ID NO: 16213 - protein, 14 aa, synthetic construct
CASSIKGTNSDYTF

SEQ ID NO: 16214 - protein, 13 aa, synthetic construct
CAASVSGSWQLIF

SEQ ID NO: 16215 - protein, 12 aa, synthetic construct
CASSIRYTEVFF

SEQ ID NO: 16216 - protein, 14 aa, synthetic construct
CAMDSNYGNEKITF

SEQ ID NO: 16217 - protein, 15 aa, synthetic construct
CASSIGGTSAETLYF

SEQ ID NO: 16218 - protein, 18 aa, synthetic construct
CAMREGQVTGANTGKLTF

SEQ ID NO: 16219 - protein, 12 aa, synthetic construct
CASSIGGSEQYF

SEQ ID NO: 16220 - protein, 15 aa, synthetic construct
CAADDSGGSNYKLTF

SEQ ID NO: 16221 - protein, 12 aa, synthetic construct
CASSIFNERLFF

SEQ ID NO: 16222 - protein, 16 aa, synthetic construct
CAVRAYTGANTGKLTF

SEQ ID NO: 16223 - protein, 12 aa, synthetic construct
CASSMKEDTQYF

SEQ ID NO: 16224 - protein, 15 aa, synthetic construct
CAVSIGTGGADRLTF

SEQ ID NO: 16225 - protein, 13 aa, synthetic construct
CASSMGQGSDYTF

SEQ ID NO: 16226 - protein, 13 aa, synthetic construct
CALSDNYAQGLTF

SEQ ID NO: 16227 - protein, 12 aa, synthetic construct
CASSMGNSPLYF

SEQ ID NO: 16228 - protein, 17 aa, synthetic construct
CAMREGENGSSGNKLIF

SEQ ID NO: 16229 - protein, 12 aa, synthetic construct
CASSMGDERLFF

SEQ ID NO: 16230 - protein, 13 aa, synthetic construct
CAMRESYAQGLTF

SEQ ID NO: 16231 - protein, 15 aa, synthetic construct
CASSMGGLGTGQLYF

SEQ ID NO: 16232 - protein, 12 aa, synthetic construct
CGTAGSGGKLTL

SEQ ID NO: 16233 - protein, 14 aa, synthetic construct
CASSIGTDNERLFF

SEQ ID NO: 16234 - protein, 14 aa, synthetic construct
CALTASSGSWQLIF

SEQ ID NO: 16235 - protein, 11 aa, synthetic construct
CASSIGDEQYF

SEQ ID NO: 16236 - protein, 14 aa, synthetic construct
CALPSNTGYQNFYF

SEQ ID NO: 16237 - protein, 15 aa, synthetic construct
CASSQEGSSAETLYF

SEQ ID NO: 16238 - protein, 13 aa, synthetic construct
CAATSGGNYKPTF

SEQ ID NO: 16239 - protein, 13 aa, synthetic construct
CASSQGADSDYTF

SEQ ID NO: 16240 - protein, 14 aa, synthetic construct
CAVSAASGSWQLIF

SEQ ID NO: 16241 - protein, 13 aa, synthetic construct
CASSPRDNYEQYF

SEQ ID NO: 16242 - protein, 14 aa, synthetic construct
CALRSNYNQGKLIF

SEQ ID NO: 16243 - protein, 14 aa, synthetic construct
CASSPGKNTGQLYF

SEQ ID NO: 16244 - protein, 15 aa, synthetic construct
CAMRGDDSGYNKLTF

SEQ ID NO: 16245 - protein, 14 aa, synthetic construct
CASSRQGSGNTLYF

SEQ ID NO: 16246 - protein, 14 aa, synthetic construct
CAASELYSNNRLTL

SEQ ID NO: 16247 - protein, 12 aa, synthetic construct
CASSLQGPEVFF

SEQ ID NO: 16248 - protein, 15 aa, synthetic construct
CALSDLGSGSWQLIF

SEQ ID NO: 16249 - protein, 14 aa, synthetic construct
CASSSPGQYAEQFF

SEQ ID NO: 16250 - protein, 14 aa, synthetic construct
CAATYTGGADRLTF

SEQ ID NO: 16251 - protein, 15 aa, synthetic construct
CASSFPGQGYAEQFF

SEQ ID NO: 16252 - protein, 11 aa, synthetic construct
CARTNAYKVIF

SEQ ID NO: 16253 - protein, 14 aa, synthetic construct
CASAQGFYNSPLYF

SEQ ID NO: 16254 - protein, 14 aa, synthetic construct
CAAPNTEGADRLTF

SEQ ID NO: 16255 - protein, 15 aa, synthetic construct
CASAPGQGYNERLFF

SEQ ID NO: 16256 - protein, 15 aa, synthetic construct
CIVTAYVGDNSKLIW

SEQ ID NO: 16257 - protein, 12 aa, synthetic construct
CASGTGDAEQFF

SEQ ID NO: 16258 - protein, 12 aa, synthetic construct
CAVIGGGRALIF

SEQ ID NO: 16259 - protein, 12 aa, synthetic construct
CASSPGQNTLYF

SEQ ID NO: 16260 - protein, 15 aa, synthetic construct
CALSDLTGGADRLTF

SEQ ID NO: 16261 - protein, 13 aa, synthetic construct
CTCRTGGRTEVFF

SEQ ID NO: 16262 - protein, 15 aa, synthetic construct
CAVSNFQGTGSKLSF

SEQ ID NO: 16263 - protein, 12 aa, synthetic construct
CTCSPGGTEVFF

SEQ ID NO: 16264 - protein, 13 aa, synthetic construct
CAVTHNYAQGLTF

SEQ ID NO: 16265 - protein, 12 aa, synthetic construct
CTCSPGGTEVFF

SEQ ID NO: 16266 - protein, 13 aa, synthetic construct
CALSDTNTGKLTF

SEQ ID NO: 16267 - protein, 14 aa, synthetic construct
CTCSDNSYNSPLYF

SEQ ID NO: 16268 - protein, 14 aa, synthetic construct
CAVSASSGSWQLIF

SEQ ID NO: 16269 - protein, 14 aa, synthetic construct
CTCSASRANSDYTF

SEQ ID NO: 16270 - protein, 17 aa, synthetic construct
CALSDHGSGGSNAKLTF

SEQ ID NO: 16271 - protein, 11 aa, synthetic construct
CTCSAQTEVFF

SEQ ID NO: 16272 - protein, 14 aa, synthetic construct
CAVSPLTKTGKLPF

SEQ ID NO: 16273 - protein, 17 aa, synthetic construct
CTCSAESMGSSGNTLYF

SEQ ID NO: 16274 - protein, 16 aa, synthetic construct
CAVRDLPGTGSNRLTF

SEQ ID NO: 16275 - protein, 16 aa, synthetic construct
CTCSAEAGVNYAEQFF

SEQ ID NO: 16276 - protein, 15 aa, synthetic construct
CVVGDRGSALGRLHF

SEQ ID NO: 16277 - protein, 14 aa, synthetic construct
CTCSADWGVYEQYF

SEQ ID NO: 16278 - protein, 12 aa, synthetic construct
CALTEGADRLTF

SEQ ID NO: 16279 - protein, 15 aa, synthetic construct
CTCSADTGSQNTLYF

SEQ ID NO: 16280 - protein, 12 aa, synthetic construct
CASNTGYQNFYF

SEQ ID NO: 16281 - protein, 14 aa, synthetic construct
CTCSADPGQDTQYF

SEQ ID NO: 16282 - protein, 15 aa, synthetic construct
CAASAWGGSGNKLIF

SEQ ID NO: 16283 - protein, 15 aa, synthetic construct
CTCSADPFSNERLFF

SEQ ID NO: 16284 - protein, 13 aa, synthetic construct
CAASGDGNEKITF

SEQ ID NO: 16285 - protein, 14 aa, synthetic construct
CTCSADRQGTEVFF

SEQ ID NO: 16286 - protein, 16 aa, synthetic construct
CVLSARAGGSNAKLTF

SEQ ID NO: 16287 - protein, 12 aa, synthetic construct
CTCSAAGDEQYF

SEQ ID NO: 16288 - protein, 12 aa, synthetic construct
CALEPNAYKVIF

SEQ ID NO: 16289 - protein, 14 aa, synthetic construct
CTCSAGQNTGQLYF

SEQ ID NO: 16290 - protein, 13 aa, synthetic construct
CAVSADSNNRIFF

SEQ ID NO: 16291 - protein, 15 aa, synthetic construct
CTCSAGQGNYAEQFF

SEQ ID NO: 16292 - protein, 14 aa, synthetic construct
CAMRPTGNTRKLIF

SEQ ID NO: 16293 - protein, 15 aa, synthetic construct
CTCSAGGNSAETLYF

SEQ ID NO: 16294 - protein, 11 aa, synthetic construct
CATGDNSKLIW

SEQ ID NO: 16295 - protein, 13 aa, synthetic construct
CTCSAGTTETLYF

SEQ ID NO: 16296 - protein, 15 aa, synthetic construct
CVLREYQGGSAKLIF

SEQ ID NO: 16297 - protein, 13 aa, synthetic construct
CTCSAGTDTEVFF

SEQ ID NO: 16298 - protein, 15 aa, synthetic construct
CAASEHGTGGYKVVF

SEQ ID NO: 16299 - protein, 15 aa, synthetic construct
CTCSAGSSYNSPLYF

SEQ ID NO: 16300 - protein, 15 aa, synthetic construct
CAIPNSGGSNYKLTF

SEQ ID NO: 16301 - protein, 13 aa, synthetic construct
CTCSAGDNSPLYF

SEQ ID NO: 16302 - protein, 14 aa, synthetic construct
CALGEDTGYQNFYF

SEQ ID NO: 16303 - protein, 15 aa, synthetic construct
CTCSAGGGGAETLYF

SEQ ID NO: 16304 - protein, 12 aa, synthetic construct
CALNSAGNKLTF

SEQ ID NO: 16305 - protein, 15 aa, synthetic construct
CTCSAGGGENSPLYF

SEQ ID NO: 16306 - protein, 15 aa, synthetic construct
CVVAPYGSSGNKLIF

SEQ ID NO: 16307 - protein, 15 aa, synthetic construct
CTCSAGGGENSPLYF

SEQ ID NO: 16308 - protein, 12 aa, synthetic construct
CAVSSAGNKLTF

SEQ ID NO: 16309 - protein, 13 aa, synthetic construct
CTCSAGTDTEVFF

SEQ ID NO: 16310 - protein, 15 aa, synthetic construct
CAASEHGTGGYKVVF

SEQ ID NO: 16311 - protein, 16 aa, synthetic construct
CTCSAGTGGAMYEQYF

SEQ ID NO: 16312 - protein, 11 aa, synthetic construct
CAGEGADRLTF

SEQ ID NO: 16313 - protein, 15 aa, synthetic construct
CTCSATASYNSPLYF

SEQ ID NO: 16314 - protein, 17 aa, synthetic construct
CALGGVGATGGNNKLTF

SEQ ID NO: 16315 - protein, 15 aa, synthetic construct
CTCSATGASAETLYF

SEQ ID NO: 16316 - protein, 12 aa, synthetic construct
CALGYGNEKITF

SEQ ID NO: 16317 - protein, 13 aa, synthetic construct
CTCSVPGQGEVFF

SEQ ID NO: 16318 - protein, 12 aa, synthetic construct
CAVSTNAYKVIF

SEQ ID NO: 16319 - protein, 15 aa, synthetic construct
CTCSVRDNANTEVFF

SEQ ID NO: 16320 - protein, 12 aa, synthetic construct
CVLSASNNRIFF

SEQ ID NO: 16321 - protein, 15 aa, synthetic construct
CTCSVGLVSAETLYF

SEQ ID NO: 16322 - protein, 12 aa, synthetic construct
CAASYVGYKLTF

SEQ ID NO: 16323 - protein, 14 aa, synthetic construct
CTCSSRTGLGEQFF

SEQ ID NO: 16324 - protein, 14 aa, synthetic construct
CALSDGGSGNKLIF

SEQ ID NO: 16325 - protein, 9 aa, synthetic construct
GSGTRLTVL

SEQ ID NO: 16326 - protein, 10 aa, synthetic construct
GLGTTLQVQP

SEQ ID NO: 16327 - protein, 9 aa, synthetic construct
GPGTRLTVL

SEQ ID NO: 16328 - protein, 10 aa, synthetic construct
GDGTQLVVKP

SEQ ID NO: 16329 - protein, 9 aa, synthetic construct
GPGTRLTVL

SEQ ID NO: 16330 - protein, 10 aa, synthetic construct
GKGTHLHVLP

SEQ ID NO: 16331 - protein, 9 aa, synthetic construct
GSGTRLTVL

SEQ ID NO: 16332 - protein, 10 aa, synthetic construct
GQGTKLSIKP

SEQ ID NO: 16333 - protein, 9 aa, synthetic construct
GKGTRLTVV

SEQ ID NO: 16334 - protein, 10 aa, synthetic construct
GEGTQVTVIS

SEQ ID NO: 16335 - protein, 9 aa, synthetic construct
GPGTRLTVL

SEQ ID NO: 16336 - protein, 10 aa, synthetic construct
GSGTKLTVEP

SEQ ID NO: 16337 - protein, 9 aa, synthetic construct
GSGTRLLVI

SEQ ID NO: 16338 - protein, 10 aa, synthetic construct
GGGTRLTVRP

SEQ ID NO: 16339 - protein, 9 aa, synthetic construct
GSGTRLLVI

SEQ ID NO: 16340 - protein, 10 aa, synthetic construct
GSGTKLTVEP

SEQ ID NO: 16341 - protein, 9 aa, synthetic construct
GPGTRLLVL

SEQ ID NO: 16342 - protein, 10 aa, synthetic construct
GKGTKLSVKS

SEQ ID NO: 16343 - protein, 9 aa, synthetic construct
GSGTRLLVI

SEQ ID NO: 16344 - protein, 10 aa, synthetic construct
GLGTRVSVFP

SEQ ID NO: 16345 - protein, 9 aa, synthetic construct
GSGTRLTVL

SEQ ID NO: 16346 - protein, 10 aa, synthetic construct
GDGTQLVVKP

SEQ ID NO: 16347 - protein, 9 aa, synthetic construct
GEGSKLTVL

SEQ ID NO: 16348 - protein, 10 aa, synthetic construct
GTGTTVSVSP

SEQ ID NO: 16349 - protein, 9 aa, synthetic construct
GKGTRLTVV

SEQ ID NO: 16350 - protein, 10 aa, synthetic construct
GTGTLLSVKP

SEQ ID NO: 16351 - protein, 9 aa, synthetic construct
GPGTRLLVL

SEQ ID NO: 16352 - protein, 10 aa, synthetic construct
GLGTRVSVFP

SEQ ID NO: 16353 - protein, 9 aa, synthetic construct
GPGTRLTVL

SEQ ID NO: 16354 - protein, 10 aa, synthetic construct
GSGTRLLVSP

SEQ ID NO: 16355 - protein, 9 aa, synthetic construct
GPGTRLTVL

SEQ ID NO: 16356 - protein, 10 aa, synthetic construct
GHGTILRVHP

SEQ ID NO: 16357 - protein, 9 aa, synthetic construct
GSGTRLLVI

SEQ ID NO: 16358 - protein, 10 aa, synthetic construct
GLGTRVSVFP

SEQ ID NO: 16359 - protein, 9 aa, synthetic construct
GKGTRLTVV

SEQ ID NO: 16360 - protein, 10 aa, synthetic construct
GKGTQLIIQP

SEQ ID NO: 16361 - protein, 9 aa, synthetic construct
GPGTRLTVL

SEQ ID NO: 16362 - protein, 10 aa, synthetic construct
GKGTQLIIQP

SEQ ID NO: 16363 - protein, 9 aa, synthetic construct
GEGSKLTVL

SEQ ID NO: 16364 - protein, 10 aa, synthetic construct
GTGTTVSVSP

SEQ ID NO: 16365 - protein, 9 aa, synthetic construct
GAGTRLSVL

SEQ ID NO: 16366 - protein, 10 aa, synthetic construct
GKGTSLTVIP

SEQ ID NO: 16367 - protein, 9 aa, synthetic construct
GSGTRLTVL

SEQ ID NO: 16368 - protein, 10 aa, synthetic construct
GQGTVLSVIP

SEQ ID NO: 16369 - protein, 9 aa, synthetic construct
GSGTRLTVL

SEQ ID NO: 16370 - protein, 10 aa, synthetic construct
GTGTTVSVSP

SEQ ID NO: 16371 - protein, 9 aa, synthetic construct
GPGTRLTVL

SEQ ID NO: 16372 - protein, 10 aa, synthetic construct
GSGTKLIIKP

SEQ ID NO: 16373 - protein, 9 aa, synthetic construct
GEGSKLTVL

SEQ ID NO: 16374 - protein, 10 aa, synthetic construct
GTGTRLQVSP

SEQ ID NO: 16375 - protein, 9 aa, synthetic construct
GAGTRLSVL

SEQ ID NO: 16376 - protein, 10 aa, synthetic construct
GKGTSLTVIP

SEQ ID NO: 16377 - protein, 9 aa, synthetic construct
GSGTRLTVL

SEQ ID NO: 16378 - protein, 10 aa, synthetic construct
GKGTVLLVSP

SEQ ID NO: 16379 - protein, 9 aa, synthetic construct
GPGTRLTVL

SEQ ID NO: 16380 - protein, 10 aa, synthetic construct
GAGTRLKVIA

SEQ ID NO: 16381 - protein, 9 aa, synthetic construct
AAGTRLTVT

SEQ ID NO: 16382 - protein, 10 aa, synthetic construct
GKGTQLIIQP

SEQ ID NO: 16383 - protein, 9 aa, synthetic construct
GPGTRLTVL

SEQ ID NO: 16384 - protein, 10 aa, synthetic construct
GEGTKLTVSS

SEQ ID NO: 16385 - protein, 9 aa, synthetic construct
GSGTRLLVI

SEQ ID NO: 16386 - protein, 10 aa, synthetic construct
GKGTHLHVLP

SEQ ID NO: 16387 - protein, 9 aa, synthetic construct
GPGTRLTVL

SEQ ID NO: 16388 - protein, 10 aa, synthetic construct
GSGTKLIIKP

SEQ ID NO: 16389 - protein, 9 aa, synthetic construct
GKGTRLTVV

SEQ ID NO: 16390 - protein, 10 aa, synthetic construct
GHGTILRVHP

SEQ ID NO: 16391 - protein, 9 aa, synthetic construct
GPGTRLLVL

SEQ ID NO: 16392 - protein, 10 aa, synthetic construct
GDGTQLVVKP

SEQ ID NO: 16393 - protein, 9 aa, synthetic construct
GSGTRLTVL

SEQ ID NO: 16394 - protein, 10 aa, synthetic construct
GKGTSLVVHP

SEQ ID NO: 16395 - protein, 9 aa, synthetic construct
GSGTRLTVL

SEQ ID NO: 16396 - protein, 10 aa, synthetic construct
GLGTTLQVQP

SEQ ID NO: 16397 - protein, 9 aa, synthetic construct
GPGTRLTVL

SEQ ID NO: 16398 - protein, 10 aa, synthetic construct
GTGTSLLVDP

SEQ ID NO: 16399 - protein, 9 aa, synthetic construct
GKGTRLTVV

SEQ ID NO: 16400 - protein, 10 aa, synthetic construct
GSGTQLTVMP

SEQ ID NO: 16401 - protein, 9 aa, synthetic construct
GHGTKLSVL

SEQ ID NO: 16402 - protein, 10 aa, synthetic construct
GSGTQLTVMP

SEQ ID NO: 16403 - protein, 9 aa, synthetic construct
GPGTRLTVL

SEQ ID NO: 16404 - protein, 10 aa, synthetic construct
GSGTRLLVSP

SEQ ID NO: 16405 - protein, 9 aa, synthetic construct
GPGTRLLVL

SEQ ID NO: 16406 - protein, 10 aa, synthetic construct
GHGTILRVHP

SEQ ID NO: 16407 - protein, 9 aa, synthetic construct
GSGTRLTVL

SEQ ID NO: 16408 - protein, 10 aa, synthetic construct
GLGTTLQVQP

SEQ ID NO: 16409 - protein, 9 aa, synthetic construct
GHGTKLSVL

SEQ ID NO: 16410 - protein, 10 aa, synthetic construct
GKGTQLIIQP

SEQ ID NO: 16411 - protein, 9 aa, synthetic construct
GKGTRLTVV

SEQ ID NO: 16412 - protein, 10 aa, synthetic construct
GKGTQLIIQP

SEQ ID NO: 16413 - protein, 9 aa, synthetic construct
GSGTRLTVL

SEQ ID NO: 16414 - protein, 10 aa, synthetic construct
GQGTILKVYL

SEQ ID NO: 16415 - protein, 9 aa, synthetic construct
GSGTRLTVL

SEQ ID NO: 16416 - protein, 10 aa, synthetic construct
GLGTILRVRP

SEQ ID NO: 16417 - protein, 9 aa, synthetic construct
GPGTRLTVL

SEQ ID NO: 16418 - protein, 10 aa, synthetic construct
GDGTQLVVKP

SEQ ID NO: 16419 - protein, 9 aa, synthetic construct
GPGTRLTVL

SEQ ID NO: 16420 - protein, 10 aa, synthetic construct
GRGTRLQVYA

SEQ ID NO: 16421 - protein, 9 aa, synthetic construct
GKGTRLTVV

SEQ ID NO: 16422 - protein, 10 aa, synthetic construct
GQGTSLSVVP

SEQ ID NO: 16423 - protein, 9 aa, synthetic construct
GPGTRLTVL

SEQ ID NO: 16424 - protein, 10 aa, synthetic construct
GAGTKLTVKP

SEQ ID NO: 16425 - protein, 9 aa, synthetic construct
GSGTRLTVL

SEQ ID NO: 16426 - protein, 10 aa, synthetic construct
GAGTKLSVKP

SEQ ID NO: 16427 - protein, 9 aa, synthetic construct
GPGTRLLVL

SEQ ID NO: 16428 - protein, 10 aa, synthetic construct
GKGTKLSVKS

SEQ ID NO: 16429 - protein, 9 aa, synthetic construct
GSGTRLTVL

SEQ ID NO: 16430 - protein, 10 aa, synthetic construct
GKGTSLVVHP

SEQ ID NO: 16431 - protein, 9 aa, synthetic construct
GPGTRLLVL

SEQ ID NO: 16432 - protein, 10 aa, synthetic construct
GTGTKLQVVP

SEQ ID NO: 16433 - protein, 9 aa, synthetic construct
GPGTRLTVL

SEQ ID NO: 16434 - protein, 10 aa, synthetic construct
GTGTKLQVVP

SEQ ID NO: 16435 - protein, 9 aa, synthetic construct
GHGTKLSVL

SEQ ID NO: 16436 - protein, 10 aa, synthetic construct
GLGTTLQVQP

SEQ ID NO: 16437 - protein, 9 aa, synthetic construct
GKGTRLTVV

SEQ ID NO: 16438 - protein, 10 aa, synthetic construct
GTGTTVSVSP

SEQ ID NO: 16439 - protein, 9 aa, synthetic construct
GHGTKLSVL

SEQ ID NO: 16440 - protein, 10 aa, synthetic construct
GSGTKLIIKP

SEQ ID NO: 16441 - protein, 9 aa, synthetic construct
GEGTRLSVL

SEQ ID NO: 16442 - protein, 10 aa, synthetic construct
GDGTQLVVKP

SEQ ID NO: 16443 - protein, 9 aa, synthetic construct
GEGTRLSVL

SEQ ID NO: 16444 - protein, 10 aa, synthetic construct
GQGTKLSIKP

SEQ ID NO: 16445 - protein, 9 aa, synthetic construct
GPGTRLTVL

SEQ ID NO: 16446 - protein, 10 aa, synthetic construct
GKGTHLHVLP

SEQ ID NO: 16447 - protein, 9 aa, synthetic construct
GEGSKLTVL

SEQ ID NO: 16448 - protein, 10 aa, synthetic construct
GTGTRLQVNL

SEQ ID NO: 16449 - protein, 9 aa, synthetic construct
GPGTRLTVL

SEQ ID NO: 16450 - protein, 10 aa, synthetic construct
GLGTRVSVFP

SEQ ID NO: 16451 - protein, 9 aa, synthetic construct
GEGSKLTVL

SEQ ID NO: 16452 - protein, 10 aa, synthetic construct
GSGTKLIIKP

SEQ ID NO: 16453 - protein, 9 aa, synthetic construct
GAGTRLSVL

SEQ ID NO: 16454 - protein, 10 aa, synthetic construct
GHGTILRVHP

SEQ ID NO: 16455 - protein, 9 aa, synthetic construct
GPGTRLTVL

SEQ ID NO: 16456 - protein, 10 aa, synthetic construct
GIGTLLSVKP

SEQ ID NO: 16457 - protein, 9 aa, synthetic construct
GPGTRLTVL

SEQ ID NO: 16458 - protein, 10 aa, synthetic construct
GQGTKLSIKP

SEQ ID NO: 16459 - protein, 9 aa, synthetic construct
GPGTRLTVL

SEQ ID NO: 16460 - protein, 10 aa, synthetic construct
GKGTSLTVIP

SEQ ID NO: 16461 - protein, 9 aa, synthetic construct
GKGTRLTVV

SEQ ID NO: 16462 - protein, 10 aa, synthetic construct
GSGTQLTVMP

SEQ ID NO: 16463 - protein, 9 aa, synthetic construct
GSGTRLTVL

SEQ ID NO: 16464 - protein, 10 aa, synthetic construct
GGGTRLTVRP

SEQ ID NO: 16465 - protein, 9 aa, synthetic construct
GAGTRLSVL

SEQ ID NO: 16466 - protein, 10 aa, synthetic construct
GLGTTLQVQP

SEQ ID NO: 16467 - protein, 9 aa, synthetic construct
GPGTRLLVL

SEQ ID NO: 16468 - protein, 10 aa, synthetic construct
GQGTSLSVVP

SEQ ID NO: 16469 - protein, 9 aa, synthetic construct
GPGTRLTVL

SEQ ID NO: 16470 - protein, 10 aa, synthetic construct
GAGTKLTVKP

SEQ ID NO: 16471 - protein, 9 aa, synthetic construct
GEGSRLIVV

SEQ ID NO: 16472 - protein, 10 aa, synthetic construct
GTGTSLLVDP

SEQ ID NO: 16473 - protein, 9 aa, synthetic construct
GSGTRLLVI

SEQ ID NO: 16474 - protein, 10 aa, synthetic construct
GKGTQLIIQP

SEQ ID NO: 16475 - protein, 9 aa, synthetic construct
GPGTRLTVL

SEQ ID NO: 16476 - protein, 10 aa, synthetic construct
GKGTSLTVIP

SEQ ID NO: 16477 - protein, 9 aa, synthetic construct
GPGTRLTVL

SEQ ID NO: 16478 - protein, 10 aa, synthetic construct
GKGTHLHVLP

SEQ ID NO: 16479 - protein, 9 aa, synthetic construct
GHGTKLSVL

SEQ ID NO: 16480 - protein, 10 aa, synthetic construct
GAGTQLIVIP

SEQ ID NO: 16481 - protein, 9 aa, synthetic construct
GHGTKLSVL

SEQ ID NO: 16482 - protein, 10 aa, synthetic construct
GTGTLLSVKP

SEQ ID NO: 16483 - protein, 9 aa, synthetic construct
GEGSKLTVL

SEQ ID NO: 16484 - protein, 10 aa, synthetic construct
GAGTQLIVIP

SEQ ID NO: 16485 - protein, 9 aa, synthetic construct
GSGTRLTVL

SEQ ID NO: 16486 - protein, 10 aa, synthetic construct
GKGTHLHVLP

SEQ ID NO: 16487 - protein, 9 aa, synthetic construct
GKGTRLTVV

SEQ ID NO: 16488 - protein, 10 aa, synthetic construct
GTGTQVVVTP

SEQ ID NO: 16489 - protein, 9 aa, synthetic construct
GEGSRLIVV

SEQ ID NO: 16490 - protein, 10 aa, synthetic construct
GKGTSLTVIP

SEQ ID NO: 16491 - protein, 9 aa, synthetic construct
GAGTRLSVL

SEQ ID NO: 16492 - protein, 10 aa, synthetic construct
GTGTRLQVSP

SEQ ID NO: 16493 - protein, 9 aa, synthetic construct
GSGTRLLVI

SEQ ID NO: 16494 - protein, 10 aa, synthetic construct
GAGTKLTVKP

SEQ ID NO: 16495 - protein, 9 aa, synthetic construct
GKGTRLTVV

SEQ ID NO: 16496 - protein, 10 aa, synthetic construct
GAGTRLKVIA

SEQ ID NO: 16497 - protein, 9 aa, synthetic construct
GPGTRLTVL

SEQ ID NO: 16498 - protein, 10 aa, synthetic construct
GQGTILKVYL

SEQ ID NO: 16499 - protein, 9 aa, synthetic construct
GAGTRLSVL

SEQ ID NO: 16500 - protein, 10 aa, synthetic construct
GGGTRLTVRP

SEQ ID NO: 16501 - protein, 9 aa, synthetic construct
GKGTRLTVV

SEQ ID NO: 16502 - protein, 10 aa, synthetic construct
GKGTQLIIQP

SEQ ID NO: 16503 - protein, 9 aa, synthetic construct
AAGTRLTVT

SEQ ID NO: 16504 - protein, 10 aa, synthetic construct
GQGTVLSVIP

SEQ ID NO: 16505 - protein, 9 aa, synthetic construct
GEGSRLIVV

SEQ ID NO: 16506 - protein, 10 aa, synthetic construct
GKGTQLIIQP

SEQ ID NO: 16507 - protein, 9 aa, synthetic construct
GAGTRLSVL

SEQ ID NO: 16508 - protein, 10 aa, synthetic construct
GKGTSLTVIP

SEQ ID NO: 16509 - protein, 9 aa, synthetic construct
GPGTRLTVL

SEQ ID NO: 16510 - protein, 10 aa, synthetic construct
GQGTSLSVVP

SEQ ID NO: 16511 - protein, 9 aa, synthetic construct
GPGTRLTVL

SEQ ID NO: 16512 - protein, 10 aa, synthetic construct
GAGTKLTIKP

SEQ ID NO: 16513 - protein, 9 aa, synthetic construct
GSGTRLTVL

SEQ ID NO: 16514 - protein, 10 aa, synthetic construct
GSGTQLTVMP

SEQ ID NO: 16515 - protein, 9 aa, synthetic construct
GKGTRLTVV

SEQ ID NO: 16516 - protein, 10 aa, synthetic construct
GDGTVLTVKP

SEQ ID NO: 16517 - protein, 9 aa, synthetic construct
GPGTRLTVL

SEQ ID NO: 16518 - protein, 10 aa, synthetic construct
GSGTQLTVMP

SEQ ID NO: 16519 - protein, 9 aa, synthetic construct
GPGTRLTVL

SEQ ID NO: 16520 - protein, 10 aa, synthetic construct
GLGTILRVRP

SEQ ID NO: 16521 - protein, 9 aa, synthetic construct
GSGTRLTVL

SEQ ID NO: 16522 - protein, 10 aa, synthetic construct
GTGTSLLVDP

SEQ ID NO: 16523 - protein, 9 aa, synthetic construct
GPGTRLTVL

SEQ ID NO: 16524 - protein, 10 aa, synthetic construct
GKGAKLTVSP

SEQ ID NO: 16525 - protein, 9 aa, synthetic construct
GPGTRLTVL

SEQ ID NO: 16526 - protein, 10 aa, synthetic construct
GKGTHLHVLP

SEQ ID NO: 16527 - protein, 9 aa, synthetic construct
GEGTRLSVL

SEQ ID NO: 16528 - protein, 10 aa, synthetic construct
GSGTKLIIKP

SEQ ID NO: 16529 - protein, 9 aa, synthetic construct
GKGTRLTVV

SEQ ID NO: 16530 - protein, 10 aa, synthetic construct
GLGTILRVRP

SEQ ID NO: 16531 - protein, 9 aa, synthetic construct
GPGTRLLVL

SEQ ID NO: 16532 - protein, 10 aa, synthetic construct
GKGAKLTVSP

SEQ ID NO: 16533 - protein, 9 aa, synthetic construct
GPGTRLTVL

SEQ ID NO: 16534 - protein, 10 aa, synthetic construct
GTGTRLQVSP

SEQ ID NO: 16535 - protein, 9 aa, synthetic construct
GPGTRLTVL

SEQ ID NO: 16536 - protein, 10 aa, synthetic construct
GKGTSLVVHP

SEQ ID NO: 16537 - protein, 9 aa, synthetic construct
GPGTRLLVL

SEQ ID NO: 16538 - protein, 10 aa, synthetic construct
GQGTSLSVVP

SEQ ID NO: 16539 - protein, 9 aa, synthetic construct
GSGTRLLVI

SEQ ID NO: 16540 - protein, 10 aa, synthetic construct
GTGTLLSVKP

SEQ ID NO: 16541 - protein, 9 aa, synthetic construct
GEGTRLSVL

SEQ ID NO: 16542 - protein, 10 aa, synthetic construct
GEGTKLTVSS

SEQ ID NO: 16543 - protein, 9 aa, synthetic construct
GPGTRLLVL

SEQ ID NO: 16544 - protein, 10 aa, synthetic construct
GAGTKLTIKP

SEQ ID NO: 16545 - protein, 9 aa, synthetic construct
GPGTRLLVL

SEQ ID NO: 16546 - protein, 10 aa, synthetic construct
GKGTHLHVLP

SEQ ID NO: 16547 - protein, 9 aa, synthetic construct
GSGTRLLVI

SEQ ID NO: 16548 - protein, 10 aa, synthetic construct
GKGTQLIIQP

SEQ ID NO: 16549 - protein, 9 aa, synthetic construct
GEGSKLTVL

SEQ ID NO: 16550 - protein, 10 aa, synthetic construct
GHGTILRVHP

SEQ ID NO: 16551 - protein, 9 aa, synthetic construct
GPGTRLTVL

SEQ ID NO: 16552 - protein, 10 aa, synthetic construct
GKGTSLTVIP

SEQ ID NO: 16553 - protein, 9 aa, synthetic construct
GPGTRLTVL

SEQ ID NO: 16554 - protein, 10 aa, synthetic construct
GHGTILRVHP

SEQ ID NO: 16555 - protein, 9 aa, synthetic construct
GEGSKLTVL

SEQ ID NO: 16556 - protein, 10 aa, synthetic construct
GIGTLLSVKP

SEQ ID NO: 16557 - protein, 9 aa, synthetic construct
GEGTRLSVL

SEQ ID NO: 16558 - protein, 10 aa, synthetic construct
GAGTQLIVIP

SEQ ID NO: 16559 - protein, 9 aa, synthetic construct
GPGTRLTVL

SEQ ID NO: 16560 - protein, 10 aa, synthetic construct
GKGTSLTVIP

SEQ ID NO: 16561 - protein, 9 aa, synthetic construct
GPGTRLLVL

SEQ ID NO: 16562 - protein, 10 aa, synthetic construct
GTGTSLLVDP

SEQ ID NO: 16563 - protein, 9 aa, synthetic construct
GSGTRLTVL

SEQ ID NO: 16564 - protein, 10 aa, synthetic construct
GKGTSLTVIP

SEQ ID NO: 16565 - protein, 9 aa, synthetic construct
GSGTRLTVL

SEQ ID NO: 16566 - protein, 10 aa, synthetic construct
GLGTILRVRP

SEQ ID NO: 16567 - protein, 9 aa, synthetic construct
GKGTRLTVV

SEQ ID NO: 16568 - protein, 10 aa, synthetic construct
GDGTQLVVKP

SEQ ID NO: 16569 - protein, 9 aa, synthetic construct
GPGTRLTVL

SEQ ID NO: 16570 - protein, 10 aa, synthetic construct
GKGTSLTVIP

SEQ ID NO: 16571 - protein, 9 aa, synthetic construct
GPGTRLLVL

SEQ ID NO: 16572 - protein, 10 aa, synthetic construct
GQGTVLSVIP

SEQ ID NO: 16573 - protein, 9 aa, synthetic construct
GAGTRLSVL

SEQ ID NO: 16574 - protein, 10 aa, synthetic construct
GSGTKLTVEP

SEQ ID NO: 16575 - protein, 9 aa, synthetic construct
GHGTKLSVL

SEQ ID NO: 16576 - protein, 10 aa, synthetic construct
GKGTSLVVHP

SEQ ID NO: 16577 - protein, 9 aa, synthetic construct
GPGTRLTVL

SEQ ID NO: 16578 - protein, 10 aa, synthetic construct
GAGTRLKVIA

SEQ ID NO: 16579 - protein, 9 aa, synthetic construct
GPGTRLTVL

SEQ ID NO: 16580 - protein, 10 aa, synthetic construct
GIGTRVLVRP

SEQ ID NO: 16581 - protein, 9 aa, synthetic construct
GPGTRLTVL

SEQ ID NO: 16582 - protein, 10 aa, synthetic construct
GSGTRLLVSP

SEQ ID NO: 16583 - protein, 9 aa, synthetic construct
GPGTRLTVL

SEQ ID NO: 16584 - protein, 10 aa, synthetic construct
GTGTQVVVTP

SEQ ID NO: 16585 - protein, 9 aa, synthetic construct
GPGTRLTVL

SEQ ID NO: 16586 - protein, 10 aa, synthetic construct
GLGTRVSVFP

SEQ ID NO: 16587 - protein, 9 aa, synthetic construct
GKGTRLTVV

SEQ ID NO: 16588 - protein, 10 aa, synthetic construct
GKGTSLVVHP

SEQ ID NO: 16589 - protein, 9 aa, synthetic construct
GPGTRLLVL

SEQ ID NO: 16590 - protein, 10 aa, synthetic construct
GDGTVLTVKP

SEQ ID NO: 16591 - protein, 9 aa, synthetic construct
GEGSRLIVV

SEQ ID NO: 16592 - protein, 10 aa, synthetic construct
GTGTLLSVKP

SEQ ID NO: 16593 - protein, 9 aa, synthetic construct
GPGTRLTVL

SEQ ID NO: 16594 - protein, 10 aa, synthetic construct
GKGTKLSVKS

SEQ ID NO: 16595 - protein, 9 aa, synthetic construct
GKGTRLTVV

SEQ ID NO: 16596 - protein, 10 aa, synthetic construct
GSGTRLLVSP

SEQ ID NO: 16597 - protein, 9 aa, synthetic construct
GPGTRLTVL

SEQ ID NO: 16598 - protein, 10 aa, synthetic construct
GDGTQLVVKP

SEQ ID NO: 16599 - protein, 9 aa, synthetic construct
GPGTRLTVL

SEQ ID NO: 16600 - protein, 10 aa, synthetic construct
GHGTILRVHP

SEQ ID NO: 16601 - protein, 9 aa, synthetic construct
GSGTRLTVL

SEQ ID NO: 16602 - protein, 10 aa, synthetic construct
GKGTHLHVLP

SEQ ID NO: 16603 - protein, 9 aa, synthetic construct
GKGTRLTVV

SEQ ID NO: 16604 - protein, 10 aa, synthetic construct
GHGTILRVHP

SEQ ID NO: 16605 - protein, 9 aa, synthetic construct
GPGTRLTVL

SEQ ID NO: 16606 - protein, 10 aa, synthetic construct
GKGTQLIIQP

SEQ ID NO: 16607 - protein, 9 aa, synthetic construct
GAGTRLSVL

SEQ ID NO: 16608 - protein, 10 aa, synthetic construct
GKGTKFSLIP

SEQ ID NO: 16609 - protein, 9 aa, synthetic construct
GAGTRLSVL

SEQ ID NO: 16610 - protein, 10 aa, synthetic construct
GIGTLLSVKP

SEQ ID NO: 16611 - protein, 9 aa, synthetic construct
GEGSKLTVL

SEQ ID NO: 16612 - protein, 10 aa, synthetic construct
GAGTKLTIKP

SEQ ID NO: 16613 - protein, 9 aa, synthetic construct
GSGTRLTVL

SEQ ID NO: 16614 - protein, 10 aa, synthetic construct
GKGTKLSVKS

SEQ ID NO: 16615 - protein, 9 aa, synthetic construct
GPGTRLTVL

SEQ ID NO: 16616 - protein, 10 aa, synthetic construct
GKGTSLTVIP

SEQ ID NO: 16617 - protein, 9 aa, synthetic construct
GAGTRLSVL

SEQ ID NO: 16618 - protein, 10 aa, synthetic construct
GDGTQLVVKP

SEQ ID NO: 16619 - protein, 9 aa, synthetic construct
GPGTRLTVL

SEQ ID NO: 16620 - protein, 10 aa, synthetic construct
GRGTRLQVYA

SEQ ID NO: 16621 - protein, 9 aa, synthetic construct
GAGTRLSVL

SEQ ID NO: 16622 - protein, 10 aa, synthetic construct
GKGTSLVVHP

SEQ ID NO: 16623 - protein, 9 aa, synthetic construct
GKGTRLTVV

SEQ ID NO: 16624 - protein, 10 aa, synthetic construct
GLGTRVSVFP

SEQ ID NO: 16625 - protein, 9 aa, synthetic construct
GKGTRLTVV

SEQ ID NO: 16626 - protein, 10 aa, synthetic construct
GLGTRVSVFP

SEQ ID NO: 16627 - protein, 9 aa, synthetic construct
GPGTRLTVL

SEQ ID NO: 16628 - protein, 10 aa, synthetic construct
GKGTQLIIQP

SEQ ID NO: 16629 - protein, 9 aa, synthetic construct
GPGTRLLVL

SEQ ID NO: 16630 - protein, 10 aa, synthetic construct
GSGTQLTVMP

SEQ ID NO: 16631 - protein, 9 aa, synthetic construct
GSGTRLTVL

SEQ ID NO: 16632 - protein, 10 aa, synthetic construct
GTGTRLQVNL

SEQ ID NO: 16633 - protein, 9 aa, synthetic construct
GPGTRLTVL

SEQ ID NO: 16634 - protein, 10 aa, synthetic construct
GTGTSLLVDP

SEQ ID NO: 16635 - protein, 9 aa, synthetic construct
AAGTRLTVT

SEQ ID NO: 16636 - protein, 10 aa, synthetic construct
GLGTILRVRP

SEQ ID NO: 16637 - protein, 9 aa, synthetic construct
GKGTRLTVV

SEQ ID NO: 16638 - protein, 10 aa, synthetic construct
GAGTKLTIKP

SEQ ID NO: 16639 - protein, 9 aa, synthetic construct
GSGTRLLVI

SEQ ID NO: 16640 - protein, 10 aa, synthetic construct
GKGTQLIIQP

SEQ ID NO: 16641 - protein, 9 aa, synthetic construct
AAGTRLTVT

SEQ ID NO: 16642 - protein, 10 aa, synthetic construct
GKGTLLTVTP

SEQ ID NO: 16643 - protein, 9 aa, synthetic construct
GPGTRLLVL

SEQ ID NO: 16644 - protein, 10 aa, synthetic construct
GKGTQVVVLP

SEQ ID NO: 16645 - protein, 9 aa, synthetic construct
GEGSRLIVV

SEQ ID NO: 16646 - protein, 10 aa, synthetic construct
GKGTSLTVIP

SEQ ID NO: 16647 - protein, 9 aa, synthetic construct
GPGTRLTVL

SEQ ID NO: 16648 - protein, 10 aa, synthetic construct
GKGTHLHVLP

SEQ ID NO: 16649 - protein, 9 aa, synthetic construct
GSGTRLTVL

SEQ ID NO: 16650 - protein, 10 aa, synthetic construct
GKGTQLIIQP

SEQ ID NO: 16651 - protein, 9 aa, synthetic construct
GEGTRLSVL

SEQ ID NO: 16652 - protein, 10 aa, synthetic construct
GLGTTLQVQP

SEQ ID NO: 16653 - protein, 9 aa, synthetic construct
GPGTRLTVL

SEQ ID NO: 16654 - protein, 10 aa, synthetic construct
GLGTRVSVFP

SEQ ID NO: 16655 - protein, 9 aa, synthetic construct
GPGTRLLVL

SEQ ID NO: 16656 - protein, 10 aa, synthetic construct
GAGTKLTIKP

SEQ ID NO: 16657 - protein, 9 aa, synthetic construct
GEGSKLTVL

SEQ ID NO: 16658 - protein, 10 aa, synthetic construct
GQGTVLSVIP

SEQ ID NO: 16659 - protein, 9 aa, synthetic construct
GPGTRLLVL

SEQ ID NO: 16660 - protein, 10 aa, synthetic construct
GIGTRVLVRP

SEQ ID NO: 16661 - protein, 9 aa, synthetic construct
GKGTRLTVV

SEQ ID NO: 16662 - protein, 10 aa, synthetic construct
GDGTQLVVKP

SEQ ID NO: 16663 - protein, 9 aa, synthetic construct
GSGTRLLVI

SEQ ID NO: 16664 - protein, 10 aa, synthetic construct
GKGTQVVVLP

SEQ ID NO: 16665 - protein, 9 aa, synthetic construct
GSGTRLTVL

SEQ ID NO: 16666 - protein, 10 aa, synthetic construct
GSGTKLTVEP

SEQ ID NO: 16667 - protein, 9 aa, synthetic construct
GSGTRLTVL

SEQ ID NO: 16668 - protein, 10 aa, synthetic construct
GAGTRLKVIA

SEQ ID NO: 16669 - protein, 9 aa, synthetic construct
GHGTKLSVL

SEQ ID NO: 16670 - protein, 10 aa, synthetic construct
GLGTILRVRP

SEQ ID NO: 16671 - protein, 9 aa, synthetic construct
GEGSKLTVL

SEQ ID NO: 16672 - protein, 10 aa, synthetic construct
GKGTQLIIQP

SEQ ID NO: 16673 - protein, 9 aa, synthetic construct
GKGTRLTVV

SEQ ID NO: 16674 - protein, 10 aa, synthetic construct
GAGTQLIVIP

SEQ ID NO: 16675 - protein, 9 aa, synthetic construct
GEGTRLSVL

SEQ ID NO: 16676 - protein, 10 aa, synthetic construct
GAGTKLTVKP

SEQ ID NO: 16677 - protein, 9 aa, synthetic construct
GPGTRLLVL

SEQ ID NO: 16678 - protein, 10 aa, synthetic construct
GSGTQLTVMP

SEQ ID NO: 16679 - protein, 9 aa, synthetic construct
GPGTRLTVL

SEQ ID NO: 16680 - protein, 10 aa, synthetic construct
GKGTSLVVHP

SEQ ID NO: 16681 - protein, 9 aa, synthetic construct
GHGTKLSVL

SEQ ID NO: 16682 - protein, 10 aa, synthetic construct
GIGTRVLVRP

SEQ ID NO: 16683 - protein, 9 aa, synthetic construct
GKGTRLTVV

SEQ ID NO: 16684 - protein, 10 aa, synthetic construct
GKGTQLIIQP

SEQ ID NO: 16685 - protein, 9 aa, synthetic construct
GPGTRLTVL

SEQ ID NO: 16686 - protein, 10 aa, synthetic construct
GDGTVLTVKP

SEQ ID NO: 16687 - protein, 9 aa, synthetic construct
GSGTRLTVL

SEQ ID NO: 16688 - protein, 10 aa, synthetic construct
GTGTSLLVDP

SEQ ID NO: 16689 - protein, 9 aa, synthetic construct
GPGTRLLVL

SEQ ID NO: 16690 - protein, 10 aa, synthetic construct
GTGTQVVVTP

SEQ ID NO: 16691 - protein, 9 aa, synthetic construct
GPGTRLTVL

SEQ ID NO: 16692 - protein, 10 aa, synthetic construct
GAGTRLAVCP

SEQ ID NO: 16693 - protein, 9 aa, synthetic construct
GPGTRLTVL

SEQ ID NO: 16694 - protein, 10 aa, synthetic construct
GAGTRLAVCP

SEQ ID NO: 16695 - protein, 9 aa, synthetic construct
GPGTRLTVL

SEQ ID NO: 16696 - protein, 10 aa, synthetic construct
GAGTRLKVIA

SEQ ID NO: 16697 - protein, 9 aa, synthetic construct
GEGTRLSVL

SEQ ID NO: 16698 - protein, 10 aa, synthetic construct
GTGTRLQVLP

SEQ ID NO: 16699 - protein, 9 aa, synthetic construct
GEGTRLSVL

SEQ ID NO: 16700 - protein, 10 aa, synthetic construct
GTGTRLQVLP

SEQ ID NO: 16701 - protein, 9 aa, synthetic construct
GEGSKLTVL

SEQ ID NO: 16702 - protein, 10 aa, synthetic construct
GKGTKFSLIP

SEQ ID NO: 16703 - protein, 9 aa, synthetic construct
GKGTRLTVV

SEQ ID NO: 16704 - protein, 10 aa, synthetic construct
GSGTQLTVMP

SEQ ID NO: 16705 - protein, 9 aa, synthetic construct
GSGTRLLVI

SEQ ID NO: 16706 - protein, 10 aa, synthetic construct
GLGTRVSVFP

SEQ ID NO: 16707 - protein, 9 aa, synthetic construct
GPGTRLLVL

SEQ ID NO: 16708 - protein, 10 aa, synthetic construct
GSGTQLTVMP

SEQ ID NO: 16709 - protein, 9 aa, synthetic construct
GPGTRLLVL

SEQ ID NO: 16710 - protein, 10 aa, synthetic construct
GQGTVLSVIP

SEQ ID NO: 16711 - protein, 9 aa, synthetic construct
GPGTRLLVL

SEQ ID NO: 16712 - protein, 10 aa, synthetic construct
GDGTQLVVKP

SEQ ID NO: 16713 - protein, 9 aa, synthetic construct
GEGSRLIVV

SEQ ID NO: 16714 - protein, 10 aa, synthetic construct
GKGTKLSVKS

SEQ ID NO: 16715 - protein, 9 aa, synthetic construct
GEGSRLIVV

SEQ ID NO: 16716 - protein, 10 aa, synthetic construct
GLGTILRVRP

SEQ ID NO: 16717 - protein, 9 aa, synthetic construct
GPGTRLLVL

SEQ ID NO: 16718 - protein, 10 aa, synthetic construct
GKGAKLTVSP

SEQ ID NO: 16719 - protein, 9 aa, synthetic construct
GPGTRLTVL

SEQ ID NO: 16720 - protein, 10 aa, synthetic construct
GKGTLLTVTP

SEQ ID NO: 16721 - protein, 9 aa, synthetic construct
GPGTRLLVL

SEQ ID NO: 16722 - protein, 10 aa, synthetic construct
GKGTLLTVTP

SEQ ID NO: 16723 - protein, 9 aa, synthetic construct
GEGTRLSVL

SEQ ID NO: 16724 - protein, 10 aa, synthetic construct
GTGTTVSVSP

SEQ ID NO: 16725 - protein, 9 aa, synthetic construct
GPGTRLTVL

SEQ ID NO: 16726 - protein, 10 aa, synthetic construct
GAGTKLTVKP

SEQ ID NO: 16727 - protein, 9 aa, synthetic construct
GPGTRLLVL

SEQ ID NO: 16728 - protein, 10 aa, synthetic construct
GTGTTVSVSP

SEQ ID NO: 16729 - protein, 9 aa, synthetic construct
GKGTRLTVV

SEQ ID NO: 16730 - protein, 10 aa, synthetic construct
GSGTQLTVMP

SEQ ID NO: 16731 - protein, 9 aa, synthetic construct
GSGTRLLVI

SEQ ID NO: 16732 - protein, 10 aa, synthetic construct
GTGTKLQVVP

SEQ ID NO: 16733 - protein, 9 aa, synthetic construct
GAGTRLSVL

SEQ ID NO: 16734 - protein, 10 aa, synthetic construct
GTGTQVVVTP

SEQ ID NO: 16735 - protein, 9 aa, synthetic construct
AAGTRLTVT

SEQ ID NO: 16736 - protein, 10 aa, synthetic construct
GDGTQLVVKP

SEQ ID NO: 16737 - protein, 9 aa, synthetic construct
GSGTRLTVL

SEQ ID NO: 16738 - protein, 10 aa, synthetic construct
GTGTSLLVDP

SEQ ID NO: 16739 - protein, 9 aa, synthetic construct
GHGTKLSVL

SEQ ID NO: 16740 - protein, 10 aa, synthetic construct
GEGTKLTVSS

SEQ ID NO: 16741 - protein, 9 aa, synthetic construct
GHGTKLSVL

SEQ ID NO: 16742 - protein, 10 aa, synthetic construct
GKGTHLHVLP

SEQ ID NO: 16743 - protein, 9 aa, synthetic construct
GHGTKLSVL

SEQ ID NO: 16744 - protein, 10 aa, synthetic construct
GGGTRLTVRP

SEQ ID NO: 16745 - protein, 9 aa, synthetic construct
GEGSKLTVL

SEQ ID NO: 16746 - protein, 10 aa, synthetic construct
GEGTKLTVSS

SEQ ID NO: 16747 - protein, 9 aa, synthetic construct
GPGTRLLVL

SEQ ID NO: 16748 - protein, 10 aa, synthetic construct
GQGTILKVYL

SEQ ID NO: 16749 - protein, 9 aa, synthetic construct
GSGTRLTVL

SEQ ID NO: 16750 - protein, 10 aa, synthetic construct
GDGTQLVVKP

SEQ ID NO: 16751 - protein, 9 aa, synthetic construct
GEGSKLTVL

SEQ ID NO: 16752 - protein, 10 aa, synthetic construct
GEGTKLTVSS

SEQ ID NO: 16753 - protein, 9 aa, synthetic construct
GEGSKLTVL

SEQ ID NO: 16754 - protein, 10 aa, synthetic construct
GDGTQLVVKP

SEQ ID NO: 16755 - protein, 9 aa, synthetic construct
GPGTRLTVL

SEQ ID NO: 16756 - protein, 10 aa, synthetic construct
GKGTSLVVHP

SEQ ID NO: 16757 - protein, 9 aa, synthetic construct
GEGTRLSVL

SEQ ID NO: 16758 - protein, 10 aa, synthetic construct
GTGTSLLVDP

SEQ ID NO: 16759 - protein, 9 aa, synthetic construct
GAGTRLSVL

SEQ ID NO: 16760 - protein, 10 aa, synthetic construct
GGGTRLTVRP

SEQ ID NO: 16761 - protein, 9 aa, synthetic construct
GKGTRLTVV

SEQ ID NO: 16762 - protein, 10 aa, synthetic construct
GSGTKLIIKP

SEQ ID NO: 16763 - protein, 9 aa, synthetic construct
GEGTRLSVL

SEQ ID NO: 16764 - protein, 10 aa, synthetic construct
GKGTLLTVTP

SEQ ID NO: 16765 - protein, 9 aa, synthetic construct
GHGTKLSVL

SEQ ID NO: 16766 - protein, 10 aa, synthetic construct
GIGTLLSVKP

SEQ ID NO: 16767 - protein, 9 aa, synthetic construct
GAGTRLSVL

SEQ ID NO: 16768 - protein, 10 aa, synthetic construct
GQGTKLSIKP

SEQ ID NO: 16769 - protein, 9 aa, synthetic construct
GPGTRLTVL

SEQ ID NO: 16770 - protein, 10 aa, synthetic construct
GLGTRVSVFP

SEQ ID NO: 16771 - protein, 9 aa, synthetic construct
GPGTRLTVL

SEQ ID NO: 16772 - protein, 10 aa, synthetic construct
GTGTKLQVVP

SEQ ID NO: 16773 - protein, 9 aa, synthetic construct
GKGTRLTVV

SEQ ID NO: 16774 - protein, 10 aa, synthetic construct
GQGTSLSVVP

SEQ ID NO: 16775 - protein, 9 aa, synthetic construct
GPGTRLTVL

SEQ ID NO: 16776 - protein, 10 aa, synthetic construct
GKGTLLTVTP

SEQ ID NO: 16777 - protein, 9 aa, synthetic construct
GSGTRLLVI

SEQ ID NO: 16778 - protein, 10 aa, synthetic construct
GEGTQVTVIS

SEQ ID NO: 16779 - protein, 9 aa, synthetic construct
GPGTRLLVL

SEQ ID NO: 16780 - protein, 10 aa, synthetic construct
GLGTRVSVFP

SEQ ID NO: 16781 - protein, 9 aa, synthetic construct
GPGTRLTVL

SEQ ID NO: 16782 - protein, 10 aa, synthetic construct
GKGTLLTVTP

SEQ ID NO: 16783 - protein, 9 aa, synthetic construct
GAGTRLSVL

SEQ ID NO: 16784 - protein, 10 aa, synthetic construct
GDGTVLTVKP

SEQ ID NO: 16785 - protein, 9 aa, synthetic construct
GPGTRLLVL

SEQ ID NO: 16786 - protein, 10 aa, synthetic construct
GSGTKLTVEP

SEQ ID NO: 16787 - protein, 9 aa, synthetic construct
GPGTRLTVL

SEQ ID NO: 16788 - protein, 10 aa, synthetic construct
GTGTRLQVSP

SEQ ID NO: 16789 - protein, 9 aa, synthetic construct
GEGSKLTVL

SEQ ID NO: 16790 - protein, 10 aa, synthetic construct
GKGTSLTVIP

SEQ ID NO: 16791 - protein, 9 aa, synthetic construct
GSGTRLTVL

SEQ ID NO: 16792 - protein, 10 aa, synthetic construct
GKGTQVVVLP

SEQ ID NO: 16793 - protein, 9 aa, synthetic construct
GPGTRLTVL

SEQ ID NO: 16794 - protein, 10 aa, synthetic construct
GLGTTLQVQP

SEQ ID NO: 16795 - protein, 9 aa, synthetic construct
GPGTRLTVL

SEQ ID NO: 16796 - protein, 10 aa, synthetic construct
GKGAKLTVSP

SEQ ID NO: 16797 - protein, 9 aa, synthetic construct
AAGTRLTVT

SEQ ID NO: 16798 - protein, 10 aa, synthetic construct
GIGTRVLVRP

SEQ ID NO: 16799 - protein, 9 aa, synthetic construct
AAGTRLTVT

SEQ ID NO: 16800 - protein, 10 aa, synthetic construct
GIGTLLSVKP

SEQ ID NO: 16801 - protein, 9 aa, synthetic construct
GSGTRLTVL

SEQ ID NO: 16802 - protein, 10 aa, synthetic construct
GAGTQLIVIP

SEQ ID NO: 16803 - protein, 9 aa, synthetic construct
GKGTRLTVV

SEQ ID NO: 16804 - protein, 10 aa, synthetic construct
GQGTSLSVVP

SEQ ID NO: 16805 - protein, 9 aa, synthetic construct
GPGTRLLVL

SEQ ID NO: 16806 - protein, 10 aa, synthetic construct
GKGTLLTVTP

SEQ ID NO: 16807 - protein, 9 aa, synthetic construct
GEGSKLTVL

SEQ ID NO: 16808 - protein, 10 aa, synthetic construct
GKGAKLTVSP

SEQ ID NO: 16809 - protein, 9 aa, synthetic construct
GEGSRLIVV

SEQ ID NO: 16810 - protein, 10 aa, synthetic construct
GAGTKLTIKP

SEQ ID NO: 16811 - protein, 9 aa, synthetic construct
GAGTRLSVL

SEQ ID NO: 16812 - protein, 10 aa, synthetic construct
GKGTQLIIQP

SEQ ID NO: 16813 - protein, 9 aa, synthetic construct
GKGTRLTVV

SEQ ID NO: 16814 - protein, 10 aa, synthetic construct
GKGTSLTVIP

SEQ ID NO: 16815 - protein, 9 aa, synthetic construct
GPGTRLLVL

SEQ ID NO: 16816 - protein, 10 aa, synthetic construct
GSGTKLTVEP

SEQ ID NO: 16817 - protein, 9 aa, synthetic construct
GPGTRLLVL

SEQ ID NO: 16818 - protein, 10 aa, synthetic construct
GQGTSLSVVP

SEQ ID NO: 16819 - protein, 9 aa, synthetic construct
GPGTRLLVL

SEQ ID NO: 16820 - protein, 10 aa, synthetic construct
GSGTKLTVEP

SEQ ID NO: 16821 - protein, 9 aa, synthetic construct
GSGTRLTVL

SEQ ID NO: 16822 - protein, 10 aa, synthetic construct
GLGTRVSVFP

SEQ ID NO: 16823 - protein, 9 aa, synthetic construct
GSGTRLTVL

SEQ ID NO: 16824 - protein, 10 aa, synthetic construct
GDGTQLVVKP

SEQ ID NO: 16825 - protein, 9 aa, synthetic construct
GKGTRLTVV

SEQ ID NO: 16826 - protein, 10 aa, synthetic construct
GQGTSLSVVP

SEQ ID NO: 16827 - protein, 9 aa, synthetic construct
GPGTRLTVL

SEQ ID NO: 16828 - protein, 10 aa, synthetic construct
GKGTLLTVTP

SEQ ID NO: 16829 - protein, 9 aa, synthetic construct
GPGTRLTVL

SEQ ID NO: 16830 - protein, 10 aa, synthetic construct
GKGTLLTVTP

SEQ ID NO: 16831 - protein, 9 aa, synthetic construct
GEGSRLIVV

SEQ ID NO: 16832 - protein, 10 aa, synthetic construct
GRGTRLQVYA

SEQ ID NO: 16833 - protein, 9 aa, synthetic construct
GPGTRLTVL

SEQ ID NO: 16834 - protein, 10 aa, synthetic construct
GKGTSLVVHP

SEQ ID NO: 16835 - protein, 9 aa, synthetic construct
GSGTRLTVL

SEQ ID NO: 16836 - protein, 10 aa, synthetic construct
GKGTKLSVKS

SEQ ID NO: 16837 - protein, 9 aa, synthetic construct
GAGTRLSVL

SEQ ID NO: 16838 - protein, 10 aa, synthetic construct
GKGTQLIIQP

SEQ ID NO: 16839 - protein, 9 aa, synthetic construct
GAGTRLSVL

SEQ ID NO: 16840 - protein, 10 aa, synthetic construct
GKGTQLIIQP

SEQ ID NO: 16841 - protein, 9 aa, synthetic construct
GHGTKLSVL

SEQ ID NO: 16842 - protein, 10 aa, synthetic construct
GTGTRLQVSP

SEQ ID NO: 16843 - protein, 9 aa, synthetic construct
GPGTRLTVL

SEQ ID NO: 16844 - protein, 10 aa, synthetic construct
GDGTQLVVKP

SEQ ID NO: 16845 - protein, 9 aa, synthetic construct
GPGTRLTVL

SEQ ID NO: 16846 - protein, 10 aa, synthetic construct
GQGTSLSVVP

SEQ ID NO: 16847 - protein, 9 aa, synthetic construct
AAGTRLTVT

SEQ ID NO: 16848 - protein, 10 aa, synthetic construct
GHGTILRVHP

SEQ ID NO: 16849 - protein, 9 aa, synthetic construct
GAGTRLSVL

SEQ ID NO: 16850 - protein, 10 aa, synthetic construct
GKGTSLTVIP

SEQ ID NO: 16851 - protein, 9 aa, synthetic construct
GAGTRLSVL

SEQ ID NO: 16852 - protein, 10 aa, synthetic construct
GDGTVLTVKP

SEQ ID NO: 16853 - protein, 9 aa, synthetic construct
GKGTRLTVV

SEQ ID NO: 16854 - protein, 10 aa, synthetic construct
GTGTRLQVLP

SEQ ID NO: 16855 - protein, 9 aa, synthetic construct
GPGTRLTVL

SEQ ID NO: 16856 - protein, 10 aa, synthetic construct
GHGTILRVHP

SEQ ID NO: 16857 - protein, 9 aa, synthetic construct
GPGTRLTVL

SEQ ID NO: 16858 - protein, 10 aa, synthetic construct
GKGAKLTVSP

SEQ ID NO: 16859 - protein, 9 aa, synthetic construct
GHGTKLSVL

SEQ ID NO: 16860 - protein, 10 aa, synthetic construct
GKGTHLHVLP

SEQ ID NO: 16861 - protein, 9 aa, synthetic construct
GEGSKLTVL

SEQ ID NO: 16862 - protein, 10 aa, synthetic construct
GKGTHLHVLP

SEQ ID NO: 16863 - protein, 9 aa, synthetic construct
GPGTRLTVL

SEQ ID NO: 16864 - protein, 10 aa, synthetic construct
GSGTRLLVSP

SEQ ID NO: 16865 - protein, 9 aa, synthetic construct
GPGTRLTVL

SEQ ID NO: 16866 - protein, 10 aa, synthetic construct
GQGTSLSVVP

SEQ ID NO: 16867 - protein, 9 aa, synthetic construct
GPGTRLLVL

SEQ ID NO: 16868 - protein, 10 aa, synthetic construct
GEGTQVTVIS

SEQ ID NO: 16869 - protein, 9 aa, synthetic construct
GPGTRLLVL

SEQ ID NO: 16870 - protein, 10 aa, synthetic construct
GLGTTLQVQP

SEQ ID NO: 16871 - protein, 9 aa, synthetic construct
GPGTRLLVL

SEQ ID NO: 16872 - protein, 10 aa, synthetic construct
GKGTHLHVLP

SEQ ID NO: 16873 - protein, 9 aa, synthetic construct
GEGSRLIVV

SEQ ID NO: 16874 - protein, 10 aa, synthetic construct
GSGTKLIIKP

SEQ ID NO: 16875 - protein, 9 aa, synthetic construct
GHGTKLSVL

SEQ ID NO: 16876 - protein, 10 aa, synthetic construct
GAGTKLSVKP

SEQ ID NO: 16877 - protein, 9 aa, synthetic construct
GKGTRLTVV

SEQ ID NO: 16878 - protein, 10 aa, synthetic construct
GTGTSLLVDP

SEQ ID NO: 16879 - protein, 9 aa, synthetic construct
GSGTRLTVL

SEQ ID NO: 16880 - protein, 10 aa, synthetic construct
GSGTQLTVMP

SEQ ID NO: 16881 - protein, 9 aa, synthetic construct
GSGTRLLVI

SEQ ID NO: 16882 - protein, 10 aa, synthetic construct
GAGTKLTIKP

SEQ ID NO: 16883 - protein, 9 aa, synthetic construct
GPGTRLTVL

SEQ ID NO: 16884 - protein, 10 aa, synthetic construct
GIGTRVLVRP

SEQ ID NO: 16885 - protein, 9 aa, synthetic construct
GPGTRLLVL

SEQ ID NO: 16886 - protein, 10 aa, synthetic construct
GTGTSLLVDP

SEQ ID NO: 16887 - protein, 9 aa, synthetic construct
GPGTRLLVL

SEQ ID NO: 16888 - protein, 10 aa, synthetic construct
VKGTKLSVKS

SEQ ID NO: 16889 - protein, 9 aa, synthetic construct
GPGTRLTVL

SEQ ID NO: 16890 - protein, 10 aa, synthetic construct
GKGTSLTVIP

SEQ ID NO: 16891 - protein, 9 aa, synthetic construct
GPGTRLTVL

SEQ ID NO: 16892 - protein, 10 aa, synthetic construct
GSGTQLTVMP

SEQ ID NO: 16893 - protein, 9 aa, synthetic construct
GKGTRLTVV

SEQ ID NO: 16894 - protein, 10 aa, synthetic construct
GAGTKLTIKP

SEQ ID NO: 16895 - protein, 9 aa, synthetic construct
GAGTRLSVL

SEQ ID NO: 16896 - protein, 10 aa, synthetic construct
GAGTQLIVIP

SEQ ID NO: 16897 - protein, 9 aa, synthetic construct
GSGTRLLVI

SEQ ID NO: 16898 - protein, 10 aa, synthetic construct
GSGTQLTVMP

SEQ ID NO: 16899 - protein, 9 aa, synthetic construct
GSGTRLLVI

SEQ ID NO: 16900 - protein, 10 aa, synthetic construct
GKGTHLHVLP

SEQ ID NO: 16901 - protein, 9 aa, synthetic construct
GSGTRLLVI

SEQ ID NO: 16902 - protein, 10 aa, synthetic construct
GDGTQLVVKP

SEQ ID NO: 16903 - protein, 9 aa, synthetic construct
GSGTRLTVL

SEQ ID NO: 16904 - protein, 10 aa, synthetic construct
GSGTRLLVSP

SEQ ID NO: 16905 - protein, 9 aa, synthetic construct
GPGTRLTVL

SEQ ID NO: 16906 - protein, 10 aa, synthetic construct
GQGTKLSIKP

SEQ ID NO: 16907 - protein, 9 aa, synthetic construct
GKGTRLTVV

SEQ ID NO: 16908 - protein, 10 aa, synthetic construct
GQGTVLSVIP

SEQ ID NO: 16909 - protein, 9 aa, synthetic construct
GPGTRLLVL

SEQ ID NO: 16910 - protein, 10 aa, synthetic construct
GKGTLLTVTP

SEQ ID NO: 16911 - protein, 9 aa, synthetic construct
GPGTRLTVL

SEQ ID NO: 16912 - protein, 10 aa, synthetic construct
GAGTKLTIKP

SEQ ID NO: 16913 - protein, 9 aa, synthetic construct
GPGTRLTVL

SEQ ID NO: 16914 - protein, 10 aa, synthetic construct
GSGTKLTVEP

SEQ ID NO: 16915 - protein, 9 aa, synthetic construct
GPGTRLTVL

SEQ ID NO: 16916 - protein, 10 aa, synthetic construct
GSGTKLTVEP

SEQ ID NO: 16917 - protein, 9 aa, synthetic construct
GSGTRLTVL

SEQ ID NO: 16918 - protein, 10 aa, synthetic construct
GKGTKLSVKS

SEQ ID NO: 16919 - protein, 9 aa, synthetic construct
GSGTRLTVL

SEQ ID NO: 16920 - protein, 10 aa, synthetic construct
GLGTTLQVQP

SEQ ID NO: 16921 - protein, 9 aa, synthetic construct
GSGTRLTVL

SEQ ID NO: 16922 - protein, 10 aa, synthetic construct
GLGTTLQVQP

SEQ ID NO: 16923 - protein, 9 aa, synthetic construct
GKGTRLTVV

SEQ ID NO: 16924 - protein, 10 aa, synthetic construct
GKGTLLTVTP

SEQ ID NO: 16925 - protein, 9 aa, synthetic construct
GPGTRLTVL

SEQ ID NO: 16926 - protein, 10 aa, synthetic construct
GKGTSLTVIP

SEQ ID NO: 16927 - protein, 9 aa, synthetic construct
GPGTRLLVL

SEQ ID NO: 16928 - protein, 10 aa, synthetic construct
GKGTSLTVIP

SEQ ID NO: 16929 - protein, 9 aa, synthetic construct
GPGTRLLVL

SEQ ID NO: 16930 - protein, 10 aa, synthetic construct
GKGTHLHVLP

SEQ ID NO: 16931 - protein, 9 aa, synthetic construct
GPGTRLTVL

SEQ ID NO: 16932 - protein, 10 aa, synthetic construct
GTGTQVVVTP

SEQ ID NO: 16933 - protein, 9 aa, synthetic construct
GPGTRLTVL

SEQ ID NO: 16934 - protein, 10 aa, synthetic construct
GDGTQLVVKP

SEQ ID NO: 16935 - protein, 9 aa, synthetic construct
GAGTRLSVL

SEQ ID NO: 16936 - protein, 10 aa, synthetic construct
GKGAKLTVSP

SEQ ID NO: 16937 - protein, 9 aa, synthetic construct
GKGTRLTVV

SEQ ID NO: 16938 - protein, 10 aa, synthetic construct
GSGTQLTVMP

SEQ ID NO: 16939 - protein, 9 aa, synthetic construct
GPGTRLLVL

SEQ ID NO: 16940 - protein, 10 aa, synthetic construct
GSGTQLTVMP

SEQ ID NO: 16941 - protein, 9 aa, synthetic construct
GAGTRLSVL

SEQ ID NO: 16942 - protein, 10 aa, synthetic construct
GLGTILRVRP

SEQ ID NO: 16943 - protein, 9 aa, synthetic construct
GPGTRLLVL

SEQ ID NO: 16944 - protein, 10 aa, synthetic construct
GKGTQLIIQP

SEQ ID NO: 16945 - protein, 9 aa, synthetic construct
GSGTRLLVI

SEQ ID NO: 16946 - protein, 10 aa, synthetic construct
GQGTVLSVIP

SEQ ID NO: 16947 - protein, 9 aa, synthetic construct
GAGTRLSVL

SEQ ID NO: 16948 - protein, 10 aa, synthetic construct
GGGTRLTVRP

SEQ ID NO: 16949 - protein, 9 aa, synthetic construct
GSGTRLTVL

SEQ ID NO: 16950 - protein, 10 aa, synthetic construct
GTGTKLQVVP

SEQ ID NO: 16951 - protein, 9 aa, synthetic construct
GEGSKLTVL

SEQ ID NO: 16952 - protein, 10 aa, synthetic construct
GLGTRVSVFP

SEQ ID NO: 16953 - protein, 9 aa, synthetic construct
GKGTRLTVV

SEQ ID NO: 16954 - protein, 10 aa, synthetic construct
GKGTKLSVKS

SEQ ID NO: 16955 - protein, 9 aa, synthetic construct
GEGSKLTVL

SEQ ID NO: 16956 - protein, 10 aa, synthetic construct
GQGTILKVYL

SEQ ID NO: 16957 - protein, 9 aa, synthetic construct
GSGTRLLVI

SEQ ID NO: 16958 - protein, 10 aa, synthetic construct
GTGTTVSVSP

SEQ ID NO: 16959 - protein, 9 aa, synthetic construct
GSGTRLTVL

SEQ ID NO: 16960 - protein, 10 aa, synthetic construct
GKGAKLTVSP

SEQ ID NO: 16961 - protein, 9 aa, synthetic construct
GKGTRLTVV

SEQ ID NO: 16962 - protein, 10 aa, synthetic construct
GTGTSLLVDP

SEQ ID NO: 16963 - protein, 9 aa, synthetic construct
GKGTRLTVV

SEQ ID NO: 16964 - protein, 10 aa, synthetic construct
GDGTQLVVKP

SEQ ID NO: 16965 - protein, 9 aa, synthetic construct
GPGTRLTVL

SEQ ID NO: 16966 - protein, 10 aa, synthetic construct
GKGAKLTVSP

SEQ ID NO: 16967 - protein, 9 aa, synthetic construct
AAGTRLTVT

SEQ ID NO: 16968 - protein, 10 aa, synthetic construct
GQGTILKVYL

SEQ ID NO: 16969 - protein, 9 aa, synthetic construct
GPGTRLTVL

SEQ ID NO: 16970 - protein, 10 aa, synthetic construct
GKGAKLTVSP

SEQ ID NO: 16971 - protein, 9 aa, synthetic construct
GSGTRLLVI

SEQ ID NO: 16972 - protein, 10 aa, synthetic construct
GTGTRLQVSP

SEQ ID NO: 16973 - protein, 9 aa, synthetic construct
GPGTRLTVL

SEQ ID NO: 16974 - protein, 10 aa, synthetic construct
GRGTRLQVYA

SEQ ID NO: 16975 - protein, 9 aa, synthetic construct
GEGSRLIVV

SEQ ID NO: 16976 - protein, 10 aa, synthetic construct
GKGAKLTVSP

SEQ ID NO: 16977 - protein, 9 aa, synthetic construct
GSGTRLLVI

SEQ ID NO: 16978 - protein, 10 aa, synthetic construct
GAGTKLTIKP

SEQ ID NO: 16979 - protein, 9 aa, synthetic construct
GHGTKLSVL

SEQ ID NO: 16980 - protein, 10 aa, synthetic construct
GEGTQVTVIS

SEQ ID NO: 16981 - protein, 9 aa, synthetic construct
GPGTRLTVL

SEQ ID NO: 16982 - protein, 10 aa, synthetic construct
GGGTRLTVRP

SEQ ID NO: 16983 - protein, 9 aa, synthetic construct
GAGTRLSVL

SEQ ID NO: 16984 - protein, 10 aa, synthetic construct
GKGTSLTVIP

SEQ ID NO: 16985 - protein, 9 aa, synthetic construct
GPGTRLTVL

SEQ ID NO: 16986 - protein, 10 aa, synthetic construct
GKGTVLLVSP

SEQ ID NO: 16987 - protein, 9 aa, synthetic construct
GAGTRLSVL

SEQ ID NO: 16988 - protein, 10 aa, synthetic construct
GDGTQLVVKP

SEQ ID NO: 16989 - protein, 9 aa, synthetic construct
GPGTRLTVL

SEQ ID NO: 16990 - protein, 10 aa, synthetic construct
GGGTRLTVRP

SEQ ID NO: 16991 - protein, 9 aa, synthetic construct
GSGTRLTVL

SEQ ID NO: 16992 - protein, 10 aa, synthetic construct
GQGTSLSVVP

SEQ ID NO: 16993 - protein, 9 aa, synthetic construct
GSGTRLLVI

SEQ ID NO: 16994 - protein, 10 aa, synthetic construct
GTGTTVSVSP

SEQ ID NO: 16995 - protein, 9 aa, synthetic construct
GSGTRLLVI

SEQ ID NO: 16996 - protein, 10 aa, synthetic construct
GSGTKLTVEP

SEQ ID NO: 16997 - protein, 9 aa, synthetic construct
GKGTRLTVV

SEQ ID NO: 16998 - protein, 10 aa, synthetic construct
GIGTLLSVKP

SEQ ID NO: 16999 - protein, 9 aa, synthetic construct
GPGTRLLVL

SEQ ID NO: 17000 - protein, 10 aa, synthetic construct
GSGTKLIIKP

SEQ ID NO: 17001 - protein, 9 aa, synthetic construct
GHGTKLSVL

SEQ ID NO: 17002 - protein, 10 aa, synthetic construct
GKGTHLHVLP

SEQ ID NO: 17003 - protein, 9 aa, synthetic construct
GPGTRLLVL

SEQ ID NO: 17004 - protein, 11 aa, synthetic construct
GSGTKVIVLPY

SEQ ID NO: 17005 - protein, 9 aa, synthetic construct
GPGTRLTVL

SEQ ID NO: 17006 - protein, 10 aa, synthetic construct
GAGTQLIVIP

SEQ ID NO: 17007 - protein, 9 aa, synthetic construct
GSGTRLLVI

SEQ ID NO: 17008 - protein, 10 aa, synthetic construct
GTGTRLQVSP

SEQ ID NO: 17009 - protein, 9 aa, synthetic construct
GPGTRLTVL

SEQ ID NO: 17010 - protein, 10 aa, synthetic construct
GKGTLLTVTP

SEQ ID NO: 17011 - protein, 9 aa, synthetic construct
GEGSRLIVV

SEQ ID NO: 17012 - protein, 10 aa, synthetic construct
GEGTKLTVSS

SEQ ID NO: 17013 - protein, 9 aa, synthetic construct
GAGTRLSVL

SEQ ID NO: 17014 - protein, 10 aa, synthetic construct
GQGTSLSVVP

SEQ ID NO: 17015 - protein, 9 aa, synthetic construct
GPGTRLLVL

SEQ ID NO: 17016 - protein, 10 aa, synthetic construct
GAGTQLIVIP

SEQ ID NO: 17017 - protein, 9 aa, synthetic construct
GEGSKLTVL

SEQ ID NO: 17018 - protein, 10 aa, synthetic construct
GGGTRLTVRP

SEQ ID NO: 17019 - protein, 9 aa, synthetic construct
GSGTRLLVI

SEQ ID NO: 17020 - protein, 10 aa, synthetic construct
GAGTRLQVNL

SEQ ID NO: 17021 - protein, 9 aa, synthetic construct
GPGTRLTVL

SEQ ID NO: 17022 - protein, 10 aa, synthetic construct
GLGTRVSVFP

SEQ ID NO: 17023 - protein, 9 aa, synthetic construct
GEGSRLIVV

SEQ ID NO: 17024 - protein, 10 aa, synthetic construct
GSGTRLLVSP

SEQ ID NO: 17025 - protein, 9 aa, synthetic construct
GSGTRLTVL

SEQ ID NO: 17026 - protein, 10 aa, synthetic construct
GSGTQLTVMP

SEQ ID NO: 17027 - protein, 9 aa, synthetic construct
GSGTRLLVI

SEQ ID NO: 17028 - protein, 10 aa, synthetic construct
GTGTRLQVSP

SEQ ID NO: 17029 - protein, 9 aa, synthetic construct
GPGTRLLVL

SEQ ID NO: 17030 - protein, 10 aa, synthetic construct
GAGTQLIVIP

SEQ ID NO: 17031 - protein, 9 aa, synthetic construct
GPGTRLTVL

SEQ ID NO: 17032 - protein, 10 aa, synthetic construct
GEGTKLTVSS

SEQ ID NO: 17033 - protein, 9 aa, synthetic construct
GPGTRLTVL

SEQ ID NO: 17034 - protein, 10 aa, synthetic construct
GTGTLLSVKP

SEQ ID NO: 17035 - protein, 9 aa, synthetic construct
GPGTRLTVL

SEQ ID NO: 17036 - protein, 10 aa, synthetic construct
GLGTRVSVFP

SEQ ID NO: 17037 - protein, 9 aa, synthetic construct
GSGTRLTVL

SEQ ID NO: 17038 - protein, 10 aa, synthetic construct
GTGTKLQVVP

SEQ ID NO: 17039 - protein, 9 aa, synthetic construct
GPGTRLTVL

SEQ ID NO: 17040 - protein, 10 aa, synthetic construct
GSGTKLIIKP

SEQ ID NO: 17041 - protein, 9 aa, synthetic construct
GPGTRLTVL

SEQ ID NO: 17042 - protein, 10 aa, synthetic construct
GLGTTLQVQP

SEQ ID NO: 17043 - protein, 9 aa, synthetic construct
GHGTKLSVL

SEQ ID NO: 17044 - protein, 10 aa, synthetic construct
GQGTSLSVVP

SEQ ID NO: 17045 - protein, 9 aa, synthetic construct
GPGTRLLVL

SEQ ID NO: 17046 - protein, 10 aa, synthetic construct
GEGTKLTVSS

SEQ ID NO: 17047 - protein, 9 aa, synthetic construct
GPGTRLTVL

SEQ ID NO: 17048 - protein, 10 aa, synthetic construct
GKGTKLSVKS

SEQ ID NO: 17049 - protein, 9 aa, synthetic construct
GKGTRLTVV

SEQ ID NO: 17050 - protein, 10 aa, synthetic construct
GQGTSLSVVP

SEQ ID NO: 17051 - protein, 9 aa, synthetic construct
GKGTRLTVV

SEQ ID NO: 17052 - protein, 10 aa, synthetic construct
GAGTRLAVCP

SEQ ID NO: 17053 - protein, 9 aa, synthetic construct
GSGTRLTVL

SEQ ID NO: 17054 - protein, 10 aa, synthetic construct
GKGTHLHVLP

SEQ ID NO: 17055 - protein, 9 aa, synthetic construct
GHGTKLSVL

SEQ ID NO: 17056 - protein, 10 aa, synthetic construct
GKGTHLHVLP

SEQ ID NO: 17057 - protein, 9 aa, synthetic construct
GPGTRLTVL

SEQ ID NO: 17058 - protein, 10 aa, synthetic construct
GKGTSLTVIP

SEQ ID NO: 17059 - protein, 9 aa, synthetic construct
GPGTRLTVL

SEQ ID NO: 17060 - protein, 10 aa, synthetic construct
GKGTHLHVLP

SEQ ID NO: 17061 - protein, 9 aa, synthetic construct
GPGTRLTVL

SEQ ID NO: 17062 - protein, 10 aa, synthetic construct
GSGTQLTVMP

SEQ ID NO: 17063 - protein, 9 aa, synthetic construct
GPGTRLLVL

SEQ ID NO: 17064 - protein, 10 aa, synthetic construct
GAGTKLTVKP

SEQ ID NO: 17065 - protein, 9 aa, synthetic construct
GAGTRLSVL

SEQ ID NO: 17066 - protein, 10 aa, synthetic construct
GSGTKLIIKP

SEQ ID NO: 17067 - protein, 9 aa, synthetic construct
GSGTRLTVL

SEQ ID NO: 17068 - protein, 10 aa, synthetic construct
GQGTILKVYL

SEQ ID NO: 17069 - protein, 9 aa, synthetic construct
GPGTRLTVL

SEQ ID NO: 17070 - protein, 10 aa, synthetic construct
GKGTKLSVKS

SEQ ID NO: 17071 - protein, 9 aa, synthetic construct
GPGTRLTVL

SEQ ID NO: 17072 - protein, 10 aa, synthetic construct
GIGTRVLVRP

SEQ ID NO: 17073 - protein, 9 aa, synthetic construct
GEGTRLSVL

SEQ ID NO: 17074 - protein, 10 aa, synthetic construct
GSGTKLIIKP

SEQ ID NO: 17075 - protein, 9 aa, synthetic construct
GSGTRLTVL

SEQ ID NO: 17076 - protein, 10 aa, synthetic construct
GKGTHLHVLP

SEQ ID NO: 17077 - protein, 9 aa, synthetic construct
GPGTRLLVL

SEQ ID NO: 17078 - protein, 10 aa, synthetic construct
GKGTKLSVKS

SEQ ID NO: 17079 - protein, 9 aa, synthetic construct
GEGSRLIVV

SEQ ID NO: 17080 - protein, 10 aa, synthetic construct
GQGTVLSVIP

SEQ ID NO: 17081 - protein, 9 aa, synthetic construct
GSGTRLLVI

SEQ ID NO: 17082 - protein, 10 aa, synthetic construct
GKGTHLHVLP

SEQ ID NO: 17083 - protein, 9 aa, synthetic construct
GKGTRLTVV

SEQ ID NO: 17084 - protein, 10 aa, synthetic construct
GKGTSLTVIP

SEQ ID NO: 17085 - protein, 9 aa, synthetic construct
GEGTRLSVL

SEQ ID NO: 17086 - protein, 10 aa, synthetic construct
GQGTKLSIKP

SEQ ID NO: 17087 - protein, 9 aa, synthetic construct
GAGTRLSVL

SEQ ID NO: 17088 - protein, 10 aa, synthetic construct
GSGTKLIIKP

SEQ ID NO: 17089 - protein, 9 aa, synthetic construct
GAGTRLSVL

SEQ ID NO: 17090 - protein, 10 aa, synthetic construct
GTGTRLQVSP

SEQ ID NO: 17091 - protein, 9 aa, synthetic construct
GHGTKLSVL

SEQ ID NO: 17092 - protein, 10 aa, synthetic construct
GEGTKLTVSS

SEQ ID NO: 17093 - protein, 9 aa, synthetic construct
GSGTRLLVI

SEQ ID NO: 17094 - protein, 10 aa, synthetic construct
GLGTRVSVFP

SEQ ID NO: 17095 - protein, 9 aa, synthetic construct
GPGTRLTVL

SEQ ID NO: 17096 - protein, 10 aa, synthetic construct
GTGTRLQVLP

SEQ ID NO: 17097 - protein, 9 aa, synthetic construct
GKGTRLTVV

SEQ ID NO: 17098 - protein, 10 aa, synthetic construct
GKGTVLLVSP

SEQ ID NO: 17099 - protein, 9 aa, synthetic construct
GPGTRLTVL

SEQ ID NO: 17100 - protein, 10 aa, synthetic construct
GKGAKLTVSP

SEQ ID NO: 17101 - protein, 9 aa, synthetic construct
GPGTRLLVL

SEQ ID NO: 17102 - protein, 10 aa, synthetic construct
GKGTSLTVIP

SEQ ID NO: 17103 - protein, 9 aa, synthetic construct
GAGTRLSVL

SEQ ID NO: 17104 - protein, 10 aa, synthetic construct
GKGAKLTVSP

SEQ ID NO: 17105 - protein, 9 aa, synthetic construct
GHGTKLSVL

SEQ ID NO: 17106 - protein, 10 aa, synthetic construct
GSGTKLTVEP

SEQ ID NO: 17107 - protein, 9 aa, synthetic construct
GPGTRLTVL

SEQ ID NO: 17108 - protein, 10 aa, synthetic construct
GAGTRLQVNL

SEQ ID NO: 17109 - protein, 9 aa, synthetic construct
GPGTRLLVL

SEQ ID NO: 17110 - protein, 10 aa, synthetic construct
GTGTTVSVSP

SEQ ID NO: 17111 - protein, 9 aa, synthetic construct
GPGTRLTVL

SEQ ID NO: 17112 - protein, 10 aa, synthetic construct
GAGTKLTIKP

SEQ ID NO: 17113 - protein, 9 aa, synthetic construct
GHGTKLSVL

SEQ ID NO: 17114 - protein, 10 aa, synthetic construct
GKGTSLTVIP

SEQ ID NO: 17115 - protein, 9 aa, synthetic construct
GKGTRLTVV

SEQ ID NO: 17116 - protein, 10 aa, synthetic construct
GKGTSLTVIP

SEQ ID NO: 17117 - protein, 9 aa, synthetic construct
GSGTRLTVL

SEQ ID NO: 17118 - protein, 10 aa, synthetic construct
GGGTRLTVRP

SEQ ID NO: 17119 - protein, 9 aa, synthetic construct
GKGTRLTVV

SEQ ID NO: 17120 - protein, 10 aa, synthetic construct
GSGTQLTVMP

SEQ ID NO: 17121 - protein, 9 aa, synthetic construct
GKGTRLTVV

SEQ ID NO: 17122 - protein, 10 aa, synthetic construct
GKGTKLSVKS

SEQ ID NO: 17123 - protein, 9 aa, synthetic construct
GSGTRLLVI

SEQ ID NO: 17124 - protein, 10 aa, synthetic construct
GEGTQVTVIS

SEQ ID NO: 17125 - protein, 9 aa, synthetic construct
GSGTRLLVI

SEQ ID NO: 17126 - protein, 10 aa, synthetic construct
GSGTKLTVEP

SEQ ID NO: 17127 - protein, 9 aa, synthetic construct
GPGTRLTVL

SEQ ID NO: 17128 - protein, 10 aa, synthetic construct
GQGTSLSVVP

SEQ ID NO: 17129 - protein, 9 aa, synthetic construct
GPGTRLLVL

SEQ ID NO: 17130 - protein, 10 aa, synthetic construct
GIGTLLSVKP

SEQ ID NO: 17131 - protein, 9 aa, synthetic construct
GHGTKLSVL

SEQ ID NO: 17132 - protein, 10 aa, synthetic construct
GDGTQLVVKP

SEQ ID NO: 17133 - protein, 9 aa, synthetic construct
GSGTRLTVL

SEQ ID NO: 17134 - protein, 10 aa, synthetic construct
GQGTVLSVIP

SEQ ID NO: 17135 - protein, 9 aa, synthetic construct
GAGTRLSVL

SEQ ID NO: 17136 - protein, 10 aa, synthetic construct
GTGTRLQVSP

SEQ ID NO: 17137 - protein, 9 aa, synthetic construct
GPGTRLTVL

SEQ ID NO: 17138 - protein, 10 aa, synthetic construct
GKGTQLIIQP

SEQ ID NO: 17139 - protein, 9 aa, synthetic construct
GAGTRLSVL

SEQ ID NO: 17140 - protein, 10 aa, synthetic construct
GDGTQLVVKP

SEQ ID NO: 17141 - protein, 9 aa, synthetic construct
GPGTRLTVL

SEQ ID NO: 17142 - protein, 10 aa, synthetic construct
GLGTTLQVQP

SEQ ID NO: 17143 - protein, 9 aa, synthetic construct
GPGTRLTVL

SEQ ID NO: 17144 - protein, 10 aa, synthetic construct
GSGTKLTVEP

SEQ ID NO: 17145 - protein, 9 aa, synthetic construct
GPGTRLTVL

SEQ ID NO: 17146 - protein, 10 aa, synthetic construct
GDGTQLVVKP

SEQ ID NO: 17147 - protein, 9 aa, synthetic construct
GPGTRLTVL

SEQ ID NO: 17148 - protein, 10 aa, synthetic construct
GLGTRVSVFP

SEQ ID NO: 17149 - protein, 9 aa, synthetic construct
GPGTRLTVL

SEQ ID NO: 17150 - protein, 10 aa, synthetic construct
GDGTVLTVKP

SEQ ID NO: 17151 - protein, 9 aa, synthetic construct
GPGTRLTVL

SEQ ID NO: 17152 - protein, 10 aa, synthetic construct
GKGTHLHVLP

SEQ ID NO: 17153 - protein, 9 aa, synthetic construct
GKGTRLTVV

SEQ ID NO: 17154 - protein, 10 aa, synthetic construct
GIGTRVLVRP

SEQ ID NO: 17155 - protein, 9 aa, synthetic construct
GSGTRLTVL

SEQ ID NO: 17156 - protein, 10 aa, synthetic construct
GKGTHLHVLP

SEQ ID NO: 17157 - protein, 9 aa, synthetic construct
GSGTRLTVL

SEQ ID NO: 17158 - protein, 10 aa, synthetic construct
GDGTQLVVKP

SEQ ID NO: 17159 - protein, 9 aa, synthetic construct
GSGTRLTVL

SEQ ID NO: 17160 - protein, 11 aa, synthetic construct
GSGTKVIVLPY

SEQ ID NO: 17161 - protein, 9 aa, synthetic construct
GKGTRLTVV

SEQ ID NO: 17162 - protein, 10 aa, synthetic construct
GQGTILKVYL

SEQ ID NO: 17163 - protein, 9 aa, synthetic construct
GEGSRLIVV

SEQ ID NO: 17164 - protein, 10 aa, synthetic construct
GTGTQVVVTP

SEQ ID NO: 17165 - protein, 9 aa, synthetic construct
GEGSRLIVV

SEQ ID NO: 17166 - protein, 10 aa, synthetic construct
GTGTLLSVKP

SEQ ID NO: 17167 - protein, 9 aa, synthetic construct
GSGTRLTVL

SEQ ID NO: 17168 - protein, 10 aa, synthetic construct
GQGTSLSVVP

SEQ ID NO: 17169 - protein, 9 aa, synthetic construct
GKGTRLTVV

SEQ ID NO: 17170 - protein, 10 aa, synthetic construct
GIGTRVLVRP

SEQ ID NO: 17171 - protein, 9 aa, synthetic construct
AAGTRLTVT

SEQ ID NO: 17172 - protein, 10 aa, synthetic construct
GKGTVLLVSP

SEQ ID NO: 17173 - protein, 9 aa, synthetic construct
GHGTKLSVL

SEQ ID NO: 17174 - protein, 10 aa, synthetic construct
GAGTRLKVIA

SEQ ID NO: 17175 - protein, 9 aa, synthetic construct
GSGTRLTVL

SEQ ID NO: 17176 - protein, 10 aa, synthetic construct
GSGTKLTVEP

SEQ ID NO: 17177 - protein, 9 aa, synthetic construct
GSGTRLTVL

SEQ ID NO: 17178 - protein, 10 aa, synthetic construct
GKGTHLHVLP

SEQ ID NO: 17179 - protein, 9 aa, synthetic construct
GPGTRLTVL

SEQ ID NO: 17180 - protein, 10 aa, synthetic construct
GEGTQVTVIS

SEQ ID NO: 17181 - protein, 9 aa, synthetic construct
GPGTRLTVL

SEQ ID NO: 17182 - protein, 10 aa, synthetic construct
GSGTKLTVEP

SEQ ID NO: 17183 - protein, 9 aa, synthetic construct
GPGTRLTVL

SEQ ID NO: 17184 - protein, 10 aa, synthetic construct
GKGTLLTVTP

SEQ ID NO: 17185 - protein, 9 aa, synthetic construct
GEGSKLTVL

SEQ ID NO: 17186 - protein, 10 aa, synthetic construct
GKGTQVVVLP

SEQ ID NO: 17187 - protein, 9 aa, synthetic construct
GPGTRLTVL

SEQ ID NO: 17188 - protein, 10 aa, synthetic construct
GGGTRLTVRP

SEQ ID NO: 17189 - protein, 9 aa, synthetic construct
GPGTRLTVL

SEQ ID NO: 17190 - protein, 10 aa, synthetic construct
GLGTTLQVQP

SEQ ID NO: 17191 - protein, 9 aa, synthetic construct
GPGTRLTVL

SEQ ID NO: 17192 - protein, 10 aa, synthetic construct
GKGTSLTVIP

SEQ ID NO: 17193 - protein, 9 aa, synthetic construct
GPGTRLTVL

SEQ ID NO: 17194 - protein, 10 aa, synthetic construct
GTGTRLQVSP

SEQ ID NO: 17195 - protein, 9 aa, synthetic construct
GPGTRLTVL

SEQ ID NO: 17196 - protein, 10 aa, synthetic construct
GTGTKLQVVP

SEQ ID NO: 17197 - protein, 9 aa, synthetic construct
GKGTRLTVV

SEQ ID NO: 17198 - protein, 10 aa, synthetic construct
GKGTSLTVIP

SEQ ID NO: 17199 - protein, 9 aa, synthetic construct
GPGTRLLVL

SEQ ID NO: 17200 - protein, 10 aa, synthetic construct
GTGTSLLVDP

SEQ ID NO: 17201 - protein, 9 aa, synthetic construct
GPGTRLTVL

SEQ ID NO: 17202 - protein, 10 aa, synthetic construct
GLGTRVSVFP

SEQ ID NO: 17203 - protein, 9 aa, synthetic construct
GEGSRLIVV

SEQ ID NO: 17204 - protein, 10 aa, synthetic construct
GSGTRLLVSP

SEQ ID NO: 17205 - protein, 9 aa, synthetic construct
GPGTRLTVL

SEQ ID NO: 17206 - protein, 10 aa, synthetic construct
GTGTRLQVNL

SEQ ID NO: 17207 - protein, 9 aa, synthetic construct
GKGTRLTVV

SEQ ID NO: 17208 - protein, 10 aa, synthetic construct
GGGTRLTVRP

SEQ ID NO: 17209 - protein, 9 aa, synthetic construct
GPGTRLTVL

SEQ ID NO: 17210 - protein, 10 aa, synthetic construct
GTGTRLQVLP

SEQ ID NO: 17211 - protein, 9 aa, synthetic construct
GSGTRLTVL

SEQ ID NO: 17212 - protein, 10 aa, synthetic construct
GTGTRLQVLP

SEQ ID NO: 17213 - protein, 9 aa, synthetic construct
GEGSKLTVL

SEQ ID NO: 17214 - protein, 10 aa, synthetic construct
GKGTHLHVLP

SEQ ID NO: 17215 - protein, 9 aa, synthetic construct
GKGTRLTVV

SEQ ID NO: 17216 - protein, 10 aa, synthetic construct
GAGTRLKVIA

SEQ ID NO: 17217 - protein, 9 aa, synthetic construct
GKGTRLTVV

SEQ ID NO: 17218 - protein, 10 aa, synthetic construct
GAGTKLTIKP

SEQ ID NO: 17219 - protein, 9 aa, synthetic construct
GPGTRLLVL

SEQ ID NO: 17220 - protein, 10 aa, synthetic construct
GHGTILRVHP

SEQ ID NO: 17221 - protein, 9 aa, synthetic construct
GKGTRLTVV

SEQ ID NO: 17222 - protein, 10 aa, synthetic construct
GAGTKLTIKP

SEQ ID NO: 17223 - protein, 9 aa, synthetic construct
GKGTRLTVV

SEQ ID NO: 17224 - protein, 10 aa, synthetic construct
GTGTLLSVKP

SEQ ID NO: 17225 - protein, 9 aa, synthetic construct
GKGTRLTVV

SEQ ID NO: 17226 - protein, 10 aa, synthetic construct
GKGTQVVVLP

SEQ ID NO: 17227 - protein, 9 aa, synthetic construct
GSGTRLTVL

SEQ ID NO: 17228 - protein, 10 aa, synthetic construct
GQGTSLSVVP

SEQ ID NO: 17229 - protein, 9 aa, synthetic construct
GPGTRLLVL

SEQ ID NO: 17230 - protein, 10 aa, synthetic construct
GSGTRLLVSP

SEQ ID NO: 17231 - protein, 9 aa, synthetic construct
GHGTKLSVL

SEQ ID NO: 17232 - protein, 10 aa, synthetic construct
GKGTSLTVIP

SEQ ID NO: 17233 - protein, 9 aa, synthetic construct
GPGTRLTVL

SEQ ID NO: 17234 - protein, 10 aa, synthetic construct
GKGTQLIIQP

SEQ ID NO: 17235 - protein, 9 aa, synthetic construct
GSGTRLTVL

SEQ ID NO: 17236 - protein, 10 aa, synthetic construct
GKGTHLHVLP

SEQ ID NO: 17237 - protein, 9 aa, synthetic construct
GKGTRLTVV

SEQ ID NO: 17238 - protein, 10 aa, synthetic construct
GEGTKLTVSS

SEQ ID NO: 17239 - protein, 9 aa, synthetic construct
GSGTRLTVL

SEQ ID NO: 17240 - protein, 10 aa, synthetic construct
GKGTHLHVLP

SEQ ID NO: 17241 - protein, 9 aa, synthetic construct
GSGTRLTVL

SEQ ID NO: 17242 - protein, 10 aa, synthetic construct
GKGTHLHVLP

SEQ ID NO: 17243 - protein, 9 aa, synthetic construct
GSGTRLTVL

SEQ ID NO: 17244 - protein, 10 aa, synthetic construct
GDGTQLVVKP

SEQ ID NO: 17245 - protein, 9 aa, synthetic construct
GPGTRLLVL

SEQ ID NO: 17246 - protein, 10 aa, synthetic construct
GSGTQLTVMP

SEQ ID NO: 17247 - protein, 9 aa, synthetic construct
GSGTRLLVI

SEQ ID NO: 17248 - protein, 10 aa, synthetic construct
GKGTQLIIQP

SEQ ID NO: 17249 - protein, 9 aa, synthetic construct
GPGTRLTVL

SEQ ID NO: 17250 - protein, 10 aa, synthetic construct
GQGTKLSIKP

SEQ ID NO: 17251 - protein, 9 aa, synthetic construct
GPGTRLTVL

SEQ ID NO: 17252 - protein, 10 aa, synthetic construct
GTGTRLQVLP

SEQ ID NO: 17253 - protein, 9 aa, synthetic construct
GPGTRLTVL

SEQ ID NO: 17254 - protein, 10 aa, synthetic construct
GLGTRVSVFP

SEQ ID NO: 17255 - protein, 9 aa, synthetic construct
GPGTRLTVL

SEQ ID NO: 17256 - protein, 10 aa, synthetic construct
GGGTRLTVRP

SEQ ID NO: 17257 - protein, 9 aa, synthetic construct
GPGTRLTVL

SEQ ID NO: 17258 - protein, 10 aa, synthetic construct
GKGTKLSVKS

SEQ ID NO: 17259 - protein, 9 aa, synthetic construct
GPGTRLTVL

SEQ ID NO: 17260 - protein, 10 aa, synthetic construct
GDGTVLTVKP

SEQ ID NO: 17261 - protein, 9 aa, synthetic construct
GPGTRLTVL

SEQ ID NO: 17262 - protein, 10 aa, synthetic construct
GGGTRLTVRP

SEQ ID NO: 17263 - protein, 9 aa, synthetic construct
GPGTRLTVL

SEQ ID NO: 17264 - protein, 10 aa, synthetic construct
GLGTILRVRP

SEQ ID NO: 17265 - protein, 9 aa, synthetic construct
GPGTRLTVL

SEQ ID NO: 17266 - protein, 10 aa, synthetic construct
GKGTSLTVIP

SEQ ID NO: 17267 - protein, 9 aa, synthetic construct
GPGTRLTVL

SEQ ID NO: 17268 - protein, 10 aa, synthetic construct
GLGTTLQVQP

SEQ ID NO: 17269 - protein, 9 aa, synthetic construct
GPGTRLTVL

SEQ ID NO: 17270 - protein, 11 aa, synthetic construct
GSGTKVIVLPY

SEQ ID NO: 17271 - protein, 9 aa, synthetic construct
GPGTRLTVL

SEQ ID NO: 17272 - protein, 10 aa, synthetic construct
GKGTSLTVIP

SEQ ID NO: 17273 - protein, 9 aa, synthetic construct
GPGTRLTVL

SEQ ID NO: 17274 - protein, 10 aa, synthetic construct
GKGTQLIIQP

SEQ ID NO: 17275 - protein, 9 aa, synthetic construct
GPGTRLTVL

SEQ ID NO: 17276 - protein, 10 aa, synthetic construct
GQGTVLSVIP

SEQ ID NO: 17277 - protein, 9 aa, synthetic construct
GPGTRLLVL

SEQ ID NO: 17278 - protein, 10 aa, synthetic construct
GKGTVLLVSP

SEQ ID NO: 17279 - protein, 9 aa, synthetic construct
GSGTRLLVI

SEQ ID NO: 17280 - protein, 10 aa, synthetic construct
GAGTKLTIKP

SEQ ID NO: 17281 - protein, 9 aa, synthetic construct
GPGTRLTVL

SEQ ID NO: 17282 - protein, 10 aa, synthetic construct
GAGTQLIVIP

SEQ ID NO: 17283 - protein, 9 aa, synthetic construct
GPGTRLTVL

SEQ ID NO: 17284 - protein, 10 aa, synthetic construct
GKGTSLTVIP

SEQ ID NO: 17285 - protein, 9 aa, synthetic construct
GPGTRLTVL

SEQ ID NO: 17286 - protein, 10 aa, synthetic construct
GDGTQLVVKP

SEQ ID NO: 17287 - protein, 9 aa, synthetic construct
GPGTRLTVL

SEQ ID NO: 17288 - protein, 10 aa, synthetic construct
GEGTKLTVSS

SEQ ID NO: 17289 - protein, 9 aa, synthetic construct
GKGTRLTVV

SEQ ID NO: 17290 - protein, 10 aa, synthetic construct
GAGTQLIVIP

SEQ ID NO: 17291 - protein, 9 aa, synthetic construct
GPGTRLLVL

SEQ ID NO: 17292 - protein, 10 aa, synthetic construct
GLGTSLVVNP

SEQ ID NO: 17293 - protein, 9 aa, synthetic construct
GPGTRLTVL

SEQ ID NO: 17294 - protein, 10 aa, synthetic construct
GKGTKLSVKS

SEQ ID NO: 17295 - protein, 9 aa, synthetic construct
GAGTRLSVL

SEQ ID NO: 17296 - protein, 10 aa, synthetic construct
GAGTRLKVIA

SEQ ID NO: 17297 - protein, 9 aa, synthetic construct
GEGSRLIVV

SEQ ID NO: 17298 - protein, 10 aa, synthetic construct
GIGTRVLVRP

SEQ ID NO: 17299 - protein, 9 aa, synthetic construct
GPGTRLTVL

SEQ ID NO: 17300 - protein, 10 aa, synthetic construct
GAGTRLAVCP

SEQ ID NO: 17301 - protein, 9 aa, synthetic construct
GEGSKLTVL

SEQ ID NO: 17302 - protein, 10 aa, synthetic construct
GKGTSLTVIP

SEQ ID NO: 17303 - protein, 9 aa, synthetic construct
GSGTRLLVI

SEQ ID NO: 17304 - protein, 10 aa, synthetic construct
GKGTHLHVLP

SEQ ID NO: 17305 - protein, 9 aa, synthetic construct
GEGSKLTVL

SEQ ID NO: 17306 - protein, 10 aa, synthetic construct
GKGTSLTVIP

SEQ ID NO: 17307 - protein, 9 aa, synthetic construct
GEGSKLTVL

SEQ ID NO: 17308 - protein, 10 aa, synthetic construct
GQGTSLSVVP

SEQ ID NO: 17309 - protein, 9 aa, synthetic construct
GKGTRLTVV

SEQ ID NO: 17310 - protein, 10 aa, synthetic construct
GTGTKLQVVP

SEQ ID NO: 17311 - protein, 9 aa, synthetic construct
GSGTRLLVI

SEQ ID NO: 17312 - protein, 10 aa, synthetic construct
GTGTRLQVLP

SEQ ID NO: 17313 - protein, 9 aa, synthetic construct
GKGTRLTVV

SEQ ID NO: 17314 - protein, 10 aa, synthetic construct
GKGTHLHVLP

SEQ ID NO: 17315 - protein, 9 aa, synthetic construct
GKGTRLTVV

SEQ ID NO: 17316 - protein, 10 aa, synthetic construct
GSGTRLLVSP

SEQ ID NO: 17317 - protein, 9 aa, synthetic construct
GHGTKLSVL

SEQ ID NO: 17318 - protein, 10 aa, synthetic construct
GSGTKLIIKP

SEQ ID NO: 17319 - protein, 9 aa, synthetic construct
GPGTRLTVL

SEQ ID NO: 17320 - protein, 10 aa, synthetic construct
GKGTSLTVIP

SEQ ID NO: 17321 - protein, 9 aa, synthetic construct
AAGTRLTVT

SEQ ID NO: 17322 - protein, 10 aa, synthetic construct
GAGTKLTIKP

SEQ ID NO: 17323 - protein, 9 aa, synthetic construct
GSGTRLTVL

SEQ ID NO: 17324 - protein, 10 aa, synthetic construct
GKGTKLSVKS

SEQ ID NO: 17325 - protein, 9 aa, synthetic construct
GPGTRLTVL

SEQ ID NO: 17326 - protein, 10 aa, synthetic construct
GAGTRLKVIA

SEQ ID NO: 17327 - protein, 9 aa, synthetic construct
GKGTRLTVV

SEQ ID NO: 17328 - protein, 10 aa, synthetic construct
GKGTSLTVIP

SEQ ID NO: 17329 - protein, 9 aa, synthetic construct
GEGSKLTVL

SEQ ID NO: 17330 - protein, 10 aa, synthetic construct
GQGTVLSVIP

SEQ ID NO: 17331 - protein, 9 aa, synthetic construct
GAGTRLSVL

SEQ ID NO: 17332 - protein, 10 aa, synthetic construct
GTGTLLSVKP

SEQ ID NO: 17333 - protein, 9 aa, synthetic construct
GPGTRLLVL

SEQ ID NO: 17334 - protein, 10 aa, synthetic construct
GSGTKLTVEP

SEQ ID NO: 17335 - protein, 9 aa, synthetic construct
GSGTRLTVL

SEQ ID NO: 17336 - protein, 10 aa, synthetic construct
GSGTRLLVSP

SEQ ID NO: 17337 - protein, 9 aa, synthetic construct
GKGTRLTVV

SEQ ID NO: 17338 - protein, 10 aa, synthetic construct
GQGTSLSVVP

SEQ ID NO: 17339 - protein, 9 aa, synthetic construct
GSGTRLTVL

SEQ ID NO: 17340 - protein, 10 aa, synthetic construct
GTGTTVSVSP

SEQ ID NO: 17341 - protein, 9 aa, synthetic construct
GPGTRLTVL

SEQ ID NO: 17342 - protein, 10 aa, synthetic construct
GTGTRLQVLP

SEQ ID NO: 17343 - protein, 9 aa, synthetic construct
GPGTRLLVL

SEQ ID NO: 17344 - protein, 10 aa, synthetic construct
GAGTKLTIKP

SEQ ID NO: 17345 - protein, 9 aa, synthetic construct
GPGTRLTVL

SEQ ID NO: 17346 - protein, 10 aa, synthetic construct
GTGTRLQVLP

SEQ ID NO: 17347 - protein, 9 aa, synthetic construct
GSGTRLLVI

SEQ ID NO: 17348 - protein, 10 aa, synthetic construct
GKGTKFSLIP

SEQ ID NO: 17349 - protein, 9 aa, synthetic construct
GHGTKLSVL

SEQ ID NO: 17350 - protein, 10 aa, synthetic construct
GLGTRVSVFP

SEQ ID NO: 17351 - protein, 9 aa, synthetic construct
GPGTRLTVL

SEQ ID NO: 17352 - protein, 10 aa, synthetic construct
GTGTSLLVDP

SEQ ID NO: 17353 - protein, 9 aa, synthetic construct
GKGTRLTVV

SEQ ID NO: 17354 - protein, 10 aa, synthetic construct
GKGTLLTVTP

SEQ ID NO: 17355 - protein, 9 aa, synthetic construct
GPGTRLTVL

SEQ ID NO: 17356 - protein, 10 aa, synthetic construct
GTGTTVSVSP

SEQ ID NO: 17357 - protein, 9 aa, synthetic construct
GPGTRLTVL

SEQ ID NO: 17358 - protein, 10 aa, synthetic construct
GIGTRVLVRP

SEQ ID NO: 17359 - protein, 9 aa, synthetic construct
GPGTRLLVL

SEQ ID NO: 17360 - protein, 10 aa, synthetic construct
GAGTKLTIKP

SEQ ID NO: 17361 - protein, 9 aa, synthetic construct
GPGTRLTVL

SEQ ID NO: 17362 - protein, 10 aa, synthetic construct
GAGTRLKVIA

SEQ ID NO: 17363 - protein, 9 aa, synthetic construct
GPGTRLLVL

SEQ ID NO: 17364 - protein, 10 aa, synthetic construct
GSGTRLLVSP

SEQ ID NO: 17365 - protein, 9 aa, synthetic construct
GPGTRLTVL

SEQ ID NO: 17366 - protein, 10 aa, synthetic construct
GSGTQLTVMP

SEQ ID NO: 17367 - protein, 9 aa, synthetic construct
GKGTRLTVV

SEQ ID NO: 17368 - protein, 10 aa, synthetic construct
GQGTVLSVIP

SEQ ID NO: 17369 - protein, 9 aa, synthetic construct
GSGTRLLVI

SEQ ID NO: 17370 - protein, 10 aa, synthetic construct
GTGTKLQVVP

SEQ ID NO: 17371 - protein, 9 aa, synthetic construct
GSGTRLLVI

SEQ ID NO: 17372 - protein, 10 aa, synthetic construct
GTGTSLLVDP

SEQ ID NO: 17373 - protein, 9 aa, synthetic construct
GEGSRLIVV

SEQ ID NO: 17374 - protein, 10 aa, synthetic construct
GHGTILRVHP

SEQ ID NO: 17375 - protein, 9 aa, synthetic construct
GPGTRLTVL

SEQ ID NO: 17376 - protein, 10 aa, synthetic construct
GHGTILRVHP

SEQ ID NO: 17377 - protein, 9 aa, synthetic construct
GEGSRLIVV

SEQ ID NO: 17378 - protein, 10 aa, synthetic construct
GEGTQVTVIS

SEQ ID NO: 17379 - protein, 9 aa, synthetic construct
GSGTRLLVI

SEQ ID NO: 17380 - protein, 10 aa, synthetic construct
GLGTRVSVFP

SEQ ID NO: 17381 - protein, 9 aa, synthetic construct
GAGTRLSVL

SEQ ID NO: 17382 - protein, 10 aa, synthetic construct
GQGTVLSVIP

SEQ ID NO: 17383 - protein, 9 aa, synthetic construct
GPGTRLTVL

SEQ ID NO: 17384 - protein, 10 aa, synthetic construct
GKGAKLTVSP

SEQ ID NO: 17385 - protein, 9 aa, synthetic construct
AAGTRLTVT

SEQ ID NO: 17386 - protein, 10 aa, synthetic construct
GKGTKFSLIP

SEQ ID NO: 17387 - protein, 9 aa, synthetic construct
GAGTRLSVL

SEQ ID NO: 17388 - protein, 10 aa, synthetic construct
GDGTQLVVKP

SEQ ID NO: 17389 - protein, 9 aa, synthetic construct
GPGTRLLVL

SEQ ID NO: 17390 - protein, 10 aa, synthetic construct
GAGTKLTIKP

SEQ ID NO: 17391 - protein, 9 aa, synthetic construct
GHGTKLSVL

SEQ ID NO: 17392 - protein, 10 aa, synthetic construct
GAGTKLSVKP

SEQ ID NO: 17393 - protein, 9 aa, synthetic construct
GAGTRLSVL

SEQ ID NO: 17394 - protein, 10 aa, synthetic construct
GKGTSLTVIP

SEQ ID NO: 17395 - protein, 9 aa, synthetic construct
GKGTRLTVV

SEQ ID NO: 17396 - protein, 10 aa, synthetic construct
GKGAKLTVSP

SEQ ID NO: 17397 - protein, 9 aa, synthetic construct
GPGTRLLVL

SEQ ID NO: 17398 - protein, 10 aa, synthetic construct
GAGTRLQVNL

SEQ ID NO: 17399 - protein, 9 aa, synthetic construct
GKGTRLTVV

SEQ ID NO: 17400 - protein, 10 aa, synthetic construct
GAGTRLQVNL

SEQ ID NO: 17401 - protein, 9 aa, synthetic construct
GEGTRLSVL

SEQ ID NO: 17402 - protein, 10 aa, synthetic construct
GKGTHLHVLP

SEQ ID NO: 17403 - protein, 9 aa, synthetic construct
AAGTRLTVT

SEQ ID NO: 17404 - protein, 10 aa, synthetic construct
GQGTSLSVVP

SEQ ID NO: 17405 - protein, 9 aa, synthetic construct
GPGTRLTVL

SEQ ID NO: 17406 - protein, 10 aa, synthetic construct
GQGTVLSVIP

SEQ ID NO: 17407 - protein, 9 aa, synthetic construct
GPGTRLTVL

SEQ ID NO: 17408 - protein, 10 aa, synthetic construct
GQGTSLSVVP

SEQ ID NO: 17409 - protein, 9 aa, synthetic construct
GAGTRLSVL

SEQ ID NO: 17410 - protein, 10 aa, synthetic construct
GQGTVLSVIP

SEQ ID NO: 17411 - protein, 9 aa, synthetic construct
GAGTRLSVL

SEQ ID NO: 17412 - protein, 10 aa, synthetic construct
GEGTKLTVSS

SEQ ID NO: 17413 - protein, 9 aa, synthetic construct
GAGTRLSVL

SEQ ID NO: 17414 - protein, 10 aa, synthetic construct
GIGTRVLVRP

SEQ ID NO: 17415 - protein, 9 aa, synthetic construct
GSGTRLTVL

SEQ ID NO: 17416 - protein, 10 aa, synthetic construct
GEGTKLTVSS

SEQ ID NO: 17417 - protein, 9 aa, synthetic construct
GSGTRLTVL

SEQ ID NO: 17418 - protein, 10 aa, synthetic construct
GDGTQLVVKP

SEQ ID NO: 17419 - protein, 9 aa, synthetic construct
GSGTRLTVL

SEQ ID NO: 17420 - protein, 10 aa, synthetic construct
GDGTQLVVKP

SEQ ID NO: 17421 - protein, 9 aa, synthetic construct
AAGTRLTVT

SEQ ID NO: 17422 - protein, 10 aa, synthetic construct
GDGTQLVVKP

SEQ ID NO: 17423 - protein, 9 aa, synthetic construct
GPGTRLTVL

SEQ ID NO: 17424 - protein, 10 aa, synthetic construct
GSGTKLTVEP

SEQ ID NO: 17425 - protein, 9 aa, synthetic construct
GEGSKLTVL

SEQ ID NO: 17426 - protein, 10 aa, synthetic construct
GTGTRLQVSP

SEQ ID NO: 17427 - protein, 9 aa, synthetic construct
AAGTRLTVT

SEQ ID NO: 17428 - protein, 10 aa, synthetic construct
GTGTRLQVSP

SEQ ID NO: 17429 - protein, 9 aa, synthetic construct
GEGTRLSVL

SEQ ID NO: 17430 - protein, 10 aa, synthetic construct
GTGTRLQVSP

SEQ ID NO: 17431 - protein, 9 aa, synthetic construct
GEGTRLSVL

SEQ ID NO: 17432 - protein, 10 aa, synthetic construct
GHGTILRVHP

SEQ ID NO: 17433 - protein, 9 aa, synthetic construct
GHGTKLSVL

SEQ ID NO: 17434 - protein, 10 aa, synthetic construct
GAGTRLKVIA

SEQ ID NO: 17435 - protein, 9 aa, synthetic construct
GSGTRLTVL

SEQ ID NO: 17436 - protein, 10 aa, synthetic construct
GKGTSLVVHP

SEQ ID NO: 17437 - protein, 9 aa, synthetic construct
GSGTRLLVI

SEQ ID NO: 17438 - protein, 10 aa, synthetic construct
GIGTRVLVRP

SEQ ID NO: 17439 - protein, 9 aa, synthetic construct
GSGTRLTVL

SEQ ID NO: 17440 - protein, 10 aa, synthetic construct
GSGTQLTVMP

SEQ ID NO: 17441 - protein, 9 aa, synthetic construct
GEGSKLTVL

SEQ ID NO: 17442 - protein, 10 aa, synthetic construct
GKGTQLIIQP

SEQ ID NO: 17443 - protein, 9 aa, synthetic construct
GSGTRLLVI

SEQ ID NO: 17444 - protein, 10 aa, synthetic construct
GKGTQVVVLP

SEQ ID NO: 17445 - protein, 9 aa, synthetic construct
GKGTRLTVV

SEQ ID NO: 17446 - protein, 10 aa, synthetic construct
GAGTRLKVIA

SEQ ID NO: 17447 - protein, 9 aa, synthetic construct
GEGSRLIVV

SEQ ID NO: 17448 - protein, 10 aa, synthetic construct
GQGTKLSIKP

SEQ ID NO: 17449 - protein, 9 aa, synthetic construct
GPGTRLTVL

SEQ ID NO: 17450 - protein, 10 aa, synthetic construct
GKGAKLTVSP

SEQ ID NO: 17451 - protein, 9 aa, synthetic construct
GPGTRLTVL

SEQ ID NO: 17452 - protein, 10 aa, synthetic construct
GQGTKLSIKP

SEQ ID NO: 17453 - protein, 9 aa, synthetic construct
GEGSKLTVL

SEQ ID NO: 17454 - protein, 10 aa, synthetic construct
GLGTRVSVFP

SEQ ID NO: 17455 - protein, 9 aa, synthetic construct
GPGTRLTVL

SEQ ID NO: 17456 - protein, 10 aa, synthetic construct
GSGTQLTVMP

SEQ ID NO: 17457 - protein, 9 aa, synthetic construct
GKGTRLTVV

SEQ ID NO: 17458 - protein, 10 aa, synthetic construct
GQGTVLSVIP

SEQ ID NO: 17459 - protein, 9 aa, synthetic construct
GKGTRLTVV

SEQ ID NO: 17460 - protein, 10 aa, synthetic construct
GKGTVLLVSP

SEQ ID NO: 17461 - protein, 9 aa, synthetic construct
GKGTRLTVV

SEQ ID NO: 17462 - protein, 10 aa, synthetic construct
GQGTVLSVIP

SEQ ID NO: 17463 - protein, 9 aa, synthetic construct
GSGTRLTVL

SEQ ID NO: 17464 - protein, 10 aa, synthetic construct
GLGTTLQVQP

SEQ ID NO: 17465 - protein, 9 aa, synthetic construct
GPGTRLTVL

SEQ ID NO: 17466 - protein, 10 aa, synthetic construct
GIGTRVLVRP

SEQ ID NO: 17467 - protein, 9 aa, synthetic construct
GSGTRLTVL

SEQ ID NO: 17468 - protein, 11 aa, synthetic construct
GSGTKVIVLPY

SEQ ID NO: 17469 - protein, 9 aa, synthetic construct
GPGTRLLVL

SEQ ID NO: 17470 - protein, 10 aa, synthetic construct
GKGTHLHVLP

SEQ ID NO: 17471 - protein, 9 aa, synthetic construct
GPGTRLTVL

SEQ ID NO: 17472 - protein, 10 aa, synthetic construct
GKGTHLHVLP

SEQ ID NO: 17473 - protein, 9 aa, synthetic construct
GSGTRLLVI

SEQ ID NO: 17474 - protein, 10 aa, synthetic construct
GKGTSLTVIP

SEQ ID NO: 17475 - protein, 9 aa, synthetic construct
GEGTRLSVL

SEQ ID NO: 17476 - protein, 10 aa, synthetic construct
GEGTKLTVSS

SEQ ID NO: 17477 - protein, 9 aa, synthetic construct
GEGSRLIVV

SEQ ID NO: 17478 - protein, 10 aa, synthetic construct
GLGTTLQVQP

SEQ ID NO: 17479 - protein, 9 aa, synthetic construct
GHGTKLSVL

SEQ ID NO: 17480 - protein, 10 aa, synthetic construct
GDGTQLVVKP

SEQ ID NO: 17481 - protein, 9 aa, synthetic construct
GHGTKLSVL

SEQ ID NO: 17482 - protein, 10 aa, synthetic construct
GKGTQVVVLP

SEQ ID NO: 17483 - protein, 9 aa, synthetic construct
GSGTRLTVL

SEQ ID NO: 17484 - protein, 10 aa, synthetic construct
GTGTLLSVKP

SEQ ID NO: 17485 - protein, 9 aa, synthetic construct
GSGTRLTVL

SEQ ID NO: 17486 - protein, 10 aa, synthetic construct
GQGTILKVYL

SEQ ID NO: 17487 - protein, 9 aa, synthetic construct
GAGTRLSVL

SEQ ID NO: 17488 - protein, 10 aa, synthetic construct
GQGTKLSIKP

SEQ ID NO: 17489 - protein, 9 aa, synthetic construct
GSGTRLLVI

SEQ ID NO: 17490 - protein, 10 aa, synthetic construct
GDGTQLVVKP

SEQ ID NO: 17491 - protein, 9 aa, synthetic construct
GPGTRLTVL

SEQ ID NO: 17492 - protein, 10 aa, synthetic construct
GQGTSLSVVP

SEQ ID NO: 17493 - protein, 9 aa, synthetic construct
GPGTRLTVL

SEQ ID NO: 17494 - protein, 10 aa, synthetic construct
GAGTRLKVIA

SEQ ID NO: 17495 - protein, 9 aa, synthetic construct
GSGTRLLVI

SEQ ID NO: 17496 - protein, 10 aa, synthetic construct
GAGTRLKVIA

SEQ ID NO: 17497 - protein, 9 aa, synthetic construct
GPGTRLLVL

SEQ ID NO: 17498 - protein, 10 aa, synthetic construct
GGGTRLTVRP

SEQ ID NO: 17499 - protein, 9 aa, synthetic construct
GAGTRLSVL

SEQ ID NO: 17500 - protein, 10 aa, synthetic construct
GTGTTVSVSP

SEQ ID NO: 17501 - protein, 9 aa, synthetic construct
AAGTRLTVT

SEQ ID NO: 17502 - protein, 10 aa, synthetic construct
GDGTQLVVKP

SEQ ID NO: 17503 - protein, 9 aa, synthetic construct
GPGTRLLVL

SEQ ID NO: 17504 - protein, 10 aa, synthetic construct
GLGTRVSVFP

SEQ ID NO: 17505 - protein, 9 aa, synthetic construct
GPGTRLLVL

SEQ ID NO: 17506 - protein, 10 aa, synthetic construct
GIGTRVLVRP

SEQ ID NO: 17507 - protein, 9 aa, synthetic construct
GSGTRLLVI

SEQ ID NO: 17508 - protein, 10 aa, synthetic construct
GTGTRLQVLP

SEQ ID NO: 17509 - protein, 9 aa, synthetic construct
GSGTRLTVL

SEQ ID NO: 17510 - protein, 10 aa, synthetic construct
GKGTHLHVLP

SEQ ID NO: 17511 - protein, 9 aa, synthetic construct
GSGTRLTVL

SEQ ID NO: 17512 - protein, 10 aa, synthetic construct
GKGTSLTVIP

SEQ ID NO: 17513 - protein, 9 aa, synthetic construct
GHGTKLSVL

SEQ ID NO: 17514 - protein, 10 aa, synthetic construct
GLGTRVSVFP

SEQ ID NO: 17515 - protein, 9 aa, synthetic construct
GPGTRLTVL

SEQ ID NO: 17516 - protein, 10 aa, synthetic construct
GKGTQLIIQP

SEQ ID NO: 17517 - protein, 9 aa, synthetic construct
AAGTRLTVT

SEQ ID NO: 17518 - protein, 10 aa, synthetic construct
GAGTKLSVKP

SEQ ID NO: 17519 - protein, 9 aa, synthetic construct
GSGTRLTVL

SEQ ID NO: 17520 - protein, 10 aa, synthetic construct
GAGTKLTIKP

SEQ ID NO: 17521 - protein, 9 aa, synthetic construct
GSGTRLTVL

SEQ ID NO: 17522 - protein, 10 aa, synthetic construct
GLGTRVSVFP

SEQ ID NO: 17523 - protein, 9 aa, synthetic construct
GAGTRLSVL

SEQ ID NO: 17524 - protein, 10 aa, synthetic construct
GSGTQLTVMP

SEQ ID NO: 17525 - protein, 9 aa, synthetic construct
GEGTRLSVL

SEQ ID NO: 17526 - protein, 10 aa, synthetic construct
GEGTKLTVSS

SEQ ID NO: 17527 - protein, 9 aa, synthetic construct
GSGTRLTVL

SEQ ID NO: 17528 - protein, 10 aa, synthetic construct
GEGTKLTVSS

SEQ ID NO: 17529 - protein, 9 aa, synthetic construct
GSGTRLLVI

SEQ ID NO: 17530 - protein, 10 aa, synthetic construct
GKGTLLTVTP

SEQ ID NO: 17531 - protein, 9 aa, synthetic construct
GHGTKLSVL

SEQ ID NO: 17532 - protein, 10 aa, synthetic construct
GKGTSLTVIP

SEQ ID NO: 17533 - protein, 9 aa, synthetic construct
GKGTRLTVV

SEQ ID NO: 17534 - protein, 10 aa, synthetic construct
GKGTLLTVTP

SEQ ID NO: 17535 - protein, 9 aa, synthetic construct
GPGTRLTVL

SEQ ID NO: 17536 - protein, 10 aa, synthetic construct
GTGTTVSVSP

SEQ ID NO: 17537 - protein, 9 aa, synthetic construct
GEGSRLIVV

SEQ ID NO: 17538 - protein, 10 aa, synthetic construct
GKGTKLSVKS

SEQ ID NO: 17539 - protein, 9 aa, synthetic construct
GKGTRLTVV

SEQ ID NO: 17540 - protein, 10 aa, synthetic construct
GHGTILRVHP

SEQ ID NO: 17541 - protein, 9 aa, synthetic construct
GSGTRLTVL

SEQ ID NO: 17542 - protein, 10 aa, synthetic construct
GQGTSLSVVP

SEQ ID NO: 17543 - protein, 9 aa, synthetic construct
GPGTRLTVL

SEQ ID NO: 17544 - protein, 10 aa, synthetic construct
GTGTTVSVSP

SEQ ID NO: 17545 - protein, 9 aa, synthetic construct
GAGTRLSVL

SEQ ID NO: 17546 - protein, 11 aa, synthetic construct
GSGTKVIPCLP

SEQ ID NO: 17547 - protein, 9 aa, synthetic construct
GPGTRLLVL

SEQ ID NO: 17548 - protein, 10 aa, synthetic construct
GDGTQLVVKP

SEQ ID NO: 17549 - protein, 9 aa, synthetic construct
GPGTRLTVL

SEQ ID NO: 17550 - protein, 10 aa, synthetic construct
GTGTTVSVSP

SEQ ID NO: 17551 - protein, 9 aa, synthetic construct
GPGTRLTVL

SEQ ID NO: 17552 - protein, 10 aa, synthetic construct
GLGTRVSVFP

SEQ ID NO: 17553 - protein, 9 aa, synthetic construct
GEGSRLIVV

SEQ ID NO: 17554 - protein, 10 aa, synthetic construct
GDGTQLVVKP

SEQ ID NO: 17555 - protein, 9 aa, synthetic construct
GPGTRLTVL

SEQ ID NO: 17556 - protein, 10 aa, synthetic construct
GGGTRLTVRP

SEQ ID NO: 17557 - protein, 9 aa, synthetic construct
GKGTRLTVV

SEQ ID NO: 17558 - protein, 10 aa, synthetic construct
GDGTQLVVKP

SEQ ID NO: 17559 - protein, 9 aa, synthetic construct
GPGTRLTVL

SEQ ID NO: 17560 - protein, 10 aa, synthetic construct
GSGTKLTVEP

SEQ ID NO: 17561 - protein, 9 aa, synthetic construct
GEGSKLTVL

SEQ ID NO: 17562 - protein, 10 aa, synthetic construct
GLGTTLQVQP

SEQ ID NO: 17563 - protein, 9 aa, synthetic construct
GPGTRLTVL

SEQ ID NO: 17564 - protein, 10 aa, synthetic construct
GAGTKLTIKP

SEQ ID NO: 17565 - protein, 9 aa, synthetic construct
GPGTRLLVL

SEQ ID NO: 17566 - protein, 10 aa, synthetic construct
GKGAKLTVSP

SEQ ID NO: 17567 - protein, 9 aa, synthetic construct
GSGTRLTVL

SEQ ID NO: 17568 - protein, 10 aa, synthetic construct
GTGTTVSVSP

SEQ ID NO: 17569 - protein, 9 aa, synthetic construct
GEGSKLTVL

SEQ ID NO: 17570 - protein, 10 aa, synthetic construct
GKGAKLTVSP

SEQ ID NO: 17571 - protein, 9 aa, synthetic construct
GEGSKLTVL

SEQ ID NO: 17572 - protein, 10 aa, synthetic construct
GTGTTVSVSP

SEQ ID NO: 17573 - protein, 9 aa, synthetic construct
GSGTRLTVL

SEQ ID NO: 17574 - protein, 10 aa, synthetic construct
GLGTILRVRP

SEQ ID NO: 17575 - protein, 9 aa, synthetic construct
GSGTRLTVL

SEQ ID NO: 17576 - protein, 10 aa, synthetic construct
GTGTRLQVNL

SEQ ID NO: 17577 - protein, 9 aa, synthetic construct
GKGTRLTVV

SEQ ID NO: 17578 - protein, 10 aa, synthetic construct
GAGTQLIVIP

SEQ ID NO: 17579 - protein, 9 aa, synthetic construct
GPGTRLTVL

SEQ ID NO: 17580 - protein, 10 aa, synthetic construct
GKGTKLSVKS

SEQ ID NO: 17581 - protein, 9 aa, synthetic construct
GPGTRLTVL

SEQ ID NO: 17582 - protein, 10 aa, synthetic construct
GQGTVLSVIP

SEQ ID NO: 17583 - protein, 9 aa, synthetic construct
GHGTKLSVL

SEQ ID NO: 17584 - protein, 10 aa, synthetic construct
GTGTSLLVDP

SEQ ID NO: 17585 - protein, 9 aa, synthetic construct
GPGTRLLVL

SEQ ID NO: 17586 - protein, 10 aa, synthetic construct
GKGTHLHVLP

SEQ ID NO: 17587 - protein, 9 aa, synthetic construct
GSGTRLTVL

SEQ ID NO: 17588 - protein, 10 aa, synthetic construct
GQGTKLSIKP

SEQ ID NO: 17589 - protein, 9 aa, synthetic construct
GPGTRLTVL

SEQ ID NO: 17590 - protein, 10 aa, synthetic construct
GSGTKLTVEP

SEQ ID NO: 17591 - protein, 9 aa, synthetic construct
GPGTRLTVL

SEQ ID NO: 17592 - protein, 10 aa, synthetic construct
GTGTKLQVVP

SEQ ID NO: 17593 - protein, 9 aa, synthetic construct
GSGTRLTVL

SEQ ID NO: 17594 - protein, 10 aa, synthetic construct
GKGTLLTVTP

SEQ ID NO: 17595 - protein, 9 aa, synthetic construct
GPGTRLTVL

SEQ ID NO: 17596 - protein, 10 aa, synthetic construct
GSGTQLTVMP

SEQ ID NO: 17597 - protein, 9 aa, synthetic construct
GSGTRLTVL

SEQ ID NO: 17598 - protein, 10 aa, synthetic construct
GSGTQLTVMP

SEQ ID NO: 17599 - protein, 9 aa, synthetic construct
GPGTRLTVL

SEQ ID NO: 17600 - protein, 10 aa, synthetic construct
GTGTSLLVDP

SEQ ID NO: 17601 - protein, 9 aa, synthetic construct
GEGSKLTVL

SEQ ID NO: 17602 - protein, 10 aa, synthetic construct
GKGTLLTVTP

SEQ ID NO: 17603 - protein, 9 aa, synthetic construct
GSGTRLLVI

SEQ ID NO: 17604 - protein, 10 aa, synthetic construct
GQGTVLSVIP

SEQ ID NO: 17605 - protein, 9 aa, synthetic construct
AAGTRLTVT

SEQ ID NO: 17606 - protein, 10 aa, synthetic construct
GSGTQLTVMP

SEQ ID NO: 17607 - protein, 9 aa, synthetic construct
GPGTRLTVL

SEQ ID NO: 17608 - protein, 10 aa, synthetic construct
GKGTHLHVLP

SEQ ID NO: 17609 - protein, 9 aa, synthetic construct
GPGTRLTVL

SEQ ID NO: 17610 - protein, 10 aa, synthetic construct
GKGTKLSVKS

SEQ ID NO: 17611 - protein, 9 aa, synthetic construct
GPGTRLTVL

SEQ ID NO: 17612 - protein, 10 aa, synthetic construct
GEGTQVTVIS

SEQ ID NO: 17613 - protein, 9 aa, synthetic construct
GPGTRLTVL

SEQ ID NO: 17614 - protein, 10 aa, synthetic construct
GTGTTVSVSP

SEQ ID NO: 17615 - protein, 9 aa, synthetic construct
GPGTRLLVL

SEQ ID NO: 17616 - protein, 10 aa, synthetic construct
GKGTQLIIQP

SEQ ID NO: 17617 - protein, 9 aa, synthetic construct
GKGTRLTVV

SEQ ID NO: 17618 - protein, 10 aa, synthetic construct
GTGTSLLVDP

SEQ ID NO: 17619 - protein, 9 aa, synthetic construct
GPGTRLLVL

SEQ ID NO: 17620 - protein, 10 aa, synthetic construct
GAGTQLIVIP

SEQ ID NO: 17621 - protein, 9 aa, synthetic construct
GPGTRLTVL

SEQ ID NO: 17622 - protein, 10 aa, synthetic construct
GKGTSLTVIP

SEQ ID NO: 17623 - protein, 9 aa, synthetic construct
GKGTRLTVV

SEQ ID NO: 17624 - protein, 10 aa, synthetic construct
GLGTRVSVFP

SEQ ID NO: 17625 - protein, 9 aa, synthetic construct
GEGTRLSVL

SEQ ID NO: 17626 - protein, 10 aa, synthetic construct
GKGTKLSVKS

SEQ ID NO: 17627 - protein, 9 aa, synthetic construct
GPGTRLTVL

SEQ ID NO: 17628 - protein, 10 aa, synthetic construct
GDGTVLTVKP

SEQ ID NO: 17629 - protein, 9 aa, synthetic construct
GPGTRLTVL

SEQ ID NO: 17630 - protein, 10 aa, synthetic construct
GTGTRLQVLP

SEQ ID NO: 17631 - protein, 9 aa, synthetic construct
GEGSRLIVV

SEQ ID NO: 17632 - protein, 10 aa, synthetic construct
GKGTVLLVSP

SEQ ID NO: 17633 - protein, 9 aa, synthetic construct
GPGTRLTVL

SEQ ID NO: 17634 - protein, 10 aa, synthetic construct
GKGTHLHVLP

SEQ ID NO: 17635 - protein, 9 aa, synthetic construct
GPGTRLTVL

SEQ ID NO: 17636 - protein, 10 aa, synthetic construct
GLGTILRVRP

SEQ ID NO: 17637 - protein, 9 aa, synthetic construct
GEGSKLTVL

SEQ ID NO: 17638 - protein, 10 aa, synthetic construct
GDGTQLVVKP

SEQ ID NO: 17639 - protein, 9 aa, synthetic construct
GPGTRLTVL

SEQ ID NO: 17640 - protein, 10 aa, synthetic construct
GAGTKLTIKP

SEQ ID NO: 17641 - protein, 9 aa, synthetic construct
GEGSRLIVV

SEQ ID NO: 17642 - protein, 10 aa, synthetic construct
GHGTILRVHP

SEQ ID NO: 17643 - protein, 9 aa, synthetic construct
GHGTKLSVL

SEQ ID NO: 17644 - protein, 10 aa, synthetic construct
GSGTKLIIKP

SEQ ID NO: 17645 - protein, 9 aa, synthetic construct
GPGTRLLVL

SEQ ID NO: 17646 - protein, 10 aa, synthetic construct
GKGTSLVVHP

SEQ ID NO: 17647 - protein, 9 aa, synthetic construct
GSGTRLTVL

SEQ ID NO: 17648 - protein, 10 aa, synthetic construct
GHGTILRVHP

SEQ ID NO: 17649 - protein, 9 aa, synthetic construct
GPGTRLLVL

SEQ ID NO: 17650 - protein, 10 aa, synthetic construct
GSGTKLTVEP

SEQ ID NO: 17651 - protein, 9 aa, synthetic construct
GPGTRLTVL

SEQ ID NO: 17652 - protein, 10 aa, synthetic construct
GDGTVLTVKP

SEQ ID NO: 17653 - protein, 9 aa, synthetic construct
GKGTRLTVV

SEQ ID NO: 17654 - protein, 10 aa, synthetic construct
GTGTRLQVLP

SEQ ID NO: 17655 - protein, 9 aa, synthetic construct
GPGTRLLVL

SEQ ID NO: 17656 - protein, 10 aa, synthetic construct
GQGTVLSVIP

SEQ ID NO: 17657 - protein, 9 aa, synthetic construct
GPGTRLLVL

SEQ ID NO: 17658 - protein, 10 aa, synthetic construct
GKGTHLHVLP

SEQ ID NO: 17659 - protein, 9 aa, synthetic construct
GPGTRLTVL

SEQ ID NO: 17660 - protein, 10 aa, synthetic construct
GDGTVLTVKP

SEQ ID NO: 17661 - protein, 9 aa, synthetic construct
GPGTRLTVL

SEQ ID NO: 17662 - protein, 10 aa, synthetic construct
GDGTQLVVKP

SEQ ID NO: 17663 - protein, 9 aa, synthetic construct
GKGTRLTVV

SEQ ID NO: 17664 - protein, 10 aa, synthetic construct
GAGTRLKVIA

SEQ ID NO: 17665 - protein, 9 aa, synthetic construct
GPGTRLLVL

SEQ ID NO: 17666 - protein, 10 aa, synthetic construct
GTGTTVSVSP

SEQ ID NO: 17667 - protein, 9 aa, synthetic construct
GPGTRLTVL

SEQ ID NO: 17668 - protein, 10 aa, synthetic construct
GQGTSLSVVP

SEQ ID NO: 17669 - protein, 9 aa, synthetic construct
GSGTRLLVI

SEQ ID NO: 17670 - protein, 10 aa, synthetic construct
GQGTVLSVIP

SEQ ID NO: 17671 - protein, 9 aa, synthetic construct
GPGTRLLVL

SEQ ID NO: 17672 - protein, 10 aa, synthetic construct
GSGTQLTVMP

SEQ ID NO: 17673 - protein, 9 aa, synthetic construct
GPGTRLLVL

SEQ ID NO: 17674 - protein, 10 aa, synthetic construct
GIGTLLSVKP

SEQ ID NO: 17675 - protein, 9 aa, synthetic construct
GPGTRLLVL

SEQ ID NO: 17676 - protein, 10 aa, synthetic construct
GLGTRVSVFP

SEQ ID NO: 17677 - protein, 9 aa, synthetic construct
GSGTRLTVL

SEQ ID NO: 17678 - protein, 10 aa, synthetic construct
GKGTQVVVLP

SEQ ID NO: 17679 - protein, 9 aa, synthetic construct
GPGTRLTVL

SEQ ID NO: 17680 - protein, 10 aa, synthetic construct
GQGTVLSVIP

SEQ ID NO: 17681 - protein, 9 aa, synthetic construct
GPGTRLTVL

SEQ ID NO: 17682 - protein, 10 aa, synthetic construct
GLGTILRVRP

SEQ ID NO: 17683 - protein, 9 aa, synthetic construct
GHGTKLSVL

SEQ ID NO: 17684 - protein, 10 aa, synthetic construct
GAGTKLTIKP

SEQ ID NO: 17685 - protein, 9 aa, synthetic construct
AAGTRLTVT

SEQ ID NO: 17686 - protein, 10 aa, synthetic construct
GKGTSLTVIP

SEQ ID NO: 17687 - protein, 9 aa, synthetic construct
AAGTRLTVT

SEQ ID NO: 17688 - protein, 10 aa, synthetic construct
GQGTSLSVVP

SEQ ID NO: 17689 - protein, 9 aa, synthetic construct
GHGTKLSVL

SEQ ID NO: 17690 - protein, 10 aa, synthetic construct
GGGTRLTVRP

SEQ ID NO: 17691 - protein, 9 aa, synthetic construct
GSGTRLTVL

SEQ ID NO: 17692 - protein, 10 aa, synthetic construct
GLGTRVSVFP

SEQ ID NO: 17693 - protein, 9 aa, synthetic construct
GPGTRLTVL

SEQ ID NO: 17694 - protein, 10 aa, synthetic construct
GQGTVLSVIP

SEQ ID NO: 17695 - protein, 9 aa, synthetic construct
GHGTKLSVL

SEQ ID NO: 17696 - protein, 10 aa, synthetic construct
GDGTVLTVKP

SEQ ID NO: 17697 - protein, 9 aa, synthetic construct
GSGTRLLVI

SEQ ID NO: 17698 - protein, 10 aa, synthetic construct
GSGTQLTVMP

SEQ ID NO: 17699 - protein, 9 aa, synthetic construct
GKGTRLTVV

SEQ ID NO: 17700 - protein, 10 aa, synthetic construct
GAGTKLTIKP

SEQ ID NO: 17701 - protein, 9 aa, synthetic construct
GSGTRLTVL

SEQ ID NO: 17702 - protein, 10 aa, synthetic construct
GHGTILRVHP

SEQ ID NO: 17703 - protein, 9 aa, synthetic construct
GPGTRLTVL

SEQ ID NO: 17704 - protein, 10 aa, synthetic construct
GKGTLLTVTP

SEQ ID NO: 17705 - protein, 9 aa, synthetic construct
GHGTKLSVL

SEQ ID NO: 17706 - protein, 10 aa, synthetic construct
GHGTILRVHP

SEQ ID NO: 17707 - protein, 9 aa, synthetic construct
GPGTRLLVL

SEQ ID NO: 17708 - protein, 10 aa, synthetic construct
GKGTQLIIQP

SEQ ID NO: 17709 - protein, 9 aa, synthetic construct
GSGTRLLVI

SEQ ID NO: 17710 - protein, 10 aa, synthetic construct
GLGTRVSVFP

SEQ ID NO: 17711 - protein, 9 aa, synthetic construct
AAGTRLTVT

SEQ ID NO: 17712 - protein, 10 aa, synthetic construct
GIGTLLSVKP

SEQ ID NO: 17713 - protein, 9 aa, synthetic construct
GHGTKLSVL

SEQ ID NO: 17714 - protein, 10 aa, synthetic construct
GLGTRVSVFP

SEQ ID NO: 17715 - protein, 9 aa, synthetic construct
GEGSKLTVL

SEQ ID NO: 17716 - protein, 10 aa, synthetic construct
GTGTRLQVNL

SEQ ID NO: 17717 - protein, 9 aa, synthetic construct
GHGTKLSVL

SEQ ID NO: 17718 - protein, 10 aa, synthetic construct
GSGTQLTVMP

SEQ ID NO: 17719 - protein, 9 aa, synthetic construct
GPGTRLTVL

SEQ ID NO: 17720 - protein, 10 aa, synthetic construct
GKGTSLTVIP

SEQ ID NO: 17721 - protein, 9 aa, synthetic construct
GSGTRLTVL

SEQ ID NO: 17722 - protein, 10 aa, synthetic construct
GKGTSLVVHP

SEQ ID NO: 17723 - protein, 9 aa, synthetic construct
GSGTRLLVI

SEQ ID NO: 17724 - protein, 10 aa, synthetic construct
GSGTQLTVMP

SEQ ID NO: 17725 - protein, 9 aa, synthetic construct
GPGTRLTVL

SEQ ID NO: 17726 - protein, 10 aa, synthetic construct
GQGTKLSIKP

SEQ ID NO: 17727 - protein, 9 aa, synthetic construct
GEGSKLTVL

SEQ ID NO: 17728 - protein, 10 aa, synthetic construct
GKGTVLLVSP

SEQ ID NO: 17729 - protein, 9 aa, synthetic construct
GEGSRLIVV

SEQ ID NO: 17730 - protein, 10 aa, synthetic construct
GKGTQVVVLP

SEQ ID NO: 17731 - protein, 9 aa, synthetic construct
GKGTRLTVV

SEQ ID NO: 17732 - protein, 10 aa, synthetic construct
GSGTQLTVMP

SEQ ID NO: 17733 - protein, 9 aa, synthetic construct
GPGTRLTVL

SEQ ID NO: 17734 - protein, 10 aa, synthetic construct
GKGTQLIIQP

SEQ ID NO: 17735 - protein, 9 aa, synthetic construct
GPGTRLTVL

SEQ ID NO: 17736 - protein, 10 aa, synthetic construct
GKGTHLHVLP

SEQ ID NO: 17737 - protein, 9 aa, synthetic construct
AAGTRLTVT

SEQ ID NO: 17738 - protein, 10 aa, synthetic construct
GKGTQLIIQP

SEQ ID NO: 17739 - protein, 9 aa, synthetic construct
GHGTKLSVL

SEQ ID NO: 17740 - protein, 10 aa, synthetic construct
GLGTSLVVNP

SEQ ID NO: 17741 - protein, 9 aa, synthetic construct
GPGTRLTVL

SEQ ID NO: 17742 - protein, 10 aa, synthetic construct
GTGTTVSVSP

SEQ ID NO: 17743 - protein, 9 aa, synthetic construct
GAGTRLSVL

SEQ ID NO: 17744 - protein, 10 aa, synthetic construct
GKGTQLIIQP

SEQ ID NO: 17745 - protein, 9 aa, synthetic construct
GKGTRLTVV

SEQ ID NO: 17746 - protein, 10 aa, synthetic construct
GKGAKLTVSP

SEQ ID NO: 17747 - protein, 9 aa, synthetic construct
GKGTRLTVV

SEQ ID NO: 17748 - protein, 10 aa, synthetic construct
GLGTRVSVFP

SEQ ID NO: 17749 - protein, 9 aa, synthetic construct
GKGTRLTVV

SEQ ID NO: 17750 - protein, 10 aa, synthetic construct
GDGTVLTVKP

SEQ ID NO: 17751 - protein, 9 aa, synthetic construct
AAGTRLTVT

SEQ ID NO: 17752 - protein, 10 aa, synthetic construct
GSGTQLTVMP

SEQ ID NO: 17753 - protein, 9 aa, synthetic construct
GSGTRLLVI

SEQ ID NO: 17754 - protein, 10 aa, synthetic construct
GKGTKLSVKS

SEQ ID NO: 17755 - protein, 9 aa, synthetic construct
GKGTRLTVV

SEQ ID NO: 17756 - protein, 10 aa, synthetic construct
GDGTVLTVKP

SEQ ID NO: 17757 - protein, 9 aa, synthetic construct
GEGSRLIVV

SEQ ID NO: 17758 - protein, 10 aa, synthetic construct
GKGTKFSLIP

SEQ ID NO: 17759 - protein, 9 aa, synthetic construct
GPGTRLTVL

SEQ ID NO: 17760 - protein, 10 aa, synthetic construct
GAGTQLIVIP

SEQ ID NO: 17761 - protein, 9 aa, synthetic construct
GPGTRLTVL

SEQ ID NO: 17762 - protein, 10 aa, synthetic construct
GKGTQLIIQP

SEQ ID NO: 17763 - protein, 9 aa, synthetic construct
GAGTRLSVL

SEQ ID NO: 17764 - protein, 10 aa, synthetic construct
GKGTSLTVIP

SEQ ID NO: 17765 - protein, 9 aa, synthetic construct
GPGTRLLVL

SEQ ID NO: 17766 - protein, 10 aa, synthetic construct
GTGTLLSVKP

SEQ ID NO: 17767 - protein, 9 aa, synthetic construct
GHGTKLSVL

SEQ ID NO: 17768 - protein, 10 aa, synthetic construct
GAGTKLTIKP

SEQ ID NO: 17769 - protein, 9 aa, synthetic construct
GKGTRLTVV

SEQ ID NO: 17770 - protein, 10 aa, synthetic construct
GKGTKLSVKS

SEQ ID NO: 17771 - protein, 9 aa, synthetic construct
GPGTRLTVL

SEQ ID NO: 17772 - protein, 10 aa, synthetic construct
GKGTHLHVLP

SEQ ID NO: 17773 - protein, 9 aa, synthetic construct
GEGSKLTVL

SEQ ID NO: 17774 - protein, 10 aa, synthetic construct
GDGTQLVVKP

SEQ ID NO: 17775 - protein, 9 aa, synthetic construct
GPGTRLTVL

SEQ ID NO: 17776 - protein, 10 aa, synthetic construct
GLGTTLQVQP

SEQ ID NO: 17777 - protein, 9 aa, synthetic construct
GSGTRLTVL

SEQ ID NO: 17778 - protein, 10 aa, synthetic construct
GLGTSLVVNP

SEQ ID NO: 17779 - protein, 9 aa, synthetic construct
GSGTRLTVL

SEQ ID NO: 17780 - protein, 10 aa, synthetic construct
GEGTKLTVSS

SEQ ID NO: 17781 - protein, 9 aa, synthetic construct
GKGTRLTVV

SEQ ID NO: 17782 - protein, 10 aa, synthetic construct
GSGTRLLVSP

SEQ ID NO: 17783 - protein, 9 aa, synthetic construct
AAGTRLTVT

SEQ ID NO: 17784 - protein, 10 aa, synthetic construct
GKGTLLTVTP

SEQ ID NO: 17785 - protein, 9 aa, synthetic construct
AAGTRLTVT

SEQ ID NO: 17786 - protein, 10 aa, synthetic construct
GKGTSLTVIP

SEQ ID NO: 17787 - protein, 9 aa, synthetic construct
GSGTRLTVL

SEQ ID NO: 17788 - protein, 10 aa, synthetic construct
GIGTRVLVRP

SEQ ID NO: 17789 - protein, 9 aa, synthetic construct
AAGTRLTVT

SEQ ID NO: 17790 - protein, 10 aa, synthetic construct
GIGTLLSVKP

SEQ ID NO: 17791 - protein, 9 aa, synthetic construct
AAGTRLTVT

SEQ ID NO: 17792 - protein, 10 aa, synthetic construct
GIGTRVLVRP

SEQ ID NO: 17793 - protein, 9 aa, synthetic construct
GKGTRLTVV

SEQ ID NO: 17794 - protein, 10 aa, synthetic construct
GSGTRLLVSP

SEQ ID NO: 17795 - protein, 9 aa, synthetic construct
GPGTRLTVL

SEQ ID NO: 17796 - protein, 10 aa, synthetic construct
GKGTQLIIQP

SEQ ID NO: 17797 - protein, 9 aa, synthetic construct
AAGTRLTVT

SEQ ID NO: 17798 - protein, 10 aa, synthetic construct
GQGTVLSVIP

SEQ ID NO: 17799 - protein, 9 aa, synthetic construct
GSGTRLTVL

SEQ ID NO: 17800 - protein, 10 aa, synthetic construct
GAGTKLTIKP

SEQ ID NO: 17801 - protein, 9 aa, synthetic construct
GKGTRLTVV

SEQ ID NO: 17802 - protein, 10 aa, synthetic construct
GKGTHLHVLP

SEQ ID NO: 17803 - protein, 9 aa, synthetic construct
GKGTRLTVV

SEQ ID NO: 17804 - protein, 10 aa, synthetic construct
GDGTQLVVKP

SEQ ID NO: 17805 - protein, 9 aa, synthetic construct
GSGTRLTVL

SEQ ID NO: 17806 - protein, 10 aa, synthetic construct
GTGTSLLVDP

SEQ ID NO: 17807 - protein, 9 aa, synthetic construct
GPGTRLTVL

SEQ ID NO: 17808 - protein, 10 aa, synthetic construct
GTGTLLSVKP

SEQ ID NO: 17809 - DNA, 28 bp, synthetic construct
  source 1..28: mol_type = other DNA
ggctcaggaaccagactgactgttctcg

SEQ ID NO: 17810 - DNA, 31 bp, synthetic construct
  source 1..31: mol_type = other DNA
gggctggggacaactttacaagtgcaaccag

SEQ ID NO: 17811 - DNA, 28 bp, synthetic construct
  source 1..28: mol_type = other DNA
ggtcccggcaccaggctcacggttttag

SEQ ID NO: 17812 - DNA, 31 bp, synthetic construct
  source 1..31: mol_type = other DNA
ggtgatgggacgcagctggtggtgaagccca

SEQ ID NO: 17813 - DNA, 28 bp, synthetic construct
  source 1..28: mol_type = other DNA
ggtcccggcaccaggctcacggttttag

SEQ ID NO: 17814 - DNA, 31 bp, synthetic construct
  source 1..31: mol_type = other DNA
ggaaaagggacacatcttcatgttctcccta

SEQ ID NO: 17815 - DNA, 28 bp, synthetic construct
  source 1..28: mol_type = other DNA
ggctcaggaaccagactgactgttctcg

SEQ ID NO: 17816 - DNA, 31 bp, synthetic construct
  source 1..31: mol_type = other DNA
ggacagggaaccaagttatctatcaagccca

SEQ ID NO: 17817 - DNA, 28 bp, synthetic construct
  source 1..28: mol_type = other DNA
ggtaaaggaaccagactcacagttgtag

SEQ ID NO: 17818 - DNA, 31 bp, synthetic construct
  source 1..31: mol_type = other DNA
ggggaagggacccaagtgacggtaatatctg

SEQ ID NO: 17819 - DNA, 28 bp, synthetic construct
  source 1..28: mol_type = other DNA
ggtcccggcaccaggctcacggttttag

SEQ ID NO: 17820 - DNA, 31 bp, synthetic construct
  source 1..31: mol_type = other DNA
ggatctggcaccaaactcactgtagagccaa

SEQ ID NO: 17821 - DNA, 28 bp, synthetic construct
  source 1..28: mol_type = other DNA
ggctcagggaccaggcttttggtaatag

SEQ ID NO: 17822 - DNA, 31 bp, synthetic construct
  source 1..31: mol_type = other DNA
ggagggggaacaaggttaacggtcagacccg

SEQ ID NO: 17823 - DNA, 28 bp, synthetic construct
  source 1..28: mol_type = other DNA
ggctcagggaccaggcttttggtaatag

SEQ ID NO: 17824 - DNA, 31 bp, synthetic construct; identical to SEQ ID NO: 17820
  source 1..31: mol_type = other DNA

SEQ ID NO: 17825 - DNA, 28 bp, synthetic construct
  source 1..28: mol_type = other DNA
gggccaggcactcggctcctcgtgttag

SEQ ID NO: 17826 - DNA, 31 bp, synthetic construct
  source 1..31: mol_type = other DNA
gggaaaggcactaaactctctgttaaatcaa

SEQ ID NO: 17827 - DNA, 28 bp, synthetic construct
  source 1..28: mol_type = other DNA
ggctcagggaccaggcttttggtaatag

SEQ ID NO: 17828 - DNA, 31 bp, synthetic construct
  source 1..31: mol_type = other DNA
ggtcttggcaccagagtatctgtgtttccct

SEQ ID NO: 17829 - DNA, 28 bp, synthetic construct
  source 1..28: mol_type = other DNA
ggctcaggaaccagactgactgttctcg

SEQ ID NO: 17830 - DNA, 31 bp, synthetic construct; identical to SEQ ID NO: 17812
  source 1..31: mol_type = other DNA

SEQ ID NO: 17831 - DNA, 28 bp, synthetic construct
  source 1..28: mol_type = other DNA
ggtgaaggctcaaagctgacagtgctgg

SEQ ID NO: 17832 - DNA, 31 bp, synthetic construct
  source 1..31: mol_type = other DNA
ggaacaggaaccacggtatcagtcagcccca

SEQ ID NO: 17833 - DNA, 28 bp, synthetic construct
  source 1..28: mol_type = other DNA
ggtaaaggaaccagactcacagttgtag

SEQ ID NO: 17834 - DNA, 31 bp, synthetic construct
  source 1..31: mol_type = other DNA
ggaactggcactctgctttctgtcaagccaa

SEQ ID NO: 17835 - DNA, 28 bp, synthetic construct
  source 1..28: mol_type = other DNA
gggccaggcactcggctcctcgtgttag

SEQ ID NO: 17836 - DNA, 31 bp, synthetic construct; identical to SEQ ID NO: 17828
  source 1..31: mol_type = other DNA

SEQ ID NO: 17837 - DNA, 28 bp, synthetic construct
  source 1..28: mol_type = other DNA
ggtcccggcaccaggctcacggttttag

SEQ ID NO: 17838 - DNA, 31 bp, synthetic construct
  source 1..31: mol_type = other DNA
ggaagtgggactcgattgctggtaagccctg

SEQ ID NO: 17839 - DNA, 28 bp, synthetic construct
  source 1..28: mol_type = other DNA
ggtcccggcaccaggctcacggttttag

SEQ ID NO: 17840 - DNA, 31 bp, synthetic construct
  source 1..31: mol_type = other DNA
ggacacggcaccatccttagggtccatccaa

SEQ ID NO: 17841 - DNA, 28 bp, synthetic construct
  source 1..28: mol_type = other DNA
ggctcagggaccaggcttttggtaatag

SEQ ID NO: 17842 - DNA, 31 bp, synthetic construct; identical to SEQ ID NO: 17828
  source 1..31: mol_type = other DNA

SEQ ID NO: 17843 - DNA, 28 bp, synthetic construct
  source 1..28: mol_type = other DNA
ggtaaaggaaccagactcacagttgtag

SEQ ID NO: 17844 - DNA, 31 bp, synthetic construct
  source 1..31: mol_type = other DNA
gggaaaggaactcagctgatcatccagccct

SEQ ID NO: 17845 - DNA, 28 bp, synthetic construct
  source 1..28: mol_type = other DNA
ggaccagggacacgactcaccgtcctag

SEQ ID NO: 17846 - DNA, 31 bp, synthetic construct; identical to SEQ ID NO: 17844
  source 1..31: mol_type = other DNA

SEQ ID NO: 17847 - DNA, 28 bp, synthetic construct
  source 1..28: mol_type = other DNA
ggtgaaggctcaaagctgacagtgctgg

SEQ ID NO: 17848 - DNA, 31 bp, synthetic construct; identical to SEQ ID NO: 17832
  source 1..31: mol_type = other DNA

SEQ ID NO: 17849 - DNA, 28 bp, synthetic construct
  source 1..28: mol_type = other DNA
ggtgcgggcacccgactatcggtgctag

SEQ ID NO: 17850 - DNA, 31 bp, synthetic construct
  source 1..31: mol_type = other DNA
gggaaaggaacaagtttgactgtcattccaa

SEQ ID NO: 17851 - DNA, 28 bp, synthetic construct
  source 1..28: mol_type = other DNA
ggctcaggaaccagactgactgttctcg

SEQ ID NO: 17852 - DNA, 31 bp, synthetic construct
  source 1..31: mol_type = other DNA
ggtcaaggaaccgttctgagtgttataccag

SEQ ID NO: 17853 - DNA, 28 bp, synthetic construct
  source 1..28: mol_type = other DNA
ggctcaggaaccagactgactgttctcg

SEQ ID NO: 17854 - DNA, 31 bp, synthetic construct; identical to SEQ ID NO: 17832
  source 1..31: mol_type = other DNA

SEQ ID NO: 17855 - DNA, 28 bp, synthetic construct
  source 1..28: mol_type = other DNA
ggaccagggacacgactcaccgtcctag

SEQ ID NO: 17856 - DNA, 31 bp, synthetic construct
  source 1..31: mol_type = other DNA
ggctctgggaccaagctaattataaagccag

SEQ ID NO: 17857 - DNA, 28 bp, synthetic construct
  source 1..28: mol_type = other DNA
ggtgaaggctcaaagctgacagtgctgg

SEQ ID NO: 17858 - DNA, 31 bp, synthetic construct
  source 1..31: mol_type = other DNA
ggaacagggaccagattacaagtctcaccaa

SEQ ID NO: 17859 - DNA, 28 bp, synthetic construct
  source 1..28: mol_type = other DNA
ggtgcgggcacccgactatcggtgctag

SEQ ID NO: 17860 - DNA, 31 bp, synthetic construct; identical to SEQ ID NO: 17850
  source 1..31: mol_type = other DNA

SEQ ID NO: 17861 - DNA, 28 bp, synthetic construct
  source 1..28: mol_type = other DNA
ggctcaggaaccagactgactgttctcg

SEQ ID NO: 17862 - DNA, 31 bp, synthetic construct
  source 1..31: mol_type = other DNA
ggaaagggcacggtgcttctagtctctccag

SEQ ID NO: 17863 - DNA, 28 bp, synthetic construct
  source 1..28: mol_type = other DNA
ggtcccggcaccaggctcacggttttag

SEQ ID NO: 17864 - DNA, 31 bp, synthetic construct
  source 1..31: mol_type = other DNA
ggagcaggtaccagactgaaggttatagcac

SEQ ID NO: 17865 - DNA, 28 bp, synthetic construct
  source 1..28: mol_type = other DNA
gcggcaggcacccggctcactgtgacag

SEQ ID NO: 17866 - DNA, 31 bp, synthetic construct; identical to SEQ ID NO: 17844
  source 1..31: mol_type = other DNA

SEQ ID NO: 17867 - DNA, 28 bp, synthetic construct
  source 1..28: mol_type = other DNA
ggtcccggcaccaggctcacggttttag

SEQ ID NO: 17868 - DNA, 31 bp, synthetic construct
  source 1..31: mol_type = other DNA
ggggaggggacaaagctgacagtgagctcat

SEQ ID NO: 17869 - DNA, 28 bp, synthetic construct
  source 1..28: mol_type = other DNA
ggctcagggaccaggcttttggtaatag

SEQ ID NO: 17870 - DNA, 31 bp, synthetic construct; identical to SEQ ID NO: 17814
  source 1..31: mol_type = other DNA

SEQ ID NO: 17871 - DNA, 28 bp, synthetic construct
  source 1..28: mol_type = other DNA
ggtcccggcaccaggctcacggttttag

SEQ ID NO: 17872 - DNA, 31 bp, synthetic construct; identical to SEQ ID NO: 17856
  source 1..31: mol_type = other DNA

SEQ ID NO: 17873 - DNA, 28 bp, synthetic construct
  source 1..28: mol_type = other DNA
ggtaaaggaaccagactcacagttgtag

SEQ ID NO: 17874 - DNA, 31 bp, synthetic construct; identical to SEQ ID NO: 17840
  source 1..31: mol_type = other DNA

SEQ ID NO: 17875 - DNA, 28 bp, synthetic construct
  source 1..28: mol_type = other DNA
gggccaggcactcggctcctcgtgttag

SEQ ID NO: 17876 - DNA, 31 bp, synthetic construct; identical to SEQ ID NO: 17812
  source 1..31: mol_type = other DNA

SEQ ID NO: 17877 - DNA, 28 bp, synthetic construct
  source 1..28: mol_type = other DNA
ggctcaggaaccagactgactgttctcg

SEQ ID NO: 17878 - DNA, 31 bp, synthetic construct
  source 1..31: mol_type = other DNA
gggaaagggaccagcctcgtggttcatccat

SEQ ID NO: 17879 - DNA, 28 bp, synthetic construct
  source 1..28: mol_type = other DNA
ggctcaggaaccagactgactgttctcg

SEQ ID NO: 17880 - DNA, 31 bp, synthetic construct
  source 1..31: mol_type = other DNA
ggactggggacaactttacaagtgcaaccag

SEQ ID NO: 17881 - DNA, 28 bp, synthetic construct
  source 1..28: mol_type = other DNA
ggtcccggcaccaggctcacggttttag

SEQ ID NO: 17882 - DNA, 31 bp, synthetic construct
  source 1..31: mol_type = other DNA
gggacaggaacaagcctgttggttgatccaa

SEQ ID NO: 17883 - DNA, 28 bp, synthetic construct
  source 1..28: mol_type = other DNA
ggtaaaggaaccagactcacagttgtag

SEQ ID NO: 17884 - DNA, 31 bp, synthetic construct
  source 1..31: mol_type = other DNA
ggatctggaacccaactgacagttatgcctg

SEQ ID NO: 17885 - DNA, 28 bp, synthetic construct
  source 1..28: mol_type = other DNA
ggtcatggaaccaagctgtctgtcctgg

SEQ ID NO: 17886 - DNA, 31 bp, synthetic construct; identical to SEQ ID NO: 17884
  source 1..31: mol_type = other DNA

SEQ ID NO: 17887 - DNA, 28 bp, synthetic construct
  source 1..28: mol_type = other DNA
ggtcccggcaccaggctcacggttttag

SEQ ID NO: 17888 - DNA, 31 bp, synthetic construct; identical to SEQ ID NO: 17838
  source 1..31: mol_type = other DNA

SEQ ID NO: 17889 - DNA, 28 bp, synthetic construct
  source 1..28: mol_type = other DNA
gggccaggcactcggctcctcgtgttag

SEQ ID NO: 17890 - DNA, 31 bp, synthetic construct; identical to SEQ ID NO: 17840
  source 1..31: mol_type = other DNA

SEQ ID NO: 17891 - DNA, 28 bp, synthetic construct
  source 1..28: mol_type = other DNA
ggctcaggaaccagactgactgttctcg

SEQ ID NO: 17892 - DNA, 31 bp, synthetic construct; identical to SEQ ID NO: 17880
  source 1..31: mol_type = other DNA

SEQ ID NO: 17893 - DNA, 28 bp, synthetic construct
  source 1..28: mol_type = other DNA
ggtcatggaaccaagctgtctgtcctgg

SEQ ID NO: 17894 - DNA, 31 bp, synthetic construct; identical to SEQ ID NO: 17844
  source 1..31: mol_type = other DNA

SEQ ID NO: 17895 - DNA, 28 bp, synthetic construct
  source 1..28: mol_type = other DNA
ggtaaaggaaccagactcacagttgtag

SEQ ID NO: 17896 - DNA, 31 bp, synthetic construct; identical to SEQ ID NO: 17844
  source 1..31: mol_type = other DNA

SEQ ID NO: 17897 - DNA, 28 bp, synthetic construct
  source 1..28: mol_type = other DNA
ggctcaggaaccagactgactgttctcg

SEQ ID NO: 17898 - DNA, 31 bp, synthetic construct
  source 1..31: mol_type = other DNA
ggtcaggggaccatattaaaggtgtacctgc

SEQ ID NO: 17899 - DNA, 28 bp, synthetic construct
  source 1..28: mol_type = other DNA
ggctcaggaaccagactgactgttctcg

SEQ ID NO: 17900 - DNA, 31 bp, synthetic construct
  source 1..31: mol_type = other DNA
ggcttgggaaccattttgagagtcagacctc

SEQ ID NO: 17901 - DNA, 28 bp, synthetic construct
  source 1..28: mol_type = other DNA
ggtcccggcaccaggctcacggttttag

SEQ ID NO: 17902 - DNA, 31 bp, synthetic construct; identical to SEQ ID NO: 17812
  source 1..31: mol_type = other DNA

SEQ ID NO: 17903 - DNA, 28 bp, synthetic construct
  source 1..28: mol_type = other DNA
ggaccagggacacgactcaccgtcctag

SEQ ID NO: 17904 - DNA, 31 bp, synthetic construct
  source 1..31: mol_type = other DNA
gggagggggacaagactccaagtttatgcaa

SEQ ID NO: 17905 - DNA, 28 bp, synthetic construct
  source 1..28: mol_type = other DNA
ggtaaaggaaccagactcacagttgtag

SEQ ID NO: 17906 - DNA, 31 bp, synthetic construct
  source 1..31: mol_type = other DNA
gggcaggggacatccttatcagtcgttccaa

SEQ ID NO: 17907 - DNA, 28 bp, synthetic construct
  source 1..28: mol_type = other DNA
ggaccagggacacgactcaccgtcctag

SEQ ID NO: 17908 - DNA, 31 bp, synthetic construct
  source 1..31: mol_type = other DNA
ggagcgggaaccaaattaacagtaaaaccaa

SEQ ID NO: 17909 - DNA, 28 bp, synthetic construct
  source 1..28: mol_type = other DNA
ggctcaggaaccagactgactgttctcg

SEQ ID NO: 17910 - DNA, 31 bp, synthetic construct
  source 1..31: mol_type = other DNA
ggagcgggaaccaaattatcagtaaaaccaa

SEQ ID NO: 17911 - DNA, 28 bp, synthetic construct
  source 1..28: mol_type = other DNA
gggccaggcactcggctcctcgtgttag

SEQ ID NO: 17912 - DNA, 31 bp, synthetic construct; identical to SEQ ID NO: 17826
  source 1..31: mol_type = other DNA

SEQ ID NO: 17913 - DNA, 28 bp, synthetic construct
  source 1..28: mol_type = other DNA
ggctcaggaaccagactgactgttctcg

SEQ ID NO: 17914 - DNA, 31 bp, synthetic construct; identical to SEQ ID NO: 17878
  source 1..31: mol_type = other DNA

SEQ ID NO: 17915 - DNA, 28 bp, synthetic construct
  source 1..28: mol_type = other DNA
gggccaggcactcggctcctcgtgttag

SEQ ID NO: 17916 - DNA, 31 bp, synthetic construct
  source 1..31: mol_type = other DNA
ggaactgggacaaaactccaagtcgttccaa

SEQ ID NO: 17917 - DNA, 28 bp, synthetic construct
  source 1..28: mol_type = other DNA
ggtcccggcaccaggctcacggttttag

SEQ ID NO: 17918 - DNA, 31 bp, synthetic construct; identical to SEQ ID NO: 17916
  source 1..31: mol_type = other DNA

SEQ ID NO: 17919 - DNA, 28 bp, synthetic construct
  source 1..28: mol_type = other DNA
ggtcatggaaccaagctgtctgtcctgg

SEQ ID NO: 17920 - DNA, 31 bp, synthetic construct; identical to SEQ ID NO: 17880
  source 1..31: mol_type = other DNA

SEQ ID NO: 17921 - DNA, 28 bp, synthetic construct
  source 1..28: mol_type = other DNA
ggtaaaggaaccagactcacagttgtag

SEQ ID NO: 17922 - DNA, 31 bp, synthetic construct; identical to SEQ ID NO: 17832
  source 1..31: mol_type = other DNA

SEQ ID NO: 17923 - DNA, 28 bp, synthetic construct
  source 1..28: mol_type = other DNA
ggtcatggaaccaagctgtctgtcctgg

SEQ ID NO: 17924 - DNA, 31 bp, synthetic construct; identical to SEQ ID NO: 17856
  source 1..31: mol_type = other DNA

SEQ ID NO: 17925 - DNA, 28 bp, synthetic construct
  source 1..28: mol_type = other DNA
ggagaggggactcgactctctgttctag

SEQ ID NO: 17926 - DNA, 31 bp, synthetic construct; identical to SEQ ID NO: 17812
  source 1..31: mol_type = other DNA

SEQ ID NO: 17927 - DNA, 28 bp, synthetic construct
  source 1..28: mol_type = other DNA
ggagaggggactcgactctctgttctag

SEQ ID NO: 17928 - DNA, 31 bp, synthetic construct; identical to SEQ ID NO: 17816
  source 1..31: mol_type = other DNA

SEQ ID NO: 17929 - DNA, 28 bp, synthetic construct
  source 1..28: mol_type = other DNA
ggtcccggcaccaggctcacggttttag

SEQ ID NO: 17930 - DNA, 31 bp, synthetic construct; identical to SEQ ID NO: 17814
  source 1..31: mol_type = other DNA

SEQ ID NO: 17931 - DNA, 28 bp, synthetic construct
  source 1..28: mol_type = other DNA
ggtgaaggctcaaagctgacagtgctgg

SEQ ID NO: 17932 - DNA, 31 bp, synthetic construct
  source 1..31: mol_type = other DNA
gggactggaacaagacttcaggtcaaccttg

SEQ ID NO: 17933 - DNA, 28 bp, synthetic construct
  source 1..28: mol_type = other DNA
ggaccagggacacgactcaccgtcctag

SEQ ID NO: 17934 - DNA, 31 bp, synthetic construct; identical to SEQ ID NO: 17828
  source 1..31: mol_type = other DNA

SEQ ID NO: 17935 - DNA, 28 bp, synthetic construct
  source 1..28: mol_type = other DNA
ggtgaaggctcaaagctgacagtgctgg

SEQ ID NO: 17936 - DNA, 31 bp, synthetic construct; identical to SEQ ID NO: 17856
  source 1..31: mol_type = other DNA

SEQ ID NO: 17937 - DNA, 28 bp, synthetic construct
  source 1..28: mol_type = other DNA
ggtgcgggcacccgactatcggtgctag

SEQ ID NO: 17938 - DNA, 31 bp, synthetic construct; identical to SEQ ID NO: 17840
  source 1..31: mol_type = other DNA

SEQ ID NO: 17939 - DNA, 28 bp, synthetic construct
  source 1..28: mol_type = other DNA
ggaccagggacacgactcaccgtcctag

SEQ ID NO: 17940 - DNA, 31 bp, synthetic construct
  source 1..31: mol_type = other DNA
ggaattgggactctgctttctgtcaagccaa

SEQ ID NO: 17941 - DNA, 28 bp, synthetic construct
  source 1..28: mol_type = other DNA
ggtcccggcaccaggctcacggttttag

SEQ ID NO: 17942 - DNA, 31 bp, synthetic construct; identical to SEQ ID NO: 17816
  source 1..31: mol_type = other DNA

SEQ ID NO: 17943 - DNA, 28 bp, synthetic construct
  source 1..28: mol_type = other DNA
ggaccagggacacgactcaccgtcctag

SEQ ID NO: 17944 - DNA, 31 bp, synthetic construct; identical to SEQ ID NO: 17850
  source 1..31: mol_type = other DNA

SEQ ID NO: 17945 - DNA, 28 bp, synthetic construct
  source 1..28: mol_type = other DNA
ggtaaaggaaccagactcacagttgtag

SEQ ID NO: 17946 - DNA, 31 bp, synthetic construct; identical to SEQ ID NO: 17884
  source 1..31: mol_type = other DNA

SEQ ID NO: 17947 - DNA, 28 bp, synthetic construct
  source 1..28: mol_type = other DNA
ggctcaggaaccagactgactgttctcg

SEQ ID NO: 17948 - DNA, 31 bp, synthetic construct; identical to SEQ ID NO: 17822
  source 1..31: mol_type = other DNA

SEQ ID NO: 17949 - DNA, 28 bp, synthetic construct
  source 1..28: mol_type = other DNA
ggtgcgggcacccgactatcggtgctag

SEQ ID NO: 17950 - DNA, 31 bp, synthetic construct; identical to SEQ ID NO: 17810
  source 1..31: mol_type = other DNA

SEQ ID NO: 17951 - DNA, 28 bp, synthetic construct
  source 1..28: mol_type = other DNA
gggccaggcactcggctcctcgtgttag

SEQ ID NO: 17952 - DNA, 31 bp, synthetic construct; identical to SEQ ID NO: 17906
  source 1..31: mol_type = other DNA

SEQ ID NO: 17953 - DNA, 28 bp, synthetic construct
  source 1..28: mol_type = other DNA
ggtcccggcaccaggctcacggttttag

SEQ ID NO: 17954 - DNA, 31 bp, synthetic construct; identical to SEQ ID NO: 17908
  source 1..31: mol_type = other DNA

SEQ ID NO: 17955 - DNA, 28 bp, synthetic construct
  source 1..28: mol_type = other DNA
ggagaaggaagccggctcattgttgtag

SEQ ID NO: 17956 - DNA, 31 bp, synthetic construct; identical to SEQ ID NO: 17882
  source 1..31: mol_type = other DNA

SEQ ID NO: 17957 - DNA, 28 bp, synthetic construct
  source 1..28: mol_type = other DNA
ggctcagggaccaggcttttggtaatag

SEQ ID NO: 17958 - DNA, 31 bp, synthetic construct; identical to SEQ ID NO: 17844
  source 1..31: mol_type = other DNA

SEQ ID NO: 17959 - DNA, 28 bp, synthetic construct
  source 1..28: mol_type = other DNA
ggtcccggcaccaggctcacggttttag

SEQ ID NO: 17960 - DNA, 31 bp, synthetic construct; identical to SEQ ID NO: 17850
  source 1..31: mol_type = other DNA

SEQ ID NO: 17961 - DNA, 28 bp, synthetic construct
  source 1..28: mol_type = other DNA
ggtcccggcaccaggctcacggttttag

SEQ ID NO: 17962 - DNA, 31 bp, synthetic construct; identical to SEQ ID NO: 17814
  source 1..31: mol_type = other DNA

SEQ ID NO: 17963 - DNA, 28 bp, synthetic construct
  source 1..28: mol_type = other DNA
ggtcatggaaccaagctgtctgtcctgg

SEQ ID NO: 17964 - DNA, 31 bp, synthetic construct
  source 1..31: mol_type = other DNA
ggagctgggactcagctgattgtcatacctg

SEQ ID NO: 17965 - DNA, 28 bp, synthetic construct
  source 1..28: mol_type = other DNA
ggtcatggaaccaagctgtctgtcctgg

SEQ ID NO: 17966 - DNA, 31 bp, synthetic construct; identical to SEQ ID NO: 17834
  source 1..31: mol_type = other DNA

SEQ ID NO: 17967 - DNA, 28 bp, synthetic construct
  source 1..28: mol_type = other DNA
ggtgaaggctcaaagctgacagtgctgg

SEQ ID NO: 17968 - DNA, 31 bp, synthetic construct; identical to SEQ ID NO: 17964
  source 1..31: mol_type = other DNA

SEQ ID NO: 17969 - DNA, 28 bp, synthetic construct
  source 1..28: mol_type = other DNA
ggctcaggaaccagactgactgttctcg

SEQ ID NO: 17970 - DNA, 31 bp, synthetic construct; identical to SEQ ID NO: 17814
  source 1..31: mol_type = other DNA

SEQ ID NO: 17971 - DNA, 28 bp, synthetic construct
  source 1..28: mol_type = other DNA
ggtaaaggaaccagactcacagttgtag

SEQ ID NO: 17972 - DNA, 31 bp, synthetic construct
  source 1..31: mol_type = other DNA
ggaacaggaacccaggttgtggtgaccccag

SEQ ID NO: 17973 - DNA, 28 bp, synthetic construct
  source 1..28: mol_type = other DNA
ggagaaggaagccggctcattgttgtag

SEQ ID NO: 17974 - DNA, 31 bp, synthetic construct; identical to SEQ ID NO: 17850
  source 1..31: mol_type = other DNA

SEQ ID NO: 17975 - DNA, 28 bp, synthetic construct
  source 1..28: mol_type = other DNA
ggtgcgggcacccgactatcggtgctag

SEQ ID NO: 17976 - DNA, 31 bp, synthetic construct; identical to SEQ ID NO: 17858
  source 1..31: mol_type = other DNA

SEQ ID NO: 17977 - DNA, 28 bp, synthetic construct
  source 1..28: mol_type = other DNA
ggctcagggaccaggcttttggtaatag

SEQ ID NO: 17978 - DNA, 31 bp, synthetic construct; identical to SEQ ID NO: 17908
  source 1..31: mol_type = other DNA

SEQ ID NO: 17979 - DNA, 28 bp, synthetic construct
  source 1..28: mol_type = other DNA
ggtaaaggaaccagactcacagttgtag

SEQ ID NO: 17980 - DNA, 31 bp, synthetic construct; identical to SEQ ID NO: 17864
  source 1..31: mol_type = other DNA

SEQ ID NO: 17981 - DNA, 28 bp, synthetic construct
  source 1..28: mol_type = other DNA
ggtcccggcaccaggctcacggttttag

SEQ ID NO: 17982 - DNA, 31 bp, synthetic construct; identical to SEQ ID NO: 17898
  source 1..31: mol_type = other DNA

SEQ ID NO: 17983 - DNA, 28 bp, synthetic construct
  source 1..28: mol_type = other DNA
ggtgcgggcacccgactatcggtgctag

SEQ ID NO: 17984 - DNA, 31 bp, synthetic construct; identical to SEQ ID NO: 17822
  source 1..31: mol_type = other DNA

SEQ ID NO: 17985 - DNA, 28 bp, synthetic construct
  source 1..28: mol_type = other DNA
ggtaaaggaaccagactcacagttgtag

SEQ ID NO: 17986 - DNA, 31 bp, synthetic construct; identical to SEQ ID NO: 17844
  source 1..31: mol_type = other DNA

SEQ ID NO: 17987 - DNA, 28 bp, synthetic construct
  source 1..28: mol_type = other DNA
gcggcaggcacccggctcactgtgacag

SEQ ID NO: 17988 - DNA, 31 bp, synthetic construct; identical to SEQ ID NO: 17852
  source 1..31: mol_type = other DNA

SEQ ID NO: 17989 - DNA, 28 bp, synthetic construct
  source 1..28: mol_type = other DNA
ggagaaggaagccggctcattgttgtag

SEQ ID NO: 17990 - DNA, 31 bp, synthetic construct; identical to SEQ ID NO: 17844
  source 1..31: mol_type = other DNA

SEQ ID NO: 17991 - DNA, 28 bp, synthetic construct
  source 1..28: mol_type = other DNA
ggtgcgggcacccgactatcggtgctag

SEQ ID NO: 17992 - DNA, 31 bp, synthetic construct; identical to SEQ ID NO: 17850
  source 1..31: mol_type = other DNA

SEQ ID NO: 17993 - DNA, 28 bp, synthetic construct
  source 1..28: mol_type = other DNA
ggtcccggcaccaggctcacggttttag

SEQ ID NO: 17994 - DNA, 31 bp, synthetic construct; identical to SEQ ID NO: 17906
  source 1..31: mol_type = other DNA

SEQ ID NO: 17995 - DNA, 28 bp, synthetic construct
  source 1..28: mol_type = other DNA
ggtcccggcaccaggctcacggttttag

SEQ ID NO: 17996 - DNA, 31 bp, synthetic construct
  source 1..31: mol_type = other DNA
ggggctggaaccaaactcaccattaaaccca

SEQ ID NO: 17997 - DNA, 28 bp, synthetic construct
  source 1..28: mol_type = other DNA
ggctcaggaaccagactgactgttctcg

SEQ ID NO: 17998 - DNA, 31 bp, synthetic construct; identical to SEQ ID NO: 17884
  source 1..31: mol_type = other DNA

SEQ ID NO: 17999 - DNA, 28 bp, synthetic construct
  source 1..28: mol_type = other DNA
ggtaaaggaaccagactcacagttgtag

SEQ ID NO: 18000 - DNA, 31 bp, synthetic construct
  source 1..31: mol_type = other DNA
ggggatgggaccgtgctcacagtgaagccaa

SEQ ID NO: 18001 - DNA, 28 bp, synthetic construct
  source 1..28: mol_type = other DNA
ggaccagggacacgactcaccgtcctag

SEQ ID NO: 18002 - DNA, 31 bp, synthetic construct; identical to SEQ ID NO: 17884
  source 1..31: mol_type = other DNA

SEQ ID NO: 18003 - DNA, 28 bp, synthetic construct
  source 1..28: mol_type = other DNA
ggaccagggacacgactcaccgtcctag

SEQ ID NO: 18004 - DNA, 31 bp, synthetic construct; identical to SEQ ID NO: 17900
  source 1..31: mol_type = other DNA

SEQ ID NO: 18005 - DNA, 28 bp, synthetic construct
  source 1..28: mol_type = other DNA
ggctcaggaaccagactgactgttctcg

SEQ ID NO: 18006 - DNA, 31 bp, synthetic construct
  source 1..31: mol_type = other DNA
gggacaggaacaagcttgttggttgatccaa

SEQ ID NO: 18007 - DNA, 28 bp, synthetic construct
  source 1..28: mol_type = other DNA
ggtcccggcaccaggctcacggttttag

SEQ ID NO: 18008 - DNA, 31 bp, synthetic construct
  source 1..31: mol_type = other DNA
gggaagggggcaaagctcacagtgagtccag

SEQ ID NO: 18009 - DNA, 28 bp, synthetic construct
  source 1..28: mol_type = other DNA
ggtcccggcaccaggctcacggttttag

SEQ ID NO: 18010 - DNA, 31 bp, synthetic construct; identical to SEQ ID NO: 17814
  source 1..31: mol_type = other DNA

SEQ ID NO: 18011 - DNA, 28 bp, synthetic construct
  source 1..28: mol_type = other DNA
ggagaggggactcgactctctgttctag

SEQ ID NO: 18012 - DNA, 31 bp, synthetic construct; identical to SEQ ID NO: 17856
  source 1..31: mol_type = other DNA

SEQ ID NO: 18013 - DNA, 28 bp, synthetic construct
  source 1..28: mol_type = other DNA
ggtaaaggaaccagactcacagttgtag

SEQ ID NO: 18014 - DNA, 31 bp, synthetic construct; identical to SEQ ID NO: 17900
  source 1..31: mol_type = other DNA

SEQ ID NO: 18015 - DNA, 28 bp, synthetic construct
  source 1..28: mol_type = other DNA
gggccaggcactcggctcctcgtgttag

SEQ ID NO: 18016 - DNA, 31 bp, synthetic construct; identical to SEQ ID NO: 18008
  source 1..31: mol_type = other DNA

SEQ ID NO: 18017 - DNA, 28 bp, synthetic construct
  source 1..28: mol_type = other DNA
ggaccagggacacgactcaccgtcctag

SEQ ID NO: 18018 - DNA, 31 bp, synthetic construct; identical to SEQ ID NO: 17858
  source 1..31: mol_type = other DNA

SEQ ID NO: 18019 - DNA, 28 bp, synthetic construct
  source 1..28: mol_type = other DNA
ggtcccggcaccaggctcacggttttag

SEQ ID NO: 18020 - DNA, 31 bp, synthetic construct; identical to SEQ ID NO: 17878
  source 1..31: mol_type = other DNA

SEQ ID NO: 18021 - DNA, 28 bp, synthetic construct
  source 1..28: mol_type = other DNA
gggccaggcactcggctcctcgtgttag

SEQ ID NO: 18022 - DNA, 31 bp, synthetic construct; identical to SEQ ID NO: 17906
  source 1..31: mol_type = other DNA

SEQ ID NO: 18023 - DNA, 28 bp, synthetic construct
  source 1..28: mol_type = other DNA
ggctcagggaccaggcttttggtaatag

SEQ ID NO: 18024 - DNA, 31 bp, synthetic construct; identical to SEQ ID NO: 17834
  source 1..31: mol_type = other DNA

SEQ ID NO: 18025 - DNA, 28 bp, synthetic construct
  source 1..28: mol_type = other DNA
ggagaggggactcgactctctgttctag

SEQ ID NO: 18026 - DNA, 31 bp, synthetic construct; identical to SEQ ID NO: 17868
  source 1..31: mol_type = other DNA

SEQ ID NO: 18027 - DNA, 28 bp, synthetic construct
  source 1..28: mol_type = other DNA
gggccaggcactcggctcctcgtgttag

SEQ ID NO: 18028 - DNA, 31 bp, synthetic construct; identical to SEQ ID NO: 17996
  source 1..31: mol_type = other DNA

SEQ ID NO: 18029 - DNA, 28 bp, synthetic construct
  source 1..28: mol_type = other DNA
gggccaggcactcggctcctcgtgttag

SEQ ID NO: 18030 - DNA, 31 bp, synthetic construct; identical to SEQ ID NO: 17814
  source 1..31: mol_type = other DNA

SEQ ID NO: 18031 - DNA, 28 bp, synthetic construct
  source 1..28: mol_type = other DNA
ggctcagggaccaggcttttggtaatag

SEQ ID NO: 18032 - DNA, 31 bp, synthetic construct; identical to SEQ ID NO: 17844
  source 1..31: mol_type = other DNA

SEQ ID NO: 18033 - DNA, 28 bp, synthetic construct
  source 1..28: mol_type = other DNA
ggtgaaggctcaaagctgacagtgctgg

SEQ ID NO: 18034 - DNA, 31 bp, synthetic construct; identical to SEQ ID NO: 17840
  source 1..31: mol_type = other DNA

SEQ ID NO: 18035 - DNA, 28 bp, synthetic construct
  source 1..28: mol_type = other DNA
ggtcccggcaccaggctcacggttttag

SEQ ID NO: 18036 - DNA, 31 bp, synthetic construct; identical to SEQ ID NO: 17850
  source 1..31: mol_type = other DNA

SEQ ID NO: 18037 - DNA, 28 bp, synthetic construct
  source 1..28: mol_type = other DNA
ggtcccggcaccaggctcacggttttag

SEQ ID NO: 18038 - DNA, 31 bp, synthetic construct; identical to SEQ ID NO: 17840
  source 1..31: mol_type = other DNA

SEQ ID NO: 18039 - DNA, 28 bp, synthetic construct
  source 1..28: mol_type = other DNA
ggtgaaggctcaaagctgacagtgctgg

SEQ ID NO: 18040 - DNA, 31 bp, synthetic construct; identical to SEQ ID NO: 17940
  source 1..31: mol_type = other DNA

SEQ ID NO: 18041 - DNA, 28 bp, synthetic construct
  source 1..28: mol_type = other DNA
ggagaggggactcgactctctgttctag

SEQ ID NO: 18042 - DNA, 31 bp, synthetic construct; identical to SEQ ID NO: 17964
  source 1..31: mol_type = other DNA

SEQ ID NO: 18043 - DNA, 28 bp, synthetic construct
  source 1..28: mol_type = other DNA
ggtcccggcaccaggctcacggttttag

SEQ ID NO: 18044 - DNA, 31 bp, synthetic construct; identical to SEQ ID NO: 17850
  source 1..31: mol_type = other DNA

SEQ ID NO: 18045 - DNA, 28 bp, synthetic construct
  source 1..28: mol_type = other DNA
gggccaggcactcggctcctcgtgttag

SEQ ID NO: 18046 - DNA, 31 bp, synthetic construct; identical to SEQ ID NO: 17882
  source 1..31: mol_type = other DNA

SEQ ID NO: 18047 - DNA, 28 bp, synthetic construct
  source 1..28: mol_type = other DNA
ggctcaggaaccagactgactgttctcg

SEQ ID NO: 18048 - DNA, 31 bp, synthetic construct; identical to SEQ ID NO: 17850
  source 1..31: mol_type = other DNA

SEQ ID NO: 18049 - DNA, 28 bp, synthetic construct
  source 1..28: mol_type = other DNA
ggctcaggaaccagactgactgttctcg

SEQ ID NO: 18050 - DNA, 31 bp, synthetic construct; identical to SEQ ID NO: 17900
  source 1..31: mol_type = other DNA

SEQ ID NO: 18051 - DNA, 28 bp, synthetic construct
  source 1..28: mol_type = other DNA
ggtaaaggaaccagactcacagttgtag

SEQ ID NO: 18052 - DNA, 31 bp, synthetic construct; identical to SEQ ID NO: 17812
  source 1..31: mol_type = other DNA

SEQ ID NO: 18053 - DNA, 28 bp, synthetic construct
  source 1..28: mol_type = other DNA
ggtcccggcaccaggctcacggttttag

SEQ ID NO: 18054 - DNA, 31 bp, synthetic construct; identical to SEQ ID NO: 17850
  source 1..31: mol_type = other DNA

SEQ ID NO: 18055 - DNA, 28 bp, synthetic construct
  source 1..28: mol_type = other DNA
gggccaggcactcggctcctcgtgttag

SEQ ID NO: 18056 - DNA, 31 bp, synthetic construct; identical to SEQ ID NO: 17852
  source 1..31: mol_type = other DNA

SEQ ID NO: 18057 - DNA, 28 bp, synthetic construct
  source 1..28: mol_type = other DNA
ggtgcgggcacccgactatcggtgctag

SEQ ID NO: 18058 - DNA, 31 bp, synthetic construct; identical to SEQ ID NO: 17820
  source 1..31: mol_type = other DNA

SEQ ID NO: 18059 - DNA, 28 bp, synthetic construct
  source 1..28: mol_type = other DNA
ggtcatggaaccaagctgtctgtcctgg

SEQ ID NO: 18060 - DNA, 31 bp, synthetic construct; identical to SEQ ID NO: 17878
  source 1..31: mol_type = other DNA

SEQ ID NO: 18061 - DNA, 28 bp, synthetic construct
  source 1..28: mol_type = other DNA
ggaccagggacacgactcaccgtcctag

SEQ ID NO: 18062 - DNA, 31 bp, synthetic construct; identical to SEQ ID NO: 17864
  source 1..31: mol_type = other DNA

SEQ ID NO: 18063 - DNA, 28 bp, synthetic construct
  source 1..28: mol_type = other DNA
ggtcccggcaccaggctcacggttttag

SEQ ID NO: 18064 - DNA, 31 bp, synthetic construct
  source 1..31: mol_type = other DNA
ggaattggaaccagggtgctggtcaggccag

SEQ ID NO: 18065 - DNA, 28 bp, synthetic construct
  source 1..28: mol_type = other DNA
ggtcccggcaccaggctcacggttttag

SEQ ID NO: 18066 - DNA, 31 bp, synthetic construct; identical to SEQ ID NO: 17838
  source 1..31: mol_type = other DNA

SEQ ID NO: 18067 - DNA, 28 bp, synthetic construct
  source 1..28: mol_type = other DNA
ggaccagggacacgactcaccgtcctag

SEQ ID NO: 18068 - DNA, 31 bp, synthetic construct; identical to SEQ ID NO: 17972
  source 1..31: mol_type = other DNA

SEQ ID NO: 18069 - DNA, 28 bp, synthetic construct
  source 1..28: mol_type = other DNA
ggaccagggacacgactcaccgtcctag

SEQ ID NO: 18070 - DNA, 31 bp, synthetic construct; identical to SEQ ID NO: 17828
  source 1..31: mol_type = other DNA

SEQ ID NO: 18071 - DNA, 28 bp, synthetic construct
  source 1..28: mol_type = other DNA
ggtaaaggaaccagactcacagttgtag

SEQ ID NO: 18072 - DNA, 31 bp, synthetic construct; identical to SEQ ID NO: 17878
  source 1..31: mol_type = other DNA

SEQ ID NO: 18073 - DNA, 28 bp, synthetic construct
  source 1..28: mol_type = other DNA
gggccaggcactcggctcctcgtgttag

SEQ ID NO: 18074 - DNA, 31 bp, synthetic construct; identical to SEQ ID NO: 18000
  source 1..31: mol_type = other DNA

SEQ ID NO: 18075 - DNA, 28 bp, synthetic construct
  source 1..28: mol_type = other DNA
ggagaaggaagccggctcattgttgtag

SEQ ID NO: 18076 - DNA, 31 bp, synthetic construct; identical to SEQ ID NO: 17834
  source 1..31: mol_type = other DNA

SEQ ID NO: 18077 - DNA, 28 bp, synthetic construct
  source 1..28: mol_type = other DNA
ggtcccggcaccaggctcacggttttag

SEQ ID NO: 18078 - DNA, 31 bp, synthetic construct; identical to SEQ ID NO: 17826
  source 1..31: mol_type = other DNA

SEQ ID NO: 18079 - DNA, 28 bp, synthetic construct
  source 1..28: mol_type = other DNA
ggtaaaggaaccagactcacagttgtag

SEQ ID NO: 18080 - DNA, 31 bp, synthetic construct; identical to SEQ ID NO: 17838
  source 1..31: mol_type = other DNA

SEQ ID NO: 18081 - DNA, 28 bp, synthetic construct
  source 1..28: mol_type = other DNA
ggtcccggcaccaggctcacggttttag

SEQ ID NO: 18082 - DNA, 31 bp, synthetic construct; identical to SEQ ID NO: 17812
  source 1..31: mol_type = other DNA

SEQ ID NO: 18083 - DNA, 28 bp, synthetic construct
  source 1..28: mol_type = other DNA
ggtcccggcaccaggctcacggttttag

SEQ ID NO: 18084 - DNA, 31 bp, synthetic construct; identical to SEQ ID NO: 17840
  source 1..31: mol_type = other DNA

SEQ ID NO: 18085 - DNA, 28 bp, synthetic construct
  source 1..28: mol_type = other DNA
ggctcaggaaccagactgactgttctcg

SEQ ID NO: 18086 - DNA, 31 bp, synthetic construct; identical to SEQ ID NO: 17814
  source 1..31: mol_type = other DNA

SEQ ID NO: 18087 - DNA, 28 bp, synthetic construct
  source 1..28: mol_type = other DNA
ggtaaaggaaccagactcacagttgtag

SEQ ID NO: 18088 - DNA, 31 bp, synthetic construct; identical to SEQ ID NO: 17840
  source 1..31: mol_type = other DNA

SEQ ID NO: 18089 - DNA, 28 bp, synthetic construct
  source 1..28: mol_type = other DNA
ggtcccggcaccaggctcacggttttag

SEQ ID NO: 18090 - DNA, 31 bp, synthetic construct; identical to SEQ ID NO: 17844
  source 1..31: mol_type = other DNA

SEQ ID NO: 18091 - DNA, 28 bp, synthetic construct
  source 1..28: mol_type = other DNA
ggtgcgggcacccgactatcggtgctag

SEQ ID NO: 18092 - DNA, 31 bp, synthetic construct
  source 1..31: mol_type = other DNA
gggaaaggcaccaaattctcactcatcccga

SEQ ID NO: 18093 - DNA, 28 bp, synthetic construct
  source 1..28: mol_type = other DNA
ggtgcgggcacccgactatcggtgctag

SEQ ID NO: 18094 - DNA, 31 bp, synthetic construct; identical to SEQ ID NO: 17940
  source 1..31: mol_type = other DNA

SEQ ID NO: 18095 - DNA, 28 bp, synthetic construct
  source 1..28: mol_type = other DNA
ggtgaaggctcaaagctgacagtgctgg

SEQ ID NO: 18096 - DNA, 31 bp, synthetic construct; identical to SEQ ID NO: 17996
  source 1..31: mol_type = other DNA

SEQ ID NO: 18097 - DNA, 28 bp, synthetic construct
  source 1..28: mol_type = other DNA
ggctcaggaaccagactgactgttctcg

SEQ ID NO: 18098 - DNA, 31 bp, synthetic construct; identical to SEQ ID NO: 17826
  source 1..31: mol_type = other DNA

SEQ ID NO: 18099 - DNA, 28 bp, synthetic construct
  source 1..28: mol_type = other DNA
ggaccagggacacgactcaccgtcctag

SEQ ID NO: 18100 - DNA, 31 bp, synthetic construct; identical to SEQ ID NO: 17850
  source 1..31: mol_type = other DNA

SEQ ID NO: 18101 - DNA, 28 bp, synthetic construct
  source 1..28: mol_type = other DNA
ggtgcgggcacccgactatcggtgctag

SEQ ID NO: 18102 - DNA, 31 bp, synthetic construct; identical to SEQ ID NO: 17812
  source 1..31: mol_type = other DNA

SEQ ID NO: 18103 - DNA, 28 bp, synthetic construct
  source 1..28: mol_type = other DNA
ggaccagggacacgactcaccgtcctag

SEQ ID NO: 18104 - DNA, 31 bp, synthetic construct; identical to SEQ ID NO: 17904
  source 1..31: mol_type = other DNA

SEQ ID NO: 18105 - DNA, 28 bp, synthetic construct
  source 1..28: mol_type = other DNA
ggtgcgggcacccgactatcggtgctag

SEQ ID NO: 18106 - DNA, 31 bp, synthetic construct; identical to SEQ ID NO: 17878
  source 1..31: mol_type = other DNA

SEQ ID NO: 18107 - DNA, 28 bp, synthetic construct
  source 1..28: mol_type = other DNA
ggtaaaggaaccagactcacagttgtag

SEQ ID NO: 18108 - DNA, 31 bp, synthetic construct; identical to SEQ ID NO: 17828
  source 1..31: mol_type = other DNA

SEQ ID NO: 18109 - DNA, 28 bp, synthetic construct
  source 1..28: mol_type = other DNA
ggtaaaggaaccagactcacagttgtag

SEQ ID NO: 18110 - DNA, 31 bp, synthetic construct; identical to SEQ ID NO: 17828
  source 1..31: mol_type = other DNA

SEQ ID NO: 18111 - DNA, 28 bp, synthetic construct
  source 1..28: mol_type = other DNA
ggtcccggcaccaggctcacggttttag

SEQ ID NO: 18112 - DNA, 31 bp, synthetic construct; identical to SEQ ID NO: 17844
  source 1..31: mol_type = other DNA

SEQ ID NO: 18113 - DNA, 28 bp, synthetic construct
  source 1..28: mol_type = other DNA
gggccaggcactcggctcctcgtgttag

SEQ ID NO: 18114 - DNA, 31 bp, synthetic construct; identical to SEQ ID NO: 17884
  source 1..31: mol_type = other DNA

SEQ ID NO: 18115 - DNA, 28 bp, synthetic construct
  source 1..28: mol_type = other DNA
ggctcaggaaccagactgactgttctcg

SEQ ID NO: 18116 - DNA, 31 bp, synthetic construct; identical to SEQ ID NO: 17932
  source 1..31: mol_type = other DNA

SEQ ID NO: 18117 - DNA, 28 bp, synthetic construct
  source 1..28: mol_type = other DNA
ggtcccggcaccaggctcacggttttag

SEQ ID NO: 18118 - DNA, 31 bp, synthetic construct; identical to SEQ ID NO: 18006
  source 1..31: mol_type = other DNA

SEQ ID NO: 18119 - DNA, 28 bp, synthetic construct
  source 1..28: mol_type = other DNA
gcggcaggcacccggctcactgtgacag

SEQ ID NO: 18120 - DNA, 31 bp, synthetic construct; identical to SEQ ID NO: 17900
  source 1..31: mol_type = other DNA

SEQ ID NO: 18121 - DNA, 28 bp, synthetic construct
  source 1..28: mol_type = other DNA
ggtaaaggaaccagactcacagttgtag

SEQ ID NO: 18122 - DNA, 31 bp, synthetic construct; identical to SEQ ID NO: 17996
  source 1..31: mol_type = other DNA

SEQ ID NO: 18123 - DNA, 28 bp, synthetic construct
  source 1..28: mol_type = other DNA
ggctcagggaccaggcttttggtaatag

SEQ ID NO: 18124 - DNA, 31 bp, synthetic construct; identical to SEQ ID NO: 17844
  source 1..31: mol_type = other DNA

SEQ ID NO: 18125 - DNA, 28 bp, synthetic construct
  source 1..28: mol_type = other DNA
gcggcaggcacccggctcactgtgacag

SEQ ID NO: 18126 - DNA, 31 bp, synthetic construct
  source 1..31: mol_type = other DNA
gggaaaggaactctcttaactgtgactccaa

SEQ ID NO: 18127 - DNA, 28 bp, synthetic construct
  source 1..28: mol_type = other DNA
gggccaggcactcggctcctcgtgttag

SEQ ID NO: 18128 - DNA, 31 bp, synthetic construct
  source 1..31: mol_type = other DNA
gggaagggaacccaggtggtggtgttaccaa

SEQ ID NO: 18129 - DNA, 28 bp, synthetic construct
  source 1..28: mol_type = other DNA
ggagaaggaagccggctcattgttgtag

SEQ ID NO: 18130 - DNA, 31 bp, synthetic construct; identical to SEQ ID NO: 17850
  source 1..31: mol_type = other DNA

SEQ ID NO: 18131 - DNA, 28 bp, synthetic construct
  source 1..28: mol_type = other DNA
ggtcccggcaccaggctcacggttttag

SEQ ID NO: 18132 - DNA, 31 bp, synthetic construct; identical to SEQ ID NO: 17814
  source 1..31: mol_type = other DNA

SEQ ID NO: 18133 - DNA, 28 bp, synthetic construct
  source 1..28: mol_type = other DNA
ggctcaggaaccagactgactgttctcg

SEQ ID NO: 18134 - DNA, 31 bp, synthetic construct; identical to SEQ ID NO: 17844
  source 1..31: mol_type = other DNA

SEQ ID NO: 18135 - DNA, 28 bp, synthetic construct
  source 1..28: mol_type = other DNA
ggagaggggactcgactctctgttctag

SEQ ID NO: 18136 - DNA, 31 bp, synthetic construct; identical to SEQ ID NO: 17810
  source 1..31: mol_type = other DNA

SEQ ID NO: 18137 - DNA, 28 bp, synthetic construct
  source 1..28: mol_type = other DNA
ggtcccggcaccaggctcacggttttag

SEQ ID NO: 18138 - DNA, 31 bp, synthetic construct; identical to SEQ ID NO: 17828
  source 1..31: mol_type = other DNA

SEQ ID NO: 18139 - DNA, 28 bp, synthetic construct
  source 1..28: mol_type = other DNA
gggccaggcactcggctcctcgtgttag

SEQ ID NO: 18140 - DNA, 31 bp, synthetic construct; identical to SEQ ID NO: 17996
  source 1..31: mol_type = other DNA

SEQ ID NO: 18141 - DNA, 28 bp, synthetic construct
  source 1..28: mol_type = other DNA
ggtgaaggctcaaagctgacagtgctgg

SEQ ID NO: 18142 - DNA, 31 bp, synthetic construct; identical to SEQ ID NO: 17852
  source 1..31: mol_type = other DNA

SEQ ID NO: 18143 - DNA, 28 bp, synthetic construct
  source 1..28: mol_type = other DNA
gggccaggcactcggctcctcgtgttag

SEQ ID NO: 18144 - DNA, 31 bp, synthetic construct; identical to SEQ ID NO: 18064
  source 1..31: mol_type = other DNA

SEQ ID NO: 18145 - DNA, 28 bp, synthetic construct
  source 1..28: mol_type = other DNA
ggtaaaggaaccagactcacagttgtag

SEQ ID NO: 18146 - DNA, 31 bp, synthetic construct; identical to SEQ ID NO: 17812
  source 1..31: mol_type = other DNA

SEQ ID NO: 18147 - DNA, 28 bp, synthetic construct
  source 1..28: mol_type = other DNA
ggctcagggaccaggcttttggtaatag

SEQ ID NO: 18148 - DNA, 31 bp, synthetic construct; identical to SEQ ID NO: 18128
  source 1..31: mol_type = other DNA

SEQ ID NO: 18149 - DNA, 28 bp, synthetic construct
  source 1..28: mol_type = other DNA
ggctcaggaaccagactgactgttctcg

SEQ ID NO: 18150 - DNA, 31 bp, synthetic construct; identical to SEQ ID NO: 17820
  source 1..31: mol_type = other DNA

SEQ ID NO: 18151 - DNA, 28 bp, synthetic construct
  source 1..28: mol_type = other DNA
ggctcaggaaccagactgactgttctcg

SEQ ID NO: 18152 - DNA, 31 bp, synthetic construct; identical to SEQ ID NO: 17864
  source 1..31: mol_type = other DNA

SEQ ID NO: 18153 - DNA, 28 bp, synthetic construct
  source 1..28: mol_type = other DNA
ggtcatggaaccaagctgtctgtcctgg

SEQ ID NO: 18154 - DNA, 31 bp, synthetic construct; identical to SEQ ID NO: 17900
  source 1..31: mol_type = other DNA

SEQ ID NO: 18155 - DNA, 28 bp, synthetic construct
  source 1..28: mol_type = other DNA
ggtgaaggctcaaagctgacagtgctgg

SEQ ID NO: 18156 - DNA, 31 bp, synthetic construct; identical to SEQ ID NO: 17844
  source 1..31: mol_type = other DNA

SEQ ID NO: 18157 - DNA, 28 bp, synthetic construct
  source 1..28: mol_type = other DNA
ggtaaaggaaccagactcacagttgtag

SEQ ID NO: 18158 - DNA, 31 bp, synthetic construct; identical to SEQ ID NO: 17964
  source 1..31: mol_type = other DNA

SEQ ID NO: 18159 - DNA, 28 bp, synthetic construct
  source 1..28: mol_type = other DNA
ggagaggggactcgactctctgttctag

SEQ ID NO: 18160 - DNA, 31 bp, synthetic construct; identical to SEQ ID NO: 17908
  source 1..31: mol_type = other DNA

SEQ ID NO: 18161 - DNA, 28 bp, synthetic construct
  source 1..28: mol_type = other DNA
gggccaggcactcggctcctcgtgttag

SEQ ID NO: 18162 - DNA, 31 bp, synthetic construct; identical to SEQ ID NO: 17884
  source 1..31: mol_type = other DNA

SEQ ID NO: 18163 - DNA, 28 bp, synthetic construct
  source 1..28: mol_type = other DNA
ggtcccggcaccaggctcacggttttag

SEQ ID NO: 18164 - DNA, 31 bp, synthetic construct; identical to SEQ ID NO: 17878
  source 1..31: mol_type = other DNA

SEQ ID NO: 18165 - DNA, 28 bp, synthetic construct
  source 1..28: mol_type = other DNA
ggtcatggaaccaagctgtctgtcctgg

SEQ ID NO: 18166 - DNA, 31 bp, synthetic construct
  source 1..31: mol_type = other DNA
ggaatcggaaccagggtgctggtcaggccag

SEQ ID NO: 18167 - DNA, 28 bp, synthetic construct
  source 1..28: mol_type = other DNA
ggtaaaggaaccagactcacagttgtag

SEQ ID NO: 18168 - DNA, 31 bp, synthetic construct; identical to SEQ ID NO: 17844
  source 1..31: mol_type = other DNA

SEQ ID NO: 18169 - DNA, 28 bp, synthetic construct
  source 1..28: mol_type = other DNA
ggtcccggcaccaggctcacggttttag

SEQ ID NO: 18170 - DNA, 31 bp, synthetic construct; identical to SEQ ID NO: 18000
  source 1..31: mol_type = other DNA

SEQ ID NO: 18171 - DNA, 28 bp, synthetic construct
  source 1..28: mol_type = other DNA
ggctcaggaaccagactgactgttctcg

SEQ ID NO: 18172 - DNA, 31 bp, synthetic construct; identical to SEQ ID NO: 18006
  source 1..31: mol_type = other DNA

SEQ ID NO: 18173 - DNA, 28 bp, synthetic construct
  source 1..28: mol_type = other DNA
gggccaggcactcggctcctcgtgttag

SEQ ID NO: 18174 - DNA, 31 bp, synthetic construct; identical to SEQ ID NO: 17972
  source 1..31: mol_type = other DNA

SEQ ID NO: 18175 - DNA, 28 bp, synthetic construct
  source 1..28: mol_type = other DNA
ggaccagggacacgactcaccgtcctag

SEQ ID NO: 18176 - DNA, 31 bp, synthetic construct
  source 1..31: mol_type = other DNA
ggagcagggaccagactggctgtgtgcccat

SEQ ID NO: 18177 - DNA, 28 bp, synthetic construct
  source 1..28: mol_type = other DNA
ggaccagggacacgactcaccgtcctag

SEQ ID NO: 18178 - DNA, 31 bp, synthetic construct; identical to SEQ ID NO: 18176
  source 1..31: mol_type = other DNA

SEQ ID NO: 18179 - DNA, 28 bp, synthetic construct
  source 1..28: mol_type = other DNA
ggtcccggcaccaggctcacggttttag

SEQ ID NO: 18180 - DNA, 31 bp, synthetic construct; identical to SEQ ID NO: 17864
  source 1..31: mol_type = other DNA

SEQ ID NO: 18181 - DNA, 28 bp, synthetic construct
  source 1..28: mol_type = other DNA
ggagaggggactcgactctctgttctag

SEQ ID NO: 18182 - DNA, 31 bp, synthetic construct
  source 1..31: mol_type = other DNA
ggaacagggaccagattacaagtattaccaa

SEQ ID NO: 18183 - DNA, 28 bp, synthetic construct
  source 1..28: mol_type = other DNA
ggagaggggactcgactctctgttctag

SEQ ID NO: 18184 - DNA, 31 bp, synthetic construct; identical to SEQ ID NO: 18182
  source 1..31: mol_type = other DNA

SEQ ID NO: 18185 - DNA, 28 bp, synthetic construct
  source 1..28: mol_type = other DNA
ggtgaaggctcaaagctgacagtgctgg

SEQ ID NO: 18186 - DNA, 31 bp, synthetic construct; identical to SEQ ID NO: 18092
  source 1..31: mol_type = other DNA

SEQ ID NO: 18187 - DNA, 28 bp, synthetic construct
  source 1..28: mol_type = other DNA
ggtaaaggaaccagactcacagttgtag

SEQ ID NO: 18188 - DNA, 31 bp, synthetic construct; identical to SEQ ID NO: 17884
  source 1..31: mol_type = other DNA

SEQ ID NO: 18189 - DNA, 28 bp, synthetic construct
  source 1..28: mol_type = other DNA
ggctcagggaccaggcttttggtaatag

SEQ ID NO: 18190 - DNA, 31 bp, synthetic construct; identical to SEQ ID NO: 17828
  source 1..31: mol_type = other DNA

SEQ ID NO: 18191 - DNA, 28 bp, synthetic construct
  source 1..28: mol_type = other DNA
gggccaggcactcggctcctcgtgttag

SEQ ID NO: 18192 - DNA, 31 bp, synthetic construct; identical to SEQ ID NO: 17884
  source 1..31: mol_type = other DNA

SEQ ID NO: 18193 - DNA, 28 bp, synthetic construct
  source 1..28: mol_type = other DNA
gggccaggcactcggctcctcgtgttag

SEQ ID NO: 18194 - DNA, 31 bp, synthetic construct; identical to SEQ ID NO: 17852
  source 1..31: mol_type = other DNA

SEQ ID NO: 18195 - DNA, 28 bp, synthetic construct
  source 1..28: mol_type = other DNA
gggccaggcactcggctcctcgtgttag

SEQ ID NO: 18196 - DNA, 31 bp, synthetic construct; identical to SEQ ID NO: 17812
  source 1..31: mol_type = other DNA

SEQ ID NO: 18197 - DNA, 28 bp, synthetic construct
  source 1..28: mol_type = other DNA
ggagaaggaagccggctcattgttgtag

SEQ ID NO: 18198 - DNA, 31 bp, synthetic construct; identical to SEQ ID NO: 17826
  source 1..31: mol_type = other DNA

SEQ ID NO: 18199 - DNA, 28 bp, synthetic construct
  source 1..28: mol_type = other DNA
ggagaaggaagccggctcattgttgtag

SEQ ID NO: 18200 - DNA, 31 bp, synthetic construct; identical to SEQ ID NO: 17900
  source 1..31: mol_type = other DNA

SEQ ID NO: 18201 - DNA, 28 bp, synthetic construct
  source 1..28: mol_type = other DNA
gggccaggcactcggctcctcgtgttag

SEQ ID NO: 18202 - DNA, 31 bp, synthetic construct; identical to SEQ ID NO: 18008
  source 1..31: mol_type = other DNA

SEQ ID NO: 18203 - DNA, 28 bp, synthetic construct
  source 1..28: mol_type = other DNA
ggtcccggcaccaggctcacggttttag

SEQ ID NO: 18204 - DNA, 31 bp, synthetic construct; identical to SEQ ID NO: 18126
  source 1..31: mol_type = other DNA

SEQ ID NO: 18205 - DNA, 28 bp, synthetic construct
  source 1..28: mol_type = other DNA
gggccaggcactcggctcctcgtgttag

SEQ ID NO: 18206 - DNA, 31 bp, synthetic construct; identical to SEQ ID NO: 18126
  source 1..31: mol_type = other DNA

SEQ ID NO: 18207 - DNA, 28 bp, synthetic construct
  source 1..28: mol_type = other DNA
ggagaggggactcgactctctgttctag

SEQ ID NO: 18208 - DNA, 31 bp, synthetic construct; identical to SEQ ID NO: 17832
  source 1..31: mol_type = other DNA

SEQ ID NO: 18209 - DNA, 28 bp, synthetic construct
  source 1..28: mol_type = other DNA
ggtcccggcaccaggctcacggttttag

SEQ ID NO: 18210 - DNA, 31 bp, synthetic construct; identical to SEQ ID NO: 17908
  source 1..31: mol_type = other DNA

SEQ ID NO: 18211 - DNA, 28 bp, synthetic construct
  source 1..28: mol_type = other DNA
gggccaggcactcggctcctcgtgttag

SEQ ID NO: 18212 - DNA, 31 bp, synthetic construct; identical to SEQ ID NO: 17832
  source 1..31: mol_type = other DNA

SEQ ID NO: 18213 - DNA, 28 bp, synthetic construct
  source 1..28: mol_type = other DNA
ggtaaaggaaccagactcacagttgtag

SEQ ID NO: 18214 - DNA, 31 bp, synthetic construct; identical to SEQ ID NO: 17884
  source 1..31: mol_type = other DNA

SEQ ID NO: 18215 - DNA, 28 bp, synthetic construct
  source 1..28: mol_type = other DNA
ggctcagggaccaggcttttggtaatag

SEQ ID NO: 18216 - DNA, 31 bp, synthetic construct; identical to SEQ ID NO: 17916
  source 1..31: mol_type = other DNA

SEQ ID NO: 18217 - DNA, 28 bp, synthetic construct
  source 1..28: mol_type = other DNA
ggtgcgggcacccgactatcggtgctag

SEQ ID NO: 18218 - DNA, 31 bp, synthetic construct; identical to SEQ ID NO: 17972
  source 1..31: mol_type = other DNA

SEQ ID NO: 18219 - DNA, 28 bp, synthetic construct
  source 1..28: mol_type = other DNA
gcggcaggcacccggctcactgtgacag

SEQ ID NO: 18220 - DNA, 31 bp, synthetic construct; identical to SEQ ID NO: 17812
  source 1..31: mol_type = other DNA

SEQ ID NO: 18221 - DNA, 28 bp, synthetic construct
  source 1..28: mol_type = other DNA
ggctcaggaaccagactgactgttctcg

SEQ ID NO: 18222 - DNA, 31 bp, synthetic construct; identical to SEQ ID NO: 17882
  source 1..31: mol_type = other DNA

SEQ ID NO: 18223 - DNA, 28 bp, synthetic construct
  source 1..28: mol_type = other DNA
ggtcatggaaccaagctgtctgtcctgg

SEQ ID NO: 18224 - DNA, 31 bp, synthetic construct; identical to SEQ ID NO: 17868
  source 1..31: mol_type = other DNA

SEQ ID NO: 18225 - DNA, 28 bp, synthetic construct
  source 1..28: mol_type = other DNA
ggtcatggaaccaagctgtctgtcctgg

SEQ ID NO: 18226 - DNA, 31 bp, synthetic construct; identical to SEQ ID NO: 17814
  source 1..31: mol_type = other DNA

SEQ ID NO: 18227 - DNA, 28 bp, synthetic construct
  source 1..28: mol_type = other DNA
ggtcatggaaccaagctgtctgtcctgg

SEQ ID NO: 18228 - DNA, 31 bp, synthetic construct; identical to SEQ ID NO: 17822
  source 1..31: mol_type = other DNA

SEQ ID NO: 18229 - DNA, 28 bp, synthetic construct
  source 1..28: mol_type = other DNA
ggtgaaggctcaaagctgacagtgctgg

SEQ ID NO: 18230 - DNA, 31 bp, synthetic construct; identical to SEQ ID NO: 17868
  source 1..31: mol_type = other DNA

SEQ ID NO: 18231 - DNA, 28 bp, synthetic construct
  source 1..28: mol_type = other DNA
gggccaggcactcggctcctcgtgttag

SEQ ID NO: 18232 - DNA, 31 bp, synthetic construct
  source 1..31: mol_type = other DNA
ggccaggggaccatattaaaggtgtacctgc

SEQ ID NO: 18233 - DNA, 28 bp, synthetic construct
  source 1..28: mol_type = other DNA
ggctcaggaaccagactgactgttctcg

SEQ ID NO: 18234 - DNA, 31 bp, synthetic construct; identical to SEQ ID NO: 17812
  source 1..31: mol_type = other DNA

SEQ ID NO: 18235 - DNA, 28 bp, synthetic construct
  source 1..28: mol_type = other DNA
ggtgaaggctcaaagctgacagtgctgg

SEQ ID NO: 18236 - DNA, 31 bp, synthetic construct; identical to SEQ ID NO: 17868
  source 1..31: mol_type = other DNA

SEQ ID NO: 18237 - DNA, 28 bp, synthetic construct
  source 1..28: mol_type = other DNA
ggtgaaggctcaaagctgacagtgctgg

SEQ ID NO: 18238 - DNA, 31 bp, synthetic construct; identical to SEQ ID NO: 17812
  source 1..31: mol_type = other DNA

SEQ ID NO: 18239 - DNA, 28 bp, synthetic construct
  source 1..28: mol_type = other DNA
ggaccagggacacgactcaccgtcctag

SEQ ID NO: 18240 - DNA, 31 bp, synthetic construct; identical to SEQ ID NO: 17878
  source 1..31: mol_type = other DNA

SEQ ID NO: 18241 - DNA, 28 bp, synthetic construct
  source 1..28: mol_type = other DNA
ggagaggggactcgactctctgttctag

SEQ ID NO: 18242 - DNA, 31 bp, synthetic construct; identical to SEQ ID NO: 17882
  source 1..31: mol_type = other DNA

SEQ ID NO: 18243 - DNA, 28 bp, synthetic construct
  source 1..28: mol_type = other DNA
ggtgcgggcacccgactatcggtgctag

SEQ ID NO: 18244 - DNA, 31 bp, synthetic construct; identical to SEQ ID NO: 17822
  source 1..31: mol_type = other DNA

SEQ ID NO: 18245 - DNA, 28 bp, synthetic construct
  source 1..28: mol_type = other DNA
ggtaaaggaaccagactcacagttgtag

SEQ ID NO: 18246 - DNA, 31 bp, synthetic construct; identical to SEQ ID NO: 17856
  source 1..31: mol_type = other DNA

SEQ ID NO: 18247 - DNA, 28 bp, synthetic construct
  source 1..28: mol_type = other DNA
ggagaggggactcgactctctgttctag

SEQ ID NO: 18248 - DNA, 31 bp, synthetic construct; identical to SEQ ID NO: 18126
  source 1..31: mol_type = other DNA

SEQ ID NO: 18249 - DNA, 28 bp, synthetic construct
  source 1..28: mol_type = other DNA
ggtcatggaaccaagctgtctgtcctgg

SEQ ID NO: 18250 - DNA, 31 bp, synthetic construct; identical to SEQ ID NO: 17940
  source 1..31: mol_type = other DNA

SEQ ID NO: 18251 - DNA, 28 bp, synthetic construct
  source 1..28: mol_type = other DNA
ggtgcgggcacccgactatcggtgctag

SEQ ID NO: 18252 - DNA, 31 bp, synthetic construct; identical to SEQ ID NO: 17816
  source 1..31: mol_type = other DNA

SEQ ID NO: 18253 - DNA, 28 bp, synthetic construct
  source 1..28: mol_type = other DNA
ggtcccggcaccaggctcacggttttag

SEQ ID NO: 18254 - DNA, 31 bp, synthetic construct; identical to SEQ ID NO: 17828
  source 1..31: mol_type = other DNA

SEQ ID NO: 18255 - DNA, 28 bp, synthetic construct
  source 1..28: mol_type = other DNA
ggtcccggcaccaggctcacggttttag

SEQ ID NO: 18256 - DNA, 31 bp, synthetic construct; identical to SEQ ID NO: 17916
  source 1..31: mol_type = other DNA

SEQ ID NO: 18257 - DNA, 28 bp, synthetic construct
  source 1..28: mol_type = other DNA
ggtaaaggaaccagactcacagttgtag

SEQ ID NO: 18258 - DNA, 31 bp, synthetic construct; identical to SEQ ID NO: 17906
  source 1..31: mol_type = other DNA

SEQ ID NO: 18259 - DNA, 28 bp, synthetic construct
  source 1..28: mol_type = other DNA
ggtcccggcaccaggctcacggttttag

SEQ ID NO: 18260 - DNA, 31 bp, synthetic construct; identical to SEQ ID NO: 18126
  source 1..31: mol_type = other DNA

SEQ ID NO: 18261 - DNA, 28 bp, synthetic construct
  source 1..28: mol_type = other DNA
ggctcagggaccaggcttttggtaatag

SEQ ID NO: 18262 - DNA, 31 bp, synthetic construct; identical to SEQ ID NO: 17818
  source 1..31: mol_type = other DNA

SEQ ID NO: 18263 - DNA, 28 bp, synthetic construct
  source 1..28: mol_type = other DNA
gggccaggcactcggctcctcgtgttag

SEQ ID NO: 18264 - DNA, 31 bp, synthetic construct; identical to SEQ ID NO: 17828
  source 1..31: mol_type = other DNA

SEQ ID NO: 18265 - DNA, 28 bp, synthetic construct
  source 1..28: mol_type = other DNA
ggaccagggacacgactcaccgtcctag

SEQ ID NO: 18266 - DNA, 31 bp, synthetic construct; identical to SEQ ID NO: 18126
  source 1..31: mol_type = other DNA

SEQ ID NO: 18267 - DNA, 28 bp, synthetic construct
  source 1..28: mol_type = other DNA
ggtgcgggcacccgactatcggtgctag

SEQ ID NO: 18268 - DNA, 31 bp, synthetic construct; identical to SEQ ID NO: 18000
  source 1..31: mol_type = other DNA

SEQ ID NO: 18269 - DNA, 28 bp, synthetic construct
  source 1..28: mol_type = other DNA
gggccaggcactcggctcctcgtgttag

SEQ ID NO: 18270 - DNA, 31 bp, synthetic construct; identical to SEQ ID NO: 17820
  source 1..31: mol_type = other DNA

SEQ ID NO: 18271 - DNA, 28 bp, synthetic construct
  source 1..28: mol_type = other DNA
ggaccagggacacgactcaccgtcctag

SEQ ID NO: 18272 - DNA, 31 bp, synthetic construct; identical to SEQ ID NO: 17858
  source 1..31: mol_type = other DNA

SEQ ID NO: 18273 - DNA, 28 bp, synthetic construct
  source 1..28: mol_type = other DNA
ggtgaaggctcaaagctgacagtgctgg

SEQ ID NO: 18274 - DNA, 31 bp, synthetic construct; identical to SEQ ID NO: 17850
  source 1..31: mol_type = other DNA

SEQ ID NO: 18275 - DNA, 28 bp, synthetic construct
  source 1..28: mol_type = other DNA
ggctcaggaaccagactgactgttctcg

SEQ ID NO: 18276 - DNA, 31 bp, synthetic construct; identical to SEQ ID NO: 18128
  source 1..31: mol_type = other DNA

SEQ ID NO: 18277 - DNA, 28 bp, synthetic construct
  source 1..28: mol_type = other DNA
ggtcccggcaccaggctcacggttttag

SEQ ID NO: 18278 - DNA, 31 bp, synthetic construct; identical to SEQ ID NO: 17810
  source 1..31: mol_type = other DNA

SEQ ID NO: 18279 - DNA, 28 bp, synthetic construct
  source 1..28: mol_type = other DNA
ggtcccggcaccaggctcacggttttag

SEQ ID NO: 18280 - DNA, 31 bp, synthetic construct; identical to SEQ ID NO: 18008
  source 1..31: mol_type = other DNA

SEQ ID NO: 18281 - DNA, 28 bp, synthetic construct
  source 1..28: mol_type = other DNA
gcggcaggcacccggctcactgtgacag

SEQ ID NO: 18282 - DNA, 31 bp, synthetic construct; identical to SEQ ID NO: 18064
  source 1..31: mol_type = other DNA

SEQ ID NO: 18283 - DNA, 28 bp, synthetic construct
  source 1..28: mol_type = other DNA
gcggcaggcacccggctcactgtgacag

SEQ ID NO: 18284 - DNA, 31 bp, synthetic construct; identical to SEQ ID NO: 17940
  source 1..31: mol_type = other DNA

SEQ ID NO: 18285 - DNA, 28 bp, synthetic construct
  source 1..28: mol_type = other DNA
ggctcaggaaccagactgactgttctcg

SEQ ID NO: 18286 - DNA, 31 bp, synthetic construct; identical to SEQ ID NO: 17964
  source 1..31: mol_type = other DNA

SEQ ID NO: 18287 - DNA, 28 bp, synthetic construct
  source 1..28: mol_type = other DNA
ggtaaaggaaccagactcacagttgtag

SEQ ID NO: 18288 - DNA, 31 bp, synthetic construct; identical to SEQ ID NO: 17906
  source 1..31: mol_type = other DNA

SEQ ID NO: 18289 - DNA, 28 bp, synthetic construct
  source 1..28: mol_type = other DNA
gggccaggcactcggctcctcgtgttag

SEQ ID NO: 18290 - DNA, 31 bp, synthetic construct; identical to SEQ ID NO: 18126
  source 1..31: mol_type = other DNA

SEQ ID NO: 18291 - DNA, 28 bp, synthetic construct
  source 1..28: mol_type = other DNA
ggtgaaggctcaaagctgacagtgctgg

SEQ ID NO: 18292 - DNA, 31 bp, synthetic construct; identical to SEQ ID NO: 18008
  source 1..31: mol_type = other DNA

SEQ ID NO: 18293 - DNA, 28 bp, synthetic construct
  source 1..28: mol_type = other DNA
ggagaaggaagccggctcattgttgtag

SEQ ID NO: 18294 - DNA, 31 bp, synthetic construct; identical to SEQ ID NO: 17996
  source 1..31: mol_type = other DNA

SEQ ID NO: 18295 - DNA, 28 bp, synthetic construct
  source 1..28: mol_type = other DNA
ggtgcgggcacccgactatcggtgctag

SEQ ID NO: 18296 - DNA, 31 bp, synthetic construct; identical to SEQ ID NO: 17844
  source 1..31: mol_type = other DNA

SEQ ID NO: 18297 - DNA, 28 bp, synthetic construct
  source 1..28: mol_type = other DNA
ggtaaaggaaccagactcacagttgtag

SEQ ID NO: 18298 - DNA, 31 bp, synthetic construct; identical to SEQ ID NO: 17850
  source 1..31: mol_type = other DNA

SEQ ID NO: 18299 - DNA, 28 bp, synthetic construct
  source 1..28: mol_type = other DNA
gggccaggcactcggctcctcgtgttag

SEQ ID NO: 18300 - DNA, 31 bp, synthetic construct; identical to SEQ ID NO: 17820
  source 1..31: mol_type = other DNA

SEQ ID NO: 18301 - DNA, 28 bp, synthetic construct
  source 1..28: mol_type = other DNA
gggccaggcactcggctcctcgtgttag

SEQ ID NO: 18302 - DNA, 31 bp, synthetic construct; identical to SEQ ID NO: 17906
  source 1..31: mol_type = other DNA

SEQ ID NO: 18303 - DNA, 28 bp, synthetic construct
  source 1..28: mol_type = other DNA
gggccaggcactcggctcctcgtgttag

SEQ ID NO: 18304 - DNA, 31 bp, synthetic construct; identical to SEQ ID NO: 17820
  source 1..31: mol_type = other DNA

SEQ ID NO: 18305 - DNA, 28 bp, synthetic construct
  source 1..28: mol_type = other DNA
ggctcaggaaccagactgactgttctcg

SEQ ID NO: 18306 - DNA, 31 bp, synthetic construct; identical to SEQ ID NO: 17828
  source 1..31: mol_type = other DNA

SEQ ID NO: 18307 - DNA, 28 bp, synthetic construct
  source 1..28: mol_type = other DNA
ggctcaggaaccagactgactgttctcg

SEQ ID NO: 18308 - DNA, 31 bp, synthetic construct; identical to SEQ ID NO: 17812
  source 1..31: mol_type = other DNA

SEQ ID NO: 18309 - DNA, 28 bp, synthetic construct
  source 1..28: mol_type = other DNA
ggtaaaggaaccagactcacagttgtag

SEQ ID NO: 18310 - DNA, 31 bp, synthetic construct; identical to SEQ ID NO: 17906
  source 1..31: mol_type = other DNA

SEQ ID NO: 18311 - DNA, 28 bp, synthetic construct
  source 1..28: mol_type = other DNA
ggtcccggcaccaggctcacggttttag

SEQ ID NO: 18312 - DNA, 31 bp, synthetic construct; identical to SEQ ID NO: 18126
  source 1..31: mol_type = other DNA

SEQ ID NO: 18313 - DNA, 28 bp, synthetic construct
  source 1..28: mol_type = other DNA
ggtcccggcaccaggctcacggttttag

SEQ ID NO: 18314 - DNA, 31 bp, synthetic construct; identical to SEQ ID NO: 18126
  source 1..31: mol_type = other DNA

SEQ ID NO: 18315 - DNA, 28 bp, synthetic construct
  source 1..28: mol_type = other DNA
ggagaaggaagccggctcattgttgtag

SEQ ID NO: 18316 - DNA, 31 bp, synthetic construct; identical to SEQ ID NO: 17904
  source 1..31: mol_type = other DNA

SEQ ID NO: 18317 - DNA, 28 bp, synthetic construct
  source 1..28: mol_type = other DNA
ggtcccggcaccaggctcacggttttag

SEQ ID NO: 18318 - DNA, 31 bp, synthetic construct; identical to SEQ ID NO: 17878
  source 1..31: mol_type = other DNA

SEQ ID NO: 18319 - DNA, 28 bp, synthetic construct
  source 1..28: mol_type = other DNA
ggctcaggaaccagactgactgttctcg

SEQ ID NO: 18320 - DNA, 31 bp, synthetic construct; identical to SEQ ID NO: 17826
  source 1..31: mol_type = other DNA

SEQ ID NO: 18321 - DNA, 28 bp, synthetic construct
  source 1..28: mol_type = other DNA
ggtgcgggcacccgactatcggtgctag

SEQ ID NO: 18322 - DNA, 31 bp, synthetic construct; identical to SEQ ID NO: 17844
  source 1..31: mol_type = other DNA

SEQ ID NO: 18323 - DNA, 28 bp, synthetic construct
  source 1..28: mol_type = other DNA
ggtgcgggcacccgactatcggtgctag

SEQ ID NO: 18324 - DNA, 31 bp, synthetic construct; identical to SEQ ID NO: 17844
  source 1..31: mol_type = other DNA

SEQ ID NO: 18325 - DNA, 28 bp, synthetic construct
  source 1..28: mol_type = other DNA
ggtcatggaaccaagctgtctgtcctgg

SEQ ID NO: 18326 - DNA, 31 bp, synthetic construct; identical to SEQ ID NO: 17858
  source 1..31: mol_type = other DNA

SEQ ID NO: 18327 - DNA, 28 bp, synthetic construct
  source 1..28: mol_type = other DNA
ggtcccggcaccaggctcacggttttag

SEQ ID NO: 18328 - DNA, 31 bp, synthetic construct; identical to SEQ ID NO: 17812
  source 1..31: mol_type = other DNA

SEQ ID NO: 18329 - DNA, 28 bp, synthetic construct
  source 1..28: mol_type = other DNA
ggaccagggacacgactcaccgtcctag

SEQ ID NO: 18330 - DNA, 31 bp, synthetic construct; identical to SEQ ID NO: 17906
  source 1..31: mol_type = other DNA

SEQ ID NO: 18331 - DNA, 28 bp, synthetic construct
  source 1..28: mol_type = other DNA
gcggcaggcacccggctcactgtgacag

SEQ ID NO: 18332 - DNA, 31 bp, synthetic construct; identical to SEQ ID NO: 17840
  source 1..31: mol_type = other DNA

SEQ ID NO: 18333 - DNA, 28 bp, synthetic construct
  source 1..28: mol_type = other DNA
ggtgcgggcacccgactatcggtgctag

SEQ ID NO: 18334 - DNA, 31 bp, synthetic construct; identical to SEQ ID NO: 17850
  source 1..31: mol_type = other DNA

SEQ ID NO: 18335 - DNA, 28 bp, synthetic construct
  source 1..28: mol_type = other DNA
ggtgcgggcacccgactatcggtgctag

SEQ ID NO: 18336 - DNA, 31 bp, synthetic construct; identical to SEQ ID NO: 18000
  source 1..31: mol_type = other DNA

SEQ ID NO: 18337 - DNA, 28 bp, synthetic construct
  source 1..28: mol_type = other DNA
ggtaaaggaaccagactcacagttgtag

SEQ ID NO: 18338 - DNA, 31 bp, synthetic construct; identical to SEQ ID NO: 18182
  source 1..31: mol_type = other DNA

SEQ ID NO: 18339 - DNA, 28 bp, synthetic construct
  source 1..28: mol_type = other DNA
ggtcccggcaccaggctcacggttttag

SEQ ID NO: 18340 - DNA, 31 bp, synthetic construct; identical to SEQ ID NO: 17840
  source 1..31: mol_type = other DNA

SEQ ID NO: 18341 - DNA, 28 bp, synthetic construct
  source 1..28: mol_type = other DNA
ggtcccggcaccaggctcacggttttag

SEQ ID NO: 18342 - DNA, 31 bp, synthetic construct; identical to SEQ ID NO: 18008
  source 1..31: mol_type = other DNA

SEQ ID NO: 18343 - DNA, 28 bp, synthetic construct
  source 1..28: mol_type = other DNA
ggtcatggaaccaagctgtctgtcctgg

SEQ ID NO: 18344 - DNA, 31 bp, synthetic construct; identical to SEQ ID NO: 17814
  source 1..31: mol_type = other DNA

SEQ ID NO: 18345 - DNA, 28 bp, synthetic construct
  source 1..28: mol_type = other DNA
ggtgaaggctcaaagctgacagtgctgg

SEQ ID NO: 18346 - DNA, 31 bp, synthetic construct; identical to SEQ ID NO: 17814
  source 1..31: mol_type = other DNA

SEQ ID NO: 18347 - DNA, 28 bp, synthetic construct
  source 1..28: mol_type = other DNA
ggaccagggacacgactcaccgtcctag

SEQ ID NO: 18348 - DNA, 31 bp, synthetic construct; identical to SEQ ID NO: 17838
  source 1..31: mol_type = other DNA

SEQ ID NO: 18349 - DNA, 28 bp, synthetic construct
  source 1..28: mol_type = other DNA
ggtcccggcaccaggctcacggttttag

SEQ ID NO: 18350 - DNA, 31 bp, synthetic construct; identical to SEQ ID NO: 17906
  source 1..31: mol_type = other DNA

SEQ ID NO: 18351 - DNA, 28 bp, synthetic construct
  source 1..28: mol_type = other DNA
gggccaggcactcggctcctcgtgttag

SEQ ID NO: 18352 - DNA, 31 bp, synthetic construct; identical to SEQ ID NO: 17818
  source 1..31: mol_type = other DNA

SEQ ID NO: 18353 - DNA, 28 bp, synthetic construct
  source 1..28: mol_type = other DNA
gggccaggcactcggctcctcgtgttag

SEQ ID NO: 18354 - DNA, 31 bp, synthetic construct; identical to SEQ ID NO: 17810
  source 1..31: mol_type = other DNA

SEQ ID NO: 18355 - DNA, 28 bp, synthetic construct
  source 1..28: mol_type = other DNA
gggccaggcactcggctcctcgtgttag

SEQ ID NO: 18356 - DNA, 31 bp, synthetic construct; identical to SEQ ID NO: 17814
  source 1..31: mol_type = other DNA

SEQ ID NO: 18357 - DNA, 28 bp, synthetic construct
  source 1..28: mol_type = other DNA
ggagaaggaagccggctcattgttgtag

SEQ ID NO: 18358 - DNA, 31 bp, synthetic construct; identical to SEQ ID NO: 17856
  source 1..31: mol_type = other DNA

SEQ ID NO: 18359 - DNA, 28 bp, synthetic construct
  source 1..28: mol_type = other DNA
ggtcatggaaccaagctgtctgtcctgg

SEQ ID NO: 18360 - DNA, 31 bp, synthetic construct; identical to SEQ ID NO: 17910
  source 1..31: mol_type = other DNA

SEQ ID NO: 18361 - DNA, 28 bp, synthetic construct
  source 1..28: mol_type = other DNA
ggtaaaggaaccagactcacagttgtag

SEQ ID NO: 18362 - DNA, 31 bp, synthetic construct; identical to SEQ ID NO: 18006
  source 1..31: mol_type = other DNA

SEQ ID NO: 18363 - DNA, 28 bp, synthetic construct
  source 1..28: mol_type = other DNA
ggctcaggaaccagactgactgttctcg

SEQ ID NO: 18364 - DNA, 31 bp, synthetic construct; identical to SEQ ID NO: 17884
  source 1..31: mol_type = other DNA

SEQ ID NO: 18365 - DNA, 28 bp, synthetic construct
  source 1..28: mol_type = other DNA
ggctcagggaccaggcttttggtaatag

SEQ ID NO: 18366 - DNA, 31 bp, synthetic construct; identical to SEQ ID NO: 17996
  source 1..31: mol_type = other DNA

SEQ ID NO: 18367 - DNA, 28 bp, synthetic construct
  source 1..28: mol_type = other DNA
ggaccagggacacgactcaccgtcctag

SEQ ID NO: 18368 - DNA, 31 bp, synthetic construct; identical to SEQ ID NO: 18166
  source 1..31: mol_type = other DNA

SEQ ID NO: 18369 - DNA, 28 bp, synthetic construct
  source 1..28: mol_type = other DNA
gggccaggcactcggctcctcgtgttag

SEQ ID NO: 18370 - DNA, 31 bp, synthetic construct; identical to SEQ ID NO: 18006
  source 1..31: mol_type = other DNA

SEQ ID NO: 18371 - DNA, 28 bp, synthetic construct
  source 1..28: mol_type = other DNA
gggccaggcactcggctcctcgtgttag

SEQ ID NO: 18372 - DNA, 31 bp, synthetic construct
  source 1..31: mol_type = other DNA
gtgaaaggcactaaactctctgttaaatcaa

SEQ ID NO: 18373 - DNA, 28 bp, synthetic construct
  source 1..28: mol_type = other DNA
ggtcccggcaccaggctcacggttttag

SEQ ID NO: 18374 - DNA, 31 bp, synthetic construct; identical to SEQ ID NO: 17850
  source 1..31: mol_type = other DNA

SEQ ID NO: 18375 - DNA, 28 bp, synthetic construct
  source 1..28: mol_type = other DNA
ggaccagggacacgactcaccgtcctag

SEQ ID NO: 18376 - DNA, 31 bp, synthetic construct; identical to SEQ ID NO: 17884
  source 1..31: mol_type = other DNA

SEQ ID NO: 18377 - DNA, 28 bp, synthetic construct
  source 1..28: mol_type = other DNA
ggtaaaggaaccagactcacagttgtag

SEQ ID NO: 18378 - DNA, 31 bp, synthetic construct; identical to SEQ ID NO: 17996
  source 1..31: mol_type = other DNA

SEQ ID NO: 18379 - DNA, 28 bp, synthetic construct
  source 1..28: mol_type = other DNA
ggtgcgggcacccgactatcggtgctag

SEQ ID NO: 18380 - DNA, 31 bp, synthetic construct; identical to SEQ ID NO: 17964
  source 1..31: mol_type = other DNA

SEQ ID NO: 18381 - DNA, 28 bp, synthetic construct
  source 1..28: mol_type = other DNA
ggctcagggaccaggcttttggtaatag

SEQ ID NO: 18382 - DNA, 31 bp, synthetic construct; identical to SEQ ID NO: 17884
  source 1..31: mol_type = other DNA

SEQ ID NO: 18383 - DNA, 28 bp, synthetic construct
  source 1..28: mol_type = other DNA
ggctcagggaccaggcttttggtaatag

SEQ ID NO: 18384 - DNA, 31 bp, synthetic construct; identical to SEQ ID NO: 17814
  source 1..31: mol_type = other DNA

SEQ ID NO: 18385 - DNA, 28 bp, synthetic construct
  source 1..28: mol_type = other DNA
ggctcagggaccaggcttttggtaatag

SEQ ID NO: 18386 - DNA, 31 bp, synthetic construct; identical to SEQ ID NO: 17812
  source 1..31: mol_type = other DNA

SEQ ID NO: 18387 - DNA, 28 bp, synthetic construct
  source 1..28: mol_type = other DNA
ggctcaggaaccagactgactgttctcg

SEQ ID NO: 18388 - DNA, 31 bp, synthetic construct; identical to SEQ ID NO: 17838
  source 1..31: mol_type = other DNA

SEQ ID NO: 18389 - DNA, 28 bp, synthetic construct
  source 1..28: mol_type = other DNA
ggaccagggacacgactcaccgtcctag

SEQ ID NO: 18390 - DNA, 31 bp, synthetic construct; identical to SEQ ID NO: 17816
  source 1..31: mol_type = other DNA

SEQ ID NO: 18391 - DNA, 28 bp, synthetic construct
  source 1..28: mol_type = other DNA
ggtaaaggaaccagactcacagttgtag

SEQ ID NO: 18392 - DNA, 31 bp, synthetic construct; identical to SEQ ID NO: 17852
  source 1..31: mol_type = other DNA

SEQ ID NO: 18393 - DNA, 28 bp, synthetic construct
  source 1..28: mol_type = other DNA
gggccaggcactcggctcctcgtgttag

SEQ ID NO: 18394 - DNA, 31 bp, synthetic construct; identical to SEQ ID NO: 18126
  source 1..31: mol_type = other DNA

SEQ ID NO: 18395 - DNA, 28 bp, synthetic construct
  source 1..28: mol_type = other DNA
ggtcccggcaccaggctcacggttttag

SEQ ID NO: 18396 - DNA, 31 bp, synthetic construct; identical to SEQ ID NO: 17996
  source 1..31: mol_type = other DNA

SEQ ID NO: 18397 - DNA, 28 bp, synthetic construct
  source 1..28: mol_type = other DNA
ggtcccggcaccaggctcacggttttag

SEQ ID NO: 18398 - DNA, 31 bp, synthetic construct; identical to SEQ ID NO: 17820
  source 1..31: mol_type = other DNA

SEQ ID NO: 18399 - DNA, 28 bp, synthetic construct
  source 1..28: mol_type = other DNA
ggtcccggcaccaggctcacggttttag

SEQ ID NO: 18400 - DNA, 31 bp, synthetic construct
  source 1..31: mol_type = other DNA
ggatctggcaccaaactaactgtagagccaa

SEQ ID NO: 18401 - DNA, 28 bp, synthetic construct
  source 1..28: mol_type = other DNA
ggctcaggaaccagactgactgttctcg

SEQ ID NO: 18402 - DNA, 31 bp, synthetic construct; identical to SEQ ID NO: 17826
  source 1..31: mol_type = other DNA

SEQ ID NO: 18403 - DNA, 28 bp, synthetic construct
  source 1..28: mol_type = other DNA
ggctcaggaaccagactgactgttctcg

SEQ ID NO: 18404 - DNA, 31 bp, synthetic construct; identical to SEQ ID NO: 17810
  source 1..31: mol_type = other DNA

SEQ ID NO: 18405 - DNA, 28 bp, synthetic construct
  source 1..28: mol_type = other DNA
ggctcaggaaccagactgactgttctcg

SEQ ID NO: 18406 - DNA, 31 bp, synthetic construct; identical to SEQ ID NO: 17810
  source 1..31: mol_type = other DNA

SEQ ID NO: 18407 - DNA, 28 bp, synthetic construct
  source 1..28: mol_type = other DNA
ggtaaaggaaccagactcacagttgtag

SEQ ID NO: 18408 - DNA, 31 bp, synthetic construct; identical to SEQ ID NO: 18126
  source 1..31: mol_type = other DNA

SEQ ID NO: 18409 - DNA, 28 bp, synthetic construct
  source 1..28: mol_type = other DNA
ggtcccggcaccaggctcacggttttag

SEQ ID NO: 18410 - DNA, 31 bp, synthetic construct; identical to SEQ ID NO: 17850
  source 1..31: mol_type = other DNA

SEQ ID NO: 18411 - DNA, 28 bp, synthetic construct
  source 1..28: mol_type = other DNA
gggccaggcactcggctcctcgtgttag

SEQ ID NO: 18412 - DNA, 31 bp, synthetic construct; identical to SEQ ID NO: 17850
  source 1..31: mol_type = other DNA

SEQ ID NO: 18413 - DNA, 28 bp, synthetic construct
  source 1..28: mol_type = other DNA
gggccaggcactcggctcctcgtgttag

SEQ ID NO: 18414 - DNA, 31 bp, synthetic construct; identical to SEQ ID NO: 17814
  source 1..31: mol_type = other DNA

SEQ ID NO: 18415 - DNA, 28 bp, synthetic construct
  source 1..28: mol_type = other DNA
ggtcccggcaccaggctcacggttttag

SEQ ID NO: 18416 - DNA, 31 bp, synthetic construct; identical to SEQ ID NO: 17972
  source 1..31: mol_type = other DNA

SEQ ID NO: 18417 - DNA, 28 bp, synthetic construct
  source 1..28: mol_type = other DNA
ggtcccggcaccaggctcacggttttag

SEQ ID NO: 18418 - DNA, 31 bp, synthetic construct; identical to SEQ ID NO: 17812
  source 1..31: mol_type = other DNA

SEQ ID NO: 18419 - DNA, 28 bp, synthetic construct
  source 1..28: mol_type = other DNA
ggtgcgggcacccgactatcggtgctag

SEQ ID NO: 18420 - DNA, 31 bp, synthetic construct; identical to SEQ ID NO: 18008
  source 1..31: mol_type = other DNA

SEQ ID NO: 18421 - DNA, 28 bp, synthetic construct
  source 1..28: mol_type = other DNA
ggtaaaggaaccagactcacagttgtag

SEQ ID NO: 18422 - DNA, 31 bp, synthetic construct; identical to SEQ ID NO: 17884
  source 1..31: mol_type = other DNA

SEQ ID NO: 18423 - DNA, 28 bp, synthetic construct
  source 1..28: mol_type = other DNA
gggccaggcactcggctcctcgtgttag

SEQ ID NO: 18424 - DNA, 31 bp, synthetic construct; identical to SEQ ID NO: 17884
  source 1..31: mol_type = other DNA

SEQ ID NO: 18425 - DNA, 28 bp, synthetic construct
  source 1..28: mol_type = other DNA
ggtgcgggcacccgactatcggtgctag

SEQ ID NO: 18426 - DNA, 31 bp, synthetic construct; identical to SEQ ID NO: 17900
  source 1..31: mol_type = other DNA

SEQ ID NO: 18427 - DNA, 28 bp, synthetic construct
  source 1..28: mol_type = other DNA
gggccaggcactcggctcctcgtgttag

SEQ ID NO: 18428 - DNA, 31 bp, synthetic construct; identical to SEQ ID NO: 17844
  source 1..31: mol_type = other DNA

SEQ ID NO: 18429 - DNA, 28 bp, synthetic construct
  source 1..28: mol_type = other DNA
ggctcagggaccaggcttttggtaatag

SEQ ID NO: 18430 - DNA, 31 bp, synthetic construct; identical to SEQ ID NO: 17852
  source 1..31: mol_type = other DNA

SEQ ID NO: 18431 - DNA, 28 bp, synthetic construct
  source 1..28: mol_type = other DNA
ggtgcgggcacccgactatcggtgctag

SEQ ID NO: 18432 - DNA, 31 bp, synthetic construct; identical to SEQ ID NO: 17822
  source 1..31: mol_type = other DNA

SEQ ID NO: 18433 - DNA, 28 bp, synthetic construct
  source 1..28: mol_type = other DNA
ggctcaggaaccagactgactgttctcg

SEQ ID NO: 18434 - DNA, 31 bp, synthetic construct; identical to SEQ ID NO: 17916
  source 1..31: mol_type = other DNA

SEQ ID NO: 18435 - DNA, 28 bp, synthetic construct
  source 1..28: mol_type = other DNA
ggtgaaggctcaaagctgacagtgctgg

SEQ ID NO: 18436 - DNA, 31 bp, synthetic construct; identical to SEQ ID NO: 17828
  source 1..31: mol_type = other DNA

SEQ ID NO: 18437 - DNA, 28 bp, synthetic construct
  source 1..28: mol_type = other DNA
ggtaaaggaaccagactcacagttgtag

SEQ ID NO: 18438 - DNA, 31 bp, synthetic construct; identical to SEQ ID NO: 17826
  source 1..31: mol_type = other DNA

SEQ ID NO: 18439 - DNA, 28 bp, synthetic construct
  source 1..28: mol_type = other DNA
ggtgaaggctcaaagctgacagtgctgg

SEQ ID NO: 18440 - DNA, 31 bp, synthetic construct; identical to SEQ ID NO: 18232
  source 1..31: mol_type = other DNA

SEQ ID NO: 18441 - DNA, 28 bp, synthetic construct
  source 1..28: mol_type = other DNA
ggctcagggaccaggcttttggtaatag

SEQ ID NO: 18442 - DNA, 31 bp, synthetic construct; identical to SEQ ID NO: 17832
  source 1..31: mol_type = other DNA

SEQ ID NO: 18443 - DNA, 28 bp, synthetic construct
  source 1..28: mol_type = other DNA
ggctcaggaaccagactgactgttctcg

SEQ ID NO: 18444 - DNA, 31 bp, synthetic construct; identical to SEQ ID NO: 18008
  source 1..31: mol_type = other DNA

SEQ ID NO: 18445 - DNA, 28 bp, synthetic construct
  source 1..28: mol_type = other DNA
ggtaaaggaaccagactcacagttgtag

SEQ ID NO: 18446 - DNA, 31 bp, synthetic construct; identical to SEQ ID NO: 17882
  source 1..31: mol_type = other DNA

SEQ ID NO: 18447 - DNA, 28 bp, synthetic construct
  source 1..28: mol_type = other DNA
ggtaaaggaaccagactcacagttgtag

SEQ ID NO: 18448 - DNA, 31 bp, synthetic construct; identical to SEQ ID NO: 17812
  source 1..31: mol_type = other DNA

SEQ ID NO: 18449 - DNA, 28 bp, synthetic construct
  source 1..28: mol_type = other DNA
ggtcccggcaccaggctcacggttttag

SEQ ID NO: 18450 - DNA, 31 bp, synthetic construct; identical to SEQ ID NO: 18008
  source 1..31: mol_type = other DNA

SEQ ID NO: 18451 - DNA, 28 bp, synthetic construct
  source 1..28: mol_type = other DNA
gcggcaggcacccggctcactgtgacag

SEQ ID NO: 18452 - DNA, 31 bp, synthetic construct; identical to SEQ ID NO: 17898
  source 1..31: mol_type = other DNA

SEQ ID NO: 18453 - DNA, 28 bp, synthetic construct
  source 1..28: mol_type = other DNA
ggaccagggacacgactcaccgtcctag

SEQ ID NO: 18454 - DNA, 31 bp, synthetic construct; identical to SEQ ID NO: 18008
  source 1..31: mol_type = other DNA

SEQ ID NO: 18455 - DNA, 28 bp, synthetic construct
  source 1..28: mol_type = other DNA
ggctcagggaccaggcttttggtaatcg

SEQ ID NO: 18456 - DNA, 31 bp, synthetic construct; identical to SEQ ID NO: 17858
  source 1..31: mol_type = other DNA

SEQ ID NO: 18457 - DNA, 28 bp, synthetic construct
  source 1..28: mol_type = other DNA
ggtcccggcaccaggctcacggttttag

SEQ ID NO: 18458 - DNA, 31 bp, synthetic construct; identical to SEQ ID NO: 17904
  source 1..31: mol_type = other DNA

SEQ ID NO: 18459 - DNA, 28 bp, synthetic construct
  source 1..28: mol_type = other DNA
ggagaaggaagccggctcattgttgtag

SEQ ID NO: 18460 - DNA, 31 bp, synthetic construct; identical to SEQ ID NO: 18008
  source 1..31: mol_type = other DNA

SEQ ID NO: 18461 - DNA, 28 bp, synthetic construct
  source 1..28: mol_type = other DNA
ggctcagggaccaggcttttggtaatag

SEQ ID NO: 18462 - DNA, 31 bp, synthetic construct; identical to SEQ ID NO: 17996
  source 1..31: mol_type = other DNA

SEQ ID NO: 18463 - DNA, 28 bp, synthetic construct
  source 1..28: mol_type = other DNA
ggtcatggaaccaagctgtctgtcctgg

SEQ ID NO: 18464 - DNA, 31 bp, synthetic construct; identical to SEQ ID NO: 17818
  source 1..31: mol_type = other DNA

SEQ ID NO: 18465 - DNA, 28 bp, synthetic construct
  source 1..28: mol_type = other DNA
ggtcccggcaccaggctcacggttttag

SEQ ID NO: 18466 - DNA, 31 bp, synthetic construct; identical to SEQ ID NO: 17822
  source 1..31: mol_type = other DNA

SEQ ID NO: 18467 - DNA, 28 bp, synthetic construct
  source 1..28: mol_type = other DNA
ggtgcgggcacccgactatcggtgctag

SEQ ID NO: 18468 - DNA, 31 bp, synthetic construct; identical to SEQ ID NO: 17850
  source 1..31: mol_type = other DNA

SEQ ID NO: 18469 - DNA, 28 bp, synthetic construct
  source 1..28: mol_type = other DNA
ggaccagggacacgactcaccgtcctag

SEQ ID NO: 18470 - DNA, 31 bp, synthetic construct; identical to SEQ ID NO: 17862
  source 1..31: mol_type = other DNA

SEQ ID NO: 18471 - DNA, 28 bp, synthetic construct
  source 1..28: mol_type = other DNA
ggtgcgggcacccgactatcggtgctag

SEQ ID NO: 18472 - DNA, 31 bp, synthetic construct; identical to SEQ ID NO: 17812
  source 1..31: mol_type = other DNA

SEQ ID NO: 18473 - DNA, 28 bp, synthetic construct
  source 1..28: mol_type = other DNA
ggtcccggcaccaggctcacggttttag

SEQ ID NO: 18474 - DNA, 31 bp, synthetic construct; identical to SEQ ID NO: 17822
  source 1..31: mol_type = other DNA

SEQ ID NO: 18475 - DNA, 28 bp, synthetic construct
  source 1..28: mol_type = other DNA
ggctcaggaaccagactgactgttctcg

SEQ ID NO: 18476 - DNA, 31 bp, synthetic construct; identical to SEQ ID NO: 17906
  source 1..31: mol_type = other DNA

SEQ ID NO: 18477 - DNA, 28 bp, synthetic construct
  source 1..28: mol_type = other DNA
ggctcagggaccaggcttttggtaatag

SEQ ID NO: 18478 - DNA, 31 bp, synthetic construct; identical to SEQ ID NO: 17832
  source 1..31: mol_type = other DNA

SEQ ID NO: 18479 - DNA, 28 bp, synthetic construct
  source 1..28: mol_type = other DNA
ggctcagggaccaggcttttggtaatag

SEQ ID NO: 18480 - DNA, 31 bp, synthetic construct; identical to SEQ ID NO: 17820
  source 1..31: mol_type = other DNA

SEQ ID NO: 18481 - DNA, 28 bp, synthetic construct
  source 1..28: mol_type = other DNA
ggtaaaggaaccagactcacagttgtag

SEQ ID NO: 18482 - DNA, 31 bp, synthetic construct; identical to SEQ ID NO: 17940
  source 1..31: mol_type = other DNA

SEQ ID NO: 18483 - DNA, 28 bp, synthetic construct
  source 1..28: mol_type = other DNA
gggccaggcactcggctcctcgtgttag

SEQ ID NO: 18484 - DNA, 31 bp, synthetic construct; identical to SEQ ID NO: 17856
  source 1..31: mol_type = other DNA

SEQ ID NO: 18485 - DNA, 28 bp, synthetic construct
  source 1..28: mol_type = other DNA
ggtcatggaaccaagctgtctgtcctgg

SEQ ID NO: 18486 - DNA, 31 bp, synthetic construct; identical to SEQ ID NO: 17814
  source 1..31: mol_type = other DNA

SEQ ID NO: 18487 - DNA, 28 bp, synthetic construct
  source 1..28: mol_type = other DNA
gggccaggcactcggctcctcgtgttag

SEQ ID NO: 18488 - DNA, 34 bp, synthetic construct
  source 1..34: mol_type = other DNA
ggatctggcacaaaagtcattgttctaccataca

SEQ ID NO: 18489 - DNA, 28 bp, synthetic construct
  source 1..28: mol_type = other DNA
ggtcccggcaccaggctcacggttttag

SEQ ID NO: 18490 - DNA, 31 bp, synthetic construct; identical to SEQ ID NO: 17964
  source 1..31: mol_type = other DNA

SEQ ID NO: 18491 - DNA, 28 bp, synthetic construct
  source 1..28: mol_type = other DNA
ggctcagggaccaggcttttggtaatag

SEQ ID NO: 18492 - DNA, 31 bp, synthetic construct; identical to SEQ ID NO: 17858
  source 1..31: mol_type = other DNA

SEQ ID NO: 18493 - DNA, 28 bp, synthetic construct
  source 1..28: mol_type = other DNA
ggtcccggcaccaggctcacggttttag

SEQ ID NO: 18494 - DNA, 31 bp, synthetic construct; identical to SEQ ID NO: 18126
  source 1..31: mol_type = other DNA

SEQ ID NO: 18495 - DNA, 28 bp, synthetic construct
  source 1..28: mol_type = other DNA
ggagaaggaagccggctcattgttgtag

SEQ ID NO: 18496 - DNA, 31 bp, synthetic construct; identical to SEQ ID NO: 17868
  source 1..31: mol_type = other DNA

SEQ ID NO: 18497 - DNA, 28 bp, synthetic construct
  source 1..28: mol_type = other DNA
ggtgcgggcacccgactatcggtgctag

SEQ ID NO: 18498 - DNA, 31 bp, synthetic construct; identical to SEQ ID NO: 17906
  source 1..31: mol_type = other DNA

SEQ ID NO: 18499 - DNA, 28 bp, synthetic construct
  source 1..28: mol_type = other DNA
gggccaggcactcggctcctcgtgttag

SEQ ID NO: 18500 - DNA, 31 bp, synthetic construct; identical to SEQ ID NO: 17964
  source 1..31: mol_type = other DNA

SEQ ID NO: 18501 - DNA, 28 bp, synthetic construct
  source 1..28: mol_type = other DNA
ggtgaaggctcaaagctgacagtgctgg

SEQ ID NO: 18502 - DNA, 31 bp, synthetic construct; identical to SEQ ID NO: 17822
  source 1..31: mol_type = other DNA

SEQ ID NO: 18503 - DNA, 28 bp, synthetic construct
  source 1..28: mol_type = other DNA
ggctcagggaccaggcttttggtaatag

SEQ ID NO: 18504 - DNA, 31 bp, synthetic construct
  source 1..31: mol_type = other DNA
ggggctggaacaagacttcaggtcaaccttg

SEQ ID NO: 18505 - DNA, 28 bp, synthetic construct
  source 1..28: mol_type = other DNA
ggtcccggcaccaggctcacggttttag

SEQ ID NO: 18506 - DNA, 31 bp, synthetic construct; identical to SEQ ID NO: 17828
  source 1..31: mol_type = other DNA

SEQ ID NO: 18507 - DNA, 28 bp, synthetic construct
  source 1..28: mol_type = other DNA
ggagaaggaagccggctcattgttgtag

SEQ ID NO: 18508 - DNA, 31 bp, synthetic construct; identical to SEQ ID NO: 17838
  source 1..31: mol_type = other DNA

SEQ ID NO: 18509 - DNA, 28 bp, synthetic construct
  source 1..28: mol_type = other DNA
ggctcaggaaccagactgactgttctcg

SEQ ID NO: 18510 - DNA, 31 bp, synthetic construct; identical to SEQ ID NO: 17884
  source 1..31: mol_type = other DNA

SEQ ID NO: 18511 - DNA, 28 bp, synthetic construct
  source 1..28: mol_type = other DNA
ggctcagggaccaggcttttggtaatag

SEQ ID NO: 18512 - DNA, 31 bp, synthetic construct; identical to SEQ ID NO: 17858
  source 1..31: mol_type = other DNA

SEQ ID NO: 18513 - DNA, 28 bp, synthetic construct
  source 1..28: mol_type = other DNA
gggccaggcactcggctcctcgtgttag

SEQ ID NO: 18514 - DNA, 31 bp, synthetic construct; identical to SEQ ID NO: 17964
  source 1..31: mol_type = other DNA

SEQ ID NO: 18515 - DNA, 28 bp, synthetic construct
  source 1..28: mol_type = other DNA
ggaccagggacacgactcaccgtcctag

SEQ ID NO: 18516 - DNA, 31 bp, synthetic construct; identical to SEQ ID NO: 17868
  source 1..31: mol_type = other DNA

SEQ ID NO: 18517 - DNA, 28 bp, synthetic construct
  source 1..28: mol_type = other DNA
ggtcccggcaccaggctcacggttttag

SEQ ID NO: 18518 - DNA, 31 bp, synthetic construct; identical to SEQ ID NO: 17834
  source 1..31: mol_type = other DNA

SEQ ID NO: 18519 - DNA, 28 bp, synthetic construct
  source 1..28: mol_type = other DNA
ggaccagggacacgactcaccgtcctag

SEQ ID NO: 18520 - DNA, 31 bp, synthetic construct; identical to SEQ ID NO: 17828
  source 1..31: mol_type = other DNA

SEQ ID NO: 18521 - DNA, 28 bp, synthetic construct
  source 1..28: mol_type = other DNA
ggctcaggaaccagactgactgttctcg

SEQ ID NO: 18522 - DNA, 31 bp, synthetic construct; identical to SEQ ID NO: 17916
  source 1..31: mol_type = other DNA

SEQ ID NO: 18523 - DNA, 28 bp, synthetic construct
  source 1..28: mol_type = other DNA
ggtcccggcaccaggctcacggttttag

SEQ ID NO: 18524 - DNA, 31 bp, synthetic construct; identical to SEQ ID NO: 17856
  source 1..31: mol_type = other DNA

SEQ ID NO: 18525 - DNA, 28 bp, synthetic construct
  source 1..28: mol_type = other DNA
ggaccagggacacgactcaccgtcctag

SEQ ID NO: 18526 - DNA, 31 bp, synthetic construct; identical to SEQ ID NO: 17810
  source 1..31: mol_type = other DNA

SEQ ID NO: 18527 - DNA, 28 bp, synthetic construct
  source 1..28: mol_type = other DNA
ggtcatggaaccaagctgtctgtcctgg

SEQ ID NO: 18528 - DNA, 31 bp, synthetic construct; identical to SEQ ID NO: 17906
  source 1..31: mol_type = other DNA

SEQ ID NO: 18529 - DNA, 28 bp, synthetic construct
  source 1..28: mol_type = other DNA
gggccaggcactcggctcctcgtgttag

SEQ ID NO: 18530 - DNA, 31 bp, synthetic construct; identical to SEQ ID NO: 17868
  source 1..31: mol_type = other DNA

SEQ ID NO: 18531 - DNA, 28 bp, synthetic construct
  source 1..28: mol_type = other DNA
ggtcccggcaccaggctcacggttttag

SEQ ID NO: 18532 - DNA, 31 bp, synthetic construct; identical to SEQ ID NO: 17826
  source 1..31: mol_type = other DNA

SEQ ID NO: 18533 - DNA, 28 bp, synthetic construct
  source 1..28: mol_type = other DNA
ggtaaaggaaccagactcacagttgtag

SEQ ID NO: 18534 - DNA, 31 bp, synthetic construct; identical to SEQ ID NO: 17906
  source 1..31: mol_type = other DNA

SEQ ID NO: 18535 - DNA, 28 bp, synthetic construct
  source 1..28: mol_type = other DNA
ggtaaaggaaccagactcacagttgtag

SEQ ID NO: 18536 - DNA, 31 bp, synthetic construct; identical to SEQ ID NO: 18176
  source 1..31: mol_type = other DNA

SEQ ID NO: 18537 - DNA, 28 bp, synthetic construct
  source 1..28: mol_type = other DNA
ggctcaggaaccagactgactgttctcg

SEQ ID NO: 18538 - DNA, 31 bp, synthetic construct; identical to SEQ ID NO: 17814
  source 1..31: mol_type = other DNA

SEQ ID NO: 18539 - DNA, 28 bp, synthetic construct
  source 1..28: mol_type = other DNA
ggtcatggaaccaagctgtctgtcctgg

SEQ ID NO: 18540 - DNA, 31 bp, synthetic construct; identical to SEQ ID NO: 17814
  source 1..31: mol_type = other DNA

SEQ ID NO: 18541 - DNA, 28 bp, synthetic construct
  source 1..28: mol_type = other DNA
ggtcccggcaccaggctcacggttttag

SEQ ID NO: 18542 - DNA, 31 bp, synthetic construct; identical to SEQ ID NO: 17850
  source 1..31: mol_type = other DNA

SEQ ID NO: 18543 - DNA, 28 bp, synthetic construct
  source 1..28: mol_type = other DNA
ggtcccggcaccaggctcacggttttag

SEQ ID NO: 18544 - DNA, 31 bp, synthetic construct; identical to SEQ ID NO: 17814
  source 1..31: mol_type = other DNA

SEQ ID NO: 18545 - DNA, 28 bp, synthetic construct
  source 1..28: mol_type = other DNA
ggtcccggcaccaggctcacggttttag

SEQ ID NO: 18546 - DNA, 31 bp, synthetic construct; identical to SEQ ID NO: 17884
  source 1..31: mol_type = other DNA

SEQ ID NO: 18547 - DNA, 28 bp, synthetic construct
  source 1..28: mol_type = other DNA
gggccaggcactcggctcctcgtgttag

SEQ ID NO: 18548 - DNA, 31 bp, synthetic construct; identical to SEQ ID NO: 17908
  source 1..31: mol_type = other DNA

SEQ ID NO: 18549 - DNA, 28 bp, synthetic construct
  source 1..28: mol_type = other DNA
ggtgcgggcacccgactatcggtgctag

SEQ ID NO: 18550 - DNA, 31 bp, synthetic construct; identical to SEQ ID NO: 17856
  source 1..31: mol_type = other DNA

SEQ ID NO: 18551 - DNA, 28 bp, synthetic construct
  source 1..28: mol_type = other DNA
ggctcaggaaccagactgactgttctcg

SEQ ID NO: 18552 - DNA, 31 bp, synthetic construct; identical to SEQ ID NO: 17898
  source 1..31: mol_type = other DNA

SEQ ID NO: 18553 - DNA, 28 bp, synthetic construct
  source 1..28: mol_type = other DNA
ggtcccggcaccaggctcacggttttag

SEQ ID NO: 18554 - DNA, 31 bp, synthetic construct; identical to SEQ ID NO: 17826
  source 1..31: mol_type = other DNA

SEQ ID NO: 18555 - DNA, 28 bp, synthetic construct
  source 1..28: mol_type = other DNA
ggaccagggacacgactcaccgtcctag

SEQ ID NO: 18556 - DNA, 31 bp, synthetic construct; identical to SEQ ID NO: 18166
  source 1..31: mol_type = other DNA

SEQ ID NO: 18557 - DNA, 28 bp, synthetic construct
  source 1..28: mol_type = other DNA
ggagaggggactcgactctctgttctag

SEQ ID NO: 18558 - DNA, 31 bp, synthetic construct; identical to SEQ ID NO: 17856
  source 1..31: mol_type = other DNA

SEQ ID NO: 18559 - DNA, 28 bp, synthetic construct
  source 1..28: mol_type = other DNA
ggctcaggaaccagactgactgttctcg

SEQ ID NO: 18560 - DNA, 31 bp, synthetic construct; identical to SEQ ID NO: 17814
  source 1..31: mol_type = other DNA

SEQ ID NO: 18561 - DNA, 28 bp, synthetic construct
  source 1..28: mol_type = other DNA
gggccaggcactcggctcctcgtgttag

SEQ ID NO: 18562 - DNA, 31 bp, synthetic construct; identical to SEQ ID NO: 17826
  source 1..31: mol_type = other DNA

SEQ ID NO: 18563 - DNA, 28 bp, synthetic construct
  source 1..28: mol_type = other DNA
ggagaaggaagccggctcattgttgtag

SEQ ID NO: 18564 - DNA, 31 bp, synthetic construct; identical to SEQ ID NO: 17852
  source 1..31: mol_type = other DNA

SEQ ID NO: 18565 - DNA, 28 bp, synthetic construct
  source 1..28: mol_type = other DNA
ggctcagggaccaggcttttggtaatag

SEQ ID NO: 18566 - DNA, 31 bp, synthetic construct; identical to SEQ ID NO: 17814
  source 1..31: mol_type = other DNA

SEQ ID NO: 18567 - DNA, 28 bp, synthetic construct
  source 1..28: mol_type = other DNA
ggtaaaggaaccagactcacagttgtag

SEQ ID NO: 18568 - DNA, 31 bp, synthetic construct; identical to SEQ ID NO: 17850
  source 1..31: mol_type = other DNA

SEQ ID NO: 18569 - DNA, 28 bp, synthetic construct
  source 1..28: mol_type = other DNA
ggagaggggactcgactctctgttctag

SEQ ID NO: 18570 - DNA, 31 bp, synthetic construct; identical to SEQ ID NO: 17816
  source 1..31: mol_type = other DNA

SEQ ID NO: 18571 - DNA, 28 bp, synthetic construct
  source 1..28: mol_type = other DNA
ggtgcgggcacccgactatcggtgctag

SEQ ID NO: 18572 - DNA, 31 bp, synthetic construct; identical to SEQ ID NO: 17856
  source 1..31: mol_type = other DNA

SEQ ID NO: 18573 - DNA, 28 bp, synthetic construct
  source 1..28: mol_type = other DNA
ggtgcgggcacccgactatcggtgctag

SEQ ID NO: 18574 - DNA, 31 bp, synthetic construct; identical to SEQ ID NO: 17858
  source 1..31: mol_type = other DNA

SEQ ID NO: 18575 - DNA, 28 bp, synthetic construct
  source 1..28: mol_type = other DNA
ggtcatggaaccaagctgtctgtcctgg

SEQ ID NO: 18576 - DNA, 31 bp, synthetic construct; identical to SEQ ID NO: 17868
  source 1..31: mol_type = other DNA

SEQ ID NO: 18577 - DNA, 28 bp, synthetic construct
  source 1..28: mol_type = other DNA
ggctcagggaccaggcttttggtaatag

SEQ ID NO: 18578 - DNA, 31 bp, synthetic construct; identical to SEQ ID NO: 17828
  source 1..31: mol_type = other DNA

SEQ ID NO: 18579 - DNA, 28 bp, synthetic construct
  source 1..28: mol_type = other DNA
ggtcccggcaccaggctcacggttttag

SEQ ID NO: 18580 - DNA, 31 bp, synthetic construct; identical to SEQ ID NO: 18182
  source 1..31: mol_type = other DNA

SEQ ID NO: 18581 - DNA, 28 bp, synthetic construct
  source 1..28: mol_type = other DNA
ggtaaaggaaccagactcacagttgtag

SEQ ID NO: 18582 - DNA, 31 bp, synthetic construct; identical to SEQ ID NO: 17862
  source 1..31: mol_type = other DNA

SEQ ID NO: 18583 - DNA, 28 bp, synthetic construct
  source 1..28: mol_type = other DNA
ggaccagggacacgactcaccgtcctag

SEQ ID NO: 18584 - DNA, 31 bp, synthetic construct; identical to SEQ ID NO: 18008
  source 1..31: mol_type = other DNA

SEQ ID NO: 18585 - DNA, 28 bp, synthetic construct
  source 1..28: mol_type = other DNA
gggccaggcactcggctcctcgtgttag

SEQ ID NO: 18586 - DNA, 31 bp, synthetic construct; identical to SEQ ID NO: 17850
  source 1..31: mol_type = other DNA

SEQ ID NO: 18587 - DNA, 28 bp, synthetic construct
  source 1..28: mol_type = other DNA
ggtgcgggcacccgactatcggtgctag

SEQ ID NO: 18588 - DNA, 31 bp, synthetic construct; identical to SEQ ID NO: 18008
  source 1..31: mol_type = other DNA

SEQ ID NO: 18589 - DNA, 28 bp, synthetic construct
  source 1..28: mol_type = other DNA
ggtcatggaaccaagctgtctgtcctgg

SEQ ID NO: 18590 - DNA, 31 bp, synthetic construct; identical to SEQ ID NO: 17820
  source 1..31: mol_type = other DNA

SEQ ID NO: 18591 - DNA, 28 bp, synthetic construct
  source 1..28: mol_type = other DNA
ggaccagggacacgactcaccgtcctag

SEQ ID NO: 18592 - DNA, 31 bp, synthetic construct; identical to SEQ ID NO: 18504
  source 1..31: mol_type = other DNA

SEQ ID NO: 18593 - DNA, 28 bp, synthetic construct
  source 1..28: mol_type = other DNA
gggccaggcactcggctcctcgtgttag

SEQ ID NO: 18594 - DNA, 31 bp, synthetic construct; identical to SEQ ID NO: 17832
  source 1..31: mol_type = other DNA

SEQ ID NO: 18595 - DNA, 28 bp, synthetic construct
  source 1..28: mol_type = other DNA
ggaccagggacacgactcaccgtcctag

SEQ ID NO: 18596 - DNA, 31 bp, synthetic construct; identical to SEQ ID NO: 17996
  source 1..31: mol_type = other DNA

SEQ ID NO: 18597 - DNA, 28 bp, synthetic construct
  source 1..28: mol_type = other DNA
ggtcatggaaccaagctgtctgtcctgg

SEQ ID NO: 18598 - DNA, 31 bp, synthetic construct; identical to SEQ ID NO: 17850
  source 1..31: mol_type = other DNA

SEQ ID NO: 18599 - DNA, 28 bp, synthetic construct
  source 1..28: mol_type = other DNA
ggtaaaggaaccagactcacagttgtag

SEQ ID NO: 18600 - DNA, 31 bp, synthetic construct; identical to SEQ ID NO: 17850
  source 1..31: mol_type = other DNA

SEQ ID NO: 18601 - DNA, 28 bp, synthetic construct
  source 1..28: mol_type = other DNA
ggctcaggaaccagactgactgttctcg

SEQ ID NO: 18602 - DNA, 31 bp, synthetic construct; identical to SEQ ID NO: 17822
  source 1..31: mol_type = other DNA

SEQ ID NO: 18603 - DNA, 28 bp, synthetic construct
  source 1..28: mol_type = other DNA
ggtaaaggaaccagactcacagttgtag

SEQ ID NO: 18604 - DNA, 31 bp, synthetic construct; identical to SEQ ID NO: 17884
  source 1..31: mol_type = other DNA

SEQ ID NO: 18605 - DNA, 28 bp, synthetic construct
  source 1..28: mol_type = other DNA
ggtaaaggaaccagactcacagttgtag

SEQ ID NO: 18606 - DNA, 31 bp, synthetic construct; identical to SEQ ID NO: 17826
  source 1..31: mol_type = other DNA

SEQ ID NO: 18607 - DNA, 28 bp, synthetic construct
  source 1..28: mol_type = other DNA
ggctcagggaccaggcttttggtaatag

SEQ ID NO: 18608 - DNA, 31 bp, synthetic construct; identical to SEQ ID NO: 17818
  source 1..31: mol_type = other DNA

SEQ ID NO: 18609 - DNA, 28 bp, synthetic construct
  source 1..28: mol_type = other DNA
ggctcagggaccaggcttttggtaatag

SEQ ID NO: 18610 - DNA, 31 bp, synthetic construct; identical to SEQ ID NO: 17820
  source 1..31: mol_type = other DNA

SEQ ID NO: 18611 - DNA, 28 bp, synthetic construct
  source 1..28: mol_type = other DNA
ggtcccggcaccaggctcacggttttag

SEQ ID NO: 18612 - DNA, 31 bp, synthetic construct; identical to SEQ ID NO: 17906
  source 1..31: mol_type = other DNA

SEQ ID NO: 18613 - DNA, 28 bp, synthetic construct
  source 1..28: mol_type = other DNA
gggccaggcactcggctcctcgtgttag

SEQ ID NO: 18614 - DNA, 31 bp, synthetic construct; identical to SEQ ID NO: 17940
  source 1..31: mol_type = other DNA

SEQ ID NO: 18615 - DNA, 28 bp, synthetic construct
  source 1..28: mol_type = other DNA
ggtcatggaaccaagctgtctgtcctgg

SEQ ID NO: 18616 - DNA, 31 bp, synthetic construct; identical to SEQ ID NO: 17812
  source 1..31: mol_type = other DNA

SEQ ID NO: 18617 - DNA, 28 bp, synthetic construct
  source 1..28: mol_type = other DNA
ggctcaggaaccagactgactgttctcg

SEQ ID NO: 18618 - DNA, 31 bp, synthetic construct; identical to SEQ ID NO: 17852
  source 1..31: mol_type = other DNA

SEQ ID NO: 18619 - DNA, 28 bp, synthetic construct
  source 1..28: mol_type = other DNA
ggtgcgggcacccgactatcggtgctag

SEQ ID NO: 18620 - DNA, 31 bp, synthetic construct; identical to SEQ ID NO: 17858
  source 1..31: mol_type = other DNA

SEQ ID NO: 18621 - DNA, 28 bp, synthetic construct
  source 1..28: mol_type = other DNA
ggtcccggcaccaggctcacggttttag

SEQ ID NO: 18622 - DNA, 31 bp, synthetic construct; identical to SEQ ID NO: 17844
  source 1..31: mol_type = other DNA

SEQ ID NO: 18623 - DNA, 28 bp, synthetic construct
  source 1..28: mol_type = other DNA
ggtgcgggcacccgactatcggtgctag

SEQ ID NO: 18624 - DNA, 31 bp, synthetic construct; identical to SEQ ID NO: 17812
  source 1..31: mol_type = other DNA

SEQ ID NO: 18625 - DNA, 28 bp, synthetic construct
  source 1..28: mol_type = other DNA
ggaccagggacacgactcaccgtcctag

SEQ ID NO: 18626 - DNA, 31 bp, synthetic construct; identical to SEQ ID NO: 17880
  source 1..31: mol_type = other DNA

SEQ ID NO: 18627 - DNA, 28 bp, synthetic construct
  source 1..28: mol_type = other DNA
ggaccagggacacgactcaccgtcctag

SEQ ID NO: 18628 - DNA, 31 bp, synthetic construct; identical to SEQ ID NO: 17820
  source 1..31: mol_type = other DNA

SEQ ID NO: 18629 - DNA, 28 bp, synthetic construct
  source 1..28: mol_type = other DNA
ggtcccggcaccaggctcacggttttag

SEQ ID NO: 18630 - DNA, 31 bp, synthetic construct; identical to SEQ ID NO: 17812
  source 1..31: mol_type = other DNA

SEQ ID NO: 18631 - DNA, 28 bp, synthetic construct
  source 1..28: mol_type = other DNA
ggtcccggcaccaggctcacggttttag

SEQ ID NO: 18632 - DNA, 31 bp, synthetic construct; identical to SEQ ID NO: 17828
  source 1..31: mol_type = other DNA

SEQ ID NO: 18633 - DNA, 28 bp, synthetic construct
  source 1..28: mol_type = other DNA
ggtcccggcaccaggctcacggttttag

SEQ ID NO: 18634 - DNA, 31 bp, synthetic construct; identical to SEQ ID NO: 18000
  source 1..31: mol_type = other DNA

SEQ ID NO: 18635 - DNA, 28 bp, synthetic construct
  source 1..28: mol_type = other DNA
ggtcccggcaccaggctcacggttttag

SEQ ID NO: 18636 - DNA, 31 bp, synthetic construct; identical to SEQ ID NO: 17814
  source 1..31: mol_type = other DNA

SEQ ID NO: 18637 - DNA, 28 bp, synthetic construct
  source 1..28: mol_type = other DNA
ggtaaaggaaccagactcacagttgtag

SEQ ID NO: 18638 - DNA, 31 bp, synthetic construct; identical to SEQ ID NO: 18064
  source 1..31: mol_type = other DNA

SEQ ID NO: 18639 - DNA, 28 bp, synthetic construct
  source 1..28: mol_type = other DNA
ggctcaggaaccagactgactgttctcg

SEQ ID NO: 18640 - DNA, 31 bp, synthetic construct; identical to SEQ ID NO: 17814
  source 1..31: mol_type = other DNA

SEQ ID NO: 18641 - DNA, 28 bp, synthetic construct
  source 1..28: mol_type = other DNA
ggctcaggaaccagactgactgttctcg

SEQ ID NO: 18642 - DNA, 31 bp, synthetic construct; identical to SEQ ID NO: 17812
  source 1..31: mol_type = other DNA

SEQ ID NO: 18643 - DNA, 28 bp, synthetic construct
  source 1..28: mol_type = other DNA
ggctcaggaaccagactgactgttctcg

SEQ ID NO: 18644 - DNA, 34 bp, synthetic construct; identical to SEQ ID NO: 18488
  source 1..34: mol_type = other DNA

SEQ ID NO: 18645 - DNA, 28 bp, synthetic construct
  source 1..28: mol_type = other DNA
ggtaaaggaaccagactcacagttgtag

SEQ ID NO: 18646 - DNA, 31 bp, synthetic construct; identical to SEQ ID NO: 17898
  source 1..31: mol_type = other DNA

SEQ ID NO: 18647 - DNA, 28 bp, synthetic construct
  source 1..28: mol_type = other DNA
ggagaaggaagccggctcattgttgtag

SEQ ID NO: 18648 - DNA, 31 bp, synthetic construct; identical to SEQ ID NO: 17972
  source 1..31: mol_type = other DNA

SEQ ID NO: 18649 - DNA, 28 bp, synthetic construct
  source 1..28: mol_type = other DNA
ggagaaggaagccggctcattgttgtag

SEQ ID NO: 18650 - DNA, 31 bp, synthetic construct; identical to SEQ ID NO: 17834
  source 1..31: mol_type = other DNA

SEQ ID NO: 18651 - DNA, 28 bp, synthetic construct
  source 1..28: mol_type = other DNA
ggctcaggaaccagactgactgttctcg

SEQ ID NO: 18652 - DNA, 31 bp, synthetic construct; identical to SEQ ID NO: 17906
  source 1..31: mol_type = other DNA

SEQ ID NO: 18653 - DNA, 28 bp, synthetic construct
  source 1..28: mol_type = other DNA
ggtaaaggaaccagactcacagttgtag

SEQ ID NO: 18654 - DNA, 31 bp, synthetic construct; identical to SEQ ID NO: 18064
  source 1..31: mol_type = other DNA

SEQ ID NO: 18655 - DNA, 28 bp, synthetic construct
  source 1..28: mol_type = other DNA
gcggcaggcacccggctcactgtgacag

SEQ ID NO: 18656 - DNA, 31 bp, synthetic construct; identical to SEQ ID NO: 17862
  source 1..31: mol_type = other DNA

SEQ ID NO: 18657 - DNA, 28 bp, synthetic construct
  source 1..28: mol_type = other DNA
ggtcatggaaccaagctgtctgtcctgg

SEQ ID NO: 18658 - DNA, 31 bp, synthetic construct; identical to SEQ ID NO: 17864
  source 1..31: mol_type = other DNA

SEQ ID NO: 18659 - DNA, 28 bp, synthetic construct
  source 1..28: mol_type = other DNA
ggctcaggaaccagactgactgttctcg

SEQ ID NO: 18660 - DNA, 31 bp, synthetic construct; identical to SEQ ID NO: 17820
  source 1..31: mol_type = other DNA

SEQ ID NO: 18661 - DNA, 28 bp, synthetic construct
  source 1..28: mol_type = other DNA
ggctcaggaaccagactgactgttctcg

SEQ ID NO: 18662 - DNA, 31 bp, synthetic construct; identical to SEQ ID NO: 17814
  source 1..31: mol_type = other DNA

SEQ ID NO: 18663 - DNA, 28 bp, synthetic construct
  source 1..28: mol_type = other DNA
ggaccagggacacgactcaccgtcctag

SEQ ID NO: 18664 - DNA, 31 bp, synthetic construct; identical to SEQ ID NO: 17818
  source 1..31: mol_type = other DNA

SEQ ID NO: 18665 - DNA, 28 bp, synthetic construct
  source 1..28: mol_type = other DNA
ggaccagggacacgactcaccgtcctag

SEQ ID NO: 18666 - DNA, 31 bp, synthetic construct; identical to SEQ ID NO: 17820
  source 1..31: mol_type = other DNA

SEQ ID NO: 18667 - DNA, 28 bp, synthetic construct
  source 1..28: mol_type = other DNA
ggaccagggacacgactcaccgtcctag

SEQ ID NO: 18668 - DNA, 31 bp, synthetic construct; identical to SEQ ID NO: 18126
  source 1..31: mol_type = other DNA

SEQ ID NO: 18669 - DNA, 28 bp, synthetic construct
  source 1..28: mol_type = other DNA
ggtgaaggctcaaagctgacagtgctgg

SEQ ID NO: 18670 - DNA, 31 bp, synthetic construct; identical to SEQ ID NO: 18128
  source 1..31: mol_type = other DNA

SEQ ID NO: 18671 - DNA, 28 bp, synthetic construct
  source 1..28: mol_type = other DNA
ggtcccggcaccaggctcacggttttag

SEQ ID NO: 18672 - DNA, 31 bp, synthetic construct; identical to SEQ ID NO: 17822
  source 1..31: mol_type = other DNA

SEQ ID NO: 18673 - DNA, 28 bp, synthetic construct
  source 1..28: mol_type = other DNA
ggtcccggcaccaggctcacggttttag

SEQ ID NO: 18674 - DNA, 31 bp, synthetic construct; identical to SEQ ID NO: 17880
  source 1..31: mol_type = other DNA

SEQ ID NO: 18675 - DNA, 28 bp, synthetic construct
  source 1..28: mol_type = other DNA
ggtcccggcaccaggctcacggttttag

SEQ ID NO: 18676 - DNA, 31 bp, synthetic construct; identical to SEQ ID NO: 17850
  source 1..31: mol_type = other DNA

SEQ ID NO: 18677 - DNA, 28 bp, synthetic construct
  source 1..28: mol_type = other DNA
ggtcccggcaccaggctcacggttttag

SEQ ID NO: 18678 - DNA, 31 bp, synthetic construct; identical to SEQ ID NO: 17858
  source 1..31: mol_type = other DNA

SEQ ID NO: 18679 - DNA, 28 bp, synthetic construct
  source 1..28: mol_type = other DNA
ggtcccggcaccaggctcacggttttag

SEQ ID NO: 18680 - DNA, 31 bp, synthetic construct; identical to SEQ ID NO: 17916
  source 1..31: mol_type = other DNA

SEQ ID NO: 18681 - DNA, 28 bp, synthetic construct
  source 1..28: mol_type = other DNA
ggtaaaggaaccagactcacagttgtag

SEQ ID NO: 18682 - DNA, 31 bp, synthetic construct; identical to SEQ ID NO: 17850
  source 1..31: mol_type = other DNA

SEQ ID NO: 18683 - DNA, 28 bp, synthetic construct
  source 1..28: mol_type = other DNA
gggccaggcactcggctcctcgtgttag

SEQ ID NO: 18684 - DNA, 31 bp, synthetic construct; identical to SEQ ID NO: 18006
  source 1..31: mol_type = other DNA

SEQ ID NO: 18685 - DNA, 28 bp, synthetic construct
  source 1..28: mol_type = other DNA
ggaccagggacacgactcaccgtcctag

SEQ ID NO: 18686 - DNA, 31 bp, synthetic construct; identical to SEQ ID NO: 17828
  source 1..31: mol_type = other DNA

SEQ ID NO: 18687 - DNA, 28 bp, synthetic construct
  source 1..28: mol_type = other DNA
ggagaaggaagccggctcattgttgtag

SEQ ID NO: 18688 - DNA, 31 bp, synthetic construct; identical to SEQ ID NO: 17838
  source 1..31: mol_type = other DNA

SEQ ID NO: 18689 - DNA, 28 bp, synthetic construct
  source 1..28: mol_type = other DNA
ggtcccggcaccaggctcacggttttag

SEQ ID NO: 18690 - DNA, 31 bp, synthetic construct; identical to SEQ ID NO: 17932
  source 1..31: mol_type = other DNA

SEQ ID NO: 18691 - DNA, 28 bp, synthetic construct
  source 1..28: mol_type = other DNA
ggtaaaggaaccagactcacagttgtag

SEQ ID NO: 18692 - DNA, 31 bp, synthetic construct; identical to SEQ ID NO: 17822
  source 1..31: mol_type = other DNA

SEQ ID NO: 18693 - DNA, 28 bp, synthetic construct
  source 1..28: mol_type = other DNA
ggtcccggcaccaggctcacggttttag

SEQ ID NO: 18694 - DNA, 31 bp, synthetic construct; identical to SEQ ID NO: 18182
  source 1..31: mol_type = other DNA

SEQ ID NO: 18695 - DNA, 28 bp, synthetic construct
  source 1..28: mol_type = other DNA
ggctcaggaaccagactgactgttctcg

SEQ ID NO: 18696 - DNA, 31 bp, synthetic construct; identical to SEQ ID NO: 18182
  source 1..31: mol_type = other DNA

SEQ ID NO: 18697 - DNA, 28 bp, synthetic construct
  source 1..28: mol_type = other DNA
ggtgaaggctcaaagctgacagtgctgg

SEQ ID NO: 18698 - DNA, 31 bp, synthetic construct; identical to SEQ ID NO: 17814
  source 1..31: mol_type = other DNA

SEQ ID NO: 18699 - DNA, 28 bp, synthetic construct
  source 1..28: mol_type = other DNA
ggtaaaggaaccagactcacagttgtag

SEQ ID NO: 18700 - DNA, 31 bp, synthetic construct; identical to SEQ ID NO: 17864
  source 1..31: mol_type = other DNA

SEQ ID NO: 18701 - DNA, 28 bp, synthetic construct
  source 1..28: mol_type = other DNA
ggtaaaggaaccagactcacagttgtag

SEQ ID NO: 18702 - DNA, 31 bp, synthetic construct; identical to SEQ ID NO: 17996
  source 1..31: mol_type = other DNA

SEQ ID NO: 18703 - DNA, 28 bp, synthetic construct
  source 1..28: mol_type = other DNA
gggccaggcactcggctcctcgtgttag

SEQ ID NO: 18704 - DNA, 31 bp, synthetic construct; identical to SEQ ID NO: 17840
  source 1..31: mol_type = other DNA

SEQ ID NO: 18705 - DNA, 28 bp, synthetic construct
  source 1..28: mol_type = other DNA
ggtaaaggaaccagactcacagttgtag

SEQ ID NO: 18706 - DNA, 31 bp, synthetic construct; identical to SEQ ID NO: 17996
  source 1..31: mol_type = other DNA

SEQ ID NO: 18707 - DNA, 28 bp, synthetic construct
  source 1..28: mol_type = other DNA
ggtaaaggaaccagactcacagttgtag

SEQ ID NO: 18708 - DNA, 31 bp, synthetic construct; identical to SEQ ID NO: 17834
  source 1..31: mol_type = other DNA

SEQ ID NO: 18709 - DNA, 28 bp, synthetic construct
  source 1..28: mol_type = other DNA
ggtaaaggaaccagactcacagttgtag

SEQ ID NO: 18710 - DNA, 31 bp, synthetic construct; identical to SEQ ID NO: 18128
  source 1..31: mol_type = other DNA

SEQ ID NO: 18711 - DNA, 28 bp, synthetic construct
  source 1..28: mol_type = other DNA
ggctcaggaaccagactgactgttctcg

SEQ ID NO: 18712 - DNA, 31 bp, synthetic construct; identical to SEQ ID NO: 17906
  source 1..31: mol_type = other DNA

SEQ ID NO: 18713 - DNA, 28 bp, synthetic construct
  source 1..28: mol_type = other DNA
gggccaggcactcggctcctcgtgttag

SEQ ID NO: 18714 - DNA, 31 bp, synthetic construct; identical to SEQ ID NO: 17838
  source 1..31: mol_type = other DNA

SEQ ID NO: 18715 - DNA, 28 bp, synthetic construct
  source 1..28: mol_type = other DNA
ggtcatggaaccaagctgtctgtcctgg

SEQ ID NO: 18716 - DNA, 31 bp, synthetic construct; identical to SEQ ID NO: 17850
  source 1..31: mol_type = other DNA

SEQ ID NO: 18717 - DNA, 28 bp, synthetic construct
  source 1..28: mol_type = other DNA
ggtcccggcaccaggctcacggttttag

SEQ ID NO: 18718 - DNA, 31 bp, synthetic construct; identical to SEQ ID NO: 17844
  source 1..31: mol_type = other DNA

SEQ ID NO: 18719 - DNA, 28 bp, synthetic construct
  source 1..28: mol_type = other DNA
ggctcaggaaccagactgactgttctcg

SEQ ID NO: 18720 - DNA, 31 bp, synthetic construct; identical to SEQ ID NO: 17814
  source 1..31: mol_type = other DNA

SEQ ID NO: 18721 - DNA, 28 bp, synthetic construct
  source 1..28: mol_type = other DNA
ggtaaaggaaccagactcacagttgtag

SEQ ID NO: 18722 - DNA, 31 bp, synthetic construct; identical to SEQ ID NO: 17868
  source 1..31: mol_type = other DNA

SEQ ID NO: 18723 - DNA, 28 bp, synthetic construct
  source 1..28: mol_type = other DNA
ggctcaggaaccagactgactgttctcg

SEQ ID NO: 18724 - DNA, 31 bp, synthetic construct; identical to SEQ ID NO: 17814
  source 1..31: mol_type = other DNA

SEQ ID NO: 18725 - DNA, 28 bp, synthetic construct
  source 1..28: mol_type = other DNA
ggctcaggaaccagactgactgttctcg

SEQ ID NO: 18726 - DNA, 31 bp, synthetic construct; identical to SEQ ID NO: 17814
  source 1..31: mol_type = other DNA

SEQ ID NO: 18727 - DNA, 28 bp, synthetic construct
  source 1..28: mol_type = other DNA
ggctcaggaaccagactgactgttctcg

SEQ ID NO: 18728 - DNA, 31 bp, synthetic construct; identical to SEQ ID NO: 17812
  source 1..31: mol_type = other DNA

SEQ ID NO: 18729 - DNA, 28 bp, synthetic construct
  source 1..28: mol_type = other DNA
gggccaggcactcggctcctcgtgttag

SEQ ID NO: 18730 - DNA, 31 bp, synthetic construct; identical to SEQ ID NO: 17884
  source 1..31: mol_type = other DNA

SEQ ID NO: 18731 - DNA, 28 bp, synthetic construct
  source 1..28: mol_type = other DNA
ggctcagggaccaggcttttggtaatag

SEQ ID NO: 18732 - DNA, 31 bp, synthetic construct; identical to SEQ ID NO: 17844
  source 1..31: mol_type = other DNA

SEQ ID NO: 18733 - DNA, 28 bp, synthetic construct
  source 1..28: mol_type = other DNA
ggtcccggcaccaggctcacggttttag

SEQ ID NO: 18734 - DNA, 31 bp, synthetic construct; identical to SEQ ID NO: 17816
  source 1..31: mol_type = other DNA

SEQ ID NO: 18735 - DNA, 28 bp, synthetic construct
  source 1..28: mol_type = other DNA
ggtcccggcaccaggctcacggttttag

SEQ ID NO: 18736 - DNA, 31 bp, synthetic construct; identical to SEQ ID NO: 18182
  source 1..31: mol_type = other DNA

SEQ ID NO: 18737 - DNA, 28 bp, synthetic construct
  source 1..28: mol_type = other DNA
ggtcccggcaccaggctcacggttttag

SEQ ID NO: 18738 - DNA, 31 bp, synthetic construct; identical to SEQ ID NO: 17828
  source 1..31: mol_type = other DNA

SEQ ID NO: 18739 - DNA, 28 bp, synthetic construct
  source 1..28: mol_type = other DNA
ggtcccggcaccaggctcacggttttag

SEQ ID NO: 18740 - DNA, 31 bp, synthetic construct; identical to SEQ ID NO: 17822
  source 1..31: mol_type = other DNA

SEQ ID NO: 18741 - DNA, 28 bp, synthetic construct
  source 1..28: mol_type = other DNA
ggtcccggcaccaggctcacggttttag

SEQ ID NO: 18742 - DNA, 31 bp, synthetic construct; identical to SEQ ID NO: 17826
  source 1..31: mol_type = other DNA

SEQ ID NO: 18743 - DNA, 28 bp, synthetic construct
  source 1..28: mol_type = other DNA
ggtcccggcaccaggctcacggttttag

SEQ ID NO: 18744 - DNA, 31 bp, synthetic construct; identical to SEQ ID NO: 18000
  source 1..31: mol_type = other DNA

SEQ ID NO: 18745 - DNA, 28 bp, synthetic construct
  source 1..28: mol_type = other DNA
ggtcccggcaccaggctcacggttttag

SEQ ID NO: 18746 - DNA, 31 bp, synthetic construct; identical to SEQ ID NO: 17822
  source 1..31: mol_type = other DNA

SEQ ID NO: 18747 - DNA, 28 bp, synthetic construct
  source 1..28: mol_type = other DNA
ggtcccggcaccaggctcacggttttag

SEQ ID NO: 18748 - DNA, 31 bp, synthetic construct; identical to SEQ ID NO: 17900
  source 1..31: mol_type = other DNA

SEQ ID NO: 18749 - DNA, 28 bp, synthetic construct
  source 1..28: mol_type = other DNA
ggtcccggcaccaggctcacggttttag

SEQ ID NO: 18750 - DNA, 31 bp, synthetic construct; identical to SEQ ID NO: 17850
  source 1..31: mol_type = other DNA

SEQ ID NO: 18751 - DNA, 28 bp, synthetic construct
  source 1..28: mol_type = other DNA
ggtcccggcaccaggctcacggttttag

SEQ ID NO: 18752 - DNA, 31 bp, synthetic construct; identical to SEQ ID NO: 17880
  source 1..31: mol_type = other DNA

SEQ ID NO: 18753 - DNA, 28 bp, synthetic construct
  source 1..28: mol_type = other DNA
ggtcccggcaccaggctcacggttttag

SEQ ID NO: 18754 - DNA, 34 bp, synthetic construct; identical to SEQ ID NO: 18488
  source 1..34: mol_type = other DNA

SEQ ID NO: 18755 - DNA, 28 bp, synthetic construct
  source 1..28: mol_type = other DNA
ggtcccggcaccaggctcacggttttag

SEQ ID NO: 18756 - DNA, 31 bp, synthetic construct; identical to SEQ ID NO: 17850
  source 1..31: mol_type = other DNA

SEQ ID NO: 18757 - DNA, 28 bp, synthetic construct
  source 1..28: mol_type = other DNA
ggtcccggcaccaggctcacggttttag

SEQ ID NO: 18758 - DNA, 31 bp, synthetic construct; identical to SEQ ID NO: 17844
  source 1..31: mol_type = other DNA

SEQ ID NO: 18759 - DNA, 28 bp, synthetic construct
  source 1..28: mol_type = other DNA
ggtcccggcaccaggctcacggttttag

SEQ ID NO: 18760 - DNA, 31 bp, synthetic construct; identical to SEQ ID NO: 17852
  source 1..31: mol_type = other DNA

SEQ ID NO: 18761 - DNA, 28 bp, synthetic construct
  source 1..28: mol_type = other DNA
gggccaggcactcggctcctcgtgttag

SEQ ID NO: 18762 - DNA, 31 bp, synthetic construct; identical to SEQ ID NO: 17862
  source 1..31: mol_type = other DNA

SEQ ID NO: 18763 - DNA, 28 bp, synthetic construct
  source 1..28: mol_type = other DNA
ggctcagggaccaggcttttggtaatag

SEQ ID NO: 18764 - DNA, 31 bp, synthetic construct; identical to SEQ ID NO: 17996
  source 1..31: mol_type = other DNA

SEQ ID NO: 18765 - DNA, 28 bp, synthetic construct
  source 1..28: mol_type = other DNA
ggaccagggacacgactcaccgtcctag

SEQ ID NO: 18766 - DNA, 31 bp, synthetic construct; identical to SEQ ID NO: 17964
  source 1..31: mol_type = other DNA

SEQ ID NO: 18767 - DNA, 28 bp, synthetic construct
  source 1..28: mol_type = other DNA
ggtcccggcaccaggctcacggttttag

SEQ ID NO: 18768 - DNA, 31 bp, synthetic construct; identical to SEQ ID NO: 17850
  source 1..31: mol_type = other DNA

SEQ ID NO: 18769 - DNA, 28 bp, synthetic construct
  source 1..28: mol_type = other DNA
ggtcccggcaccaggctcacggttttag

SEQ ID NO: 18770 - DNA, 31 bp, synthetic construct; identical to SEQ ID NO: 17812
  source 1..31: mol_type = other DNA

SEQ ID NO: 18771 - DNA, 28 bp, synthetic construct
  source 1..28: mol_type = other DNA
ggtcccggcaccaggctcacggttttag

SEQ ID NO: 18772 - DNA, 31 bp, synthetic construct; identical to SEQ ID NO: 17868
  source 1..31: mol_type = other DNA

SEQ ID NO: 18773 - DNA, 28 bp, synthetic construct
  source 1..28: mol_type = other DNA
ggtaaaggaaccagactcacagttgtag

SEQ ID NO: 18774 - DNA, 31 bp, synthetic construct; identical to SEQ ID NO: 17964
  source 1..31: mol_type = other DNA

SEQ ID NO: 18775 - DNA, 28 bp, synthetic construct
  source 1..28: mol_type = other DNA
gggccaggcactcggctcctcgtgttag

SEQ ID NO: 18776 - DNA, 31 bp, synthetic construct
  source 1..31: mol_type = other DNA
ggcttggggacaagtctggtagtaaatccaa

SEQ ID NO: 18777 - DNA, 28 bp, synthetic construct
  source 1..28: mol_type = other DNA
ggaccagggacacgactcaccgtcctag

SEQ ID NO: 18778 - DNA, 31 bp, synthetic construct; identical to SEQ ID NO: 17826
  source 1..31: mol_type = other DNA

SEQ ID NO: 18779 - DNA, 28 bp, synthetic construct
  source 1..28: mol_type = other DNA
ggtgcgggcacccgactatcggtgctag

SEQ ID NO: 18780 - DNA, 31 bp, synthetic construct; identical to SEQ ID NO: 17864
  source 1..31: mol_type = other DNA

SEQ ID NO: 18781 - DNA, 28 bp, synthetic construct
  source 1..28: mol_type = other DNA
ggagaaggaagccggctcattgttgtag

SEQ ID NO: 18782 - DNA, 31 bp, synthetic construct; identical to SEQ ID NO: 18064
  source 1..31: mol_type = other DNA

SEQ ID NO: 18783 - DNA, 28 bp, synthetic construct
  source 1..28: mol_type = other DNA
ggtcccggcaccaggctcacggttttag

SEQ ID NO: 18784 - DNA, 31 bp, synthetic construct; identical to SEQ ID NO: 18176
  source 1..31: mol_type = other DNA

SEQ ID NO: 18785 - DNA, 28 bp, synthetic construct
  source 1..28: mol_type = other DNA
ggtgaaggctcaaagctgacagtgctgg

SEQ ID NO: 18786 - DNA, 31 bp, synthetic construct; identical to SEQ ID NO: 17850
  source 1..31: mol_type = other DNA

SEQ ID NO: 18787 - DNA, 28 bp, synthetic construct
  source 1..28: mol_type = other DNA
ggctcagggaccaggcttttggtaatag

SEQ ID NO: 18788 - DNA, 31 bp, synthetic construct; identical to SEQ ID NO: 17814
  source 1..31: mol_type = other DNA

SEQ ID NO: 18789 - DNA, 28 bp, synthetic construct
  source 1..28: mol_type = other DNA
ggtgaaggctcaaagctgacagtgctgg

SEQ ID NO: 18790 - DNA, 31 bp, synthetic construct; identical to SEQ ID NO: 17850
  source 1..31: mol_type = other DNA

SEQ ID NO: 18791 - DNA, 28 bp, synthetic construct
  source 1..28: mol_type = other DNA
ggtgaaggctcaaagctgacagtgctgg

SEQ ID NO: 18792 - DNA, 31 bp, synthetic construct; identical to SEQ ID NO: 17906
  source 1..31: mol_type = other DNA

SEQ ID NO: 18793 - DNA, 28 bp, synthetic construct
  source 1..28: mol_type = other DNA
ggtaaaggaaccagactcacagttgtag

SEQ ID NO: 18794 - DNA, 31 bp, synthetic construct; identical to SEQ ID NO: 17916
  source 1..31: mol_type = other DNA

SEQ ID NO: 18795 - DNA, 28 bp, synthetic construct
  source 1..28: mol_type = other DNA
ggctcagggaccaggcttttggtaatag

SEQ ID NO: 18796 - DNA, 31 bp, synthetic construct; identical to SEQ ID NO: 18182
  source 1..31: mol_type = other DNA

SEQ ID NO: 18797 - DNA, 28 bp, synthetic construct
  source 1..28: mol_type = other DNA
ggtaaaggaaccagactcacagttgtag

SEQ ID NO: 18798 - DNA, 31 bp, synthetic construct; identical to SEQ ID NO: 17814
  source 1..31: mol_type = other DNA

SEQ ID NO: 18799 - DNA, 28 bp, synthetic construct
  source 1..28: mol_type = other DNA
ggtaaaggaaccagactcacagttgtag

SEQ ID NO: 18800 - DNA, 31 bp, synthetic construct; identical to SEQ ID NO: 17838
  source 1..31: mol_type = other DNA

SEQ ID NO: 18801 - DNA, 28 bp, synthetic construct
  source 1..28: mol_type = other DNA
ggtcatggaaccaagctgtctgtcctgg

SEQ ID NO: 18802 - DNA, 31 bp, synthetic construct; identical to SEQ ID NO: 17856
  source 1..31: mol_type = other DNA

SEQ ID NO: 18803 - DNA, 28 bp, synthetic construct
  source 1..28: mol_type = other DNA
ggtcccggcaccaggctcacggttttag

SEQ ID NO: 18804 - DNA, 31 bp, synthetic construct; identical to SEQ ID NO: 17850
  source 1..31: mol_type = other DNA

SEQ ID NO: 18805 - DNA, 28 bp, synthetic construct
  source 1..28: mol_type = other DNA
gcggcaggcacccggctcactgtgacag

SEQ ID NO: 18806 - DNA, 31 bp, synthetic construct; identical to SEQ ID NO: 17996
  source 1..31: mol_type = other DNA

SEQ ID NO: 18807 - DNA, 28 bp, synthetic construct
  source 1..28: mol_type = other DNA
ggctcaggaaccagactgactgttctcg

SEQ ID NO: 18808 - DNA, 31 bp, synthetic construct; identical to SEQ ID NO: 17826
  source 1..31: mol_type = other DNA

SEQ ID NO: 18809 - DNA, 28 bp, synthetic construct
  source 1..28: mol_type = other DNA
ggtcccggcaccaggctcacggttttag

SEQ ID NO: 18810 - DNA, 31 bp, synthetic construct; identical to SEQ ID NO: 17864
  source 1..31: mol_type = other DNA

SEQ ID NO: 18811 - DNA, 28 bp, synthetic construct
  source 1..28: mol_type = other DNA
ggtaaaggaaccagactcacagttgtag

SEQ ID NO: 18812 - DNA, 31 bp, synthetic construct; identical to SEQ ID NO: 17850
  source 1..31: mol_type = other DNA

SEQ ID NO: 18813 - DNA, 28 bp, synthetic construct
  source 1..28: mol_type = other DNA
ggtgaaggctcaaagctgacagtgctgg

SEQ ID NO: 18814 - DNA, 31 bp, synthetic construct; identical to SEQ ID NO: 17852
  source 1..31: mol_type = other DNA

SEQ ID NO: 18815 - DNA, 28 bp, synthetic construct
  source 1..28: mol_type = other DNA
ggtgcgggcacccgactatcggtgctag

SEQ ID NO: 18816 - DNA, 31 bp, synthetic construct; identical to SEQ ID NO: 17834
  source 1..31: mol_type = other DNA

SEQ ID NO: 18817 - DNA, 28 bp, synthetic construct
  source 1..28: mol_type = other DNA
gggccaggcactcggctcctcgtgttag

SEQ ID NO: 18818 - DNA, 31 bp, synthetic construct; identical to SEQ ID NO: 17820
  source 1..31: mol_type = other DNA

SEQ ID NO: 18819 - DNA, 28 bp, synthetic construct
  source 1..28: mol_type = other DNA
ggctcaggaaccagactgactgttctcg

SEQ ID NO: 18820 - DNA, 31 bp, synthetic construct; identical to SEQ ID NO: 17838
  source 1..31: mol_type = other DNA

SEQ ID NO: 18821 - DNA, 28 bp, synthetic construct
  source 1..28: mol_type = other DNA
ggtaaaggaaccagactcacagttgtag

SEQ ID NO: 18822 - DNA, 31 bp, synthetic construct; identical to SEQ ID NO: 17906
  source 1..31: mol_type = other DNA

SEQ ID NO: 18823 - DNA, 28 bp, synthetic construct
  source 1..28: mol_type = other DNA
ggctcaggaaccagactgactgttctcg

SEQ ID NO: 18824 - DNA, 31 bp, synthetic construct; identical to SEQ ID NO: 17832
  source 1..31: mol_type = other DNA

SEQ ID NO: 18825 - DNA, 28 bp, synthetic construct
  source 1..28: mol_type = other DNA
ggtcccggcaccaggctcacggttttag

SEQ ID NO: 18826 - DNA, 31 bp, synthetic construct; identical to SEQ ID NO: 18182
  source 1..31: mol_type = other DNA

SEQ ID NO: 18827 - DNA, 28 bp, synthetic construct
  source 1..28: mol_type = other DNA
gggccaggcactcggctcctcgtgttag

SEQ ID NO: 18828 - DNA, 31 bp, synthetic construct; identical to SEQ ID NO: 17996
  source 1..31: mol_type = other DNA

SEQ ID NO: 18829 - DNA, 28 bp, synthetic construct
  source 1..28: mol_type = other DNA
ggtcccggcaccaggctcacggttttag

SEQ ID NO: 18830 - DNA, 31 bp, synthetic construct; identical to SEQ ID NO: 18182
  source 1..31: mol_type = other DNA

SEQ ID NO: 18831 - DNA, 28 bp, synthetic construct
  source 1..28: mol_type = other DNA
ggctcagggaccaggcttttggtaatag

SEQ ID NO: 18832 - DNA, 31 bp, synthetic construct; identical to SEQ ID NO: 18092
  source 1..31: mol_type = other DNA

SEQ ID NO: 18833 - DNA, 28 bp, synthetic construct
  source 1..28: mol_type = other DNA
ggtcatggaaccaagctgtctgtcctgg

SEQ ID NO: 18834 - DNA, 31 bp, synthetic construct; identical to SEQ ID NO: 17828
  source 1..31: mol_type = other DNA

SEQ ID NO: 18835 - DNA, 28 bp, synthetic construct
  source 1..28: mol_type = other DNA
ggtcccggcaccaggctcacggttttag

SEQ ID NO: 18836 - DNA, 31 bp, synthetic construct; identical to SEQ ID NO: 17882
  source 1..31: mol_type = other DNA

SEQ ID NO: 18837 - DNA, 28 bp, synthetic construct
  source 1..28: mol_type = other DNA
ggtaaaggaaccagactcacagttgtag

SEQ ID NO: 18838 - DNA, 31 bp, synthetic construct; identical to SEQ ID NO: 18126
  source 1..31: mol_type = other DNA

SEQ ID NO: 18839 - DNA, 28 bp, synthetic construct
  source 1..28: mol_type = other DNA
ggtcccggcaccaggctcacggttttag

SEQ ID NO: 18840 - DNA, 31 bp, synthetic construct; identical to SEQ ID NO: 17832
  source 1..31: mol_type = other DNA

SEQ ID NO: 18841 - DNA, 28 bp, synthetic construct
  source 1..28: mol_type = other DNA
ggtcccggcaccaggctcacggttttag

SEQ ID NO: 18842 - DNA, 31 bp, synthetic construct; identical to SEQ ID NO: 18064
  source 1..31: mol_type = other DNA

SEQ ID NO: 18843 - DNA, 28 bp, synthetic construct
  source 1..28: mol_type = other DNA
gggccaggcactcggctcctcgtgttag

SEQ ID NO: 18844 - DNA, 31 bp, synthetic construct; identical to SEQ ID NO: 17996
  source 1..31: mol_type = other DNA

SEQ ID NO: 18845 - DNA, 28 bp, synthetic construct
  source 1..28: mol_type = other DNA
ggtcccggcaccaggctcacggttttag

SEQ ID NO: 18846 - DNA, 31 bp, synthetic construct; identical to SEQ ID NO: 17864
  source 1..31: mol_type = other DNA

SEQ ID NO: 18847 - DNA, 28 bp, synthetic construct
  source 1..28: mol_type = other DNA
gggccaggcactcggctcctcgtgttag

SEQ ID NO: 18848 - DNA, 31 bp, synthetic construct; identical to SEQ ID NO: 17838
  source 1..31: mol_type = other DNA

SEQ ID NO: 18849 - DNA, 28 bp, synthetic construct
  source 1..28: mol_type = other DNA
ggaccagggacacgactcaccgtcctag

SEQ ID NO: 18850 - DNA, 31 bp, synthetic construct; identical to SEQ ID NO: 17884
  source 1..31: mol_type = other DNA

SEQ ID NO: 18851 - DNA, 28 bp, synthetic construct
  source 1..28: mol_type = other DNA
ggtaaaggaaccagactcacagttgtag

SEQ ID NO: 18852 - DNA, 31 bp, synthetic construct; identical to SEQ ID NO: 17852
  source 1..31: mol_type = other DNA

SEQ ID NO: 18853 - DNA, 28 bp, synthetic construct
  source 1..28: mol_type = other DNA
ggctcagggaccaggcttttggtaatag

SEQ ID NO: 18854 - DNA, 31 bp, synthetic construct; identical to SEQ ID NO: 17916
  source 1..31: mol_type = other DNA

SEQ ID NO: 18855 - DNA, 28 bp, synthetic construct
  source 1..28: mol_type = other DNA
ggctcagggaccaggcttttggtaatag

SEQ ID NO: 18856 - DNA, 31 bp, synthetic construct; identical to SEQ ID NO: 18006
  source 1..31: mol_type = other DNA

SEQ ID NO: 18857 - DNA, 28 bp, synthetic construct
  source 1..28: mol_type = other DNA
ggagaaggaagccggctcattgttgtag

SEQ ID NO: 18858 - DNA, 31 bp, synthetic construct; identical to SEQ ID NO: 17840
  source 1..31: mol_type = other DNA

SEQ ID NO: 18859 - DNA, 28 bp, synthetic construct
  source 1..28: mol_type = other DNA
ggtcccggcaccaggctcacggttttag

SEQ ID NO: 18860 - DNA, 31 bp, synthetic construct; identical to SEQ ID NO: 17840
  source 1..31: mol_type = other DNA

SEQ ID NO: 18861 - DNA, 28 bp, synthetic construct
  source 1..28: mol_type = other DNA
ggagaaggaagccggctcattgttgtag

SEQ ID NO: 18862 - DNA, 31 bp, synthetic construct; identical to SEQ ID NO: 17818
  source 1..31: mol_type = other DNA

SEQ ID NO: 18863 - DNA, 28 bp, synthetic construct
  source 1..28: mol_type = other DNA
ggctcagggaccaggcttttggtaatag

SEQ ID NO: 18864 - DNA, 31 bp, synthetic construct; identical to SEQ ID NO: 17828
  source 1..31: mol_type = other DNA

SEQ ID NO: 18865 - DNA, 28 bp, synthetic construct
  source 1..28: mol_type = other DNA
ggtgcgggcacccgactatcggtgctag

SEQ ID NO: 18866 - DNA, 31 bp, synthetic construct; identical to SEQ ID NO: 17852
  source 1..31: mol_type = other DNA

SEQ ID NO: 18867 - DNA, 28 bp, synthetic construct
  source 1..28: mol_type = other DNA
ggtcccggcaccaggctcacggttttag

SEQ ID NO: 18868 - DNA, 31 bp, synthetic construct; identical to SEQ ID NO: 18008
  source 1..31: mol_type = other DNA

SEQ ID NO: 18869 - DNA, 28 bp, synthetic construct
  source 1..28: mol_type = other DNA
gcggcaggcacccggctcactgtgacag

SEQ ID NO: 18870 - DNA, 31 bp, synthetic construct; identical to SEQ ID NO: 18092
  source 1..31: mol_type = other DNA

SEQ ID NO: 18871 - DNA, 28 bp, synthetic construct
  source 1..28: mol_type = other DNA
ggtgcgggcacccgactatcggtgctag

SEQ ID NO: 18872 - DNA, 31 bp, synthetic construct; identical to SEQ ID NO: 17812
  source 1..31: mol_type = other DNA

SEQ ID NO: 18873 - DNA, 28 bp, synthetic construct
  source 1..28: mol_type = other DNA
gggccaggcactcggctcctcgtgttag

SEQ ID NO: 18874 - DNA, 31 bp, synthetic construct; identical to SEQ ID NO: 17996
  source 1..31: mol_type = other DNA

SEQ ID NO: 18875 - DNA, 28 bp, synthetic construct
  source 1..28: mol_type = other DNA
ggtcatggaaccaagctgtctgtcctgg

SEQ ID NO: 18876 - DNA, 31 bp, synthetic construct; identical to SEQ ID NO: 17910
  source 1..31: mol_type = other DNA

SEQ ID NO: 18877 - DNA, 28 bp, synthetic construct
  source 1..28: mol_type = other DNA
ggtgcgggcacccgactatcggtgctag

SEQ ID NO: 18878 - DNA, 31 bp, synthetic construct; identical to SEQ ID NO: 17850
  source 1..31: mol_type = other DNA

SEQ ID NO: 18879 - DNA, 28 bp, synthetic construct
  source 1..28: mol_type = other DNA
ggtaaaggaaccagactcacagttgtag

SEQ ID NO: 18880 - DNA, 31 bp, synthetic construct; identical to SEQ ID NO: 18008
  source 1..31: mol_type = other DNA

SEQ ID NO: 18881 - DNA, 28 bp, synthetic construct
  source 1..28: mol_type = other DNA
gggccaggcactcggctcctcgtgttag

SEQ ID NO: 18882 - DNA, 31 bp, synthetic construct; identical to SEQ ID NO: 18504
  source 1..31: mol_type = other DNA

SEQ ID NO: 18883 - DNA, 28 bp, synthetic construct
  source 1..28: mol_type = other DNA
ggtaaaggaaccagactcacagttgtag

SEQ ID NO: 18884 - DNA, 31 bp, synthetic construct; identical to SEQ ID NO: 18504
  source 1..31: mol_type = other DNA

SEQ ID NO: 18885 - DNA, 28 bp, synthetic construct
  source 1..28: mol_type = other DNA
ggagaggggactcgactctctgttctag

SEQ ID NO: 18886 - DNA, 31 bp, synthetic construct; identical to SEQ ID NO: 17814
  source 1..31: mol_type = other DNA

SEQ ID NO: 18887 - DNA, 28 bp, synthetic construct
  source 1..28: mol_type = other DNA
gcggcaggcacccggctcactgtgacag

SEQ ID NO: 18888 - DNA, 31 bp, synthetic construct; identical to SEQ ID NO: 17906
  source 1..31: mol_type = other DNA

SEQ ID NO: 18889 - DNA, 28 bp, synthetic construct
  source 1..28: mol_type = other DNA
ggaccagggacacgactcaccgtcctag

SEQ ID NO: 18890 - DNA, 31 bp, synthetic construct; identical to SEQ ID NO: 17852
  source 1..31: mol_type = other DNA

SEQ ID NO: 18891 - DNA, 28 bp, synthetic construct
  source 1..28: mol_type = other DNA
ggtcccggcaccaggctcacggttttag

SEQ ID NO: 18892 - DNA, 31 bp, synthetic construct; identical to SEQ ID NO: 17906
  source 1..31: mol_type = other DNA

SEQ ID NO: 18893 - DNA, 28 bp, synthetic construct
  source 1..28: mol_type = other DNA
ggtgcgggcacccgactatcggtgctag

SEQ ID NO: 18894 - DNA, 31 bp, synthetic construct; identical to SEQ ID NO: 17852
  source 1..31: mol_type = other DNA

SEQ ID NO: 18895 - DNA, 28 bp, synthetic construct
  source 1..28: mol_type = other DNA
ggtgcgggcacccgactatcggtgctag

SEQ ID NO: 18896 - DNA, 31 bp, synthetic construct; identical to SEQ ID NO: 17868
  source 1..31: mol_type = other DNA

SEQ ID NO: 18897 - DNA, 28 bp, synthetic construct
  source 1..28: mol_type = other DNA
ggtgcgggcacccgactatcggtgctag

SEQ ID NO: 18898 - DNA, 31 bp, synthetic construct; identical to SEQ ID NO: 18064
  source 1..31: mol_type = other DNA

SEQ ID NO: 18899 - DNA, 28 bp, synthetic construct
  source 1..28: mol_type = other DNA
ggctcaggaaccagactgactgttctcg

SEQ ID NO: 18900 - DNA, 31 bp, synthetic construct; identical to SEQ ID NO: 17868
  source 1..31: mol_type = other DNA

SEQ ID NO: 18901 - DNA, 28 bp, synthetic construct
  source 1..28: mol_type = other DNA
ggctcaggaaccagactgactgttctcg

SEQ ID NO: 18902 - DNA, 31 bp, synthetic construct; identical to SEQ ID NO: 17812
  source 1..31: mol_type = other DNA

SEQ ID NO: 18903 - DNA, 28 bp, synthetic construct
  source 1..28: mol_type = other DNA
ggctcaggaaccagactgactgttctcg

SEQ ID NO: 18904 - DNA, 31 bp, synthetic construct; identical to SEQ ID NO: 17812
  source 1..31: mol_type = other DNA

SEQ ID NO: 18905 - DNA, 28 bp, synthetic construct
  source 1..28: mol_type = other DNA
gcggcaggcacccggctcactgtgacag

SEQ ID NO: 18906 - DNA, 31 bp, synthetic construct; identical to SEQ ID NO: 17812
  source 1..31: mol_type = other DNA

SEQ ID NO: 18907 - DNA, 28 bp, synthetic construct
  source 1..28: mol_type = other DNA
ggtcccggcaccaggctcacggttttag

SEQ ID NO: 18908 - DNA, 31 bp, synthetic construct; identical to SEQ ID NO: 17820
  source 1..31: mol_type = other DNA

SEQ ID NO: 18909 - DNA, 28 bp, synthetic construct
  source 1..28: mol_type = other DNA
ggtgaaggctcaaagctgacagtgctgg

SEQ ID NO: 18910 - DNA, 31 bp, synthetic construct; identical to SEQ ID NO: 17858
  source 1..31: mol_type = other DNA

SEQ ID NO: 18911 - DNA, 28 bp, synthetic construct
  source 1..28: mol_type = other DNA
gcggcaggcacccggctcactgtgacag

SEQ ID NO: 18912 - DNA, 31 bp, synthetic construct; identical to SEQ ID NO: 17858
  source 1..31: mol_type = other DNA

SEQ ID NO: 18913 - DNA, 28 bp, synthetic construct
  source 1..28: mol_type = other DNA
ggagaggggactcgactctctgttctag

SEQ ID NO: 18914 - DNA, 31 bp, synthetic construct; identical to SEQ ID NO: 17858
  source 1..31: mol_type = other DNA

SEQ ID NO: 18915 - DNA, 28 bp, synthetic construct
  source 1..28: mol_type = other DNA
ggagaggggactcgactctctgttctag

SEQ ID NO: 18916 - DNA, 31 bp, synthetic construct; identical to SEQ ID NO: 17840
  source 1..31: mol_type = other DNA

SEQ ID NO: 18917 - DNA, 28 bp, synthetic construct
  source 1..28: mol_type = other DNA
ggtcatggaaccaagctgtctgtcctgg

SEQ ID NO: 18918 - DNA, 31 bp, synthetic construct; identical to SEQ ID NO: 17864
  source 1..31: mol_type = other DNA

SEQ ID NO: 18919 - DNA, 28 bp, synthetic construct
  source 1..28: mol_type = other DNA
ggctcaggaaccagactgactgttctcg

SEQ ID NO: 18920 - DNA, 31 bp, synthetic construct; identical to SEQ ID NO: 17878
  source 1..31: mol_type = other DNA

SEQ ID NO: 18921 - DNA, 28 bp, synthetic construct
  source 1..28: mol_type = other DNA
ggctcagggaccaggcttttggtaatag

SEQ ID NO: 18922 - DNA, 31 bp, synthetic construct; identical to SEQ ID NO: 18166
  source 1..31: mol_type = other DNA

SEQ ID NO: 18923 - DNA, 28 bp, synthetic construct
  source 1..28: mol_type = other DNA
ggctcaggaaccagactgactgttctcg

SEQ ID NO: 18924 - DNA, 31 bp, synthetic construct; identical to SEQ ID NO: 17884
  source 1..31: mol_type = other DNA

SEQ ID NO: 18925 - DNA, 28 bp, synthetic construct
  source 1..28: mol_type = other DNA
ggtgaaggctcaaagctgacagtgctgg

SEQ ID NO: 18926 - DNA, 31 bp, synthetic construct; identical to SEQ ID NO: 17844
  source 1..31: mol_type = other DNA

SEQ ID NO: 18927 - DNA, 28 bp, synthetic construct
  source 1..28: mol_type = other DNA
ggctcagggaccaggcttttggtaatag

SEQ ID NO: 18928 - DNA, 31 bp, synthetic construct; identical to SEQ ID NO: 18128
  source 1..31: mol_type = other DNA

SEQ ID NO: 18929 - DNA, 28 bp, synthetic construct
  source 1..28: mol_type = other DNA
ggtaaaggaaccagactcacagttgtag

SEQ ID NO: 18930 - DNA, 31 bp, synthetic construct; identical to SEQ ID NO: 17864
  source 1..31: mol_type = other DNA

SEQ ID NO: 18931 - DNA, 28 bp, synthetic construct
  source 1..28: mol_type = other DNA
ggagaaggaagccggctcattgttgtag

SEQ ID NO: 18932 - DNA, 31 bp, synthetic construct; identical to SEQ ID NO: 17816
  source 1..31: mol_type = other DNA

SEQ ID NO: 18933 - DNA, 28 bp, synthetic construct
  source 1..28: mol_type = other DNA
ggtcccggcaccaggctcacggttttag

SEQ ID NO: 18934 - DNA, 31 bp, synthetic construct; identical to SEQ ID NO: 18008
  source 1..31: mol_type = other DNA

SEQ ID NO: 18935 - DNA, 28 bp, synthetic construct
  source 1..28: mol_type = other DNA
ggtcccggcaccaggctcacggttttag

SEQ ID NO: 18936 - DNA, 31 bp, synthetic construct; identical to SEQ ID NO: 17816
  source 1..31: mol_type = other DNA

SEQ ID NO: 18937 - DNA, 28 bp, synthetic construct
  source 1..28: mol_type = other DNA
ggtgaaggctcaaagctgacagtgctgg

SEQ ID NO: 18938 - DNA, 31 bp, synthetic construct; identical to SEQ ID NO: 17828
  source 1..31: mol_type = other DNA

SEQ ID NO: 18939 - DNA, 28 bp, synthetic construct
  source 1..28: mol_type = other DNA
ggtcccggcaccaggctcacggttttag

SEQ ID NO: 18940 - DNA, 31 bp, synthetic construct; identical to SEQ ID NO: 17884
  source 1..31: mol_type = other DNA

SEQ ID NO: 18941 - DNA, 28 bp, synthetic construct
  source 1..28: mol_type = other DNA
ggtaaaggaaccagactcacagttgtag

SEQ ID NO: 18942 - DNA, 31 bp, synthetic construct; identical to SEQ ID NO: 17852
  source 1..31: mol_type = other DNA

SEQ ID NO: 18943 - DNA, 28 bp, synthetic construct
  source 1..28: mol_type = other DNA
ggtaaaggaaccagactcacagttgtag

SEQ ID NO: 18944 - DNA, 31 bp, synthetic construct
  source 1..31: mol_type = other DNA
ggaaagggcacggtacttctagtctctccag

SEQ ID NO: 18945 - DNA, 28 bp, synthetic construct
  source 1..28: mol_type = other DNA
ggtaaaggaaccagactcacagttgtag

SEQ ID NO: 18946 - DNA, 31 bp, synthetic construct; identical to SEQ ID NO: 17852
  source 1..31: mol_type = other DNA

SEQ ID NO: 18947 - DNA, 28 bp, synthetic construct
  source 1..28: mol_type = other DNA
ggctcaggaaccagactgactgttctcg

SEQ ID NO: 18948 - DNA, 31 bp, synthetic construct; identical to SEQ ID NO: 17810
  source 1..31: mol_type = other DNA

SEQ ID NO: 18949 - DNA, 28 bp, synthetic construct
  source 1..28: mol_type = other DNA
ggaccagggacacgactcaccgtcctag

SEQ ID NO: 18950 - DNA, 31 bp, synthetic construct; identical to SEQ ID NO: 18064
  source 1..31: mol_type = other DNA

SEQ ID NO: 18951 - DNA, 28 bp, synthetic construct
  source 1..28: mol_type = other DNA
ggctcaggaaccagactgactgttctcg

SEQ ID NO: 18952 - DNA, 34 bp, synthetic construct; identical to SEQ ID NO: 18488
  source 1..34: mol_type = other DNA

SEQ ID NO: 18953 - DNA, 28 bp, synthetic construct
  source 1..28: mol_type = other DNA
gggccaggcactcggctcctcgtgttag

SEQ ID NO: 18954 - DNA, 31 bp, synthetic construct; identical to SEQ ID NO: 17814
  source 1..31: mol_type = other DNA

SEQ ID NO: 18955 - DNA, 28 bp, synthetic construct
  source 1..28: mol_type = other DNA
ggtcccggcaccaggctcacggttttag

SEQ ID NO: 18956 - DNA, 31 bp, synthetic construct; identical to SEQ ID NO: 17814
  source 1..31: mol_type = other DNA

SEQ ID NO: 18957 - DNA, 28 bp, synthetic construct
  source 1..28: mol_type = other DNA
ggctcagggaccaggcttttggtaatag

SEQ ID NO: 18958 - DNA, 31 bp, synthetic construct; identical to SEQ ID NO: 17850
  source 1..31: mol_type = other DNA

SEQ ID NO: 18959 - DNA, 28 bp, synthetic construct
  source 1..28: mol_type = other DNA
ggagaggggactcgactctctgttctag

SEQ ID NO: 18960 - DNA, 31 bp, synthetic construct; identical to SEQ ID NO: 17868
  source 1..31: mol_type = other DNA

SEQ ID NO: 18961 - DNA, 28 bp, synthetic construct
  source 1..28: mol_type = other DNA
ggagaaggaagccggctcattgttgtag

SEQ ID NO: 18962 - DNA, 31 bp, synthetic construct; identical to SEQ ID NO: 17880
  source 1..31: mol_type = other DNA

SEQ ID NO: 18963 - DNA, 28 bp, synthetic construct
  source 1..28: mol_type = other DNA
ggtcatggaaccaagctgtctgtcctgg

SEQ ID NO: 18964 - DNA, 31 bp, synthetic construct; identical to SEQ ID NO: 17812
  source 1..31: mol_type = other DNA

SEQ ID NO: 18965 - DNA, 28 bp, synthetic construct
  source 1..28: mol_type = other DNA
ggtcatggaaccaagctgtctgtcctgg

SEQ ID NO: 18966 - DNA, 31 bp, synthetic construct; identical to SEQ ID NO: 18128
  source 1..31: mol_type = other DNA

SEQ ID NO: 18967 - DNA, 28 bp, synthetic construct
  source 1..28: mol_type = other DNA
ggctcaggaaccagactgactgttctcg

SEQ ID NO: 18968 - DNA, 31 bp, synthetic construct; identical to SEQ ID NO: 17834
  source 1..31: mol_type = other DNA

SEQ ID NO: 18969 - DNA, 28 bp, synthetic construct
  source 1..28: mol_type = other DNA
ggctcaggaaccagactgactgttctcg

SEQ ID NO: 18970 - DNA, 31 bp, synthetic construct; identical to SEQ ID NO: 17898
  source 1..31: mol_type = other DNA

SEQ ID NO: 18971 - DNA, 28 bp, synthetic construct
  source 1..28: mol_type = other DNA
ggtgcgggcacccgactatcggtgctag

SEQ ID NO: 18972 - DNA, 31 bp, synthetic construct; identical to SEQ ID NO: 17816
  source 1..31: mol_type = other DNA

SEQ ID NO: 18973 - DNA, 28 bp, synthetic construct
  source 1..28: mol_type = other DNA
ggctcagggaccaggcttttggtaatag

SEQ ID NO: 18974 - DNA, 31 bp, synthetic construct; identical to SEQ ID NO: 17812
  source 1..31: mol_type = other DNA

SEQ ID NO: 18975 - DNA, 28 bp, synthetic construct
  source 1..28: mol_type = other DNA
ggtcccggcaccaggctcacggttttag

SEQ ID NO: 18976 - DNA, 31 bp, synthetic construct; identical to SEQ ID NO: 17906
  source 1..31: mol_type = other DNA

SEQ ID NO: 18977 - DNA, 28 bp, synthetic construct
  source 1..28: mol_type = other DNA
ggaccagggacacgactcaccgtcctag

SEQ ID NO: 18978 - DNA, 31 bp, synthetic construct; identical to SEQ ID NO: 17864
  source 1..31: mol_type = other DNA

SEQ ID NO: 18979 - DNA, 28 bp, synthetic construct
  source 1..28: mol_type = other DNA
ggctcagggaccaggcttttggtaatag

SEQ ID NO: 18980 - DNA, 31 bp, synthetic construct; identical to SEQ ID NO: 17864
  source 1..31: mol_type = other DNA

SEQ ID NO: 18981 - DNA, 28 bp, synthetic construct
  source 1..28: mol_type = other DNA
gggccaggcactcggctcctcgtgttag

SEQ ID NO: 18982 - DNA, 31 bp, synthetic construct; identical to SEQ ID NO: 17822
  source 1..31: mol_type = other DNA

SEQ ID NO: 18983 - DNA, 28 bp, synthetic construct
  source 1..28: mol_type = other DNA
ggtgcgggcacccgactatcggtgctag

SEQ ID NO: 18984 - DNA, 31 bp, synthetic construct; identical to SEQ ID NO: 17832
  source 1..31: mol_type = other DNA

SEQ ID NO: 18985 - DNA, 28 bp, synthetic construct
  source 1..28: mol_type = other DNA
gcggcaggcacccggctcactgtgacag

SEQ ID NO: 18986 - DNA, 31 bp, synthetic construct; identical to SEQ ID NO: 17812
  source 1..31: mol_type = other DNA

SEQ ID NO: 18987 - DNA, 28 bp, synthetic construct
  source 1..28: mol_type = other DNA
gggccaggcactcggctcctcgtgttag

SEQ ID NO: 18988 - DNA, 31 bp, synthetic construct; identical to SEQ ID NO: 17828
  source 1..31: mol_type = other DNA

SEQ ID NO: 18989 - DNA, 28 bp, synthetic construct
  source 1..28: mol_type = other DNA
gggccaggcactcggctcctcgtgttag

SEQ ID NO: 18990 - DNA, 31 bp, synthetic construct; identical to SEQ ID NO: 18166
  source 1..31: mol_type = other DNA

SEQ ID NO: 18991 - DNA, 28 bp, synthetic construct
  source 1..28: mol_type = other DNA
ggctcagggaccaggcttttggtaatag

SEQ ID NO: 18992 - DNA, 31 bp, synthetic construct; identical to SEQ ID NO: 18182
  source 1..31: mol_type = other DNA

SEQ ID NO: 18993 - DNA, 28 bp, synthetic construct
  source 1..28: mol_type = other DNA
ggctcaggaaccagactgactgttctcg

SEQ ID NO: 18994 - DNA, 31 bp, synthetic construct; identical to SEQ ID NO: 17814
  source 1..31: mol_type = other DNA

SEQ ID NO: 18995 - DNA, 28 bp, synthetic construct
  source 1..28: mol_type = other DNA
ggctcaggaaccagactgactgttctcg

SEQ ID NO: 18996 - DNA, 31 bp, synthetic construct; identical to SEQ ID NO: 17850
  source 1..31: mol_type = other DNA

SEQ ID NO: 18997 - DNA, 28 bp, synthetic construct
  source 1..28: mol_type = other DNA
ggtcatggaaccaagctgtctgtcctgg

SEQ ID NO: 18998 - DNA, 31 bp, synthetic construct; identical to SEQ ID NO: 17828
  source 1..31: mol_type = other DNA

SEQ ID NO: 18999 - DNA, 28 bp, synthetic construct
  source 1..28: mol_type = other DNA
ggtcccggcaccaggctcacggttttag

SEQ ID NO: 19000 - DNA, 31 bp, synthetic construct; identical to SEQ ID NO: 17844
  source 1..31: mol_type = other DNA

SEQ ID NO: 19001 - DNA, 28 bp, synthetic construct
  source 1..28: mol_type = other DNA
gcggcaggcacccggctcactgtgacag

SEQ ID NO: 19002 - DNA, 31 bp, synthetic construct; identical to SEQ ID NO: 17910
  source 1..31: mol_type = other DNA

SEQ ID NO: 19003 - DNA, 28 bp, synthetic construct
  source 1..28: mol_type = other DNA
ggctcaggaaccagactgactgttctcg

SEQ ID NO: 19004 - DNA, 31 bp, synthetic construct; identical to SEQ ID NO: 17996
  source 1..31: mol_type = other DNA

SEQ ID NO: 19005 - DNA, 28 bp, synthetic construct
  source 1..28: mol_type = other DNA
ggctcaggaaccagactgactgttctcg

SEQ ID NO: 19006 - DNA, 31 bp, synthetic construct; identical to SEQ ID NO: 17828
  source 1..31: mol_type = other DNA

SEQ ID NO: 19007 - DNA, 28 bp, synthetic construct
  source 1..28: mol_type = other DNA
ggtgcgggcacccgactatcggtgctag

SEQ ID NO: 19008 - DNA, 31 bp, synthetic construct; identical to SEQ ID NO: 17884
  source 1..31: mol_type = other DNA

SEQ ID NO: 19009 - DNA, 28 bp, synthetic construct
  source 1..28: mol_type = other DNA
ggagaggggactcgactctctgttctag

SEQ ID NO: 19010 - DNA, 31 bp, synthetic construct; identical to SEQ ID NO: 17868
  source 1..31: mol_type = other DNA

SEQ ID NO: 19011 - DNA, 28 bp, synthetic construct
  source 1..28: mol_type = other DNA
ggctcaggaaccagactgactgttctcg

SEQ ID NO: 19012 - DNA, 31 bp, synthetic construct; identical to SEQ ID NO: 17868
  source 1..31: mol_type = other DNA

SEQ ID NO: 19013 - DNA, 28 bp, synthetic construct
  source 1..28: mol_type = other DNA
ggctcagggaccaggcttttggtaatag

SEQ ID NO: 19014 - DNA, 31 bp, synthetic construct; identical to SEQ ID NO: 18126
  source 1..31: mol_type = other DNA

SEQ ID NO: 19015 - DNA, 28 bp, synthetic construct
  source 1..28: mol_type = other DNA
ggtcatggaaccaagctgtctgtcctgg

SEQ ID NO: 19016 - DNA, 31 bp, synthetic construct; identical to SEQ ID NO: 17850
  source 1..31: mol_type = other DNA

SEQ ID NO: 19017 - DNA, 28 bp, synthetic construct
  source 1..28: mol_type = other DNA
ggtaaaggaaccagactcacagttgtag

SEQ ID NO: 19018 - DNA, 31 bp, synthetic construct; identical to SEQ ID NO: 18126
  source 1..31: mol_type = other DNA

SEQ ID NO: 19019 - DNA, 28 bp, synthetic construct
  source 1..28: mol_type = other DNA
ggaccagggacacgactcaccgtcctag

SEQ ID NO: 19020 - DNA, 31 bp, synthetic construct; identical to SEQ ID NO: 17832
  source 1..31: mol_type = other DNA

SEQ ID NO: 19021 - DNA, 28 bp, synthetic construct
  source 1..28: mol_type = other DNA
ggagaaggaagccggctcattgttgtag

SEQ ID NO: 19022 - DNA, 31 bp, synthetic construct; identical to SEQ ID NO: 17826
  source 1..31: mol_type = other DNA

SEQ ID NO: 19023 - DNA, 28 bp, synthetic construct
  source 1..28: mol_type = other DNA
ggtaaaggaaccagactcacagttgtag

SEQ ID NO: 19024 - DNA, 31 bp, synthetic construct; identical to SEQ ID NO: 17840
  source 1..31: mol_type = other DNA

SEQ ID NO: 19025 - DNA, 28 bp, synthetic construct
  source 1..28: mol_type = other DNA
ggctcaggaaccagactgactgttctcg

SEQ ID NO: 19026 - DNA, 31 bp, synthetic construct; identical to SEQ ID NO: 17906
  source 1..31: mol_type = other DNA

SEQ ID NO: 19027 - DNA, 28 bp, synthetic construct
  source 1..28: mol_type = other DNA
ggtcccggcaccaggctcacggttttag

SEQ ID NO: 19028 - DNA, 31 bp, synthetic construct; identical to SEQ ID NO: 17832
  source 1..31: mol_type = other DNA

SEQ ID NO: 19029 - DNA, 28 bp, synthetic construct
  source 1..28: mol_type = other DNA
ggtgcgggcacccgactatcggtgctag

SEQ ID NO: 19030 - DNA, 34 bp, synthetic construct
  source 1..34: mol_type = other DNA
ggatctggcacaaaagtcattccatgtctaccat

SEQ ID NO: 19031 - DNA, 28 bp, synthetic construct
  source 1..28: mol_type = other DNA
gggccaggcactcggctcctcgtgttag

SEQ ID NO: 19032 - DNA, 31 bp, synthetic construct; identical to SEQ ID NO: 17812
  source 1..31: mol_type = other DNA

SEQ ID NO: 19033 - DNA, 28 bp, synthetic construct
  source 1..28: mol_type = other DNA
ggtcccggcaccaggctcacggttttag

SEQ ID NO: 19034 - DNA, 31 bp, synthetic construct; identical to SEQ ID NO: 17832
  source 1..31: mol_type = other DNA

SEQ ID NO: 19035 - DNA, 28 bp, synthetic construct
  source 1..28: mol_type = other DNA
ggaccagggacacgactcaccgtcctag

SEQ ID NO: 19036 - DNA, 31 bp, synthetic construct; identical to SEQ ID NO: 17828
  source 1..31: mol_type = other DNA

SEQ ID NO: 19037 - DNA, 28 bp, synthetic construct
  source 1..28: mol_type = other DNA
ggagaaggaagccggctcattgttgtag

SEQ ID NO: 19038 - DNA, 31 bp, synthetic construct; identical to SEQ ID NO: 17812
  source 1..31: mol_type = other DNA

SEQ ID NO: 19039 - DNA, 28 bp, synthetic construct
  source 1..28: mol_type = other DNA
ggaccagggacacgactcaccgtcctag

SEQ ID NO: 19040 - DNA, 31 bp, synthetic construct; identical to SEQ ID NO: 17822
  source 1..31: mol_type = other DNA

SEQ ID NO: 19041 - DNA, 28 bp, synthetic construct
  source 1..28: mol_type = other DNA
ggtaaaggaaccagactcacagttgtag

SEQ ID NO: 19042 - DNA, 31 bp, synthetic construct; identical to SEQ ID NO: 17812
  source 1..31: mol_type = other DNA

SEQ ID NO: 19043 - DNA, 28 bp, synthetic construct
  source 1..28: mol_type = other DNA
ggtcccggcaccaggctcacggttttag

SEQ ID NO: 19044 - DNA, 31 bp, synthetic construct; identical to SEQ ID NO: 17820
  source 1..31: mol_type = other DNA

SEQ ID NO: 19045 - DNA, 28 bp, synthetic construct
  source 1..28: mol_type = other DNA
ggtgaaggctcaaagctgacagtgctgg

SEQ ID NO: 19046 - DNA, 31 bp, synthetic construct; identical to SEQ ID NO: 17880
  source 1..31: mol_type = other DNA

SEQ ID NO: 19047 - DNA, 28 bp, synthetic construct
  source 1..28: mol_type = other DNA
ggtcccggcaccaggctcacggttttag

SEQ ID NO: 19048 - DNA, 31 bp, synthetic construct; identical to SEQ ID NO: 17996
  source 1..31: mol_type = other DNA

SEQ ID NO: 19049 - DNA, 28 bp, synthetic construct
  source 1..28: mol_type = other DNA
gggccaggcactcggctcctcgtgttag

SEQ ID NO: 19050 - DNA, 31 bp, synthetic construct; identical to SEQ ID NO: 18008
  source 1..31: mol_type = other DNA

SEQ ID NO: 19051 - DNA, 28 bp, synthetic construct
  source 1..28: mol_type = other DNA
ggctcaggaaccagactgactgttctcg

SEQ ID NO: 19052 - DNA, 31 bp, synthetic construct; identical to SEQ ID NO: 17832
  source 1..31: mol_type = other DNA

SEQ ID NO: 19053 - DNA, 28 bp, synthetic construct
  source 1..28: mol_type = other DNA
ggtgaaggctcaaagctgacagtgctgg

SEQ ID NO: 19054 - DNA, 31 bp, synthetic construct; identical to SEQ ID NO: 18008
  source 1..31: mol_type = other DNA

SEQ ID NO: 19055 - DNA, 28 bp, synthetic construct
  source 1..28: mol_type = other DNA
ggtgaaggctcaaagctgacagtgctgg

SEQ ID NO: 19056 - DNA, 31 bp, synthetic construct; identical to SEQ ID NO: 17832
  source 1..31: mol_type = other DNA

SEQ ID NO: 19057 - DNA, 28 bp, synthetic construct
  source 1..28: mol_type = other DNA
ggctcaggaaccagactgactgttctcg

SEQ ID NO: 19058 - DNA, 31 bp, synthetic construct; identical to SEQ ID NO: 17900
  source 1..31: mol_type = other DNA

SEQ ID NO: 19059 - DNA, 28 bp, synthetic construct
  source 1..28: mol_type = other DNA
ggctcaggaaccagactgactgttctcg

SEQ ID NO: 19060 - DNA, 31 bp, synthetic construct; identical to SEQ ID NO: 17932
  source 1..31: mol_type = other DNA

SEQ ID NO: 19061 - DNA, 28 bp, synthetic construct
  source 1..28: mol_type = other DNA
ggtaaaggaaccagactcacagttgtag

SEQ ID NO: 19062 - DNA, 31 bp, synthetic construct; identical to SEQ ID NO: 17964
  source 1..31: mol_type = other DNA

SEQ ID NO: 19063 - DNA, 28 bp, synthetic construct
  source 1..28: mol_type = other DNA
ggaccagggacacgactcaccgtcctag

SEQ ID NO: 19064 - DNA, 31 bp, synthetic construct; identical to SEQ ID NO: 17826
  source 1..31: mol_type = other DNA

SEQ ID NO: 19065 - DNA, 28 bp, synthetic construct
  source 1..28: mol_type = other DNA
ggaccagggacacgactcaccgtcctag

SEQ ID NO: 19066 - DNA, 31 bp, synthetic construct; identical to SEQ ID NO: 17852
  source 1..31: mol_type = other DNA

SEQ ID NO: 19067 - DNA, 28 bp, synthetic construct
  source 1..28: mol_type = other DNA
ggtcatggaaccaagctgtctgtcctgg

SEQ ID NO: 19068 - DNA, 31 bp, synthetic construct; identical to SEQ ID NO: 17882
  source 1..31: mol_type = other DNA

SEQ ID NO: 19069 - DNA, 28 bp, synthetic construct
  source 1..28: mol_type = other DNA
gggccaggcactcggctcctcgtgttag

SEQ ID NO: 19070 - DNA, 31 bp, synthetic construct; identical to SEQ ID NO: 17814
  source 1..31: mol_type = other DNA

SEQ ID NO: 19071 - DNA, 28 bp, synthetic construct
  source 1..28: mol_type = other DNA
ggctcaggaaccagactgactgttctcg

SEQ ID NO: 19072 - DNA, 31 bp, synthetic construct; identical to SEQ ID NO: 17816
  source 1..31: mol_type = other DNA

SEQ ID NO: 19073 - DNA, 28 bp, synthetic construct
  source 1..28: mol_type = other DNA
ggtcccggcaccaggctcacggttttag

SEQ ID NO: 19074 - DNA, 31 bp, synthetic construct; identical to SEQ ID NO: 17820
  source 1..31: mol_type = other DNA

SEQ ID NO: 19075 - DNA, 28 bp, synthetic construct
  source 1..28: mol_type = other DNA
ggaccagggacacgactcaccgtcctag

SEQ ID NO: 19076 - DNA, 31 bp, synthetic construct; identical to SEQ ID NO: 17916
  source 1..31: mol_type = other DNA

SEQ ID NO: 19077 - DNA, 28 bp, synthetic construct
  source 1..28: mol_type = other DNA
ggctcaggaaccagactgactgttctcg

SEQ ID NO: 19078 - DNA, 31 bp, synthetic construct; identical to SEQ ID NO: 18126
  source 1..31: mol_type = other DNA

SEQ ID NO: 19079 - DNA, 28 bp, synthetic construct
  source 1..28: mol_type = other DNA
ggaccagggacacgactcaccgtcctag

SEQ ID NO: 19080 - DNA, 31 bp, synthetic construct; identical to SEQ ID NO: 17884
  source 1..31: mol_type = other DNA

SEQ ID NO: 19081 - DNA, 28 bp, synthetic construct
  source 1..28: mol_type = other DNA
ggctcaggaaccagactgactgttctcg

SEQ ID NO: 19082 - DNA, 31 bp, synthetic construct; identical to SEQ ID NO: 17884
  source 1..31: mol_type = other DNA

SEQ ID NO: 19083 - DNA, 28 bp, synthetic construct
  source 1..28: mol_type = other DNA
ggaccagggacacgactcaccgtcctag

SEQ ID NO: 19084 - DNA, 31 bp, synthetic construct; identical to SEQ ID NO: 18006
  source 1..31: mol_type = other DNA

SEQ ID NO: 19085 - DNA, 28 bp, synthetic construct
  source 1..28: mol_type = other DNA
ggtgaaggctcaaagctgacagtgctgg

SEQ ID NO: 19086 - DNA, 31 bp, synthetic construct; identical to SEQ ID NO: 18126
  source 1..31: mol_type = other DNA

SEQ ID NO: 19087 - DNA, 28 bp, synthetic construct
  source 1..28: mol_type = other DNA
ggctcagggaccaggcttttggtaatag

SEQ ID NO: 19088 - DNA, 31 bp, synthetic construct; identical to SEQ ID NO: 17852
  source 1..31: mol_type = other DNA

SEQ ID NO: 19089 - DNA, 28 bp, synthetic construct
  source 1..28: mol_type = other DNA
gcggcaggcacccggctcactgtgacag

SEQ ID NO: 19090 - DNA, 31 bp, synthetic construct; identical to SEQ ID NO: 17884
  source 1..31: mol_type = other DNA

SEQ ID NO: 19091 - DNA, 28 bp, synthetic construct
  source 1..28: mol_type = other DNA
ggtcccggcaccaggctcacggttttag

SEQ ID NO: 19092 - DNA, 31 bp, synthetic construct; identical to SEQ ID NO: 17814
  source 1..31: mol_type = other DNA

SEQ ID NO: 19093 - DNA, 28 bp, synthetic construct
  source 1..28: mol_type = other DNA
ggtcccggcaccaggctcacggttttag

SEQ ID NO: 19094 - DNA, 31 bp, synthetic construct; identical to SEQ ID NO: 17826
  source 1..31: mol_type = other DNA

SEQ ID NO: 19095 - DNA, 28 bp, synthetic construct
  source 1..28: mol_type = other DNA
ggtcccggcaccaggctcacggttttag

SEQ ID NO: 19096 - DNA, 31 bp, synthetic construct; identical to SEQ ID NO: 17818
  source 1..31: mol_type = other DNA

SEQ ID NO: 19097 - DNA, 28 bp, synthetic construct
  source 1..28: mol_type = other DNA
ggtcccggcaccaggctcacggttttag

SEQ ID NO: 19098 - DNA, 31 bp, synthetic construct; identical to SEQ ID NO: 17832
  source 1..31: mol_type = other DNA

SEQ ID NO: 19099 - DNA, 28 bp, synthetic construct
  source 1..28: mol_type = other DNA
gggccaggcactcggctcctcgtgttag

SEQ ID NO: 19100 - DNA, 31 bp, synthetic construct; identical to SEQ ID NO: 17844
  source 1..31: mol_type = other DNA

SEQ ID NO: 19101 - DNA, 28 bp, synthetic construct
  source 1..28: mol_type = other DNA
ggtaaaggaaccagactcacagttgtag

SEQ ID NO: 19102 - DNA, 31 bp, synthetic construct; identical to SEQ ID NO: 18006
  source 1..31: mol_type = other DNA

SEQ ID NO: 19103 - DNA, 28 bp, synthetic construct
  source 1..28: mol_type = other DNA
gggccaggcactcggctcctcgtgttag

SEQ ID NO: 19104 - DNA, 31 bp, synthetic construct; identical to SEQ ID NO: 17964
  source 1..31: mol_type = other DNA

SEQ ID NO: 19105 - DNA, 28 bp, synthetic construct
  source 1..28: mol_type = other DNA
ggaccagggacacgactcaccgtcctag

SEQ ID NO: 19106 - DNA, 31 bp, synthetic construct; identical to SEQ ID NO: 17850
  source 1..31: mol_type = other DNA

SEQ ID NO: 19107 - DNA, 28 bp, synthetic construct
  source 1..28: mol_type = other DNA
ggtaaaggaaccagactcacagttgtag

SEQ ID NO: 19108 - DNA, 31 bp, synthetic construct; identical to SEQ ID NO: 17828
  source 1..31: mol_type = other DNA

SEQ ID NO: 19109 - DNA, 28 bp, synthetic construct
  source 1..28: mol_type = other DNA
ggagaggggactcgactctctgttctag

SEQ ID NO: 19110 - DNA, 31 bp, synthetic construct; identical to SEQ ID NO: 17826
  source 1..31: mol_type = other DNA

SEQ ID NO: 19111 - DNA, 28 bp, synthetic construct
  source 1..28: mol_type = other DNA
ggtcccggcaccaggctcacggttttag

SEQ ID NO: 19112 - DNA, 31 bp, synthetic construct; identical to SEQ ID NO: 18000
  source 1..31: mol_type = other DNA

SEQ ID NO: 19113 - DNA, 28 bp, synthetic construct
  source 1..28: mol_type = other DNA
ggtcccggcaccaggctcacggttttag

SEQ ID NO: 19114 - DNA, 31 bp, synthetic construct; identical to SEQ ID NO: 18182
  source 1..31: mol_type = other DNA

SEQ ID NO: 19115 - DNA, 28 bp, synthetic construct
  source 1..28: mol_type = other DNA
ggagaaggaagccggctcattgttgtag

SEQ ID NO: 19116 - DNA, 31 bp, synthetic construct; identical to SEQ ID NO: 18944
  source 1..31: mol_type = other DNA

SEQ ID NO: 19117 - DNA, 28 bp, synthetic construct
  source 1..28: mol_type = other DNA
ggtcccggcaccaggctcacggttttag

SEQ ID NO: 19118 - DNA, 31 bp, synthetic construct; identical to SEQ ID NO: 17814
  source 1..31: mol_type = other DNA

SEQ ID NO: 19119 - DNA, 28 bp, synthetic construct
  source 1..28: mol_type = other DNA
ggtcccggcaccaggctcacggttttag

SEQ ID NO: 19120 - DNA, 31 bp, synthetic construct; identical to SEQ ID NO: 17900
  source 1..31: mol_type = other DNA

SEQ ID NO: 19121 - DNA, 28 bp, synthetic construct
  source 1..28: mol_type = other DNA
ggtgaaggctcaaagctgacagtgctgg

SEQ ID NO: 19122 - DNA, 31 bp, synthetic construct; identical to SEQ ID NO: 17812
  source 1..31: mol_type = other DNA

SEQ ID NO: 19123 - DNA, 28 bp, synthetic construct
  source 1..28: mol_type = other DNA
ggtcccggcaccaggctcacggttttag

SEQ ID NO: 19124 - DNA, 31 bp, synthetic construct; identical to SEQ ID NO: 17996
  source 1..31: mol_type = other DNA

SEQ ID NO: 19125 - DNA, 28 bp, synthetic construct
  source 1..28: mol_type = other DNA
ggagaaggaagccggctcattgttgtag

SEQ ID NO: 19126 - DNA, 31 bp, synthetic construct; identical to SEQ ID NO: 17840
  source 1..31: mol_type = other DNA

SEQ ID NO: 19127 - DNA, 28 bp, synthetic construct
  source 1..28: mol_type = other DNA
ggtcatggaaccaagctgtctgtcctgg

SEQ ID NO: 19128 - DNA, 31 bp, synthetic construct; identical to SEQ ID NO: 17856
  source 1..31: mol_type = other DNA

SEQ ID NO: 19129 - DNA, 28 bp, synthetic construct
  source 1..28: mol_type = other DNA
gggccaggcactcggctcctcgtgttag

SEQ ID NO: 19130 - DNA, 31 bp, synthetic construct; identical to SEQ ID NO: 17878
  source 1..31: mol_type = other DNA

SEQ ID NO: 19131 - DNA, 28 bp, synthetic construct
  source 1..28: mol_type = other DNA
ggctcaggaaccagactgactgttctcg

SEQ ID NO: 19132 - DNA, 31 bp, synthetic construct; identical to SEQ ID NO: 17840
  source 1..31: mol_type = other DNA

SEQ ID NO: 19133 - DNA, 28 bp, synthetic construct
  source 1..28: mol_type = other DNA
gggccaggcactcggctcctcgtgttag

SEQ ID NO: 19134 - DNA, 31 bp, synthetic construct; identical to SEQ ID NO: 17820
  source 1..31: mol_type = other DNA

SEQ ID NO: 19135 - DNA, 28 bp, synthetic construct
  source 1..28: mol_type = other DNA
ggtcccggcaccaggctcacggttttag

SEQ ID NO: 19136 - DNA, 31 bp, synthetic construct; identical to SEQ ID NO: 18000
  source 1..31: mol_type = other DNA

SEQ ID NO: 19137 - DNA, 28 bp, synthetic construct
  source 1..28: mol_type = other DNA
ggtaaaggaaccagactcacagttgtag

SEQ ID NO: 19138 - DNA, 31 bp, synthetic construct; identical to SEQ ID NO: 18182
  source 1..31: mol_type = other DNA

SEQ ID NO: 19139 - DNA, 28 bp, synthetic construct
  source 1..28: mol_type = other DNA
gggccaggcactcggctcctcgtgttag

SEQ ID NO: 19140 - DNA, 31 bp, synthetic construct; identical to SEQ ID NO: 17852
  source 1..31: mol_type = other DNA

SEQ ID NO: 19141 - DNA, 28 bp, synthetic construct
  source 1..28: mol_type = other DNA
gggccaggcactcggctcctcgtgttag

SEQ ID NO: 19142 - DNA, 31 bp, synthetic construct; identical to SEQ ID NO: 17814
  source 1..31: mol_type = other DNA

SEQ ID NO: 19143 - DNA, 28 bp, synthetic construct
  source 1..28: mol_type = other DNA
ggaccagggacacgactcaccgtcctag

SEQ ID NO: 19144 - DNA, 31 bp, synthetic construct; identical to SEQ ID NO: 18000
  source 1..31: mol_type = other DNA

SEQ ID NO: 19145 - DNA, 28 bp, synthetic construct
  source 1..28: mol_type = other DNA
ggtcccggcaccaggctcacggttttag

SEQ ID NO: 19146 - DNA, 31 bp, synthetic construct; identical to SEQ ID NO: 17812
  source 1..31: mol_type = other DNA

SEQ ID NO: 19147 - DNA, 28 bp, synthetic construct
  source 1..28: mol_type = other DNA
ggtaaaggaaccagactcacagttgtag

SEQ ID NO: 19148 - DNA, 31 bp, synthetic construct; identical to SEQ ID NO: 17864
  source 1..31: mol_type = other DNA

SEQ ID NO: 19149 - DNA, 28 bp, synthetic construct
  source 1..28: mol_type = other DNA
gggccaggcactcggctcctcgtgttag

SEQ ID NO: 19150 - DNA, 31 bp, synthetic construct; identical to SEQ ID NO: 17832
  source 1..31: mol_type = other DNA

SEQ ID NO: 19151 - DNA, 28 bp, synthetic construct
  source 1..28: mol_type = other DNA
ggtcccggcaccaggctcacggttttag

SEQ ID NO: 19152 - DNA, 31 bp, synthetic construct; identical to SEQ ID NO: 17906
  source 1..31: mol_type = other DNA

SEQ ID NO: 19153 - DNA, 28 bp, synthetic construct
  source 1..28: mol_type = other DNA
ggctcagggaccaggcttttggtaatag

SEQ ID NO: 19154 - DNA, 31 bp, synthetic construct; identical to SEQ ID NO: 17852
  source 1..31: mol_type = other DNA

SEQ ID NO: 19155 - DNA, 28 bp, synthetic construct
  source 1..28: mol_type = other DNA
gggccaggcactcggctcctcgtgttag

SEQ ID NO: 19156 - DNA, 31 bp, synthetic construct; identical to SEQ ID NO: 17884
  source 1..31: mol_type = other DNA

SEQ ID NO: 19157 - DNA, 28 bp, synthetic construct
  source 1..28: mol_type = other DNA
gggccaggcactcggctcctcgtgttag

SEQ ID NO: 19158 - DNA, 31 bp, synthetic construct; identical to SEQ ID NO: 17940
  source 1..31: mol_type = other DNA

SEQ ID NO: 19159 - DNA, 28 bp, synthetic construct
  source 1..28: mol_type = other DNA
gggccaggcactcggctcctcgtgttag

SEQ ID NO: 19160 - DNA, 31 bp, synthetic construct; identical to SEQ ID NO: 17828
  source 1..31: mol_type = other DNA

SEQ ID NO: 19161 - DNA, 28 bp, synthetic construct
  source 1..28: mol_type = other DNA
ggctcaggaaccagactgactgttctcg

SEQ ID NO: 19162 - DNA, 31 bp, synthetic construct; identical to SEQ ID NO: 18128
  source 1..31: mol_type = other DNA

SEQ ID NO: 19163 - DNA, 28 bp, synthetic construct
  source 1..28: mol_type = other DNA
ggaccagggacacgactcaccgtcctag

SEQ ID NO: 19164 - DNA, 31 bp, synthetic construct; identical to SEQ ID NO: 17852
  source 1..31: mol_type = other DNA

SEQ ID NO: 19165 - DNA, 28 bp, synthetic construct
  source 1..28: mol_type = other DNA
ggtcccggcaccaggctcacggttttag

SEQ ID NO: 19166 - DNA, 31 bp, synthetic construct; identical to SEQ ID NO: 17900
  source 1..31: mol_type = other DNA

SEQ ID NO: 19167 - DNA, 28 bp, synthetic construct
  source 1..28: mol_type = other DNA
ggtcatggaaccaagctgtctgtcctgg

SEQ ID NO: 19168 - DNA, 31 bp, synthetic construct; identical to SEQ ID NO: 17996
  source 1..31: mol_type = other DNA

SEQ ID NO: 19169 - DNA, 28 bp, synthetic construct
  source 1..28: mol_type = other DNA
gcggcaggcacccggctcactgtgacag

SEQ ID NO: 19170 - DNA, 31 bp, synthetic construct; identical to SEQ ID NO: 17850
  source 1..31: mol_type = other DNA

SEQ ID NO: 19171 - DNA, 28 bp, synthetic construct
  source 1..28: mol_type = other DNA
gcggcaggcacccggctcactgtgacag

SEQ ID NO: 19172 - DNA, 31 bp, synthetic construct; identical to SEQ ID NO: 17906
  source 1..31: mol_type = other DNA

SEQ ID NO: 19173 - DNA, 28 bp, synthetic construct
  source 1..28: mol_type = other DNA
ggtcatggaaccaagctgtctgtcctgg

SEQ ID NO: 19174 - DNA, 31 bp, synthetic construct; identical to SEQ ID NO: 17822
  source 1..31: mol_type = other DNA

SEQ ID NO: 19175 - DNA, 28 bp, synthetic construct
  source 1..28: mol_type = other DNA
ggctcaggaaccagactgactgttctcg

SEQ ID NO: 19176 - DNA, 31 bp, synthetic construct; identical to SEQ ID NO: 17828
  source 1..31: mol_type = other DNA

SEQ ID NO: 19177 - DNA, 28 bp, synthetic construct
  source 1..28: mol_type = other DNA
ggtcccggcaccaggctcacggttttag

SEQ ID NO: 19178 - DNA, 31 bp, synthetic construct; identical to SEQ ID NO: 17852
  source 1..31: mol_type = other DNA

SEQ ID NO: 19179 - DNA, 28 bp, synthetic construct
  source 1..28: mol_type = other DNA
ggtcatggaaccaagctgtctgtcctgg

SEQ ID NO: 19180 - DNA, 31 bp, synthetic construct; identical to SEQ ID NO: 18000
  source 1..31: mol_type = other DNA

SEQ ID NO: 19181 - DNA, 28 bp, synthetic construct
  source 1..28: mol_type = other DNA
ggctcagggaccaggcttttggtaatag

SEQ ID NO: 19182 - DNA, 31 bp, synthetic construct; identical to SEQ ID NO: 17884
  source 1..31: mol_type = other DNA

SEQ ID NO: 19183 - DNA, 28 bp, synthetic construct
  source 1..28: mol_type = other DNA
ggtaaaggaaccagactcacagttgtag

SEQ ID NO: 19184 - DNA, 31 bp, synthetic construct; identical to SEQ ID NO: 17996
  source 1..31: mol_type = other DNA

SEQ ID NO: 19185 - DNA, 28 bp, synthetic construct
  source 1..28: mol_type = other DNA
ggctcaggaaccagactgactgttctcg

SEQ ID NO: 19186 - DNA, 31 bp, synthetic construct; identical to SEQ ID NO: 17840
  source 1..31: mol_type = other DNA

SEQ ID NO: 19187 - DNA, 28 bp, synthetic construct
  source 1..28: mol_type = other DNA
ggtcccggcaccaggctcacggttttag

SEQ ID NO: 19188 - DNA, 31 bp, synthetic construct; identical to SEQ ID NO: 18126
  source 1..31: mol_type = other DNA

SEQ ID NO: 19189 - DNA, 28 bp, synthetic construct
  source 1..28: mol_type = other DNA
ggtcatggaaccaagctgtctgtcctgg

SEQ ID NO: 19190 - DNA, 31 bp, synthetic construct; identical to SEQ ID NO: 17840
  source 1..31: mol_type = other DNA

SEQ ID NO: 19191 - DNA, 28 bp, synthetic construct
  source 1..28: mol_type = other DNA
gggccaggcactcggctcctcgtgttag

SEQ ID NO: 19192 - DNA, 31 bp, synthetic construct; identical to SEQ ID NO: 17844
  source 1..31: mol_type = other DNA

SEQ ID NO: 19193 - DNA, 28 bp, synthetic construct
  source 1..28: mol_type = other DNA
ggctcagggaccaggcttttggtaatag

SEQ ID NO: 19194 - DNA, 31 bp, synthetic construct; identical to SEQ ID NO: 17828
  source 1..31: mol_type = other DNA

SEQ ID NO: 19195 - DNA, 28 bp, synthetic construct
  source 1..28: mol_type = other DNA
gcggcaggcacccggctcactgtgacag

SEQ ID NO: 19196 - DNA, 31 bp, synthetic construct; identical to SEQ ID NO: 17940
  source 1..31: mol_type = other DNA

SEQ ID NO: 19197 - DNA, 28 bp, synthetic construct
  source 1..28: mol_type = other DNA
ggtcatggaaccaagctgtctgtcctgg

SEQ ID NO: 19198 - DNA, 31 bp, synthetic construct; identical to SEQ ID NO: 17828
  source 1..31: mol_type = other DNA

SEQ ID NO: 19199 - DNA, 28 bp, synthetic construct
  source 1..28: mol_type = other DNA
ggtgaaggctcaaagctgacagtgctgg

SEQ ID NO: 19200 - DNA, 31 bp, synthetic construct; identical to SEQ ID NO: 17932
  source 1..31: mol_type = other DNA

SEQ ID NO: 19201 - DNA, 28 bp, synthetic construct
  source 1..28: mol_type = other DNA
ggtcatggaaccaagctgtctgtcctgg

SEQ ID NO: 19202 - DNA, 31 bp, synthetic construct; identical to SEQ ID NO: 17884
  source 1..31: mol_type = other DNA

SEQ ID NO: 19203 - DNA, 28 bp, synthetic construct
  source 1..28: mol_type = other DNA
ggtcccggcaccaggctcacggttttag

SEQ ID NO: 19204 - DNA, 31 bp, synthetic construct; identical to SEQ ID NO: 17850
  source 1..31: mol_type = other DNA

SEQ ID NO: 19205 - DNA, 28 bp, synthetic construct
  source 1..28: mol_type = other DNA
ggctcaggaaccagactgactgttctcg

SEQ ID NO: 19206 - DNA, 31 bp, synthetic construct; identical to SEQ ID NO: 17878
  source 1..31: mol_type = other DNA

SEQ ID NO: 19207 - DNA, 28 bp, synthetic construct
  source 1..28: mol_type = other DNA
ggctcagggaccaggcttttggtaatag

SEQ ID NO: 19208 - DNA, 31 bp, synthetic construct; identical to SEQ ID NO: 17884
  source 1..31: mol_type = other DNA

SEQ ID NO: 19209 - DNA, 28 bp, synthetic construct
  source 1..28: mol_type = other DNA
ggtcccggcaccaggctcacggttttag

SEQ ID NO: 19210 - DNA, 31 bp, synthetic construct; identical to SEQ ID NO: 17816
  source 1..31: mol_type = other DNA

SEQ ID NO: 19211 - DNA, 28 bp, synthetic construct
  source 1..28: mol_type = other DNA
ggtgaaggctcaaagctgacagtgctgg

SEQ ID NO: 19212 - DNA, 31 bp, synthetic construct; identical to SEQ ID NO: 17862
  source 1..31: mol_type = other DNA

SEQ ID NO: 19213 - DNA, 28 bp, synthetic construct
  source 1..28: mol_type = other DNA
ggagaaggaagccggctcattgttgtag

SEQ ID NO: 19214 - DNA, 31 bp, synthetic construct; identical to SEQ ID NO: 18128
  source 1..31: mol_type = other DNA

SEQ ID NO: 19215 - DNA, 28 bp, synthetic construct
  source 1..28: mol_type = other DNA
ggtaaaggaaccagactcacagttgtag

SEQ ID NO: 19216 - DNA, 31 bp, synthetic construct; identical to SEQ ID NO: 17884
  source 1..31: mol_type = other DNA

SEQ ID NO: 19217 - DNA, 28 bp, synthetic construct
  source 1..28: mol_type = other DNA
ggaccagggacacgactcaccgtcctag

SEQ ID NO: 19218 - DNA, 31 bp, synthetic construct; identical to SEQ ID NO: 17844
  source 1..31: mol_type = other DNA

SEQ ID NO: 19219 - DNA, 28 bp, synthetic construct
  source 1..28: mol_type = other DNA
ggaccagggacacgactcaccgtcctag

SEQ ID NO: 19220 - DNA, 31 bp, synthetic construct; identical to SEQ ID NO: 17814
  source 1..31: mol_type = other DNA

SEQ ID NO: 19221 - DNA, 28 bp, synthetic construct
  source 1..28: mol_type = other DNA
gcggcaggcacccggctcactgtgacag

SEQ ID NO: 19222 - DNA, 31 bp, synthetic construct; identical to SEQ ID NO: 17844
  source 1..31: mol_type = other DNA

SEQ ID NO: 19223 - DNA, 28 bp, synthetic construct
  source 1..28: mol_type = other DNA
ggtcatggaaccaagctgtctgtcctgg

SEQ ID NO: 19224 - DNA, 31 bp, synthetic construct; identical to SEQ ID NO: 18776
  source 1..31: mol_type = other DNA

SEQ ID NO: 19225 - DNA, 28 bp, synthetic construct
  source 1..28: mol_type = other DNA
ggaccagggacacgactcaccgtcctag

SEQ ID NO: 19226 - DNA, 31 bp, synthetic construct; identical to SEQ ID NO: 17832
  source 1..31: mol_type = other DNA

SEQ ID NO: 19227 - DNA, 28 bp, synthetic construct
  source 1..28: mol_type = other DNA
ggtgcgggcacccgactatcggtgctag

SEQ ID NO: 19228 - DNA, 31 bp, synthetic construct; identical to SEQ ID NO: 17844
  source 1..31: mol_type = other DNA

SEQ ID NO: 19229 - DNA, 28 bp, synthetic construct
  source 1..28: mol_type = other DNA
ggtaaaggaaccagactcacagttgtag

SEQ ID NO: 19230 - DNA, 31 bp, synthetic construct; identical to SEQ ID NO: 18008
  source 1..31: mol_type = other DNA

SEQ ID NO: 19231 - DNA, 28 bp, synthetic construct
  source 1..28: mol_type = other DNA
ggtaaaggaaccagactcacagttgtag

SEQ ID NO: 19232 - DNA, 31 bp, synthetic construct; identical to SEQ ID NO: 17828
  source 1..31: mol_type = other DNA

SEQ ID NO: 19233 - DNA, 28 bp, synthetic construct
  source 1..28: mol_type = other DNA
ggtaaaggaaccagactcacagttgtag

SEQ ID NO: 19234 - DNA, 31 bp, synthetic construct; identical to SEQ ID NO: 18000
  source 1..31: mol_type = other DNA

SEQ ID NO: 19235 - DNA, 28 bp, synthetic construct
  source 1..28: mol_type = other DNA
gcggcaggcacccggctcactgtgacag

SEQ ID NO: 19236 - DNA, 31 bp, synthetic construct; identical to SEQ ID NO: 17884
  source 1..31: mol_type = other DNA

SEQ ID NO: 19237 - DNA, 28 bp, synthetic construct
  source 1..28: mol_type = other DNA
ggctcagggaccaggcttttggtaatag

SEQ ID NO: 19238 - DNA, 31 bp, synthetic construct; identical to SEQ ID NO: 17826
  source 1..31: mol_type = other DNA

SEQ ID NO: 19239 - DNA, 28 bp, synthetic construct
  source 1..28: mol_type = other DNA
ggtaaaggaaccagactcacagttgtag

SEQ ID NO: 19240 - DNA, 31 bp, synthetic construct; identical to SEQ ID NO: 18000
  source 1..31: mol_type = other DNA

SEQ ID NO: 19241 - DNA, 28 bp, synthetic construct
  source 1..28: mol_type = other DNA
ggagaaggaagccggctcattgttgtag

SEQ ID NO: 19242 - DNA, 31 bp, synthetic construct; identical to SEQ ID NO: 18092
  source 1..31: mol_type = other DNA

SEQ ID NO: 19243 - DNA, 28 bp, synthetic construct
  source 1..28: mol_type = other DNA
ggaccagggacacgactcaccgtcctag

SEQ ID NO: 19244 - DNA, 31 bp, synthetic construct; identical to SEQ ID NO: 17964
  source 1..31: mol_type = other DNA

SEQ ID NO: 19245 - DNA, 28 bp, synthetic construct
  source 1..28: mol_type = other DNA
ggtcccggcaccaggctcacggttttag

SEQ ID NO: 19246 - DNA, 31 bp, synthetic construct; identical to SEQ ID NO: 17844
  source 1..31: mol_type = other DNA

SEQ ID NO: 19247 - DNA, 28 bp, synthetic construct
  source 1..28: mol_type = other DNA
ggtgcgggcacccgactatcggtgctag

SEQ ID NO: 19248 - DNA, 31 bp, synthetic construct; identical to SEQ ID NO: 17850
  source 1..31: mol_type = other DNA

SEQ ID NO: 19249 - DNA, 28 bp, synthetic construct
  source 1..28: mol_type = other DNA
gggccaggcactcggctcctcgtgttag

SEQ ID NO: 19250 - DNA, 31 bp, synthetic construct; identical to SEQ ID NO: 17834
  source 1..31: mol_type = other DNA

SEQ ID NO: 19251 - DNA, 28 bp, synthetic construct
  source 1..28: mol_type = other DNA
ggtcatggaaccaagctgtctgtcctgg

SEQ ID NO: 19252 - DNA, 31 bp, synthetic construct; identical to SEQ ID NO: 17996
  source 1..31: mol_type = other DNA

SEQ ID NO: 19253 - DNA, 28 bp, synthetic construct
  source 1..28: mol_type = other DNA
ggtaaaggaaccagactcacagttgtag

SEQ ID NO: 19254 - DNA, 31 bp, synthetic construct; identical to SEQ ID NO: 17826
  source 1..31: mol_type = other DNA

SEQ ID NO: 19255 - DNA, 28 bp, synthetic construct
  source 1..28: mol_type = other DNA
ggtcccggcaccaggctcacggttttag

SEQ ID NO: 19256 - DNA, 31 bp, synthetic construct; identical to SEQ ID NO: 17814
  source 1..31: mol_type = other DNA

SEQ ID NO: 19257 - DNA, 28 bp, synthetic construct
  source 1..28: mol_type = other DNA
ggtgaaggctcaaagctgacagtgctgg

SEQ ID NO: 19258 - DNA, 31 bp, synthetic construct; identical to SEQ ID NO: 17812
  source 1..31: mol_type = other DNA

SEQ ID NO: 19259 - DNA, 28 bp, synthetic construct
  source 1..28: mol_type = other DNA
ggaccagggacacgactcaccgtcctag

SEQ ID NO: 19260 - DNA, 31 bp, synthetic construct; identical to SEQ ID NO: 17810
  source 1..31: mol_type = other DNA

SEQ ID NO: 19261 - DNA, 28 bp, synthetic construct
  source 1..28: mol_type = other DNA
ggctcaggaaccagactgactgttctcg

SEQ ID NO: 19262 - DNA, 31 bp, synthetic construct; identical to SEQ ID NO: 18776
  source 1..31: mol_type = other DNA

SEQ ID NO: 19263 - DNA, 28 bp, synthetic construct
  source 1..28: mol_type = other DNA
ggctcaggaaccagactgactgttctcg

SEQ ID NO: 19264 - DNA, 31 bp, synthetic construct; identical to SEQ ID NO: 17868
  source 1..31: mol_type = other DNA

SEQ ID NO: 19265 - DNA, 28 bp, synthetic construct
  source 1..28: mol_type = other DNA
ggtaaaggaaccagactcacagttgtag

SEQ ID NO: 19266 - DNA, 31 bp, synthetic construct; identical to SEQ ID NO: 17838
  source 1..31: mol_type = other DNA

SEQ ID NO: 19267 - DNA, 28 bp, synthetic construct
  source 1..28: mol_type = other DNA
gcggcaggcacccggctcactgtgacag

SEQ ID NO: 19268 - DNA, 31 bp, synthetic construct; identical to SEQ ID NO: 18126
  source 1..31: mol_type = other DNA

SEQ ID NO: 19269 - DNA, 28 bp, synthetic construct
  source 1..28: mol_type = other DNA
gcggcaggcacccggctcactgtgacag

SEQ ID NO: 19270 - DNA, 31 bp, synthetic construct; identical to SEQ ID NO: 17850
  source 1..31: mol_type = other DNA

SEQ ID NO: 19271 - DNA, 28 bp, synthetic construct
  source 1..28: mol_type = other DNA
ggctcaggaaccagactgactgttctcg

SEQ ID NO: 19272 - DNA, 31 bp, synthetic construct; identical to SEQ ID NO: 18166
  source 1..31: mol_type = other DNA

SEQ ID NO: 19273 - DNA, 28 bp, synthetic construct
  source 1..28: mol_type = other DNA
gcggcaggcacccggctcactgtgacag

SEQ ID NO: 19274 - DNA, 31 bp, synthetic construct; identical to SEQ ID NO: 17940
  source 1..31: mol_type = other DNA

SEQ ID NO: 19275 - DNA, 28 bp, synthetic construct
  source 1..28: mol_type = other DNA
gcggcaggcacccggctcactgtgacag

SEQ ID NO: 19276 - DNA, 31 bp, synthetic construct; identical to SEQ ID NO: 18064
  source 1..31: mol_type = other DNA

SEQ ID NO: 19277 - DNA, 28 bp, synthetic construct
  source 1..28: mol_type = other DNA
ggtaaaggaaccagactcacagttgtag

SEQ ID NO: 19278 - DNA, 31 bp, synthetic construct; identical to SEQ ID NO: 17838
  source 1..31: mol_type = other DNA

SEQ ID NO: 19279 - DNA, 28 bp, synthetic construct
  source 1..28: mol_type = other DNA
ggtcccggcaccaggctcacggttttag

SEQ ID NO: 19280 - DNA, 31 bp, synthetic construct; identical to SEQ ID NO: 17844
  source 1..31: mol_type = other DNA

SEQ ID NO: 19281 - DNA, 28 bp, synthetic construct
  source 1..28: mol_type = other DNA
gcggcaggcacccggctcactgtgacag

SEQ ID NO: 19282 - DNA, 31 bp, synthetic construct; identical to SEQ ID NO: 17852
  source 1..31: mol_type = other DNA

SEQ ID NO: 19283 - DNA, 28 bp, synthetic construct
  source 1..28: mol_type = other DNA
ggctcaggaaccagactgactgttctcg

SEQ ID NO: 19284 - DNA, 31 bp, synthetic construct; identical to SEQ ID NO: 17996
  source 1..31: mol_type = other DNA

SEQ ID NO: 19285 - DNA, 28 bp, synthetic construct
  source 1..28: mol_type = other DNA
ggtaaaggaaccagactcacagttgtag

SEQ ID NO: 19286 - DNA, 31 bp, synthetic construct; identical to SEQ ID NO: 17814
  source 1..31: mol_type = other DNA

SEQ ID NO: 19287 - DNA, 28 bp, synthetic construct
  source 1..28: mol_type = other DNA
ggtaaaggaaccagactcacagttgtag

SEQ ID NO: 19288 - DNA, 31 bp, synthetic construct; identical to SEQ ID NO: 17812
  source 1..31: mol_type = other DNA

SEQ ID NO: 19289 - DNA, 28 bp, synthetic construct
  source 1..28: mol_type = other DNA
ggctcaggaaccagactgactgttctcg

SEQ ID NO: 19290 - DNA, 31 bp, synthetic construct; identical to SEQ ID NO: 18006
  source 1..31: mol_type = other DNA

SEQ ID NO: 19291 - DNA, 28 bp, synthetic construct
  source 1..28: mol_type = other DNA
ggaccagggacacgactcaccgtcctag

SEQ ID NO: 19292 - DNA, 31 bp, synthetic construct; identical to SEQ ID NO: 17834
  source 1..31: mol_type = other DNA

SEQ ID NO: 19293 - protein, 26 aa, synthetic construct
GGIITQTPKFLIGQEGQKLTLKCQQN

SEQ ID NO: 19294 - protein, 26 aa, synthetic construct
GEQVEQLPSSLIVQEGASVLINCSYT

SEQ ID NO: 19295 - protein, 26 aa, synthetic construct
VTLLEQNPRWRLVPRGQAVNLRCILK

SEQ ID NO: 19296 - protein, 26 aa, synthetic construct
GEQVEQLPSSLIVQEGASVLINCSYT

SEQ ID NO: 19297 - protein, 26 aa, synthetic construct
GGIITQTPKFLIGQEGQKLTLKCQQN

SEQ ID NO: 19298 - protein, 26 aa, synthetic construct
AQSVTQPDARVTVSEGASLQLRCKYS

SEQ ID NO: 19299 - protein, 26 aa, synthetic construct
EAAVTQSPRSKVAVTGGKVTLSCHQT

SEQ ID NO: 19300 - protein, 26 aa, synthetic construct
GEQVEQRPPHLSVREGDSAVIICTYT

SEQ ID NO: 19301 - protein, 26 aa, synthetic construct
DTTVKQNPRYKLARVGKPVNLICSQT

SEQ ID NO: 19302 - protein, 26 aa, synthetic construct
TQTVSQSDAHVTVFEGDSVELRCNYS

SEQ ID NO: 19303 - protein, 26 aa, synthetic construct
DMKVTQMPRYLIKRMGENVLLECGQD

SEQ ID NO: 19304 - protein, 26 aa, synthetic construct
QQKVQQSPESLSVPEGGMASLNCTSS

SEQ ID NO: 19305 - protein, 26 aa, synthetic construct
EAAVTQSPRSKVAVTGGKVTLSCHQT

SEQ ID NO: 19306 - protein, 26 aa, synthetic construct
SQWGEENLQALSIQEGEDVTMNCSYK

SEQ ID NO: 19307 - protein, 26 aa, synthetic construct
EAAVTQSPRNKVAVTGGKVTLSCNQT

SEQ ID NO: 19308 - protein, 25 aa, synthetic construct
GQGVEQPDNLMSVEGTFARVNCTYS

SEQ ID NO: 19309 - protein, 26 aa, synthetic construct
EAAVTQSPRNKVAVTGGKVTLSCNQT

SEQ ID NO: 19310 - protein, 26 aa, synthetic construct
GDSVTQKQGQVTLSEDDFLFINCTYS

SEQ ID NO: 19311 - protein, 26 aa, synthetic construct
EAAVTQSPRSKVAVTGGKVTLSCHQT

SEQ ID NO: 19312 - protein, 26 aa, synthetic construct
GDSVTQTEGLVTLTKGLPVMLNCTYQ

SEQ ID NO: 19313 - protein, 25 aa, synthetic construct
NTKITQSPRYLILGRANKSLECEQH

SEQ ID NO: 19314 - protein, 26 aa, synthetic construct
GQQVKQSSPSLTVQEGGILILNCDYE

SEQ ID NO: 19315 - protein, 26 aa, synthetic construct
AQTIHQWPVAEIKAVGSPLSLGCTIK

SEQ ID NO: 19316 - protein, 26 aa, synthetic construct
AQKVTQTQTSISVMEKTTVTMDCVYE

SEQ ID NO: 19317 - protein, 26 aa, synthetic construct
EAGVTQSPRYAVLQEGQAVSFWCDPI

SEQ ID NO: 19318 - protein, 26 aa, synthetic construct
GDSVTQTEGLVTLTKGLPVMLNCTYQ

SEQ ID NO: 19319 - protein, 26 aa, synthetic construct
DPKIIQKPKYLVAVTGSEKILICEQY

SEQ ID NO: 19320 - protein, 26 aa, synthetic construct
GDQVKQSPSALSLQEGTNSALRCNFS

SEQ ID NO: 19321 - protein, 26 aa, synthetic construct
EAAVTQSPRSKVAVTGGKVTLSCHQT

SEQ ID NO: 19322 - protein, 26 aa, synthetic construct
AQKVTQTQTSISVMEKTTVTMDCVYE

SEQ ID NO: 19323 - protein, 26 aa, synthetic construct
GGIITQTPKFLIGQEGQKLTLKCQQN

SEQ ID NO: 19324 - protein, 26 aa, synthetic construct
GEQVEQLPSSLIVQEGASVLINCSYT

SEQ ID NO: 19325 - protein, 26 aa, synthetic construct
GGIITQTPKFLIGQEGQKLTLKCQQN

SEQ ID NO: 19326 - protein, 26 aa, synthetic construct
GDSVTQTEGLVTLTEGLPVMLNCTYQ

SEQ ID NO: 19327 - protein, 25 aa, synthetic construct
NTKITQSPRYLILGRANKSLECEQH

SEQ ID NO: 19328 - protein, 26 aa, synthetic construct
GQQVQQSPASLVLQEGENAELQCNFS

SEQ ID NO: 19329 - protein, 26 aa, synthetic construct
DPKIIQKPKYLVAVTGSEKILICEQY

SEQ ID NO: 19330 - protein, 26 aa, synthetic construct
GDSVTQTEGQVTVSESKSLIINCTYS

SEQ ID NO: 19331 - protein, 26 aa, synthetic construct
EAAVTQSPRNKVAVTGGKVTLSCNQT

SEQ ID NO: 19332 - protein, 26 aa, synthetic construct
AQKVTQTQTSISVMEKTTVTMDCVYE

SEQ ID NO: 19333 - protein, 26 aa, synthetic construct
EAAVTQSPRNKVAVTGGKVTLSCNQT

SEQ ID NO: 19334 - protein, 26 aa, synthetic construct
GEQVEQRPPHLSVREGDSAIIICTYT

SEQ ID NO: 19335 - protein, 26 aa, synthetic construct
EAAVTQSPRSKVAVTGGKVTLSCHQT

SEQ ID NO: 19336 - protein, 26 aa, synthetic construct
AQKVTQTQTSISVMEKTTVTMDCVYE

SEQ ID NO: 19337 - protein, 26 aa, synthetic construct
EAAVTQSPRSKVAVTGGKVTLSCHQT

SEQ ID NO: 19338 - protein, 26 aa, synthetic construct
QQKVQQSPESLTVSEGAMASLNCTFS

SEQ ID NO: 19339 - protein, 25 aa, synthetic construct
NTKITQSPRYLILGRANKSLECEQH

SEQ ID NO: 19340 - protein, 26 aa, synthetic construct
GDSVTQKQGQVTLSEDDFLFINCTYS

SEQ ID NO: 19341 - protein, 25 aa, synthetic construct
NTKITQSPRYLILGRANKSLECEQH

SEQ ID NO: 19342 - protein, 26 aa, synthetic construct
GQQVQQSPASLVLQEGENAELQCNFS

SEQ ID NO: 19343 - protein, 26 aa, synthetic construct
SVLLYQKPNRDICQSGTSLKIQCVAD

SEQ ID NO: 19344 - protein, 26 aa, synthetic construct
AQKVTQTQTSISVMEKTTVTMDCVYE

SEQ ID NO: 19345 - protein, 26 aa, synthetic construct
ETAVFQTPNYHVTQVGNEVSFNCKQT

SEQ ID NO: 19346 - protein, 26 aa, synthetic construct
GQQVQQSPASLVLQEGENAELQCNFS

SEQ ID NO: 19347 - protein, 26 aa, synthetic construct
ETAVFQTPNYHVTQVGNEVSFNCKQT

SEQ ID NO: 19348 - protein, 26 aa, synthetic construct
GQQVQQSPASLVLQEGENAELQCNFS

SEQ ID NO: 19349 - protein, 26 aa, synthetic construct
EAAVTQSPRNKVAVTGGKVTLSCNQT

SEQ ID NO: 19350 - protein, 26 aa, synthetic construct
GQQVQQSPASLVLQEGENAELQCNFS

SEQ ID NO: 19351 - protein, 26 aa, synthetic construct
EAAVTQSPRNKVAVTGGKVTLSCNQT

SEQ ID NO: 19352 - protein, 26 aa, synthetic construct
GDSVTQTEGQVTVSESKSLIINCTYS

SEQ ID NO: 19353 - protein, 26 aa, synthetic construct
EAAVTQSPRNKVAVTGGKVTLSCNQT

SEQ ID NO: 19354 - protein, 26 aa, synthetic construct
GDSVTQMQGQVTLSEDDFLFINCTYS

SEQ ID NO: 19355 - protein, 26 aa, synthetic construct
EAAVTQSPRSKVAVTGGKVTLSCHQT

SEQ ID NO: 19356 - protein, 26 aa, synthetic construct
AQSVDQPDAHVTLYEGASLELRCSYS

SEQ ID NO: 19357 - protein, 26 aa, synthetic construct
EAAVTQSPRSKVAVTGGKVTLSCHQT

SEQ ID NO: 19358 - protein, 26 aa, synthetic construct
AQSVDQPDAHVTLSEGASLELRCSYS

SEQ ID NO: 19359 - protein, 26 aa, synthetic construct
DTTVKQNPRYKLARVGKPVNLICSQT

SEQ ID NO: 19360 - protein, 26 aa, synthetic construct
AQSVTQPDARVTVSEGASLQLRCKYS

SEQ ID NO: 19361 - protein, 26 aa, synthetic construct
AQTIHQWPVAEIKAVGSPLSLGCTIK

SEQ ID NO: 19362 - protein, 26 aa, synthetic construct
GEQVEQRPPHLSVREGDSAVIICTYT

SEQ ID NO: 19363 - protein, 26 aa, synthetic construct
GGIITQTPKFLIGQEGQKLTLKCQQN

SEQ ID NO: 19364 - protein, 26 aa, synthetic construct
AQSVDQPDAHVTLSEGASLELRCSYS

SEQ ID NO: 19365 - protein, 25 aa, synthetic construct
NTKITQSPRYLILGRANKSLECEQH

SEQ ID NO: 19366 - protein, 26 aa, synthetic construct
GDSVTQTEGQVALSEEDFLTIHCNYS

SEQ ID NO: 19367 - protein, 25 aa, synthetic construct
NTKITQSPRYLILGRANKSLECEQH

SEQ ID NO: 19368 - protein, 26 aa, synthetic construct
QEKVQQSPESLIVPEGAMSSLNCTFS

SEQ ID NO: 19369 - protein, 25 aa, synthetic construct
NTKITQSPRYLILGRANKSLECEQH

SEQ ID NO: 19370 - protein, 26 aa, synthetic construct
AQKVTQTQTSISVMEKTTVTMDCVYE

SEQ ID NO: 19371 - protein, 25 aa, synthetic construct
NTKITQSPRYLILGRANKSLECEQH

SEQ ID NO: 19372 - protein, 26 aa, synthetic construct
GDSVTQTEGLVTLTEGLPVMLNCTYQ

SEQ ID NO: 19373 - protein, 25 aa, synthetic construct
NTKITQSPRYLILGRANKSLECEQH

SEQ ID NO: 19374 - protein, 26 aa, synthetic construct
GDSVIQMQGQVTLSENDFLFINCTYS

SEQ ID NO: 19375 - protein, 25 aa, synthetic construct
NTKITQSPRYLILGRANKSLECEQH

SEQ ID NO: 19376 - protein, 26 aa, synthetic construct
AQKVTQTQTSISVMEKTTVTMDCVYE

SEQ ID NO: 19377 - protein, 25 aa, synthetic construct
NTKITQSPRYLILGRANKSLECEQH

SEQ ID NO: 19378 - protein, 26 aa, synthetic construct
AQSVTQPDARVTVSEGASLQLRCKYS

SEQ ID NO: 19379 - protein, 25 aa, synthetic construct
NTKITQSPRYLILGRANKSLECEQH

SEQ ID NO: 19380 - protein, 26 aa, synthetic construct
AQKVTQTQTSISVMEKTTVTMDCVYE

SEQ ID NO: 19381 - protein, 25 aa, synthetic construct
NTKITQSPRYLILGRANKSLECEQH

SEQ ID NO: 19382 - protein, 26 aa, synthetic construct
AQKVTQTQTSISVMEKTTVTMDCVYE

SEQ ID NO: 19383 - protein, 25 aa, synthetic construct
NTKITQSPRYLILGRANKSLECEQH

SEQ ID NO: 19384 - protein, 26 aa, synthetic construct
GEQVEQRPPHLSVREGDSAVIICTYT

SEQ ID NO: 19385 - protein, 25 aa, synthetic construct
NTKITQSPRYLILGRANKSLECEQH

SEQ ID NO: 19386 - protein, 26 aa, synthetic construct
GDSVTQTEGQVALSEEDFLTIHCNYS

SEQ ID NO: 19387 - protein, 25 aa, synthetic construct
NTKITQSPRYLILGRANKSLECEQH

SEQ ID NO: 19388 - protein, 26 aa, synthetic construct
GQQVQQSPASLVLQEGENAELQCNFS

SEQ ID NO: 19389 - protein, 25 aa, synthetic construct
NTKITQSPRYLILGRANKSLECEQH

SEQ ID NO: 19390 - protein, 26 aa, synthetic construct
GDSVTQTEGQVALSEEDFLTIHCNYS

SEQ ID NO: 19391 - protein, 25 aa, synthetic construct
NTKITQSPRYLILGRANKSLECEQH

SEQ ID NO: 19392 - protein, 26 aa, synthetic construct
SQLAEENLWALSVHEGESVTVNCSYK

SEQ ID NO: 19393 - protein, 25 aa, synthetic construct
NTKITQSPRYLILGRANKSLECEQH

SEQ ID NO: 19394 - protein, 26 aa, synthetic construct
GQQVQQSPASLVLQEGENAELQCNFS

SEQ ID NO: 19395 - protein, 25 aa, synthetic construct
NTKITQSPRYLILGRANKSLECEQH

SEQ ID NO: 19396 - protein, 26 aa, synthetic construct
GDSVTQTEGLVTLTEGLPVMLNCTYQ

SEQ ID NO: 19397 - protein, 25 aa, synthetic construct
NTKITQSPRYLILGRANKSLECEQH

SEQ ID NO: 19398 - protein, 26 aa, synthetic construct
QQQVRQSPQSLTVWEGGTTVLTCSYE

SEQ ID NO: 19399 - protein, 25 aa, synthetic construct
NTKITQSPRYLILGRANKSLECEQH

SEQ ID NO: 19400 - protein, 26 aa, synthetic construct
AQSVTQPDARVTVSEGASLQLRCKYS

SEQ ID NO: 19401 - protein, 25 aa, synthetic construct
NTKITQSPRYLILGRANKSLECEQH

SEQ ID NO: 19402 - protein, 26 aa, synthetic construct
GQQVQQSPASLVLQEGENAELQCNFS

SEQ ID NO: 19403 - protein, 26 aa, synthetic construct
NAGVIQTPRHKVTGKGQEATLWCEPI

SEQ ID NO: 19404 - protein, 26 aa, synthetic construct
GQQVQQSPSSLVLQEGENAELQCNFS

SEQ ID NO: 19405 - protein, 26 aa, synthetic construct
NAGVIQTPRHKVTGKGQEATLWCEPI

SEQ ID NO: 19406 - protein, 26 aa, synthetic construct
AQSVTQPDARVTVSEGASLQLRCKYS

SEQ ID NO: 19407 - protein, 26 aa, synthetic construct
NAGVIQTPRHKVTGKGQEATLWCEPI

SEQ ID NO: 19408 - protein, 26 aa, synthetic construct
GQQVQQSPASLVLQEGENAELQCNFS

SEQ ID NO: 19409 - protein, 26 aa, synthetic construct
NSKVIQTPRYLVKGQGQKAKMRCIPE

SEQ ID NO: 19410 - protein, 26 aa, synthetic construct
AQKVTQTQTSISVMEKTTVTMDCVYE

SEQ ID NO: 19411 - protein, 26 aa, synthetic construct
SVLLYQKPNRDICQSGTSLKIQCVAD

SEQ ID NO: 19412 - protein, 26 aa, synthetic construct
GEQVEQRPPHLSVREGDSAVIICTYT

SEQ ID NO: 19413 - protein, 26 aa, synthetic construct
SVLLYQKPNRDICQSGTSLKIQCVAD

SEQ ID NO: 19414 - protein, 26 aa, synthetic construct
GEQVEQRPPHLSVREGDSAVITCTYT

SEQ ID NO: 19415 - protein, 26 aa, synthetic construct
SVLLYQKPNRDICQSGTSLKIQCVAD

SEQ ID NO: 19416 - protein, 26 aa, synthetic construct
GEQVEQRPPHLSVREGDSAVITCTYT

SEQ ID NO: 19417 - protein, 26 aa, synthetic construct
SVLLYQKPNRDICQSGTSLKIQCVAD

SEQ ID NO: 19418 - protein, 26 aa, synthetic construct
AQSVTQPDARVTVSEGASLQLRCKYS

SEQ ID NO: 19419 - protein, 26 aa, synthetic construct
SVLLYQKPNRDICQSGTSLKIQCVAD

SEQ ID NO: 19420 - protein, 26 aa, synthetic construct
GEQVEQRPPHLSVREGDSAFITCTYT

SEQ ID NO: 19421 - protein, 26 aa, synthetic construct
SVLLYQKPNRDICQSGTSLKIQCVAD

SEQ ID NO: 19422 - protein, 26 aa, synthetic construct
GEQVEQRPPHLSVREGDSAVITCTYT

SEQ ID NO: 19423 - protein, 26 aa, synthetic construct
EAGVTQSPRYAVLQEGQAVSFWCDPI

SEQ ID NO: 19424 - protein, 26 aa, synthetic construct
GDSVTQTEGLVTLTKGLPVMLNCTYQ

SEQ ID NO: 19425 - protein, 26 aa, synthetic construct
EAGVTQSPRYAVLQEGQAVSFWCDPI

SEQ ID NO: 19426 - protein, 26 aa, synthetic construct
GDSVTQTEGQVTVSESKSLIINCTYS

SEQ ID NO: 19427 - protein, 26 aa, synthetic construct
EAGVTQSPRYAVLQEGQAVSFWCDPI

SEQ ID NO: 19428 - protein, 26 aa, synthetic construct
GDSVTQTEGPVTLSEGTSLTVNCSYE

SEQ ID NO: 19429 - protein, 26 aa, synthetic construct
EAGVTQSPRYAVLQEGQAVSFWCDPI

SEQ ID NO: 19430 - protein, 25 aa, synthetic construct
GQGVEQPDNLMSVEGTFARVNCTYS

SEQ ID NO: 19431 - protein, 26 aa, synthetic construct
EAGVTQSPRYAVLQEGQAVSFWCDPI

SEQ ID NO: 19432 - protein, 26 aa, synthetic construct
GDSVTQTEGLVTLTEGLPVMLNCTYQ

SEQ ID NO: 19433 - protein, 26 aa, synthetic construct
EAGVTQSPRYAVLQEGQAVSFWCDPI

SEQ ID NO: 19434 - protein, 26 aa, synthetic construct
AQSVTQPDARVTVSEGASLQLRCKYS

SEQ ID NO: 19435 - protein, 26 aa, synthetic construct
EAGVTQSPRYAVLQEGQAVSFWCDPI

SEQ ID NO: 19436 - protein, 26 aa, synthetic construct
QQKVQQSPESLSVPEGGMASLNCTSS

SEQ ID NO: 19437 - protein, 26 aa, synthetic construct
EAGVTQSPRYAVLQEGQAVSFWCDPI

SEQ ID NO: 19438 - protein, 26 aa, synthetic construct
GDSVTQTEGQVALSEEDFLTIHCNYS

SEQ ID NO: 19439 - protein, 26 aa, synthetic construct
EAGVTQSPRYAVLQEGQAVSFWCDPI

SEQ ID NO: 19440 - protein, 26 aa, synthetic construct
QQNVQQSPESLIVPEGARTSLNCTFS

SEQ ID NO: 19441 - protein, 26 aa, synthetic construct
EAGVTQSPRYAVLQEGQAVSFWCDPI

SEQ ID NO: 19442 - protein, 26 aa, synthetic construct
GDSVTQTEGLVTLTKGLPVMLNCTYQ

SEQ ID NO: 19443 - protein, 26 aa, synthetic construct
EAGVTQSPRYAVLQEGQAVSFWCDPI

SEQ ID NO: 19444 - protein, 26 aa, synthetic construct
QQQVRQSPQSLTVWEGETAILNCSYE

SEQ ID NO: 19445 - protein, 26 aa, synthetic construct
EAGVTQSPRYAVLQEGQAVSFWCDPI

SEQ ID NO: 19446 - protein, 26 aa, synthetic construct
GDSVTQTEGQVALSEEDFLTIHCNYS

SEQ ID NO: 19447 - protein, 26 aa, synthetic construct
EAGVTQSPRYAVLQEGQAVSFWCDPI

SEQ ID NO: 19448 - protein, 26 aa, synthetic construct
GDSVTQTEGLVTVTEGLPVKLNCTYQ

SEQ ID NO: 19449 - protein, 26 aa, synthetic construct
EAGVTQSPRYAVLQEGQAVSFWCDPI

SEQ ID NO: 19450 - protein, 26 aa, synthetic construct
QQQVRQSSQSLTVWEGETAILNCSYE

SEQ ID NO: 19451 - protein, 26 aa, synthetic construct
EAGVTQSPRYAVLQEGQAVSFWCDPI

SEQ ID NO: 19452 - protein, 26 aa, synthetic construct
GDSVTQTEGQVALSEEDFLTIHCNYS

SEQ ID NO: 19453 - protein, 26 aa, synthetic construct
EAGVTQSPRYAVLQEGQAVSFWCDPI

SEQ ID NO: 19454 - protein, 26 aa, synthetic construct
GDSVTQTEGPVTLSEGTSLTVNCSYE

SEQ ID NO: 19455 - protein, 26 aa, synthetic construct
EAGVTQSPRYAVLQEGQAVSFWCDPI

SEQ ID NO: 19456 - protein, 26 aa, synthetic construct
GQQVQQSPASLVLQEGENAELQCNFS

SEQ ID NO: 19457 - protein, 26 aa, synthetic construct
DMKVTQMPRYLIKRMGENVLLECGQD

SEQ ID NO: 19458 - protein, 26 aa, synthetic construct
GEQVEQRPPHLSVPEGDSAVIICTYT

SEQ ID NO: 19459 - protein, 26 aa, synthetic construct
DMKVTQMPRYLIKRMGENVLLECGQD

SEQ ID NO: 19460 - protein, 26 aa, synthetic construct
GDSVTQTEGPVTLSEGTSLTVNCSYE

SEQ ID NO: 19461 - protein, 26 aa, synthetic construct
DMKVTQMPRYLIKRMGENVLLECGQD

SEQ ID NO: 19462 - protein, 26 aa, synthetic construct
SQWGEENLQALSIQEGEDVTMNCSYK

SEQ ID NO: 19463 - protein, 26 aa, synthetic construct
DMKVTQMPRYLIKRMGENVLLECGQD

SEQ ID NO: 19464 - protein, 26 aa, synthetic construct
QQQVRQSPQSLTVWEGETAILNCSYE

SEQ ID NO: 19465 - protein, 26 aa, synthetic construct
DMKVTQMPRYLIKRMGENVLLECGQD

SEQ ID NO: 19466 - protein, 26 aa, synthetic construct
GQQVKQSSPSLTVQEGGISILNCDYE

SEQ ID NO: 19467 - protein, 26 aa, synthetic construct
DMKVTQMPRYLIKRMGENVLLECGQD

SEQ ID NO: 19468 - protein, 25 aa, synthetic construct
DAKTTQPDSMESTEGETVHLPCSHA

SEQ ID NO: 19469 - protein, 26 aa, synthetic construct
DPKIIQKPKYLVAVTGSEKILICEQY

SEQ ID NO: 19470 - protein, 26 aa, synthetic construct
AQKVTQTQTSISVMEKTTVTMDCVYE

SEQ ID NO: 19471 - protein, 26 aa, synthetic construct
DPKIIQKPKYLVAVTGSEKILICEQY

SEQ ID NO: 19472 - protein, 26 aa, synthetic construct
GDSVTQTEGQVTVSESKSLIINCTYS

SEQ ID NO: 19473 - protein, 26 aa, synthetic construct
DPKIIQKPKYLVAVTGSEKILICEQY

SEQ ID NO: 19474 - protein, 26 aa, synthetic construct
GQQVQQSPTSLVLQEGENAELQCNFS

SEQ ID NO: 19475 - protein, 26 aa, synthetic construct
DPKIIQKPKYLVAVTGSEKILICEQY

SEQ ID NO: 19476 - protein, 26 aa, synthetic construct
AQKVTQTQTSISVMEKTTVTMDCVYE

SEQ ID NO: 19477 - protein, 26 aa, synthetic construct
DPKIIQKPKYLVAVTGSEKILICEQY

SEQ ID NO: 19478 - protein, 26 aa, synthetic construct
SQWGEENLQALSIQEGEDVTMNCSYK

SEQ ID NO: 19479 - protein, 26 aa, synthetic construct
DPKIIQKPKYLVAVTGSEKILICEQY

SEQ ID NO: 19480 - protein, 26 aa, synthetic construct
GDSVTQTEGPVTVSESESLIINCTYS

SEQ ID NO: 19481 - protein, 26 aa, synthetic construct
DPKIIQKPKYLVAVTGSEKILICEQY

SEQ ID NO: 19482 - protein, 26 aa, synthetic construct
GDSVTQKQGQVTLSEDDFLFINCTYS

SEQ ID NO: 19483 - protein, 26 aa, synthetic construct
DPKIIQKPKYLVAVTGSEKILICEQY

SEQ ID NO: 19484 - protein, 26 aa, synthetic construct
QQKVQQSPESLSVPEGGMASFNCTSS

SEQ ID NO: 19485 - protein, 26 aa, synthetic construct
DPKIIQKPKYLVAVTGSEKILICEQY

SEQ ID NO: 19486 - protein, 26 aa, synthetic construct
QQKVQQSPESLSVPEGGMASLNCTSS

SEQ ID NO: 19487 - protein, 26 aa, synthetic construct
DPKIIQKPKYLVAVTGSEKILICEQY

SEQ ID NO: 19488 - protein, 26 aa, synthetic construct
GDSVTQTEGQVTVSESKSLIINCTYS

SEQ ID NO: 19489 - protein, 26 aa, synthetic construct
DPKIIQKPKYLVAVTGSEKILICEQY

SEQ ID NO: 19490 - protein, 26 aa, synthetic construct
GDSVTQTEGLVTLTEGLPVMLNCTYQ

SEQ ID NO: 19491 - protein, 26 aa, synthetic construct
DPKIIQKPKYLVAVTGSEKILICEQY

SEQ ID NO: 19492 - protein, 26 aa, synthetic construct
AQKVTQTQTSISVVEKTTVTMDCVYE

SEQ ID NO: 19493 - protein, 26 aa, synthetic construct
DPKIIQKPKYLVAVTGSEKILICEQY

SEQ ID NO: 19494 - protein, 26 aa, synthetic construct
GEKVEQHESTLSVREGDSAVINCTYT

SEQ ID NO: 19495 - protein, 26 aa, synthetic construct
DPKIIQKPKYLVAVTGSEKILICEQY

SEQ ID NO: 19496 - protein, 26 aa, synthetic construct
AQSVTQPDARVTVSEGASLQLRCKYS

SEQ ID NO: 19497 - protein, 26 aa, synthetic construct
DPKIIQKPKYLVAVTGSEKILICEQY

SEQ ID NO: 19498 - protein, 26 aa, synthetic construct
AQKVTQTQTSISVMEKTTVTMDCVYE

SEQ ID NO: 19499 - protein, 26 aa, synthetic construct
ETAVFQTPNYHVTQVGNEVSFNCKQT

SEQ ID NO: 19500 - protein, 26 aa, synthetic construct
AQSVTQPDARVTVSEGASLQLRCKYS

SEQ ID NO: 19501 - protein, 26 aa, synthetic construct
ETAVFQTPNYHVTQVGNEVSFNCKQT

SEQ ID NO: 19502 - protein, 26 aa, synthetic construct
AQSVTQPDARVTVSEGASLQLRCKYS

SEQ ID NO: 19503 - protein, 26 aa, synthetic construct
ETAVFQTPNYHVTQVGNEVSFNCKQT

SEQ ID NO: 19504 - protein, 26 aa, synthetic construct
AQKVTQTQTSISVMEKTTVTMDCVYE

SEQ ID NO: 19505 - protein, 26 aa, synthetic construct
ETAVFQTPNYHVTQVGNEVSFNCKQT

SEQ ID NO: 19506 - protein, 26 aa, synthetic construct
TQTVSQSDAHVTVFEGDSVELRCNYS

SEQ ID NO: 19507 - protein, 26 aa, synthetic construct
ETAVFQTPNYHVTQVGNEVSFNCKQT

SEQ ID NO: 19508 - protein, 26 aa, synthetic construct
GDSVTQKQGQVTLSEDDFLFINCTYS

SEQ ID NO: 19509 - protein, 26 aa, synthetic construct
ETAVFQTPNYHVTQVGNEVSFNCKQT

SEQ ID NO: 19510 - protein, 26 aa, synthetic construct
GDSVTQKQGQVTLSEDDFLFINCTYS

SEQ ID NO: 19511 - protein, 26 aa, synthetic construct
ETAVFQTPNYHVTQVGNEVSFNCKQT

SEQ ID NO: 19512 - protein, 26 aa, synthetic construct
GQQVQQSPASLVLQEGENAELQCNFS

SEQ ID NO: 19513 - protein, 26 aa, synthetic construct
ETAVFQTPNYHVTQVGNEVSFNCKQT

SEQ ID NO: 19514 - protein, 26 aa, synthetic construct
GDSVTQTEGLVTLTEGLPVMLNCTYQ

SEQ ID NO: 19515 - protein, 26 aa, synthetic construct
ETAVFQTPNYHVTQVGNEVSFNCKQT

SEQ ID NO: 19516 - protein, 26 aa, synthetic construct
AQKVTQTQTSISVMEKTTVTMDCVYE

SEQ ID NO: 19517 - protein, 26 aa, synthetic construct
ETAVFQTPNYHVTQVGNEVSFNCKQT

SEQ ID NO: 19518 - protein, 26 aa, synthetic construct
GQQVQQSPTSLVLQEGENAELQCNFS

SEQ ID NO: 19519 - protein, 26 aa, synthetic construct
ETAVFQTPNYHVTQVGNEVSFNCKQT

SEQ ID NO: 19520 - protein, 26 aa, synthetic construct
QQKVQQSPESLSVPEGGMASFNCTSS

SEQ ID NO: 19521 - protein, 26 aa, synthetic construct
ETAVFQTPNYHVTQVGNEVSFNCKQT

SEQ ID NO: 19522 - protein, 26 aa, synthetic construct
GEKVEQHESTLSVREGDSAVINCTYT

SEQ ID NO: 19523 - protein, 26 aa, synthetic construct
ETAVFQTPNYHVTQVGNEVSFNCKQT

SEQ ID NO: 19524 - protein, 26 aa, synthetic construct
GDSVTQTEGLVTLTEGLPVMLNCTYQ

SEQ ID NO: 19525 - protein, 26 aa, synthetic construct
EAAVTQSPRNKVAVTGGKVTLSCNQT

SEQ ID NO: 19526 - protein, 26 aa, synthetic construct
GEQVEQLPSILRVQEGSSASINCSYE

SEQ ID NO: 19527 - protein, 26 aa, synthetic construct
EAAVTQSPRNKVAVTGGKVTLSCNQT

SEQ ID NO: 19528 - protein, 26 aa, synthetic construct
QQQVRQSPQSLTVWEGETTILNCSYE

SEQ ID NO: 19529 - protein, 26 aa, synthetic construct
EAAVTQSPRNKVAVTGGKVTLSCNQT

SEQ ID NO: 19530 - protein, 26 aa, synthetic construct
QQKVQQSPESLTVSEGAMASLNCTFS

SEQ ID NO: 19531 - protein, 26 aa, synthetic construct
EAAVTQSPRNKVAVTGGKVTLSCNQT

SEQ ID NO: 19532 - protein, 26 aa, synthetic construct
GEQVEQLPSILRVQEGSSASINCTYE

SEQ ID NO: 19533 - protein, 26 aa, synthetic construct
EAAVTQSPRNKVAVTGGKVTLSCNQT

SEQ ID NO: 19534 - protein, 26 aa, synthetic construct
GDSVTQTEGQVTVSESKSLIINCTYS

SEQ ID NO: 19535 - protein, 26 aa, synthetic construct
EAAVTQSPRNKVAVTGGKVTLSCNQT

SEQ ID NO: 19536 - protein, 26 aa, synthetic construct
QQKVQQSPESLTVSEGAMASLNCTFS

SEQ ID NO: 19537 - protein, 26 aa, synthetic construct
EAAVTQSPRNKVAVTGGKVTLSCNQT

SEQ ID NO: 19538 - protein, 26 aa, synthetic construct
QQKVQQSPESLTVSEGAMASLNCTFS

SEQ ID NO: 19539 - protein, 26 aa, synthetic construct
EAAVTQSPRNKVAVTGGKVTLSCNQT

SEQ ID NO: 19540 - protein, 26 aa, synthetic construct
GEQVEQRPPHLSVREGDSAVIICTYT

SEQ ID NO: 19541 - protein, 26 aa, synthetic construct
EAAVTQSPRNKVAVTGGKVTLSCNQT

SEQ ID NO: 19542 - protein, 26 aa, synthetic construct
QQQVRQSSQSLTVWEGETAILNCSYE

SEQ ID NO: 19543 - protein, 26 aa, synthetic construct
EAAVTQSPRNKVAVTGGKVTLSCNQT

SEQ ID NO: 19544 - protein, 26 aa, synthetic construct
QQKVQQSPESLSVPEGGMASLNCTSS

SEQ ID NO: 19545 - protein, 26 aa, synthetic construct
EAAVTQSPRNKVAVTGGKVTLSCNQT

SEQ ID NO: 19546 - protein, 26 aa, synthetic construct
QQKVQQSPESLSVPEGGMASFNCTSS

SEQ ID NO: 19547 - protein, 26 aa, synthetic construct
EAAVTQSPRNKVAVTGGKVTLSCNQT

SEQ ID NO: 19548 - protein, 26 aa, synthetic construct
GDSVTQTEGPVTLSEGTSLTVNCSYE

SEQ ID NO: 19549 - protein, 26 aa, synthetic construct
EAAVTQSPRNKVAVTGGKVTLSCNQT

SEQ ID NO: 19550 - protein, 26 aa, synthetic construct
SQLAEENSWALSVHEGESVTVNCSYK

SEQ ID NO: 19551 - protein, 26 aa, synthetic construct
EAAVTQSPRNKVAVTGGKVTLSCNQT

SEQ ID NO: 19552 - protein, 26 aa, synthetic construct
GQQVQQSPTSLVLQEGENAELQCNFS

SEQ ID NO: 19553 - protein, 26 aa, synthetic construct
EAAVTQSPRNKVAVTGGKVTLSCNQT

SEQ ID NO: 19554 - protein, 26 aa, synthetic construct
QQKVQQSPESLIVPEGGMASLNCTSS

SEQ ID NO: 19555 - protein, 26 aa, synthetic construct
EAAVTQSPRNKVAVTGGKVTLSCNQT

SEQ ID NO: 19556 - protein, 26 aa, synthetic construct
QQQVRQSPQSLTVWEGETAILNCSYE

SEQ ID NO: 19557 - protein, 26 aa, synthetic construct
EAAVTQSPRNKVAVTGGKVTLSCNQT

SEQ ID NO: 19558 - protein, 26 aa, synthetic construct
GDSVTQTEGLVTLTEGLPVMLNCTYQ

SEQ ID NO: 19559 - protein, 26 aa, synthetic construct
EAAVTQSPRNKVAVTGGKVTLSCNQT

SEQ ID NO: 19560 - protein, 26 aa, synthetic construct
GDSVTQTEGPVTLSEGTSLTVNCSYE

SEQ ID NO: 19561 - protein, 26 aa, synthetic construct
EAAVTQSPRNKVAVTGGKVTLSCNQT

SEQ ID NO: 19562 - protein, 26 aa, synthetic construct
AQKVTQTQTSISVMEKTTVTMDCVYE

SEQ ID NO: 19563 - protein, 26 aa, synthetic construct
EAAVTQSPRNKVAVTGGKVTLSCNQT

SEQ ID NO: 19564 - protein, 25 aa, synthetic construct
LAKTTQPPSMEAYEGQEVNVSCSHT

SEQ ID NO: 19565 - protein, 26 aa, synthetic construct
EAAVTQSPRNKVAVTGGKVTLSCNQT

SEQ ID NO: 19566 - protein, 26 aa, synthetic construct
AQKVTQTQTSISVMEKTTVTMDCVYE

SEQ ID NO: 19567 - protein, 26 aa, synthetic construct
EAAVTQSPRNKVAVTGGKVTLSCNQT

SEQ ID NO: 19568 - protein, 26 aa, synthetic construct
GEQVEQLPSSLIVQEGASVLINCSYT

SEQ ID NO: 19569 - protein, 26 aa, synthetic construct
EAAVTQSPRNKVAVTGGKVTLSCNQT

SEQ ID NO: 19570 - protein, 26 aa, synthetic construct
GDSVTQTEGPVTLSEGTSLTVNCSYE

SEQ ID NO: 19571 - protein, 26 aa, synthetic construct
EAAVTQSPRNKVAVTGGKVTLSCNQT

SEQ ID NO: 19572 - protein, 26 aa, synthetic construct
GDSVTQTEGLVTLTEGLPVMLNCTYQ

SEQ ID NO: 19573 - protein, 26 aa, synthetic construct
EAAVTQSPRNKVAVTGGKVTLSCNQT

SEQ ID NO: 19574 - protein, 26 aa, synthetic construct
GDSVTQKQGQVTLSEDDFLFINCTYS

SEQ ID NO: 19575 - protein, 26 aa, synthetic construct
EAAVTQSPRNKVAVTGGKVTLSCNQT

SEQ ID NO: 19576 - protein, 26 aa, synthetic construct
GQQVQQSPASLVLQEGENAELQCNFS

SEQ ID NO: 19577 - protein, 26 aa, synthetic construct
EAAVTQSPRNKVAVTGGKVTLSCNQT

SEQ ID NO: 19578 - protein, 26 aa, synthetic construct
AQSVTQPDARVTVSEGASLQLRCKYS

SEQ ID NO: 19579 - protein, 26 aa, synthetic construct
EAAVTQSPRNKVAVTGGKVTLSCNQT

SEQ ID NO: 19580 - protein, 26 aa, synthetic construct
SQWGEENLQALSIQEGEDVTMNCSYK

SEQ ID NO: 19581 - protein, 26 aa, synthetic construct
EAAVTQSPRNKVAVTGGKVTLSCNQT

SEQ ID NO: 19582 - protein, 26 aa, synthetic construct
AQSVTQPDARVTVSEGASLQLRCKYS

SEQ ID NO: 19583 - protein, 26 aa, synthetic construct
EAAVTQSPRNKVAVTGGKVTLSCNQT

SEQ ID NO: 19584 - protein, 26 aa, synthetic construct
GDSVIQMQGQVTLSENDFLFINCTYS

SEQ ID NO: 19585 - protein, 26 aa, synthetic construct
EAAVTQSPRNKVAVTGGKVTLSCNQT

SEQ ID NO: 19586 - protein, 26 aa, synthetic construct
GDSVTQTEGQVTVSESKSLIINCTYS

SEQ ID NO: 19587 - protein, 26 aa, synthetic construct
EAAVTQSPRNKVAVTGGKVTLSCNQT

SEQ ID NO: 19588 - protein, 26 aa, synthetic construct
GDSVTQTEGPVTVSESESLIINCTYS

SEQ ID NO: 19589 - protein, 26 aa, synthetic construct
EAAVTQSPRNKVAVTGGKVTLSCNQT

SEQ ID NO: 19590 - protein, 26 aa, synthetic construct
QQQVRQSPQSLTVWEGETAILNCSYE

SEQ ID NO: 19591 - protein, 26 aa, synthetic construct
EAAVTQSPRNKVAVTGGKVTLSCNQT

SEQ ID NO: 19592 - protein, 26 aa, synthetic construct
AQKVTQTQTSISVMEKTTVTMDCVYE

SEQ ID NO: 19593 - protein, 26 aa, synthetic construct
EAAVTQSPRNKVAVTGGKVTLSCNQT

SEQ ID NO: 19594 - protein, 26 aa, synthetic construct
GQQVQQSPASLVLQEGENAELQCNFS

SEQ ID NO: 19595 - protein, 26 aa, synthetic construct
EAAVTQSPRNKVAVTGGKVTLSCNQT

SEQ ID NO: 19596 - protein, 26 aa, synthetic construct
GDSVTQTEGLVTLTKGLPVMLNCTYQ

SEQ ID NO: 19597 - protein, 26 aa, synthetic construct
EAAVTQSPRNKVAVTGGKVTLSCNQT

SEQ ID NO: 19598 - protein, 26 aa, synthetic construct
QQQVRQSPQSLTVWEGETAILNCSYE

SEQ ID NO: 19599 - protein, 26 aa, synthetic construct
EAAVTQSPRNKVAVTGGKVTLSCNQT

SEQ ID NO: 19600 - protein, 26 aa, synthetic construct
QQQVRQSPQSLTVWEGETAILNCSYE

SEQ ID NO: 19601 - protein, 26 aa, synthetic construct
EAAVTQSPRNKVAVTGGKVTLSCNQT

SEQ ID NO: 19602 - protein, 26 aa, synthetic construct
GQQVQQSPSSLVLQEGENAELQCNFS

SEQ ID NO: 19603 - protein, 26 aa, synthetic construct
EAAVTQSPRNKVAVTGGKVTLSCNQT

SEQ ID NO: 19604 - protein, 25 aa, synthetic construct
DAKTTQPDSMESTEGETVHLPCSHA

SEQ ID NO: 19605 - protein, 26 aa, synthetic construct
EAAVTQSPRNKVAVTGGKVTLSCNQT

SEQ ID NO: 19606 - protein, 26 aa, synthetic construct
AQKVTQTQTSISVMEKTTVTMDCVYE

SEQ ID NO: 19607 - protein, 26 aa, synthetic construct
EAAVTQSPRNKVAVTGGKVTLSCNQT

SEQ ID NO: 19608 - protein, 26 aa, synthetic construct
AQKVTQTQTSISVMEKTTVTMDCVYE

SEQ ID NO: 19609 - protein, 26 aa, synthetic construct
EAAVTQSPRNKVAVTGGKVTLSCNQT

SEQ ID NO: 19610 - protein, 26 aa, synthetic construct
QQKVQQSPESLSVPEGGMASLNCTSS

SEQ ID NO: 19611 - protein, 26 aa, synthetic construct
EAAVTQSPRNKVAVTGGKVTLSCNQT

SEQ ID NO: 19612 - protein, 26 aa, synthetic construct
QQQVRQSPQSLTVWEGETTILNCSYE

SEQ ID NO: 19613 - protein, 26 aa, synthetic construct
EAAVTQSPRNKVAVTGGKVTLSCNQT

SEQ ID NO: 19614 - protein, 26 aa, synthetic construct
QQKVQQSPESLIVPEGGMASLNCTSS

SEQ ID NO: 19615 - protein, 26 aa, synthetic construct
EAAVTQSPRNKVAVTGGKVTLSCNQT

SEQ ID NO: 19616 - protein, 26 aa, synthetic construct
QQNVQQSPESLIVPEGARTSLNCTFS

SEQ ID NO: 19617 - protein, 26 aa, synthetic construct
EAAVTQSPRNKVAVTGGKVTLSCNQT

SEQ ID NO: 19618 - protein, 26 aa, synthetic construct
GDSVTQTEGLVTLTEGLPVMLNCTYQ

SEQ ID NO: 19619 - protein, 26 aa, synthetic construct
EAAVTQSPRNKVAVTGGKVTLSCNQT

SEQ ID NO: 19620 - protein, 26 aa, synthetic construct
QQQVRQSPQSLTVWEGETAILNCSYE

SEQ ID NO: 19621 - protein, 26 aa, synthetic construct
EAAVTQSPRNKVAVTGGKVTLSCNQT

SEQ ID NO: 19622 - protein, 26 aa, synthetic construct
GDSVTQTEGLVTLTKGLPVMLNCTYQ

SEQ ID NO: 19623 - protein, 26 aa, synthetic construct
EAAVTQSPRNKVAVTGGKVTLSCNQT

SEQ ID NO: 19624 - protein, 26 aa, synthetic construct
GQQVQQSPTSLVLQEGENAELQCNFS

SEQ ID NO: 19625 - protein, 26 aa, synthetic construct
EAAVTQSPRNKVAVTGGKVTLSCNQT

SEQ ID NO: 19626 - protein, 26 aa, synthetic construct
GEQVEQRPPHLSVREGDSAVIICTYT

SEQ ID NO: 19627 - protein, 26 aa, synthetic construct
EAAVTQSPRNKVAVTGGKVTLSCNQT

SEQ ID NO: 19628 - protein, 26 aa, synthetic construct
GDKVKQSPSALSLQEGTNSALRCNFS

SEQ ID NO: 19629 - protein, 26 aa, synthetic construct
EAAVTQSPRNKVAVTGGKVTLSCNQT

SEQ ID NO: 19630 - protein, 26 aa, synthetic construct
GNSVTQMQGQVTLSEEEFLFINCTYS

SEQ ID NO: 19631 - protein, 26 aa, synthetic construct
EAAVTQSPRNKVAVTGGKVTLSCNQT

SEQ ID NO: 19632 - protein, 26 aa, synthetic construct
AQKVTQTQTSISVMEKTTVTMDCVYE

SEQ ID NO: 19633 - protein, 26 aa, synthetic construct
EAAVTQSPRNKVTVTGGNVTLSCRQT

SEQ ID NO: 19634 - protein, 26 aa, synthetic construct
QQKVQQSPESLIVPEGGMASLNCTSS

SEQ ID NO: 19635 - protein, 26 aa, synthetic construct
EAAVTQSPRNKVTVTGGNVTLSCRQT

SEQ ID NO: 19636 - protein, 26 aa, synthetic construct
AQSVTQPDARVTVSEGASLQLRCKYS

SEQ ID NO: 19637 - protein, 26 aa, synthetic construct
EAAVTQSPRNKVTVTGGNVTLSCRQT

SEQ ID NO: 19638 - protein, 26 aa, synthetic construct
QQKVQQSPESLSVPEGGMASFNCTSS

SEQ ID NO: 19639 - protein, 26 aa, synthetic construct
EAAVTQSPRNKVTVTGGNVTLSCRQT

SEQ ID NO: 19640 - protein, 26 aa, synthetic construct
AQKVTQTQTSISVMEKTTVTMDCVYE

SEQ ID NO: 19641 - protein, 26 aa, synthetic construct
EAAVTQSPRNKVTVTGGNVTLSCRQT

SEQ ID NO: 19642 - protein, 26 aa, synthetic construct
GDSVTQKQGQVTLSEDDFLFINCTYS

SEQ ID NO: 19643 - protein, 26 aa, synthetic construct
EAAVTQSPRNKVTVTGGNVTLSCRQT

SEQ ID NO: 19644 - protein, 26 aa, synthetic construct
GDSVTQTEGQVTVSESKSLIINCTYS

SEQ ID NO: 19645 - protein, 26 aa, synthetic construct
EAAVTQSPRNKVTVTGGNVTLSCRQT

SEQ ID NO: 19646 - protein, 26 aa, synthetic construct
AQKVTQTQTSISVMEKTTVTMDCVYE

SEQ ID NO: 19647 - protein, 26 aa, synthetic construct
EAAVTQSPRNKVTVTGGNVTLSCRQT

SEQ ID NO: 19648 - protein, 26 aa, synthetic construct
AQKVTQTQTSISVMEKTTVTMDCVYE

SEQ ID NO: 19649 - protein, 26 aa, synthetic construct
EAAVTQSPRNKVTVTGGNVTLSCRQT

SEQ ID NO: 19650 - protein, 26 aa, synthetic construct
QQKVQQSPESLIVPEGAMTSLNCTFS

SEQ ID NO: 19651 - protein, 26 aa, synthetic construct
EAAVTQSPRNKVTVTGGNVTLSCRQT

SEQ ID NO: 19652 - protein, 26 aa, synthetic construct
GEQVEQLPSILRVQEGSSASINCSYE

SEQ ID NO: 19653 - protein, 26 aa, synthetic construct
EAAVTQSPRNKVTVTGGNVTLSCRQT

SEQ ID NO: 19654 - protein, 26 aa, synthetic construct
AQSVTQPDARVTVSEGASLQLRCKYS

SEQ ID NO: 19655 - protein, 26 aa, synthetic construct
EAAVTQSPRNKVTVTGGNVTLSCRQT

SEQ ID NO: 19656 - protein, 26 aa, synthetic construct
GDSVTQTEGLVTVTEGLPVKLNCTYQ

SEQ ID NO: 19657 - protein, 26 aa, synthetic construct
EAAVTQSPRNKVTVTGGNVTLSCRQT

SEQ ID NO: 19658 - protein, 26 aa, synthetic construct
GNSVTQMQGQVTLSEEEFLFINCTYS

SEQ ID NO: 19659 - protein, 26 aa, synthetic construct
EAAVTQSPRNKVTVTGGNVTLSCRQT

SEQ ID NO: 19660 - protein, 25 aa, synthetic construct
LAKTTQPPSMEAYEGQEVNVSCSHT

SEQ ID NO: 19661 - protein, 26 aa, synthetic construct
EAAVTQSPRNKVTVTGGNVTLSCRQT

SEQ ID NO: 19662 - protein, 26 aa, synthetic construct
QQKVQQSPESLTVSEGAMASLNCTFS

SEQ ID NO: 19663 - protein, 26 aa, synthetic construct
EAAVTQSPRNKVTVTGGNVTLSCRQT

SEQ ID NO: 19664 - protein, 26 aa, synthetic construct
GDSVTQTEGQVTVSESKSLIINCTYS

SEQ ID NO: 19665 - protein, 26 aa, synthetic construct
EAAVTQSPRNKVTVTGGNVTLSCRQT

SEQ ID NO: 19666 - protein, 26 aa, synthetic construct
GDSVTQTEGQVALSEEDFLTIHCNYS

SEQ ID NO: 19667 - protein, 26 aa, synthetic construct
EAAVTQSPRNKVTVTGGNVTLSCRQT

SEQ ID NO: 19668 - protein, 26 aa, synthetic construct
AQKVTQTQTSISVMEKTTVTMDCVYE

SEQ ID NO: 19669 - protein, 26 aa, synthetic construct
EAAVTQSPRNKVTVTGGNVTLSCRQT

SEQ ID NO: 19670 - protein, 26 aa, synthetic construct
QQKVQQSPESLIVPEGGMASLNCTFS

SEQ ID NO: 19671 - protein, 26 aa, synthetic construct
EAAVTQSPRNKVTVTGGNVTLSCRQT

SEQ ID NO: 19672 - protein, 26 aa, synthetic construct
GEQVEQRPPHLSVPEGDSAVIICTYT

SEQ ID NO: 19673 - protein, 26 aa, synthetic construct
EAAVTQSPRNKVTVTGGNVTLSCRQT

SEQ ID NO: 19674 - protein, 26 aa, synthetic construct
GDSVTQTEGLVTLTKGLPVMLNCTYQ

SEQ ID NO: 19675 - protein, 26 aa, synthetic construct
EAAVTQSPRNKVTVTGGNVTLSCRQT

SEQ ID NO: 19676 - protein, 26 aa, synthetic construct
QQQVRQSPQSLTVWEGETAILNCSYE

SEQ ID NO: 19677 - protein, 26 aa, synthetic construct
EAAVTQSPRNKVTVTGGNVTLSCRQT

SEQ ID NO: 19678 - protein, 26 aa, synthetic construct
GDSVTQTEGLVTLTEGLPVMLNCTYQ

SEQ ID NO: 19679 - protein, 26 aa, synthetic construct
EAAVTQSPRNKVTVTGGNVTLSCRQT

SEQ ID NO: 19680 - protein, 26 aa, synthetic construct
GDSVTQTEGPVTVSESESLIINCTYS

SEQ ID NO: 19681 - protein, 26 aa, synthetic construct
EAAVTQSPRNKVTVTGGNVTLSCRQT

SEQ ID NO: 19682 - protein, 26 aa, synthetic construct
GDSVTQTEGPVTVSESESLIINCTYS

SEQ ID NO: 19683 - protein, 26 aa, synthetic construct
EAAVTQSPRNKVTVTGGNVTLSCRQT

SEQ ID NO: 19684 - protein, 26 aa, synthetic construct
GDSVTQTEGLVTLTEGLPVMLNCTYQ

SEQ ID NO: 19685 - protein, 26 aa, synthetic construct
EAAVTQSPRNKVTVTGGNVTLSCRQT

SEQ ID NO: 19686 - protein, 26 aa, synthetic construct
AQKVTQTQTSISVMEKTTVTMDCVYE

SEQ ID NO: 19687 - protein, 26 aa, synthetic construct
EAAVTQSPRNKVTVTGGNVTLSCRQT

SEQ ID NO: 19688 - protein, 26 aa, synthetic construct
QQQVRQSPQSLTVWEGETTILNCSYE

SEQ ID NO: 19689 - protein, 26 aa, synthetic construct
EAAVTQSPRNKVTVTGGNVTLSCRQT

SEQ ID NO: 19690 - protein, 26 aa, synthetic construct
QQKVQQSPESLIVPEGGMASLNCTSS

SEQ ID NO: 19691 - protein, 26 aa, synthetic construct
EAAVTQSPRNKVTVTGGNVTLSCRQT

SEQ ID NO: 19692 - protein, 26 aa, synthetic construct
QQQVRQSPQSLTVWEGETAILNCSYE

SEQ ID NO: 19693 - protein, 26 aa, synthetic construct
EAAVTQSPRNKVTVTGGNVTLSCRQT

SEQ ID NO: 19694 - protein, 26 aa, synthetic construct
AQKVTQTQTSISVMEKTTVTMDCVYE

SEQ ID NO: 19695 - protein, 26 aa, synthetic construct
EAAVTQSPRNKVTVTGGNVTLSCRQT

SEQ ID NO: 19696 - protein, 26 aa, synthetic construct
QQKVQQSPESLIVPEGGMASLNCTSS

SEQ ID NO: 19697 - protein, 26 aa, synthetic construct
EAAVTQSPRNKVTVTGGNVTLSCRQT

SEQ ID NO: 19698 - protein, 25 aa, synthetic construct
GQGVEQPDNLMSVEGTFARVNCTYS

SEQ ID NO: 19699 - protein, 26 aa, synthetic construct
EAAVTQSPRNKVTVTGGNVTLSCRQT

SEQ ID NO: 19700 - protein, 26 aa, synthetic construct
QQNVQQSPESLIVPEGARTSLNCTFS

SEQ ID NO: 19701 - protein, 26 aa, synthetic construct
EAAVTQSPRNKVTVTGGNVTLSCRQT

SEQ ID NO: 19702 - protein, 26 aa, synthetic construct
GEQVEQRPPHLSVREGDSAVIICTYT

SEQ ID NO: 19703 - protein, 26 aa, synthetic construct
EAAVTQSPRNKVTVTGGNVTLSCRQT

SEQ ID NO: 19704 - protein, 26 aa, synthetic construct
GDSVTQTEGQVALSEEDFLTIHCNYS

SEQ ID NO: 19705 - protein, 26 aa, synthetic construct
EAAVTQSPRNKVTVTGGNVTLSCRQT

SEQ ID NO: 19706 - protein, 26 aa, synthetic construct
QQQVRQSPQSLTVWEGETAILNCSYE

SEQ ID NO: 19707 - protein, 26 aa, synthetic construct
EAAVTQSPRSKVAVTGGKVTLSCHQT

SEQ ID NO: 19708 - protein, 26 aa, synthetic construct
SQLAEENLWALSVHEGESVTVNCSYK

SEQ ID NO: 19709 - protein, 26 aa, synthetic construct
EAAVTQSPRSKVAVTGGKVTLSCHQT

SEQ ID NO: 19710 - protein, 26 aa, synthetic construct
QQQVRQSPQSLTVWEGETAILNCSYE

SEQ ID NO: 19711 - protein, 26 aa, synthetic construct
EAAVTQSPRSKVAVTGGKVTLSCHQT

SEQ ID NO: 19712 - protein, 26 aa, synthetic construct
QQKVQQSPESLSVPEGGMASLNCTSS

SEQ ID NO: 19713 - protein, 26 aa, synthetic construct
EAAVTQSPRSKVAVTGGKVTLSCHQT

SEQ ID NO: 19714 - protein, 26 aa, synthetic construct
GQQVQQSPSSLVLQEGENAELQCNFS

SEQ ID NO: 19715 - protein, 26 aa, synthetic construct
EAAVTQSPRSKVAVTGGKVTLSCHQT

SEQ ID NO: 19716 - protein, 26 aa, synthetic construct
AQKVTQTQTSISVVEKTTVTMDCVYE

SEQ ID NO: 19717 - protein, 26 aa, synthetic construct
EAAVTQSPRSKVAVTGGKVTLSCHQT

SEQ ID NO: 19718 - protein, 26 aa, synthetic construct
GEQVEQLPSILRVQERSSASINCTYE

SEQ ID NO: 19719 - protein, 26 aa, synthetic construct
EAAVTQSPRSKVAVTGGKVTLSCHQT

SEQ ID NO: 19720 - protein, 25 aa, synthetic construct
LAKTTQPPSMEAYEGQEVNVSCSHT

SEQ ID NO: 19721 - protein, 26 aa, synthetic construct
EAAVTQSPRSKVAVTGGKVTLSCHQT

SEQ ID NO: 19722 - protein, 26 aa, synthetic construct
GEQVEQLPSILRVQEGSSASINCSYE

SEQ ID NO: 19723 - protein, 26 aa, synthetic construct
EAAVTQSPRSKVAVTGGKVTLSCHQT

SEQ ID NO: 19724 - protein, 26 aa, synthetic construct
AQKVTQTQTSISVMEKTTVTMDCVYE

SEQ ID NO: 19725 - protein, 26 aa, synthetic construct
EAAVTQSPRSKVAVTGGKVTLSCHQT

SEQ ID NO: 19726 - protein, 26 aa, synthetic construct
AQSVTQPDARVTVSEGASLQLRCKYS

SEQ ID NO: 19727 - protein, 26 aa, synthetic construct
EAAVTQSPRSKVAVTGGKVTLSCHQT

SEQ ID NO: 19728 - protein, 26 aa, synthetic construct
GDSVTQTEGLVTLTKGLPVMLNCTYQ

SEQ ID NO: 19729 - protein, 26 aa, synthetic construct
EAAVTQSPRSKVAVTGGKVTLSCHQT

SEQ ID NO: 19730 - protein, 26 aa, synthetic construct
TQTVSQSDAHVTVFEGDSVELRCNYS

SEQ ID NO: 19731 - protein, 26 aa, synthetic construct
EAAVTQSPRSKVAVTGGKVTLSCHQT

SEQ ID NO: 19732 - protein, 26 aa, synthetic construct
GDQVEQSPSALSLHEGTDSALRCNFT

SEQ ID NO: 19733 - protein, 26 aa, synthetic construct
EAAVTQSPRSKVAVTGGKVTLSCHQT

SEQ ID NO: 19734 - protein, 26 aa, synthetic construct
QQQVRQSPQSLTVWEGETAILNCSYE

SEQ ID NO: 19735 - protein, 26 aa, synthetic construct
EAAVTQSPRSKVAVTGGKVTLSCHQT

SEQ ID NO: 19736 - protein, 26 aa, synthetic construct
GEQVEQLPSSLIVQEGASVLINCSYT

SEQ ID NO: 19737 - protein, 26 aa, synthetic construct
EAAVTQSPRSKVAVTGGKVTLSCHQT

SEQ ID NO: 19738 - protein, 26 aa, synthetic construct
QQKVQQSPESLSVPEGGMASFNCTSS

SEQ ID NO: 19739 - protein, 26 aa, synthetic construct
EAAVTQSPRSKVAVTGGKVTLSCHQT

SEQ ID NO: 19740 - protein, 26 aa, synthetic construct
AQKVTQTQTSISVMEKTTVTMDCVYE

SEQ ID NO: 19741 - protein, 26 aa, synthetic construct
EAAVTQSPRSKVAVTGGKVTLSCHQT

SEQ ID NO: 19742 - protein, 26 aa, synthetic construct
GEQVEQLPSSLIVQEGASVLINCSYT

SEQ ID NO: 19743 - protein, 26 aa, synthetic construct
EAAVTQSPRSKVAVTGGKVTLSCHQT

SEQ ID NO: 19744 - protein, 26 aa, synthetic construct
AQKVTQTQTSISVMEKTTVTMDCVYE

SEQ ID NO: 19745 - protein, 26 aa, synthetic construct
EAAVTQSPRSKVAVTGGKVTLSCHQT

SEQ ID NO: 19746 - protein, 26 aa, synthetic construct
AQKVTQTQTSISVMEKTTVTMDCVYE

SEQ ID NO: 19747 - protein, 26 aa, synthetic construct
EAAVTQSPRSKVAVTGGKVTLSCHQT

SEQ ID NO: 19748 - protein, 26 aa, synthetic construct
GQQVKQSSPSLTVQEGGILILNCDYE

SEQ ID NO: 19749 - protein, 26 aa, synthetic construct
EAAVTQSPRSKVAVTGGKVTLSCHQT

SEQ ID NO: 19750 - protein, 26 aa, synthetic construct
GDQVKQSPSALSLQEGTNSALRCNFS

SEQ ID NO: 19751 - protein, 26 aa, synthetic construct
EAAVTQSPRSKVAVTGGKVTLSCHQT

SEQ ID NO: 19752 - protein, 26 aa, synthetic construct
SQWGEENLQALSIQEGEDVTMNCSYK

SEQ ID NO: 19753 - protein, 26 aa, synthetic construct
EAAVTQSPRSKVAVTGGKVTLSCHQT

SEQ ID NO: 19754 - protein, 26 aa, synthetic construct
AQKVTQTQTSISVMEKTTVTMDCVYE

SEQ ID NO: 19755 - protein, 26 aa, synthetic construct
EAAVTQSPRSKVAVTGGKVTLSCHQT

SEQ ID NO: 19756 - protein, 26 aa, synthetic construct
GEQVEQLPSSLIVQEGASVLINCSYT

SEQ ID NO: 19757 - protein, 26 aa, synthetic construct
EAAVTQSPRSKVAVTGGKVTLSCHQT

SEQ ID NO: 19758 - protein, 26 aa, synthetic construct
AQKVTQTQTSISVMEKTTVTMDCVYE

SEQ ID NO: 19759 - protein, 26 aa, synthetic construct
EAAVTQSPRSKVAVTGGKVTLSCHQT

SEQ ID NO: 19760 - protein, 26 aa, synthetic construct
GQQVQQSPASLVLQEGENAELQCNFS

SEQ ID NO: 19761 - protein, 26 aa, synthetic construct
EAAVTQSPRSKVAVTGGKVTLSCHQT

SEQ ID NO: 19762 - protein, 26 aa, synthetic construct
GQQVKQSSPSLTVQEGGISILNCDYE

SEQ ID NO: 19763 - protein, 26 aa, synthetic construct
EAAVTQSPRSKVAVTGGKVTLSCHQT

SEQ ID NO: 19764 - protein, 26 aa, synthetic construct
AQKVTQTQTSISVMEKTTVTMDCVYE

SEQ ID NO: 19765 - protein, 26 aa, synthetic construct
EAAVTQSPRSKVAVTGGKVTLSCHQT

SEQ ID NO: 19766 - protein, 26 aa, synthetic construct
AQSVDQPDAHVTLSEGASLELRCSYS

SEQ ID NO: 19767 - protein, 26 aa, synthetic construct
EAAVTQSPRSKVAVTGGKVTLSCHQT

SEQ ID NO: 19768 - protein, 26 aa, synthetic construct
GDKVKQSPSALSLQEGTNSALRCNFS

SEQ ID NO: 19769 - protein, 26 aa, synthetic construct
EAAVTQSPRSKVAVTGGKVTLSCHQT

SEQ ID NO: 19770 - protein, 26 aa, synthetic construct
AQKVTQTQTSISVMEKTTVTMDCVYE

SEQ ID NO: 19771 - protein, 26 aa, synthetic construct
DTTVKQNPRYKLARVGKPVNLICSQT

SEQ ID NO: 19772 - protein, 25 aa, synthetic construct
DAKTTQPDSMESTEGETVHLPCSHA

SEQ ID NO: 19773 - protein, 26 aa, synthetic construct
DTTVKQNPRYKLARVGKPVNLICSQT

SEQ ID NO: 19774 - protein, 26 aa, synthetic construct
GDSVTQTEGQVTVSESKSLIINCTYS

SEQ ID NO: 19775 - protein, 26 aa, synthetic construct
DTTVKQNPRYKLARVGKPVNLICSQT

SEQ ID NO: 19776 - protein, 26 aa, synthetic construct
AQRVTQVQPTGSSQWGEEVTLDCSYE

SEQ ID NO: 19777 - protein, 26 aa, synthetic construct
DTTVKQNPRYKLARVGKPVNLICSQT

SEQ ID NO: 19778 - protein, 26 aa, synthetic construct
GDQVKQSPSALSLQEGTNSALRCNFS

SEQ ID NO: 19779 - protein, 26 aa, synthetic construct
DTTVKQNPRYKLARVGKPVNLICSQT

SEQ ID NO: 19780 - protein, 26 aa, synthetic construct
AQKVTQTQTSISVMEKTTVTMDCVYE

SEQ ID NO: 19781 - protein, 26 aa, synthetic construct
DTTVKQNPRYKLARVGKPVNLICSQT

SEQ ID NO: 19782 - protein, 26 aa, synthetic construct
GDSVTQTEGQVTVSESKSLIINCTYS

SEQ ID NO: 19783 - protein, 26 aa, synthetic construct
DTTVKQNPRYKLARVGKPVNLICSQT

SEQ ID NO: 19784 - protein, 26 aa, synthetic construct
GDSVTQTEGPVTVSESESLIINCTYS

SEQ ID NO: 19785 - protein, 26 aa, synthetic construct
DTTVKQNPRYKLARVGKPVNLICSQT

SEQ ID NO: 19786 - protein, 26 aa, synthetic construct
GEKVEQHESTLSVREGDSAVINCTYT

SEQ ID NO: 19787 - protein, 26 aa, synthetic construct
DAGVTQTPRHEVAEKGQTIILKCEPV

SEQ ID NO: 19788 - protein, 26 aa, synthetic construct
AQKVTQTQTSISVMEKTTVTMDCVYE

SEQ ID NO: 19789 - protein, 26 aa, synthetic construct
DAGVTQTPRHEVAEKGQTIILKCEPV

SEQ ID NO: 19790 - protein, 26 aa, synthetic construct
AQKVTQTQTSISVMEKTTVTMDCVYE

SEQ ID NO: 19791 - protein, 26 aa, synthetic construct
AQTIHQWPVAEIKAVGSPLSLGCTIK

SEQ ID NO: 19792 - protein, 26 aa, synthetic construct
QQKVQQSPESLIVPEGGMASLNCTSS

SEQ ID NO: 19793 - protein, 26 aa, synthetic construct
AQTIHQWPVAEIKAVGSPLSLGCTIK

SEQ ID NO: 19794 - protein, 26 aa, synthetic construct
GQQVQQSPSSLVLQEGENAELQCNFS

SEQ ID NO: 19795 - protein, 26 aa, synthetic construct
AQTIHQWPVAEIKAVGSPLSLGCTIK

SEQ ID NO: 19796 - protein, 26 aa, synthetic construct
GDSVTQTEGLVTLTKGLPVMLNCTYQ

SEQ ID NO: 19797 - protein, 26 aa, synthetic construct
AQTIHQWPVAEIKAVGSPLSLGCTIK

SEQ ID NO: 19798 - protein, 26 aa, synthetic construct
GDSVTQTEGLVTLTEGLPVMLNCTYQ

SEQ ID NO: 19799 - protein, 26 aa, synthetic construct
AQTIHQWPVAEIKAVGSPLSLGCTIK

SEQ ID NO: 19800 - protein, 26 aa, synthetic construct
GEQVEQRPPHLSVPEGDSAVIICTYT

SEQ ID NO: 19801 - protein, 26 aa, synthetic construct
AQTIHQWPVAEIKAVGSPLSLGCTIK

SEQ ID NO: 19802 - protein, 26 aa, synthetic construct
QQKVQQSPESLIVPEGAMTSLNCTFS

SEQ ID NO: 19803 - protein, 26 aa, synthetic construct
AQTIHQWPVAEIKAVGSPLSLGCTIK

SEQ ID NO: 19804 - protein, 26 aa, synthetic construct
GEQVEQRPPHLSVREGDSAIIICTYT

SEQ ID NO: 19805 - protein, 26 aa, synthetic construct
AQTIHQWPVAEIKAVGSPLSLGCTIK

SEQ ID NO: 19806 - protein, 26 aa, synthetic construct
GEQVEQRPPHLSVREGDSAVIICTYT

SEQ ID NO: 19807 - protein, 26 aa, synthetic construct
AQTIHQWPVAEIKAVGSPLSLGCTIK

SEQ ID NO: 19808 - protein, 26 aa, synthetic construct
AQKVTQTQTSISVMEKTTVTMDCVYE

SEQ ID NO: 19809 - protein, 26 aa, synthetic construct
GPKVLQIPSHQIIDMGQMVTLNCDPV

SEQ ID NO: 19810 - protein, 26 aa, synthetic construct
GDSVTQTEGPVTLSEGTSLTVNCSYE

SEQ ID NO: 19811 - protein, 26 aa, synthetic construct
GPKVLQIPSHQIIDMGQMVTLNCDPV

SEQ ID NO: 19812 - protein, 26 aa, synthetic construct
AQSVTQPDARVTVSEGASLQLRCKYS

SEQ ID NO: 19813 - protein, 26 aa, synthetic construct
GPKVLQIPSHQIIDMGQMVTLNCDPV

SEQ ID NO: 19814 - protein, 26 aa, synthetic construct
SQWGEENLQALSIQEGEDVTMNCSYK

SEQ ID NO: 19815 - protein, 26 aa, synthetic construct
GGIITQTPKFLIGQEGQKLTLKCQQN

SEQ ID NO: 19816 - protein, 26 aa, synthetic construct
QQKVQQSPESLTVSEGAMASLNCTFS

SEQ ID NO: 19817 - protein, 26 aa, synthetic construct
GGIITQTPKFLIGQEGQKLTLKCQQN

SEQ ID NO: 19818 - protein, 26 aa, synthetic construct
GQQVQQSPASLVLQEGENAELQCNFS

SEQ ID NO: 19819 - protein, 26 aa, synthetic construct
GGIITQTPKFLIGQEGQKLTLKCQQN

SEQ ID NO: 19820 - protein, 26 aa, synthetic construct
QQKVQQSPESLIVPEGGMASLNCTSS

SEQ ID NO: 19821 - protein, 26 aa, synthetic construct
GGIITQTPKFLIGQEGQKLTLKCQQN

SEQ ID NO: 19822 - protein, 26 aa, synthetic construct
GDSVTQTEGQVTVSESKSLIINCTYS

SEQ ID NO: 19823 - protein, 26 aa, synthetic construct
GGIITQTPKFLIGQEGQKLTLKCQQN

SEQ ID NO: 19824 - protein, 26 aa, synthetic construct
GEQVEQLPSSLIVQEGASVLINCSYT

SEQ ID NO: 19825 - protein, 26 aa, synthetic construct
GGIITQTPKFLIGQEGQKLTLKCQQN

SEQ ID NO: 19826 - protein, 26 aa, synthetic construct
TQTVSQSDAHVTVFEGDSVELRCNYS

SEQ ID NO: 19827 - protein, 26 aa, synthetic construct
GGIITQTPKFLIGQEGQKLTLKCQQN

SEQ ID NO: 19828 - protein, 26 aa, synthetic construct
GDSVTQKQGQVTLSEDDFLFINCTYS

SEQ ID NO: 19829 - protein, 26 aa, synthetic construct
GGIITQTPKFLIGQEGQKLTLKCQQN

SEQ ID NO: 19830 - protein, 26 aa, synthetic construct
GDSVTQTEGLVTLTEGLPVMLNCTYQ

SEQ ID NO: 19831 - protein, 26 aa, synthetic construct
GGIITQTPKFLIGQEGQKLTLKCQQN

SEQ ID NO: 19832 - protein, 26 aa, synthetic construct
QQQVRQSPQSLTVWEGETAILNCSYE

SEQ ID NO: 19833 - protein, 26 aa, synthetic construct
GGIITQTPKFLIGQEGQKLTLKCQQN

SEQ ID NO: 19834 - protein, 26 aa, synthetic construct
AQKVTQTQTSISVMEKTTVTMDCVYE

SEQ ID NO: 19835 - protein, 26 aa, synthetic construct
GGIITQTPKFLIGQEGQKLTLKCQQN

SEQ ID NO: 19836 - protein, 26 aa, synthetic construct
GDQVKQSPSALSLQEGTNSALRCNFS

SEQ ID NO: 19837 - protein, 26 aa, synthetic construct
GGIITQTPKFLIGQEGQKLTLKCQQN

SEQ ID NO: 19838 - protein, 26 aa, synthetic construct
AQKVTQTQTSISVMEKTTVTMDCVYE

SEQ ID NO: 19839 - protein, 26 aa, synthetic construct
GGIITQTPKFLIGQEGQKLTLKCQQN

SEQ ID NO: 19840 - protein, 26 aa, synthetic construct
SQLAEENSWALSVHEGESVTVNCSYK

SEQ ID NO: 19841 - protein, 26 aa, synthetic construct
GGIITQTPKFLIGQEGQKLTLKCQQN

SEQ ID NO: 19842 - protein, 26 aa, synthetic construct
AQKVTQTQTSISVMEKTTVTMDCVYE

SEQ ID NO: 19843 - protein, 26 aa, synthetic construct
GGIITQTPKFLIGQEGQKLTLKCQQN

SEQ ID NO: 19844 - protein, 26 aa, synthetic construct
AQSVDQPDAHVTLYEGASLELRCSYS

SEQ ID NO: 19845 - protein, 26 aa, synthetic construct
GGIITQTPKFLIGQEGQKLTLKCQQN

SEQ ID NO: 19846 - protein, 26 aa, synthetic construct
GEKVEQHESTLSVREGDSAVINCTYT

SEQ ID NO: 19847 - protein, 26 aa, synthetic construct
GGIITQTPKFLIGQEGQKLTLKCQQN

SEQ ID NO: 19848 - protein, 26 aa, synthetic construct
GEKVEQHESTLSVREGDSAVINCTYT

SEQ ID NO: 19849 - protein, 26 aa, synthetic construct
GGIITQTPKFLIGQEGQKLTLKCQQN

SEQ ID NO: 19850 - protein, 26 aa, synthetic construct
QQQVRQSPQSLTVWEGETAILNCSYE

SEQ ID NO: 19851 - protein, 26 aa, synthetic construct
GGIITQTPKFLIGQEGQKLTLKCQQN

SEQ ID NO: 19852 - protein, 26 aa, synthetic construct
GDSVTQTEGQVTVSESKSLIINCTYS

SEQ ID NO: 19853 - protein, 26 aa, synthetic construct
GGIITQTPKFLIGQEGQKLTLKCQQN

SEQ ID NO: 19854 - protein, 26 aa, synthetic construct
GDSVTQTEGQVTVSESKSLIINCTYS

SEQ ID NO: 19855 - protein, 26 aa, synthetic construct
GGIITQTPKFLIGQEGQKLTLKCQQN

SEQ ID NO: 19856 - protein, 26 aa, synthetic construct
GEQVEQRPPHLSVREGDSAVITCTYT

SEQ ID NO: 19857 - protein, 26 aa, synthetic construct
GGIITQTPKFLIGQEGQKLTLKCQQN

SEQ ID NO: 19858 - protein, 26 aa, synthetic construct
QQKVQQSPESLSVPEGGMASFNCTSS

SEQ ID NO: 19859 - protein, 26 aa, synthetic construct
GGIITQTPKFLIGQEGQKLTLKCQQN

SEQ ID NO: 19860 - protein, 26 aa, synthetic construct
AQSVTQPDARVTVSEGASLQLRCKYS

SEQ ID NO: 19861 - protein, 26 aa, synthetic construct
GGIITQTPKFLIGQEGQKLTLKCQQN

SEQ ID NO: 19862 - protein, 26 aa, synthetic construct
GDSVTQKQGQVTLSEDDFLFINCTYS

SEQ ID NO: 19863 - protein, 26 aa, synthetic construct
GGIITQTPKFLIGQEGQKLTLKCQQN

SEQ ID NO: 19864 - protein, 26 aa, synthetic construct
TQTVSQSDAHVTVFEGDSVELRCNYS

SEQ ID NO: 19865 - protein, 26 aa, synthetic construct
GGIITQTPKFLIGQEGQKLTLKCQQN

SEQ ID NO: 19866 - protein, 26 aa, synthetic construct
TQTVSQSDAHVTVFEGDSVELRCNYS

SEQ ID NO: 19867 - protein, 26 aa, synthetic construct
GGIITQTPKFLIGQEGQKLTLKCQQN

SEQ ID NO: 19868 - protein, 26 aa, synthetic construct
GEQVEQLPSSLIVQEGASVLINCSYT

SEQ ID NO: 19869 - protein, 26 aa, synthetic construct
GGIITQTPKFLIGQEGQKLTLKCQQN

SEQ ID NO: 19870 - protein, 25 aa, synthetic construct
LAKTTQPPSMEAYEGQEVNVSCSHT

SEQ ID NO: 19871 - protein, 26 aa, synthetic construct
GGIITQTPKFLIGQEGQKLTLKCQQN

SEQ ID NO: 19872 - protein, 26 aa, synthetic construct
QQKVQQSPESLIVPEGGMASLNCTSS

SEQ ID NO: 19873 - protein, 26 aa, synthetic construct
GGIITQTPKFLIGQEGQKLTLKCQQN

SEQ ID NO: 19874 - protein, 26 aa, synthetic construct
GDSVIQMQGQVTLSENDFLFINCTYS

SEQ ID NO: 19875 - protein, 26 aa, synthetic construct
GGIITQTPKFLIGQEGQKLTLKCQQN

SEQ ID NO: 19876 - protein, 26 aa, synthetic construct
QQQVRQSPQSLTVWEGETAILNCSYE

SEQ ID NO: 19877 - protein, 26 aa, synthetic construct
GGIITQTPKFLIGQEGQKLTLKCQQN

SEQ ID NO: 19878 - protein, 26 aa, synthetic construct
GDSVTQTEGLVTLTKGLPVMLNCTYQ

SEQ ID NO: 19879 - protein, 26 aa, synthetic construct
VTLLEQNPRWRLVPRGQAVNLRCILK

SEQ ID NO: 19880 - protein, 25 aa, synthetic construct
LAKTTQPPSMEAYEGQEVNVSCSHT

SEQ ID NO: 19881 - protein, 26 aa, synthetic construct
VTLLEQNPRWRLVPRGQAVNLRCILK

SEQ ID NO: 19882 - protein, 26 aa, synthetic construct
GEQVEQRPPHLSVREGDSAVIICTYT

SEQ ID NO: 19883 - protein, 26 aa, synthetic construct
VTLLEQNPRWRLVPRGQAVNLRCILK

SEQ ID NO: 19884 - protein, 26 aa, synthetic construct
AQKVTQTQTSISVMEKTTVTMDCVYE

SEQ ID NO: 19885 - protein, 26 aa, synthetic construct
VTLLEQNPRWRLVPRGQAVNLRCILK

SEQ ID NO: 19886 - protein, 26 aa, synthetic construct
AQSVTQPDARVTVSEGASLQLRCKYS

SEQ ID NO: 19887 - protein, 26 aa, synthetic construct
VTLLEQNPRWRLVPRGQAVNLRCILK

SEQ ID NO: 19888 - protein, 26 aa, synthetic construct
GDSVTQTEGLVTLTEGLPVMLNCTYQ

SEQ ID NO: 19889 - protein, 26 aa, synthetic construct
VTLLEQNPRWRLVPRGQAVNLRCILK

SEQ ID NO: 19890 - protein, 25 aa, synthetic construct
LAKTTQPPSMEAYEGQEVNVSCSHT

SEQ ID NO: 19891 - protein, 26 aa, synthetic construct
VTLLEQNPRWRLVPRGQAVNLRCILK

SEQ ID NO: 19892 - protein, 26 aa, synthetic construct
GEQVEQRPPHLSVPEGDSAVIICTYT

SEQ ID NO: 19893 - protein, 26 aa, synthetic construct
VTLLEQNPRWRLVPRGQAVNLRCILK

SEQ ID NO: 19894 - protein, 26 aa, synthetic construct
SQLAEENSWALSVHEGESVTVNCSYK

SEQ ID NO: 19895 - protein, 26 aa, synthetic construct
VTLLEQNPRWRLVPRGQAVNLRCILK

SEQ ID NO: 19896 - protein, 26 aa, synthetic construct
QQQVRQSPQSLTVWEGETAILNCSYE

SEQ ID NO: 19897 - protein, 26 aa, synthetic construct
VTLLEQNPRWRLVPRGQAVNLRCILK

SEQ ID NO: 19898 - protein, 26 aa, synthetic construct
SQLAEENLWALSVHEGESVTVNCSYK

SEQ ID NO: 19899 - protein, 26 aa, synthetic construct
VTLLEQNPRWRLVPRGQAVNLRCILK

SEQ ID NO: 19900 - protein, 26 aa, synthetic construct
AQSVTQPDARVTVSEGASLQLRCKYS

SEQ ID NO: 19901 - protein, 26 aa, synthetic construct
VTLLEQNPRWRLVPRGQAVNLRCILK

SEQ ID NO: 19902 - protein, 26 aa, synthetic construct
QQQVRQSPQSLTVWEGETAILNCSYE

SEQ ID NO: 19903 - DNA, 78 bp, synthetic construct; identical to SEQ ID NO: 1511
  source 1..78: mol_type = other DNA

SEQ ID NO: 19904 - DNA, 78 bp, synthetic construct; identical to SEQ ID NO: 1644
  source 1..78: mol_type = other DNA

SEQ ID NO: 19905 - DNA, 78 bp, synthetic construct; identical to SEQ ID NO: 1507
  source 1..78: mol_type = other DNA

SEQ ID NO: 19906 - DNA, 78 bp, synthetic construct; identical to SEQ ID NO: 1644
  source 1..78: mol_type = other DNA

SEQ ID NO: 19907 - DNA, 78 bp, synthetic construct; identical to SEQ ID NO: 1511
  source 1..78: mol_type = other DNA

SEQ ID NO: 19908 - DNA, 78 bp, synthetic construct; identical to SEQ ID NO: 1514
  source 1..78: mol_type = other DNA

SEQ ID NO: 19909 - DNA, 78 bp, synthetic construct; identical to SEQ ID NO: 1491
  source 1..78: mol_type = other DNA

SEQ ID NO: 19910 - DNA, 78 bp, synthetic construct; identical to SEQ ID NO: 1592
  source 1..78: mol_type = other DNA

SEQ ID NO: 19911 - DNA, 78 bp, synthetic construct; identical to SEQ ID NO: 1783
  source 1..78: mol_type = other DNA

SEQ ID NO: 19912 - DNA, 78 bp, synthetic construct; identical to SEQ ID NO: 1594
  source 1..78: mol_type = other DNA

SEQ ID NO: 19913 - DNA, 78 bp, synthetic construct; identical to SEQ ID NO: 1647
  source 1..78: mol_type = other DNA

SEQ ID NO: 19914 - DNA, 78 bp, synthetic construct; identical to SEQ ID NO: 1548
  source 1..78: mol_type = other DNA

SEQ ID NO: 19915 - DNA, 78 bp, synthetic construct; identical to SEQ ID NO: 1491
  source 1..78: mol_type = other DNA

SEQ ID NO: 19916 - DNA, 78 bp, synthetic construct; identical to SEQ ID NO: 1564
  source 1..78: mol_type = other DNA

SEQ ID NO: 19917 - DNA, 78 bp, synthetic construct; identical to SEQ ID NO: 1487
  source 1..78: mol_type = other DNA

SEQ ID NO: 19918 - DNA, 75 bp, synthetic construct; identical to SEQ ID NO: 1488
  source 1..75: mol_type = other DNA

SEQ ID NO: 19919 - DNA, 78 bp, synthetic construct; identical to SEQ ID NO: 1487
  source 1..78: mol_type = other DNA

SEQ ID NO: 19920 - DNA, 78 bp, synthetic construct; identical to SEQ ID NO: 1994
  source 1..78: mol_type = other DNA

SEQ ID NO: 19921 - DNA, 78 bp, synthetic construct; identical to SEQ ID NO: 1491
  source 1..78: mol_type = other DNA

SEQ ID NO: 19922 - DNA, 78 bp, synthetic construct; identical to SEQ ID NO: 1492
  source 1..78: mol_type = other DNA

SEQ ID NO: 19923 - DNA, 75 bp, synthetic construct; identical to SEQ ID NO: 1579
  source 1..75: mol_type = other DNA

SEQ ID NO: 19924 - DNA, 78 bp, synthetic construct; identical to SEQ ID NO: 1562
  source 1..78: mol_type = other DNA

SEQ ID NO: 19925 - DNA, 78 bp, synthetic construct; identical to SEQ ID NO: 1519
  source 1..78: mol_type = other DNA

SEQ ID NO: 19926 - DNA, 78 bp, synthetic construct; identical to SEQ ID NO: 1528
  source 1..78: mol_type = other DNA

SEQ ID NO: 19927 - DNA, 78 bp, synthetic construct; identical to SEQ ID NO: 1485
  source 1..78: mol_type = other DNA

SEQ ID NO: 19928 - DNA, 78 bp, synthetic construct; identical to SEQ ID NO: 1492
  source 1..78: mol_type = other DNA

SEQ ID NO: 19929 - DNA, 78 bp, synthetic construct; identical to SEQ ID NO: 1499
  source 1..78: mol_type = other DNA

SEQ ID NO: 19930 - DNA, 78 bp, synthetic construct; identical to SEQ ID NO: 1742
  source 1..78: mol_type = other DNA

SEQ ID NO: 19931 - DNA, 78 bp, synthetic construct; identical to SEQ ID NO: 1491
  source 1..78: mol_type = other DNA

SEQ ID NO: 19932 - DNA, 78 bp, synthetic construct; identical to SEQ ID NO: 1528
  source 1..78: mol_type = other DNA

SEQ ID NO: 19933 - DNA, 78 bp, synthetic construct; identical to SEQ ID NO: 1511
  source 1..78: mol_type = other DNA

SEQ ID NO: 19934 - DNA, 78 bp, synthetic construct; identical to SEQ ID NO: 1644
  source 1..78: mol_type = other DNA

SEQ ID NO: 19935 - DNA, 78 bp, synthetic construct; identical to SEQ ID NO: 1511
  source 1..78: mol_type = other DNA

SEQ ID NO: 19936 - DNA, 78 bp, synthetic construct; identical to SEQ ID NO: 1546
  source 1..78: mol_type = other DNA

SEQ ID NO: 19937 - DNA, 75 bp, synthetic construct; identical to SEQ ID NO: 1579
  source 1..75: mol_type = other DNA

SEQ ID NO: 19938 - DNA, 78 bp, synthetic construct; identical to SEQ ID NO: 1540
  source 1..78: mol_type = other DNA

SEQ ID NO: 19939 - DNA, 78 bp, synthetic construct; identical to SEQ ID NO: 1499
  source 1..78: mol_type = other DNA

SEQ ID NO: 19940 - DNA, 78 bp, synthetic construct; identical to SEQ ID NO: 1544
  source 1..78: mol_type = other DNA

SEQ ID NO: 19941 - DNA, 78 bp, synthetic construct; identical to SEQ ID NO: 1487
  source 1..78: mol_type = other DNA

SEQ ID NO: 19942 - DNA, 78 bp, synthetic construct; identical to SEQ ID NO: 1528
  source 1..78: mol_type = other DNA

SEQ ID NO: 19943 - DNA, 78 bp, synthetic construct; identical to SEQ ID NO: 1487
  source 1..78: mol_type = other DNA

SEQ ID NO: 19944 - DNA, 78 bp, synthetic construct; identical to SEQ ID NO: 1506
  source 1..78: mol_type = other DNA

SEQ ID NO: 19945 - DNA, 78 bp, synthetic construct; identical to SEQ ID NO: 1491
  source 1..78: mol_type = other DNA

SEQ ID NO: 19946 - DNA, 78 bp, synthetic construct; identical to SEQ ID NO: 1528
  source 1..78: mol_type = other DNA

SEQ ID NO: 19947 - DNA, 78 bp, synthetic construct; identical to SEQ ID NO: 1491
  source 1..78: mol_type = other DNA

SEQ ID NO: 19948 - DNA, 78 bp, synthetic construct; identical to SEQ ID NO: 1576
  source 1..78: mol_type = other DNA

SEQ ID NO: 19949 - DNA, 75 bp, synthetic construct; identical to SEQ ID NO: 1579
  source 1..75: mol_type = other DNA

SEQ ID NO: 19950 - DNA, 78 bp, synthetic construct; identical to SEQ ID NO: 1994
  source 1..78: mol_type = other DNA

SEQ ID NO: 19951 - DNA, 75 bp, synthetic construct; identical to SEQ ID NO: 1579
  source 1..75: mol_type = other DNA

SEQ ID NO: 19952 - DNA, 78 bp, synthetic construct; identical to SEQ ID NO: 1578
  source 1..78: mol_type = other DNA

SEQ ID NO: 19953 - DNA, 78 bp, synthetic construct; identical to SEQ ID NO: 2051
  source 1..78: mol_type = other DNA

SEQ ID NO: 19954 - DNA, 78 bp, synthetic construct; identical to SEQ ID NO: 1528
  source 1..78: mol_type = other DNA

SEQ ID NO: 19955 - DNA, 78 bp, synthetic construct; identical to SEQ ID NO: 1583
  source 1..78: mol_type = other DNA

SEQ ID NO: 19956 - DNA, 78 bp, synthetic construct; identical to SEQ ID NO: 1540
  source 1..78: mol_type = other DNA

SEQ ID NO: 19957 - DNA, 78 bp, synthetic construct; identical to SEQ ID NO: 1583
  source 1..78: mol_type = other DNA

SEQ ID NO: 19958 - DNA, 78 bp, synthetic construct; identical to SEQ ID NO: 1494
  source 1..78: mol_type = other DNA

SEQ ID NO: 19959 - DNA, 78 bp, synthetic construct; identical to SEQ ID NO: 1487
  source 1..78: mol_type = other DNA

SEQ ID NO: 19960 - DNA, 78 bp, synthetic construct; identical to SEQ ID NO: 1578
  source 1..78: mol_type = other DNA

SEQ ID NO: 19961 - DNA, 78 bp, synthetic construct; identical to SEQ ID NO: 1487
  source 1..78: mol_type = other DNA

SEQ ID NO: 19962 - DNA, 78 bp, synthetic construct; identical to SEQ ID NO: 1846
  source 1..78: mol_type = other DNA

SEQ ID NO: 19963 - DNA, 78 bp, synthetic construct; identical to SEQ ID NO: 1487
  source 1..78: mol_type = other DNA

SEQ ID NO: 19964 - DNA, 78 bp, synthetic construct; identical to SEQ ID NO: 1634
  source 1..78: mol_type = other DNA

SEQ ID NO: 19965 - DNA, 78 bp, synthetic construct; identical to SEQ ID NO: 1491
  source 1..78: mol_type = other DNA

SEQ ID NO: 19966 - DNA, 78 bp, synthetic construct; identical to SEQ ID NO: 1882
  source 1..78: mol_type = other DNA

SEQ ID NO: 19967 - DNA, 78 bp, synthetic construct; identical to SEQ ID NO: 1491
  source 1..78: mol_type = other DNA

SEQ ID NO: 19968 - DNA, 78 bp, synthetic construct; identical to SEQ ID NO: 1764
  source 1..78: mol_type = other DNA

SEQ ID NO: 19969 - DNA, 78 bp, synthetic construct; identical to SEQ ID NO: 1783
  source 1..78: mol_type = other DNA

SEQ ID NO: 19970 - DNA, 78 bp, synthetic construct; identical to SEQ ID NO: 1504
  source 1..78: mol_type = other DNA

SEQ ID NO: 19971 - DNA, 78 bp, synthetic construct; identical to SEQ ID NO: 1519
  source 1..78: mol_type = other DNA

SEQ ID NO: 19972 - DNA, 78 bp, synthetic construct; identical to SEQ ID NO: 1592
  source 1..78: mol_type = other DNA

SEQ ID NO: 19973 - DNA, 78 bp, synthetic construct; identical to SEQ ID NO: 1511
  source 1..78: mol_type = other DNA

SEQ ID NO: 19974 - DNA, 78 bp, synthetic construct; identical to SEQ ID NO: 1764
  source 1..78: mol_type = other DNA

SEQ ID NO: 19975 - DNA, 75 bp, synthetic construct; identical to SEQ ID NO: 1579
  source 1..75: mol_type = other DNA

SEQ ID NO: 19976 - DNA, 78 bp, synthetic construct; identical to SEQ ID NO: 1706
  source 1..78: mol_type = other DNA

SEQ ID NO: 19977 - DNA, 75 bp, synthetic construct; identical to SEQ ID NO: 1579
  source 1..75: mol_type = other DNA

SEQ ID NO: 19978 - DNA, 78 bp, synthetic construct; identical to SEQ ID NO: 1580
  source 1..78: mol_type = other DNA

SEQ ID NO: 19979 - DNA, 75 bp, synthetic construct; identical to SEQ ID NO: 1579
  source 1..75: mol_type = other DNA

SEQ ID NO: 19980 - DNA, 78 bp, synthetic construct; identical to SEQ ID NO: 1528
  source 1..78: mol_type = other DNA

SEQ ID NO: 19981 - DNA, 75 bp, synthetic construct; identical to SEQ ID NO: 1579
  source 1..75: mol_type = other DNA

SEQ ID NO: 19982 - DNA, 78 bp, synthetic construct; identical to SEQ ID NO: 1556
  source 1..78: mol_type = other DNA

SEQ ID NO: 19983 - DNA, 75 bp, synthetic construct; identical to SEQ ID NO: 1579
  source 1..75: mol_type = other DNA

SEQ ID NO: 19984 - DNA, 78 bp, synthetic construct; identical to SEQ ID NO: 1940
  source 1..78: mol_type = other DNA

SEQ ID NO: 19985 - DNA, 75 bp, synthetic construct; identical to SEQ ID NO: 1579
  source 1..75: mol_type = other DNA

SEQ ID NO: 19986 - DNA, 78 bp, synthetic construct; identical to SEQ ID NO: 1528
  source 1..78: mol_type = other DNA

SEQ ID NO: 19987 - DNA, 75 bp, synthetic construct; identical to SEQ ID NO: 1579
  source 1..75: mol_type = other DNA

SEQ ID NO: 19988 - DNA, 78 bp, synthetic construct; identical to SEQ ID NO: 1504
  source 1..78: mol_type = other DNA

SEQ ID NO: 19989 - DNA, 75 bp, synthetic construct; identical to SEQ ID NO: 1579
  source 1..75: mol_type = other DNA

SEQ ID NO: 19990 - DNA, 78 bp, synthetic construct; identical to SEQ ID NO: 1528
  source 1..78: mol_type = other DNA

SEQ ID NO: 19991 - DNA, 75 bp, synthetic construct; identical to SEQ ID NO: 1579
  source 1..75: mol_type = other DNA

SEQ ID NO: 19992 - DNA, 78 bp, synthetic construct; identical to SEQ ID NO: 1528
  source 1..78: mol_type = other DNA

SEQ ID NO: 19993 - DNA, 75 bp, synthetic construct; identical to SEQ ID NO: 1579
  source 1..75: mol_type = other DNA

SEQ ID NO: 19994 - DNA, 78 bp, synthetic construct; identical to SEQ ID NO: 1592
  source 1..78: mol_type = other DNA

SEQ ID NO: 19995 - DNA, 75 bp, synthetic construct; identical to SEQ ID NO: 1579
  source 1..75: mol_type = other DNA

SEQ ID NO: 19996 - DNA, 78 bp, synthetic construct; identical to SEQ ID NO: 1706
  source 1..78: mol_type = other DNA

SEQ ID NO: 19997 - DNA, 75 bp, synthetic construct; identical to SEQ ID NO: 1579
  source 1..75: mol_type = other DNA

SEQ ID NO: 19998 - DNA, 78 bp, synthetic construct; identical to SEQ ID NO: 1740
  source 1..78: mol_type = other DNA

SEQ ID NO: 19999 - DNA, 75 bp, synthetic construct; identical to SEQ ID NO: 1579
  source 1..75: mol_type = other DNA

SEQ ID NO: 20000 - DNA, 78 bp, synthetic construct; identical to SEQ ID NO: 1498
  source 1..78: mol_type = other DNA

SEQ ID NO: 20001 - DNA, 75 bp, synthetic construct; identical to SEQ ID NO: 1579
  source 1..75: mol_type = other DNA

SEQ ID NO: 20002 - DNA, 78 bp, synthetic construct; identical to SEQ ID NO: 1674
  source 1..78: mol_type = other DNA

SEQ ID NO: 20003 - DNA, 75 bp, synthetic construct; identical to SEQ ID NO: 1579
  source 1..75: mol_type = other DNA

SEQ ID NO: 20004 - DNA, 78 bp, synthetic construct; identical to SEQ ID NO: 1540
  source 1..78: mol_type = other DNA

SEQ ID NO: 20005 - DNA, 75 bp, synthetic construct; identical to SEQ ID NO: 1579
  source 1..75: mol_type = other DNA

SEQ ID NO: 20006 - DNA, 78 bp, synthetic construct; identical to SEQ ID NO: 1556
  source 1..78: mol_type = other DNA

SEQ ID NO: 20007 - DNA, 75 bp, synthetic construct; identical to SEQ ID NO: 1579
  source 1..75: mol_type = other DNA

SEQ ID NO: 20008 - DNA, 78 bp, synthetic construct; identical to SEQ ID NO: 1858
  source 1..78: mol_type = other DNA

SEQ ID NO: 20009 - DNA, 75 bp, synthetic construct; identical to SEQ ID NO: 1579
  source 1..75: mol_type = other DNA

SEQ ID NO: 20010 - DNA, 78 bp, synthetic construct; identical to SEQ ID NO: 1504
  source 1..78: mol_type = other DNA

SEQ ID NO: 20011 - DNA, 75 bp, synthetic construct; identical to SEQ ID NO: 1579
  source 1..75: mol_type = other DNA

SEQ ID NO: 20012 - DNA, 78 bp, synthetic construct; identical to SEQ ID NO: 1494
  source 1..78: mol_type = other DNA

SEQ ID NO: 20013 - DNA, 78 bp, synthetic construct; identical to SEQ ID NO: 1501
  source 1..78: mol_type = other DNA

SEQ ID NO: 20014 - DNA, 78 bp, synthetic construct; identical to SEQ ID NO: 1806
  source 1..78: mol_type = other DNA

SEQ ID NO: 20015 - DNA, 78 bp, synthetic construct; identical to SEQ ID NO: 1501
  source 1..78: mol_type = other DNA

SEQ ID NO: 20016 - DNA, 78 bp, synthetic construct; identical to SEQ ID NO: 1496
  source 1..78: mol_type = other DNA

SEQ ID NO: 20017 - DNA, 78 bp, synthetic construct; identical to SEQ ID NO: 1501
  source 1..78: mol_type = other DNA

SEQ ID NO: 20018 - DNA, 78 bp, synthetic construct; identical to SEQ ID NO: 1740
  source 1..78: mol_type = other DNA

SEQ ID NO: 20019 - DNA, 78 bp, synthetic construct
  source 1..78: mol_type = other DNA
aattcaaaagtcattcagactccaagatatctggtgaaagggcaaggacaaaaagcaaagatgaggtgtatccctgaa

SEQ ID NO: 20020 - DNA, 78 bp, synthetic construct; identical to SEQ ID NO: 1528
  source 1..78: mol_type = other DNA

SEQ ID NO: 20021 - DNA, 78 bp, synthetic construct; identical to SEQ ID NO: 2051
  source 1..78: mol_type = other DNA

SEQ ID NO: 20022 - DNA, 78 bp, synthetic construct; identical to SEQ ID NO: 1592
  source 1..78: mol_type = other DNA

SEQ ID NO: 20023 - DNA, 78 bp, synthetic construct; identical to SEQ ID NO: 2051
  source 1..78: mol_type = other DNA

SEQ ID NO: 20024 - DNA, 78 bp, synthetic construct; identical to SEQ ID NO: 1526
  source 1..78: mol_type = other DNA

SEQ ID NO: 20025 - DNA, 78 bp, synthetic construct; identical to SEQ ID NO: 2051
  source 1..78: mol_type = other DNA

SEQ ID NO: 20026 - DNA, 78 bp, synthetic construct; identical to SEQ ID NO: 1526
  source 1..78: mol_type = other DNA

SEQ ID NO: 20027 - DNA, 78 bp, synthetic construct; identical to SEQ ID NO: 2051
  source 1..78: mol_type = other DNA

SEQ ID NO: 20028 - DNA, 78 bp, synthetic construct; identical to SEQ ID NO: 1514
  source 1..78: mol_type = other DNA

SEQ ID NO: 20029 - DNA, 78 bp, synthetic construct; identical to SEQ ID NO: 2051
  source 1..78: mol_type = other DNA

SEQ ID NO: 20030 - DNA, 78 bp, synthetic construct; identical to SEQ ID NO: 2330
  source 1..78: mol_type = other DNA

SEQ ID NO: 20031 - DNA, 78 bp, synthetic construct; identical to SEQ ID NO: 2051
  source 1..78: mol_type = other DNA

SEQ ID NO: 20032 - DNA, 78 bp, synthetic construct; identical to SEQ ID NO: 1526
  source 1..78: mol_type = other DNA

SEQ ID NO: 20033 - DNA, 78 bp, synthetic construct; identical to SEQ ID NO: 1485
  source 1..78: mol_type = other DNA

SEQ ID NO: 20034 - DNA, 78 bp, synthetic construct; identical to SEQ ID NO: 1492
  source 1..78: mol_type = other DNA

SEQ ID NO: 20035 - DNA, 78 bp, synthetic construct; identical to SEQ ID NO: 1485
  source 1..78: mol_type = other DNA

SEQ ID NO: 20036 - DNA, 78 bp, synthetic construct; identical to SEQ ID NO: 1544
  source 1..78: mol_type = other DNA

SEQ ID NO: 20037 - DNA, 78 bp, synthetic construct; identical to SEQ ID NO: 1485
  source 1..78: mol_type = other DNA

SEQ ID NO: 20038 - DNA, 78 bp, synthetic construct; identical to SEQ ID NO: 2072
  source 1..78: mol_type = other DNA

SEQ ID NO: 20039 - DNA, 78 bp, synthetic construct; identical to SEQ ID NO: 1485
  source 1..78: mol_type = other DNA

SEQ ID NO: 20040 - DNA, 75 bp, synthetic construct; identical to SEQ ID NO: 1488
  source 1..75: mol_type = other DNA

SEQ ID NO: 20041 - DNA, 78 bp, synthetic construct; identical to SEQ ID NO: 1485
  source 1..78: mol_type = other DNA

SEQ ID NO: 20042 - DNA, 78 bp, synthetic construct; identical to SEQ ID NO: 1556
  source 1..78: mol_type = other DNA

SEQ ID NO: 20043 - DNA, 78 bp, synthetic construct; identical to SEQ ID NO: 1485
  source 1..78: mol_type = other DNA

SEQ ID NO: 20044 - DNA, 78 bp, synthetic construct; identical to SEQ ID NO: 1514
  source 1..78: mol_type = other DNA

SEQ ID NO: 20045 - DNA, 78 bp, synthetic construct; identical to SEQ ID NO: 1485
  source 1..78: mol_type = other DNA

SEQ ID NO: 20046 - DNA, 78 bp, synthetic construct; identical to SEQ ID NO: 1548
  source 1..78: mol_type = other DNA

SEQ ID NO: 20047 - DNA, 78 bp, synthetic construct; identical to SEQ ID NO: 1485
  source 1..78: mol_type = other DNA

SEQ ID NO: 20048 - DNA, 78 bp, synthetic construct; identical to SEQ ID NO: 1706
  source 1..78: mol_type = other DNA

SEQ ID NO: 20049 - DNA, 78 bp, synthetic construct; identical to SEQ ID NO: 1485
  source 1..78: mol_type = other DNA

SEQ ID NO: 20050 - DNA, 78 bp, synthetic construct; identical to SEQ ID NO: 1560
  source 1..78: mol_type = other DNA

SEQ ID NO: 20051 - DNA, 78 bp, synthetic construct; identical to SEQ ID NO: 1485
  source 1..78: mol_type = other DNA

SEQ ID NO: 20052 - DNA, 78 bp, synthetic construct; identical to SEQ ID NO: 1492
  source 1..78: mol_type = other DNA

SEQ ID NO: 20053 - DNA, 78 bp, synthetic construct; identical to SEQ ID NO: 1485
  source 1..78: mol_type = other DNA

SEQ ID NO: 20054 - DNA, 78 bp, synthetic construct; identical to SEQ ID NO: 1608
  source 1..78: mol_type = other DNA

SEQ ID NO: 20055 - DNA, 78 bp, synthetic construct; identical to SEQ ID NO: 1485
  source 1..78: mol_type = other DNA

SEQ ID NO: 20056 - DNA, 78 bp, synthetic construct; identical to SEQ ID NO: 1498
  source 1..78: mol_type = other DNA

SEQ ID NO: 20057 - DNA, 78 bp, synthetic construct; identical to SEQ ID NO: 1485
  source 1..78: mol_type = other DNA

SEQ ID NO: 20058 - DNA, 78 bp, synthetic construct; identical to SEQ ID NO: 1600
  source 1..78: mol_type = other DNA

SEQ ID NO: 20059 - DNA, 78 bp, synthetic construct; identical to SEQ ID NO: 1485
  source 1..78: mol_type = other DNA

SEQ ID NO: 20060 - DNA, 78 bp, synthetic construct; identical to SEQ ID NO: 1568
  source 1..78: mol_type = other DNA

SEQ ID NO: 20061 - DNA, 78 bp, synthetic construct; identical to SEQ ID NO: 1485
  source 1..78: mol_type = other DNA

SEQ ID NO: 20062 - DNA, 78 bp, synthetic construct; identical to SEQ ID NO: 1706
  source 1..78: mol_type = other DNA

SEQ ID NO: 20063 - DNA, 78 bp, synthetic construct; identical to SEQ ID NO: 1485
  source 1..78: mol_type = other DNA

SEQ ID NO: 20064 - DNA, 78 bp, synthetic construct; identical to SEQ ID NO: 1522
  source 1..78: mol_type = other DNA

SEQ ID NO: 20065 - DNA, 78 bp, synthetic construct; identical to SEQ ID NO: 1485
  source 1..78: mol_type = other DNA

SEQ ID NO: 20066 - DNA, 78 bp, synthetic construct; identical to SEQ ID NO: 1540
  source 1..78: mol_type = other DNA

SEQ ID NO: 20067 - DNA, 78 bp, synthetic construct; identical to SEQ ID NO: 1647
  source 1..78: mol_type = other DNA

SEQ ID NO: 20068 - DNA, 78 bp, synthetic construct; identical to SEQ ID NO: 1584
  source 1..78: mol_type = other DNA

SEQ ID NO: 20069 - DNA, 78 bp, synthetic construct; identical to SEQ ID NO: 1647
  source 1..78: mol_type = other DNA

SEQ ID NO: 20070 - DNA, 78 bp, synthetic construct; identical to SEQ ID NO: 1522
  source 1..78: mol_type = other DNA

SEQ ID NO: 20071 - DNA, 78 bp, synthetic construct; identical to SEQ ID NO: 1647
  source 1..78: mol_type = other DNA

SEQ ID NO: 20072 - DNA, 78 bp, synthetic construct; identical to SEQ ID NO: 1564
  source 1..78: mol_type = other DNA

SEQ ID NO: 20073 - DNA, 78 bp, synthetic construct; identical to SEQ ID NO: 1647
  source 1..78: mol_type = other DNA

SEQ ID NO: 20074 - DNA, 78 bp, synthetic construct; identical to SEQ ID NO: 1608
  source 1..78: mol_type = other DNA

SEQ ID NO: 20075 - DNA, 78 bp, synthetic construct; identical to SEQ ID NO: 1647
  source 1..78: mol_type = other DNA

SEQ ID NO: 20076 - DNA, 78 bp, synthetic construct; identical to SEQ ID NO: 1732
  source 1..78: mol_type = other DNA

SEQ ID NO: 20077 - DNA, 78 bp, synthetic construct; identical to SEQ ID NO: 1647
  source 1..78: mol_type = other DNA

SEQ ID NO: 20078 - DNA, 75 bp, synthetic construct; identical to SEQ ID NO: 1588
  source 1..75: mol_type = other DNA

SEQ ID NO: 20079 - DNA, 78 bp, synthetic construct; identical to SEQ ID NO: 1499
  source 1..78: mol_type = other DNA

SEQ ID NO: 20080 - DNA, 78 bp, synthetic construct; identical to SEQ ID NO: 1528
  source 1..78: mol_type = other DNA

SEQ ID NO: 20081 - DNA, 78 bp, synthetic construct; identical to SEQ ID NO: 1499
  source 1..78: mol_type = other DNA

SEQ ID NO: 20082 - DNA, 78 bp, synthetic construct; identical to SEQ ID NO: 1544
  source 1..78: mol_type = other DNA

SEQ ID NO: 20083 - DNA, 78 bp, synthetic construct; identical to SEQ ID NO: 1499
  source 1..78: mol_type = other DNA

SEQ ID NO: 20084 - DNA, 78 bp, synthetic construct; identical to SEQ ID NO: 2012
  source 1..78: mol_type = other DNA

SEQ ID NO: 20085 - DNA, 78 bp, synthetic construct; identical to SEQ ID NO: 1499
  source 1..78: mol_type = other DNA

SEQ ID NO: 20086 - DNA, 78 bp, synthetic construct; identical to SEQ ID NO: 1528
  source 1..78: mol_type = other DNA

SEQ ID NO: 20087 - DNA, 78 bp, synthetic construct; identical to SEQ ID NO: 1499
  source 1..78: mol_type = other DNA

SEQ ID NO: 20088 - DNA, 78 bp, synthetic construct; identical to SEQ ID NO: 1564
  source 1..78: mol_type = other DNA

SEQ ID NO: 20089 - DNA, 78 bp, synthetic construct; identical to SEQ ID NO: 1499
  source 1..78: mol_type = other DNA

SEQ ID NO: 20090 - DNA, 78 bp, synthetic construct; identical to SEQ ID NO: 1614
  source 1..78: mol_type = other DNA

SEQ ID NO: 20091 - DNA, 78 bp, synthetic construct; identical to SEQ ID NO: 1499
  source 1..78: mol_type = other DNA

SEQ ID NO: 20092 - DNA, 78 bp, synthetic construct; identical to SEQ ID NO: 1994
  source 1..78: mol_type = other DNA

SEQ ID NO: 20093 - DNA, 78 bp, synthetic construct; identical to SEQ ID NO: 1499
  source 1..78: mol_type = other DNA

SEQ ID NO: 20094 - DNA, 78 bp, synthetic construct; identical to SEQ ID NO: 1486
  source 1..78: mol_type = other DNA

SEQ ID NO: 20095 - DNA, 78 bp, synthetic construct; identical to SEQ ID NO: 1499
  source 1..78: mol_type = other DNA

SEQ ID NO: 20096 - DNA, 78 bp, synthetic construct; identical to SEQ ID NO: 1548
  source 1..78: mol_type = other DNA

SEQ ID NO: 20097 - DNA, 78 bp, synthetic construct; identical to SEQ ID NO: 1499
  source 1..78: mol_type = other DNA

SEQ ID NO: 20098 - DNA, 78 bp, synthetic construct; identical to SEQ ID NO: 1846
  source 1..78: mol_type = other DNA

SEQ ID NO: 20099 - DNA, 78 bp, synthetic construct; identical to SEQ ID NO: 1499
  source 1..78: mol_type = other DNA

SEQ ID NO: 20100 - DNA, 78 bp, synthetic construct; identical to SEQ ID NO: 1556
  source 1..78: mol_type = other DNA

SEQ ID NO: 20101 - DNA, 78 bp, synthetic construct; identical to SEQ ID NO: 1499
  source 1..78: mol_type = other DNA

SEQ ID NO: 20102 - DNA, 78 bp, synthetic construct; identical to SEQ ID NO: 1490
  source 1..78: mol_type = other DNA

SEQ ID NO: 20103 - DNA, 78 bp, synthetic construct; identical to SEQ ID NO: 1499
  source 1..78: mol_type = other DNA

SEQ ID NO: 20104 - DNA, 78 bp, synthetic construct; identical to SEQ ID NO: 1538
  source 1..78: mol_type = other DNA

SEQ ID NO: 20105 - DNA, 78 bp, synthetic construct; identical to SEQ ID NO: 1499
  source 1..78: mol_type = other DNA

SEQ ID NO: 20106 - DNA, 78 bp, synthetic construct; identical to SEQ ID NO: 1496
  source 1..78: mol_type = other DNA

SEQ ID NO: 20107 - DNA, 78 bp, synthetic construct; identical to SEQ ID NO: 1499
  source 1..78: mol_type = other DNA

SEQ ID NO: 20108 - DNA, 78 bp, synthetic construct; identical to SEQ ID NO: 1528
  source 1..78: mol_type = other DNA

SEQ ID NO: 20109 - DNA, 78 bp, synthetic construct; identical to SEQ ID NO: 1583
  source 1..78: mol_type = other DNA

SEQ ID NO: 20110 - DNA, 78 bp, synthetic construct; identical to SEQ ID NO: 1514
  source 1..78: mol_type = other DNA

SEQ ID NO: 20111 - DNA, 78 bp, synthetic construct; identical to SEQ ID NO: 1583
  source 1..78: mol_type = other DNA

SEQ ID NO: 20112 - DNA, 78 bp, synthetic construct; identical to SEQ ID NO: 1496
  source 1..78: mol_type = other DNA

SEQ ID NO: 20113 - DNA, 78 bp, synthetic construct; identical to SEQ ID NO: 1583
  source 1..78: mol_type = other DNA

SEQ ID NO: 20114 - DNA, 78 bp, synthetic construct; identical to SEQ ID NO: 1528
  source 1..78: mol_type = other DNA

SEQ ID NO: 20115 - DNA, 78 bp, synthetic construct; identical to SEQ ID NO: 1583
  source 1..78: mol_type = other DNA

SEQ ID NO: 20116 - DNA, 78 bp, synthetic construct; identical to SEQ ID NO: 1594
  source 1..78: mol_type = other DNA

SEQ ID NO: 20117 - DNA, 78 bp, synthetic construct; identical to SEQ ID NO: 1583
  source 1..78: mol_type = other DNA

SEQ ID NO: 20118 - DNA, 78 bp, synthetic construct; identical to SEQ ID NO: 1994
  source 1..78: mol_type = other DNA

SEQ ID NO: 20119 - DNA, 78 bp, synthetic construct; identical to SEQ ID NO: 1583
  source 1..78: mol_type = other DNA

SEQ ID NO: 20120 - DNA, 78 bp, synthetic construct; identical to SEQ ID NO: 1994
  source 1..78: mol_type = other DNA

SEQ ID NO: 20121 - DNA, 78 bp, synthetic construct; identical to SEQ ID NO: 1583
  source 1..78: mol_type = other DNA

SEQ ID NO: 20122 - DNA, 78 bp, synthetic construct; identical to SEQ ID NO: 1494
  source 1..78: mol_type = other DNA

SEQ ID NO: 20123 - DNA, 78 bp, synthetic construct; identical to SEQ ID NO: 1583
  source 1..78: mol_type = other DNA

SEQ ID NO: 20124 - DNA, 78 bp, synthetic construct; identical to SEQ ID NO: 1546
  source 1..78: mol_type = other DNA

SEQ ID NO: 20125 - DNA, 78 bp, synthetic construct; identical to SEQ ID NO: 1583
  source 1..78: mol_type = other DNA

SEQ ID NO: 20126 - DNA, 78 bp, synthetic construct; identical to SEQ ID NO: 1528
  source 1..78: mol_type = other DNA

SEQ ID NO: 20127 - DNA, 78 bp, synthetic construct; identical to SEQ ID NO: 1583
  source 1..78: mol_type = other DNA

SEQ ID NO: 20128 - DNA, 78 bp, synthetic construct; identical to SEQ ID NO: 2012
  source 1..78: mol_type = other DNA

SEQ ID NO: 20129 - DNA, 78 bp, synthetic construct; identical to SEQ ID NO: 1583
  source 1..78: mol_type = other DNA

SEQ ID NO: 20130 - DNA, 78 bp, synthetic construct; identical to SEQ ID NO: 1486
  source 1..78: mol_type = other DNA

SEQ ID NO: 20131 - DNA, 78 bp, synthetic construct; identical to SEQ ID NO: 1583
  source 1..78: mol_type = other DNA

SEQ ID NO: 20132 - DNA, 78 bp, synthetic construct; identical to SEQ ID NO: 1538
  source 1..78: mol_type = other DNA

SEQ ID NO: 20133 - DNA, 78 bp, synthetic construct; identical to SEQ ID NO: 1583
  source 1..78: mol_type = other DNA

SEQ ID NO: 20134 - DNA, 78 bp, synthetic construct; identical to SEQ ID NO: 1546
  source 1..78: mol_type = other DNA

SEQ ID NO: 20135 - DNA, 78 bp, synthetic construct; identical to SEQ ID NO: 1487
  source 1..78: mol_type = other DNA

SEQ ID NO: 20136 - DNA, 78 bp, synthetic construct; identical to SEQ ID NO: 1532
  source 1..78: mol_type = other DNA

SEQ ID NO: 20137 - DNA, 78 bp, synthetic construct; identical to SEQ ID NO: 1487
  source 1..78: mol_type = other DNA

SEQ ID NO: 20138 - DNA, 78 bp, synthetic construct
  source 1..78: mol_type = other DNA
cagcagcaggtgagacaaagtccccaatctctgacagtctgggaaggagagaccacaattctgaactgcagttatgag

SEQ ID NO: 20139 - DNA, 78 bp, synthetic construct; identical to SEQ ID NO: 1487
  source 1..78: mol_type = other DNA

SEQ ID NO: 20140 - DNA, 78 bp, synthetic construct; identical to SEQ ID NO: 1576
  source 1..78: mol_type = other DNA

SEQ ID NO: 20141 - DNA, 78 bp, synthetic construct; identical to SEQ ID NO: 1487
  source 1..78: mol_type = other DNA

SEQ ID NO: 20142 - DNA, 78 bp, synthetic construct; identical to SEQ ID NO: 1862
  source 1..78: mol_type = other DNA

SEQ ID NO: 20143 - DNA, 78 bp, synthetic construct; identical to SEQ ID NO: 1487
  source 1..78: mol_type = other DNA

SEQ ID NO: 20144 - DNA, 78 bp, synthetic construct; identical to SEQ ID NO: 1544
  source 1..78: mol_type = other DNA

SEQ ID NO: 20145 - DNA, 78 bp, synthetic construct; identical to SEQ ID NO: 1487
  source 1..78: mol_type = other DNA

SEQ ID NO: 20146 - DNA, 78 bp, synthetic construct; identical to SEQ ID NO: 2140
  source 1..78: mol_type = other DNA

SEQ ID NO: 20147 - DNA, 78 bp, synthetic construct; identical to SEQ ID NO: 1487
  source 1..78: mol_type = other DNA

SEQ ID NO: 20148 - DNA, 78 bp, synthetic construct; identical to SEQ ID NO: 1576
  source 1..78: mol_type = other DNA

SEQ ID NO: 20149 - DNA, 78 bp, synthetic construct; identical to SEQ ID NO: 1487
  source 1..78: mol_type = other DNA

SEQ ID NO: 20150 - DNA, 78 bp, synthetic construct; identical to SEQ ID NO: 1592
  source 1..78: mol_type = other DNA

SEQ ID NO: 20151 - DNA, 78 bp, synthetic construct; identical to SEQ ID NO: 1487
  source 1..78: mol_type = other DNA

SEQ ID NO: 20152 - DNA, 78 bp, synthetic construct; identical to SEQ ID NO: 1568
  source 1..78: mol_type = other DNA

SEQ ID NO: 20153 - DNA, 78 bp, synthetic construct; identical to SEQ ID NO: 1487
  source 1..78: mol_type = other DNA

SEQ ID NO: 20154 - DNA, 78 bp, synthetic construct; identical to SEQ ID NO: 1548
  source 1..78: mol_type = other DNA

SEQ ID NO: 20155 - DNA, 78 bp, synthetic construct; identical to SEQ ID NO: 1487
  source 1..78: mol_type = other DNA

SEQ ID NO: 20156 - DNA, 78 bp, synthetic construct; identical to SEQ ID NO: 1486
  source 1..78: mol_type = other DNA

SEQ ID NO: 20157 - DNA, 78 bp, synthetic construct; identical to SEQ ID NO: 1487
  source 1..78: mol_type = other DNA

SEQ ID NO: 20158 - DNA, 78 bp, synthetic construct; identical to SEQ ID NO: 2072
  source 1..78: mol_type = other DNA

SEQ ID NO: 20159 - DNA, 78 bp, synthetic construct; identical to SEQ ID NO: 1487
  source 1..78: mol_type = other DNA

SEQ ID NO: 20160 - DNA, 78 bp, synthetic construct; identical to SEQ ID NO: 1672
  source 1..78: mol_type = other DNA

SEQ ID NO: 20161 - DNA, 78 bp, synthetic construct; identical to SEQ ID NO: 1487
  source 1..78: mol_type = other DNA

SEQ ID NO: 20162 - DNA, 78 bp, synthetic construct; identical to SEQ ID NO: 2012
  source 1..78: mol_type = other DNA

SEQ ID NO: 20163 - DNA, 78 bp, synthetic construct; identical to SEQ ID NO: 1487
  source 1..78: mol_type = other DNA

SEQ ID NO: 20164 - DNA, 78 bp, synthetic construct; identical to SEQ ID NO: 1512
  source 1..78: mol_type = other DNA

SEQ ID NO: 20165 - DNA, 78 bp, synthetic construct; identical to SEQ ID NO: 1487
  source 1..78: mol_type = other DNA

SEQ ID NO: 20166 - DNA, 78 bp, synthetic construct; identical to SEQ ID NO: 1608
  source 1..78: mol_type = other DNA

SEQ ID NO: 20167 - DNA, 78 bp, synthetic construct; identical to SEQ ID NO: 1487
  source 1..78: mol_type = other DNA

SEQ ID NO: 20168 - DNA, 78 bp, synthetic construct; identical to SEQ ID NO: 1530
  source 1..78: mol_type = other DNA

SEQ ID NO: 20169 - DNA, 78 bp, synthetic construct; identical to SEQ ID NO: 1487
  source 1..78: mol_type = other DNA

SEQ ID NO: 20170 - DNA, 78 bp, synthetic construct; identical to SEQ ID NO: 2072
  source 1..78: mol_type = other DNA

SEQ ID NO: 20171 - DNA, 78 bp, synthetic construct; identical to SEQ ID NO: 1487
  source 1..78: mol_type = other DNA

SEQ ID NO: 20172 - DNA, 78 bp, synthetic construct; identical to SEQ ID NO: 1528
  source 1..78: mol_type = other DNA

SEQ ID NO: 20173 - DNA, 78 bp, synthetic construct; identical to SEQ ID NO: 1487
  source 1..78: mol_type = other DNA

SEQ ID NO: 20174 - DNA, 75 bp, synthetic construct; identical to SEQ ID NO: 1590
  source 1..75: mol_type = other DNA

SEQ ID NO: 20175 - DNA, 78 bp, synthetic construct; identical to SEQ ID NO: 1487
  source 1..78: mol_type = other DNA

SEQ ID NO: 20176 - DNA, 78 bp, synthetic construct; identical to SEQ ID NO: 1528
  source 1..78: mol_type = other DNA

SEQ ID NO: 20177 - DNA, 78 bp, synthetic construct; identical to SEQ ID NO: 1487
  source 1..78: mol_type = other DNA

SEQ ID NO: 20178 - DNA, 78 bp, synthetic construct; identical to SEQ ID NO: 1644
  source 1..78: mol_type = other DNA

SEQ ID NO: 20179 - DNA, 78 bp, synthetic construct; identical to SEQ ID NO: 1487
  source 1..78: mol_type = other DNA

SEQ ID NO: 20180 - DNA, 78 bp, synthetic construct; identical to SEQ ID NO: 1522
  source 1..78: mol_type = other DNA

SEQ ID NO: 20181 - DNA, 78 bp, synthetic construct; identical to SEQ ID NO: 1487
  source 1..78: mol_type = other DNA

SEQ ID NO: 20182 - DNA, 78 bp, synthetic construct; identical to SEQ ID NO: 1556
  source 1..78: mol_type = other DNA

SEQ ID NO: 20183 - DNA, 78 bp, synthetic construct; identical to SEQ ID NO: 1487
  source 1..78: mol_type = other DNA

SEQ ID NO: 20184 - DNA, 78 bp, synthetic construct; identical to SEQ ID NO: 1994
  source 1..78: mol_type = other DNA

SEQ ID NO: 20185 - DNA, 78 bp, synthetic construct; identical to SEQ ID NO: 1487
  source 1..78: mol_type = other DNA

SEQ ID NO: 20186 - DNA, 78 bp, synthetic construct; identical to SEQ ID NO: 1740
  source 1..78: mol_type = other DNA

SEQ ID NO: 20187 - DNA, 78 bp, synthetic construct; identical to SEQ ID NO: 1487
  source 1..78: mol_type = other DNA

SEQ ID NO: 20188 - DNA, 78 bp, synthetic construct; identical to SEQ ID NO: 1514
  source 1..78: mol_type = other DNA

SEQ ID NO: 20189 - DNA, 78 bp, synthetic construct; identical to SEQ ID NO: 1487
  source 1..78: mol_type = other DNA

SEQ ID NO: 20190 - DNA, 78 bp, synthetic construct; identical to SEQ ID NO: 2562
  source 1..78: mol_type = other DNA

SEQ ID NO: 20191 - DNA, 78 bp, synthetic construct; identical to SEQ ID NO: 1487
  source 1..78: mol_type = other DNA

SEQ ID NO: 20192 - DNA, 78 bp, synthetic construct; identical to SEQ ID NO: 1496
  source 1..78: mol_type = other DNA

SEQ ID NO: 20193 - DNA, 78 bp, synthetic construct; identical to SEQ ID NO: 1487
  source 1..78: mol_type = other DNA

SEQ ID NO: 20194 - DNA, 78 bp, synthetic construct; identical to SEQ ID NO: 1940
  source 1..78: mol_type = other DNA

SEQ ID NO: 20195 - DNA, 78 bp, synthetic construct; identical to SEQ ID NO: 1487
  source 1..78: mol_type = other DNA

SEQ ID NO: 20196 - DNA, 78 bp, synthetic construct; identical to SEQ ID NO: 1544
  source 1..78: mol_type = other DNA

SEQ ID NO: 20197 - DNA, 78 bp, synthetic construct; identical to SEQ ID NO: 1487
  source 1..78: mol_type = other DNA

SEQ ID NO: 20198 - DNA, 78 bp, synthetic construct; identical to SEQ ID NO: 1614
  source 1..78: mol_type = other DNA

SEQ ID NO: 20199 - DNA, 78 bp, synthetic construct; identical to SEQ ID NO: 1487
  source 1..78: mol_type = other DNA

SEQ ID NO: 20200 - DNA, 78 bp, synthetic construct; identical to SEQ ID NO: 1608
  source 1..78: mol_type = other DNA

SEQ ID NO: 20201 - DNA, 78 bp, synthetic construct; identical to SEQ ID NO: 1487
  source 1..78: mol_type = other DNA

SEQ ID NO: 20202 - DNA, 78 bp, synthetic construct; identical to SEQ ID NO: 1528
  source 1..78: mol_type = other DNA

SEQ ID NO: 20203 - DNA, 78 bp, synthetic construct; identical to SEQ ID NO: 1487
  source 1..78: mol_type = other DNA

SEQ ID NO: 20204 - DNA, 78 bp, synthetic construct; identical to SEQ ID NO: 1494
  source 1..78: mol_type = other DNA

SEQ ID NO: 20205 - DNA, 78 bp, synthetic construct; identical to SEQ ID NO: 1487
  source 1..78: mol_type = other DNA

SEQ ID NO: 20206 - DNA, 78 bp, synthetic construct; identical to SEQ ID NO: 1492
  source 1..78: mol_type = other DNA

SEQ ID NO: 20207 - DNA, 78 bp, synthetic construct; identical to SEQ ID NO: 1487
  source 1..78: mol_type = other DNA

SEQ ID NO: 20208 - DNA, 78 bp, synthetic construct; identical to SEQ ID NO: 1552
  source 1..78: mol_type = other DNA

SEQ ID NO: 20209 - DNA, 78 bp, synthetic construct; identical to SEQ ID NO: 1487
  source 1..78: mol_type = other DNA

SEQ ID NO: 20210 - DNA, 78 bp, synthetic construct; identical to SEQ ID NO: 1608
  source 1..78: mol_type = other DNA

SEQ ID NO: 20211 - DNA, 78 bp, synthetic construct; identical to SEQ ID NO: 1487
  source 1..78: mol_type = other DNA

SEQ ID NO: 20212 - DNA, 78 bp, synthetic construct; identical to SEQ ID NO: 1806
  source 1..78: mol_type = other DNA

SEQ ID NO: 20213 - DNA, 78 bp, synthetic construct; identical to SEQ ID NO: 1487
  source 1..78: mol_type = other DNA

SEQ ID NO: 20214 - DNA, 75 bp, synthetic construct; identical to SEQ ID NO: 1588
  source 1..75: mol_type = other DNA

SEQ ID NO: 20215 - DNA, 78 bp, synthetic construct; identical to SEQ ID NO: 1487
  source 1..78: mol_type = other DNA

SEQ ID NO: 20216 - DNA, 78 bp, synthetic construct; identical to SEQ ID NO: 1528
  source 1..78: mol_type = other DNA

SEQ ID NO: 20217 - DNA, 78 bp, synthetic construct; identical to SEQ ID NO: 1487
  source 1..78: mol_type = other DNA

SEQ ID NO: 20218 - DNA, 78 bp, synthetic construct; identical to SEQ ID NO: 1528
  source 1..78: mol_type = other DNA

SEQ ID NO: 20219 - DNA, 78 bp, synthetic construct; identical to SEQ ID NO: 1487
  source 1..78: mol_type = other DNA

SEQ ID NO: 20220 - DNA, 78 bp, synthetic construct; identical to SEQ ID NO: 1548
  source 1..78: mol_type = other DNA

SEQ ID NO: 20221 - DNA, 78 bp, synthetic construct; identical to SEQ ID NO: 1487
  source 1..78: mol_type = other DNA

SEQ ID NO: 20222 - DNA, 78 bp, synthetic construct; identical to SEQ ID NO: 20138
  source 1..78: mol_type = other DNA

SEQ ID NO: 20223 - DNA, 78 bp, synthetic construct; identical to SEQ ID NO: 1487
  source 1..78: mol_type = other DNA

SEQ ID NO: 20224 - DNA, 78 bp, synthetic construct; identical to SEQ ID NO: 1512
  source 1..78: mol_type = other DNA

SEQ ID NO: 20225 - DNA, 78 bp, synthetic construct; identical to SEQ ID NO: 1487
  source 1..78: mol_type = other DNA

SEQ ID NO: 20226 - DNA, 78 bp, synthetic construct; identical to SEQ ID NO: 1560
  source 1..78: mol_type = other DNA

SEQ ID NO: 20227 - DNA, 78 bp, synthetic construct; identical to SEQ ID NO: 1487
  source 1..78: mol_type = other DNA

SEQ ID NO: 20228 - DNA, 78 bp, synthetic construct; identical to SEQ ID NO: 1546
  source 1..78: mol_type = other DNA

SEQ ID NO: 20229 - DNA, 78 bp, synthetic construct; identical to SEQ ID NO: 1487
  source 1..78: mol_type = other DNA

SEQ ID NO: 20230 - DNA, 78 bp, synthetic construct; identical to SEQ ID NO: 1608
  source 1..78: mol_type = other DNA

SEQ ID NO: 20231 - DNA, 78 bp, synthetic construct; identical to SEQ ID NO: 1487
  source 1..78: mol_type = other DNA

SEQ ID NO: 20232 - DNA, 78 bp, synthetic construct; identical to SEQ ID NO: 1492
  source 1..78: mol_type = other DNA

SEQ ID NO: 20233 - DNA, 78 bp, synthetic construct; identical to SEQ ID NO: 1487
  source 1..78: mol_type = other DNA

SEQ ID NO: 20234 - DNA, 78 bp, synthetic construct; identical to SEQ ID NO: 2012
  source 1..78: mol_type = other DNA

SEQ ID NO: 20235 - DNA, 78 bp, synthetic construct; identical to SEQ ID NO: 1487
  source 1..78: mol_type = other DNA

SEQ ID NO: 20236 - DNA, 78 bp, synthetic construct; identical to SEQ ID NO: 1592
  source 1..78: mol_type = other DNA

SEQ ID NO: 20237 - DNA, 78 bp, synthetic construct; identical to SEQ ID NO: 1487
  source 1..78: mol_type = other DNA

SEQ ID NO: 20238 - DNA, 78 bp, synthetic construct; identical to SEQ ID NO: 1888
  source 1..78: mol_type = other DNA

SEQ ID NO: 20239 - DNA, 78 bp, synthetic construct; identical to SEQ ID NO: 1487
  source 1..78: mol_type = other DNA

SEQ ID NO: 20240 - DNA, 78 bp, synthetic construct; identical to SEQ ID NO: 1736
  source 1..78: mol_type = other DNA

SEQ ID NO: 20241 - DNA, 78 bp, synthetic construct; identical to SEQ ID NO: 1487
  source 1..78: mol_type = other DNA

SEQ ID NO: 20242 - DNA, 78 bp, synthetic construct; identical to SEQ ID NO: 1528
  source 1..78: mol_type = other DNA

SEQ ID NO: 20243 - DNA, 78 bp, synthetic construct; identical to SEQ ID NO: 1521
  source 1..78: mol_type = other DNA

SEQ ID NO: 20244 - DNA, 78 bp, synthetic construct; identical to SEQ ID NO: 1512
  source 1..78: mol_type = other DNA

SEQ ID NO: 20245 - DNA, 78 bp, synthetic construct; identical to SEQ ID NO: 1521
  source 1..78: mol_type = other DNA

SEQ ID NO: 20246 - DNA, 78 bp, synthetic construct; identical to SEQ ID NO: 1496
  source 1..78: mol_type = other DNA

SEQ ID NO: 20247 - DNA, 78 bp, synthetic construct; identical to SEQ ID NO: 1521
  source 1..78: mol_type = other DNA

SEQ ID NO: 20248 - DNA, 78 bp, synthetic construct; identical to SEQ ID NO: 1486
  source 1..78: mol_type = other DNA

SEQ ID NO: 20249 - DNA, 78 bp, synthetic construct; identical to SEQ ID NO: 1521
  source 1..78: mol_type = other DNA

SEQ ID NO: 20250 - DNA, 78 bp, synthetic construct; identical to SEQ ID NO: 1528
  source 1..78: mol_type = other DNA

SEQ ID NO: 20251 - DNA, 78 bp, synthetic construct; identical to SEQ ID NO: 1521
  source 1..78: mol_type = other DNA

SEQ ID NO: 20252 - DNA, 78 bp, synthetic construct; identical to SEQ ID NO: 1994
  source 1..78: mol_type = other DNA

SEQ ID NO: 20253 - DNA, 78 bp, synthetic construct; identical to SEQ ID NO: 1521
  source 1..78: mol_type = other DNA

SEQ ID NO: 20254 - DNA, 78 bp, synthetic construct; identical to SEQ ID NO: 1544
  source 1..78: mol_type = other DNA

SEQ ID NO: 20255 - DNA, 78 bp, synthetic construct; identical to SEQ ID NO: 1521
  source 1..78: mol_type = other DNA

SEQ ID NO: 20256 - DNA, 78 bp, synthetic construct; identical to SEQ ID NO: 1528
  source 1..78: mol_type = other DNA

SEQ ID NO: 20257 - DNA, 78 bp, synthetic construct; identical to SEQ ID NO: 1521
  source 1..78: mol_type = other DNA

SEQ ID NO: 20258 - DNA, 78 bp, synthetic construct; identical to SEQ ID NO: 1528
  source 1..78: mol_type = other DNA

SEQ ID NO: 20259 - DNA, 78 bp, synthetic construct; identical to SEQ ID NO: 1521
  source 1..78: mol_type = other DNA

SEQ ID NO: 20260 - DNA, 78 bp, synthetic construct; identical to SEQ ID NO: 1860
  source 1..78: mol_type = other DNA

SEQ ID NO: 20261 - DNA, 78 bp, synthetic construct; identical to SEQ ID NO: 1521
  source 1..78: mol_type = other DNA

SEQ ID NO: 20262 - DNA, 78 bp, synthetic construct; identical to SEQ ID NO: 1532
  source 1..78: mol_type = other DNA

SEQ ID NO: 20263 - DNA, 78 bp, synthetic construct; identical to SEQ ID NO: 1521
  source 1..78: mol_type = other DNA

SEQ ID NO: 20264 - DNA, 78 bp, synthetic construct; identical to SEQ ID NO: 1504
  source 1..78: mol_type = other DNA

SEQ ID NO: 20265 - DNA, 78 bp, synthetic construct; identical to SEQ ID NO: 1521
  source 1..78: mol_type = other DNA

SEQ ID NO: 20266 - DNA, 78 bp, synthetic construct; identical to SEQ ID NO: 1600
  source 1..78: mol_type = other DNA

SEQ ID NO: 20267 - DNA, 78 bp, synthetic construct; identical to SEQ ID NO: 1521
  source 1..78: mol_type = other DNA

SEQ ID NO: 20268 - DNA, 78 bp, synthetic construct; identical to SEQ ID NO: 1736
  source 1..78: mol_type = other DNA

SEQ ID NO: 20269 - DNA, 78 bp, synthetic construct; identical to SEQ ID NO: 1521
  source 1..78: mol_type = other DNA

SEQ ID NO: 20270 - DNA, 75 bp, synthetic construct; identical to SEQ ID NO: 1590
  source 1..75: mol_type = other DNA

SEQ ID NO: 20271 - DNA, 78 bp, synthetic construct; identical to SEQ ID NO: 1521
  source 1..78: mol_type = other DNA

SEQ ID NO: 20272 - DNA, 78 bp, synthetic construct; identical to SEQ ID NO: 1576
  source 1..78: mol_type = other DNA

SEQ ID NO: 20273 - DNA, 78 bp, synthetic construct; identical to SEQ ID NO: 1521
  source 1..78: mol_type = other DNA

SEQ ID NO: 20274 - DNA, 78 bp, synthetic construct; identical to SEQ ID NO: 1544
  source 1..78: mol_type = other DNA

SEQ ID NO: 20275 - DNA, 78 bp, synthetic construct; identical to SEQ ID NO: 1521
  source 1..78: mol_type = other DNA

SEQ ID NO: 20276 - DNA, 78 bp, synthetic construct; identical to SEQ ID NO: 1498
  source 1..78: mol_type = other DNA

SEQ ID NO: 20277 - DNA, 78 bp, synthetic construct; identical to SEQ ID NO: 1521
  source 1..78: mol_type = other DNA

SEQ ID NO: 20278 - DNA, 78 bp, synthetic construct; identical to SEQ ID NO: 1528
  source 1..78: mol_type = other DNA

SEQ ID NO: 20279 - DNA, 78 bp, synthetic construct; identical to SEQ ID NO: 1521
  source 1..78: mol_type = other DNA

SEQ ID NO: 20280 - DNA, 78 bp, synthetic construct; identical to SEQ ID NO: 1616
  source 1..78: mol_type = other DNA

SEQ ID NO: 20281 - DNA, 78 bp, synthetic construct; identical to SEQ ID NO: 1521
  source 1..78: mol_type = other DNA

SEQ ID NO: 20282 - DNA, 78 bp, synthetic construct; identical to SEQ ID NO: 1584
  source 1..78: mol_type = other DNA

SEQ ID NO: 20283 - DNA, 78 bp, synthetic construct; identical to SEQ ID NO: 1521
  source 1..78: mol_type = other DNA

SEQ ID NO: 20284 - DNA, 78 bp, synthetic construct; identical to SEQ ID NO: 1492
  source 1..78: mol_type = other DNA

SEQ ID NO: 20285 - DNA, 78 bp, synthetic construct; identical to SEQ ID NO: 1521
  source 1..78: mol_type = other DNA

SEQ ID NO: 20286 - DNA, 78 bp, synthetic construct; identical to SEQ ID NO: 1608
  source 1..78: mol_type = other DNA

SEQ ID NO: 20287 - DNA, 78 bp, synthetic construct; identical to SEQ ID NO: 1521
  source 1..78: mol_type = other DNA

SEQ ID NO: 20288 - DNA, 78 bp, synthetic construct; identical to SEQ ID NO: 1546
  source 1..78: mol_type = other DNA

SEQ ID NO: 20289 - DNA, 78 bp, synthetic construct; identical to SEQ ID NO: 1521
  source 1..78: mol_type = other DNA

SEQ ID NO: 20290 - DNA, 78 bp, synthetic construct; identical to SEQ ID NO: 1614
  source 1..78: mol_type = other DNA

SEQ ID NO: 20291 - DNA, 78 bp, synthetic construct; identical to SEQ ID NO: 1521
  source 1..78: mol_type = other DNA

SEQ ID NO: 20292 - DNA, 78 bp, synthetic construct; identical to SEQ ID NO: 1614
  source 1..78: mol_type = other DNA

SEQ ID NO: 20293 - DNA, 78 bp, synthetic construct; identical to SEQ ID NO: 1521
  source 1..78: mol_type = other DNA

SEQ ID NO: 20294 - DNA, 78 bp, synthetic construct; identical to SEQ ID NO: 1546
  source 1..78: mol_type = other DNA

SEQ ID NO: 20295 - DNA, 78 bp, synthetic construct; identical to SEQ ID NO: 1521
  source 1..78: mol_type = other DNA

SEQ ID NO: 20296 - DNA, 78 bp, synthetic construct; identical to SEQ ID NO: 1528
  source 1..78: mol_type = other DNA

SEQ ID NO: 20297 - DNA, 78 bp, synthetic construct; identical to SEQ ID NO: 1521
  source 1..78: mol_type = other DNA

SEQ ID NO: 20298 - DNA, 78 bp, synthetic construct; identical to SEQ ID NO: 20138
  source 1..78: mol_type = other DNA

SEQ ID NO: 20299 - DNA, 78 bp, synthetic construct; identical to SEQ ID NO: 1521
  source 1..78: mol_type = other DNA

SEQ ID NO: 20300 - DNA, 78 bp, synthetic construct; identical to SEQ ID NO: 1512
  source 1..78: mol_type = other DNA

SEQ ID NO: 20301 - DNA, 78 bp, synthetic construct; identical to SEQ ID NO: 1521
  source 1..78: mol_type = other DNA

SEQ ID NO: 20302 - DNA, 78 bp, synthetic construct; identical to SEQ ID NO: 1552
  source 1..78: mol_type = other DNA

SEQ ID NO: 20303 - DNA, 78 bp, synthetic construct; identical to SEQ ID NO: 1521
  source 1..78: mol_type = other DNA

SEQ ID NO: 20304 - DNA, 78 bp, synthetic construct; identical to SEQ ID NO: 1528
  source 1..78: mol_type = other DNA

SEQ ID NO: 20305 - DNA, 78 bp, synthetic construct; identical to SEQ ID NO: 1521
  source 1..78: mol_type = other DNA

SEQ ID NO: 20306 - DNA, 78 bp, synthetic construct; identical to SEQ ID NO: 1512
  source 1..78: mol_type = other DNA

SEQ ID NO: 20307 - DNA, 78 bp, synthetic construct; identical to SEQ ID NO: 1521
  source 1..78: mol_type = other DNA

SEQ ID NO: 20308 - DNA, 75 bp, synthetic construct; identical to SEQ ID NO: 1488
  source 1..75: mol_type = other DNA

SEQ ID NO: 20309 - DNA, 78 bp, synthetic construct; identical to SEQ ID NO: 1521
  source 1..78: mol_type = other DNA

SEQ ID NO: 20310 - DNA, 78 bp, synthetic construct; identical to SEQ ID NO: 1560
  source 1..78: mol_type = other DNA

SEQ ID NO: 20311 - DNA, 78 bp, synthetic construct; identical to SEQ ID NO: 1521
  source 1..78: mol_type = other DNA

SEQ ID NO: 20312 - DNA, 78 bp, synthetic construct; identical to SEQ ID NO: 1592
  source 1..78: mol_type = other DNA

SEQ ID NO: 20313 - DNA, 78 bp, synthetic construct; identical to SEQ ID NO: 1521
  source 1..78: mol_type = other DNA

SEQ ID NO: 20314 - DNA, 78 bp, synthetic construct; identical to SEQ ID NO: 1498
  source 1..78: mol_type = other DNA

SEQ ID NO: 20315 - DNA, 78 bp, synthetic construct; identical to SEQ ID NO: 1521
  source 1..78: mol_type = other DNA

SEQ ID NO: 20316 - DNA, 78 bp, synthetic construct; identical to SEQ ID NO: 1608
  source 1..78: mol_type = other DNA

SEQ ID NO: 20317 - DNA, 78 bp, synthetic construct; identical to SEQ ID NO: 1491
  source 1..78: mol_type = other DNA

SEQ ID NO: 20318 - DNA, 78 bp, synthetic construct; identical to SEQ ID NO: 1674
  source 1..78: mol_type = other DNA

SEQ ID NO: 20319 - DNA, 78 bp, synthetic construct; identical to SEQ ID NO: 1491
  source 1..78: mol_type = other DNA

SEQ ID NO: 20320 - DNA, 78 bp, synthetic construct; identical to SEQ ID NO: 1552
  source 1..78: mol_type = other DNA

SEQ ID NO: 20321 - DNA, 78 bp, synthetic construct; identical to SEQ ID NO: 1491
  source 1..78: mol_type = other DNA

SEQ ID NO: 20322 - DNA, 78 bp, synthetic construct; identical to SEQ ID NO: 1548
  source 1..78: mol_type = other DNA

SEQ ID NO: 20323 - DNA, 78 bp, synthetic construct; identical to SEQ ID NO: 1491
  source 1..78: mol_type = other DNA

SEQ ID NO: 20324 - DNA, 78 bp, synthetic construct; identical to SEQ ID NO: 1806
  source 1..78: mol_type = other DNA

SEQ ID NO: 20325 - DNA, 78 bp, synthetic construct; identical to SEQ ID NO: 1491
  source 1..78: mol_type = other DNA

SEQ ID NO: 20326 - DNA, 78 bp, synthetic construct; identical to SEQ ID NO: 1490
  source 1..78: mol_type = other DNA

SEQ ID NO: 20327 - DNA, 78 bp, synthetic construct; identical to SEQ ID NO: 1491
  source 1..78: mol_type = other DNA

SEQ ID NO: 20328 - DNA, 78 bp, synthetic construct; identical to SEQ ID NO: 1666
  source 1..78: mol_type = other DNA

SEQ ID NO: 20329 - DNA, 78 bp, synthetic construct; identical to SEQ ID NO: 1491
  source 1..78: mol_type = other DNA

SEQ ID NO: 20330 - DNA, 75 bp, synthetic construct; identical to SEQ ID NO: 1590
  source 1..75: mol_type = other DNA

SEQ ID NO: 20331 - DNA, 78 bp, synthetic construct; identical to SEQ ID NO: 1491
  source 1..78: mol_type = other DNA

SEQ ID NO: 20332 - DNA, 78 bp, synthetic construct; identical to SEQ ID NO: 1532
  source 1..78: mol_type = other DNA

SEQ ID NO: 20333 - DNA, 78 bp, synthetic construct; identical to SEQ ID NO: 1491
  source 1..78: mol_type = other DNA

SEQ ID NO: 20334 - DNA, 78 bp, synthetic construct; identical to SEQ ID NO: 1528
  source 1..78: mol_type = other DNA

SEQ ID NO: 20335 - DNA, 78 bp, synthetic construct; identical to SEQ ID NO: 1491
  source 1..78: mol_type = other DNA

SEQ ID NO: 20336 - DNA, 78 bp, synthetic construct; identical to SEQ ID NO: 1504
  source 1..78: mol_type = other DNA

SEQ ID NO: 20337 - DNA, 78 bp, synthetic construct; identical to SEQ ID NO: 1491
  source 1..78: mol_type = other DNA

SEQ ID NO: 20338 - DNA, 78 bp, synthetic construct; identical to SEQ ID NO: 1492
  source 1..78: mol_type = other DNA

SEQ ID NO: 20339 - DNA, 78 bp, synthetic construct; identical to SEQ ID NO: 1491
  source 1..78: mol_type = other DNA

SEQ ID NO: 20340 - DNA, 78 bp, synthetic construct; identical to SEQ ID NO: 1594
  source 1..78: mol_type = other DNA

SEQ ID NO: 20341 - DNA, 78 bp, synthetic construct; identical to SEQ ID NO: 1491
  source 1..78: mol_type = other DNA

SEQ ID NO: 20342 - DNA, 78 bp, synthetic construct; identical to SEQ ID NO: 1502
  source 1..78: mol_type = other DNA

SEQ ID NO: 20343 - DNA, 78 bp, synthetic construct; identical to SEQ ID NO: 1491
  source 1..78: mol_type = other DNA

SEQ ID NO: 20344 - DNA, 78 bp, synthetic construct; identical to SEQ ID NO: 1608
  source 1..78: mol_type = other DNA

SEQ ID NO: 20345 - DNA, 78 bp, synthetic construct; identical to SEQ ID NO: 1491
  source 1..78: mol_type = other DNA

SEQ ID NO: 20346 - DNA, 78 bp, synthetic construct; identical to SEQ ID NO: 1644
  source 1..78: mol_type = other DNA

SEQ ID NO: 20347 - DNA, 78 bp, synthetic construct; identical to SEQ ID NO: 1491
  source 1..78: mol_type = other DNA

SEQ ID NO: 20348 - DNA, 78 bp, synthetic construct; identical to SEQ ID NO: 1486
  source 1..78: mol_type = other DNA

SEQ ID NO: 20349 - DNA, 78 bp, synthetic construct; identical to SEQ ID NO: 1491
  source 1..78: mol_type = other DNA

SEQ ID NO: 20350 - DNA, 78 bp, synthetic construct; identical to SEQ ID NO: 1528
  source 1..78: mol_type = other DNA

SEQ ID NO: 20351 - DNA, 78 bp, synthetic construct; identical to SEQ ID NO: 1491
  source 1..78: mol_type = other DNA

SEQ ID NO: 20352 - DNA, 78 bp, synthetic construct; identical to SEQ ID NO: 1644
  source 1..78: mol_type = other DNA

SEQ ID NO: 20353 - DNA, 78 bp, synthetic construct; identical to SEQ ID NO: 1491
  source 1..78: mol_type = other DNA

SEQ ID NO: 20354 - DNA, 78 bp, synthetic construct; identical to SEQ ID NO: 1528
  source 1..78: mol_type = other DNA

SEQ ID NO: 20355 - DNA, 78 bp, synthetic construct; identical to SEQ ID NO: 1491
  source 1..78: mol_type = other DNA

SEQ ID NO: 20356 - DNA, 78 bp, synthetic construct; identical to SEQ ID NO: 1528
  source 1..78: mol_type = other DNA

SEQ ID NO: 20357 - DNA, 78 bp, synthetic construct; identical to SEQ ID NO: 1491
  source 1..78: mol_type = other DNA

SEQ ID NO: 20358 - DNA, 78 bp, synthetic construct; identical to SEQ ID NO: 1562
  source 1..78: mol_type = other DNA

SEQ ID NO: 20359 - DNA, 78 bp, synthetic construct; identical to SEQ ID NO: 1491
  source 1..78: mol_type = other DNA

SEQ ID NO: 20360 - DNA, 78 bp, synthetic construct; identical to SEQ ID NO: 1742
  source 1..78: mol_type = other DNA

SEQ ID NO: 20361 - DNA, 78 bp, synthetic construct; identical to SEQ ID NO: 1491
  source 1..78: mol_type = other DNA

SEQ ID NO: 20362 - DNA, 78 bp, synthetic construct; identical to SEQ ID NO: 2562
  source 1..78: mol_type = other DNA

SEQ ID NO: 20363 - DNA, 78 bp, synthetic construct; identical to SEQ ID NO: 1491
  source 1..78: mol_type = other DNA

SEQ ID NO: 20364 - DNA, 78 bp, synthetic construct; identical to SEQ ID NO: 1528
  source 1..78: mol_type = other DNA

SEQ ID NO: 20365 - DNA, 78 bp, synthetic construct; identical to SEQ ID NO: 1491
  source 1..78: mol_type = other DNA

SEQ ID NO: 20366 - DNA, 78 bp, synthetic construct
  source 1..78: mol_type = other DNA
ggtgagcaggtggaacagctcccttcctccctgattgtccaggagggagccagtgttctgatcaactgctcctacaca

SEQ ID NO: 20367 - DNA, 78 bp, synthetic construct; identical to SEQ ID NO: 1491
  source 1..78: mol_type = other DNA

SEQ ID NO: 20368 - DNA, 78 bp, synthetic construct; identical to SEQ ID NO: 1528
  source 1..78: mol_type = other DNA

SEQ ID NO: 20369 - DNA, 78 bp, synthetic construct; identical to SEQ ID NO: 1491
  source 1..78: mol_type = other DNA

SEQ ID NO: 20370 - DNA, 78 bp, synthetic construct; identical to SEQ ID NO: 1540
  source 1..78: mol_type = other DNA

SEQ ID NO: 20371 - DNA, 78 bp, synthetic construct; identical to SEQ ID NO: 1491
  source 1..78: mol_type = other DNA

SEQ ID NO: 20372 - DNA, 78 bp, synthetic construct; identical to SEQ ID NO: 1732
  source 1..78: mol_type = other DNA

SEQ ID NO: 20373 - DNA, 78 bp, synthetic construct; identical to SEQ ID NO: 1491
  source 1..78: mol_type = other DNA

SEQ ID NO: 20374 - DNA, 78 bp, synthetic construct; identical to SEQ ID NO: 1528
  source 1..78: mol_type = other DNA

SEQ ID NO: 20375 - DNA, 78 bp, synthetic construct; identical to SEQ ID NO: 1491
  source 1..78: mol_type = other DNA

SEQ ID NO: 20376 - DNA, 78 bp, synthetic construct; identical to SEQ ID NO: 1764
  source 1..78: mol_type = other DNA

SEQ ID NO: 20377 - DNA, 78 bp, synthetic construct; identical to SEQ ID NO: 1491
  source 1..78: mol_type = other DNA

SEQ ID NO: 20378 - DNA, 78 bp, synthetic construct; identical to SEQ ID NO: 2422
  source 1..78: mol_type = other DNA

SEQ ID NO: 20379 - DNA, 78 bp, synthetic construct; identical to SEQ ID NO: 1491
  source 1..78: mol_type = other DNA

SEQ ID NO: 20380 - DNA, 78 bp, synthetic construct; identical to SEQ ID NO: 1528
  source 1..78: mol_type = other DNA

SEQ ID NO: 20381 - DNA, 78 bp, synthetic construct; identical to SEQ ID NO: 1783
  source 1..78: mol_type = other DNA

SEQ ID NO: 20382 - DNA, 75 bp, synthetic construct; identical to SEQ ID NO: 1588
  source 1..75: mol_type = other DNA

SEQ ID NO: 20383 - DNA, 78 bp, synthetic construct; identical to SEQ ID NO: 1783
  source 1..78: mol_type = other DNA

SEQ ID NO: 20384 - DNA, 78 bp, synthetic construct; identical to SEQ ID NO: 1544
  source 1..78: mol_type = other DNA

SEQ ID NO: 20385 - DNA, 78 bp, synthetic construct; identical to SEQ ID NO: 1783
  source 1..78: mol_type = other DNA

SEQ ID NO: 20386 - DNA, 78 bp, synthetic construct; identical to SEQ ID NO: 1794
  source 1..78: mol_type = other DNA

SEQ ID NO: 20387 - DNA, 78 bp, synthetic construct; identical to SEQ ID NO: 1783
  source 1..78: mol_type = other DNA

SEQ ID NO: 20388 - DNA, 78 bp, synthetic construct; identical to SEQ ID NO: 1742
  source 1..78: mol_type = other DNA

SEQ ID NO: 20389 - DNA, 78 bp, synthetic construct; identical to SEQ ID NO: 1783
  source 1..78: mol_type = other DNA

SEQ ID NO: 20390 - DNA, 78 bp, synthetic construct; identical to SEQ ID NO: 1528
  source 1..78: mol_type = other DNA

SEQ ID NO: 20391 - DNA, 78 bp, synthetic construct; identical to SEQ ID NO: 1783
  source 1..78: mol_type = other DNA

SEQ ID NO: 20392 - DNA, 78 bp, synthetic construct; identical to SEQ ID NO: 1846
  source 1..78: mol_type = other DNA

SEQ ID NO: 20393 - DNA, 78 bp, synthetic construct; identical to SEQ ID NO: 1783
  source 1..78: mol_type = other DNA

SEQ ID NO: 20394 - DNA, 78 bp, synthetic construct; identical to SEQ ID NO: 1614
  source 1..78: mol_type = other DNA

SEQ ID NO: 20395 - DNA, 78 bp, synthetic construct; identical to SEQ ID NO: 1783
  source 1..78: mol_type = other DNA

SEQ ID NO: 20396 - DNA, 78 bp, synthetic construct; identical to SEQ ID NO: 1538
  source 1..78: mol_type = other DNA

SEQ ID NO: 20397 - DNA, 78 bp, synthetic construct; identical to SEQ ID NO: 2723
  source 1..78: mol_type = other DNA

SEQ ID NO: 20398 - DNA, 78 bp, synthetic construct; identical to SEQ ID NO: 1528
  source 1..78: mol_type = other DNA

SEQ ID NO: 20399 - DNA, 78 bp, synthetic construct; identical to SEQ ID NO: 2723
  source 1..78: mol_type = other DNA

SEQ ID NO: 20400 - DNA, 78 bp, synthetic construct; identical to SEQ ID NO: 1528
  source 1..78: mol_type = other DNA

SEQ ID NO: 20401 - DNA, 78 bp, synthetic construct; identical to SEQ ID NO: 1519
  source 1..78: mol_type = other DNA

SEQ ID NO: 20402 - DNA, 78 bp, synthetic construct; identical to SEQ ID NO: 1512
  source 1..78: mol_type = other DNA

SEQ ID NO: 20403 - DNA, 78 bp, synthetic construct; identical to SEQ ID NO: 1519
  source 1..78: mol_type = other DNA

SEQ ID NO: 20404 - DNA, 78 bp, synthetic construct; identical to SEQ ID NO: 1806
  source 1..78: mol_type = other DNA

SEQ ID NO: 20405 - DNA, 78 bp, synthetic construct; identical to SEQ ID NO: 1519
  source 1..78: mol_type = other DNA

SEQ ID NO: 20406 - DNA, 78 bp, synthetic construct; identical to SEQ ID NO: 1492
  source 1..78: mol_type = other DNA

SEQ ID NO: 20407 - DNA, 78 bp, synthetic construct; identical to SEQ ID NO: 1519
  source 1..78: mol_type = other DNA

SEQ ID NO: 20408 - DNA, 78 bp, synthetic construct; identical to SEQ ID NO: 1556
  source 1..78: mol_type = other DNA

SEQ ID NO: 20409 - DNA, 78 bp, synthetic construct; identical to SEQ ID NO: 1519
  source 1..78: mol_type = other DNA

SEQ ID NO: 20410 - DNA, 78 bp, synthetic construct; identical to SEQ ID NO: 1584
  source 1..78: mol_type = other DNA

SEQ ID NO: 20411 - DNA, 78 bp, synthetic construct; identical to SEQ ID NO: 1519
  source 1..78: mol_type = other DNA

SEQ ID NO: 20412 - DNA, 78 bp, synthetic construct; identical to SEQ ID NO: 1698
  source 1..78: mol_type = other DNA

SEQ ID NO: 20413 - DNA, 78 bp, synthetic construct; identical to SEQ ID NO: 1519
  source 1..78: mol_type = other DNA

SEQ ID NO: 20414 - DNA, 78 bp, synthetic construct; identical to SEQ ID NO: 1506
  source 1..78: mol_type = other DNA

SEQ ID NO: 20415 - DNA, 78 bp, synthetic construct; identical to SEQ ID NO: 1519
  source 1..78: mol_type = other DNA

SEQ ID NO: 20416 - DNA, 78 bp, synthetic construct; identical to SEQ ID NO: 1592
  source 1..78: mol_type = other DNA

SEQ ID NO: 20417 - DNA, 78 bp, synthetic construct; identical to SEQ ID NO: 1519
  source 1..78: mol_type = other DNA

SEQ ID NO: 20418 - DNA, 78 bp, synthetic construct; identical to SEQ ID NO: 1528
  source 1..78: mol_type = other DNA

SEQ ID NO: 20419 - DNA, 78 bp, synthetic construct; identical to SEQ ID NO: 1575
  source 1..78: mol_type = other DNA

SEQ ID NO: 20420 - DNA, 78 bp, synthetic construct; identical to SEQ ID NO: 2072
  source 1..78: mol_type = other DNA

SEQ ID NO: 20421 - DNA, 78 bp, synthetic construct; identical to SEQ ID NO: 1575
  source 1..78: mol_type = other DNA

SEQ ID NO: 20422 - DNA, 78 bp, synthetic construct; identical to SEQ ID NO: 1514
  source 1..78: mol_type = other DNA

SEQ ID NO: 20423 - DNA, 78 bp, synthetic construct; identical to SEQ ID NO: 1575
  source 1..78: mol_type = other DNA

SEQ ID NO: 20424 - DNA, 78 bp, synthetic construct; identical to SEQ ID NO: 1564
  source 1..78: mol_type = other DNA

SEQ ID NO: 20425 - DNA, 78 bp, synthetic construct; identical to SEQ ID NO: 1511
  source 1..78: mol_type = other DNA

SEQ ID NO: 20426 - DNA, 78 bp, synthetic construct; identical to SEQ ID NO: 1576
  source 1..78: mol_type = other DNA

SEQ ID NO: 20427 - DNA, 78 bp, synthetic construct; identical to SEQ ID NO: 1511
  source 1..78: mol_type = other DNA

SEQ ID NO: 20428 - DNA, 78 bp, synthetic construct; identical to SEQ ID NO: 1740
  source 1..78: mol_type = other DNA

SEQ ID NO: 20429 - DNA, 78 bp, synthetic construct; identical to SEQ ID NO: 1511
  source 1..78: mol_type = other DNA

SEQ ID NO: 20430 - DNA, 78 bp, synthetic construct; identical to SEQ ID NO: 1512
  source 1..78: mol_type = other DNA

SEQ ID NO: 20431 - DNA, 78 bp, synthetic construct; identical to SEQ ID NO: 1511
  source 1..78: mol_type = other DNA

SEQ ID NO: 20432 - DNA, 78 bp, synthetic construct; identical to SEQ ID NO: 1846
  source 1..78: mol_type = other DNA

SEQ ID NO: 20433 - DNA, 78 bp, synthetic construct; identical to SEQ ID NO: 1511
  source 1..78: mol_type = other DNA

SEQ ID NO: 20434 - DNA, 78 bp, synthetic construct; identical to SEQ ID NO: 1644
  source 1..78: mol_type = other DNA

SEQ ID NO: 20435 - DNA, 78 bp, synthetic construct; identical to SEQ ID NO: 1511
  source 1..78: mol_type = other DNA

SEQ ID NO: 20436 - DNA, 78 bp, synthetic construct; identical to SEQ ID NO: 1594
  source 1..78: mol_type = other DNA

SEQ ID NO: 20437 - DNA, 78 bp, synthetic construct; identical to SEQ ID NO: 1511
  source 1..78: mol_type = other DNA

SEQ ID NO: 20438 - DNA, 78 bp, synthetic construct; identical to SEQ ID NO: 1994
  source 1..78: mol_type = other DNA

SEQ ID NO: 20439 - DNA, 78 bp, synthetic construct; identical to SEQ ID NO: 1511
  source 1..78: mol_type = other DNA

SEQ ID NO: 20440 - DNA, 78 bp, synthetic construct; identical to SEQ ID NO: 1556
  source 1..78: mol_type = other DNA

SEQ ID NO: 20441 - DNA, 78 bp, synthetic construct; identical to SEQ ID NO: 1511
  source 1..78: mol_type = other DNA

SEQ ID NO: 20442 - DNA, 78 bp, synthetic construct; identical to SEQ ID NO: 2102
  source 1..78: mol_type = other DNA

SEQ ID NO: 20443 - DNA, 78 bp, synthetic construct; identical to SEQ ID NO: 1511
  source 1..78: mol_type = other DNA

SEQ ID NO: 20444 - DNA, 78 bp, synthetic construct; identical to SEQ ID NO: 1528
  source 1..78: mol_type = other DNA

SEQ ID NO: 20445 - DNA, 78 bp, synthetic construct; identical to SEQ ID NO: 1511
  source 1..78: mol_type = other DNA

SEQ ID NO: 20446 - DNA, 78 bp, synthetic construct; identical to SEQ ID NO: 1742
  source 1..78: mol_type = other DNA

SEQ ID NO: 20447 - DNA, 78 bp, synthetic construct; identical to SEQ ID NO: 1511
  source 1..78: mol_type = other DNA

SEQ ID NO: 20448 - DNA, 78 bp, synthetic construct; identical to SEQ ID NO: 1528
  source 1..78: mol_type = other DNA

SEQ ID NO: 20449 - DNA, 78 bp, synthetic construct; identical to SEQ ID NO: 1511
  source 1..78: mol_type = other DNA

SEQ ID NO: 20450 - DNA, 78 bp, synthetic construct; identical to SEQ ID NO: 1672
  source 1..78: mol_type = other DNA

SEQ ID NO: 20451 - DNA, 78 bp, synthetic construct; identical to SEQ ID NO: 1511
  source 1..78: mol_type = other DNA

SEQ ID NO: 20452 - DNA, 78 bp, synthetic construct; identical to SEQ ID NO: 1528
  source 1..78: mol_type = other DNA

SEQ ID NO: 20453 - DNA, 78 bp, synthetic construct; identical to SEQ ID NO: 1511
  source 1..78: mol_type = other DNA

SEQ ID NO: 20454 - DNA, 78 bp, synthetic construct; identical to SEQ ID NO: 1882
  source 1..78: mol_type = other DNA

SEQ ID NO: 20455 - DNA, 78 bp, synthetic construct; identical to SEQ ID NO: 1511
  source 1..78: mol_type = other DNA

SEQ ID NO: 20456 - DNA, 78 bp, synthetic construct; identical to SEQ ID NO: 1538
  source 1..78: mol_type = other DNA

SEQ ID NO: 20457 - DNA, 78 bp, synthetic construct; identical to SEQ ID NO: 1511
  source 1..78: mol_type = other DNA

SEQ ID NO: 20458 - DNA, 78 bp, synthetic construct; identical to SEQ ID NO: 1538
  source 1..78: mol_type = other DNA

SEQ ID NO: 20459 - DNA, 78 bp, synthetic construct; identical to SEQ ID NO: 1511
  source 1..78: mol_type = other DNA

SEQ ID NO: 20460 - DNA, 78 bp, synthetic construct; identical to SEQ ID NO: 1552
  source 1..78: mol_type = other DNA

SEQ ID NO: 20461 - DNA, 78 bp, synthetic construct; identical to SEQ ID NO: 1511
  source 1..78: mol_type = other DNA

SEQ ID NO: 20462 - DNA, 78 bp, synthetic construct; identical to SEQ ID NO: 1544
  source 1..78: mol_type = other DNA

SEQ ID NO: 20463 - DNA, 78 bp, synthetic construct; identical to SEQ ID NO: 1511
  source 1..78: mol_type = other DNA

SEQ ID NO: 20464 - DNA, 78 bp, synthetic construct; identical to SEQ ID NO: 1544
  source 1..78: mol_type = other DNA

SEQ ID NO: 20465 - DNA, 78 bp, synthetic construct; identical to SEQ ID NO: 1511
  source 1..78: mol_type = other DNA

SEQ ID NO: 20466 - DNA, 78 bp, synthetic construct; identical to SEQ ID NO: 1526
  source 1..78: mol_type = other DNA

SEQ ID NO: 20467 - DNA, 78 bp, synthetic construct; identical to SEQ ID NO: 1511
  source 1..78: mol_type = other DNA

SEQ ID NO: 20468 - DNA, 78 bp, synthetic construct; identical to SEQ ID NO: 1486
  source 1..78: mol_type = other DNA

SEQ ID NO: 20469 - DNA, 78 bp, synthetic construct; identical to SEQ ID NO: 1511
  source 1..78: mol_type = other DNA

SEQ ID NO: 20470 - DNA, 78 bp, synthetic construct; identical to SEQ ID NO: 1514
  source 1..78: mol_type = other DNA

SEQ ID NO: 20471 - DNA, 78 bp, synthetic construct; identical to SEQ ID NO: 1511
  source 1..78: mol_type = other DNA

SEQ ID NO: 20472 - DNA, 78 bp, synthetic construct; identical to SEQ ID NO: 1994
  source 1..78: mol_type = other DNA

SEQ ID NO: 20473 - DNA, 78 bp, synthetic construct; identical to SEQ ID NO: 1511
  source 1..78: mol_type = other DNA

SEQ ID NO: 20474 - DNA, 78 bp, synthetic construct; identical to SEQ ID NO: 1594
  source 1..78: mol_type = other DNA

SEQ ID NO: 20475 - DNA, 78 bp, synthetic construct; identical to SEQ ID NO: 1511
  source 1..78: mol_type = other DNA

SEQ ID NO: 20476 - DNA, 78 bp, synthetic construct; identical to SEQ ID NO: 1594
  source 1..78: mol_type = other DNA

SEQ ID NO: 20477 - DNA, 78 bp, synthetic construct; identical to SEQ ID NO: 1511
  source 1..78: mol_type = other DNA

SEQ ID NO: 20478 - DNA, 78 bp, synthetic construct; identical to SEQ ID NO: 1644
  source 1..78: mol_type = other DNA

SEQ ID NO: 20479 - DNA, 78 bp, synthetic construct; identical to SEQ ID NO: 1511
  source 1..78: mol_type = other DNA

SEQ ID NO: 20480 - DNA, 75 bp, synthetic construct; identical to SEQ ID NO: 1590
  source 1..75: mol_type = other DNA

SEQ ID NO: 20481 - DNA, 78 bp, synthetic construct; identical to SEQ ID NO: 1511
  source 1..78: mol_type = other DNA

SEQ ID NO: 20482 - DNA, 78 bp, synthetic construct; identical to SEQ ID NO: 1512
  source 1..78: mol_type = other DNA

SEQ ID NO: 20483 - DNA, 78 bp, synthetic construct; identical to SEQ ID NO: 1511
  source 1..78: mol_type = other DNA

SEQ ID NO: 20484 - DNA, 78 bp, synthetic construct; identical to SEQ ID NO: 1940
  source 1..78: mol_type = other DNA

SEQ ID NO: 20485 - DNA, 78 bp, synthetic construct; identical to SEQ ID NO: 1511
  source 1..78: mol_type = other DNA

SEQ ID NO: 20486 - DNA, 78 bp, synthetic construct; identical to SEQ ID NO: 1608
  source 1..78: mol_type = other DNA

SEQ ID NO: 20487 - DNA, 78 bp, synthetic construct; identical to SEQ ID NO: 1511
  source 1..78: mol_type = other DNA

SEQ ID NO: 20488 - DNA, 78 bp, synthetic construct; identical to SEQ ID NO: 1492
  source 1..78: mol_type = other DNA

SEQ ID NO: 20489 - DNA, 78 bp, synthetic construct; identical to SEQ ID NO: 1507
  source 1..78: mol_type = other DNA

SEQ ID NO: 20490 - DNA, 75 bp, synthetic construct; identical to SEQ ID NO: 1590
  source 1..75: mol_type = other DNA

SEQ ID NO: 20491 - DNA, 78 bp, synthetic construct; identical to SEQ ID NO: 1507
  source 1..78: mol_type = other DNA

SEQ ID NO: 20492 - DNA, 78 bp, synthetic construct; identical to SEQ ID NO: 1592
  source 1..78: mol_type = other DNA

SEQ ID NO: 20493 - DNA, 78 bp, synthetic construct; identical to SEQ ID NO: 1507
  source 1..78: mol_type = other DNA

SEQ ID NO: 20494 - DNA, 78 bp, synthetic construct; identical to SEQ ID NO: 1528
  source 1..78: mol_type = other DNA

SEQ ID NO: 20495 - DNA, 78 bp, synthetic construct; identical to SEQ ID NO: 1507
  source 1..78: mol_type = other DNA

SEQ ID NO: 20496 - DNA, 78 bp, synthetic construct; identical to SEQ ID NO: 1496
  source 1..78: mol_type = other DNA

SEQ ID NO: 20497 - DNA, 78 bp, synthetic construct; identical to SEQ ID NO: 1507
  source 1..78: mol_type = other DNA

SEQ ID NO: 20498 - DNA, 78 bp, synthetic construct; identical to SEQ ID NO: 1556
  source 1..78: mol_type = other DNA

SEQ ID NO: 20499 - DNA, 78 bp, synthetic construct; identical to SEQ ID NO: 1507
  source 1..78: mol_type = other DNA

SEQ ID NO: 20500 - DNA, 75 bp, synthetic construct; identical to SEQ ID NO: 1590
  source 1..75: mol_type = other DNA

SEQ ID NO: 20501 - DNA, 78 bp, synthetic construct; identical to SEQ ID NO: 1507
  source 1..78: mol_type = other DNA

SEQ ID NO: 20502 - DNA, 78 bp, synthetic construct; identical to SEQ ID NO: 1584
  source 1..78: mol_type = other DNA

SEQ ID NO: 20503 - DNA, 78 bp, synthetic construct; identical to SEQ ID NO: 1507
  source 1..78: mol_type = other DNA

SEQ ID NO: 20504 - DNA, 78 bp, synthetic construct; identical to SEQ ID NO: 1672
  source 1..78: mol_type = other DNA

SEQ ID NO: 20505 - DNA, 78 bp, synthetic construct; identical to SEQ ID NO: 1507
  source 1..78: mol_type = other DNA

SEQ ID NO: 20506 - DNA, 78 bp, synthetic construct; identical to SEQ ID NO: 1608
  source 1..78: mol_type = other DNA

SEQ ID NO: 20507 - DNA, 78 bp, synthetic construct; identical to SEQ ID NO: 1507
  source 1..78: mol_type = other DNA

SEQ ID NO: 20508 - DNA, 78 bp, synthetic construct; identical to SEQ ID NO: 1674
  source 1..78: mol_type = other DNA

SEQ ID NO: 20509 - DNA, 78 bp, synthetic construct; identical to SEQ ID NO: 1507
  source 1..78: mol_type = other DNA

SEQ ID NO: 20510 - DNA, 78 bp, synthetic construct; identical to SEQ ID NO: 1504
  source 1..78: mol_type = other DNA

SEQ ID NO: 20511 - DNA, 78 bp, synthetic construct; identical to SEQ ID NO: 1507
  source 1..78: mol_type = other DNA

SEQ ID NO: 20512 - DNA, 78 bp, synthetic construct; identical to SEQ ID NO: 2102
  source 1..78: mol_type = other DNA

SEQ ID NO: 20513 - protein, 5 aa, synthetic construct
FNHDT

SEQ ID NO: 20514 - protein, 6 aa, synthetic construct
DSASVY

SEQ ID NO: 20515 - protein, 6 aa, synthetic construct
NSQYPW

SEQ ID NO: 20516 - protein, 6 aa, synthetic construct
DSASVY

SEQ ID NO: 20517 - protein, 5 aa, synthetic construct
FNHDT

SEQ ID NO: 20518 - protein, 6 aa, synthetic construct
YFGTPY

SEQ ID NO: 20519 - protein, 5 aa, synthetic construct
NNHDY

SEQ ID NO: 20520 - protein, 6 aa, synthetic construct
DPNSYY

SEQ ID NO: 20521 - protein, 5 aa, synthetic construct
MNHDT

SEQ ID NO: 20522 - protein, 6 aa, synthetic construct
YGGSIY

SEQ ID NO: 20523 - protein, 5 aa, synthetic construct
MSHET

SEQ ID NO: 20524 - protein, 6 aa, synthetic construct
DRNFQY

SEQ ID NO: 20525 - protein, 5 aa, synthetic construct
NNHDY

SEQ ID NO: 20526 - protein, 5 aa, synthetic construct
TYTTV

SEQ ID NO: 20527 - protein, 5 aa, synthetic construct
NNHNN

SEQ ID NO: 20528 - protein, 6 aa, synthetic construct
TSGFNG

SEQ ID NO: 20529 - protein, 5 aa, synthetic construct
NNHNN

SEQ ID NO: 20530 - protein, 6 aa, synthetic construct
TTTYPT

SEQ ID NO: 20531 - protein, 5 aa, synthetic construct
NNHDY

SEQ ID NO: 20532 - protein, 6 aa, synthetic construct
TTYSPF

SEQ ID NO: 20533 - protein, 5 aa, synthetic construct
LGHNA

SEQ ID NO: 20534 - protein, 6 aa, synthetic construct
NDMFDY

SEQ ID NO: 20535 - protein, 6 aa, synthetic construct
GKSSPN

SEQ ID NO: 20536 - protein, 7 aa, synthetic construct
TQDSSYF

SEQ ID NO: 20537 - protein, 5 aa, synthetic construct
SGHDT

SEQ ID NO: 20538 - protein, 6 aa, synthetic construct
TTYSPF

SEQ ID NO: 20539 - protein, 5 aa, synthetic construct
LGHNA

SEQ ID NO: 20540 - protein, 5 aa, synthetic construct
IATTT

SEQ ID NO: 20541 - protein, 5 aa, synthetic construct
NNHDY

SEQ ID NO: 20542 - protein, 7 aa, synthetic construct
TQDSSYF

SEQ ID NO: 20543 - protein, 5 aa, synthetic construct
FNHDT

SEQ ID NO: 20544 - protein, 6 aa, synthetic construct
DSASVY

SEQ ID NO: 20545 - protein, 5 aa, synthetic construct
FNHDT

SEQ ID NO: 20546 - protein, 6 aa, synthetic construct
TAYSTF

SEQ ID NO: 20547 - protein, 5 aa, synthetic construct
LGHNA

SEQ ID NO: 20548 - protein, 5 aa, synthetic construct
TSLNS

SEQ ID NO: 20549 - protein, 5 aa, synthetic construct
LGHNA

SEQ ID NO: 20550 - protein, 8 aa, synthetic construct
TTSIAYPN

SEQ ID NO: 20551 - protein, 5 aa, synthetic construct
NNHNN

SEQ ID NO: 20552 - protein, 7 aa, synthetic construct
TQDSSYF

SEQ ID NO: 20553 - protein, 5 aa, synthetic construct
NNHNN

SEQ ID NO: 20554 - protein, 6 aa, synthetic construct
DSATAY

SEQ ID NO: 20555 - protein, 5 aa, synthetic construct
NNHDY

SEQ ID NO: 20556 - protein, 7 aa, synthetic construct
TRDSSYF

SEQ ID NO: 20557 - protein, 5 aa, synthetic construct
NNHDY

SEQ ID NO: 20558 - protein, 6 aa, synthetic construct
DGTSNN

SEQ ID NO: 20559 - protein, 5 aa, synthetic construct
LGHNA

SEQ ID NO: 20560 - protein, 6 aa, synthetic construct
TTTYPT

SEQ ID NO: 20561 - protein, 5 aa, synthetic construct
LGHNA

SEQ ID NO: 20562 - protein, 5 aa, synthetic construct
STATR

SEQ ID NO: 20563 - protein, 5 aa, synthetic construct
SQVVS

SEQ ID NO: 20564 - protein, 7 aa, synthetic construct
TRDSSYF

SEQ ID NO: 20565 - protein, 5 aa, synthetic construct
LGHDT

SEQ ID NO: 20566 - protein, 5 aa, synthetic construct
STATQ

SEQ ID NO: 20567 - protein, 5 aa, synthetic construct
LGHDT

SEQ ID NO: 20568 - protein, 5 aa, synthetic construct
TSLNS

SEQ ID NO: 20569 - protein, 5 aa, synthetic construct
NNHNN

SEQ ID NO: 20570 - protein, 5 aa, synthetic construct
STATR

SEQ ID NO: 20571 - protein, 5 aa, synthetic construct
NNHNN

SEQ ID NO: 20572 - protein, 8 aa, synthetic construct
ATSIGYPN

SEQ ID NO: 20573 - protein, 5 aa, synthetic construct
NNHNN

SEQ ID NO: 20574 - protein, 6 aa, synthetic construct
TTWYPT

SEQ ID NO: 20575 - protein, 5 aa, synthetic construct
NNHDY

SEQ ID NO: 20576 - protein, 6 aa, synthetic construct
YSAAPY

SEQ ID NO: 20577 - protein, 5 aa, synthetic construct
NNHDY

SEQ ID NO: 20578 - protein, 6 aa, synthetic construct
YSAAPY

SEQ ID NO: 20579 - protein, 5 aa, synthetic construct
MNHDT

SEQ ID NO: 20580 - protein, 6 aa, synthetic construct
SSVTPY

SEQ ID NO: 20581 - protein, 6 aa, synthetic construct
GKSSPN

SEQ ID NO: 20582 - protein, 6 aa, synthetic construct
DPNSYY

SEQ ID NO: 20583 - protein, 5 aa, synthetic construct
FNHDT

SEQ ID NO: 20584 - protein, 6 aa, synthetic construct
YSAAPY

SEQ ID NO: 20585 - protein, 5 aa, synthetic construct
LGHNA

SEQ ID NO: 20586 - protein, 6 aa, synthetic construct
ASGYPA

SEQ ID NO: 20587 - protein, 5 aa, synthetic construct
LGHNA

SEQ ID NO: 20588 - protein, 6 aa, synthetic construct
NSASQS

SEQ ID NO: 20589 - protein, 5 aa, synthetic construct
LGHNA

SEQ ID NO: 20590 - protein, 7 aa, synthetic construct
TQDSSYF

SEQ ID NO: 20591 - protein, 5 aa, synthetic construct
LGHNA

SEQ ID NO: 20592 - protein, 6 aa, synthetic construct
STYSPF

SEQ ID NO: 20593 - protein, 5 aa, synthetic construct
LGHNA

SEQ ID NO: 20594 - protein, 6 aa, synthetic construct
TTGYPT

SEQ ID NO: 20595 - protein, 5 aa, synthetic construct
LGHNA

SEQ ID NO: 20596 - protein, 7 aa, synthetic construct
TRDSSYF

SEQ ID NO: 20597 - protein, 5 aa, synthetic construct
LGHNA

SEQ ID NO: 20598 - protein, 6 aa, synthetic construct
SSVTPY

SEQ ID NO: 20599 - protein, 5 aa, synthetic construct
LGHNA

SEQ ID NO: 20600 - protein, 7 aa, synthetic construct
TRDSSYF

SEQ ID NO: 20601 - protein, 5 aa, synthetic construct
LGHNA

SEQ ID NO: 20602 - protein, 7 aa, synthetic construct
TQDSSYF

SEQ ID NO: 20603 - protein, 5 aa, synthetic construct
LGHNA

SEQ ID NO: 20604 - protein, 6 aa, synthetic construct
DPNSYY

SEQ ID NO: 20605 - protein, 5 aa, synthetic construct
LGHNA

SEQ ID NO: 20606 - protein, 6 aa, synthetic construct
ASGYPA

SEQ ID NO: 20607 - protein, 5 aa, synthetic construct
LGHNA

SEQ ID NO: 20608 - protein, 5 aa, synthetic construct
TSLNS

SEQ ID NO: 20609 - protein, 5 aa, synthetic construct
LGHNA

SEQ ID NO: 20610 - protein, 6 aa, synthetic construct
ASGYPT

SEQ ID NO: 20611 - protein, 5 aa, synthetic construct
LGHNA

SEQ ID NO: 20612 - protein, 5 aa, synthetic construct
TSITA

SEQ ID NO: 20613 - protein, 5 aa, synthetic construct
LGHNA

SEQ ID NO: 20614 - protein, 5 aa, synthetic construct
TSLNS

SEQ ID NO: 20615 - protein, 5 aa, synthetic construct
LGHNA

SEQ ID NO: 20616 - protein, 6 aa, synthetic construct
STYSPF

SEQ ID NO: 20617 - protein, 5 aa, synthetic construct
LGHNA

SEQ ID NO: 20618 - protein, 6 aa, synthetic construct
DSTFNY

SEQ ID NO: 20619 - protein, 5 aa, synthetic construct
LGHNA

SEQ ID NO: 20620 - protein, 6 aa, synthetic construct
SSVTPY

SEQ ID NO: 20621 - protein, 5 aa, synthetic construct
LGHNA

SEQ ID NO: 20622 - protein, 5 aa, synthetic construct
TSLNS

SEQ ID NO: 20623 - protein, 5 aa, synthetic construct
SGHSA

SEQ ID NO: 20624 - protein, 5 aa, synthetic construct
STATQ

SEQ ID NO: 20625 - protein, 5 aa, synthetic construct
SGHSA

SEQ ID NO: 20626 - protein, 6 aa, synthetic construct
YSATPY

SEQ ID NO: 20627 - protein, 5 aa, synthetic construct
SGHSA

SEQ ID NO: 20628 - protein, 5 aa, synthetic construct
TSLNS

SEQ ID NO: 20629 - protein, 5 aa, synthetic construct
KGHPV

SEQ ID NO: 20630 - protein, 7 aa, synthetic construct
TQDSSYF

SEQ ID NO: 20631 - protein, 5 aa, synthetic construct
SQVVS

SEQ ID NO: 20632 - protein, 6 aa, synthetic construct
DPNSYY

SEQ ID NO: 20633 - protein, 5 aa, synthetic construct
SQVVS

SEQ ID NO: 20634 - protein, 6 aa, synthetic construct
DPNSYY

SEQ ID NO: 20635 - protein, 5 aa, synthetic construct
SQVVS

SEQ ID NO: 20636 - protein, 6 aa, synthetic construct
DPNSYY

SEQ ID NO: 20637 - protein, 5 aa, synthetic construct
SQVVS

SEQ ID NO: 20638 - protein, 6 aa, synthetic construct
YSGTPY

SEQ ID NO: 20639 - protein, 5 aa, synthetic construct
SQVVS

SEQ ID NO: 20640 - protein, 6 aa, synthetic construct
DPNSYY

SEQ ID NO: 20641 - protein, 5 aa, synthetic construct
SQVVS

SEQ ID NO: 20642 - protein, 6 aa, synthetic construct
DPNSYY

SEQ ID NO: 20643 - protein, 5 aa, synthetic construct
SGHDT

SEQ ID NO: 20644 - protein, 6 aa, synthetic construct
TTYSPF

SEQ ID NO: 20645 - protein, 5 aa, synthetic construct
SGHDT

SEQ ID NO: 20646 - protein, 8 aa, synthetic construct
TTSIAYPN

SEQ ID NO: 20647 - protein, 5 aa, synthetic construct
SGHDT

SEQ ID NO: 20648 - protein, 6 aa, synthetic construct
TKQYPT

SEQ ID NO: 20649 - protein, 5 aa, synthetic construct
SGHDT

SEQ ID NO: 20650 - protein, 6 aa, synthetic construct
TSGFNG

SEQ ID NO: 20651 - protein, 5 aa, synthetic construct
SGHDT

SEQ ID NO: 20652 - protein, 6 aa, synthetic construct
STYSPF

SEQ ID NO: 20653 - protein, 5 aa, synthetic construct
SGHDT

SEQ ID NO: 20654 - protein, 6 aa, synthetic construct
SSGTPY

SEQ ID NO: 20655 - protein, 5 aa, synthetic construct
SGHDT

SEQ ID NO: 20656 - protein, 6 aa, synthetic construct
DRNFQY

SEQ ID NO: 20657 - protein, 5 aa, synthetic construct
SGHDT

SEQ ID NO: 20658 - protein, 6 aa, synthetic construct
ASGYPA

SEQ ID NO: 20659 - protein, 5 aa, synthetic construct
SGHDT

SEQ ID NO: 20660 - protein, 6 aa, synthetic construct
DSASQY

SEQ ID NO: 20661 - protein, 5 aa, synthetic construct
SGHDT

SEQ ID NO: 20662 - protein, 6 aa, synthetic construct
TTYSPF

SEQ ID NO: 20663 - protein, 5 aa, synthetic construct
SGHDT

SEQ ID NO: 20664 - protein, 6 aa, synthetic construct
DSTFNY

SEQ ID NO: 20665 - protein, 5 aa, synthetic construct
SGHDT

SEQ ID NO: 20666 - protein, 6 aa, synthetic construct
ASGYPA

SEQ ID NO: 20667 - protein, 5 aa, synthetic construct
SGHDT

SEQ ID NO: 20668 - protein, 7 aa, synthetic construct
TTYLTIA

SEQ ID NO: 20669 - protein, 5 aa, synthetic construct
SGHDT

SEQ ID NO: 20670 - protein, 6 aa, synthetic construct
NSAFDY

SEQ ID NO: 20671 - protein, 5 aa, synthetic construct
SGHDT

SEQ ID NO: 20672 - protein, 6 aa, synthetic construct
ASGYPA

SEQ ID NO: 20673 - protein, 5 aa, synthetic construct
SGHDT

SEQ ID NO: 20674 - protein, 6 aa, synthetic construct
TKQYPT

SEQ ID NO: 20675 - protein, 5 aa, synthetic construct
SGHDT

SEQ ID NO: 20676 - protein, 5 aa, synthetic construct
STATQ

SEQ ID NO: 20677 - protein, 5 aa, synthetic construct
MSHET

SEQ ID NO: 20678 - protein, 6 aa, synthetic construct
DSATAY

SEQ ID NO: 20679 - protein, 5 aa, synthetic construct
MSHET

SEQ ID NO: 20680 - protein, 6 aa, synthetic construct
TKQYPT

SEQ ID NO: 20681 - protein, 5 aa, synthetic construct
MSHET

SEQ ID NO: 20682 - protein, 5 aa, synthetic construct
TYTTV

SEQ ID NO: 20683 - protein, 5 aa, synthetic construct
MSHET

SEQ ID NO: 20684 - protein, 6 aa, synthetic construct
NSAFDY

SEQ ID NO: 20685 - protein, 5 aa, synthetic construct
MSHET

SEQ ID NO: 20686 - protein, 6 aa, synthetic construct
NDMFDY

SEQ ID NO: 20687 - protein, 5 aa, synthetic construct
MSHET

SEQ ID NO: 20688 - protein, 7 aa, synthetic construct
TISGNEY

SEQ ID NO: 20689 - protein, 5 aa, synthetic construct
LGHNA

SEQ ID NO: 20690 - protein, 7 aa, synthetic construct
TQDSSYF

SEQ ID NO: 20691 - protein, 5 aa, synthetic construct
LGHNA

SEQ ID NO: 20692 - protein, 8 aa, synthetic construct
TTSIAYPN

SEQ ID NO: 20693 - protein, 5 aa, synthetic construct
LGHNA

SEQ ID NO: 20694 - protein, 5 aa, synthetic construct
TSLNS

SEQ ID NO: 20695 - protein, 5 aa, synthetic construct
LGHNA

SEQ ID NO: 20696 - protein, 7 aa, synthetic construct
TQDSSYF

SEQ ID NO: 20697 - protein, 5 aa, synthetic construct
LGHNA

SEQ ID NO: 20698 - protein, 5 aa, synthetic construct
TYTTV

SEQ ID NO: 20699 - protein, 5 aa, synthetic construct
LGHNA

SEQ ID NO: 20700 - protein, 8 aa, synthetic construct
ATSIAYPN

SEQ ID NO: 20701 - protein, 5 aa, synthetic construct
LGHNA

SEQ ID NO: 20702 - protein, 6 aa, synthetic construct
TTTYPT

SEQ ID NO: 20703 - protein, 5 aa, synthetic construct
LGHNA

SEQ ID NO: 20704 - protein, 6 aa, synthetic construct
DRNFQY

SEQ ID NO: 20705 - protein, 5 aa, synthetic construct
LGHNA

SEQ ID NO: 20706 - protein, 6 aa, synthetic construct
DRNFQY

SEQ ID NO: 20707 - protein, 5 aa, synthetic construct
LGHNA

SEQ ID NO: 20708 - protein, 8 aa, synthetic construct
ATSIGYPN

SEQ ID NO: 20709 - protein, 5 aa, synthetic construct
LGHNA

SEQ ID NO: 20710 - protein, 6 aa, synthetic construct
STYSPF

SEQ ID NO: 20711 - protein, 5 aa, synthetic construct
LGHNA

SEQ ID NO: 20712 - protein, 7 aa, synthetic construct
TRDSSYF

SEQ ID NO: 20713 - protein, 5 aa, synthetic construct
LGHNA

SEQ ID NO: 20714 - protein, 6 aa, synthetic construct
DTASSY

SEQ ID NO: 20715 - protein, 5 aa, synthetic construct
LGHNA

SEQ ID NO: 20716 - protein, 6 aa, synthetic construct
YSATPY

SEQ ID NO: 20717 - protein, 5 aa, synthetic construct
LGHNA

SEQ ID NO: 20718 - protein, 7 aa, synthetic construct
TRDSSYF

SEQ ID NO: 20719 - protein, 5 aa, synthetic construct
LGHDT

SEQ ID NO: 20720 - protein, 6 aa, synthetic construct
YFGTPY

SEQ ID NO: 20721 - protein, 5 aa, synthetic construct
LGHDT

SEQ ID NO: 20722 - protein, 6 aa, synthetic construct
YSGTPY

SEQ ID NO: 20723 - protein, 5 aa, synthetic construct
LGHDT

SEQ ID NO: 20724 - protein, 7 aa, synthetic construct
TQDSSYF

SEQ ID NO: 20725 - protein, 5 aa, synthetic construct
LGHDT

SEQ ID NO: 20726 - protein, 6 aa, synthetic construct
YGGSIY

SEQ ID NO: 20727 - protein, 5 aa, synthetic construct
LGHDT

SEQ ID NO: 20728 - protein, 6 aa, synthetic construct
TTTYPT

SEQ ID NO: 20729 - protein, 5 aa, synthetic construct
LGHDT

SEQ ID NO: 20730 - protein, 6 aa, synthetic construct
TTTYPT

SEQ ID NO: 20731 - protein, 5 aa, synthetic construct
LGHDT

SEQ ID NO: 20732 - protein, 5 aa, synthetic construct
TSLNS

SEQ ID NO: 20733 - protein, 5 aa, synthetic construct
LGHDT

SEQ ID NO: 20734 - protein, 6 aa, synthetic construct
TAYSTF

SEQ ID NO: 20735 - protein, 5 aa, synthetic construct
LGHDT

SEQ ID NO: 20736 - protein, 7 aa, synthetic construct
TQDSSYF

SEQ ID NO: 20737 - protein, 5 aa, synthetic construct
LGHDT

SEQ ID NO: 20738 - protein, 5 aa, synthetic construct
TSLNS

SEQ ID NO: 20739 - protein, 5 aa, synthetic construct
LGHDT

SEQ ID NO: 20740 - protein, 6 aa, synthetic construct
DRNFQY

SEQ ID NO: 20741 - protein, 5 aa, synthetic construct
LGHDT

SEQ ID NO: 20742 - protein, 6 aa, synthetic construct
DTASSY

SEQ ID NO: 20743 - protein, 5 aa, synthetic construct
LGHDT

SEQ ID NO: 20744 - protein, 6 aa, synthetic construct
TAYSTF

SEQ ID NO: 20745 - protein, 5 aa, synthetic construct
NNHNN

SEQ ID NO: 20746 - protein, 6 aa, synthetic construct
DSASNY

SEQ ID NO: 20747 - protein, 5 aa, synthetic construct
NNHNN

SEQ ID NO: 20748 - protein, 6 aa, synthetic construct
DSTFDY

SEQ ID NO: 20749 - protein, 5 aa, synthetic construct
NNHNN

SEQ ID NO: 20750 - protein, 6 aa, synthetic construct
DGTSNN

SEQ ID NO: 20751 - protein, 5 aa, synthetic construct
NNHNN

SEQ ID NO: 20752 - protein, 6 aa, synthetic construct
NSASNY

SEQ ID NO: 20753 - protein, 5 aa, synthetic construct
NNHNN

SEQ ID NO: 20754 - protein, 8 aa, synthetic construct
TTSIAYPN

SEQ ID NO: 20755 - protein, 5 aa, synthetic construct
NNHNN

SEQ ID NO: 20756 - protein, 6 aa, synthetic construct
DGTSDN

SEQ ID NO: 20757 - protein, 5 aa, synthetic construct
NNHNN

SEQ ID NO: 20758 - protein, 6 aa, synthetic construct
DGTSNN

SEQ ID NO: 20759 - protein, 5 aa, synthetic construct
NNHNN

SEQ ID NO: 20760 - protein, 6 aa, synthetic construct
DPNSYY

SEQ ID NO: 20761 - protein, 5 aa, synthetic construct
NNHNN

SEQ ID NO: 20762 - protein, 6 aa, synthetic construct
NSAFDY

SEQ ID NO: 20763 - protein, 5 aa, synthetic construct
NNHNN

SEQ ID NO: 20764 - protein, 6 aa, synthetic construct
DRNFQY

SEQ ID NO: 20765 - protein, 5 aa, synthetic construct
NNHNN

SEQ ID NO: 20766 - protein, 6 aa, synthetic construct
DRNFQY

SEQ ID NO: 20767 - protein, 5 aa, synthetic construct
NNHNN

SEQ ID NO: 20768 - protein, 6 aa, synthetic construct
TKQYPT

SEQ ID NO: 20769 - protein, 5 aa, synthetic construct
NNHNN

SEQ ID NO: 20770 - protein, 5 aa, synthetic construct
TSITA

SEQ ID NO: 20771 - protein, 5 aa, synthetic construct
NNHNN

SEQ ID NO: 20772 - protein, 5 aa, synthetic construct
TSLNS

SEQ ID NO: 20773 - protein, 5 aa, synthetic construct
NNHNN

SEQ ID NO: 20774 - protein, 6 aa, synthetic construct
DRNVDY

SEQ ID NO: 20775 - protein, 5 aa, synthetic construct
NNHNN

SEQ ID NO: 20776 - protein, 6 aa, synthetic construct
NSAFDY

SEQ ID NO: 20777 - protein, 5 aa, synthetic construct
NNHNN

SEQ ID NO: 20778 - protein, 7 aa, synthetic construct
TIYSNAF

SEQ ID NO: 20779 - protein, 5 aa, synthetic construct
NNHNN

SEQ ID NO: 20780 - protein, 6 aa, synthetic construct
TKQYPT

SEQ ID NO: 20781 - protein, 5 aa, synthetic construct
NNHNN

SEQ ID NO: 20782 - protein, 7 aa, synthetic construct
TQDSSYF

SEQ ID NO: 20783 - protein, 5 aa, synthetic construct
NNHNN

SEQ ID NO: 20784 - protein, 7 aa, synthetic construct
NIATSEY

SEQ ID NO: 20785 - protein, 5 aa, synthetic construct
NNHNN

SEQ ID NO: 20786 - protein, 7 aa, synthetic construct
TQDSSYF

SEQ ID NO: 20787 - protein, 5 aa, synthetic construct
NNHNN

SEQ ID NO: 20788 - protein, 6 aa, synthetic construct
DSASVY

SEQ ID NO: 20789 - protein, 5 aa, synthetic construct
NNHNN

SEQ ID NO: 20790 - protein, 6 aa, synthetic construct
TKQYPT

SEQ ID NO: 20791 - protein, 5 aa, synthetic construct
NNHNN

SEQ ID NO: 20792 - protein, 6 aa, synthetic construct
STYSPF

SEQ ID NO: 20793 - protein, 5 aa, synthetic construct
NNHNN

SEQ ID NO: 20794 - protein, 6 aa, synthetic construct
TTTYPT

SEQ ID NO: 20795 - protein, 5 aa, synthetic construct
NNHNN

SEQ ID NO: 20796 - protein, 5 aa, synthetic construct
TSLNS

SEQ ID NO: 20797 - protein, 5 aa, synthetic construct
NNHNN

SEQ ID NO: 20798 - protein, 6 aa, synthetic construct
YSGTPY

SEQ ID NO: 20799 - protein, 5 aa, synthetic construct
NNHNN

SEQ ID NO: 20800 - protein, 5 aa, synthetic construct
TYTTV

SEQ ID NO: 20801 - protein, 5 aa, synthetic construct
NNHNN

SEQ ID NO: 20802 - protein, 6 aa, synthetic construct
YSATPY

SEQ ID NO: 20803 - protein, 5 aa, synthetic construct
NNHNN

SEQ ID NO: 20804 - protein, 6 aa, synthetic construct
TTGYPT

SEQ ID NO: 20805 - protein, 5 aa, synthetic construct
NNHNN

SEQ ID NO: 20806 - protein, 8 aa, synthetic construct
ATSIAYPN

SEQ ID NO: 20807 - protein, 5 aa, synthetic construct
NNHNN

SEQ ID NO: 20808 - protein, 8 aa, synthetic construct
ATSIAYPN

SEQ ID NO: 20809 - protein, 5 aa, synthetic construct
NNHNN

SEQ ID NO: 20810 - protein, 6 aa, synthetic construct
NSAFDY

SEQ ID NO: 20811 - protein, 5 aa, synthetic construct
NNHNN

SEQ ID NO: 20812 - protein, 7 aa, synthetic construct
TQDSSYF

SEQ ID NO: 20813 - protein, 5 aa, synthetic construct
NNHNN

SEQ ID NO: 20814 - protein, 5 aa, synthetic construct
TSLNS

SEQ ID NO: 20815 - protein, 5 aa, synthetic construct
NNHNN

SEQ ID NO: 20816 - protein, 6 aa, synthetic construct
TTYSPF

SEQ ID NO: 20817 - protein, 5 aa, synthetic construct
NNHNN

SEQ ID NO: 20818 - protein, 6 aa, synthetic construct
DSTFNY

SEQ ID NO: 20819 - protein, 5 aa, synthetic construct
NNHNN

SEQ ID NO: 20820 - protein, 6 aa, synthetic construct
DSTFNY

SEQ ID NO: 20821 - protein, 5 aa, synthetic construct
NNHNN

SEQ ID NO: 20822 - protein, 5 aa, synthetic construct
STATQ

SEQ ID NO: 20823 - protein, 5 aa, synthetic construct
NNHNN

SEQ ID NO: 20824 - protein, 7 aa, synthetic construct
TISGNEY

SEQ ID NO: 20825 - protein, 5 aa, synthetic construct
NNHNN

SEQ ID NO: 20826 - protein, 7 aa, synthetic construct
TQDSSYF

SEQ ID NO: 20827 - protein, 5 aa, synthetic construct
NNHNN

SEQ ID NO: 20828 - protein, 7 aa, synthetic construct
TQDSSYF

SEQ ID NO: 20829 - protein, 5 aa, synthetic construct
NNHNN

SEQ ID NO: 20830 - protein, 6 aa, synthetic construct
DRNFQY

SEQ ID NO: 20831 - protein, 5 aa, synthetic construct
NNHNN

SEQ ID NO: 20832 - protein, 6 aa, synthetic construct
DSTFDY

SEQ ID NO: 20833 - protein, 5 aa, synthetic construct
NNHNN

SEQ ID NO: 20834 - protein, 6 aa, synthetic construct
DRNVDY

SEQ ID NO: 20835 - protein, 5 aa, synthetic construct
NNHNN

SEQ ID NO: 20836 - protein, 6 aa, synthetic construct
DSASQY

SEQ ID NO: 20837 - protein, 5 aa, synthetic construct
NNHNN

SEQ ID NO: 20838 - protein, 7 aa, synthetic construct
TIYSNPF

SEQ ID NO: 20839 - protein, 5 aa, synthetic construct
NNHNN

SEQ ID NO: 20840 - protein, 6 aa, synthetic construct
NSAFDY

SEQ ID NO: 20841 - protein, 5 aa, synthetic construct
NNHNN

SEQ ID NO: 20842 - protein, 6 aa, synthetic construct
TTYSPF

SEQ ID NO: 20843 - protein, 5 aa, synthetic construct
NNHNN

SEQ ID NO: 20844 - protein, 5 aa, synthetic construct
TSLNS

SEQ ID NO: 20845 - protein, 5 aa, synthetic construct
NNHNN

SEQ ID NO: 20846 - protein, 6 aa, synthetic construct
DPNSYY

SEQ ID NO: 20847 - protein, 5 aa, synthetic construct
NNHNN

SEQ ID NO: 20848 - protein, 5 aa, synthetic construct
IAATT

SEQ ID NO: 20849 - protein, 5 aa, synthetic construct
NNHNN

SEQ ID NO: 20850 - protein, 6 aa, synthetic construct
TTGYPT

SEQ ID NO: 20851 - protein, 5 aa, synthetic construct
NNHNN

SEQ ID NO: 20852 - protein, 7 aa, synthetic construct
TQDSSYF

SEQ ID NO: 20853 - protein, 5 aa, synthetic construct
NSHNY

SEQ ID NO: 20854 - protein, 6 aa, synthetic construct
DRNVDY

SEQ ID NO: 20855 - protein, 5 aa, synthetic construct
NSHNY

SEQ ID NO: 20856 - protein, 6 aa, synthetic construct
YSATPY

SEQ ID NO: 20857 - protein, 5 aa, synthetic construct
NSHNY

SEQ ID NO: 20858 - protein, 6 aa, synthetic construct
DRNFQY

SEQ ID NO: 20859 - protein, 5 aa, synthetic construct
NSHNY

SEQ ID NO: 20860 - protein, 7 aa, synthetic construct
TQDSSYF

SEQ ID NO: 20861 - protein, 5 aa, synthetic construct
NSHNY

SEQ ID NO: 20862 - protein, 6 aa, synthetic construct
TTTYPT

SEQ ID NO: 20863 - protein, 5 aa, synthetic construct
NSHNY

SEQ ID NO: 20864 - protein, 8 aa, synthetic construct
ATSIAYPN

SEQ ID NO: 20865 - protein, 5 aa, synthetic construct
NSHNY

SEQ ID NO: 20866 - protein, 7 aa, synthetic construct
TRDSSYF

SEQ ID NO: 20867 - protein, 5 aa, synthetic construct
NSHNY

SEQ ID NO: 20868 - protein, 7 aa, synthetic construct
TQDSSYF

SEQ ID NO: 20869 - protein, 5 aa, synthetic construct
NSHNY

SEQ ID NO: 20870 - protein, 6 aa, synthetic construct
DSASQY

SEQ ID NO: 20871 - protein, 5 aa, synthetic construct
NSHNY

SEQ ID NO: 20872 - protein, 6 aa, synthetic construct
DSASNY

SEQ ID NO: 20873 - protein, 5 aa, synthetic construct
NSHNY

SEQ ID NO: 20874 - protein, 6 aa, synthetic construct
SSVTPY

SEQ ID NO: 20875 - protein, 5 aa, synthetic construct
NSHNY

SEQ ID NO: 20876 - protein, 7 aa, synthetic construct
TTYLTIA

SEQ ID NO: 20877 - protein, 5 aa, synthetic construct
NSHNY

SEQ ID NO: 20878 - protein, 6 aa, synthetic construct
TTGYPT

SEQ ID NO: 20879 - protein, 5 aa, synthetic construct
NSHNY

SEQ ID NO: 20880 - protein, 7 aa, synthetic construct
NIATSEY

SEQ ID NO: 20881 - protein, 5 aa, synthetic construct
NSHNY

SEQ ID NO: 20882 - protein, 6 aa, synthetic construct
DGTSNN

SEQ ID NO: 20883 - protein, 5 aa, synthetic construct
NSHNY

SEQ ID NO: 20884 - protein, 8 aa, synthetic construct
TTSIAYPN

SEQ ID NO: 20885 - protein, 5 aa, synthetic construct
NSHNY

SEQ ID NO: 20886 - protein, 6 aa, synthetic construct
ASGYPA

SEQ ID NO: 20887 - protein, 5 aa, synthetic construct
NSHNY

SEQ ID NO: 20888 - protein, 7 aa, synthetic construct
TRDSSYF

SEQ ID NO: 20889 - protein, 5 aa, synthetic construct
NSHNY

SEQ ID NO: 20890 - protein, 6 aa, synthetic construct
DRNSQY

SEQ ID NO: 20891 - protein, 5 aa, synthetic construct
NSHNY

SEQ ID NO: 20892 - protein, 6 aa, synthetic construct
DSATAY

SEQ ID NO: 20893 - protein, 5 aa, synthetic construct
NSHNY

SEQ ID NO: 20894 - protein, 6 aa, synthetic construct
TTYSPF

SEQ ID NO: 20895 - protein, 5 aa, synthetic construct
NSHNY

SEQ ID NO: 20896 - protein, 6 aa, synthetic construct
NSAFDY

SEQ ID NO: 20897 - protein, 5 aa, synthetic construct
NSHNY

SEQ ID NO: 20898 - protein, 6 aa, synthetic construct
TAYSTF

SEQ ID NO: 20899 - protein, 5 aa, synthetic construct
NSHNY

SEQ ID NO: 20900 - protein, 8 aa, synthetic construct
ATSIAYPN

SEQ ID NO: 20901 - protein, 5 aa, synthetic construct
NSHNY

SEQ ID NO: 20902 - protein, 8 aa, synthetic construct
ATSIAYPN

SEQ ID NO: 20903 - protein, 5 aa, synthetic construct
NSHNY

SEQ ID NO: 20904 - protein, 6 aa, synthetic construct
TAYSTF

SEQ ID NO: 20905 - protein, 5 aa, synthetic construct
NSHNY

SEQ ID NO: 20906 - protein, 7 aa, synthetic construct
TRDSSYF

SEQ ID NO: 20907 - protein, 5 aa, synthetic construct
NSHNY

SEQ ID NO: 20908 - protein, 6 aa, synthetic construct
DSTFDY

SEQ ID NO: 20909 - protein, 5 aa, synthetic construct
NSHNY

SEQ ID NO: 20910 - protein, 6 aa, synthetic construct
DRNVDY

SEQ ID NO: 20911 - protein, 5 aa, synthetic construct
NSHNY

SEQ ID NO: 20912 - protein, 6 aa, synthetic construct
DSTFDY

SEQ ID NO: 20913 - protein, 5 aa, synthetic construct
NSHNY

SEQ ID NO: 20914 - protein, 7 aa, synthetic construct
TQDSSYF

SEQ ID NO: 20915 - protein, 5 aa, synthetic construct
NSHNY

SEQ ID NO: 20916 - protein, 6 aa, synthetic construct
DRNVDY

SEQ ID NO: 20917 - protein, 5 aa, synthetic construct
NSHNY

SEQ ID NO: 20918 - protein, 6 aa, synthetic construct
TSGFNG

SEQ ID NO: 20919 - protein, 5 aa, synthetic construct
NSHNY

SEQ ID NO: 20920 - protein, 6 aa, synthetic construct
DSASQY

SEQ ID NO: 20921 - protein, 5 aa, synthetic construct
NSHNY

SEQ ID NO: 20922 - protein, 6 aa, synthetic construct
DPNSYY

SEQ ID NO: 20923 - protein, 5 aa, synthetic construct
NSHNY

SEQ ID NO: 20924 - protein, 6 aa, synthetic construct
ASGYPA

SEQ ID NO: 20925 - protein, 5 aa, synthetic construct
NSHNY

SEQ ID NO: 20926 - protein, 6 aa, synthetic construct
NSAFDY

SEQ ID NO: 20927 - protein, 5 aa, synthetic construct
NNHDY

SEQ ID NO: 20928 - protein, 5 aa, synthetic construct
TSITA

SEQ ID NO: 20929 - protein, 5 aa, synthetic construct
NNHDY

SEQ ID NO: 20930 - protein, 6 aa, synthetic construct
DSTFNY

SEQ ID NO: 20931 - protein, 5 aa, synthetic construct
NNHDY

SEQ ID NO: 20932 - protein, 6 aa, synthetic construct
DRNFQY

SEQ ID NO: 20933 - protein, 5 aa, synthetic construct
NNHDY

SEQ ID NO: 20934 - protein, 5 aa, synthetic construct
STATQ

SEQ ID NO: 20935 - protein, 5 aa, synthetic construct
NNHDY

SEQ ID NO: 20936 - protein, 7 aa, synthetic construct
TRDSSYF

SEQ ID NO: 20937 - protein, 5 aa, synthetic construct
NNHDY

SEQ ID NO: 20938 - protein, 6 aa, synthetic construct
NSASNY

SEQ ID NO: 20939 - protein, 5 aa, synthetic construct
NNHDY

SEQ ID NO: 20940 - protein, 7 aa, synthetic construct
NIATSEY

SEQ ID NO: 20941 - protein, 5 aa, synthetic construct
NNHDY

SEQ ID NO: 20942 - protein, 6 aa, synthetic construct
DSASNY

SEQ ID NO: 20943 - protein, 5 aa, synthetic construct
NNHDY

SEQ ID NO: 20944 - protein, 7 aa, synthetic construct
TQDSSYF

SEQ ID NO: 20945 - protein, 5 aa, synthetic construct
NNHDY

SEQ ID NO: 20946 - protein, 6 aa, synthetic construct
SSVTPY

SEQ ID NO: 20947 - protein, 5 aa, synthetic construct
NNHDY

SEQ ID NO: 20948 - protein, 6 aa, synthetic construct
TTYSPF

SEQ ID NO: 20949 - protein, 5 aa, synthetic construct
NNHDY

SEQ ID NO: 20950 - protein, 6 aa, synthetic construct
YGGSIY

SEQ ID NO: 20951 - protein, 5 aa, synthetic construct
NNHDY

SEQ ID NO: 20952 - protein, 5 aa, synthetic construct
TTMRS

SEQ ID NO: 20953 - protein, 5 aa, synthetic construct
NNHDY

SEQ ID NO: 20954 - protein, 6 aa, synthetic construct
NSAFDY

SEQ ID NO: 20955 - protein, 5 aa, synthetic construct
NNHDY

SEQ ID NO: 20956 - protein, 6 aa, synthetic construct
DSASVY

SEQ ID NO: 20957 - protein, 5 aa, synthetic construct
NNHDY

SEQ ID NO: 20958 - protein, 6 aa, synthetic construct
DRNFQY

SEQ ID NO: 20959 - protein, 5 aa, synthetic construct
NNHDY

SEQ ID NO: 20960 - protein, 7 aa, synthetic construct
TQDSSYF

SEQ ID NO: 20961 - protein, 5 aa, synthetic construct
NNHDY

SEQ ID NO: 20962 - protein, 6 aa, synthetic construct
DSASVY

SEQ ID NO: 20963 - protein, 5 aa, synthetic construct
NNHDY

SEQ ID NO: 20964 - protein, 7 aa, synthetic construct
TQDSSYF

SEQ ID NO: 20965 - protein, 5 aa, synthetic construct
NNHDY

SEQ ID NO: 20966 - protein, 7 aa, synthetic construct
TRDSSYF

SEQ ID NO: 20967 - protein, 5 aa, synthetic construct
NNHDY

SEQ ID NO: 20968 - protein, 6 aa, synthetic construct
NDMFDY

SEQ ID NO: 20969 - protein, 5 aa, synthetic construct
NNHDY

SEQ ID NO: 20970 - protein, 5 aa, synthetic construct
IATTT

SEQ ID NO: 20971 - protein, 5 aa, synthetic construct
NNHDY

SEQ ID NO: 20972 - protein, 5 aa, synthetic construct
TYTTV

SEQ ID NO: 20973 - protein, 5 aa, synthetic construct
NNHDY

SEQ ID NO: 20974 - protein, 7 aa, synthetic construct
TRDSSYF

SEQ ID NO: 20975 - protein, 5 aa, synthetic construct
NNHDY

SEQ ID NO: 20976 - protein, 6 aa, synthetic construct
DSASVY

SEQ ID NO: 20977 - protein, 5 aa, synthetic construct
NNHDY

SEQ ID NO: 20978 - protein, 7 aa, synthetic construct
TQDSSYF

SEQ ID NO: 20979 - protein, 5 aa, synthetic construct
NNHDY

SEQ ID NO: 20980 - protein, 5 aa, synthetic construct
TSLNS

SEQ ID NO: 20981 - protein, 5 aa, synthetic construct
NNHDY

SEQ ID NO: 20982 - protein, 6 aa, synthetic construct
NDMFDY

SEQ ID NO: 20983 - protein, 5 aa, synthetic construct
NNHDY

SEQ ID NO: 20984 - protein, 7 aa, synthetic construct
TRDSSYF

SEQ ID NO: 20985 - protein, 5 aa, synthetic construct
NNHDY

SEQ ID NO: 20986 - protein, 6 aa, synthetic construct
YSAAPY

SEQ ID NO: 20987 - protein, 5 aa, synthetic construct
NNHDY

SEQ ID NO: 20988 - protein, 5 aa, synthetic construct
IAATT

SEQ ID NO: 20989 - protein, 5 aa, synthetic construct
NNHDY

SEQ ID NO: 20990 - protein, 7 aa, synthetic construct
TQDSSYF

SEQ ID NO: 20991 - protein, 5 aa, synthetic construct
MNHDT

SEQ ID NO: 20992 - protein, 7 aa, synthetic construct
TISGNEY

SEQ ID NO: 20993 - protein, 5 aa, synthetic construct
MNHDT

SEQ ID NO: 20994 - protein, 8 aa, synthetic construct
ATSIAYPN

SEQ ID NO: 20995 - protein, 5 aa, synthetic construct
MNHDT

SEQ ID NO: 20996 - protein, 7 aa, synthetic construct
TSEYFYR

SEQ ID NO: 20997 - protein, 5 aa, synthetic construct
MNHDT

SEQ ID NO: 20998 - protein, 5 aa, synthetic construct
IATTT

SEQ ID NO: 20999 - protein, 5 aa, synthetic construct
MNHDT

SEQ ID NO: 21000 - protein, 7 aa, synthetic construct
TRDSSYF

SEQ ID NO: 21001 - protein, 5 aa, synthetic construct
MNHDT

SEQ ID NO: 21002 - protein, 8 aa, synthetic construct
ATSIGYPN

SEQ ID NO: 21003 - protein, 5 aa, synthetic construct
MNHDT

SEQ ID NO: 21004 - protein, 8 aa, synthetic construct
ATSIAYPN

SEQ ID NO: 21005 - protein, 5 aa, synthetic construct
MNHDT

SEQ ID NO: 21006 - protein, 6 aa, synthetic construct
DTASSY

SEQ ID NO: 21007 - protein, 5 aa, synthetic construct
SGHND

SEQ ID NO: 21008 - protein, 7 aa, synthetic construct
TQDSSYF

SEQ ID NO: 21009 - protein, 5 aa, synthetic construct
SGHND

SEQ ID NO: 21010 - protein, 7 aa, synthetic construct
TQDSSYF

SEQ ID NO: 21011 - protein, 6 aa, synthetic construct
GKSSPN

SEQ ID NO: 21012 - protein, 6 aa, synthetic construct
DRNVDY

SEQ ID NO: 21013 - protein, 6 aa, synthetic construct
GKSSPN

SEQ ID NO: 21014 - protein, 5 aa, synthetic construct
STATQ

SEQ ID NO: 21015 - protein, 6 aa, synthetic construct
GKSSPN

SEQ ID NO: 21016 - protein, 6 aa, synthetic construct
TTYSPF

SEQ ID NO: 21017 - protein, 6 aa, synthetic construct
GKSSPN

SEQ ID NO: 21018 - protein, 6 aa, synthetic construct
STYSPF

SEQ ID NO: 21019 - protein, 6 aa, synthetic construct
GKSSPN

SEQ ID NO: 21020 - protein, 6 aa, synthetic construct
DSATAY

SEQ ID NO: 21021 - protein, 6 aa, synthetic construct
GKSSPN

SEQ ID NO: 21022 - protein, 6 aa, synthetic construct
DSASQY

SEQ ID NO: 21023 - protein, 6 aa, synthetic construct
GKSSPN

SEQ ID NO: 21024 - protein, 6 aa, synthetic construct
DSATAY

SEQ ID NO: 21025 - protein, 6 aa, synthetic construct
GKSSPN

SEQ ID NO: 21026 - protein, 6 aa, synthetic construct
DPNSYY

SEQ ID NO: 21027 - protein, 6 aa, synthetic construct
GKSSPN

SEQ ID NO: 21028 - protein, 7 aa, synthetic construct
TRDSSYF

SEQ ID NO: 21029 - protein, 5 aa, synthetic construct
SNHLY

SEQ ID NO: 21030 - protein, 6 aa, synthetic construct
TKQYPT

SEQ ID NO: 21031 - protein, 5 aa, synthetic construct
SNHLY

SEQ ID NO: 21032 - protein, 6 aa, synthetic construct
YSGTPY

SEQ ID NO: 21033 - protein, 5 aa, synthetic construct
SNHLY

SEQ ID NO: 21034 - protein, 5 aa, synthetic construct
TYTTV

SEQ ID NO: 21035 - protein, 5 aa, synthetic construct
FNHDT

SEQ ID NO: 21036 - protein, 6 aa, synthetic construct
DGTSNN

SEQ ID NO: 21037 - protein, 5 aa, synthetic construct
FNHDT

SEQ ID NO: 21038 - protein, 5 aa, synthetic construct
TSLNS

SEQ ID NO: 21039 - protein, 5 aa, synthetic construct
FNHDT

SEQ ID NO: 21040 - protein, 6 aa, synthetic construct
DRNVDY

SEQ ID NO: 21041 - protein, 5 aa, synthetic construct
FNHDT

SEQ ID NO: 21042 - protein, 8 aa, synthetic construct
ATSIGYPN

SEQ ID NO: 21043 - protein, 5 aa, synthetic construct
FNHDT

SEQ ID NO: 21044 - protein, 6 aa, synthetic construct
DSASVY

SEQ ID NO: 21045 - protein, 5 aa, synthetic construct
FNHDT

SEQ ID NO: 21046 - protein, 6 aa, synthetic construct
YGGSIY

SEQ ID NO: 21047 - protein, 5 aa, synthetic construct
FNHDT

SEQ ID NO: 21048 - protein, 6 aa, synthetic construct
TTTYPT

SEQ ID NO: 21049 - protein, 5 aa, synthetic construct
FNHDT

SEQ ID NO: 21050 - protein, 6 aa, synthetic construct
STYSPF

SEQ ID NO: 21051 - protein, 5 aa, synthetic construct
FNHDT

SEQ ID NO: 21052 - protein, 6 aa, synthetic construct
NSAFDY

SEQ ID NO: 21053 - protein, 5 aa, synthetic construct
FNHDT

SEQ ID NO: 21054 - protein, 7 aa, synthetic construct
TQDSSYF

SEQ ID NO: 21055 - protein, 5 aa, synthetic construct
FNHDT

SEQ ID NO: 21056 - protein, 5 aa, synthetic construct
IATTT

SEQ ID NO: 21057 - protein, 5 aa, synthetic construct
FNHDT

SEQ ID NO: 21058 - protein, 7 aa, synthetic construct
TQDSSYF

SEQ ID NO: 21059 - protein, 5 aa, synthetic construct
FNHDT

SEQ ID NO: 21060 - protein, 5 aa, synthetic construct
TSITA

SEQ ID NO: 21061 - protein, 5 aa, synthetic construct
FNHDT

SEQ ID NO: 21062 - protein, 7 aa, synthetic construct
TQDSSYF

SEQ ID NO: 21063 - protein, 5 aa, synthetic construct
FNHDT

SEQ ID NO: 21064 - protein, 6 aa, synthetic construct
YSAAPY

SEQ ID NO: 21065 - protein, 5 aa, synthetic construct
FNHDT

SEQ ID NO: 21066 - protein, 6 aa, synthetic construct
DTASSY

SEQ ID NO: 21067 - protein, 5 aa, synthetic construct
FNHDT

SEQ ID NO: 21068 - protein, 6 aa, synthetic construct
DTASSY

SEQ ID NO: 21069 - protein, 5 aa, synthetic construct
FNHDT

SEQ ID NO: 21070 - protein, 6 aa, synthetic construct
DSTFDY

SEQ ID NO: 21071 - protein, 5 aa, synthetic construct
FNHDT

SEQ ID NO: 21072 - protein, 8 aa, synthetic construct
ATSIAYPN

SEQ ID NO: 21073 - protein, 5 aa, synthetic construct
FNHDT

SEQ ID NO: 21074 - protein, 8 aa, synthetic construct
TTSIAYPN

SEQ ID NO: 21075 - protein, 5 aa, synthetic construct
FNHDT

SEQ ID NO: 21076 - protein, 6 aa, synthetic construct
DPNSYY

SEQ ID NO: 21077 - protein, 5 aa, synthetic construct
FNHDT

SEQ ID NO: 21078 - protein, 6 aa, synthetic construct
DRNFQY

SEQ ID NO: 21079 - protein, 5 aa, synthetic construct
FNHDT

SEQ ID NO: 21080 - protein, 6 aa, synthetic construct
YSGTPY

SEQ ID NO: 21081 - protein, 5 aa, synthetic construct
FNHDT

SEQ ID NO: 21082 - protein, 6 aa, synthetic construct
TTTYPT

SEQ ID NO: 21083 - protein, 5 aa, synthetic construct
FNHDT

SEQ ID NO: 21084 - protein, 6 aa, synthetic construct
YGGSIY

SEQ ID NO: 21085 - protein, 5 aa, synthetic construct
FNHDT

SEQ ID NO: 21086 - protein, 6 aa, synthetic construct
YGGSIY

SEQ ID NO: 21087 - protein, 5 aa, synthetic construct
FNHDT

SEQ ID NO: 21088 - protein, 6 aa, synthetic construct
DSASVY

SEQ ID NO: 21089 - protein, 5 aa, synthetic construct
FNHDT

SEQ ID NO: 21090 - protein, 7 aa, synthetic construct
NIATSEY

SEQ ID NO: 21091 - protein, 5 aa, synthetic construct
FNHDT

SEQ ID NO: 21092 - protein, 6 aa, synthetic construct
DRNVDY

SEQ ID NO: 21093 - protein, 5 aa, synthetic construct
FNHDT

SEQ ID NO: 21094 - protein, 6 aa, synthetic construct
TTGYPT

SEQ ID NO: 21095 - protein, 5 aa, synthetic construct
FNHDT

SEQ ID NO: 21096 - protein, 6 aa, synthetic construct
DSTFNY

SEQ ID NO: 21097 - protein, 5 aa, synthetic construct
FNHDT

SEQ ID NO: 21098 - protein, 6 aa, synthetic construct
TTYSPF

SEQ ID NO: 21099 - protein, 6 aa, synthetic construct
NSQYPW

SEQ ID NO: 21100 - protein, 7 aa, synthetic construct
NIATSEY

SEQ ID NO: 21101 - protein, 6 aa, synthetic construct
NSQYPW

SEQ ID NO: 21102 - protein, 6 aa, synthetic construct
DPNSYY

SEQ ID NO: 21103 - protein, 6 aa, synthetic construct
NSQYPW

SEQ ID NO: 21104 - protein, 7 aa, synthetic construct
TQDSSYF

SEQ ID NO: 21105 - protein, 6 aa, synthetic construct
NSQYPW

SEQ ID NO: 21106 - protein, 6 aa, synthetic construct
YSATPY

SEQ ID NO: 21107 - protein, 6 aa, synthetic construct
NSQYPW

SEQ ID NO: 21108 - protein, 6 aa, synthetic construct
STYSPF

SEQ ID NO: 21109 - protein, 6 aa, synthetic construct
NSQYPW

SEQ ID NO: 21110 - protein, 7 aa, synthetic construct
NIATSEY

SEQ ID NO: 21111 - protein, 6 aa, synthetic construct
NSQYPW

SEQ ID NO: 21112 - protein, 6 aa, synthetic construct
DSATAY

SEQ ID NO: 21113 - protein, 6 aa, synthetic construct
NSQYPW

SEQ ID NO: 21114 - protein, 5 aa, synthetic construct
TSITA

SEQ ID NO: 21115 - protein, 6 aa, synthetic construct
NSQYPW

SEQ ID NO: 21116 - protein, 6 aa, synthetic construct
DSTFNY

SEQ ID NO: 21117 - protein, 6 aa, synthetic construct
NSQYPW

SEQ ID NO: 21118 - protein, 5 aa, synthetic construct
TSITA

SEQ ID NO: 21119 - protein, 6 aa, synthetic construct
NSQYPW

SEQ ID NO: 21120 - protein, 6 aa, synthetic construct
SSVTPY

SEQ ID NO: 21121 - protein, 6 aa, synthetic construct
NSQYPW

SEQ ID NO: 21122 - protein, 6 aa, synthetic construct
NSAFDY

SEQ ID NO: 21123 - DNA, 15 bp, synthetic construct
  source 1..15: mol_type = other DNA
ttcaatcatgataca

SEQ ID NO: 21124 - DNA, 18 bp, synthetic construct
  source 1..18: mol_type = other DNA
gacagtgcctctgtctac

SEQ ID NO: 21125 - DNA, 18 bp, synthetic construct
  source 1..18: mol_type = other DNA
aattcccagtatccctgg

SEQ ID NO: 21126 - DNA, 18 bp, synthetic construct
  source 1..18: mol_type = other DNA
gacagtgcctctgtctac

SEQ ID NO: 21127 - DNA, 15 bp, synthetic construct
  source 1..15: mol_type = other DNA
ttcaatcatgataca

SEQ ID NO: 21128 - DNA, 18 bp, synthetic construct
  source 1..18: mol_type = other DNA
tactttgggacaccttat

SEQ ID NO: 21129 - DNA, 15 bp, synthetic construct
  source 1..15: mol_type = other DNA
aataaccatgactat

SEQ ID NO: 21130 - DNA, 18 bp, synthetic construct
  source 1..18: mol_type = other DNA
gaccctaacagttattac

SEQ ID NO: 21131 - DNA, 15 bp, synthetic construct
  source 1..15: mol_type = other DNA
atgaatcatgatacc

SEQ ID NO: 21132 - DNA, 18 bp, synthetic construct
  source 1..18: mol_type = other DNA
tatggtggatccatttac

SEQ ID NO: 21133 - DNA, 15 bp, synthetic construct
  source 1..15: mol_type = other DNA
atgagccatgaaaca

SEQ ID NO: 21134 - DNA, 18 bp, synthetic construct
  source 1..18: mol_type = other DNA
gatcgtaattttcagtac

SEQ ID NO: 21135 - DNA, 15 bp, synthetic construct
  source 1..15: mol_type = other DNA
aataaccatgactat

SEQ ID NO: 21136 - DNA, 15 bp, synthetic construct
  source 1..15: mol_type = other DNA
acttacacaactgtt

SEQ ID NO: 21137 - DNA, 15 bp, synthetic construct
  source 1..15: mol_type = other DNA
aataaccacaacaac

SEQ ID NO: 21138 - DNA, 18 bp, synthetic construct
  source 1..18: mol_type = other DNA
acctcagggttcaatggg

SEQ ID NO: 21139 - DNA, 15 bp, synthetic construct
  source 1..15: mol_type = other DNA
aataaccacaacaac

SEQ ID NO: 21140 - DNA, 18 bp, synthetic construct
  source 1..18: mol_type = other DNA
accacaacgtacccaact

SEQ ID NO: 21141 - DNA, 15 bp, synthetic construct
  source 1..15: mol_type = other DNA
aataaccatgactat

SEQ ID NO: 21142 - DNA, 18 bp, synthetic construct
  source 1..18: mol_type = other DNA
actacttactcacctttc

SEQ ID NO: 21143 - DNA, 15 bp, synthetic construct
  source 1..15: mol_type = other DNA
ctgggacataatgct

SEQ ID NO: 21144 - DNA, 18 bp, synthetic construct
  source 1..18: mol_type = other DNA
aatgatatgtttgactat

SEQ ID NO: 21145 - DNA, 18 bp, synthetic construct
  source 1..18: mol_type = other DNA
gggaaatcaagccctaac

SEQ ID NO: 21146 - DNA, 21 bp, synthetic construct
  source 1..21: mol_type = other DNA
acccaggacagttcttacttc

SEQ ID NO: 21147 - DNA, 15 bp, synthetic construct
  source 1..15: mol_type = other DNA
tctggacatgatacc

SEQ ID NO: 21148 - DNA, 18 bp, synthetic construct
  source 1..18: mol_type = other DNA
actacttactcacctttc

SEQ ID NO: 21149 - DNA, 15 bp, synthetic construct
  source 1..15: mol_type = other DNA
ctaggccacaatgct

SEQ ID NO: 21150 - DNA, 15 bp, synthetic construct
  source 1..15: mol_type = other DNA
atcgccacaacaact

SEQ ID NO: 21151 - DNA, 15 bp, synthetic construct
  source 1..15: mol_type = other DNA
aataaccatgactat

SEQ ID NO: 21152 - DNA, 21 bp, synthetic construct
  source 1..21: mol_type = other DNA
acccaggacagttcttacttc

SEQ ID NO: 21153 - DNA, 15 bp, synthetic construct
  source 1..15: mol_type = other DNA
ttcaatcatgataca

SEQ ID NO: 21154 - DNA, 18 bp, synthetic construct
  source 1..18: mol_type = other DNA
gacagtgcctctgtctac

SEQ ID NO: 21155 - DNA, 15 bp, synthetic construct
  source 1..15: mol_type = other DNA
ttcaatcatgataca

SEQ ID NO: 21156 - DNA, 18 bp, synthetic construct
  source 1..18: mol_type = other DNA
actgcttactcaactttc

SEQ ID NO: 21157 - DNA, 15 bp, synthetic construct
  source 1..15: mol_type = other DNA
ctgggacataatgct

SEQ ID NO: 21158 - DNA, 15 bp, synthetic construct
  source 1..15: mol_type = other DNA
acatctttgaacagt

SEQ ID NO: 21159 - DNA, 15 bp, synthetic construct
  source 1..15: mol_type = other DNA
ctaggccacaatgct

SEQ ID NO: 21160 - DNA, 24 bp, synthetic construct
  source 1..24: mol_type = other DNA
accacaagcatagcttaccctaat

SEQ ID NO: 21161 - DNA, 15 bp, synthetic construct
  source 1..15: mol_type = other DNA
aataaccacaacaac

SEQ ID NO: 21162 - DNA, 21 bp, synthetic construct
  source 1..21: mol_type = other DNA
acccaggacagttcttacttc

SEQ ID NO: 21163 - DNA, 15 bp, synthetic construct
  source 1..15: mol_type = other DNA
aataaccacaacaac

SEQ ID NO: 21164 - DNA, 18 bp, synthetic construct
  source 1..18: mol_type = other DNA
gacagtgccactgcttac

SEQ ID NO: 21165 - DNA, 15 bp, synthetic construct
  source 1..15: mol_type = other DNA
aataaccatgactat

SEQ ID NO: 21166 - DNA, 21 bp, synthetic construct
  source 1..21: mol_type = other DNA
acccgggacagttcttacttc

SEQ ID NO: 21167 - DNA, 15 bp, synthetic construct
  source 1..15: mol_type = other DNA
aataaccatgactat

SEQ ID NO: 21168 - DNA, 18 bp, synthetic construct
  source 1..18: mol_type = other DNA
gatggtacttctaacaac

SEQ ID NO: 21169 - DNA, 15 bp, synthetic construct
  source 1..15: mol_type = other DNA
ctgggacataatgct

SEQ ID NO: 21170 - DNA, 18 bp, synthetic construct
  source 1..18: mol_type = other DNA
accacaacgtacccaact

SEQ ID NO: 21171 - DNA, 15 bp, synthetic construct
  source 1..15: mol_type = other DNA
ctgggacataatgct

SEQ ID NO: 21172 - DNA, 15 bp, synthetic construct
  source 1..15: mol_type = other DNA
tccacagcaacccgg

SEQ ID NO: 21173 - DNA, 15 bp, synthetic construct
  source 1..15: mol_type = other DNA
agtcaagttgtttcg

SEQ ID NO: 21174 - DNA, 21 bp, synthetic construct
  source 1..21: mol_type = other DNA
acccgggacagttcttacttc

SEQ ID NO: 21175 - DNA, 15 bp, synthetic construct
  source 1..15: mol_type = other DNA
ctgggccacgatact

SEQ ID NO: 21176 - DNA, 15 bp, synthetic construct
  source 1..15: mol_type = other DNA
tccacagcaacccag

SEQ ID NO: 21177 - DNA, 15 bp, synthetic construct
  source 1..15: mol_type = other DNA
ctgggccacgatact

SEQ ID NO: 21178 - DNA, 15 bp, synthetic construct
  source 1..15: mol_type = other DNA
acatctttgaacagt

SEQ ID NO: 21179 - DNA, 15 bp, synthetic construct
  source 1..15: mol_type = other DNA
aataaccacaacaac

SEQ ID NO: 21180 - DNA, 15 bp, synthetic construct
  source 1..15: mol_type = other DNA
tccacagcaacccgg

SEQ ID NO: 21181 - DNA, 15 bp, synthetic construct
  source 1..15: mol_type = other DNA
aataaccacaacaac

SEQ ID NO: 21182 - DNA, 24 bp, synthetic construct
  source 1..24: mol_type = other DNA
gccacaagcataggttaccctaat

SEQ ID NO: 21183 - DNA, 15 bp, synthetic construct
  source 1..15: mol_type = other DNA
aataaccacaacaac

SEQ ID NO: 21184 - DNA, 18 bp, synthetic construct
  source 1..18: mol_type = other DNA
accacatggtacccgact

SEQ ID NO: 21185 - DNA, 15 bp, synthetic construct
  source 1..15: mol_type = other DNA
aataaccatgactat

SEQ ID NO: 21186 - DNA, 18 bp, synthetic construct
  source 1..18: mol_type = other DNA
tacagtgcagcaccttac

SEQ ID NO: 21187 - DNA, 15 bp, synthetic construct
  source 1..15: mol_type = other DNA
aataaccatgactat

SEQ ID NO: 21188 - DNA, 18 bp, synthetic construct
  source 1..18: mol_type = other DNA
tacagtgcagcaccttac

SEQ ID NO: 21189 - DNA, 15 bp, synthetic construct
  source 1..15: mol_type = other DNA
atgaatcatgatacc

SEQ ID NO: 21190 - DNA, 18 bp, synthetic construct
  source 1..18: mol_type = other DNA
tcctctgtgacaccttat

SEQ ID NO: 21191 - DNA, 18 bp, synthetic construct
  source 1..18: mol_type = other DNA
gggaaatcaagccctaac

SEQ ID NO: 21192 - DNA, 18 bp, synthetic construct
  source 1..18: mol_type = other DNA
gaccctaacagttattac

SEQ ID NO: 21193 - DNA, 15 bp, synthetic construct
  source 1..15: mol_type = other DNA
ttcaatcatgataca

SEQ ID NO: 21194 - DNA, 18 bp, synthetic construct
  source 1..18: mol_type = other DNA
tacagtgcagcaccttac

SEQ ID NO: 21195 - DNA, 15 bp, synthetic construct
  source 1..15: mol_type = other DNA
ctgggacataatgct

SEQ ID NO: 21196 - DNA, 18 bp, synthetic construct
  source 1..18: mol_type = other DNA
gcctcagggtacccagct

SEQ ID NO: 21197 - DNA, 15 bp, synthetic construct
  source 1..15: mol_type = other DNA
ctgggacataatgct

SEQ ID NO: 21198 - DNA, 18 bp, synthetic construct
  source 1..18: mol_type = other DNA
aacagtgcttctcagtcc

SEQ ID NO: 21199 - DNA, 15 bp, synthetic construct
  source 1..15: mol_type = other DNA
ctgggacataatgct

SEQ ID NO: 21200 - DNA, 21 bp, synthetic construct
  source 1..21: mol_type = other DNA
acccaggacagttcttacttc

SEQ ID NO: 21201 - DNA, 15 bp, synthetic construct
  source 1..15: mol_type = other DNA
ctgggacataatgct

SEQ ID NO: 21202 - DNA, 18 bp, synthetic construct
  source 1..18: mol_type = other DNA
agtacttactcacctttc

SEQ ID NO: 21203 - DNA, 15 bp, synthetic construct
  source 1..15: mol_type = other DNA
ctgggacataatgct

SEQ ID NO: 21204 - DNA, 18 bp, synthetic construct
  source 1..18: mol_type = other DNA
accacagggtacccgact

SEQ ID NO: 21205 - DNA, 15 bp, synthetic construct
  source 1..15: mol_type = other DNA
ctgggacataatgct

SEQ ID NO: 21206 - DNA, 21 bp, synthetic construct
  source 1..21: mol_type = other DNA
acccgggacagttcttacttc

SEQ ID NO: 21207 - DNA, 15 bp, synthetic construct
  source 1..15: mol_type = other DNA
ctgggacataatgct

SEQ ID NO: 21208 - DNA, 18 bp, synthetic construct
  source 1..18: mol_type = other DNA
tcctctgtgacaccttat

SEQ ID NO: 21209 - DNA, 15 bp, synthetic construct
  source 1..15: mol_type = other DNA
ctgggacataatgct

SEQ ID NO: 21210 - DNA, 21 bp, synthetic construct
  source 1..21: mol_type = other DNA
acccgggacagttcttacttc

SEQ ID NO: 21211 - DNA, 15 bp, synthetic construct
  source 1..15: mol_type = other DNA
ctgggacataatgct

SEQ ID NO: 21212 - DNA, 21 bp, synthetic construct
  source 1..21: mol_type = other DNA
acccaggacagttcttacttc

SEQ ID NO: 21213 - DNA, 15 bp, synthetic construct
  source 1..15: mol_type = other DNA
ctgggacataatgct

SEQ ID NO: 21214 - DNA, 18 bp, synthetic construct
  source 1..18: mol_type = other DNA
gaccctaacagttattac

SEQ ID NO: 21215 - DNA, 15 bp, synthetic construct
  source 1..15: mol_type = other DNA
ctgggacataatgct

SEQ ID NO: 21216 - DNA, 18 bp, synthetic construct
  source 1..18: mol_type = other DNA
gcctcagggtacccagct

SEQ ID NO: 21217 - DNA, 15 bp, synthetic construct
  source 1..15: mol_type = other DNA
ctgggacataatgct

SEQ ID NO: 21218 - DNA, 15 bp, synthetic construct
  source 1..15: mol_type = other DNA
acatctttgaacagt

SEQ ID NO: 21219 - DNA, 15 bp, synthetic construct
  source 1..15: mol_type = other DNA
ctgggacataatgct

SEQ ID NO: 21220 - DNA, 18 bp, synthetic construct
  source 1..18: mol_type = other DNA
gcctcagggtacccaacc

SEQ ID NO: 21221 - DNA, 15 bp, synthetic construct
  source 1..15: mol_type = other DNA
ctgggacataatgct

SEQ ID NO: 21222 - DNA, 15 bp, synthetic construct
  source 1..15: mol_type = other DNA
acatccataactgcc

SEQ ID NO: 21223 - DNA, 15 bp, synthetic construct
  source 1..15: mol_type = other DNA
ctgggacataatgct

SEQ ID NO: 21224 - DNA, 15 bp, synthetic construct
  source 1..15: mol_type = other DNA
acatctttgaacagt

SEQ ID NO: 21225 - DNA, 15 bp, synthetic construct
  source 1..15: mol_type = other DNA
ctgggacataatgct

SEQ ID NO: 21226 - DNA, 18 bp, synthetic construct
  source 1..18: mol_type = other DNA
agtacttactcacctttc

SEQ ID NO: 21227 - DNA, 15 bp, synthetic construct
  source 1..15: mol_type = other DNA
ctgggacataatgct

SEQ ID NO: 21228 - DNA, 18 bp, synthetic construct
  source 1..18: mol_type = other DNA
gacagcacttttaactac

SEQ ID NO: 21229 - DNA, 15 bp, synthetic construct
  source 1..15: mol_type = other DNA
ctgggacataatgct

SEQ ID NO: 21230 - DNA, 18 bp, synthetic construct
  source 1..18: mol_type = other DNA
tcctctgtgacaccttat

SEQ ID NO: 21231 - DNA, 15 bp, synthetic construct
  source 1..15: mol_type = other DNA
ctgggacataatgct

SEQ ID NO: 21232 - DNA, 15 bp, synthetic construct
  source 1..15: mol_type = other DNA
acatctttgaacagt

SEQ ID NO: 21233 - DNA, 15 bp, synthetic construct
  source 1..15: mol_type = other DNA
tcaggacatagtgct

SEQ ID NO: 21234 - DNA, 15 bp, synthetic construct
  source 1..15: mol_type = other DNA
tccacagcaacccag

SEQ ID NO: 21235 - DNA, 15 bp, synthetic construct
  source 1..15: mol_type = other DNA
tcaggacatagtgct

SEQ ID NO: 21236 - DNA, 18 bp, synthetic construct
  source 1..18: mol_type = other DNA
tactctgcgacaccttat

SEQ ID NO: 21237 - DNA, 15 bp, synthetic construct
  source 1..15: mol_type = other DNA
tcaggacatagtgct

SEQ ID NO: 21238 - DNA, 15 bp, synthetic construct
  source 1..15: mol_type = other DNA
acatctttgaacagt

SEQ ID NO: 21239 - DNA, 15 bp, synthetic construct
  source 1..15: mol_type = other DNA
aagggacatccagtt

SEQ ID NO: 21240 - DNA, 21 bp, synthetic construct
  source 1..21: mol_type = other DNA
acccaggacagttcttacttc

SEQ ID NO: 21241 - DNA, 15 bp, synthetic construct
  source 1..15: mol_type = other DNA
agtcaagttgtttcg

SEQ ID NO: 21242 - DNA, 18 bp, synthetic construct
  source 1..18: mol_type = other DNA
gaccctaacagttattac

SEQ ID NO: 21243 - DNA, 15 bp, synthetic construct
  source 1..15: mol_type = other DNA
agtcaagttgtttcg

SEQ ID NO: 21244 - DNA, 18 bp, synthetic construct
  source 1..18: mol_type = other DNA
gaccctaacagttattac

SEQ ID NO: 21245 - DNA, 15 bp, synthetic construct
  source 1..15: mol_type = other DNA
agtcaagttgtttcg

SEQ ID NO: 21246 - DNA, 18 bp, synthetic construct
  source 1..18: mol_type = other DNA
gaccctaacagttattac

SEQ ID NO: 21247 - DNA, 15 bp, synthetic construct
  source 1..15: mol_type = other DNA
agtcaagttgtttcg

SEQ ID NO: 21248 - DNA, 18 bp, synthetic construct
  source 1..18: mol_type = other DNA
tactctgggacaccttat

SEQ ID NO: 21249 - DNA, 15 bp, synthetic construct
  source 1..15: mol_type = other DNA
agtcaagttgtttcg

SEQ ID NO: 21250 - DNA, 18 bp, synthetic construct
  source 1..18: mol_type = other DNA
gaccctaacagttattac

SEQ ID NO: 21251 - DNA, 15 bp, synthetic construct
  source 1..15: mol_type = other DNA
agtcaagttgtttcg

SEQ ID NO: 21252 - DNA, 18 bp, synthetic construct
  source 1..18: mol_type = other DNA
gaccctaacagttattac

SEQ ID NO: 21253 - DNA, 15 bp, synthetic construct
  source 1..15: mol_type = other DNA
tctggacatgatacc

SEQ ID NO: 21254 - DNA, 18 bp, synthetic construct
  source 1..18: mol_type = other DNA
actacttactcacctttc

SEQ ID NO: 21255 - DNA, 15 bp, synthetic construct
  source 1..15: mol_type = other DNA
tctggacatgatacc

SEQ ID NO: 21256 - DNA, 24 bp, synthetic construct
  source 1..24: mol_type = other DNA
accacaagcatagcttaccctaat

SEQ ID NO: 21257 - DNA, 15 bp, synthetic construct
  source 1..15: mol_type = other DNA
tctggacatgatacc

SEQ ID NO: 21258 - DNA, 18 bp, synthetic construct
  source 1..18: mol_type = other DNA
accaaacagtacccaacc

SEQ ID NO: 21259 - DNA, 15 bp, synthetic construct
  source 1..15: mol_type = other DNA
tctggacatgatacc

SEQ ID NO: 21260 - DNA, 18 bp, synthetic construct
  source 1..18: mol_type = other DNA
acctcagggttcaatggg

SEQ ID NO: 21261 - DNA, 15 bp, synthetic construct
  source 1..15: mol_type = other DNA
tctggacatgatacc

SEQ ID NO: 21262 - DNA, 18 bp, synthetic construct
  source 1..18: mol_type = other DNA
agtacttactcacctttc

SEQ ID NO: 21263 - DNA, 15 bp, synthetic construct
  source 1..15: mol_type = other DNA
tctggacatgatacc

SEQ ID NO: 21264 - DNA, 18 bp, synthetic construct
  source 1..18: mol_type = other DNA
tcctctgggacaccttat

SEQ ID NO: 21265 - DNA, 15 bp, synthetic construct
  source 1..15: mol_type = other DNA
tctggacatgatacc

SEQ ID NO: 21266 - DNA, 18 bp, synthetic construct
  source 1..18: mol_type = other DNA
gatcgtaattttcagtac

SEQ ID NO: 21267 - DNA, 15 bp, synthetic construct
  source 1..15: mol_type = other DNA
tctggacatgatacc

SEQ ID NO: 21268 - DNA, 18 bp, synthetic construct
  source 1..18: mol_type = other DNA
gcctcagggtacccagct

SEQ ID NO: 21269 - DNA, 15 bp, synthetic construct
  source 1..15: mol_type = other DNA
tctggacatgatacc

SEQ ID NO: 21270 - DNA, 18 bp, synthetic construct
  source 1..18: mol_type = other DNA
gacagtgcttctcagtat

SEQ ID NO: 21271 - DNA, 15 bp, synthetic construct
  source 1..15: mol_type = other DNA
tctggacatgatacc

SEQ ID NO: 21272 - DNA, 18 bp, synthetic construct
  source 1..18: mol_type = other DNA
actacttactcacctttc

SEQ ID NO: 21273 - DNA, 15 bp, synthetic construct
  source 1..15: mol_type = other DNA
tctggacatgatacc

SEQ ID NO: 21274 - DNA, 18 bp, synthetic construct
  source 1..18: mol_type = other DNA
gacagcacttttaactac

SEQ ID NO: 21275 - DNA, 15 bp, synthetic construct
  source 1..15: mol_type = other DNA
tctggacatgatacc

SEQ ID NO: 21276 - DNA, 18 bp, synthetic construct
  source 1..18: mol_type = other DNA
gcctcagggtacccagct

SEQ ID NO: 21277 - DNA, 15 bp, synthetic construct
  source 1..15: mol_type = other DNA
tctggacatgatacc

SEQ ID NO: 21278 - DNA, 21 bp, synthetic construct
  source 1..21: mol_type = other DNA
actacttatttaactattgcc

SEQ ID NO: 21279 - DNA, 15 bp, synthetic construct
  source 1..15: mol_type = other DNA
tctggacatgatacc

SEQ ID NO: 21280 - DNA, 18 bp, synthetic construct
  source 1..18: mol_type = other DNA
aacagtgcttttgactac

SEQ ID NO: 21281 - DNA, 15 bp, synthetic construct
  source 1..15: mol_type = other DNA
tctggacatgatacc

SEQ ID NO: 21282 - DNA, 18 bp, synthetic construct
  source 1..18: mol_type = other DNA
gcctcagggtacccagct

SEQ ID NO: 21283 - DNA, 15 bp, synthetic construct
  source 1..15: mol_type = other DNA
tctggacatgatacc

SEQ ID NO: 21284 - DNA, 18 bp, synthetic construct
  source 1..18: mol_type = other DNA
accaaacagtacccaacc

SEQ ID NO: 21285 - DNA, 15 bp, synthetic construct
  source 1..15: mol_type = other DNA
tctggacatgatacc

SEQ ID NO: 21286 - DNA, 15 bp, synthetic construct
  source 1..15: mol_type = other DNA
tccacagcaacccag

SEQ ID NO: 21287 - DNA, 15 bp, synthetic construct
  source 1..15: mol_type = other DNA
atgagccatgaaaca

SEQ ID NO: 21288 - DNA, 18 bp, synthetic construct
  source 1..18: mol_type = other DNA
gacagtgccacagcttac

SEQ ID NO: 21289 - DNA, 15 bp, synthetic construct
  source 1..15: mol_type = other DNA
atgagccatgaaaca

SEQ ID NO: 21290 - DNA, 18 bp, synthetic construct
  source 1..18: mol_type = other DNA
accaaacagtacccaacc

SEQ ID NO: 21291 - DNA, 15 bp, synthetic construct
  source 1..15: mol_type = other DNA
atgagccatgaaaca

SEQ ID NO: 21292 - DNA, 15 bp, synthetic construct
  source 1..15: mol_type = other DNA
acttacacaactgtt

SEQ ID NO: 21293 - DNA, 15 bp, synthetic construct
  source 1..15: mol_type = other DNA
atgagccatgaaaca

SEQ ID NO: 21294 - DNA, 18 bp, synthetic construct
  source 1..18: mol_type = other DNA
aacagtgcttttgactac

SEQ ID NO: 21295 - DNA, 15 bp, synthetic construct
  source 1..15: mol_type = other DNA
atgagccatgaaaca

SEQ ID NO: 21296 - DNA, 18 bp, synthetic construct
  source 1..18: mol_type = other DNA
aatgatatgtttgactat

SEQ ID NO: 21297 - DNA, 15 bp, synthetic construct
  source 1..15: mol_type = other DNA
atgagccatgaaaca

SEQ ID NO: 21298 - DNA, 21 bp, synthetic construct
  source 1..21: mol_type = other DNA
acaatcagtggaaacgagtac

SEQ ID NO: 21299 - DNA, 15 bp, synthetic construct
  source 1..15: mol_type = other DNA
ctaggccacaatgct

SEQ ID NO: 21300 - DNA, 21 bp, synthetic construct
  source 1..21: mol_type = other DNA
acccaggacagttcttacttc

SEQ ID NO: 21301 - DNA, 15 bp, synthetic construct
  source 1..15: mol_type = other DNA
ctaggccacaatgct

SEQ ID NO: 21302 - DNA, 24 bp, synthetic construct
  source 1..24: mol_type = other DNA
accacaagcatagcttaccctaat

SEQ ID NO: 21303 - DNA, 15 bp, synthetic construct
  source 1..15: mol_type = other DNA
ctaggccacaatgct

SEQ ID NO: 21304 - DNA, 15 bp, synthetic construct
  source 1..15: mol_type = other DNA
acatctttgaacagt

SEQ ID NO: 21305 - DNA, 15 bp, synthetic construct
  source 1..15: mol_type = other DNA
ctaggccacaatgct

SEQ ID NO: 21306 - DNA, 21 bp, synthetic construct
  source 1..21: mol_type = other DNA
acccaggacagttcttacttc

SEQ ID NO: 21307 - DNA, 15 bp, synthetic construct
  source 1..15: mol_type = other DNA
ctaggccacaatgct

SEQ ID NO: 21308 - DNA, 15 bp, synthetic construct
  source 1..15: mol_type = other DNA
acttacacaactgtt

SEQ ID NO: 21309 - DNA, 15 bp, synthetic construct
  source 1..15: mol_type = other DNA
ctaggccacaatgct

SEQ ID NO: 21310 - DNA, 24 bp, synthetic construct
  source 1..24: mol_type = other DNA
gccacaagcatagcttaccctaat

SEQ ID NO: 21311 - DNA, 15 bp, synthetic construct
  source 1..15: mol_type = other DNA
ctaggccacaatgct

SEQ ID NO: 21312 - DNA, 18 bp, synthetic construct
  source 1..18: mol_type = other DNA
accacaacgtacccaact

SEQ ID NO: 21313 - DNA, 15 bp, synthetic construct
  source 1..15: mol_type = other DNA
ctaggccacaatgct

SEQ ID NO: 21314 - DNA, 18 bp, synthetic construct
  source 1..18: mol_type = other DNA
gatcgtaattttcagtac

SEQ ID NO: 21315 - DNA, 15 bp, synthetic construct
  source 1..15: mol_type = other DNA
ctaggccacaatgct

SEQ ID NO: 21316 - DNA, 18 bp, synthetic construct
  source 1..18: mol_type = other DNA
gatcgtaattttcagtac

SEQ ID NO: 21317 - DNA, 15 bp, synthetic construct
  source 1..15: mol_type = other DNA
ctaggccacaatgct

SEQ ID NO: 21318 - DNA, 24 bp, synthetic construct
  source 1..24: mol_type = other DNA
gccacaagcataggttaccctaat

SEQ ID NO: 21319 - DNA, 15 bp, synthetic construct
  source 1..15: mol_type = other DNA
ctaggccacaatgct

SEQ ID NO: 21320 - DNA, 18 bp, synthetic construct
  source 1..18: mol_type = other DNA
agtacttactcacctttc

SEQ ID NO: 21321 - DNA, 15 bp, synthetic construct
  source 1..15: mol_type = other DNA
ctaggccacaatgct

SEQ ID NO: 21322 - DNA, 21 bp, synthetic construct
  source 1..21: mol_type = other DNA
acccgggacagttcttacttc

SEQ ID NO: 21323 - DNA, 15 bp, synthetic construct
  source 1..15: mol_type = other DNA
ctaggccacaatgct

SEQ ID NO: 21324 - DNA, 18 bp, synthetic construct
  source 1..18: mol_type = other DNA
gatactgcctcatcatac

SEQ ID NO: 21325 - DNA, 15 bp, synthetic construct
  source 1..15: mol_type = other DNA
ctaggccacaatgct

SEQ ID NO: 21326 - DNA, 18 bp, synthetic construct
  source 1..18: mol_type = other DNA
tactctgcgacaccttat

SEQ ID NO: 21327 - DNA, 15 bp, synthetic construct
  source 1..15: mol_type = other DNA
ctaggccacaatgct

SEQ ID NO: 21328 - DNA, 21 bp, synthetic construct
  source 1..21: mol_type = other DNA
acccgggacagttcttacttc

SEQ ID NO: 21329 - DNA, 15 bp, synthetic construct
  source 1..15: mol_type = other DNA
ctgggccacgatact

SEQ ID NO: 21330 - DNA, 18 bp, synthetic construct
  source 1..18: mol_type = other DNA
tactttgggacaccttat

SEQ ID NO: 21331 - DNA, 15 bp, synthetic construct
  source 1..15: mol_type = other DNA
ctgggccacgatact

SEQ ID NO: 21332 - DNA, 18 bp, synthetic construct
  source 1..18: mol_type = other DNA
tactctgggacgccttat

SEQ ID NO: 21333 - DNA, 15 bp, synthetic construct
  source 1..15: mol_type = other DNA
ctgggccacgatact

SEQ ID NO: 21334 - DNA, 21 bp, synthetic construct
  source 1..21: mol_type = other DNA
acccaggacagttcttacttc

SEQ ID NO: 21335 - DNA, 15 bp, synthetic construct
  source 1..15: mol_type = other DNA
ctgggccacgatact

SEQ ID NO: 21336 - DNA, 18 bp, synthetic construct
  source 1..18: mol_type = other DNA
tatggtggatccatttac

SEQ ID NO: 21337 - DNA, 15 bp, synthetic construct
  source 1..15: mol_type = other DNA
ctgggccacgatact

SEQ ID NO: 21338 - DNA, 18 bp, synthetic construct
  source 1..18: mol_type = other DNA
accacaacatacccaact

SEQ ID NO: 21339 - DNA, 15 bp, synthetic construct
  source 1..15: mol_type = other DNA
ctgggccacgatact

SEQ ID NO: 21340 - DNA, 18 bp, synthetic construct
  source 1..18: mol_type = other DNA
accacaacgtacccaact

SEQ ID NO: 21341 - DNA, 15 bp, synthetic construct
  source 1..15: mol_type = other DNA
ctgggccacgatact

SEQ ID NO: 21342 - DNA, 15 bp, synthetic construct
  source 1..15: mol_type = other DNA
acatctttgaacagt

SEQ ID NO: 21343 - DNA, 15 bp, synthetic construct
  source 1..15: mol_type = other DNA
ctgggccacgatact

SEQ ID NO: 21344 - DNA, 18 bp, synthetic construct
  source 1..18: mol_type = other DNA
actgcttactcaactttc

SEQ ID NO: 21345 - DNA, 15 bp, synthetic construct
  source 1..15: mol_type = other DNA
ctgggccacgatact

SEQ ID NO: 21346 - DNA, 21 bp, synthetic construct
  source 1..21: mol_type = other DNA
acccaggacagttcttacttc

SEQ ID NO: 21347 - DNA, 15 bp, synthetic construct
  source 1..15: mol_type = other DNA
ctgggccacgatact

SEQ ID NO: 21348 - DNA, 15 bp, synthetic construct
  source 1..15: mol_type = other DNA
acatctttgaacagt

SEQ ID NO: 21349 - DNA, 15 bp, synthetic construct
  source 1..15: mol_type = other DNA
ctgggccacgatact

SEQ ID NO: 21350 - DNA, 18 bp, synthetic construct
  source 1..18: mol_type = other DNA
gatcgtaattttcagtac

SEQ ID NO: 21351 - DNA, 15 bp, synthetic construct
  source 1..15: mol_type = other DNA
ctgggccacgatact

SEQ ID NO: 21352 - DNA, 18 bp, synthetic construct
  source 1..18: mol_type = other DNA
gatactgcttcatcatac

SEQ ID NO: 21353 - DNA, 15 bp, synthetic construct
  source 1..15: mol_type = other DNA
ctgggccacgatact

SEQ ID NO: 21354 - DNA, 18 bp, synthetic construct
  source 1..18: mol_type = other DNA
actgcttactcaactttc

SEQ ID NO: 21355 - DNA, 15 bp, synthetic construct
  source 1..15: mol_type = other DNA
aataaccacaacaac

SEQ ID NO: 21356 - DNA, 18 bp, synthetic construct
  source 1..18: mol_type = other DNA
gacagtgcctccaactac

SEQ ID NO: 21357 - DNA, 15 bp, synthetic construct
  source 1..15: mol_type = other DNA
aataaccacaacaac

SEQ ID NO: 21358 - DNA, 18 bp, synthetic construct
  source 1..18: mol_type = other DNA
gacagcacttttgactac

SEQ ID NO: 21359 - DNA, 15 bp, synthetic construct
  source 1..15: mol_type = other DNA
aataaccacaacaac

SEQ ID NO: 21360 - DNA, 18 bp, synthetic construct
  source 1..18: mol_type = other DNA
gatggtacttctaacaac

SEQ ID NO: 21361 - DNA, 15 bp, synthetic construct
  source 1..15: mol_type = other DNA
aataaccacaacaac

SEQ ID NO: 21362 - DNA, 18 bp, synthetic construct
  source 1..18: mol_type = other DNA
aacagtgcctccaactac

SEQ ID NO: 21363 - DNA, 15 bp, synthetic construct
  source 1..15: mol_type = other DNA
aataaccacaacaac

SEQ ID NO: 21364 - DNA, 24 bp, synthetic construct
  source 1..24: mol_type = other DNA
accacaagcatagcttaccctaat

SEQ ID NO: 21365 - DNA, 15 bp, synthetic construct
  source 1..15: mol_type = other DNA
aataaccacaacaac

SEQ ID NO: 21366 - DNA, 18 bp, synthetic construct
  source 1..18: mol_type = other DNA
gatggtacttctgacaac

SEQ ID NO: 21367 - DNA, 15 bp, synthetic construct
  source 1..15: mol_type = other DNA
aataaccacaacaac

SEQ ID NO: 21368 - DNA, 18 bp, synthetic construct
  source 1..18: mol_type = other DNA
gatggtacttctaacaac

SEQ ID NO: 21369 - DNA, 15 bp, synthetic construct
  source 1..15: mol_type = other DNA
aataaccacaacaac

SEQ ID NO: 21370 - DNA, 18 bp, synthetic construct
  source 1..18: mol_type = other DNA
gaccctaacagttattac

SEQ ID NO: 21371 - DNA, 15 bp, synthetic construct
  source 1..15: mol_type = other DNA
aataaccacaacaac

SEQ ID NO: 21372 - DNA, 18 bp, synthetic construct
  source 1..18: mol_type = other DNA
aacagtgcttttgactac

SEQ ID NO: 21373 - DNA, 15 bp, synthetic construct
  source 1..15: mol_type = other DNA
aataaccacaacaac

SEQ ID NO: 21374 - DNA, 18 bp, synthetic construct
  source 1..18: mol_type = other DNA
gatcgtaattttcagtac

SEQ ID NO: 21375 - DNA, 15 bp, synthetic construct
  source 1..15: mol_type = other DNA
aataaccacaacaac

SEQ ID NO: 21376 - DNA, 18 bp, synthetic construct
  source 1..18: mol_type = other DNA
gatcgtaattttcagtac

SEQ ID NO: 21377 - DNA, 15 bp, synthetic construct
  source 1..15: mol_type = other DNA
aataaccacaacaac

SEQ ID NO: 21378 - DNA, 18 bp, synthetic construct
  source 1..18: mol_type = other DNA
accaaacagtacccaacc

SEQ ID NO: 21379 - DNA, 15 bp, synthetic construct
  source 1..15: mol_type = other DNA
aataaccacaacaac

SEQ ID NO: 21380 - DNA, 15 bp, synthetic construct
  source 1..15: mol_type = other DNA
acatccataactgcc

SEQ ID NO: 21381 - DNA, 15 bp, synthetic construct
  source 1..15: mol_type = other DNA
aataaccacaacaac

SEQ ID NO: 21382 - DNA, 15 bp, synthetic construct
  source 1..15: mol_type = other DNA
acatctttgaacagt

SEQ ID NO: 21383 - DNA, 15 bp, synthetic construct
  source 1..15: mol_type = other DNA
aataaccacaacaac

SEQ ID NO: 21384 - DNA, 18 bp, synthetic construct
  source 1..18: mol_type = other DNA
gatcgtaatgttgactac

SEQ ID NO: 21385 - DNA, 15 bp, synthetic construct
  source 1..15: mol_type = other DNA
aataaccacaacaac

SEQ ID NO: 21386 - DNA, 18 bp, synthetic construct
  source 1..18: mol_type = other DNA
aacagtgcttttgactac

SEQ ID NO: 21387 - DNA, 15 bp, synthetic construct
  source 1..15: mol_type = other DNA
aataaccacaacaac

SEQ ID NO: 21388 - DNA, 21 bp, synthetic construct
  source 1..21: mol_type = other DNA
actatttactcaaatgctttc

SEQ ID NO: 21389 - DNA, 15 bp, synthetic construct
  source 1..15: mol_type = other DNA
aataaccacaacaac

SEQ ID NO: 21390 - DNA, 18 bp, synthetic construct
  source 1..18: mol_type = other DNA
accaaacagtacccaacc

SEQ ID NO: 21391 - DNA, 15 bp, synthetic construct
  source 1..15: mol_type = other DNA
aataaccacaacaac

SEQ ID NO: 21392 - DNA, 21 bp, synthetic construct
  source 1..21: mol_type = other DNA
acccaggacagttcttacttc

SEQ ID NO: 21393 - DNA, 15 bp, synthetic construct
  source 1..15: mol_type = other DNA
aataaccacaacaac

SEQ ID NO: 21394 - DNA, 21 bp, synthetic construct
  source 1..21: mol_type = other DNA
aacattgctacaagcgagtac

SEQ ID NO: 21395 - DNA, 15 bp, synthetic construct
  source 1..15: mol_type = other DNA
aataaccacaacaac

SEQ ID NO: 21396 - DNA, 21 bp, synthetic construct
  source 1..21: mol_type = other DNA
acccaggacagttcttacttc

SEQ ID NO: 21397 - DNA, 15 bp, synthetic construct
  source 1..15: mol_type = other DNA
aataaccacaacaac

SEQ ID NO: 21398 - DNA, 18 bp, synthetic construct
  source 1..18: mol_type = other DNA
gacagtgcctctgtctac

SEQ ID NO: 21399 - DNA, 15 bp, synthetic construct
  source 1..15: mol_type = other DNA
aataaccacaacaac

SEQ ID NO: 21400 - DNA, 18 bp, synthetic construct
  source 1..18: mol_type = other DNA
accaaacagtacccaacc

SEQ ID NO: 21401 - DNA, 15 bp, synthetic construct
  source 1..15: mol_type = other DNA
aataaccacaacaac

SEQ ID NO: 21402 - DNA, 18 bp, synthetic construct
  source 1..18: mol_type = other DNA
agtacttactcacctttc

SEQ ID NO: 21403 - DNA, 15 bp, synthetic construct
  source 1..15: mol_type = other DNA
aataaccacaacaac

SEQ ID NO: 21404 - DNA, 18 bp, synthetic construct
  source 1..18: mol_type = other DNA
accacaacatacccaact

SEQ ID NO: 21405 - DNA, 15 bp, synthetic construct
  source 1..15: mol_type = other DNA
aataaccacaacaac

SEQ ID NO: 21406 - DNA, 15 bp, synthetic construct
  source 1..15: mol_type = other DNA
acatctttgaacagt

SEQ ID NO: 21407 - DNA, 15 bp, synthetic construct
  source 1..15: mol_type = other DNA
aataaccacaacaac

SEQ ID NO: 21408 - DNA, 18 bp, synthetic construct
  source 1..18: mol_type = other DNA
tactctgggacaccttat

SEQ ID NO: 21409 - DNA, 15 bp, synthetic construct
  source 1..15: mol_type = other DNA
aataaccacaacaac

SEQ ID NO: 21410 - DNA, 15 bp, synthetic construct
  source 1..15: mol_type = other DNA
acttatacaactgtt

SEQ ID NO: 21411 - DNA, 15 bp, synthetic construct
  source 1..15: mol_type = other DNA
aataaccacaacaac

SEQ ID NO: 21412 - DNA, 18 bp, synthetic construct
  source 1..18: mol_type = other DNA
tactctgcgacaccttat

SEQ ID NO: 21413 - DNA, 15 bp, synthetic construct
  source 1..15: mol_type = other DNA
aataaccacaacaac

SEQ ID NO: 21414 - DNA, 18 bp, synthetic construct
  source 1..18: mol_type = other DNA
accacagggtacccgact

SEQ ID NO: 21415 - DNA, 15 bp, synthetic construct
  source 1..15: mol_type = other DNA
aataaccacaacaac

SEQ ID NO: 21416 - DNA, 24 bp, synthetic construct
  source 1..24: mol_type = other DNA
gccacaagcatagcttaccctaat

SEQ ID NO: 21417 - DNA, 15 bp, synthetic construct
  source 1..15: mol_type = other DNA
aataaccacaacaac

SEQ ID NO: 21418 - DNA, 24 bp, synthetic construct
  source 1..24: mol_type = other DNA
gccacaagcatagcttaccctaat

SEQ ID NO: 21419 - DNA, 15 bp, synthetic construct
  source 1..15: mol_type = other DNA
aataaccacaacaac

SEQ ID NO: 21420 - DNA, 18 bp, synthetic construct
  source 1..18: mol_type = other DNA
aacagtgcttttgactac

SEQ ID NO: 21421 - DNA, 15 bp, synthetic construct
  source 1..15: mol_type = other DNA
aataaccacaacaac

SEQ ID NO: 21422 - DNA, 21 bp, synthetic construct
  source 1..21: mol_type = other DNA
acccaggacagttcttacttc

SEQ ID NO: 21423 - DNA, 15 bp, synthetic construct
  source 1..15: mol_type = other DNA
aataaccacaacaac

SEQ ID NO: 21424 - DNA, 15 bp, synthetic construct
  source 1..15: mol_type = other DNA
acatctttgaacagt

SEQ ID NO: 21425 - DNA, 15 bp, synthetic construct
  source 1..15: mol_type = other DNA
aataaccacaacaac

SEQ ID NO: 21426 - DNA, 18 bp, synthetic construct
  source 1..18: mol_type = other DNA
actacttactcacctttc

SEQ ID NO: 21427 - DNA, 15 bp, synthetic construct
  source 1..15: mol_type = other DNA
aataaccacaacaac

SEQ ID NO: 21428 - DNA, 18 bp, synthetic construct
  source 1..18: mol_type = other DNA
gacagcacttttaactac

SEQ ID NO: 21429 - DNA, 15 bp, synthetic construct
  source 1..15: mol_type = other DNA
aataaccacaacaac

SEQ ID NO: 21430 - DNA, 18 bp, synthetic construct
  source 1..18: mol_type = other DNA
gacagcacttttaactac

SEQ ID NO: 21431 - DNA, 15 bp, synthetic construct
  source 1..15: mol_type = other DNA
aataaccacaacaac

SEQ ID NO: 21432 - DNA, 15 bp, synthetic construct
  source 1..15: mol_type = other DNA
tccacagcaacccag

SEQ ID NO: 21433 - DNA, 15 bp, synthetic construct
  source 1..15: mol_type = other DNA
aataaccacaacaac

SEQ ID NO: 21434 - DNA, 21 bp, synthetic construct
  source 1..21: mol_type = other DNA
acaatcagtggaaacgagtac

SEQ ID NO: 21435 - DNA, 15 bp, synthetic construct
  source 1..15: mol_type = other DNA
aataaccacaacaac

SEQ ID NO: 21436 - DNA, 21 bp, synthetic construct
  source 1..21: mol_type = other DNA
acccaggacagttcttacttc

SEQ ID NO: 21437 - DNA, 15 bp, synthetic construct
  source 1..15: mol_type = other DNA
aataaccacaacaac

SEQ ID NO: 21438 - DNA, 21 bp, synthetic construct
  source 1..21: mol_type = other DNA
acccaggacagttcttacttc

SEQ ID NO: 21439 - DNA, 15 bp, synthetic construct
  source 1..15: mol_type = other DNA
aataaccacaacaac

SEQ ID NO: 21440 - DNA, 18 bp, synthetic construct
  source 1..18: mol_type = other DNA
gatcgtaattttcagtat

SEQ ID NO: 21441 - DNA, 15 bp, synthetic construct
  source 1..15: mol_type = other DNA
aataaccacaacaac

SEQ ID NO: 21442 - DNA, 18 bp, synthetic construct
  source 1..18: mol_type = other DNA
gacagcacttttgactac

SEQ ID NO: 21443 - DNA, 15 bp, synthetic construct
  source 1..15: mol_type = other DNA
aataaccacaacaac

SEQ ID NO: 21444 - DNA, 18 bp, synthetic construct
  source 1..18: mol_type = other DNA
gatcgtaatgttgactac

SEQ ID NO: 21445 - DNA, 15 bp, synthetic construct
  source 1..15: mol_type = other DNA
aataaccacaacaac

SEQ ID NO: 21446 - DNA, 18 bp, synthetic construct
  source 1..18: mol_type = other DNA
gacagtgcttctcagtat

SEQ ID NO: 21447 - DNA, 15 bp, synthetic construct
  source 1..15: mol_type = other DNA
aataaccacaacaac

SEQ ID NO: 21448 - DNA, 21 bp, synthetic construct
  source 1..21: mol_type = other DNA
actatttactcaaatcctttc

SEQ ID NO: 21449 - DNA, 15 bp, synthetic construct
  source 1..15: mol_type = other DNA
aataaccacaacaac

SEQ ID NO: 21450 - DNA, 18 bp, synthetic construct
  source 1..18: mol_type = other DNA
aacagtgcttttgactac

SEQ ID NO: 21451 - DNA, 15 bp, synthetic construct
  source 1..15: mol_type = other DNA
aataaccacaacaac

SEQ ID NO: 21452 - DNA, 18 bp, synthetic construct
  source 1..18: mol_type = other DNA
actacttactcacctttc

SEQ ID NO: 21453 - DNA, 15 bp, synthetic construct
  source 1..15: mol_type = other DNA
aataaccacaacaac

SEQ ID NO: 21454 - DNA, 15 bp, synthetic construct
  source 1..15: mol_type = other DNA
acatctttgaacagt

SEQ ID NO: 21455 - DNA, 15 bp, synthetic construct
  source 1..15: mol_type = other DNA
aataaccacaacaac

SEQ ID NO: 21456 - DNA, 18 bp, synthetic construct
  source 1..18: mol_type = other DNA
gaccctaacagttattac

SEQ ID NO: 21457 - DNA, 15 bp, synthetic construct
  source 1..15: mol_type = other DNA
aataaccacaacaac

SEQ ID NO: 21458 - DNA, 15 bp, synthetic construct
  source 1..15: mol_type = other DNA
atcgccgcgacaact

SEQ ID NO: 21459 - DNA, 15 bp, synthetic construct
  source 1..15: mol_type = other DNA
aataaccacaacaac

SEQ ID NO: 21460 - DNA, 18 bp, synthetic construct
  source 1..18: mol_type = other DNA
accacagggtacccgact

SEQ ID NO: 21461 - DNA, 15 bp, synthetic construct
  source 1..15: mol_type = other DNA
aataaccacaacaac

SEQ ID NO: 21462 - DNA, 21 bp, synthetic construct
  source 1..21: mol_type = other DNA
acccaggacagttcttacttc

SEQ ID NO: 21463 - DNA, 15 bp, synthetic construct
  source 1..15: mol_type = other DNA
aatagccacaactac

SEQ ID NO: 21464 - DNA, 18 bp, synthetic construct
  source 1..18: mol_type = other DNA
gatcgtaatgttgactac

SEQ ID NO: 21465 - DNA, 15 bp, synthetic construct
  source 1..15: mol_type = other DNA
aatagccacaactac

SEQ ID NO: 21466 - DNA, 18 bp, synthetic construct
  source 1..18: mol_type = other DNA
tactctgcgacaccttat

SEQ ID NO: 21467 - DNA, 15 bp, synthetic construct
  source 1..15: mol_type = other DNA
aatagccacaactac

SEQ ID NO: 21468 - DNA, 18 bp, synthetic construct
  source 1..18: mol_type = other DNA
gatcgtaattttcagtac

SEQ ID NO: 21469 - DNA, 15 bp, synthetic construct
  source 1..15: mol_type = other DNA
aatagccacaactac

SEQ ID NO: 21470 - DNA, 21 bp, synthetic construct
  source 1..21: mol_type = other DNA
acccaggacagttcttacttc

SEQ ID NO: 21471 - DNA, 15 bp, synthetic construct
  source 1..15: mol_type = other DNA
aatagccacaactac

SEQ ID NO: 21472 - DNA, 18 bp, synthetic construct
  source 1..18: mol_type = other DNA
accacaacatacccaact

SEQ ID NO: 21473 - DNA, 15 bp, synthetic construct
  source 1..15: mol_type = other DNA
aatagccacaactac

SEQ ID NO: 21474 - DNA, 24 bp, synthetic construct
  source 1..24: mol_type = other DNA
gccacaagcatagcttaccctaat

SEQ ID NO: 21475 - DNA, 15 bp, synthetic construct
  source 1..15: mol_type = other DNA
aatagccacaactac

SEQ ID NO: 21476 - DNA, 21 bp, synthetic construct
  source 1..21: mol_type = other DNA
acccgggacagttcttacttc

SEQ ID NO: 21477 - DNA, 15 bp, synthetic construct
  source 1..15: mol_type = other DNA
aatagccacaactac

SEQ ID NO: 21478 - DNA, 21 bp, synthetic construct
  source 1..21: mol_type = other DNA
acccaggacagttcttacttc

SEQ ID NO: 21479 - DNA, 15 bp, synthetic construct
  source 1..15: mol_type = other DNA
aatagccacaactac

SEQ ID NO: 21480 - DNA, 18 bp, synthetic construct
  source 1..18: mol_type = other DNA
gacagtgcttctcagtat

SEQ ID NO: 21481 - DNA, 15 bp, synthetic construct
  source 1..15: mol_type = other DNA
aatagccacaactac

SEQ ID NO: 21482 - DNA, 18 bp, synthetic construct
  source 1..18: mol_type = other DNA
gacagtgcctccaactac

SEQ ID NO: 21483 - DNA, 15 bp, synthetic construct
  source 1..15: mol_type = other DNA
aatagccacaactac

SEQ ID NO: 21484 - DNA, 18 bp, synthetic construct
  source 1..18: mol_type = other DNA
tcctctgtgacaccttat

SEQ ID NO: 21485 - DNA, 15 bp, synthetic construct
  source 1..15: mol_type = other DNA
aatagccacaactac

SEQ ID NO: 21486 - DNA, 21 bp, synthetic construct
  source 1..21: mol_type = other DNA
actacttatttaactattgcc

SEQ ID NO: 21487 - DNA, 15 bp, synthetic construct
  source 1..15: mol_type = other DNA
aatagccacaactac

SEQ ID NO: 21488 - DNA, 18 bp, synthetic construct
  source 1..18: mol_type = other DNA
accacagggtacccgact

SEQ ID NO: 21489 - DNA, 15 bp, synthetic construct
  source 1..15: mol_type = other DNA
aatagccacaactac

SEQ ID NO: 21490 - DNA, 21 bp, synthetic construct
  source 1..21: mol_type = other DNA
aacattgctacaagcgagtac

SEQ ID NO: 21491 - DNA, 15 bp, synthetic construct
  source 1..15: mol_type = other DNA
aatagccacaactac

SEQ ID NO: 21492 - DNA, 18 bp, synthetic construct
  source 1..18: mol_type = other DNA
gatggtacttctaacaac

SEQ ID NO: 21493 - DNA, 15 bp, synthetic construct
  source 1..15: mol_type = other DNA
aatagccacaactac

SEQ ID NO: 21494 - DNA, 24 bp, synthetic construct
  source 1..24: mol_type = other DNA
accacaagcatagcttaccctaat

SEQ ID NO: 21495 - DNA, 15 bp, synthetic construct
  source 1..15: mol_type = other DNA
aatagccacaactac

SEQ ID NO: 21496 - DNA, 18 bp, synthetic construct
  source 1..18: mol_type = other DNA
gcctcagggtacccagct

SEQ ID NO: 21497 - DNA, 15 bp, synthetic construct
  source 1..15: mol_type = other DNA
aatagccacaactac

SEQ ID NO: 21498 - DNA, 21 bp, synthetic construct
  source 1..21: mol_type = other DNA
acccgggacagttcttacttc

SEQ ID NO: 21499 - DNA, 15 bp, synthetic construct
  source 1..15: mol_type = other DNA
aatagccacaactac

SEQ ID NO: 21500 - DNA, 18 bp, synthetic construct
  source 1..18: mol_type = other DNA
gatcgtaattctcagtat

SEQ ID NO: 21501 - DNA, 15 bp, synthetic construct
  source 1..15: mol_type = other DNA
aatagccacaactac

SEQ ID NO: 21502 - DNA, 18 bp, synthetic construct
  source 1..18: mol_type = other DNA
gacagtgccacagcttac

SEQ ID NO: 21503 - DNA, 15 bp, synthetic construct
  source 1..15: mol_type = other DNA
aatagccacaactac

SEQ ID NO: 21504 - DNA, 18 bp, synthetic construct
  source 1..18: mol_type = other DNA
actacttactcacctttc

SEQ ID NO: 21505 - DNA, 15 bp, synthetic construct
  source 1..15: mol_type = other DNA
aatagccacaactac

SEQ ID NO: 21506 - DNA, 18 bp, synthetic construct
  source 1..18: mol_type = other DNA
aacagtgcttttgactac

SEQ ID NO: 21507 - DNA, 15 bp, synthetic construct
  source 1..15: mol_type = other DNA
aatagccacaactac

SEQ ID NO: 21508 - DNA, 18 bp, synthetic construct
  source 1..18: mol_type = other DNA
actgcttactcaactttc

SEQ ID NO: 21509 - DNA, 15 bp, synthetic construct
  source 1..15: mol_type = other DNA
aatagccacaactac

SEQ ID NO: 21510 - DNA, 24 bp, synthetic construct
  source 1..24: mol_type = other DNA
gccacaagcatagcttaccctaat

SEQ ID NO: 21511 - DNA, 15 bp, synthetic construct
  source 1..15: mol_type = other DNA
aatagccacaactac

SEQ ID NO: 21512 - DNA, 24 bp, synthetic construct
  source 1..24: mol_type = other DNA
gccacaagcatagcttaccctaat

SEQ ID NO: 21513 - DNA, 15 bp, synthetic construct
  source 1..15: mol_type = other DNA
aatagccacaactac

SEQ ID NO: 21514 - DNA, 18 bp, synthetic construct
  source 1..18: mol_type = other DNA
actgcttactcaactttc

SEQ ID NO: 21515 - DNA, 15 bp, synthetic construct
  source 1..15: mol_type = other DNA
aatagccacaactac

SEQ ID NO: 21516 - DNA, 21 bp, synthetic construct
  source 1..21: mol_type = other DNA
acccgggacagttcttacttc

SEQ ID NO: 21517 - DNA, 15 bp, synthetic construct
  source 1..15: mol_type = other DNA
aatagccacaactac

SEQ ID NO: 21518 - DNA, 18 bp, synthetic construct
  source 1..18: mol_type = other DNA
gacagcacttttgactac

SEQ ID NO: 21519 - DNA, 15 bp, synthetic construct
  source 1..15: mol_type = other DNA
aatagccacaactac

SEQ ID NO: 21520 - DNA, 18 bp, synthetic construct
  source 1..18: mol_type = other DNA
gatcgtaatgttgactac

SEQ ID NO: 21521 - DNA, 15 bp, synthetic construct
  source 1..15: mol_type = other DNA
aatagccacaactac

SEQ ID NO: 21522 - DNA, 18 bp, synthetic construct
  source 1..18: mol_type = other DNA
gacagcacttttgactac

SEQ ID NO: 21523 - DNA, 15 bp, synthetic construct
  source 1..15: mol_type = other DNA
aatagccacaactac

SEQ ID NO: 21524 - DNA, 21 bp, synthetic construct
  source 1..21: mol_type = other DNA
acccaggacagttcttacttc

SEQ ID NO: 21525 - DNA, 15 bp, synthetic construct
  source 1..15: mol_type = other DNA
aatagccacaactac

SEQ ID NO: 21526 - DNA, 18 bp, synthetic construct
  source 1..18: mol_type = other DNA
gatcgtaatgttgactac

SEQ ID NO: 21527 - DNA, 15 bp, synthetic construct
  source 1..15: mol_type = other DNA
aatagccacaactac

SEQ ID NO: 21528 - DNA, 18 bp, synthetic construct
  source 1..18: mol_type = other DNA
acctcagggttcaatggg

SEQ ID NO: 21529 - DNA, 15 bp, synthetic construct
  source 1..15: mol_type = other DNA
aatagccacaactac

SEQ ID NO: 21530 - DNA, 18 bp, synthetic construct
  source 1..18: mol_type = other DNA
gacagtgcttctcagtat

SEQ ID NO: 21531 - DNA, 15 bp, synthetic construct
  source 1..15: mol_type = other DNA
aatagccacaactac

SEQ ID NO: 21532 - DNA, 18 bp, synthetic construct
  source 1..18: mol_type = other DNA
gaccctaacagttattac

SEQ ID NO: 21533 - DNA, 15 bp, synthetic construct
  source 1..15: mol_type = other DNA
aatagccacaactac

SEQ ID NO: 21534 - DNA, 18 bp, synthetic construct
  source 1..18: mol_type = other DNA
gcctcagggtacccagct

SEQ ID NO: 21535 - DNA, 15 bp, synthetic construct
  source 1..15: mol_type = other DNA
aatagccacaactac

SEQ ID NO: 21536 - DNA, 18 bp, synthetic construct
  source 1..18: mol_type = other DNA
aacagtgcttttgactac

SEQ ID NO: 21537 - DNA, 15 bp, synthetic construct
  source 1..15: mol_type = other DNA
aataaccatgactat

SEQ ID NO: 21538 - DNA, 15 bp, synthetic construct
  source 1..15: mol_type = other DNA
acatccataactgcc

SEQ ID NO: 21539 - DNA, 15 bp, synthetic construct
  source 1..15: mol_type = other DNA
aataaccatgactat

SEQ ID NO: 21540 - DNA, 18 bp, synthetic construct
  source 1..18: mol_type = other DNA
gacagcacttttaactac

SEQ ID NO: 21541 - DNA, 15 bp, synthetic construct
  source 1..15: mol_type = other DNA
aataaccatgactat

SEQ ID NO: 21542 - DNA, 18 bp, synthetic construct
  source 1..18: mol_type = other DNA
gatcgtaattttcagtac

SEQ ID NO: 21543 - DNA, 15 bp, synthetic construct
  source 1..15: mol_type = other DNA
aataaccatgactat

SEQ ID NO: 21544 - DNA, 15 bp, synthetic construct
  source 1..15: mol_type = other DNA
tccacagcaacccag

SEQ ID NO: 21545 - DNA, 15 bp, synthetic construct
  source 1..15: mol_type = other DNA
aataaccatgactat

SEQ ID NO: 21546 - DNA, 21 bp, synthetic construct
  source 1..21: mol_type = other DNA
acccgggacagttcttacttc

SEQ ID NO: 21547 - DNA, 15 bp, synthetic construct
  source 1..15: mol_type = other DNA
aataaccatgactat

SEQ ID NO: 21548 - DNA, 18 bp, synthetic construct
  source 1..18: mol_type = other DNA
aacagtgcctccaactac

SEQ ID NO: 21549 - DNA, 15 bp, synthetic construct
  source 1..15: mol_type = other DNA
aataaccatgactat

SEQ ID NO: 21550 - DNA, 21 bp, synthetic construct
  source 1..21: mol_type = other DNA
aacattgctacaagcgagtac

SEQ ID NO: 21551 - DNA, 15 bp, synthetic construct
  source 1..15: mol_type = other DNA
aataaccatgactat

SEQ ID NO: 21552 - DNA, 18 bp, synthetic construct
  source 1..18: mol_type = other DNA
gacagtgcctccaactac

SEQ ID NO: 21553 - DNA, 15 bp, synthetic construct
  source 1..15: mol_type = other DNA
aataaccatgactat

SEQ ID NO: 21554 - DNA, 21 bp, synthetic construct
  source 1..21: mol_type = other DNA
acccaggacagttcttacttc

SEQ ID NO: 21555 - DNA, 15 bp, synthetic construct
  source 1..15: mol_type = other DNA
aataaccatgactat

SEQ ID NO: 21556 - DNA, 18 bp, synthetic construct
  source 1..18: mol_type = other DNA
tcctctgtgacaccttat

SEQ ID NO: 21557 - DNA, 15 bp, synthetic construct
  source 1..15: mol_type = other DNA
aataaccatgactat

SEQ ID NO: 21558 - DNA, 18 bp, synthetic construct
  source 1..18: mol_type = other DNA
actacttactcacctttc

SEQ ID NO: 21559 - DNA, 15 bp, synthetic construct
  source 1..15: mol_type = other DNA
aataaccatgactat

SEQ ID NO: 21560 - DNA, 18 bp, synthetic construct
  source 1..18: mol_type = other DNA
tatggtggatccatttac

SEQ ID NO: 21561 - DNA, 15 bp, synthetic construct
  source 1..15: mol_type = other DNA
aataaccatgactat

SEQ ID NO: 21562 - DNA, 15 bp, synthetic construct
  source 1..15: mol_type = other DNA
accaccatgaggagt

SEQ ID NO: 21563 - DNA, 15 bp, synthetic construct
  source 1..15: mol_type = other DNA
aataaccatgactat

SEQ ID NO: 21564 - DNA, 18 bp, synthetic construct
  source 1..18: mol_type = other DNA
aacagtgcttttgactac

SEQ ID NO: 21565 - DNA, 15 bp, synthetic construct
  source 1..15: mol_type = other DNA
aataaccatgactat

SEQ ID NO: 21566 - DNA, 18 bp, synthetic construct
  source 1..18: mol_type = other DNA
gacagtgcctctgtctac

SEQ ID NO: 21567 - DNA, 15 bp, synthetic construct
  source 1..15: mol_type = other DNA
aataaccatgactat

SEQ ID NO: 21568 - DNA, 18 bp, synthetic construct
  source 1..18: mol_type = other DNA
gatcgtaattttcagtac

SEQ ID NO: 21569 - DNA, 15 bp, synthetic construct
  source 1..15: mol_type = other DNA
aataaccatgactat

SEQ ID NO: 21570 - DNA, 21 bp, synthetic construct
  source 1..21: mol_type = other DNA
acccaggacagttcttacttc

SEQ ID NO: 21571 - DNA, 15 bp, synthetic construct
  source 1..15: mol_type = other DNA
aataaccatgactat

SEQ ID NO: 21572 - DNA, 18 bp, synthetic construct
  source 1..18: mol_type = other DNA
gacagtgcctctgtctac

SEQ ID NO: 21573 - DNA, 15 bp, synthetic construct
  source 1..15: mol_type = other DNA
aataaccatgactat

SEQ ID NO: 21574 - DNA, 21 bp, synthetic construct
  source 1..21: mol_type = other DNA
acccaggacagttcttacttc

SEQ ID NO: 21575 - DNA, 15 bp, synthetic construct
  source 1..15: mol_type = other DNA
aataaccatgactat

SEQ ID NO: 21576 - DNA, 21 bp, synthetic construct
  source 1..21: mol_type = other DNA
acccgggacagttcttacttc

SEQ ID NO: 21577 - DNA, 15 bp, synthetic construct
  source 1..15: mol_type = other DNA
aataaccatgactat

SEQ ID NO: 21578 - DNA, 18 bp, synthetic construct
  source 1..18: mol_type = other DNA
aatgatatgtttgactat

SEQ ID NO: 21579 - DNA, 15 bp, synthetic construct
  source 1..15: mol_type = other DNA
aataaccatgactat

SEQ ID NO: 21580 - DNA, 15 bp, synthetic construct
  source 1..15: mol_type = other DNA
atcgccacaacaact

SEQ ID NO: 21581 - DNA, 15 bp, synthetic construct
  source 1..15: mol_type = other DNA
aataaccatgactat

SEQ ID NO: 21582 - DNA, 15 bp, synthetic construct
  source 1..15: mol_type = other DNA
acttatacaactgtt

SEQ ID NO: 21583 - DNA, 15 bp, synthetic construct
  source 1..15: mol_type = other DNA
aataaccatgactat

SEQ ID NO: 21584 - DNA, 21 bp, synthetic construct
  source 1..21: mol_type = other DNA
acccgggacagttcttacttc

SEQ ID NO: 21585 - DNA, 15 bp, synthetic construct
  source 1..15: mol_type = other DNA
aataaccatgactat

SEQ ID NO: 21586 - DNA, 18 bp, synthetic construct
  source 1..18: mol_type = other DNA
gacagtgcctctgtctac

SEQ ID NO: 21587 - DNA, 15 bp, synthetic construct
  source 1..15: mol_type = other DNA
aataaccatgactat

SEQ ID NO: 21588 - DNA, 21 bp, synthetic construct
  source 1..21: mol_type = other DNA
acccaggacagttcttacttc

SEQ ID NO: 21589 - DNA, 15 bp, synthetic construct
  source 1..15: mol_type = other DNA
aataaccatgactat

SEQ ID NO: 21590 - DNA, 15 bp, synthetic construct
  source 1..15: mol_type = other DNA
acatctttgaacagt

SEQ ID NO: 21591 - DNA, 15 bp, synthetic construct
  source 1..15: mol_type = other DNA
aataaccatgactat

SEQ ID NO: 21592 - DNA, 18 bp, synthetic construct
  source 1..18: mol_type = other DNA
aatgatatgtttgactat

SEQ ID NO: 21593 - DNA, 15 bp, synthetic construct
  source 1..15: mol_type = other DNA
aataaccatgactat

SEQ ID NO: 21594 - DNA, 21 bp, synthetic construct
  source 1..21: mol_type = other DNA
acccgggacagttcttacttc

SEQ ID NO: 21595 - DNA, 15 bp, synthetic construct
  source 1..15: mol_type = other DNA
aataaccatgactat

SEQ ID NO: 21596 - DNA, 18 bp, synthetic construct
  source 1..18: mol_type = other DNA
tacagtgcagcaccttac

SEQ ID NO: 21597 - DNA, 15 bp, synthetic construct
  source 1..15: mol_type = other DNA
aataaccatgactat

SEQ ID NO: 21598 - DNA, 15 bp, synthetic construct
  source 1..15: mol_type = other DNA
atcgccgcgacaact

SEQ ID NO: 21599 - DNA, 15 bp, synthetic construct
  source 1..15: mol_type = other DNA
aataaccatgactat

SEQ ID NO: 21600 - DNA, 21 bp, synthetic construct
  source 1..21: mol_type = other DNA
acccaggacagttcttacttc

SEQ ID NO: 21601 - DNA, 15 bp, synthetic construct
  source 1..15: mol_type = other DNA
atgaatcatgatacc

SEQ ID NO: 21602 - DNA, 21 bp, synthetic construct
  source 1..21: mol_type = other DNA
acaatcagtggaaacgagtac

SEQ ID NO: 21603 - DNA, 15 bp, synthetic construct
  source 1..15: mol_type = other DNA
atgaatcatgatacc

SEQ ID NO: 21604 - DNA, 24 bp, synthetic construct
  source 1..24: mol_type = other DNA
gccacaagcatagcttaccctaat

SEQ ID NO: 21605 - DNA, 15 bp, synthetic construct
  source 1..15: mol_type = other DNA
atgaatcatgatacc

SEQ ID NO: 21606 - DNA, 21 bp, synthetic construct
  source 1..21: mol_type = other DNA
acaagtgaatacttctaccgt

SEQ ID NO: 21607 - DNA, 15 bp, synthetic construct
  source 1..15: mol_type = other DNA
atgaatcatgatacc

SEQ ID NO: 21608 - DNA, 15 bp, synthetic construct
  source 1..15: mol_type = other DNA
atcgccacaacaact

SEQ ID NO: 21609 - DNA, 15 bp, synthetic construct
  source 1..15: mol_type = other DNA
atgaatcatgatacc

SEQ ID NO: 21610 - DNA, 21 bp, synthetic construct
  source 1..21: mol_type = other DNA
acccgggacagttcttacttc

SEQ ID NO: 21611 - DNA, 15 bp, synthetic construct
  source 1..15: mol_type = other DNA
atgaatcatgatacc

SEQ ID NO: 21612 - DNA, 24 bp, synthetic construct
  source 1..24: mol_type = other DNA
gccacaagcataggttaccctaat

SEQ ID NO: 21613 - DNA, 15 bp, synthetic construct
  source 1..15: mol_type = other DNA
atgaatcatgatacc

SEQ ID NO: 21614 - DNA, 24 bp, synthetic construct
  source 1..24: mol_type = other DNA
gccacaagcatagcttaccctaat

SEQ ID NO: 21615 - DNA, 15 bp, synthetic construct
  source 1..15: mol_type = other DNA
atgaatcatgatacc

SEQ ID NO: 21616 - DNA, 18 bp, synthetic construct
  source 1..18: mol_type = other DNA
gatactgcttcatcatac

SEQ ID NO: 21617 - DNA, 15 bp, synthetic construct
  source 1..15: mol_type = other DNA
tcaggccacaatgac

SEQ ID NO: 21618 - DNA, 21 bp, synthetic construct
  source 1..21: mol_type = other DNA
acccaggacagttcttacttc

SEQ ID NO: 21619 - DNA, 15 bp, synthetic construct
  source 1..15: mol_type = other DNA
tcaggccacaatgac

SEQ ID NO: 21620 - DNA, 21 bp, synthetic construct
  source 1..21: mol_type = other DNA
acccaggacagttcttacttc

SEQ ID NO: 21621 - DNA, 18 bp, synthetic construct
  source 1..18: mol_type = other DNA
gggaaatcaagccctaac

SEQ ID NO: 21622 - DNA, 18 bp, synthetic construct
  source 1..18: mol_type = other DNA
gatcgtaatgttgactac

SEQ ID NO: 21623 - DNA, 18 bp, synthetic construct
  source 1..18: mol_type = other DNA
gggaaatcaagccctaac

SEQ ID NO: 21624 - DNA, 15 bp, synthetic construct
  source 1..15: mol_type = other DNA
tccacagcaacccag

SEQ ID NO: 21625 - DNA, 18 bp, synthetic construct
  source 1..18: mol_type = other DNA
gggaaatcaagccctaac

SEQ ID NO: 21626 - DNA, 18 bp, synthetic construct
  source 1..18: mol_type = other DNA
actacttactcacctttc

SEQ ID NO: 21627 - DNA, 18 bp, synthetic construct
  source 1..18: mol_type = other DNA
gggaaatcaagccctaac

SEQ ID NO: 21628 - DNA, 18 bp, synthetic construct
  source 1..18: mol_type = other DNA
agtacttactcacctttc

SEQ ID NO: 21629 - DNA, 18 bp, synthetic construct
  source 1..18: mol_type = other DNA
gggaaatcaagccctaac

SEQ ID NO: 21630 - DNA, 18 bp, synthetic construct
  source 1..18: mol_type = other DNA
gacagtgccacagcttac

SEQ ID NO: 21631 - DNA, 18 bp, synthetic construct
  source 1..18: mol_type = other DNA
gggaaatcaagccctaac

SEQ ID NO: 21632 - DNA, 18 bp, synthetic construct
  source 1..18: mol_type = other DNA
gacagtgcttctcagtat

SEQ ID NO: 21633 - DNA, 18 bp, synthetic construct
  source 1..18: mol_type = other DNA
gggaaatcaagccctaac

SEQ ID NO: 21634 - DNA, 18 bp, synthetic construct
  source 1..18: mol_type = other DNA
gacagtgccactgcttac

SEQ ID NO: 21635 - DNA, 18 bp, synthetic construct
  source 1..18: mol_type = other DNA
gggaaatcaagccctaac

SEQ ID NO: 21636 - DNA, 18 bp, synthetic construct
  source 1..18: mol_type = other DNA
gaccctaacagttattac

SEQ ID NO: 21637 - DNA, 18 bp, synthetic construct
  source 1..18: mol_type = other DNA
gggaaatcaagccctaac

SEQ ID NO: 21638 - DNA, 21 bp, synthetic construct
  source 1..21: mol_type = other DNA
acccgggacagttcttacttc

SEQ ID NO: 21639 - DNA, 15 bp, synthetic construct
  source 1..15: mol_type = other DNA
tctaatcacctatat

SEQ ID NO: 21640 - DNA, 18 bp, synthetic construct
  source 1..18: mol_type = other DNA
accaaacagtacccaacc

SEQ ID NO: 21641 - DNA, 15 bp, synthetic construct
  source 1..15: mol_type = other DNA
tctaatcacctatat

SEQ ID NO: 21642 - DNA, 18 bp, synthetic construct
  source 1..18: mol_type = other DNA
tactctgggacaccttat

SEQ ID NO: 21643 - DNA, 15 bp, synthetic construct
  source 1..15: mol_type = other DNA
tctaatcacctatat

SEQ ID NO: 21644 - DNA, 15 bp, synthetic construct
  source 1..15: mol_type = other DNA
acttatacaactgtt

SEQ ID NO: 21645 - DNA, 15 bp, synthetic construct
  source 1..15: mol_type = other DNA
ttcaatcatgataca

SEQ ID NO: 21646 - DNA, 18 bp, synthetic construct
  source 1..18: mol_type = other DNA
gatggtacttctaacaac

SEQ ID NO: 21647 - DNA, 15 bp, synthetic construct
  source 1..15: mol_type = other DNA
ttcaatcatgataca

SEQ ID NO: 21648 - DNA, 15 bp, synthetic construct
  source 1..15: mol_type = other DNA
acatctttgaacagt

SEQ ID NO: 21649 - DNA, 15 bp, synthetic construct
  source 1..15: mol_type = other DNA
ttcaatcatgataca

SEQ ID NO: 21650 - DNA, 18 bp, synthetic construct
  source 1..18: mol_type = other DNA
gatcgtaatgttgactac

SEQ ID NO: 21651 - DNA, 15 bp, synthetic construct
  source 1..15: mol_type = other DNA
ttcaatcatgataca

SEQ ID NO: 21652 - DNA, 24 bp, synthetic construct
  source 1..24: mol_type = other DNA
gccacaagcataggttaccctaat

SEQ ID NO: 21653 - DNA, 15 bp, synthetic construct
  source 1..15: mol_type = other DNA
ttcaatcatgataca

SEQ ID NO: 21654 - DNA, 18 bp, synthetic construct
  source 1..18: mol_type = other DNA
gacagtgcctctgtctac

SEQ ID NO: 21655 - DNA, 15 bp, synthetic construct
  source 1..15: mol_type = other DNA
ttcaatcatgataca

SEQ ID NO: 21656 - DNA, 18 bp, synthetic construct
  source 1..18: mol_type = other DNA
tatggtggatccatttac

SEQ ID NO: 21657 - DNA, 15 bp, synthetic construct
  source 1..15: mol_type = other DNA
ttcaatcatgataca

SEQ ID NO: 21658 - DNA, 18 bp, synthetic construct
  source 1..18: mol_type = other DNA
accacaacatacccaact

SEQ ID NO: 21659 - DNA, 15 bp, synthetic construct
  source 1..15: mol_type = other DNA
ttcaatcatgataca

SEQ ID NO: 21660 - DNA, 18 bp, synthetic construct
  source 1..18: mol_type = other DNA
agtacttactcacctttc

SEQ ID NO: 21661 - DNA, 15 bp, synthetic construct
  source 1..15: mol_type = other DNA
ttcaatcatgataca

SEQ ID NO: 21662 - DNA, 18 bp, synthetic construct
  source 1..18: mol_type = other DNA
aacagtgcttttgactac

SEQ ID NO: 21663 - DNA, 15 bp, synthetic construct
  source 1..15: mol_type = other DNA
ttcaatcatgataca

SEQ ID NO: 21664 - DNA, 21 bp, synthetic construct
  source 1..21: mol_type = other DNA
acccaggacagttcttacttc

SEQ ID NO: 21665 - DNA, 15 bp, synthetic construct
  source 1..15: mol_type = other DNA
ttcaatcatgataca

SEQ ID NO: 21666 - DNA, 15 bp, synthetic construct
  source 1..15: mol_type = other DNA
atcgccacaacaact

SEQ ID NO: 21667 - DNA, 15 bp, synthetic construct
  source 1..15: mol_type = other DNA
ttcaatcatgataca

SEQ ID NO: 21668 - DNA, 21 bp, synthetic construct
  source 1..21: mol_type = other DNA
acccaggacagttcttacttc

SEQ ID NO: 21669 - DNA, 15 bp, synthetic construct
  source 1..15: mol_type = other DNA
ttcaatcatgataca

SEQ ID NO: 21670 - DNA, 15 bp, synthetic construct
  source 1..15: mol_type = other DNA
acatccataactgcc

SEQ ID NO: 21671 - DNA, 15 bp, synthetic construct
  source 1..15: mol_type = other DNA
ttcaatcatgataca

SEQ ID NO: 21672 - DNA, 21 bp, synthetic construct
  source 1..21: mol_type = other DNA
acccaggacagttcttacttc

SEQ ID NO: 21673 - DNA, 15 bp, synthetic construct
  source 1..15: mol_type = other DNA
ttcaatcatgataca

SEQ ID NO: 21674 - DNA, 18 bp, synthetic construct
  source 1..18: mol_type = other DNA
tacagtgcagcaccttac

SEQ ID NO: 21675 - DNA, 15 bp, synthetic construct
  source 1..15: mol_type = other DNA
ttcaatcatgataca

SEQ ID NO: 21676 - DNA, 18 bp, synthetic construct
  source 1..18: mol_type = other DNA
gatactgcttcatcatac

SEQ ID NO: 21677 - DNA, 15 bp, synthetic construct
  source 1..15: mol_type = other DNA
ttcaatcatgataca

SEQ ID NO: 21678 - DNA, 18 bp, synthetic construct
  source 1..18: mol_type = other DNA
gatactgcttcatcatac

SEQ ID NO: 21679 - DNA, 15 bp, synthetic construct
  source 1..15: mol_type = other DNA
ttcaatcatgataca

SEQ ID NO: 21680 - DNA, 18 bp, synthetic construct
  source 1..18: mol_type = other DNA
gacagcacttttgactac

SEQ ID NO: 21681 - DNA, 15 bp, synthetic construct
  source 1..15: mol_type = other DNA
ttcaatcatgataca

SEQ ID NO: 21682 - DNA, 24 bp, synthetic construct
  source 1..24: mol_type = other DNA
gccacaagcatagcttaccctaat

SEQ ID NO: 21683 - DNA, 15 bp, synthetic construct
  source 1..15: mol_type = other DNA
ttcaatcatgataca

SEQ ID NO: 21684 - DNA, 24 bp, synthetic construct
  source 1..24: mol_type = other DNA
accacaagcatagcttaccctaat

SEQ ID NO: 21685 - DNA, 15 bp, synthetic construct
  source 1..15: mol_type = other DNA
ttcaatcatgataca

SEQ ID NO: 21686 - DNA, 18 bp, synthetic construct
  source 1..18: mol_type = other DNA
gaccctaacagttattac

SEQ ID NO: 21687 - DNA, 15 bp, synthetic construct
  source 1..15: mol_type = other DNA
ttcaatcatgataca

SEQ ID NO: 21688 - DNA, 18 bp, synthetic construct
  source 1..18: mol_type = other DNA
gatcgtaattttcagtac

SEQ ID NO: 21689 - DNA, 15 bp, synthetic construct
  source 1..15: mol_type = other DNA
ttcaatcatgataca

SEQ ID NO: 21690 - DNA, 18 bp, synthetic construct
  source 1..18: mol_type = other DNA
tactctgggacaccttat

SEQ ID NO: 21691 - DNA, 15 bp, synthetic construct
  source 1..15: mol_type = other DNA
ttcaatcatgataca

SEQ ID NO: 21692 - DNA, 18 bp, synthetic construct
  source 1..18: mol_type = other DNA
accacaacgtacccaact

SEQ ID NO: 21693 - DNA, 15 bp, synthetic construct
  source 1..15: mol_type = other DNA
ttcaatcatgataca

SEQ ID NO: 21694 - DNA, 18 bp, synthetic construct
  source 1..18: mol_type = other DNA
tatggtggatccatttac

SEQ ID NO: 21695 - DNA, 15 bp, synthetic construct
  source 1..15: mol_type = other DNA
ttcaatcatgataca

SEQ ID NO: 21696 - DNA, 18 bp, synthetic construct
  source 1..18: mol_type = other DNA
tatggtggatccatttac

SEQ ID NO: 21697 - DNA, 15 bp, synthetic construct
  source 1..15: mol_type = other DNA
ttcaatcatgataca

SEQ ID NO: 21698 - DNA, 18 bp, synthetic construct
  source 1..18: mol_type = other DNA
gacagtgcctctgtctac

SEQ ID NO: 21699 - DNA, 15 bp, synthetic construct
  source 1..15: mol_type = other DNA
ttcaatcatgataca

SEQ ID NO: 21700 - DNA, 21 bp, synthetic construct
  source 1..21: mol_type = other DNA
aacattgctacaagcgagtac

SEQ ID NO: 21701 - DNA, 15 bp, synthetic construct
  source 1..15: mol_type = other DNA
ttcaatcatgataca

SEQ ID NO: 21702 - DNA, 18 bp, synthetic construct
  source 1..18: mol_type = other DNA
gatcgtaatgttgactac

SEQ ID NO: 21703 - DNA, 15 bp, synthetic construct
  source 1..15: mol_type = other DNA
ttcaatcatgataca

SEQ ID NO: 21704 - DNA, 18 bp, synthetic construct
  source 1..18: mol_type = other DNA
accacagggtacccgact

SEQ ID NO: 21705 - DNA, 15 bp, synthetic construct
  source 1..15: mol_type = other DNA
ttcaatcatgataca

SEQ ID NO: 21706 - DNA, 18 bp, synthetic construct
  source 1..18: mol_type = other DNA
gacagcacttttaactac

SEQ ID NO: 21707 - DNA, 15 bp, synthetic construct
  source 1..15: mol_type = other DNA
ttcaatcatgataca

SEQ ID NO: 21708 - DNA, 18 bp, synthetic construct
  source 1..18: mol_type = other DNA
actacttactcacctttc

SEQ ID NO: 21709 - DNA, 18 bp, synthetic construct
  source 1..18: mol_type = other DNA
aattcccagtatccctgg

SEQ ID NO: 21710 - DNA, 21 bp, synthetic construct
  source 1..21: mol_type = other DNA
aacattgctacaagcgagtac

SEQ ID NO: 21711 - DNA, 18 bp, synthetic construct
  source 1..18: mol_type = other DNA
aattcccagtatccctgg

SEQ ID NO: 21712 - DNA, 18 bp, synthetic construct
  source 1..18: mol_type = other DNA
gaccctaacagttattac

SEQ ID NO: 21713 - DNA, 18 bp, synthetic construct
  source 1..18: mol_type = other DNA
aattcccagtatccctgg

SEQ ID NO: 21714 - DNA, 21 bp, synthetic construct
  source 1..21: mol_type = other DNA
acccaggacagttcttacttc

SEQ ID NO: 21715 - DNA, 18 bp, synthetic construct
  source 1..18: mol_type = other DNA
aattcccagtatccctgg

SEQ ID NO: 21716 - DNA, 18 bp, synthetic construct
  source 1..18: mol_type = other DNA
tactctgcgacaccttat

SEQ ID NO: 21717 - DNA, 18 bp, synthetic construct
  source 1..18: mol_type = other DNA
aattcccagtatccctgg

SEQ ID NO: 21718 - DNA, 18 bp, synthetic construct
  source 1..18: mol_type = other DNA
agtacttactcacctttc

SEQ ID NO: 21719 - DNA, 18 bp, synthetic construct
  source 1..18: mol_type = other DNA
aattcccagtatccctgg

SEQ ID NO: 21720 - DNA, 21 bp, synthetic construct
  source 1..21: mol_type = other DNA
aacattgctacaagcgagtac

SEQ ID NO: 21721 - DNA, 18 bp, synthetic construct
  source 1..18: mol_type = other DNA
aattcccagtatccctgg

SEQ ID NO: 21722 - DNA, 18 bp, synthetic construct
  source 1..18: mol_type = other DNA
gacagtgccacagcttac

SEQ ID NO: 21723 - DNA, 18 bp, synthetic construct
  source 1..18: mol_type = other DNA
aattcccagtatccctgg

SEQ ID NO: 21724 - DNA, 15 bp, synthetic construct
  source 1..15: mol_type = other DNA
acatccataactgcc

SEQ ID NO: 21725 - DNA, 18 bp, synthetic construct
  source 1..18: mol_type = other DNA
aattcccagtatccctgg

SEQ ID NO: 21726 - DNA, 18 bp, synthetic construct
  source 1..18: mol_type = other DNA
gacagcacttttaactac

SEQ ID NO: 21727 - DNA, 18 bp, synthetic construct
  source 1..18: mol_type = other DNA
aattcccagtatccctgg

SEQ ID NO: 21728 - DNA, 15 bp, synthetic construct
  source 1..15: mol_type = other DNA
acatccataactgcc

SEQ ID NO: 21729 - DNA, 18 bp, synthetic construct
  source 1..18: mol_type = other DNA
aattcccagtatccctgg

SEQ ID NO: 21730 - DNA, 18 bp, synthetic construct
  source 1..18: mol_type = other DNA
tcctctgtgacaccttat

SEQ ID NO: 21731 - DNA, 18 bp, synthetic construct
  source 1..18: mol_type = other DNA
aattcccagtatccctgg

SEQ ID NO: 21732 - DNA, 18 bp, synthetic construct
  source 1..18: mol_type = other DNA
aacagtgcttttgactac

SEQ ID NO: 21733 - protein, 17 aa, synthetic construct
MYWYRQDSGKGLRLIYY

SEQ ID NO: 21734 - protein, 17 aa, synthetic construct
FPWYKQEPGKRLQFIID

SEQ ID NO: 21735 - protein, 17 aa, synthetic construct
MSWYQQDLQKQLQWLFT

SEQ ID NO: 21736 - protein, 17 aa, synthetic construct
FPWYKQEPGKRLQFIID

SEQ ID NO: 21737 - protein, 17 aa, synthetic construct
MYWYRQDSGKGLRLIYY

SEQ ID NO: 21738 - protein, 17 aa, synthetic construct
LFWYVQYPRQGLQLLLK

SEQ ID NO: 21739 - protein, 17 aa, synthetic construct
MYWYRQDTGHGLRLIHY

SEQ ID NO: 21740 - protein, 17 aa, synthetic construct
FFWYKQEPGAGLQLLMK

SEQ ID NO: 21741 - protein, 17 aa, synthetic construct
MYWYQKKPNQAPKLLLF

SEQ ID NO: 21742 - protein, 17 aa, synthetic construct
LSWYIQHHGHGLQFLLK

SEQ ID NO: 21743 - protein, 17 aa, synthetic construct
MYWYRQDPGLGLQLIYI

SEQ ID NO: 21744 - protein, 17 aa, synthetic construct
FWWYRQHSGEGPKALMS

SEQ ID NO: 21745 - protein, 17 aa, synthetic construct
MYWYRQDTGHGLRLIHY

SEQ ID NO: 21746 - protein, 17 aa, synthetic construct
VQWYRQKSGKGPAQLIL

SEQ ID NO: 21747 - protein, 17 aa, synthetic construct
MYWYRQDTGHGLRLIHY

SEQ ID NO: 21748 - protein, 17 aa, synthetic construct
LSWYQQREGHAPVFLSY

SEQ ID NO: 21749 - protein, 17 aa, synthetic construct
MYWYRQDTGHGLRLIHY

SEQ ID NO: 21750 - protein, 17 aa, synthetic construct
LFWYVQYPGQGPQLLLK

SEQ ID NO: 21751 - protein, 17 aa, synthetic construct
MYWYRQDTGHGLRLIHY

SEQ ID NO: 21752 - protein, 17 aa, synthetic construct
LFWYVQHLNEAPKLLLK

SEQ ID NO: 21753 - protein, 17 aa, synthetic construct
MYWYKQSAEKPPELMFL

SEQ ID NO: 21754 - protein, 17 aa, synthetic construct
FAWYKKYPDNSPTLLIS

SEQ ID NO: 21755 - protein, 17 aa, synthetic construct
LYWYWQATGGTLQQLFY

SEQ ID NO: 21756 - protein, 17 aa, synthetic construct
LFWYKQTASGEIVFLIR

SEQ ID NO: 21757 - protein, 17 aa, synthetic construct
LYWYQQPRDQGPQLLVY

SEQ ID NO: 21758 - protein, 17 aa, synthetic construct
LFWYVQHLNEAPKLLLK

SEQ ID NO: 21759 - protein, 17 aa, synthetic construct
MYWYRQSAKKPLEFMFS

SEQ ID NO: 21760 - protein, 17 aa, synthetic construct
VQWFLQNPRGSLMNLFY

SEQ ID NO: 21761 - protein, 17 aa, synthetic construct
MYWYRQDTGHGLRLIHY

SEQ ID NO: 21762 - protein, 17 aa, synthetic construct
LFWYKQTASGEIVFLIR

SEQ ID NO: 21763 - protein, 17 aa, synthetic construct
MYWYRQDSGKGLRLIYY

SEQ ID NO: 21764 - protein, 17 aa, synthetic construct
FPWYKQEPGKRLQFIID

SEQ ID NO: 21765 - protein, 17 aa, synthetic construct
MYWYRQDSGKGLRLIYY

SEQ ID NO: 21766 - protein, 17 aa, synthetic construct
LFWYVQHLNEAPKLLLK

SEQ ID NO: 21767 - protein, 17 aa, synthetic construct
MYWYKQSAEKPPELMFL

SEQ ID NO: 21768 - protein, 17 aa, synthetic construct
MQWFYQRPGGSLVSLFY

SEQ ID NO: 21769 - protein, 17 aa, synthetic construct
MYWYRQSAKKPLEFMFS

SEQ ID NO: 21770 - protein, 17 aa, synthetic construct
LFWYVRYPGEGLQLLLK

SEQ ID NO: 21771 - protein, 17 aa, synthetic construct
MYWYRQDTGHGLRLIHY

SEQ ID NO: 21772 - protein, 17 aa, synthetic construct
LFWYKQTASGEIVFLIR

SEQ ID NO: 21773 - protein, 17 aa, synthetic construct
MYWYRQDTGHGLRLIHY

SEQ ID NO: 21774 - protein, 17 aa, synthetic construct
FSWYKQEAGAGLQLLMS

SEQ ID NO: 21775 - protein, 17 aa, synthetic construct
MYWYRQDTGHGLRLIHY

SEQ ID NO: 21776 - protein, 17 aa, synthetic construct
LFWYKQTASGEIVFLIR

SEQ ID NO: 21777 - protein, 17 aa, synthetic construct
MYWYRQDTGHGLRLIHY

SEQ ID NO: 21778 - protein, 17 aa, synthetic construct
FRWYRQHSAKGLEVLVS

SEQ ID NO: 21779 - protein, 17 aa, synthetic construct
MYWYKQSAEKPPELMFL

SEQ ID NO: 21780 - protein, 17 aa, synthetic construct
LFWYVQYPGQGPQLLLK

SEQ ID NO: 21781 - protein, 17 aa, synthetic construct
MYWYKQSAEKPPELMFL

SEQ ID NO: 21782 - protein, 17 aa, synthetic construct
LQWFYQHPGGRLVSLFY

SEQ ID NO: 21783 - protein, 17 aa, synthetic construct
MFWYQQFQEQSLMLMAT

SEQ ID NO: 21784 - protein, 17 aa, synthetic construct
LFWYKQTASGEIVFLIR

SEQ ID NO: 21785 - protein, 17 aa, synthetic construct
MYWYKQDSKKLLKIMFS

SEQ ID NO: 21786 - protein, 17 aa, synthetic construct
LQWFYQSPGGSLVSLLS

SEQ ID NO: 21787 - protein, 17 aa, synthetic construct
MYWYKQDSKKLLKIMFS

SEQ ID NO: 21788 - protein, 17 aa, synthetic construct
MQWFYQRPGGSLVSLFY

SEQ ID NO: 21789 - protein, 17 aa, synthetic construct
MYWYRQDTGHGLRLIHY

SEQ ID NO: 21790 - protein, 17 aa, synthetic construct
LQWFYQHPGGRLVSLFY

SEQ ID NO: 21791 - protein, 17 aa, synthetic construct
MYWYRQDTGHGLRLIHY

SEQ ID NO: 21792 - protein, 17 aa, synthetic construct
LFWYVRYPGEGLQLLLK

SEQ ID NO: 21793 - protein, 17 aa, synthetic construct
MYWYRQDTGHGLRLIHY

SEQ ID NO: 21794 - protein, 17 aa, synthetic construct
LFWYVQYPGEGPQLLLK

SEQ ID NO: 21795 - protein, 17 aa, synthetic construct
MYWYRQDTGHGLRLIHY

SEQ ID NO: 21796 - protein, 17 aa, synthetic construct
LFWYVQYPGQSLQFLLK

SEQ ID NO: 21797 - protein, 17 aa, synthetic construct
MYWYRQDTGHGLRLIHY

SEQ ID NO: 21798 - protein, 17 aa, synthetic construct
LFWYVQYPGQSLQFLLK

SEQ ID NO: 21799 - protein, 17 aa, synthetic construct
MYWYQKKPNQAPKLLLF

SEQ ID NO: 21800 - protein, 17 aa, synthetic construct
LFWYVQYPRQGLQLLLK

SEQ ID NO: 21801 - protein, 17 aa, synthetic construct
LYWYWQATGGTLQQLFY

SEQ ID NO: 21802 - protein, 17 aa, synthetic construct
FFWYKQEPGAGLQLLMK

SEQ ID NO: 21803 - protein, 17 aa, synthetic construct
MYWYRQDSGKGLRLIYY

SEQ ID NO: 21804 - protein, 17 aa, synthetic construct
LFWYVQYPGQSLQFLLK

SEQ ID NO: 21805 - protein, 17 aa, synthetic construct
MYWYKQSAEKPPELMFL

SEQ ID NO: 21806 - protein, 17 aa, synthetic construct
LFWYVQYPGEGPQFLFR

SEQ ID NO: 21807 - protein, 17 aa, synthetic construct
MYWYKQSAEKPPELMFL

SEQ ID NO: 21808 - protein, 17 aa, synthetic construct
IWWYQQHPGKGPEALIS

SEQ ID NO: 21809 - protein, 17 aa, synthetic construct
MYWYKQSAEKPPELMFL

SEQ ID NO: 21810 - protein, 17 aa, synthetic construct
LFWYKQTASGEIVFLIR

SEQ ID NO: 21811 - protein, 17 aa, synthetic construct
MYWYKQSAEKPPELMFL

SEQ ID NO: 21812 - protein, 17 aa, synthetic construct
LFWYVQHLNEAPKLLLK

SEQ ID NO: 21813 - protein, 17 aa, synthetic construct
MYWYKQSAEKPPELMFL

SEQ ID NO: 21814 - protein, 17 aa, synthetic construct
LFWYVQYSGEGPQLLLQ

SEQ ID NO: 21815 - protein, 17 aa, synthetic construct
MYWYKQSAEKPPELMFL

SEQ ID NO: 21816 - protein, 17 aa, synthetic construct
LFWYKQTASGEIVFLIR

SEQ ID NO: 21817 - protein, 17 aa, synthetic construct
MYWYKQSAEKPPELMFL

SEQ ID NO: 21818 - protein, 17 aa, synthetic construct
LFWYVQYPRQGLQLLLK

SEQ ID NO: 21819 - protein, 17 aa, synthetic construct
MYWYKQSAEKPPELMFL

SEQ ID NO: 21820 - protein, 17 aa, synthetic construct
LFWYKQTASGEIVFLIR

SEQ ID NO: 21821 - protein, 17 aa, synthetic construct
MYWYKQSAEKPPELMFL

SEQ ID NO: 21822 - protein, 17 aa, synthetic construct
LFWYKQTASGEIVFLIR

SEQ ID NO: 21823 - protein, 17 aa, synthetic construct
MYWYKQSAEKPPELMFL

SEQ ID NO: 21824 - protein, 17 aa, synthetic construct
FFWYKQEPGAGLQLLMK

SEQ ID NO: 21825 - protein, 17 aa, synthetic construct
MYWYKQSAEKPPELMFL

SEQ ID NO: 21826 - protein, 17 aa, synthetic construct
LFWYVQYPGEGPQFLFR

SEQ ID NO: 21827 - protein, 17 aa, synthetic construct
MYWYKQSAEKPPELMFL

SEQ ID NO: 21828 - protein, 17 aa, synthetic construct
MQWFYQRPEGSLVSLFY

SEQ ID NO: 21829 - protein, 17 aa, synthetic construct
MYWYKQSAEKPPELMFL

SEQ ID NO: 21830 - protein, 17 aa, synthetic construct
LFWYVQYPGEGPQLLFR

SEQ ID NO: 21831 - protein, 17 aa, synthetic construct
MYWYKQSAEKPPELMFL

SEQ ID NO: 21832 - protein, 17 aa, synthetic construct
LQWYRQKSGEGPAQLIL

SEQ ID NO: 21833 - protein, 17 aa, synthetic construct
MYWYKQSAEKPPELMFL

SEQ ID NO: 21834 - protein, 17 aa, synthetic construct
MQWFYQRPGGSLVSLFY

SEQ ID NO: 21835 - protein, 17 aa, synthetic construct
MYWYKQSAEKPPELMFL

SEQ ID NO: 21836 - protein, 17 aa, synthetic construct
LFWYVQHLNEAPKLLLK

SEQ ID NO: 21837 - protein, 17 aa, synthetic construct
MYWYKQSAEKPPELMFL

SEQ ID NO: 21838 - protein, 17 aa, synthetic construct
FPWYQQFPGEGPALLIS

SEQ ID NO: 21839 - protein, 17 aa, synthetic construct
MYWYKQSAEKPPELMFL

SEQ ID NO: 21840 - protein, 17 aa, synthetic construct
LFWYVQYPRQGLQLLLK

SEQ ID NO: 21841 - protein, 17 aa, synthetic construct
MYWYKQSAEKPPELMFL

SEQ ID NO: 21842 - protein, 17 aa, synthetic construct
MQWFYQRPGGSLVSLFY

SEQ ID NO: 21843 - protein, 17 aa, synthetic construct
VFWYRQTIVQGLEFLTY

SEQ ID NO: 21844 - protein, 17 aa, synthetic construct
LQWFYQSPGGSLVSLLS

SEQ ID NO: 21845 - protein, 17 aa, synthetic construct
VFWYRQTIVQGLEFLTY

SEQ ID NO: 21846 - protein, 17 aa, synthetic construct
LFWYVQYPRQGLQLLLK

SEQ ID NO: 21847 - protein, 17 aa, synthetic construct
VFWYRQTIVQGLEFLTY

SEQ ID NO: 21848 - protein, 17 aa, synthetic construct
MQWFYQRPEGSLVSLFY

SEQ ID NO: 21849 - protein, 17 aa, synthetic construct
VFWYQQNKNNEFKFLIN

SEQ ID NO: 21850 - protein, 17 aa, synthetic construct
LFWYKQTASGEIVFLIR

SEQ ID NO: 21851 - protein, 17 aa, synthetic construct
MFWYQQFQEQSLMLMAT

SEQ ID NO: 21852 - protein, 17 aa, synthetic construct
FFWYKQEPGAGLQLLMK

SEQ ID NO: 21853 - protein, 17 aa, synthetic construct
MFWYQQFQEQSLMLMAT

SEQ ID NO: 21854 - protein, 17 aa, synthetic construct
FFWYKQEPGASLQLLMK

SEQ ID NO: 21855 - protein, 17 aa, synthetic construct
MFWYQQFQEQSLMLMAT

SEQ ID NO: 21856 - protein, 17 aa, synthetic construct
FFWYKQEPGASLQLLMK

SEQ ID NO: 21857 - protein, 17 aa, synthetic construct
MFWYQQFQEQSLMLMAT

SEQ ID NO: 21858 - protein, 17 aa, synthetic construct
LFWYVQYPRQGLQLLLK

SEQ ID NO: 21859 - protein, 17 aa, synthetic construct
MFWYQQFQEQSLMLMAT

SEQ ID NO: 21860 - protein, 17 aa, synthetic construct
FFWYKQEPGASLQLLMK

SEQ ID NO: 21861 - protein, 17 aa, synthetic construct
MFWYQQFQEQSLMLMAT

SEQ ID NO: 21862 - protein, 17 aa, synthetic construct
FFWYKQEPGASLQLLMK

SEQ ID NO: 21863 - protein, 17 aa, synthetic construct
LYWYQQPRDQGPQLLVY

SEQ ID NO: 21864 - protein, 17 aa, synthetic construct
LFWYVQHLNEAPKLLLK

SEQ ID NO: 21865 - protein, 17 aa, synthetic construct
LYWYQQPRDQGPQLLVY

SEQ ID NO: 21866 - protein, 17 aa, synthetic construct
LFWYVRYPGEGLQLLLK

SEQ ID NO: 21867 - protein, 17 aa, synthetic construct
LYWYQQPRDQGPQLLVY

SEQ ID NO: 21868 - protein, 17 aa, synthetic construct
LFWYVQYPGEGPQLLFK

SEQ ID NO: 21869 - protein, 17 aa, synthetic construct
LYWYQQPRDQGPQLLVY

SEQ ID NO: 21870 - protein, 17 aa, synthetic construct
LSWYQQREGHAPVFLSY

SEQ ID NO: 21871 - protein, 17 aa, synthetic construct
LYWYQQPRDQGPQLLVY

SEQ ID NO: 21872 - protein, 17 aa, synthetic construct
LFWYVQHLNEAPKLLLK

SEQ ID NO: 21873 - protein, 17 aa, synthetic construct
LYWYQQPRDQGPQLLVY

SEQ ID NO: 21874 - protein, 17 aa, synthetic construct
LFWYVQYPRQGLQLLLK

SEQ ID NO: 21875 - protein, 17 aa, synthetic construct
LYWYQQPRDQGPQLLVY

SEQ ID NO: 21876 - protein, 17 aa, synthetic construct
FWWYRQHSGEGPKALMS

SEQ ID NO: 21877 - protein, 17 aa, synthetic construct
LYWYQQPRDQGPQLLVY

SEQ ID NO: 21878 - protein, 17 aa, synthetic construct
LFWYVQYPGEGPQFLFR

SEQ ID NO: 21879 - protein, 17 aa, synthetic construct
LYWYQQPRDQGPQLLVY

SEQ ID NO: 21880 - protein, 17 aa, synthetic construct
FWWYRQHSGKAPKALMS

SEQ ID NO: 21881 - protein, 17 aa, synthetic construct
LYWYQQPRDQGPQLLVY

SEQ ID NO: 21882 - protein, 17 aa, synthetic construct
LFWYVQHLNEAPKLLLK

SEQ ID NO: 21883 - protein, 17 aa, synthetic construct
LYWYQQPRDQGPQLLVY

SEQ ID NO: 21884 - protein, 17 aa, synthetic construct
FPWYQQFPGEGPALLIS

SEQ ID NO: 21885 - protein, 17 aa, synthetic construct
LYWYQQPRDQGPQLLVY

SEQ ID NO: 21886 - protein, 17 aa, synthetic construct
LFWYVQYPGEGPQFLFR

SEQ ID NO: 21887 - protein, 17 aa, synthetic construct
LYWYQQPRDQGPQLLVY

SEQ ID NO: 21888 - protein, 17 aa, synthetic construct
FFWYVQYLNEAPQVLLK

SEQ ID NO: 21889 - protein, 17 aa, synthetic construct
LYWYQQPRDQGPQLLVY

SEQ ID NO: 21890 - protein, 17 aa, synthetic construct
FPWYQQFPGEGPALLIA

SEQ ID NO: 21891 - protein, 17 aa, synthetic construct
LYWYQQPRDQGPQLLVY

SEQ ID NO: 21892 - protein, 17 aa, synthetic construct
LFWYVQYPGEGPQFLFR

SEQ ID NO: 21893 - protein, 17 aa, synthetic construct
LYWYQQPRDQGPQLLVY

SEQ ID NO: 21894 - protein, 17 aa, synthetic construct
LFWYVQYPGEGPQLLFK

SEQ ID NO: 21895 - protein, 17 aa, synthetic construct
LYWYQQPRDQGPQLLVY

SEQ ID NO: 21896 - protein, 17 aa, synthetic construct
LQWFYQSPGGSLVSLLS

SEQ ID NO: 21897 - protein, 17 aa, synthetic construct
MYWYRQDPGLGLQLIYI

SEQ ID NO: 21898 - protein, 17 aa, synthetic construct
FYWYKQEPGAGLQLLMS

SEQ ID NO: 21899 - protein, 17 aa, synthetic construct
MYWYRQDPGLGLQLIYI

SEQ ID NO: 21900 - protein, 17 aa, synthetic construct
LFWYVQYPGEGPQLLFK

SEQ ID NO: 21901 - protein, 17 aa, synthetic construct
MYWYRQDPGLGLQLIYI

SEQ ID NO: 21902 - protein, 17 aa, synthetic construct
VQWYRQKSGKGPAQLIL

SEQ ID NO: 21903 - protein, 17 aa, synthetic construct
MYWYRQDPGLGLQLIYI

SEQ ID NO: 21904 - protein, 17 aa, synthetic construct
FPWYQQFPGEGPALLIS

SEQ ID NO: 21905 - protein, 17 aa, synthetic construct
MYWYRQDPGLGLQLIYI

SEQ ID NO: 21906 - protein, 17 aa, synthetic construct
FAWYKKYPDNSPTLLIS

SEQ ID NO: 21907 - protein, 17 aa, synthetic construct
MYWYRQDPGLGLQLIYI

SEQ ID NO: 21908 - protein, 17 aa, synthetic construct
IYWYRQVPLQGPEYVTH

SEQ ID NO: 21909 - protein, 17 aa, synthetic construct
MYWYRQSAKKPLEFMFS

SEQ ID NO: 21910 - protein, 17 aa, synthetic construct
LFWYKQTASGEIVFLIR

SEQ ID NO: 21911 - protein, 17 aa, synthetic construct
MYWYRQSAKKPLEFMFS

SEQ ID NO: 21912 - protein, 17 aa, synthetic construct
LFWYVRYPGEGLQLLLK

SEQ ID NO: 21913 - protein, 17 aa, synthetic construct
MYWYRQSAKKPLEFMFS

SEQ ID NO: 21914 - protein, 17 aa, synthetic construct
MQWFYQRPGGSLVSVFY

SEQ ID NO: 21915 - protein, 17 aa, synthetic construct
MYWYRQSAKKPLEFMFS

SEQ ID NO: 21916 - protein, 17 aa, synthetic construct
LFWYKQTASGEIVFLIR

SEQ ID NO: 21917 - protein, 17 aa, synthetic construct
MYWYRQSAKKPLEFMFS

SEQ ID NO: 21918 - protein, 17 aa, synthetic construct
VQWYRQKSGKGPAQLIL

SEQ ID NO: 21919 - protein, 17 aa, synthetic construct
MYWYRQSAKKPLEFMFS

SEQ ID NO: 21920 - protein, 17 aa, synthetic construct
LFWYVRYPGEGLQLLLK

SEQ ID NO: 21921 - protein, 17 aa, synthetic construct
MYWYRQSAKKPLEFMFS

SEQ ID NO: 21922 - protein, 17 aa, synthetic construct
LFWYVQYPGQGPQLLLK

SEQ ID NO: 21923 - protein, 17 aa, synthetic construct
MYWYRQSAKKPLEFMFS

SEQ ID NO: 21924 - protein, 17 aa, synthetic construct
FWWYRQHSGEGPKALMS

SEQ ID NO: 21925 - protein, 17 aa, synthetic construct
MYWYRQSAKKPLEFMFS

SEQ ID NO: 21926 - protein, 17 aa, synthetic construct
FWWYRQHSGEGPKALMS

SEQ ID NO: 21927 - protein, 17 aa, synthetic construct
MYWYRQSAKKPLEFMFS

SEQ ID NO: 21928 - protein, 17 aa, synthetic construct
LFWYVRYPGEGLQLLLK

SEQ ID NO: 21929 - protein, 17 aa, synthetic construct
MYWYRQSAKKPLEFMFS

SEQ ID NO: 21930 - protein, 17 aa, synthetic construct
LFWYVQHLNEAPKLLLK

SEQ ID NO: 21931 - protein, 17 aa, synthetic construct
MYWYRQSAKKPLEFMFS

SEQ ID NO: 21932 - protein, 17 aa, synthetic construct
LFWYKQTASGEIVFLIR

SEQ ID NO: 21933 - protein, 17 aa, synthetic construct
MYWYRQSAKKPLEFMFS

SEQ ID NO: 21934 - protein, 17 aa, synthetic construct
FPWYKQEAGKSLHFVID

SEQ ID NO: 21935 - protein, 17 aa, synthetic construct
MYWYRQSAKKPLEFMFS

SEQ ID NO: 21936 - protein, 17 aa, synthetic construct
LFWYVQYPRQGLQLLLK

SEQ ID NO: 21937 - protein, 17 aa, synthetic construct
MYWYRQSAKKPLEFMFS

SEQ ID NO: 21938 - protein, 17 aa, synthetic construct
LFWYKQTASGEIVFLIR

SEQ ID NO: 21939 - protein, 17 aa, synthetic construct
MYWYKQDSKKLLKIMFS

SEQ ID NO: 21940 - protein, 17 aa, synthetic construct
LFWYVQYPRQGLQLLLK

SEQ ID NO: 21941 - protein, 17 aa, synthetic construct
MYWYKQDSKKLLKIMFS

SEQ ID NO: 21942 - protein, 17 aa, synthetic construct
LFWYVQYPRQGLQLLLK

SEQ ID NO: 21943 - protein, 17 aa, synthetic construct
MYWYKQDSKKLLKIMFS

SEQ ID NO: 21944 - protein, 17 aa, synthetic construct
LFWYKQTASGEIVFLIR

SEQ ID NO: 21945 - protein, 17 aa, synthetic construct
MYWYKQDSKKLLKIMFS

SEQ ID NO: 21946 - protein, 17 aa, synthetic construct
LSWYIQHHGRGLQFLLK

SEQ ID NO: 21947 - protein, 17 aa, synthetic construct
MYWYKQDSKKLLKIMFS

SEQ ID NO: 21948 - protein, 17 aa, synthetic construct
LLWYVQYPGQGPQLLLK

SEQ ID NO: 21949 - protein, 17 aa, synthetic construct
MYWYKQDSKKLLKIMFS

SEQ ID NO: 21950 - protein, 17 aa, synthetic construct
LFWYVQYPGQGPQLLLK

SEQ ID NO: 21951 - protein, 17 aa, synthetic construct
MYWYKQDSKKLLKIMFS

SEQ ID NO: 21952 - protein, 17 aa, synthetic construct
MQWFYQRPGGSLVSLFY

SEQ ID NO: 21953 - protein, 17 aa, synthetic construct
MYWYKQDSKKLLKIMFS

SEQ ID NO: 21954 - protein, 17 aa, synthetic construct
LFWYVQHLNEAPKLLLK

SEQ ID NO: 21955 - protein, 17 aa, synthetic construct
MYWYKQDSKKLLKIMFS

SEQ ID NO: 21956 - protein, 17 aa, synthetic construct
LFWYKQTASGEIVFLIR

SEQ ID NO: 21957 - protein, 17 aa, synthetic construct
MYWYKQDSKKLLKIMFS

SEQ ID NO: 21958 - protein, 17 aa, synthetic construct
MQWFYQRPGGSLISVFY

SEQ ID NO: 21959 - protein, 17 aa, synthetic construct
MYWYKQDSKKLLKIMFS

SEQ ID NO: 21960 - protein, 17 aa, synthetic construct
FWWYRQHSGEGPKALMS

SEQ ID NO: 21961 - protein, 17 aa, synthetic construct
MYWYKQDSKKLLKIMFS

SEQ ID NO: 21962 - protein, 17 aa, synthetic construct
FPWYKQEAGKGLHFVID

SEQ ID NO: 21963 - protein, 17 aa, synthetic construct
MYWYKQDSKKLLKIMFS

SEQ ID NO: 21964 - protein, 17 aa, synthetic construct
LFWYVQHLNEAPKLLLK

SEQ ID NO: 21965 - protein, 17 aa, synthetic construct
MYWYRQDTGHGLRLIHY

SEQ ID NO: 21966 - protein, 17 aa, synthetic construct
FPWYKQEPGENPKLIID

SEQ ID NO: 21967 - protein, 17 aa, synthetic construct
MYWYRQDTGHGLRLIHY

SEQ ID NO: 21968 - protein, 17 aa, synthetic construct
FPWYRQFPGKSPALLIA

SEQ ID NO: 21969 - protein, 17 aa, synthetic construct
MYWYRQDTGHGLRLIHY

SEQ ID NO: 21970 - protein, 17 aa, synthetic construct
FRWYRQHSAKGLEVLVS

SEQ ID NO: 21971 - protein, 17 aa, synthetic construct
MYWYRQDTGHGLRLIHY

SEQ ID NO: 21972 - protein, 17 aa, synthetic construct
FPWYKQEPGENPKLIID

SEQ ID NO: 21973 - protein, 17 aa, synthetic construct
MYWYRQDTGHGLRLIHY

SEQ ID NO: 21974 - protein, 17 aa, synthetic construct
LFWYVRYPGEGLQLLLK

SEQ ID NO: 21975 - protein, 17 aa, synthetic construct
MYWYRQDTGHGLRLIHY

SEQ ID NO: 21976 - protein, 17 aa, synthetic construct
FRWYRQHSGKGLEVLVS

SEQ ID NO: 21977 - protein, 17 aa, synthetic construct
MYWYRQDTGHGLRLIHY

SEQ ID NO: 21978 - protein, 17 aa, synthetic construct
FRWYRQHSAKGLEVLVS

SEQ ID NO: 21979 - protein, 17 aa, synthetic construct
MYWYRQDTGHGLRLIHY

SEQ ID NO: 21980 - protein, 17 aa, synthetic construct
FFWYKQEPGAGLQLLMK

SEQ ID NO: 21981 - protein, 17 aa, synthetic construct
MYWYRQDTGHGLRLIHY

SEQ ID NO: 21982 - protein, 17 aa, synthetic construct
FPWYQQFPGEGPALLIA

SEQ ID NO: 21983 - protein, 17 aa, synthetic construct
MYWYRQDTGHGLRLIHY

SEQ ID NO: 21984 - protein, 17 aa, synthetic construct
FWWYRQHSGEGPKALMS

SEQ ID NO: 21985 - protein, 17 aa, synthetic construct
MYWYRQDTGHGLRLIHY

SEQ ID NO: 21986 - protein, 17 aa, synthetic construct
FWWYRQHSGEGPKALMS

SEQ ID NO: 21987 - protein, 17 aa, synthetic construct
MYWYRQDTGHGLRLIHY

SEQ ID NO: 21988 - protein, 17 aa, synthetic construct
LFWYVQYPGEGPQLLFK

SEQ ID NO: 21989 - protein, 17 aa, synthetic construct
MYWYRQDTGHGLRLIHY

SEQ ID NO: 21990 - protein, 17 aa, synthetic construct
LQWYRQKSGKGPAQLIL

SEQ ID NO: 21991 - protein, 17 aa, synthetic construct
MYWYRQDTGHGLRLIHY

SEQ ID NO: 21992 - protein, 17 aa, synthetic construct
MQWFYQRPGGSLVSVFY

SEQ ID NO: 21993 - protein, 17 aa, synthetic construct
MYWYRQDTGHGLRLIHY

SEQ ID NO: 21994 - protein, 17 aa, synthetic construct
FWWYRQHSGKSPKMLMS

SEQ ID NO: 21995 - protein, 17 aa, synthetic construct
MYWYRQDTGHGLRLIHY

SEQ ID NO: 21996 - protein, 17 aa, synthetic construct
FPWYQQFPGEGPALLIS

SEQ ID NO: 21997 - protein, 17 aa, synthetic construct
MYWYRQDTGHGLRLIHY

SEQ ID NO: 21998 - protein, 17 aa, synthetic construct
LFWYVHYLNESPWLLLR

SEQ ID NO: 21999 - protein, 17 aa, synthetic construct
MYWYRQDTGHGLRLIHY

SEQ ID NO: 22000 - protein, 17 aa, synthetic construct
LFWYVQYPGEGPQLLFK

SEQ ID NO: 22001 - protein, 17 aa, synthetic construct
MYWYRQDTGHGLRLIHY

SEQ ID NO: 22002 - protein, 17 aa, synthetic construct
LFWYKQTASGEIVFLIR

SEQ ID NO: 22003 - protein, 17 aa, synthetic construct
MYWYRQDTGHGLRLIHY

SEQ ID NO: 22004 - protein, 17 aa, synthetic construct
IYWYRQVPHQGPQFIIQ

SEQ ID NO: 22005 - protein, 17 aa, synthetic construct
MYWYRQDTGHGLRLIHY

SEQ ID NO: 22006 - protein, 17 aa, synthetic construct
LFWYKQTASGEIVFLIR

SEQ ID NO: 22007 - protein, 17 aa, synthetic construct
MYWYRQDTGHGLRLIHY

SEQ ID NO: 22008 - protein, 17 aa, synthetic construct
FPWYKQEPGKRLQFIID

SEQ ID NO: 22009 - protein, 17 aa, synthetic construct
MYWYRQDTGHGLRLIHY

SEQ ID NO: 22010 - protein, 17 aa, synthetic construct
LFWYVQYPGEGPQLLFK

SEQ ID NO: 22011 - protein, 17 aa, synthetic construct
MYWYRQDTGHGLRLIHY

SEQ ID NO: 22012 - protein, 17 aa, synthetic construct
LFWYVQHLNEAPKLLLK

SEQ ID NO: 22013 - protein, 17 aa, synthetic construct
MYWYRQDTGHGLRLIHY

SEQ ID NO: 22014 - protein, 17 aa, synthetic construct
LLWYVQYPGQGPQLLLK

SEQ ID NO: 22015 - protein, 17 aa, synthetic construct
MYWYRQDTGHGLRLIHY

SEQ ID NO: 22016 - protein, 17 aa, synthetic construct
MQWFYQRPEGSLVSLFY

SEQ ID NO: 22017 - protein, 17 aa, synthetic construct
MYWYRQDTGHGLRLIHY

SEQ ID NO: 22018 - protein, 17 aa, synthetic construct
LFWYVQYPRQGLQLLLK

SEQ ID NO: 22019 - protein, 17 aa, synthetic construct
MYWYRQDTGHGLRLIHY

SEQ ID NO: 22020 - protein, 17 aa, synthetic construct
VHWYRQDSGRGPALIIL

SEQ ID NO: 22021 - protein, 17 aa, synthetic construct
MYWYRQDTGHGLRLIHY

SEQ ID NO: 22022 - protein, 17 aa, synthetic construct
LFWYVQYPRQGLQLLLK

SEQ ID NO: 22023 - protein, 17 aa, synthetic construct
MYWYRQDTGHGLRLIHY

SEQ ID NO: 22024 - protein, 17 aa, synthetic construct
LFWYVQYSGEGPQLLLQ

SEQ ID NO: 22025 - protein, 17 aa, synthetic construct
MYWYRQDTGHGLRLIHY

SEQ ID NO: 22026 - protein, 17 aa, synthetic construct
LFWYVRYPGEGLQLLLK

SEQ ID NO: 22027 - protein, 17 aa, synthetic construct
MYWYRQDTGHGLRLIHY

SEQ ID NO: 22028 - protein, 17 aa, synthetic construct
LFWYVRYPGEGLQLLLK

SEQ ID NO: 22029 - protein, 17 aa, synthetic construct
MYWYRQDTGHGLRLIHY

SEQ ID NO: 22030 - protein, 17 aa, synthetic construct
FPWYQQFPGEGPALLIA

SEQ ID NO: 22031 - protein, 17 aa, synthetic construct
MYWYRQDTGHGLRLIHY

SEQ ID NO: 22032 - protein, 17 aa, synthetic construct
LFWYKQTASGEIVFLIR

SEQ ID NO: 22033 - protein, 17 aa, synthetic construct
MYWYRQDTGHGLRLIHY

SEQ ID NO: 22034 - protein, 17 aa, synthetic construct
MQWFYQRPGGSLVSLFY

SEQ ID NO: 22035 - protein, 17 aa, synthetic construct
MYWYRQDTGHGLRLIHY

SEQ ID NO: 22036 - protein, 17 aa, synthetic construct
LFWYVQHLNEAPKLLLK

SEQ ID NO: 22037 - protein, 17 aa, synthetic construct
MYWYRQDTGHGLRLIHY

SEQ ID NO: 22038 - protein, 17 aa, synthetic construct
FPWYQQFPGEGPALLIS

SEQ ID NO: 22039 - protein, 17 aa, synthetic construct
MYWYRQDTGHGLRLIHY

SEQ ID NO: 22040 - protein, 17 aa, synthetic construct
FPWYQQFPGEGPALLIS

SEQ ID NO: 22041 - protein, 17 aa, synthetic construct
MYWYRQDTGHGLRLIHY

SEQ ID NO: 22042 - protein, 17 aa, synthetic construct
LQWFYQSPGGSLVSLLS

SEQ ID NO: 22043 - protein, 17 aa, synthetic construct
MYWYRQDTGHGLRLIHY

SEQ ID NO: 22044 - protein, 17 aa, synthetic construct
IYWYRQVPLQGPEYVTH

SEQ ID NO: 22045 - protein, 17 aa, synthetic construct
MYWYRQDTGHGLRLIHY

SEQ ID NO: 22046 - protein, 17 aa, synthetic construct
LFWYKQTASGEIVFLIR

SEQ ID NO: 22047 - protein, 17 aa, synthetic construct
MYWYRQDTGHGLRLIHY

SEQ ID NO: 22048 - protein, 17 aa, synthetic construct
LFWYKQTASGEIVFLIR

SEQ ID NO: 22049 - protein, 17 aa, synthetic construct
MYWYRQDTGHGLRLIHY

SEQ ID NO: 22050 - protein, 17 aa, synthetic construct
FWWYRQHSGEGPKALMS

SEQ ID NO: 22051 - protein, 17 aa, synthetic construct
MYWYRQDTGHGLRLIHY

SEQ ID NO: 22052 - protein, 17 aa, synthetic construct
FPWYRQFPGKSPALLIA

SEQ ID NO: 22053 - protein, 17 aa, synthetic construct
MYWYRQDTGHGLRLIHY

SEQ ID NO: 22054 - protein, 17 aa, synthetic construct
FWWYRQHSGKSPKMLMS

SEQ ID NO: 22055 - protein, 17 aa, synthetic construct
MYWYRQDTGHGLRLIHY

SEQ ID NO: 22056 - protein, 17 aa, synthetic construct
FWWYRQHSGKAPKALMS

SEQ ID NO: 22057 - protein, 17 aa, synthetic construct
MYWYRQDTGHGLRLIHY

SEQ ID NO: 22058 - protein, 17 aa, synthetic construct
LFWYVHYLNESPRLLLK

SEQ ID NO: 22059 - protein, 17 aa, synthetic construct
MYWYRQDTGHGLRLIHY

SEQ ID NO: 22060 - protein, 17 aa, synthetic construct
FPWYQQFPGEGPALLIS

SEQ ID NO: 22061 - protein, 17 aa, synthetic construct
MYWYRQDTGHGLRLIHY

SEQ ID NO: 22062 - protein, 17 aa, synthetic construct
LFWYVQHLNEAPKLLLK

SEQ ID NO: 22063 - protein, 17 aa, synthetic construct
MYWYRQDTGHGLRLIHY

SEQ ID NO: 22064 - protein, 17 aa, synthetic construct
MQWFYQRPGGSLISVFY

SEQ ID NO: 22065 - protein, 17 aa, synthetic construct
MYWYRQDTGHGLRLIHY

SEQ ID NO: 22066 - protein, 17 aa, synthetic construct
FFWYKQEPGAGLQLLMK

SEQ ID NO: 22067 - protein, 17 aa, synthetic construct
MYWYRQDTGHGLRLIHY

SEQ ID NO: 22068 - protein, 17 aa, synthetic construct
VQWFLQNPRGSLINLFY

SEQ ID NO: 22069 - protein, 17 aa, synthetic construct
MYWYRQDTGHGLRLIHY

SEQ ID NO: 22070 - protein, 17 aa, synthetic construct
LFWYVQYPGEGPQLLLK

SEQ ID NO: 22071 - protein, 17 aa, synthetic construct
MYWYRQDTGHGLRLIHY

SEQ ID NO: 22072 - protein, 17 aa, synthetic construct
LFWYKQTASGEIVFLIR

SEQ ID NO: 22073 - protein, 17 aa, synthetic construct
MYWYRQDTGHGLRLIHY

SEQ ID NO: 22074 - protein, 17 aa, synthetic construct
FWWYRQHSGKSPKMLMS

SEQ ID NO: 22075 - protein, 17 aa, synthetic construct
MYWYRQDTGHGLRLIHY

SEQ ID NO: 22076 - protein, 17 aa, synthetic construct
LFWYVQYPRQGLQLLLK

SEQ ID NO: 22077 - protein, 17 aa, synthetic construct
MYWYRQDTGHGLRLIHY

SEQ ID NO: 22078 - protein, 17 aa, synthetic construct
FWWYRQHSGEGPKALMS

SEQ ID NO: 22079 - protein, 17 aa, synthetic construct
MYWYRQDTGHGLRLIHY

SEQ ID NO: 22080 - protein, 17 aa, synthetic construct
LFWYKQTASGEIVFLIR

SEQ ID NO: 22081 - protein, 17 aa, synthetic construct
MYWYRQDTGHGLRLIHY

SEQ ID NO: 22082 - protein, 17 aa, synthetic construct
LLWYVQYPGQGPQLLLK

SEQ ID NO: 22083 - protein, 17 aa, synthetic construct
MYWYRQDTGHGLRLIHY

SEQ ID NO: 22084 - protein, 17 aa, synthetic construct
LFWYVRYPGEGLQLLLK

SEQ ID NO: 22085 - protein, 17 aa, synthetic construct
MYWYRQDTGHGLRLIHY

SEQ ID NO: 22086 - protein, 17 aa, synthetic construct
LFWYKQTASGEIVFLIR

SEQ ID NO: 22087 - protein, 17 aa, synthetic construct
MYWYRQDTGHGLRLIHY

SEQ ID NO: 22088 - protein, 17 aa, synthetic construct
LFWYKQTASGEIVFLIR

SEQ ID NO: 22089 - protein, 17 aa, synthetic construct
MYWYRQDTGHGLRLIHY

SEQ ID NO: 22090 - protein, 17 aa, synthetic construct
FAWYRQHSGKAPKALMS

SEQ ID NO: 22091 - protein, 17 aa, synthetic construct
MYWYRQDTGHGLRLIHY

SEQ ID NO: 22092 - protein, 17 aa, synthetic construct
FPWYKQEPGENPKLIID

SEQ ID NO: 22093 - protein, 17 aa, synthetic construct
MYWYRQDTGHGLRLIHY

SEQ ID NO: 22094 - protein, 17 aa, synthetic construct
LFWYVQYPRQGLQLLLK

SEQ ID NO: 22095 - protein, 17 aa, synthetic construct
MYWYRQDTGHGLRLIHY

SEQ ID NO: 22096 - protein, 17 aa, synthetic construct
FFWYVQYLNEAPQVLLK

SEQ ID NO: 22097 - protein, 17 aa, synthetic construct
MYWYRQDTGHGLRLIHY

SEQ ID NO: 22098 - protein, 17 aa, synthetic construct
LFWYVQYPGEGPQLLLK

SEQ ID NO: 22099 - protein, 17 aa, synthetic construct
MYWYRQDTGHGLRLIHY

SEQ ID NO: 22100 - protein, 17 aa, synthetic construct
IYWYRQVPHQGPQFIIQ

SEQ ID NO: 22101 - protein, 17 aa, synthetic construct
MYWYRQDTGHGLRLIHY

SEQ ID NO: 22102 - protein, 17 aa, synthetic construct
FRWYRQHSAKGLEVLVS

SEQ ID NO: 22103 - protein, 17 aa, synthetic construct
MYWYRQDTGHGLRLIHY

SEQ ID NO: 22104 - protein, 17 aa, synthetic construct
LFWYVRYPGEGLQLLLK

SEQ ID NO: 22105 - protein, 17 aa, synthetic construct
MYWYRQDTGHGLRLIHY

SEQ ID NO: 22106 - protein, 17 aa, synthetic construct
LFWYVQYPGEGPQFLFR

SEQ ID NO: 22107 - protein, 17 aa, synthetic construct
MYWYRQDTGHGLRLIHY

SEQ ID NO: 22108 - protein, 17 aa, synthetic construct
LFWYKQTASGEIVFLIR

SEQ ID NO: 22109 - protein, 17 aa, synthetic construct
MYWYRQDTGHGLRLIHY

SEQ ID NO: 22110 - protein, 17 aa, synthetic construct
FWWYRQHSGEGPKALMS

SEQ ID NO: 22111 - protein, 17 aa, synthetic construct
MYWYRQDTGHGLRLIHY

SEQ ID NO: 22112 - protein, 17 aa, synthetic construct
FYWYKQEPGAGLQLLMS

SEQ ID NO: 22113 - protein, 17 aa, synthetic construct
MYWYRQDTGHGLRLIHY

SEQ ID NO: 22114 - protein, 17 aa, synthetic construct
LFWYVQHLNEAPKLLLK

SEQ ID NO: 22115 - protein, 17 aa, synthetic construct
MYWYRQDTGHGLRLIHY

SEQ ID NO: 22116 - protein, 17 aa, synthetic construct
FPWYQQFPGEGPALLIA

SEQ ID NO: 22117 - protein, 17 aa, synthetic construct
MYWYRQDTGHGLRLIHY

SEQ ID NO: 22118 - protein, 17 aa, synthetic construct
LFWYVQHLNEAPKLLLK

SEQ ID NO: 22119 - protein, 17 aa, synthetic construct
MYWYRQDTGHGLRLIHY

SEQ ID NO: 22120 - protein, 17 aa, synthetic construct
LFWYVRYPGEGLQLLLK

SEQ ID NO: 22121 - protein, 17 aa, synthetic construct
MYWYRQDTGHGLRLIHY

SEQ ID NO: 22122 - protein, 17 aa, synthetic construct
LFWYVRYPGEGLQLLLK

SEQ ID NO: 22123 - protein, 17 aa, synthetic construct
MYWYRQDTGHGLRLIHY

SEQ ID NO: 22124 - protein, 17 aa, synthetic construct
LFWYVQHLNEAPKLLLK

SEQ ID NO: 22125 - protein, 17 aa, synthetic construct
MYWYRQDTGHGLRLIHY

SEQ ID NO: 22126 - protein, 17 aa, synthetic construct
LFWYKQTASGEIVFLIR

SEQ ID NO: 22127 - protein, 17 aa, synthetic construct
MYWYRQDTGHGLRLIHY

SEQ ID NO: 22128 - protein, 17 aa, synthetic construct
FPWYRQFPGKSPALLIA

SEQ ID NO: 22129 - protein, 17 aa, synthetic construct
MYWYRQDTGHGLRLIHY

SEQ ID NO: 22130 - protein, 17 aa, synthetic construct
FWWYRQHSGKSPKMLMS

SEQ ID NO: 22131 - protein, 17 aa, synthetic construct
MYWYRQDTGHGLRLIHY

SEQ ID NO: 22132 - protein, 17 aa, synthetic construct
FPWYRLFPGESPALLIA

SEQ ID NO: 22133 - protein, 17 aa, synthetic construct
MYWYRQDTGHGLRLIHY

SEQ ID NO: 22134 - protein, 17 aa, synthetic construct
LFWYKQTASGEIVFLIR

SEQ ID NO: 22135 - protein, 17 aa, synthetic construct
MYWYRQDTGHGLRLIHY

SEQ ID NO: 22136 - protein, 17 aa, synthetic construct
FWWYRQHSGKSPKMLMS

SEQ ID NO: 22137 - protein, 17 aa, synthetic construct
MYWYRQDTGHGLRLIHY

SEQ ID NO: 22138 - protein, 17 aa, synthetic construct
LSWYQQREGHAPVFLSY

SEQ ID NO: 22139 - protein, 17 aa, synthetic construct
MYWYRQDTGHGLRLIHY

SEQ ID NO: 22140 - protein, 17 aa, synthetic construct
FWWYRQHSGKAPKALMS

SEQ ID NO: 22141 - protein, 17 aa, synthetic construct
MYWYRQDTGHGLRLIHY

SEQ ID NO: 22142 - protein, 17 aa, synthetic construct
FFWYKQEPGAGLQLLMK

SEQ ID NO: 22143 - protein, 17 aa, synthetic construct
MYWYRQDTGHGLRLIHY

SEQ ID NO: 22144 - protein, 17 aa, synthetic construct
LFWYVQYPGEGPQFLFR

SEQ ID NO: 22145 - protein, 17 aa, synthetic construct
MYWYRQDTGHGLRLIHY

SEQ ID NO: 22146 - protein, 17 aa, synthetic construct
FPWYQQFPGEGPALLIS

SEQ ID NO: 22147 - protein, 17 aa, synthetic construct
MYWYRQDTGHGLRLIHY

SEQ ID NO: 22148 - protein, 17 aa, synthetic construct
LQWYRQKSGEGPAQLIL

SEQ ID NO: 22149 - protein, 17 aa, synthetic construct
MYWYRQDTGHGLRLIHY

SEQ ID NO: 22150 - protein, 17 aa, synthetic construct
FPWYQQFPGEGPALLIS

SEQ ID NO: 22151 - protein, 17 aa, synthetic construct
MYWYRQDTGHGLRLIHY

SEQ ID NO: 22152 - protein, 17 aa, synthetic construct
FWWYRQHSGEGPKALMS

SEQ ID NO: 22153 - protein, 17 aa, synthetic construct
MYWYRQDTGHGLRLIHY

SEQ ID NO: 22154 - protein, 17 aa, synthetic construct
LQWFYQSPGGSLVSLLS

SEQ ID NO: 22155 - protein, 17 aa, synthetic construct
MYWYRQDTGHGLRLIHY

SEQ ID NO: 22156 - protein, 17 aa, synthetic construct
LFWYKQTASGEIVFLIR

SEQ ID NO: 22157 - protein, 17 aa, synthetic construct
MYWYRQDTGHGLRLIHY

SEQ ID NO: 22158 - protein, 17 aa, synthetic construct
FPWYKQEPGENPKLIID

SEQ ID NO: 22159 - protein, 17 aa, synthetic construct
MYWYRQDTGHGLRLIHY

SEQ ID NO: 22160 - protein, 17 aa, synthetic construct
IYWYRQVPHQGPQFIIQ

SEQ ID NO: 22161 - protein, 17 aa, synthetic construct
MYWYRQDTGHGLRLIHY

SEQ ID NO: 22162 - protein, 17 aa, synthetic construct
FPWYKQEPGENPKLIID

SEQ ID NO: 22163 - protein, 17 aa, synthetic construct
MYWYRQDTGHGLRLIHY

SEQ ID NO: 22164 - protein, 17 aa, synthetic construct
LFWYKQTASGEIVFLIR

SEQ ID NO: 22165 - protein, 17 aa, synthetic construct
MYWYRQDTGHGLRLIHY

SEQ ID NO: 22166 - protein, 17 aa, synthetic construct
LFWYVQYPRQGLQLLLK

SEQ ID NO: 22167 - protein, 17 aa, synthetic construct
MYWYRQDTGHGLRLIHY

SEQ ID NO: 22168 - protein, 17 aa, synthetic construct
LFWYVQHLNEAPKLLLK

SEQ ID NO: 22169 - protein, 17 aa, synthetic construct
MYWYRQDTGHGLRLIHY

SEQ ID NO: 22170 - protein, 17 aa, synthetic construct
LSWYIQHHGRGLQFLLK

SEQ ID NO: 22171 - protein, 17 aa, synthetic construct
MYWYRQDTGHGLRLIHY

SEQ ID NO: 22172 - protein, 17 aa, synthetic construct
VQWFRQNSRGSLISLFY

SEQ ID NO: 22173 - protein, 17 aa, synthetic construct
MYWYRQDTGHGLRLIHY

SEQ ID NO: 22174 - protein, 17 aa, synthetic construct
FPWYQQFPGEGPALLIS

SEQ ID NO: 22175 - protein, 17 aa, synthetic construct
MYWYRQDTGHGLRLIHY

SEQ ID NO: 22176 - protein, 17 aa, synthetic construct
FPWYKQEPGKRLQFIID

SEQ ID NO: 22177 - protein, 17 aa, synthetic construct
MYWYRQDTGHGLRLIHY

SEQ ID NO: 22178 - protein, 17 aa, synthetic construct
FWWYRQHSGEGPKALMS

SEQ ID NO: 22179 - protein, 17 aa, synthetic construct
MYWYRQDTGHGLRLIHY

SEQ ID NO: 22180 - protein, 17 aa, synthetic construct
LFWYKQTASGEIVFLIR

SEQ ID NO: 22181 - protein, 17 aa, synthetic construct
MYWYRQDTGHGLRLIHY

SEQ ID NO: 22182 - protein, 17 aa, synthetic construct
FPWYKQEPGKRLQFIID

SEQ ID NO: 22183 - protein, 17 aa, synthetic construct
MYWYRQDTGHGLRLIHY

SEQ ID NO: 22184 - protein, 17 aa, synthetic construct
LFWYKQTASGEIVFLIR

SEQ ID NO: 22185 - protein, 17 aa, synthetic construct
MYWYRQDTGHGLRLIHY

SEQ ID NO: 22186 - protein, 17 aa, synthetic construct
LFWYKQTASGEIVFLIR

SEQ ID NO: 22187 - protein, 17 aa, synthetic construct
MYWYRQDTGHGLRLIHY

SEQ ID NO: 22188 - protein, 17 aa, synthetic construct
FAWYKKYPDNSPTLLIS

SEQ ID NO: 22189 - protein, 17 aa, synthetic construct
MYWYRQDTGHGLRLIHY

SEQ ID NO: 22190 - protein, 17 aa, synthetic construct
VQWFLQNPRGSLMNLFY

SEQ ID NO: 22191 - protein, 17 aa, synthetic construct
MYWYRQDTGHGLRLIHY

SEQ ID NO: 22192 - protein, 17 aa, synthetic construct
VHWYRQDSGRGPALIIL

SEQ ID NO: 22193 - protein, 17 aa, synthetic construct
MYWYRQDTGHGLRLIHY

SEQ ID NO: 22194 - protein, 17 aa, synthetic construct
LFWYKQTASGEIVFLIR

SEQ ID NO: 22195 - protein, 17 aa, synthetic construct
MYWYRQDTGHGLRLIHY

SEQ ID NO: 22196 - protein, 17 aa, synthetic construct
FPWYKQEPGKRLQFIID

SEQ ID NO: 22197 - protein, 17 aa, synthetic construct
MYWYRQDTGHGLRLIHY

SEQ ID NO: 22198 - protein, 17 aa, synthetic construct
LFWYKQTASGEIVFLIR

SEQ ID NO: 22199 - protein, 17 aa, synthetic construct
MYWYRQDTGHGLRLIHY

SEQ ID NO: 22200 - protein, 17 aa, synthetic construct
MQWFYQRPGGSLVSLFY

SEQ ID NO: 22201 - protein, 17 aa, synthetic construct
MYWYRQDTGHGLRLIHY

SEQ ID NO: 22202 - protein, 17 aa, synthetic construct
FAWYKKYPDNSPTLLIS

SEQ ID NO: 22203 - protein, 17 aa, synthetic construct
MYWYRQDTGHGLRLIHY

SEQ ID NO: 22204 - protein, 17 aa, synthetic construct
LFWYKQTASGEIVFLIR

SEQ ID NO: 22205 - protein, 17 aa, synthetic construct
MYWYRQDTGHGLRLIHY

SEQ ID NO: 22206 - protein, 17 aa, synthetic construct
LFWYVQYPGQSLQFLLK

SEQ ID NO: 22207 - protein, 17 aa, synthetic construct
MYWYRQDTGHGLRLIHY

SEQ ID NO: 22208 - protein, 17 aa, synthetic construct
VQWFLQNPRGSLINLFY

SEQ ID NO: 22209 - protein, 17 aa, synthetic construct
MYWYRQDTGHGLRLIHY

SEQ ID NO: 22210 - protein, 17 aa, synthetic construct
LFWYKQTASGEIVFLIR

SEQ ID NO: 22211 - protein, 17 aa, synthetic construct
MYWYQKKPNQAPKLLLF

SEQ ID NO: 22212 - protein, 17 aa, synthetic construct
IYWYRQVPLQGPEYVTH

SEQ ID NO: 22213 - protein, 17 aa, synthetic construct
MYWYQKKPNQAPKLLLF

SEQ ID NO: 22214 - protein, 17 aa, synthetic construct
LFWYVRYPGEGLQLLLK

SEQ ID NO: 22215 - protein, 17 aa, synthetic construct
MYWYQKKPNQAPKLLLF

SEQ ID NO: 22216 - protein, 17 aa, synthetic construct
IFWYRQLFSGEMVFLIY

SEQ ID NO: 22217 - protein, 17 aa, synthetic construct
MYWYQKKPNQAPKLLLF

SEQ ID NO: 22218 - protein, 17 aa, synthetic construct
VQWFLQNPRGSLMNLFY

SEQ ID NO: 22219 - protein, 17 aa, synthetic construct
MYWYQKKPNQAPKLLLF

SEQ ID NO: 22220 - protein, 17 aa, synthetic construct
LFWYKQTASGEIVFLIR

SEQ ID NO: 22221 - protein, 17 aa, synthetic construct
MYWYQKKPNQAPKLLLF

SEQ ID NO: 22222 - protein, 17 aa, synthetic construct
LFWYVRYPGEGLQLLLK

SEQ ID NO: 22223 - protein, 17 aa, synthetic construct
MYWYQKKPNQAPKLLLF

SEQ ID NO: 22224 - protein, 17 aa, synthetic construct
LFWYVRYPGEGLQLLLK

SEQ ID NO: 22225 - protein, 17 aa, synthetic construct
MYWYQKKPNQAPKLLLF

SEQ ID NO: 22226 - protein, 17 aa, synthetic construct
FPWYKQEAGKGLHFVID

SEQ ID NO: 22227 - protein, 17 aa, synthetic construct
LFWYRQTKIQGLELLSY

SEQ ID NO: 22228 - protein, 17 aa, synthetic construct
LFWYKQTASGEIVFLIR

SEQ ID NO: 22229 - protein, 17 aa, synthetic construct
LFWYRQTKIQGLELLSY

SEQ ID NO: 22230 - protein, 17 aa, synthetic construct
LFWYKQTASGEIVFLIR

SEQ ID NO: 22231 - protein, 17 aa, synthetic construct
LYWYWQATGGTLQQLFY

SEQ ID NO: 22232 - protein, 17 aa, synthetic construct
FWWYRQHSGKSPKMLMS

SEQ ID NO: 22233 - protein, 17 aa, synthetic construct
LYWYWQATGGTLQQLFY

SEQ ID NO: 22234 - protein, 17 aa, synthetic construct
LQWFYQSPGGSLVSLLS

SEQ ID NO: 22235 - protein, 17 aa, synthetic construct
LYWYWQATGGTLQQLFY

SEQ ID NO: 22236 - protein, 17 aa, synthetic construct
LFWYVQHLNEAPKLLLK

SEQ ID NO: 22237 - protein, 17 aa, synthetic construct
LYWYWQATGGTLQQLFY

SEQ ID NO: 22238 - protein, 17 aa, synthetic construct
LFWYVQHLNEAPKLLLK

SEQ ID NO: 22239 - protein, 17 aa, synthetic construct
LYWYWQATGGTLQQLFY

SEQ ID NO: 22240 - protein, 17 aa, synthetic construct
FYWYKQEPGAGLQLLMS

SEQ ID NO: 22241 - protein, 17 aa, synthetic construct
LYWYWQATGGTLQQLFY

SEQ ID NO: 22242 - protein, 17 aa, synthetic construct
FAWYRQHSGKAPKALMS

SEQ ID NO: 22243 - protein, 17 aa, synthetic construct
LYWYWQATGGTLQQLFY

SEQ ID NO: 22244 - protein, 17 aa, synthetic construct
FSWYKQEAGAGLQLLMS

SEQ ID NO: 22245 - protein, 17 aa, synthetic construct
LYWYWQATGGTLQQLFY

SEQ ID NO: 22246 - protein, 17 aa, synthetic construct
FFWYKQEPGAGLQLLMK

SEQ ID NO: 22247 - protein, 17 aa, synthetic construct
LYWYWQATGGTLQQLFY

SEQ ID NO: 22248 - protein, 17 aa, synthetic construct
LFWYKQTASGEIVFLIR

SEQ ID NO: 22249 - protein, 17 aa, synthetic construct
FYWYKQILGQQMEFLVN

SEQ ID NO: 22250 - protein, 17 aa, synthetic construct
LFWYVQYPGEGPQLLFK

SEQ ID NO: 22251 - protein, 17 aa, synthetic construct
FYWYKQILGQQMEFLVN

SEQ ID NO: 22252 - protein, 17 aa, synthetic construct
LFWYVQYPRQGLQLLLK

SEQ ID NO: 22253 - protein, 17 aa, synthetic construct
FYWYKQILGQQMEFLVN

SEQ ID NO: 22254 - protein, 17 aa, synthetic construct
VHWYRQDSGRGPALIIL

SEQ ID NO: 22255 - protein, 17 aa, synthetic construct
MYWYRQDSGKGLRLIYY

SEQ ID NO: 22256 - protein, 17 aa, synthetic construct
FRWYRQHSAKGLEVLVS

SEQ ID NO: 22257 - protein, 17 aa, synthetic construct
MYWYRQDSGKGLRLIYY

SEQ ID NO: 22258 - protein, 17 aa, synthetic construct
MQWFYQRPEGSLVSLFY

SEQ ID NO: 22259 - protein, 17 aa, synthetic construct
MYWYRQDSGKGLRLIYY

SEQ ID NO: 22260 - protein, 17 aa, synthetic construct
FWWYRQHSGKSPKMLMS

SEQ ID NO: 22261 - protein, 17 aa, synthetic construct
MYWYRQDSGKGLRLIYY

SEQ ID NO: 22262 - protein, 17 aa, synthetic construct
LFWYVRYPGEGLQLLLK

SEQ ID NO: 22263 - protein, 17 aa, synthetic construct
MYWYRQDSGKGLRLIYY

SEQ ID NO: 22264 - protein, 17 aa, synthetic construct
FPWYKQEPGKRLQFIID

SEQ ID NO: 22265 - protein, 17 aa, synthetic construct
MYWYRQDSGKGLRLIYY

SEQ ID NO: 22266 - protein, 17 aa, synthetic construct
LSWYIQHHGRGLQFLLK

SEQ ID NO: 22267 - protein, 17 aa, synthetic construct
MYWYRQDSGKGLRLIYY

SEQ ID NO: 22268 - protein, 17 aa, synthetic construct
LLWYVQYLGQGPQLLLK

SEQ ID NO: 22269 - protein, 17 aa, synthetic construct
MYWYRQDSGKGLRLIYY

SEQ ID NO: 22270 - protein, 17 aa, synthetic construct
LFWYVQHLNEAPKLLLK

SEQ ID NO: 22271 - protein, 17 aa, synthetic construct
MYWYRQDSGKGLRLIYY

SEQ ID NO: 22272 - protein, 17 aa, synthetic construct
FPWYQQFPGEGPALLIA

SEQ ID NO: 22273 - protein, 17 aa, synthetic construct
MYWYRQDSGKGLRLIYY

SEQ ID NO: 22274 - protein, 17 aa, synthetic construct
LFWYKQTASGEIVFLIR

SEQ ID NO: 22275 - protein, 17 aa, synthetic construct
MYWYRQDSGKGLRLIYY

SEQ ID NO: 22276 - protein, 17 aa, synthetic construct
VQWFLQNPRGSLMNLFY

SEQ ID NO: 22277 - protein, 17 aa, synthetic construct
MYWYRQDSGKGLRLIYY

SEQ ID NO: 22278 - protein, 17 aa, synthetic construct
LFWYKQTASGEIVFLIR

SEQ ID NO: 22279 - protein, 17 aa, synthetic construct
MYWYRQDSGKGLRLIYY

SEQ ID NO: 22280 - protein, 17 aa, synthetic construct
LQWYRQKSGKGPAQLIL

SEQ ID NO: 22281 - protein, 17 aa, synthetic construct
MYWYRQDSGKGLRLIYY

SEQ ID NO: 22282 - protein, 17 aa, synthetic construct
LFWYKQTASGEIVFLIR

SEQ ID NO: 22283 - protein, 17 aa, synthetic construct
MYWYRQDSGKGLRLIYY

SEQ ID NO: 22284 - protein, 17 aa, synthetic construct
LFWYVQYPGQSLQFLLK

SEQ ID NO: 22285 - protein, 17 aa, synthetic construct
MYWYRQDSGKGLRLIYY

SEQ ID NO: 22286 - protein, 17 aa, synthetic construct
FPWYKQEAGKGLHFVID

SEQ ID NO: 22287 - protein, 17 aa, synthetic construct
MYWYRQDSGKGLRLIYY

SEQ ID NO: 22288 - protein, 17 aa, synthetic construct
FPWYKQEAGKGLHFVID

SEQ ID NO: 22289 - protein, 17 aa, synthetic construct
MYWYRQDSGKGLRLIYY

SEQ ID NO: 22290 - protein, 17 aa, synthetic construct
FPWYRLFPGESPALLIA

SEQ ID NO: 22291 - protein, 17 aa, synthetic construct
MYWYRQDSGKGLRLIYY

SEQ ID NO: 22292 - protein, 17 aa, synthetic construct
LFWYVRYPGEGLQLLLK

SEQ ID NO: 22293 - protein, 17 aa, synthetic construct
MYWYRQDSGKGLRLIYY

SEQ ID NO: 22294 - protein, 17 aa, synthetic construct
LFWYVRYPGEGLQLLLK

SEQ ID NO: 22295 - protein, 17 aa, synthetic construct
MYWYRQDSGKGLRLIYY

SEQ ID NO: 22296 - protein, 17 aa, synthetic construct
FFWYKQEPGASLQLLMK

SEQ ID NO: 22297 - protein, 17 aa, synthetic construct
MYWYRQDSGKGLRLIYY

SEQ ID NO: 22298 - protein, 17 aa, synthetic construct
FWWYRQHSGEGPKALMS

SEQ ID NO: 22299 - protein, 17 aa, synthetic construct
MYWYRQDSGKGLRLIYY

SEQ ID NO: 22300 - protein, 17 aa, synthetic construct
LFWYVQYPRQGLQLLLK

SEQ ID NO: 22301 - protein, 17 aa, synthetic construct
MYWYRQDSGKGLRLIYY

SEQ ID NO: 22302 - protein, 17 aa, synthetic construct
LFWYVQYPGQGPQLLLK

SEQ ID NO: 22303 - protein, 17 aa, synthetic construct
MYWYRQDSGKGLRLIYY

SEQ ID NO: 22304 - protein, 17 aa, synthetic construct
LSWYIQHHGRGLQFLLK

SEQ ID NO: 22305 - protein, 17 aa, synthetic construct
MYWYRQDSGKGLRLIYY

SEQ ID NO: 22306 - protein, 17 aa, synthetic construct
LSWYIQHHGHGLQFLLK

SEQ ID NO: 22307 - protein, 17 aa, synthetic construct
MYWYRQDSGKGLRLIYY

SEQ ID NO: 22308 - protein, 17 aa, synthetic construct
FPWYKQEPGKRLQFIID

SEQ ID NO: 22309 - protein, 17 aa, synthetic construct
MYWYRQDSGKGLRLIYY

SEQ ID NO: 22310 - protein, 17 aa, synthetic construct
IYWYRQVPHQGPQFIIQ

SEQ ID NO: 22311 - protein, 17 aa, synthetic construct
MYWYRQDSGKGLRLIYY

SEQ ID NO: 22312 - protein, 17 aa, synthetic construct
FWWYRQHSGKSPKMLMS

SEQ ID NO: 22313 - protein, 17 aa, synthetic construct
MYWYRQDSGKGLRLIYY

SEQ ID NO: 22314 - protein, 17 aa, synthetic construct
LFWYVQYSGEGPQLLLQ

SEQ ID NO: 22315 - protein, 17 aa, synthetic construct
MYWYRQDSGKGLRLIYY

SEQ ID NO: 22316 - protein, 17 aa, synthetic construct
FPWYQQFPGEGPALLIS

SEQ ID NO: 22317 - protein, 17 aa, synthetic construct
MYWYRQDSGKGLRLIYY

SEQ ID NO: 22318 - protein, 17 aa, synthetic construct
LFWYVQHLNEAPKLLLK

SEQ ID NO: 22319 - protein, 17 aa, synthetic construct
MSWYQQDLQKQLQWLFT

SEQ ID NO: 22320 - protein, 17 aa, synthetic construct
IYWYRQVPHQGPQFIIQ

SEQ ID NO: 22321 - protein, 17 aa, synthetic construct
MSWYQQDLQKQLQWLFT

SEQ ID NO: 22322 - protein, 17 aa, synthetic construct
FFWYKQEPGAGLQLLMK

SEQ ID NO: 22323 - protein, 17 aa, synthetic construct
MSWYQQDLQKQLQWLFT

SEQ ID NO: 22324 - protein, 17 aa, synthetic construct
LFWYKQTASGEIVFLIR

SEQ ID NO: 22325 - protein, 17 aa, synthetic construct
MSWYQQDLQKQLQWLFT

SEQ ID NO: 22326 - protein, 17 aa, synthetic construct
LFWYVQYPRQGLQLLLK

SEQ ID NO: 22327 - protein, 17 aa, synthetic construct
MSWYQQDLQKQLQWLFT

SEQ ID NO: 22328 - protein, 17 aa, synthetic construct
LFWYVQHLNEAPKLLLK

SEQ ID NO: 22329 - protein, 17 aa, synthetic construct
MSWYQQDLQKQLQWLFT

SEQ ID NO: 22330 - protein, 17 aa, synthetic construct
IYWYRQVPHQGPQFIIQ

SEQ ID NO: 22331 - protein, 17 aa, synthetic construct
MSWYQQDLQKQLQWLFT

SEQ ID NO: 22332 - protein, 17 aa, synthetic construct
FYWYKQEPGAGLQLLMS

SEQ ID NO: 22333 - protein, 17 aa, synthetic construct
MSWYQQDLQKQLQWLFT

SEQ ID NO: 22334 - protein, 17 aa, synthetic construct
LQWYRQKSGKGPAQLIL

SEQ ID NO: 22335 - protein, 17 aa, synthetic construct
MSWYQQDLQKQLQWLFT

SEQ ID NO: 22336 - protein, 17 aa, synthetic construct
FPWYQQFPGEGPALLIS

SEQ ID NO: 22337 - protein, 17 aa, synthetic construct
MSWYQQDLQKQLQWLFT

SEQ ID NO: 22338 - protein, 17 aa, synthetic construct
LQWYRQKSGEGPAQLIL

SEQ ID NO: 22339 - protein, 17 aa, synthetic construct
MSWYQQDLQKQLQWLFT

SEQ ID NO: 22340 - protein, 17 aa, synthetic construct
LFWYVQYPRQGLQLLLK

SEQ ID NO: 22341 - protein, 17 aa, synthetic construct
MSWYQQDLQKQLQWLFT

SEQ ID NO: 22342 - protein, 17 aa, synthetic construct
FPWYQQFPGEGPALLIA

SEQ ID NO: 22343 - DNA, 51 bp, synthetic construct; identical to SEQ ID NO: 7447
  source 1..51: mol_type = other DNA

SEQ ID NO: 22344 - DNA, 51 bp, synthetic construct; identical to SEQ ID NO: 7580
  source 1..51: mol_type = other DNA

SEQ ID NO: 22345 - DNA, 51 bp, synthetic construct; identical to SEQ ID NO: 7443
  source 1..51: mol_type = other DNA

SEQ ID NO: 22346 - DNA, 51 bp, synthetic construct; identical to SEQ ID NO: 7580
  source 1..51: mol_type = other DNA

SEQ ID NO: 22347 - DNA, 51 bp, synthetic construct; identical to SEQ ID NO: 7447
  source 1..51: mol_type = other DNA

SEQ ID NO: 22348 - DNA, 51 bp, synthetic construct; identical to SEQ ID NO: 7432
  source 1..51: mol_type = other DNA

SEQ ID NO: 22349 - DNA, 51 bp, synthetic construct; identical to SEQ ID NO: 7427
  source 1..51: mol_type = other DNA

SEQ ID NO: 22350 - DNA, 51 bp, synthetic construct; identical to SEQ ID NO: 7528
  source 1..51: mol_type = other DNA

SEQ ID NO: 22351 - DNA, 51 bp, synthetic construct; identical to SEQ ID NO: 7719
  source 1..51: mol_type = other DNA

SEQ ID NO: 22352 - DNA, 51 bp, synthetic construct; identical to SEQ ID NO: 8002
  source 1..51: mol_type = other DNA

SEQ ID NO: 22353 - DNA, 51 bp, synthetic construct; identical to SEQ ID NO: 7583
  source 1..51: mol_type = other DNA

SEQ ID NO: 22354 - DNA, 51 bp, synthetic construct; identical to SEQ ID NO: 7944
  source 1..51: mol_type = other DNA

SEQ ID NO: 22355 - DNA, 51 bp, synthetic construct; identical to SEQ ID NO: 7427
  source 1..51: mol_type = other DNA

SEQ ID NO: 22356 - DNA, 51 bp, synthetic construct; identical to SEQ ID NO: 8070
  source 1..51: mol_type = other DNA

SEQ ID NO: 22357 - DNA, 51 bp, synthetic construct; identical to SEQ ID NO: 7423
  source 1..51: mol_type = other DNA

SEQ ID NO: 22358 - DNA, 51 bp, synthetic construct; identical to SEQ ID NO: 7424
  source 1..51: mol_type = other DNA

SEQ ID NO: 22359 - DNA, 51 bp, synthetic construct; identical to SEQ ID NO: 7423
  source 1..51: mol_type = other DNA

SEQ ID NO: 22360 - DNA, 51 bp, synthetic construct; identical to SEQ ID NO: 7930
  source 1..51: mol_type = other DNA

SEQ ID NO: 22361 - DNA, 51 bp, synthetic construct; identical to SEQ ID NO: 7427
  source 1..51: mol_type = other DNA

SEQ ID NO: 22362 - DNA, 51 bp, synthetic construct; identical to SEQ ID NO: 7428
  source 1..51: mol_type = other DNA

SEQ ID NO: 22363 - DNA, 51 bp, synthetic construct; identical to SEQ ID NO: 7515
  source 1..51: mol_type = other DNA

SEQ ID NO: 22364 - DNA, 51 bp, synthetic construct; identical to SEQ ID NO: 7498
  source 1..51: mol_type = other DNA

SEQ ID NO: 22365 - DNA, 51 bp, synthetic construct; identical to SEQ ID NO: 7455
  source 1..51: mol_type = other DNA

SEQ ID NO: 22366 - DNA, 51 bp, synthetic construct; identical to SEQ ID NO: 7426
  source 1..51: mol_type = other DNA

SEQ ID NO: 22367 - DNA, 51 bp, synthetic construct; identical to SEQ ID NO: 7421
  source 1..51: mol_type = other DNA

SEQ ID NO: 22368 - DNA, 51 bp, synthetic construct; identical to SEQ ID NO: 7428
  source 1..51: mol_type = other DNA

SEQ ID NO: 22369 - DNA, 51 bp, synthetic construct; identical to SEQ ID NO: 7435
  source 1..51: mol_type = other DNA

SEQ ID NO: 22370 - DNA, 51 bp, synthetic construct; identical to SEQ ID NO: 7678
  source 1..51: mol_type = other DNA

SEQ ID NO: 22371 - DNA, 51 bp, synthetic construct; identical to SEQ ID NO: 7427
  source 1..51: mol_type = other DNA

SEQ ID NO: 22372 - DNA, 51 bp, synthetic construct; identical to SEQ ID NO: 7426
  source 1..51: mol_type = other DNA

SEQ ID NO: 22373 - DNA, 51 bp, synthetic construct; identical to SEQ ID NO: 7447
  source 1..51: mol_type = other DNA

SEQ ID NO: 22374 - DNA, 51 bp, synthetic construct; identical to SEQ ID NO: 7580
  source 1..51: mol_type = other DNA

SEQ ID NO: 22375 - DNA, 51 bp, synthetic construct; identical to SEQ ID NO: 7447
  source 1..51: mol_type = other DNA

SEQ ID NO: 22376 - DNA, 51 bp, synthetic construct; identical to SEQ ID NO: 7482
  source 1..51: mol_type = other DNA

SEQ ID NO: 22377 - DNA, 51 bp, synthetic construct; identical to SEQ ID NO: 7515
  source 1..51: mol_type = other DNA

SEQ ID NO: 22378 - DNA, 51 bp, synthetic construct; identical to SEQ ID NO: 7430
  source 1..51: mol_type = other DNA

SEQ ID NO: 22379 - DNA, 51 bp, synthetic construct; identical to SEQ ID NO: 7435
  source 1..51: mol_type = other DNA

SEQ ID NO: 22380 - DNA, 51 bp, synthetic construct; identical to SEQ ID NO: 7480
  source 1..51: mol_type = other DNA

SEQ ID NO: 22381 - DNA, 51 bp, synthetic construct; identical to SEQ ID NO: 7423
  source 1..51: mol_type = other DNA

SEQ ID NO: 22382 - DNA, 51 bp, synthetic construct; identical to SEQ ID NO: 7426
  source 1..51: mol_type = other DNA

SEQ ID NO: 22383 - DNA, 51 bp, synthetic construct; identical to SEQ ID NO: 7423
  source 1..51: mol_type = other DNA

SEQ ID NO: 22384 - DNA, 51 bp, synthetic construct; identical to SEQ ID NO: 7442
  source 1..51: mol_type = other DNA

SEQ ID NO: 22385 - DNA, 51 bp, synthetic construct; identical to SEQ ID NO: 7427
  source 1..51: mol_type = other DNA

SEQ ID NO: 22386 - DNA, 51 bp, synthetic construct; identical to SEQ ID NO: 7426
  source 1..51: mol_type = other DNA

SEQ ID NO: 22387 - DNA, 51 bp, synthetic construct; identical to SEQ ID NO: 7427
  source 1..51: mol_type = other DNA

SEQ ID NO: 22388 - DNA, 51 bp, synthetic construct; identical to SEQ ID NO: 7512
  source 1..51: mol_type = other DNA

SEQ ID NO: 22389 - DNA, 51 bp, synthetic construct; identical to SEQ ID NO: 7515
  source 1..51: mol_type = other DNA

SEQ ID NO: 22390 - DNA, 51 bp, synthetic construct; identical to SEQ ID NO: 7930
  source 1..51: mol_type = other DNA

SEQ ID NO: 22391 - DNA, 51 bp, synthetic construct; identical to SEQ ID NO: 7515
  source 1..51: mol_type = other DNA

SEQ ID NO: 22392 - DNA, 51 bp, synthetic construct; identical to SEQ ID NO: 7514
  source 1..51: mol_type = other DNA

SEQ ID NO: 22393 - DNA, 51 bp, synthetic construct; identical to SEQ ID NO: 7987
  source 1..51: mol_type = other DNA

SEQ ID NO: 22394 - DNA, 51 bp, synthetic construct; identical to SEQ ID NO: 7426
  source 1..51: mol_type = other DNA

SEQ ID NO: 22395 - DNA, 51 bp, synthetic construct; identical to SEQ ID NO: 7519
  source 1..51: mol_type = other DNA

SEQ ID NO: 22396 - DNA, 51 bp, synthetic construct; identical to SEQ ID NO: 7742
  source 1..51: mol_type = other DNA

SEQ ID NO: 22397 - DNA, 51 bp, synthetic construct; identical to SEQ ID NO: 7519
  source 1..51: mol_type = other DNA

SEQ ID NO: 22398 - DNA, 51 bp, synthetic construct; identical to SEQ ID NO: 7430
  source 1..51: mol_type = other DNA

SEQ ID NO: 22399 - DNA, 51 bp, synthetic construct; identical to SEQ ID NO: 7423
  source 1..51: mol_type = other DNA

SEQ ID NO: 22400 - DNA, 51 bp, synthetic construct; identical to SEQ ID NO: 7514
  source 1..51: mol_type = other DNA

SEQ ID NO: 22401 - DNA, 51 bp, synthetic construct; identical to SEQ ID NO: 7423
  source 1..51: mol_type = other DNA

SEQ ID NO: 22402 - DNA, 51 bp, synthetic construct; identical to SEQ ID NO: 7480
  source 1..51: mol_type = other DNA

SEQ ID NO: 22403 - DNA, 51 bp, synthetic construct; identical to SEQ ID NO: 7423
  source 1..51: mol_type = other DNA

SEQ ID NO: 22404 - DNA, 51 bp, synthetic construct; identical to SEQ ID NO: 7570
  source 1..51: mol_type = other DNA

SEQ ID NO: 22405 - DNA, 51 bp, synthetic construct; identical to SEQ ID NO: 7427
  source 1..51: mol_type = other DNA

SEQ ID NO: 22406 - DNA, 51 bp, synthetic construct; identical to SEQ ID NO: 7700
  source 1..51: mol_type = other DNA

SEQ ID NO: 22407 - DNA, 51 bp, synthetic construct; identical to SEQ ID NO: 7427
  source 1..51: mol_type = other DNA

SEQ ID NO: 22408 - DNA, 51 bp, synthetic construct; identical to SEQ ID NO: 7700
  source 1..51: mol_type = other DNA

SEQ ID NO: 22409 - DNA, 51 bp, synthetic construct; identical to SEQ ID NO: 7719
  source 1..51: mol_type = other DNA

SEQ ID NO: 22410 - DNA, 51 bp, synthetic construct; identical to SEQ ID NO: 7432
  source 1..51: mol_type = other DNA

SEQ ID NO: 22411 - DNA, 51 bp, synthetic construct; identical to SEQ ID NO: 7455
  source 1..51: mol_type = other DNA

SEQ ID NO: 22412 - DNA, 51 bp, synthetic construct; identical to SEQ ID NO: 7528
  source 1..51: mol_type = other DNA

SEQ ID NO: 22413 - DNA, 51 bp, synthetic construct; identical to SEQ ID NO: 7447
  source 1..51: mol_type = other DNA

SEQ ID NO: 22414 - DNA, 51 bp, synthetic construct; identical to SEQ ID NO: 7700
  source 1..51: mol_type = other DNA

SEQ ID NO: 22415 - DNA, 51 bp, synthetic construct; identical to SEQ ID NO: 7515
  source 1..51: mol_type = other DNA

SEQ ID NO: 22416 - DNA, 51 bp, synthetic construct; identical to SEQ ID NO: 7642
  source 1..51: mol_type = other DNA

SEQ ID NO: 22417 - DNA, 51 bp, synthetic construct; identical to SEQ ID NO: 7515
  source 1..51: mol_type = other DNA

SEQ ID NO: 22418 - DNA, 51 bp, synthetic construct; identical to SEQ ID NO: 7516
  source 1..51: mol_type = other DNA

SEQ ID NO: 22419 - DNA, 51 bp, synthetic construct; identical to SEQ ID NO: 7515
  source 1..51: mol_type = other DNA

SEQ ID NO: 22420 - DNA, 51 bp, synthetic construct; identical to SEQ ID NO: 7426
  source 1..51: mol_type = other DNA

SEQ ID NO: 22421 - DNA, 51 bp, synthetic construct; identical to SEQ ID NO: 7515
  source 1..51: mol_type = other DNA

SEQ ID NO: 22422 - DNA, 51 bp, synthetic construct; identical to SEQ ID NO: 7492
  source 1..51: mol_type = other DNA

SEQ ID NO: 22423 - DNA, 51 bp, synthetic construct; identical to SEQ ID NO: 7515
  source 1..51: mol_type = other DNA

SEQ ID NO: 22424 - DNA, 51 bp, synthetic construct; identical to SEQ ID NO: 7876
  source 1..51: mol_type = other DNA

SEQ ID NO: 22425 - DNA, 51 bp, synthetic construct; identical to SEQ ID NO: 7515
  source 1..51: mol_type = other DNA

SEQ ID NO: 22426 - DNA, 51 bp, synthetic construct; identical to SEQ ID NO: 7426
  source 1..51: mol_type = other DNA

SEQ ID NO: 22427 - DNA, 51 bp, synthetic construct; identical to SEQ ID NO: 7515
  source 1..51: mol_type = other DNA

SEQ ID NO: 22428 - DNA, 51 bp, synthetic construct; identical to SEQ ID NO: 7432
  source 1..51: mol_type = other DNA

SEQ ID NO: 22429 - DNA, 51 bp, synthetic construct; identical to SEQ ID NO: 7515
  source 1..51: mol_type = other DNA

SEQ ID NO: 22430 - DNA, 51 bp, synthetic construct; identical to SEQ ID NO: 7426
  source 1..51: mol_type = other DNA

SEQ ID NO: 22431 - DNA, 51 bp, synthetic construct; identical to SEQ ID NO: 7515
  source 1..51: mol_type = other DNA

SEQ ID NO: 22432 - DNA, 51 bp, synthetic construct; identical to SEQ ID NO: 7426
  source 1..51: mol_type = other DNA

SEQ ID NO: 22433 - DNA, 51 bp, synthetic construct; identical to SEQ ID NO: 7515
  source 1..51: mol_type = other DNA

SEQ ID NO: 22434 - DNA, 51 bp, synthetic construct; identical to SEQ ID NO: 7528
  source 1..51: mol_type = other DNA

SEQ ID NO: 22435 - DNA, 51 bp, synthetic construct; identical to SEQ ID NO: 7515
  source 1..51: mol_type = other DNA

SEQ ID NO: 22436 - DNA, 51 bp, synthetic construct; identical to SEQ ID NO: 7642
  source 1..51: mol_type = other DNA

SEQ ID NO: 22437 - DNA, 51 bp, synthetic construct; identical to SEQ ID NO: 7515
  source 1..51: mol_type = other DNA

SEQ ID NO: 22438 - DNA, 51 bp, synthetic construct; identical to SEQ ID NO: 7676
  source 1..51: mol_type = other DNA

SEQ ID NO: 22439 - DNA, 51 bp, synthetic construct; identical to SEQ ID NO: 7515
  source 1..51: mol_type = other DNA

SEQ ID NO: 22440 - DNA, 51 bp, synthetic construct; identical to SEQ ID NO: 7434
  source 1..51: mol_type = other DNA

SEQ ID NO: 22441 - DNA, 51 bp, synthetic construct; identical to SEQ ID NO: 7515
  source 1..51: mol_type = other DNA

SEQ ID NO: 22442 - DNA, 51 bp, synthetic construct; identical to SEQ ID NO: 7444
  source 1..51: mol_type = other DNA

SEQ ID NO: 22443 - DNA, 51 bp, synthetic construct; identical to SEQ ID NO: 7515
  source 1..51: mol_type = other DNA

SEQ ID NO: 22444 - DNA, 51 bp, synthetic construct; identical to SEQ ID NO: 7430
  source 1..51: mol_type = other DNA

SEQ ID NO: 22445 - DNA, 51 bp, synthetic construct; identical to SEQ ID NO: 7515
  source 1..51: mol_type = other DNA

SEQ ID NO: 22446 - DNA, 51 bp, synthetic construct; identical to SEQ ID NO: 7492
  source 1..51: mol_type = other DNA

SEQ ID NO: 22447 - DNA, 51 bp, synthetic construct; identical to SEQ ID NO: 7515
  source 1..51: mol_type = other DNA

SEQ ID NO: 22448 - DNA, 51 bp, synthetic construct; identical to SEQ ID NO: 7794
  source 1..51: mol_type = other DNA

SEQ ID NO: 22449 - DNA, 51 bp, synthetic construct; identical to SEQ ID NO: 7515
  source 1..51: mol_type = other DNA

SEQ ID NO: 22450 - DNA, 51 bp, synthetic construct; identical to SEQ ID NO: 7432
  source 1..51: mol_type = other DNA

SEQ ID NO: 22451 - DNA, 51 bp, synthetic construct; identical to SEQ ID NO: 7515
  source 1..51: mol_type = other DNA

SEQ ID NO: 22452 - DNA, 51 bp, synthetic construct; identical to SEQ ID NO: 7430
  source 1..51: mol_type = other DNA

SEQ ID NO: 22453 - DNA, 51 bp, synthetic construct; identical to SEQ ID NO: 7437
  source 1..51: mol_type = other DNA

SEQ ID NO: 22454 - DNA, 51 bp, synthetic construct; identical to SEQ ID NO: 7742
  source 1..51: mol_type = other DNA

SEQ ID NO: 22455 - DNA, 51 bp, synthetic construct; identical to SEQ ID NO: 7437
  source 1..51: mol_type = other DNA

SEQ ID NO: 22456 - DNA, 51 bp, synthetic construct; identical to SEQ ID NO: 7432
  source 1..51: mol_type = other DNA

SEQ ID NO: 22457 - DNA, 51 bp, synthetic construct; identical to SEQ ID NO: 7437
  source 1..51: mol_type = other DNA

SEQ ID NO: 22458 - DNA, 51 bp, synthetic construct; identical to SEQ ID NO: 7676
  source 1..51: mol_type = other DNA

SEQ ID NO: 22459 - DNA, 51 bp, synthetic construct
  source 1..51: mol_type = other DNA
gtattctggtatcaacaaaataagaacaatgagtttaaatttttgattaac

SEQ ID NO: 22460 - DNA, 51 bp, synthetic construct; identical to SEQ ID NO: 7426
  source 1..51: mol_type = other DNA

SEQ ID NO: 22461 - DNA, 51 bp, synthetic construct; identical to SEQ ID NO: 7987
  source 1..51: mol_type = other DNA

SEQ ID NO: 22462 - DNA, 51 bp, synthetic construct; identical to SEQ ID NO: 7528
  source 1..51: mol_type = other DNA

SEQ ID NO: 22463 - DNA, 51 bp, synthetic construct; identical to SEQ ID NO: 7987
  source 1..51: mol_type = other DNA

SEQ ID NO: 22464 - DNA, 51 bp, synthetic construct; identical to SEQ ID NO: 7462
  source 1..51: mol_type = other DNA

SEQ ID NO: 22465 - DNA, 51 bp, synthetic construct; identical to SEQ ID NO: 7987
  source 1..51: mol_type = other DNA

SEQ ID NO: 22466 - DNA, 51 bp, synthetic construct; identical to SEQ ID NO: 7462
  source 1..51: mol_type = other DNA

SEQ ID NO: 22467 - DNA, 51 bp, synthetic construct; identical to SEQ ID NO: 7987
  source 1..51: mol_type = other DNA

SEQ ID NO: 22468 - DNA, 51 bp, synthetic construct; identical to SEQ ID NO: 7432
  source 1..51: mol_type = other DNA

SEQ ID NO: 22469 - DNA, 51 bp, synthetic construct; identical to SEQ ID NO: 7987
  source 1..51: mol_type = other DNA

SEQ ID NO: 22470 - DNA, 51 bp, synthetic construct; identical to SEQ ID NO: 7462
  source 1..51: mol_type = other DNA

SEQ ID NO: 22471 - DNA, 51 bp, synthetic construct; identical to SEQ ID NO: 7987
  source 1..51: mol_type = other DNA

SEQ ID NO: 22472 - DNA, 51 bp, synthetic construct; identical to SEQ ID NO: 7462
  source 1..51: mol_type = other DNA

SEQ ID NO: 22473 - DNA, 51 bp, synthetic construct; identical to SEQ ID NO: 7421
  source 1..51: mol_type = other DNA

SEQ ID NO: 22474 - DNA, 51 bp, synthetic construct; identical to SEQ ID NO: 7428
  source 1..51: mol_type = other DNA

SEQ ID NO: 22475 - DNA, 51 bp, synthetic construct; identical to SEQ ID NO: 7421
  source 1..51: mol_type = other DNA

SEQ ID NO: 22476 - DNA, 51 bp, synthetic construct; identical to SEQ ID NO: 7480
  source 1..51: mol_type = other DNA

SEQ ID NO: 22477 - DNA, 51 bp, synthetic construct; identical to SEQ ID NO: 7421
  source 1..51: mol_type = other DNA

SEQ ID NO: 22478 - DNA, 51 bp, synthetic construct; identical to SEQ ID NO: 7458
  source 1..51: mol_type = other DNA

SEQ ID NO: 22479 - DNA, 51 bp, synthetic construct; identical to SEQ ID NO: 7421
  source 1..51: mol_type = other DNA

SEQ ID NO: 22480 - DNA, 51 bp, synthetic construct; identical to SEQ ID NO: 7424
  source 1..51: mol_type = other DNA

SEQ ID NO: 22481 - DNA, 51 bp, synthetic construct; identical to SEQ ID NO: 7421
  source 1..51: mol_type = other DNA

SEQ ID NO: 22482 - DNA, 51 bp, synthetic construct; identical to SEQ ID NO: 7492
  source 1..51: mol_type = other DNA

SEQ ID NO: 22483 - DNA, 51 bp, synthetic construct; identical to SEQ ID NO: 7421
  source 1..51: mol_type = other DNA

SEQ ID NO: 22484 - DNA, 51 bp, synthetic construct; identical to SEQ ID NO: 7432
  source 1..51: mol_type = other DNA

SEQ ID NO: 22485 - DNA, 51 bp, synthetic construct; identical to SEQ ID NO: 7421
  source 1..51: mol_type = other DNA

SEQ ID NO: 22486 - DNA, 51 bp, synthetic construct; identical to SEQ ID NO: 7422
  source 1..51: mol_type = other DNA

SEQ ID NO: 22487 - DNA, 51 bp, synthetic construct; identical to SEQ ID NO: 7421
  source 1..51: mol_type = other DNA

SEQ ID NO: 22488 - DNA, 51 bp, synthetic construct; identical to SEQ ID NO: 7642
  source 1..51: mol_type = other DNA

SEQ ID NO: 22489 - DNA, 51 bp, synthetic construct; identical to SEQ ID NO: 7421
  source 1..51: mol_type = other DNA

SEQ ID NO: 22490 - DNA, 51 bp, synthetic construct; identical to SEQ ID NO: 7496
  source 1..51: mol_type = other DNA

SEQ ID NO: 22491 - DNA, 51 bp, synthetic construct; identical to SEQ ID NO: 7421
  source 1..51: mol_type = other DNA

SEQ ID NO: 22492 - DNA, 51 bp, synthetic construct; identical to SEQ ID NO: 7428
  source 1..51: mol_type = other DNA

SEQ ID NO: 22493 - DNA, 51 bp, synthetic construct; identical to SEQ ID NO: 7421
  source 1..51: mol_type = other DNA

SEQ ID NO: 22494 - DNA, 51 bp, synthetic construct; identical to SEQ ID NO: 7488
  source 1..51: mol_type = other DNA

SEQ ID NO: 22495 - DNA, 51 bp, synthetic construct; identical to SEQ ID NO: 7421
  source 1..51: mol_type = other DNA

SEQ ID NO: 22496 - DNA, 51 bp, synthetic construct; identical to SEQ ID NO: 7534
  source 1..51: mol_type = other DNA

SEQ ID NO: 22497 - DNA, 51 bp, synthetic construct; identical to SEQ ID NO: 7421
  source 1..51: mol_type = other DNA

SEQ ID NO: 22498 - DNA, 51 bp, synthetic construct; identical to SEQ ID NO: 7536
  source 1..51: mol_type = other DNA

SEQ ID NO: 22499 - DNA, 51 bp, synthetic construct; identical to SEQ ID NO: 7421
  source 1..51: mol_type = other DNA

SEQ ID NO: 22500 - DNA, 51 bp, synthetic construct; identical to SEQ ID NO: 7504
  source 1..51: mol_type = other DNA

SEQ ID NO: 22501 - DNA, 51 bp, synthetic construct; identical to SEQ ID NO: 7421
  source 1..51: mol_type = other DNA

SEQ ID NO: 22502 - DNA, 51 bp, synthetic construct; identical to SEQ ID NO: 7642
  source 1..51: mol_type = other DNA

SEQ ID NO: 22503 - DNA, 51 bp, synthetic construct; identical to SEQ ID NO: 7421
  source 1..51: mol_type = other DNA

SEQ ID NO: 22504 - DNA, 51 bp, synthetic construct; identical to SEQ ID NO: 7458
  source 1..51: mol_type = other DNA

SEQ ID NO: 22505 - DNA, 51 bp, synthetic construct; identical to SEQ ID NO: 7421
  source 1..51: mol_type = other DNA

SEQ ID NO: 22506 - DNA, 51 bp, synthetic construct; identical to SEQ ID NO: 7742
  source 1..51: mol_type = other DNA

SEQ ID NO: 22507 - DNA, 51 bp, synthetic construct; identical to SEQ ID NO: 7583
  source 1..51: mol_type = other DNA

SEQ ID NO: 22508 - DNA, 51 bp, synthetic construct; identical to SEQ ID NO: 7520
  source 1..51: mol_type = other DNA

SEQ ID NO: 22509 - DNA, 51 bp, synthetic construct; identical to SEQ ID NO: 7583
  source 1..51: mol_type = other DNA

SEQ ID NO: 22510 - DNA, 51 bp, synthetic construct; identical to SEQ ID NO: 7458
  source 1..51: mol_type = other DNA

SEQ ID NO: 22511 - DNA, 51 bp, synthetic construct; identical to SEQ ID NO: 7583
  source 1..51: mol_type = other DNA

SEQ ID NO: 22512 - DNA, 51 bp, synthetic construct; identical to SEQ ID NO: 8070
  source 1..51: mol_type = other DNA

SEQ ID NO: 22513 - DNA, 51 bp, synthetic construct; identical to SEQ ID NO: 7583
  source 1..51: mol_type = other DNA

SEQ ID NO: 22514 - DNA, 51 bp, synthetic construct; identical to SEQ ID NO: 7544
  source 1..51: mol_type = other DNA

SEQ ID NO: 22515 - DNA, 51 bp, synthetic construct; identical to SEQ ID NO: 7583
  source 1..51: mol_type = other DNA

SEQ ID NO: 22516 - DNA, 51 bp, synthetic construct; identical to SEQ ID NO: 7498
  source 1..51: mol_type = other DNA

SEQ ID NO: 22517 - DNA, 51 bp, synthetic construct; identical to SEQ ID NO: 7583
  source 1..51: mol_type = other DNA

SEQ ID NO: 22518 - DNA, 51 bp, synthetic construct; identical to SEQ ID NO: 7814
  source 1..51: mol_type = other DNA

SEQ ID NO: 22519 - DNA, 51 bp, synthetic construct; identical to SEQ ID NO: 7435
  source 1..51: mol_type = other DNA

SEQ ID NO: 22520 - DNA, 51 bp, synthetic construct; identical to SEQ ID NO: 7426
  source 1..51: mol_type = other DNA

SEQ ID NO: 22521 - DNA, 51 bp, synthetic construct; identical to SEQ ID NO: 7435
  source 1..51: mol_type = other DNA

SEQ ID NO: 22522 - DNA, 51 bp, synthetic construct; identical to SEQ ID NO: 7480
  source 1..51: mol_type = other DNA

SEQ ID NO: 22523 - DNA, 51 bp, synthetic construct; identical to SEQ ID NO: 7435
  source 1..51: mol_type = other DNA

SEQ ID NO: 22524 - DNA, 51 bp, synthetic construct; identical to SEQ ID NO: 7948
  source 1..51: mol_type = other DNA

SEQ ID NO: 22525 - DNA, 51 bp, synthetic construct; identical to SEQ ID NO: 7435
  source 1..51: mol_type = other DNA

SEQ ID NO: 22526 - DNA, 51 bp, synthetic construct; identical to SEQ ID NO: 7426
  source 1..51: mol_type = other DNA

SEQ ID NO: 22527 - DNA, 51 bp, synthetic construct; identical to SEQ ID NO: 7435
  source 1..51: mol_type = other DNA

SEQ ID NO: 22528 - DNA, 51 bp, synthetic construct; identical to SEQ ID NO: 8070
  source 1..51: mol_type = other DNA

SEQ ID NO: 22529 - DNA, 51 bp, synthetic construct; identical to SEQ ID NO: 7435
  source 1..51: mol_type = other DNA

SEQ ID NO: 22530 - DNA, 51 bp, synthetic construct; identical to SEQ ID NO: 7480
  source 1..51: mol_type = other DNA

SEQ ID NO: 22531 - DNA, 51 bp, synthetic construct; identical to SEQ ID NO: 7435
  source 1..51: mol_type = other DNA

SEQ ID NO: 22532 - DNA, 51 bp, synthetic construct; identical to SEQ ID NO: 7930
  source 1..51: mol_type = other DNA

SEQ ID NO: 22533 - DNA, 51 bp, synthetic construct; identical to SEQ ID NO: 7435
  source 1..51: mol_type = other DNA

SEQ ID NO: 22534 - DNA, 51 bp, synthetic construct; identical to SEQ ID NO: 7422
  source 1..51: mol_type = other DNA

SEQ ID NO: 22535 - DNA, 51 bp, synthetic construct; identical to SEQ ID NO: 7435
  source 1..51: mol_type = other DNA

SEQ ID NO: 22536 - DNA, 51 bp, synthetic construct; identical to SEQ ID NO: 7422
  source 1..51: mol_type = other DNA

SEQ ID NO: 22537 - DNA, 51 bp, synthetic construct; identical to SEQ ID NO: 7435
  source 1..51: mol_type = other DNA

SEQ ID NO: 22538 - DNA, 51 bp, synthetic construct; identical to SEQ ID NO: 7480
  source 1..51: mol_type = other DNA

SEQ ID NO: 22539 - DNA, 51 bp, synthetic construct; identical to SEQ ID NO: 7435
  source 1..51: mol_type = other DNA

SEQ ID NO: 22540 - DNA, 51 bp, synthetic construct; identical to SEQ ID NO: 7492
  source 1..51: mol_type = other DNA

SEQ ID NO: 22541 - DNA, 51 bp, synthetic construct; identical to SEQ ID NO: 7435
  source 1..51: mol_type = other DNA

SEQ ID NO: 22542 - DNA, 51 bp, synthetic construct; identical to SEQ ID NO: 7426
  source 1..51: mol_type = other DNA

SEQ ID NO: 22543 - DNA, 51 bp, synthetic construct; identical to SEQ ID NO: 7435
  source 1..51: mol_type = other DNA

SEQ ID NO: 22544 - DNA, 51 bp, synthetic construct; identical to SEQ ID NO: 7474
  source 1..51: mol_type = other DNA

SEQ ID NO: 22545 - DNA, 51 bp, synthetic construct; identical to SEQ ID NO: 7435
  source 1..51: mol_type = other DNA

SEQ ID NO: 22546 - DNA, 51 bp, synthetic construct; identical to SEQ ID NO: 7432
  source 1..51: mol_type = other DNA

SEQ ID NO: 22547 - DNA, 51 bp, synthetic construct; identical to SEQ ID NO: 7435
  source 1..51: mol_type = other DNA

SEQ ID NO: 22548 - DNA, 51 bp, synthetic construct; identical to SEQ ID NO: 7426
  source 1..51: mol_type = other DNA

SEQ ID NO: 22549 - DNA, 51 bp, synthetic construct; identical to SEQ ID NO: 7519
  source 1..51: mol_type = other DNA

SEQ ID NO: 22550 - DNA, 51 bp, synthetic construct; identical to SEQ ID NO: 7432
  source 1..51: mol_type = other DNA

SEQ ID NO: 22551 - DNA, 51 bp, synthetic construct; identical to SEQ ID NO: 7519
  source 1..51: mol_type = other DNA

SEQ ID NO: 22552 - DNA, 51 bp, synthetic construct; identical to SEQ ID NO: 7432
  source 1..51: mol_type = other DNA

SEQ ID NO: 22553 - DNA, 51 bp, synthetic construct; identical to SEQ ID NO: 7519
  source 1..51: mol_type = other DNA

SEQ ID NO: 22554 - DNA, 51 bp, synthetic construct; identical to SEQ ID NO: 7426
  source 1..51: mol_type = other DNA

SEQ ID NO: 22555 - DNA, 51 bp, synthetic construct; identical to SEQ ID NO: 7519
  source 1..51: mol_type = other DNA

SEQ ID NO: 22556 - DNA, 51 bp, synthetic construct; identical to SEQ ID NO: 7530
  source 1..51: mol_type = other DNA

SEQ ID NO: 22557 - DNA, 51 bp, synthetic construct; identical to SEQ ID NO: 7519
  source 1..51: mol_type = other DNA

SEQ ID NO: 22558 - DNA, 51 bp, synthetic construct
  source 1..51: mol_type = other DNA
cttttgtggtatgtccaatatcctggacaaggtccacagctccttctgaaa

SEQ ID NO: 22559 - DNA, 51 bp, synthetic construct; identical to SEQ ID NO: 7519
  source 1..51: mol_type = other DNA

SEQ ID NO: 22560 - DNA, 51 bp, synthetic construct; identical to SEQ ID NO: 7930
  source 1..51: mol_type = other DNA

SEQ ID NO: 22561 - DNA, 51 bp, synthetic construct; identical to SEQ ID NO: 7519
  source 1..51: mol_type = other DNA

SEQ ID NO: 22562 - DNA, 51 bp, synthetic construct; identical to SEQ ID NO: 7430
  source 1..51: mol_type = other DNA

SEQ ID NO: 22563 - DNA, 51 bp, synthetic construct; identical to SEQ ID NO: 7519
  source 1..51: mol_type = other DNA

SEQ ID NO: 22564 - DNA, 51 bp, synthetic construct; identical to SEQ ID NO: 7482
  source 1..51: mol_type = other DNA

SEQ ID NO: 22565 - DNA, 51 bp, synthetic construct; identical to SEQ ID NO: 7519
  source 1..51: mol_type = other DNA

SEQ ID NO: 22566 - DNA, 51 bp, synthetic construct; identical to SEQ ID NO: 7426
  source 1..51: mol_type = other DNA

SEQ ID NO: 22567 - DNA, 51 bp, synthetic construct; identical to SEQ ID NO: 7519
  source 1..51: mol_type = other DNA

SEQ ID NO: 22568 - DNA, 51 bp, synthetic construct; identical to SEQ ID NO: 8194
  source 1..51: mol_type = other DNA

SEQ ID NO: 22569 - DNA, 51 bp, synthetic construct; identical to SEQ ID NO: 7519
  source 1..51: mol_type = other DNA

SEQ ID NO: 22570 - DNA, 51 bp, synthetic construct; identical to SEQ ID NO: 7422
  source 1..51: mol_type = other DNA

SEQ ID NO: 22571 - DNA, 51 bp, synthetic construct; identical to SEQ ID NO: 7519
  source 1..51: mol_type = other DNA

SEQ ID NO: 22572 - DNA, 51 bp, synthetic construct; identical to SEQ ID NO: 7478
  source 1..51: mol_type = other DNA

SEQ ID NO: 22573 - DNA, 51 bp, synthetic construct; identical to SEQ ID NO: 7519
  source 1..51: mol_type = other DNA

SEQ ID NO: 22574 - DNA, 51 bp, synthetic construct; identical to SEQ ID NO: 7482
  source 1..51: mol_type = other DNA

SEQ ID NO: 22575 - DNA, 51 bp, synthetic construct; identical to SEQ ID NO: 7423
  source 1..51: mol_type = other DNA

SEQ ID NO: 22576 - DNA, 51 bp, synthetic construct; identical to SEQ ID NO: 7468
  source 1..51: mol_type = other DNA

SEQ ID NO: 22577 - DNA, 51 bp, synthetic construct; identical to SEQ ID NO: 7423
  source 1..51: mol_type = other DNA

SEQ ID NO: 22578 - DNA, 51 bp, synthetic construct
  source 1..51: mol_type = other DNA
ttcccatggtaccggcagttccctgggaaaagccctgcactcctgatagcc

SEQ ID NO: 22579 - DNA, 51 bp, synthetic construct; identical to SEQ ID NO: 7423
  source 1..51: mol_type = other DNA

SEQ ID NO: 22580 - DNA, 51 bp, synthetic construct; identical to SEQ ID NO: 7512
  source 1..51: mol_type = other DNA

SEQ ID NO: 22581 - DNA, 51 bp, synthetic construct; identical to SEQ ID NO: 7423
  source 1..51: mol_type = other DNA

SEQ ID NO: 22582 - DNA, 51 bp, synthetic construct; identical to SEQ ID NO: 7468
  source 1..51: mol_type = other DNA

SEQ ID NO: 22583 - DNA, 51 bp, synthetic construct; identical to SEQ ID NO: 7423
  source 1..51: mol_type = other DNA

SEQ ID NO: 22584 - DNA, 51 bp, synthetic construct; identical to SEQ ID NO: 7480
  source 1..51: mol_type = other DNA

SEQ ID NO: 22585 - DNA, 51 bp, synthetic construct; identical to SEQ ID NO: 7423
  source 1..51: mol_type = other DNA

SEQ ID NO: 22586 - DNA, 51 bp, synthetic construct; identical to SEQ ID NO: 8076
  source 1..51: mol_type = other DNA

SEQ ID NO: 22587 - DNA, 51 bp, synthetic construct; identical to SEQ ID NO: 7423
  source 1..51: mol_type = other DNA

SEQ ID NO: 22588 - DNA, 51 bp, synthetic construct; identical to SEQ ID NO: 7512
  source 1..51: mol_type = other DNA

SEQ ID NO: 22589 - DNA, 51 bp, synthetic construct; identical to SEQ ID NO: 7423
  source 1..51: mol_type = other DNA

SEQ ID NO: 22590 - DNA, 51 bp, synthetic construct; identical to SEQ ID NO: 7528
  source 1..51: mol_type = other DNA

SEQ ID NO: 22591 - DNA, 51 bp, synthetic construct; identical to SEQ ID NO: 7423
  source 1..51: mol_type = other DNA

SEQ ID NO: 22592 - DNA, 51 bp, synthetic construct; identical to SEQ ID NO: 7504
  source 1..51: mol_type = other DNA

SEQ ID NO: 22593 - DNA, 51 bp, synthetic construct; identical to SEQ ID NO: 7423
  source 1..51: mol_type = other DNA

SEQ ID NO: 22594 - DNA, 51 bp, synthetic construct; identical to SEQ ID NO: 7422
  source 1..51: mol_type = other DNA

SEQ ID NO: 22595 - DNA, 51 bp, synthetic construct; identical to SEQ ID NO: 7423
  source 1..51: mol_type = other DNA

SEQ ID NO: 22596 - DNA, 51 bp, synthetic construct; identical to SEQ ID NO: 7422
  source 1..51: mol_type = other DNA

SEQ ID NO: 22597 - DNA, 51 bp, synthetic construct; identical to SEQ ID NO: 7423
  source 1..51: mol_type = other DNA

SEQ ID NO: 22598 - DNA, 51 bp, synthetic construct; identical to SEQ ID NO: 7458
  source 1..51: mol_type = other DNA

SEQ ID NO: 22599 - DNA, 51 bp, synthetic construct; identical to SEQ ID NO: 7423
  source 1..51: mol_type = other DNA

SEQ ID NO: 22600 - DNA, 51 bp, synthetic construct; identical to SEQ ID NO: 7608
  source 1..51: mol_type = other DNA

SEQ ID NO: 22601 - DNA, 51 bp, synthetic construct; identical to SEQ ID NO: 7423
  source 1..51: mol_type = other DNA

SEQ ID NO: 22602 - DNA, 51 bp, synthetic construct; identical to SEQ ID NO: 7948
  source 1..51: mol_type = other DNA

SEQ ID NO: 22603 - DNA, 51 bp, synthetic construct; identical to SEQ ID NO: 7423
  source 1..51: mol_type = other DNA

SEQ ID NO: 22604 - DNA, 51 bp, synthetic construct; identical to SEQ ID NO: 7448
  source 1..51: mol_type = other DNA

SEQ ID NO: 22605 - DNA, 51 bp, synthetic construct; identical to SEQ ID NO: 7423
  source 1..51: mol_type = other DNA

SEQ ID NO: 22606 - DNA, 51 bp, synthetic construct; identical to SEQ ID NO: 7544
  source 1..51: mol_type = other DNA

SEQ ID NO: 22607 - DNA, 51 bp, synthetic construct; identical to SEQ ID NO: 7423
  source 1..51: mol_type = other DNA

SEQ ID NO: 22608 - DNA, 51 bp, synthetic construct
  source 1..51: mol_type = other DNA
cttttctggtatgtgcactatctcaatgaatccccttggctactcctgcgg

SEQ ID NO: 22609 - DNA, 51 bp, synthetic construct; identical to SEQ ID NO: 7423
  source 1..51: mol_type = other DNA

SEQ ID NO: 22610 - DNA, 51 bp, synthetic construct; identical to SEQ ID NO: 7458
  source 1..51: mol_type = other DNA

SEQ ID NO: 22611 - DNA, 51 bp, synthetic construct; identical to SEQ ID NO: 7423
  source 1..51: mol_type = other DNA

SEQ ID NO: 22612 - DNA, 51 bp, synthetic construct; identical to SEQ ID NO: 7426
  source 1..51: mol_type = other DNA

SEQ ID NO: 22613 - DNA, 51 bp, synthetic construct; identical to SEQ ID NO: 7423
  source 1..51: mol_type = other DNA

SEQ ID NO: 22614 - DNA, 51 bp, synthetic construct; identical to SEQ ID NO: 7526
  source 1..51: mol_type = other DNA

SEQ ID NO: 22615 - DNA, 51 bp, synthetic construct; identical to SEQ ID NO: 7423
  source 1..51: mol_type = other DNA

SEQ ID NO: 22616 - DNA, 51 bp, synthetic construct; identical to SEQ ID NO: 7426
  source 1..51: mol_type = other DNA

SEQ ID NO: 22617 - DNA, 51 bp, synthetic construct; identical to SEQ ID NO: 7423
  source 1..51: mol_type = other DNA

SEQ ID NO: 22618 - DNA, 51 bp, synthetic construct; identical to SEQ ID NO: 7580
  source 1..51: mol_type = other DNA

SEQ ID NO: 22619 - DNA, 51 bp, synthetic construct; identical to SEQ ID NO: 7423
  source 1..51: mol_type = other DNA

SEQ ID NO: 22620 - DNA, 51 bp, synthetic construct; identical to SEQ ID NO: 7458
  source 1..51: mol_type = other DNA

SEQ ID NO: 22621 - DNA, 51 bp, synthetic construct; identical to SEQ ID NO: 7423
  source 1..51: mol_type = other DNA

SEQ ID NO: 22622 - DNA, 51 bp, synthetic construct; identical to SEQ ID NO: 7492
  source 1..51: mol_type = other DNA

SEQ ID NO: 22623 - DNA, 51 bp, synthetic construct; identical to SEQ ID NO: 7423
  source 1..51: mol_type = other DNA

SEQ ID NO: 22624 - DNA, 51 bp, synthetic construct; identical to SEQ ID NO: 22558
  source 1..51: mol_type = other DNA

SEQ ID NO: 22625 - DNA, 51 bp, synthetic construct; identical to SEQ ID NO: 7423
  source 1..51: mol_type = other DNA

SEQ ID NO: 22626 - DNA, 51 bp, synthetic construct; identical to SEQ ID NO: 7676
  source 1..51: mol_type = other DNA

SEQ ID NO: 22627 - DNA, 51 bp, synthetic construct; identical to SEQ ID NO: 7423
  source 1..51: mol_type = other DNA

SEQ ID NO: 22628 - DNA, 51 bp, synthetic construct; identical to SEQ ID NO: 7432
  source 1..51: mol_type = other DNA

SEQ ID NO: 22629 - DNA, 51 bp, synthetic construct; identical to SEQ ID NO: 7423
  source 1..51: mol_type = other DNA

SEQ ID NO: 22630 - DNA, 51 bp, synthetic construct; identical to SEQ ID NO: 8498
  source 1..51: mol_type = other DNA

SEQ ID NO: 22631 - DNA, 51 bp, synthetic construct; identical to SEQ ID NO: 7423
  source 1..51: mol_type = other DNA

SEQ ID NO: 22632 - DNA, 51 bp, synthetic construct; identical to SEQ ID NO: 7432
  source 1..51: mol_type = other DNA

SEQ ID NO: 22633 - DNA, 51 bp, synthetic construct; identical to SEQ ID NO: 7423
  source 1..51: mol_type = other DNA

SEQ ID NO: 22634 - DNA, 51 bp, synthetic construct; identical to SEQ ID NO: 7876
  source 1..51: mol_type = other DNA

SEQ ID NO: 22635 - DNA, 51 bp, synthetic construct; identical to SEQ ID NO: 7423
  source 1..51: mol_type = other DNA

SEQ ID NO: 22636 - DNA, 51 bp, synthetic construct; identical to SEQ ID NO: 7480
  source 1..51: mol_type = other DNA

SEQ ID NO: 22637 - DNA, 51 bp, synthetic construct; identical to SEQ ID NO: 7423
  source 1..51: mol_type = other DNA

SEQ ID NO: 22638 - DNA, 51 bp, synthetic construct; identical to SEQ ID NO: 7480
  source 1..51: mol_type = other DNA

SEQ ID NO: 22639 - DNA, 51 bp, synthetic construct; identical to SEQ ID NO: 7423
  source 1..51: mol_type = other DNA

SEQ ID NO: 22640 - DNA, 51 bp, synthetic construct; identical to SEQ ID NO: 7504
  source 1..51: mol_type = other DNA

SEQ ID NO: 22641 - DNA, 51 bp, synthetic construct; identical to SEQ ID NO: 7423
  source 1..51: mol_type = other DNA

SEQ ID NO: 22642 - DNA, 51 bp, synthetic construct; identical to SEQ ID NO: 7426
  source 1..51: mol_type = other DNA

SEQ ID NO: 22643 - DNA, 51 bp, synthetic construct; identical to SEQ ID NO: 7423
  source 1..51: mol_type = other DNA

SEQ ID NO: 22644 - DNA, 51 bp, synthetic construct; identical to SEQ ID NO: 7430
  source 1..51: mol_type = other DNA

SEQ ID NO: 22645 - DNA, 51 bp, synthetic construct; identical to SEQ ID NO: 7423
  source 1..51: mol_type = other DNA

SEQ ID NO: 22646 - DNA, 51 bp, synthetic construct; identical to SEQ ID NO: 7428
  source 1..51: mol_type = other DNA

SEQ ID NO: 22647 - DNA, 51 bp, synthetic construct; identical to SEQ ID NO: 7423
  source 1..51: mol_type = other DNA

SEQ ID NO: 22648 - DNA, 51 bp, synthetic construct; identical to SEQ ID NO: 7488
  source 1..51: mol_type = other DNA

SEQ ID NO: 22649 - DNA, 51 bp, synthetic construct; identical to SEQ ID NO: 7423
  source 1..51: mol_type = other DNA

SEQ ID NO: 22650 - DNA, 51 bp, synthetic construct; identical to SEQ ID NO: 7488
  source 1..51: mol_type = other DNA

SEQ ID NO: 22651 - DNA, 51 bp, synthetic construct; identical to SEQ ID NO: 7423
  source 1..51: mol_type = other DNA

SEQ ID NO: 22652 - DNA, 51 bp, synthetic construct; identical to SEQ ID NO: 7742
  source 1..51: mol_type = other DNA

SEQ ID NO: 22653 - DNA, 51 bp, synthetic construct; identical to SEQ ID NO: 7423
  source 1..51: mol_type = other DNA

SEQ ID NO: 22654 - DNA, 51 bp, synthetic construct; identical to SEQ ID NO: 7814
  source 1..51: mol_type = other DNA

SEQ ID NO: 22655 - DNA, 51 bp, synthetic construct; identical to SEQ ID NO: 7423
  source 1..51: mol_type = other DNA

SEQ ID NO: 22656 - DNA, 51 bp, synthetic construct; identical to SEQ ID NO: 7426
  source 1..51: mol_type = other DNA

SEQ ID NO: 22657 - DNA, 51 bp, synthetic construct; identical to SEQ ID NO: 7423
  source 1..51: mol_type = other DNA

SEQ ID NO: 22658 - DNA, 51 bp, synthetic construct; identical to SEQ ID NO: 7426
  source 1..51: mol_type = other DNA

SEQ ID NO: 22659 - DNA, 51 bp, synthetic construct; identical to SEQ ID NO: 7423
  source 1..51: mol_type = other DNA

SEQ ID NO: 22660 - DNA, 51 bp, synthetic construct; identical to SEQ ID NO: 8178
  source 1..51: mol_type = other DNA

SEQ ID NO: 22661 - DNA, 51 bp, synthetic construct; identical to SEQ ID NO: 7423
  source 1..51: mol_type = other DNA

SEQ ID NO: 22662 - DNA, 51 bp, synthetic construct; identical to SEQ ID NO: 22578
  source 1..51: mol_type = other DNA

SEQ ID NO: 22663 - DNA, 51 bp, synthetic construct; identical to SEQ ID NO: 7423
  source 1..51: mol_type = other DNA

SEQ ID NO: 22664 - DNA, 51 bp, synthetic construct; identical to SEQ ID NO: 7448
  source 1..51: mol_type = other DNA

SEQ ID NO: 22665 - DNA, 51 bp, synthetic construct; identical to SEQ ID NO: 7423
  source 1..51: mol_type = other DNA

SEQ ID NO: 22666 - DNA, 51 bp, synthetic construct; identical to SEQ ID NO: 7496
  source 1..51: mol_type = other DNA

SEQ ID NO: 22667 - DNA, 51 bp, synthetic construct; identical to SEQ ID NO: 7423
  source 1..51: mol_type = other DNA

SEQ ID NO: 22668 - DNA, 51 bp, synthetic construct; identical to SEQ ID NO: 7628
  source 1..51: mol_type = other DNA

SEQ ID NO: 22669 - DNA, 51 bp, synthetic construct; identical to SEQ ID NO: 7423
  source 1..51: mol_type = other DNA

SEQ ID NO: 22670 - DNA, 51 bp, synthetic construct; identical to SEQ ID NO: 7544
  source 1..51: mol_type = other DNA

SEQ ID NO: 22671 - DNA, 51 bp, synthetic construct; identical to SEQ ID NO: 7423
  source 1..51: mol_type = other DNA

SEQ ID NO: 22672 - DNA, 51 bp, synthetic construct; identical to SEQ ID NO: 7428
  source 1..51: mol_type = other DNA

SEQ ID NO: 22673 - DNA, 51 bp, synthetic construct; identical to SEQ ID NO: 7423
  source 1..51: mol_type = other DNA

SEQ ID NO: 22674 - DNA, 51 bp, synthetic construct; identical to SEQ ID NO: 8194
  source 1..51: mol_type = other DNA

SEQ ID NO: 22675 - DNA, 51 bp, synthetic construct; identical to SEQ ID NO: 7423
  source 1..51: mol_type = other DNA

SEQ ID NO: 22676 - DNA, 51 bp, synthetic construct; identical to SEQ ID NO: 7528
  source 1..51: mol_type = other DNA

SEQ ID NO: 22677 - DNA, 51 bp, synthetic construct; identical to SEQ ID NO: 7423
  source 1..51: mol_type = other DNA

SEQ ID NO: 22678 - DNA, 51 bp, synthetic construct; identical to SEQ ID NO: 7970
  source 1..51: mol_type = other DNA

SEQ ID NO: 22679 - DNA, 51 bp, synthetic construct; identical to SEQ ID NO: 7423
  source 1..51: mol_type = other DNA

SEQ ID NO: 22680 - DNA, 51 bp, synthetic construct; identical to SEQ ID NO: 7672
  source 1..51: mol_type = other DNA

SEQ ID NO: 22681 - DNA, 51 bp, synthetic construct; identical to SEQ ID NO: 7423
  source 1..51: mol_type = other DNA

SEQ ID NO: 22682 - DNA, 51 bp, synthetic construct; identical to SEQ ID NO: 7426
  source 1..51: mol_type = other DNA

SEQ ID NO: 22683 - DNA, 51 bp, synthetic construct; identical to SEQ ID NO: 7457
  source 1..51: mol_type = other DNA

SEQ ID NO: 22684 - DNA, 51 bp, synthetic construct; identical to SEQ ID NO: 7448
  source 1..51: mol_type = other DNA

SEQ ID NO: 22685 - DNA, 51 bp, synthetic construct; identical to SEQ ID NO: 7457
  source 1..51: mol_type = other DNA

SEQ ID NO: 22686 - DNA, 51 bp, synthetic construct; identical to SEQ ID NO: 7432
  source 1..51: mol_type = other DNA

SEQ ID NO: 22687 - DNA, 51 bp, synthetic construct; identical to SEQ ID NO: 7457
  source 1..51: mol_type = other DNA

SEQ ID NO: 22688 - DNA, 51 bp, synthetic construct; identical to SEQ ID NO: 7422
  source 1..51: mol_type = other DNA

SEQ ID NO: 22689 - DNA, 51 bp, synthetic construct; identical to SEQ ID NO: 7457
  source 1..51: mol_type = other DNA

SEQ ID NO: 22690 - DNA, 51 bp, synthetic construct; identical to SEQ ID NO: 7426
  source 1..51: mol_type = other DNA

SEQ ID NO: 22691 - DNA, 51 bp, synthetic construct; identical to SEQ ID NO: 7457
  source 1..51: mol_type = other DNA

SEQ ID NO: 22692 - DNA, 51 bp, synthetic construct; identical to SEQ ID NO: 22558
  source 1..51: mol_type = other DNA

SEQ ID NO: 22693 - DNA, 51 bp, synthetic construct; identical to SEQ ID NO: 7457
  source 1..51: mol_type = other DNA

SEQ ID NO: 22694 - DNA, 51 bp, synthetic construct; identical to SEQ ID NO: 7480
  source 1..51: mol_type = other DNA

SEQ ID NO: 22695 - DNA, 51 bp, synthetic construct; identical to SEQ ID NO: 7457
  source 1..51: mol_type = other DNA

SEQ ID NO: 22696 - DNA, 51 bp, synthetic construct; identical to SEQ ID NO: 7426
  source 1..51: mol_type = other DNA

SEQ ID NO: 22697 - DNA, 51 bp, synthetic construct; identical to SEQ ID NO: 7457
  source 1..51: mol_type = other DNA

SEQ ID NO: 22698 - DNA, 51 bp, synthetic construct; identical to SEQ ID NO: 7426
  source 1..51: mol_type = other DNA

SEQ ID NO: 22699 - DNA, 51 bp, synthetic construct; identical to SEQ ID NO: 7457
  source 1..51: mol_type = other DNA

SEQ ID NO: 22700 - DNA, 51 bp, synthetic construct; identical to SEQ ID NO: 7634
  source 1..51: mol_type = other DNA

SEQ ID NO: 22701 - DNA, 51 bp, synthetic construct; identical to SEQ ID NO: 7457
  source 1..51: mol_type = other DNA

SEQ ID NO: 22702 - DNA, 51 bp, synthetic construct; identical to SEQ ID NO: 7468
  source 1..51: mol_type = other DNA

SEQ ID NO: 22703 - DNA, 51 bp, synthetic construct; identical to SEQ ID NO: 7457
  source 1..51: mol_type = other DNA

SEQ ID NO: 22704 - DNA, 51 bp, synthetic construct; identical to SEQ ID NO: 7432
  source 1..51: mol_type = other DNA

SEQ ID NO: 22705 - DNA, 51 bp, synthetic construct; identical to SEQ ID NO: 7457
  source 1..51: mol_type = other DNA

SEQ ID NO: 22706 - DNA, 51 bp, synthetic construct; identical to SEQ ID NO: 7536
  source 1..51: mol_type = other DNA

SEQ ID NO: 22707 - DNA, 51 bp, synthetic construct; identical to SEQ ID NO: 7457
  source 1..51: mol_type = other DNA

SEQ ID NO: 22708 - DNA, 51 bp, synthetic construct; identical to SEQ ID NO: 7672
  source 1..51: mol_type = other DNA

SEQ ID NO: 22709 - DNA, 51 bp, synthetic construct; identical to SEQ ID NO: 7457
  source 1..51: mol_type = other DNA

SEQ ID NO: 22710 - DNA, 51 bp, synthetic construct; identical to SEQ ID NO: 7526
  source 1..51: mol_type = other DNA

SEQ ID NO: 22711 - DNA, 51 bp, synthetic construct; identical to SEQ ID NO: 7457
  source 1..51: mol_type = other DNA

SEQ ID NO: 22712 - DNA, 51 bp, synthetic construct; identical to SEQ ID NO: 7512
  source 1..51: mol_type = other DNA

SEQ ID NO: 22713 - DNA, 51 bp, synthetic construct; identical to SEQ ID NO: 7457
  source 1..51: mol_type = other DNA

SEQ ID NO: 22714 - DNA, 51 bp, synthetic construct; identical to SEQ ID NO: 7480
  source 1..51: mol_type = other DNA

SEQ ID NO: 22715 - DNA, 51 bp, synthetic construct; identical to SEQ ID NO: 7457
  source 1..51: mol_type = other DNA

SEQ ID NO: 22716 - DNA, 51 bp, synthetic construct; identical to SEQ ID NO: 7534
  source 1..51: mol_type = other DNA

SEQ ID NO: 22717 - DNA, 51 bp, synthetic construct; identical to SEQ ID NO: 7457
  source 1..51: mol_type = other DNA

SEQ ID NO: 22718 - DNA, 51 bp, synthetic construct; identical to SEQ ID NO: 7426
  source 1..51: mol_type = other DNA

SEQ ID NO: 22719 - DNA, 51 bp, synthetic construct; identical to SEQ ID NO: 7457
  source 1..51: mol_type = other DNA

SEQ ID NO: 22720 - DNA, 51 bp, synthetic construct; identical to SEQ ID NO: 7552
  source 1..51: mol_type = other DNA

SEQ ID NO: 22721 - DNA, 51 bp, synthetic construct; identical to SEQ ID NO: 7457
  source 1..51: mol_type = other DNA

SEQ ID NO: 22722 - DNA, 51 bp, synthetic construct; identical to SEQ ID NO: 7520
  source 1..51: mol_type = other DNA

SEQ ID NO: 22723 - DNA, 51 bp, synthetic construct; identical to SEQ ID NO: 7457
  source 1..51: mol_type = other DNA

SEQ ID NO: 22724 - DNA, 51 bp, synthetic construct; identical to SEQ ID NO: 7428
  source 1..51: mol_type = other DNA

SEQ ID NO: 22725 - DNA, 51 bp, synthetic construct; identical to SEQ ID NO: 7457
  source 1..51: mol_type = other DNA

SEQ ID NO: 22726 - DNA, 51 bp, synthetic construct; identical to SEQ ID NO: 7504
  source 1..51: mol_type = other DNA

SEQ ID NO: 22727 - DNA, 51 bp, synthetic construct; identical to SEQ ID NO: 7457
  source 1..51: mol_type = other DNA

SEQ ID NO: 22728 - DNA, 51 bp, synthetic construct; identical to SEQ ID NO: 7482
  source 1..51: mol_type = other DNA

SEQ ID NO: 22729 - DNA, 51 bp, synthetic construct; identical to SEQ ID NO: 7457
  source 1..51: mol_type = other DNA

SEQ ID NO: 22730 - DNA, 51 bp, synthetic construct; identical to SEQ ID NO: 7480
  source 1..51: mol_type = other DNA

SEQ ID NO: 22731 - DNA, 51 bp, synthetic construct; identical to SEQ ID NO: 7457
  source 1..51: mol_type = other DNA

SEQ ID NO: 22732 - DNA, 51 bp, synthetic construct; identical to SEQ ID NO: 7480
  source 1..51: mol_type = other DNA

SEQ ID NO: 22733 - DNA, 51 bp, synthetic construct; identical to SEQ ID NO: 7457
  source 1..51: mol_type = other DNA

SEQ ID NO: 22734 - DNA, 51 bp, synthetic construct; identical to SEQ ID NO: 7482
  source 1..51: mol_type = other DNA

SEQ ID NO: 22735 - DNA, 51 bp, synthetic construct; identical to SEQ ID NO: 7457
  source 1..51: mol_type = other DNA

SEQ ID NO: 22736 - DNA, 51 bp, synthetic construct; identical to SEQ ID NO: 7426
  source 1..51: mol_type = other DNA

SEQ ID NO: 22737 - DNA, 51 bp, synthetic construct; identical to SEQ ID NO: 7457
  source 1..51: mol_type = other DNA

SEQ ID NO: 22738 - DNA, 51 bp, synthetic construct; identical to SEQ ID NO: 22578
  source 1..51: mol_type = other DNA

SEQ ID NO: 22739 - DNA, 51 bp, synthetic construct; identical to SEQ ID NO: 7457
  source 1..51: mol_type = other DNA

SEQ ID NO: 22740 - DNA, 51 bp, synthetic construct; identical to SEQ ID NO: 7448
  source 1..51: mol_type = other DNA

SEQ ID NO: 22741 - DNA, 51 bp, synthetic construct; identical to SEQ ID NO: 7457
  source 1..51: mol_type = other DNA

SEQ ID NO: 22742 - DNA, 51 bp, synthetic construct; identical to SEQ ID NO: 7660
  source 1..51: mol_type = other DNA

SEQ ID NO: 22743 - DNA, 51 bp, synthetic construct; identical to SEQ ID NO: 7457
  source 1..51: mol_type = other DNA

SEQ ID NO: 22744 - DNA, 51 bp, synthetic construct; identical to SEQ ID NO: 7426
  source 1..51: mol_type = other DNA

SEQ ID NO: 22745 - DNA, 51 bp, synthetic construct; identical to SEQ ID NO: 7457
  source 1..51: mol_type = other DNA

SEQ ID NO: 22746 - DNA, 51 bp, synthetic construct; identical to SEQ ID NO: 7448
  source 1..51: mol_type = other DNA

SEQ ID NO: 22747 - DNA, 51 bp, synthetic construct; identical to SEQ ID NO: 7457
  source 1..51: mol_type = other DNA

SEQ ID NO: 22748 - DNA, 51 bp, synthetic construct; identical to SEQ ID NO: 7424
  source 1..51: mol_type = other DNA

SEQ ID NO: 22749 - DNA, 51 bp, synthetic construct; identical to SEQ ID NO: 7457
  source 1..51: mol_type = other DNA

SEQ ID NO: 22750 - DNA, 51 bp, synthetic construct; identical to SEQ ID NO: 7496
  source 1..51: mol_type = other DNA

SEQ ID NO: 22751 - DNA, 51 bp, synthetic construct; identical to SEQ ID NO: 7457
  source 1..51: mol_type = other DNA

SEQ ID NO: 22752 - DNA, 51 bp, synthetic construct; identical to SEQ ID NO: 7528
  source 1..51: mol_type = other DNA

SEQ ID NO: 22753 - DNA, 51 bp, synthetic construct; identical to SEQ ID NO: 7457
  source 1..51: mol_type = other DNA

SEQ ID NO: 22754 - DNA, 51 bp, synthetic construct; identical to SEQ ID NO: 7534
  source 1..51: mol_type = other DNA

SEQ ID NO: 22755 - DNA, 51 bp, synthetic construct; identical to SEQ ID NO: 7457
  source 1..51: mol_type = other DNA

SEQ ID NO: 22756 - DNA, 51 bp, synthetic construct; identical to SEQ ID NO: 7544
  source 1..51: mol_type = other DNA

SEQ ID NO: 22757 - DNA, 51 bp, synthetic construct; identical to SEQ ID NO: 7427
  source 1..51: mol_type = other DNA

SEQ ID NO: 22758 - DNA, 51 bp, synthetic construct; identical to SEQ ID NO: 7444
  source 1..51: mol_type = other DNA

SEQ ID NO: 22759 - DNA, 51 bp, synthetic construct; identical to SEQ ID NO: 7427
  source 1..51: mol_type = other DNA

SEQ ID NO: 22760 - DNA, 51 bp, synthetic construct; identical to SEQ ID NO: 7488
  source 1..51: mol_type = other DNA

SEQ ID NO: 22761 - DNA, 51 bp, synthetic construct; identical to SEQ ID NO: 7427
  source 1..51: mol_type = other DNA

SEQ ID NO: 22762 - DNA, 51 bp, synthetic construct; identical to SEQ ID NO: 7944
  source 1..51: mol_type = other DNA

SEQ ID NO: 22763 - DNA, 51 bp, synthetic construct; identical to SEQ ID NO: 7427
  source 1..51: mol_type = other DNA

SEQ ID NO: 22764 - DNA, 51 bp, synthetic construct; identical to SEQ ID NO: 7742
  source 1..51: mol_type = other DNA

SEQ ID NO: 22765 - DNA, 51 bp, synthetic construct; identical to SEQ ID NO: 7427
  source 1..51: mol_type = other DNA

SEQ ID NO: 22766 - DNA, 51 bp, synthetic construct; identical to SEQ ID NO: 7426
  source 1..51: mol_type = other DNA

SEQ ID NO: 22767 - DNA, 51 bp, synthetic construct; identical to SEQ ID NO: 7427
  source 1..51: mol_type = other DNA

SEQ ID NO: 22768 - DNA, 51 bp, synthetic construct; identical to SEQ ID NO: 7468
  source 1..51: mol_type = other DNA

SEQ ID NO: 22769 - DNA, 51 bp, synthetic construct; identical to SEQ ID NO: 7427
  source 1..51: mol_type = other DNA

SEQ ID NO: 22770 - DNA, 51 bp, synthetic construct; identical to SEQ ID NO: 7526
  source 1..51: mol_type = other DNA

SEQ ID NO: 22771 - DNA, 51 bp, synthetic construct; identical to SEQ ID NO: 7427
  source 1..51: mol_type = other DNA

SEQ ID NO: 22772 - DNA, 51 bp, synthetic construct; identical to SEQ ID NO: 7468
  source 1..51: mol_type = other DNA

SEQ ID NO: 22773 - DNA, 51 bp, synthetic construct; identical to SEQ ID NO: 7427
  source 1..51: mol_type = other DNA

SEQ ID NO: 22774 - DNA, 51 bp, synthetic construct; identical to SEQ ID NO: 7426
  source 1..51: mol_type = other DNA

SEQ ID NO: 22775 - DNA, 51 bp, synthetic construct; identical to SEQ ID NO: 7427
  source 1..51: mol_type = other DNA

SEQ ID NO: 22776 - DNA, 51 bp, synthetic construct; identical to SEQ ID NO: 7432
  source 1..51: mol_type = other DNA

SEQ ID NO: 22777 - DNA, 51 bp, synthetic construct; identical to SEQ ID NO: 7427
  source 1..51: mol_type = other DNA

SEQ ID NO: 22778 - DNA, 51 bp, synthetic construct; identical to SEQ ID NO: 7428
  source 1..51: mol_type = other DNA

SEQ ID NO: 22779 - DNA, 51 bp, synthetic construct; identical to SEQ ID NO: 7427
  source 1..51: mol_type = other DNA

SEQ ID NO: 22780 - DNA, 51 bp, synthetic construct; identical to SEQ ID NO: 7530
  source 1..51: mol_type = other DNA

SEQ ID NO: 22781 - DNA, 51 bp, synthetic construct; identical to SEQ ID NO: 7427
  source 1..51: mol_type = other DNA

SEQ ID NO: 22782 - DNA, 51 bp, synthetic construct; identical to SEQ ID NO: 7438
  source 1..51: mol_type = other DNA

SEQ ID NO: 22783 - DNA, 51 bp, synthetic construct; identical to SEQ ID NO: 7427
  source 1..51: mol_type = other DNA

SEQ ID NO: 22784 - DNA, 51 bp, synthetic construct; identical to SEQ ID NO: 7544
  source 1..51: mol_type = other DNA

SEQ ID NO: 22785 - DNA, 51 bp, synthetic construct; identical to SEQ ID NO: 7427
  source 1..51: mol_type = other DNA

SEQ ID NO: 22786 - DNA, 51 bp, synthetic construct; identical to SEQ ID NO: 7580
  source 1..51: mol_type = other DNA

SEQ ID NO: 22787 - DNA, 51 bp, synthetic construct; identical to SEQ ID NO: 7427
  source 1..51: mol_type = other DNA

SEQ ID NO: 22788 - DNA, 51 bp, synthetic construct; identical to SEQ ID NO: 7422
  source 1..51: mol_type = other DNA

SEQ ID NO: 22789 - DNA, 51 bp, synthetic construct; identical to SEQ ID NO: 7427
  source 1..51: mol_type = other DNA

SEQ ID NO: 22790 - DNA, 51 bp, synthetic construct; identical to SEQ ID NO: 7426
  source 1..51: mol_type = other DNA

SEQ ID NO: 22791 - DNA, 51 bp, synthetic construct; identical to SEQ ID NO: 7427
  source 1..51: mol_type = other DNA

SEQ ID NO: 22792 - DNA, 51 bp, synthetic construct; identical to SEQ ID NO: 7580
  source 1..51: mol_type = other DNA

SEQ ID NO: 22793 - DNA, 51 bp, synthetic construct; identical to SEQ ID NO: 7427
  source 1..51: mol_type = other DNA

SEQ ID NO: 22794 - DNA, 51 bp, synthetic construct; identical to SEQ ID NO: 7426
  source 1..51: mol_type = other DNA

SEQ ID NO: 22795 - DNA, 51 bp, synthetic construct; identical to SEQ ID NO: 7427
  source 1..51: mol_type = other DNA

SEQ ID NO: 22796 - DNA, 51 bp, synthetic construct; identical to SEQ ID NO: 7426
  source 1..51: mol_type = other DNA

SEQ ID NO: 22797 - DNA, 51 bp, synthetic construct; identical to SEQ ID NO: 7427
  source 1..51: mol_type = other DNA

SEQ ID NO: 22798 - DNA, 51 bp, synthetic construct; identical to SEQ ID NO: 7498
  source 1..51: mol_type = other DNA

SEQ ID NO: 22799 - DNA, 51 bp, synthetic construct; identical to SEQ ID NO: 7427
  source 1..51: mol_type = other DNA

SEQ ID NO: 22800 - DNA, 51 bp, synthetic construct; identical to SEQ ID NO: 7678
  source 1..51: mol_type = other DNA

SEQ ID NO: 22801 - DNA, 51 bp, synthetic construct; identical to SEQ ID NO: 7427
  source 1..51: mol_type = other DNA

SEQ ID NO: 22802 - DNA, 51 bp, synthetic construct; identical to SEQ ID NO: 8498
  source 1..51: mol_type = other DNA

SEQ ID NO: 22803 - DNA, 51 bp, synthetic construct; identical to SEQ ID NO: 7427
  source 1..51: mol_type = other DNA

SEQ ID NO: 22804 - DNA, 51 bp, synthetic construct; identical to SEQ ID NO: 7426
  source 1..51: mol_type = other DNA

SEQ ID NO: 22805 - DNA, 51 bp, synthetic construct; identical to SEQ ID NO: 7427
  source 1..51: mol_type = other DNA

SEQ ID NO: 22806 - DNA, 51 bp, synthetic construct; identical to SEQ ID NO: 7580
  source 1..51: mol_type = other DNA

SEQ ID NO: 22807 - DNA, 51 bp, synthetic construct; identical to SEQ ID NO: 7427
  source 1..51: mol_type = other DNA

SEQ ID NO: 22808 - DNA, 51 bp, synthetic construct; identical to SEQ ID NO: 7426
  source 1..51: mol_type = other DNA

SEQ ID NO: 22809 - DNA, 51 bp, synthetic construct; identical to SEQ ID NO: 7427
  source 1..51: mol_type = other DNA

SEQ ID NO: 22810 - DNA, 51 bp, synthetic construct; identical to SEQ ID NO: 7430
  source 1..51: mol_type = other DNA

SEQ ID NO: 22811 - DNA, 51 bp, synthetic construct; identical to SEQ ID NO: 7427
  source 1..51: mol_type = other DNA

SEQ ID NO: 22812 - DNA, 51 bp, synthetic construct; identical to SEQ ID NO: 7498
  source 1..51: mol_type = other DNA

SEQ ID NO: 22813 - DNA, 51 bp, synthetic construct; identical to SEQ ID NO: 7427
  source 1..51: mol_type = other DNA

SEQ ID NO: 22814 - DNA, 51 bp, synthetic construct; identical to SEQ ID NO: 7426
  source 1..51: mol_type = other DNA

SEQ ID NO: 22815 - DNA, 51 bp, synthetic construct; identical to SEQ ID NO: 7427
  source 1..51: mol_type = other DNA

SEQ ID NO: 22816 - DNA, 51 bp, synthetic construct; identical to SEQ ID NO: 7700
  source 1..51: mol_type = other DNA

SEQ ID NO: 22817 - DNA, 51 bp, synthetic construct; identical to SEQ ID NO: 7427
  source 1..51: mol_type = other DNA

SEQ ID NO: 22818 - DNA, 51 bp, synthetic construct; identical to SEQ ID NO: 7970
  source 1..51: mol_type = other DNA

SEQ ID NO: 22819 - DNA, 51 bp, synthetic construct; identical to SEQ ID NO: 7427
  source 1..51: mol_type = other DNA

SEQ ID NO: 22820 - DNA, 51 bp, synthetic construct; identical to SEQ ID NO: 7426
  source 1..51: mol_type = other DNA

SEQ ID NO: 22821 - DNA, 51 bp, synthetic construct; identical to SEQ ID NO: 7719
  source 1..51: mol_type = other DNA

SEQ ID NO: 22822 - DNA, 51 bp, synthetic construct; identical to SEQ ID NO: 7814
  source 1..51: mol_type = other DNA

SEQ ID NO: 22823 - DNA, 51 bp, synthetic construct; identical to SEQ ID NO: 7719
  source 1..51: mol_type = other DNA

SEQ ID NO: 22824 - DNA, 51 bp, synthetic construct; identical to SEQ ID NO: 7480
  source 1..51: mol_type = other DNA

SEQ ID NO: 22825 - DNA, 51 bp, synthetic construct; identical to SEQ ID NO: 7719
  source 1..51: mol_type = other DNA

SEQ ID NO: 22826 - DNA, 51 bp, synthetic construct; identical to SEQ ID NO: 7730
  source 1..51: mol_type = other DNA

SEQ ID NO: 22827 - DNA, 51 bp, synthetic construct; identical to SEQ ID NO: 7719
  source 1..51: mol_type = other DNA

SEQ ID NO: 22828 - DNA, 51 bp, synthetic construct; identical to SEQ ID NO: 7678
  source 1..51: mol_type = other DNA

SEQ ID NO: 22829 - DNA, 51 bp, synthetic construct; identical to SEQ ID NO: 7719
  source 1..51: mol_type = other DNA

SEQ ID NO: 22830 - DNA, 51 bp, synthetic construct; identical to SEQ ID NO: 7426
  source 1..51: mol_type = other DNA

SEQ ID NO: 22831 - DNA, 51 bp, synthetic construct; identical to SEQ ID NO: 7719
  source 1..51: mol_type = other DNA

SEQ ID NO: 22832 - DNA, 51 bp, synthetic construct; identical to SEQ ID NO: 7480
  source 1..51: mol_type = other DNA

SEQ ID NO: 22833 - DNA, 51 bp, synthetic construct; identical to SEQ ID NO: 7719
  source 1..51: mol_type = other DNA

SEQ ID NO: 22834 - DNA, 51 bp, synthetic construct; identical to SEQ ID NO: 7480
  source 1..51: mol_type = other DNA

SEQ ID NO: 22835 - DNA, 51 bp, synthetic construct; identical to SEQ ID NO: 7719
  source 1..51: mol_type = other DNA

SEQ ID NO: 22836 - DNA, 51 bp, synthetic construct; identical to SEQ ID NO: 7478
  source 1..51: mol_type = other DNA

SEQ ID NO: 22837 - DNA, 51 bp, synthetic construct; identical to SEQ ID NO: 8659
  source 1..51: mol_type = other DNA

SEQ ID NO: 22838 - DNA, 51 bp, synthetic construct; identical to SEQ ID NO: 7426
  source 1..51: mol_type = other DNA

SEQ ID NO: 22839 - DNA, 51 bp, synthetic construct; identical to SEQ ID NO: 8659
  source 1..51: mol_type = other DNA

SEQ ID NO: 22840 - DNA, 51 bp, synthetic construct; identical to SEQ ID NO: 7426
  source 1..51: mol_type = other DNA

SEQ ID NO: 22841 - DNA, 51 bp, synthetic construct; identical to SEQ ID NO: 7455
  source 1..51: mol_type = other DNA

SEQ ID NO: 22842 - DNA, 51 bp, synthetic construct; identical to SEQ ID NO: 7448
  source 1..51: mol_type = other DNA

SEQ ID NO: 22843 - DNA, 51 bp, synthetic construct; identical to SEQ ID NO: 7455
  source 1..51: mol_type = other DNA

SEQ ID NO: 22844 - DNA, 51 bp, synthetic construct; identical to SEQ ID NO: 7742
  source 1..51: mol_type = other DNA

SEQ ID NO: 22845 - DNA, 51 bp, synthetic construct; identical to SEQ ID NO: 7455
  source 1..51: mol_type = other DNA

SEQ ID NO: 22846 - DNA, 51 bp, synthetic construct; identical to SEQ ID NO: 7428
  source 1..51: mol_type = other DNA

SEQ ID NO: 22847 - DNA, 51 bp, synthetic construct; identical to SEQ ID NO: 7455
  source 1..51: mol_type = other DNA

SEQ ID NO: 22848 - DNA, 51 bp, synthetic construct; identical to SEQ ID NO: 7492
  source 1..51: mol_type = other DNA

SEQ ID NO: 22849 - DNA, 51 bp, synthetic construct; identical to SEQ ID NO: 7455
  source 1..51: mol_type = other DNA

SEQ ID NO: 22850 - DNA, 51 bp, synthetic construct; identical to SEQ ID NO: 7520
  source 1..51: mol_type = other DNA

SEQ ID NO: 22851 - DNA, 51 bp, synthetic construct; identical to SEQ ID NO: 7455
  source 1..51: mol_type = other DNA

SEQ ID NO: 22852 - DNA, 51 bp, synthetic construct; identical to SEQ ID NO: 7634
  source 1..51: mol_type = other DNA

SEQ ID NO: 22853 - DNA, 51 bp, synthetic construct; identical to SEQ ID NO: 7455
  source 1..51: mol_type = other DNA

SEQ ID NO: 22854 - DNA, 51 bp, synthetic construct; identical to SEQ ID NO: 7442
  source 1..51: mol_type = other DNA

SEQ ID NO: 22855 - DNA, 51 bp, synthetic construct; identical to SEQ ID NO: 7455
  source 1..51: mol_type = other DNA

SEQ ID NO: 22856 - DNA, 51 bp, synthetic construct; identical to SEQ ID NO: 7528
  source 1..51: mol_type = other DNA

SEQ ID NO: 22857 - DNA, 51 bp, synthetic construct; identical to SEQ ID NO: 7455
  source 1..51: mol_type = other DNA

SEQ ID NO: 22858 - DNA, 51 bp, synthetic construct; identical to SEQ ID NO: 7426
  source 1..51: mol_type = other DNA

SEQ ID NO: 22859 - DNA, 51 bp, synthetic construct; identical to SEQ ID NO: 7511
  source 1..51: mol_type = other DNA

SEQ ID NO: 22860 - DNA, 51 bp, synthetic construct; identical to SEQ ID NO: 7458
  source 1..51: mol_type = other DNA

SEQ ID NO: 22861 - DNA, 51 bp, synthetic construct; identical to SEQ ID NO: 7511
  source 1..51: mol_type = other DNA

SEQ ID NO: 22862 - DNA, 51 bp, synthetic construct; identical to SEQ ID NO: 7432
  source 1..51: mol_type = other DNA

SEQ ID NO: 22863 - DNA, 51 bp, synthetic construct; identical to SEQ ID NO: 7511
  source 1..51: mol_type = other DNA

SEQ ID NO: 22864 - DNA, 51 bp, synthetic construct; identical to SEQ ID NO: 7500
  source 1..51: mol_type = other DNA

SEQ ID NO: 22865 - DNA, 51 bp, synthetic construct; identical to SEQ ID NO: 7447
  source 1..51: mol_type = other DNA

SEQ ID NO: 22866 - DNA, 51 bp, synthetic construct; identical to SEQ ID NO: 7512
  source 1..51: mol_type = other DNA

SEQ ID NO: 22867 - DNA, 51 bp, synthetic construct; identical to SEQ ID NO: 7447
  source 1..51: mol_type = other DNA

SEQ ID NO: 22868 - DNA, 51 bp, synthetic construct; identical to SEQ ID NO: 7676
  source 1..51: mol_type = other DNA

SEQ ID NO: 22869 - DNA, 51 bp, synthetic construct; identical to SEQ ID NO: 7447
  source 1..51: mol_type = other DNA

SEQ ID NO: 22870 - DNA, 51 bp, synthetic construct; identical to SEQ ID NO: 7448
  source 1..51: mol_type = other DNA

SEQ ID NO: 22871 - DNA, 51 bp, synthetic construct; identical to SEQ ID NO: 7447
  source 1..51: mol_type = other DNA

SEQ ID NO: 22872 - DNA, 51 bp, synthetic construct; identical to SEQ ID NO: 7480
  source 1..51: mol_type = other DNA

SEQ ID NO: 22873 - DNA, 51 bp, synthetic construct; identical to SEQ ID NO: 7447
  source 1..51: mol_type = other DNA

SEQ ID NO: 22874 - DNA, 51 bp, synthetic construct; identical to SEQ ID NO: 7580
  source 1..51: mol_type = other DNA

SEQ ID NO: 22875 - DNA, 51 bp, synthetic construct; identical to SEQ ID NO: 7447
  source 1..51: mol_type = other DNA

SEQ ID NO: 22876 - DNA, 51 bp, synthetic construct; identical to SEQ ID NO: 7530
  source 1..51: mol_type = other DNA

SEQ ID NO: 22877 - DNA, 51 bp, synthetic construct; identical to SEQ ID NO: 7447
  source 1..51: mol_type = other DNA

SEQ ID NO: 22878 - DNA, 51 bp, synthetic construct
  source 1..51: mol_type = other DNA
cttttgtggtatgtccaatatcttggacaaggtccacagctccttctgaaa

SEQ ID NO: 22879 - DNA, 51 bp, synthetic construct; identical to SEQ ID NO: 7447
  source 1..51: mol_type = other DNA

SEQ ID NO: 22880 - DNA, 51 bp, synthetic construct; identical to SEQ ID NO: 7492
  source 1..51: mol_type = other DNA

SEQ ID NO: 22881 - DNA, 51 bp, synthetic construct; identical to SEQ ID NO: 7447
  source 1..51: mol_type = other DNA

SEQ ID NO: 22882 - DNA, 51 bp, synthetic construct; identical to SEQ ID NO: 7504
  source 1..51: mol_type = other DNA

SEQ ID NO: 22883 - DNA, 51 bp, synthetic construct; identical to SEQ ID NO: 7447
  source 1..51: mol_type = other DNA

SEQ ID NO: 22884 - DNA, 51 bp, synthetic construct; identical to SEQ ID NO: 7426
  source 1..51: mol_type = other DNA

SEQ ID NO: 22885 - DNA, 51 bp, synthetic construct; identical to SEQ ID NO: 7447
  source 1..51: mol_type = other DNA

SEQ ID NO: 22886 - DNA, 51 bp, synthetic construct; identical to SEQ ID NO: 7678
  source 1..51: mol_type = other DNA

SEQ ID NO: 22887 - DNA, 51 bp, synthetic construct; identical to SEQ ID NO: 7447
  source 1..51: mol_type = other DNA

SEQ ID NO: 22888 - DNA, 51 bp, synthetic construct; identical to SEQ ID NO: 7426
  source 1..51: mol_type = other DNA

SEQ ID NO: 22889 - DNA, 51 bp, synthetic construct; identical to SEQ ID NO: 7447
  source 1..51: mol_type = other DNA

SEQ ID NO: 22890 - DNA, 51 bp, synthetic construct; identical to SEQ ID NO: 7608
  source 1..51: mol_type = other DNA

SEQ ID NO: 22891 - DNA, 51 bp, synthetic construct; identical to SEQ ID NO: 7447
  source 1..51: mol_type = other DNA

SEQ ID NO: 22892 - DNA, 51 bp, synthetic construct; identical to SEQ ID NO: 7426
  source 1..51: mol_type = other DNA

SEQ ID NO: 22893 - DNA, 51 bp, synthetic construct; identical to SEQ ID NO: 7447
  source 1..51: mol_type = other DNA

SEQ ID NO: 22894 - DNA, 51 bp, synthetic construct; identical to SEQ ID NO: 7700
  source 1..51: mol_type = other DNA

SEQ ID NO: 22895 - DNA, 51 bp, synthetic construct; identical to SEQ ID NO: 7447
  source 1..51: mol_type = other DNA

SEQ ID NO: 22896 - DNA, 51 bp, synthetic construct; identical to SEQ ID NO: 7478
  source 1..51: mol_type = other DNA

SEQ ID NO: 22897 - DNA, 51 bp, synthetic construct; identical to SEQ ID NO: 7447
  source 1..51: mol_type = other DNA

SEQ ID NO: 22898 - DNA, 51 bp, synthetic construct; identical to SEQ ID NO: 7478
  source 1..51: mol_type = other DNA

SEQ ID NO: 22899 - DNA, 51 bp, synthetic construct; identical to SEQ ID NO: 7447
  source 1..51: mol_type = other DNA

SEQ ID NO: 22900 - DNA, 51 bp, synthetic construct; identical to SEQ ID NO: 7660
  source 1..51: mol_type = other DNA

SEQ ID NO: 22901 - DNA, 51 bp, synthetic construct; identical to SEQ ID NO: 7447
  source 1..51: mol_type = other DNA

SEQ ID NO: 22902 - DNA, 51 bp, synthetic construct; identical to SEQ ID NO: 7480
  source 1..51: mol_type = other DNA

SEQ ID NO: 22903 - DNA, 51 bp, synthetic construct; identical to SEQ ID NO: 7447
  source 1..51: mol_type = other DNA

SEQ ID NO: 22904 - DNA, 51 bp, synthetic construct; identical to SEQ ID NO: 7480
  source 1..51: mol_type = other DNA

SEQ ID NO: 22905 - DNA, 51 bp, synthetic construct; identical to SEQ ID NO: 7447
  source 1..51: mol_type = other DNA

SEQ ID NO: 22906 - DNA, 51 bp, synthetic construct; identical to SEQ ID NO: 7462
  source 1..51: mol_type = other DNA

SEQ ID NO: 22907 - DNA, 51 bp, synthetic construct; identical to SEQ ID NO: 7447
  source 1..51: mol_type = other DNA

SEQ ID NO: 22908 - DNA, 51 bp, synthetic construct; identical to SEQ ID NO: 7422
  source 1..51: mol_type = other DNA

SEQ ID NO: 22909 - DNA, 51 bp, synthetic construct; identical to SEQ ID NO: 7447
  source 1..51: mol_type = other DNA

SEQ ID NO: 22910 - DNA, 51 bp, synthetic construct; identical to SEQ ID NO: 7432
  source 1..51: mol_type = other DNA

SEQ ID NO: 22911 - DNA, 51 bp, synthetic construct; identical to SEQ ID NO: 7447
  source 1..51: mol_type = other DNA

SEQ ID NO: 22912 - DNA, 51 bp, synthetic construct; identical to SEQ ID NO: 7930
  source 1..51: mol_type = other DNA

SEQ ID NO: 22913 - DNA, 51 bp, synthetic construct; identical to SEQ ID NO: 7447
  source 1..51: mol_type = other DNA

SEQ ID NO: 22914 - DNA, 51 bp, synthetic construct; identical to SEQ ID NO: 7530
  source 1..51: mol_type = other DNA

SEQ ID NO: 22915 - DNA, 51 bp, synthetic construct; identical to SEQ ID NO: 7447
  source 1..51: mol_type = other DNA

SEQ ID NO: 22916 - DNA, 51 bp, synthetic construct; identical to SEQ ID NO: 8002
  source 1..51: mol_type = other DNA

SEQ ID NO: 22917 - DNA, 51 bp, synthetic construct; identical to SEQ ID NO: 7447
  source 1..51: mol_type = other DNA

SEQ ID NO: 22918 - DNA, 51 bp, synthetic construct; identical to SEQ ID NO: 7580
  source 1..51: mol_type = other DNA

SEQ ID NO: 22919 - DNA, 51 bp, synthetic construct; identical to SEQ ID NO: 7447
  source 1..51: mol_type = other DNA

SEQ ID NO: 22920 - DNA, 51 bp, synthetic construct; identical to SEQ ID NO: 7526
  source 1..51: mol_type = other DNA

SEQ ID NO: 22921 - DNA, 51 bp, synthetic construct; identical to SEQ ID NO: 7447
  source 1..51: mol_type = other DNA

SEQ ID NO: 22922 - DNA, 51 bp, synthetic construct; identical to SEQ ID NO: 7448
  source 1..51: mol_type = other DNA

SEQ ID NO: 22923 - DNA, 51 bp, synthetic construct; identical to SEQ ID NO: 7447
  source 1..51: mol_type = other DNA

SEQ ID NO: 22924 - DNA, 51 bp, synthetic construct; identical to SEQ ID NO: 7876
  source 1..51: mol_type = other DNA

SEQ ID NO: 22925 - DNA, 51 bp, synthetic construct; identical to SEQ ID NO: 7447
  source 1..51: mol_type = other DNA

SEQ ID NO: 22926 - DNA, 51 bp, synthetic construct; identical to SEQ ID NO: 7488
  source 1..51: mol_type = other DNA

SEQ ID NO: 22927 - DNA, 51 bp, synthetic construct; identical to SEQ ID NO: 7447
  source 1..51: mol_type = other DNA

SEQ ID NO: 22928 - DNA, 51 bp, synthetic construct; identical to SEQ ID NO: 7428
  source 1..51: mol_type = other DNA

SEQ ID NO: 22929 - DNA, 51 bp, synthetic construct; identical to SEQ ID NO: 7443
  source 1..51: mol_type = other DNA

SEQ ID NO: 22930 - DNA, 51 bp, synthetic construct; identical to SEQ ID NO: 7526
  source 1..51: mol_type = other DNA

SEQ ID NO: 22931 - DNA, 51 bp, synthetic construct; identical to SEQ ID NO: 7443
  source 1..51: mol_type = other DNA

SEQ ID NO: 22932 - DNA, 51 bp, synthetic construct; identical to SEQ ID NO: 7528
  source 1..51: mol_type = other DNA

SEQ ID NO: 22933 - DNA, 51 bp, synthetic construct; identical to SEQ ID NO: 7443
  source 1..51: mol_type = other DNA

SEQ ID NO: 22934 - DNA, 51 bp, synthetic construct; identical to SEQ ID NO: 7426
  source 1..51: mol_type = other DNA

SEQ ID NO: 22935 - DNA, 51 bp, synthetic construct; identical to SEQ ID NO: 7443
  source 1..51: mol_type = other DNA

SEQ ID NO: 22936 - DNA, 51 bp, synthetic construct; identical to SEQ ID NO: 7432
  source 1..51: mol_type = other DNA

SEQ ID NO: 22937 - DNA, 51 bp, synthetic construct; identical to SEQ ID NO: 7443
  source 1..51: mol_type = other DNA

SEQ ID NO: 22938 - DNA, 51 bp, synthetic construct; identical to SEQ ID NO: 7492
  source 1..51: mol_type = other DNA

SEQ ID NO: 22939 - DNA, 51 bp, synthetic construct; identical to SEQ ID NO: 7443
  source 1..51: mol_type = other DNA

SEQ ID NO: 22940 - DNA, 51 bp, synthetic construct; identical to SEQ ID NO: 7526
  source 1..51: mol_type = other DNA

SEQ ID NO: 22941 - DNA, 51 bp, synthetic construct; identical to SEQ ID NO: 7443
  source 1..51: mol_type = other DNA

SEQ ID NO: 22942 - DNA, 51 bp, synthetic construct; identical to SEQ ID NO: 7520
  source 1..51: mol_type = other DNA

SEQ ID NO: 22943 - DNA, 51 bp, synthetic construct; identical to SEQ ID NO: 7443
  source 1..51: mol_type = other DNA

SEQ ID NO: 22944 - DNA, 51 bp, synthetic construct; identical to SEQ ID NO: 7608
  source 1..51: mol_type = other DNA

SEQ ID NO: 22945 - DNA, 51 bp, synthetic construct; identical to SEQ ID NO: 7443
  source 1..51: mol_type = other DNA

SEQ ID NO: 22946 - DNA, 51 bp, synthetic construct; identical to SEQ ID NO: 7488
  source 1..51: mol_type = other DNA

SEQ ID NO: 22947 - DNA, 51 bp, synthetic construct; identical to SEQ ID NO: 7443
  source 1..51: mol_type = other DNA

SEQ ID NO: 22948 - DNA, 51 bp, synthetic construct; identical to SEQ ID NO: 7444
  source 1..51: mol_type = other DNA

SEQ ID NO: 22949 - DNA, 51 bp, synthetic construct; identical to SEQ ID NO: 7443
  source 1..51: mol_type = other DNA

SEQ ID NO: 22950 - DNA, 51 bp, synthetic construct; identical to SEQ ID NO: 7432
  source 1..51: mol_type = other DNA

SEQ ID NO: 22951 - DNA, 51 bp, synthetic construct; identical to SEQ ID NO: 7443
  source 1..51: mol_type = other DNA

SEQ ID NO: 22952 - DNA, 51 bp, synthetic construct; identical to SEQ ID NO: 7504
  source 1..51: mol_type = other DNA

SEQ ID NO: 22953 - protein, 6 aa, synthetic construct
SITEND

SEQ ID NO: 22954 - protein, 7 aa, synthetic construct
IRSNMER

SEQ ID NO: 22955 - protein, 6 aa, synthetic construct
LRSPGD

SEQ ID NO: 22956 - protein, 7 aa, synthetic construct
IRSNMER

SEQ ID NO: 22957 - protein, 6 aa, synthetic construct
SITEND

SEQ ID NO: 22958 - protein, 8 aa, synthetic construct
YYPGDPVV

SEQ ID NO: 22959 - protein, 6 aa, synthetic construct
SYVADS

SEQ ID NO: 22960 - protein, 7 aa, synthetic construct
VFSSTEI

SEQ ID NO: 22961 - protein, 6 aa, synthetic construct
YYDKIL

SEQ ID NO: 22962 - protein, 8 aa, synthetic construct
YYSGNPVV

SEQ ID NO: 22963 - protein, 6 aa, synthetic construct
SYDVDS

SEQ ID NO: 22964 - protein, 6 aa, synthetic construct
IFSDGD

SEQ ID NO: 22965 - protein, 6 aa, synthetic construct
SYVADS

SEQ ID NO: 22966 - protein, 7 aa, synthetic construct
IRSNERE

SEQ ID NO: 22967 - protein, 6 aa, synthetic construct
SYGAGS

SEQ ID NO: 22968 - protein, 6 aa, synthetic construct
VVLDGL

SEQ ID NO: 22969 - protein, 6 aa, synthetic construct
SYGAGS

SEQ ID NO: 22970 - protein, 7 aa, synthetic construct
VTTANNK

SEQ ID NO: 22971 - protein, 6 aa, synthetic construct
SYVADS

SEQ ID NO: 22972 - protein, 7 aa, synthetic construct
SSTDNKR

SEQ ID NO: 22973 - protein, 6 aa, synthetic construct
YNLKQL

SEQ ID NO: 22974 - protein, 7 aa, synthetic construct
VRSNVDK

SEQ ID NO: 22975 - protein, 5 aa, synthetic construct
SITVG

SEQ ID NO: 22976 - protein, 8 aa, synthetic construct
QDSYKKEN

SEQ ID NO: 22977 - protein, 6 aa, synthetic construct
FRDEAV

SEQ ID NO: 22978 - protein, 7 aa, synthetic construct
SSTDNKR

SEQ ID NO: 22979 - protein, 6 aa, synthetic construct
YSYQKL

SEQ ID NO: 22980 - protein, 5 aa, synthetic construct
LVPGT

SEQ ID NO: 22981 - protein, 6 aa, synthetic construct
SYVADS

SEQ ID NO: 22982 - protein, 8 aa, synthetic construct
QDSYKKEN

SEQ ID NO: 22983 - protein, 6 aa, synthetic construct
SITEND

SEQ ID NO: 22984 - protein, 7 aa, synthetic construct
IRSNMER

SEQ ID NO: 22985 - protein, 6 aa, synthetic construct
SITEND

SEQ ID NO: 22986 - protein, 7 aa, synthetic construct
SSTDNKR

SEQ ID NO: 22987 - protein, 6 aa, synthetic construct
YNLKQL

SEQ ID NO: 22988 - protein, 5 aa, synthetic construct
NPSGT

SEQ ID NO: 22989 - protein, 6 aa, synthetic construct
YSYQKL

SEQ ID NO: 22990 - protein, 7 aa, synthetic construct
VITAGQK

SEQ ID NO: 22991 - protein, 6 aa, synthetic construct
SYGAGS

SEQ ID NO: 22992 - protein, 8 aa, synthetic construct
QDSYKKEN

SEQ ID NO: 22993 - protein, 6 aa, synthetic construct
SYGAGS

SEQ ID NO: 22994 - protein, 7 aa, synthetic construct
VLSNVDR

SEQ ID NO: 22995 - protein, 6 aa, synthetic construct
SYVADS

SEQ ID NO: 22996 - protein, 8 aa, synthetic construct
QDSYKKEN

SEQ ID NO: 22997 - protein, 6 aa, synthetic construct
SYVADS

SEQ ID NO: 22998 - protein, 6 aa, synthetic construct
IFSDGE

SEQ ID NO: 22999 - protein, 6 aa, synthetic construct
YNLKQL

SEQ ID NO: 23000 - protein, 7 aa, synthetic construct
VTTANNK

SEQ ID NO: 23001 - protein, 6 aa, synthetic construct
YNLKQL

SEQ ID NO: 23002 - protein, 5 aa, synthetic construct
NPSGT

SEQ ID NO: 23003 - protein, 7 aa, synthetic construct
ANEGSEA

SEQ ID NO: 23004 - protein, 8 aa, synthetic construct
QDSYKKEN

SEQ ID NO: 23005 - protein, 6 aa, synthetic construct
YNNKQL

SEQ ID NO: 23006 - protein, 5 aa, synthetic construct
NPSGT

SEQ ID NO: 23007 - protein, 6 aa, synthetic construct
YNNKQL

SEQ ID NO: 23008 - protein, 5 aa, synthetic construct
NPSGT

SEQ ID NO: 23009 - protein, 6 aa, synthetic construct
SYGAGS

SEQ ID NO: 23010 - protein, 5 aa, synthetic construct
NPSGT

SEQ ID NO: 23011 - protein, 6 aa, synthetic construct
SYGAGS

SEQ ID NO: 23012 - protein, 7 aa, synthetic construct
VITAGQK

SEQ ID NO: 23013 - protein, 6 aa, synthetic construct
SYGAGS

SEQ ID NO: 23014 - protein, 7 aa, synthetic construct
VTTANNK

SEQ ID NO: 23015 - protein, 6 aa, synthetic construct
SYVADS

SEQ ID NO: 23016 - protein, 8 aa, synthetic construct
YITGDAVV

SEQ ID NO: 23017 - protein, 6 aa, synthetic construct
SYVADS

SEQ ID NO: 23018 - protein, 8 aa, synthetic construct
YITGDTVV

SEQ ID NO: 23019 - protein, 6 aa, synthetic construct
YYDKIL

SEQ ID NO: 23020 - protein, 8 aa, synthetic construct
YYSGDPVV

SEQ ID NO: 23021 - protein, 5 aa, synthetic construct
SITVG

SEQ ID NO: 23022 - protein, 7 aa, synthetic construct
VFSSTEI

SEQ ID NO: 23023 - protein, 6 aa, synthetic construct
SITEND

SEQ ID NO: 23024 - protein, 8 aa, synthetic construct
YITGDTVV

SEQ ID NO: 23025 - protein, 6 aa, synthetic construct
YNLKQL

SEQ ID NO: 23026 - protein, 7 aa, synthetic construct
ASRDKEK

SEQ ID NO: 23027 - protein, 6 aa, synthetic construct
YNLKQL

SEQ ID NO: 23028 - protein, 6 aa, synthetic construct
IFSNGN

SEQ ID NO: 23029 - protein, 6 aa, synthetic construct
YNLKQL

SEQ ID NO: 23030 - protein, 8 aa, synthetic construct
QDSYKKEN

SEQ ID NO: 23031 - protein, 6 aa, synthetic construct
YNLKQL

SEQ ID NO: 23032 - protein, 7 aa, synthetic construct
SFTDNKR

SEQ ID NO: 23033 - protein, 6 aa, synthetic construct
YNLKQL

SEQ ID NO: 23034 - protein, 7 aa, synthetic construct
VTTANNK

SEQ ID NO: 23035 - protein, 6 aa, synthetic construct
YNLKQL

SEQ ID NO: 23036 - protein, 8 aa, synthetic construct
QDSYKKEN

SEQ ID NO: 23037 - protein, 6 aa, synthetic construct
YNLKQL

SEQ ID NO: 23038 - protein, 8 aa, synthetic construct
YYSGDPVV

SEQ ID NO: 23039 - protein, 6 aa, synthetic construct
YNLKQL

SEQ ID NO: 23040 - protein, 8 aa, synthetic construct
QDSYKKEN

SEQ ID NO: 23041 - protein, 6 aa, synthetic construct
YNLKQL

SEQ ID NO: 23042 - protein, 8 aa, synthetic construct
QDSYKKEN

SEQ ID NO: 23043 - protein, 6 aa, synthetic construct
YNLKQL

SEQ ID NO: 23044 - protein, 7 aa, synthetic construct
VFSSTEI

SEQ ID NO: 23045 - protein, 6 aa, synthetic construct
YNLKQL

SEQ ID NO: 23046 - protein, 7 aa, synthetic construct
ASRDKEK

SEQ ID NO: 23047 - protein, 6 aa, synthetic construct
YNLKQL

SEQ ID NO: 23048 - protein, 5 aa, synthetic construct
NPSGT

SEQ ID NO: 23049 - protein, 6 aa, synthetic construct
YNLKQL

SEQ ID NO: 23050 - protein, 7 aa, synthetic construct
ASRDKEK

SEQ ID NO: 23051 - protein, 6 aa, synthetic construct
YNLKQL

SEQ ID NO: 23052 - protein, 7 aa, synthetic construct
IRSNERE

SEQ ID NO: 23053 - protein, 6 aa, synthetic construct
YNLKQL

SEQ ID NO: 23054 - protein, 5 aa, synthetic construct
NPSGT

SEQ ID NO: 23055 - protein, 6 aa, synthetic construct
YNLKQL

SEQ ID NO: 23056 - protein, 7 aa, synthetic construct
SFTDNKR

SEQ ID NO: 23057 - protein, 6 aa, synthetic construct
YNLKQL

SEQ ID NO: 23058 - protein, 7 aa, synthetic construct
ILSVSDK

SEQ ID NO: 23059 - protein, 6 aa, synthetic construct
YNLKQL

SEQ ID NO: 23060 - protein, 8 aa, synthetic construct
YYSGDPVV

SEQ ID NO: 23061 - protein, 6 aa, synthetic construct
YNLKQL

SEQ ID NO: 23062 - protein, 5 aa, synthetic construct
NPSGT

SEQ ID NO: 23063 - protein, 6 aa, synthetic construct
FRNQAP

SEQ ID NO: 23064 - protein, 5 aa, synthetic construct
NPSGT

SEQ ID NO: 23065 - protein, 6 aa, synthetic construct
FRNQAP

SEQ ID NO: 23066 - protein, 8 aa, synthetic construct
YYSGDPVV

SEQ ID NO: 23067 - protein, 6 aa, synthetic construct
FRNQAP

SEQ ID NO: 23068 - protein, 5 aa, synthetic construct
NPSGT

SEQ ID NO: 23069 - protein, 6 aa, synthetic construct
FQNQEV

SEQ ID NO: 23070 - protein, 8 aa, synthetic construct
QDSYKKEN

SEQ ID NO: 23071 - protein, 7 aa, synthetic construct
ANEGSEA

SEQ ID NO: 23072 - protein, 7 aa, synthetic construct
VFSSTEI

SEQ ID NO: 23073 - protein, 7 aa, synthetic construct
ANEGSEA

SEQ ID NO: 23074 - protein, 7 aa, synthetic construct
VFSSTEI

SEQ ID NO: 23075 - protein, 7 aa, synthetic construct
ANEGSEA

SEQ ID NO: 23076 - protein, 7 aa, synthetic construct
VFSSTEI

SEQ ID NO: 23077 - protein, 7 aa, synthetic construct
ANEGSEA

SEQ ID NO: 23078 - protein, 8 aa, synthetic construct
YYSGDPVV

SEQ ID NO: 23079 - protein, 7 aa, synthetic construct
ANEGSEA

SEQ ID NO: 23080 - protein, 7 aa, synthetic construct
VFSSTEI

SEQ ID NO: 23081 - protein, 7 aa, synthetic construct
ANEGSEA

SEQ ID NO: 23082 - protein, 7 aa, synthetic construct
VFSSTEI

SEQ ID NO: 23083 - protein, 6 aa, synthetic construct
FRDEAV

SEQ ID NO: 23084 - protein, 7 aa, synthetic construct
SSTDNKR

SEQ ID NO: 23085 - protein, 6 aa, synthetic construct
FRDEAV

SEQ ID NO: 23086 - protein, 7 aa, synthetic construct
VITAGQK

SEQ ID NO: 23087 - protein, 6 aa, synthetic construct
FRDEAV

SEQ ID NO: 23088 - protein, 7 aa, synthetic construct
VPKANEK

SEQ ID NO: 23089 - protein, 6 aa, synthetic construct
FRDEAV

SEQ ID NO: 23090 - protein, 6 aa, synthetic construct
VVLDGL

SEQ ID NO: 23091 - protein, 6 aa, synthetic construct
FRDEAV

SEQ ID NO: 23092 - protein, 7 aa, synthetic construct
SFTDNKR

SEQ ID NO: 23093 - protein, 6 aa, synthetic construct
FRDEAV

SEQ ID NO: 23094 - protein, 8 aa, synthetic construct
YYSGDPVV

SEQ ID NO: 23095 - protein, 6 aa, synthetic construct
FRDEAV

SEQ ID NO: 23096 - protein, 6 aa, synthetic construct
IFSDGD

SEQ ID NO: 23097 - protein, 6 aa, synthetic construct
FRDEAV

SEQ ID NO: 23098 - protein, 7 aa, synthetic construct
ASRDKEK

SEQ ID NO: 23099 - protein, 6 aa, synthetic construct
FRDEAV

SEQ ID NO: 23100 - protein, 6 aa, synthetic construct
IFSNGE

SEQ ID NO: 23101 - protein, 6 aa, synthetic construct
FRDEAV

SEQ ID NO: 23102 - protein, 7 aa, synthetic construct
SSTDNKR

SEQ ID NO: 23103 - protein, 6 aa, synthetic construct
FRDEAV

SEQ ID NO: 23104 - protein, 7 aa, synthetic construct
IRSVSDK

SEQ ID NO: 23105 - protein, 6 aa, synthetic construct
FRDEAV

SEQ ID NO: 23106 - protein, 7 aa, synthetic construct
ASRDKEK

SEQ ID NO: 23107 - protein, 6 aa, synthetic construct
FRDEAV

SEQ ID NO: 23108 - protein, 7 aa, synthetic construct
SSTDNKR

SEQ ID NO: 23109 - protein, 6 aa, synthetic construct
FRDEAV

SEQ ID NO: 23110 - protein, 7 aa, synthetic construct
IRSVSDK

SEQ ID NO: 23111 - protein, 6 aa, synthetic construct
FRDEAV

SEQ ID NO: 23112 - protein, 7 aa, synthetic construct
ASRDKEK

SEQ ID NO: 23113 - protein, 6 aa, synthetic construct
FRDEAV

SEQ ID NO: 23114 - protein, 7 aa, synthetic construct
VPKANEK

SEQ ID NO: 23115 - protein, 6 aa, synthetic construct
FRDEAV

SEQ ID NO: 23116 - protein, 5 aa, synthetic construct
NPSGT

SEQ ID NO: 23117 - protein, 6 aa, synthetic construct
SYDVDS

SEQ ID NO: 23118 - protein, 7 aa, synthetic construct
VFSNVDR

SEQ ID NO: 23119 - protein, 6 aa, synthetic construct
SYDVDS

SEQ ID NO: 23120 - protein, 7 aa, synthetic construct
VPKANEK

SEQ ID NO: 23121 - protein, 6 aa, synthetic construct
SYDVDS

SEQ ID NO: 23122 - protein, 7 aa, synthetic construct
IRSNERE

SEQ ID NO: 23123 - protein, 6 aa, synthetic construct
SYDVDS

SEQ ID NO: 23124 - protein, 7 aa, synthetic construct
ILSVSNK

SEQ ID NO: 23125 - protein, 6 aa, synthetic construct
SYDVDS

SEQ ID NO: 23126 - protein, 7 aa, synthetic construct
VRSNVDK

SEQ ID NO: 23127 - protein, 6 aa, synthetic construct
SYDVDS

SEQ ID NO: 23128 - protein, 5 aa, synthetic construct
GLQQN

SEQ ID NO: 23129 - protein, 6 aa, synthetic construct
YSYQKL

SEQ ID NO: 23130 - protein, 8 aa, synthetic construct
QDSYKKEN

SEQ ID NO: 23131 - protein, 6 aa, synthetic construct
YSYQKL

SEQ ID NO: 23132 - protein, 7 aa, synthetic construct
VITAGQK

SEQ ID NO: 23133 - protein, 6 aa, synthetic construct
YSYQKL

SEQ ID NO: 23134 - protein, 5 aa, synthetic construct
NPSGT

SEQ ID NO: 23135 - protein, 6 aa, synthetic construct
YSYQKL

SEQ ID NO: 23136 - protein, 8 aa, synthetic construct
QDSYKKEN

SEQ ID NO: 23137 - protein, 6 aa, synthetic construct
YSYQKL

SEQ ID NO: 23138 - protein, 7 aa, synthetic construct
IRSNERE

SEQ ID NO: 23139 - protein, 6 aa, synthetic construct
YSYQKL

SEQ ID NO: 23140 - protein, 7 aa, synthetic construct
VITAGQK

SEQ ID NO: 23141 - protein, 6 aa, synthetic construct
YSYQKL

SEQ ID NO: 23142 - protein, 7 aa, synthetic construct
VTTANNK

SEQ ID NO: 23143 - protein, 6 aa, synthetic construct
YSYQKL

SEQ ID NO: 23144 - protein, 6 aa, synthetic construct
IFSDGD

SEQ ID NO: 23145 - protein, 6 aa, synthetic construct
YSYQKL

SEQ ID NO: 23146 - protein, 6 aa, synthetic construct
IFSDGD

SEQ ID NO: 23147 - protein, 6 aa, synthetic construct
YSYQKL

SEQ ID NO: 23148 - protein, 7 aa, synthetic construct
VITAGQK

SEQ ID NO: 23149 - protein, 6 aa, synthetic construct
YSYQKL

SEQ ID NO: 23150 - protein, 7 aa, synthetic construct
SFTDNKR

SEQ ID NO: 23151 - protein, 6 aa, synthetic construct
YSYQKL

SEQ ID NO: 23152 - protein, 8 aa, synthetic construct
QDSYKKEN

SEQ ID NO: 23153 - protein, 6 aa, synthetic construct
YSYQKL

SEQ ID NO: 23154 - protein, 7 aa, synthetic construct
IRSNVDR

SEQ ID NO: 23155 - protein, 6 aa, synthetic construct
YSYQKL

SEQ ID NO: 23156 - protein, 8 aa, synthetic construct
YYSGDPVV

SEQ ID NO: 23157 - protein, 6 aa, synthetic construct
YSYQKL

SEQ ID NO: 23158 - protein, 8 aa, synthetic construct
QDSYKKEN

SEQ ID NO: 23159 - protein, 6 aa, synthetic construct
YNNKQL

SEQ ID NO: 23160 - protein, 8 aa, synthetic construct
YYPGDPVV

SEQ ID NO: 23161 - protein, 6 aa, synthetic construct
YNNKQL

SEQ ID NO: 23162 - protein, 8 aa, synthetic construct
YYSGDPVV

SEQ ID NO: 23163 - protein, 6 aa, synthetic construct
YNNKQL

SEQ ID NO: 23164 - protein, 8 aa, synthetic construct
QDSYKKEN

SEQ ID NO: 23165 - protein, 6 aa, synthetic construct
YNNKQL

SEQ ID NO: 23166 - protein, 8 aa, synthetic construct
YYSGNPVV

SEQ ID NO: 23167 - protein, 6 aa, synthetic construct
YNNKQL

SEQ ID NO: 23168 - protein, 7 aa, synthetic construct
VTTANNK

SEQ ID NO: 23169 - protein, 6 aa, synthetic construct
YNNKQL

SEQ ID NO: 23170 - protein, 7 aa, synthetic construct
VTTANNK

SEQ ID NO: 23171 - protein, 6 aa, synthetic construct
YNNKQL

SEQ ID NO: 23172 - protein, 5 aa, synthetic construct
NPSGT

SEQ ID NO: 23173 - protein, 6 aa, synthetic construct
YNNKQL

SEQ ID NO: 23174 - protein, 7 aa, synthetic construct
SSTDNKR

SEQ ID NO: 23175 - protein, 6 aa, synthetic construct
YNNKQL

SEQ ID NO: 23176 - protein, 8 aa, synthetic construct
QDSYKKEN

SEQ ID NO: 23177 - protein, 6 aa, synthetic construct
YNNKQL

SEQ ID NO: 23178 - protein, 5 aa, synthetic construct
NPSGT

SEQ ID NO: 23179 - protein, 6 aa, synthetic construct
YNNKQL

SEQ ID NO: 23180 - protein, 6 aa, synthetic construct
IFSDGD

SEQ ID NO: 23181 - protein, 6 aa, synthetic construct
YNNKQL

SEQ ID NO: 23182 - protein, 7 aa, synthetic construct
IRSNVDR

SEQ ID NO: 23183 - protein, 6 aa, synthetic construct
YNNKQL

SEQ ID NO: 23184 - protein, 7 aa, synthetic construct
SSTDNKR

SEQ ID NO: 23185 - protein, 6 aa, synthetic construct
SYGAGS

SEQ ID NO: 23186 - protein, 7 aa, synthetic construct
IRSNMER

SEQ ID NO: 23187 - protein, 6 aa, synthetic construct
SYGAGS

SEQ ID NO: 23188 - protein, 7 aa, synthetic construct
ISLVSNK

SEQ ID NO: 23189 - protein, 6 aa, synthetic construct
SYGAGS

SEQ ID NO: 23190 - protein, 6 aa, synthetic construct
IFSDGE

SEQ ID NO: 23191 - protein, 6 aa, synthetic construct
SYGAGS

SEQ ID NO: 23192 - protein, 7 aa, synthetic construct
IRSNMER

SEQ ID NO: 23193 - protein, 6 aa, synthetic construct
SYGAGS

SEQ ID NO: 23194 - protein, 7 aa, synthetic construct
VITAGQK

SEQ ID NO: 23195 - protein, 6 aa, synthetic construct
SYGAGS

SEQ ID NO: 23196 - protein, 6 aa, synthetic construct
IFSDGE

SEQ ID NO: 23197 - protein, 6 aa, synthetic construct
SYGAGS

SEQ ID NO: 23198 - protein, 6 aa, synthetic construct
IFSDGE

SEQ ID NO: 23199 - protein, 6 aa, synthetic construct
SYGAGS

SEQ ID NO: 23200 - protein, 7 aa, synthetic construct
VFSSTEI

SEQ ID NO: 23201 - protein, 6 aa, synthetic construct
SYGAGS

SEQ ID NO: 23202 - protein, 7 aa, synthetic construct
IRSVSDK

SEQ ID NO: 23203 - protein, 6 aa, synthetic construct
SYGAGS

SEQ ID NO: 23204 - protein, 6 aa, synthetic construct
IFSDGD

SEQ ID NO: 23205 - protein, 6 aa, synthetic construct
SYGAGS

SEQ ID NO: 23206 - protein, 6 aa, synthetic construct
IFSDGD

SEQ ID NO: 23207 - protein, 6 aa, synthetic construct
SYGAGS

SEQ ID NO: 23208 - protein, 7 aa, synthetic construct
VPKANEK

SEQ ID NO: 23209 - protein, 6 aa, synthetic construct
SYGAGS

SEQ ID NO: 23210 - protein, 7 aa, synthetic construct
IRSNERE

SEQ ID NO: 23211 - protein, 6 aa, synthetic construct
SYGAGS

SEQ ID NO: 23212 - protein, 5 aa, synthetic construct
NPSGT

SEQ ID NO: 23213 - protein, 6 aa, synthetic construct
SYGAGS

SEQ ID NO: 23214 - protein, 6 aa, synthetic construct
IFSNGE

SEQ ID NO: 23215 - protein, 6 aa, synthetic construct
SYGAGS

SEQ ID NO: 23216 - protein, 7 aa, synthetic construct
ILSVSNK

SEQ ID NO: 23217 - protein, 6 aa, synthetic construct
SYGAGS

SEQ ID NO: 23218 - protein, 7 aa, synthetic construct
SSTDNKR

SEQ ID NO: 23219 - protein, 6 aa, synthetic construct
SYGAGS

SEQ ID NO: 23220 - protein, 7 aa, synthetic construct
VPKANEK

SEQ ID NO: 23221 - protein, 6 aa, synthetic construct
SYGAGS

SEQ ID NO: 23222 - protein, 8 aa, synthetic construct
QDSYKKEN

SEQ ID NO: 23223 - protein, 6 aa, synthetic construct
SYGAGS

SEQ ID NO: 23224 - protein, 7 aa, synthetic construct
GYKDYVV

SEQ ID NO: 23225 - protein, 6 aa, synthetic construct
SYGAGS

SEQ ID NO: 23226 - protein, 8 aa, synthetic construct
QDSYKKEN

SEQ ID NO: 23227 - protein, 6 aa, synthetic construct
SYGAGS

SEQ ID NO: 23228 - protein, 7 aa, synthetic construct
IRSNMER

SEQ ID NO: 23229 - protein, 6 aa, synthetic construct
SYGAGS

SEQ ID NO: 23230 - protein, 7 aa, synthetic construct
VPKANEK

SEQ ID NO: 23231 - protein, 6 aa, synthetic construct
SYGAGS

SEQ ID NO: 23232 - protein, 7 aa, synthetic construct
SFTDNKR

SEQ ID NO: 23233 - protein, 6 aa, synthetic construct
SYGAGS

SEQ ID NO: 23234 - protein, 7 aa, synthetic construct
VTTANNK

SEQ ID NO: 23235 - protein, 6 aa, synthetic construct
SYGAGS

SEQ ID NO: 23236 - protein, 5 aa, synthetic construct
NPSGT

SEQ ID NO: 23237 - protein, 6 aa, synthetic construct
SYGAGS

SEQ ID NO: 23238 - protein, 8 aa, synthetic construct
YYSGDPVV

SEQ ID NO: 23239 - protein, 6 aa, synthetic construct
SYGAGS

SEQ ID NO: 23240 - protein, 7 aa, synthetic construct
IRSNERE

SEQ ID NO: 23241 - protein, 6 aa, synthetic construct
SYGAGS

SEQ ID NO: 23242 - protein, 8 aa, synthetic construct
YYSGDPVV

SEQ ID NO: 23243 - protein, 6 aa, synthetic construct
SYGAGS

SEQ ID NO: 23244 - protein, 7 aa, synthetic construct
VTTANNK

SEQ ID NO: 23245 - protein, 6 aa, synthetic construct
SYGAGS

SEQ ID NO: 23246 - protein, 7 aa, synthetic construct
VITAGQK

SEQ ID NO: 23247 - protein, 6 aa, synthetic construct
SYGAGS

SEQ ID NO: 23248 - protein, 7 aa, synthetic construct
VITAGQK

SEQ ID NO: 23249 - protein, 6 aa, synthetic construct
SYGAGS

SEQ ID NO: 23250 - protein, 7 aa, synthetic construct
IRSVSDK

SEQ ID NO: 23251 - protein, 6 aa, synthetic construct
SYGAGS

SEQ ID NO: 23252 - protein, 8 aa, synthetic construct
QDSYKKEN

SEQ ID NO: 23253 - protein, 6 aa, synthetic construct
SYGAGS

SEQ ID NO: 23254 - protein, 5 aa, synthetic construct
NPSGT

SEQ ID NO: 23255 - protein, 6 aa, synthetic construct
SYGAGS

SEQ ID NO: 23256 - protein, 7 aa, synthetic construct
SSTDNKR

SEQ ID NO: 23257 - protein, 6 aa, synthetic construct
SYGAGS

SEQ ID NO: 23258 - protein, 7 aa, synthetic construct
ISSVSDK

SEQ ID NO: 23259 - protein, 6 aa, synthetic construct
SYGAGS

SEQ ID NO: 23260 - protein, 7 aa, synthetic construct
IRSVSDK

SEQ ID NO: 23261 - protein, 6 aa, synthetic construct
SYGAGS

SEQ ID NO: 23262 - protein, 5 aa, synthetic construct
NPSGT

SEQ ID NO: 23263 - protein, 6 aa, synthetic construct
SYGAGS

SEQ ID NO: 23264 - protein, 5 aa, synthetic construct
GLQQN

SEQ ID NO: 23265 - protein, 6 aa, synthetic construct
SYGAGS

SEQ ID NO: 23266 - protein, 8 aa, synthetic construct
QDSYKKEN

SEQ ID NO: 23267 - protein, 6 aa, synthetic construct
SYGAGS

SEQ ID NO: 23268 - protein, 8 aa, synthetic construct
QDSYKKEN

SEQ ID NO: 23269 - protein, 6 aa, synthetic construct
SYGAGS

SEQ ID NO: 23270 - protein, 6 aa, synthetic construct
IFSDGD

SEQ ID NO: 23271 - protein, 6 aa, synthetic construct
SYGAGS

SEQ ID NO: 23272 - protein, 7 aa, synthetic construct
ISLVSNK

SEQ ID NO: 23273 - protein, 6 aa, synthetic construct
SYGAGS

SEQ ID NO: 23274 - protein, 6 aa, synthetic construct
IFSNGE

SEQ ID NO: 23275 - protein, 6 aa, synthetic construct
SYGAGS

SEQ ID NO: 23276 - protein, 6 aa, synthetic construct
IFSNGE

SEQ ID NO: 23277 - protein, 6 aa, synthetic construct
SYGAGS

SEQ ID NO: 23278 - protein, 7 aa, synthetic construct
SSTDNKR

SEQ ID NO: 23279 - protein, 6 aa, synthetic construct
SYGAGS

SEQ ID NO: 23280 - protein, 7 aa, synthetic construct
ILSVSDK

SEQ ID NO: 23281 - protein, 6 aa, synthetic construct
SYGAGS

SEQ ID NO: 23282 - protein, 7 aa, synthetic construct
SSTDNKR

SEQ ID NO: 23283 - protein, 6 aa, synthetic construct
SYGAGS

SEQ ID NO: 23284 - protein, 5 aa, synthetic construct
NPSGT

SEQ ID NO: 23285 - protein, 6 aa, synthetic construct
SYGAGS

SEQ ID NO: 23286 - protein, 7 aa, synthetic construct
VFSSTEI

SEQ ID NO: 23287 - protein, 6 aa, synthetic construct
SYGAGS

SEQ ID NO: 23288 - protein, 5 aa, synthetic construct
LVPGT

SEQ ID NO: 23289 - protein, 6 aa, synthetic construct
SYGAGS

SEQ ID NO: 23290 - protein, 7 aa, synthetic construct
VTTANNK

SEQ ID NO: 23291 - protein, 6 aa, synthetic construct
SYGAGS

SEQ ID NO: 23292 - protein, 8 aa, synthetic construct
QDSYKKEN

SEQ ID NO: 23293 - protein, 6 aa, synthetic construct
SYGAGN

SEQ ID NO: 23294 - protein, 6 aa, synthetic construct
IFSNGE

SEQ ID NO: 23295 - protein, 6 aa, synthetic construct
SYGAGN

SEQ ID NO: 23296 - skipped

SEQ ID NO: 23297 - protein, 6 aa, synthetic construct
SYGAGN

SEQ ID NO: 23298 - protein, 6 aa, synthetic construct
IFSDGD

SEQ ID NO: 23299 - protein, 6 aa, synthetic construct
SYGAGN

SEQ ID NO: 23300 - protein, 8 aa, synthetic construct
QDSYKKEN

SEQ ID NO: 23301 - protein, 6 aa, synthetic construct
SYGAGN

SEQ ID NO: 23302 - protein, 7 aa, synthetic construct
VTTANNK

SEQ ID NO: 23303 - protein, 6 aa, synthetic construct
SYGAGN

SEQ ID NO: 23304 - protein, 7 aa, synthetic construct
VITAGQK

SEQ ID NO: 23305 - protein, 6 aa, synthetic construct
SYGAGN

SEQ ID NO: 23306 - protein, 8 aa, synthetic construct
QDSYKKEN

SEQ ID NO: 23307 - protein, 6 aa, synthetic construct
SYGAGN

SEQ ID NO: 23308 - protein, 8 aa, synthetic construct
QDSYKKEN

SEQ ID NO: 23309 - protein, 6 aa, synthetic construct
SYGAGN

SEQ ID NO: 23310 - protein, 6 aa, synthetic construct
IFSNGE

SEQ ID NO: 23311 - protein, 6 aa, synthetic construct
SYGAGN

SEQ ID NO: 23312 - protein, 7 aa, synthetic construct
IRSNMER

SEQ ID NO: 23313 - protein, 6 aa, synthetic construct
SYGAGN

SEQ ID NO: 23314 - protein, 8 aa, synthetic construct
YYSGDPVV

SEQ ID NO: 23315 - protein, 6 aa, synthetic construct
SYGAGN

SEQ ID NO: 23316 - protein, 7 aa, synthetic construct
SSTDNKR

SEQ ID NO: 23317 - protein, 6 aa, synthetic construct
SYGAGN

SEQ ID NO: 23318 - protein, 7 aa, synthetic construct
VTTANNK

SEQ ID NO: 23319 - protein, 6 aa, synthetic construct
SYGAGN

SEQ ID NO: 23320 - protein, 7 aa, synthetic construct
GYKDYVV

SEQ ID NO: 23321 - protein, 6 aa, synthetic construct
SYGAGN

SEQ ID NO: 23322 - protein, 6 aa, synthetic construct
IFSDGE

SEQ ID NO: 23323 - protein, 6 aa, synthetic construct
SYGAGN

SEQ ID NO: 23324 - protein, 7 aa, synthetic construct
VITAGQK

SEQ ID NO: 23325 - protein, 6 aa, synthetic construct
SYGAGN

SEQ ID NO: 23326 - protein, 7 aa, synthetic construct
ASRDKEK

SEQ ID NO: 23327 - protein, 6 aa, synthetic construct
SYGAGN

SEQ ID NO: 23328 - protein, 8 aa, synthetic construct
QDSYKKEN

SEQ ID NO: 23329 - protein, 6 aa, synthetic construct
SYGAGN

SEQ ID NO: 23330 - protein, 6 aa, synthetic construct
IFSNGD

SEQ ID NO: 23331 - protein, 6 aa, synthetic construct
SYGAGN

SEQ ID NO: 23332 - protein, 7 aa, synthetic construct
VFSNVDR

SEQ ID NO: 23333 - protein, 6 aa, synthetic construct
SYGAGN

SEQ ID NO: 23334 - protein, 7 aa, synthetic construct
SSTDNKR

SEQ ID NO: 23335 - protein, 6 aa, synthetic construct
SYGAGN

SEQ ID NO: 23336 - protein, 7 aa, synthetic construct
IRSVSDK

SEQ ID NO: 23337 - protein, 6 aa, synthetic construct
SYGAGN

SEQ ID NO: 23338 - protein, 7 aa, synthetic construct
SSTDNKR

SEQ ID NO: 23339 - protein, 6 aa, synthetic construct
SYGAGN

SEQ ID NO: 23340 - protein, 7 aa, synthetic construct
VITAGQK

SEQ ID NO: 23341 - protein, 6 aa, synthetic construct
SYGAGN

SEQ ID NO: 23342 - protein, 7 aa, synthetic construct
VITAGQK

SEQ ID NO: 23343 - protein, 6 aa, synthetic construct
SYGAGN

SEQ ID NO: 23344 - protein, 7 aa, synthetic construct
SSTDNKR

SEQ ID NO: 23345 - protein, 6 aa, synthetic construct
SYGAGN

SEQ ID NO: 23346 - protein, 8 aa, synthetic construct
QDSYKKEN

SEQ ID NO: 23347 - protein, 6 aa, synthetic construct
SYGAGN

SEQ ID NO: 23348 - protein, 7 aa, synthetic construct
ISLVSNK

SEQ ID NO: 23349 - protein, 6 aa, synthetic construct
SYGAGN

SEQ ID NO: 23350 - protein, 6 aa, synthetic construct
IFSNGE

SEQ ID NO: 23351 - protein, 6 aa, synthetic construct
SYGAGN

SEQ ID NO: 23352 - protein, 7 aa, synthetic construct
IRPVSNK

SEQ ID NO: 23353 - protein, 6 aa, synthetic construct
SYGAGN

SEQ ID NO: 23354 - protein, 8 aa, synthetic construct
QDSYKKEN

SEQ ID NO: 23355 - protein, 6 aa, synthetic construct
SYGAGN

SEQ ID NO: 23356 - protein, 6 aa, synthetic construct
IFSNGE

SEQ ID NO: 23357 - protein, 6 aa, synthetic construct
SYGAGN

SEQ ID NO: 23358 - protein, 6 aa, synthetic construct
VVLDGL

SEQ ID NO: 23359 - protein, 6 aa, synthetic construct
SYGAGN

SEQ ID NO: 23360 - protein, 6 aa, synthetic construct
IFSNGE

SEQ ID NO: 23361 - protein, 6 aa, synthetic construct
SYGAGN

SEQ ID NO: 23362 - protein, 7 aa, synthetic construct
VFSSTEI

SEQ ID NO: 23363 - protein, 6 aa, synthetic construct
SYGAGN

SEQ ID NO: 23364 - protein, 7 aa, synthetic construct
ASRDKEK

SEQ ID NO: 23365 - protein, 6 aa, synthetic construct
SYGAGN

SEQ ID NO: 23366 - protein, 7 aa, synthetic construct
ILSVSDK

SEQ ID NO: 23367 - protein, 6 aa, synthetic construct
SYVADS

SEQ ID NO: 23368 - protein, 7 aa, synthetic construct
IRSNERE

SEQ ID NO: 23369 - protein, 6 aa, synthetic construct
SYVADS

SEQ ID NO: 23370 - protein, 7 aa, synthetic construct
ISSVSDK

SEQ ID NO: 23371 - protein, 6 aa, synthetic construct
SYVADS

SEQ ID NO: 23372 - protein, 6 aa, synthetic construct
IFSDGD

SEQ ID NO: 23373 - protein, 6 aa, synthetic construct
SYVADS

SEQ ID NO: 23374 - protein, 5 aa, synthetic construct
NPSGT

SEQ ID NO: 23375 - protein, 6 aa, synthetic construct
SYVADS

SEQ ID NO: 23376 - protein, 8 aa, synthetic construct
QDSYKKEN

SEQ ID NO: 23377 - protein, 6 aa, synthetic construct
SYVADS

SEQ ID NO: 23378 - protein, 7 aa, synthetic construct
IRSNMER

SEQ ID NO: 23379 - protein, 6 aa, synthetic construct
SYVADS

SEQ ID NO: 23380 - protein, 7 aa, synthetic construct
GYKDYVV

SEQ ID NO: 23381 - protein, 6 aa, synthetic construct
SYVADS

SEQ ID NO: 23382 - protein, 7 aa, synthetic construct
IRSNMER

SEQ ID NO: 23383 - protein, 6 aa, synthetic construct
SYVADS

SEQ ID NO: 23384 - protein, 8 aa, synthetic construct
QDSYKKEN

SEQ ID NO: 23385 - protein, 6 aa, synthetic construct
SYVADS

SEQ ID NO: 23386 - protein, 8 aa, synthetic construct
YYSGDPVV

SEQ ID NO: 23387 - protein, 6 aa, synthetic construct
SYVADS

SEQ ID NO: 23388 - protein, 7 aa, synthetic construct
SSTDNKR

SEQ ID NO: 23389 - protein, 6 aa, synthetic construct
SYVADS

SEQ ID NO: 23390 - protein, 8 aa, synthetic construct
YYSGNPVV

SEQ ID NO: 23391 - protein, 6 aa, synthetic construct
SYVADS

SEQ ID NO: 23392 - protein, 5 aa, synthetic construct
LASGT

SEQ ID NO: 23393 - protein, 6 aa, synthetic construct
SYVADS

SEQ ID NO: 23394 - protein, 7 aa, synthetic construct
ILSVSNK

SEQ ID NO: 23395 - protein, 6 aa, synthetic construct
SYVADS

SEQ ID NO: 23396 - protein, 7 aa, synthetic construct
IRSNMER

SEQ ID NO: 23397 - protein, 6 aa, synthetic construct
SYVADS

SEQ ID NO: 23398 - protein, 6 aa, synthetic construct
IFSDGD

SEQ ID NO: 23399 - protein, 6 aa, synthetic construct
SYVADS

SEQ ID NO: 23400 - protein, 8 aa, synthetic construct
QDSYKKEN

SEQ ID NO: 23401 - protein, 6 aa, synthetic construct
SYVADS

SEQ ID NO: 23402 - protein, 7 aa, synthetic construct
IRSNMER

SEQ ID NO: 23403 - protein, 6 aa, synthetic construct
SYVADS

SEQ ID NO: 23404 - protein, 8 aa, synthetic construct
QDSYKKEN

SEQ ID NO: 23405 - protein, 6 aa, synthetic construct
SYVADS

SEQ ID NO: 23406 - protein, 8 aa, synthetic construct
QDSYKKEN

SEQ ID NO: 23407 - protein, 6 aa, synthetic construct
SYVADS

SEQ ID NO: 23408 - protein, 7 aa, synthetic construct
VRSNVDK

SEQ ID NO: 23409 - protein, 6 aa, synthetic construct
SYVADS

SEQ ID NO: 23410 - protein, 5 aa, synthetic construct
LVPGT

SEQ ID NO: 23411 - protein, 6 aa, synthetic construct
SYVADS

SEQ ID NO: 23412 - protein, 7 aa, synthetic construct
IRSNERE

SEQ ID NO: 23413 - protein, 6 aa, synthetic construct
SYVADS

SEQ ID NO: 23414 - protein, 8 aa, synthetic construct
QDSYKKEN

SEQ ID NO: 23415 - protein, 6 aa, synthetic construct
SYVADS

SEQ ID NO: 23416 - protein, 7 aa, synthetic construct
IRSNMER

SEQ ID NO: 23417 - protein, 6 aa, synthetic construct
SYVADS

SEQ ID NO: 23418 - protein, 8 aa, synthetic construct
QDSYKKEN

SEQ ID NO: 23419 - protein, 6 aa, synthetic construct
SYVADS

SEQ ID NO: 23420 - protein, 5 aa, synthetic construct
NPSGT

SEQ ID NO: 23421 - protein, 6 aa, synthetic construct
SYVADS

SEQ ID NO: 23422 - protein, 7 aa, synthetic construct
VRSNVDK

SEQ ID NO: 23423 - protein, 6 aa, synthetic construct
SYVADS

SEQ ID NO: 23424 - protein, 8 aa, synthetic construct
QDSYKKEN

SEQ ID NO: 23425 - protein, 6 aa, synthetic construct
SYVADS

SEQ ID NO: 23426 - protein, 8 aa, synthetic construct
YITGDTVV

SEQ ID NO: 23427 - protein, 6 aa, synthetic construct
SYVADS

SEQ ID NO: 23428 - protein, 5 aa, synthetic construct
LVPGT

SEQ ID NO: 23429 - protein, 6 aa, synthetic construct
SYVADS

SEQ ID NO: 23430 - protein, 8 aa, synthetic construct
QDSYKKEN

SEQ ID NO: 23431 - protein, 6 aa, synthetic construct
YYDKIL

SEQ ID NO: 23432 - protein, 5 aa, synthetic construct
GLQQN

SEQ ID NO: 23433 - protein, 6 aa, synthetic construct
YYDKIL

SEQ ID NO: 23434 - protein, 7 aa, synthetic construct
VITAGQK

SEQ ID NO: 23435 - protein, 6 aa, synthetic construct
YYDKIL

SEQ ID NO: 23436 - protein, 8 aa, synthetic construct
QPSFDTQN

SEQ ID NO: 23437 - protein, 6 aa, synthetic construct
YYDKIL

SEQ ID NO: 23438 - protein, 5 aa, synthetic construct
LVPGT

SEQ ID NO: 23439 - protein, 6 aa, synthetic construct
YYDKIL

SEQ ID NO: 23440 - protein, 8 aa, synthetic construct
QDSYKKEN

SEQ ID NO: 23441 - protein, 6 aa, synthetic construct
YYDKIL

SEQ ID NO: 23442 - protein, 7 aa, synthetic construct
VITAGQK

SEQ ID NO: 23443 - protein, 6 aa, synthetic construct
YYDKIL

SEQ ID NO: 23444 - protein, 7 aa, synthetic construct
VITAGQK

SEQ ID NO: 23445 - protein, 6 aa, synthetic construct
YYDKIL

SEQ ID NO: 23446 - protein, 7 aa, synthetic construct
IRSNVDR

SEQ ID NO: 23447 - protein, 6 aa, synthetic construct
FRSKSL

SEQ ID NO: 23448 - protein, 8 aa, synthetic construct
QDSYKKEN

SEQ ID NO: 23449 - protein, 6 aa, synthetic construct
FRSKSL

SEQ ID NO: 23450 - protein, 8 aa, synthetic construct
QDSYKKEN

SEQ ID NO: 23451 - protein, 5 aa, synthetic construct
SITVG

SEQ ID NO: 23452 - protein, 6 aa, synthetic construct
IFSNGE

SEQ ID NO: 23453 - protein, 5 aa, synthetic construct
SITVG

SEQ ID NO: 23454 - protein, 5 aa, synthetic construct
NPSGT

SEQ ID NO: 23455 - protein, 5 aa, synthetic construct
SITVG

SEQ ID NO: 23456 - protein, 7 aa, synthetic construct
SSTDNKR

SEQ ID NO: 23457 - protein, 5 aa, synthetic construct
SITVG

SEQ ID NO: 23458 - protein, 7 aa, synthetic construct
SFTDNKR

SEQ ID NO: 23459 - protein, 5 aa, synthetic construct
SITVG

SEQ ID NO: 23460 - protein, 7 aa, synthetic construct
VFSNVDR

SEQ ID NO: 23461 - protein, 5 aa, synthetic construct
SITVG

SEQ ID NO: 23462 - protein, 6 aa, synthetic construct
IFSNGE

SEQ ID NO: 23463 - protein, 5 aa, synthetic construct
SITVG

SEQ ID NO: 23464 - protein, 7 aa, synthetic construct
VLSNVDR

SEQ ID NO: 23465 - protein, 5 aa, synthetic construct
SITVG

SEQ ID NO: 23466 - protein, 7 aa, synthetic construct
VFSSTEI

SEQ ID NO: 23467 - protein, 5 aa, synthetic construct
SITVG

SEQ ID NO: 23468 - protein, 8 aa, synthetic construct
QDSYKKEN

SEQ ID NO: 23469 - protein, 6 aa, synthetic construct
FYNGKV

SEQ ID NO: 23470 - protein, 7 aa, synthetic construct
VPKANEK

SEQ ID NO: 23471 - protein, 6 aa, synthetic construct
FYNGKV

SEQ ID NO: 23472 - protein, 8 aa, synthetic construct
YYSGDPVV

SEQ ID NO: 23473 - protein, 6 aa, synthetic construct
FYNGKV

SEQ ID NO: 23474 - protein, 7 aa, synthetic construct
IRSNERE

SEQ ID NO: 23475 - protein, 6 aa, synthetic construct
SITEND

SEQ ID NO: 23476 - protein, 6 aa, synthetic construct
IFSDGE

SEQ ID NO: 23477 - protein, 6 aa, synthetic construct
SITEND

SEQ ID NO: 23478 - protein, 5 aa, synthetic construct
NPSGT

SEQ ID NO: 23479 - protein, 6 aa, synthetic construct
SITEND

SEQ ID NO: 23480 - protein, 6 aa, synthetic construct
IFSNGE

SEQ ID NO: 23481 - protein, 6 aa, synthetic construct
SITEND

SEQ ID NO: 23482 - protein, 7 aa, synthetic construct
VITAGQK

SEQ ID NO: 23483 - protein, 6 aa, synthetic construct
SITEND

SEQ ID NO: 23484 - protein, 7 aa, synthetic construct
IRSNMER

SEQ ID NO: 23485 - protein, 6 aa, synthetic construct
SITEND

SEQ ID NO: 23486 - protein, 8 aa, synthetic construct
YYSGNPVV

SEQ ID NO: 23487 - protein, 6 aa, synthetic construct
SITEND

SEQ ID NO: 23488 - protein, 7 aa, synthetic construct
VTTANNK

SEQ ID NO: 23489 - protein, 6 aa, synthetic construct
SITEND

SEQ ID NO: 23490 - protein, 7 aa, synthetic construct
SFTDNKR

SEQ ID NO: 23491 - protein, 6 aa, synthetic construct
SITEND

SEQ ID NO: 23492 - protein, 7 aa, synthetic construct
IRSVSDK

SEQ ID NO: 23493 - protein, 6 aa, synthetic construct
SITEND

SEQ ID NO: 23494 - protein, 8 aa, synthetic construct
QDSYKKEN

SEQ ID NO: 23495 - protein, 6 aa, synthetic construct
SITEND

SEQ ID NO: 23496 - protein, 5 aa, synthetic construct
LVPGT

SEQ ID NO: 23497 - protein, 6 aa, synthetic construct
SITEND

SEQ ID NO: 23498 - protein, 8 aa, synthetic construct
QDSYKKEN

SEQ ID NO: 23499 - protein, 6 aa, synthetic construct
SITEND

SEQ ID NO: 23500 - protein, 7 aa, synthetic construct
IRSNERE

SEQ ID NO: 23501 - protein, 6 aa, synthetic construct
SITEND

SEQ ID NO: 23502 - protein, 8 aa, synthetic construct
QDSYKKEN

SEQ ID NO: 23503 - protein, 6 aa, synthetic construct
SITEND

SEQ ID NO: 23504 - protein, 8 aa, synthetic construct
YITGDAVV

SEQ ID NO: 23505 - protein, 6 aa, synthetic construct
SITEND

SEQ ID NO: 23506 - protein, 7 aa, synthetic construct
IRSNVDR

SEQ ID NO: 23507 - protein, 6 aa, synthetic construct
SITEND

SEQ ID NO: 23508 - protein, 7 aa, synthetic construct
IRSNVDR

SEQ ID NO: 23509 - protein, 6 aa, synthetic construct
SITEND

SEQ ID NO: 23510 - protein, 7 aa, synthetic construct
IRPVSNK

SEQ ID NO: 23511 - protein, 6 aa, synthetic construct
SITEND

SEQ ID NO: 23512 - protein, 7 aa, synthetic construct
VITAGQK

SEQ ID NO: 23513 - protein, 6 aa, synthetic construct
SITEND

SEQ ID NO: 23514 - protein, 7 aa, synthetic construct
VITAGQK

SEQ ID NO: 23515 - protein, 6 aa, synthetic construct
SITEND

SEQ ID NO: 23516 - protein, 7 aa, synthetic construct
VFSSTEI

SEQ ID NO: 23517 - protein, 6 aa, synthetic construct
SITEND

SEQ ID NO: 23518 - protein, 6 aa, synthetic construct
IFSDGD

SEQ ID NO: 23519 - protein, 6 aa, synthetic construct
SITEND

SEQ ID NO: 23520 - protein, 8 aa, synthetic construct
YYSGDPVV

SEQ ID NO: 23521 - protein, 6 aa, synthetic construct
SITEND

SEQ ID NO: 23522 - protein, 7 aa, synthetic construct
VTTANNK

SEQ ID NO: 23523 - protein, 6 aa, synthetic construct
SITEND

SEQ ID NO: 23524 - protein, 8 aa, synthetic construct
YYSGNPVV

SEQ ID NO: 23525 - protein, 6 aa, synthetic construct
SITEND

SEQ ID NO: 23526 - protein, 8 aa, synthetic construct
YYSGNPVV

SEQ ID NO: 23527 - protein, 6 aa, synthetic construct
SITEND

SEQ ID NO: 23528 - protein, 7 aa, synthetic construct
IRSNMER

SEQ ID NO: 23529 - protein, 6 aa, synthetic construct
SITEND

SEQ ID NO: 23530 - protein, 7 aa, synthetic construct
GYKDYVV

SEQ ID NO: 23531 - protein, 6 aa, synthetic construct
SITEND

SEQ ID NO: 23532 - protein, 6 aa, synthetic construct
IFSNGE

SEQ ID NO: 23533 - protein, 6 aa, synthetic construct
SITEND

SEQ ID NO: 23534 - protein, 7 aa, synthetic construct
VTTANNK

SEQ ID NO: 23535 - protein, 6 aa, synthetic construct
SITEND

SEQ ID NO: 23536 - protein, 7 aa, synthetic construct
IRSVSDK

SEQ ID NO: 23537 - protein, 6 aa, synthetic construct
SITEND

SEQ ID NO: 23538 - protein, 7 aa, synthetic construct
SSTDNKR

SEQ ID NO: 23539 - protein, 6 aa, synthetic construct
LRSPGD

SEQ ID NO: 23540 - protein, 7 aa, synthetic construct
GYKDYVV

SEQ ID NO: 23541 - protein, 6 aa, synthetic construct
LRSPGD

SEQ ID NO: 23542 - protein, 7 aa, synthetic construct
VFSSTEI

SEQ ID NO: 23543 - protein, 6 aa, synthetic construct
LRSPGD

SEQ ID NO: 23544 - protein, 8 aa, synthetic construct
QDSYKKEN

SEQ ID NO: 23545 - protein, 6 aa, synthetic construct
LRSPGD

SEQ ID NO: 23546 - protein, 8 aa, synthetic construct
YYSGDPVV

SEQ ID NO: 23547 - protein, 6 aa, synthetic construct
LRSPGD

SEQ ID NO: 23548 - protein, 7 aa, synthetic construct
SFTDNKR

SEQ ID NO: 23549 - protein, 6 aa, synthetic construct
LRSPGD

SEQ ID NO: 23550 - protein, 7 aa, synthetic construct
GYKDYVV

SEQ ID NO: 23551 - protein, 6 aa, synthetic construct
LRSPGD

SEQ ID NO: 23552 - protein, 7 aa, synthetic construct
VFSNVDR

SEQ ID NO: 23553 - protein, 6 aa, synthetic construct
LRSPGD

SEQ ID NO: 23554 - protein, 7 aa, synthetic construct
IRSNERE

SEQ ID NO: 23555 - protein, 6 aa, synthetic construct
LRSPGD

SEQ ID NO: 23556 - protein, 7 aa, synthetic construct
IRSVSDK

SEQ ID NO: 23557 - protein, 6 aa, synthetic construct
LRSPGD

SEQ ID NO: 23558 - protein, 7 aa, synthetic construct
IRSNERE

SEQ ID NO: 23559 - protein, 6 aa, synthetic construct
LRSPGD

SEQ ID NO: 23560 - protein, 8 aa, synthetic construct
YYSGDPVV

SEQ ID NO: 23561 - protein, 6 aa, synthetic construct
LRSPGD

SEQ ID NO: 23562 - protein, 7 aa, synthetic construct
IRSVSDK

SEQ ID NO: 23563 - DNA, 18 bp, synthetic construct
  source 1..18: mol_type = other DNA
tcaataactgaaaacgat

SEQ ID NO: 23564 - DNA, 21 bp, synthetic construct
  source 1..21: mol_type = other DNA
atccgttcaaatatggaaaga

SEQ ID NO: 23565 - DNA, 18 bp, synthetic construct
  source 1..18: mol_type = other DNA
ctgcggagtcctggggac

SEQ ID NO: 23566 - DNA, 21 bp, synthetic construct
  source 1..21: mol_type = other DNA
atccgttcaaatatggaaaga

SEQ ID NO: 23567 - DNA, 18 bp, synthetic construct
  source 1..18: mol_type = other DNA
tcaataactgaaaacgat

SEQ ID NO: 23568 - DNA, 24 bp, synthetic construct
  source 1..24: mol_type = other DNA
tactatccaggagacccagtggtt

SEQ ID NO: 23569 - DNA, 18 bp, synthetic construct
  source 1..18: mol_type = other DNA
tcatatgtcgctgacagc

SEQ ID NO: 23570 - DNA, 21 bp, synthetic construct
  source 1..21: mol_type = other DNA
gttttctcaagtacggaaata

SEQ ID NO: 23571 - DNA, 18 bp, synthetic construct
  source 1..18: mol_type = other DNA
tactatgataagattttg

SEQ ID NO: 23572 - DNA, 24 bp, synthetic construct
  source 1..24: mol_type = other DNA
tactattcgggaaacccagtggtt

SEQ ID NO: 23573 - DNA, 18 bp, synthetic construct
  source 1..18: mol_type = other DNA
tcatacgatgttgatagt

SEQ ID NO: 23574 - DNA, 18 bp, synthetic construct
  source 1..18: mol_type = other DNA
atcttctctgatggtgac

SEQ ID NO: 23575 - DNA, 18 bp, synthetic construct
  source 1..18: mol_type = other DNA
tcatatgtcgctgacagc

SEQ ID NO: 23576 - DNA, 21 bp, synthetic construct
  source 1..21: mol_type = other DNA
atacgttcaaatgagcgagag

SEQ ID NO: 23577 - DNA, 18 bp, synthetic construct
  source 1..18: mol_type = other DNA
tcatatggtgctggcagc

SEQ ID NO: 23578 - DNA, 18 bp, synthetic construct
  source 1..18: mol_type = other DNA
gttgttttggatggtttg

SEQ ID NO: 23579 - DNA, 18 bp, synthetic construct
  source 1..18: mol_type = other DNA
tcatatggtgctggcagc

SEQ ID NO: 23580 - DNA, 21 bp, synthetic construct
  source 1..21: mol_type = other DNA
gtcacaactgccaacaacaag

SEQ ID NO: 23581 - DNA, 18 bp, synthetic construct
  source 1..18: mol_type = other DNA
tcatatgtcgctgacagc

SEQ ID NO: 23582 - DNA, 21 bp, synthetic construct
  source 1..21: mol_type = other DNA
agctccacagacaacaagagg

SEQ ID NO: 23583 - DNA, 18 bp, synthetic construct
  source 1..18: mol_type = other DNA
tacaatcttaaacagttg

SEQ ID NO: 23584 - DNA, 21 bp, synthetic construct
  source 1..21: mol_type = other DNA
gtacgctcaaatgtggataag

SEQ ID NO: 23585 - DNA, 15 bp, synthetic construct
  source 1..15: mol_type = other DNA
tctattactgttggc

SEQ ID NO: 23586 - DNA, 24 bp, synthetic construct
  source 1..24: mol_type = other DNA
caggactcttacaaaaaggaaaat

SEQ ID NO: 23587 - DNA, 18 bp, synthetic construct
  source 1..18: mol_type = other DNA
tttcgggatgaggctgtt

SEQ ID NO: 23588 - DNA, 21 bp, synthetic construct
  source 1..21: mol_type = other DNA
agctccacagacaacaagagg

SEQ ID NO: 23589 - DNA, 18 bp, synthetic construct
  source 1..18: mol_type = other DNA
tacagctatcaaaaactt

SEQ ID NO: 23590 - DNA, 15 bp, synthetic construct
  source 1..15: mol_type = other DNA
ctggttccaggaaca

SEQ ID NO: 23591 - DNA, 18 bp, synthetic construct
  source 1..18: mol_type = other DNA
tcatatgtcgctgacagc

SEQ ID NO: 23592 - DNA, 24 bp, synthetic construct
  source 1..24: mol_type = other DNA
caggactcttacaaaaaggaaaat

SEQ ID NO: 23593 - DNA, 18 bp, synthetic construct
  source 1..18: mol_type = other DNA
tcaataactgaaaacgat

SEQ ID NO: 23594 - DNA, 21 bp, synthetic construct
  source 1..21: mol_type = other DNA
atccgttcaaatatggaaaga

SEQ ID NO: 23595 - DNA, 18 bp, synthetic construct
  source 1..18: mol_type = other DNA
tcaataactgaaaacgat

SEQ ID NO: 23596 - DNA, 21 bp, synthetic construct
  source 1..21: mol_type = other DNA
agctccacagacaacaagagg

SEQ ID NO: 23597 - DNA, 18 bp, synthetic construct
  source 1..18: mol_type = other DNA
tacaatcttaaacagttg

SEQ ID NO: 23598 - DNA, 15 bp, synthetic construct
  source 1..15: mol_type = other DNA
aatccttctgggaca

SEQ ID NO: 23599 - DNA, 18 bp, synthetic construct
  source 1..18: mol_type = other DNA
tacagctatcaaaaactt

SEQ ID NO: 23600 - DNA, 21 bp, synthetic construct
  source 1..21: mol_type = other DNA
gtcattacggctggccagaag

SEQ ID NO: 23601 - DNA, 18 bp, synthetic construct
  source 1..18: mol_type = other DNA
tcatatggtgctggcagc

SEQ ID NO: 23602 - DNA, 24 bp, synthetic construct
  source 1..24: mol_type = other DNA
caggactcttacaaaaaggaaaat

SEQ ID NO: 23603 - DNA, 18 bp, synthetic construct
  source 1..18: mol_type = other DNA
tcatatggtgctggcagc

SEQ ID NO: 23604 - DNA, 21 bp, synthetic construct
  source 1..21: mol_type = other DNA
gtcctttcaaatgtggacaga

SEQ ID NO: 23605 - DNA, 18 bp, synthetic construct
  source 1..18: mol_type = other DNA
tcatatgtcgctgacagc

SEQ ID NO: 23606 - DNA, 24 bp, synthetic construct
  source 1..24: mol_type = other DNA
caggactcttacaaaaaggaaaat

SEQ ID NO: 23607 - DNA, 18 bp, synthetic construct
  source 1..18: mol_type = other DNA
tcatatgtcgctgacagc

SEQ ID NO: 23608 - DNA, 18 bp, synthetic construct
  source 1..18: mol_type = other DNA
atcttctctgatggtgaa

SEQ ID NO: 23609 - DNA, 18 bp, synthetic construct
  source 1..18: mol_type = other DNA
tacaatcttaaacagttg

SEQ ID NO: 23610 - DNA, 21 bp, synthetic construct
  source 1..21: mol_type = other DNA
gtcacaactgccaacaacaag

SEQ ID NO: 23611 - DNA, 18 bp, synthetic construct
  source 1..18: mol_type = other DNA
tacaatcttaaacagttg

SEQ ID NO: 23612 - DNA, 15 bp, synthetic construct
  source 1..15: mol_type = other DNA
aatccttctgggaca

SEQ ID NO: 23613 - DNA, 21 bp, synthetic construct
  source 1..21: mol_type = other DNA
gcaaatgaaggctctgaagcc

SEQ ID NO: 23614 - DNA, 24 bp, synthetic construct
  source 1..24: mol_type = other DNA
caggactcttacaaaaaggaaaat

SEQ ID NO: 23615 - DNA, 18 bp, synthetic construct
  source 1..18: mol_type = other DNA
tacaataataagcaactc

SEQ ID NO: 23616 - DNA, 15 bp, synthetic construct
  source 1..15: mol_type = other DNA
aatccttctgggaca

SEQ ID NO: 23617 - DNA, 18 bp, synthetic construct
  source 1..18: mol_type = other DNA
tacaataataagcaactc

SEQ ID NO: 23618 - DNA, 15 bp, synthetic construct
  source 1..15: mol_type = other DNA
aatccttctgggaca

SEQ ID NO: 23619 - DNA, 18 bp, synthetic construct
  source 1..18: mol_type = other DNA
tcatatggtgctggcagc

SEQ ID NO: 23620 - DNA, 15 bp, synthetic construct
  source 1..15: mol_type = other DNA
aatccttctgggaca

SEQ ID NO: 23621 - DNA, 18 bp, synthetic construct
  source 1..18: mol_type = other DNA
tcatatggtgctggcagc

SEQ ID NO: 23622 - DNA, 21 bp, synthetic construct
  source 1..21: mol_type = other DNA
gtcattacggctggccagaag

SEQ ID NO: 23623 - DNA, 18 bp, synthetic construct
  source 1..18: mol_type = other DNA
tcatatggtgctggcagc

SEQ ID NO: 23624 - DNA, 21 bp, synthetic construct
  source 1..21: mol_type = other DNA
gtcacaacagccaacaacaag

SEQ ID NO: 23625 - DNA, 18 bp, synthetic construct
  source 1..18: mol_type = other DNA
tcatatgtcgctgacagc

SEQ ID NO: 23626 - DNA, 24 bp, synthetic construct
  source 1..24: mol_type = other DNA
tacatcacaggagacgccgttgtt

SEQ ID NO: 23627 - DNA, 18 bp, synthetic construct
  source 1..18: mol_type = other DNA
tcatatgtcgctgacagc

SEQ ID NO: 23628 - DNA, 24 bp, synthetic construct
  source 1..24: mol_type = other DNA
tacatcacaggagacaccgttgtt

SEQ ID NO: 23629 - DNA, 18 bp, synthetic construct
  source 1..18: mol_type = other DNA
tactatgataagattttg

SEQ ID NO: 23630 - DNA, 24 bp, synthetic construct
  source 1..24: mol_type = other DNA
tactattccggagacccagtggtt

SEQ ID NO: 23631 - DNA, 15 bp, synthetic construct
  source 1..15: mol_type = other DNA
tctattactgttggc

SEQ ID NO: 23632 - DNA, 21 bp, synthetic construct
  source 1..21: mol_type = other DNA
gttttctcaagtacggaaata

SEQ ID NO: 23633 - DNA, 18 bp, synthetic construct
  source 1..18: mol_type = other DNA
tcaataactgaaaacgat

SEQ ID NO: 23634 - DNA, 24 bp, synthetic construct
  source 1..24: mol_type = other DNA
tacatcacaggagacaccgttgtt

SEQ ID NO: 23635 - DNA, 18 bp, synthetic construct
  source 1..18: mol_type = other DNA
tacaatcttaaacagttg

SEQ ID NO: 23636 - DNA, 21 bp, synthetic construct
  source 1..21: mol_type = other DNA
gcctcaagggacaaagagaaa

SEQ ID NO: 23637 - DNA, 18 bp, synthetic construct
  source 1..18: mol_type = other DNA
tacaatcttaaacagttg

SEQ ID NO: 23638 - DNA, 18 bp, synthetic construct
  source 1..18: mol_type = other DNA
atattctctaatggcaac

SEQ ID NO: 23639 - DNA, 18 bp, synthetic construct
  source 1..18: mol_type = other DNA
tacaatcttaaacagttg

SEQ ID NO: 23640 - DNA, 24 bp, synthetic construct
  source 1..24: mol_type = other DNA
caggactcttacaaaaaggaaaat

SEQ ID NO: 23641 - DNA, 18 bp, synthetic construct
  source 1..18: mol_type = other DNA
tacaatcttaaacagttg

SEQ ID NO: 23642 - DNA, 21 bp, synthetic construct
  source 1..21: mol_type = other DNA
agcttcacagacaacaagagg

SEQ ID NO: 23643 - DNA, 18 bp, synthetic construct
  source 1..18: mol_type = other DNA
tacaatcttaaacagttg

SEQ ID NO: 23644 - DNA, 21 bp, synthetic construct
  source 1..21: mol_type = other DNA
gtcacaactgccaacaacaag

SEQ ID NO: 23645 - DNA, 18 bp, synthetic construct
  source 1..18: mol_type = other DNA
tacaatcttaaacagttg

SEQ ID NO: 23646 - DNA, 24 bp, synthetic construct
  source 1..24: mol_type = other DNA
caggactcttacaaaaaggaaaat

SEQ ID NO: 23647 - DNA, 18 bp, synthetic construct
  source 1..18: mol_type = other DNA
tacaatcttaaacagttg

SEQ ID NO: 23648 - DNA, 24 bp, synthetic construct
  source 1..24: mol_type = other DNA
tactattccggagacccagtggtt

SEQ ID NO: 23649 - DNA, 18 bp, synthetic construct
  source 1..18: mol_type = other DNA
tacaatcttaaacagttg

SEQ ID NO: 23650 - DNA, 24 bp, synthetic construct
  source 1..24: mol_type = other DNA
caggactcttacaaaaaggaaaat

SEQ ID NO: 23651 - DNA, 18 bp, synthetic construct
  source 1..18: mol_type = other DNA
tacaatcttaaacagttg

SEQ ID NO: 23652 - DNA, 24 bp, synthetic construct
  source 1..24: mol_type = other DNA
caggactcttacaaaaaggaaaat

SEQ ID NO: 23653 - DNA, 18 bp, synthetic construct
  source 1..18: mol_type = other DNA
tacaatcttaaacagttg

SEQ ID NO: 23654 - DNA, 21 bp, synthetic construct
  source 1..21: mol_type = other DNA
gttttctcaagtacggaaata

SEQ ID NO: 23655 - DNA, 18 bp, synthetic construct
  source 1..18: mol_type = other DNA
tacaatcttaaacagttg

SEQ ID NO: 23656 - DNA, 21 bp, synthetic construct
  source 1..21: mol_type = other DNA
gcctcaagggacaaagagaaa

SEQ ID NO: 23657 - DNA, 18 bp, synthetic construct
  source 1..18: mol_type = other DNA
tacaatcttaaacagttg

SEQ ID NO: 23658 - DNA, 15 bp, synthetic construct
  source 1..15: mol_type = other DNA
aatccttctgggaca

SEQ ID NO: 23659 - DNA, 18 bp, synthetic construct
  source 1..18: mol_type = other DNA
tacaatcttaaacagttg

SEQ ID NO: 23660 - DNA, 21 bp, synthetic construct
  source 1..21: mol_type = other DNA
gcctcaagggacaaagagaaa

SEQ ID NO: 23661 - DNA, 18 bp, synthetic construct
  source 1..18: mol_type = other DNA
tacaatcttaaacagttg

SEQ ID NO: 23662 - DNA, 21 bp, synthetic construct
  source 1..21: mol_type = other DNA
atacgttcaaatgagagagag

SEQ ID NO: 23663 - DNA, 18 bp, synthetic construct
  source 1..18: mol_type = other DNA
tacaatcttaaacagttg

SEQ ID NO: 23664 - DNA, 15 bp, synthetic construct
  source 1..15: mol_type = other DNA
aatccttctgggaca

SEQ ID NO: 23665 - DNA, 18 bp, synthetic construct
  source 1..18: mol_type = other DNA
tacaatcttaaacagttg

SEQ ID NO: 23666 - DNA, 21 bp, synthetic construct
  source 1..21: mol_type = other DNA
agcttcacagacaacaagagg

SEQ ID NO: 23667 - DNA, 18 bp, synthetic construct
  source 1..18: mol_type = other DNA
tacaatcttaaacagttg

SEQ ID NO: 23668 - DNA, 21 bp, synthetic construct
  source 1..21: mol_type = other DNA
atactttcagtgtccgataaa

SEQ ID NO: 23669 - DNA, 18 bp, synthetic construct
  source 1..18: mol_type = other DNA
tacaatcttaaacagttg

SEQ ID NO: 23670 - DNA, 24 bp, synthetic construct
  source 1..24: mol_type = other DNA
tactattccggagacccagtggtt

SEQ ID NO: 23671 - DNA, 18 bp, synthetic construct
  source 1..18: mol_type = other DNA
tacaatcttaaacagttg

SEQ ID NO: 23672 - DNA, 15 bp, synthetic construct
  source 1..15: mol_type = other DNA
aatccttctgggaca

SEQ ID NO: 23673 - DNA, 18 bp, synthetic construct
  source 1..18: mol_type = other DNA
tttcgaaatcaagctcct

SEQ ID NO: 23674 - DNA, 15 bp, synthetic construct
  source 1..15: mol_type = other DNA
aatccttctgggaca

SEQ ID NO: 23675 - DNA, 18 bp, synthetic construct
  source 1..18: mol_type = other DNA
tttcgaaatcaagctcct

SEQ ID NO: 23676 - DNA, 24 bp, synthetic construct
  source 1..24: mol_type = other DNA
tactattccggagacccagtggtt

SEQ ID NO: 23677 - DNA, 18 bp, synthetic construct
  source 1..18: mol_type = other DNA
tttcgaaatcaagctcct

SEQ ID NO: 23678 - DNA, 15 bp, synthetic construct
  source 1..15: mol_type = other DNA
aatccttctgggaca

SEQ ID NO: 23679 - DNA, 18 bp, synthetic construct
  source 1..18: mol_type = other DNA
tttcagaatcaagaagtt

SEQ ID NO: 23680 - DNA, 24 bp, synthetic construct
  source 1..24: mol_type = other DNA
caggactcttacaaaaaggaaaat

SEQ ID NO: 23681 - DNA, 21 bp, synthetic construct
  source 1..21: mol_type = other DNA
gcaaatgaaggctctgaagcc

SEQ ID NO: 23682 - DNA, 21 bp, synthetic construct
  source 1..21: mol_type = other DNA
gttttctcaagtacggaaata

SEQ ID NO: 23683 - DNA, 21 bp, synthetic construct
  source 1..21: mol_type = other DNA
gcaaatgaaggctctgaagcc

SEQ ID NO: 23684 - DNA, 21 bp, synthetic construct
  source 1..21: mol_type = other DNA
gttttctcaagtacggaaata

SEQ ID NO: 23685 - DNA, 21 bp, synthetic construct
  source 1..21: mol_type = other DNA
gcaaatgaaggctctgaagcc

SEQ ID NO: 23686 - DNA, 21 bp, synthetic construct
  source 1..21: mol_type = other DNA
gttttctcaagtacggaaata

SEQ ID NO: 23687 - DNA, 21 bp, synthetic construct
  source 1..21: mol_type = other DNA
gcaaatgaaggctctgaagcc

SEQ ID NO: 23688 - DNA, 24 bp, synthetic construct
  source 1..24: mol_type = other DNA
tactattcaggagacccagtggtt

SEQ ID NO: 23689 - DNA, 21 bp, synthetic construct
  source 1..21: mol_type = other DNA
gcaaatgaaggctctgaagcc

SEQ ID NO: 23690 - DNA, 21 bp, synthetic construct
  source 1..21: mol_type = other DNA
gttttctcaagtacggaaata

SEQ ID NO: 23691 - DNA, 21 bp, synthetic construct
  source 1..21: mol_type = other DNA
gcaaatgaaggctctgaagcc

SEQ ID NO: 23692 - DNA, 21 bp, synthetic construct
  source 1..21: mol_type = other DNA
gttttctcaagtacggaaata

SEQ ID NO: 23693 - DNA, 18 bp, synthetic construct
  source 1..18: mol_type = other DNA
tttcgggatgaggctgtt

SEQ ID NO: 23694 - DNA, 21 bp, synthetic construct
  source 1..21: mol_type = other DNA
agctccacagacaacaagagg

SEQ ID NO: 23695 - DNA, 18 bp, synthetic construct
  source 1..18: mol_type = other DNA
tttcgggatgaggctgtt

SEQ ID NO: 23696 - DNA, 21 bp, synthetic construct
  source 1..21: mol_type = other DNA
gtcattacggctggccagaag

SEQ ID NO: 23697 - DNA, 18 bp, synthetic construct
  source 1..18: mol_type = other DNA
tttcgggatgaggctgtt

SEQ ID NO: 23698 - DNA, 21 bp, synthetic construct
  source 1..21: mol_type = other DNA
gtcccaaaggccaacgagaag

SEQ ID NO: 23699 - DNA, 18 bp, synthetic construct
  source 1..18: mol_type = other DNA
tttcgggatgaggctgtt

SEQ ID NO: 23700 - DNA, 18 bp, synthetic construct
  source 1..18: mol_type = other DNA
gttgttttggatggtttg

SEQ ID NO: 23701 - DNA, 18 bp, synthetic construct
  source 1..18: mol_type = other DNA
tttcgggatgaggctgtt

SEQ ID NO: 23702 - DNA, 21 bp, synthetic construct
  source 1..21: mol_type = other DNA
agcttcacagacaacaagagg

SEQ ID NO: 23703 - DNA, 18 bp, synthetic construct
  source 1..18: mol_type = other DNA
tttcgggatgaggctgtt

SEQ ID NO: 23704 - DNA, 24 bp, synthetic construct
  source 1..24: mol_type = other DNA
tactattccggagacccagtggtt

SEQ ID NO: 23705 - DNA, 18 bp, synthetic construct
  source 1..18: mol_type = other DNA
tttcgggatgaggctgtt

SEQ ID NO: 23706 - DNA, 18 bp, synthetic construct
  source 1..18: mol_type = other DNA
atcttctctgatggtgac

SEQ ID NO: 23707 - DNA, 18 bp, synthetic construct
  source 1..18: mol_type = other DNA
tttcgggatgaggctgtt

SEQ ID NO: 23708 - DNA, 21 bp, synthetic construct
  source 1..21: mol_type = other DNA
gcctcaagggacaaagagaaa

SEQ ID NO: 23709 - DNA, 18 bp, synthetic construct
  source 1..18: mol_type = other DNA
tttcgggatgaggctgtt

SEQ ID NO: 23710 - DNA, 18 bp, synthetic construct
  source 1..18: mol_type = other DNA
atcttctccaatggtgaa

SEQ ID NO: 23711 - DNA, 18 bp, synthetic construct
  source 1..18: mol_type = other DNA
tttcgggatgaggctgtt

SEQ ID NO: 23712 - DNA, 21 bp, synthetic construct
  source 1..21: mol_type = other DNA
agctccacagacaacaagagg

SEQ ID NO: 23713 - DNA, 18 bp, synthetic construct
  source 1..18: mol_type = other DNA
tttcgggatgaggctgtt

SEQ ID NO: 23714 - DNA, 21 bp, synthetic construct
  source 1..21: mol_type = other DNA
atacgttcagtgtccgataaa

SEQ ID NO: 23715 - DNA, 18 bp, synthetic construct
  source 1..18: mol_type = other DNA
tttcgggatgaggctgtt

SEQ ID NO: 23716 - DNA, 21 bp, synthetic construct
  source 1..21: mol_type = other DNA
gcctcaagggacaaagagaaa

SEQ ID NO: 23717 - DNA, 18 bp, synthetic construct
  source 1..18: mol_type = other DNA
tttcgggatgaggctgtt

SEQ ID NO: 23718 - DNA, 21 bp, synthetic construct
  source 1..21: mol_type = other DNA
agctccacagacaacaagagg

SEQ ID NO: 23719 - DNA, 18 bp, synthetic construct
  source 1..18: mol_type = other DNA
tttcgggatgaggctgtt

SEQ ID NO: 23720 - DNA, 21 bp, synthetic construct
  source 1..21: mol_type = other DNA
atacgttcagtgtccgataaa

SEQ ID NO: 23721 - DNA, 18 bp, synthetic construct
  source 1..18: mol_type = other DNA
tttcgggatgaggctgtt

SEQ ID NO: 23722 - DNA, 21 bp, synthetic construct
  source 1..21: mol_type = other DNA
gcctcaagggacaaagagaaa

SEQ ID NO: 23723 - DNA, 18 bp, synthetic construct
  source 1..18: mol_type = other DNA
tttcgggatgaggctgtt

SEQ ID NO: 23724 - DNA, 21 bp, synthetic construct
  source 1..21: mol_type = other DNA
gtcccaaaggccaacgagaag

SEQ ID NO: 23725 - DNA, 18 bp, synthetic construct
  source 1..18: mol_type = other DNA
tttcgggatgaggctgtt

SEQ ID NO: 23726 - DNA, 15 bp, synthetic construct
  source 1..15: mol_type = other DNA
aatccttctgggaca

SEQ ID NO: 23727 - DNA, 18 bp, synthetic construct
  source 1..18: mol_type = other DNA
tcatacgatgttgatagt

SEQ ID NO: 23728 - DNA, 21 bp, synthetic construct
  source 1..21: mol_type = other DNA
gtcttttcaaatgtggacaga

SEQ ID NO: 23729 - DNA, 18 bp, synthetic construct
  source 1..18: mol_type = other DNA
tcatacgatgttgatagt

SEQ ID NO: 23730 - DNA, 21 bp, synthetic construct
  source 1..21: mol_type = other DNA
gtcccaaaggccaacgagaag

SEQ ID NO: 23731 - DNA, 18 bp, synthetic construct
  source 1..18: mol_type = other DNA
tcatacgatgttgatagt

SEQ ID NO: 23732 - DNA, 21 bp, synthetic construct
  source 1..21: mol_type = other DNA
atacgttcaaatgagcgagag

SEQ ID NO: 23733 - DNA, 18 bp, synthetic construct
  source 1..18: mol_type = other DNA
tcatacgatgttgatagt

SEQ ID NO: 23734 - DNA, 21 bp, synthetic construct
  source 1..21: mol_type = other DNA
atactttcagtgtccaataaa

SEQ ID NO: 23735 - DNA, 18 bp, synthetic construct
  source 1..18: mol_type = other DNA
tcatacgatgttgatagt

SEQ ID NO: 23736 - DNA, 21 bp, synthetic construct
  source 1..21: mol_type = other DNA
gtacgctcaaatgtggataag

SEQ ID NO: 23737 - DNA, 18 bp, synthetic construct
  source 1..18: mol_type = other DNA
tcatacgatgttgatagt

SEQ ID NO: 23738 - DNA, 15 bp, synthetic construct
  source 1..15: mol_type = other DNA
ggtctacaacaaaat

SEQ ID NO: 23739 - DNA, 18 bp, synthetic construct
  source 1..18: mol_type = other DNA
tacagctatcaaaaactt

SEQ ID NO: 23740 - DNA, 24 bp, synthetic construct
  source 1..24: mol_type = other DNA
caggactcttacaaaaaggaaaat

SEQ ID NO: 23741 - DNA, 18 bp, synthetic construct
  source 1..18: mol_type = other DNA
tacagctatcaaaaactt

SEQ ID NO: 23742 - DNA, 21 bp, synthetic construct
  source 1..21: mol_type = other DNA
gtcattacggctggccagaag

SEQ ID NO: 23743 - DNA, 18 bp, synthetic construct
  source 1..18: mol_type = other DNA
tacagctatcaaaaactt

SEQ ID NO: 23744 - DNA, 15 bp, synthetic construct
  source 1..15: mol_type = other DNA
aatccttctgggaca

SEQ ID NO: 23745 - DNA, 18 bp, synthetic construct
  source 1..18: mol_type = other DNA
tacagctatcaaaaactt

SEQ ID NO: 23746 - DNA, 24 bp, synthetic construct
  source 1..24: mol_type = other DNA
caggactcttacaaaaaggaaaat

SEQ ID NO: 23747 - DNA, 18 bp, synthetic construct
  source 1..18: mol_type = other DNA
tacagctatcaaaaactt

SEQ ID NO: 23748 - DNA, 21 bp, synthetic construct
  source 1..21: mol_type = other DNA
atacgttcaaatgagcgagag

SEQ ID NO: 23749 - DNA, 18 bp, synthetic construct
  source 1..18: mol_type = other DNA
tacagctatcaaaaactt

SEQ ID NO: 23750 - DNA, 21 bp, synthetic construct
  source 1..21: mol_type = other DNA
gtcattacggctggccagaag

SEQ ID NO: 23751 - DNA, 18 bp, synthetic construct
  source 1..18: mol_type = other DNA
tacagctatcaaaaactt

SEQ ID NO: 23752 - DNA, 21 bp, synthetic construct
  source 1..21: mol_type = other DNA
gtcacaactgccaacaacaag

SEQ ID NO: 23753 - DNA, 18 bp, synthetic construct
  source 1..18: mol_type = other DNA
tacagctatcaaaaactt

SEQ ID NO: 23754 - DNA, 18 bp, synthetic construct
  source 1..18: mol_type = other DNA
atcttctctgatggtgac

SEQ ID NO: 23755 - DNA, 18 bp, synthetic construct
  source 1..18: mol_type = other DNA
tacagctatcaaaaactt

SEQ ID NO: 23756 - DNA, 18 bp, synthetic construct
  source 1..18: mol_type = other DNA
atcttctctgatggtgac

SEQ ID NO: 23757 - DNA, 18 bp, synthetic construct
  source 1..18: mol_type = other DNA
tacagctatcaaaaactt

SEQ ID NO: 23758 - DNA, 21 bp, synthetic construct
  source 1..21: mol_type = other DNA
gtcattacggctggccagaag

SEQ ID NO: 23759 - DNA, 18 bp, synthetic construct
  source 1..18: mol_type = other DNA
tacagctatcaaaaactt

SEQ ID NO: 23760 - DNA, 21 bp, synthetic construct
  source 1..21: mol_type = other DNA
agcttcacagacaacaagagg

SEQ ID NO: 23761 - DNA, 18 bp, synthetic construct
  source 1..18: mol_type = other DNA
tacagctatcaaaaactt

SEQ ID NO: 23762 - DNA, 24 bp, synthetic construct
  source 1..24: mol_type = other DNA
caggactcttacaaaaaggaaaat

SEQ ID NO: 23763 - DNA, 18 bp, synthetic construct
  source 1..18: mol_type = other DNA
tacagctatcaaaaactt

SEQ ID NO: 23764 - DNA, 21 bp, synthetic construct
  source 1..21: mol_type = other DNA
attcgttcaaatgtggacaga

SEQ ID NO: 23765 - DNA, 18 bp, synthetic construct
  source 1..18: mol_type = other DNA
tacagctatcaaaaactt

SEQ ID NO: 23766 - DNA, 24 bp, synthetic construct
  source 1..24: mol_type = other DNA
tactattccggagacccagtggtt

SEQ ID NO: 23767 - DNA, 18 bp, synthetic construct
  source 1..18: mol_type = other DNA
tacagctatcaaaaactt

SEQ ID NO: 23768 - DNA, 24 bp, synthetic construct
  source 1..24: mol_type = other DNA
caggactcttacaaaaaggaaaat

SEQ ID NO: 23769 - DNA, 18 bp, synthetic construct
  source 1..18: mol_type = other DNA
tacaataataagcaactc

SEQ ID NO: 23770 - DNA, 24 bp, synthetic construct
  source 1..24: mol_type = other DNA
tactatccaggagacccagtggtt

SEQ ID NO: 23771 - DNA, 18 bp, synthetic construct
  source 1..18: mol_type = other DNA
tacaataataagcaactc

SEQ ID NO: 23772 - DNA, 24 bp, synthetic construct
  source 1..24: mol_type = other DNA
tactattccggagacccagtggtt

SEQ ID NO: 23773 - DNA, 18 bp, synthetic construct
  source 1..18: mol_type = other DNA
tacaataataagcaactc

SEQ ID NO: 23774 - DNA, 24 bp, synthetic construct
  source 1..24: mol_type = other DNA
caggactcttacaaaaaggaaaat

SEQ ID NO: 23775 - DNA, 18 bp, synthetic construct
  source 1..18: mol_type = other DNA
tacaataataagcaactc

SEQ ID NO: 23776 - DNA, 24 bp, synthetic construct
  source 1..24: mol_type = other DNA
tactattcgggaaacccagtggtt

SEQ ID NO: 23777 - DNA, 18 bp, synthetic construct
  source 1..18: mol_type = other DNA
tacaataataagcaactc

SEQ ID NO: 23778 - DNA, 21 bp, synthetic construct
  source 1..21: mol_type = other DNA
gtgacaactgccaacaacaag

SEQ ID NO: 23779 - DNA, 18 bp, synthetic construct
  source 1..18: mol_type = other DNA
tacaataataagcaactc

SEQ ID NO: 23780 - DNA, 21 bp, synthetic construct
  source 1..21: mol_type = other DNA
gtcacaactgccaacaacaag

SEQ ID NO: 23781 - DNA, 18 bp, synthetic construct
  source 1..18: mol_type = other DNA
tacaataataagcaactc

SEQ ID NO: 23782 - DNA, 15 bp, synthetic construct
  source 1..15: mol_type = other DNA
aatccttctgggaca

SEQ ID NO: 23783 - DNA, 18 bp, synthetic construct
  source 1..18: mol_type = other DNA
tacaataataagcaactc

SEQ ID NO: 23784 - DNA, 21 bp, synthetic construct
  source 1..21: mol_type = other DNA
agctccacagacaacaagagg

SEQ ID NO: 23785 - DNA, 18 bp, synthetic construct
  source 1..18: mol_type = other DNA
tacaataataagcaactc

SEQ ID NO: 23786 - DNA, 24 bp, synthetic construct
  source 1..24: mol_type = other DNA
caggactcttacaaaaaggaaaat

SEQ ID NO: 23787 - DNA, 18 bp, synthetic construct
  source 1..18: mol_type = other DNA
tacaataataagcaactc

SEQ ID NO: 23788 - DNA, 15 bp, synthetic construct
  source 1..15: mol_type = other DNA
aatccttctgggaca

SEQ ID NO: 23789 - DNA, 18 bp, synthetic construct
  source 1..18: mol_type = other DNA
tacaataataagcaactc

SEQ ID NO: 23790 - DNA, 18 bp, synthetic construct
  source 1..18: mol_type = other DNA
atcttctctgatggtgac

SEQ ID NO: 23791 - DNA, 18 bp, synthetic construct
  source 1..18: mol_type = other DNA
tacaataataagcaactc

SEQ ID NO: 23792 - DNA, 21 bp, synthetic construct
  source 1..21: mol_type = other DNA
attcgttcaaatgtggacaga

SEQ ID NO: 23793 - DNA, 18 bp, synthetic construct
  source 1..18: mol_type = other DNA
tacaataataagcaactc

SEQ ID NO: 23794 - DNA, 21 bp, synthetic construct
  source 1..21: mol_type = other DNA
agctccacagacaacaagagg

SEQ ID NO: 23795 - DNA, 18 bp, synthetic construct
  source 1..18: mol_type = other DNA
tcatatggtgctggcagc

SEQ ID NO: 23796 - DNA, 21 bp, synthetic construct
  source 1..21: mol_type = other DNA
attcgttcaaatatggaaaga

SEQ ID NO: 23797 - DNA, 18 bp, synthetic construct
  source 1..18: mol_type = other DNA
tcatatggtgctggcagc

SEQ ID NO: 23798 - DNA, 21 bp, synthetic construct
  source 1..21: mol_type = other DNA
ataagtttggtgtccaataaa

SEQ ID NO: 23799 - DNA, 18 bp, synthetic construct
  source 1..18: mol_type = other DNA
tcatatggtgctggcagc

SEQ ID NO: 23800 - DNA, 18 bp, synthetic construct
  source 1..18: mol_type = other DNA
atcttctctgatggtgaa

SEQ ID NO: 23801 - DNA, 18 bp, synthetic construct
  source 1..18: mol_type = other DNA
tcatatggtgctggcagc

SEQ ID NO: 23802 - DNA, 21 bp, synthetic construct
  source 1..21: mol_type = other DNA
attcgttcaaatatggaaaga

SEQ ID NO: 23803 - DNA, 18 bp, synthetic construct
  source 1..18: mol_type = other DNA
tcatatggtgctggcagc

SEQ ID NO: 23804 - DNA, 21 bp, synthetic construct
  source 1..21: mol_type = other DNA
gtcattacggctggccagaag

SEQ ID NO: 23805 - DNA, 18 bp, synthetic construct
  source 1..18: mol_type = other DNA
tcatatggtgctggcagc

SEQ ID NO: 23806 - DNA, 18 bp, synthetic construct
  source 1..18: mol_type = other DNA
atcttctctgatggtgaa

SEQ ID NO: 23807 - DNA, 18 bp, synthetic construct
  source 1..18: mol_type = other DNA
tcatatggtgctggcagc

SEQ ID NO: 23808 - DNA, 18 bp, synthetic construct
  source 1..18: mol_type = other DNA
atcttctctgatggtgaa

SEQ ID NO: 23809 - DNA, 18 bp, synthetic construct
  source 1..18: mol_type = other DNA
tcatatggtgctggcagc

SEQ ID NO: 23810 - DNA, 21 bp, synthetic construct
  source 1..21: mol_type = other DNA
gttttctcaagtacggaaata

SEQ ID NO: 23811 - DNA, 18 bp, synthetic construct
  source 1..18: mol_type = other DNA
tcatatggtgctggcagc

SEQ ID NO: 23812 - DNA, 21 bp, synthetic construct
  source 1..21: mol_type = other DNA
atacgttcagtgtccgataaa

SEQ ID NO: 23813 - DNA, 18 bp, synthetic construct
  source 1..18: mol_type = other DNA
tcatatggtgctggcagc

SEQ ID NO: 23814 - DNA, 18 bp, synthetic construct
  source 1..18: mol_type = other DNA
atcttctctgatggtgac

SEQ ID NO: 23815 - DNA, 18 bp, synthetic construct
  source 1..18: mol_type = other DNA
tcatatggtgctggcagc

SEQ ID NO: 23816 - DNA, 18 bp, synthetic construct
  source 1..18: mol_type = other DNA
atcttctctgatggtgac

SEQ ID NO: 23817 - DNA, 18 bp, synthetic construct
  source 1..18: mol_type = other DNA
tcatatggtgctggcagc

SEQ ID NO: 23818 - DNA, 21 bp, synthetic construct
  source 1..21: mol_type = other DNA
gtcccaaaggccaacgagaag

SEQ ID NO: 23819 - DNA, 18 bp, synthetic construct
  source 1..18: mol_type = other DNA
tcatatggtgctggcagc

SEQ ID NO: 23820 - DNA, 21 bp, synthetic construct
  source 1..21: mol_type = other DNA
atacgttcaaatgagagagag

SEQ ID NO: 23821 - DNA, 18 bp, synthetic construct
  source 1..18: mol_type = other DNA
tcatatggtgctggcagc

SEQ ID NO: 23822 - DNA, 15 bp, synthetic construct
  source 1..15: mol_type = other DNA
aatccttctgggaca

SEQ ID NO: 23823 - DNA, 18 bp, synthetic construct
  source 1..18: mol_type = other DNA
tcatatggtgctggcagc

SEQ ID NO: 23824 - DNA, 18 bp, synthetic construct
  source 1..18: mol_type = other DNA
atcttctccaatggtgaa

SEQ ID NO: 23825 - DNA, 18 bp, synthetic construct
  source 1..18: mol_type = other DNA
tcatatggtgctggcagc

SEQ ID NO: 23826 - DNA, 21 bp, synthetic construct
  source 1..21: mol_type = other DNA
atactttcagtgtccaataaa

SEQ ID NO: 23827 - DNA, 18 bp, synthetic construct
  source 1..18: mol_type = other DNA
tcatatggtgctggcagc

SEQ ID NO: 23828 - DNA, 21 bp, synthetic construct
  source 1..21: mol_type = other DNA
agctccacagacaacaagagg

SEQ ID NO: 23829 - DNA, 18 bp, synthetic construct
  source 1..18: mol_type = other DNA
tcatatggtgctggcagc

SEQ ID NO: 23830 - DNA, 21 bp, synthetic construct
  source 1..21: mol_type = other DNA
gtcccaaaggccaacgagaag

SEQ ID NO: 23831 - DNA, 18 bp, synthetic construct
  source 1..18: mol_type = other DNA
tcatatggtgctggcagc

SEQ ID NO: 23832 - DNA, 24 bp, synthetic construct
  source 1..24: mol_type = other DNA
caggactcttacaaaaaggaaaat

SEQ ID NO: 23833 - DNA, 18 bp, synthetic construct
  source 1..18: mol_type = other DNA
tcatatggtgctggcagc

SEQ ID NO: 23834 - DNA, 21 bp, synthetic construct
  source 1..21: mol_type = other DNA
ggatataaggactatgtggta

SEQ ID NO: 23835 - DNA, 18 bp, synthetic construct
  source 1..18: mol_type = other DNA
tcatatggtgctggcagc

SEQ ID NO: 23836 - DNA, 24 bp, synthetic construct
  source 1..24: mol_type = other DNA
caggactcttacaaaaaggaaaat

SEQ ID NO: 23837 - DNA, 18 bp, synthetic construct
  source 1..18: mol_type = other DNA
tcatatggtgctggcagc

SEQ ID NO: 23838 - DNA, 21 bp, synthetic construct
  source 1..21: mol_type = other DNA
atccgttcaaatatggaaaga

SEQ ID NO: 23839 - DNA, 18 bp, synthetic construct
  source 1..18: mol_type = other DNA
tcatatggtgctggcagc

SEQ ID NO: 23840 - DNA, 21 bp, synthetic construct
  source 1..21: mol_type = other DNA
gtcccaaaggccaacgagaag

SEQ ID NO: 23841 - DNA, 18 bp, synthetic construct
  source 1..18: mol_type = other DNA
tcatatggtgctggcagc

SEQ ID NO: 23842 - DNA, 21 bp, synthetic construct
  source 1..21: mol_type = other DNA
agcttcacagacaacaagagg

SEQ ID NO: 23843 - DNA, 18 bp, synthetic construct
  source 1..18: mol_type = other DNA
tcatatggtgctggcagc

SEQ ID NO: 23844 - DNA, 21 bp, synthetic construct
  source 1..21: mol_type = other DNA
gtgacaactgccaacaacaag

SEQ ID NO: 23845 - DNA, 18 bp, synthetic construct
  source 1..18: mol_type = other DNA
tcatatggtgctggcagc

SEQ ID NO: 23846 - DNA, 15 bp, synthetic construct
  source 1..15: mol_type = other DNA
aatccttctgggaca

SEQ ID NO: 23847 - DNA, 18 bp, synthetic construct
  source 1..18: mol_type = other DNA
tcatatggtgctggcagc

SEQ ID NO: 23848 - DNA, 24 bp, synthetic construct
  source 1..24: mol_type = other DNA
tactattcaggagacccagtggtt

SEQ ID NO: 23849 - DNA, 18 bp, synthetic construct
  source 1..18: mol_type = other DNA
tcatatggtgctggcagc

SEQ ID NO: 23850 - DNA, 21 bp, synthetic construct
  source 1..21: mol_type = other DNA
atacgttcaaatgagcgagag

SEQ ID NO: 23851 - DNA, 18 bp, synthetic construct
  source 1..18: mol_type = other DNA
tcatatggtgctggcagc

SEQ ID NO: 23852 - DNA, 24 bp, synthetic construct
  source 1..24: mol_type = other DNA
tactattccggagacccagtggtt

SEQ ID NO: 23853 - DNA, 18 bp, synthetic construct
  source 1..18: mol_type = other DNA
tcatatggtgctggcagc

SEQ ID NO: 23854 - DNA, 21 bp, synthetic construct
  source 1..21: mol_type = other DNA
gtcacaactgccaacaacaag

SEQ ID NO: 23855 - DNA, 18 bp, synthetic construct
  source 1..18: mol_type = other DNA
tcatatggtgctggcagc

SEQ ID NO: 23856 - DNA, 21 bp, synthetic construct
  source 1..21: mol_type = other DNA
gtcattacggctggccagaag

SEQ ID NO: 23857 - DNA, 18 bp, synthetic construct
  source 1..18: mol_type = other DNA
tcatatggtgctggcagc

SEQ ID NO: 23858 - DNA, 21 bp, synthetic construct
  source 1..21: mol_type = other DNA
gtcattacggctggccagaag

SEQ ID NO: 23859 - DNA, 18 bp, synthetic construct
  source 1..18: mol_type = other DNA
tcatatggtgctggcagc

SEQ ID NO: 23860 - DNA, 21 bp, synthetic construct
  source 1..21: mol_type = other DNA
atacgttcagtgtccgataaa

SEQ ID NO: 23861 - DNA, 18 bp, synthetic construct
  source 1..18: mol_type = other DNA
tcatatggtgctggcagc

SEQ ID NO: 23862 - DNA, 24 bp, synthetic construct
  source 1..24: mol_type = other DNA
caggactcttacaaaaaggaaaat

SEQ ID NO: 23863 - DNA, 18 bp, synthetic construct
  source 1..18: mol_type = other DNA
tcatatggtgctggcagc

SEQ ID NO: 23864 - DNA, 15 bp, synthetic construct
  source 1..15: mol_type = other DNA
aatccttctgggaca

SEQ ID NO: 23865 - DNA, 18 bp, synthetic construct
  source 1..18: mol_type = other DNA
tcatatggtgctggcagc

SEQ ID NO: 23866 - DNA, 21 bp, synthetic construct
  source 1..21: mol_type = other DNA
agctccacagacaacaagagg

SEQ ID NO: 23867 - DNA, 18 bp, synthetic construct
  source 1..18: mol_type = other DNA
tcatatggtgctggcagc

SEQ ID NO: 23868 - DNA, 21 bp, synthetic construct
  source 1..21: mol_type = other DNA
ataagttcagtgtccgataaa

SEQ ID NO: 23869 - DNA, 18 bp, synthetic construct
  source 1..18: mol_type = other DNA
tcatatggtgctggcagc

SEQ ID NO: 23870 - DNA, 21 bp, synthetic construct
  source 1..21: mol_type = other DNA
atacgttcagtgtccgataaa

SEQ ID NO: 23871 - DNA, 18 bp, synthetic construct
  source 1..18: mol_type = other DNA
tcatatggtgctggcagc

SEQ ID NO: 23872 - DNA, 15 bp, synthetic construct
  source 1..15: mol_type = other DNA
aatccttctgggaca

SEQ ID NO: 23873 - DNA, 18 bp, synthetic construct
  source 1..18: mol_type = other DNA
tcatatggtgctggcagc

SEQ ID NO: 23874 - DNA, 15 bp, synthetic construct
  source 1..15: mol_type = other DNA
ggtctacaacaaaat

SEQ ID NO: 23875 - DNA, 18 bp, synthetic construct
  source 1..18: mol_type = other DNA
tcatatggtgctggcagc

SEQ ID NO: 23876 - DNA, 24 bp, synthetic construct
  source 1..24: mol_type = other DNA
caggactcttacaaaaaggaaaat

SEQ ID NO: 23877 - DNA, 18 bp, synthetic construct
  source 1..18: mol_type = other DNA
tcatatggtgctggcagc

SEQ ID NO: 23878 - DNA, 24 bp, synthetic construct
  source 1..24: mol_type = other DNA
caggactcttacaaaaaggaaaat

SEQ ID NO: 23879 - DNA, 18 bp, synthetic construct
  source 1..18: mol_type = other DNA
tcatatggtgctggcagc

SEQ ID NO: 23880 - DNA, 18 bp, synthetic construct
  source 1..18: mol_type = other DNA
atcttctctgatggtgac

SEQ ID NO: 23881 - DNA, 18 bp, synthetic construct
  source 1..18: mol_type = other DNA
tcatatggtgctggcagc

SEQ ID NO: 23882 - DNA, 21 bp, synthetic construct
  source 1..21: mol_type = other DNA
ataagtttggtgtccaataaa

SEQ ID NO: 23883 - DNA, 18 bp, synthetic construct
  source 1..18: mol_type = other DNA
tcatatggtgctggcagc

SEQ ID NO: 23884 - DNA, 18 bp, synthetic construct
  source 1..18: mol_type = other DNA
atcttctccaatggtgaa

SEQ ID NO: 23885 - DNA, 18 bp, synthetic construct
  source 1..18: mol_type = other DNA
tcatatggtgctggcagc

SEQ ID NO: 23886 - DNA, 18 bp, synthetic construct
  source 1..18: mol_type = other DNA
atcttctccaatggtgaa

SEQ ID NO: 23887 - DNA, 18 bp, synthetic construct
  source 1..18: mol_type = other DNA
tcatatggtgctggcagc

SEQ ID NO: 23888 - DNA, 21 bp, synthetic construct
  source 1..21: mol_type = other DNA
agctccacagacaacaagagg

SEQ ID NO: 23889 - DNA, 18 bp, synthetic construct
  source 1..18: mol_type = other DNA
tcatatggtgctggcagc

SEQ ID NO: 23890 - DNA, 21 bp, synthetic construct
  source 1..21: mol_type = other DNA
atactttcagtgtccgataaa

SEQ ID NO: 23891 - DNA, 18 bp, synthetic construct
  source 1..18: mol_type = other DNA
tcatatggtgctggcagc

SEQ ID NO: 23892 - DNA, 21 bp, synthetic construct
  source 1..21: mol_type = other DNA
agctccacagacaacaagagg

SEQ ID NO: 23893 - DNA, 18 bp, synthetic construct
  source 1..18: mol_type = other DNA
tcatatggtgctggcagc

SEQ ID NO: 23894 - DNA, 15 bp, synthetic construct
  source 1..15: mol_type = other DNA
aatccttctgggaca

SEQ ID NO: 23895 - DNA, 18 bp, synthetic construct
  source 1..18: mol_type = other DNA
tcatatggtgctggcagc

SEQ ID NO: 23896 - DNA, 21 bp, synthetic construct
  source 1..21: mol_type = other DNA
gttttctcaagtacggaaata

SEQ ID NO: 23897 - DNA, 18 bp, synthetic construct
  source 1..18: mol_type = other DNA
tcatatggtgctggcagc

SEQ ID NO: 23898 - DNA, 15 bp, synthetic construct
  source 1..15: mol_type = other DNA
ctggttccaggaaca

SEQ ID NO: 23899 - DNA, 18 bp, synthetic construct
  source 1..18: mol_type = other DNA
tcatatggtgctggcagc

SEQ ID NO: 23900 - DNA, 21 bp, synthetic construct
  source 1..21: mol_type = other DNA
gtcacaacagccaacaataag

SEQ ID NO: 23901 - DNA, 18 bp, synthetic construct
  source 1..18: mol_type = other DNA
tcatatggtgctggcagc

SEQ ID NO: 23902 - DNA, 24 bp, synthetic construct
  source 1..24: mol_type = other DNA
caggactcttacaaaaaggaaaat

SEQ ID NO: 23903 - DNA, 18 bp, synthetic construct
  source 1..18: mol_type = other DNA
tcatatggtgctggcaac

SEQ ID NO: 23904 - DNA, 18 bp, synthetic construct
  source 1..18: mol_type = other DNA
atcttctccaatggtgaa

SEQ ID NO: 23905 - DNA, 18 bp, synthetic construct
  source 1..18: mol_type = other DNA
tcatatggtgctggcaac

SEQ ID NO: 23906 - skipped

SEQ ID NO: 23907 - DNA, 18 bp, synthetic construct
  source 1..18: mol_type = other DNA
tcatatggtgctggcaac

SEQ ID NO: 23908 - DNA, 18 bp, synthetic construct
  source 1..18: mol_type = other DNA
atcttctctgatggtgac

SEQ ID NO: 23909 - DNA, 18 bp, synthetic construct
  source 1..18: mol_type = other DNA
tcatatggtgctggcaac

SEQ ID NO: 23910 - DNA, 24 bp, synthetic construct
  source 1..24: mol_type = other DNA
caggactcttacaaaaaggaaaat

SEQ ID NO: 23911 - DNA, 18 bp, synthetic construct
  source 1..18: mol_type = other DNA
tcatatggtgctggcaac

SEQ ID NO: 23912 - DNA, 21 bp, synthetic construct
  source 1..21: mol_type = other DNA
gtgacaactgccaacaacaag

SEQ ID NO: 23913 - DNA, 18 bp, synthetic construct
  source 1..18: mol_type = other DNA
tcatatggtgctggcaac

SEQ ID NO: 23914 - DNA, 21 bp, synthetic construct
  source 1..21: mol_type = other DNA
gtcattacggctggccagaag

SEQ ID NO: 23915 - DNA, 18 bp, synthetic construct
  source 1..18: mol_type = other DNA
tcatatggtgctggcaac

SEQ ID NO: 23916 - DNA, 24 bp, synthetic construct
  source 1..24: mol_type = other DNA
caggactcttacaaaaaggaaaat

SEQ ID NO: 23917 - DNA, 18 bp, synthetic construct
  source 1..18: mol_type = other DNA
tcatatggtgctggcaac

SEQ ID NO: 23918 - DNA, 24 bp, synthetic construct
  source 1..24: mol_type = other DNA
caggactcttacaaaaaggaaaat

SEQ ID NO: 23919 - DNA, 18 bp, synthetic construct
  source 1..18: mol_type = other DNA
tcatatggtgctggcaac

SEQ ID NO: 23920 - DNA, 18 bp, synthetic construct
  source 1..18: mol_type = other DNA
atcttctccaatggtgaa

SEQ ID NO: 23921 - DNA, 18 bp, synthetic construct
  source 1..18: mol_type = other DNA
tcatatggtgctggcaac

SEQ ID NO: 23922 - DNA, 21 bp, synthetic construct
  source 1..21: mol_type = other DNA
attcgttcaaatatggaaaga

SEQ ID NO: 23923 - DNA, 18 bp, synthetic construct
  source 1..18: mol_type = other DNA
tcatatggtgctggcaac

SEQ ID NO: 23924 - DNA, 24 bp, synthetic construct
  source 1..24: mol_type = other DNA
tactattccggagacccagtggtt

SEQ ID NO: 23925 - DNA, 18 bp, synthetic construct
  source 1..18: mol_type = other DNA
tcatatggtgctggcaac

SEQ ID NO: 23926 - DNA, 21 bp, synthetic construct
  source 1..21: mol_type = other DNA
agctccacagacaacaagagg

SEQ ID NO: 23927 - DNA, 18 bp, synthetic construct
  source 1..18: mol_type = other DNA
tcatatggtgctggcaac

SEQ ID NO: 23928 - DNA, 21 bp, synthetic construct
  source 1..21: mol_type = other DNA
gtcacaacagccaacaataag

SEQ ID NO: 23929 - DNA, 18 bp, synthetic construct
  source 1..18: mol_type = other DNA
tcatatggtgctggcaac

SEQ ID NO: 23930 - DNA, 21 bp, synthetic construct
  source 1..21: mol_type = other DNA
ggatataaggactatgtggta

SEQ ID NO: 23931 - DNA, 18 bp, synthetic construct
  source 1..18: mol_type = other DNA
tcatatggtgctggcaac

SEQ ID NO: 23932 - DNA, 18 bp, synthetic construct
  source 1..18: mol_type = other DNA
atcttctctgatggtgaa

SEQ ID NO: 23933 - DNA, 18 bp, synthetic construct
  source 1..18: mol_type = other DNA
tcatatggtgctggcaac

SEQ ID NO: 23934 - DNA, 21 bp, synthetic construct
  source 1..21: mol_type = other DNA
gtcattacggctggccagaag

SEQ ID NO: 23935 - DNA, 18 bp, synthetic construct
  source 1..18: mol_type = other DNA
tcatatggtgctggcaac

SEQ ID NO: 23936 - DNA, 21 bp, synthetic construct
  source 1..21: mol_type = other DNA
gcctcaagggacaaagagaaa

SEQ ID NO: 23937 - DNA, 18 bp, synthetic construct
  source 1..18: mol_type = other DNA
tcatatggtgctggcaac

SEQ ID NO: 23938 - DNA, 24 bp, synthetic construct
  source 1..24: mol_type = other DNA
caggactcttacaaaaaggaaaat

SEQ ID NO: 23939 - DNA, 18 bp, synthetic construct
  source 1..18: mol_type = other DNA
tcatatggtgctggcaac

SEQ ID NO: 23940 - DNA, 18 bp, synthetic construct
  source 1..18: mol_type = other DNA
atcttctccaatggtgac

SEQ ID NO: 23941 - DNA, 18 bp, synthetic construct
  source 1..18: mol_type = other DNA
tcatatggtgctggcaac

SEQ ID NO: 23942 - DNA, 21 bp, synthetic construct
  source 1..21: mol_type = other DNA
gtcttttcaaatgtggacaga

SEQ ID NO: 23943 - DNA, 18 bp, synthetic construct
  source 1..18: mol_type = other DNA
tcatatggtgctggcaac

SEQ ID NO: 23944 - DNA, 21 bp, synthetic construct
  source 1..21: mol_type = other DNA
agctccacagacaacaagagg

SEQ ID NO: 23945 - DNA, 18 bp, synthetic construct
  source 1..18: mol_type = other DNA
tcatatggtgctggcaac

SEQ ID NO: 23946 - DNA, 21 bp, synthetic construct
  source 1..21: mol_type = other DNA
atacgttcagtgtccgataaa

SEQ ID NO: 23947 - DNA, 18 bp, synthetic construct
  source 1..18: mol_type = other DNA
tcatatggtgctggcaac

SEQ ID NO: 23948 - DNA, 21 bp, synthetic construct
  source 1..21: mol_type = other DNA
agctccacagacaacaagagg

SEQ ID NO: 23949 - DNA, 18 bp, synthetic construct
  source 1..18: mol_type = other DNA
tcatatggtgctggcaac

SEQ ID NO: 23950 - DNA, 21 bp, synthetic construct
  source 1..21: mol_type = other DNA
gtcattacggctggccagaag

SEQ ID NO: 23951 - DNA, 18 bp, synthetic construct
  source 1..18: mol_type = other DNA
tcatatggtgctggcaac

SEQ ID NO: 23952 - DNA, 21 bp, synthetic construct
  source 1..21: mol_type = other DNA
gtcattacggctggccagaag

SEQ ID NO: 23953 - DNA, 18 bp, synthetic construct
  source 1..18: mol_type = other DNA
tcatatggtgctggcaac

SEQ ID NO: 23954 - DNA, 21 bp, synthetic construct
  source 1..21: mol_type = other DNA
agctccacagacaacaagagg

SEQ ID NO: 23955 - DNA, 18 bp, synthetic construct
  source 1..18: mol_type = other DNA
tcatatggtgctggcaac

SEQ ID NO: 23956 - DNA, 24 bp, synthetic construct
  source 1..24: mol_type = other DNA
caggactcttacaaaaaggaaaat

SEQ ID NO: 23957 - DNA, 18 bp, synthetic construct
  source 1..18: mol_type = other DNA
tcatatggtgctggcaac

SEQ ID NO: 23958 - DNA, 21 bp, synthetic construct
  source 1..21: mol_type = other DNA
ataagtttggtgtccaataaa

SEQ ID NO: 23959 - DNA, 18 bp, synthetic construct
  source 1..18: mol_type = other DNA
tcatatggtgctggcaac

SEQ ID NO: 23960 - DNA, 18 bp, synthetic construct
  source 1..18: mol_type = other DNA
atcttctccaatggtgaa

SEQ ID NO: 23961 - DNA, 18 bp, synthetic construct
  source 1..18: mol_type = other DNA
tcatatggtgctggcaac

SEQ ID NO: 23962 - DNA, 21 bp, synthetic construct
  source 1..21: mol_type = other DNA
atacgtccagtgtccaataaa

SEQ ID NO: 23963 - DNA, 18 bp, synthetic construct
  source 1..18: mol_type = other DNA
tcatatggtgctggcaac

SEQ ID NO: 23964 - DNA, 24 bp, synthetic construct
  source 1..24: mol_type = other DNA
caggactcttacaaaaaggaaaat

SEQ ID NO: 23965 - DNA, 18 bp, synthetic construct
  source 1..18: mol_type = other DNA
tcatatggtgctggcaac

SEQ ID NO: 23966 - DNA, 18 bp, synthetic construct
  source 1..18: mol_type = other DNA
atcttctccaatggtgaa

SEQ ID NO: 23967 - DNA, 18 bp, synthetic construct
  source 1..18: mol_type = other DNA
tcatatggtgctggcaac

SEQ ID NO: 23968 - DNA, 18 bp, synthetic construct
  source 1..18: mol_type = other DNA
gttgttttggatggtttg

SEQ ID NO: 23969 - DNA, 18 bp, synthetic construct
  source 1..18: mol_type = other DNA
tcatatggtgctggcaac

SEQ ID NO: 23970 - DNA, 18 bp, synthetic construct
  source 1..18: mol_type = other DNA
atcttctccaatggtgaa

SEQ ID NO: 23971 - DNA, 18 bp, synthetic construct
  source 1..18: mol_type = other DNA
tcatatggtgctggcaac

SEQ ID NO: 23972 - DNA, 21 bp, synthetic construct
  source 1..21: mol_type = other DNA
gttttctcaagtacggaaata

SEQ ID NO: 23973 - DNA, 18 bp, synthetic construct
  source 1..18: mol_type = other DNA
tcatatggtgctggcaac

SEQ ID NO: 23974 - DNA, 21 bp, synthetic construct
  source 1..21: mol_type = other DNA
gcctcaagggacaaagagaaa

SEQ ID NO: 23975 - DNA, 18 bp, synthetic construct
  source 1..18: mol_type = other DNA
tcatatggtgctggcaac

SEQ ID NO: 23976 - DNA, 21 bp, synthetic construct
  source 1..21: mol_type = other DNA
atactttcagtgtccgataaa

SEQ ID NO: 23977 - DNA, 18 bp, synthetic construct
  source 1..18: mol_type = other DNA
tcatatgtcgctgacagc

SEQ ID NO: 23978 - DNA, 21 bp, synthetic construct
  source 1..21: mol_type = other DNA
atacgttcaaatgagagagag

SEQ ID NO: 23979 - DNA, 18 bp, synthetic construct
  source 1..18: mol_type = other DNA
tcatatgtcgctgacagc

SEQ ID NO: 23980 - DNA, 21 bp, synthetic construct
  source 1..21: mol_type = other DNA
ataagttcagtgtccgataaa

SEQ ID NO: 23981 - DNA, 18 bp, synthetic construct
  source 1..18: mol_type = other DNA
tcatatgtcgctgacagc

SEQ ID NO: 23982 - DNA, 18 bp, synthetic construct
  source 1..18: mol_type = other DNA
atcttctctgatggtgac

SEQ ID NO: 23983 - DNA, 18 bp, synthetic construct
  source 1..18: mol_type = other DNA
tcatatgtcgctgacagc

SEQ ID NO: 23984 - DNA, 15 bp, synthetic construct
  source 1..15: mol_type = other DNA
aatccttctgggaca

SEQ ID NO: 23985 - DNA, 18 bp, synthetic construct
  source 1..18: mol_type = other DNA
tcatatgtcgctgacagc

SEQ ID NO: 23986 - DNA, 24 bp, synthetic construct
  source 1..24: mol_type = other DNA
caggactcttacaaaaaggaaaat

SEQ ID NO: 23987 - DNA, 18 bp, synthetic construct
  source 1..18: mol_type = other DNA
tcatatgtcgctgacagc

SEQ ID NO: 23988 - DNA, 21 bp, synthetic construct
  source 1..21: mol_type = other DNA
attcgttcaaatatggaaaga

SEQ ID NO: 23989 - DNA, 18 bp, synthetic construct
  source 1..18: mol_type = other DNA
tcatatgtcgctgacagc

SEQ ID NO: 23990 - DNA, 21 bp, synthetic construct
  source 1..21: mol_type = other DNA
ggatataaggactatgtggta

SEQ ID NO: 23991 - DNA, 18 bp, synthetic construct
  source 1..18: mol_type = other DNA
tcatatgtcgctgacagc

SEQ ID NO: 23992 - DNA, 21 bp, synthetic construct
  source 1..21: mol_type = other DNA
attcgttcaaatatggaaaga

SEQ ID NO: 23993 - DNA, 18 bp, synthetic construct
  source 1..18: mol_type = other DNA
tcatatgtcgctgacagc

SEQ ID NO: 23994 - DNA, 24 bp, synthetic construct
  source 1..24: mol_type = other DNA
caggactcttacaaaaaggaaaat

SEQ ID NO: 23995 - DNA, 18 bp, synthetic construct
  source 1..18: mol_type = other DNA
tcatatgtcgctgacagc

SEQ ID NO: 23996 - DNA, 24 bp, synthetic construct
  source 1..24: mol_type = other DNA
tactattccggagacccagtggtt

SEQ ID NO: 23997 - DNA, 18 bp, synthetic construct
  source 1..18: mol_type = other DNA
tcatatgtcgctgacagc

SEQ ID NO: 23998 - DNA, 21 bp, synthetic construct
  source 1..21: mol_type = other DNA
agctccacagacaacaagagg

SEQ ID NO: 23999 - DNA, 18 bp, synthetic construct
  source 1..18: mol_type = other DNA
tcatatgtcgctgacagc

SEQ ID NO: 24000 - DNA, 24 bp, synthetic construct
  source 1..24: mol_type = other DNA
tactattcgggaaacccagtggtt

SEQ ID NO: 24001 - DNA, 18 bp, synthetic construct
  source 1..18: mol_type = other DNA
tcatatgtcgctgacagc

SEQ ID NO: 24002 - DNA, 15 bp, synthetic construct
  source 1..15: mol_type = other DNA
ttggcttcaggaaca

SEQ ID NO: 24003 - DNA, 18 bp, synthetic construct
  source 1..18: mol_type = other DNA
tcatatgtcgctgacagc

SEQ ID NO: 24004 - DNA, 21 bp, synthetic construct
  source 1..21: mol_type = other DNA
atactttcagtgtccaataaa

SEQ ID NO: 24005 - DNA, 18 bp, synthetic construct
  source 1..18: mol_type = other DNA
tcatatgtcgctgacagc

SEQ ID NO: 24006 - DNA, 21 bp, synthetic construct
  source 1..21: mol_type = other DNA
atccgttcaaatatggaaaga

SEQ ID NO: 24007 - DNA, 18 bp, synthetic construct
  source 1..18: mol_type = other DNA
tcatatgtcgctgacagc

SEQ ID NO: 24008 - DNA, 18 bp, synthetic construct
  source 1..18: mol_type = other DNA
atcttctctgatggtgac

SEQ ID NO: 24009 - DNA, 18 bp, synthetic construct
  source 1..18: mol_type = other DNA
tcatatgtcgctgacagc

SEQ ID NO: 24010 - DNA, 24 bp, synthetic construct
  source 1..24: mol_type = other DNA
caggactcttacaaaaaggaaaat

SEQ ID NO: 24011 - DNA, 18 bp, synthetic construct
  source 1..18: mol_type = other DNA
tcatatgtcgctgacagc

SEQ ID NO: 24012 - DNA, 21 bp, synthetic construct
  source 1..21: mol_type = other DNA
atccgttcaaatatggaaaga

SEQ ID NO: 24013 - DNA, 18 bp, synthetic construct
  source 1..18: mol_type = other DNA
tcatatgtcgctgacagc

SEQ ID NO: 24014 - DNA, 24 bp, synthetic construct
  source 1..24: mol_type = other DNA
caggactcttacaaaaaggaaaat

SEQ ID NO: 24015 - DNA, 18 bp, synthetic construct
  source 1..18: mol_type = other DNA
tcatatgtcgctgacagc

SEQ ID NO: 24016 - DNA, 24 bp, synthetic construct
  source 1..24: mol_type = other DNA
caggactcttacaaaaaggaaaat

SEQ ID NO: 24017 - DNA, 18 bp, synthetic construct
  source 1..18: mol_type = other DNA
tcatatgtcgctgacagc

SEQ ID NO: 24018 - DNA, 21 bp, synthetic construct
  source 1..21: mol_type = other DNA
gtacgctcaaatgtggataag

SEQ ID NO: 24019 - DNA, 18 bp, synthetic construct
  source 1..18: mol_type = other DNA
tcatatgtcgctgacagc

SEQ ID NO: 24020 - DNA, 15 bp, synthetic construct
  source 1..15: mol_type = other DNA
ctggttccaggaaca

SEQ ID NO: 24021 - DNA, 18 bp, synthetic construct
  source 1..18: mol_type = other DNA
tcatatgtcgctgacagc

SEQ ID NO: 24022 - DNA, 21 bp, synthetic construct
  source 1..21: mol_type = other DNA
atacgttcaaatgagcgagag

SEQ ID NO: 24023 - DNA, 18 bp, synthetic construct
  source 1..18: mol_type = other DNA
tcatatgtcgctgacagc

SEQ ID NO: 24024 - DNA, 24 bp, synthetic construct
  source 1..24: mol_type = other DNA
caggactcttacaaaaaggaaaat

SEQ ID NO: 24025 - DNA, 18 bp, synthetic construct
  source 1..18: mol_type = other DNA
tcatatgtcgctgacagc

SEQ ID NO: 24026 - DNA, 21 bp, synthetic construct
  source 1..21: mol_type = other DNA
atccgttcaaatatggaaaga

SEQ ID NO: 24027 - DNA, 18 bp, synthetic construct
  source 1..18: mol_type = other DNA
tcatatgtcgctgacagc

SEQ ID NO: 24028 - DNA, 24 bp, synthetic construct
  source 1..24: mol_type = other DNA
caggactcttacaaaaaggaaaat

SEQ ID NO: 24029 - DNA, 18 bp, synthetic construct
  source 1..18: mol_type = other DNA
tcatatgtcgctgacagc

SEQ ID NO: 24030 - DNA, 15 bp, synthetic construct
  source 1..15: mol_type = other DNA
aatccttctgggaca

SEQ ID NO: 24031 - DNA, 18 bp, synthetic construct
  source 1..18: mol_type = other DNA
tcatatgtcgctgacagc

SEQ ID NO: 24032 - DNA, 21 bp, synthetic construct
  source 1..21: mol_type = other DNA
gtacgctcaaatgtggataag

SEQ ID NO: 24033 - DNA, 18 bp, synthetic construct
  source 1..18: mol_type = other DNA
tcatatgtcgctgacagc

SEQ ID NO: 24034 - DNA, 24 bp, synthetic construct
  source 1..24: mol_type = other DNA
caggactcttacaaaaaggaaaat

SEQ ID NO: 24035 - DNA, 18 bp, synthetic construct
  source 1..18: mol_type = other DNA
tcatatgtcgctgacagc

SEQ ID NO: 24036 - DNA, 24 bp, synthetic construct
  source 1..24: mol_type = other DNA
tacatcacaggagacaccgttgtt

SEQ ID NO: 24037 - DNA, 18 bp, synthetic construct
  source 1..18: mol_type = other DNA
tcatatgtcgctgacagc

SEQ ID NO: 24038 - DNA, 15 bp, synthetic construct
  source 1..15: mol_type = other DNA
ctggttccaggaaca

SEQ ID NO: 24039 - DNA, 18 bp, synthetic construct
  source 1..18: mol_type = other DNA
tcatatgtcgctgacagc

SEQ ID NO: 24040 - DNA, 24 bp, synthetic construct
  source 1..24: mol_type = other DNA
caggactcttacaaaaaggaaaat

SEQ ID NO: 24041 - DNA, 18 bp, synthetic construct
  source 1..18: mol_type = other DNA
tactatgataagattttg

SEQ ID NO: 24042 - DNA, 15 bp, synthetic construct
  source 1..15: mol_type = other DNA
ggtctacaacaaaat

SEQ ID NO: 24043 - DNA, 18 bp, synthetic construct
  source 1..18: mol_type = other DNA
tactatgataagattttg

SEQ ID NO: 24044 - DNA, 21 bp, synthetic construct
  source 1..21: mol_type = other DNA
gtcattacggctggccagaag

SEQ ID NO: 24045 - DNA, 18 bp, synthetic construct
  source 1..18: mol_type = other DNA
tactatgataagattttg

SEQ ID NO: 24046 - DNA, 24 bp, synthetic construct
  source 1..24: mol_type = other DNA
caaccttcttttgacactcagaac

SEQ ID NO: 24047 - DNA, 18 bp, synthetic construct
  source 1..18: mol_type = other DNA
tactatgataagattttg

SEQ ID NO: 24048 - DNA, 15 bp, synthetic construct
  source 1..15: mol_type = other DNA
ctggttccaggaaca

SEQ ID NO: 24049 - DNA, 18 bp, synthetic construct
  source 1..18: mol_type = other DNA
tactatgataagattttg

SEQ ID NO: 24050 - DNA, 24 bp, synthetic construct
  source 1..24: mol_type = other DNA
caggactcttacaaaaaggaaaat

SEQ ID NO: 24051 - DNA, 18 bp, synthetic construct
  source 1..18: mol_type = other DNA
tactatgataagattttg

SEQ ID NO: 24052 - DNA, 21 bp, synthetic construct
  source 1..21: mol_type = other DNA
gtcattacggctggccagaag

SEQ ID NO: 24053 - DNA, 18 bp, synthetic construct
  source 1..18: mol_type = other DNA
tactatgataagattttg

SEQ ID NO: 24054 - DNA, 21 bp, synthetic construct
  source 1..21: mol_type = other DNA
gtcattacggctggccagaag

SEQ ID NO: 24055 - DNA, 18 bp, synthetic construct
  source 1..18: mol_type = other DNA
tactatgataagattttg

SEQ ID NO: 24056 - DNA, 21 bp, synthetic construct
  source 1..21: mol_type = other DNA
attcgttcaaatgtggacaga

SEQ ID NO: 24057 - DNA, 18 bp, synthetic construct
  source 1..18: mol_type = other DNA
ttccgcagcaagtctctt

SEQ ID NO: 24058 - DNA, 24 bp, synthetic construct
  source 1..24: mol_type = other DNA
caggactcttacaaaaaggaaaat

SEQ ID NO: 24059 - DNA, 18 bp, synthetic construct
  source 1..18: mol_type = other DNA
ttccgcagcaagtctctt

SEQ ID NO: 24060 - DNA, 24 bp, synthetic construct
  source 1..24: mol_type = other DNA
caggactcttacaaaaaggaaaat

SEQ ID NO: 24061 - DNA, 15 bp, synthetic construct
  source 1..15: mol_type = other DNA
tctattactgttggc

SEQ ID NO: 24062 - DNA, 18 bp, synthetic construct
  source 1..18: mol_type = other DNA
atcttctccaatggtgaa

SEQ ID NO: 24063 - DNA, 15 bp, synthetic construct
  source 1..15: mol_type = other DNA
tctattactgttggc

SEQ ID NO: 24064 - DNA, 15 bp, synthetic construct
  source 1..15: mol_type = other DNA
aatccttctgggaca

SEQ ID NO: 24065 - DNA, 15 bp, synthetic construct
  source 1..15: mol_type = other DNA
tctattactgttggc

SEQ ID NO: 24066 - DNA, 21 bp, synthetic construct
  source 1..21: mol_type = other DNA
agctccacagacaacaagagg

SEQ ID NO: 24067 - DNA, 15 bp, synthetic construct
  source 1..15: mol_type = other DNA
tctattactgttggc

SEQ ID NO: 24068 - DNA, 21 bp, synthetic construct
  source 1..21: mol_type = other DNA
agcttcacagacaacaagagg

SEQ ID NO: 24069 - DNA, 15 bp, synthetic construct
  source 1..15: mol_type = other DNA
tctattactgttggc

SEQ ID NO: 24070 - DNA, 21 bp, synthetic construct
  source 1..21: mol_type = other DNA
gtcttttcaaatgtggacaga

SEQ ID NO: 24071 - DNA, 15 bp, synthetic construct
  source 1..15: mol_type = other DNA
tctattactgttggc

SEQ ID NO: 24072 - DNA, 18 bp, synthetic construct
  source 1..18: mol_type = other DNA
atcttctccaatggtgaa

SEQ ID NO: 24073 - DNA, 15 bp, synthetic construct
  source 1..15: mol_type = other DNA
tctattactgttggc

SEQ ID NO: 24074 - DNA, 21 bp, synthetic construct
  source 1..21: mol_type = other DNA
gtcctttcaaatgtggacaga

SEQ ID NO: 24075 - DNA, 15 bp, synthetic construct
  source 1..15: mol_type = other DNA
tctattactgttggc

SEQ ID NO: 24076 - DNA, 21 bp, synthetic construct
  source 1..21: mol_type = other DNA
gttttctcaagtacggaaata

SEQ ID NO: 24077 - DNA, 15 bp, synthetic construct
  source 1..15: mol_type = other DNA
tctattactgttggc

SEQ ID NO: 24078 - DNA, 24 bp, synthetic construct
  source 1..24: mol_type = other DNA
caggactcttacaaaaaggaaaat

SEQ ID NO: 24079 - DNA, 18 bp, synthetic construct
  source 1..18: mol_type = other DNA
ttctacaatggtaaagtc

SEQ ID NO: 24080 - DNA, 21 bp, synthetic construct
  source 1..21: mol_type = other DNA
gtcccaaaggccaacgagaag

SEQ ID NO: 24081 - DNA, 18 bp, synthetic construct
  source 1..18: mol_type = other DNA
ttctacaatggtaaagtc

SEQ ID NO: 24082 - DNA, 24 bp, synthetic construct
  source 1..24: mol_type = other DNA
tactattcaggagacccagtggtt

SEQ ID NO: 24083 - DNA, 18 bp, synthetic construct
  source 1..18: mol_type = other DNA
ttctacaatggtaaagtc

SEQ ID NO: 24084 - DNA, 21 bp, synthetic construct
  source 1..21: mol_type = other DNA
atacgttcaaatgagcgagag

SEQ ID NO: 24085 - DNA, 18 bp, synthetic construct
  source 1..18: mol_type = other DNA
tcaataactgaaaacgat

SEQ ID NO: 24086 - DNA, 18 bp, synthetic construct
  source 1..18: mol_type = other DNA
atcttctctgatggtgaa

SEQ ID NO: 24087 - DNA, 18 bp, synthetic construct
  source 1..18: mol_type = other DNA
tcaataactgaaaacgat

SEQ ID NO: 24088 - DNA, 15 bp, synthetic construct
  source 1..15: mol_type = other DNA
aatccttctgggaca

SEQ ID NO: 24089 - DNA, 18 bp, synthetic construct
  source 1..18: mol_type = other DNA
tcaataactgaaaacgat

SEQ ID NO: 24090 - DNA, 18 bp, synthetic construct
  source 1..18: mol_type = other DNA
atcttctccaatggtgaa

SEQ ID NO: 24091 - DNA, 18 bp, synthetic construct
  source 1..18: mol_type = other DNA
tcaataactgaaaacgat

SEQ ID NO: 24092 - DNA, 21 bp, synthetic construct
  source 1..21: mol_type = other DNA
gtcattacggctggccagaag

SEQ ID NO: 24093 - DNA, 18 bp, synthetic construct
  source 1..18: mol_type = other DNA
tcaataactgaaaacgat

SEQ ID NO: 24094 - DNA, 21 bp, synthetic construct
  source 1..21: mol_type = other DNA
atccgttcaaatatggaaaga

SEQ ID NO: 24095 - DNA, 18 bp, synthetic construct
  source 1..18: mol_type = other DNA
tcaataactgaaaacgat

SEQ ID NO: 24096 - DNA, 24 bp, synthetic construct
  source 1..24: mol_type = other DNA
tactattcgggaaacccagtggtt

SEQ ID NO: 24097 - DNA, 18 bp, synthetic construct
  source 1..18: mol_type = other DNA
tcaataactgaaaacgat

SEQ ID NO: 24098 - DNA, 21 bp, synthetic construct
  source 1..21: mol_type = other DNA
gtgacaactgccaacaataag

SEQ ID NO: 24099 - DNA, 18 bp, synthetic construct
  source 1..18: mol_type = other DNA
tcaataactgaaaacgat

SEQ ID NO: 24100 - DNA, 21 bp, synthetic construct
  source 1..21: mol_type = other DNA
agcttcacagacaacaagagg

SEQ ID NO: 24101 - DNA, 18 bp, synthetic construct
  source 1..18: mol_type = other DNA
tcaataactgaaaacgat

SEQ ID NO: 24102 - DNA, 21 bp, synthetic construct
  source 1..21: mol_type = other DNA
atacgttcagtgtccgataaa

SEQ ID NO: 24103 - DNA, 18 bp, synthetic construct
  source 1..18: mol_type = other DNA
tcaataactgaaaacgat

SEQ ID NO: 24104 - DNA, 24 bp, synthetic construct
  source 1..24: mol_type = other DNA
caggactcttacaaaaaggaaaat

SEQ ID NO: 24105 - DNA, 18 bp, synthetic construct
  source 1..18: mol_type = other DNA
tcaataactgaaaacgat

SEQ ID NO: 24106 - DNA, 15 bp, synthetic construct
  source 1..15: mol_type = other DNA
ctggttccaggaaca

SEQ ID NO: 24107 - DNA, 18 bp, synthetic construct
  source 1..18: mol_type = other DNA
tcaataactgaaaacgat

SEQ ID NO: 24108 - DNA, 24 bp, synthetic construct
  source 1..24: mol_type = other DNA
caggactcttacaaaaaggaaaat

SEQ ID NO: 24109 - DNA, 18 bp, synthetic construct
  source 1..18: mol_type = other DNA
tcaataactgaaaacgat

SEQ ID NO: 24110 - DNA, 21 bp, synthetic construct
  source 1..21: mol_type = other DNA
atacgttcaaatgagagagag

SEQ ID NO: 24111 - DNA, 18 bp, synthetic construct
  source 1..18: mol_type = other DNA
tcaataactgaaaacgat

SEQ ID NO: 24112 - DNA, 24 bp, synthetic construct
  source 1..24: mol_type = other DNA
caggactcttacaaaaaggaaaat

SEQ ID NO: 24113 - DNA, 18 bp, synthetic construct
  source 1..18: mol_type = other DNA
tcaataactgaaaacgat

SEQ ID NO: 24114 - DNA, 24 bp, synthetic construct
  source 1..24: mol_type = other DNA
tacatcacaggagacgccgttgtt

SEQ ID NO: 24115 - DNA, 18 bp, synthetic construct
  source 1..18: mol_type = other DNA
tcaataactgaaaacgat

SEQ ID NO: 24116 - DNA, 21 bp, synthetic construct
  source 1..21: mol_type = other DNA
attcgttcaaatgtggacaga

SEQ ID NO: 24117 - DNA, 18 bp, synthetic construct
  source 1..18: mol_type = other DNA
tcaataactgaaaacgat

SEQ ID NO: 24118 - DNA, 21 bp, synthetic construct
  source 1..21: mol_type = other DNA
attcgttcaaatgtggacaga

SEQ ID NO: 24119 - DNA, 18 bp, synthetic construct
  source 1..18: mol_type = other DNA
tcaataactgaaaacgat

SEQ ID NO: 24120 - DNA, 21 bp, synthetic construct
  source 1..21: mol_type = other DNA
atacgtccagtgtccaataaa

SEQ ID NO: 24121 - DNA, 18 bp, synthetic construct
  source 1..18: mol_type = other DNA
tcaataactgaaaacgat

SEQ ID NO: 24122 - DNA, 21 bp, synthetic construct
  source 1..21: mol_type = other DNA
gtcattacggctggccagaag

SEQ ID NO: 24123 - DNA, 18 bp, synthetic construct
  source 1..18: mol_type = other DNA
tcaataactgaaaacgat

SEQ ID NO: 24124 - DNA, 21 bp, synthetic construct
  source 1..21: mol_type = other DNA
gtcattacggctggccagaag

SEQ ID NO: 24125 - DNA, 18 bp, synthetic construct
  source 1..18: mol_type = other DNA
tcaataactgaaaacgat

SEQ ID NO: 24126 - DNA, 21 bp, synthetic construct
  source 1..21: mol_type = other DNA
gttttctcaagtacggaaata

SEQ ID NO: 24127 - DNA, 18 bp, synthetic construct
  source 1..18: mol_type = other DNA
tcaataactgaaaacgat

SEQ ID NO: 24128 - DNA, 18 bp, synthetic construct
  source 1..18: mol_type = other DNA
atcttctctgatggtgac

SEQ ID NO: 24129 - DNA, 18 bp, synthetic construct
  source 1..18: mol_type = other DNA
tcaataactgaaaacgat

SEQ ID NO: 24130 - DNA, 24 bp, synthetic construct
  source 1..24: mol_type = other DNA
tactattcaggagacccagtggtt

SEQ ID NO: 24131 - DNA, 18 bp, synthetic construct
  source 1..18: mol_type = other DNA
tcaataactgaaaacgat

SEQ ID NO: 24132 - DNA, 21 bp, synthetic construct
  source 1..21: mol_type = other DNA
gtcacaactgccaacaacaag

SEQ ID NO: 24133 - DNA, 18 bp, synthetic construct
  source 1..18: mol_type = other DNA
tcaataactgaaaacgat

SEQ ID NO: 24134 - DNA, 24 bp, synthetic construct
  source 1..24: mol_type = other DNA
tactattcgggaaacccagtggtt

SEQ ID NO: 24135 - DNA, 18 bp, synthetic construct
  source 1..18: mol_type = other DNA
tcaataactgaaaacgat

SEQ ID NO: 24136 - DNA, 24 bp, synthetic construct
  source 1..24: mol_type = other DNA
tactattcgggaaacccagtggtt

SEQ ID NO: 24137 - DNA, 18 bp, synthetic construct
  source 1..18: mol_type = other DNA
tcaataactgaaaacgat

SEQ ID NO: 24138 - DNA, 21 bp, synthetic construct
  source 1..21: mol_type = other DNA
atccgttcaaatatggaaaga

SEQ ID NO: 24139 - DNA, 18 bp, synthetic construct
  source 1..18: mol_type = other DNA
tcaataactgaaaacgat

SEQ ID NO: 24140 - DNA, 21 bp, synthetic construct
  source 1..21: mol_type = other DNA
ggatataaggactatgtggta

SEQ ID NO: 24141 - DNA, 18 bp, synthetic construct
  source 1..18: mol_type = other DNA
tcaataactgaaaacgat

SEQ ID NO: 24142 - DNA, 18 bp, synthetic construct
  source 1..18: mol_type = other DNA
atcttctccaatggtgaa

SEQ ID NO: 24143 - DNA, 18 bp, synthetic construct
  source 1..18: mol_type = other DNA
tcaataactgaaaacgat

SEQ ID NO: 24144 - DNA, 21 bp, synthetic construct
  source 1..21: mol_type = other DNA
gtcacaactgccaacaacaag

SEQ ID NO: 24145 - DNA, 18 bp, synthetic construct
  source 1..18: mol_type = other DNA
tcaataactgaaaacgat

SEQ ID NO: 24146 - DNA, 21 bp, synthetic construct
  source 1..21: mol_type = other DNA
atacgttcagtgtccgataaa

SEQ ID NO: 24147 - DNA, 18 bp, synthetic construct
  source 1..18: mol_type = other DNA
tcaataactgaaaacgat

SEQ ID NO: 24148 - DNA, 21 bp, synthetic construct
  source 1..21: mol_type = other DNA
agctccacagacaacaagagg

SEQ ID NO: 24149 - DNA, 18 bp, synthetic construct
  source 1..18: mol_type = other DNA
ctgcggagtcctggggac

SEQ ID NO: 24150 - DNA, 21 bp, synthetic construct
  source 1..21: mol_type = other DNA
ggatataaggactatgtggta

SEQ ID NO: 24151 - DNA, 18 bp, synthetic construct
  source 1..18: mol_type = other DNA
ctgcggagtcctggggac

SEQ ID NO: 24152 - DNA, 21 bp, synthetic construct
  source 1..21: mol_type = other DNA
gttttctcaagtacggaaata

SEQ ID NO: 24153 - DNA, 18 bp, synthetic construct
  source 1..18: mol_type = other DNA
ctgcggagtcctggggac

SEQ ID NO: 24154 - DNA, 24 bp, synthetic construct
  source 1..24: mol_type = other DNA
caggactcttacaaaaaggaaaat

SEQ ID NO: 24155 - DNA, 18 bp, synthetic construct
  source 1..18: mol_type = other DNA
ctgcggagtcctggggac

SEQ ID NO: 24156 - DNA, 24 bp, synthetic construct
  source 1..24: mol_type = other DNA
tactattccggagacccagtggtt

SEQ ID NO: 24157 - DNA, 18 bp, synthetic construct
  source 1..18: mol_type = other DNA
ctgcggagtcctggggac

SEQ ID NO: 24158 - DNA, 21 bp, synthetic construct
  source 1..21: mol_type = other DNA
agcttcacagacaacaagagg

SEQ ID NO: 24159 - DNA, 18 bp, synthetic construct
  source 1..18: mol_type = other DNA
ctgcggagtcctggggac

SEQ ID NO: 24160 - DNA, 21 bp, synthetic construct
  source 1..21: mol_type = other DNA
ggatataaggactatgtggta

SEQ ID NO: 24161 - DNA, 18 bp, synthetic construct
  source 1..18: mol_type = other DNA
ctgcggagtcctggggac

SEQ ID NO: 24162 - DNA, 21 bp, synthetic construct
  source 1..21: mol_type = other DNA
gtcttttcaaatgtggacaga

SEQ ID NO: 24163 - DNA, 18 bp, synthetic construct
  source 1..18: mol_type = other DNA
ctgcggagtcctggggac

SEQ ID NO: 24164 - DNA, 21 bp, synthetic construct
  source 1..21: mol_type = other DNA
atacgttcaaatgagagagag

SEQ ID NO: 24165 - DNA, 18 bp, synthetic construct
  source 1..18: mol_type = other DNA
ctgcggagtcctggggac

SEQ ID NO: 24166 - DNA, 21 bp, synthetic construct
  source 1..21: mol_type = other DNA
atacgttcagtgtccgataaa

SEQ ID NO: 24167 - DNA, 18 bp, synthetic construct
  source 1..18: mol_type = other DNA
ctgcggagtcctggggac

SEQ ID NO: 24168 - DNA, 21 bp, synthetic construct
  source 1..21: mol_type = other DNA
atacgttcaaatgagagagag

SEQ ID NO: 24169 - DNA, 18 bp, synthetic construct
  source 1..18: mol_type = other DNA
ctgcggagtcctggggac

SEQ ID NO: 24170 - DNA, 24 bp, synthetic construct
  source 1..24: mol_type = other DNA
tactattccggagacccagtggtt

SEQ ID NO: 24171 - DNA, 18 bp, synthetic construct
  source 1..18: mol_type = other DNA
ctgcggagtcctggggac

SEQ ID NO: 24172 - DNA, 21 bp, synthetic construct
  source 1..21: mol_type = other DNA
atacgttcagtgtccgataaa

SEQ ID NO: 24173 - protein, 36 aa, synthetic construct; identical to SEQ ID NO: 11899

SEQ ID NO: 24174 - protein, 33 aa, synthetic construct; identical to SEQ ID NO: 12032

SEQ ID NO: 24175 - protein, 35 aa, synthetic construct; identical to SEQ ID NO: 11895

SEQ ID NO: 24176 - protein, 33 aa, synthetic construct; identical to SEQ ID NO: 12032

SEQ ID NO: 24177 - protein, 36 aa, synthetic construct; identical to SEQ ID NO: 11899

SEQ ID NO: 24178 - protein, 33 aa, synthetic construct; identical to SEQ ID NO: 11924

SEQ ID NO: 24179 - protein, 36 aa, synthetic construct; identical to SEQ ID NO: 11879

SEQ ID NO: 24180 - protein, 33 aa, synthetic construct; identical to SEQ ID NO: 11980

SEQ ID NO: 24181 - protein, 36 aa, synthetic construct; identical to SEQ ID NO: 12171

SEQ ID NO: 24182 - protein, 33 aa, synthetic construct; identical to SEQ ID NO: 11946

SEQ ID NO: 24183 - protein, 36 aa, synthetic construct; identical to SEQ ID NO: 12035

SEQ ID NO: 24184 - protein, 33 aa, synthetic construct; identical to SEQ ID NO: 11874

SEQ ID NO: 24185 - protein, 36 aa, synthetic construct; identical to SEQ ID NO: 11879

SEQ ID NO: 24186 - protein, 33 aa, synthetic construct; identical to SEQ ID NO: 12030

SEQ ID NO: 24187 - protein, 36 aa, synthetic construct; identical to SEQ ID NO: 11875

SEQ ID NO: 24188 - protein, 33 aa, synthetic construct; identical to SEQ ID NO: 11876

SEQ ID NO: 24189 - protein, 36 aa, synthetic construct; identical to SEQ ID NO: 11875

SEQ ID NO: 24190 - protein, 33 aa, synthetic construct; identical to SEQ ID NO: 12382

SEQ ID NO: 24191 - protein, 36 aa, synthetic construct; identical to SEQ ID NO: 11879

SEQ ID NO: 24192 - protein, 33 aa, synthetic construct; identical to SEQ ID NO: 11880

SEQ ID NO: 24193 - protein, 36 aa, synthetic construct; identical to SEQ ID NO: 11967

SEQ ID NO: 24194 - protein, 33 aa, synthetic construct; identical to SEQ ID NO: 11950

SEQ ID NO: 24195 - protein, 36 aa, synthetic construct; identical to SEQ ID NO: 11907

SEQ ID NO: 24196 - protein, 33 aa, synthetic construct; identical to SEQ ID NO: 11878

SEQ ID NO: 24197 - protein, 37 aa, synthetic construct; identical to SEQ ID NO: 11873

SEQ ID NO: 24198 - protein, 33 aa, synthetic construct; identical to SEQ ID NO: 11880

SEQ ID NO: 24199 - protein, 36 aa, synthetic construct; identical to SEQ ID NO: 11887

SEQ ID NO: 24200 - protein, 33 aa, synthetic construct; identical to SEQ ID NO: 12130

SEQ ID NO: 24201 - protein, 36 aa, synthetic construct; identical to SEQ ID NO: 11879

SEQ ID NO: 24202 - protein, 33 aa, synthetic construct; identical to SEQ ID NO: 11878

SEQ ID NO: 24203 - protein, 36 aa, synthetic construct; identical to SEQ ID NO: 11899

SEQ ID NO: 24204 - protein, 33 aa, synthetic construct; identical to SEQ ID NO: 12032

SEQ ID NO: 24205 - protein, 36 aa, synthetic construct; identical to SEQ ID NO: 11899

SEQ ID NO: 24206 - protein, 33 aa, synthetic construct; identical to SEQ ID NO: 11918

SEQ ID NO: 24207 - protein, 36 aa, synthetic construct; identical to SEQ ID NO: 11967

SEQ ID NO: 24208 - protein, 33 aa, synthetic construct; identical to SEQ ID NO: 11928

SEQ ID NO: 24209 - protein, 36 aa, synthetic construct; identical to SEQ ID NO: 11887

SEQ ID NO: 24210 - protein, 33 aa, synthetic construct; identical to SEQ ID NO: 11932

SEQ ID NO: 24211 - protein, 36 aa, synthetic construct; identical to SEQ ID NO: 11875

SEQ ID NO: 24212 - protein, 33 aa, synthetic construct; identical to SEQ ID NO: 11878

SEQ ID NO: 24213 - protein, 36 aa, synthetic construct; identical to SEQ ID NO: 11875

SEQ ID NO: 24214 - protein, 33 aa, synthetic construct; identical to SEQ ID NO: 11894

SEQ ID NO: 24215 - protein, 36 aa, synthetic construct; identical to SEQ ID NO: 11879

SEQ ID NO: 24216 - protein, 33 aa, synthetic construct; identical to SEQ ID NO: 11916

SEQ ID NO: 24217 - protein, 36 aa, synthetic construct; identical to SEQ ID NO: 11879

SEQ ID NO: 24218 - protein, 33 aa, synthetic construct; identical to SEQ ID NO: 11964

SEQ ID NO: 24219 - protein, 36 aa, synthetic construct; identical to SEQ ID NO: 11967

SEQ ID NO: 24220 - protein, 33 aa, synthetic construct; identical to SEQ ID NO: 12382

SEQ ID NO: 24221 - protein, 36 aa, synthetic construct; identical to SEQ ID NO: 11967

SEQ ID NO: 24222 - protein, 33 aa, synthetic construct; identical to SEQ ID NO: 11966

SEQ ID NO: 24223 - protein, 37 aa, synthetic construct; identical to SEQ ID NO: 12439

SEQ ID NO: 24224 - protein, 33 aa, synthetic construct; identical to SEQ ID NO: 11916

SEQ ID NO: 24225 - protein, 36 aa, synthetic construct; identical to SEQ ID NO: 11971

SEQ ID NO: 24226 - protein, 33 aa, synthetic construct; identical to SEQ ID NO: 12194

SEQ ID NO: 24227 - protein, 36 aa, synthetic construct; identical to SEQ ID NO: 11971

SEQ ID NO: 24228 - protein, 33 aa, synthetic construct; identical to SEQ ID NO: 11882

SEQ ID NO: 24229 - protein, 36 aa, synthetic construct; identical to SEQ ID NO: 11875

SEQ ID NO: 24230 - protein, 33 aa, synthetic construct; identical to SEQ ID NO: 11966

SEQ ID NO: 24231 - protein, 36 aa, synthetic construct; identical to SEQ ID NO: 11875

SEQ ID NO: 24232 - protein, 33 aa, synthetic construct; identical to SEQ ID NO: 12094

SEQ ID NO: 24233 - protein, 36 aa, synthetic construct; identical to SEQ ID NO: 11875

SEQ ID NO: 24234 - protein, 33 aa, synthetic construct; identical to SEQ ID NO: 12022

SEQ ID NO: 24235 - protein, 36 aa, synthetic construct; identical to SEQ ID NO: 11879

SEQ ID NO: 24236 - protein, 33 aa, synthetic construct; identical to SEQ ID NO: 12152

SEQ ID NO: 24237 - protein, 36 aa, synthetic construct; identical to SEQ ID NO: 11879

SEQ ID NO: 24238 - protein, 33 aa, synthetic construct; identical to SEQ ID NO: 12152

SEQ ID NO: 24239 - protein, 36 aa, synthetic construct; identical to SEQ ID NO: 12171

SEQ ID NO: 24240 - protein, 33 aa, synthetic construct; identical to SEQ ID NO: 11892

SEQ ID NO: 24241 - protein, 36 aa, synthetic construct; identical to SEQ ID NO: 11907

SEQ ID NO: 24242 - protein, 33 aa, synthetic construct; identical to SEQ ID NO: 11980

SEQ ID NO: 24243 - protein, 36 aa, synthetic construct; identical to SEQ ID NO: 11899

SEQ ID NO: 24244 - protein, 33 aa, synthetic construct; identical to SEQ ID NO: 12152

SEQ ID NO: 24245 - protein, 36 aa, synthetic construct; identical to SEQ ID NO: 11967

SEQ ID NO: 24246 - protein, 33 aa, synthetic construct; identical to SEQ ID NO: 12094

SEQ ID NO: 24247 - protein, 36 aa, synthetic construct; identical to SEQ ID NO: 11967

SEQ ID NO: 24248 - protein, 33 aa, synthetic construct; identical to SEQ ID NO: 11968

SEQ ID NO: 24249 - protein, 36 aa, synthetic construct; identical to SEQ ID NO: 11967

SEQ ID NO: 24250 - protein, 33 aa, synthetic construct; identical to SEQ ID NO: 11878

SEQ ID NO: 24251 - protein, 36 aa, synthetic construct; identical to SEQ ID NO: 11967

SEQ ID NO: 24252 - protein, 33 aa, synthetic construct; identical to SEQ ID NO: 11944

SEQ ID NO: 24253 - protein, 36 aa, synthetic construct; identical to SEQ ID NO: 11967

SEQ ID NO: 24254 - protein, 33 aa, synthetic construct; identical to SEQ ID NO: 12328

SEQ ID NO: 24255 - protein, 36 aa, synthetic construct; identical to SEQ ID NO: 11967

SEQ ID NO: 24256 - protein, 33 aa, synthetic construct; identical to SEQ ID NO: 11916

SEQ ID NO: 24257 - protein, 36 aa, synthetic construct; identical to SEQ ID NO: 11967

SEQ ID NO: 24258 - protein, 33 aa, synthetic construct; identical to SEQ ID NO: 11892

SEQ ID NO: 24259 - protein, 36 aa, synthetic construct; identical to SEQ ID NO: 11967

SEQ ID NO: 24260 - protein, 33 aa, synthetic construct; identical to SEQ ID NO: 11916

SEQ ID NO: 24261 - protein, 36 aa, synthetic construct; identical to SEQ ID NO: 11967

SEQ ID NO: 24262 - protein, 33 aa, synthetic construct; identical to SEQ ID NO: 11878

SEQ ID NO: 24263 - protein, 36 aa, synthetic construct; identical to SEQ ID NO: 11967

SEQ ID NO: 24264 - protein, 33 aa, synthetic construct; identical to SEQ ID NO: 11980

SEQ ID NO: 24265 - protein, 36 aa, synthetic construct; identical to SEQ ID NO: 11967

SEQ ID NO: 24266 - protein, 33 aa, synthetic construct; identical to SEQ ID NO: 12094

SEQ ID NO: 24267 - protein, 36 aa, synthetic construct; identical to SEQ ID NO: 11967

SEQ ID NO: 24268 - protein, 33 aa, synthetic construct; identical to SEQ ID NO: 12038

SEQ ID NO: 24269 - protein, 36 aa, synthetic construct; identical to SEQ ID NO: 11967

SEQ ID NO: 24270 - protein, 33 aa, synthetic construct; identical to SEQ ID NO: 11886

SEQ ID NO: 24271 - protein, 36 aa, synthetic construct; identical to SEQ ID NO: 11967

SEQ ID NO: 24272 - protein, 33 aa, synthetic construct; identical to SEQ ID NO: 11896

SEQ ID NO: 24273 - protein, 36 aa, synthetic construct; identical to SEQ ID NO: 11967

SEQ ID NO: 24274 - protein, 33 aa, synthetic construct; identical to SEQ ID NO: 11928

SEQ ID NO: 24275 - protein, 36 aa, synthetic construct; identical to SEQ ID NO: 11967

SEQ ID NO: 24276 - protein, 33 aa, synthetic construct; identical to SEQ ID NO: 11944

SEQ ID NO: 24277 - protein, 36 aa, synthetic construct; identical to SEQ ID NO: 11967

SEQ ID NO: 24278 - protein, 33 aa, synthetic construct; identical to SEQ ID NO: 12246

SEQ ID NO: 24279 - protein, 36 aa, synthetic construct; identical to SEQ ID NO: 11967

SEQ ID NO: 24280 - protein, 33 aa, synthetic construct; identical to SEQ ID NO: 11892

SEQ ID NO: 24281 - protein, 36 aa, synthetic construct; identical to SEQ ID NO: 11967

SEQ ID NO: 24282 - protein, 33 aa, synthetic construct; identical to SEQ ID NO: 11882

SEQ ID NO: 24283 - protein, 37 aa, synthetic construct; identical to SEQ ID NO: 11889

SEQ ID NO: 24284 - protein, 33 aa, synthetic construct; identical to SEQ ID NO: 12194

SEQ ID NO: 24285 - protein, 37 aa, synthetic construct; identical to SEQ ID NO: 11889

SEQ ID NO: 24286 - protein, 33 aa, synthetic construct; identical to SEQ ID NO: 11892

SEQ ID NO: 24287 - protein, 37 aa, synthetic construct; identical to SEQ ID NO: 11889

SEQ ID NO: 24288 - protein, 33 aa, synthetic construct; identical to SEQ ID NO: 12038

SEQ ID NO: 24289 - protein, 37 aa, synthetic construct
LQQIDMTEKRFSAECPSNSPCSLEIQSSEAGDSALYL

SEQ ID NO: 24290 - protein, 33 aa, synthetic construct; identical to SEQ ID NO: 11878

SEQ ID NO: 24291 - protein, 37 aa, synthetic construct; identical to SEQ ID NO: 12439

SEQ ID NO: 24292 - protein, 33 aa, synthetic construct; identical to SEQ ID NO: 11980

SEQ ID NO: 24293 - protein, 37 aa, synthetic construct; identical to SEQ ID NO: 12439

SEQ ID NO: 24294 - protein, 33 aa, synthetic construct
NEGQGFTVLLNKKPTRLSLNLTAAHPGDSAAYF

SEQ ID NO: 24295 - protein, 37 aa, synthetic construct; identical to SEQ ID NO: 12439

SEQ ID NO: 24296 - protein, 33 aa, synthetic construct; identical to SEQ ID NO: 11914

SEQ ID NO: 24297 - protein, 37 aa, synthetic construct; identical to SEQ ID NO: 12439

SEQ ID NO: 24298 - protein, 33 aa, synthetic construct; identical to SEQ ID NO: 11892

SEQ ID NO: 24299 - protein, 37 aa, synthetic construct; identical to SEQ ID NO: 12439

SEQ ID NO: 24300 - protein, 33 aa, synthetic construct; identical to SEQ ID NO: 11914

SEQ ID NO: 24301 - protein, 37 aa, synthetic construct; identical to SEQ ID NO: 12439

SEQ ID NO: 24302 - protein, 33 aa, synthetic construct; identical to SEQ ID NO: 11914

SEQ ID NO: 24303 - protein, 37 aa, synthetic construct; identical to SEQ ID NO: 11873

SEQ ID NO: 24304 - protein, 33 aa, synthetic construct; identical to SEQ ID NO: 11880

SEQ ID NO: 24305 - protein, 37 aa, synthetic construct; identical to SEQ ID NO: 11873

SEQ ID NO: 24306 - protein, 33 aa, synthetic construct; identical to SEQ ID NO: 11932

SEQ ID NO: 24307 - protein, 37 aa, synthetic construct; identical to SEQ ID NO: 11873

SEQ ID NO: 24308 - protein, 33 aa, synthetic construct; identical to SEQ ID NO: 12094

SEQ ID NO: 24309 - protein, 37 aa, synthetic construct; identical to SEQ ID NO: 11873

SEQ ID NO: 24310 - protein, 33 aa, synthetic construct; identical to SEQ ID NO: 11876

SEQ ID NO: 24311 - protein, 37 aa, synthetic construct; identical to SEQ ID NO: 11873

SEQ ID NO: 24312 - protein, 33 aa, synthetic construct; identical to SEQ ID NO: 11944

SEQ ID NO: 24313 - protein, 37 aa, synthetic construct; identical to SEQ ID NO: 11873

SEQ ID NO: 24314 - protein, 33 aa, synthetic construct; identical to SEQ ID NO: 11892

SEQ ID NO: 24315 - protein, 37 aa, synthetic construct; identical to SEQ ID NO: 11873

SEQ ID NO: 24316 - protein, 33 aa, synthetic construct; identical to SEQ ID NO: 11874

SEQ ID NO: 24317 - protein, 37 aa, synthetic construct; identical to SEQ ID NO: 11873

SEQ ID NO: 24318 - protein, 33 aa, synthetic construct; identical to SEQ ID NO: 12094

SEQ ID NO: 24319 - protein, 37 aa, synthetic construct; identical to SEQ ID NO: 11873

SEQ ID NO: 24320 - protein, 33 aa, synthetic construct; identical to SEQ ID NO: 11948

SEQ ID NO: 24321 - protein, 37 aa, synthetic construct; identical to SEQ ID NO: 11873

SEQ ID NO: 24322 - protein, 33 aa, synthetic construct; identical to SEQ ID NO: 11880

SEQ ID NO: 24323 - protein, 37 aa, synthetic construct; identical to SEQ ID NO: 11873

SEQ ID NO: 24324 - protein, 33 aa, synthetic construct; identical to SEQ ID NO: 11940

SEQ ID NO: 24325 - protein, 37 aa, synthetic construct; identical to SEQ ID NO: 11873

SEQ ID NO: 24326 - protein, 33 aa, synthetic construct; identical to SEQ ID NO: 11886

SEQ ID NO: 24327 - protein, 37 aa, synthetic construct; identical to SEQ ID NO: 11873

SEQ ID NO: 24328 - protein, 33 aa, synthetic construct; identical to SEQ ID NO: 11918

SEQ ID NO: 24329 - protein, 37 aa, synthetic construct; identical to SEQ ID NO: 11873

SEQ ID NO: 24330 - protein, 33 aa, synthetic construct; identical to SEQ ID NO: 11956

SEQ ID NO: 24331 - protein, 37 aa, synthetic construct; identical to SEQ ID NO: 11873

SEQ ID NO: 24332 - protein, 33 aa, synthetic construct; identical to SEQ ID NO: 12094

SEQ ID NO: 24333 - protein, 37 aa, synthetic construct; identical to SEQ ID NO: 11873

SEQ ID NO: 24334 - protein, 33 aa, synthetic construct; identical to SEQ ID NO: 11910

SEQ ID NO: 24335 - protein, 37 aa, synthetic construct; identical to SEQ ID NO: 11873

SEQ ID NO: 24336 - protein, 33 aa, synthetic construct; identical to SEQ ID NO: 12194

SEQ ID NO: 24337 - protein, 36 aa, synthetic construct; identical to SEQ ID NO: 12035

SEQ ID NO: 24338 - protein, 33 aa, synthetic construct; identical to SEQ ID NO: 11972

SEQ ID NO: 24339 - protein, 36 aa, synthetic construct; identical to SEQ ID NO: 12035

SEQ ID NO: 24340 - protein, 33 aa, synthetic construct; identical to SEQ ID NO: 11910

SEQ ID NO: 24341 - protein, 36 aa, synthetic construct; identical to SEQ ID NO: 12035

SEQ ID NO: 24342 - protein, 33 aa, synthetic construct; identical to SEQ ID NO: 12030

SEQ ID NO: 24343 - protein, 36 aa, synthetic construct; identical to SEQ ID NO: 12035

SEQ ID NO: 24344 - protein, 33 aa, synthetic construct; identical to SEQ ID NO: 11996

SEQ ID NO: 24345 - protein, 36 aa, synthetic construct; identical to SEQ ID NO: 12035

SEQ ID NO: 24346 - protein, 33 aa, synthetic construct; identical to SEQ ID NO: 12120

SEQ ID NO: 24347 - protein, 36 aa, synthetic construct; identical to SEQ ID NO: 12035

SEQ ID NO: 24348 - protein, 33 aa, synthetic construct; identical to SEQ ID NO: 12266

SEQ ID NO: 24349 - protein, 36 aa, synthetic construct; identical to SEQ ID NO: 11887

SEQ ID NO: 24350 - protein, 33 aa, synthetic construct; identical to SEQ ID NO: 11878

SEQ ID NO: 24351 - protein, 36 aa, synthetic construct; identical to SEQ ID NO: 11887

SEQ ID NO: 24352 - protein, 33 aa, synthetic construct; identical to SEQ ID NO: 11932

SEQ ID NO: 24353 - protein, 36 aa, synthetic construct; identical to SEQ ID NO: 11887

SEQ ID NO: 24354 - protein, 33 aa, synthetic construct; identical to SEQ ID NO: 12038

SEQ ID NO: 24355 - protein, 36 aa, synthetic construct; identical to SEQ ID NO: 11887

SEQ ID NO: 24356 - protein, 33 aa, synthetic construct; identical to SEQ ID NO: 11878

SEQ ID NO: 24357 - protein, 36 aa, synthetic construct; identical to SEQ ID NO: 11887

SEQ ID NO: 24358 - protein, 33 aa, synthetic construct; identical to SEQ ID NO: 12030

SEQ ID NO: 24359 - protein, 36 aa, synthetic construct; identical to SEQ ID NO: 11887

SEQ ID NO: 24360 - protein, 33 aa, synthetic construct; identical to SEQ ID NO: 11932

SEQ ID NO: 24361 - protein, 36 aa, synthetic construct; identical to SEQ ID NO: 11887

SEQ ID NO: 24362 - protein, 33 aa, synthetic construct; identical to SEQ ID NO: 12382

SEQ ID NO: 24363 - protein, 36 aa, synthetic construct; identical to SEQ ID NO: 11887

SEQ ID NO: 24364 - protein, 33 aa, synthetic construct; identical to SEQ ID NO: 11874

SEQ ID NO: 24365 - protein, 36 aa, synthetic construct; identical to SEQ ID NO: 11887

SEQ ID NO: 24366 - protein, 33 aa, synthetic construct; identical to SEQ ID NO: 11874

SEQ ID NO: 24367 - protein, 36 aa, synthetic construct; identical to SEQ ID NO: 11887

SEQ ID NO: 24368 - protein, 33 aa, synthetic construct; identical to SEQ ID NO: 12094

SEQ ID NO: 24369 - protein, 36 aa, synthetic construct; identical to SEQ ID NO: 11887

SEQ ID NO: 24370 - protein, 33 aa, synthetic construct; identical to SEQ ID NO: 11944

SEQ ID NO: 24371 - protein, 36 aa, synthetic construct; identical to SEQ ID NO: 11887

SEQ ID NO: 24372 - protein, 33 aa, synthetic construct; identical to SEQ ID NO: 11878

SEQ ID NO: 24373 - protein, 36 aa, synthetic construct; identical to SEQ ID NO: 11887

SEQ ID NO: 24374 - protein, 33 aa, synthetic construct; identical to SEQ ID NO: 12238

SEQ ID NO: 24375 - protein, 36 aa, synthetic construct; identical to SEQ ID NO: 11887

SEQ ID NO: 24376 - protein, 33 aa, synthetic construct; identical to SEQ ID NO: 11892

SEQ ID NO: 24377 - protein, 36 aa, synthetic construct; identical to SEQ ID NO: 11887

SEQ ID NO: 24378 - protein, 33 aa, synthetic construct; identical to SEQ ID NO: 11916

SEQ ID NO: 24379 - protein, 36 aa, synthetic construct; identical to SEQ ID NO: 11971

SEQ ID NO: 24380 - protein, 33 aa, synthetic construct; identical to SEQ ID NO: 11924

SEQ ID NO: 24381 - protein, 36 aa, synthetic construct; identical to SEQ ID NO: 11971

SEQ ID NO: 24382 - protein, 33 aa, synthetic construct; identical to SEQ ID NO: 12016

SEQ ID NO: 24383 - protein, 36 aa, synthetic construct; identical to SEQ ID NO: 11971

SEQ ID NO: 24384 - protein, 33 aa, synthetic construct; identical to SEQ ID NO: 11878

SEQ ID NO: 24385 - protein, 36 aa, synthetic construct; identical to SEQ ID NO: 11971

SEQ ID NO: 24386 - protein, 33 aa, synthetic construct; identical to SEQ ID NO: 11946

SEQ ID NO: 24387 - protein, 36 aa, synthetic construct; identical to SEQ ID NO: 11971

SEQ ID NO: 24388 - protein, 33 aa, synthetic construct; identical to SEQ ID NO: 12382

SEQ ID NO: 24389 - protein, 36 aa, synthetic construct; identical to SEQ ID NO: 11971

SEQ ID NO: 24390 - protein, 33 aa, synthetic construct; identical to SEQ ID NO: 12382

SEQ ID NO: 24391 - protein, 36 aa, synthetic construct; identical to SEQ ID NO: 11971

SEQ ID NO: 24392 - protein, 33 aa, synthetic construct; identical to SEQ ID NO: 11882

SEQ ID NO: 24393 - protein, 36 aa, synthetic construct; identical to SEQ ID NO: 11971

SEQ ID NO: 24394 - protein, 33 aa, synthetic construct; identical to SEQ ID NO: 11918

SEQ ID NO: 24395 - protein, 36 aa, synthetic construct; identical to SEQ ID NO: 11971

SEQ ID NO: 24396 - protein, 33 aa, synthetic construct; identical to SEQ ID NO: 11878

SEQ ID NO: 24397 - protein, 36 aa, synthetic construct; identical to SEQ ID NO: 11971

SEQ ID NO: 24398 - protein, 33 aa, synthetic construct; identical to SEQ ID NO: 12038

SEQ ID NO: 24399 - protein, 36 aa, synthetic construct; identical to SEQ ID NO: 11971

SEQ ID NO: 24400 - protein, 33 aa, synthetic construct; identical to SEQ ID NO: 11874

SEQ ID NO: 24401 - protein, 36 aa, synthetic construct; identical to SEQ ID NO: 11971

SEQ ID NO: 24402 - protein, 33 aa, synthetic construct; identical to SEQ ID NO: 11926

SEQ ID NO: 24403 - protein, 36 aa, synthetic construct; identical to SEQ ID NO: 11971

SEQ ID NO: 24404 - protein, 33 aa, synthetic construct; identical to SEQ ID NO: 11918

SEQ ID NO: 24405 - protein, 36 aa, synthetic construct; identical to SEQ ID NO: 11875

SEQ ID NO: 24406 - protein, 33 aa, synthetic construct; identical to SEQ ID NO: 11920

SEQ ID NO: 24407 - protein, 36 aa, synthetic construct; identical to SEQ ID NO: 11875

SEQ ID NO: 24408 - protein, 33 aa, synthetic construct; identical to SEQ ID NO: 11940

SEQ ID NO: 24409 - protein, 36 aa, synthetic construct; identical to SEQ ID NO: 11875

SEQ ID NO: 24410 - protein, 33 aa, synthetic construct; identical to SEQ ID NO: 11964

SEQ ID NO: 24411 - protein, 36 aa, synthetic construct; identical to SEQ ID NO: 11875

SEQ ID NO: 24412 - protein, 33 aa, synthetic construct; identical to SEQ ID NO: 12042

SEQ ID NO: 24413 - protein, 36 aa, synthetic construct; identical to SEQ ID NO: 11875

SEQ ID NO: 24414 - protein, 33 aa, synthetic construct; identical to SEQ ID NO: 11932

SEQ ID NO: 24415 - protein, 36 aa, synthetic construct; identical to SEQ ID NO: 11875

SEQ ID NO: 24416 - protein, 33 aa, synthetic construct; identical to SEQ ID NO: 12528

SEQ ID NO: 24417 - protein, 36 aa, synthetic construct; identical to SEQ ID NO: 11875

SEQ ID NO: 24418 - protein, 33 aa, synthetic construct; identical to SEQ ID NO: 11964

SEQ ID NO: 24419 - protein, 36 aa, synthetic construct; identical to SEQ ID NO: 11875

SEQ ID NO: 24420 - protein, 33 aa, synthetic construct; identical to SEQ ID NO: 11980

SEQ ID NO: 24421 - protein, 36 aa, synthetic construct; identical to SEQ ID NO: 11875

SEQ ID NO: 24422 - protein, 33 aa, synthetic construct; identical to SEQ ID NO: 11956

SEQ ID NO: 24423 - protein, 36 aa, synthetic construct; identical to SEQ ID NO: 11875

SEQ ID NO: 24424 - protein, 33 aa, synthetic construct; identical to SEQ ID NO: 11874

SEQ ID NO: 24425 - protein, 36 aa, synthetic construct; identical to SEQ ID NO: 11875

SEQ ID NO: 24426 - protein, 33 aa, synthetic construct; identical to SEQ ID NO: 11874

SEQ ID NO: 24427 - protein, 36 aa, synthetic construct; identical to SEQ ID NO: 11875

SEQ ID NO: 24428 - protein, 33 aa, synthetic construct; identical to SEQ ID NO: 12094

SEQ ID NO: 24429 - protein, 36 aa, synthetic construct; identical to SEQ ID NO: 11875

SEQ ID NO: 24430 - protein, 33 aa, synthetic construct; identical to SEQ ID NO: 11896

SEQ ID NO: 24431 - protein, 36 aa, synthetic construct; identical to SEQ ID NO: 11875

SEQ ID NO: 24432 - protein, 33 aa, synthetic construct; identical to SEQ ID NO: 12038

SEQ ID NO: 24433 - protein, 36 aa, synthetic construct; identical to SEQ ID NO: 11875

SEQ ID NO: 24434 - protein, 33 aa, synthetic construct; identical to SEQ ID NO: 11900

SEQ ID NO: 24435 - protein, 36 aa, synthetic construct; identical to SEQ ID NO: 11875

SEQ ID NO: 24436 - protein, 33 aa, synthetic construct; identical to SEQ ID NO: 11996

SEQ ID NO: 24437 - protein, 36 aa, synthetic construct; identical to SEQ ID NO: 11875

SEQ ID NO: 24438 - protein, 33 aa, synthetic construct; identical to SEQ ID NO: 11918

SEQ ID NO: 24439 - protein, 36 aa, synthetic construct; identical to SEQ ID NO: 11875

SEQ ID NO: 24440 - protein, 33 aa, synthetic construct; identical to SEQ ID NO: 12094

SEQ ID NO: 24441 - protein, 36 aa, synthetic construct; identical to SEQ ID NO: 11875

SEQ ID NO: 24442 - protein, 33 aa, synthetic construct; identical to SEQ ID NO: 11878

SEQ ID NO: 24443 - protein, 36 aa, synthetic construct; identical to SEQ ID NO: 11875

SEQ ID NO: 24444 - protein, 31 aa, synthetic construct; identical to SEQ ID NO: 11978

SEQ ID NO: 24445 - protein, 36 aa, synthetic construct; identical to SEQ ID NO: 11875

SEQ ID NO: 24446 - protein, 33 aa, synthetic construct; identical to SEQ ID NO: 11878

SEQ ID NO: 24447 - protein, 36 aa, synthetic construct; identical to SEQ ID NO: 11875

SEQ ID NO: 24448 - protein, 33 aa, synthetic construct; identical to SEQ ID NO: 12032

SEQ ID NO: 24449 - protein, 36 aa, synthetic construct; identical to SEQ ID NO: 11875

SEQ ID NO: 24450 - protein, 33 aa, synthetic construct; identical to SEQ ID NO: 11910

SEQ ID NO: 24451 - protein, 36 aa, synthetic construct; identical to SEQ ID NO: 11875

SEQ ID NO: 24452 - protein, 33 aa, synthetic construct; identical to SEQ ID NO: 11944

SEQ ID NO: 24453 - protein, 36 aa, synthetic construct; identical to SEQ ID NO: 11875

SEQ ID NO: 24454 - protein, 33 aa, synthetic construct; identical to SEQ ID NO: 12382

SEQ ID NO: 24455 - protein, 36 aa, synthetic construct; identical to SEQ ID NO: 11875

SEQ ID NO: 24456 - protein, 33 aa, synthetic construct; identical to SEQ ID NO: 12038

SEQ ID NO: 24457 - protein, 36 aa, synthetic construct; identical to SEQ ID NO: 11875

SEQ ID NO: 24458 - protein, 33 aa, synthetic construct; identical to SEQ ID NO: 11892

SEQ ID NO: 24459 - protein, 36 aa, synthetic construct; identical to SEQ ID NO: 11875

SEQ ID NO: 24460 - protein, 33 aa, synthetic construct; identical to SEQ ID NO: 11952

SEQ ID NO: 24461 - protein, 36 aa, synthetic construct; identical to SEQ ID NO: 11875

SEQ ID NO: 24462 - protein, 33 aa, synthetic construct; identical to SEQ ID NO: 11892

SEQ ID NO: 24463 - protein, 36 aa, synthetic construct; identical to SEQ ID NO: 11875

SEQ ID NO: 24464 - protein, 33 aa, synthetic construct; identical to SEQ ID NO: 12328

SEQ ID NO: 24465 - protein, 36 aa, synthetic construct; identical to SEQ ID NO: 11875

SEQ ID NO: 24466 - protein, 33 aa, synthetic construct; identical to SEQ ID NO: 11932

SEQ ID NO: 24467 - protein, 36 aa, synthetic construct; identical to SEQ ID NO: 11875

SEQ ID NO: 24468 - protein, 33 aa, synthetic construct; identical to SEQ ID NO: 11932

SEQ ID NO: 24469 - protein, 36 aa, synthetic construct; identical to SEQ ID NO: 11875

SEQ ID NO: 24470 - protein, 33 aa, synthetic construct
KEDGGFTIFFNKREKNLSLHIKDSQPGDSATYF

SEQ ID NO: 24471 - protein, 36 aa, synthetic construct; identical to SEQ ID NO: 11875

SEQ ID NO: 24472 - protein, 33 aa, synthetic construct; identical to SEQ ID NO: 11878

SEQ ID NO: 24473 - protein, 36 aa, synthetic construct; identical to SEQ ID NO: 11875

SEQ ID NO: 24474 - protein, 33 aa, synthetic construct; identical to SEQ ID NO: 11882

SEQ ID NO: 24475 - protein, 36 aa, synthetic construct; identical to SEQ ID NO: 11875

SEQ ID NO: 24476 - protein, 33 aa, synthetic construct; identical to SEQ ID NO: 11880

SEQ ID NO: 24477 - protein, 36 aa, synthetic construct; identical to SEQ ID NO: 11875

SEQ ID NO: 24478 - protein, 33 aa, synthetic construct; identical to SEQ ID NO: 11940

SEQ ID NO: 24479 - protein, 36 aa, synthetic construct; identical to SEQ ID NO: 11875

SEQ ID NO: 24480 - protein, 33 aa, synthetic construct; identical to SEQ ID NO: 11940

SEQ ID NO: 24481 - protein, 36 aa, synthetic construct; identical to SEQ ID NO: 11875

SEQ ID NO: 24482 - protein, 33 aa, synthetic construct; identical to SEQ ID NO: 12194

SEQ ID NO: 24483 - protein, 36 aa, synthetic construct; identical to SEQ ID NO: 11875

SEQ ID NO: 24484 - protein, 33 aa, synthetic construct; identical to SEQ ID NO: 12266

SEQ ID NO: 24485 - protein, 36 aa, synthetic construct; identical to SEQ ID NO: 11875

SEQ ID NO: 24486 - protein, 33 aa, synthetic construct; identical to SEQ ID NO: 11878

SEQ ID NO: 24487 - protein, 36 aa, synthetic construct; identical to SEQ ID NO: 11875

SEQ ID NO: 24488 - protein, 33 aa, synthetic construct; identical to SEQ ID NO: 11878

SEQ ID NO: 24489 - protein, 36 aa, synthetic construct; identical to SEQ ID NO: 11875

SEQ ID NO: 24490 - protein, 33 aa, synthetic construct; identical to SEQ ID NO: 11874

SEQ ID NO: 24491 - protein, 36 aa, synthetic construct; identical to SEQ ID NO: 11875

SEQ ID NO: 24492 - protein, 33 aa, synthetic construct; identical to SEQ ID NO: 11940

SEQ ID NO: 24493 - protein, 36 aa, synthetic construct; identical to SEQ ID NO: 11875

SEQ ID NO: 24494 - protein, 33 aa, synthetic construct; identical to SEQ ID NO: 11900

SEQ ID NO: 24495 - protein, 36 aa, synthetic construct; identical to SEQ ID NO: 11875

SEQ ID NO: 24496 - protein, 33 aa, synthetic construct; identical to SEQ ID NO: 11948

SEQ ID NO: 24497 - protein, 36 aa, synthetic construct; identical to SEQ ID NO: 11875

SEQ ID NO: 24498 - protein, 33 aa, synthetic construct; identical to SEQ ID NO: 11918

SEQ ID NO: 24499 - protein, 36 aa, synthetic construct; identical to SEQ ID NO: 11875

SEQ ID NO: 24500 - protein, 33 aa, synthetic construct; identical to SEQ ID NO: 11996

SEQ ID NO: 24501 - protein, 36 aa, synthetic construct; identical to SEQ ID NO: 11875

SEQ ID NO: 24502 - protein, 33 aa, synthetic construct; identical to SEQ ID NO: 11880

SEQ ID NO: 24503 - protein, 36 aa, synthetic construct; identical to SEQ ID NO: 11875

SEQ ID NO: 24504 - protein, 33 aa, synthetic construct; identical to SEQ ID NO: 12038

SEQ ID NO: 24505 - protein, 36 aa, synthetic construct; identical to SEQ ID NO: 11875

SEQ ID NO: 24506 - protein, 33 aa, synthetic construct; identical to SEQ ID NO: 11980

SEQ ID NO: 24507 - protein, 36 aa, synthetic construct; identical to SEQ ID NO: 11875

SEQ ID NO: 24508 - protein, 33 aa, synthetic construct; identical to SEQ ID NO: 12130

SEQ ID NO: 24509 - protein, 36 aa, synthetic construct; identical to SEQ ID NO: 11875

SEQ ID NO: 24510 - protein, 33 aa, synthetic construct; identical to SEQ ID NO: 12124

SEQ ID NO: 24511 - protein, 36 aa, synthetic construct; identical to SEQ ID NO: 11875

SEQ ID NO: 24512 - protein, 33 aa, synthetic construct; identical to SEQ ID NO: 11878

SEQ ID NO: 24513 - protein, 36 aa, synthetic construct; identical to SEQ ID NO: 11909

SEQ ID NO: 24514 - protein, 33 aa, synthetic construct; identical to SEQ ID NO: 11900

SEQ ID NO: 24515 - protein, 36 aa, synthetic construct; identical to SEQ ID NO: 11909

SEQ ID NO: 24516 - protein, 31 aa, synthetic construct
YYSGDPEFSKSNSSFHLQKASVHWSDSAVYF

SEQ ID NO: 24517 - protein, 36 aa, synthetic construct; identical to SEQ ID NO: 11909

SEQ ID NO: 24518 - protein, 33 aa, synthetic construct; identical to SEQ ID NO: 11874

SEQ ID NO: 24519 - protein, 36 aa, synthetic construct; identical to SEQ ID NO: 11909

SEQ ID NO: 24520 - protein, 33 aa, synthetic construct; identical to SEQ ID NO: 11878

SEQ ID NO: 24521 - protein, 36 aa, synthetic construct; identical to SEQ ID NO: 11909

SEQ ID NO: 24522 - protein, 33 aa, synthetic construct; identical to SEQ ID NO: 12382

SEQ ID NO: 24523 - protein, 36 aa, synthetic construct; identical to SEQ ID NO: 11909

SEQ ID NO: 24524 - protein, 33 aa, synthetic construct; identical to SEQ ID NO: 11932

SEQ ID NO: 24525 - protein, 36 aa, synthetic construct; identical to SEQ ID NO: 11909

SEQ ID NO: 24526 - protein, 33 aa, synthetic construct; identical to SEQ ID NO: 11916

SEQ ID NO: 24527 - protein, 36 aa, synthetic construct; identical to SEQ ID NO: 11909

SEQ ID NO: 24528 - protein, 33 aa, synthetic construct; identical to SEQ ID NO: 11878

SEQ ID NO: 24529 - protein, 36 aa, synthetic construct; identical to SEQ ID NO: 11909

SEQ ID NO: 24530 - protein, 33 aa, synthetic construct; identical to SEQ ID NO: 11948

SEQ ID NO: 24531 - protein, 36 aa, synthetic construct; identical to SEQ ID NO: 11909

SEQ ID NO: 24532 - protein, 33 aa, synthetic construct; identical to SEQ ID NO: 11920

SEQ ID NO: 24533 - protein, 36 aa, synthetic construct; identical to SEQ ID NO: 11909

SEQ ID NO: 24534 - protein, 33 aa, synthetic construct; identical to SEQ ID NO: 11892

SEQ ID NO: 24535 - protein, 36 aa, synthetic construct; identical to SEQ ID NO: 11909

SEQ ID NO: 24536 - protein, 33 aa, synthetic construct; identical to SEQ ID NO: 11918

SEQ ID NO: 24537 - protein, 36 aa, synthetic construct; identical to SEQ ID NO: 11909

SEQ ID NO: 24538 - protein, 33 aa, synthetic construct; identical to SEQ ID NO: 12124

SEQ ID NO: 24539 - protein, 36 aa, synthetic construct; identical to SEQ ID NO: 11909

SEQ ID NO: 24540 - protein, 31 aa, synthetic construct; identical to SEQ ID NO: 11978

SEQ ID NO: 24541 - protein, 36 aa, synthetic construct; identical to SEQ ID NO: 11909

SEQ ID NO: 24542 - protein, 33 aa, synthetic construct; identical to SEQ ID NO: 11964

SEQ ID NO: 24543 - protein, 36 aa, synthetic construct; identical to SEQ ID NO: 11909

SEQ ID NO: 24544 - protein, 33 aa, synthetic construct; identical to SEQ ID NO: 11932

SEQ ID NO: 24545 - protein, 36 aa, synthetic construct; identical to SEQ ID NO: 11909

SEQ ID NO: 24546 - protein, 33 aa, synthetic construct; identical to SEQ ID NO: 11886

SEQ ID NO: 24547 - protein, 36 aa, synthetic construct; identical to SEQ ID NO: 11909

SEQ ID NO: 24548 - protein, 33 aa, synthetic construct; identical to SEQ ID NO: 11916

SEQ ID NO: 24549 - protein, 36 aa, synthetic construct; identical to SEQ ID NO: 11909

SEQ ID NO: 24550 - protein, 33 aa, synthetic construct; identical to SEQ ID NO: 12542

SEQ ID NO: 24551 - protein, 36 aa, synthetic construct; identical to SEQ ID NO: 11909

SEQ ID NO: 24552 - protein, 33 aa, synthetic construct; identical to SEQ ID NO: 11972

SEQ ID NO: 24553 - protein, 36 aa, synthetic construct; identical to SEQ ID NO: 11909

SEQ ID NO: 24554 - protein, 33 aa, synthetic construct; identical to SEQ ID NO: 11880

SEQ ID NO: 24555 - protein, 36 aa, synthetic construct; identical to SEQ ID NO: 11909

SEQ ID NO: 24556 - protein, 33 aa, synthetic construct; identical to SEQ ID NO: 24470

SEQ ID NO: 24557 - protein, 36 aa, synthetic construct; identical to SEQ ID NO: 11909

SEQ ID NO: 24558 - protein, 33 aa, synthetic construct; identical to SEQ ID NO: 11918

SEQ ID NO: 24559 - protein, 36 aa, synthetic construct; identical to SEQ ID NO: 11909

SEQ ID NO: 24560 - protein, 33 aa, synthetic construct; identical to SEQ ID NO: 11932

SEQ ID NO: 24561 - protein, 36 aa, synthetic construct; identical to SEQ ID NO: 11909

SEQ ID NO: 24562 - protein, 33 aa, synthetic construct; identical to SEQ ID NO: 11932

SEQ ID NO: 24563 - protein, 36 aa, synthetic construct; identical to SEQ ID NO: 11909

SEQ ID NO: 24564 - protein, 33 aa, synthetic construct; identical to SEQ ID NO: 11918

SEQ ID NO: 24565 - protein, 36 aa, synthetic construct; identical to SEQ ID NO: 11909

SEQ ID NO: 24566 - protein, 33 aa, synthetic construct; identical to SEQ ID NO: 11916

SEQ ID NO: 24567 - protein, 36 aa, synthetic construct; identical to SEQ ID NO: 11909

SEQ ID NO: 24568 - protein, 33 aa, synthetic construct; identical to SEQ ID NO: 11940

SEQ ID NO: 24569 - protein, 36 aa, synthetic construct; identical to SEQ ID NO: 11909

SEQ ID NO: 24570 - protein, 33 aa, synthetic construct; identical to SEQ ID NO: 11900

SEQ ID NO: 24571 - protein, 36 aa, synthetic construct; identical to SEQ ID NO: 11909

SEQ ID NO: 24572 - protein, 33 aa, synthetic construct; identical to SEQ ID NO: 11940

SEQ ID NO: 24573 - protein, 36 aa, synthetic construct; identical to SEQ ID NO: 11909

SEQ ID NO: 24574 - protein, 33 aa, synthetic construct; identical to SEQ ID NO: 11878

SEQ ID NO: 24575 - protein, 36 aa, synthetic construct; identical to SEQ ID NO: 11909

SEQ ID NO: 24576 - protein, 33 aa, synthetic construct; identical to SEQ ID NO: 11900

SEQ ID NO: 24577 - protein, 36 aa, synthetic construct; identical to SEQ ID NO: 11909

SEQ ID NO: 24578 - protein, 33 aa, synthetic construct; identical to SEQ ID NO: 11876

SEQ ID NO: 24579 - protein, 36 aa, synthetic construct; identical to SEQ ID NO: 11909

SEQ ID NO: 24580 - protein, 33 aa, synthetic construct; identical to SEQ ID NO: 11948

SEQ ID NO: 24581 - protein, 36 aa, synthetic construct; identical to SEQ ID NO: 11909

SEQ ID NO: 24582 - protein, 33 aa, synthetic construct; identical to SEQ ID NO: 11980

SEQ ID NO: 24583 - protein, 36 aa, synthetic construct; identical to SEQ ID NO: 11909

SEQ ID NO: 24584 - protein, 33 aa, synthetic construct; identical to SEQ ID NO: 11886

SEQ ID NO: 24585 - protein, 36 aa, synthetic construct; identical to SEQ ID NO: 11909

SEQ ID NO: 24586 - protein, 33 aa, synthetic construct; identical to SEQ ID NO: 11996

SEQ ID NO: 24587 - protein, 36 aa, synthetic construct; identical to SEQ ID NO: 11879

SEQ ID NO: 24588 - protein, 33 aa, synthetic construct; identical to SEQ ID NO: 11896

SEQ ID NO: 24589 - protein, 36 aa, synthetic construct; identical to SEQ ID NO: 11879

SEQ ID NO: 24590 - protein, 33 aa, synthetic construct; identical to SEQ ID NO: 11940

SEQ ID NO: 24591 - protein, 36 aa, synthetic construct; identical to SEQ ID NO: 11879

SEQ ID NO: 24592 - protein, 33 aa, synthetic construct; identical to SEQ ID NO: 11874

SEQ ID NO: 24593 - protein, 36 aa, synthetic construct; identical to SEQ ID NO: 11879

SEQ ID NO: 24594 - protein, 33 aa, synthetic construct; identical to SEQ ID NO: 12194

SEQ ID NO: 24595 - protein, 36 aa, synthetic construct; identical to SEQ ID NO: 11879

SEQ ID NO: 24596 - protein, 33 aa, synthetic construct; identical to SEQ ID NO: 11878

SEQ ID NO: 24597 - protein, 36 aa, synthetic construct; identical to SEQ ID NO: 11879

SEQ ID NO: 24598 - protein, 33 aa, synthetic construct; identical to SEQ ID NO: 12054

SEQ ID NO: 24599 - protein, 36 aa, synthetic construct; identical to SEQ ID NO: 11879

SEQ ID NO: 24600 - protein, 31 aa, synthetic construct; identical to SEQ ID NO: 11978

SEQ ID NO: 24601 - protein, 36 aa, synthetic construct; identical to SEQ ID NO: 11879

SEQ ID NO: 24602 - protein, 33 aa, synthetic construct; identical to SEQ ID NO: 11920

SEQ ID NO: 24603 - protein, 36 aa, synthetic construct; identical to SEQ ID NO: 11879

SEQ ID NO: 24604 - protein, 33 aa, synthetic construct; identical to SEQ ID NO: 11878

SEQ ID NO: 24605 - protein, 36 aa, synthetic construct; identical to SEQ ID NO: 11879

SEQ ID NO: 24606 - protein, 33 aa, synthetic construct; identical to SEQ ID NO: 11892

SEQ ID NO: 24607 - protein, 36 aa, synthetic construct; identical to SEQ ID NO: 11879

SEQ ID NO: 24608 - protein, 33 aa, synthetic construct; identical to SEQ ID NO: 11880

SEQ ID NO: 24609 - protein, 36 aa, synthetic construct; identical to SEQ ID NO: 11879

SEQ ID NO: 24610 - protein, 33 aa, synthetic construct; identical to SEQ ID NO: 11946

SEQ ID NO: 24611 - protein, 36 aa, synthetic construct; identical to SEQ ID NO: 11879

SEQ ID NO: 24612 - protein, 34 aa, synthetic construct; identical to SEQ ID NO: 11890

SEQ ID NO: 24613 - protein, 36 aa, synthetic construct; identical to SEQ ID NO: 11879

SEQ ID NO: 24614 - protein, 33 aa, synthetic construct; identical to SEQ ID NO: 11996

SEQ ID NO: 24615 - protein, 36 aa, synthetic construct; identical to SEQ ID NO: 11879

SEQ ID NO: 24616 - protein, 33 aa, synthetic construct; identical to SEQ ID NO: 12032

SEQ ID NO: 24617 - protein, 36 aa, synthetic construct; identical to SEQ ID NO: 11879

SEQ ID NO: 24618 - protein, 33 aa, synthetic construct; identical to SEQ ID NO: 11874

SEQ ID NO: 24619 - protein, 36 aa, synthetic construct; identical to SEQ ID NO: 11879

SEQ ID NO: 24620 - protein, 33 aa, synthetic construct; identical to SEQ ID NO: 11878

SEQ ID NO: 24621 - protein, 36 aa, synthetic construct; identical to SEQ ID NO: 11879

SEQ ID NO: 24622 - protein, 33 aa, synthetic construct; identical to SEQ ID NO: 12032

SEQ ID NO: 24623 - protein, 36 aa, synthetic construct; identical to SEQ ID NO: 11879

SEQ ID NO: 24624 - protein, 33 aa, synthetic construct; identical to SEQ ID NO: 11878

SEQ ID NO: 24625 - protein, 36 aa, synthetic construct; identical to SEQ ID NO: 11879

SEQ ID NO: 24626 - protein, 33 aa, synthetic construct; identical to SEQ ID NO: 11916

SEQ ID NO: 24627 - protein, 36 aa, synthetic construct; identical to SEQ ID NO: 11879

SEQ ID NO: 24628 - protein, 33 aa, synthetic construct; identical to SEQ ID NO: 11950

SEQ ID NO: 24629 - protein, 36 aa, synthetic construct; identical to SEQ ID NO: 11879

SEQ ID NO: 24630 - protein, 33 aa, synthetic construct; identical to SEQ ID NO: 12130

SEQ ID NO: 24631 - protein, 36 aa, synthetic construct; identical to SEQ ID NO: 11879

SEQ ID NO: 24632 - protein, 33 aa, synthetic construct; identical to SEQ ID NO: 11952

SEQ ID NO: 24633 - protein, 36 aa, synthetic construct; identical to SEQ ID NO: 11879

SEQ ID NO: 24634 - protein, 33 aa, synthetic construct; identical to SEQ ID NO: 11916

SEQ ID NO: 24635 - protein, 36 aa, synthetic construct; identical to SEQ ID NO: 11879

SEQ ID NO: 24636 - protein, 33 aa, synthetic construct
KQTQRLTLLFDKKTKHLSLHITATQPGDSAIYF

SEQ ID NO: 24637 - protein, 36 aa, synthetic construct; identical to SEQ ID NO: 11879

SEQ ID NO: 24638 - protein, 33 aa, synthetic construct; identical to SEQ ID NO: 11878

SEQ ID NO: 24639 - protein, 36 aa, synthetic construct; identical to SEQ ID NO: 11879

SEQ ID NO: 24640 - protein, 33 aa, synthetic construct; identical to SEQ ID NO: 11928

SEQ ID NO: 24641 - protein, 36 aa, synthetic construct; identical to SEQ ID NO: 11879

SEQ ID NO: 24642 - protein, 33 aa, synthetic construct; identical to SEQ ID NO: 12120

SEQ ID NO: 24643 - protein, 36 aa, synthetic construct; identical to SEQ ID NO: 11879

SEQ ID NO: 24644 - protein, 33 aa, synthetic construct; identical to SEQ ID NO: 11916

SEQ ID NO: 24645 - protein, 36 aa, synthetic construct; identical to SEQ ID NO: 11879

SEQ ID NO: 24646 - protein, 33 aa, synthetic construct; identical to SEQ ID NO: 12152

SEQ ID NO: 24647 - protein, 36 aa, synthetic construct; identical to SEQ ID NO: 11879

SEQ ID NO: 24648 - protein, 33 aa, synthetic construct; identical to SEQ ID NO: 12276

SEQ ID NO: 24649 - protein, 36 aa, synthetic construct; identical to SEQ ID NO: 11879

SEQ ID NO: 24650 - protein, 33 aa, synthetic construct; identical to SEQ ID NO: 11878

SEQ ID NO: 24651 - protein, 36 aa, synthetic construct; identical to SEQ ID NO: 12171

SEQ ID NO: 24652 - protein, 33 aa, synthetic construct; identical to SEQ ID NO: 12266

SEQ ID NO: 24653 - protein, 36 aa, synthetic construct; identical to SEQ ID NO: 12171

SEQ ID NO: 24654 - protein, 33 aa, synthetic construct; identical to SEQ ID NO: 11932

SEQ ID NO: 24655 - protein, 36 aa, synthetic construct; identical to SEQ ID NO: 12171

SEQ ID NO: 24656 - protein, 33 aa, synthetic construct; identical to SEQ ID NO: 12182

SEQ ID NO: 24657 - protein, 36 aa, synthetic construct; identical to SEQ ID NO: 12171

SEQ ID NO: 24658 - protein, 33 aa, synthetic construct; identical to SEQ ID NO: 12130

SEQ ID NO: 24659 - protein, 36 aa, synthetic construct; identical to SEQ ID NO: 12171

SEQ ID NO: 24660 - protein, 33 aa, synthetic construct; identical to SEQ ID NO: 11916

SEQ ID NO: 24661 - protein, 36 aa, synthetic construct; identical to SEQ ID NO: 12171

SEQ ID NO: 24662 - protein, 33 aa, synthetic construct; identical to SEQ ID NO: 12094

SEQ ID NO: 24663 - protein, 36 aa, synthetic construct; identical to SEQ ID NO: 12171

SEQ ID NO: 24664 - protein, 33 aa, synthetic construct; identical to SEQ ID NO: 11932

SEQ ID NO: 24665 - protein, 36 aa, synthetic construct; identical to SEQ ID NO: 12171

SEQ ID NO: 24666 - protein, 33 aa, synthetic construct; identical to SEQ ID NO: 11926

SEQ ID NO: 24667 - protein, 37 aa, synthetic construct; identical to SEQ ID NO: 13111

SEQ ID NO: 24668 - protein, 33 aa, synthetic construct; identical to SEQ ID NO: 11878

SEQ ID NO: 24669 - protein, 37 aa, synthetic construct; identical to SEQ ID NO: 13111

SEQ ID NO: 24670 - protein, 33 aa, synthetic construct; identical to SEQ ID NO: 11878

SEQ ID NO: 24671 - protein, 36 aa, synthetic construct; identical to SEQ ID NO: 11907

SEQ ID NO: 24672 - protein, 33 aa, synthetic construct; identical to SEQ ID NO: 11900

SEQ ID NO: 24673 - protein, 36 aa, synthetic construct; identical to SEQ ID NO: 11907

SEQ ID NO: 24674 - protein, 33 aa, synthetic construct; identical to SEQ ID NO: 12194

SEQ ID NO: 24675 - protein, 36 aa, synthetic construct; identical to SEQ ID NO: 11907

SEQ ID NO: 24676 - protein, 33 aa, synthetic construct; identical to SEQ ID NO: 11880

SEQ ID NO: 24677 - protein, 36 aa, synthetic construct; identical to SEQ ID NO: 11907

SEQ ID NO: 24678 - protein, 33 aa, synthetic construct; identical to SEQ ID NO: 11944

SEQ ID NO: 24679 - protein, 36 aa, synthetic construct; identical to SEQ ID NO: 11907

SEQ ID NO: 24680 - protein, 33 aa, synthetic construct; identical to SEQ ID NO: 11972

SEQ ID NO: 24681 - protein, 36 aa, synthetic construct; identical to SEQ ID NO: 11907

SEQ ID NO: 24682 - protein, 33 aa, synthetic construct; identical to SEQ ID NO: 11948

SEQ ID NO: 24683 - protein, 36 aa, synthetic construct; identical to SEQ ID NO: 11907

SEQ ID NO: 24684 - protein, 33 aa, synthetic construct; identical to SEQ ID NO: 11894

SEQ ID NO: 24685 - protein, 36 aa, synthetic construct; identical to SEQ ID NO: 11907

SEQ ID NO: 24686 - protein, 33 aa, synthetic construct; identical to SEQ ID NO: 11980

SEQ ID NO: 24687 - protein, 36 aa, synthetic construct; identical to SEQ ID NO: 11907

SEQ ID NO: 24688 - protein, 33 aa, synthetic construct; identical to SEQ ID NO: 11916

SEQ ID NO: 24689 - protein, 37 aa, synthetic construct; identical to SEQ ID NO: 11963

SEQ ID NO: 24690 - protein, 33 aa, synthetic construct; identical to SEQ ID NO: 12094

SEQ ID NO: 24691 - protein, 37 aa, synthetic construct; identical to SEQ ID NO: 11963

SEQ ID NO: 24692 - protein, 33 aa, synthetic construct; identical to SEQ ID NO: 11892

SEQ ID NO: 24693 - protein, 37 aa, synthetic construct; identical to SEQ ID NO: 11963

SEQ ID NO: 24694 - protein, 33 aa, synthetic construct; identical to SEQ ID NO: 11952

SEQ ID NO: 24695 - protein, 36 aa, synthetic construct; identical to SEQ ID NO: 11899

SEQ ID NO: 24696 - protein, 33 aa, synthetic construct; identical to SEQ ID NO: 11964

SEQ ID NO: 24697 - protein, 36 aa, synthetic construct; identical to SEQ ID NO: 11899

SEQ ID NO: 24698 - protein, 33 aa, synthetic construct; identical to SEQ ID NO: 12038

SEQ ID NO: 24699 - protein, 36 aa, synthetic construct; identical to SEQ ID NO: 11899

SEQ ID NO: 24700 - protein, 33 aa, synthetic construct; identical to SEQ ID NO: 11900

SEQ ID NO: 24701 - protein, 36 aa, synthetic construct; identical to SEQ ID NO: 11899

SEQ ID NO: 24702 - protein, 33 aa, synthetic construct; identical to SEQ ID NO: 12094

SEQ ID NO: 24703 - protein, 36 aa, synthetic construct; identical to SEQ ID NO: 11899

SEQ ID NO: 24704 - protein, 33 aa, synthetic construct; identical to SEQ ID NO: 12032

SEQ ID NO: 24705 - protein, 36 aa, synthetic construct; identical to SEQ ID NO: 11899

SEQ ID NO: 24706 - protein, 33 aa, synthetic construct; identical to SEQ ID NO: 11946

SEQ ID NO: 24707 - protein, 36 aa, synthetic construct; identical to SEQ ID NO: 11899

SEQ ID NO: 24708 - protein, 33 aa, synthetic construct; identical to SEQ ID NO: 12382

SEQ ID NO: 24709 - protein, 36 aa, synthetic construct; identical to SEQ ID NO: 11899

SEQ ID NO: 24710 - protein, 33 aa, synthetic construct; identical to SEQ ID NO: 11944

SEQ ID NO: 24711 - protein, 36 aa, synthetic construct; identical to SEQ ID NO: 11899

SEQ ID NO: 24712 - protein, 33 aa, synthetic construct; identical to SEQ ID NO: 11940

SEQ ID NO: 24713 - protein, 36 aa, synthetic construct; identical to SEQ ID NO: 11899

SEQ ID NO: 24714 - protein, 33 aa, synthetic construct; identical to SEQ ID NO: 11878

SEQ ID NO: 24715 - protein, 36 aa, synthetic construct; identical to SEQ ID NO: 11899

SEQ ID NO: 24716 - protein, 33 aa, synthetic construct; identical to SEQ ID NO: 12130

SEQ ID NO: 24717 - protein, 36 aa, synthetic construct; identical to SEQ ID NO: 11899

SEQ ID NO: 24718 - protein, 33 aa, synthetic construct; identical to SEQ ID NO: 11878

SEQ ID NO: 24719 - protein, 36 aa, synthetic construct; identical to SEQ ID NO: 11899

SEQ ID NO: 24720 - protein, 33 aa, synthetic construct; identical to SEQ ID NO: 11896

SEQ ID NO: 24721 - protein, 36 aa, synthetic construct; identical to SEQ ID NO: 11899

SEQ ID NO: 24722 - protein, 33 aa, synthetic construct; identical to SEQ ID NO: 11878

SEQ ID NO: 24723 - protein, 36 aa, synthetic construct; identical to SEQ ID NO: 11899

SEQ ID NO: 24724 - protein, 33 aa, synthetic construct; identical to SEQ ID NO: 12152

SEQ ID NO: 24725 - protein, 36 aa, synthetic construct; identical to SEQ ID NO: 11899

SEQ ID NO: 24726 - protein, 33 aa, synthetic construct; identical to SEQ ID NO: 11926

SEQ ID NO: 24727 - protein, 36 aa, synthetic construct; identical to SEQ ID NO: 11899

SEQ ID NO: 24728 - protein, 33 aa, synthetic construct; identical to SEQ ID NO: 11926

SEQ ID NO: 24729 - protein, 36 aa, synthetic construct; identical to SEQ ID NO: 11899

SEQ ID NO: 24730 - protein, 33 aa, synthetic construct; identical to SEQ ID NO: 11940

SEQ ID NO: 24731 - protein, 36 aa, synthetic construct; identical to SEQ ID NO: 11899

SEQ ID NO: 24732 - protein, 33 aa, synthetic construct; identical to SEQ ID NO: 11932

SEQ ID NO: 24733 - protein, 36 aa, synthetic construct; identical to SEQ ID NO: 11899

SEQ ID NO: 24734 - protein, 33 aa, synthetic construct; identical to SEQ ID NO: 11932

SEQ ID NO: 24735 - protein, 36 aa, synthetic construct; identical to SEQ ID NO: 11899

SEQ ID NO: 24736 - protein, 33 aa, synthetic construct; identical to SEQ ID NO: 11914

SEQ ID NO: 24737 - protein, 36 aa, synthetic construct; identical to SEQ ID NO: 11899

SEQ ID NO: 24738 - protein, 33 aa, synthetic construct; identical to SEQ ID NO: 11874

SEQ ID NO: 24739 - protein, 36 aa, synthetic construct; identical to SEQ ID NO: 11899

SEQ ID NO: 24740 - protein, 33 aa, synthetic construct; identical to SEQ ID NO: 11892

SEQ ID NO: 24741 - protein, 36 aa, synthetic construct; identical to SEQ ID NO: 11899

SEQ ID NO: 24742 - protein, 33 aa, synthetic construct; identical to SEQ ID NO: 12382

SEQ ID NO: 24743 - protein, 36 aa, synthetic construct; identical to SEQ ID NO: 11899

SEQ ID NO: 24744 - protein, 33 aa, synthetic construct; identical to SEQ ID NO: 11946

SEQ ID NO: 24745 - protein, 36 aa, synthetic construct; identical to SEQ ID NO: 11899

SEQ ID NO: 24746 - protein, 33 aa, synthetic construct; identical to SEQ ID NO: 11946

SEQ ID NO: 24747 - protein, 36 aa, synthetic construct; identical to SEQ ID NO: 11899

SEQ ID NO: 24748 - protein, 33 aa, synthetic construct; identical to SEQ ID NO: 12032

SEQ ID NO: 24749 - protein, 36 aa, synthetic construct; identical to SEQ ID NO: 11899

SEQ ID NO: 24750 - protein, 31 aa, synthetic construct; identical to SEQ ID NO: 11978

SEQ ID NO: 24751 - protein, 36 aa, synthetic construct; identical to SEQ ID NO: 11899

SEQ ID NO: 24752 - protein, 33 aa, synthetic construct; identical to SEQ ID NO: 11900

SEQ ID NO: 24753 - protein, 36 aa, synthetic construct; identical to SEQ ID NO: 11899

SEQ ID NO: 24754 - protein, 33 aa, synthetic construct; identical to SEQ ID NO: 12328

SEQ ID NO: 24755 - protein, 36 aa, synthetic construct; identical to SEQ ID NO: 11899

SEQ ID NO: 24756 - protein, 33 aa, synthetic construct; identical to SEQ ID NO: 11940

SEQ ID NO: 24757 - protein, 36 aa, synthetic construct; identical to SEQ ID NO: 11899

SEQ ID NO: 24758 - protein, 33 aa, synthetic construct; identical to SEQ ID NO: 11880

SEQ ID NO: 24759 - protein, 35 aa, synthetic construct; identical to SEQ ID NO: 11895

SEQ ID NO: 24760 - protein, 31 aa, synthetic construct; identical to SEQ ID NO: 11978

SEQ ID NO: 24761 - protein, 35 aa, synthetic construct; identical to SEQ ID NO: 11895

SEQ ID NO: 24762 - protein, 33 aa, synthetic construct; identical to SEQ ID NO: 11980

SEQ ID NO: 24763 - protein, 35 aa, synthetic construct; identical to SEQ ID NO: 11895

SEQ ID NO: 24764 - protein, 33 aa, synthetic construct; identical to SEQ ID NO: 11878

SEQ ID NO: 24765 - protein, 35 aa, synthetic construct; identical to SEQ ID NO: 11895

SEQ ID NO: 24766 - protein, 33 aa, synthetic construct; identical to SEQ ID NO: 11892

SEQ ID NO: 24767 - protein, 35 aa, synthetic construct; identical to SEQ ID NO: 11895

SEQ ID NO: 24768 - protein, 33 aa, synthetic construct; identical to SEQ ID NO: 11944

SEQ ID NO: 24769 - protein, 35 aa, synthetic construct; identical to SEQ ID NO: 11895

SEQ ID NO: 24770 - protein, 31 aa, synthetic construct; identical to SEQ ID NO: 11978

SEQ ID NO: 24771 - protein, 35 aa, synthetic construct; identical to SEQ ID NO: 11895

SEQ ID NO: 24772 - protein, 33 aa, synthetic construct; identical to SEQ ID NO: 11972

SEQ ID NO: 24773 - protein, 35 aa, synthetic construct; identical to SEQ ID NO: 11895

SEQ ID NO: 24774 - protein, 33 aa, synthetic construct; identical to SEQ ID NO: 11896

SEQ ID NO: 24775 - protein, 35 aa, synthetic construct; identical to SEQ ID NO: 11895

SEQ ID NO: 24776 - protein, 33 aa, synthetic construct; identical to SEQ ID NO: 11940

SEQ ID NO: 24777 - protein, 35 aa, synthetic construct; identical to SEQ ID NO: 11895

SEQ ID NO: 24778 - protein, 33 aa, synthetic construct; identical to SEQ ID NO: 11896

SEQ ID NO: 24779 - protein, 35 aa, synthetic construct; identical to SEQ ID NO: 11895

SEQ ID NO: 24780 - protein, 33 aa, synthetic construct; identical to SEQ ID NO: 11892

SEQ ID NO: 24781 - protein, 35 aa, synthetic construct; identical to SEQ ID NO: 11895

SEQ ID NO: 24782 - protein, 33 aa, synthetic construct; identical to SEQ ID NO: 11940

SEQ ID NO: 24783 - DNA, 108 bp, synthetic construct; identical to SEQ ID NO: 13383
  source 1..108: mol_type = other DNA

SEQ ID NO: 24784 - DNA, 99 bp, synthetic construct; identical to SEQ ID NO: 13516
  source 1..99: mol_type = other DNA

SEQ ID NO: 24785 - DNA, 105 bp, synthetic construct; identical to SEQ ID NO: 13379
  source 1..105: mol_type = other DNA

SEQ ID NO: 24786 - DNA, 99 bp, synthetic construct; identical to SEQ ID NO: 13516
  source 1..99: mol_type = other DNA

SEQ ID NO: 24787 - DNA, 108 bp, synthetic construct; identical to SEQ ID NO: 13383
  source 1..108: mol_type = other DNA

SEQ ID NO: 24788 - DNA, 99 bp, synthetic construct; identical to SEQ ID NO: 13408
  source 1..99: mol_type = other DNA

SEQ ID NO: 24789 - DNA, 108 bp, synthetic construct; identical to SEQ ID NO: 13363
  source 1..108: mol_type = other DNA

SEQ ID NO: 24790 - DNA, 99 bp, synthetic construct; identical to SEQ ID NO: 13464
  source 1..99: mol_type = other DNA

SEQ ID NO: 24791 - DNA, 108 bp, synthetic construct; identical to SEQ ID NO: 13655
  source 1..108: mol_type = other DNA

SEQ ID NO: 24792 - DNA, 99 bp, synthetic construct; identical to SEQ ID NO: 13938
  source 1..99: mol_type = other DNA

SEQ ID NO: 24793 - DNA, 108 bp, synthetic construct; identical to SEQ ID NO: 13519
  source 1..108: mol_type = other DNA

SEQ ID NO: 24794 - DNA, 99 bp, synthetic construct; identical to SEQ ID NO: 13358
  source 1..99: mol_type = other DNA

SEQ ID NO: 24795 - DNA, 108 bp, synthetic construct; identical to SEQ ID NO: 13363
  source 1..108: mol_type = other DNA

SEQ ID NO: 24796 - DNA, 99 bp, synthetic construct; identical to SEQ ID NO: 13514
  source 1..99: mol_type = other DNA

SEQ ID NO: 24797 - DNA, 108 bp, synthetic construct; identical to SEQ ID NO: 13359
  source 1..108: mol_type = other DNA

SEQ ID NO: 24798 - DNA, 99 bp, synthetic construct; identical to SEQ ID NO: 13360
  source 1..99: mol_type = other DNA

SEQ ID NO: 24799 - DNA, 108 bp, synthetic construct; identical to SEQ ID NO: 13359
  source 1..108: mol_type = other DNA

SEQ ID NO: 24800 - DNA, 99 bp, synthetic construct; identical to SEQ ID NO: 13866
  source 1..99: mol_type = other DNA

SEQ ID NO: 24801 - DNA, 108 bp, synthetic construct; identical to SEQ ID NO: 13363
  source 1..108: mol_type = other DNA

SEQ ID NO: 24802 - DNA, 99 bp, synthetic construct; identical to SEQ ID NO: 13364
  source 1..99: mol_type = other DNA

SEQ ID NO: 24803 - DNA, 108 bp, synthetic construct; identical to SEQ ID NO: 13451
  source 1..108: mol_type = other DNA

SEQ ID NO: 24804 - DNA, 99 bp, synthetic construct; identical to SEQ ID NO: 13434
  source 1..99: mol_type = other DNA

SEQ ID NO: 24805 - DNA, 108 bp, synthetic construct; identical to SEQ ID NO: 13391
  source 1..108: mol_type = other DNA

SEQ ID NO: 24806 - DNA, 99 bp, synthetic construct; identical to SEQ ID NO: 13444
  source 1..99: mol_type = other DNA

SEQ ID NO: 24807 - DNA, 111 bp, synthetic construct; identical to SEQ ID NO: 13357
  source 1..111: mol_type = other DNA

SEQ ID NO: 24808 - DNA, 99 bp, synthetic construct; identical to SEQ ID NO: 13364
  source 1..99: mol_type = other DNA

SEQ ID NO: 24809 - DNA, 108 bp, synthetic construct; identical to SEQ ID NO: 13371
  source 1..108: mol_type = other DNA

SEQ ID NO: 24810 - DNA, 99 bp, synthetic construct; identical to SEQ ID NO: 13614
  source 1..99: mol_type = other DNA

SEQ ID NO: 24811 - DNA, 108 bp, synthetic construct; identical to SEQ ID NO: 13363
  source 1..108: mol_type = other DNA

SEQ ID NO: 24812 - DNA, 99 bp, synthetic construct; identical to SEQ ID NO: 13444
  source 1..99: mol_type = other DNA

SEQ ID NO: 24813 - DNA, 108 bp, synthetic construct; identical to SEQ ID NO: 13383
  source 1..108: mol_type = other DNA

SEQ ID NO: 24814 - DNA, 99 bp, synthetic construct; identical to SEQ ID NO: 13516
  source 1..99: mol_type = other DNA

SEQ ID NO: 24815 - DNA, 108 bp, synthetic construct; identical to SEQ ID NO: 13383
  source 1..108: mol_type = other DNA

SEQ ID NO: 24816 - DNA, 99 bp, synthetic construct; identical to SEQ ID NO: 13402
  source 1..99: mol_type = other DNA

SEQ ID NO: 24817 - DNA, 108 bp, synthetic construct; identical to SEQ ID NO: 13451
  source 1..108: mol_type = other DNA

SEQ ID NO: 24818 - DNA, 99 bp, synthetic construct; identical to SEQ ID NO: 13412
  source 1..99: mol_type = other DNA

SEQ ID NO: 24819 - DNA, 108 bp, synthetic construct; identical to SEQ ID NO: 13371
  source 1..108: mol_type = other DNA

SEQ ID NO: 24820 - DNA, 99 bp, synthetic construct; identical to SEQ ID NO: 13416
  source 1..99: mol_type = other DNA

SEQ ID NO: 24821 - DNA, 108 bp, synthetic construct; identical to SEQ ID NO: 13359
  source 1..108: mol_type = other DNA

SEQ ID NO: 24822 - DNA, 99 bp, synthetic construct; identical to SEQ ID NO: 13362
  source 1..99: mol_type = other DNA

SEQ ID NO: 24823 - DNA, 108 bp, synthetic construct; identical to SEQ ID NO: 13359
  source 1..108: mol_type = other DNA

SEQ ID NO: 24824 - DNA, 99 bp, synthetic construct; identical to SEQ ID NO: 13378
  source 1..99: mol_type = other DNA

SEQ ID NO: 24825 - DNA, 108 bp, synthetic construct; identical to SEQ ID NO: 13363
  source 1..108: mol_type = other DNA

SEQ ID NO: 24826 - DNA, 99 bp, synthetic construct; identical to SEQ ID NO: 13400
  source 1..99: mol_type = other DNA

SEQ ID NO: 24827 - DNA, 108 bp, synthetic construct; identical to SEQ ID NO: 13363
  source 1..108: mol_type = other DNA

SEQ ID NO: 24828 - DNA, 99 bp, synthetic construct; identical to SEQ ID NO: 13448
  source 1..99: mol_type = other DNA

SEQ ID NO: 24829 - DNA, 108 bp, synthetic construct; identical to SEQ ID NO: 13451
  source 1..108: mol_type = other DNA

SEQ ID NO: 24830 - DNA, 99 bp, synthetic construct; identical to SEQ ID NO: 13866
  source 1..99: mol_type = other DNA

SEQ ID NO: 24831 - DNA, 108 bp, synthetic construct; identical to SEQ ID NO: 13451
  source 1..108: mol_type = other DNA

SEQ ID NO: 24832 - DNA, 99 bp, synthetic construct; identical to SEQ ID NO: 13450
  source 1..99: mol_type = other DNA

SEQ ID NO: 24833 - DNA, 111 bp, synthetic construct; identical to SEQ ID NO: 13923
  source 1..111: mol_type = other DNA

SEQ ID NO: 24834 - DNA, 99 bp, synthetic construct; identical to SEQ ID NO: 13400
  source 1..99: mol_type = other DNA

SEQ ID NO: 24835 - DNA, 108 bp, synthetic construct; identical to SEQ ID NO: 13455
  source 1..108: mol_type = other DNA

SEQ ID NO: 24836 - DNA, 99 bp, synthetic construct; identical to SEQ ID NO: 13678
  source 1..99: mol_type = other DNA

SEQ ID NO: 24837 - DNA, 108 bp, synthetic construct; identical to SEQ ID NO: 13455
  source 1..108: mol_type = other DNA

SEQ ID NO: 24838 - DNA, 99 bp, synthetic construct; identical to SEQ ID NO: 13366
  source 1..99: mol_type = other DNA

SEQ ID NO: 24839 - DNA, 108 bp, synthetic construct; identical to SEQ ID NO: 13359
  source 1..108: mol_type = other DNA

SEQ ID NO: 24840 - DNA, 99 bp, synthetic construct; identical to SEQ ID NO: 13450
  source 1..99: mol_type = other DNA

SEQ ID NO: 24841 - DNA, 108 bp, synthetic construct; identical to SEQ ID NO: 13359
  source 1..108: mol_type = other DNA

SEQ ID NO: 24842 - DNA, 99 bp, synthetic construct; identical to SEQ ID NO: 13578
  source 1..99: mol_type = other DNA

SEQ ID NO: 24843 - DNA, 108 bp, synthetic construct; identical to SEQ ID NO: 13359
  source 1..108: mol_type = other DNA

SEQ ID NO: 24844 - DNA, 99 bp, synthetic construct; identical to SEQ ID NO: 13506
  source 1..99: mol_type = other DNA

SEQ ID NO: 24845 - DNA, 108 bp, synthetic construct; identical to SEQ ID NO: 13363
  source 1..108: mol_type = other DNA

SEQ ID NO: 24846 - DNA, 99 bp, synthetic construct; identical to SEQ ID NO: 13636
  source 1..99: mol_type = other DNA

SEQ ID NO: 24847 - DNA, 108 bp, synthetic construct; identical to SEQ ID NO: 13363
  source 1..108: mol_type = other DNA

SEQ ID NO: 24848 - DNA, 99 bp, synthetic construct; identical to SEQ ID NO: 13636
  source 1..99: mol_type = other DNA

SEQ ID NO: 24849 - DNA, 108 bp, synthetic construct; identical to SEQ ID NO: 13655
  source 1..108: mol_type = other DNA

SEQ ID NO: 24850 - DNA, 99 bp, synthetic construct; identical to SEQ ID NO: 13376
  source 1..99: mol_type = other DNA

SEQ ID NO: 24851 - DNA, 108 bp, synthetic construct; identical to SEQ ID NO: 13391
  source 1..108: mol_type = other DNA

SEQ ID NO: 24852 - DNA, 99 bp, synthetic construct; identical to SEQ ID NO: 13464
  source 1..99: mol_type = other DNA

SEQ ID NO: 24853 - DNA, 108 bp, synthetic construct; identical to SEQ ID NO: 13383
  source 1..108: mol_type = other DNA

SEQ ID NO: 24854 - DNA, 99 bp, synthetic construct; identical to SEQ ID NO: 13636
  source 1..99: mol_type = other DNA

SEQ ID NO: 24855 - DNA, 108 bp, synthetic construct; identical to SEQ ID NO: 13451
  source 1..108: mol_type = other DNA

SEQ ID NO: 24856 - DNA, 99 bp, synthetic construct; identical to SEQ ID NO: 13578
  source 1..99: mol_type = other DNA

SEQ ID NO: 24857 - DNA, 108 bp, synthetic construct; identical to SEQ ID NO: 13451
  source 1..108: mol_type = other DNA

SEQ ID NO: 24858 - DNA, 99 bp, synthetic construct; identical to SEQ ID NO: 13452
  source 1..99: mol_type = other DNA

SEQ ID NO: 24859 - DNA, 108 bp, synthetic construct; identical to SEQ ID NO: 13451
  source 1..108: mol_type = other DNA

SEQ ID NO: 24860 - DNA, 99 bp, synthetic construct; identical to SEQ ID NO: 13444
  source 1..99: mol_type = other DNA

SEQ ID NO: 24861 - DNA, 108 bp, synthetic construct; identical to SEQ ID NO: 13451
  source 1..108: mol_type = other DNA

SEQ ID NO: 24862 - DNA, 99 bp, synthetic construct; identical to SEQ ID NO: 13428
  source 1..99: mol_type = other DNA

SEQ ID NO: 24863 - DNA, 108 bp, synthetic construct; identical to SEQ ID NO: 13451
  source 1..108: mol_type = other DNA

SEQ ID NO: 24864 - DNA, 99 bp, synthetic construct; identical to SEQ ID NO: 13812
  source 1..99: mol_type = other DNA

SEQ ID NO: 24865 - DNA, 108 bp, synthetic construct; identical to SEQ ID NO: 13451
  source 1..108: mol_type = other DNA

SEQ ID NO: 24866 - DNA, 99 bp, synthetic construct; identical to SEQ ID NO: 13400
  source 1..99: mol_type = other DNA

SEQ ID NO: 24867 - DNA, 108 bp, synthetic construct; identical to SEQ ID NO: 13451
  source 1..108: mol_type = other DNA

SEQ ID NO: 24868 - DNA, 99 bp, synthetic construct; identical to SEQ ID NO: 13376
  source 1..99: mol_type = other DNA

SEQ ID NO: 24869 - DNA, 108 bp, synthetic construct; identical to SEQ ID NO: 13451
  source 1..108: mol_type = other DNA

SEQ ID NO: 24870 - DNA, 99 bp, synthetic construct; identical to SEQ ID NO: 13400
  source 1..99: mol_type = other DNA

SEQ ID NO: 24871 - DNA, 108 bp, synthetic construct; identical to SEQ ID NO: 13451
  source 1..108: mol_type = other DNA

SEQ ID NO: 24872 - DNA, 99 bp, synthetic construct; identical to SEQ ID NO: 13444
  source 1..99: mol_type = other DNA

SEQ ID NO: 24873 - DNA, 108 bp, synthetic construct; identical to SEQ ID NO: 13451
  source 1..108: mol_type = other DNA

SEQ ID NO: 24874 - DNA, 99 bp, synthetic construct; identical to SEQ ID NO: 13464
  source 1..99: mol_type = other DNA

SEQ ID NO: 24875 - DNA, 108 bp, synthetic construct; identical to SEQ ID NO: 13451
  source 1..108: mol_type = other DNA

SEQ ID NO: 24876 - DNA, 99 bp, synthetic construct; identical to SEQ ID NO: 13578
  source 1..99: mol_type = other DNA

SEQ ID NO: 24877 - DNA, 108 bp, synthetic construct; identical to SEQ ID NO: 13451
  source 1..108: mol_type = other DNA

SEQ ID NO: 24878 - DNA, 99 bp, synthetic construct; identical to SEQ ID NO: 13612
  source 1..99: mol_type = other DNA

SEQ ID NO: 24879 - DNA, 108 bp, synthetic construct; identical to SEQ ID NO: 13451
  source 1..108: mol_type = other DNA

SEQ ID NO: 24880 - DNA, 99 bp, synthetic construct; identical to SEQ ID NO: 13370
  source 1..99: mol_type = other DNA

SEQ ID NO: 24881 - DNA, 108 bp, synthetic construct; identical to SEQ ID NO: 13451
  source 1..108: mol_type = other DNA

SEQ ID NO: 24882 - DNA, 99 bp, synthetic construct; identical to SEQ ID NO: 13380
  source 1..99: mol_type = other DNA

SEQ ID NO: 24883 - DNA, 108 bp, synthetic construct; identical to SEQ ID NO: 13451
  source 1..108: mol_type = other DNA

SEQ ID NO: 24884 - DNA, 99 bp, synthetic construct; identical to SEQ ID NO: 13412
  source 1..99: mol_type = other DNA

SEQ ID NO: 24885 - DNA, 108 bp, synthetic construct; identical to SEQ ID NO: 13451
  source 1..108: mol_type = other DNA

SEQ ID NO: 24886 - DNA, 99 bp, synthetic construct; identical to SEQ ID NO: 13428
  source 1..99: mol_type = other DNA

SEQ ID NO: 24887 - DNA, 108 bp, synthetic construct; identical to SEQ ID NO: 13451
  source 1..108: mol_type = other DNA

SEQ ID NO: 24888 - DNA, 99 bp, synthetic construct; identical to SEQ ID NO: 13730
  source 1..99: mol_type = other DNA

SEQ ID NO: 24889 - DNA, 108 bp, synthetic construct; identical to SEQ ID NO: 13451
  source 1..108: mol_type = other DNA

SEQ ID NO: 24890 - DNA, 99 bp, synthetic construct; identical to SEQ ID NO: 13376
  source 1..99: mol_type = other DNA

SEQ ID NO: 24891 - DNA, 108 bp, synthetic construct; identical to SEQ ID NO: 13451
  source 1..108: mol_type = other DNA

SEQ ID NO: 24892 - DNA, 99 bp, synthetic construct; identical to SEQ ID NO: 13366
  source 1..99: mol_type = other DNA

SEQ ID NO: 24893 - DNA, 111 bp, synthetic construct; identical to SEQ ID NO: 13373
  source 1..111: mol_type = other DNA

SEQ ID NO: 24894 - DNA, 99 bp, synthetic construct; identical to SEQ ID NO: 13678
  source 1..99: mol_type = other DNA

SEQ ID NO: 24895 - DNA, 111 bp, synthetic construct; identical to SEQ ID NO: 13373
  source 1..111: mol_type = other DNA

SEQ ID NO: 24896 - DNA, 99 bp, synthetic construct; identical to SEQ ID NO: 13392
  source 1..99: mol_type = other DNA

SEQ ID NO: 24897 - DNA, 111 bp, synthetic construct; identical to SEQ ID NO: 13373
  source 1..111: mol_type = other DNA

SEQ ID NO: 24898 - DNA, 99 bp, synthetic construct; identical to SEQ ID NO: 13612
  source 1..99: mol_type = other DNA

SEQ ID NO: 24899 - DNA, 111 bp, synthetic construct
  source 1..111: mol_type = other DNA
cttcagcaaatagacatgactgaaaaacgattctctgctgagtgtccttcaaactcaccttgcagcctagaaattcagtcctctgaggcaggagactcagcactgtacctc

SEQ ID NO: 24900 - DNA, 99 bp, synthetic construct; identical to SEQ ID NO: 13362
  source 1..99: mol_type = other DNA

SEQ ID NO: 24901 - DNA, 111 bp, synthetic construct; identical to SEQ ID NO: 13923
  source 1..111: mol_type = other DNA

SEQ ID NO: 24902 - DNA, 99 bp, synthetic construct; identical to SEQ ID NO: 13464
  source 1..99: mol_type = other DNA

SEQ ID NO: 24903 - DNA, 111 bp, synthetic construct; identical to SEQ ID NO: 13923
  source 1..111: mol_type = other DNA

SEQ ID NO: 24904 - DNA, 99 bp, synthetic construct
  source 1..99: mol_type = other DNA
aacgaaggacaaggattcactgtcctactgaacaagaaacccacacgactctctctgaacctcacagctgcccatcctggggactcagccgcgtacttc

SEQ ID NO: 24905 - DNA, 111 bp, synthetic construct; identical to SEQ ID NO: 13923
  source 1..111: mol_type = other DNA

SEQ ID NO: 24906 - DNA, 99 bp, synthetic construct; identical to SEQ ID NO: 13398
  source 1..99: mol_type = other DNA

SEQ ID NO: 24907 - DNA, 111 bp, synthetic construct; identical to SEQ ID NO: 13923
  source 1..111: mol_type = other DNA

SEQ ID NO: 24908 - DNA, 99 bp, synthetic construct; identical to SEQ ID NO: 13822
  source 1..99: mol_type = other DNA

SEQ ID NO: 24909 - DNA, 111 bp, synthetic construct; identical to SEQ ID NO: 13923
  source 1..111: mol_type = other DNA

SEQ ID NO: 24910 - DNA, 99 bp, synthetic construct; identical to SEQ ID NO: 13398
  source 1..99: mol_type = other DNA

SEQ ID NO: 24911 - DNA, 111 bp, synthetic construct; identical to SEQ ID NO: 13923
  source 1..111: mol_type = other DNA

SEQ ID NO: 24912 - DNA, 99 bp, synthetic construct; identical to SEQ ID NO: 13398
  source 1..99: mol_type = other DNA

SEQ ID NO: 24913 - DNA, 111 bp, synthetic construct; identical to SEQ ID NO: 13357
  source 1..111: mol_type = other DNA

SEQ ID NO: 24914 - DNA, 99 bp, synthetic construct; identical to SEQ ID NO: 13364
  source 1..99: mol_type = other DNA

SEQ ID NO: 24915 - DNA, 111 bp, synthetic construct; identical to SEQ ID NO: 13357
  source 1..111: mol_type = other DNA

SEQ ID NO: 24916 - DNA, 99 bp, synthetic construct; identical to SEQ ID NO: 13416
  source 1..99: mol_type = other DNA

SEQ ID NO: 24917 - DNA, 111 bp, synthetic construct; identical to SEQ ID NO: 13357
  source 1..111: mol_type = other DNA

SEQ ID NO: 24918 - DNA, 99 bp, synthetic construct; identical to SEQ ID NO: 13578
  source 1..99: mol_type = other DNA

SEQ ID NO: 24919 - DNA, 111 bp, synthetic construct; identical to SEQ ID NO: 13357
  source 1..111: mol_type = other DNA

SEQ ID NO: 24920 - DNA, 99 bp, synthetic construct; identical to SEQ ID NO: 13360
  source 1..99: mol_type = other DNA

SEQ ID NO: 24921 - DNA, 111 bp, synthetic construct; identical to SEQ ID NO: 13357
  source 1..111: mol_type = other DNA

SEQ ID NO: 24922 - DNA, 99 bp, synthetic construct; identical to SEQ ID NO: 13428
  source 1..99: mol_type = other DNA

SEQ ID NO: 24923 - DNA, 111 bp, synthetic construct; identical to SEQ ID NO: 13357
  source 1..111: mol_type = other DNA

SEQ ID NO: 24924 - DNA, 99 bp, synthetic construct; identical to SEQ ID NO: 13386
  source 1..99: mol_type = other DNA

SEQ ID NO: 24925 - DNA, 111 bp, synthetic construct; identical to SEQ ID NO: 13357
  source 1..111: mol_type = other DNA

SEQ ID NO: 24926 - DNA, 99 bp, synthetic construct; identical to SEQ ID NO: 13358
  source 1..99: mol_type = other DNA

SEQ ID NO: 24927 - DNA, 111 bp, synthetic construct; identical to SEQ ID NO: 13357
  source 1..111: mol_type = other DNA

SEQ ID NO: 24928 - DNA, 99 bp, synthetic construct; identical to SEQ ID NO: 13578
  source 1..99: mol_type = other DNA

SEQ ID NO: 24929 - DNA, 111 bp, synthetic construct; identical to SEQ ID NO: 13357
  source 1..111: mol_type = other DNA

SEQ ID NO: 24930 - DNA, 99 bp, synthetic construct; identical to SEQ ID NO: 13432
  source 1..99: mol_type = other DNA

SEQ ID NO: 24931 - DNA, 111 bp, synthetic construct; identical to SEQ ID NO: 13357
  source 1..111: mol_type = other DNA

SEQ ID NO: 24932 - DNA, 99 bp, synthetic construct; identical to SEQ ID NO: 13364
  source 1..99: mol_type = other DNA

SEQ ID NO: 24933 - DNA, 111 bp, synthetic construct; identical to SEQ ID NO: 13357
  source 1..111: mol_type = other DNA

SEQ ID NO: 24934 - DNA, 99 bp, synthetic construct; identical to SEQ ID NO: 13596
  source 1..99: mol_type = other DNA

SEQ ID NO: 24935 - DNA, 111 bp, synthetic construct; identical to SEQ ID NO: 13357
  source 1..111: mol_type = other DNA

SEQ ID NO: 24936 - DNA, 99 bp, synthetic construct; identical to SEQ ID NO: 13470
  source 1..99: mol_type = other DNA

SEQ ID NO: 24937 - DNA, 111 bp, synthetic construct; identical to SEQ ID NO: 13357
  source 1..111: mol_type = other DNA

SEQ ID NO: 24938 - DNA, 99 bp, synthetic construct; identical to SEQ ID NO: 13402
  source 1..99: mol_type = other DNA

SEQ ID NO: 24939 - DNA, 111 bp, synthetic construct; identical to SEQ ID NO: 13357
  source 1..111: mol_type = other DNA

SEQ ID NO: 24940 - DNA, 99 bp, synthetic construct; identical to SEQ ID NO: 13440
  source 1..99: mol_type = other DNA

SEQ ID NO: 24941 - DNA, 111 bp, synthetic construct; identical to SEQ ID NO: 13357
  source 1..111: mol_type = other DNA

SEQ ID NO: 24942 - DNA, 99 bp, synthetic construct; identical to SEQ ID NO: 13578
  source 1..99: mol_type = other DNA

SEQ ID NO: 24943 - DNA, 111 bp, synthetic construct; identical to SEQ ID NO: 13357
  source 1..111: mol_type = other DNA

SEQ ID NO: 24944 - DNA, 99 bp, synthetic construct; identical to SEQ ID NO: 13394
  source 1..99: mol_type = other DNA

SEQ ID NO: 24945 - DNA, 111 bp, synthetic construct; identical to SEQ ID NO: 13357
  source 1..111: mol_type = other DNA

SEQ ID NO: 24946 - DNA, 99 bp, synthetic construct; identical to SEQ ID NO: 13678
  source 1..99: mol_type = other DNA

SEQ ID NO: 24947 - DNA, 108 bp, synthetic construct; identical to SEQ ID NO: 13519
  source 1..108: mol_type = other DNA

SEQ ID NO: 24948 - DNA, 99 bp, synthetic construct; identical to SEQ ID NO: 13456
  source 1..99: mol_type = other DNA

SEQ ID NO: 24949 - DNA, 108 bp, synthetic construct; identical to SEQ ID NO: 13519
  source 1..108: mol_type = other DNA

SEQ ID NO: 24950 - DNA, 99 bp, synthetic construct; identical to SEQ ID NO: 13394
  source 1..99: mol_type = other DNA

SEQ ID NO: 24951 - DNA, 108 bp, synthetic construct; identical to SEQ ID NO: 13519
  source 1..108: mol_type = other DNA

SEQ ID NO: 24952 - DNA, 99 bp, synthetic construct; identical to SEQ ID NO: 13514
  source 1..99: mol_type = other DNA

SEQ ID NO: 24953 - DNA, 108 bp, synthetic construct; identical to SEQ ID NO: 13519
  source 1..108: mol_type = other DNA

SEQ ID NO: 24954 - DNA, 99 bp, synthetic construct; identical to SEQ ID NO: 13480
  source 1..99: mol_type = other DNA

SEQ ID NO: 24955 - DNA, 108 bp, synthetic construct; identical to SEQ ID NO: 13519
  source 1..108: mol_type = other DNA

SEQ ID NO: 24956 - DNA, 99 bp, synthetic construct; identical to SEQ ID NO: 13604
  source 1..99: mol_type = other DNA

SEQ ID NO: 24957 - DNA, 108 bp, synthetic construct; identical to SEQ ID NO: 13519
  source 1..108: mol_type = other DNA

SEQ ID NO: 24958 - DNA, 99 bp, synthetic construct; identical to SEQ ID NO: 13750
  source 1..99: mol_type = other DNA

SEQ ID NO: 24959 - DNA, 108 bp, synthetic construct; identical to SEQ ID NO: 13371
  source 1..108: mol_type = other DNA

SEQ ID NO: 24960 - DNA, 99 bp, synthetic construct; identical to SEQ ID NO: 13362
  source 1..99: mol_type = other DNA

SEQ ID NO: 24961 - DNA, 108 bp, synthetic construct; identical to SEQ ID NO: 13371
  source 1..108: mol_type = other DNA

SEQ ID NO: 24962 - DNA, 99 bp, synthetic construct; identical to SEQ ID NO: 13416
  source 1..99: mol_type = other DNA

SEQ ID NO: 24963 - DNA, 108 bp, synthetic construct; identical to SEQ ID NO: 13371
  source 1..108: mol_type = other DNA

SEQ ID NO: 24964 - DNA, 99 bp, synthetic construct; identical to SEQ ID NO: 13884
  source 1..99: mol_type = other DNA

SEQ ID NO: 24965 - DNA, 108 bp, synthetic construct; identical to SEQ ID NO: 13371
  source 1..108: mol_type = other DNA

SEQ ID NO: 24966 - DNA, 99 bp, synthetic construct; identical to SEQ ID NO: 13444
  source 1..99: mol_type = other DNA

SEQ ID NO: 24967 - DNA, 108 bp, synthetic construct; identical to SEQ ID NO: 13371
  source 1..108: mol_type = other DNA

SEQ ID NO: 24968 - DNA, 99 bp, synthetic construct; identical to SEQ ID NO: 13514
  source 1..99: mol_type = other DNA

SEQ ID NO: 24969 - DNA, 108 bp, synthetic construct; identical to SEQ ID NO: 13371
  source 1..108: mol_type = other DNA

SEQ ID NO: 24970 - DNA, 99 bp, synthetic construct; identical to SEQ ID NO: 13416
  source 1..99: mol_type = other DNA

SEQ ID NO: 24971 - DNA, 108 bp, synthetic construct; identical to SEQ ID NO: 13371
  source 1..108: mol_type = other DNA

SEQ ID NO: 24972 - DNA, 99 bp, synthetic construct; identical to SEQ ID NO: 13866
  source 1..99: mol_type = other DNA

SEQ ID NO: 24973 - DNA, 108 bp, synthetic construct; identical to SEQ ID NO: 13371
  source 1..108: mol_type = other DNA

SEQ ID NO: 24974 - DNA, 99 bp, synthetic construct; identical to SEQ ID NO: 13358
  source 1..99: mol_type = other DNA

SEQ ID NO: 24975 - DNA, 108 bp, synthetic construct; identical to SEQ ID NO: 13371
  source 1..108: mol_type = other DNA

SEQ ID NO: 24976 - DNA, 99 bp, synthetic construct; identical to SEQ ID NO: 13358
  source 1..99: mol_type = other DNA

SEQ ID NO: 24977 - DNA, 108 bp, synthetic construct; identical to SEQ ID NO: 13371
  source 1..108: mol_type = other DNA

SEQ ID NO: 24978 - DNA, 99 bp, synthetic construct; identical to SEQ ID NO: 13578
  source 1..99: mol_type = other DNA

SEQ ID NO: 24979 - DNA, 108 bp, synthetic construct; identical to SEQ ID NO: 13371
  source 1..108: mol_type = other DNA

SEQ ID NO: 24980 - DNA, 99 bp, synthetic construct; identical to SEQ ID NO: 13428
  source 1..99: mol_type = other DNA

SEQ ID NO: 24981 - DNA, 108 bp, synthetic construct; identical to SEQ ID NO: 13371
  source 1..108: mol_type = other DNA

SEQ ID NO: 24982 - DNA, 99 bp, synthetic construct; identical to SEQ ID NO: 13362
  source 1..99: mol_type = other DNA

SEQ ID NO: 24983 - DNA, 108 bp, synthetic construct; identical to SEQ ID NO: 13371
  source 1..108: mol_type = other DNA

SEQ ID NO: 24984 - DNA, 99 bp, synthetic construct; identical to SEQ ID NO: 13722
  source 1..99: mol_type = other DNA

SEQ ID NO: 24985 - DNA, 108 bp, synthetic construct; identical to SEQ ID NO: 13371
  source 1..108: mol_type = other DNA

SEQ ID NO: 24986 - DNA, 99 bp, synthetic construct; identical to SEQ ID NO: 13392
  source 1..99: mol_type = other DNA

SEQ ID NO: 24987 - DNA, 108 bp, synthetic construct; identical to SEQ ID NO: 13371
  source 1..108: mol_type = other DNA

SEQ ID NO: 24988 - DNA, 99 bp, synthetic construct; identical to SEQ ID NO: 13400
  source 1..99: mol_type = other DNA

SEQ ID NO: 24989 - DNA, 108 bp, synthetic construct; identical to SEQ ID NO: 13455
  source 1..108: mol_type = other DNA

SEQ ID NO: 24990 - DNA, 99 bp, synthetic construct; identical to SEQ ID NO: 13408
  source 1..99: mol_type = other DNA

SEQ ID NO: 24991 - DNA, 108 bp, synthetic construct; identical to SEQ ID NO: 13455
  source 1..108: mol_type = other DNA

SEQ ID NO: 24992 - DNA, 99 bp, synthetic construct; identical to SEQ ID NO: 13500
  source 1..99: mol_type = other DNA

SEQ ID NO: 24993 - DNA, 108 bp, synthetic construct; identical to SEQ ID NO: 13455
  source 1..108: mol_type = other DNA

SEQ ID NO: 24994 - DNA, 99 bp, synthetic construct; identical to SEQ ID NO: 13362
  source 1..99: mol_type = other DNA

SEQ ID NO: 24995 - DNA, 108 bp, synthetic construct; identical to SEQ ID NO: 13455
  source 1..108: mol_type = other DNA

SEQ ID NO: 24996 - DNA, 99 bp, synthetic construct; identical to SEQ ID NO: 13430
  source 1..99: mol_type = other DNA

SEQ ID NO: 24997 - DNA, 108 bp, synthetic construct; identical to SEQ ID NO: 13455
  source 1..108: mol_type = other DNA

SEQ ID NO: 24998 - DNA, 99 bp, synthetic construct
  source 1..99: mol_type = other DNA
ggaatcagcagaggctttgaagctacatatgacaaagggaccacgtccttccacttgcagaaagcctcagtgcaggagtcagattcagccgtgtacttc

SEQ ID NO: 24999 - DNA, 108 bp, synthetic construct; identical to SEQ ID NO: 13455
  source 1..108: mol_type = other DNA

SEQ ID NO: 25000 - DNA, 99 bp, synthetic construct; identical to SEQ ID NO: 13866
  source 1..99: mol_type = other DNA

SEQ ID NO: 25001 - DNA, 108 bp, synthetic construct; identical to SEQ ID NO: 13455
  source 1..108: mol_type = other DNA

SEQ ID NO: 25002 - DNA, 99 bp, synthetic construct; identical to SEQ ID NO: 13366
  source 1..99: mol_type = other DNA

SEQ ID NO: 25003 - DNA, 108 bp, synthetic construct; identical to SEQ ID NO: 13455
  source 1..108: mol_type = other DNA

SEQ ID NO: 25004 - DNA, 99 bp, synthetic construct; identical to SEQ ID NO: 13402
  source 1..99: mol_type = other DNA

SEQ ID NO: 25005 - DNA, 108 bp, synthetic construct; identical to SEQ ID NO: 13455
  source 1..108: mol_type = other DNA

SEQ ID NO: 25006 - DNA, 99 bp, synthetic construct; identical to SEQ ID NO: 13362
  source 1..99: mol_type = other DNA

SEQ ID NO: 25007 - DNA, 108 bp, synthetic construct; identical to SEQ ID NO: 13455
  source 1..108: mol_type = other DNA

SEQ ID NO: 25008 - DNA, 99 bp, synthetic construct; identical to SEQ ID NO: 13884
  source 1..99: mol_type = other DNA

SEQ ID NO: 25009 - DNA, 108 bp, synthetic construct; identical to SEQ ID NO: 13455
  source 1..108: mol_type = other DNA

SEQ ID NO: 25010 - DNA, 99 bp, synthetic construct; identical to SEQ ID NO: 13358
  source 1..99: mol_type = other DNA

SEQ ID NO: 25011 - DNA, 108 bp, synthetic construct; identical to SEQ ID NO: 13455
  source 1..108: mol_type = other DNA

SEQ ID NO: 25012 - DNA, 99 bp, synthetic construct; identical to SEQ ID NO: 13410
  source 1..99: mol_type = other DNA

SEQ ID NO: 25013 - DNA, 108 bp, synthetic construct; identical to SEQ ID NO: 13455
  source 1..108: mol_type = other DNA

SEQ ID NO: 25014 - DNA, 99 bp, synthetic construct; identical to SEQ ID NO: 13402
  source 1..99: mol_type = other DNA

SEQ ID NO: 25015 - DNA, 108 bp, synthetic construct; identical to SEQ ID NO: 13359
  source 1..108: mol_type = other DNA

SEQ ID NO: 25016 - DNA, 99 bp, synthetic construct; identical to SEQ ID NO: 13404
  source 1..99: mol_type = other DNA

SEQ ID NO: 25017 - DNA, 108 bp, synthetic construct; identical to SEQ ID NO: 13359
  source 1..108: mol_type = other DNA

SEQ ID NO: 25018 - DNA, 99 bp, synthetic construct; identical to SEQ ID NO: 13424
  source 1..99: mol_type = other DNA

SEQ ID NO: 25019 - DNA, 108 bp, synthetic construct; identical to SEQ ID NO: 13359
  source 1..108: mol_type = other DNA

SEQ ID NO: 25020 - DNA, 99 bp, synthetic construct; identical to SEQ ID NO: 13448
  source 1..99: mol_type = other DNA

SEQ ID NO: 25021 - DNA, 108 bp, synthetic construct; identical to SEQ ID NO: 13359
  source 1..108: mol_type = other DNA

SEQ ID NO: 25022 - DNA, 99 bp, synthetic construct; identical to SEQ ID NO: 13526
  source 1..99: mol_type = other DNA

SEQ ID NO: 25023 - DNA, 108 bp, synthetic construct; identical to SEQ ID NO: 13359
  source 1..108: mol_type = other DNA

SEQ ID NO: 25024 - DNA, 99 bp, synthetic construct; identical to SEQ ID NO: 13416
  source 1..99: mol_type = other DNA

SEQ ID NO: 25025 - DNA, 108 bp, synthetic construct; identical to SEQ ID NO: 13359
  source 1..108: mol_type = other DNA

SEQ ID NO: 25026 - DNA, 99 bp, synthetic construct; identical to SEQ ID NO: 14012
  source 1..99: mol_type = other DNA

SEQ ID NO: 25027 - DNA, 108 bp, synthetic construct; identical to SEQ ID NO: 13359
  source 1..108: mol_type = other DNA

SEQ ID NO: 25028 - DNA, 99 bp, synthetic construct; identical to SEQ ID NO: 13448
  source 1..99: mol_type = other DNA

SEQ ID NO: 25029 - DNA, 108 bp, synthetic construct; identical to SEQ ID NO: 13359
  source 1..108: mol_type = other DNA

SEQ ID NO: 25030 - DNA, 99 bp, synthetic construct; identical to SEQ ID NO: 13464
  source 1..99: mol_type = other DNA

SEQ ID NO: 25031 - DNA, 108 bp, synthetic construct; identical to SEQ ID NO: 13359
  source 1..108: mol_type = other DNA

SEQ ID NO: 25032 - DNA, 99 bp, synthetic construct; identical to SEQ ID NO: 13440
  source 1..99: mol_type = other DNA

SEQ ID NO: 25033 - DNA, 108 bp, synthetic construct; identical to SEQ ID NO: 13359
  source 1..108: mol_type = other DNA

SEQ ID NO: 25034 - DNA, 99 bp, synthetic construct; identical to SEQ ID NO: 13358
  source 1..99: mol_type = other DNA

SEQ ID NO: 25035 - DNA, 108 bp, synthetic construct; identical to SEQ ID NO: 13359
  source 1..108: mol_type = other DNA

SEQ ID NO: 25036 - DNA, 99 bp, synthetic construct; identical to SEQ ID NO: 13358
  source 1..99: mol_type = other DNA

SEQ ID NO: 25037 - DNA, 108 bp, synthetic construct; identical to SEQ ID NO: 13359
  source 1..108: mol_type = other DNA

SEQ ID NO: 25038 - DNA, 99 bp, synthetic construct; identical to SEQ ID NO: 13578
  source 1..99: mol_type = other DNA

SEQ ID NO: 25039 - DNA, 108 bp, synthetic construct; identical to SEQ ID NO: 13359
  source 1..108: mol_type = other DNA

SEQ ID NO: 25040 - DNA, 99 bp, synthetic construct; identical to SEQ ID NO: 13380
  source 1..99: mol_type = other DNA

SEQ ID NO: 25041 - DNA, 108 bp, synthetic construct; identical to SEQ ID NO: 13359
  source 1..108: mol_type = other DNA

SEQ ID NO: 25042 - DNA, 99 bp, synthetic construct; identical to SEQ ID NO: 13884
  source 1..99: mol_type = other DNA

SEQ ID NO: 25043 - DNA, 108 bp, synthetic construct; identical to SEQ ID NO: 13359
  source 1..108: mol_type = other DNA

SEQ ID NO: 25044 - DNA, 99 bp, synthetic construct; identical to SEQ ID NO: 13384
  source 1..99: mol_type = other DNA

SEQ ID NO: 25045 - DNA, 108 bp, synthetic construct; identical to SEQ ID NO: 13359
  source 1..108: mol_type = other DNA

SEQ ID NO: 25046 - DNA, 99 bp, synthetic construct; identical to SEQ ID NO: 13480
  source 1..99: mol_type = other DNA

SEQ ID NO: 25047 - DNA, 108 bp, synthetic construct; identical to SEQ ID NO: 13359
  source 1..108: mol_type = other DNA

SEQ ID NO: 25048 - DNA, 99 bp, synthetic construct; identical to SEQ ID NO: 13402
  source 1..99: mol_type = other DNA

SEQ ID NO: 25049 - DNA, 108 bp, synthetic construct; identical to SEQ ID NO: 13359
  source 1..108: mol_type = other DNA

SEQ ID NO: 25050 - DNA, 99 bp, synthetic construct; identical to SEQ ID NO: 13578
  source 1..99: mol_type = other DNA

SEQ ID NO: 25051 - DNA, 108 bp, synthetic construct; identical to SEQ ID NO: 13359
  source 1..108: mol_type = other DNA

SEQ ID NO: 25052 - DNA, 99 bp, synthetic construct; identical to SEQ ID NO: 13444
  source 1..99: mol_type = other DNA

SEQ ID NO: 25053 - DNA, 108 bp, synthetic construct; identical to SEQ ID NO: 13359
  source 1..108: mol_type = other DNA

SEQ ID NO: 25054 - DNA, 93 bp, synthetic construct; identical to SEQ ID NO: 13462
  source 1..93: mol_type = other DNA

SEQ ID NO: 25055 - DNA, 108 bp, synthetic construct; identical to SEQ ID NO: 13359
  source 1..108: mol_type = other DNA

SEQ ID NO: 25056 - DNA, 99 bp, synthetic construct; identical to SEQ ID NO: 13444
  source 1..99: mol_type = other DNA

SEQ ID NO: 25057 - DNA, 108 bp, synthetic construct; identical to SEQ ID NO: 13359
  source 1..108: mol_type = other DNA

SEQ ID NO: 25058 - DNA, 99 bp, synthetic construct; identical to SEQ ID NO: 13516
  source 1..99: mol_type = other DNA

SEQ ID NO: 25059 - DNA, 108 bp, synthetic construct; identical to SEQ ID NO: 13359
  source 1..108: mol_type = other DNA

SEQ ID NO: 25060 - DNA, 99 bp, synthetic construct; identical to SEQ ID NO: 13394
  source 1..99: mol_type = other DNA

SEQ ID NO: 25061 - DNA, 108 bp, synthetic construct; identical to SEQ ID NO: 13359
  source 1..108: mol_type = other DNA

SEQ ID NO: 25062 - DNA, 99 bp, synthetic construct; identical to SEQ ID NO: 13428
  source 1..99: mol_type = other DNA

SEQ ID NO: 25063 - DNA, 108 bp, synthetic construct; identical to SEQ ID NO: 13359
  source 1..108: mol_type = other DNA

SEQ ID NO: 25064 - DNA, 99 bp, synthetic construct; identical to SEQ ID NO: 24998
  source 1..99: mol_type = other DNA

SEQ ID NO: 25065 - DNA, 108 bp, synthetic construct; identical to SEQ ID NO: 13359
  source 1..108: mol_type = other DNA

SEQ ID NO: 25066 - DNA, 99 bp, synthetic construct; identical to SEQ ID NO: 13612
  source 1..99: mol_type = other DNA

SEQ ID NO: 25067 - DNA, 108 bp, synthetic construct; identical to SEQ ID NO: 13359
  source 1..108: mol_type = other DNA

SEQ ID NO: 25068 - DNA, 99 bp, synthetic construct; identical to SEQ ID NO: 13822
  source 1..99: mol_type = other DNA

SEQ ID NO: 25069 - DNA, 108 bp, synthetic construct; identical to SEQ ID NO: 13359
  source 1..108: mol_type = other DNA

SEQ ID NO: 25070 - DNA, 99 bp, synthetic construct; identical to SEQ ID NO: 13436
  source 1..99: mol_type = other DNA

SEQ ID NO: 25071 - DNA, 108 bp, synthetic construct; identical to SEQ ID NO: 13359
  source 1..108: mol_type = other DNA

SEQ ID NO: 25072 - DNA, 99 bp, synthetic construct; identical to SEQ ID NO: 13392
  source 1..99: mol_type = other DNA

SEQ ID NO: 25073 - DNA, 108 bp, synthetic construct; identical to SEQ ID NO: 13359
  source 1..108: mol_type = other DNA

SEQ ID NO: 25074 - DNA, 99 bp, synthetic construct; identical to SEQ ID NO: 13812
  source 1..99: mol_type = other DNA

SEQ ID NO: 25075 - DNA, 108 bp, synthetic construct; identical to SEQ ID NO: 13359
  source 1..108: mol_type = other DNA

SEQ ID NO: 25076 - DNA, 99 bp, synthetic construct; identical to SEQ ID NO: 13416
  source 1..99: mol_type = other DNA

SEQ ID NO: 25077 - DNA, 108 bp, synthetic construct; identical to SEQ ID NO: 13359
  source 1..108: mol_type = other DNA

SEQ ID NO: 25078 - DNA, 99 bp, synthetic construct; identical to SEQ ID NO: 13416
  source 1..99: mol_type = other DNA

SEQ ID NO: 25079 - DNA, 108 bp, synthetic construct; identical to SEQ ID NO: 13359
  source 1..108: mol_type = other DNA

SEQ ID NO: 25080 - DNA, 99 bp, synthetic construct
  source 1..99: mol_type = other DNA
aaggaagatggaggattcacaatcttcttcaataaaagggagaaaaatctctccttgcacatcaaagactctcagcctggagactcagccacctacttc

SEQ ID NO: 25081 - DNA, 108 bp, synthetic construct; identical to SEQ ID NO: 13359
  source 1..108: mol_type = other DNA

SEQ ID NO: 25082 - DNA, 99 bp, synthetic construct; identical to SEQ ID NO: 13362
  source 1..99: mol_type = other DNA

SEQ ID NO: 25083 - DNA, 108 bp, synthetic construct; identical to SEQ ID NO: 13359
  source 1..108: mol_type = other DNA

SEQ ID NO: 25084 - DNA, 99 bp, synthetic construct; identical to SEQ ID NO: 13366
  source 1..99: mol_type = other DNA

SEQ ID NO: 25085 - DNA, 108 bp, synthetic construct; identical to SEQ ID NO: 13359
  source 1..108: mol_type = other DNA

SEQ ID NO: 25086 - DNA, 99 bp, synthetic construct; identical to SEQ ID NO: 13364
  source 1..99: mol_type = other DNA

SEQ ID NO: 25087 - DNA, 108 bp, synthetic construct; identical to SEQ ID NO: 13359
  source 1..108: mol_type = other DNA

SEQ ID NO: 25088 - DNA, 99 bp, synthetic construct; identical to SEQ ID NO: 13424
  source 1..99: mol_type = other DNA

SEQ ID NO: 25089 - DNA, 108 bp, synthetic construct; identical to SEQ ID NO: 13359
  source 1..108: mol_type = other DNA

SEQ ID NO: 25090 - DNA, 99 bp, synthetic construct; identical to SEQ ID NO: 13596
  source 1..99: mol_type = other DNA

SEQ ID NO: 25091 - DNA, 108 bp, synthetic construct; identical to SEQ ID NO: 13359
  source 1..108: mol_type = other DNA

SEQ ID NO: 25092 - DNA, 99 bp, synthetic construct; identical to SEQ ID NO: 13678
  source 1..99: mol_type = other DNA

SEQ ID NO: 25093 - DNA, 108 bp, synthetic construct; identical to SEQ ID NO: 13359
  source 1..108: mol_type = other DNA

SEQ ID NO: 25094 - DNA, 99 bp, synthetic construct; identical to SEQ ID NO: 13750
  source 1..99: mol_type = other DNA

SEQ ID NO: 25095 - DNA, 108 bp, synthetic construct; identical to SEQ ID NO: 13359
  source 1..108: mol_type = other DNA

SEQ ID NO: 25096 - DNA, 99 bp, synthetic construct; identical to SEQ ID NO: 13444
  source 1..99: mol_type = other DNA

SEQ ID NO: 25097 - DNA, 108 bp, synthetic construct; identical to SEQ ID NO: 13359
  source 1..108: mol_type = other DNA

SEQ ID NO: 25098 - DNA, 99 bp, synthetic construct; identical to SEQ ID NO: 13362
  source 1..99: mol_type = other DNA

SEQ ID NO: 25099 - DNA, 108 bp, synthetic construct; identical to SEQ ID NO: 13359
  source 1..108: mol_type = other DNA

SEQ ID NO: 25100 - DNA, 99 bp, synthetic construct; identical to SEQ ID NO: 13358
  source 1..99: mol_type = other DNA

SEQ ID NO: 25101 - DNA, 108 bp, synthetic construct; identical to SEQ ID NO: 13359
  source 1..108: mol_type = other DNA

SEQ ID NO: 25102 - DNA, 99 bp, synthetic construct; identical to SEQ ID NO: 13424
  source 1..99: mol_type = other DNA

SEQ ID NO: 25103 - DNA, 108 bp, synthetic construct; identical to SEQ ID NO: 13359
  source 1..108: mol_type = other DNA

SEQ ID NO: 25104 - DNA, 99 bp, synthetic construct; identical to SEQ ID NO: 13900
  source 1..99: mol_type = other DNA

SEQ ID NO: 25105 - DNA, 108 bp, synthetic construct; identical to SEQ ID NO: 13359
  source 1..108: mol_type = other DNA

SEQ ID NO: 25106 - DNA, 99 bp, synthetic construct; identical to SEQ ID NO: 13432
  source 1..99: mol_type = other DNA

SEQ ID NO: 25107 - DNA, 108 bp, synthetic construct; identical to SEQ ID NO: 13359
  source 1..108: mol_type = other DNA

SEQ ID NO: 25108 - DNA, 99 bp, synthetic construct; identical to SEQ ID NO: 13402
  source 1..99: mol_type = other DNA

SEQ ID NO: 25109 - DNA, 108 bp, synthetic construct; identical to SEQ ID NO: 13359
  source 1..108: mol_type = other DNA

SEQ ID NO: 25110 - DNA, 99 bp, synthetic construct; identical to SEQ ID NO: 13480
  source 1..99: mol_type = other DNA

SEQ ID NO: 25111 - DNA, 108 bp, synthetic construct; identical to SEQ ID NO: 13359
  source 1..108: mol_type = other DNA

SEQ ID NO: 25112 - DNA, 99 bp, synthetic construct; identical to SEQ ID NO: 13364
  source 1..99: mol_type = other DNA

SEQ ID NO: 25113 - DNA, 108 bp, synthetic construct; identical to SEQ ID NO: 13359
  source 1..108: mol_type = other DNA

SEQ ID NO: 25114 - DNA, 99 bp, synthetic construct; identical to SEQ ID NO: 13884
  source 1..99: mol_type = other DNA

SEQ ID NO: 25115 - DNA, 108 bp, synthetic construct; identical to SEQ ID NO: 13359
  source 1..108: mol_type = other DNA

SEQ ID NO: 25116 - DNA, 99 bp, synthetic construct; identical to SEQ ID NO: 13464
  source 1..99: mol_type = other DNA

SEQ ID NO: 25117 - DNA, 108 bp, synthetic construct; identical to SEQ ID NO: 13359
  source 1..108: mol_type = other DNA

SEQ ID NO: 25118 - DNA, 99 bp, synthetic construct; identical to SEQ ID NO: 13614
  source 1..99: mol_type = other DNA

SEQ ID NO: 25119 - DNA, 108 bp, synthetic construct; identical to SEQ ID NO: 13359
  source 1..108: mol_type = other DNA

SEQ ID NO: 25120 - DNA, 99 bp, synthetic construct; identical to SEQ ID NO: 13608
  source 1..99: mol_type = other DNA

SEQ ID NO: 25121 - DNA, 108 bp, synthetic construct; identical to SEQ ID NO: 13359
  source 1..108: mol_type = other DNA

SEQ ID NO: 25122 - DNA, 99 bp, synthetic construct; identical to SEQ ID NO: 13444
  source 1..99: mol_type = other DNA

SEQ ID NO: 25123 - DNA, 108 bp, synthetic construct; identical to SEQ ID NO: 13393
  source 1..108: mol_type = other DNA

SEQ ID NO: 25124 - DNA, 99 bp, synthetic construct; identical to SEQ ID NO: 13384
  source 1..99: mol_type = other DNA

SEQ ID NO: 25125 - DNA, 108 bp, synthetic construct; identical to SEQ ID NO: 13393
  source 1..108: mol_type = other DNA

SEQ ID NO: 25126 - DNA, 93 bp, synthetic construct
  source 1..93: mol_type = other DNA
tactattcaggagaccctgagttcagcaagagtaactcttccttccacctgcagaaagcctctgtgcactggagcgactcggctgtgtacttc

SEQ ID NO: 25127 - DNA, 108 bp, synthetic construct; identical to SEQ ID NO: 13393
  source 1..108: mol_type = other DNA

SEQ ID NO: 25128 - DNA, 99 bp, synthetic construct; identical to SEQ ID NO: 13358
  source 1..99: mol_type = other DNA

SEQ ID NO: 25129 - DNA, 108 bp, synthetic construct; identical to SEQ ID NO: 13393
  source 1..108: mol_type = other DNA

SEQ ID NO: 25130 - DNA, 99 bp, synthetic construct; identical to SEQ ID NO: 13362
  source 1..99: mol_type = other DNA

SEQ ID NO: 25131 - DNA, 108 bp, synthetic construct; identical to SEQ ID NO: 13393
  source 1..108: mol_type = other DNA

SEQ ID NO: 25132 - DNA, 99 bp, synthetic construct; identical to SEQ ID NO: 24998
  source 1..99: mol_type = other DNA

SEQ ID NO: 25133 - DNA, 108 bp, synthetic construct; identical to SEQ ID NO: 13393
  source 1..108: mol_type = other DNA

SEQ ID NO: 25134 - DNA, 99 bp, synthetic construct; identical to SEQ ID NO: 13416
  source 1..99: mol_type = other DNA

SEQ ID NO: 25135 - DNA, 108 bp, synthetic construct; identical to SEQ ID NO: 13393
  source 1..108: mol_type = other DNA

SEQ ID NO: 25136 - DNA, 99 bp, synthetic construct; identical to SEQ ID NO: 13400
  source 1..99: mol_type = other DNA

SEQ ID NO: 25137 - DNA, 108 bp, synthetic construct; identical to SEQ ID NO: 13393
  source 1..108: mol_type = other DNA

SEQ ID NO: 25138 - DNA, 99 bp, synthetic construct; identical to SEQ ID NO: 13444
  source 1..99: mol_type = other DNA

SEQ ID NO: 25139 - DNA, 108 bp, synthetic construct; identical to SEQ ID NO: 13393
  source 1..108: mol_type = other DNA

SEQ ID NO: 25140 - DNA, 99 bp, synthetic construct; identical to SEQ ID NO: 13732
  source 1..99: mol_type = other DNA

SEQ ID NO: 25141 - DNA, 108 bp, synthetic construct; identical to SEQ ID NO: 13393
  source 1..108: mol_type = other DNA

SEQ ID NO: 25142 - DNA, 99 bp, synthetic construct; identical to SEQ ID NO: 13404
  source 1..99: mol_type = other DNA

SEQ ID NO: 25143 - DNA, 108 bp, synthetic construct; identical to SEQ ID NO: 13393
  source 1..108: mol_type = other DNA

SEQ ID NO: 25144 - DNA, 99 bp, synthetic construct; identical to SEQ ID NO: 13376
  source 1..99: mol_type = other DNA

SEQ ID NO: 25145 - DNA, 108 bp, synthetic construct; identical to SEQ ID NO: 13393
  source 1..108: mol_type = other DNA

SEQ ID NO: 25146 - DNA, 99 bp, synthetic construct; identical to SEQ ID NO: 13402
  source 1..99: mol_type = other DNA

SEQ ID NO: 25147 - DNA, 108 bp, synthetic construct; identical to SEQ ID NO: 13393
  source 1..108: mol_type = other DNA

SEQ ID NO: 25148 - DNA, 99 bp, synthetic construct; identical to SEQ ID NO: 13608
  source 1..99: mol_type = other DNA

SEQ ID NO: 25149 - DNA, 108 bp, synthetic construct; identical to SEQ ID NO: 13393
  source 1..108: mol_type = other DNA

SEQ ID NO: 25150 - DNA, 93 bp, synthetic construct; identical to SEQ ID NO: 13462
  source 1..93: mol_type = other DNA

SEQ ID NO: 25151 - DNA, 108 bp, synthetic construct; identical to SEQ ID NO: 13393
  source 1..108: mol_type = other DNA

SEQ ID NO: 25152 - DNA, 99 bp, synthetic construct; identical to SEQ ID NO: 13448
  source 1..99: mol_type = other DNA

SEQ ID NO: 25153 - DNA, 108 bp, synthetic construct; identical to SEQ ID NO: 13393
  source 1..108: mol_type = other DNA

SEQ ID NO: 25154 - DNA, 99 bp, synthetic construct; identical to SEQ ID NO: 13416
  source 1..99: mol_type = other DNA

SEQ ID NO: 25155 - DNA, 108 bp, synthetic construct; identical to SEQ ID NO: 13393
  source 1..108: mol_type = other DNA

SEQ ID NO: 25156 - DNA, 99 bp, synthetic construct; identical to SEQ ID NO: 13470
  source 1..99: mol_type = other DNA

SEQ ID NO: 25157 - DNA, 108 bp, synthetic construct; identical to SEQ ID NO: 13393
  source 1..108: mol_type = other DNA

SEQ ID NO: 25158 - DNA, 99 bp, synthetic construct; identical to SEQ ID NO: 13400
  source 1..99: mol_type = other DNA

SEQ ID NO: 25159 - DNA, 108 bp, synthetic construct; identical to SEQ ID NO: 13393
  source 1..108: mol_type = other DNA

SEQ ID NO: 25160 - DNA, 99 bp, synthetic construct; identical to SEQ ID NO: 14026
  source 1..99: mol_type = other DNA

SEQ ID NO: 25161 - DNA, 108 bp, synthetic construct; identical to SEQ ID NO: 13393
  source 1..108: mol_type = other DNA

SEQ ID NO: 25162 - DNA, 99 bp, synthetic construct; identical to SEQ ID NO: 13456
  source 1..99: mol_type = other DNA

SEQ ID NO: 25163 - DNA, 108 bp, synthetic construct; identical to SEQ ID NO: 13393
  source 1..108: mol_type = other DNA

SEQ ID NO: 25164 - DNA, 99 bp, synthetic construct; identical to SEQ ID NO: 13364
  source 1..99: mol_type = other DNA

SEQ ID NO: 25165 - DNA, 108 bp, synthetic construct; identical to SEQ ID NO: 13393
  source 1..108: mol_type = other DNA

SEQ ID NO: 25166 - DNA, 99 bp, synthetic construct; identical to SEQ ID NO: 25080
  source 1..99: mol_type = other DNA

SEQ ID NO: 25167 - DNA, 108 bp, synthetic construct; identical to SEQ ID NO: 13393
  source 1..108: mol_type = other DNA

SEQ ID NO: 25168 - DNA, 99 bp, synthetic construct; identical to SEQ ID NO: 13402
  source 1..99: mol_type = other DNA

SEQ ID NO: 25169 - DNA, 108 bp, synthetic construct; identical to SEQ ID NO: 13393
  source 1..108: mol_type = other DNA

SEQ ID NO: 25170 - DNA, 99 bp, synthetic construct; identical to SEQ ID NO: 13416
  source 1..99: mol_type = other DNA

SEQ ID NO: 25171 - DNA, 108 bp, synthetic construct; identical to SEQ ID NO: 13393
  source 1..108: mol_type = other DNA

SEQ ID NO: 25172 - DNA, 99 bp, synthetic construct; identical to SEQ ID NO: 13416
  source 1..99: mol_type = other DNA

SEQ ID NO: 25173 - DNA, 108 bp, synthetic construct; identical to SEQ ID NO: 13393
  source 1..108: mol_type = other DNA

SEQ ID NO: 25174 - DNA, 99 bp, synthetic construct; identical to SEQ ID NO: 13402
  source 1..99: mol_type = other DNA

SEQ ID NO: 25175 - DNA, 108 bp, synthetic construct; identical to SEQ ID NO: 13393
  source 1..108: mol_type = other DNA

SEQ ID NO: 25176 - DNA, 99 bp, synthetic construct; identical to SEQ ID NO: 13400
  source 1..99: mol_type = other DNA

SEQ ID NO: 25177 - DNA, 108 bp, synthetic construct; identical to SEQ ID NO: 13393
  source 1..108: mol_type = other DNA

SEQ ID NO: 25178 - DNA, 99 bp, synthetic construct; identical to SEQ ID NO: 13424
  source 1..99: mol_type = other DNA

SEQ ID NO: 25179 - DNA, 108 bp, synthetic construct; identical to SEQ ID NO: 13393
  source 1..108: mol_type = other DNA

SEQ ID NO: 25180 - DNA, 99 bp, synthetic construct; identical to SEQ ID NO: 13384
  source 1..99: mol_type = other DNA

SEQ ID NO: 25181 - DNA, 108 bp, synthetic construct; identical to SEQ ID NO: 13393
  source 1..108: mol_type = other DNA

SEQ ID NO: 25182 - DNA, 99 bp, synthetic construct; identical to SEQ ID NO: 13596
  source 1..99: mol_type = other DNA

SEQ ID NO: 25183 - DNA, 108 bp, synthetic construct; identical to SEQ ID NO: 13393
  source 1..108: mol_type = other DNA

SEQ ID NO: 25184 - DNA, 99 bp, synthetic construct; identical to SEQ ID NO: 13362
  source 1..99: mol_type = other DNA

SEQ ID NO: 25185 - DNA, 108 bp, synthetic construct; identical to SEQ ID NO: 13393
  source 1..108: mol_type = other DNA

SEQ ID NO: 25186 - DNA, 99 bp, synthetic construct; identical to SEQ ID NO: 13384
  source 1..99: mol_type = other DNA

SEQ ID NO: 25187 - DNA, 108 bp, synthetic construct; identical to SEQ ID NO: 13393
  source 1..108: mol_type = other DNA

SEQ ID NO: 25188 - DNA, 99 bp, synthetic construct; identical to SEQ ID NO: 13360
  source 1..99: mol_type = other DNA

SEQ ID NO: 25189 - DNA, 108 bp, synthetic construct; identical to SEQ ID NO: 13393
  source 1..108: mol_type = other DNA

SEQ ID NO: 25190 - DNA, 99 bp, synthetic construct; identical to SEQ ID NO: 13432
  source 1..99: mol_type = other DNA

SEQ ID NO: 25191 - DNA, 108 bp, synthetic construct; identical to SEQ ID NO: 13393
  source 1..108: mol_type = other DNA

SEQ ID NO: 25192 - DNA, 99 bp, synthetic construct; identical to SEQ ID NO: 13464
  source 1..99: mol_type = other DNA

SEQ ID NO: 25193 - DNA, 108 bp, synthetic construct; identical to SEQ ID NO: 13393
  source 1..108: mol_type = other DNA

SEQ ID NO: 25194 - DNA, 99 bp, synthetic construct; identical to SEQ ID NO: 13470
  source 1..99: mol_type = other DNA

SEQ ID NO: 25195 - DNA, 108 bp, synthetic construct; identical to SEQ ID NO: 13393
  source 1..108: mol_type = other DNA

SEQ ID NO: 25196 - DNA, 99 bp, synthetic construct; identical to SEQ ID NO: 13480
  source 1..99: mol_type = other DNA

SEQ ID NO: 25197 - DNA, 108 bp, synthetic construct; identical to SEQ ID NO: 13363
  source 1..108: mol_type = other DNA

SEQ ID NO: 25198 - DNA, 99 bp, synthetic construct; identical to SEQ ID NO: 13380
  source 1..99: mol_type = other DNA

SEQ ID NO: 25199 - DNA, 108 bp, synthetic construct; identical to SEQ ID NO: 13363
  source 1..108: mol_type = other DNA

SEQ ID NO: 25200 - DNA, 99 bp, synthetic construct; identical to SEQ ID NO: 13424
  source 1..99: mol_type = other DNA

SEQ ID NO: 25201 - DNA, 108 bp, synthetic construct; identical to SEQ ID NO: 13363
  source 1..108: mol_type = other DNA

SEQ ID NO: 25202 - DNA, 99 bp, synthetic construct; identical to SEQ ID NO: 13358
  source 1..99: mol_type = other DNA

SEQ ID NO: 25203 - DNA, 108 bp, synthetic construct; identical to SEQ ID NO: 13363
  source 1..108: mol_type = other DNA

SEQ ID NO: 25204 - DNA, 99 bp, synthetic construct; identical to SEQ ID NO: 13678
  source 1..99: mol_type = other DNA

SEQ ID NO: 25205 - DNA, 108 bp, synthetic construct; identical to SEQ ID NO: 13363
  source 1..108: mol_type = other DNA

SEQ ID NO: 25206 - DNA, 99 bp, synthetic construct; identical to SEQ ID NO: 13362
  source 1..99: mol_type = other DNA

SEQ ID NO: 25207 - DNA, 108 bp, synthetic construct; identical to SEQ ID NO: 13363
  source 1..108: mol_type = other DNA

SEQ ID NO: 25208 - DNA, 99 bp, synthetic construct; identical to SEQ ID NO: 13538
  source 1..99: mol_type = other DNA

SEQ ID NO: 25209 - DNA, 108 bp, synthetic construct; identical to SEQ ID NO: 13363
  source 1..108: mol_type = other DNA

SEQ ID NO: 25210 - DNA, 93 bp, synthetic construct; identical to SEQ ID NO: 13462
  source 1..93: mol_type = other DNA

SEQ ID NO: 25211 - DNA, 108 bp, synthetic construct; identical to SEQ ID NO: 13363
  source 1..108: mol_type = other DNA

SEQ ID NO: 25212 - DNA, 99 bp, synthetic construct; identical to SEQ ID NO: 13404
  source 1..99: mol_type = other DNA

SEQ ID NO: 25213 - DNA, 108 bp, synthetic construct; identical to SEQ ID NO: 13363
  source 1..108: mol_type = other DNA

SEQ ID NO: 25214 - DNA, 99 bp, synthetic construct; identical to SEQ ID NO: 13444
  source 1..99: mol_type = other DNA

SEQ ID NO: 25215 - DNA, 108 bp, synthetic construct; identical to SEQ ID NO: 13363
  source 1..108: mol_type = other DNA

SEQ ID NO: 25216 - DNA, 99 bp, synthetic construct; identical to SEQ ID NO: 13376
  source 1..99: mol_type = other DNA

SEQ ID NO: 25217 - DNA, 108 bp, synthetic construct; identical to SEQ ID NO: 13363
  source 1..108: mol_type = other DNA

SEQ ID NO: 25218 - DNA, 99 bp, synthetic construct; identical to SEQ ID NO: 13364
  source 1..99: mol_type = other DNA

SEQ ID NO: 25219 - DNA, 108 bp, synthetic construct; identical to SEQ ID NO: 13363
  source 1..108: mol_type = other DNA

SEQ ID NO: 25220 - DNA, 99 bp, synthetic construct; identical to SEQ ID NO: 13430
  source 1..99: mol_type = other DNA

SEQ ID NO: 25221 - DNA, 108 bp, synthetic construct; identical to SEQ ID NO: 13363
  source 1..108: mol_type = other DNA

SEQ ID NO: 25222 - DNA, 102 bp, synthetic construct; identical to SEQ ID NO: 13374
  source 1..102: mol_type = other DNA

SEQ ID NO: 25223 - DNA, 108 bp, synthetic construct; identical to SEQ ID NO: 13363
  source 1..108: mol_type = other DNA

SEQ ID NO: 25224 - DNA, 99 bp, synthetic construct; identical to SEQ ID NO: 13480
  source 1..99: mol_type = other DNA

SEQ ID NO: 25225 - DNA, 108 bp, synthetic construct; identical to SEQ ID NO: 13363
  source 1..108: mol_type = other DNA

SEQ ID NO: 25226 - DNA, 99 bp, synthetic construct; identical to SEQ ID NO: 13516
  source 1..99: mol_type = other DNA

SEQ ID NO: 25227 - DNA, 108 bp, synthetic construct; identical to SEQ ID NO: 13363
  source 1..108: mol_type = other DNA

SEQ ID NO: 25228 - DNA, 99 bp, synthetic construct; identical to SEQ ID NO: 13358
  source 1..99: mol_type = other DNA

SEQ ID NO: 25229 - DNA, 108 bp, synthetic construct; identical to SEQ ID NO: 13363
  source 1..108: mol_type = other DNA

SEQ ID NO: 25230 - DNA, 99 bp, synthetic construct; identical to SEQ ID NO: 13362
  source 1..99: mol_type = other DNA

SEQ ID NO: 25231 - DNA, 108 bp, synthetic construct; identical to SEQ ID NO: 13363
  source 1..108: mol_type = other DNA

SEQ ID NO: 25232 - DNA, 99 bp, synthetic construct; identical to SEQ ID NO: 13516
  source 1..99: mol_type = other DNA

SEQ ID NO: 25233 - DNA, 108 bp, synthetic construct; identical to SEQ ID NO: 13363
  source 1..108: mol_type = other DNA

SEQ ID NO: 25234 - DNA, 99 bp, synthetic construct; identical to SEQ ID NO: 13444
  source 1..99: mol_type = other DNA

SEQ ID NO: 25235 - DNA, 108 bp, synthetic construct; identical to SEQ ID NO: 13363
  source 1..108: mol_type = other DNA

SEQ ID NO: 25236 - DNA, 99 bp, synthetic construct; identical to SEQ ID NO: 13400
  source 1..99: mol_type = other DNA

SEQ ID NO: 25237 - DNA, 108 bp, synthetic construct; identical to SEQ ID NO: 13363
  source 1..108: mol_type = other DNA

SEQ ID NO: 25238 - DNA, 99 bp, synthetic construct; identical to SEQ ID NO: 13434
  source 1..99: mol_type = other DNA

SEQ ID NO: 25239 - DNA, 108 bp, synthetic construct; identical to SEQ ID NO: 13363
  source 1..108: mol_type = other DNA

SEQ ID NO: 25240 - DNA, 99 bp, synthetic construct; identical to SEQ ID NO: 13614
  source 1..99: mol_type = other DNA

SEQ ID NO: 25241 - DNA, 108 bp, synthetic construct; identical to SEQ ID NO: 13363
  source 1..108: mol_type = other DNA

SEQ ID NO: 25242 - DNA, 99 bp, synthetic construct; identical to SEQ ID NO: 13436
  source 1..99: mol_type = other DNA

SEQ ID NO: 25243 - DNA, 108 bp, synthetic construct; identical to SEQ ID NO: 13363
  source 1..108: mol_type = other DNA

SEQ ID NO: 25244 - DNA, 99 bp, synthetic construct; identical to SEQ ID NO: 13400
  source 1..99: mol_type = other DNA

SEQ ID NO: 25245 - DNA, 108 bp, synthetic construct; identical to SEQ ID NO: 13363
  source 1..108: mol_type = other DNA

SEQ ID NO: 25246 - DNA, 99 bp, synthetic construct
  source 1..99: mol_type = other DNA
aagcagactcaaagactcacccttttatttgataagaaaaccaaacacctttccctgcacattacagccactcagcctggagactcagccatctacttc

SEQ ID NO: 25247 - DNA, 108 bp, synthetic construct; identical to SEQ ID NO: 13363
  source 1..108: mol_type = other DNA

SEQ ID NO: 25248 - DNA, 99 bp, synthetic construct; identical to SEQ ID NO: 13444
  source 1..99: mol_type = other DNA

SEQ ID NO: 25249 - DNA, 108 bp, synthetic construct; identical to SEQ ID NO: 13363
  source 1..108: mol_type = other DNA

SEQ ID NO: 25250 - DNA, 99 bp, synthetic construct; identical to SEQ ID NO: 13412
  source 1..99: mol_type = other DNA

SEQ ID NO: 25251 - DNA, 108 bp, synthetic construct; identical to SEQ ID NO: 13363
  source 1..108: mol_type = other DNA

SEQ ID NO: 25252 - DNA, 99 bp, synthetic construct; identical to SEQ ID NO: 13604
  source 1..99: mol_type = other DNA

SEQ ID NO: 25253 - DNA, 108 bp, synthetic construct; identical to SEQ ID NO: 13363
  source 1..108: mol_type = other DNA

SEQ ID NO: 25254 - DNA, 99 bp, synthetic construct; identical to SEQ ID NO: 13400
  source 1..99: mol_type = other DNA

SEQ ID NO: 25255 - DNA, 108 bp, synthetic construct; identical to SEQ ID NO: 13363
  source 1..108: mol_type = other DNA

SEQ ID NO: 25256 - DNA, 99 bp, synthetic construct; identical to SEQ ID NO: 13636
  source 1..99: mol_type = other DNA

SEQ ID NO: 25257 - DNA, 108 bp, synthetic construct; identical to SEQ ID NO: 13363
  source 1..108: mol_type = other DNA

SEQ ID NO: 25258 - DNA, 99 bp, synthetic construct; identical to SEQ ID NO: 14294
  source 1..99: mol_type = other DNA

SEQ ID NO: 25259 - DNA, 108 bp, synthetic construct; identical to SEQ ID NO: 13363
  source 1..108: mol_type = other DNA

SEQ ID NO: 25260 - DNA, 99 bp, synthetic construct; identical to SEQ ID NO: 13444
  source 1..99: mol_type = other DNA

SEQ ID NO: 25261 - DNA, 108 bp, synthetic construct; identical to SEQ ID NO: 13655
  source 1..108: mol_type = other DNA

SEQ ID NO: 25262 - DNA, 99 bp, synthetic construct; identical to SEQ ID NO: 13750
  source 1..99: mol_type = other DNA

SEQ ID NO: 25263 - DNA, 108 bp, synthetic construct; identical to SEQ ID NO: 13655
  source 1..108: mol_type = other DNA

SEQ ID NO: 25264 - DNA, 99 bp, synthetic construct; identical to SEQ ID NO: 13416
  source 1..99: mol_type = other DNA

SEQ ID NO: 25265 - DNA, 108 bp, synthetic construct; identical to SEQ ID NO: 13655
  source 1..108: mol_type = other DNA

SEQ ID NO: 25266 - DNA, 99 bp, synthetic construct; identical to SEQ ID NO: 13666
  source 1..99: mol_type = other DNA

SEQ ID NO: 25267 - DNA, 108 bp, synthetic construct; identical to SEQ ID NO: 13655
  source 1..108: mol_type = other DNA

SEQ ID NO: 25268 - DNA, 99 bp, synthetic construct; identical to SEQ ID NO: 13614
  source 1..99: mol_type = other DNA

SEQ ID NO: 25269 - DNA, 108 bp, synthetic construct; identical to SEQ ID NO: 13655
  source 1..108: mol_type = other DNA

SEQ ID NO: 25270 - DNA, 99 bp, synthetic construct; identical to SEQ ID NO: 13400
  source 1..99: mol_type = other DNA

SEQ ID NO: 25271 - DNA, 108 bp, synthetic construct; identical to SEQ ID NO: 13655
  source 1..108: mol_type = other DNA

SEQ ID NO: 25272 - DNA, 99 bp, synthetic construct; identical to SEQ ID NO: 13578
  source 1..99: mol_type = other DNA

SEQ ID NO: 25273 - DNA, 108 bp, synthetic construct; identical to SEQ ID NO: 13655
  source 1..108: mol_type = other DNA

SEQ ID NO: 25274 - DNA, 99 bp, synthetic construct; identical to SEQ ID NO: 13416
  source 1..99: mol_type = other DNA

SEQ ID NO: 25275 - DNA, 108 bp, synthetic construct; identical to SEQ ID NO: 13655
  source 1..108: mol_type = other DNA

SEQ ID NO: 25276 - DNA, 99 bp, synthetic construct; identical to SEQ ID NO: 13410
  source 1..99: mol_type = other DNA

SEQ ID NO: 25277 - DNA, 111 bp, synthetic construct; identical to SEQ ID NO: 14595
  source 1..111: mol_type = other DNA

SEQ ID NO: 25278 - DNA, 99 bp, synthetic construct; identical to SEQ ID NO: 13362
  source 1..99: mol_type = other DNA

SEQ ID NO: 25279 - DNA, 111 bp, synthetic construct; identical to SEQ ID NO: 14595
  source 1..111: mol_type = other DNA

SEQ ID NO: 25280 - DNA, 99 bp, synthetic construct; identical to SEQ ID NO: 13362
  source 1..99: mol_type = other DNA

SEQ ID NO: 25281 - DNA, 108 bp, synthetic construct; identical to SEQ ID NO: 13391
  source 1..108: mol_type = other DNA

SEQ ID NO: 25282 - DNA, 99 bp, synthetic construct; identical to SEQ ID NO: 13384
  source 1..99: mol_type = other DNA

SEQ ID NO: 25283 - DNA, 108 bp, synthetic construct; identical to SEQ ID NO: 13391
  source 1..108: mol_type = other DNA

SEQ ID NO: 25284 - DNA, 99 bp, synthetic construct; identical to SEQ ID NO: 13678
  source 1..99: mol_type = other DNA

SEQ ID NO: 25285 - DNA, 108 bp, synthetic construct; identical to SEQ ID NO: 13391
  source 1..108: mol_type = other DNA

SEQ ID NO: 25286 - DNA, 99 bp, synthetic construct; identical to SEQ ID NO: 13364
  source 1..99: mol_type = other DNA

SEQ ID NO: 25287 - DNA, 108 bp, synthetic construct; identical to SEQ ID NO: 13391
  source 1..108: mol_type = other DNA

SEQ ID NO: 25288 - DNA, 99 bp, synthetic construct; identical to SEQ ID NO: 13428
  source 1..99: mol_type = other DNA

SEQ ID NO: 25289 - DNA, 108 bp, synthetic construct; identical to SEQ ID NO: 13391
  source 1..108: mol_type = other DNA

SEQ ID NO: 25290 - DNA, 99 bp, synthetic construct; identical to SEQ ID NO: 13456
  source 1..99: mol_type = other DNA

SEQ ID NO: 25291 - DNA, 108 bp, synthetic construct; identical to SEQ ID NO: 13391
  source 1..108: mol_type = other DNA

SEQ ID NO: 25292 - DNA, 99 bp, synthetic construct; identical to SEQ ID NO: 13570
  source 1..99: mol_type = other DNA

SEQ ID NO: 25293 - DNA, 108 bp, synthetic construct; identical to SEQ ID NO: 13391
  source 1..108: mol_type = other DNA

SEQ ID NO: 25294 - DNA, 99 bp, synthetic construct; identical to SEQ ID NO: 13378
  source 1..99: mol_type = other DNA

SEQ ID NO: 25295 - DNA, 108 bp, synthetic construct; identical to SEQ ID NO: 13391
  source 1..108: mol_type = other DNA

SEQ ID NO: 25296 - DNA, 99 bp, synthetic construct; identical to SEQ ID NO: 13464
  source 1..99: mol_type = other DNA

SEQ ID NO: 25297 - DNA, 108 bp, synthetic construct; identical to SEQ ID NO: 13391
  source 1..108: mol_type = other DNA

SEQ ID NO: 25298 - DNA, 99 bp, synthetic construct; identical to SEQ ID NO: 13400
  source 1..99: mol_type = other DNA

SEQ ID NO: 25299 - DNA, 111 bp, synthetic construct; identical to SEQ ID NO: 13447
  source 1..111: mol_type = other DNA

SEQ ID NO: 25300 - DNA, 99 bp, synthetic construct; identical to SEQ ID NO: 13578
  source 1..99: mol_type = other DNA

SEQ ID NO: 25301 - DNA, 111 bp, synthetic construct; identical to SEQ ID NO: 13447
  source 1..111: mol_type = other DNA

SEQ ID NO: 25302 - DNA, 99 bp, synthetic construct; identical to SEQ ID NO: 13822
  source 1..99: mol_type = other DNA

SEQ ID NO: 25303 - DNA, 111 bp, synthetic construct; identical to SEQ ID NO: 13447
  source 1..111: mol_type = other DNA

SEQ ID NO: 25304 - DNA, 99 bp, synthetic construct; identical to SEQ ID NO: 13436
  source 1..99: mol_type = other DNA

SEQ ID NO: 25305 - DNA, 108 bp, synthetic construct; identical to SEQ ID NO: 13383
  source 1..108: mol_type = other DNA

SEQ ID NO: 25306 - DNA, 99 bp, synthetic construct; identical to SEQ ID NO: 13448
  source 1..99: mol_type = other DNA

SEQ ID NO: 25307 - DNA, 108 bp, synthetic construct; identical to SEQ ID NO: 13383
  source 1..108: mol_type = other DNA

SEQ ID NO: 25308 - DNA, 99 bp, synthetic construct; identical to SEQ ID NO: 13612
  source 1..99: mol_type = other DNA

SEQ ID NO: 25309 - DNA, 108 bp, synthetic construct; identical to SEQ ID NO: 13383
  source 1..108: mol_type = other DNA

SEQ ID NO: 25310 - DNA, 99 bp, synthetic construct; identical to SEQ ID NO: 13900
  source 1..99: mol_type = other DNA

SEQ ID NO: 25311 - DNA, 108 bp, synthetic construct; identical to SEQ ID NO: 13383
  source 1..108: mol_type = other DNA

SEQ ID NO: 25312 - DNA, 99 bp, synthetic construct; identical to SEQ ID NO: 13578
  source 1..99: mol_type = other DNA

SEQ ID NO: 25313 - DNA, 108 bp, synthetic construct; identical to SEQ ID NO: 13383
  source 1..108: mol_type = other DNA

SEQ ID NO: 25314 - DNA, 99 bp, synthetic construct; identical to SEQ ID NO: 13516
  source 1..99: mol_type = other DNA

SEQ ID NO: 25315 - DNA, 108 bp, synthetic construct; identical to SEQ ID NO: 13383
  source 1..108: mol_type = other DNA

SEQ ID NO: 25316 - DNA, 99 bp, synthetic construct; identical to SEQ ID NO: 13430
  source 1..99: mol_type = other DNA

SEQ ID NO: 25317 - DNA, 108 bp, synthetic construct; identical to SEQ ID NO: 13383
  source 1..108: mol_type = other DNA

SEQ ID NO: 25318 - DNA, 99 bp, synthetic construct
  source 1..99: mol_type = other DNA
ggaatcagcagaggctttgaagctacatatgacaaagggaccacgtccttccacttgcagaaagcctcagtgcaggagtcagactcagccgtgtacttc

SEQ ID NO: 25319 - DNA, 108 bp, synthetic construct; identical to SEQ ID NO: 13383
  source 1..108: mol_type = other DNA

SEQ ID NO: 25320 - DNA, 99 bp, synthetic construct; identical to SEQ ID NO: 13428
  source 1..99: mol_type = other DNA

SEQ ID NO: 25321 - DNA, 108 bp, synthetic construct; identical to SEQ ID NO: 13383
  source 1..108: mol_type = other DNA

SEQ ID NO: 25322 - DNA, 99 bp, synthetic construct; identical to SEQ ID NO: 13974
  source 1..99: mol_type = other DNA

SEQ ID NO: 25323 - DNA, 108 bp, synthetic construct; identical to SEQ ID NO: 13383
  source 1..108: mol_type = other DNA

SEQ ID NO: 25324 - DNA, 99 bp, synthetic construct; identical to SEQ ID NO: 13444
  source 1..99: mol_type = other DNA

SEQ ID NO: 25325 - DNA, 108 bp, synthetic construct; identical to SEQ ID NO: 13383
  source 1..108: mol_type = other DNA

SEQ ID NO: 25326 - DNA, 99 bp, synthetic construct; identical to SEQ ID NO: 13614
  source 1..99: mol_type = other DNA

SEQ ID NO: 25327 - DNA, 108 bp, synthetic construct; identical to SEQ ID NO: 13383
  source 1..108: mol_type = other DNA

SEQ ID NO: 25328 - DNA, 99 bp, synthetic construct; identical to SEQ ID NO: 13362
  source 1..99: mol_type = other DNA

SEQ ID NO: 25329 - DNA, 108 bp, synthetic construct; identical to SEQ ID NO: 13383
  source 1..108: mol_type = other DNA

SEQ ID NO: 25330 - DNA, 99 bp, synthetic construct; identical to SEQ ID NO: 13380
  source 1..99: mol_type = other DNA

SEQ ID NO: 25331 - DNA, 108 bp, synthetic construct; identical to SEQ ID NO: 13383
  source 1..108: mol_type = other DNA

SEQ ID NO: 25332 - DNA, 99 bp, synthetic construct; identical to SEQ ID NO: 13362
  source 1..99: mol_type = other DNA

SEQ ID NO: 25333 - DNA, 108 bp, synthetic construct; identical to SEQ ID NO: 13383
  source 1..108: mol_type = other DNA

SEQ ID NO: 25334 - DNA, 99 bp, synthetic construct; identical to SEQ ID NO: 13636
  source 1..99: mol_type = other DNA

SEQ ID NO: 25335 - DNA, 108 bp, synthetic construct; identical to SEQ ID NO: 13383
  source 1..108: mol_type = other DNA

SEQ ID NO: 25336 - DNA, 99 bp, synthetic construct; identical to SEQ ID NO: 13410
  source 1..99: mol_type = other DNA

SEQ ID NO: 25337 - DNA, 108 bp, synthetic construct; identical to SEQ ID NO: 13383
  source 1..108: mol_type = other DNA

SEQ ID NO: 25338 - DNA, 99 bp, synthetic construct; identical to SEQ ID NO: 13410
  source 1..99: mol_type = other DNA

SEQ ID NO: 25339 - DNA, 108 bp, synthetic construct; identical to SEQ ID NO: 13383
  source 1..108: mol_type = other DNA

SEQ ID NO: 25340 - DNA, 99 bp, synthetic construct; identical to SEQ ID NO: 13596
  source 1..99: mol_type = other DNA

SEQ ID NO: 25341 - DNA, 108 bp, synthetic construct; identical to SEQ ID NO: 13383
  source 1..108: mol_type = other DNA

SEQ ID NO: 25342 - DNA, 99 bp, synthetic construct; identical to SEQ ID NO: 13416
  source 1..99: mol_type = other DNA

SEQ ID NO: 25343 - DNA, 108 bp, synthetic construct; identical to SEQ ID NO: 13383
  source 1..108: mol_type = other DNA

SEQ ID NO: 25344 - DNA, 99 bp, synthetic construct; identical to SEQ ID NO: 13416
  source 1..99: mol_type = other DNA

SEQ ID NO: 25345 - DNA, 108 bp, synthetic construct; identical to SEQ ID NO: 13383
  source 1..108: mol_type = other DNA

SEQ ID NO: 25346 - DNA, 99 bp, synthetic construct; identical to SEQ ID NO: 13398
  source 1..99: mol_type = other DNA

SEQ ID NO: 25347 - DNA, 108 bp, synthetic construct; identical to SEQ ID NO: 13383
  source 1..108: mol_type = other DNA

SEQ ID NO: 25348 - DNA, 99 bp, synthetic construct; identical to SEQ ID NO: 13358
  source 1..99: mol_type = other DNA

SEQ ID NO: 25349 - DNA, 108 bp, synthetic construct; identical to SEQ ID NO: 13383
  source 1..108: mol_type = other DNA

SEQ ID NO: 25350 - DNA, 99 bp, synthetic construct; identical to SEQ ID NO: 13822
  source 1..99: mol_type = other DNA

SEQ ID NO: 25351 - DNA, 108 bp, synthetic construct; identical to SEQ ID NO: 13383
  source 1..108: mol_type = other DNA

SEQ ID NO: 25352 - DNA, 99 bp, synthetic construct; identical to SEQ ID NO: 13866
  source 1..99: mol_type = other DNA

SEQ ID NO: 25353 - DNA, 108 bp, synthetic construct; identical to SEQ ID NO: 13383
  source 1..108: mol_type = other DNA

SEQ ID NO: 25354 - DNA, 99 bp, synthetic construct; identical to SEQ ID NO: 13430
  source 1..99: mol_type = other DNA

SEQ ID NO: 25355 - DNA, 108 bp, synthetic construct; identical to SEQ ID NO: 13383
  source 1..108: mol_type = other DNA

SEQ ID NO: 25356 - DNA, 99 bp, synthetic construct; identical to SEQ ID NO: 13938
  source 1..99: mol_type = other DNA

SEQ ID NO: 25357 - DNA, 108 bp, synthetic construct; identical to SEQ ID NO: 13383
  source 1..108: mol_type = other DNA

SEQ ID NO: 25358 - DNA, 99 bp, synthetic construct; identical to SEQ ID NO: 13516
  source 1..99: mol_type = other DNA

SEQ ID NO: 25359 - DNA, 108 bp, synthetic construct; identical to SEQ ID NO: 13383
  source 1..108: mol_type = other DNA

SEQ ID NO: 25360 - DNA, 93 bp, synthetic construct; identical to SEQ ID NO: 13462
  source 1..93: mol_type = other DNA

SEQ ID NO: 25361 - DNA, 108 bp, synthetic construct; identical to SEQ ID NO: 13383
  source 1..108: mol_type = other DNA

SEQ ID NO: 25362 - DNA, 99 bp, synthetic construct; identical to SEQ ID NO: 13384
  source 1..99: mol_type = other DNA

SEQ ID NO: 25363 - DNA, 108 bp, synthetic construct; identical to SEQ ID NO: 13383
  source 1..108: mol_type = other DNA

SEQ ID NO: 25364 - DNA, 99 bp, synthetic construct; identical to SEQ ID NO: 13812
  source 1..99: mol_type = other DNA

SEQ ID NO: 25365 - DNA, 108 bp, synthetic construct; identical to SEQ ID NO: 13383
  source 1..108: mol_type = other DNA

SEQ ID NO: 25366 - DNA, 99 bp, synthetic construct; identical to SEQ ID NO: 13596
  source 1..99: mol_type = other DNA

SEQ ID NO: 25367 - DNA, 108 bp, synthetic construct; identical to SEQ ID NO: 13383
  source 1..108: mol_type = other DNA

SEQ ID NO: 25368 - DNA, 99 bp, synthetic construct; identical to SEQ ID NO: 13364
  source 1..99: mol_type = other DNA

SEQ ID NO: 25369 - DNA, 105 bp, synthetic construct; identical to SEQ ID NO: 13379
  source 1..105: mol_type = other DNA

SEQ ID NO: 25370 - DNA, 93 bp, synthetic construct; identical to SEQ ID NO: 13462
  source 1..93: mol_type = other DNA

SEQ ID NO: 25371 - DNA, 105 bp, synthetic construct; identical to SEQ ID NO: 13379
  source 1..105: mol_type = other DNA

SEQ ID NO: 25372 - DNA, 99 bp, synthetic construct; identical to SEQ ID NO: 13464
  source 1..99: mol_type = other DNA

SEQ ID NO: 25373 - DNA, 105 bp, synthetic construct; identical to SEQ ID NO: 13379
  source 1..105: mol_type = other DNA

SEQ ID NO: 25374 - DNA, 99 bp, synthetic construct; identical to SEQ ID NO: 13362
  source 1..99: mol_type = other DNA

SEQ ID NO: 25375 - DNA, 105 bp, synthetic construct; identical to SEQ ID NO: 13379
  source 1..105: mol_type = other DNA

SEQ ID NO: 25376 - DNA, 99 bp, synthetic construct; identical to SEQ ID NO: 13392
  source 1..99: mol_type = other DNA

SEQ ID NO: 25377 - DNA, 105 bp, synthetic construct; identical to SEQ ID NO: 13379
  source 1..105: mol_type = other DNA

SEQ ID NO: 25378 - DNA, 99 bp, synthetic construct; identical to SEQ ID NO: 13428
  source 1..99: mol_type = other DNA

SEQ ID NO: 25379 - DNA, 105 bp, synthetic construct; identical to SEQ ID NO: 13379
  source 1..105: mol_type = other DNA

SEQ ID NO: 25380 - DNA, 93 bp, synthetic construct; identical to SEQ ID NO: 13462
  source 1..93: mol_type = other DNA

SEQ ID NO: 25381 - DNA, 105 bp, synthetic construct; identical to SEQ ID NO: 13379
  source 1..105: mol_type = other DNA

SEQ ID NO: 25382 - DNA, 99 bp, synthetic construct; identical to SEQ ID NO: 13456
  source 1..99: mol_type = other DNA

SEQ ID NO: 25383 - DNA, 105 bp, synthetic construct; identical to SEQ ID NO: 13379
  source 1..105: mol_type = other DNA

SEQ ID NO: 25384 - DNA, 99 bp, synthetic construct; identical to SEQ ID NO: 13380
  source 1..99: mol_type = other DNA

SEQ ID NO: 25385 - DNA, 105 bp, synthetic construct; identical to SEQ ID NO: 13379
  source 1..105: mol_type = other DNA

SEQ ID NO: 25386 - DNA, 99 bp, synthetic construct; identical to SEQ ID NO: 13596
  source 1..99: mol_type = other DNA

SEQ ID NO: 25387 - DNA, 105 bp, synthetic construct; identical to SEQ ID NO: 13379
  source 1..105: mol_type = other DNA

SEQ ID NO: 25388 - DNA, 99 bp, synthetic construct; identical to SEQ ID NO: 13380
  source 1..99: mol_type = other DNA

SEQ ID NO: 25389 - DNA, 105 bp, synthetic construct; identical to SEQ ID NO: 13379
  source 1..105: mol_type = other DNA

SEQ ID NO: 25390 - DNA, 99 bp, synthetic construct; identical to SEQ ID NO: 13376
  source 1..99: mol_type = other DNA

SEQ ID NO: 25391 - DNA, 105 bp, synthetic construct; identical to SEQ ID NO: 13379
  source 1..105: mol_type = other DNA

SEQ ID NO: 25392 - DNA, 99 bp, synthetic construct; identical to SEQ ID NO: 13974
  source 1..99: mol_type = other DNA

SEQ ID NO: 25393 - protein, 15 aa, synthetic construct
CASSIGTGDNQAPLF

SEQ ID NO: 25394 - protein, 13 aa, synthetic construct
CSASNNYAQGLTF

SEQ ID NO: 25395 - protein, 15 aa, synthetic construct
CTCSADPGGYAEQFF

SEQ ID NO: 25396 - protein, 13 aa, synthetic construct
CSASDNYAQGLTF

SEQ ID NO: 25397 - protein, 12 aa, synthetic construct
CASTDSGNTLYF

SEQ ID NO: 25398 - protein, 12 aa, synthetic construct
CAVTSSGQKLVF

SEQ ID NO: 25399 - protein, 15 aa, synthetic construct
CASREGDNSAETLYF

SEQ ID NO: 25400 - protein, 14 aa, synthetic construct
CAVTPSSSFSKLVF

SEQ ID NO: 25401 - protein, 16 aa, synthetic construct
CASSRDGHSNTGQLYF

SEQ ID NO: 25402 - protein, 12 aa, synthetic construct
CAVRGSNAKLTF

SEQ ID NO: 25403 - protein, 15 aa, synthetic construct
CASSFPLGDYAEQFF

SEQ ID NO: 25404 - protein, 14 aa, synthetic construct
CAASGSSGSWQLIF

SEQ ID NO: 25405 - protein, 12 aa, synthetic construct
CASSDTGEEVFF

SEQ ID NO: 25406 - protein, 13 aa, synthetic construct
CATDNTGYQNFYF

SEQ ID NO: 25407 - protein, 12 aa, synthetic construct
CASGRDNSDYTF

SEQ ID NO: 25408 - protein, 12 aa, synthetic construct
CAVAGNTRKLIF

SEQ ID NO: 25409 - protein, 14 aa, synthetic construct
CASGDGGAQDTQYF

SEQ ID NO: 25410 - protein, 15 aa, synthetic construct
CALVDRASSGQKLVF

SEQ ID NO: 25411 - protein, 13 aa, synthetic construct
CASSDQGAYEQYF

SEQ ID NO: 25412 - protein, 12 aa, synthetic construct
CALRPNYNVLYF

SEQ ID NO: 25413 - protein, 16 aa, synthetic construct
CASSQDEGWGEAEQFF

SEQ ID NO: 25414 - protein, 12 aa, synthetic construct
CAAAGFASALTF

SEQ ID NO: 25415 - protein, 15 aa, synthetic construct
CAWRTGGVNTGQLYF

SEQ ID NO: 25416 - protein, 16 aa, synthetic construct
CAMREDSGGSNYKLTF

SEQ ID NO: 25417 - protein, 11 aa, synthetic construct
CASSHSSEQFF

SEQ ID NO: 25418 - protein, 13 aa, synthetic construct
CALINNAGAKLTF

SEQ ID NO: 25419 - protein, 16 aa, synthetic construct
CASSQDLGHPNERLFF

SEQ ID NO: 25420 - protein, 14 aa, synthetic construct
CAAHSGGSNAKLTF

SEQ ID NO: 25421 - protein, 14 aa, synthetic construct
CASRGLGVYAEQFF

SEQ ID NO: 25422 - protein, 15 aa, synthetic construct
CAMREGPDYANKMIF

SEQ ID NO: 25423 - protein, 15 aa, synthetic construct
CASSIGTGDNQAPLF

SEQ ID NO: 25424 - protein, 13 aa, synthetic construct
CSASNNYAQGLTF

SEQ ID NO: 25425 - protein, 15 aa, synthetic construct
CASSIGQGAGNTLYF

SEQ ID NO: 25426 - protein, 15 aa, synthetic construct
CALSVTGANTGKLTF

SEQ ID NO: 25427 - protein, 18 aa, synthetic construct
CASSPGTGGGLYNSPLYF

SEQ ID NO: 25428 - protein, 13 aa, synthetic construct
CALKRNNNNAPRF

SEQ ID NO: 25429 - protein, 16 aa, synthetic construct
CASSQNRDRGNTEVFF

SEQ ID NO: 25430 - protein, 13 aa, synthetic construct
CALGAPHTDKVVF

SEQ ID NO: 25431 - protein, 16 aa, synthetic construct
CASGDAGQPNTGQLYF

SEQ ID NO: 25432 - protein, 12 aa, synthetic construct
CAMTSNTDKVVF

SEQ ID NO: 25433 - protein, 13 aa, synthetic construct
CASGDVRNERLFF

SEQ ID NO: 25434 - protein, 14 aa, synthetic construct
CAVSPSSGSWQLIF

SEQ ID NO: 25435 - protein, 14 aa, synthetic construct
CASSEGISNERLFF

SEQ ID NO: 25436 - protein, 17 aa, synthetic construct
CAMREVNTGANTGKLTF

SEQ ID NO: 25437 - protein, 14 aa, synthetic construct
CASSDGWGVYEQYF

SEQ ID NO: 25438 - protein, 14 aa, synthetic construct
CAANTGANTGKLTF

SEQ ID NO: 25439 - protein, 13 aa, synthetic construct
CASNRDRDTEVFF

SEQ ID NO: 25440 - protein, 15 aa, synthetic construct
CALAASNTGYQNFYF

SEQ ID NO: 25441 - protein, 15 aa, synthetic construct
CASSQDYSSGNTLYF

SEQ ID NO: 25442 - protein, 9 aa, synthetic construct
CANYNVLYF

SEQ ID NO: 25443 - protein, 14 aa, synthetic construct
CSSRDGGAQDTQYF

SEQ ID NO: 25444 - protein, 12 aa, synthetic construct
CAMGTGNYKYVF

SEQ ID NO: 25445 - protein, 15 aa, synthetic construct
CASSQLGESSYEQYF

SEQ ID NO: 25446 - protein, 12 aa, synthetic construct
CAIALGGYKLTF

SEQ ID NO: 25447 - protein, 15 aa, synthetic construct
CASSSRGLDSYEQYF

SEQ ID NO: 25448 - protein, 12 aa, synthetic construct
CAMDSAGNKLTF

SEQ ID NO: 25449 - protein, 15 aa, synthetic construct
CASGAPGLGDYEQYF

SEQ ID NO: 25450 - protein, 14 aa, synthetic construct
CAIDRGNYAQGLTF

SEQ ID NO: 25451 - protein, 15 aa, synthetic construct
CASGDGAGGGAEQFF

SEQ ID NO: 25452 - protein, 13 aa, synthetic construct
CALSNTGYQNFYF

SEQ ID NO: 25453 - protein, 14 aa, synthetic construct
CASGGTGGGDTQYF

SEQ ID NO: 25454 - protein, 13 aa, synthetic construct
CVLGEGSNYQLIW

SEQ ID NO: 25455 - protein, 15 aa, synthetic construct
CASSRDNSYNSPLYF

SEQ ID NO: 25456 - protein, 12 aa, synthetic construct
CACVGDNSKLIW

SEQ ID NO: 25457 - protein, 11 aa, synthetic construct
CASSDGTTLYF

SEQ ID NO: 25458 - protein, 15 aa, synthetic construct
CALEAGGGSNYKLTF

SEQ ID NO: 25459 - protein, 14 aa, synthetic construct
CASSWTGRDAEQFF

SEQ ID NO: 25460 - protein, 11 aa, synthetic construct
CAVSMANAPRF

SEQ ID NO: 25461 - protein, 15 aa, synthetic construct
CAWSLPSRLSDEQYF

SEQ ID NO: 25462 - protein, 12 aa, synthetic construct
CAASTNAYKVIF

SEQ ID NO: 25463 - protein, 13 aa, synthetic construct
CASSLGQFTEVFF

SEQ ID NO: 25464 - protein, 16 aa, synthetic construct
CALEGRYGSSGNKLIF

SEQ ID NO: 25465 - protein, 13 aa, synthetic construct
CASSQRDSGEQYF

SEQ ID NO: 25466 - protein, 14 aa, synthetic construct
CALTANTGNYKYVF

SEQ ID NO: 25467 - protein, 14 aa, synthetic construct
CASSQEQNAETLYF

SEQ ID NO: 25468 - protein, 13 aa, synthetic construct
CAAATSSGQKLVF

SEQ ID NO: 25469 - protein, 14 aa, synthetic construct
CASSQDRGFAEQFF

SEQ ID NO: 25470 - protein, 15 aa, synthetic construct
CAMRESSSSFSKLVF

SEQ ID NO: 25471 - protein, 16 aa, synthetic construct
CASSQDWVSYNSPLYF

SEQ ID NO: 25472 - protein, 11 aa, synthetic construct
CARGDNSKLIW

SEQ ID NO: 25473 - protein, 16 aa, synthetic construct
CASSQDPGGLAETLYF

SEQ ID NO: 25474 - protein, 13 aa, synthetic construct
CAMSPNMGYKLTF

SEQ ID NO: 25475 - protein, 13 aa, synthetic construct
CASSQDAGDTLYF

SEQ ID NO: 25476 - protein, 16 aa, synthetic construct
CAMRGHSSSSFSKLVF

SEQ ID NO: 25477 - protein, 15 aa, synthetic construct
CASSQDGGDAETLYF

SEQ ID NO: 25478 - protein, 16 aa, synthetic construct
CAVSSLNVGDNSKLIW

SEQ ID NO: 25479 - protein, 14 aa, synthetic construct
CASSQDGHYAEQFF

SEQ ID NO: 25480 - protein, 14 aa, synthetic construct
CAMRGQGTGSKLSF

SEQ ID NO: 25481 - protein, 15 aa, synthetic construct
CASSQDWDSGNTLYF

SEQ ID NO: 25482 - protein, 14 aa, synthetic construct
CAMRLTGNTRKLIF

SEQ ID NO: 25483 - protein, 14 aa, synthetic construct
CASSQAQSQNTLYF

SEQ ID NO: 25484 - protein, 14 aa, synthetic construct
CAVRASSGSWQLIF

SEQ ID NO: 25485 - protein, 14 aa, synthetic construct
CASSQAGNYAEQFF

SEQ ID NO: 25486 - protein, 16 aa, synthetic construct
CALSAMTNSAGNKLTF

SEQ ID NO: 25487 - protein, 15 aa, synthetic construct
CASSQAGTGDAEQFF

SEQ ID NO: 25488 - protein, 5 aa, synthetic construct
CASPF

SEQ ID NO: 25489 - protein, 11 aa, synthetic construct
CASSQGETLYF

SEQ ID NO: 25490 - protein, 13 aa, synthetic construct
CALSGDYANKMIF

SEQ ID NO: 25491 - protein, 12 aa, synthetic construct
CASSQGGQAPLF

SEQ ID NO: 25492 - protein, 13 aa, synthetic construct
CAIASSSFSKLVF

SEQ ID NO: 25493 - protein, 15 aa, synthetic construct
CASSPTGISNERLFF

SEQ ID NO: 25494 - protein, 13 aa, synthetic construct
CALAPSNTNKVVF

SEQ ID NO: 25495 - protein, 15 aa, synthetic construct
CASSPRQTNTGQLYF

SEQ ID NO: 25496 - protein, 12 aa, synthetic construct
CALWGSGGKLTL

SEQ ID NO: 25497 - protein, 15 aa, synthetic construct
CASSPGTGPNERLFF

SEQ ID NO: 25498 - protein, 13 aa, synthetic construct
CAASAPGGYKVVF

SEQ ID NO: 25499 - protein, 13 aa, synthetic construct
CASSPGLGDEQYF

SEQ ID NO: 25500 - protein, 13 aa, synthetic construct
CAAQQGTGSKLSF

SEQ ID NO: 25501 - protein, 12 aa, synthetic construct
CASGTGGVEQYF

SEQ ID NO: 25502 - protein, 13 aa, synthetic construct
CAMELGGADRLTF

SEQ ID NO: 25503 - protein, 14 aa, synthetic construct
CASSLDASQNTLYF

SEQ ID NO: 25504 - protein, 15 aa, synthetic construct
CAIDPITGSGGKLTL

SEQ ID NO: 25505 - protein, 12 aa, synthetic construct
CASSLAGDEQYF

SEQ ID NO: 25506 - protein, 12 aa, synthetic construct
CAVRDYANKMIF

SEQ ID NO: 25507 - protein, 16 aa, synthetic construct
CASSLAGGGSAETLYF

SEQ ID NO: 25508 - protein, 14 aa, synthetic construct
CAMDPGTGSNRLTF

SEQ ID NO: 25509 - protein, 14 aa, synthetic construct
CASSLRDDQDTQYF

SEQ ID NO: 25510 - protein, 15 aa, synthetic construct
CAMREGSSNTDKVVF

SEQ ID NO: 25511 - protein, 12 aa, synthetic construct
CSSTGSYAEQFF

SEQ ID NO: 25512 - protein, 13 aa, synthetic construct
CAVGLSNYNVLYF

SEQ ID NO: 25513 - protein, 8 aa, synthetic construct
CSSSEQFF

SEQ ID NO: 25514 - protein, 13 aa, synthetic construct
CAVSGANTGKLTF

SEQ ID NO: 25515 - protein, 8 aa, synthetic construct
CSSSEQFF

SEQ ID NO: 25516 - protein, 13 aa, synthetic construct
CAVSGANTGKLTF

SEQ ID NO: 25517 - protein, 11 aa, synthetic construct
CSSSEGAEVFF

SEQ ID NO: 25518 - protein, 11 aa, synthetic construct
CVLSGGHKVVF

SEQ ID NO: 25519 - protein, 12 aa, synthetic construct
CSSSGGRDTLYF

SEQ ID NO: 25520 - protein, 13 aa, synthetic construct
CAVSNSAGNKLTF

SEQ ID NO: 25521 - protein, 10 aa, synthetic construct
CSSHRGEVFF

SEQ ID NO: 25522 - protein, 14 aa, synthetic construct
CAVSERYNQGKLIF

SEQ ID NO: 25523 - protein, 13 aa, synthetic construct
CASTGGTRDTQYF

SEQ ID NO: 25524 - protein, 14 aa, synthetic construct
CALSENYNQGKLIF

SEQ ID NO: 25525 - protein, 14 aa, synthetic construct
CASSPRDWGYEQYF

SEQ ID NO: 25526 - protein, 14 aa, synthetic construct
CALVPMDYANKMIF

SEQ ID NO: 25527 - protein, 16 aa, synthetic construct
CASSPIEWGQGNTLYF

SEQ ID NO: 25528 - protein, 14 aa, synthetic construct
CALSEDSGYNKLTF

SEQ ID NO: 25529 - protein, 15 aa, synthetic construct
CASSPPGQYYAEQFF

SEQ ID NO: 25530 - protein, 13 aa, synthetic construct
CAVSTASLGKLQF

SEQ ID NO: 25531 - protein, 14 aa, synthetic construct
CASSLQGANTEVFF

SEQ ID NO: 25532 - protein, 14 aa, synthetic construct
CALTHSSNTNKVVF

SEQ ID NO: 25533 - protein, 12 aa, synthetic construct
CASSLPAETLYF

SEQ ID NO: 25534 - protein, 14 aa, synthetic construct
CVLRASSSGQKLVF

SEQ ID NO: 25535 - protein, 13 aa, synthetic construct
CASSDWGSYEQYF

SEQ ID NO: 25536 - protein, 15 aa, synthetic construct
CAASGYGSSGNKLIF

SEQ ID NO: 25537 - protein, 15 aa, synthetic construct
CASSPGTGRNTEVFF

SEQ ID NO: 25538 - protein, 14 aa, synthetic construct
CALSGSSSFSKLVF

SEQ ID NO: 25539 - protein, 14 aa, synthetic construct
CASSSGTDSYEQYF

SEQ ID NO: 25540 - protein, 14 aa, synthetic construct
CAVKAYQGGRALIF

SEQ ID NO: 25541 - protein, 14 aa, synthetic construct
CASSSGTANTEVFF

SEQ ID NO: 25542 - protein, 14 aa, synthetic construct
CALRNGGSGNKLIF

SEQ ID NO: 25543 - protein, 12 aa, synthetic construct
CASSLRSYEQYF

SEQ ID NO: 25544 - protein, 12 aa, synthetic construct
CAAASNYNVLYF

SEQ ID NO: 25545 - protein, 15 aa, synthetic construct
CASSLWGASAETLYF

SEQ ID NO: 25546 - protein, 13 aa, synthetic construct
CALGDYNQGKLIF

SEQ ID NO: 25547 - protein, 14 aa, synthetic construct
CASSFDGANTEVFF

SEQ ID NO: 25548 - protein, 14 aa, synthetic construct
CALRSGGSNYKLTF

SEQ ID NO: 25549 - protein, 15 aa, synthetic construct
CASSFGGRTNERLFF

SEQ ID NO: 25550 - protein, 17 aa, synthetic construct
CAASGTNYGSSGNKLIF

SEQ ID NO: 25551 - protein, 14 aa, synthetic construct
CASSFGDTGNTLYF

SEQ ID NO: 25552 - protein, 14 aa, synthetic construct
CALSGATNAYKVIF

SEQ ID NO: 25553 - protein, 11 aa, synthetic construct
CASSFGDTQYF

SEQ ID NO: 25554 - protein, 15 aa, synthetic construct
CALSDEYQGGRALIF

SEQ ID NO: 25555 - protein, 15 aa, synthetic construct
CASSFWGSSAETLYF

SEQ ID NO: 25556 - protein, 11 aa, synthetic construct
CYSSGSWQLIF

SEQ ID NO: 25557 - protein, 12 aa, synthetic construct
CASSGTDYEQYF

SEQ ID NO: 25558 - protein, 16 aa, synthetic construct
CAVSAGKTGNTRKLIF

SEQ ID NO: 25559 - protein, 14 aa, synthetic construct
CASSLGEANQAPLF

SEQ ID NO: 25560 - protein, 15 aa, synthetic construct
CALSVASSGSWQLIF

SEQ ID NO: 25561 - protein, 15 aa, synthetic construct
CASSGTGGVQDTQYF

SEQ ID NO: 25562 - protein, 12 aa, synthetic construct
CASMDSNYQLIW

SEQ ID NO: 25563 - protein, 14 aa, synthetic construct
CASSLGGNNERLFF

SEQ ID NO: 25564 - protein, 14 aa, synthetic construct
CAASGNTGYQNFYF

SEQ ID NO: 25565 - protein, 13 aa, synthetic construct
CASSLDRNTEVFF

SEQ ID NO: 25566 - protein, 16 aa, synthetic construct
CAAGAQDQGGSAKLIF

SEQ ID NO: 25567 - protein, 11 aa, synthetic construct
CASSFGLEVFF

SEQ ID NO: 25568 - protein, 14 aa, synthetic construct
CILRVQGGSAKLIF

SEQ ID NO: 25569 - protein, 16 aa, synthetic construct
CASSQTRDNYNSPLYF

SEQ ID NO: 25570 - protein, 14 aa, synthetic construct
CAMREGTNTDKVVF

SEQ ID NO: 25571 - protein, 17 aa, synthetic construct
CASSQEPGLGGIDTQYF

SEQ ID NO: 25572 - protein, 12 aa, synthetic construct
CALGPSNNRIFF

SEQ ID NO: 25573 - protein, 15 aa, synthetic construct
CASSQEWVNQDTQYF

SEQ ID NO: 25574 - protein, 15 aa, synthetic construct
CAMERFGTGYQNFYF

SEQ ID NO: 25575 - protein, 14 aa, synthetic construct
CASSQDNSAETLYF

SEQ ID NO: 25576 - protein, 15 aa, synthetic construct
CAMREGGNAGAKLTF

SEQ ID NO: 25577 - protein, 14 aa, synthetic construct
CASSQDRGDTEVFF

SEQ ID NO: 25578 - protein, 13 aa, synthetic construct
CACLSGSFNKLTF

SEQ ID NO: 25579 - protein, 15 aa, synthetic construct
CASSQDHISNERLFF

SEQ ID NO: 25580 - protein, 14 aa, synthetic construct
CALGDRDYAQGLTF

SEQ ID NO: 25581 - protein, 14 aa, synthetic construct
CASSQDPFQDTQYF

SEQ ID NO: 25582 - protein, 13 aa, synthetic construct
CALVDDSGTYQRF

SEQ ID NO: 25583 - protein, 16 aa, synthetic construct
CASSQDGGARDSDYTF

SEQ ID NO: 25584 - protein, 17 aa, synthetic construct
CAASDPMLSGSFNKLTF

SEQ ID NO: 25585 - protein, 15 aa, synthetic construct
CASSQDQISNERLFF

SEQ ID NO: 25586 - protein, 14 aa, synthetic construct
CAAFHDSGYNKLTF

SEQ ID NO: 25587 - protein, 15 aa, synthetic construct
CASSQDVTGGYEQYF

SEQ ID NO: 25588 - protein, 14 aa, synthetic construct
CALSWSSGSWQLIF

SEQ ID NO: 25589 - protein, 16 aa, synthetic construct
CASSQDWGQDAETLYF

SEQ ID NO: 25590 - protein, 14 aa, synthetic construct
CALSDAGSGGKLTL

SEQ ID NO: 25591 - protein, 16 aa, synthetic construct
CASSQADWDNQDTQYF

SEQ ID NO: 25592 - protein, 15 aa, synthetic construct
CAMRESSGGNYKPTF

SEQ ID NO: 25593 - protein, 13 aa, synthetic construct
CASSQGTNSDYTF

SEQ ID NO: 25594 - protein, 12 aa, synthetic construct
CAARSAGNKLTF

SEQ ID NO: 25595 - protein, 14 aa, synthetic construct
CASSPQIANTEVFF

SEQ ID NO: 25596 - protein, 13 aa, synthetic construct
CAVIGGGSAKLIF

SEQ ID NO: 25597 - protein, 13 aa, synthetic construct
CASGLGVSAEQFF

SEQ ID NO: 25598 - protein, 14 aa, synthetic construct
CAMREGPGYQNFYF

SEQ ID NO: 25599 - protein, 13 aa, synthetic construct
CASRQGAYAEQFF

SEQ ID NO: 25600 - protein, 16 aa, synthetic construct
CAVSPLNQGGSAKLIF

SEQ ID NO: 25601 - protein, 12 aa, synthetic construct
CASSKQGYEQYF

SEQ ID NO: 25602 - protein, 14 aa, synthetic construct
CAVSSYTGNYKYVF

SEQ ID NO: 25603 - protein, 13 aa, synthetic construct
CASSPTANSDYTF

SEQ ID NO: 25604 - protein, 13 aa, synthetic construct
CAMREGYAQGLTF

SEQ ID NO: 25605 - protein, 15 aa, synthetic construct
CASSPWGGALDTQYF

SEQ ID NO: 25606 - protein, 14 aa, synthetic construct
CAVRSDTNAYKVIF

SEQ ID NO: 25607 - protein, 15 aa, synthetic construct
CASSDYWGSSYEQYF

SEQ ID NO: 25608 - protein, 13 aa, synthetic construct
CALVGGGNYKPTF

SEQ ID NO: 25609 - protein, 15 aa, synthetic construct
CASSADWGAGDTQYF

SEQ ID NO: 25610 - protein, 15 aa, synthetic construct
CALAQTSGGNYKPTF

SEQ ID NO: 25611 - protein, 15 aa, synthetic construct
CASSYTGGDSYEQYF

SEQ ID NO: 25612 - protein, 12 aa, synthetic construct
CAITSSGQKLVF

SEQ ID NO: 25613 - protein, 16 aa, synthetic construct
CASSYRLGRDTGQLYF

SEQ ID NO: 25614 - protein, 12 aa, synthetic construct
CALWTGNYKYVF

SEQ ID NO: 25615 - protein, 12 aa, synthetic construct
CASSWTKDTQYF

SEQ ID NO: 25616 - protein, 15 aa, synthetic construct
CAMRETSGGNYKPTF

SEQ ID NO: 25617 - protein, 15 aa, synthetic construct
CASSFDWGAGDTQYF

SEQ ID NO: 25618 - protein, 14 aa, synthetic construct
CAMEATSSGQKLVF

SEQ ID NO: 25619 - protein, 13 aa, synthetic construct
CASRTGGIGEQYF

SEQ ID NO: 25620 - protein, 18 aa, synthetic construct
CAASEHLWGNYGNEKITF

SEQ ID NO: 25621 - protein, 14 aa, synthetic construct
CASSPGLGDYEQYF

SEQ ID NO: 25622 - protein, 11 aa, synthetic construct
CAAPGGYKVVF

SEQ ID NO: 25623 - protein, 12 aa, synthetic construct
CASVGFSYEQYF

SEQ ID NO: 25624 - protein, 13 aa, synthetic construct
CALSDRDNNAPRF

SEQ ID NO: 25625 - protein, 14 aa, synthetic construct
CASDWGANTGQLYF

SEQ ID NO: 25626 - protein, 13 aa, synthetic construct
CAAPSSSFSKLVF

SEQ ID NO: 25627 - protein, 15 aa, synthetic construct
CASGDWGGSAETLYF

SEQ ID NO: 25628 - protein, 13 aa, synthetic construct
CAASEDSGTYQRF

SEQ ID NO: 25629 - protein, 16 aa, synthetic construct
CASGDPRTGANTEVFF

SEQ ID NO: 25630 - protein, 11 aa, synthetic construct
CAVTGGYKVVF

SEQ ID NO: 25631 - protein, 10 aa, synthetic construct
CASGTDEQYF

SEQ ID NO: 25632 - protein, 13 aa, synthetic construct
CAATSSGSWQLIF

SEQ ID NO: 25633 - protein, 14 aa, synthetic construct
CASGDRGGQDTQYF

SEQ ID NO: 25634 - protein, 12 aa, synthetic construct
CALGVVVGQLTF

SEQ ID NO: 25635 - protein, 10 aa, synthetic construct
CASGDYEQYF

SEQ ID NO: 25636 - protein, 11 aa, synthetic construct
CAMMGGRALIF

SEQ ID NO: 25637 - protein, 13 aa, synthetic construct
CASGTNNNQAPLF

SEQ ID NO: 25638 - protein, 12 aa, synthetic construct
CAVMSNYNVLYF

SEQ ID NO: 25639 - protein, 13 aa, synthetic construct
CASGPGGATEVFF

SEQ ID NO: 25640 - protein, 10 aa, synthetic construct
CAVSAGKLTF

SEQ ID NO: 25641 - protein, 15 aa, synthetic construct
CASGETGGSNERLFF

SEQ ID NO: 25642 - protein, 14 aa, synthetic construct
CAAVPSSGSWQLIF

SEQ ID NO: 25643 - protein, 14 aa, synthetic construct
CASGETGGYAEQFF

SEQ ID NO: 25644 - protein, 12 aa, synthetic construct
CAARTGGYKVVF

SEQ ID NO: 25645 - protein, 14 aa, synthetic construct
CASGEGGGLYEQYF

SEQ ID NO: 25646 - protein, 13 aa, synthetic construct
CAASDSGSWQLIF

SEQ ID NO: 25647 - protein, 13 aa, synthetic construct
CASGDRGRGEQYF

SEQ ID NO: 25648 - protein, 16 aa, synthetic construct
CALSERAGANTGKLTF

SEQ ID NO: 25649 - protein, 15 aa, synthetic construct
CASGDLGSSAETLYF

SEQ ID NO: 25650 - protein, 13 aa, synthetic construct
CATDLDYANKMIF

SEQ ID NO: 25651 - protein, 13 aa, synthetic construct
CASGDWGAYEQYF

SEQ ID NO: 25652 - protein, 14 aa, synthetic construct
CAMWASSSFSKLVF

SEQ ID NO: 25653 - protein, 14 aa, synthetic construct
CASGETGASSDYTF

SEQ ID NO: 25654 - protein, 12 aa, synthetic construct
CAAWTGGYKVVF

SEQ ID NO: 25655 - protein, 15 aa, synthetic construct
CASGETGGDAETLYF

SEQ ID NO: 25656 - protein, 14 aa, synthetic construct
CAASSNTGYQNFYF

SEQ ID NO: 25657 - protein, 14 aa, synthetic construct
CASGERTVQDTQYF

SEQ ID NO: 25658 - protein, 14 aa, synthetic construct
CALSDNNAGAKLTF

SEQ ID NO: 25659 - protein, 12 aa, synthetic construct
CASGESQNTLYF

SEQ ID NO: 25660 - protein, 14 aa, synthetic construct
CALSDGTGYQNFYF

SEQ ID NO: 25661 - protein, 15 aa, synthetic construct
CASGEGLGGRETLYF

SEQ ID NO: 25662 - protein, 14 aa, synthetic construct
CAMREGEGGRALIF

SEQ ID NO: 25663 - protein, 16 aa, synthetic construct
CASGEGLGGRGDTQYF

SEQ ID NO: 25664 - protein, 16 aa, synthetic construct
CIVTDPWGSNTNKVVF

SEQ ID NO: 25665 - protein, 14 aa, synthetic construct
CASGEGQGNTEVFF

SEQ ID NO: 25666 - protein, 15 aa, synthetic construct
CAMREGDYSNNRLTL

SEQ ID NO: 25667 - protein, 13 aa, synthetic construct
CASGEGETTEVFF

SEQ ID NO: 25668 - protein, 16 aa, synthetic construct
CSAPGAPNSAGNKLTF

SEQ ID NO: 25669 - protein, 14 aa, synthetic construct
CASGEGAANTEVFF

SEQ ID NO: 25670 - protein, 15 aa, synthetic construct
CALSDGTSGSWQLIF

SEQ ID NO: 25671 - protein, 13 aa, synthetic construct
CASGDNWGDTQYF

SEQ ID NO: 25672 - protein, 14 aa, synthetic construct
CALSDQGGSAKLIF

SEQ ID NO: 25673 - protein, 13 aa, synthetic construct
CASGDTGDSDYTF

SEQ ID NO: 25674 - protein, 16 aa, synthetic construct
CALVSYYGSSGNKLIF

SEQ ID NO: 25675 - protein, 13 aa, synthetic construct
CASGDPGDAEQFF

SEQ ID NO: 25676 - protein, 14 aa, synthetic construct
CAMEPGTGNYKYVF

SEQ ID NO: 25677 - protein, 13 aa, synthetic construct
CASGDPGNSDYTF

SEQ ID NO: 25678 - protein, 13 aa, synthetic construct
CVLSVTNTGKLTF

SEQ ID NO: 25679 - protein, 14 aa, synthetic construct
CASGDLGGHYEQYF

SEQ ID NO: 25680 - protein, 13 aa, synthetic construct
CAPASSGSWQLIF

SEQ ID NO: 25681 - protein, 14 aa, synthetic construct
CASGDDWDQNTLYF

SEQ ID NO: 25682 - protein, 13 aa, synthetic construct
CAVKGNAGAKLTF

SEQ ID NO: 25683 - protein, 13 aa, synthetic construct
CASGDAEWDTQYF

SEQ ID NO: 25684 - protein, 15 aa, synthetic construct
CAMSAASSGSWQLIF

SEQ ID NO: 25685 - protein, 13 aa, synthetic construct
CASGDAGNSDYTF

SEQ ID NO: 25686 - protein, 13 aa, synthetic construct
CALRPNMGYKLTF

SEQ ID NO: 25687 - protein, 14 aa, synthetic construct
CASGDAGIQDTQYF

SEQ ID NO: 25688 - protein, 10 aa, synthetic construct
CASSANKVVF

SEQ ID NO: 25689 - protein, 15 aa, synthetic construct
CASGDAGGGNERLFF

SEQ ID NO: 25690 - protein, 14 aa, synthetic construct
CAASESGGNYKPTF

SEQ ID NO: 25691 - protein, 14 aa, synthetic construct
CASGDATYNSPLYF

SEQ ID NO: 25692 - protein, 15 aa, synthetic construct
CAMRDEGSAGNKLTF

SEQ ID NO: 25693 - protein, 13 aa, synthetic construct
CASGDAAENTLYF

SEQ ID NO: 25694 - protein, 13 aa, synthetic construct
CAMDTGGADRLTF

SEQ ID NO: 25695 - protein, 14 aa, synthetic construct
CASGDAGSAETLYF

SEQ ID NO: 25696 - protein, 12 aa, synthetic construct
CALSSGSWQLIF

SEQ ID NO: 25697 - protein, 15 aa, synthetic construct
CASGDAGGSAETLYF

SEQ ID NO: 25698 - protein, 14 aa, synthetic construct
CAASPNTGYQNFYF

SEQ ID NO: 25699 - protein, 15 aa, synthetic construct
CASGDAGGRQNTLYF

SEQ ID NO: 25700 - protein, 14 aa, synthetic construct
CAASADTGNYKYVF

SEQ ID NO: 25701 - protein, 15 aa, synthetic construct
CASGDAGGANSDYTF

SEQ ID NO: 25702 - protein, 14 aa, synthetic construct
CAPQQNTGYQNFYF

SEQ ID NO: 25703 - protein, 14 aa, synthetic construct
CASGDGPWDTEVFF

SEQ ID NO: 25704 - protein, 12 aa, synthetic construct
CILRGTGSKLSF

SEQ ID NO: 25705 - protein, 15 aa, synthetic construct
CASGDVTGGAREQYF

SEQ ID NO: 25706 - protein, 15 aa, synthetic construct
CAMREGHTGYQNFYF

SEQ ID NO: 25707 - protein, 14 aa, synthetic construct
CASGDVLGGIEQYF

SEQ ID NO: 25708 - protein, 15 aa, synthetic construct
CAMREDDSGYNKLTF

SEQ ID NO: 25709 - protein, 16 aa, synthetic construct
CASGDVGQGFYAEQFF

SEQ ID NO: 25710 - protein, 12 aa, synthetic construct
CAVNYSNNRLTL

SEQ ID NO: 25711 - protein, 16 aa, synthetic construct
CASGDVGGAHTGQLYF

SEQ ID NO: 25712 - protein, 14 aa, synthetic construct
CAASKAGNTRKLIF

SEQ ID NO: 25713 - protein, 16 aa, synthetic construct
CASGDVGGHNTGQLYF

SEQ ID NO: 25714 - protein, 14 aa, synthetic construct
CAASTAGNTRKLIF

SEQ ID NO: 25715 - protein, 17 aa, synthetic construct
CASGDVETGGSQNTLYF

SEQ ID NO: 25716 - protein, 14 aa, synthetic construct
CAVSPWTGGYKVVF

SEQ ID NO: 25717 - protein, 14 aa, synthetic construct
CASGDSLSGNTLYF

SEQ ID NO: 25718 - protein, 16 aa, synthetic construct
CALSGDRGSALGRLHF

SEQ ID NO: 25719 - protein, 15 aa, synthetic construct
CASGDSGGVAETLYF

SEQ ID NO: 25720 - protein, 16 aa, synthetic construct
CAAKGIASSSFSKLVF

SEQ ID NO: 25721 - protein, 13 aa, synthetic construct
CASGDLSAETLYF

SEQ ID NO: 25722 - protein, 13 aa, synthetic construct
CALSSNSGTYQRF

SEQ ID NO: 25723 - protein, 12 aa, synthetic construct
CASGAWGGEQYF

SEQ ID NO: 25724 - protein, 14 aa, synthetic construct
CATPADTNAYKVIF

SEQ ID NO: 25725 - protein, 13 aa, synthetic construct
CASGGQGAYEQYF

SEQ ID NO: 25726 - protein, 13 aa, synthetic construct
CAVRTGSGGKLTL

SEQ ID NO: 25727 - protein, 15 aa, synthetic construct
CASGGPGLGSETLYF

SEQ ID NO: 25728 - protein, 13 aa, synthetic construct
CAGYGGSGNKLIF

SEQ ID NO: 25729 - protein, 11 aa, synthetic construct
CASGGDREVFF

SEQ ID NO: 25730 - protein, 13 aa, synthetic construct
CVLGDHSNNRLTL

SEQ ID NO: 25731 - protein, 12 aa, synthetic construct
CASGYWGNEQYF

SEQ ID NO: 25732 - protein, 16 aa, synthetic construct
CAMRGMATGGNNKLTF

SEQ ID NO: 25733 - protein, 14 aa, synthetic construct
CASTPGQSSYEQYF

SEQ ID NO: 25734 - protein, 14 aa, synthetic construct
CAAMLSGSFNKLTF

SEQ ID NO: 25735 - protein, 13 aa, synthetic construct
CASRDSSGNTLYF

SEQ ID NO: 25736 - protein, 13 aa, synthetic construct
CALSMLGGRALIF

SEQ ID NO: 25737 - protein, 12 aa, synthetic construct
CASRDNNQAPLF

SEQ ID NO: 25738 - protein, 15 aa, synthetic construct
CAASKTSSSFSKLVF

SEQ ID NO: 25739 - protein, 12 aa, synthetic construct
CASSTNNQAPLF

SEQ ID NO: 25740 - protein, 13 aa, synthetic construct
CAMRASNTDKVVF

SEQ ID NO: 25741 - protein, 15 aa, synthetic construct
CASSEMGGRQDTQYF

SEQ ID NO: 25742 - protein, 16 aa, synthetic construct
CALVEGATGGNNKLTF

SEQ ID NO: 25743 - protein, 13 aa, synthetic construct
CASSEGTNQAPLF

SEQ ID NO: 25744 - protein, 14 aa, synthetic construct
CALSDQGGSAKLIF

SEQ ID NO: 25745 - protein, 18 aa, synthetic construct
CASSEGTGRIDSGNTLYF

SEQ ID NO: 25746 - protein, 16 aa, synthetic construct
CAMREVTGANTGKLTF

SEQ ID NO: 25747 - protein, 13 aa, synthetic construct
CASSDSANTEVFF

SEQ ID NO: 25748 - protein, 14 aa, synthetic construct
CAMREGGGSAKLIF

SEQ ID NO: 25749 - protein, 15 aa, synthetic construct
CASSDLGGSAETLYF

SEQ ID NO: 25750 - protein, 13 aa, synthetic construct
CAVSGDSNYQLIW

SEQ ID NO: 25751 - protein, 13 aa, synthetic construct
CASSDSSSYEQYF

SEQ ID NO: 25752 - protein, 14 aa, synthetic construct
CAASEGGGSAKLIF

SEQ ID NO: 25753 - protein, 12 aa, synthetic construct
CASSDWQNTLYF

SEQ ID NO: 25754 - protein, 13 aa, synthetic construct
CASDQGGSAKLIF

SEQ ID NO: 25755 - protein, 11 aa, synthetic construct
CASSDFRGGFF

SEQ ID NO: 25756 - protein, 14 aa, synthetic construct
CALSSGGSNAKLTF

SEQ ID NO: 25757 - protein, 16 aa, synthetic construct
CASSETGGASAETLYF

SEQ ID NO: 25758 - protein, 15 aa, synthetic construct
CVLGDRGQGGRALIF

SEQ ID NO: 25759 - protein, 17 aa, synthetic construct
CASSERLGPSNTGQLYF

SEQ ID NO: 25760 - protein, 14 aa, synthetic construct
CIVTDRGFASALTF

SEQ ID NO: 25761 - protein, 15 aa, synthetic construct
CASSEGTGGYAEQFF

SEQ ID NO: 25762 - protein, 11 aa, synthetic construct
CAVRGSWQLIF

SEQ ID NO: 25763 - protein, 14 aa, synthetic construct
CASSEGGANERLFF

SEQ ID NO: 25764 - protein, 15 aa, synthetic construct
CALGDNVGDNSKLIW

SEQ ID NO: 25765 - protein, 15 aa, synthetic construct
CASSEYRVANTEVFF

SEQ ID NO: 25766 - protein, 14 aa, synthetic construct
CALGVMDYANKMIF

SEQ ID NO: 25767 - protein, 14 aa, synthetic construct
CASSEWDSNERLFF

SEQ ID NO: 25768 - protein, 17 aa, synthetic construct
CAMREGEGTGGNNKLTF

SEQ ID NO: 25769 - protein, 12 aa, synthetic construct
CASSDKGLEVFF

SEQ ID NO: 25770 - protein, 13 aa, synthetic construct
CAVDGGSGNKLIF

SEQ ID NO: 25771 - protein, 14 aa, synthetic construct
CASSDPVSNERLFF

SEQ ID NO: 25772 - protein, 14 aa, synthetic construct
CAVIASSSFSKLVF

SEQ ID NO: 25773 - protein, 14 aa, synthetic construct
CASSDDRGFAEQFF

SEQ ID NO: 25774 - protein, 12 aa, synthetic construct
CALSNYAQGLTF

SEQ ID NO: 25775 - protein, 15 aa, synthetic construct
CASSDAGISNERLFF

SEQ ID NO: 25776 - protein, 11 aa, synthetic construct
CAARYAQGLTF

SEQ ID NO: 25777 - protein, 15 aa, synthetic construct
CASSDALGGTETLYF

SEQ ID NO: 25778 - protein, 14 aa, synthetic construct
CALRGNNAGAKLTF

SEQ ID NO: 25779 - protein, 13 aa, synthetic construct
CASSDAAGREQYF

SEQ ID NO: 25780 - protein, 13 aa, synthetic construct
CALDYTNAYKVIF

SEQ ID NO: 25781 - protein, 11 aa, synthetic construct
CASSDGDTLYF

SEQ ID NO: 25782 - protein, 14 aa, synthetic construct
CALGDRTNAYKVIF

SEQ ID NO: 25783 - protein, 13 aa, synthetic construct
CASSDGGVAEQFF

SEQ ID NO: 25784 - protein, 12 aa, synthetic construct
CALSDGNEKITF

SEQ ID NO: 25785 - protein, 13 aa, synthetic construct
CASSDGGNSDYTF

SEQ ID NO: 25786 - protein, 14 aa, synthetic construct
CAMREGDGNEKITF

SEQ ID NO: 25787 - protein, 15 aa, synthetic construct
CASSDVWDRGYEQYF

SEQ ID NO: 25788 - protein, 14 aa, synthetic construct
CAASSGANTGKLTF

SEQ ID NO: 25789 - protein, 14 aa, synthetic construct
CASSDVGANSDYTF

SEQ ID NO: 25790 - protein, 13 aa, synthetic construct
CAAHDSGYNKLTF

SEQ ID NO: 25791 - protein, 15 aa, synthetic construct
CASSDVGGSAETLYF

SEQ ID NO: 25792 - protein, 14 aa, synthetic construct
CAASATGGNNKLTF

SEQ ID NO: 25793 - protein, 14 aa, synthetic construct
CASSDLQGNTEVFF

SEQ ID NO: 25794 - protein, 13 aa, synthetic construct
CAMRYTGNYKYVF

SEQ ID NO: 25795 - protein, 16 aa, synthetic construct
CASSDLGGRDYAEQFF

SEQ ID NO: 25796 - protein, 12 aa, synthetic construct
CAAKGNTGKLIF

SEQ ID NO: 25797 - protein, 14 aa, synthetic construct
CASSGTGGANTLYF

SEQ ID NO: 25798 - protein, 15 aa, synthetic construct
CAVRDSTASLGKLQF

SEQ ID NO: 25799 - protein, 13 aa, synthetic construct
CASSGSNYAEQFF

SEQ ID NO: 25800 - protein, 13 aa, synthetic construct
CAVSTGGADRLTF

SEQ ID NO: 25801 - protein, 13 aa, synthetic construct
CASSGDWGDTQYF

SEQ ID NO: 25802 - protein, 14 aa, synthetic construct
CAVSDSGGNYKPTF

SEQ ID NO: 25803 - protein, 15 aa, synthetic construct
CASSSGTGGTYEQYF

SEQ ID NO: 25804 - protein, 13 aa, synthetic construct
CALGENYAQGLTF

SEQ ID NO: 25805 - protein, 10 aa, synthetic construct
CASGRTEVFF

SEQ ID NO: 25806 - protein, 13 aa, synthetic construct
CAASANSGTYQRF

SEQ ID NO: 25807 - protein, 15 aa, synthetic construct
CASTRTGGRDSDYTF

SEQ ID NO: 25808 - protein, 12 aa, synthetic construct
CASNNYAQGLTF

SEQ ID NO: 25809 - protein, 14 aa, synthetic construct
CASTRGQKSYEQYF

SEQ ID NO: 25810 - protein, 15 aa, synthetic construct
CAASRGNNAGAKLTF

SEQ ID NO: 25811 - protein, 13 aa, synthetic construct
CASSPGDGNTLYF

SEQ ID NO: 25812 - protein, 12 aa, synthetic construct
CAARDSNYQLIW

SEQ ID NO: 25813 - protein, 13 aa, synthetic construct
CASSPGTAYEQYF

SEQ ID NO: 25814 - protein, 15 aa, synthetic construct
CAIVPLTGNTRKLIF

SEQ ID NO: 25815 - protein, 12 aa, synthetic construct
CASSLQGTEVFF

SEQ ID NO: 25816 - protein, 15 aa, synthetic construct
CAMREGGGSNAKLTF

SEQ ID NO: 25817 - protein, 14 aa, synthetic construct
CASSADRGGTEVFF

SEQ ID NO: 25818 - protein, 13 aa, synthetic construct
CAASAYNNNAPRF

SEQ ID NO: 25819 - protein, 12 aa, synthetic construct
CASRDNTGQLYF

SEQ ID NO: 25820 - protein, 14 aa, synthetic construct
CIVTDTGFASALTF

SEQ ID NO: 25821 - protein, 12 aa, synthetic construct
CASRDRGREQYF

SEQ ID NO: 25822 - protein, 12 aa, synthetic construct
CAASPNTNKVVF

SEQ ID NO: 25823 - protein, 13 aa, synthetic construct
CASRGLGAYEQYF

SEQ ID NO: 25824 - protein, 15 aa, synthetic construct
CAMREGFSGSWQLIF

SEQ ID NO: 25825 - protein, 13 aa, synthetic construct
CASSTGGNYEQYF

SEQ ID NO: 25826 - protein, 15 aa, synthetic construct
CAVSSEDTGYQNFYF

SEQ ID NO: 25827 - protein, 15 aa, synthetic construct
CASSPTGGAGSDYTF

SEQ ID NO: 25828 - protein, 15 aa, synthetic construct
CALSGAMSNYNVLYF

SEQ ID NO: 25829 - protein, 11 aa, synthetic construct
CASSETYEQYF

SEQ ID NO: 25830 - protein, 14 aa, synthetic construct
CAVSAAGSGGKLTL

SEQ ID NO: 25831 - protein, 11 aa, synthetic construct
CASSDNSDYTF

SEQ ID NO: 25832 - protein, 14 aa, synthetic construct
CAANTGANTGKLTF

SEQ ID NO: 25833 - protein, 11 aa, synthetic construct
CASSDSTEVFF

SEQ ID NO: 25834 - protein, 12 aa, synthetic construct
CAASEGNYKYVF

SEQ ID NO: 25835 - protein, 14 aa, synthetic construct
CASSERGANTEVFF

SEQ ID NO: 25836 - protein, 14 aa, synthetic construct
CSASPMDYANKMIF

SEQ ID NO: 25837 - protein, 14 aa, synthetic construct
CASSEGGWAETLYF

SEQ ID NO: 25838 - protein, 16 aa, synthetic construct
CAASEEGGGSGNKLIF

SEQ ID NO: 25839 - protein, 14 aa, synthetic construct
CASSDPGRDTEVFF

SEQ ID NO: 25840 - protein, 15 aa, synthetic construct
CAMREGGGGADRLTF

SEQ ID NO: 25841 - protein, 14 aa, synthetic construct
CASSDEISNERLFF

SEQ ID NO: 25842 - protein, 14 aa, synthetic construct
CSASMGNAGAKLTF

SEQ ID NO: 25843 - protein, 13 aa, synthetic construct
CASSDDANSDYTF

SEQ ID NO: 25844 - protein, 15 aa, synthetic construct
CAMREGPSNTDKVVF

SEQ ID NO: 25845 - protein, 16 aa, synthetic construct
CASSDAGSHSGNTLYF

SEQ ID NO: 25846 - protein, 17 aa, synthetic construct
CAMREVNTGANTGKLTF

SEQ ID NO: 25847 - protein, 16 aa, synthetic construct
CASSDGTGGSAETLYF

SEQ ID NO: 25848 - protein, 13 aa, synthetic construct
CAAGAGGYQNFYF

SEQ ID NO: 25849 - protein, 11 aa, synthetic construct
CASSDVGEQYF

SEQ ID NO: 25850 - protein, 14 aa, synthetic construct
CAANSGGSNAKLTF

SEQ ID NO: 25851 - protein, 14 aa, synthetic construct
CASSDVRVNSPLYF

SEQ ID NO: 25852 - protein, 14 aa, synthetic construct
CATDGGNYAQGLTF

SEQ ID NO: 25853 - protein, 16 aa, synthetic construct
CASSGLGGRGAETLYF

SEQ ID NO: 25854 - protein, 17 aa, synthetic construct
CAMREVHTGANTGKLTF

SEQ ID NO: 25855 - protein, 12 aa, synthetic construct
CASSGGGNEQYF

SEQ ID NO: 25856 - protein, 13 aa, synthetic construct
CSASSQGGRALIF

SEQ ID NO: 25857 - protein, 15 aa, synthetic construct
CASSGTLNSGNTLYF

SEQ ID NO: 25858 - protein, 17 aa, synthetic construct
CAMREVNTGANTGKLTF

SEQ ID NO: 25859 - protein, 13 aa, synthetic construct
CASSGTANSDYTF

SEQ ID NO: 25860 - protein, 13 aa, synthetic construct
CALEDNYAQGLTF

SEQ ID NO: 25861 - protein, 15 aa, synthetic construct
CASSGRDWDQDTQYF

SEQ ID NO: 25862 - protein, 13 aa, synthetic construct
CAAGEGTGSKLSF

SEQ ID NO: 25863 - protein, 14 aa, synthetic construct
CASSSLGNTGQLYF

SEQ ID NO: 25864 - protein, 15 aa, synthetic construct
CAMRESGGSNYKLTF

SEQ ID NO: 25865 - protein, 13 aa, synthetic construct
CASSWGGAAEQFF

SEQ ID NO: 25866 - protein, 16 aa, synthetic construct
CALEGRSGGSNYKLTF

SEQ ID NO: 25867 - protein, 11 aa, synthetic construct
CASRDRGDYTF

SEQ ID NO: 25868 - protein, 13 aa, synthetic construct
CAAANYGNEKITF

SEQ ID NO: 25869 - protein, 11 aa, synthetic construct
CASTGGYTLYF

SEQ ID NO: 25870 - protein, 16 aa, synthetic construct
CAMREGDQGGSAKLIF

SEQ ID NO: 25871 - protein, 12 aa, synthetic construct
CASSTRGREQYF

SEQ ID NO: 25872 - protein, 13 aa, synthetic construct
CILRANSGTYQRF

SEQ ID NO: 25873 - protein, 15 aa, synthetic construct
CASSRGTGVGNTLYF

SEQ ID NO: 25874 - protein, 16 aa, synthetic construct
CALSALTSGGNYKPTF

SEQ ID NO: 25875 - protein, 15 aa, synthetic construct
CASSRGDWGLYEQYF

SEQ ID NO: 25876 - protein, 16 aa, synthetic construct
CALSEPRGSALGRLHF

SEQ ID NO: 25877 - protein, 14 aa, synthetic construct
CASSSGQGNTEVFF

SEQ ID NO: 25878 - protein, 11 aa, synthetic construct
CAADGNNRIFF

SEQ ID NO: 25879 - protein, 12 aa, synthetic construct
CASSRDRDEQYF

SEQ ID NO: 25880 - protein, 15 aa, synthetic construct
CAMREGAGTGSKLSF

SEQ ID NO: 25881 - protein, 12 aa, synthetic construct
CASSALRTEVFF

SEQ ID NO: 25882 - protein, 14 aa, synthetic construct
CALSASSGSWQLIF

SEQ ID NO: 25883 - protein, 14 aa, synthetic construct
CASSSGTNTGQLYF

SEQ ID NO: 25884 - protein, 14 aa, synthetic construct
CALGDRASLGKLQF

SEQ ID NO: 25885 - protein, 14 aa, synthetic construct
CASSSGTSSYEQYF

SEQ ID NO: 25886 - protein, 13 aa, synthetic construct
CAAASSGSWQLIF

SEQ ID NO: 25887 - protein, 13 aa, synthetic construct
CASSLDNTGQLYF

SEQ ID NO: 25888 - protein, 16 aa, synthetic construct
CAMRVTYGGSGNKLIF

SEQ ID NO: 25889 - protein, 18 aa, synthetic construct
CASSLGTGGPFSNERLFF

SEQ ID NO: 25890 - protein, 14 aa, synthetic construct
CAMREGEGNNRIFF

SEQ ID NO: 25891 - protein, 16 aa, synthetic construct
CAWTLTGGASQNTLYF

SEQ ID NO: 25892 - protein, 13 aa, synthetic construct
CAASGYSNNRLTL

SEQ ID NO: 25893 - protein, 14 aa, synthetic construct
CAWRSGTANTEVFF

SEQ ID NO: 25894 - protein, 13 aa, synthetic construct
CAIERNMGYKLTF

SEQ ID NO: 25895 - protein, 14 aa, synthetic construct
CAWSPGLGSYEQYF

SEQ ID NO: 25896 - protein, 14 aa, synthetic construct
CALSASSGSWQLIF

SEQ ID NO: 25897 - protein, 14 aa, synthetic construct
CAWSLGVANERLFF

SEQ ID NO: 25898 - protein, 14 aa, synthetic construct
CASNSGGSNAKLTF

SEQ ID NO: 25899 - protein, 12 aa, synthetic construct
CAWSNRGYEQYF

SEQ ID NO: 25900 - protein, 14 aa, synthetic construct
CAVSDTGGADRLTF

SEQ ID NO: 25901 - protein, 14 aa, synthetic construct
CAWSQRDRGYEQYF

SEQ ID NO: 25902 - protein, 14 aa, synthetic construct
CAVRVSGSFNKLTF

SEQ ID NO: 25903 - protein, 14 aa, synthetic construct
CAWSLDNSGNTLYF

SEQ ID NO: 25904 - protein, 14 aa, synthetic construct
CAVSASSGSWQLIF

SEQ ID NO: 25905 - protein, 14 aa, synthetic construct
CAWSLEGEPYEQYF

SEQ ID NO: 25906 - protein, 14 aa, synthetic construct
CAVSAGYSNNRLTL

SEQ ID NO: 25907 - protein, 12 aa, synthetic construct
CAWSYMNSDYTF

SEQ ID NO: 25908 - protein, 15 aa, synthetic construct
CAMRVASSGSWQLIF

SEQ ID NO: 25909 - protein, 14 aa, synthetic construct
CASSPYWGAYEQYF

SEQ ID NO: 25910 - protein, 15 aa, synthetic construct
CALSETGGSNAKLTF

SEQ ID NO: 25911 - protein, 13 aa, synthetic construct
CASSPDWGDTQYF

SEQ ID NO: 25912 - protein, 13 aa, synthetic construct
CVLSDYGNEKITF

SEQ ID NO: 25913 - protein, 14 aa, synthetic construct
CASRGDRANERLFF

SEQ ID NO: 25914 - protein, 13 aa, synthetic construct
CATDTEGADRLTF

SEQ ID NO: 25915 - protein, 11 aa, synthetic construct
CASSENERLFF

SEQ ID NO: 25916 - protein, 13 aa, synthetic construct
CAVPNSAGNKLTF

SEQ ID NO: 25917 - protein, 13 aa, synthetic construct
CASSGTFYAEQFF

SEQ ID NO: 25918 - protein, 12 aa, synthetic construct
CATNYGNEKITF

SEQ ID NO: 25919 - protein, 12 aa, synthetic construct
CASRDNYAEQFF

SEQ ID NO: 25920 - protein, 12 aa, synthetic construct
CAARTGGYKVVF

SEQ ID NO: 25921 - protein, 13 aa, synthetic construct
CASRDNNNQAPLF

SEQ ID NO: 25922 - protein, 16 aa, synthetic construct
CALSDPLYQGGRALIF

SEQ ID NO: 25923 - protein, 15 aa, synthetic construct
CASSTGTGDNSPLYF

SEQ ID NO: 25924 - protein, 13 aa, synthetic construct
CSASNNYAQGLTF

SEQ ID NO: 25925 - protein, 13 aa, synthetic construct
CASSTGVWDTLYF

SEQ ID NO: 25926 - protein, 12 aa, synthetic construct
CAVSAGNNAPRF

SEQ ID NO: 25927 - protein, 15 aa, synthetic construct
CASSRTTGPNSDYTF

SEQ ID NO: 25928 - protein, 12 aa, synthetic construct
CALDTNAYKVIF

SEQ ID NO: 25929 - protein, 14 aa, synthetic construct
CASSITSANTEVFF

SEQ ID NO: 25930 - protein, 13 aa, synthetic construct
CADTGANTGKLTF

SEQ ID NO: 25931 - protein, 14 aa, synthetic construct
CASSIRGWGTEVFF

SEQ ID NO: 25932 - protein, 13 aa, synthetic construct
CAASGGGYQNFYF

SEQ ID NO: 25933 - protein, 14 aa, synthetic construct
CASSIEGRYTEVFF

SEQ ID NO: 25934 - protein, 13 aa, synthetic construct
CAMREAGYQNFYF

SEQ ID NO: 25935 - protein, 13 aa, synthetic construct
CASSIGGRDTQYF

SEQ ID NO: 25936 - protein, 13 aa, synthetic construct
CAAGTDYANKMIF

SEQ ID NO: 25937 - protein, 12 aa, synthetic construct
CASSIGIYEQYF

SEQ ID NO: 25938 - protein, 13 aa, synthetic construct
CAMRNSAGNKLTF

SEQ ID NO: 25939 - protein, 14 aa, synthetic construct
CASSMRGGAEEQYF

SEQ ID NO: 25940 - protein, 13 aa, synthetic construct
CATENNMGYKLTF

SEQ ID NO: 25941 - protein, 12 aa, synthetic construct
CASSMGTKEVFF

SEQ ID NO: 25942 - protein, 14 aa, synthetic construct
CAMKEDTNTGKLTF

SEQ ID NO: 25943 - protein, 14 aa, synthetic construct
CASSMGTGVAEQFF

SEQ ID NO: 25944 - protein, 17 aa, synthetic construct
CALEGRNSGGSNYKLTF

SEQ ID NO: 25945 - protein, 13 aa, synthetic construct
CASSMGANSDYTF

SEQ ID NO: 25946 - protein, 15 aa, synthetic construct
CAASTRGGSNYKLTF

SEQ ID NO: 25947 - protein, 13 aa, synthetic construct
CASSMGGATEVFF

SEQ ID NO: 25948 - protein, 15 aa, synthetic construct
CAASRSGGSNYKLTF

SEQ ID NO: 25949 - protein, 14 aa, synthetic construct
CASSMVGNTGQLYF

SEQ ID NO: 25950 - protein, 14 aa, synthetic construct
CAAPTGANTGKLTF

SEQ ID NO: 25951 - protein, 12 aa, synthetic construct
CASSMSGTEVFF

SEQ ID NO: 25952 - protein, 16 aa, synthetic construct
CALRANSGGSNAKLTF

SEQ ID NO: 25953 - protein, 13 aa, synthetic construct
CASSMWDTSEVFF

SEQ ID NO: 25954 - protein, 15 aa, synthetic construct
CALGNSGGSNYKLTF

SEQ ID NO: 25955 - protein, 15 aa, synthetic construct
CASSITGTNTGQLYF

SEQ ID NO: 25956 - protein, 13 aa, synthetic construct
CAVSAYGNEKITF

SEQ ID NO: 25957 - protein, 11 aa, synthetic construct
CASSISERLFF

SEQ ID NO: 25958 - protein, 14 aa, synthetic construct
CAAPANYGNEKITF

SEQ ID NO: 25959 - protein, 14 aa, synthetic construct
CASSIGNNQDTQYF

SEQ ID NO: 25960 - protein, 12 aa, synthetic construct
CVLSASNNRIFF

SEQ ID NO: 25961 - protein, 13 aa, synthetic construct
CASSIGTAYEQYF

SEQ ID NO: 25962 - protein, 12 aa, synthetic construct
CALNYGNEKITF

SEQ ID NO: 25963 - protein, 14 aa, synthetic construct
CASSILGDQDTQYF

SEQ ID NO: 25964 - protein, 13 aa, synthetic construct
CAVSASGSWQLIF

SEQ ID NO: 25965 - protein, 15 aa, synthetic construct
CASSHWGGDTGQLYF

SEQ ID NO: 25966 - protein, 14 aa, synthetic construct
CAVSAEESNYQLIW

SEQ ID NO: 25967 - protein, 13 aa, synthetic construct
CASSPTGRDEQYF

SEQ ID NO: 25968 - protein, 12 aa, synthetic construct
CSATFNTDKVVF

SEQ ID NO: 25969 - protein, 14 aa, synthetic construct
CASSRGTGGPEQFF

SEQ ID NO: 25970 - protein, 15 aa, synthetic construct
CIVTDIGNYAQGLTF

SEQ ID NO: 25971 - protein, 14 aa, synthetic construct
CASSLSTYNSPLYF

SEQ ID NO: 25972 - protein, 13 aa, synthetic construct
CAASGKSNNRIFF

SEQ ID NO: 25973 - protein, 13 aa, synthetic construct
CASSEDSYAEQFF

SEQ ID NO: 25974 - protein, 14 aa, synthetic construct
CAMRVGGSNAKLTF

SEQ ID NO: 25975 - protein, 13 aa, synthetic construct
CASSGVGADTQYF

SEQ ID NO: 25976 - protein, 14 aa, synthetic construct
CAASESSGSWQLIF

SEQ ID NO: 25977 - protein, 13 aa, synthetic construct
CASSWEGTGQLYF

SEQ ID NO: 25978 - protein, 15 aa, synthetic construct
CALSDQTGFASALTF

SEQ ID NO: 25979 - protein, 14 aa, synthetic construct
CTCRRDRDYAEQFF

SEQ ID NO: 25980 - protein, 15 aa, synthetic construct
CIVTGDDSGYNKLTF

SEQ ID NO: 25981 - protein, 19 aa, synthetic construct
CTCSADRDWGGYNYAEQFF

SEQ ID NO: 25982 - protein, 13 aa, synthetic construct
CAVSDHSNNRIFF

SEQ ID NO: 25983 - protein, 15 aa, synthetic construct
CTCSADRDRYAEQFF

SEQ ID NO: 25984 - protein, 13 aa, synthetic construct
CAMRDTGYQNFYF

SEQ ID NO: 25985 - protein, 12 aa, synthetic construct
CTCSADFERLFF

SEQ ID NO: 25986 - protein, 12 aa, synthetic construct
CAGDTNAYKVIF

SEQ ID NO: 25987 - protein, 16 aa, synthetic construct
CTCSAGDNSYNSPLYF

SEQ ID NO: 25988 - protein, 12 aa, synthetic construct
CAANYNQGKLIF

SEQ ID NO: 25989 - protein, 14 aa, synthetic construct
CTCSAGGADAEQFF

SEQ ID NO: 25990 - protein, 11 aa, synthetic construct
CIVTANNRIFF

SEQ ID NO: 25991 - protein, 13 aa, synthetic construct
CTCSAGQNQAPLF

SEQ ID NO: 25992 - protein, 14 aa, synthetic construct
CAVSYTGGADRLTF

SEQ ID NO: 25993 - protein, 15 aa, synthetic construct
CTCSASSGGKDTQYF

SEQ ID NO: 25994 - protein, 10 aa, synthetic construct
CDTNAYKVIF

SEQ ID NO: 25995 - protein, 14 aa, synthetic construct
CTCSAGQANSDYTF

SEQ ID NO: 25996 - protein, 14 aa, synthetic construct
CAARLTGNTRKLIF

SEQ ID NO: 25997 - protein, 14 aa, synthetic construct
CTCSAGLGDAEQFF

SEQ ID NO: 25998 - protein, 11 aa, synthetic construct
CATSSGQKLVF

SEQ ID NO: 25999 - protein, 13 aa, synthetic construct
CTCSGLGQDTQYF

SEQ ID NO: 26000 - protein, 15 aa, synthetic construct
CAVSMNTGGADRLTF

SEQ ID NO: 26001 - protein, 17 aa, synthetic construct
CTCSGGLGGHSAETLYF

SEQ ID NO: 26002 - protein, 15 aa, synthetic construct
CAASHSGGSNYKLTF

SEQ ID NO: 26003 - DNA, 45 bp, synthetic construct
  source 1..45: mol_type = other DNA
tgtgccagcagtatcgggacaggggacaaccaggctccgcttttt

SEQ ID NO: 26004 - DNA, 39 bp, synthetic construct
  source 1..39: mol_type = other DNA
tgctcagcgtcaaataactatgcccagggattaaccttc

SEQ ID NO: 26005 - DNA, 45 bp, synthetic construct
  source 1..45: mol_type = other DNA
tgcacctgcagtgcagatcctgggggctatgctgagcagttcttc

SEQ ID NO: 26006 - DNA, 39 bp, synthetic construct
  source 1..39: mol_type = other DNA
tgctcagcaagtgataactatgcccagggattaaccttc

SEQ ID NO: 26007 - DNA, 36 bp, synthetic construct
  source 1..36: mol_type = other DNA
tgtgccagcaccgattctggaaatacgctctatttt

SEQ ID NO: 26008 - DNA, 36 bp, synthetic construct
  source 1..36: mol_type = other DNA
tgtgctgtgacttcaagtggccagaagctggttttt

SEQ ID NO: 26009 - DNA, 45 bp, synthetic construct
  source 1..45: mol_type = other DNA
tgtgccagcagggagggggacaatagtgcagaaacgctgtatttt

SEQ ID NO: 26010 - DNA, 42 bp, synthetic construct
  source 1..42: mol_type = other DNA
tgcgcagtcaccccatcctcctccttcagcaagctggtgttt

SEQ ID NO: 26011 - DNA, 48 bp, synthetic construct
  source 1..48: mol_type = other DNA
tgtgctagcagtagagatgggcattcaaacaccgggcagctctacttt

SEQ ID NO: 26012 - DNA, 36 bp, synthetic construct
  source 1..36: mol_type = other DNA
tgtgctgtgagaggaagcaatgcaaagctaaccttc

SEQ ID NO: 26013 - DNA, 45 bp, synthetic construct
  source 1..45: mol_type = other DNA
tgtgctagcagtttcccactgggggactatgctgagcagttcttc

SEQ ID NO: 26014 - DNA, 42 bp, synthetic construct
  source 1..42: mol_type = other DNA
tgtgcagctagtggttcttctggcagctggcaactcatcttt

SEQ ID NO: 26015 - DNA, 36 bp, synthetic construct
  source 1..36: mol_type = other DNA
tgtgccagcagtgatactggggaagaagtcttcttt

SEQ ID NO: 26016 - DNA, 39 bp, synthetic construct
  source 1..39: mol_type = other DNA
tgtgctactgacaacacgggttaccagaacttctatttt

SEQ ID NO: 26017 - DNA, 36 bp, synthetic construct
  source 1..36: mol_type = other DNA
tgtgccagcggtagggataactccgactacaccttc

SEQ ID NO: 26018 - DNA, 36 bp, synthetic construct
  source 1..36: mol_type = other DNA
tgtgctgttgcaggcaatactagaaaactcatcttt

SEQ ID NO: 26019 - DNA, 42 bp, synthetic construct
  source 1..42: mol_type = other DNA
tgtgccagcggtgatgggggggctcaagacacccagtacttt

SEQ ID NO: 26020 - DNA, 45 bp, synthetic construct
  source 1..45: mol_type = other DNA
tgtgctctggttgatcgggcttcaagtggccagaagctggttttt

SEQ ID NO: 26021 - DNA, 39 bp, synthetic construct
  source 1..39: mol_type = other DNA
tgtgccagcagtgatcagggggcctatgaacagtacttc

SEQ ID NO: 26022 - DNA, 36 bp, synthetic construct
  source 1..36: mol_type = other DNA
tgtgctttgagacctaattacaacgtgctttacttc

SEQ ID NO: 26023 - DNA, 48 bp, synthetic construct
  source 1..48: mol_type = other DNA
tgtgccagcagccaagatgaaggctggggggaagctgagcagttcttc

SEQ ID NO: 26024 - DNA, 36 bp, synthetic construct
  source 1..36: mol_type = other DNA
tgcgcagcagcaggctttgcaagtgcgctgacattt

SEQ ID NO: 26025 - DNA, 45 bp, synthetic construct
  source 1..45: mol_type = other DNA
tgtgcctggaggactgggggggttaacaccgggcagctctacttt

SEQ ID NO: 26026 - DNA, 48 bp, synthetic construct
  source 1..48: mol_type = other DNA
tgtgctatgagagaggacagtggaggcagcaattacaaactgacattt

SEQ ID NO: 26027 - DNA, 33 bp, synthetic construct
  source 1..33: mol_type = other DNA
tgtgccagcagtcactcctctgagcagttcttc

SEQ ID NO: 26028 - DNA, 39 bp, synthetic construct
  source 1..39: mol_type = other DNA
tgtgctttgattaataatgcaggtgccaagctcacattc

SEQ ID NO: 26029 - DNA, 48 bp, synthetic construct
  source 1..48: mol_type = other DNA
tgtgccagcagccaagatctcggacaccccaacgaaagattatttttc

SEQ ID NO: 26030 - DNA, 42 bp, synthetic construct
  source 1..42: mol_type = other DNA
tgtgctgcgcattctggaggaagcaatgcaaagctaaccttc

SEQ ID NO: 26031 - DNA, 42 bp, synthetic construct
  source 1..42: mol_type = other DNA
tgtgccagcagaggactgggggtctatgctgagcagttcttc

SEQ ID NO: 26032 - DNA, 45 bp, synthetic construct
  source 1..45: mol_type = other DNA
tgtgctatgagagagggcccggactatgcaaacaagatgatcttt

SEQ ID NO: 26033 - DNA, 45 bp, synthetic construct
  source 1..45: mol_type = other DNA
tgtgccagcagtatagggacaggggacaaccaggctccgcttttt

SEQ ID NO: 26034 - DNA, 39 bp, synthetic construct
  source 1..39: mol_type = other DNA
tgctcagcaagtaataactatgcccagggattaaccttc

SEQ ID NO: 26035 - DNA, 45 bp, synthetic construct
  source 1..45: mol_type = other DNA
tgtgccagcagtatcggtcagggggctggaaatacgctctatttt

SEQ ID NO: 26036 - DNA, 45 bp, synthetic construct
  source 1..45: mol_type = other DNA
tgtgctctgagtgtcactggagctaacactggaaagctcacgttt

SEQ ID NO: 26037 - DNA, 54 bp, synthetic construct
  source 1..54: mol_type = other DNA
tgtgccagcagccccgggacagggggcgggctctataattcgcccctctacttt

SEQ ID NO: 26038 - DNA, 39 bp, synthetic construct
  source 1..39: mol_type = other DNA
tgtgctttgaagcgcaataacaacaatgccccacgattt

SEQ ID NO: 26039 - DNA, 48 bp, synthetic construct
  source 1..48: mol_type = other DNA
tgtgccagcagccaaaaccgggacaggggaaacacagaagtcttcttt

SEQ ID NO: 26040 - DNA, 39 bp, synthetic construct
  source 1..39: mol_type = other DNA
tgtgctctgggggccccccataccgacaaagtcgtcttt

SEQ ID NO: 26041 - DNA, 48 bp, synthetic construct
  source 1..48: mol_type = other DNA
tgtgccagcggtgatgcaggacagccaaacaccgggcagctctacttt

SEQ ID NO: 26042 - DNA, 36 bp, synthetic construct
  source 1..36: mol_type = other DNA
tgtgctatgacttccaataccgacaaagtcgtcttt

SEQ ID NO: 26043 - DNA, 39 bp, synthetic construct
  source 1..39: mol_type = other DNA
tgtgccagcggtgatgtgaggaacgaaagattatttttc

SEQ ID NO: 26044 - DNA, 42 bp, synthetic construct
  source 1..42: mol_type = other DNA
tgcgcagtcagtccatcttctggcagctggcaactcatcttt

SEQ ID NO: 26045 - DNA, 42 bp, synthetic construct
  source 1..42: mol_type = other DNA
tgtgccagcagtgagggaatttccaacgaaagattatttttc

SEQ ID NO: 26046 - DNA, 51 bp, synthetic construct
  source 1..51: mol_type = other DNA
tgtgctatgagagaggttaacactggagctaacactggaaagctcacgttt

SEQ ID NO: 26047 - DNA, 42 bp, synthetic construct
  source 1..42: mol_type = other DNA
tgtgccagcagtgatggctggggggtctatgaacagtacttc

SEQ ID NO: 26048 - DNA, 42 bp, synthetic construct
  source 1..42: mol_type = other DNA
tgtgcagccaacactggagctaacactggaaagctcacgttt

SEQ ID NO: 26049 - DNA, 39 bp, synthetic construct
  source 1..39: mol_type = other DNA
tgtgccagcaaccgggacagggacacagaagtcttcttt

SEQ ID NO: 26050 - DNA, 45 bp, synthetic construct
  source 1..45: mol_type = other DNA
tgtgctctggccgcctcgaacacgggttaccagaacttctatttt

SEQ ID NO: 26051 - DNA, 45 bp, synthetic construct
  source 1..45: mol_type = other DNA
tgtgccagcagccaagattacagttctggaaatacgctctatttt

SEQ ID NO: 26052 - DNA, 27 bp, synthetic construct
  source 1..27: mol_type = other DNA
tgtgctaattacaacgtgctttacttc

SEQ ID NO: 26053 - DNA, 42 bp, synthetic construct
  source 1..42: mol_type = other DNA
tgtagttctagggatgggggggcgcaagacacccagtacttt

SEQ ID NO: 26054 - DNA, 36 bp, synthetic construct
  source 1..36: mol_type = other DNA
tgtgctatggggacaggaaactacaaatacgtcttt

SEQ ID NO: 26055 - DNA, 45 bp, synthetic construct
  source 1..45: mol_type = other DNA
tgtgccagcagccaactgggggagagctcctatgaacagtacttc

SEQ ID NO: 26056 - DNA, 36 bp, synthetic construct
  source 1..36: mol_type = other DNA
tgtgctatagccctcgggggctacaaacttaccttc

SEQ ID NO: 26057 - DNA, 45 bp, synthetic construct
  source 1..45: mol_type = other DNA
tgtgccagcagctcaagggggctggactcctatgaacagtacttc

SEQ ID NO: 26058 - DNA, 36 bp, synthetic construct
  source 1..36: mol_type = other DNA
tgtgctatggacagtgcagggaacaagctaactttt

SEQ ID NO: 26059 - DNA, 45 bp, synthetic construct
  source 1..45: mol_type = other DNA
tgtgccagcggggcgccgggactgggggattatgaacagtacttc

SEQ ID NO: 26060 - DNA, 42 bp, synthetic construct
  source 1..42: mol_type = other DNA
tgtgctatagatcggggtaactatgcccagggattaaccttc

SEQ ID NO: 26061 - DNA, 45 bp, synthetic construct
  source 1..45: mol_type = other DNA
tgtgccagcggtgatggggctggggggggagctgagcagttcttc

SEQ ID NO: 26062 - DNA, 39 bp, synthetic construct
  source 1..39: mol_type = other DNA
tgcgctctttcgaacacgggttaccagaacttctatttt

SEQ ID NO: 26063 - DNA, 42 bp, synthetic construct
  source 1..42: mol_type = other DNA
tgtgccagcggtgggactggggggggagacacccagtacttt

SEQ ID NO: 26064 - DNA, 39 bp, synthetic construct
  source 1..39: mol_type = other DNA
tgtgttctgggtgaaggtagcaactatcagttgatctgg

SEQ ID NO: 26065 - DNA, 45 bp, synthetic construct
  source 1..45: mol_type = other DNA
tgtgccagcagtcgggacaattcctataattcgcccctctacttt

SEQ ID NO: 26066 - DNA, 36 bp, synthetic construct
  source 1..36: mol_type = other DNA
tgtgcatgtgttggtgacaacagtaagctgatttgg

SEQ ID NO: 26067 - DNA, 33 bp, synthetic construct
  source 1..33: mol_type = other DNA
tgtgccagcagtgatgggaccaccttgtacttt

SEQ ID NO: 26068 - DNA, 45 bp, synthetic construct
  source 1..45: mol_type = other DNA
tgtgcactggaggcgggtggaggcagcaattacaaactgacattt

SEQ ID NO: 26069 - DNA, 42 bp, synthetic construct
  source 1..42: mol_type = other DNA
tgtgctagcagttggacagggagggatgctgagcagttcttc

SEQ ID NO: 26070 - DNA, 33 bp, synthetic construct
  source 1..33: mol_type = other DNA
tgtgctgtgagcatggccaatgccccacgattt

SEQ ID NO: 26071 - DNA, 45 bp, synthetic construct
  source 1..45: mol_type = other DNA
tgtgcctggagtctaccctcccgactgtctgatgaacagtacttc

SEQ ID NO: 26072 - DNA, 36 bp, synthetic construct
  source 1..36: mol_type = other DNA
tgcgcagcctccacaaatgcttacaaagtcatcttt

SEQ ID NO: 26073 - DNA, 39 bp, synthetic construct
  source 1..39: mol_type = other DNA
tgtgccagcagccttggacagttcacagaagtcttcttt

SEQ ID NO: 26074 - DNA, 48 bp, synthetic construct
  source 1..48: mol_type = other DNA
tgtgcactggagggccgatatgggagcagtggcaacaagctcatcttt

SEQ ID NO: 26075 - DNA, 39 bp, synthetic construct
  source 1..39: mol_type = other DNA
tgtgccagcagccaaagggacagtggggaacagtacttc

SEQ ID NO: 26076 - DNA, 42 bp, synthetic construct
  source 1..42: mol_type = other DNA
tgtgctctgaccgctaatacaggaaactacaaatacgtcttt

SEQ ID NO: 26077 - DNA, 42 bp, synthetic construct
  source 1..42: mol_type = other DNA
tgtgccagcagccaagaacagaatgcagaaacgctgtatttt

SEQ ID NO: 26078 - DNA, 39 bp, synthetic construct
  source 1..39: mol_type = other DNA
tgtgcagccgcaacttcaagtggccagaagctggttttt

SEQ ID NO: 26079 - DNA, 42 bp, synthetic construct
  source 1..42: mol_type = other DNA
tgtgccagcagccaagacaggggatttgctgagcagttcttc

SEQ ID NO: 26080 - DNA, 45 bp, synthetic construct
  source 1..45: mol_type = other DNA
tgtgctatgagagagtcatcctcctccttcagcaagctggtgttt

SEQ ID NO: 26081 - DNA, 48 bp, synthetic construct
  source 1..48: mol_type = other DNA
tgtgccagcagccaagactgggtttcctataattcgcccctctacttt

SEQ ID NO: 26082 - DNA, 33 bp, synthetic construct
  source 1..33: mol_type = other DNA
tgtgctcggggtgacaacagtaagctgatttgg

SEQ ID NO: 26083 - DNA, 48 bp, synthetic construct
  source 1..48: mol_type = other DNA
tgtgccagcagccaagatccgggggggcttgcagaaacgctgtatttt

SEQ ID NO: 26084 - DNA, 39 bp, synthetic construct
  source 1..39: mol_type = other DNA
tgtgctatgagccccaacatgggctacaaacttaccttc

SEQ ID NO: 26085 - DNA, 39 bp, synthetic construct
  source 1..39: mol_type = other DNA
tgtgccagcagccaagatgcaggggatacgctctatttt

SEQ ID NO: 26086 - DNA, 48 bp, synthetic construct
  source 1..48: mol_type = other DNA
tgtgctatgagagggcattcatcctcctccttcagcaagctggtgttt

SEQ ID NO: 26087 - DNA, 45 bp, synthetic construct
  source 1..45: mol_type = other DNA
tgtgccagcagccaagatggaggggatgcagaaacgctgtatttt

SEQ ID NO: 26088 - DNA, 48 bp, synthetic construct
  source 1..48: mol_type = other DNA
tgtgctgtgagctcccttaatgttggtgacaacagtaagctgatttgg

SEQ ID NO: 26089 - DNA, 42 bp, synthetic construct
  source 1..42: mol_type = other DNA
tgtgccagcagccaagatggtcactatgctgagcagttcttc

SEQ ID NO: 26090 - DNA, 42 bp, synthetic construct
  source 1..42: mol_type = other DNA
tgtgctatgagagggcaaggcactgggtctaagctgtcattt

SEQ ID NO: 26091 - DNA, 45 bp, synthetic construct
  source 1..45: mol_type = other DNA
tgtgccagcagccaagattgggattctggaaatacgctctatttt

SEQ ID NO: 26092 - DNA, 42 bp, synthetic construct
  source 1..42: mol_type = other DNA
tgtgctatgagattaacaggcaatactagaaaactcatcttt

SEQ ID NO: 26093 - DNA, 42 bp, synthetic construct
  source 1..42: mol_type = other DNA
tgtgccagcagccaagcacagagtcaaaacaccttgtacttt

SEQ ID NO: 26094 - DNA, 42 bp, synthetic construct
  source 1..42: mol_type = other DNA
tgcgcagtcagagcatcttctggcagctggcaactcatcttt

SEQ ID NO: 26095 - DNA, 42 bp, synthetic construct
  source 1..42: mol_type = other DNA
tgtgccagcagccaagcagggaactatgctgagcagttcttc

SEQ ID NO: 26096 - DNA, 48 bp, synthetic construct
  source 1..48: mol_type = other DNA
tgtgctctgagtgccatgactaacagtgcagggaacaagctaactttt

SEQ ID NO: 26097 - DNA, 45 bp, synthetic construct
  source 1..45: mol_type = other DNA
tgtgccagcagccaagccgggacaggggatgctgagcagttcttc

SEQ ID NO: 26098 - DNA, 15 bp, synthetic construct
  source 1..15: mol_type = other DNA
tgtgcttctccgttt

SEQ ID NO: 26099 - DNA, 33 bp, synthetic construct
  source 1..33: mol_type = other DNA
tgtgccagcagccaaggagaaacgctgtatttt

SEQ ID NO: 26100 - DNA, 39 bp, synthetic construct
  source 1..39: mol_type = other DNA
tgtgctctgagtggggactatgcaaacaagatgatcttt

SEQ ID NO: 26101 - DNA, 36 bp, synthetic construct
  source 1..36: mol_type = other DNA
tgtgccagcagccaagggggacaggctccgcttttt

SEQ ID NO: 26102 - DNA, 39 bp, synthetic construct
  source 1..39: mol_type = other DNA
tgtgctatagcatcctcctccttcagcaagctggtgttt

SEQ ID NO: 26103 - DNA, 45 bp, synthetic construct
  source 1..45: mol_type = other DNA
tgtgccagcagccccacagggatttccaacgaaagattatttttc

SEQ ID NO: 26104 - DNA, 39 bp, synthetic construct
  source 1..39: mol_type = other DNA
tgtgctttggccccttccaataccaacaaagtcgtcttt

SEQ ID NO: 26105 - DNA, 45 bp, synthetic construct
  source 1..45: mol_type = other DNA
tgtgccagcagcccccgacagacaaacaccgggcagctctacttt

SEQ ID NO: 26106 - DNA, 36 bp, synthetic construct
  source 1..36: mol_type = other DNA
tgtgctttgtggggcagtggtggaaaactcactttg

SEQ ID NO: 26107 - DNA, 45 bp, synthetic construct
  source 1..45: mol_type = other DNA
tgtgccagcagccccgggacagggcccaacgaaagattatttttc

SEQ ID NO: 26108 - DNA, 39 bp, synthetic construct
  source 1..39: mol_type = other DNA
tgtgcagcaagtgcacctggaggctataaagtggtcttt

SEQ ID NO: 26109 - DNA, 39 bp, synthetic construct
  source 1..39: mol_type = other DNA
tgtgccagcagcccgggactgggggatgaacagtacttc

SEQ ID NO: 26110 - DNA, 39 bp, synthetic construct
  source 1..39: mol_type = other DNA
tgtgctgcccagcaaggcactgggtctaagctgtcattt

SEQ ID NO: 26111 - DNA, 36 bp, synthetic construct
  source 1..36: mol_type = other DNA
tgtgccagcgggactgggggggttgaacagtacttc

SEQ ID NO: 26112 - DNA, 39 bp, synthetic construct
  source 1..39: mol_type = other DNA
tgtgctatggaactcggaggtgcagatagactcaccttt

SEQ ID NO: 26113 - DNA, 42 bp, synthetic construct
  source 1..42: mol_type = other DNA
tgtgcaagcagcttagacgccagtcaaaacaccttgtacttt

SEQ ID NO: 26114 - DNA, 45 bp, synthetic construct
  source 1..45: mol_type = other DNA
tgtgctatagaccccattactggcagtggtggaaaactcactttg

SEQ ID NO: 26115 - DNA, 36 bp, synthetic construct
  source 1..36: mol_type = other DNA
tgtgcaagcagcttagccggggacgaacagtacttc

SEQ ID NO: 26116 - DNA, 36 bp, synthetic construct
  source 1..36: mol_type = other DNA
tgtgctgtgagggactatgcaaacaagatgatcttt

SEQ ID NO: 26117 - DNA, 48 bp, synthetic construct
  source 1..48: mol_type = other DNA
tgtgcaagcagcttagctggggggggtagtgcagaaacgctgtatttt

SEQ ID NO: 26118 - DNA, 42 bp, synthetic construct
  source 1..42: mol_type = other DNA
tgtgctatggacccaggcactgggagtaacaggctcactttt

SEQ ID NO: 26119 - DNA, 42 bp, synthetic construct
  source 1..42: mol_type = other DNA
tgtgccagcagtctacgggacgaccaagacacccagtacttt

SEQ ID NO: 26120 - DNA, 45 bp, synthetic construct
  source 1..45: mol_type = other DNA
tgtgctatgagagagggatcttccaataccgacaaagtcgtcttt

SEQ ID NO: 26121 - DNA, 36 bp, synthetic construct
  source 1..36: mol_type = other DNA
tgtagttctaccgggtcctatgctgagcagttcttc

SEQ ID NO: 26122 - DNA, 39 bp, synthetic construct
  source 1..39: mol_type = other DNA
tgcgcagttggtttgtctaattacaacgtgctttacttc

SEQ ID NO: 26123 - DNA, 24 bp, synthetic construct
  source 1..24: mol_type = other DNA
tgtagttctagcgagcagttcttc

SEQ ID NO: 26124 - DNA, 39 bp, synthetic construct
  source 1..39: mol_type = other DNA
tgcgcagtcagtggagctaacactggaaagctcacgttt

SEQ ID NO: 26125 - DNA, 24 bp, synthetic construct
  source 1..24: mol_type = other DNA
tgtagttctagcgagcagttcttc

SEQ ID NO: 26126 - DNA, 39 bp, synthetic construct; identical to SEQ ID NO: 26124
  source 1..39: mol_type = other DNA

SEQ ID NO: 26127 - DNA, 33 bp, synthetic construct
  source 1..33: mol_type = other DNA
tgtagttctagtgagggggcagaagtcttcttt

SEQ ID NO: 26128 - DNA, 33 bp, synthetic construct
  source 1..33: mol_type = other DNA
tgtgttttgagtggggggcacaaagtcgtcttt

SEQ ID NO: 26129 - DNA, 36 bp, synthetic construct
  source 1..36: mol_type = other DNA
tgtagttctagtggggggcgggacaccttgtacttt

SEQ ID NO: 26130 - DNA, 39 bp, synthetic construct
  source 1..39: mol_type = other DNA
tgcgcagtcagtaacagtgcagggaacaagctaactttt

SEQ ID NO: 26131 - DNA, 30 bp, synthetic construct
  source 1..30: mol_type = other DNA
tgtagttctcacaggggggaagtcttcttt

SEQ ID NO: 26132 - DNA, 42 bp, synthetic construct
  source 1..42: mol_type = other DNA
tgcgcagtcagtgagaggtataaccaggggaagcttatcttt

SEQ ID NO: 26133 - DNA, 39 bp, synthetic construct
  source 1..39: mol_type = other DNA
tgtgccagcactggggggacacgagacacccagtacttt

SEQ ID NO: 26134 - DNA, 42 bp, synthetic construct
  source 1..42: mol_type = other DNA
tgtgctttgagtgagaattataaccaggggaagcttatcttt

SEQ ID NO: 26135 - DNA, 42 bp, synthetic construct
  source 1..42: mol_type = other DNA
tgtgccagcagcccacgggactgggggtatgaacagtacttc

SEQ ID NO: 26136 - DNA, 42 bp, synthetic construct
  source 1..42: mol_type = other DNA
tgtgctctggttcctatggactatgcaaacaagatgatcttt

SEQ ID NO: 26137 - DNA, 48 bp, synthetic construct
  source 1..48: mol_type = other DNA
tgtgccagcagccccatagagtgggggcagggaaatacgctctatttt

SEQ ID NO: 26138 - DNA, 42 bp, synthetic construct
  source 1..42: mol_type = other DNA
tgtgctctgagtgaggactcgggatacaacaaactcactttt

SEQ ID NO: 26139 - DNA, 45 bp, synthetic construct
  source 1..45: mol_type = other DNA
tgtgccagcagccccccgggacagtactatgctgagcagttcttc

SEQ ID NO: 26140 - DNA, 39 bp, synthetic construct
  source 1..39: mol_type = other DNA
tgtgctgtgtcaactgccagtttggggaaactgcagttt

SEQ ID NO: 26141 - DNA, 42 bp, synthetic construct
  source 1..42: mol_type = other DNA
tgtgccagcagcctacagggggcgaacacagaagtcttcttt

SEQ ID NO: 26142 - DNA, 42 bp, synthetic construct
  source 1..42: mol_type = other DNA
tgtgctttgacccactcttccaataccaacaaagtcgtcttt

SEQ ID NO: 26143 - DNA, 36 bp, synthetic construct
  source 1..36: mol_type = other DNA
tgtgccagcagcctccctgcagaaacgctgtatttt

SEQ ID NO: 26144 - DNA, 42 bp, synthetic construct
  source 1..42: mol_type = other DNA
tgtgttctgagggcctcttcaagtggccagaagctggttttt

SEQ ID NO: 26145 - DNA, 39 bp, synthetic construct
  source 1..39: mol_type = other DNA
tgtgccagcagcgactgggggtcctatgaacagtacttc

SEQ ID NO: 26146 - DNA, 45 bp, synthetic construct
  source 1..45: mol_type = other DNA
tgtgcagctagtggatatgggagcagtggcaacaagctcatcttt

SEQ ID NO: 26147 - DNA, 45 bp, synthetic construct
  source 1..45: mol_type = other DNA
tgtgccagcagtcccgggacagggcgtaacacagaagtcttcttt

SEQ ID NO: 26148 - DNA, 42 bp, synthetic construct
  source 1..42: mol_type = other DNA
tgtgctctgagtgggtcctcctccttcagcaagctggtgttt

SEQ ID NO: 26149 - DNA, 42 bp, synthetic construct
  source 1..42: mol_type = other DNA
tgtgccagcagttccgggacagactcctatgaacagtacttc

SEQ ID NO: 26150 - DNA, 42 bp, synthetic construct
  source 1..42: mol_type = other DNA
tgtgcagtgaaggcctaccagggaggcagagctctgatattt

SEQ ID NO: 26151 - DNA, 42 bp, synthetic construct
  source 1..42: mol_type = other DNA
tgtgccagcagttctgggacagcaaacacagaagtcttcttt

SEQ ID NO: 26152 - DNA, 42 bp, synthetic construct
  source 1..42: mol_type = other DNA
tgtgctttgaggaatgggggcagtggcaacaagctcatcttt

SEQ ID NO: 26153 - DNA, 36 bp, synthetic construct
  source 1..36: mol_type = other DNA
tgtgccagcagtttacgctcctatgaacagtacttc

SEQ ID NO: 26154 - DNA, 36 bp, synthetic construct
  source 1..36: mol_type = other DNA
tgtgcagcagcgtctaattacaacgtgctttacttc

SEQ ID NO: 26155 - DNA, 45 bp, synthetic construct
  source 1..45: mol_type = other DNA
tgtgccagcagtttatggggggctagtgcagaaacgctgtatttt

SEQ ID NO: 26156 - DNA, 39 bp, synthetic construct
  source 1..39: mol_type = other DNA
tgtgctctgggtgattataaccaggggaagcttatcttt

SEQ ID NO: 26157 - DNA, 42 bp, synthetic construct
  source 1..42: mol_type = other DNA
tgtgccagcagtttcgacggtgcaaacacagaagtcttcttt

SEQ ID NO: 26158 - DNA, 42 bp, synthetic construct
  source 1..42: mol_type = other DNA
tgtgctctgaggagtggaggcagcaattacaaactgacattt

SEQ ID NO: 26159 - DNA, 45 bp, synthetic construct
  source 1..45: mol_type = other DNA
tgtgccagcagtttcgggggtaggaccaacgaaagattatttttc

SEQ ID NO: 26160 - DNA, 51 bp, synthetic construct
  source 1..51: mol_type = other DNA
tgtgcagcaagtgggacgaattatgggagcagtggcaacaagctcatcttt

SEQ ID NO: 26161 - DNA, 42 bp, synthetic construct
  source 1..42: mol_type = other DNA
tgtgccagcagttttggcgatactggaaatacgctctatttt

SEQ ID NO: 26162 - DNA, 42 bp, synthetic construct
  source 1..42: mol_type = other DNA
tgtgctctgagtggggccacaaatgcttacaaagtcatcttt

SEQ ID NO: 26163 - DNA, 33 bp, synthetic construct
  source 1..33: mol_type = other DNA
tgtgccagcagttttggggacacccagtacttt

SEQ ID NO: 26164 - DNA, 45 bp, synthetic construct
  source 1..45: mol_type = other DNA
tgtgctctgagtgatgagtaccagggaggcagagctctgatattt

SEQ ID NO: 26165 - DNA, 45 bp, synthetic construct
  source 1..45: mol_type = other DNA
tgtgccagcagtttttgggggtctagtgcagaaacgctgtatttt

SEQ ID NO: 26166 - DNA, 33 bp, synthetic construct
  source 1..33: mol_type = other DNA
tgttactcttctggcagctggcaactcatcttt

SEQ ID NO: 26167 - DNA, 36 bp, synthetic construct
  source 1..36: mol_type = other DNA
tgtgctagcagcgggacagactatgaacagtacttc

SEQ ID NO: 26168 - DNA, 48 bp, synthetic construct
  source 1..48: mol_type = other DNA
tgcgcagtcagtgctggcaaaacaggcaatactagaaaactcatcttt

SEQ ID NO: 26169 - DNA, 42 bp, synthetic construct
  source 1..42: mol_type = other DNA
tgtgctagcagcttaggggaggccaaccaggctccgcttttt

SEQ ID NO: 26170 - DNA, 45 bp, synthetic construct
  source 1..45: mol_type = other DNA
tgtgctctgagtgttgcatcttctggcagctggcaactcatcttt

SEQ ID NO: 26171 - DNA, 45 bp, synthetic construct
  source 1..45: mol_type = other DNA
tgtgctagcagtgggacagggggcgtccaagacacccagtacttt

SEQ ID NO: 26172 - DNA, 36 bp, synthetic construct
  source 1..36: mol_type = other DNA
tgtgcttccatggatagcaactatcagttgatctgg

SEQ ID NO: 26173 - DNA, 42 bp, synthetic construct
  source 1..42: mol_type = other DNA
tgtgctagcagtttaggggggaacaacgaaagattatttttc

SEQ ID NO: 26174 - DNA, 42 bp, synthetic construct
  source 1..42: mol_type = other DNA
tgtgcagcaagtgggaacacgggttaccagaacttctatttt

SEQ ID NO: 26175 - DNA, 39 bp, synthetic construct
  source 1..39: mol_type = other DNA
tgtgctagcagtttggacagaaacacagaagtcttcttt

SEQ ID NO: 26176 - DNA, 48 bp, synthetic construct
  source 1..48: mol_type = other DNA
tgcgcagcaggtgcacaggatcaaggagggtctgcgaagctcatcttt

SEQ ID NO: 26177 - DNA, 33 bp, synthetic construct
  source 1..33: mol_type = other DNA
tgtgctagcagttttgggttagaagtcttcttt

SEQ ID NO: 26178 - DNA, 42 bp, synthetic construct
  source 1..42: mol_type = other DNA
tgtatcctgagagtacaaggagggtctgcgaagctcatcttt

SEQ ID NO: 26179 - DNA, 48 bp, synthetic construct
  source 1..48: mol_type = other DNA
tgtgccagcagccaaacccgggacaactataattcgcccctctacttt

SEQ ID NO: 26180 - DNA, 42 bp, synthetic construct
  source 1..42: mol_type = other DNA
tgtgctatgagagagggaaccaataccgacaaagtcgtcttt

SEQ ID NO: 26181 - DNA, 51 bp, synthetic construct
  source 1..51: mol_type = other DNA
tgtgccagcagccaagaaccgggactgggggggatagacacccagtacttt

SEQ ID NO: 26182 - DNA, 36 bp, synthetic construct
  source 1..36: mol_type = other DNA
tgtgctctgggcccctccaataacagaatcttcttt

SEQ ID NO: 26183 - DNA, 45 bp, synthetic construct
  source 1..45: mol_type = other DNA
tgtgccagcagccaagaatgggttaaccaagacacccagtacttt

SEQ ID NO: 26184 - DNA, 45 bp, synthetic construct
  source 1..45: mol_type = other DNA
tgtgctatggaacggttcgggacgggttaccagaacttctatttt

SEQ ID NO: 26185 - DNA, 42 bp, synthetic construct
  source 1..42: mol_type = other DNA
tgtgccagcagccaagacaatagtgcagaaacgctgtatttt

SEQ ID NO: 26186 - DNA, 45 bp, synthetic construct
  source 1..45: mol_type = other DNA
tgtgctatgagagagggaggaaatgcaggtgccaagctcacattc

SEQ ID NO: 26187 - DNA, 42 bp, synthetic construct
  source 1..42: mol_type = other DNA
tgtgccagcagccaagacaggggggacacagaagtcttcttt

SEQ ID NO: 26188 - DNA, 39 bp, synthetic construct
  source 1..39: mol_type = other DNA
tgtgcttgtttatctggtagcttcaataagttgaccttt

SEQ ID NO: 26189 - DNA, 45 bp, synthetic construct
  source 1..45: mol_type = other DNA
tgtgccagcagccaagaccacatttccaacgaaagattatttttc

SEQ ID NO: 26190 - DNA, 42 bp, synthetic construct
  source 1..42: mol_type = other DNA
tgtgctctgggtgatcgggactatgcccagggattaaccttc

SEQ ID NO: 26191 - DNA, 42 bp, synthetic construct
  source 1..42: mol_type = other DNA
tgtgccagcagccaagacccattccaagacacccagtacttt

SEQ ID NO: 26192 - DNA, 39 bp, synthetic construct
  source 1..39: mol_type = other DNA
tgtgctctggttgatgattctgggacttaccagaggttt

SEQ ID NO: 26193 - DNA, 48 bp, synthetic construct
  source 1..48: mol_type = other DNA
tgtgccagcagccaagacgggggggcgcgggactccgactacaccttc

SEQ ID NO: 26194 - DNA, 51 bp, synthetic construct
  source 1..51: mol_type = other DNA
tgtgcagctagtgaccccatgttatctggtagcttcaataagttgaccttt

SEQ ID NO: 26195 - DNA, 45 bp, synthetic construct
  source 1..45: mol_type = other DNA
tgtgccagcagccaagatcagatttccaacgaaagattatttttc

SEQ ID NO: 26196 - DNA, 42 bp, synthetic construct
  source 1..42: mol_type = other DNA
tgtgcagcttttcatgactcgggatacaacaaactcactttt

SEQ ID NO: 26197 - DNA, 45 bp, synthetic construct
  source 1..45: mol_type = other DNA
tgtgccagcagccaagatgtgactgggggttatgaacagtacttc

SEQ ID NO: 26198 - DNA, 42 bp, synthetic construct
  source 1..42: mol_type = other DNA
tgcgctctgagttggtcttctggcagctggcaactcatcttt

SEQ ID NO: 26199 - DNA, 48 bp, synthetic construct
  source 1..48: mol_type = other DNA
tgtgccagcagccaagattggggacaggatgcagaaacgctgtatttt

SEQ ID NO: 26200 - DNA, 42 bp, synthetic construct
  source 1..42: mol_type = other DNA
tgtgctttgagtgatgctggcagtggtggaaaactcactttg

SEQ ID NO: 26201 - DNA, 48 bp, synthetic construct
  source 1..48: mol_type = other DNA
tgtgccagcagccaagcggactgggataaccaagacacccagtacttt

SEQ ID NO: 26202 - DNA, 45 bp, synthetic construct
  source 1..45: mol_type = other DNA
tgtgctatgagagagtcctcaggaggaaactacaaacctacgttt

SEQ ID NO: 26203 - DNA, 39 bp, synthetic construct
  source 1..39: mol_type = other DNA
tgtgccagcagccaagggacaaactccgactacaccttc

SEQ ID NO: 26204 - DNA, 36 bp, synthetic construct
  source 1..36: mol_type = other DNA
tgtgcagcaaggagtgcagggaacaagctaactttt

SEQ ID NO: 26205 - DNA, 42 bp, synthetic construct
  source 1..42: mol_type = other DNA
tgtgccagcagcccccaaattgcaaacacagaagtcttcttt

SEQ ID NO: 26206 - DNA, 39 bp, synthetic construct
  source 1..39: mol_type = other DNA
tgtgctgtgataggaggagggtctgcgaagctcatcttt

SEQ ID NO: 26207 - DNA, 39 bp, synthetic construct
  source 1..39: mol_type = other DNA
tgtgcctccggactgggggtgtctgctgagcagttcttc

SEQ ID NO: 26208 - DNA, 42 bp, synthetic construct
  source 1..42: mol_type = other DNA
tgtgctatgagagagggcccgggttaccagaacttctatttt

SEQ ID NO: 26209 - DNA, 39 bp, synthetic construct
  source 1..39: mol_type = other DNA
tgtgccagcagacagggggcgtatgctgagcagttcttc

SEQ ID NO: 26210 - DNA, 48 bp, synthetic construct
  source 1..48: mol_type = other DNA
tgtgctgtgagcccactgaatcaaggagggtctgcgaagctcatcttt

SEQ ID NO: 26211 - DNA, 36 bp, synthetic construct
  source 1..36: mol_type = other DNA
tgtgccagcagcaaacaggggtatgaacagtacttc

SEQ ID NO: 26212 - DNA, 42 bp, synthetic construct
  source 1..42: mol_type = other DNA
tgtgctgtgagctcttacacaggaaactacaaatacgtcttt

SEQ ID NO: 26213 - DNA, 39 bp, synthetic construct
  source 1..39: mol_type = other DNA
tgtgccagcagccccacagcaaactccgactacaccttc

SEQ ID NO: 26214 - DNA, 39 bp, synthetic construct
  source 1..39: mol_type = other DNA
tgtgctatgagagagggctatgcccagggattaaccttc

SEQ ID NO: 26215 - DNA, 45 bp, synthetic construct
  source 1..45: mol_type = other DNA
tgtgccagcagcccctgggggggcgcgttagacacccagtacttt

SEQ ID NO: 26216 - DNA, 42 bp, synthetic construct
  source 1..42: mol_type = other DNA
tgtgctgtgaggagtgacacaaatgcttacaaagtcatcttt

SEQ ID NO: 26217 - DNA, 45 bp, synthetic construct
  source 1..45: mol_type = other DNA
tgtgccagcagcgattactgggggagctcctatgaacagtacttc

SEQ ID NO: 26218 - DNA, 39 bp, synthetic construct
  source 1..39: mol_type = other DNA
tgtgctctggttgggggaggaaactacaaacctacgttt

SEQ ID NO: 26219 - DNA, 45 bp, synthetic construct
  source 1..45: mol_type = other DNA
tgtgccagcagcgccgactggggggcgggggacacccagtacttt

SEQ ID NO: 26220 - DNA, 45 bp, synthetic construct
  source 1..45: mol_type = other DNA
tgtgctctggcccaaacctcaggaggaaactacaaacctacgttt

SEQ ID NO: 26221 - DNA, 45 bp, synthetic construct
  source 1..45: mol_type = other DNA
tgtgccagcagctacactgggggggactcctatgaacagtacttc

SEQ ID NO: 26222 - DNA, 36 bp, synthetic construct
  source 1..36: mol_type = other DNA
tgtgctatcacttcaagtggccagaagctggttttt

SEQ ID NO: 26223 - DNA, 48 bp, synthetic construct
  source 1..48: mol_type = other DNA
tgtgccagcagctatcggctggggcgggacaccgggcagctctacttt

SEQ ID NO: 26224 - DNA, 36 bp, synthetic construct
  source 1..36: mol_type = other DNA
tgtgctctatggacaggaaactacaaatacgtcttt

SEQ ID NO: 26225 - DNA, 36 bp, synthetic construct
  source 1..36: mol_type = other DNA
tgtgccagcagctggacaaaagacacccagtacttt

SEQ ID NO: 26226 - DNA, 45 bp, synthetic construct
  source 1..45: mol_type = other DNA
tgtgctatgagagaaacctcaggaggaaactacaaacctacgttt

SEQ ID NO: 26227 - DNA, 45 bp, synthetic construct
  source 1..45: mol_type = other DNA
tgtgccagcagcttcgactggggggcgggtgacacccagtacttt

SEQ ID NO: 26228 - DNA, 42 bp, synthetic construct
  source 1..42: mol_type = other DNA
tgtgctatggaggcaacttcaagtggccagaagctggttttt

SEQ ID NO: 26229 - DNA, 39 bp, synthetic construct
  source 1..39: mol_type = other DNA
tgtgccagcaggactggggggatcggggaacagtacttc

SEQ ID NO: 26230 - DNA, 54 bp, synthetic construct
  source 1..54: mol_type = other DNA
tgtgcagctagtgagcatttgtggggcaactatggaaatgagaaaataactttt

SEQ ID NO: 26231 - DNA, 42 bp, synthetic construct
  source 1..42: mol_type = other DNA
tgtgccagcagtccgggactgggggactatgaacagtacttc

SEQ ID NO: 26232 - DNA, 33 bp, synthetic construct
  source 1..33: mol_type = other DNA
tgtgcagcacctggaggctataaagtggtcttt

SEQ ID NO: 26233 - DNA, 36 bp, synthetic construct
  source 1..36: mol_type = other DNA
tgtgccagcgtggggttctcctatgaacagtacttc

SEQ ID NO: 26234 - DNA, 39 bp, synthetic construct
  source 1..39: mol_type = other DNA
tgtgctctgagtgatcgtgacaacaatgccccacgattt

SEQ ID NO: 26235 - DNA, 42 bp, synthetic construct
  source 1..42: mol_type = other DNA
tgtgccagcgactggggggcaaacaccgggcagctctacttt

SEQ ID NO: 26236 - DNA, 39 bp, synthetic construct
  source 1..39: mol_type = other DNA
tgtgctgccccatcctcctccttcagcaagctggtgttt

SEQ ID NO: 26237 - DNA, 45 bp, synthetic construct
  source 1..45: mol_type = other DNA
tgtgccagcggagactggggggggagtgcagaaacgctgtatttt

SEQ ID NO: 26238 - DNA, 39 bp, synthetic construct
  source 1..39: mol_type = other DNA
tgtgcagcaagtgaagattctgggacttaccagaggttt

SEQ ID NO: 26239 - DNA, 48 bp, synthetic construct
  source 1..48: mol_type = other DNA
tgtgccagcggcgatcctcggacaggagcaaacacagaagtcttcttt

SEQ ID NO: 26240 - DNA, 33 bp, synthetic construct
  source 1..33: mol_type = other DNA
tgtgcagttactggaggctataaagtggtcttt

SEQ ID NO: 26241 - DNA, 30 bp, synthetic construct
  source 1..30: mol_type = other DNA
tgtgccagcgggacagatgaacagtacttc

SEQ ID NO: 26242 - DNA, 39 bp, synthetic construct
  source 1..39: mol_type = other DNA
tgtgcggctacatcttctggcagctggcaactcatcttt

SEQ ID NO: 26243 - DNA, 42 bp, synthetic construct
  source 1..42: mol_type = other DNA
tgtgccagcggggacaggggtggccaagacacccagtacttt

SEQ ID NO: 26244 - DNA, 36 bp, synthetic construct
  source 1..36: mol_type = other DNA
tgtgctctgggtgtggttgtggggcagctcactttc

SEQ ID NO: 26245 - DNA, 30 bp, synthetic construct
  source 1..30: mol_type = other DNA
tgtgccagcggggactatgaacagtacttc

SEQ ID NO: 26246 - DNA, 33 bp, synthetic construct
  source 1..33: mol_type = other DNA
tgtgcaatgatgggaggcagagctctgatattt

SEQ ID NO: 26247 - DNA, 39 bp, synthetic construct
  source 1..39: mol_type = other DNA
tgtgccagcggtaccaataacaaccaggctccgcttttt

SEQ ID NO: 26248 - DNA, 36 bp, synthetic construct
  source 1..36: mol_type = other DNA
tgtgcagtgatgtctaattacaacgtgctttacttc

SEQ ID NO: 26249 - DNA, 39 bp, synthetic construct
  source 1..39: mol_type = other DNA
tgtgccagcggtccagggggcgcgacagaagtcttcttt

SEQ ID NO: 26250 - DNA, 30 bp, synthetic construct
  source 1..30: mol_type = other DNA
tgcgcagtcagtgcgggcaaacttaccttc

SEQ ID NO: 26251 - DNA, 45 bp, synthetic construct
  source 1..45: mol_type = other DNA
tgtgccagcggtgaaacagggggctccaacgaaagattatttttc

SEQ ID NO: 26252 - DNA, 42 bp, synthetic construct
  source 1..42: mol_type = other DNA
tgtgcagcagttccatcttctggcagctggcaactcatcttt

SEQ ID NO: 26253 - DNA, 42 bp, synthetic construct
  source 1..42: mol_type = other DNA
tgtgccagcggtgaaactgggggctatgctgagcagttcttc

SEQ ID NO: 26254 - DNA, 36 bp, synthetic construct
  source 1..36: mol_type = other DNA
tgtgcagctaggactggaggctataaagtggtcttt

SEQ ID NO: 26255 - DNA, 42 bp, synthetic construct
  source 1..42: mol_type = other DNA
tgtgccagcggtgaaggtggggggctctatgaacagtacttc

SEQ ID NO: 26256 - DNA, 39 bp, synthetic construct
  source 1..39: mol_type = other DNA
tgtgcagctagtgattctggcagctggcaactcatcttt

SEQ ID NO: 26257 - DNA, 39 bp, synthetic construct
  source 1..39: mol_type = other DNA
tgtgccagcggtgacagggggcggggggaacagtacttc

SEQ ID NO: 26258 - DNA, 48 bp, synthetic construct
  source 1..48: mol_type = other DNA
tgtgctctgagtgaaagggctggagctaacactggaaagctcacgttt

SEQ ID NO: 26259 - DNA, 45 bp, synthetic construct
  source 1..45: mol_type = other DNA
tgtgccagcggtgacctggggtctagtgcagaaacgctgtatttt

SEQ ID NO: 26260 - DNA, 39 bp, synthetic construct
  source 1..39: mol_type = other DNA
tgtgctactgatctggactatgcaaacaagatgatcttt

SEQ ID NO: 26261 - DNA, 39 bp, synthetic construct
  source 1..39: mol_type = other DNA
tgtgccagcggtgactggggggcctatgaacagtacttc

SEQ ID NO: 26262 - DNA, 42 bp, synthetic construct
  source 1..42: mol_type = other DNA
tgtgctatgtgggcatcctcctccttcagcaagctggtgttt

SEQ ID NO: 26263 - DNA, 42 bp, synthetic construct
  source 1..42: mol_type = other DNA
tgtgccagcggtgagacaggggcctcctccgactacaccttc

SEQ ID NO: 26264 - DNA, 36 bp, synthetic construct
  source 1..36: mol_type = other DNA
tgtgcagcctggactggaggctataaagtggtcttt

SEQ ID NO: 26265 - DNA, 45 bp, synthetic construct
  source 1..45: mol_type = other DNA
tgtgccagcggtgagactgggggtgatgcagaaacgctgtatttt

SEQ ID NO: 26266 - DNA, 42 bp, synthetic construct
  source 1..42: mol_type = other DNA
tgtgcagcaagttctaacacgggttaccagaacttctatttt

SEQ ID NO: 26267 - DNA, 42 bp, synthetic construct
  source 1..42: mol_type = other DNA
tgtgccagcggtgagaggacagtccaagacacccagtacttt

SEQ ID NO: 26268 - DNA, 42 bp, synthetic construct
  source 1..42: mol_type = other DNA
tgtgctttgagtgataataatgcaggtgccaagctcacattc

SEQ ID NO: 26269 - DNA, 36 bp, synthetic construct
  source 1..36: mol_type = other DNA
tgtgccagcggtgagagtcaaaacaccttgtacttt

SEQ ID NO: 26270 - DNA, 42 bp, synthetic construct
  source 1..42: mol_type = other DNA
tgtgctctgagtgatggcacgggttaccagaacttctatttt

SEQ ID NO: 26271 - DNA, 45 bp, synthetic construct
  source 1..45: mol_type = other DNA
tgtgccagcggtgagggactgggggggcgcgaaacgctgtatttt

SEQ ID NO: 26272 - DNA, 42 bp, synthetic construct
  source 1..42: mol_type = other DNA
tgtgctatgagagagggcgagggaggcagagctctgatattt

SEQ ID NO: 26273 - DNA, 48 bp, synthetic construct
  source 1..48: mol_type = other DNA
tgtgccagcggtgagggactgggggggcgcggtgacacccagtacttt

SEQ ID NO: 26274 - DNA, 48 bp, synthetic construct
  source 1..48: mol_type = other DNA
tgcattgtgactgacccctggggatccaataccaacaaagtcgtcttt

SEQ ID NO: 26275 - DNA, 42 bp, synthetic construct
  source 1..42: mol_type = other DNA
tgtgccagcggtgaggggcaggggaacacagaagtcttcttt

SEQ ID NO: 26276 - DNA, 45 bp, synthetic construct
  source 1..45: mol_type = other DNA
tgtgctatgagagagggagactacagcaacaacagacttactttg

SEQ ID NO: 26277 - DNA, 39 bp, synthetic construct
  source 1..39: mol_type = other DNA
tgtgccagcggtgagggggaaaccacagaagtcttcttt

SEQ ID NO: 26278 - DNA, 48 bp, synthetic construct
  source 1..48: mol_type = other DNA
tgctcagccccaggggcccctaacagtgcagggaacaagctaactttt

SEQ ID NO: 26279 - DNA, 42 bp, synthetic construct
  source 1..42: mol_type = other DNA
tgtgccagcggtgagggggcagcaaacacagaagtcttcttt

SEQ ID NO: 26280 - DNA, 45 bp, synthetic construct
  source 1..45: mol_type = other DNA
tgtgctctgagtgatgggacttctggcagctggcaactcatcttt

SEQ ID NO: 26281 - DNA, 39 bp, synthetic construct
  source 1..39: mol_type = other DNA
tgtgccagcggtgataactggggggacacccagtacttt

SEQ ID NO: 26282 - DNA, 42 bp, synthetic construct
  source 1..42: mol_type = other DNA
tgtgctttgagtgatcaaggagggtctgcgaagctcatcttt

SEQ ID NO: 26283 - DNA, 39 bp, synthetic construct
  source 1..39: mol_type = other DNA
tgtgccagcggtgatacaggggactccgactacaccttc

SEQ ID NO: 26284 - DNA, 48 bp, synthetic construct
  source 1..48: mol_type = other DNA
tgtgctctggtctcttattatgggagcagtggcaacaagctcatcttt

SEQ ID NO: 26285 - DNA, 39 bp, synthetic construct
  source 1..39: mol_type = other DNA
tgtgccagcggtgatccaggcgatgctgagcagttcttc

SEQ ID NO: 26286 - DNA, 42 bp, synthetic construct
  source 1..42: mol_type = other DNA
tgtgctatggaacctggtacaggaaactacaaatacgtcttt

SEQ ID NO: 26287 - DNA, 39 bp, synthetic construct
  source 1..39: mol_type = other DNA
tgtgccagcggtgatccagggaactccgactacaccttc

SEQ ID NO: 26288 - DNA, 39 bp, synthetic construct
  source 1..39: mol_type = other DNA
tgtgttttgagcgtaaccaatacaggcaaattaaccttt

SEQ ID NO: 26289 - DNA, 42 bp, synthetic construct
  source 1..42: mol_type = other DNA
tgtgccagcggtgatctgggggggcactatgaacagtacttc

SEQ ID NO: 26290 - DNA, 39 bp, synthetic construct
  source 1..39: mol_type = other DNA
tgtgcgcccgcatcttctggcagctggcaactcatcttt

SEQ ID NO: 26291 - DNA, 42 bp, synthetic construct
  source 1..42: mol_type = other DNA
tgtgccagcggtgatgactgggatcaaaacaccttgtacttt

SEQ ID NO: 26292 - DNA, 39 bp, synthetic construct
  source 1..39: mol_type = other DNA
tgtgctgtgaagggtaatgcaggtgccaagctcacattc

SEQ ID NO: 26293 - DNA, 39 bp, synthetic construct
  source 1..39: mol_type = other DNA
tgtgccagcggtgatgcagagtgggacacccagtacttt

SEQ ID NO: 26294 - DNA, 45 bp, synthetic construct
  source 1..45: mol_type = other DNA
tgtgctatgagtgctgcatcttctggcagctggcaactcatcttt

SEQ ID NO: 26295 - DNA, 39 bp, synthetic construct
  source 1..39: mol_type = other DNA
tgtgccagcggtgatgcagggaactccgactacaccttc

SEQ ID NO: 26296 - DNA, 39 bp, synthetic construct
  source 1..39: mol_type = other DNA
tgtgctctgaggccgaacatgggctacaaacttaccttc

SEQ ID NO: 26297 - DNA, 42 bp, synthetic construct
  source 1..42: mol_type = other DNA
tgtgccagcggtgatgcagggatacaagacacccagtacttt

SEQ ID NO: 26298 - DNA, 30 bp, synthetic construct
  source 1..30: mol_type = other DNA
tgtgcttcctcagccaacaaagtcgtcttt

SEQ ID NO: 26299 - DNA, 45 bp, synthetic construct
  source 1..45: mol_type = other DNA
tgtgccagcggtgatgcagggggcggcaacgaaagattatttttc

SEQ ID NO: 26300 - DNA, 42 bp, synthetic construct
  source 1..42: mol_type = other DNA
tgtgcagcaagtgaatcaggaggaaactacaaacctacgttt

SEQ ID NO: 26301 - DNA, 42 bp, synthetic construct
  source 1..42: mol_type = other DNA
tgtgccagcggtgatgccacctataattcgcccctctacttt

SEQ ID NO: 26302 - DNA, 45 bp, synthetic construct
  source 1..45: mol_type = other DNA
tgtgctatgagagacgagggcagtgcagggaacaagctaactttt

SEQ ID NO: 26303 - DNA, 39 bp, synthetic construct
  source 1..39: mol_type = other DNA
tgtgccagcggtgatgcggcagaaaacaccttgtacttt

SEQ ID NO: 26304 - DNA, 39 bp, synthetic construct
  source 1..39: mol_type = other DNA
tgtgctatggatacaggaggtgcagatagactcaccttt

SEQ ID NO: 26305 - DNA, 42 bp, synthetic construct
  source 1..42: mol_type = other DNA
tgtgccagcggtgatgcggggagtgcagaaacgctgtatttt

SEQ ID NO: 26306 - DNA, 36 bp, synthetic construct
  source 1..36: mol_type = other DNA
tgtgctttgtcttctggcagctggcaactcatcttt

SEQ ID NO: 26307 - DNA, 45 bp, synthetic construct
  source 1..45: mol_type = other DNA
tgtgccagcggtgatgcggggggaagtgcagaaacgctgtatttt

SEQ ID NO: 26308 - DNA, 42 bp, synthetic construct
  source 1..42: mol_type = other DNA
tgtgcagcaagtcccaacacgggttaccagaacttctatttt

SEQ ID NO: 26309 - DNA, 45 bp, synthetic construct
  source 1..45: mol_type = other DNA
tgtgccagcggtgatgcgggggggcgccaaaacaccttgtacttt

SEQ ID NO: 26310 - DNA, 42 bp, synthetic construct
  source 1..42: mol_type = other DNA
tgtgcagcaagtgcagatacaggaaactacaaatacgtcttt

SEQ ID NO: 26311 - DNA, 45 bp, synthetic construct
  source 1..45: mol_type = other DNA
tgtgccagcggtgatgctgggggggccaactccgactacaccttc

SEQ ID NO: 26312 - DNA, 42 bp, synthetic construct
  source 1..42: mol_type = other DNA
tgtgctccccaacagaacacgggttaccagaacttctatttt

SEQ ID NO: 26313 - DNA, 42 bp, synthetic construct
  source 1..42: mol_type = other DNA
tgtgccagcggtgatggaccttgggacacagaagtcttcttt

SEQ ID NO: 26314 - DNA, 36 bp, synthetic construct
  source 1..36: mol_type = other DNA
tgtatcctgaggggcactgggtctaagctgtcattt

SEQ ID NO: 26315 - DNA, 45 bp, synthetic construct
  source 1..45: mol_type = other DNA
tgtgccagcggtgatgtgactgggggggcgcgagaacagtacttc

SEQ ID NO: 26316 - DNA, 45 bp, synthetic construct
  source 1..45: mol_type = other DNA
tgtgctatgagagagggccacacgggttaccagaacttctatttt

SEQ ID NO: 26317 - DNA, 42 bp, synthetic construct
  source 1..42: mol_type = other DNA
tgtgccagcggtgatgtgctgggggggattgaacagtacttc

SEQ ID NO: 26318 - DNA, 45 bp, synthetic construct
  source 1..45: mol_type = other DNA
tgtgctatgagagaggatgactcgggatacaacaaactcactttt

SEQ ID NO: 26319 - DNA, 48 bp, synthetic construct
  source 1..48: mol_type = other DNA
tgtgccagcggtgatgtgggacaggggttctatgctgagcagttcttc

SEQ ID NO: 26320 - DNA, 36 bp, synthetic construct
  source 1..36: mol_type = other DNA
tgtgcagttaactacagcaacaacagacttactttg

SEQ ID NO: 26321 - DNA, 48 bp, synthetic construct
  source 1..48: mol_type = other DNA
tgtgccagcggtgatgtggggggcgctcacaccgggcagctctacttt

SEQ ID NO: 26322 - DNA, 42 bp, synthetic construct
  source 1..42: mol_type = other DNA
tgtgcagcaagtaaggcaggcaatactagaaaactcatcttt

SEQ ID NO: 26323 - DNA, 48 bp, synthetic construct
  source 1..48: mol_type = other DNA
tgtgccagcggtgatgtgggggggcacaacaccgggcagctctacttt

SEQ ID NO: 26324 - DNA, 42 bp, synthetic construct
  source 1..42: mol_type = other DNA
tgtgcagcaagcacggcaggcaatactagaaaactcatcttt

SEQ ID NO: 26325 - DNA, 51 bp, synthetic construct
  source 1..51: mol_type = other DNA
tgtgccagcggtgatgttgagactgggggtagtcaaaacaccttgtacttt

SEQ ID NO: 26326 - DNA, 42 bp, synthetic construct
  source 1..42: mol_type = other DNA
tgtgcagtgagcccctggactggaggctataaagtggtcttt

SEQ ID NO: 26327 - DNA, 42 bp, synthetic construct
  source 1..42: mol_type = other DNA
tgtgccagcggtgattccctttctggaaatacgctctatttt

SEQ ID NO: 26328 - DNA, 48 bp, synthetic construct
  source 1..48: mol_type = other DNA
tgtgctttgagtggagatagaggttcagccttagggaggctgcatttt

SEQ ID NO: 26329 - DNA, 45 bp, synthetic construct
  source 1..45: mol_type = other DNA
tgtgccagcggtgattctgggggggttgcagaaacgctgtatttt

SEQ ID NO: 26330 - DNA, 48 bp, synthetic construct
  source 1..48: mol_type = other DNA
tgtgcagcaaaagggatagcatcctcctccttcagcaagctggtgttt

SEQ ID NO: 26331 - DNA, 39 bp, synthetic construct
  source 1..39: mol_type = other DNA
tgtgccagcggtgatttatcagcagaaacgctgtatttt

SEQ ID NO: 26332 - DNA, 39 bp, synthetic construct
  source 1..39: mol_type = other DNA
tgtgctttgagttcaaattctgggacttaccagaggttt

SEQ ID NO: 26333 - DNA, 36 bp, synthetic construct
  source 1..36: mol_type = other DNA
tgtgccagcggtgcctgggggggcgaacagtacttc

SEQ ID NO: 26334 - DNA, 42 bp, synthetic construct
  source 1..42: mol_type = other DNA
tgtgctacccccgctgacacaaatgcttacaaagtcatcttt

SEQ ID NO: 26335 - DNA, 39 bp, synthetic construct
  source 1..39: mol_type = other DNA
tgtgccagcggtggacagggggcctatgaacagtacttc

SEQ ID NO: 26336 - DNA, 39 bp, synthetic construct
  source 1..39: mol_type = other DNA
tgcgcagtccgtactggcagtggtggaaaactcactttg

SEQ ID NO: 26337 - DNA, 45 bp, synthetic construct
  source 1..45: mol_type = other DNA
tgtgccagcggtgggccgggactgggttcagaaacgctgtatttt

SEQ ID NO: 26338 - DNA, 39 bp, synthetic construct
  source 1..39: mol_type = other DNA
tgtgctggttatgggggcagtggcaacaagctcatcttt

SEQ ID NO: 26339 - DNA, 33 bp, synthetic construct
  source 1..33: mol_type = other DNA
tgtgccagcggtggggacagggaggtcttcttt

SEQ ID NO: 26340 - DNA, 39 bp, synthetic construct
  source 1..39: mol_type = other DNA
tgtgttctgggtgatcacagcaacaacagacttactttg

SEQ ID NO: 26341 - DNA, 36 bp, synthetic construct
  source 1..36: mol_type = other DNA
tgtgccagcggttactgggggaatgaacagtacttc

SEQ ID NO: 26342 - DNA, 48 bp, synthetic construct
  source 1..48: mol_type = other DNA
tgtgctatgagaggtatggctactggaggcaataataagctgactttt

SEQ ID NO: 26343 - DNA, 42 bp, synthetic construct
  source 1..42: mol_type = other DNA
tgtgccagcactccgggacagagctcctatgaacagtacttc

SEQ ID NO: 26344 - DNA, 42 bp, synthetic construct
  source 1..42: mol_type = other DNA
tgtgcagcaatgttatctggtagcttcaataagttgaccttt

SEQ ID NO: 26345 - DNA, 39 bp, synthetic construct
  source 1..39: mol_type = other DNA
tgtgccagcagggacagctctggaaatacgctctatttt

SEQ ID NO: 26346 - DNA, 39 bp, synthetic construct
  source 1..39: mol_type = other DNA
tgtgctctgagcatgttgggaggcagagctctgatattt

SEQ ID NO: 26347 - DNA, 36 bp, synthetic construct
  source 1..36: mol_type = other DNA
tgtgccagcagggataacaaccaggctccgcttttt

SEQ ID NO: 26348 - DNA, 45 bp, synthetic construct
  source 1..45: mol_type = other DNA
tgtgcagctagtaagacatcctcctccttcagcaagctggtgttt

SEQ ID NO: 26349 - DNA, 36 bp, synthetic construct
  source 1..36: mol_type = other DNA
tgtgccagcagtacaaacaaccaggctccgcttttt

SEQ ID NO: 26350 - DNA, 39 bp, synthetic construct
  source 1..39: mol_type = other DNA
tgtgctatgagggcttccaataccgacaaagtcgtcttt

SEQ ID NO: 26351 - DNA, 45 bp, synthetic construct
  source 1..45: mol_type = other DNA
tgtgccagcagtgaaatgggggggcgccaagacacccagtacttt

SEQ ID NO: 26352 - DNA, 48 bp, synthetic construct
  source 1..48: mol_type = other DNA
tgtgctctggttgagggggctactggaggcaataataagctgactttt

SEQ ID NO: 26353 - DNA, 39 bp, synthetic construct
  source 1..39: mol_type = other DNA
tgtgccagcagtgaagggacaaaccaggctccgcttttt

SEQ ID NO: 26354 - DNA, 42 bp, synthetic construct
  source 1..42: mol_type = other DNA
tgtgctctgagtgatcaaggagggtctgcgaagctcatcttt

SEQ ID NO: 26355 - DNA, 54 bp, synthetic construct
  source 1..54: mol_type = other DNA
tgtgccagcagtgaagggacagggaggattgattctggaaatacgctctatttt

SEQ ID NO: 26356 - DNA, 48 bp, synthetic construct
  source 1..48: mol_type = other DNA
tgtgctatgagagaggtcactggagctaacactggaaagctcacgttt

SEQ ID NO: 26357 - DNA, 39 bp, synthetic construct
  source 1..39: mol_type = other DNA
tgtgccagcagtgacagtgcaaacacagaagtcttcttt

SEQ ID NO: 26358 - DNA, 42 bp, synthetic construct
  source 1..42: mol_type = other DNA
tgtgctatgagagagggaggagggtctgcgaagctcatcttt

SEQ ID NO: 26359 - DNA, 45 bp, synthetic construct
  source 1..45: mol_type = other DNA
tgtgccagcagtgacctggggggaagtgcagaaacgctgtatttt

SEQ ID NO: 26360 - DNA, 39 bp, synthetic construct
  source 1..39: mol_type = other DNA
tgtgcagtgagcggggatagcaactatcagttgatctgg

SEQ ID NO: 26361 - DNA, 39 bp, synthetic construct
  source 1..39: mol_type = other DNA
tgtgccagcagtgactcaagctcctatgaacagtacttc

SEQ ID NO: 26362 - DNA, 42 bp, synthetic construct
  source 1..42: mol_type = other DNA
tgtgctgcaagtgaggggggagggtctgcgaagctcatcttt

SEQ ID NO: 26363 - DNA, 36 bp, synthetic construct
  source 1..36: mol_type = other DNA
tgtgccagcagtgactggcaaaacaccttgtacttt

SEQ ID NO: 26364 - DNA, 39 bp, synthetic construct
  source 1..39: mol_type = other DNA
tgtgcttcagatcaaggagggtctgcgaagctcatcttt

SEQ ID NO: 26365 - DNA, 33 bp, synthetic construct
  source 1..33: mol_type = other DNA
tgtgccagcagtgacttcagggggggcttcttt

SEQ ID NO: 26366 - DNA, 42 bp, synthetic construct
  source 1..42: mol_type = other DNA
tgtgctctgagttctggaggaagcaatgcaaagctaaccttc

SEQ ID NO: 26367 - DNA, 48 bp, synthetic construct
  source 1..48: mol_type = other DNA
tgtgccagcagtgagactgggggggctagtgcagaaacgctgtatttt

SEQ ID NO: 26368 - DNA, 45 bp, synthetic construct
  source 1..45: mol_type = other DNA
tgtgttctgggtgatcgagggcagggaggcagagctctgatattt

SEQ ID NO: 26369 - DNA, 51 bp, synthetic construct
  source 1..51: mol_type = other DNA
tgtgccagcagtgagcggctggggccttcaaacaccgggcagctctacttt

SEQ ID NO: 26370 - DNA, 42 bp, synthetic construct
  source 1..42: mol_type = other DNA
tgcattgtgactgacagaggctttgcaagtgcgctgacattt

SEQ ID NO: 26371 - DNA, 45 bp, synthetic construct
  source 1..45: mol_type = other DNA
tgtgccagcagtgaggggacagggggctatgctgagcagttcttc

SEQ ID NO: 26372 - DNA, 33 bp, synthetic construct
  source 1..33: mol_type = other DNA
tgtgcagtgaggggcagctggcaactcatcttt

SEQ ID NO: 26373 - DNA, 42 bp, synthetic construct
  source 1..42: mol_type = other DNA
tgtgccagcagtgaggggggggccaacgaaagattatttttc

SEQ ID NO: 26374 - DNA, 45 bp, synthetic construct
  source 1..45: mol_type = other DNA
tgtgctctgggggataatgttggtgacaacagtaagctgatttgg

SEQ ID NO: 26375 - DNA, 45 bp, synthetic construct
  source 1..45: mol_type = other DNA
tgtgccagcagtgagtacagggttgcaaacacagaagtcttcttt

SEQ ID NO: 26376 - DNA, 42 bp, synthetic construct
  source 1..42: mol_type = other DNA
tgtgctctgggggtcatggactatgcaaacaagatgatcttt

SEQ ID NO: 26377 - DNA, 42 bp, synthetic construct
  source 1..42: mol_type = other DNA
tgtgccagcagtgagtgggacagcaacgaaagattatttttc

SEQ ID NO: 26378 - DNA, 51 bp, synthetic construct
  source 1..51: mol_type = other DNA
tgtgctatgagagagggcgagggtactggaggcaataataagctgactttt

SEQ ID NO: 26379 - DNA, 36 bp, synthetic construct
  source 1..36: mol_type = other DNA
tgtgccagcagtgataaagggttagaagtcttcttt

SEQ ID NO: 26380 - DNA, 39 bp, synthetic construct
  source 1..39: mol_type = other DNA
tgtgcagttgatgggggcagtggcaacaagctcatcttt

SEQ ID NO: 26381 - DNA, 42 bp, synthetic construct
  source 1..42: mol_type = other DNA
tgtgccagcagtgatccagtttccaacgaaagattatttttc

SEQ ID NO: 26382 - DNA, 42 bp, synthetic construct
  source 1..42: mol_type = other DNA
tgcgcagtcatagcatcctcctccttcagcaagctggtgttt

SEQ ID NO: 26383 - DNA, 42 bp, synthetic construct
  source 1..42: mol_type = other DNA
tgtgccagcagtgatgacaggggatttgctgagcagttcttc

SEQ ID NO: 26384 - DNA, 36 bp, synthetic construct
  source 1..36: mol_type = other DNA
tgtgctttgagtaactatgcccagggattaaccttc

SEQ ID NO: 26385 - DNA, 45 bp, synthetic construct
  source 1..45: mol_type = other DNA
tgtgccagcagtgatgcgggaatttccaacgaaagattatttttc

SEQ ID NO: 26386 - DNA, 33 bp, synthetic construct
  source 1..33: mol_type = other DNA
tgtgcagcaaggtatgcccagggattaaccttc

SEQ ID NO: 26387 - DNA, 45 bp, synthetic construct
  source 1..45: mol_type = other DNA
tgtgccagcagtgatgctctgggggggacagaaacgctgtatttt

SEQ ID NO: 26388 - DNA, 42 bp, synthetic construct
  source 1..42: mol_type = other DNA
tgtgctctgagagggaataatgcaggtgccaagctcacattc

SEQ ID NO: 26389 - DNA, 39 bp, synthetic construct
  source 1..39: mol_type = other DNA
tgtgccagcagtgatgctgcagggagggaacagtacttc

SEQ ID NO: 26390 - DNA, 39 bp, synthetic construct
  source 1..39: mol_type = other DNA
tgtgctctggactacacaaatgcttacaaagtcatcttt

SEQ ID NO: 26391 - DNA, 33 bp, synthetic construct
  source 1..33: mol_type = other DNA
tgtgccagcagtgatggggacaccttgtacttt

SEQ ID NO: 26392 - DNA, 42 bp, synthetic construct
  source 1..42: mol_type = other DNA
tgtgctctgggtgatcgcacaaatgcttacaaagtcatcttt

SEQ ID NO: 26393 - DNA, 39 bp, synthetic construct
  source 1..39: mol_type = other DNA
tgtgccagcagtgatgggggggtcgctgagcagttcttc

SEQ ID NO: 26394 - DNA, 36 bp, synthetic construct
  source 1..36: mol_type = other DNA
tgtgctctgagtgatggaaatgagaaaataactttt

SEQ ID NO: 26395 - DNA, 39 bp, synthetic construct
  source 1..39: mol_type = other DNA
tgtgccagcagtgatggtggaaactccgactacaccttc

SEQ ID NO: 26396 - DNA, 42 bp, synthetic construct
  source 1..42: mol_type = other DNA
tgtgctatgagagagggcgatggaaatgagaaaataactttt

SEQ ID NO: 26397 - DNA, 45 bp, synthetic construct
  source 1..45: mol_type = other DNA
tgtgccagcagtgatgtctgggacagggggtatgaacagtacttc

SEQ ID NO: 26398 - DNA, 42 bp, synthetic construct
  source 1..42: mol_type = other DNA
tgtgcagcaagttccggagctaacactggaaagctcacgttt

SEQ ID NO: 26399 - DNA, 42 bp, synthetic construct
  source 1..42: mol_type = other DNA
tgtgccagcagtgatgttggggcaaactccgactacaccttc

SEQ ID NO: 26400 - DNA, 39 bp, synthetic construct
  source 1..39: mol_type = other DNA
tgtgcagctcatgactcgggatacaacaaactcactttt

SEQ ID NO: 26401 - DNA, 45 bp, synthetic construct
  source 1..45: mol_type = other DNA
tgtgccagcagtgatgttggggggagtgcagaaacgctgtatttt

SEQ ID NO: 26402 - DNA, 42 bp, synthetic construct
  source 1..42: mol_type = other DNA
tgtgcagcaagtgctactggaggcaataataagctgactttt

SEQ ID NO: 26403 - DNA, 42 bp, synthetic construct
  source 1..42: mol_type = other DNA
tgtgccagcagtgatttacaggggaacacagaagtcttcttt

SEQ ID NO: 26404 - DNA, 39 bp, synthetic construct
  source 1..39: mol_type = other DNA
tgtgctatgagatatacaggaaactacaaatacgtcttt

SEQ ID NO: 26405 - DNA, 48 bp, synthetic construct
  source 1..48: mol_type = other DNA
tgtgccagcagtgatttgggggggcgcgactatgctgagcagttcttc

SEQ ID NO: 26406 - DNA, 36 bp, synthetic construct
  source 1..36: mol_type = other DNA
tgtgcagcaaagggcaataccggaaaactcatcttt

SEQ ID NO: 26407 - DNA, 42 bp, synthetic construct
  source 1..42: mol_type = other DNA
tgtgccagcagtgggactgggggggctaacaccttgtacttt

SEQ ID NO: 26408 - DNA, 45 bp, synthetic construct
  source 1..45: mol_type = other DNA
tgtgctgtgagggactcaactgccagtttggggaaactgcagttt

SEQ ID NO: 26409 - DNA, 39 bp, synthetic construct
  source 1..39: mol_type = other DNA
tgtgccagcagtgggagtaactatgctgagcagttcttc

SEQ ID NO: 26410 - DNA, 39 bp, synthetic construct
  source 1..39: mol_type = other DNA
tgtgcagtgagcacaggaggtgcagatagactcaccttt

SEQ ID NO: 26411 - DNA, 39 bp, synthetic construct
  source 1..39: mol_type = other DNA
tgtgccagcagtggggactggggggacacccagtacttt

SEQ ID NO: 26412 - DNA, 42 bp, synthetic construct
  source 1..42: mol_type = other DNA
tgcgcagtcagtgactcaggaggaaactacaaacctacgttt

SEQ ID NO: 26413 - DNA, 45 bp, synthetic construct
  source 1..45: mol_type = other DNA
tgtgccagcagttccgggactggggggacctatgaacagtacttc

SEQ ID NO: 26414 - DNA, 39 bp, synthetic construct
  source 1..39: mol_type = other DNA
tgtgctctgggtgaaaactatgcccagggattaaccttc

SEQ ID NO: 26415 - DNA, 30 bp, synthetic construct
  source 1..30: mol_type = other DNA
tgtgccagcggtcggacagaagtcttcttt

SEQ ID NO: 26416 - DNA, 39 bp, synthetic construct
  source 1..39: mol_type = other DNA
tgtgcagcaagtgcaaattctgggacttaccagaggttt

SEQ ID NO: 26417 - DNA, 45 bp, synthetic construct
  source 1..45: mol_type = other DNA
tgtgccagcacccggacagggggcagggactccgactacaccttc

SEQ ID NO: 26418 - DNA, 36 bp, synthetic construct
  source 1..36: mol_type = other DNA
tgtgctagtaataactatgcccagggattaaccttc

SEQ ID NO: 26419 - DNA, 42 bp, synthetic construct
  source 1..42: mol_type = other DNA
tgtgccagcacgaggggacaaaaatcctatgaacagtacttc

SEQ ID NO: 26420 - DNA, 45 bp, synthetic construct
  source 1..45: mol_type = other DNA
tgtgcagcaagtaggggcaataatgcaggtgccaagctcacattc

SEQ ID NO: 26421 - DNA, 39 bp, synthetic construct
  source 1..39: mol_type = other DNA
tgtgccagcagcccaggggatggaaatacgctctatttt

SEQ ID NO: 26422 - DNA, 36 bp, synthetic construct
  source 1..36: mol_type = other DNA
tgtgcagctagggatagcaactatcagttgatctgg

SEQ ID NO: 26423 - DNA, 39 bp, synthetic construct
  source 1..39: mol_type = other DNA
tgtgccagcagccccgggacagcctatgaacagtacttc

SEQ ID NO: 26424 - DNA, 45 bp, synthetic construct
  source 1..45: mol_type = other DNA
tgtgctatagtccctttaacaggcaatactagaaaactcatcttt

SEQ ID NO: 26425 - DNA, 36 bp, synthetic construct
  source 1..36: mol_type = other DNA
tgtgccagcagcctccagggtacagaagtcttcttt

SEQ ID NO: 26426 - DNA, 45 bp, synthetic construct
  source 1..45: mol_type = other DNA
tgtgctatgagagagggcggaggaagcaatgcaaagctaaccttc

SEQ ID NO: 26427 - DNA, 42 bp, synthetic construct
  source 1..42: mol_type = other DNA
tgtgccagcagcgctgacaggggcggcacagaagtcttcttt

SEQ ID NO: 26428 - DNA, 39 bp, synthetic construct
  source 1..39: mol_type = other DNA
tgtgctgcaagtgcgtataacaacaatgccccacgattt

SEQ ID NO: 26429 - DNA, 36 bp, synthetic construct
  source 1..36: mol_type = other DNA
tgtgccagcagggacaacaccgggcagctctacttt

SEQ ID NO: 26430 - DNA, 42 bp, synthetic construct
  source 1..42: mol_type = other DNA
tgcattgtgactgacacaggctttgcaagtgcgctgacattt

SEQ ID NO: 26431 - DNA, 36 bp, synthetic construct
  source 1..36: mol_type = other DNA
tgtgccagcagggacagggggcgagaacagtacttc

SEQ ID NO: 26432 - DNA, 36 bp, synthetic construct
  source 1..36: mol_type = other DNA
tgtgctgcaagtcccaataccaacaaagtcgtcttt

SEQ ID NO: 26433 - DNA, 39 bp, synthetic construct
  source 1..39: mol_type = other DNA
tgtgccagcaggggactgggggcctatgaacagtacttc

SEQ ID NO: 26434 - DNA, 45 bp, synthetic construct
  source 1..45: mol_type = other DNA
tgtgctatgagagagggcttttctggcagctggcaactcatcttt

SEQ ID NO: 26435 - DNA, 39 bp, synthetic construct
  source 1..39: mol_type = other DNA
tgtgccagcagtactggggggaactatgaacagtacttc

SEQ ID NO: 26436 - DNA, 45 bp, synthetic construct
  source 1..45: mol_type = other DNA
tgtgctgtgagcagtgaagacacgggttaccagaacttctatttt

SEQ ID NO: 26437 - DNA, 45 bp, synthetic construct
  source 1..45: mol_type = other DNA
tgtgccagcagtcccacagggggcgcgggctccgactacaccttc

SEQ ID NO: 26438 - DNA, 45 bp, synthetic construct
  source 1..45: mol_type = other DNA
tgtgctttgagtggggcgatgtctaattacaacgtgctttacttc

SEQ ID NO: 26439 - DNA, 33 bp, synthetic construct
  source 1..33: mol_type = other DNA
tgtgccagcagtgaaacatatgaacagtacttc

SEQ ID NO: 26440 - DNA, 42 bp, synthetic construct
  source 1..42: mol_type = other DNA
tgtgctgtgagcgctgctggcagtggtggaaaactcactttg

SEQ ID NO: 26441 - DNA, 33 bp, synthetic construct
  source 1..33: mol_type = other DNA
tgtgccagcagtgacaactccgactacaccttc

SEQ ID NO: 26442 - DNA, 42 bp, synthetic construct
  source 1..42: mol_type = other DNA
tgtgctgctaacactggagctaacactggaaagctcacgttt

SEQ ID NO: 26443 - DNA, 33 bp, synthetic construct
  source 1..33: mol_type = other DNA
tgtgccagcagtgacagtacagaagtcttcttt

SEQ ID NO: 26444 - DNA, 36 bp, synthetic construct
  source 1..36: mol_type = other DNA
tgtgcagcaagtgagggaaactacaaatacgtcttt

SEQ ID NO: 26445 - DNA, 42 bp, synthetic construct
  source 1..42: mol_type = other DNA
tgtgccagcagtgagcggggtgcaaacacagaagtcttcttt

SEQ ID NO: 26446 - DNA, 42 bp, synthetic construct
  source 1..42: mol_type = other DNA
tgctcagcaagtcccatggactatgcaaacaagatgatcttt

SEQ ID NO: 26447 - DNA, 42 bp, synthetic construct
  source 1..42: mol_type = other DNA
tgtgccagcagtgaggggggctgggcagaaacgctgtatttt

SEQ ID NO: 26448 - DNA, 48 bp, synthetic construct
  source 1..48: mol_type = other DNA
tgtgcagctagtgaggagggtgggggcagtggcaacaagctcatcttt

SEQ ID NO: 26449 - DNA, 42 bp, synthetic construct
  source 1..42: mol_type = other DNA
tgtgccagcagtgatccagggagagacacagaagtcttcttt

SEQ ID NO: 26450 - DNA, 45 bp, synthetic construct
  source 1..45: mol_type = other DNA
tgtgctatgagagagggaggaggaggtgcagatagactcaccttt

SEQ ID NO: 26451 - DNA, 42 bp, synthetic construct
  source 1..42: mol_type = other DNA
tgtgccagcagtgatgaaatttccaacgaaagattatttttc

SEQ ID NO: 26452 - DNA, 42 bp, synthetic construct
  source 1..42: mol_type = other DNA
tgctcagcaagtatgggtaatgcaggtgccaagctcacattc

SEQ ID NO: 26453 - DNA, 39 bp, synthetic construct
  source 1..39: mol_type = other DNA
tgtgccagcagtgatgacgcaaactccgactacaccttc

SEQ ID NO: 26454 - DNA, 45 bp, synthetic construct
  source 1..45: mol_type = other DNA
tgtgctatgagagagggcccctccaataccgacaaagtcgtcttt

SEQ ID NO: 26455 - DNA, 48 bp, synthetic construct
  source 1..48: mol_type = other DNA
tgtgccagcagtgatgcgggcagccattctggaaatacgctctatttt

SEQ ID NO: 26456 - DNA, 51 bp, synthetic construct; identical to SEQ ID NO: 26046
  source 1..51: mol_type = other DNA

SEQ ID NO: 26457 - DNA, 48 bp, synthetic construct
  source 1..48: mol_type = other DNA
tgtgccagcagtgatgggactgggggtagtgcagaaacgctgtatttt

SEQ ID NO: 26458 - DNA, 39 bp, synthetic construct
  source 1..39: mol_type = other DNA
tgcgcagcaggtgcagggggttaccagaacttctatttt

SEQ ID NO: 26459 - DNA, 33 bp, synthetic construct
  source 1..33: mol_type = other DNA
tgtgccagcagtgatgtaggggaacagtacttc

SEQ ID NO: 26460 - DNA, 42 bp, synthetic construct
  source 1..42: mol_type = other DNA
tgtgctgccaattctggaggaagcaatgcaaagctaaccttc

SEQ ID NO: 26461 - DNA, 42 bp, synthetic construct
  source 1..42: mol_type = other DNA
tgtgccagcagtgatgtccgggttaattcgcccctctacttt

SEQ ID NO: 26462 - DNA, 42 bp, synthetic construct
  source 1..42: mol_type = other DNA
tgtgctacagatgggggtaactatgcccagggattaaccttc

SEQ ID NO: 26463 - DNA, 48 bp, synthetic construct
  source 1..48: mol_type = other DNA
tgtgccagcagtggactgggggggcgtggtgcagaaacgctgtatttt

SEQ ID NO: 26464 - DNA, 51 bp, synthetic construct
  source 1..51: mol_type = other DNA
tgtgctatgagagaggtacacactggagctaacactggaaagctcacgttt

SEQ ID NO: 26465 - DNA, 36 bp, synthetic construct
  source 1..36: mol_type = other DNA
tgtgccagcagtggagggggcaatgaacagtacttc

SEQ ID NO: 26466 - DNA, 39 bp, synthetic construct
  source 1..39: mol_type = other DNA
tgctcagcaagtagccagggaggcagagctctgatattt

SEQ ID NO: 26467 - DNA, 45 bp, synthetic construct
  source 1..45: mol_type = other DNA
tgtgccagcagtgggacacttaattctggaaatacgctctatttt

SEQ ID NO: 26468 - DNA, 51 bp, synthetic construct; identical to SEQ ID NO: 26046
  source 1..51: mol_type = other DNA

SEQ ID NO: 26469 - DNA, 39 bp, synthetic construct
  source 1..39: mol_type = other DNA
tgtgccagcagtgggacagcaaactccgactacaccttc

SEQ ID NO: 26470 - DNA, 39 bp, synthetic construct
  source 1..39: mol_type = other DNA
tgtgctttggaagataactatgcccagggattaaccttc

SEQ ID NO: 26471 - DNA, 45 bp, synthetic construct
  source 1..45: mol_type = other DNA
tgtgccagcagtgggcgggactgggaccaagacacccagtacttt

SEQ ID NO: 26472 - DNA, 39 bp, synthetic construct
  source 1..39: mol_type = other DNA
tgcgcagcaggtgaaggcactgggtctaagctgtcattt

SEQ ID NO: 26473 - DNA, 42 bp, synthetic construct
  source 1..42: mol_type = other DNA
tgtgccagcagttcactgggaaacaccgggcagctctacttt

SEQ ID NO: 26474 - DNA, 45 bp, synthetic construct
  source 1..45: mol_type = other DNA
tgtgctatgagagaaagtggaggcagcaattacaaactgacattt

SEQ ID NO: 26475 - DNA, 39 bp, synthetic construct
  source 1..39: mol_type = other DNA
tgtgccagcagttgggggggggctgctgagcagttcttc

SEQ ID NO: 26476 - DNA, 48 bp, synthetic construct
  source 1..48: mol_type = other DNA
tgtgcactggagggccgcagtggaggcagcaattacaaactgacattt

SEQ ID NO: 26477 - DNA, 33 bp, synthetic construct
  source 1..33: mol_type = other DNA
tgtgccagccgggacaggggcgactacaccttc

SEQ ID NO: 26478 - DNA, 39 bp, synthetic construct
  source 1..39: mol_type = other DNA
tgtgctgctgccaactatggaaatgagaaaataactttt

SEQ ID NO: 26479 - DNA, 33 bp, synthetic construct
  source 1..33: mol_type = other DNA
tgtgccagtacagggggctacaccttgtacttt

SEQ ID NO: 26480 - DNA, 48 bp, synthetic construct
  source 1..48: mol_type = other DNA
tgtgctatgagagagggggatcaaggagggtctgcgaagctcatcttt

SEQ ID NO: 26481 - DNA, 36 bp, synthetic construct
  source 1..36: mol_type = other DNA
tgtgctagcagtaccagggggcgagaacagtacttc

SEQ ID NO: 26482 - DNA, 39 bp, synthetic construct
  source 1..39: mol_type = other DNA
tgtatcctgagagcaaattctgggacttaccagaggttt

SEQ ID NO: 26483 - DNA, 45 bp, synthetic construct
  source 1..45: mol_type = other DNA
tgtgctagcagtagagggacaggggttggaaatacgctctatttt

SEQ ID NO: 26484 - DNA, 48 bp, synthetic construct
  source 1..48: mol_type = other DNA
tgtgctctgagtgccctaacctcaggaggaaactacaaacctacgttt

SEQ ID NO: 26485 - DNA, 45 bp, synthetic construct
  source 1..45: mol_type = other DNA
tgtgctagcagtagaggggactgggggctctatgaacagtacttc

SEQ ID NO: 26486 - DNA, 48 bp, synthetic construct
  source 1..48: mol_type = other DNA
tgcgctctctcggaaccgagaggttcagccttagggaggctgcatttt

SEQ ID NO: 26487 - DNA, 42 bp, synthetic construct
  source 1..42: mol_type = other DNA
tgtgctagcagtagcggccagggaaacacagaagtcttcttt

SEQ ID NO: 26488 - DNA, 33 bp, synthetic construct
  source 1..33: mol_type = other DNA
tgtgctgctgacggcaataacagaatcttcttt

SEQ ID NO: 26489 - DNA, 36 bp, synthetic construct
  source 1..36: mol_type = other DNA
tgtgctagcagtcgggacagggacgaacagtacttc

SEQ ID NO: 26490 - DNA, 45 bp, synthetic construct
  source 1..45: mol_type = other DNA
tgtgctatgagagagggcgcaggcactgggtctaagctgtcattt

SEQ ID NO: 26491 - DNA, 36 bp, synthetic construct
  source 1..36: mol_type = other DNA
tgtgctagcagtgccctacgcacagaagtcttcttt

SEQ ID NO: 26492 - DNA, 42 bp, synthetic construct
  source 1..42: mol_type = other DNA
tgcgctctgagtgcatcttctggcagctggcaactcatcttt

SEQ ID NO: 26493 - DNA, 42 bp, synthetic construct
  source 1..42: mol_type = other DNA
tgtgctagcagttccgggacaaacaccgggcagctctacttt

SEQ ID NO: 26494 - DNA, 42 bp, synthetic construct
  source 1..42: mol_type = other DNA
tgtgctctgggtgatcgtgccagtttggggaaactgcagttt

SEQ ID NO: 26495 - DNA, 42 bp, synthetic construct
  source 1..42: mol_type = other DNA
tgtgctagcagttccgggactagctcctatgaacagtacttc

SEQ ID NO: 26496 - DNA, 39 bp, synthetic construct
  source 1..39: mol_type = other DNA
tgtgcagcagcatcttctggcagctggcaactcatcttt

SEQ ID NO: 26497 - DNA, 39 bp, synthetic construct
  source 1..39: mol_type = other DNA
tgtgccagcagtttagacaacaccgggcagctctacttt

SEQ ID NO: 26498 - DNA, 48 bp, synthetic construct
  source 1..48: mol_type = other DNA
tgtgctatgagagtcacctatgggggcagtggcaacaagctcatcttt

SEQ ID NO: 26499 - DNA, 54 bp, synthetic construct
  source 1..54: mol_type = other DNA
tgtgccagcagtttggggacagggggccccttttccaacgaaagattatttttc

SEQ ID NO: 26500 - DNA, 42 bp, synthetic construct
  source 1..42: mol_type = other DNA
tgtgctatgagagagggcgagggcaataacagaatcttcttt

SEQ ID NO: 26501 - DNA, 48 bp, synthetic construct
  source 1..48: mol_type = other DNA
tgtgcctggactctgactgggggggctagtcaaaacaccttgtacttt

SEQ ID NO: 26502 - DNA, 39 bp, synthetic construct
  source 1..39: mol_type = other DNA
tgtgcagcaagcgggtacagcaacaacagacttactttg

SEQ ID NO: 26503 - DNA, 42 bp, synthetic construct
  source 1..42: mol_type = other DNA
tgtgcctggagatccgggacagcaaacacagaagtcttcttt

SEQ ID NO: 26504 - DNA, 39 bp, synthetic construct
  source 1..39: mol_type = other DNA
tgtgctatagaaaggaacatgggctacaaacttaccttc

SEQ ID NO: 26505 - DNA, 42 bp, synthetic construct
  source 1..42: mol_type = other DNA
tgtgcctggagcccgggactggggtcttatgaacagtacttc

SEQ ID NO: 26506 - DNA, 42 bp, synthetic construct
  source 1..42: mol_type = other DNA
tgtgctttgagtgcatcttctggcagctggcaactcatcttt

SEQ ID NO: 26507 - DNA, 42 bp, synthetic construct
  source 1..42: mol_type = other DNA
tgtgcctggagcctaggggtggccaacgaaagattatttttc

SEQ ID NO: 26508 - DNA, 42 bp, synthetic construct
  source 1..42: mol_type = other DNA
tgtgcttccaattctggaggaagcaatgcaaagctaaccttc

SEQ ID NO: 26509 - DNA, 36 bp, synthetic construct
  source 1..36: mol_type = other DNA
tgtgcctggagtaacagggggtatgaacagtacttc

SEQ ID NO: 26510 - DNA, 42 bp, synthetic construct
  source 1..42: mol_type = other DNA
tgcgcagtcagcgatacaggaggtgcagatagactcaccttt

SEQ ID NO: 26511 - DNA, 42 bp, synthetic construct
  source 1..42: mol_type = other DNA
tgtgcctggagtcaacgggacaggggttatgaacagtacttc

SEQ ID NO: 26512 - DNA, 42 bp, synthetic construct
  source 1..42: mol_type = other DNA
tgtgcagtgagggtatctggtagcttcaataagttgaccttt

SEQ ID NO: 26513 - DNA, 42 bp, synthetic construct
  source 1..42: mol_type = other DNA
tgtgcctggagtctagacaattctggaaatacgctctatttt

SEQ ID NO: 26514 - DNA, 42 bp, synthetic construct
  source 1..42: mol_type = other DNA
tgcgcagtcagtgcatcttctggcagctggcaactcatcttt

SEQ ID NO: 26515 - DNA, 42 bp, synthetic construct
  source 1..42: mol_type = other DNA
tgtgcctggagtcttgagggggaaccctatgaacagtacttc

SEQ ID NO: 26516 - DNA, 42 bp, synthetic construct
  source 1..42: mol_type = other DNA
tgcgcagtcagtgcgggctacagcaacaacagacttactttg

SEQ ID NO: 26517 - DNA, 36 bp, synthetic construct
  source 1..36: mol_type = other DNA
tgtgcctggagttacatgaactccgactacaccttc

SEQ ID NO: 26518 - DNA, 45 bp, synthetic construct
  source 1..45: mol_type = other DNA
tgtgctatgagagtcgcatcttctggcagctggcaactcatcttt

SEQ ID NO: 26519 - DNA, 42 bp, synthetic construct
  source 1..42: mol_type = other DNA
tgtgccagcagcccctactggggggcctatgaacagtacttc

SEQ ID NO: 26520 - DNA, 45 bp, synthetic construct
  source 1..45: mol_type = other DNA
tgtgctctgagtgaaactggaggaagcaatgcaaagctaaccttc

SEQ ID NO: 26521 - DNA, 39 bp, synthetic construct
  source 1..39: mol_type = other DNA
tgtgccagcagccctgactggggggacacccagtacttt

SEQ ID NO: 26522 - DNA, 39 bp, synthetic construct
  source 1..39: mol_type = other DNA
tgtgttttgagcgactatggaaatgagaaaataactttt

SEQ ID NO: 26523 - DNA, 42 bp, synthetic construct
  source 1..42: mol_type = other DNA
tgtgccagcaggggggacagagccaacgaaagattatttttc

SEQ ID NO: 26524 - DNA, 39 bp, synthetic construct
  source 1..39: mol_type = other DNA
tgtgctacagatacagaaggtgcagatagactcaccttt

SEQ ID NO: 26525 - DNA, 33 bp, synthetic construct
  source 1..33: mol_type = other DNA
tgtgccagcagcgaaaacgaaagattatttttc

SEQ ID NO: 26526 - DNA, 39 bp, synthetic construct
  source 1..39: mol_type = other DNA
tgtgcagtgcctaacagtgcagggaacaagctaactttt

SEQ ID NO: 26527 - DNA, 39 bp, synthetic construct
  source 1..39: mol_type = other DNA
tgtgccagcagcgggactttctatgctgagcagttcttc

SEQ ID NO: 26528 - DNA, 36 bp, synthetic construct
  source 1..36: mol_type = other DNA
tgtgctaccaactatggaaatgagaaaataactttt

SEQ ID NO: 26529 - DNA, 36 bp, synthetic construct
  source 1..36: mol_type = other DNA
tgtgccagcagggacaactatgctgagcagttcttc

SEQ ID NO: 26530 - DNA, 36 bp, synthetic construct
  source 1..36: mol_type = other DNA
tgtgcagcaaggactggaggctataaagtggtcttt

SEQ ID NO: 26531 - DNA, 39 bp, synthetic construct
  source 1..39: mol_type = other DNA
tgtgccagcagggacaataacaaccaggctccgcttttt

SEQ ID NO: 26532 - DNA, 48 bp, synthetic construct
  source 1..48: mol_type = other DNA
tgcgctctgagtgatcctctctaccagggaggcagagctctgatattt

SEQ ID NO: 26533 - DNA, 45 bp, synthetic construct
  source 1..45: mol_type = other DNA
tgtgccagcagtaccgggacaggggataattcgcccctctacttt

SEQ ID NO: 26534 - DNA, 39 bp, synthetic construct; identical to SEQ ID NO: 26034
  source 1..39: mol_type = other DNA

SEQ ID NO: 26535 - DNA, 39 bp, synthetic construct
  source 1..39: mol_type = other DNA
tgtgccagcagtaccggggtatgggacaccttgtacttt

SEQ ID NO: 26536 - DNA, 36 bp, synthetic construct
  source 1..36: mol_type = other DNA
tgtgctgtgagcgctggcaacaatgccccacgattt

SEQ ID NO: 26537 - DNA, 45 bp, synthetic construct
  source 1..45: mol_type = other DNA
tgtgccagcagtaggacgacaggaccaaactccgactacaccttc

SEQ ID NO: 26538 - DNA, 36 bp, synthetic construct
  source 1..36: mol_type = other DNA
tgtgcccttgacacaaatgcttacaaagtcatcttt

SEQ ID NO: 26539 - DNA, 42 bp, synthetic construct
  source 1..42: mol_type = other DNA
tgtgccagcagtataaccagtgcaaacacagaagtcttcttt

SEQ ID NO: 26540 - DNA, 39 bp, synthetic construct
  source 1..39: mol_type = other DNA
tgtgctgacactggagctaacactggaaagctcacgttt

SEQ ID NO: 26541 - DNA, 42 bp, synthetic construct
  source 1..42: mol_type = other DNA
tgtgccagcagtatacggggatggggcacagaagtcttcttt

SEQ ID NO: 26542 - DNA, 39 bp, synthetic construct
  source 1..39: mol_type = other DNA
tgtgcagcaagtggagggggttaccagaacttctatttt

SEQ ID NO: 26543 - DNA, 42 bp, synthetic construct
  source 1..42: mol_type = other DNA
tgtgccagcagtatagagggacgttacacagaagtcttcttt

SEQ ID NO: 26544 - DNA, 39 bp, synthetic construct
  source 1..39: mol_type = other DNA
tgtgctatgagagaggcgggttaccagaacttctatttt

SEQ ID NO: 26545 - DNA, 39 bp, synthetic construct
  source 1..39: mol_type = other DNA
tgtgccagcagtatagggggcagagacacccagtacttt

SEQ ID NO: 26546 - DNA, 39 bp, synthetic construct
  source 1..39: mol_type = other DNA
tgtgctgctgggacggactatgcaaacaagatgatcttt

SEQ ID NO: 26547 - DNA, 36 bp, synthetic construct
  source 1..36: mol_type = other DNA
tgtgccagcagtatcgggatctatgaacagtacttc

SEQ ID NO: 26548 - DNA, 39 bp, synthetic construct
  source 1..39: mol_type = other DNA
tgtgctatgaggaacagtgcagggaacaagctaactttt

SEQ ID NO: 26549 - DNA, 42 bp, synthetic construct
  source 1..42: mol_type = other DNA
tgtgccagcagtatgagggggggggcggaggaacagtacttc

SEQ ID NO: 26550 - DNA, 39 bp, synthetic construct
  source 1..39: mol_type = other DNA
tgtgctactgagaacaacatgggctacaaacttaccttc

SEQ ID NO: 26551 - DNA, 36 bp, synthetic construct
  source 1..36: mol_type = other DNA
tgtgccagcagtatggggacaaaagaagtcttcttt

SEQ ID NO: 26552 - DNA, 42 bp, synthetic construct
  source 1..42: mol_type = other DNA
tgtgctatgaaggaggacaccaatacaggcaaattaaccttt

SEQ ID NO: 26553 - DNA, 42 bp, synthetic construct
  source 1..42: mol_type = other DNA
tgtgccagcagtatggggacaggggttgctgagcagttcttc

SEQ ID NO: 26554 - DNA, 51 bp, synthetic construct
  source 1..51: mol_type = other DNA
tgtgcactggagggccggaacagtggaggcagcaattacaaactgacattt

SEQ ID NO: 26555 - DNA, 39 bp, synthetic construct
  source 1..39: mol_type = other DNA
tgtgccagcagtatgggggcaaactccgactacaccttc

SEQ ID NO: 26556 - DNA, 45 bp, synthetic construct
  source 1..45: mol_type = other DNA
tgtgcagcaagcacacgtggaggcagcaattacaaactgacattt

SEQ ID NO: 26557 - DNA, 39 bp, synthetic construct
  source 1..39: mol_type = other DNA
tgtgccagcagtatggggggggccacagaagtcttcttt

SEQ ID NO: 26558 - DNA, 45 bp, synthetic construct
  source 1..45: mol_type = other DNA
tgtgcagcaagcaggagtggaggcagcaattacaaactgacattt

SEQ ID NO: 26559 - DNA, 42 bp, synthetic construct
  source 1..42: mol_type = other DNA
tgtgccagcagtatggtgggaaacaccgggcagctctacttt

SEQ ID NO: 26560 - DNA, 42 bp, synthetic construct
  source 1..42: mol_type = other DNA
tgtgcagcccccactggagctaacactggaaagctcacgttt

SEQ ID NO: 26561 - DNA, 36 bp, synthetic construct
  source 1..36: mol_type = other DNA
tgtgccagcagtatgtcgggcacagaagtcttcttt

SEQ ID NO: 26562 - DNA, 48 bp, synthetic construct
  source 1..48: mol_type = other DNA
tgtgctctgagggctaattctggaggaagcaatgcaaagctaaccttc

SEQ ID NO: 26563 - DNA, 39 bp, synthetic construct
  source 1..39: mol_type = other DNA
tgtgccagcagtatgtgggacacctcagaagtcttcttt

SEQ ID NO: 26564 - DNA, 45 bp, synthetic construct
  source 1..45: mol_type = other DNA
tgtgctctggggaacagtggaggcagcaattacaaactgacattt

SEQ ID NO: 26565 - DNA, 45 bp, synthetic construct
  source 1..45: mol_type = other DNA
tgtgccagcagtattacaggaacaaacaccgggcagctctacttt

SEQ ID NO: 26566 - DNA, 39 bp, synthetic construct
  source 1..39: mol_type = other DNA
tgcgcagtcagtgcctatggaaatgagaaaataactttt

SEQ ID NO: 26567 - DNA, 33 bp, synthetic construct
  source 1..33: mol_type = other DNA
tgtgccagcagtattagcgaaagattatttttc

SEQ ID NO: 26568 - DNA, 42 bp, synthetic construct
  source 1..42: mol_type = other DNA
tgtgcagcccctgccaactatggaaatgagaaaataactttt

SEQ ID NO: 26569 - DNA, 42 bp, synthetic construct
  source 1..42: mol_type = other DNA
tgtgccagcagtattggcaataaccaagacacccagtacttt

SEQ ID NO: 26570 - DNA, 36 bp, synthetic construct
  source 1..36: mol_type = other DNA
tgtgttttgagcgcgagcaataacagaatcttcttt

SEQ ID NO: 26571 - DNA, 39 bp, synthetic construct
  source 1..39: mol_type = other DNA
tgtgccagcagtattgggacagcttatgaacagtacttc

SEQ ID NO: 26572 - DNA, 36 bp, synthetic construct
  source 1..36: mol_type = other DNA
tgtgctctaaactatggaaatgagaaaataactttt

SEQ ID NO: 26573 - DNA, 42 bp, synthetic construct
  source 1..42: mol_type = other DNA
tgtgccagcagtattttgggggaccaagacacccagtacttt

SEQ ID NO: 26574 - DNA, 39 bp, synthetic construct
  source 1..39: mol_type = other DNA
tgtgctgtgagcgcttctggcagctggcaactcatcttt

SEQ ID NO: 26575 - DNA, 45 bp, synthetic construct
  source 1..45: mol_type = other DNA
tgtgccagcagtcactgggggggagacaccgggcagctctacttt

SEQ ID NO: 26576 - DNA, 42 bp, synthetic construct
  source 1..42: mol_type = other DNA
tgtgctgtgagcgcggaggaaagcaactatcagttgatctgg

SEQ ID NO: 26577 - DNA, 39 bp, synthetic construct
  source 1..39: mol_type = other DNA
tgtgccagcagtccaacagggcgggatgaacagtacttc

SEQ ID NO: 26578 - DNA, 36 bp, synthetic construct
  source 1..36: mol_type = other DNA
tgctcagcaaccttcaataccgacaaagtcgtcttt

SEQ ID NO: 26579 - DNA, 42 bp, synthetic construct
  source 1..42: mol_type = other DNA
tgtgccagcagtcgcgggactggggggcctgagcagttcttc

SEQ ID NO: 26580 - DNA, 45 bp, synthetic construct
  source 1..45: mol_type = other DNA
tgcattgtgactgacataggtaactatgcccagggattaaccttc

SEQ ID NO: 26581 - DNA, 42 bp, synthetic construct
  source 1..42: mol_type = other DNA
tgtgccagcagtctgtctacctataattcgcccctctacttt

SEQ ID NO: 26582 - DNA, 39 bp, synthetic construct
  source 1..39: mol_type = other DNA
tgtgcagcaagcggaaaaagcaataacagaatcttcttt

SEQ ID NO: 26583 - DNA, 39 bp, synthetic construct
  source 1..39: mol_type = other DNA
tgtgccagcagtgaagacagctatgctgagcagttcttc

SEQ ID NO: 26584 - DNA, 42 bp, synthetic construct
  source 1..42: mol_type = other DNA
tgtgctatgagagttggaggaagcaatgcaaagctaaccttc

SEQ ID NO: 26585 - DNA, 39 bp, synthetic construct
  source 1..39: mol_type = other DNA
tgtgccagcagtggagtgggcgctgacacccagtacttt

SEQ ID NO: 26586 - DNA, 42 bp, synthetic construct
  source 1..42: mol_type = other DNA
tgtgcagcaagtgagtcttctggcagctggcaactcatcttt

SEQ ID NO: 26587 - DNA, 39 bp, synthetic construct
  source 1..39: mol_type = other DNA
tgtgccagcagttgggagggcaccgggcagctctacttt

SEQ ID NO: 26588 - DNA, 45 bp, synthetic construct
  source 1..45: mol_type = other DNA
tgtgctttgagtgaccagacaggctttgcaagtgcgctgacattt

SEQ ID NO: 26589 - DNA, 42 bp, synthetic construct
  source 1..42: mol_type = other DNA
tgcacctgcaggcgggacagggactatgctgagcagttcttc

SEQ ID NO: 26590 - DNA, 45 bp, synthetic construct
  source 1..45: mol_type = other DNA
tgcattgtgactggggatgactcgggatacaacaaactcactttt

SEQ ID NO: 26591 - DNA, 57 bp, synthetic construct
  source 1..57: mol_type = other DNA
tgcacctgcagtgcagaccgggactgggggggctataactatgctgagcagttcttc

SEQ ID NO: 26592 - DNA, 39 bp, synthetic construct
  source 1..39: mol_type = other DNA
tgcgcagtcagtgatcatagcaataacagaatcttcttt

SEQ ID NO: 26593 - DNA, 45 bp, synthetic construct
  source 1..45: mol_type = other DNA
tgcacctgcagtgcagatcgagacaggtatgctgagcagttcttc

SEQ ID NO: 26594 - DNA, 39 bp, synthetic construct
  source 1..39: mol_type = other DNA
tgtgctatgagagacacgggttaccagaacttctatttt

SEQ ID NO: 26595 - DNA, 36 bp, synthetic construct
  source 1..36: mol_type = other DNA
tgcacctgcagtgcagatttcgaaagattatttttc

SEQ ID NO: 26596 - DNA, 36 bp, synthetic construct
  source 1..36: mol_type = other DNA
tgtgctggtgacacaaatgcttacaaagtcatcttt

SEQ ID NO: 26597 - DNA, 48 bp, synthetic construct
  source 1..48: mol_type = other DNA
tgcacctgcagtgcaggggacaattcctataattcgcccctctacttt

SEQ ID NO: 26598 - DNA, 36 bp, synthetic construct
  source 1..36: mol_type = other DNA
tgtgctgcgaattataaccaggggaagcttatcttt

SEQ ID NO: 26599 - DNA, 42 bp, synthetic construct
  source 1..42: mol_type = other DNA
tgcacctgcagtgcagggggcgcggatgctgagcagttcttc

SEQ ID NO: 26600 - DNA, 33 bp, synthetic construct
  source 1..33: mol_type = other DNA
tgcattgtgactgccaataacagaatcttcttt

SEQ ID NO: 26601 - DNA, 39 bp, synthetic construct
  source 1..39: mol_type = other DNA
tgcacctgcagtgcaggtcaaaaccaggctccgcttttt

SEQ ID NO: 26602 - DNA, 42 bp, synthetic construct
  source 1..42: mol_type = other DNA
tgcgcagtcagctatacaggaggtgcagatagactcaccttt

SEQ ID NO: 26603 - DNA, 45 bp, synthetic construct
  source 1..45: mol_type = other DNA
tgcacctgcagtgcatcctcagggggcaaagacacccagtacttt

SEQ ID NO: 26604 - DNA, 30 bp, synthetic construct
  source 1..30: mol_type = other DNA
tgtgacacaaatgcttacaaagtcatcttt

SEQ ID NO: 26605 - DNA, 42 bp, synthetic construct
  source 1..42: mol_type = other DNA
tgcacctgcagtgcgggacaagcaaactccgactacaccttc

SEQ ID NO: 26606 - DNA, 42 bp, synthetic construct
  source 1..42: mol_type = other DNA
tgtgcagcaagattaacaggcaatactagaaaactcatcttt

SEQ ID NO: 26607 - DNA, 42 bp, synthetic construct
  source 1..42: mol_type = other DNA
tgcacctgcagtgctggactgggggatgctgagcagttcttc

SEQ ID NO: 26608 - DNA, 33 bp, synthetic construct
  source 1..33: mol_type = other DNA
tgtgctacttcaagtggccagaagctggttttt

SEQ ID NO: 26609 - DNA, 39 bp, synthetic construct
  source 1..39: mol_type = other DNA
tgcacctgcagtggactgggccaagacacccagtacttt

SEQ ID NO: 26610 - DNA, 45 bp, synthetic construct
  source 1..45: mol_type = other DNA
tgtgctgtgagcatgaatacaggaggtgcagatagactcaccttt

SEQ ID NO: 26611 - DNA, 51 bp, synthetic construct
  source 1..51: mol_type = other DNA
tgcacctgcagtgggggactggggggtcatagtgcagaaacgctgtatttt

SEQ ID NO: 26612 - DNA, 45 bp, synthetic construct
  source 1..45: mol_type = other DNA
tgtgcagcaagccacagtggaggcagcaattacaaactgacattt

SEQ ID NO: 26613 - protein, 9 aa, synthetic construct
GEGTRLSVL

SEQ ID NO: 26614 - protein, 10 aa, synthetic construct
GLGTRVSVFP

SEQ ID NO: 26615 - protein, 9 aa, synthetic construct
GPGTRLTVL

SEQ ID NO: 26616 - protein, 10 aa, synthetic construct
GLGTRVSVFP

SEQ ID NO: 26617 - protein, 9 aa, synthetic construct
GEGSRLIVV

SEQ ID NO: 26618 - protein, 10 aa, synthetic construct
GQGTILKVYL

SEQ ID NO: 26619 - protein, 9 aa, synthetic construct
GSGTRLTVL

SEQ ID NO: 26620 - protein, 10 aa, synthetic construct
GQGTSLSVVP

SEQ ID NO: 26621 - protein, 9 aa, synthetic construct
GEGSKLTVL

SEQ ID NO: 26622 - protein, 10 aa, synthetic construct
GKGTKLSVKS

SEQ ID NO: 26623 - protein, 9 aa, synthetic construct
GPGTRLTVL

SEQ ID NO: 26624 - protein, 10 aa, synthetic construct
GSGTQLTVMP

SEQ ID NO: 26625 - protein, 9 aa, synthetic construct
GKGTRLTVV

SEQ ID NO: 26626 - protein, 10 aa, synthetic construct
GKGTSLTVIP

SEQ ID NO: 26627 - protein, 9 aa, synthetic construct
GSGTRLLVI

SEQ ID NO: 26628 - protein, 10 aa, synthetic construct
GLGTTLQVQP

SEQ ID NO: 26629 - protein, 9 aa, synthetic construct
GPGTRLLVL

SEQ ID NO: 26630 - protein, 10 aa, synthetic construct
GQGTILKVYL

SEQ ID NO: 26631 - protein, 9 aa, synthetic construct
GPGTRLTVL

SEQ ID NO: 26632 - protein, 10 aa, synthetic construct
GSGTKLTVEP

SEQ ID NO: 26633 - protein, 9 aa, synthetic construct
GPGTRLTVL

SEQ ID NO: 26634 - protein, 11 aa, synthetic construct
GSGTKVIVLPY

SEQ ID NO: 26635 - protein, 9 aa, synthetic construct
GEGSKLTVL

SEQ ID NO: 26636 - protein, 10 aa, synthetic construct
GKGTLLTVTP

SEQ ID NO: 26637 - protein, 9 aa, synthetic construct
GPGTRLTVL

SEQ ID NO: 26638 - protein, 10 aa, synthetic construct
GGGTRLTVRP

SEQ ID NO: 26639 - protein, 9 aa, synthetic construct
GHGTKLSVL

SEQ ID NO: 26640 - protein, 10 aa, synthetic construct
GKGTKLSVKS

SEQ ID NO: 26641 - protein, 9 aa, synthetic construct
GPGTRLTVL

SEQ ID NO: 26642 - protein, 10 aa, synthetic construct
GLGTILRVRP

SEQ ID NO: 26643 - protein, 9 aa, synthetic construct
GEGTRLSVL

SEQ ID NO: 26644 - protein, 10 aa, synthetic construct
GLGTRVSVFP

SEQ ID NO: 26645 - protein, 9 aa, synthetic construct
GEGSRLIVV

SEQ ID NO: 26646 - protein, 10 aa, synthetic construct
GHGTILRVHP

SEQ ID NO: 26647 - protein, 9 aa, synthetic construct
AAGTRLTVT

SEQ ID NO: 26648 - protein, 10 aa, synthetic construct
GAGTKLSVKP

SEQ ID NO: 26649 - protein, 9 aa, synthetic construct
GKGTRLTVV

SEQ ID NO: 26650 - protein, 10 aa, synthetic construct
GTGTRLQVSP

SEQ ID NO: 26651 - protein, 9 aa, synthetic construct
GEGSKLTVL

SEQ ID NO: 26652 - protein, 10 aa, synthetic construct
GTGTRLQVSP

SEQ ID NO: 26653 - protein, 9 aa, synthetic construct
GHGTKLSVL

SEQ ID NO: 26654 - protein, 10 aa, synthetic construct
GSGTQLTVMP

SEQ ID NO: 26655 - protein, 9 aa, synthetic construct
GHGTKLSVL

SEQ ID NO: 26656 - protein, 10 aa, synthetic construct
GHGTILRVHP

SEQ ID NO: 26657 - protein, 9 aa, synthetic construct
GPGTRLTVL

SEQ ID NO: 26658 - protein, 10 aa, synthetic construct
GHGTILRVHP

SEQ ID NO: 26659 - protein, 9 aa, synthetic construct
GKGTRLTVV

SEQ ID NO: 26660 - protein, 10 aa, synthetic construct
GKGTSLTVIP

SEQ ID NO: 26661 - protein, 9 aa, synthetic construct
GEGSRLIVV

SEQ ID NO: 26662 - protein, 10 aa, synthetic construct
GSGTKLTVEP

SEQ ID NO: 26663 - protein, 9 aa, synthetic construct
GPGTRLLVL

SEQ ID NO: 26664 - protein, 10 aa, synthetic construct
GAGTRLKVIA

SEQ ID NO: 26665 - protein, 9 aa, synthetic construct
GPGTRLTVL

SEQ ID NO: 26666 - protein, 10 aa, synthetic construct
GTGTSLLVDP

SEQ ID NO: 26667 - protein, 9 aa, synthetic construct
GPGTRLTVL

SEQ ID NO: 26668 - protein, 10 aa, synthetic construct
GIGTRVLVRP

SEQ ID NO: 26669 - protein, 9 aa, synthetic construct
GPGTRLTVL

SEQ ID NO: 26670 - protein, 10 aa, synthetic construct
GLGTRVSVFP

SEQ ID NO: 26671 - protein, 9 aa, synthetic construct
GPGTRLTVL

SEQ ID NO: 26672 - protein, 10 aa, synthetic construct
GKGTSLTVIP

SEQ ID NO: 26673 - protein, 9 aa, synthetic construct
GPGTRLLVL

SEQ ID NO: 26674 - protein, 10 aa, synthetic construct
GSGTKLIIKP

SEQ ID NO: 26675 - protein, 9 aa, synthetic construct
AAGTRLTVT

SEQ ID NO: 26676 - protein, 10 aa, synthetic construct
GLGTSLVVNP

SEQ ID NO: 26677 - protein, 9 aa, synthetic construct
GAGTRLSVL

SEQ ID NO: 26678 - protein, 10 aa, synthetic construct
GKGTLLTVTP

SEQ ID NO: 26679 - protein, 9 aa, synthetic construct
GPGTRLTVL

SEQ ID NO: 26680 - protein, 10 aa, synthetic construct
GAGTKLTVKP

SEQ ID NO: 26681 - protein, 9 aa, synthetic construct
GPGTRLTVL

SEQ ID NO: 26682 - protein, 10 aa, synthetic construct
GKGTHLHVLP

SEQ ID NO: 26683 - protein, 9 aa, synthetic construct
GKGTRLTVV

SEQ ID NO: 26684 - protein, 10 aa, synthetic construct
GIGTLLSVKP

SEQ ID NO: 26685 - protein, 9 aa, synthetic construct
GPGTRLTVL

SEQ ID NO: 26686 - protein, 10 aa, synthetic construct
GAGTRLKVIA

SEQ ID NO: 26687 - protein, 9 aa, synthetic construct
GSGTRLTVL

SEQ ID NO: 26688 - protein, 10 aa, synthetic construct
GQGTILKVYL

SEQ ID NO: 26689 - protein, 9 aa, synthetic construct
GPGTRLTVL

SEQ ID NO: 26690 - protein, 10 aa, synthetic construct
GQGTSLSVVP

SEQ ID NO: 26691 - protein, 9 aa, synthetic construct
AAGTRLTVT

SEQ ID NO: 26692 - protein, 10 aa, synthetic construct
GLGTSLVVNP

SEQ ID NO: 26693 - protein, 9 aa, synthetic construct
GSGTRLTVL

SEQ ID NO: 26694 - protein, 10 aa, synthetic construct
GTGTSLLVDP

SEQ ID NO: 26695 - protein, 9 aa, synthetic construct
GEGSRLIVV

SEQ ID NO: 26696 - protein, 10 aa, synthetic construct
GQGTSLSVVP

SEQ ID NO: 26697 - protein, 9 aa, synthetic construct
GSGTRLTVL

SEQ ID NO: 26698 - protein, 10 aa, synthetic construct
GLGTSLVVNP

SEQ ID NO: 26699 - protein, 9 aa, synthetic construct
GPGTRLTVL

SEQ ID NO: 26700 - protein, 10 aa, synthetic construct
GKGAKLTVSP

SEQ ID NO: 26701 - protein, 9 aa, synthetic construct
GEGSRLIVV

SEQ ID NO: 26702 - protein, 10 aa, synthetic construct
GLGTTLQVQP

SEQ ID NO: 26703 - protein, 9 aa, synthetic construct
GAGTRLSVL

SEQ ID NO: 26704 - protein, 10 aa, synthetic construct
GSGTQLTVMP

SEQ ID NO: 26705 - protein, 9 aa, synthetic construct
GPGTRLTVL

SEQ ID NO: 26706 - protein, 10 aa, synthetic construct
GIGTRVLVRP

SEQ ID NO: 26707 - protein, 9 aa, synthetic construct
GPGTRLTVL

SEQ ID NO: 26708 - protein, 10 aa, synthetic construct
GDGTQLVVKP

SEQ ID NO: 26709 - protein, 9 aa, synthetic construct
GSGTRLTVL

SEQ ID NO: 26710 - protein, 10 aa, synthetic construct
GLGTILRVRP

SEQ ID NO: 26711 - protein, 9 aa, synthetic construct
GEGTRLSVL

SEQ ID NO: 26712 - protein, 10 aa, synthetic construct
GQGTSLSVVP

SEQ ID NO: 26713 - protein, 9 aa, synthetic construct
GHGTKLSVL

SEQ ID NO: 26714 - protein, 10 aa, synthetic construct
GTGTRLQVLP

SEQ ID NO: 26715 - protein, 9 aa, synthetic construct
GEGSKLTVL

SEQ ID NO: 26716 - protein, 10 aa, synthetic construct
GAGTRLQVNL

SEQ ID NO: 26717 - protein, 9 aa, synthetic construct
GHGTKLSVL

SEQ ID NO: 26718 - protein, 10 aa, synthetic construct
GSGTRLLVSP

SEQ ID NO: 26719 - protein, 9 aa, synthetic construct
GPGTRLTVL

SEQ ID NO: 26720 - protein, 10 aa, synthetic construct
GKGAKLTVSP

SEQ ID NO: 26721 - protein, 9 aa, synthetic construct
GPGTRLTVL

SEQ ID NO: 26722 - protein, 10 aa, synthetic construct
GKGTQLIIQP

SEQ ID NO: 26723 - protein, 9 aa, synthetic construct
GAGTRLSVL

SEQ ID NO: 26724 - protein, 10 aa, synthetic construct
GTGTRLQVNL

SEQ ID NO: 26725 - protein, 9 aa, synthetic construct
GPGTRLTVL

SEQ ID NO: 26726 - protein, 10 aa, synthetic construct
GLGTILRVRP

SEQ ID NO: 26727 - protein, 9 aa, synthetic construct
GSGTRLTVL

SEQ ID NO: 26728 - protein, 10 aa, synthetic construct
GKGTKFSLIP

SEQ ID NO: 26729 - protein, 9 aa, synthetic construct
GPGTRLLVL

SEQ ID NO: 26730 - protein, 10 aa, synthetic construct
GTGTRLQVSP

SEQ ID NO: 26731 - protein, 9 aa, synthetic construct
GPGTRLTVL

SEQ ID NO: 26732 - protein, 10 aa, synthetic construct
GSGTKLTVEP

SEQ ID NO: 26733 - protein, 9 aa, synthetic construct
GPGTRLTVL

SEQ ID NO: 26734 - protein, 10 aa, synthetic construct
GHGTILRVHP

SEQ ID NO: 26735 - protein, 9 aa, synthetic construct
GPGTRLTVL

SEQ ID NO: 26736 - protein, 10 aa, synthetic construct
GHGTILRVHP

SEQ ID NO: 26737 - protein, 9 aa, synthetic construct
GKGTRLTVV

SEQ ID NO: 26738 - protein, 10 aa, synthetic construct
GTGTRLQVLP

SEQ ID NO: 26739 - protein, 9 aa, synthetic construct
GAGTRLSVL

SEQ ID NO: 26740 - protein, 10 aa, synthetic construct
GIGTRVLVRP

SEQ ID NO: 26741 - protein, 9 aa, synthetic construct
GKGTRLTVV

SEQ ID NO: 26742 - protein, 10 aa, synthetic construct
GQGTKLSIKP

SEQ ID NO: 26743 - protein, 9 aa, synthetic construct
GPGTRLLVL

SEQ ID NO: 26744 - protein, 10 aa, synthetic construct
GQGTKLSIKP

SEQ ID NO: 26745 - protein, 9 aa, synthetic construct
GPGTRLTVL

SEQ ID NO: 26746 - protein, 10 aa, synthetic construct
GLGTILRVRP

SEQ ID NO: 26747 - protein, 9 aa, synthetic construct
GEGSRLIVV

SEQ ID NO: 26748 - protein, 10 aa, synthetic construct
GKGTVLLVSP

SEQ ID NO: 26749 - protein, 9 aa, synthetic construct
GPGTRLTVL

SEQ ID NO: 26750 - protein, 10 aa, synthetic construct
GTGTQVVVTP

SEQ ID NO: 26751 - protein, 9 aa, synthetic construct
GKGTRLTVV

SEQ ID NO: 26752 - protein, 10 aa, synthetic construct
GTGTRLQVLP

SEQ ID NO: 26753 - protein, 9 aa, synthetic construct
GSGTRLTVL

SEQ ID NO: 26754 - protein, 10 aa, synthetic construct
GQGTILKVYL

SEQ ID NO: 26755 - protein, 9 aa, synthetic construct
GPGTRLTVL

SEQ ID NO: 26756 - protein, 10 aa, synthetic construct
GIGTLLSVKP

SEQ ID NO: 26757 - protein, 9 aa, synthetic construct
GKGTRLTVV

SEQ ID NO: 26758 - protein, 10 aa, synthetic construct
GQGTSLSVVP

SEQ ID NO: 26759 - protein, 9 aa, synthetic construct
GPGTRLTVL

SEQ ID NO: 26760 - protein, 10 aa, synthetic construct
GTGTTVSVSP

SEQ ID NO: 26761 - protein, 9 aa, synthetic construct
GKGTRLTVV

SEQ ID NO: 26762 - protein, 10 aa, synthetic construct
GTGTLLSVKP

SEQ ID NO: 26763 - protein, 9 aa, synthetic construct
GPGTRLTVL

SEQ ID NO: 26764 - protein, 10 aa, synthetic construct
GSGTKLTVEP

SEQ ID NO: 26765 - protein, 9 aa, synthetic construct
GSGTRLTVL

SEQ ID NO: 26766 - protein, 10 aa, synthetic construct
GQGTKLSIKP

SEQ ID NO: 26767 - protein, 9 aa, synthetic construct
GKGTRLTVV

SEQ ID NO: 26768 - protein, 10 aa, synthetic construct
GKGTLLTVTP

SEQ ID NO: 26769 - protein, 9 aa, synthetic construct
GHGTKLSVL

SEQ ID NO: 26770 - protein, 10 aa, synthetic construct
GIGTLLSVKP

SEQ ID NO: 26771 - protein, 9 aa, synthetic construct
GEGSRLIVV

SEQ ID NO: 26772 - protein, 10 aa, synthetic construct
GKGTHLHVLP

SEQ ID NO: 26773 - protein, 9 aa, synthetic construct
GPGTRLLVL

SEQ ID NO: 26774 - protein, 10 aa, synthetic construct
GTGTTVSVSP

SEQ ID NO: 26775 - protein, 9 aa, synthetic construct
GSGTRLTVL

SEQ ID NO: 26776 - protein, 10 aa, synthetic construct
GSGTQLTVMP

SEQ ID NO: 26777 - protein, 9 aa, synthetic construct
GPGTRLTVL

SEQ ID NO: 26778 - protein, 10 aa, synthetic construct
GLGTTLQVQP

SEQ ID NO: 26779 - protein, 9 aa, synthetic construct
GEGTRLSVL

SEQ ID NO: 26780 - protein, 10 aa, synthetic construct
GSGTQLTVMP

SEQ ID NO: 26781 - protein, 9 aa, synthetic construct
GPGTRLLVL

SEQ ID NO: 26782 - protein, 10 aa, synthetic construct
GSGTKLIIKP

SEQ ID NO: 26783 - protein, 9 aa, synthetic construct
GHGTKLSVL

SEQ ID NO: 26784 - protein, 10 aa, synthetic construct
GKGTSLTVIP

SEQ ID NO: 26785 - protein, 9 aa, synthetic construct
GKGTRLTVV

SEQ ID NO: 26786 - protein, 10 aa, synthetic construct
GEGTKLTVSS

SEQ ID NO: 26787 - protein, 9 aa, synthetic construct
GKGTRLTVV

SEQ ID NO: 26788 - protein, 10 aa, synthetic construct
GEGTKLTVSS

SEQ ID NO: 26789 - protein, 9 aa, synthetic construct
AAGTRLTVT

SEQ ID NO: 26790 - protein, 10 aa, synthetic construct
GTGTRLQVSP

SEQ ID NO: 26791 - protein, 9 aa, synthetic construct
GPGTRLLVL

SEQ ID NO: 26792 - protein, 10 aa, synthetic construct
GDGTQLVVKP

SEQ ID NO: 26793 - protein, 9 aa, synthetic construct
GPGTRLLVL

SEQ ID NO: 26794 - protein, 10 aa, synthetic construct
GKGTSLTVIP

SEQ ID NO: 26795 - protein, 9 aa, synthetic construct
GSGTRLTVL

SEQ ID NO: 26796 - protein, 10 aa, synthetic construct
GGGTRLTVRP

SEQ ID NO: 26797 - protein, 9 aa, synthetic construct
GKGTRLTVV

SEQ ID NO: 26798 - protein, 10 aa, synthetic construct
GAGTRLAVCP

SEQ ID NO: 26799 - protein, 9 aa, synthetic construct
GHGTKLSVL

SEQ ID NO: 26800 - protein, 10 aa, synthetic construct
GLGTRVSVFP

SEQ ID NO: 26801 - protein, 9 aa, synthetic construct
GPGTRLLVL

SEQ ID NO: 26802 - protein, 10 aa, synthetic construct
GTGTKLQVVP

SEQ ID NO: 26803 - protein, 9 aa, synthetic construct
GSGTRLLVI

SEQ ID NO: 26804 - protein, 10 aa, synthetic construct
GAGTRLAVCP

SEQ ID NO: 26805 - protein, 9 aa, synthetic construct
GHGTKLSVL

SEQ ID NO: 26806 - protein, 10 aa, synthetic construct
GKGTVLLVSP

SEQ ID NO: 26807 - protein, 9 aa, synthetic construct
GPGTRLTVL

SEQ ID NO: 26808 - protein, 10 aa, synthetic construct
GSGTQLTVMP

SEQ ID NO: 26809 - protein, 9 aa, synthetic construct
GSGTRLTVL

SEQ ID NO: 26810 - protein, 10 aa, synthetic construct
GAGTRLQVNL

SEQ ID NO: 26811 - protein, 9 aa, synthetic construct
GPGTRLLVL

SEQ ID NO: 26812 - protein, 10 aa, synthetic construct
GKGTSLVVHP

SEQ ID NO: 26813 - protein, 9 aa, synthetic construct
GSGTRLLVI

SEQ ID NO: 26814 - protein, 10 aa, synthetic construct
GIGTRVLVRP

SEQ ID NO: 26815 - protein, 9 aa, synthetic construct
GKGTRLTVV

SEQ ID NO: 26816 - protein, 10 aa, synthetic construct
GEGTKLTVSS

SEQ ID NO: 26817 - protein, 9 aa, synthetic construct
GPGTRLTVL

SEQ ID NO: 26818 - protein, 10 aa, synthetic construct
GKGTSLTVIP

SEQ ID NO: 26819 - protein, 9 aa, synthetic construct
GPGTRLTVL

SEQ ID NO: 26820 - protein, 10 aa, synthetic construct
GEGTKLTVSS

SEQ ID NO: 26821 - protein, 9 aa, synthetic construct
GPGTRLTVL

SEQ ID NO: 26822 - protein, 10 aa, synthetic construct
GAGTRLKVIA

SEQ ID NO: 26823 - protein, 9 aa, synthetic construct
GSGTRLLVI

SEQ ID NO: 26824 - protein, 10 aa, synthetic construct
GLGTRVSVFP

SEQ ID NO: 26825 - protein, 9 aa, synthetic construct
GPGTRLLVL

SEQ ID NO: 26826 - protein, 10 aa, synthetic construct
GKGTHLHVLP

SEQ ID NO: 26827 - protein, 9 aa, synthetic construct
GPGTRLTVL

SEQ ID NO: 26828 - protein, 10 aa, synthetic construct
GKGTSLVVHP

SEQ ID NO: 26829 - protein, 9 aa, synthetic construct
GPGTRLLVL

SEQ ID NO: 26830 - protein, 10 aa, synthetic construct
GKGTSLVVHP

SEQ ID NO: 26831 - protein, 9 aa, synthetic construct
GPGTRLTVL

SEQ ID NO: 26832 - protein, 10 aa, synthetic construct
GQGTILKVYL

SEQ ID NO: 26833 - protein, 9 aa, synthetic construct
GEGSKLTVL

SEQ ID NO: 26834 - protein, 10 aa, synthetic construct
GAGTRLKVIA

SEQ ID NO: 26835 - protein, 9 aa, synthetic construct
GPGTRLLVL

SEQ ID NO: 26836 - protein, 10 aa, synthetic construct
GKGTSLVVHP

SEQ ID NO: 26837 - protein, 9 aa, synthetic construct
GPGTRLLVL

SEQ ID NO: 26838 - protein, 10 aa, synthetic construct
GQGTILKVYL

SEQ ID NO: 26839 - protein, 9 aa, synthetic construct
GPGTRLTVL

SEQ ID NO: 26840 - protein, 10 aa, synthetic construct
GAGTKLTIKP

SEQ ID NO: 26841 - protein, 9 aa, synthetic construct
GPGTRLTVL

SEQ ID NO: 26842 - protein, 10 aa, synthetic construct
GSGTRLLVSP

SEQ ID NO: 26843 - protein, 9 aa, synthetic construct
GPGTRLTVL

SEQ ID NO: 26844 - protein, 10 aa, synthetic construct
GAGTKLTVKP

SEQ ID NO: 26845 - protein, 9 aa, synthetic construct
GEGSKLTVL

SEQ ID NO: 26846 - protein, 10 aa, synthetic construct
GQGTSLSVVP

SEQ ID NO: 26847 - protein, 9 aa, synthetic construct
GSGTRLTVL

SEQ ID NO: 26848 - protein, 10 aa, synthetic construct
GTGTKLQVVP

SEQ ID NO: 26849 - protein, 9 aa, synthetic construct
GKGTRLTVV

SEQ ID NO: 26850 - protein, 10 aa, synthetic construct
GSGTRLLVSP

SEQ ID NO: 26851 - protein, 9 aa, synthetic construct
GPGTRLTVL

SEQ ID NO: 26852 - protein, 10 aa, synthetic construct
GSGTQLTVMP

SEQ ID NO: 26853 - protein, 9 aa, synthetic construct
GPGTRLLVL

SEQ ID NO: 26854 - protein, 10 aa, synthetic construct
GSGTRLQVYA

SEQ ID NO: 26855 - protein, 9 aa, synthetic construct
GPGTRLTVL

SEQ ID NO: 26856 - protein, 10 aa, synthetic construct
GTGTTVSVSP

SEQ ID NO: 26857 - protein, 9 aa, synthetic construct
GEGTRLSVL

SEQ ID NO: 26858 - protein, 10 aa, synthetic construct
GSGTKLTVEP

SEQ ID NO: 26859 - protein, 9 aa, synthetic construct
GKGTRLTVV

SEQ ID NO: 26860 - protein, 10 aa, synthetic construct
GTGTSLLVDP

SEQ ID NO: 26861 - protein, 9 aa, synthetic construct
GHGTKLSVL

SEQ ID NO: 26862 - protein, 10 aa, synthetic construct
GSGTQLTVMP

SEQ ID NO: 26863 - protein, 9 aa, synthetic construct
GPGTRLTVL

SEQ ID NO: 26864 - protein, 10 aa, synthetic construct
GSGTRLLVSP

SEQ ID NO: 26865 - protein, 9 aa, synthetic construct
GPGTRLTVL

SEQ ID NO: 26866 - protein, 10 aa, synthetic construct
GSGTQLTVMP

SEQ ID NO: 26867 - protein, 9 aa, synthetic construct
GPGTRLTVL

SEQ ID NO: 26868 - protein, 10 aa, synthetic construct
GHGTILRVHP

SEQ ID NO: 26869 - protein, 9 aa, synthetic construct
GSGTRLTVL

SEQ ID NO: 26870 - protein, 10 aa, synthetic construct
GLGTILRVRP

SEQ ID NO: 26871 - protein, 9 aa, synthetic construct
GPGTRLTVL

SEQ ID NO: 26872 - protein, 10 aa, synthetic construct
GQGTSLSVVP

SEQ ID NO: 26873 - protein, 9 aa, synthetic construct
GSGTRLLVI

SEQ ID NO: 26874 - protein, 10 aa, synthetic construct
GSGTRLLVSP

SEQ ID NO: 26875 - protein, 9 aa, synthetic construct
GSGTRLTVL

SEQ ID NO: 26876 - protein, 10 aa, synthetic construct
GKGTSLTVIP

SEQ ID NO: 26877 - protein, 9 aa, synthetic construct
GPGTRLLVL

SEQ ID NO: 26878 - protein, 10 aa, synthetic construct
GGGTRLTVRP

SEQ ID NO: 26879 - protein, 9 aa, synthetic construct
GAGTRLSVL

SEQ ID NO: 26880 - protein, 10 aa, synthetic construct
GKGTSLTVIP

SEQ ID NO: 26881 - protein, 9 aa, synthetic construct
GSGTRLTVL

SEQ ID NO: 26882 - protein, 10 aa, synthetic construct
GTGTTVSVSP

SEQ ID NO: 26883 - protein, 9 aa, synthetic construct
GPGTRLLVL

SEQ ID NO: 26884 - protein, 10 aa, synthetic construct
GTGTRLQVLP

SEQ ID NO: 26885 - protein, 9 aa, synthetic construct
GKGTRLTVV

SEQ ID NO: 26886 - protein, 10 aa, synthetic construct
GKGTQVVVLP

SEQ ID NO: 26887 - protein, 9 aa, synthetic construct
GKGTRLTVV

SEQ ID NO: 26888 - protein, 10 aa, synthetic construct
GIGTRVLVRP

SEQ ID NO: 26889 - protein, 9 aa, synthetic construct
GKGTRLTVV

SEQ ID NO: 26890 - protein, 10 aa, synthetic construct
GSGTQLTVMP

SEQ ID NO: 26891 - protein, 9 aa, synthetic construct
GPGTRLLVL

SEQ ID NO: 26892 - protein, 10 aa, synthetic construct
GEGTKLTVSS

SEQ ID NO: 26893 - protein, 9 aa, synthetic construct
GSGTRLLVI

SEQ ID NO: 26894 - protein, 10 aa, synthetic construct
GIGTLLSVKP

SEQ ID NO: 26895 - protein, 9 aa, synthetic construct
GPGTRLTVL

SEQ ID NO: 26896 - protein, 10 aa, synthetic construct
GAGTRLKVIA

SEQ ID NO: 26897 - protein, 9 aa, synthetic construct
GSGTRLLVI

SEQ ID NO: 26898 - protein, 10 aa, synthetic construct
GDGTVLTVKP

SEQ ID NO: 26899 - protein, 9 aa, synthetic construct
GPGTRLTVL

SEQ ID NO: 26900 - protein, 10 aa, synthetic construct
GSGTQLTVMP

SEQ ID NO: 26901 - protein, 9 aa, synthetic construct
GAGTRLSVL

SEQ ID NO: 26902 - protein, 10 aa, synthetic construct
GGGTRLTVRP

SEQ ID NO: 26903 - protein, 9 aa, synthetic construct
GPGTRLLVL

SEQ ID NO: 26904 - protein, 10 aa, synthetic construct
GSGTQLTVMP

SEQ ID NO: 26905 - protein, 9 aa, synthetic construct
GSGTRLLVI

SEQ ID NO: 26906 - protein, 10 aa, synthetic construct
GTGTSLLVDP

SEQ ID NO: 26907 - protein, 9 aa, synthetic construct
GPGTRLLVL

SEQ ID NO: 26908 - protein, 10 aa, synthetic construct
GTGTRLQVLP

SEQ ID NO: 26909 - protein, 9 aa, synthetic construct
GHGTKLSVL

SEQ ID NO: 26910 - protein, 10 aa, synthetic construct
GKGTSLVVHP

SEQ ID NO: 26911 - protein, 9 aa, synthetic construct
AAGTRLTVT

SEQ ID NO: 26912 - protein, 10 aa, synthetic construct
GIGTRVLVRP

SEQ ID NO: 26913 - protein, 9 aa, synthetic construct
GAGTRLSVL

SEQ ID NO: 26914 - protein, 10 aa, synthetic construct
GKGTQLIIQP

SEQ ID NO: 26915 - protein, 9 aa, synthetic construct
GSGTRLTVL

SEQ ID NO: 26916 - protein, 10 aa, synthetic construct
GSGTQLTVMP

SEQ ID NO: 26917 - protein, 9 aa, synthetic construct
GSGTRLTVL

SEQ ID NO: 26918 - protein, 10 aa, synthetic construct
GKGTSLTVIP

SEQ ID NO: 26919 - protein, 9 aa, synthetic construct
GAGTRLSVL

SEQ ID NO: 26920 - protein, 10 aa, synthetic construct
GAGTRLKVIA

SEQ ID NO: 26921 - protein, 9 aa, synthetic construct
GSGTRLLVI

SEQ ID NO: 26922 - protein, 10 aa, synthetic construct
GKGTSLTVIP

SEQ ID NO: 26923 - protein, 9 aa, synthetic construct
GKGTRLTVV

SEQ ID NO: 26924 - protein, 10 aa, synthetic construct
GKGAKLTVSP

SEQ ID NO: 26925 - protein, 9 aa, synthetic construct
GPGTRLTVL

SEQ ID NO: 26926 - protein, 10 aa, synthetic construct
GKGTSLTVIP

SEQ ID NO: 26927 - protein, 9 aa, synthetic construct
GPGTRLTVL

SEQ ID NO: 26928 - protein, 10 aa, synthetic construct
GKGTVLLVSP

SEQ ID NO: 26929 - protein, 9 aa, synthetic construct
GPGTRLTVL

SEQ ID NO: 26930 - protein, 10 aa, synthetic construct
GKGTQVVVLP

SEQ ID NO: 26931 - protein, 9 aa, synthetic construct
GEGSKLTVL

SEQ ID NO: 26932 - protein, 10 aa, synthetic construct
GLGTTLQVQP

SEQ ID NO: 26933 - protein, 9 aa, synthetic construct
GEGSKLTVL

SEQ ID NO: 26934 - protein, 10 aa, synthetic construct
GLGTTLQVQP

SEQ ID NO: 26935 - protein, 9 aa, synthetic construct
GAGTRLSVL

SEQ ID NO: 26936 - protein, 10 aa, synthetic construct
GSGTRLLVSP

SEQ ID NO: 26937 - protein, 9 aa, synthetic construct
GEGSRLIVV

SEQ ID NO: 26938 - protein, 10 aa, synthetic construct
GAGTQLIVIP

SEQ ID NO: 26939 - protein, 9 aa, synthetic construct
GSGTRLTVL

SEQ ID NO: 26940 - protein, 10 aa, synthetic construct
GQGTSLSVVP

SEQ ID NO: 26941 - protein, 9 aa, synthetic construct
GSGTRLTVL

SEQ ID NO: 26942 - protein, 10 aa, synthetic construct
GTGTKLQVVP

SEQ ID NO: 26943 - protein, 9 aa, synthetic construct
GPGTRLTVL

SEQ ID NO: 26944 - protein, 10 aa, synthetic construct
GKGTHLHVLP

SEQ ID NO: 26945 - protein, 9 aa, synthetic construct
GPGTRLTVL

SEQ ID NO: 26946 - protein, 10 aa, synthetic construct
GAGTRLQVNL

SEQ ID NO: 26947 - protein, 9 aa, synthetic construct
GSGTRLTVL

SEQ ID NO: 26948 - protein, 10 aa, synthetic construct
GTGTLLSVKP

SEQ ID NO: 26949 - protein, 9 aa, synthetic construct
GKGTRLTVV

SEQ ID NO: 26950 - protein, 10 aa, synthetic construct
GKGTQVVVLP

SEQ ID NO: 26951 - protein, 9 aa, synthetic construct
GPGTRLTVL

SEQ ID NO: 26952 - protein, 10 aa, synthetic construct
GQGTVLSVIP

SEQ ID NO: 26953 - protein, 9 aa, synthetic construct
GPGTRLTVL

SEQ ID NO: 26954 - protein, 10 aa, synthetic construct
GAGTRLAVCP

SEQ ID NO: 26955 - protein, 9 aa, synthetic construct
GEGSRLIVV

SEQ ID NO: 26956 - protein, 10 aa, synthetic construct
GTGTTVSVSP

SEQ ID NO: 26957 - protein, 9 aa, synthetic construct
GEGTRLSVL

SEQ ID NO: 26958 - protein, 10 aa, synthetic construct
GQGTSLSVVP

SEQ ID NO: 26959 - protein, 9 aa, synthetic construct
GEGTRLSVL

SEQ ID NO: 26960 - protein, 10 aa, synthetic construct
GTGTRLQVSP

SEQ ID NO: 26961 - protein, 9 aa, synthetic construct
GPGTRLLVL

SEQ ID NO: 26962 - protein, 10 aa, synthetic construct
GQGTVLSVIP

SEQ ID NO: 26963 - protein, 9 aa, synthetic construct
GEGTRLSVL

SEQ ID NO: 26964 - protein, 10 aa, synthetic construct
GEGTKLTVSS

SEQ ID NO: 26965 - protein, 9 aa, synthetic construct
GEGSRLIVV

SEQ ID NO: 26966 - protein, 10 aa, synthetic construct
GHGTILRVHP

SEQ ID NO: 26967 - protein, 9 aa, synthetic construct
GKGTRLTVV

SEQ ID NO: 26968 - protein, 10 aa, synthetic construct
GEGTKLTVSS

SEQ ID NO: 26969 - protein, 9 aa, synthetic construct
GSGTRLTVL

SEQ ID NO: 26970 - protein, 10 aa, synthetic construct
GSGTKLIIKP

SEQ ID NO: 26971 - protein, 9 aa, synthetic construct
GPGTRLTVL

SEQ ID NO: 26972 - protein, 10 aa, synthetic construct
GEGTKLTVSS

SEQ ID NO: 26973 - protein, 9 aa, synthetic construct
GAGTRLSVL

SEQ ID NO: 26974 - protein, 10 aa, synthetic construct
GEGTKLTVSS

SEQ ID NO: 26975 - protein, 9 aa, synthetic construct
GKGTRLTVV

SEQ ID NO: 26976 - protein, 10 aa, synthetic construct
GKGTKLSVKS

SEQ ID NO: 26977 - protein, 9 aa, synthetic construct
GSGTRLTVL

SEQ ID NO: 26978 - protein, 10 aa, synthetic construct
GTGTTVSVSP

SEQ ID NO: 26979 - protein, 9 aa, synthetic construct
GEGSKLTVL

SEQ ID NO: 26980 - protein, 11 aa, synthetic construct
GSGTKVIVLPY

SEQ ID NO: 26981 - protein, 9 aa, synthetic construct
GPGTRLTVL

SEQ ID NO: 26982 - protein, 10 aa, synthetic construct
GSGTQLTVMP

SEQ ID NO: 26983 - protein, 9 aa, synthetic construct
GHGTKLSVL

SEQ ID NO: 26984 - protein, 10 aa, synthetic construct
GLGTSLVVNP

SEQ ID NO: 26985 - protein, 9 aa, synthetic construct
GKGTRLTVV

SEQ ID NO: 26986 - protein, 10 aa, synthetic construct
GLGTILRVRP

SEQ ID NO: 26987 - protein, 9 aa, synthetic construct
GHGTKLSVL

SEQ ID NO: 26988 - protein, 10 aa, synthetic construct
GQGTVLSVIP

SEQ ID NO: 26989 - protein, 9 aa, synthetic construct
GKGTRLTVV

SEQ ID NO: 26990 - protein, 10 aa, synthetic construct
GTGTLLSVKP

SEQ ID NO: 26991 - protein, 9 aa, synthetic construct
GHGTKLSVL

SEQ ID NO: 26992 - protein, 10 aa, synthetic construct
GQGTSLSVVP

SEQ ID NO: 26993 - protein, 9 aa, synthetic construct
GPGTRLTVL

SEQ ID NO: 26994 - protein, 10 aa, synthetic construct
GLGTRVSVFP

SEQ ID NO: 26995 - protein, 9 aa, synthetic construct
GHGTKLSVL

SEQ ID NO: 26996 - protein, 10 aa, synthetic construct
GLGTRVSVFP

SEQ ID NO: 26997 - protein, 9 aa, synthetic construct
GSGTRLTVL

SEQ ID NO: 26998 - protein, 10 aa, synthetic construct
GGGTRLTVRP

SEQ ID NO: 26999 - protein, 9 aa, synthetic construct
GPGTRLTVL

SEQ ID NO: 27000 - protein, 10 aa, synthetic construct
GKGTHLHVLP

SEQ ID NO: 27001 - protein, 9 aa, synthetic construct
GAGTRLSVL

SEQ ID NO: 27002 - protein, 10 aa, synthetic construct
GKGTHLHVLP

SEQ ID NO: 27003 - protein, 9 aa, synthetic construct
GPGTRLTVL

SEQ ID NO: 27004 - protein, 10 aa, synthetic construct
GAGTKLTIKP

SEQ ID NO: 27005 - protein, 9 aa, synthetic construct
GSGTRLLVI

SEQ ID NO: 27006 - protein, 10 aa, synthetic construct
GAGTKLTIKP

SEQ ID NO: 27007 - protein, 9 aa, synthetic construct
GPGTRLTVL

SEQ ID NO: 27008 - protein, 10 aa, synthetic construct
GHGTILRVHP

SEQ ID NO: 27009 - protein, 9 aa, synthetic construct
GSGTRLLVI

SEQ ID NO: 27010 - protein, 10 aa, synthetic construct
GKGTVLLVSP

SEQ ID NO: 27011 - protein, 9 aa, synthetic construct
GSGTRLTVL

SEQ ID NO: 27012 - protein, 10 aa, synthetic construct
GQGTVLSVIP

SEQ ID NO: 27013 - protein, 9 aa, synthetic construct
GKGTRLTVV

SEQ ID NO: 27014 - protein, 10 aa, synthetic construct
GAGTRLKVIA

SEQ ID NO: 27015 - protein, 9 aa, synthetic construct
GPGTRLTVL

SEQ ID NO: 27016 - protein, 10 aa, synthetic construct
GLGTTLQVQP

SEQ ID NO: 27017 - protein, 9 aa, synthetic construct
GAGTRLSVL

SEQ ID NO: 27018 - protein, 10 aa, synthetic construct
GTGTQVVVTP

SEQ ID NO: 27019 - protein, 9 aa, synthetic construct
GPGTRLTVL

SEQ ID NO: 27020 - protein, 10 aa, synthetic construct
GKGTQLIIQP

SEQ ID NO: 27021 - protein, 9 aa, synthetic construct
GPGTRLLVL

SEQ ID NO: 27022 - protein, 10 aa, synthetic construct
GKGTSLVVHP

SEQ ID NO: 27023 - protein, 9 aa, synthetic construct
GPGTRLTVL

SEQ ID NO: 27024 - protein, 10 aa, synthetic construct
GLGTRVSVFP

SEQ ID NO: 27025 - protein, 9 aa, synthetic construct
GKGTRLTVV

SEQ ID NO: 27026 - protein, 10 aa, synthetic construct
GTGTKLQVVP

SEQ ID NO: 27027 - protein, 9 aa, synthetic construct
GSGTRLLVI

SEQ ID NO: 27028 - protein, 10 aa, synthetic construct
GLGTRVSVFP

SEQ ID NO: 27029 - protein, 9 aa, synthetic construct
GPGTRLTVL

SEQ ID NO: 27030 - protein, 10 aa, synthetic construct
GGGTRLTVRP

SEQ ID NO: 27031 - protein, 9 aa, synthetic construct
GEGSRLIVV

SEQ ID NO: 27032 - protein, 10 aa, synthetic construct
GSGTKLIIKP

SEQ ID NO: 27033 - protein, 9 aa, synthetic construct
GPGTRLTVL

SEQ ID NO: 27034 - protein, 10 aa, synthetic construct
GLGTTLQVQP

SEQ ID NO: 27035 - protein, 9 aa, synthetic construct
GKGTRLTVV

SEQ ID NO: 27036 - protein, 10 aa, synthetic construct
GKGTKLSVKS

SEQ ID NO: 27037 - protein, 9 aa, synthetic construct
GKGTRLTVV

SEQ ID NO: 27038 - protein, 10 aa, synthetic construct
GAGTKLTVKP

SEQ ID NO: 27039 - protein, 9 aa, synthetic construct
GEGSKLTVL

SEQ ID NO: 27040 - protein, 11 aa, synthetic construct
GSGTKVIVLPY

SEQ ID NO: 27041 - protein, 9 aa, synthetic construct
GPGTRLTVL

SEQ ID NO: 27042 - protein, 10 aa, synthetic construct
GTGTRLQVLP

SEQ ID NO: 27043 - protein, 9 aa, synthetic construct
GPGTRLTVL

SEQ ID NO: 27044 - protein, 10 aa, synthetic construct
GSGTQLTVMP

SEQ ID NO: 27045 - protein, 9 aa, synthetic construct
GPGTRLTVL

SEQ ID NO: 27046 - protein, 10 aa, synthetic construct
GKGTSLTVIP

SEQ ID NO: 27047 - protein, 9 aa, synthetic construct
GSGTRLLVI

SEQ ID NO: 27048 - protein, 10 aa, synthetic construct
GSGTKLTVEP

SEQ ID NO: 27049 - protein, 9 aa, synthetic construct
GPGTRLTVL

SEQ ID NO: 27050 - protein, 10 aa, synthetic construct
GTGTRLQVNL

SEQ ID NO: 27051 - protein, 9 aa, synthetic construct
GSGTRLLVI

SEQ ID NO: 27052 - protein, 10 aa, synthetic construct
GHGTILRVHP

SEQ ID NO: 27053 - protein, 9 aa, synthetic construct
GKGTRLTVV

SEQ ID NO: 27054 - protein, 10 aa, synthetic construct
GAGTRLKVIA

SEQ ID NO: 27055 - protein, 9 aa, synthetic construct
GKGTRLTVV

SEQ ID NO: 27056 - protein, 10 aa, synthetic construct
GLGTILRVRP

SEQ ID NO: 27057 - protein, 9 aa, synthetic construct
GSGTRLTVL

SEQ ID NO: 27058 - protein, 10 aa, synthetic construct
GTGTLLSVKP

SEQ ID NO: 27059 - protein, 9 aa, synthetic construct
GKGTRLTVV

SEQ ID NO: 27060 - protein, 10 aa, synthetic construct
GKGTQLIIQP

SEQ ID NO: 27061 - protein, 9 aa, synthetic construct
GHGTKLSVL

SEQ ID NO: 27062 - protein, 10 aa, synthetic construct
GGGTRLTVRP

SEQ ID NO: 27063 - protein, 9 aa, synthetic construct
GSGTRLLVI

SEQ ID NO: 27064 - protein, 10 aa, synthetic construct
GTGTRLQVSP

SEQ ID NO: 27065 - protein, 9 aa, synthetic construct
GEGSRLIVV

SEQ ID NO: 27066 - protein, 10 aa, synthetic construct
GHGTILRVHP

SEQ ID NO: 27067 - protein, 9 aa, synthetic construct
GSGTRLTVL

SEQ ID NO: 27068 - protein, 10 aa, synthetic construct
GKGTSLTVIP

SEQ ID NO: 27069 - protein, 9 aa, synthetic construct
GPGTRLTVL

SEQ ID NO: 27070 - protein, 10 aa, synthetic construct
GKGTKLSVKS

SEQ ID NO: 27071 - protein, 9 aa, synthetic construct
AAGTRLTVT

SEQ ID NO: 27072 - protein, 10 aa, synthetic construct
GLGTRVSVFP

SEQ ID NO: 27073 - protein, 9 aa, synthetic construct
GSGTRLTVL

SEQ ID NO: 27074 - protein, 10 aa, synthetic construct
GHGTILRVHP

SEQ ID NO: 27075 - protein, 9 aa, synthetic construct
GPGTRLTVL

SEQ ID NO: 27076 - protein, 10 aa, synthetic construct
GTGTTVSVSP

SEQ ID NO: 27077 - protein, 9 aa, synthetic construct
GEGSRLIVV

SEQ ID NO: 27078 - protein, 10 aa, synthetic construct
GHGTILRVHP

SEQ ID NO: 27079 - protein, 9 aa, synthetic construct
GSGTRLLVI

SEQ ID NO: 27080 - protein, 10 aa, synthetic construct
GLGTRVSVFP

SEQ ID NO: 27081 - protein, 9 aa, synthetic construct
GPGTRLLVL

SEQ ID NO: 27082 - protein, 10 aa, synthetic construct
GKGAKLTVSP

SEQ ID NO: 27083 - protein, 9 aa, synthetic construct
GEGSKLTVL

SEQ ID NO: 27084 - protein, 10 aa, synthetic construct
GKGTLLTVTP

SEQ ID NO: 27085 - protein, 9 aa, synthetic construct
GPGTRLTVL

SEQ ID NO: 27086 - protein, 10 aa, synthetic construct
GKGTLLTVTP

SEQ ID NO: 27087 - protein, 9 aa, synthetic construct
GSGTRLLVI

SEQ ID NO: 27088 - protein, 10 aa, synthetic construct
GAGTKLTIKP

SEQ ID NO: 27089 - protein, 9 aa, synthetic construct
GAGTRLSVL

SEQ ID NO: 27090 - protein, 10 aa, synthetic construct
GEGTKLTVSS

SEQ ID NO: 27091 - protein, 9 aa, synthetic construct
GPGTRLTVL

SEQ ID NO: 27092 - protein, 10 aa, synthetic construct
GTGTKLQVVP

SEQ ID NO: 27093 - protein, 9 aa, synthetic construct
GEGSRLIVV

SEQ ID NO: 27094 - protein, 10 aa, synthetic construct
GKGTSLVVHP

SEQ ID NO: 27095 - protein, 9 aa, synthetic construct
GPGTRLTVL

SEQ ID NO: 27096 - protein, 10 aa, synthetic construct
GAGTQLIVIP

SEQ ID NO: 27097 - protein, 9 aa, synthetic construct
GKGTRLTVV

SEQ ID NO: 27098 - protein, 10 aa, synthetic construct
GDGTQLVVKP

SEQ ID NO: 27099 - protein, 9 aa, synthetic construct
GPGTRLTVL

SEQ ID NO: 27100 - protein, 10 aa, synthetic construct
GKGAKLTVSP

SEQ ID NO: 27101 - protein, 9 aa, synthetic construct
GKGTRLTVV

SEQ ID NO: 27102 - protein, 10 aa, synthetic construct
GSGTQLTVMP

SEQ ID NO: 27103 - protein, 9 aa, synthetic construct
GEGSKLTVL

SEQ ID NO: 27104 - protein, 10 aa, synthetic construct
GTGTQVVVTP

SEQ ID NO: 27105 - protein, 9 aa, synthetic construct
GPGTRLTVL

SEQ ID NO: 27106 - protein, 10 aa, synthetic construct
GSGTQLTVMP

SEQ ID NO: 27107 - protein, 9 aa, synthetic construct
GEGSKLTVL

SEQ ID NO: 27108 - protein, 10 aa, synthetic construct
GIGTLLSVKP

SEQ ID NO: 27109 - protein, 9 aa, synthetic construct
GHGTKLSVL

SEQ ID NO: 27110 - protein, 10 aa, synthetic construct
GDGTQLVVKP

SEQ ID NO: 27111 - protein, 9 aa, synthetic construct
GAGTRLSVL

SEQ ID NO: 27112 - protein, 10 aa, synthetic construct
GKGTQVVVLP

SEQ ID NO: 27113 - protein, 9 aa, synthetic construct
GKGTRLTVV

SEQ ID NO: 27114 - protein, 10 aa, synthetic construct
GTGTSLLVDP

SEQ ID NO: 27115 - protein, 9 aa, synthetic construct
GPGTRLTVL

SEQ ID NO: 27116 - protein, 10 aa, synthetic construct
GSGTQLTVMP

SEQ ID NO: 27117 - protein, 9 aa, synthetic construct
GHGTKLSVL

SEQ ID NO: 27118 - protein, 10 aa, synthetic construct
GKGTKLSVKS

SEQ ID NO: 27119 - protein, 9 aa, synthetic construct
GPGTRLTVL

SEQ ID NO: 27120 - protein, 10 aa, synthetic construct
GKGTQLIIQP

SEQ ID NO: 27121 - protein, 9 aa, synthetic construct
GPGTRLTVL

SEQ ID NO: 27122 - protein, 10 aa, synthetic construct
GAGTRLAVCP

SEQ ID NO: 27123 - protein, 9 aa, synthetic construct
GEGSRLIVV

SEQ ID NO: 27124 - protein, 10 aa, synthetic construct
GSGTQLTVMP

SEQ ID NO: 27125 - protein, 9 aa, synthetic construct
GPGTRLTVL

SEQ ID NO: 27126 - protein, 10 aa, synthetic construct
GKGTQVVVLP

SEQ ID NO: 27127 - protein, 9 aa, synthetic construct
GSGTRLLVI

SEQ ID NO: 27128 - protein, 10 aa, synthetic construct
GSGTQLTVMP

SEQ ID NO: 27129 - protein, 9 aa, synthetic construct
GPGTRLTVL

SEQ ID NO: 27130 - protein, 10 aa, synthetic construct
GKGTKLSVKS

SEQ ID NO: 27131 - protein, 9 aa, synthetic construct
GPGTRLLVL

SEQ ID NO: 27132 - protein, 10 aa, synthetic construct
GAGTKLTIKP

SEQ ID NO: 27133 - protein, 9 aa, synthetic construct
GHGTKLSVL

SEQ ID NO: 27134 - protein, 10 aa, synthetic construct
GKGTQLIIQP

SEQ ID NO: 27135 - protein, 9 aa, synthetic construct
GHGTKLSVL

SEQ ID NO: 27136 - protein, 10 aa, synthetic construct
GIGTRVLVRP

SEQ ID NO: 27137 - protein, 9 aa, synthetic construct
GPGTRLTVL

SEQ ID NO: 27138 - protein, 10 aa, synthetic construct
GAGTKLTIKP

SEQ ID NO: 27139 - protein, 9 aa, synthetic construct
GPGTRLTVL

SEQ ID NO: 27140 - protein, 10 aa, synthetic construct
GSGTRLLVSP

SEQ ID NO: 27141 - protein, 9 aa, synthetic construct
GEGTRLSVL

SEQ ID NO: 27142 - protein, 10 aa, synthetic construct
GTGTTVSVSP

SEQ ID NO: 27143 - protein, 9 aa, synthetic construct
AAGTRLTVT

SEQ ID NO: 27144 - protein, 10 aa, synthetic construct
GLGTRVSVFP

SEQ ID NO: 27145 - protein, 9 aa, synthetic construct
GAGTRLSVL

SEQ ID NO: 27146 - protein, 10 aa, synthetic construct
GAGTKLTVKP

SEQ ID NO: 27147 - protein, 9 aa, synthetic construct
GSGTRLLVI

SEQ ID NO: 27148 - protein, 10 aa, synthetic construct
GKGTHLHVLP

SEQ ID NO: 27149 - protein, 9 aa, synthetic construct
GKGTRLTVV

SEQ ID NO: 27150 - protein, 10 aa, synthetic construct
GHGTILRVHP

SEQ ID NO: 27151 - protein, 9 aa, synthetic construct
GKGTRLTVV

SEQ ID NO: 27152 - protein, 10 aa, synthetic construct
GKGTSLTVIP

SEQ ID NO: 27153 - protein, 9 aa, synthetic construct
GKGTRLTVV

SEQ ID NO: 27154 - protein, 10 aa, synthetic construct
GKGTSLTVIP

SEQ ID NO: 27155 - protein, 9 aa, synthetic construct
GPGTRLLVL

SEQ ID NO: 27156 - protein, 10 aa, synthetic construct
GLGTILRVRP

SEQ ID NO: 27157 - protein, 9 aa, synthetic construct
GPGTRLTVL

SEQ ID NO: 27158 - protein, 10 aa, synthetic construct
GIGTRVLVRP

SEQ ID NO: 27159 - protein, 9 aa, synthetic construct
GPGTRLTVL

SEQ ID NO: 27160 - protein, 10 aa, synthetic construct
GTGTSLLVDP

SEQ ID NO: 27161 - protein, 9 aa, synthetic construct
GKGTRLTVV

SEQ ID NO: 27162 - protein, 10 aa, synthetic construct
GDGTVLTVKP

SEQ ID NO: 27163 - protein, 9 aa, synthetic construct
GPGTRLTVL

SEQ ID NO: 27164 - protein, 10 aa, synthetic construct
GKGTLLTVTP

SEQ ID NO: 27165 - protein, 9 aa, synthetic construct
GSGTRLLVI

SEQ ID NO: 27166 - protein, 10 aa, synthetic construct
GKGTLLTVTP

SEQ ID NO: 27167 - protein, 9 aa, synthetic construct
GKGTRLTVV

SEQ ID NO: 27168 - protein, 10 aa, synthetic construct
GKGTLLTVTP

SEQ ID NO: 27169 - protein, 9 aa, synthetic construct
GEGSKLTVL

SEQ ID NO: 27170 - protein, 10 aa, synthetic construct
GHGTILRVHP

SEQ ID NO: 27171 - protein, 9 aa, synthetic construct
GKGTRLTVV

SEQ ID NO: 27172 - protein, 10 aa, synthetic construct
GKGTKLSVKS

SEQ ID NO: 27173 - protein, 9 aa, synthetic construct
GKGTRLTVV

SEQ ID NO: 27174 - protein, 10 aa, synthetic construct
GKGTLLTVTP

SEQ ID NO: 27175 - protein, 9 aa, synthetic construct
GEGSKLTVL

SEQ ID NO: 27176 - protein, 10 aa, synthetic construct
GAGTKLTIKP

SEQ ID NO: 27177 - protein, 9 aa, synthetic construct
GHGTKLSVL

SEQ ID NO: 27178 - protein, 10 aa, synthetic construct
GAGTKLTIKP

SEQ ID NO: 27179 - protein, 9 aa, synthetic construct
GPGTRLLVL

SEQ ID NO: 27180 - protein, 10 aa, synthetic construct
GDGTQLVVKP

SEQ ID NO: 27181 - protein, 9 aa, synthetic construct
GPGTRLTVL

SEQ ID NO: 27182 - protein, 10 aa, synthetic construct
GAGTKLTIKP

SEQ ID NO: 27183 - protein, 9 aa, synthetic construct
GPGTRLLVL

SEQ ID NO: 27184 - protein, 10 aa, synthetic construct
GSGTQLTVMP

SEQ ID NO: 27185 - protein, 9 aa, synthetic construct
GEGSKLTVL

SEQ ID NO: 27186 - protein, 10 aa, synthetic construct
GSGTKLIIKP

SEQ ID NO: 27187 - protein, 9 aa, synthetic construct
GPGTRLTVL

SEQ ID NO: 27188 - protein, 10 aa, synthetic construct
GTGTRLQVSP

SEQ ID NO: 27189 - protein, 9 aa, synthetic construct
GPGTRLTVL

SEQ ID NO: 27190 - protein, 10 aa, synthetic construct
GLGTRVSVFP

SEQ ID NO: 27191 - protein, 9 aa, synthetic construct
AAGTRLTVT

SEQ ID NO: 27192 - protein, 10 aa, synthetic construct
GDGTQLVVKP

SEQ ID NO: 27193 - protein, 9 aa, synthetic construct
GPGTRLTVL

SEQ ID NO: 27194 - protein, 10 aa, synthetic construct
GKGTKLSVKS

SEQ ID NO: 27195 - protein, 9 aa, synthetic construct
GPGTRLLVL

SEQ ID NO: 27196 - protein, 10 aa, synthetic construct
GSGTQLTVMP

SEQ ID NO: 27197 - protein, 9 aa, synthetic construct
GEGSKLTVL

SEQ ID NO: 27198 - protein, 11 aa, synthetic construct
GSGTKVIVLPY

SEQ ID NO: 27199 - protein, 9 aa, synthetic construct
GPGTRLTVL

SEQ ID NO: 27200 - protein, 10 aa, synthetic construct
GKGTVLLVSP

SEQ ID NO: 27201 - protein, 9 aa, synthetic construct
GPGTRLTVL

SEQ ID NO: 27202 - protein, 10 aa, synthetic construct
GDGTQLVVKP

SEQ ID NO: 27203 - protein, 9 aa, synthetic construct
GPGTRLTVL

SEQ ID NO: 27204 - protein, 10 aa, synthetic construct
GKGTSLTVIP

SEQ ID NO: 27205 - protein, 9 aa, synthetic construct
GHGTKLSVL

SEQ ID NO: 27206 - protein, 10 aa, synthetic construct
GKGTHLHVLP

SEQ ID NO: 27207 - protein, 9 aa, synthetic construct
AAGTRLTVT

SEQ ID NO: 27208 - protein, 10 aa, synthetic construct
GQGTKLSIKP

SEQ ID NO: 27209 - protein, 9 aa, synthetic construct
GPGTRLTVL

SEQ ID NO: 27210 - protein, 10 aa, synthetic construct
GDGTQLVVKP

SEQ ID NO: 27211 - protein, 9 aa, synthetic construct
GEGTRLSVL

SEQ ID NO: 27212 - protein, 10 aa, synthetic construct
GKGTQLIIQP

SEQ ID NO: 27213 - protein, 9 aa, synthetic construct
GPGTRLLVL

SEQ ID NO: 27214 - protein, 10 aa, synthetic construct
GKGTHLHVLP

SEQ ID NO: 27215 - protein, 9 aa, synthetic construct
GSGTRLLVI

SEQ ID NO: 27216 - protein, 10 aa, synthetic construct
GLGTTLQVQP

SEQ ID NO: 27217 - protein, 9 aa, synthetic construct
GPGTRLTVL

SEQ ID NO: 27218 - protein, 10 aa, synthetic construct
GQGTILKVYL

SEQ ID NO: 27219 - protein, 9 aa, synthetic construct
GPGTRLLVL

SEQ ID NO: 27220 - protein, 10 aa, synthetic construct
GKGTQLIIQP

SEQ ID NO: 27221 - protein, 9 aa, synthetic construct
GSGTRLTVL

SEQ ID NO: 27222 - protein, 10 aa, synthetic construct
GKGTLLTVTP

SEQ ID NO: 27223 - DNA, 28 bp, synthetic construct
  source 1..28: mol_type = other DNA
ggagaggggactcgactctctgttctag

SEQ ID NO: 27224 - DNA, 31 bp, synthetic construct; identical to SEQ ID NO: 17828
  source 1..31: mol_type = other DNA

SEQ ID NO: 27225 - DNA, 28 bp, synthetic construct
  source 1..28: mol_type = other DNA
ggaccagggacacgactcaccgtcctag

SEQ ID NO: 27226 - DNA, 31 bp, synthetic construct; identical to SEQ ID NO: 17828
  source 1..31: mol_type = other DNA

SEQ ID NO: 27227 - DNA, 28 bp, synthetic construct
  source 1..28: mol_type = other DNA
ggagaaggaagccggctcattgttgtag

SEQ ID NO: 27228 - DNA, 31 bp, synthetic construct; identical to SEQ ID NO: 18232
  source 1..31: mol_type = other DNA

SEQ ID NO: 27229 - DNA, 28 bp, synthetic construct
  source 1..28: mol_type = other DNA
ggctcaggaaccagactgactgttctcg

SEQ ID NO: 27230 - DNA, 31 bp, synthetic construct; identical to SEQ ID NO: 17906
  source 1..31: mol_type = other DNA

SEQ ID NO: 27231 - DNA, 28 bp, synthetic construct
  source 1..28: mol_type = other DNA
ggtgaaggctcaaagctgacagtgctgg

SEQ ID NO: 27232 - DNA, 31 bp, synthetic construct; identical to SEQ ID NO: 17826
  source 1..31: mol_type = other DNA

SEQ ID NO: 27233 - DNA, 28 bp, synthetic construct
  source 1..28: mol_type = other DNA
ggaccagggacacgactcaccgtcctag

SEQ ID NO: 27234 - DNA, 31 bp, synthetic construct; identical to SEQ ID NO: 17884
  source 1..31: mol_type = other DNA

SEQ ID NO: 27235 - DNA, 28 bp, synthetic construct
  source 1..28: mol_type = other DNA
ggtaaaggaaccagactcacagttgtag

SEQ ID NO: 27236 - DNA, 31 bp, synthetic construct; identical to SEQ ID NO: 17850
  source 1..31: mol_type = other DNA

SEQ ID NO: 27237 - DNA, 28 bp, synthetic construct
  source 1..28: mol_type = other DNA
ggctcagggaccaggcttttggtaatag

SEQ ID NO: 27238 - DNA, 31 bp, synthetic construct; identical to SEQ ID NO: 17810
  source 1..31: mol_type = other DNA

SEQ ID NO: 27239 - DNA, 28 bp, synthetic construct
  source 1..28: mol_type = other DNA
gggccaggcactcggctcctcgtgttag

SEQ ID NO: 27240 - DNA, 31 bp, synthetic construct; identical to SEQ ID NO: 17898
  source 1..31: mol_type = other DNA

SEQ ID NO: 27241 - DNA, 28 bp, synthetic construct
  source 1..28: mol_type = other DNA
ggtcccggcaccaggctcacggttttag

SEQ ID NO: 27242 - DNA, 31 bp, synthetic construct; identical to SEQ ID NO: 17820
  source 1..31: mol_type = other DNA

SEQ ID NO: 27243 - DNA, 28 bp, synthetic construct
  source 1..28: mol_type = other DNA
ggaccagggacacgactcaccgtcctag

SEQ ID NO: 27244 - DNA, 34 bp, synthetic construct; identical to SEQ ID NO: 18488
  source 1..34: mol_type = other DNA

SEQ ID NO: 27245 - DNA, 28 bp, synthetic construct
  source 1..28: mol_type = other DNA
ggtgaaggctcaaagctgacagtgctgg

SEQ ID NO: 27246 - DNA, 31 bp, synthetic construct; identical to SEQ ID NO: 18126
  source 1..31: mol_type = other DNA

SEQ ID NO: 27247 - DNA, 28 bp, synthetic construct
  source 1..28: mol_type = other DNA
ggaccagggacacgactcaccgtcctag

SEQ ID NO: 27248 - DNA, 31 bp, synthetic construct; identical to SEQ ID NO: 17822
  source 1..31: mol_type = other DNA

SEQ ID NO: 27249 - DNA, 28 bp, synthetic construct
  source 1..28: mol_type = other DNA
ggtcatggaaccaagctgtctgtcctgg

SEQ ID NO: 27250 - DNA, 31 bp, synthetic construct; identical to SEQ ID NO: 17826
  source 1..31: mol_type = other DNA

SEQ ID NO: 27251 - DNA, 28 bp, synthetic construct
  source 1..28: mol_type = other DNA
ggaccagggacacgactcaccgtcctag

SEQ ID NO: 27252 - DNA, 31 bp, synthetic construct; identical to SEQ ID NO: 17900
  source 1..31: mol_type = other DNA

SEQ ID NO: 27253 - DNA, 28 bp, synthetic construct
  source 1..28: mol_type = other DNA
ggagaggggactcgactctctgttctag

SEQ ID NO: 27254 - DNA, 31 bp, synthetic construct; identical to SEQ ID NO: 17828
  source 1..31: mol_type = other DNA

SEQ ID NO: 27255 - DNA, 28 bp, synthetic construct
  source 1..28: mol_type = other DNA
ggagaaggaagccggctcattgttgtag

SEQ ID NO: 27256 - DNA, 31 bp, synthetic construct; identical to SEQ ID NO: 17840
  source 1..31: mol_type = other DNA

SEQ ID NO: 27257 - DNA, 28 bp, synthetic construct
  source 1..28: mol_type = other DNA
gcggcaggcacccggctcactgtgacag

SEQ ID NO: 27258 - DNA, 31 bp, synthetic construct; identical to SEQ ID NO: 17910
  source 1..31: mol_type = other DNA

SEQ ID NO: 27259 - DNA, 28 bp, synthetic construct
  source 1..28: mol_type = other DNA
ggtaaaggaaccagactcacagttgtag

SEQ ID NO: 27260 - DNA, 31 bp, synthetic construct; identical to SEQ ID NO: 17858
  source 1..31: mol_type = other DNA

SEQ ID NO: 27261 - DNA, 28 bp, synthetic construct
  source 1..28: mol_type = other DNA
ggtgaaggctcaaagctgacagtgctgg

SEQ ID NO: 27262 - DNA, 31 bp, synthetic construct; identical to SEQ ID NO: 17858
  source 1..31: mol_type = other DNA

SEQ ID NO: 27263 - DNA, 28 bp, synthetic construct
  source 1..28: mol_type = other DNA
ggtcatggaaccaagctgtctgtcctgg

SEQ ID NO: 27264 - DNA, 31 bp, synthetic construct; identical to SEQ ID NO: 17884
  source 1..31: mol_type = other DNA

SEQ ID NO: 27265 - DNA, 28 bp, synthetic construct
  source 1..28: mol_type = other DNA
ggtcatggaaccaagctgtctgtcctgg

SEQ ID NO: 27266 - DNA, 31 bp, synthetic construct; identical to SEQ ID NO: 17840
  source 1..31: mol_type = other DNA

SEQ ID NO: 27267 - DNA, 28 bp, synthetic construct
  source 1..28: mol_type = other DNA
ggtcccggcaccaggctcacggttttag

SEQ ID NO: 27268 - DNA, 31 bp, synthetic construct; identical to SEQ ID NO: 17840
  source 1..31: mol_type = other DNA

SEQ ID NO: 27269 - DNA, 28 bp, synthetic construct
  source 1..28: mol_type = other DNA
ggtaaaggaaccagactcacagttgtag

SEQ ID NO: 27270 - DNA, 31 bp, synthetic construct; identical to SEQ ID NO: 17850
  source 1..31: mol_type = other DNA

SEQ ID NO: 27271 - DNA, 28 bp, synthetic construct
  source 1..28: mol_type = other DNA
ggagaaggaagccggctcattgttgtag

SEQ ID NO: 27272 - DNA, 31 bp, synthetic construct; identical to SEQ ID NO: 17820
  source 1..31: mol_type = other DNA

SEQ ID NO: 27273 - DNA, 28 bp, synthetic construct
  source 1..28: mol_type = other DNA
gggccaggcactcggctcctcgtgttag

SEQ ID NO: 27274 - DNA, 31 bp, synthetic construct; identical to SEQ ID NO: 17864
  source 1..31: mol_type = other DNA

SEQ ID NO: 27275 - DNA, 28 bp, synthetic construct
  source 1..28: mol_type = other DNA
ggtcccggcaccaggctcacggttttag

SEQ ID NO: 27276 - DNA, 31 bp, synthetic construct; identical to SEQ ID NO: 18006
  source 1..31: mol_type = other DNA

SEQ ID NO: 27277 - DNA, 28 bp, synthetic construct
  source 1..28: mol_type = other DNA
ggtcccggcaccaggctcacggttttag

SEQ ID NO: 27278 - DNA, 31 bp, synthetic construct; identical to SEQ ID NO: 18064
  source 1..31: mol_type = other DNA

SEQ ID NO: 27279 - DNA, 28 bp, synthetic construct
  source 1..28: mol_type = other DNA
ggtcccggcaccaggctcacggttttag

SEQ ID NO: 27280 - DNA, 31 bp, synthetic construct; identical to SEQ ID NO: 17828
  source 1..31: mol_type = other DNA

SEQ ID NO: 27281 - DNA, 28 bp, synthetic construct
  source 1..28: mol_type = other DNA
ggaccagggacacgactcaccgtcctag

SEQ ID NO: 27282 - DNA, 31 bp, synthetic construct; identical to SEQ ID NO: 17850
  source 1..31: mol_type = other DNA

SEQ ID NO: 27283 - DNA, 28 bp, synthetic construct
  source 1..28: mol_type = other DNA
gggccaggcactcggctcctcgtgttag

SEQ ID NO: 27284 - DNA, 31 bp, synthetic construct; identical to SEQ ID NO: 17856
  source 1..31: mol_type = other DNA

SEQ ID NO: 27285 - DNA, 28 bp, synthetic construct
  source 1..28: mol_type = other DNA
gcggcaggcacccggctcactgtgacag

SEQ ID NO: 27286 - DNA, 31 bp, synthetic construct; identical to SEQ ID NO: 18776
  source 1..31: mol_type = other DNA

SEQ ID NO: 27287 - DNA, 28 bp, synthetic construct
  source 1..28: mol_type = other DNA
ggtgcgggcacccgactatcggtgctag

SEQ ID NO: 27288 - DNA, 31 bp, synthetic construct; identical to SEQ ID NO: 18126
  source 1..31: mol_type = other DNA

SEQ ID NO: 27289 - DNA, 28 bp, synthetic construct
  source 1..28: mol_type = other DNA
ggaccagggacacgactcaccgtcctag

SEQ ID NO: 27290 - DNA, 31 bp, synthetic construct; identical to SEQ ID NO: 17908
  source 1..31: mol_type = other DNA

SEQ ID NO: 27291 - DNA, 28 bp, synthetic construct
  source 1..28: mol_type = other DNA
ggtcccggcaccaggctcacggttttag

SEQ ID NO: 27292 - DNA, 31 bp, synthetic construct; identical to SEQ ID NO: 17814
  source 1..31: mol_type = other DNA

SEQ ID NO: 27293 - DNA, 28 bp, synthetic construct
  source 1..28: mol_type = other DNA
ggtaaaggaaccagactcacagttgtag

SEQ ID NO: 27294 - DNA, 31 bp, synthetic construct; identical to SEQ ID NO: 17940
  source 1..31: mol_type = other DNA

SEQ ID NO: 27295 - DNA, 28 bp, synthetic construct
  source 1..28: mol_type = other DNA
ggtcccggcaccaggctcacggttttag

SEQ ID NO: 27296 - DNA, 31 bp, synthetic construct; identical to SEQ ID NO: 17864
  source 1..31: mol_type = other DNA

SEQ ID NO: 27297 - DNA, 28 bp, synthetic construct
  source 1..28: mol_type = other DNA
ggctcaggaaccagactgactgttctcg

SEQ ID NO: 27298 - DNA, 31 bp, synthetic construct; identical to SEQ ID NO: 18232
  source 1..31: mol_type = other DNA

SEQ ID NO: 27299 - DNA, 28 bp, synthetic construct
  source 1..28: mol_type = other DNA
ggaccagggacacgactcaccgtcctag

SEQ ID NO: 27300 - DNA, 31 bp, synthetic construct; identical to SEQ ID NO: 17906
  source 1..31: mol_type = other DNA

SEQ ID NO: 27301 - DNA, 28 bp, synthetic construct
  source 1..28: mol_type = other DNA
gcggcaggcacccggctcactgtgacag

SEQ ID NO: 27302 - DNA, 31 bp, synthetic construct; identical to SEQ ID NO: 18776
  source 1..31: mol_type = other DNA

SEQ ID NO: 27303 - DNA, 28 bp, synthetic construct
  source 1..28: mol_type = other DNA
ggctcaggaaccagactgactgttctcg

SEQ ID NO: 27304 - DNA, 31 bp, synthetic construct; identical to SEQ ID NO: 18006
  source 1..31: mol_type = other DNA

SEQ ID NO: 27305 - DNA, 28 bp, synthetic construct
  source 1..28: mol_type = other DNA
ggagaaggaagccggctcattgttgtag

SEQ ID NO: 27306 - DNA, 31 bp, synthetic construct; identical to SEQ ID NO: 17906
  source 1..31: mol_type = other DNA

SEQ ID NO: 27307 - DNA, 28 bp, synthetic construct
  source 1..28: mol_type = other DNA
ggctcaggaaccagactgactgttctcg

SEQ ID NO: 27308 - DNA, 31 bp, synthetic construct; identical to SEQ ID NO: 18776
  source 1..31: mol_type = other DNA

SEQ ID NO: 27309 - DNA, 28 bp, synthetic construct
  source 1..28: mol_type = other DNA
ggaccagggacacgactcaccgtcctag

SEQ ID NO: 27310 - DNA, 31 bp, synthetic construct; identical to SEQ ID NO: 18008
  source 1..31: mol_type = other DNA

SEQ ID NO: 27311 - DNA, 28 bp, synthetic construct
  source 1..28: mol_type = other DNA
ggagaaggaagccggctcattgttgtag

SEQ ID NO: 27312 - DNA, 31 bp, synthetic construct; identical to SEQ ID NO: 17810
  source 1..31: mol_type = other DNA

SEQ ID NO: 27313 - DNA, 28 bp, synthetic construct
  source 1..28: mol_type = other DNA
ggtgcgggcacccgactatcggtgctag

SEQ ID NO: 27314 - DNA, 31 bp, synthetic construct; identical to SEQ ID NO: 17884
  source 1..31: mol_type = other DNA

SEQ ID NO: 27315 - DNA, 28 bp, synthetic construct
  source 1..28: mol_type = other DNA
ggaccagggacacgactcaccgtcctag

SEQ ID NO: 27316 - DNA, 31 bp, synthetic construct; identical to SEQ ID NO: 18064
  source 1..31: mol_type = other DNA

SEQ ID NO: 27317 - DNA, 28 bp, synthetic construct
  source 1..28: mol_type = other DNA
ggaccagggacacgactcaccgtcctag

SEQ ID NO: 27318 - DNA, 31 bp, synthetic construct; identical to SEQ ID NO: 17812
  source 1..31: mol_type = other DNA

SEQ ID NO: 27319 - DNA, 28 bp, synthetic construct
  source 1..28: mol_type = other DNA
ggctcaggaaccagactgactgttctcg

SEQ ID NO: 27320 - DNA, 31 bp, synthetic construct; identical to SEQ ID NO: 17900
  source 1..31: mol_type = other DNA

SEQ ID NO: 27321 - DNA, 28 bp, synthetic construct
  source 1..28: mol_type = other DNA
ggagaggggactcgactctctgttctag

SEQ ID NO: 27322 - DNA, 31 bp, synthetic construct; identical to SEQ ID NO: 17906
  source 1..31: mol_type = other DNA

SEQ ID NO: 27323 - DNA, 28 bp, synthetic construct
  source 1..28: mol_type = other DNA
ggtcatggaaccaagctgtctgtcctgg

SEQ ID NO: 27324 - DNA, 31 bp, synthetic construct; identical to SEQ ID NO: 18182
  source 1..31: mol_type = other DNA

SEQ ID NO: 27325 - DNA, 28 bp, synthetic construct
  source 1..28: mol_type = other DNA
ggtgaaggctcaaagctgacagtgctgg

SEQ ID NO: 27326 - DNA, 31 bp, synthetic construct; identical to SEQ ID NO: 18504
  source 1..31: mol_type = other DNA

SEQ ID NO: 27327 - DNA, 28 bp, synthetic construct
  source 1..28: mol_type = other DNA
ggtcatggaaccaagctgtctgtcctgg

SEQ ID NO: 27328 - DNA, 31 bp, synthetic construct; identical to SEQ ID NO: 17838
  source 1..31: mol_type = other DNA

SEQ ID NO: 27329 - DNA, 28 bp, synthetic construct
  source 1..28: mol_type = other DNA
ggtcccggcaccaggctcacggttttag

SEQ ID NO: 27330 - DNA, 31 bp, synthetic construct; identical to SEQ ID NO: 18008
  source 1..31: mol_type = other DNA

SEQ ID NO: 27331 - DNA, 28 bp, synthetic construct
  source 1..28: mol_type = other DNA
ggtcccggcaccaggctcacggttttag

SEQ ID NO: 27332 - DNA, 31 bp, synthetic construct; identical to SEQ ID NO: 17844
  source 1..31: mol_type = other DNA

SEQ ID NO: 27333 - DNA, 28 bp, synthetic construct
  source 1..28: mol_type = other DNA
ggtgcgggcacccgactatcggtgctag

SEQ ID NO: 27334 - DNA, 31 bp, synthetic construct; identical to SEQ ID NO: 17932
  source 1..31: mol_type = other DNA

SEQ ID NO: 27335 - DNA, 28 bp, synthetic construct
  source 1..28: mol_type = other DNA
ggtcccggcaccaggctcacggttttag

SEQ ID NO: 27336 - DNA, 31 bp, synthetic construct; identical to SEQ ID NO: 17900
  source 1..31: mol_type = other DNA

SEQ ID NO: 27337 - DNA, 28 bp, synthetic construct
  source 1..28: mol_type = other DNA
ggctcaggaaccagactgactgttctcg

SEQ ID NO: 27338 - DNA, 31 bp, synthetic construct; identical to SEQ ID NO: 18092
  source 1..31: mol_type = other DNA

SEQ ID NO: 27339 - DNA, 28 bp, synthetic construct
  source 1..28: mol_type = other DNA
gggccaggcactcggctcctcgtgttag

SEQ ID NO: 27340 - DNA, 31 bp, synthetic construct; identical to SEQ ID NO: 17858
  source 1..31: mol_type = other DNA

SEQ ID NO: 27341 - DNA, 28 bp, synthetic construct
  source 1..28: mol_type = other DNA
ggaccagggacacgactcaccgtcctag

SEQ ID NO: 27342 - DNA, 31 bp, synthetic construct; identical to SEQ ID NO: 17820
  source 1..31: mol_type = other DNA

SEQ ID NO: 27343 - DNA, 28 bp, synthetic construct
  source 1..28: mol_type = other DNA
ggaccagggacacgactcaccgtcctag

SEQ ID NO: 27344 - DNA, 31 bp, synthetic construct; identical to SEQ ID NO: 17840
  source 1..31: mol_type = other DNA

SEQ ID NO: 27345 - DNA, 28 bp, synthetic construct
  source 1..28: mol_type = other DNA
ggaccagggacacgactcaccgtcctag

SEQ ID NO: 27346 - DNA, 31 bp, synthetic construct; identical to SEQ ID NO: 17840
  source 1..31: mol_type = other DNA

SEQ ID NO: 27347 - DNA, 28 bp, synthetic construct
  source 1..28: mol_type = other DNA
ggtaaaggaaccagactcacagttgtag

SEQ ID NO: 27348 - DNA, 31 bp, synthetic construct; identical to SEQ ID NO: 18182
  source 1..31: mol_type = other DNA

SEQ ID NO: 27349 - DNA, 28 bp, synthetic construct
  source 1..28: mol_type = other DNA
ggtgcgggcacccgactatcggtgctag

SEQ ID NO: 27350 - DNA, 31 bp, synthetic construct; identical to SEQ ID NO: 18064
  source 1..31: mol_type = other DNA

SEQ ID NO: 27351 - DNA, 28 bp, synthetic construct
  source 1..28: mol_type = other DNA
ggtaaaggaaccagactcacagttgtag

SEQ ID NO: 27352 - DNA, 31 bp, synthetic construct; identical to SEQ ID NO: 17816
  source 1..31: mol_type = other DNA

SEQ ID NO: 27353 - DNA, 28 bp, synthetic construct
  source 1..28: mol_type = other DNA
gggccaggcactcggctcctcgtgttag

SEQ ID NO: 27354 - DNA, 31 bp, synthetic construct; identical to SEQ ID NO: 17816
  source 1..31: mol_type = other DNA

SEQ ID NO: 27355 - DNA, 28 bp, synthetic construct
  source 1..28: mol_type = other DNA
ggtcccggcaccaggctcacggttttag

SEQ ID NO: 27356 - DNA, 31 bp, synthetic construct; identical to SEQ ID NO: 17900
  source 1..31: mol_type = other DNA

SEQ ID NO: 27357 - DNA, 28 bp, synthetic construct
  source 1..28: mol_type = other DNA
ggagaaggaagccggctcattgttgtag

SEQ ID NO: 27358 - DNA, 31 bp, synthetic construct; identical to SEQ ID NO: 18944
  source 1..31: mol_type = other DNA

SEQ ID NO: 27359 - DNA, 28 bp, synthetic construct
  source 1..28: mol_type = other DNA
ggaccagggacacgactcaccgtcctag

SEQ ID NO: 27360 - DNA, 31 bp, synthetic construct; identical to SEQ ID NO: 17972
  source 1..31: mol_type = other DNA

SEQ ID NO: 27361 - DNA, 28 bp, synthetic construct
  source 1..28: mol_type = other DNA
ggtaaaggaaccagactcacagttgtag

SEQ ID NO: 27362 - DNA, 31 bp, synthetic construct; identical to SEQ ID NO: 18182
  source 1..31: mol_type = other DNA

SEQ ID NO: 27363 - DNA, 28 bp, synthetic construct
  source 1..28: mol_type = other DNA
ggctcaggaaccagactgactgttctcg

SEQ ID NO: 27364 - DNA, 31 bp, synthetic construct; identical to SEQ ID NO: 18232
  source 1..31: mol_type = other DNA

SEQ ID NO: 27365 - DNA, 28 bp, synthetic construct
  source 1..28: mol_type = other DNA
ggtcccggcaccaggctcacggttttag

SEQ ID NO: 27366 - DNA, 31 bp, synthetic construct; identical to SEQ ID NO: 17940
  source 1..31: mol_type = other DNA

SEQ ID NO: 27367 - DNA, 28 bp, synthetic construct
  source 1..28: mol_type = other DNA
ggtaaaggaaccagactcacagttgtag

SEQ ID NO: 27368 - DNA, 31 bp, synthetic construct; identical to SEQ ID NO: 17906
  source 1..31: mol_type = other DNA

SEQ ID NO: 27369 - DNA, 28 bp, synthetic construct
  source 1..28: mol_type = other DNA
ggtcccggcaccaggctcacggttttag

SEQ ID NO: 27370 - DNA, 31 bp, synthetic construct; identical to SEQ ID NO: 17832
  source 1..31: mol_type = other DNA

SEQ ID NO: 27371 - DNA, 28 bp, synthetic construct
  source 1..28: mol_type = other DNA
ggtaaaggaaccagactcacagttgtag

SEQ ID NO: 27372 - DNA, 31 bp, synthetic construct; identical to SEQ ID NO: 17834
  source 1..31: mol_type = other DNA

SEQ ID NO: 27373 - DNA, 28 bp, synthetic construct
  source 1..28: mol_type = other DNA
ggtcccggcaccaggctcacggttttag

SEQ ID NO: 27374 - DNA, 31 bp, synthetic construct; identical to SEQ ID NO: 17820
  source 1..31: mol_type = other DNA

SEQ ID NO: 27375 - DNA, 28 bp, synthetic construct
  source 1..28: mol_type = other DNA
ggctcaggaaccagactgactgttctcg

SEQ ID NO: 27376 - DNA, 31 bp, synthetic construct; identical to SEQ ID NO: 17816
  source 1..31: mol_type = other DNA

SEQ ID NO: 27377 - DNA, 28 bp, synthetic construct
  source 1..28: mol_type = other DNA
ggtaaaggaaccagactcacagttgtag

SEQ ID NO: 27378 - DNA, 31 bp, synthetic construct; identical to SEQ ID NO: 18126
  source 1..31: mol_type = other DNA

SEQ ID NO: 27379 - DNA, 28 bp, synthetic construct
  source 1..28: mol_type = other DNA
ggtcatggaaccaagctgtctgtcctgg

SEQ ID NO: 27380 - DNA, 31 bp, synthetic construct; identical to SEQ ID NO: 17940
  source 1..31: mol_type = other DNA

SEQ ID NO: 27381 - DNA, 28 bp, synthetic construct
  source 1..28: mol_type = other DNA
ggagaaggaagccggctcattgttgtag

SEQ ID NO: 27382 - DNA, 31 bp, synthetic construct; identical to SEQ ID NO: 17814
  source 1..31: mol_type = other DNA

SEQ ID NO: 27383 - DNA, 28 bp, synthetic construct
  source 1..28: mol_type = other DNA
gggccaggcactcggctcctcgtgttag

SEQ ID NO: 27384 - DNA, 31 bp, synthetic construct; identical to SEQ ID NO: 17832
  source 1..31: mol_type = other DNA

SEQ ID NO: 27385 - DNA, 28 bp, synthetic construct
  source 1..28: mol_type = other DNA
ggctcaggaaccagactgactgttctcg

SEQ ID NO: 27386 - DNA, 31 bp, synthetic construct; identical to SEQ ID NO: 17884
  source 1..31: mol_type = other DNA

SEQ ID NO: 27387 - DNA, 28 bp, synthetic construct
  source 1..28: mol_type = other DNA
ggtcccggcaccaggctcacggttttag

SEQ ID NO: 27388 - DNA, 31 bp, synthetic construct; identical to SEQ ID NO: 17810
  source 1..31: mol_type = other DNA

SEQ ID NO: 27389 - DNA, 28 bp, synthetic construct
  source 1..28: mol_type = other DNA
ggagaggggactcgactctctgttctag

SEQ ID NO: 27390 - DNA, 31 bp, synthetic construct; identical to SEQ ID NO: 17884
  source 1..31: mol_type = other DNA

SEQ ID NO: 27391 - DNA, 28 bp, synthetic construct
  source 1..28: mol_type = other DNA
gggccaggcactcggctcctcgtgttag

SEQ ID NO: 27392 - DNA, 31 bp, synthetic construct; identical to SEQ ID NO: 17856
  source 1..31: mol_type = other DNA

SEQ ID NO: 27393 - DNA, 28 bp, synthetic construct
  source 1..28: mol_type = other DNA
ggtcatggaaccaagctgtctgtcctgg

SEQ ID NO: 27394 - DNA, 31 bp, synthetic construct; identical to SEQ ID NO: 17850
  source 1..31: mol_type = other DNA

SEQ ID NO: 27395 - DNA, 28 bp, synthetic construct
  source 1..28: mol_type = other DNA
ggtaaaggaaccagactcacagttgtag

SEQ ID NO: 27396 - DNA, 31 bp, synthetic construct; identical to SEQ ID NO: 17868
  source 1..31: mol_type = other DNA

SEQ ID NO: 27397 - DNA, 28 bp, synthetic construct
  source 1..28: mol_type = other DNA
ggtaaaggaaccagactcacagttgtag

SEQ ID NO: 27398 - DNA, 31 bp, synthetic construct; identical to SEQ ID NO: 17868
  source 1..31: mol_type = other DNA

SEQ ID NO: 27399 - DNA, 28 bp, synthetic construct
  source 1..28: mol_type = other DNA
gcggcaggcacccggctcactgtgacag

SEQ ID NO: 27400 - DNA, 31 bp, synthetic construct; identical to SEQ ID NO: 17858
  source 1..31: mol_type = other DNA

SEQ ID NO: 27401 - DNA, 28 bp, synthetic construct
  source 1..28: mol_type = other DNA
gggccaggcactcggctcctcgtgttag

SEQ ID NO: 27402 - DNA, 31 bp, synthetic construct; identical to SEQ ID NO: 17812
  source 1..31: mol_type = other DNA

SEQ ID NO: 27403 - DNA, 28 bp, synthetic construct
  source 1..28: mol_type = other DNA
gggccaggcactcggctcctcgtgttag

SEQ ID NO: 27404 - DNA, 31 bp, synthetic construct; identical to SEQ ID NO: 17850
  source 1..31: mol_type = other DNA

SEQ ID NO: 27405 - DNA, 28 bp, synthetic construct
  source 1..28: mol_type = other DNA
ggctcaggaaccagactgactgttctcg

SEQ ID NO: 27406 - DNA, 31 bp, synthetic construct; identical to SEQ ID NO: 17822
  source 1..31: mol_type = other DNA

SEQ ID NO: 27407 - DNA, 28 bp, synthetic construct
  source 1..28: mol_type = other DNA
ggtaaaggaaccagactcacagttgtag

SEQ ID NO: 27408 - DNA, 31 bp, synthetic construct; identical to SEQ ID NO: 18176
  source 1..31: mol_type = other DNA

SEQ ID NO: 27409 - DNA, 28 bp, synthetic construct
  source 1..28: mol_type = other DNA
ggtcatggaaccaagctgtctgtcctgg

SEQ ID NO: 27410 - DNA, 31 bp, synthetic construct; identical to SEQ ID NO: 17828
  source 1..31: mol_type = other DNA

SEQ ID NO: 27411 - DNA, 28 bp, synthetic construct
  source 1..28: mol_type = other DNA
gggccaggcactcggctcctcgtgttag

SEQ ID NO: 27412 - DNA, 31 bp, synthetic construct; identical to SEQ ID NO: 17916
  source 1..31: mol_type = other DNA

SEQ ID NO: 27413 - DNA, 28 bp, synthetic construct
  source 1..28: mol_type = other DNA
ggctcagggaccaggcttttggtaatag

SEQ ID NO: 27414 - DNA, 31 bp, synthetic construct; identical to SEQ ID NO: 18176
  source 1..31: mol_type = other DNA

SEQ ID NO: 27415 - DNA, 28 bp, synthetic construct
  source 1..28: mol_type = other DNA
ggtcatggaaccaagctgtctgtcctgg

SEQ ID NO: 27416 - DNA, 31 bp, synthetic construct; identical to SEQ ID NO: 17862
  source 1..31: mol_type = other DNA

SEQ ID NO: 27417 - DNA, 28 bp, synthetic construct
  source 1..28: mol_type = other DNA
ggtcccggcaccaggctcacggttttag

SEQ ID NO: 27418 - DNA, 31 bp, synthetic construct; identical to SEQ ID NO: 17884
  source 1..31: mol_type = other DNA

SEQ ID NO: 27419 - DNA, 28 bp, synthetic construct
  source 1..28: mol_type = other DNA
ggctcaggaaccagactgactgttctcg

SEQ ID NO: 27420 - DNA, 31 bp, synthetic construct; identical to SEQ ID NO: 18504
  source 1..31: mol_type = other DNA

SEQ ID NO: 27421 - DNA, 28 bp, synthetic construct
  source 1..28: mol_type = other DNA
gggccaggcactcggctcctcgtgttag

SEQ ID NO: 27422 - DNA, 31 bp, synthetic construct; identical to SEQ ID NO: 17878
  source 1..31: mol_type = other DNA

SEQ ID NO: 27423 - DNA, 28 bp, synthetic construct
  source 1..28: mol_type = other DNA
ggctcagggaccaggcttttggtaatag

SEQ ID NO: 27424 - DNA, 31 bp, synthetic construct; identical to SEQ ID NO: 18166
  source 1..31: mol_type = other DNA

SEQ ID NO: 27425 - DNA, 28 bp, synthetic construct
  source 1..28: mol_type = other DNA
ggtaaaggaaccagactcacagttgtag

SEQ ID NO: 27426 - DNA, 31 bp, synthetic construct; identical to SEQ ID NO: 17868
  source 1..31: mol_type = other DNA

SEQ ID NO: 27427 - DNA, 28 bp, synthetic construct
  source 1..28: mol_type = other DNA
ggaccagggacacgactcaccgtcctag

SEQ ID NO: 27428 - DNA, 31 bp, synthetic construct; identical to SEQ ID NO: 17850
  source 1..31: mol_type = other DNA

SEQ ID NO: 27429 - DNA, 28 bp, synthetic construct
  source 1..28: mol_type = other DNA
ggaccagggacacgactcaccgtcctag

SEQ ID NO: 27430 - DNA, 31 bp, synthetic construct; identical to SEQ ID NO: 17868
  source 1..31: mol_type = other DNA

SEQ ID NO: 27431 - DNA, 28 bp, synthetic construct
  source 1..28: mol_type = other DNA
ggtcccggcaccaggctcacggttttag

SEQ ID NO: 27432 - DNA, 31 bp, synthetic construct; identical to SEQ ID NO: 17864
  source 1..31: mol_type = other DNA

SEQ ID NO: 27433 - DNA, 28 bp, synthetic construct
  source 1..28: mol_type = other DNA
ggctcagggaccaggcttttggtaatag

SEQ ID NO: 27434 - DNA, 31 bp, synthetic construct; identical to SEQ ID NO: 17828
  source 1..31: mol_type = other DNA

SEQ ID NO: 27435 - DNA, 28 bp, synthetic construct
  source 1..28: mol_type = other DNA
gggccaggcactcggctcctcgtgttag

SEQ ID NO: 27436 - DNA, 31 bp, synthetic construct; identical to SEQ ID NO: 17814
  source 1..31: mol_type = other DNA

SEQ ID NO: 27437 - DNA, 28 bp, synthetic construct
  source 1..28: mol_type = other DNA
ggtcccggcaccaggctcacggttttag

SEQ ID NO: 27438 - DNA, 31 bp, synthetic construct; identical to SEQ ID NO: 17878
  source 1..31: mol_type = other DNA

SEQ ID NO: 27439 - DNA, 28 bp, synthetic construct
  source 1..28: mol_type = other DNA
gggccaggcactcggctcctcgtgttag

SEQ ID NO: 27440 - DNA, 31 bp, synthetic construct; identical to SEQ ID NO: 17878
  source 1..31: mol_type = other DNA

SEQ ID NO: 27441 - DNA, 28 bp, synthetic construct
  source 1..28: mol_type = other DNA
ggtcccggcaccaggctcacggttttag

SEQ ID NO: 27442 - DNA, 31 bp, synthetic construct; identical to SEQ ID NO: 17898
  source 1..31: mol_type = other DNA

SEQ ID NO: 27443 - DNA, 28 bp, synthetic construct
  source 1..28: mol_type = other DNA
ggtgaaggctcaaagctgacagtgctgg

SEQ ID NO: 27444 - DNA, 31 bp, synthetic construct; identical to SEQ ID NO: 17864
  source 1..31: mol_type = other DNA

SEQ ID NO: 27445 - DNA, 28 bp, synthetic construct
  source 1..28: mol_type = other DNA
gggccaggcactcggctcctcgtgttag

SEQ ID NO: 27446 - DNA, 31 bp, synthetic construct; identical to SEQ ID NO: 17878
  source 1..31: mol_type = other DNA

SEQ ID NO: 27447 - DNA, 28 bp, synthetic construct
  source 1..28: mol_type = other DNA
gggccaggcactcggctcctcgtgttag

SEQ ID NO: 27448 - DNA, 31 bp, synthetic construct; identical to SEQ ID NO: 18232
  source 1..31: mol_type = other DNA

SEQ ID NO: 27449 - DNA, 28 bp, synthetic construct
  source 1..28: mol_type = other DNA
ggtcccggcaccaggctcacggttttag

SEQ ID NO: 27450 - DNA, 31 bp, synthetic construct; identical to SEQ ID NO: 17996
  source 1..31: mol_type = other DNA

SEQ ID NO: 27451 - DNA, 28 bp, synthetic construct
  source 1..28: mol_type = other DNA
ggtcccggcaccaggctcacggttttag

SEQ ID NO: 27452 - DNA, 31 bp, synthetic construct; identical to SEQ ID NO: 17838
  source 1..31: mol_type = other DNA

SEQ ID NO: 27453 - DNA, 28 bp, synthetic construct
  source 1..28: mol_type = other DNA
ggtcccggcaccaggctcacggttttag

SEQ ID NO: 27454 - DNA, 31 bp, synthetic construct; identical to SEQ ID NO: 17908
  source 1..31: mol_type = other DNA

SEQ ID NO: 27455 - DNA, 28 bp, synthetic construct
  source 1..28: mol_type = other DNA
ggtgaaggctcaaagctgacagtgctgg

SEQ ID NO: 27456 - DNA, 31 bp, synthetic construct; identical to SEQ ID NO: 17906
  source 1..31: mol_type = other DNA

SEQ ID NO: 27457 - DNA, 28 bp, synthetic construct
  source 1..28: mol_type = other DNA
ggctcaggaaccagactgactgttctcg

SEQ ID NO: 27458 - DNA, 31 bp, synthetic construct; identical to SEQ ID NO: 17916
  source 1..31: mol_type = other DNA

SEQ ID NO: 27459 - DNA, 28 bp, synthetic construct
  source 1..28: mol_type = other DNA
ggtaaaggaaccagactcacagttgtag

SEQ ID NO: 27460 - DNA, 31 bp, synthetic construct; identical to SEQ ID NO: 17838
  source 1..31: mol_type = other DNA

SEQ ID NO: 27461 - DNA, 28 bp, synthetic construct
  source 1..28: mol_type = other DNA
ggtcccggcaccaggctcacggttttag

SEQ ID NO: 27462 - DNA, 31 bp, synthetic construct; identical to SEQ ID NO: 17884
  source 1..31: mol_type = other DNA

SEQ ID NO: 27463 - DNA, 28 bp, synthetic construct
  source 1..28: mol_type = other DNA
gggccaggcactcggctcctcgtgttag

SEQ ID NO: 27464 - DNA, 31 bp, synthetic construct
  source 1..31: mol_type = other DNA
gggagcggtacaagactccaagtttatgcaa

SEQ ID NO: 27465 - DNA, 28 bp, synthetic construct
  source 1..28: mol_type = other DNA
ggtcccggcaccaggctcacggttttag

SEQ ID NO: 27466 - DNA, 31 bp, synthetic construct; identical to SEQ ID NO: 17832
  source 1..31: mol_type = other DNA

SEQ ID NO: 27467 - DNA, 28 bp, synthetic construct
  source 1..28: mol_type = other DNA
ggagaggggactcgactctctgttctag

SEQ ID NO: 27468 - DNA, 31 bp, synthetic construct; identical to SEQ ID NO: 17820
  source 1..31: mol_type = other DNA

SEQ ID NO: 27469 - DNA, 28 bp, synthetic construct
  source 1..28: mol_type = other DNA
ggtaaaggaaccagactcacagttgtag

SEQ ID NO: 27470 - DNA, 31 bp, synthetic construct; identical to SEQ ID NO: 18006
  source 1..31: mol_type = other DNA

SEQ ID NO: 27471 - DNA, 28 bp, synthetic construct
  source 1..28: mol_type = other DNA
ggtcatggaaccaagctgtctgtcctgg

SEQ ID NO: 27472 - DNA, 31 bp, synthetic construct; identical to SEQ ID NO: 17884
  source 1..31: mol_type = other DNA

SEQ ID NO: 27473 - DNA, 28 bp, synthetic construct
  source 1..28: mol_type = other DNA
ggaccagggacacgactcaccgtcctag

SEQ ID NO: 27474 - DNA, 31 bp, synthetic construct; identical to SEQ ID NO: 17838
  source 1..31: mol_type = other DNA

SEQ ID NO: 27475 - DNA, 28 bp, synthetic construct
  source 1..28: mol_type = other DNA
ggtcccggcaccaggctcacggttttag

SEQ ID NO: 27476 - DNA, 31 bp, synthetic construct; identical to SEQ ID NO: 17884
  source 1..31: mol_type = other DNA

SEQ ID NO: 27477 - DNA, 28 bp, synthetic construct
  source 1..28: mol_type = other DNA
ggtcccggcaccaggctcacggttttag

SEQ ID NO: 27478 - DNA, 31 bp, synthetic construct; identical to SEQ ID NO: 17840
  source 1..31: mol_type = other DNA

SEQ ID NO: 27479 - DNA, 28 bp, synthetic construct
  source 1..28: mol_type = other DNA
ggctcaggaaccagactgactgttctcg

SEQ ID NO: 27480 - DNA, 31 bp, synthetic construct; identical to SEQ ID NO: 17900
  source 1..31: mol_type = other DNA

SEQ ID NO: 27481 - DNA, 28 bp, synthetic construct
  source 1..28: mol_type = other DNA
ggtcccggcaccaggctcacggttttag

SEQ ID NO: 27482 - DNA, 31 bp, synthetic construct; identical to SEQ ID NO: 17906
  source 1..31: mol_type = other DNA

SEQ ID NO: 27483 - DNA, 28 bp, synthetic construct
  source 1..28: mol_type = other DNA
ggctcagggaccaggcttttggtaatag

SEQ ID NO: 27484 - DNA, 31 bp, synthetic construct; identical to SEQ ID NO: 17838
  source 1..31: mol_type = other DNA

SEQ ID NO: 27485 - DNA, 28 bp, synthetic construct
  source 1..28: mol_type = other DNA
ggctcaggaaccagactgactgttctcg

SEQ ID NO: 27486 - DNA, 31 bp, synthetic construct; identical to SEQ ID NO: 17850
  source 1..31: mol_type = other DNA

SEQ ID NO: 27487 - DNA, 28 bp, synthetic construct
  source 1..28: mol_type = other DNA
gggccaggcactcggctcctcgtgttag

SEQ ID NO: 27488 - DNA, 31 bp, synthetic construct; identical to SEQ ID NO: 17822
  source 1..31: mol_type = other DNA

SEQ ID NO: 27489 - DNA, 28 bp, synthetic construct
  source 1..28: mol_type = other DNA
ggtgcgggcacccgactatcggtgctag

SEQ ID NO: 27490 - DNA, 31 bp, synthetic construct; identical to SEQ ID NO: 17850
  source 1..31: mol_type = other DNA

SEQ ID NO: 27491 - DNA, 28 bp, synthetic construct
  source 1..28: mol_type = other DNA
ggctcaggaaccagactgactgttctcg

SEQ ID NO: 27492 - DNA, 31 bp, synthetic construct; identical to SEQ ID NO: 17832
  source 1..31: mol_type = other DNA

SEQ ID NO: 27493 - DNA, 28 bp, synthetic construct
  source 1..28: mol_type = other DNA
gggccaggcactcggctcctcgtgttag

SEQ ID NO: 27494 - DNA, 31 bp, synthetic construct; identical to SEQ ID NO: 18182
  source 1..31: mol_type = other DNA

SEQ ID NO: 27495 - DNA, 28 bp, synthetic construct
  source 1..28: mol_type = other DNA
ggtaaaggaaccagactcacagttgtag

SEQ ID NO: 27496 - DNA, 31 bp, synthetic construct; identical to SEQ ID NO: 18128
  source 1..31: mol_type = other DNA

SEQ ID NO: 27497 - DNA, 28 bp, synthetic construct
  source 1..28: mol_type = other DNA
ggtaaaggaaccagactcacagttgtag

SEQ ID NO: 27498 - DNA, 31 bp, synthetic construct; identical to SEQ ID NO: 18064
  source 1..31: mol_type = other DNA

SEQ ID NO: 27499 - DNA, 28 bp, synthetic construct
  source 1..28: mol_type = other DNA
ggtaaaggaaccagactcacagttgtag

SEQ ID NO: 27500 - DNA, 31 bp, synthetic construct; identical to SEQ ID NO: 17884
  source 1..31: mol_type = other DNA

SEQ ID NO: 27501 - DNA, 28 bp, synthetic construct
  source 1..28: mol_type = other DNA
gggccaggcactcggctcctcgtgttag

SEQ ID NO: 27502 - DNA, 31 bp, synthetic construct; identical to SEQ ID NO: 17868
  source 1..31: mol_type = other DNA

SEQ ID NO: 27503 - DNA, 28 bp, synthetic construct
  source 1..28: mol_type = other DNA
ggctcagggaccaggcttttggtaatag

SEQ ID NO: 27504 - DNA, 31 bp, synthetic construct; identical to SEQ ID NO: 17940
  source 1..31: mol_type = other DNA

SEQ ID NO: 27505 - DNA, 28 bp, synthetic construct
  source 1..28: mol_type = other DNA
ggaccagggacacgactcaccgtcctag

SEQ ID NO: 27506 - DNA, 31 bp, synthetic construct; identical to SEQ ID NO: 17864
  source 1..31: mol_type = other DNA

SEQ ID NO: 27507 - DNA, 28 bp, synthetic construct
  source 1..28: mol_type = other DNA
ggctcagggaccaggcttttggtaatag

SEQ ID NO: 27508 - DNA, 31 bp, synthetic construct; identical to SEQ ID NO: 18000
  source 1..31: mol_type = other DNA

SEQ ID NO: 27509 - DNA, 28 bp, synthetic construct
  source 1..28: mol_type = other DNA
ggtcccggcaccaggctcacggttttag

SEQ ID NO: 27510 - DNA, 31 bp, synthetic construct; identical to SEQ ID NO: 17884
  source 1..31: mol_type = other DNA

SEQ ID NO: 27511 - DNA, 28 bp, synthetic construct
  source 1..28: mol_type = other DNA
ggtgcgggcacccgactatcggtgctag

SEQ ID NO: 27512 - DNA, 31 bp, synthetic construct; identical to SEQ ID NO: 17822
  source 1..31: mol_type = other DNA

SEQ ID NO: 27513 - DNA, 28 bp, synthetic construct
  source 1..28: mol_type = other DNA
gggccaggcactcggctcctcgtgttag

SEQ ID NO: 27514 - DNA, 31 bp, synthetic construct; identical to SEQ ID NO: 17884
  source 1..31: mol_type = other DNA

SEQ ID NO: 27515 - DNA, 28 bp, synthetic construct
  source 1..28: mol_type = other DNA
ggctcagggaccaggcttttggtaatag

SEQ ID NO: 27516 - DNA, 31 bp, synthetic construct; identical to SEQ ID NO: 17882
  source 1..31: mol_type = other DNA

SEQ ID NO: 27517 - DNA, 28 bp, synthetic construct
  source 1..28: mol_type = other DNA
gggccaggcactcggctcctcgtgttag

SEQ ID NO: 27518 - DNA, 31 bp, synthetic construct; identical to SEQ ID NO: 18182
  source 1..31: mol_type = other DNA

SEQ ID NO: 27519 - DNA, 28 bp, synthetic construct
  source 1..28: mol_type = other DNA
ggtcatggaaccaagctgtctgtcctgg

SEQ ID NO: 27520 - DNA, 31 bp, synthetic construct; identical to SEQ ID NO: 17878
  source 1..31: mol_type = other DNA

SEQ ID NO: 27521 - DNA, 28 bp, synthetic construct
  source 1..28: mol_type = other DNA
gcggcaggcacccggctcactgtgacag

SEQ ID NO: 27522 - DNA, 31 bp, synthetic construct; identical to SEQ ID NO: 18064
  source 1..31: mol_type = other DNA

SEQ ID NO: 27523 - DNA, 28 bp, synthetic construct
  source 1..28: mol_type = other DNA
ggtgcgggcacccgactatcggtgctag

SEQ ID NO: 27524 - DNA, 31 bp, synthetic construct; identical to SEQ ID NO: 17844
  source 1..31: mol_type = other DNA

SEQ ID NO: 27525 - DNA, 28 bp, synthetic construct
  source 1..28: mol_type = other DNA
ggctcaggaaccagactgactgttctcg

SEQ ID NO: 27526 - DNA, 31 bp, synthetic construct; identical to SEQ ID NO: 17884
  source 1..31: mol_type = other DNA

SEQ ID NO: 27527 - DNA, 28 bp, synthetic construct
  source 1..28: mol_type = other DNA
ggctcaggaaccagactgactgttctcg

SEQ ID NO: 27528 - DNA, 31 bp, synthetic construct; identical to SEQ ID NO: 17850
  source 1..31: mol_type = other DNA

SEQ ID NO: 27529 - DNA, 28 bp, synthetic construct
  source 1..28: mol_type = other DNA
ggtgcgggcacccgactatcggtgctag

SEQ ID NO: 27530 - DNA, 31 bp, synthetic construct; identical to SEQ ID NO: 17864
  source 1..31: mol_type = other DNA

SEQ ID NO: 27531 - DNA, 28 bp, synthetic construct
  source 1..28: mol_type = other DNA
ggctcagggaccaggcttttggtaatag

SEQ ID NO: 27532 - DNA, 31 bp, synthetic construct; identical to SEQ ID NO: 17850
  source 1..31: mol_type = other DNA

SEQ ID NO: 27533 - DNA, 28 bp, synthetic construct
  source 1..28: mol_type = other DNA
ggtaaaggaaccagactcacagttgtag

SEQ ID NO: 27534 - DNA, 31 bp, synthetic construct; identical to SEQ ID NO: 18008
  source 1..31: mol_type = other DNA

SEQ ID NO: 27535 - DNA, 28 bp, synthetic construct
  source 1..28: mol_type = other DNA
ggtcccggcaccaggctcacggttttag

SEQ ID NO: 27536 - DNA, 31 bp, synthetic construct; identical to SEQ ID NO: 17850
  source 1..31: mol_type = other DNA

SEQ ID NO: 27537 - DNA, 28 bp, synthetic construct
  source 1..28: mol_type = other DNA
ggtcccggcaccaggctcacggttttag

SEQ ID NO: 27538 - DNA, 31 bp, synthetic construct; identical to SEQ ID NO: 18944
  source 1..31: mol_type = other DNA

SEQ ID NO: 27539 - DNA, 28 bp, synthetic construct
  source 1..28: mol_type = other DNA
ggaccagggacacgactcaccgtcctag

SEQ ID NO: 27540 - DNA, 31 bp, synthetic construct; identical to SEQ ID NO: 18128
  source 1..31: mol_type = other DNA

SEQ ID NO: 27541 - DNA, 28 bp, synthetic construct
  source 1..28: mol_type = other DNA
ggtgaaggctcaaagctgacagtgctgg

SEQ ID NO: 27542 - DNA, 31 bp, synthetic construct; identical to SEQ ID NO: 17810
  source 1..31: mol_type = other DNA

SEQ ID NO: 27543 - DNA, 28 bp, synthetic construct
  source 1..28: mol_type = other DNA
ggtgaaggctcaaagctgacagtgctgg

SEQ ID NO: 27544 - DNA, 31 bp, synthetic construct; identical to SEQ ID NO: 17810
  source 1..31: mol_type = other DNA

SEQ ID NO: 27545 - DNA, 28 bp, synthetic construct
  source 1..28: mol_type = other DNA
ggtgcgggcacccgactatcggtgctag

SEQ ID NO: 27546 - DNA, 31 bp, synthetic construct; identical to SEQ ID NO: 17838
  source 1..31: mol_type = other DNA

SEQ ID NO: 27547 - DNA, 28 bp, synthetic construct
  source 1..28: mol_type = other DNA
ggagaaggaagccggctcattgttgtag

SEQ ID NO: 27548 - DNA, 31 bp, synthetic construct; identical to SEQ ID NO: 17964
  source 1..31: mol_type = other DNA

SEQ ID NO: 27549 - DNA, 28 bp, synthetic construct
  source 1..28: mol_type = other DNA
ggctcaggaaccagactgactgttctcg

SEQ ID NO: 27550 - DNA, 31 bp, synthetic construct; identical to SEQ ID NO: 17906
  source 1..31: mol_type = other DNA

SEQ ID NO: 27551 - DNA, 28 bp, synthetic construct
  source 1..28: mol_type = other DNA
ggctcaggaaccagactgactgttctcg

SEQ ID NO: 27552 - DNA, 31 bp, synthetic construct; identical to SEQ ID NO: 17916
  source 1..31: mol_type = other DNA

SEQ ID NO: 27553 - DNA, 28 bp, synthetic construct
  source 1..28: mol_type = other DNA
ggtcccggcaccaggctcacggttttag

SEQ ID NO: 27554 - DNA, 31 bp, synthetic construct; identical to SEQ ID NO: 17814
  source 1..31: mol_type = other DNA

SEQ ID NO: 27555 - DNA, 28 bp, synthetic construct
  source 1..28: mol_type = other DNA
ggtcccggcaccaggctcacggttttag

SEQ ID NO: 27556 - DNA, 31 bp, synthetic construct; identical to SEQ ID NO: 18504
  source 1..31: mol_type = other DNA

SEQ ID NO: 27557 - DNA, 28 bp, synthetic construct
  source 1..28: mol_type = other DNA
ggctcaggaaccagactgactgttctcg

SEQ ID NO: 27558 - DNA, 31 bp, synthetic construct; identical to SEQ ID NO: 17834
  source 1..31: mol_type = other DNA

SEQ ID NO: 27559 - DNA, 28 bp, synthetic construct
  source 1..28: mol_type = other DNA
ggtaaaggaaccagactcacagttgtag

SEQ ID NO: 27560 - DNA, 31 bp, synthetic construct; identical to SEQ ID NO: 18128
  source 1..31: mol_type = other DNA

SEQ ID NO: 27561 - DNA, 28 bp, synthetic construct
  source 1..28: mol_type = other DNA
ggtcccggcaccaggctcacggttttag

SEQ ID NO: 27562 - DNA, 31 bp, synthetic construct; identical to SEQ ID NO: 17852
  source 1..31: mol_type = other DNA

SEQ ID NO: 27563 - DNA, 28 bp, synthetic construct
  source 1..28: mol_type = other DNA
ggtcccggcaccaggctcacggttttag

SEQ ID NO: 27564 - DNA, 31 bp, synthetic construct; identical to SEQ ID NO: 18176
  source 1..31: mol_type = other DNA

SEQ ID NO: 27565 - DNA, 28 bp, synthetic construct
  source 1..28: mol_type = other DNA
ggagaaggaagccggctcattgttgtag

SEQ ID NO: 27566 - DNA, 31 bp, synthetic construct; identical to SEQ ID NO: 17832
  source 1..31: mol_type = other DNA

SEQ ID NO: 27567 - DNA, 28 bp, synthetic construct
  source 1..28: mol_type = other DNA
ggagaggggactcgactctctgttctag

SEQ ID NO: 27568 - DNA, 31 bp, synthetic construct; identical to SEQ ID NO: 17906
  source 1..31: mol_type = other DNA

SEQ ID NO: 27569 - DNA, 28 bp, synthetic construct
  source 1..28: mol_type = other DNA
ggagaggggactcgactctctgttctag

SEQ ID NO: 27570 - DNA, 31 bp, synthetic construct; identical to SEQ ID NO: 17858
  source 1..31: mol_type = other DNA

SEQ ID NO: 27571 - DNA, 28 bp, synthetic construct
  source 1..28: mol_type = other DNA
gggccaggcactcggctcctcgtgttag

SEQ ID NO: 27572 - DNA, 31 bp, synthetic construct; identical to SEQ ID NO: 17852
  source 1..31: mol_type = other DNA

SEQ ID NO: 27573 - DNA, 28 bp, synthetic construct
  source 1..28: mol_type = other DNA
ggagaggggactcgactctctgttctag

SEQ ID NO: 27574 - DNA, 31 bp, synthetic construct; identical to SEQ ID NO: 17868
  source 1..31: mol_type = other DNA

SEQ ID NO: 27575 - DNA, 28 bp, synthetic construct
  source 1..28: mol_type = other DNA
ggagaaggaagccggctcattgttgtag

SEQ ID NO: 27576 - DNA, 31 bp, synthetic construct; identical to SEQ ID NO: 17840
  source 1..31: mol_type = other DNA

SEQ ID NO: 27577 - DNA, 28 bp, synthetic construct
  source 1..28: mol_type = other DNA
ggtaaaggaaccagactcacagttgtag

SEQ ID NO: 27578 - DNA, 31 bp, synthetic construct; identical to SEQ ID NO: 17868
  source 1..31: mol_type = other DNA

SEQ ID NO: 27579 - DNA, 28 bp, synthetic construct
  source 1..28: mol_type = other DNA
ggctcaggaaccagactgactgttctcg

SEQ ID NO: 27580 - DNA, 31 bp, synthetic construct; identical to SEQ ID NO: 17856
  source 1..31: mol_type = other DNA

SEQ ID NO: 27581 - DNA, 28 bp, synthetic construct
  source 1..28: mol_type = other DNA
ggtcccggcaccaggctcacggttttag

SEQ ID NO: 27582 - DNA, 31 bp, synthetic construct; identical to SEQ ID NO: 17868
  source 1..31: mol_type = other DNA

SEQ ID NO: 27583 - DNA, 28 bp, synthetic construct
  source 1..28: mol_type = other DNA
ggtgcgggcacccgactatcggtgctag

SEQ ID NO: 27584 - DNA, 31 bp, synthetic construct; identical to SEQ ID NO: 17868
  source 1..31: mol_type = other DNA

SEQ ID NO: 27585 - DNA, 28 bp, synthetic construct
  source 1..28: mol_type = other DNA
ggtaaaggaaccagactcacagttgtag

SEQ ID NO: 27586 - DNA, 31 bp, synthetic construct; identical to SEQ ID NO: 17826
  source 1..31: mol_type = other DNA

SEQ ID NO: 27587 - DNA, 28 bp, synthetic construct
  source 1..28: mol_type = other DNA
ggctcaggaaccagactgactgttctcg

SEQ ID NO: 27588 - DNA, 31 bp, synthetic construct; identical to SEQ ID NO: 17832
  source 1..31: mol_type = other DNA

SEQ ID NO: 27589 - DNA, 28 bp, synthetic construct
  source 1..28: mol_type = other DNA
ggtgaaggctcaaagctgacagtgctgg

SEQ ID NO: 27590 - DNA, 34 bp, synthetic construct; identical to SEQ ID NO: 18488
  source 1..34: mol_type = other DNA

SEQ ID NO: 27591 - DNA, 28 bp, synthetic construct
  source 1..28: mol_type = other DNA
ggaccagggacacgactcaccgtcctag

SEQ ID NO: 27592 - DNA, 31 bp, synthetic construct; identical to SEQ ID NO: 17884
  source 1..31: mol_type = other DNA

SEQ ID NO: 27593 - DNA, 28 bp, synthetic construct
  source 1..28: mol_type = other DNA
ggtcatggaaccaagctgtctgtcctgg

SEQ ID NO: 27594 - DNA, 31 bp, synthetic construct; identical to SEQ ID NO: 18776
  source 1..31: mol_type = other DNA

SEQ ID NO: 27595 - DNA, 28 bp, synthetic construct
  source 1..28: mol_type = other DNA
ggtaaaggaaccagactcacagttgtag

SEQ ID NO: 27596 - DNA, 31 bp, synthetic construct; identical to SEQ ID NO: 17900
  source 1..31: mol_type = other DNA

SEQ ID NO: 27597 - DNA, 28 bp, synthetic construct
  source 1..28: mol_type = other DNA
ggtcatggaaccaagctgtctgtcctgg

SEQ ID NO: 27598 - DNA, 31 bp, synthetic construct; identical to SEQ ID NO: 17852
  source 1..31: mol_type = other DNA

SEQ ID NO: 27599 - DNA, 28 bp, synthetic construct
  source 1..28: mol_type = other DNA
ggtaaaggaaccagactcacagttgtag

SEQ ID NO: 27600 - DNA, 31 bp, synthetic construct; identical to SEQ ID NO: 17834
  source 1..31: mol_type = other DNA

SEQ ID NO: 27601 - DNA, 28 bp, synthetic construct
  source 1..28: mol_type = other DNA
ggtcatggaaccaagctgtctgtcctgg

SEQ ID NO: 27602 - DNA, 31 bp, synthetic construct; identical to SEQ ID NO: 17906
  source 1..31: mol_type = other DNA

SEQ ID NO: 27603 - DNA, 28 bp, synthetic construct
  source 1..28: mol_type = other DNA
ggaccagggacacgactcaccgtcctag

SEQ ID NO: 27604 - DNA, 31 bp, synthetic construct; identical to SEQ ID NO: 17828
  source 1..31: mol_type = other DNA

SEQ ID NO: 27605 - DNA, 28 bp, synthetic construct
  source 1..28: mol_type = other DNA
ggtcatggaaccaagctgtctgtcctgg

SEQ ID NO: 27606 - DNA, 31 bp, synthetic construct; identical to SEQ ID NO: 17828
  source 1..31: mol_type = other DNA

SEQ ID NO: 27607 - DNA, 28 bp, synthetic construct
  source 1..28: mol_type = other DNA
ggctcaggaaccagactgactgttctcg

SEQ ID NO: 27608 - DNA, 31 bp, synthetic construct; identical to SEQ ID NO: 17822
  source 1..31: mol_type = other DNA

SEQ ID NO: 27609 - DNA, 28 bp, synthetic construct
  source 1..28: mol_type = other DNA
ggtcccggcaccaggctcacggttttag

SEQ ID NO: 27610 - DNA, 31 bp, synthetic construct; identical to SEQ ID NO: 17814
  source 1..31: mol_type = other DNA

SEQ ID NO: 27611 - DNA, 28 bp, synthetic construct
  source 1..28: mol_type = other DNA
ggtgcgggcacccgactatcggtgctag

SEQ ID NO: 27612 - DNA, 31 bp, synthetic construct; identical to SEQ ID NO: 17814
  source 1..31: mol_type = other DNA

SEQ ID NO: 27613 - DNA, 28 bp, synthetic construct
  source 1..28: mol_type = other DNA
ggaccagggacacgactcaccgtcctag

SEQ ID NO: 27614 - DNA, 31 bp, synthetic construct; identical to SEQ ID NO: 17996
  source 1..31: mol_type = other DNA

SEQ ID NO: 27615 - DNA, 28 bp, synthetic construct
  source 1..28: mol_type = other DNA
ggctcagggaccaggcttttggtaatag

SEQ ID NO: 27616 - DNA, 31 bp, synthetic construct; identical to SEQ ID NO: 17996
  source 1..31: mol_type = other DNA

SEQ ID NO: 27617 - DNA, 28 bp, synthetic construct
  source 1..28: mol_type = other DNA
ggtcccggcaccaggctcacggttttag

SEQ ID NO: 27618 - DNA, 31 bp, synthetic construct; identical to SEQ ID NO: 17840
  source 1..31: mol_type = other DNA

SEQ ID NO: 27619 - DNA, 28 bp, synthetic construct
  source 1..28: mol_type = other DNA
ggctcagggaccaggcttttggtaatag

SEQ ID NO: 27620 - DNA, 31 bp, synthetic construct; identical to SEQ ID NO: 17862
  source 1..31: mol_type = other DNA

SEQ ID NO: 27621 - DNA, 28 bp, synthetic construct
  source 1..28: mol_type = other DNA
ggctcaggaaccagactgactgttctcg

SEQ ID NO: 27622 - DNA, 31 bp, synthetic construct; identical to SEQ ID NO: 17852
  source 1..31: mol_type = other DNA

SEQ ID NO: 27623 - DNA, 28 bp, synthetic construct
  source 1..28: mol_type = other DNA
ggtaaaggaaccagactcacagttgtag

SEQ ID NO: 27624 - DNA, 31 bp, synthetic construct; identical to SEQ ID NO: 17864
  source 1..31: mol_type = other DNA

SEQ ID NO: 27625 - DNA, 28 bp, synthetic construct
  source 1..28: mol_type = other DNA
ggaccagggacacgactcaccgtcctag

SEQ ID NO: 27626 - DNA, 31 bp, synthetic construct; identical to SEQ ID NO: 17880
  source 1..31: mol_type = other DNA

SEQ ID NO: 27627 - DNA, 28 bp, synthetic construct
  source 1..28: mol_type = other DNA
ggtgcgggcacccgactatcggtgctag

SEQ ID NO: 27628 - DNA, 31 bp, synthetic construct; identical to SEQ ID NO: 17972
  source 1..31: mol_type = other DNA

SEQ ID NO: 27629 - DNA, 28 bp, synthetic construct
  source 1..28: mol_type = other DNA
ggaccagggacacgactcaccgtcctag

SEQ ID NO: 27630 - DNA, 31 bp, synthetic construct; identical to SEQ ID NO: 17844
  source 1..31: mol_type = other DNA

SEQ ID NO: 27631 - DNA, 28 bp, synthetic construct
  source 1..28: mol_type = other DNA
gggccaggcactcggctcctcgtgttag

SEQ ID NO: 27632 - DNA, 31 bp, synthetic construct; identical to SEQ ID NO: 17878
  source 1..31: mol_type = other DNA

SEQ ID NO: 27633 - DNA, 28 bp, synthetic construct
  source 1..28: mol_type = other DNA
ggtcccggcaccaggctcacggttttag

SEQ ID NO: 27634 - DNA, 31 bp, synthetic construct; identical to SEQ ID NO: 17828
  source 1..31: mol_type = other DNA

SEQ ID NO: 27635 - DNA, 28 bp, synthetic construct
  source 1..28: mol_type = other DNA
ggtaaaggaaccagactcacagttgtag

SEQ ID NO: 27636 - DNA, 31 bp, synthetic construct; identical to SEQ ID NO: 17916
  source 1..31: mol_type = other DNA

SEQ ID NO: 27637 - DNA, 28 bp, synthetic construct
  source 1..28: mol_type = other DNA
ggctcagggaccaggcttttggtaatag

SEQ ID NO: 27638 - DNA, 31 bp, synthetic construct; identical to SEQ ID NO: 17828
  source 1..31: mol_type = other DNA

SEQ ID NO: 27639 - DNA, 28 bp, synthetic construct
  source 1..28: mol_type = other DNA
ggtcccggcaccaggctcacggttttag

SEQ ID NO: 27640 - DNA, 31 bp, synthetic construct; identical to SEQ ID NO: 17822
  source 1..31: mol_type = other DNA

SEQ ID NO: 27641 - DNA, 28 bp, synthetic construct
  source 1..28: mol_type = other DNA
ggagaaggaagccggctcattgttgtag

SEQ ID NO: 27642 - DNA, 31 bp, synthetic construct; identical to SEQ ID NO: 17856
  source 1..31: mol_type = other DNA

SEQ ID NO: 27643 - DNA, 28 bp, synthetic construct
  source 1..28: mol_type = other DNA
ggtcccggcaccaggctcacggttttag

SEQ ID NO: 27644 - DNA, 31 bp, synthetic construct; identical to SEQ ID NO: 17810
  source 1..31: mol_type = other DNA

SEQ ID NO: 27645 - DNA, 28 bp, synthetic construct
  source 1..28: mol_type = other DNA
ggtaaaggaaccagactcacagttgtag

SEQ ID NO: 27646 - DNA, 31 bp, synthetic construct; identical to SEQ ID NO: 17826
  source 1..31: mol_type = other DNA

SEQ ID NO: 27647 - DNA, 28 bp, synthetic construct
  source 1..28: mol_type = other DNA
ggtaaaggaaccagactcacagttgtag

SEQ ID NO: 27648 - DNA, 31 bp, synthetic construct; identical to SEQ ID NO: 17908
  source 1..31: mol_type = other DNA

SEQ ID NO: 27649 - DNA, 28 bp, synthetic construct
  source 1..28: mol_type = other DNA
ggtgaaggctcaaagctgacagtgctgg

SEQ ID NO: 27650 - DNA, 34 bp, synthetic construct; identical to SEQ ID NO: 18488
  source 1..34: mol_type = other DNA

SEQ ID NO: 27651 - DNA, 28 bp, synthetic construct
  source 1..28: mol_type = other DNA
ggtcccggcaccaggctcacggttttag

SEQ ID NO: 27652 - DNA, 31 bp, synthetic construct; identical to SEQ ID NO: 18182
  source 1..31: mol_type = other DNA

SEQ ID NO: 27653 - DNA, 28 bp, synthetic construct
  source 1..28: mol_type = other DNA
ggtcccggcaccaggctcacggttttag

SEQ ID NO: 27654 - DNA, 31 bp, synthetic construct; identical to SEQ ID NO: 17884
  source 1..31: mol_type = other DNA

SEQ ID NO: 27655 - DNA, 28 bp, synthetic construct
  source 1..28: mol_type = other DNA
ggtcccggcaccaggctcacggttttag

SEQ ID NO: 27656 - DNA, 31 bp, synthetic construct; identical to SEQ ID NO: 17850
  source 1..31: mol_type = other DNA

SEQ ID NO: 27657 - DNA, 28 bp, synthetic construct
  source 1..28: mol_type = other DNA
ggctcagggaccaggcttttggtaatag

SEQ ID NO: 27658 - DNA, 31 bp, synthetic construct; identical to SEQ ID NO: 17820
  source 1..31: mol_type = other DNA

SEQ ID NO: 27659 - DNA, 28 bp, synthetic construct
  source 1..28: mol_type = other DNA
ggtcccggcaccaggctcacggttttag

SEQ ID NO: 27660 - DNA, 31 bp, synthetic construct; identical to SEQ ID NO: 17932
  source 1..31: mol_type = other DNA

SEQ ID NO: 27661 - DNA, 28 bp, synthetic construct
  source 1..28: mol_type = other DNA
ggctcagggaccaggcttttggtaatag

SEQ ID NO: 27662 - DNA, 31 bp, synthetic construct; identical to SEQ ID NO: 17840
  source 1..31: mol_type = other DNA

SEQ ID NO: 27663 - DNA, 28 bp, synthetic construct
  source 1..28: mol_type = other DNA
ggtaaaggaaccagactcacagttgtag

SEQ ID NO: 27664 - DNA, 31 bp, synthetic construct; identical to SEQ ID NO: 17864
  source 1..31: mol_type = other DNA

SEQ ID NO: 27665 - DNA, 28 bp, synthetic construct
  source 1..28: mol_type = other DNA
ggtaaaggaaccagactcacagttgtag

SEQ ID NO: 27666 - DNA, 31 bp, synthetic construct; identical to SEQ ID NO: 17900
  source 1..31: mol_type = other DNA

SEQ ID NO: 27667 - DNA, 28 bp, synthetic construct
  source 1..28: mol_type = other DNA
ggctcaggaaccagactgactgttctcg

SEQ ID NO: 27668 - DNA, 31 bp, synthetic construct; identical to SEQ ID NO: 17834
  source 1..31: mol_type = other DNA

SEQ ID NO: 27669 - DNA, 28 bp, synthetic construct
  source 1..28: mol_type = other DNA
ggtaaaggaaccagactcacagttgtag

SEQ ID NO: 27670 - DNA, 31 bp, synthetic construct; identical to SEQ ID NO: 17844
  source 1..31: mol_type = other DNA

SEQ ID NO: 27671 - DNA, 28 bp, synthetic construct
  source 1..28: mol_type = other DNA
ggtcatggaaccaagctgtctgtcctgg

SEQ ID NO: 27672 - DNA, 31 bp, synthetic construct; identical to SEQ ID NO: 17822
  source 1..31: mol_type = other DNA

SEQ ID NO: 27673 - DNA, 28 bp, synthetic construct
  source 1..28: mol_type = other DNA
ggctcagggaccaggcttttggtaatag

SEQ ID NO: 27674 - DNA, 31 bp, synthetic construct; identical to SEQ ID NO: 17858
  source 1..31: mol_type = other DNA

SEQ ID NO: 27675 - DNA, 28 bp, synthetic construct
  source 1..28: mol_type = other DNA
ggagaaggaagccggctcattgttgtag

SEQ ID NO: 27676 - DNA, 31 bp, synthetic construct; identical to SEQ ID NO: 17840
  source 1..31: mol_type = other DNA

SEQ ID NO: 27677 - DNA, 28 bp, synthetic construct
  source 1..28: mol_type = other DNA
ggctcaggaaccagactgactgttctcg

SEQ ID NO: 27678 - DNA, 31 bp, synthetic construct; identical to SEQ ID NO: 17850
  source 1..31: mol_type = other DNA

SEQ ID NO: 27679 - DNA, 28 bp, synthetic construct
  source 1..28: mol_type = other DNA
ggtcccggcaccaggctcacggttttag

SEQ ID NO: 27680 - DNA, 31 bp, synthetic construct; identical to SEQ ID NO: 17826
  source 1..31: mol_type = other DNA

SEQ ID NO: 27681 - DNA, 28 bp, synthetic construct
  source 1..28: mol_type = other DNA
gcggcaggcacccggctcactgtgacag

SEQ ID NO: 27682 - DNA, 31 bp, synthetic construct; identical to SEQ ID NO: 17828
  source 1..31: mol_type = other DNA

SEQ ID NO: 27683 - DNA, 28 bp, synthetic construct
  source 1..28: mol_type = other DNA
ggctcaggaaccagactgactgttctcg

SEQ ID NO: 27684 - DNA, 31 bp, synthetic construct; identical to SEQ ID NO: 17840
  source 1..31: mol_type = other DNA

SEQ ID NO: 27685 - DNA, 28 bp, synthetic construct
  source 1..28: mol_type = other DNA
ggtcccggcaccaggctcacggttttag

SEQ ID NO: 27686 - DNA, 31 bp, synthetic construct; identical to SEQ ID NO: 17832
  source 1..31: mol_type = other DNA

SEQ ID NO: 27687 - DNA, 28 bp, synthetic construct
  source 1..28: mol_type = other DNA
ggagaaggaagccggctcattgttgtag

SEQ ID NO: 27688 - DNA, 31 bp, synthetic construct; identical to SEQ ID NO: 17840
  source 1..31: mol_type = other DNA

SEQ ID NO: 27689 - DNA, 28 bp, synthetic construct
  source 1..28: mol_type = other DNA
ggctcagggaccaggcttttggtaatag

SEQ ID NO: 27690 - DNA, 31 bp, synthetic construct; identical to SEQ ID NO: 17828
  source 1..31: mol_type = other DNA

SEQ ID NO: 27691 - DNA, 28 bp, synthetic construct
  source 1..28: mol_type = other DNA
gggccaggcactcggctcctcgtgttag

SEQ ID NO: 27692 - DNA, 31 bp, synthetic construct; identical to SEQ ID NO: 18008
  source 1..31: mol_type = other DNA

SEQ ID NO: 27693 - DNA, 28 bp, synthetic construct
  source 1..28: mol_type = other DNA
ggtgaaggctcaaagctgacagtgctgg

SEQ ID NO: 27694 - DNA, 31 bp, synthetic construct; identical to SEQ ID NO: 18126
  source 1..31: mol_type = other DNA

SEQ ID NO: 27695 - DNA, 28 bp, synthetic construct
  source 1..28: mol_type = other DNA
ggaccagggacacgactcaccgtcctag

SEQ ID NO: 27696 - DNA, 31 bp, synthetic construct; identical to SEQ ID NO: 18126
  source 1..31: mol_type = other DNA

SEQ ID NO: 27697 - DNA, 28 bp, synthetic construct
  source 1..28: mol_type = other DNA
ggctcagggaccaggcttttggtaatag

SEQ ID NO: 27698 - DNA, 31 bp, synthetic construct; identical to SEQ ID NO: 17996
  source 1..31: mol_type = other DNA

SEQ ID NO: 27699 - DNA, 28 bp, synthetic construct
  source 1..28: mol_type = other DNA
ggtgcgggcacccgactatcggtgctag

SEQ ID NO: 27700 - DNA, 31 bp, synthetic construct; identical to SEQ ID NO: 17868
  source 1..31: mol_type = other DNA

SEQ ID NO: 27701 - DNA, 28 bp, synthetic construct
  source 1..28: mol_type = other DNA
ggtcccggcaccaggctcacggttttag

SEQ ID NO: 27702 - DNA, 31 bp, synthetic construct; identical to SEQ ID NO: 17916
  source 1..31: mol_type = other DNA

SEQ ID NO: 27703 - DNA, 28 bp, synthetic construct
  source 1..28: mol_type = other DNA
ggagaaggaagccggctcattgttgtag

SEQ ID NO: 27704 - DNA, 31 bp, synthetic construct; identical to SEQ ID NO: 17878
  source 1..31: mol_type = other DNA

SEQ ID NO: 27705 - DNA, 28 bp, synthetic construct
  source 1..28: mol_type = other DNA
ggtcccggcaccaggctcacggttttag

SEQ ID NO: 27706 - DNA, 31 bp, synthetic construct; identical to SEQ ID NO: 17964
  source 1..31: mol_type = other DNA

SEQ ID NO: 27707 - DNA, 28 bp, synthetic construct
  source 1..28: mol_type = other DNA
ggtaaaggaaccagactcacagttgtag

SEQ ID NO: 27708 - DNA, 31 bp, synthetic construct; identical to SEQ ID NO: 17812
  source 1..31: mol_type = other DNA

SEQ ID NO: 27709 - DNA, 28 bp, synthetic construct
  source 1..28: mol_type = other DNA
ggtcccggcaccaggctcacggttttag

SEQ ID NO: 27710 - DNA, 31 bp, synthetic construct; identical to SEQ ID NO: 18008
  source 1..31: mol_type = other DNA

SEQ ID NO: 27711 - DNA, 28 bp, synthetic construct
  source 1..28: mol_type = other DNA
ggtaaaggaaccagactcacagttgtag

SEQ ID NO: 27712 - DNA, 31 bp, synthetic construct; identical to SEQ ID NO: 17884
  source 1..31: mol_type = other DNA

SEQ ID NO: 27713 - DNA, 28 bp, synthetic construct
  source 1..28: mol_type = other DNA
ggtgaaggctcaaagctgacagtgctgg

SEQ ID NO: 27714 - DNA, 31 bp, synthetic construct; identical to SEQ ID NO: 17972
  source 1..31: mol_type = other DNA

SEQ ID NO: 27715 - DNA, 28 bp, synthetic construct
  source 1..28: mol_type = other DNA
ggtcccggcaccaggctcacggttttag

SEQ ID NO: 27716 - DNA, 31 bp, synthetic construct; identical to SEQ ID NO: 17884
  source 1..31: mol_type = other DNA

SEQ ID NO: 27717 - DNA, 28 bp, synthetic construct
  source 1..28: mol_type = other DNA
ggtgaaggctcaaagctgacagtgctgg

SEQ ID NO: 27718 - DNA, 31 bp, synthetic construct; identical to SEQ ID NO: 17940
  source 1..31: mol_type = other DNA

SEQ ID NO: 27719 - DNA, 28 bp, synthetic construct
  source 1..28: mol_type = other DNA
ggtcatggaaccaagctgtctgtcctgg

SEQ ID NO: 27720 - DNA, 31 bp, synthetic construct; identical to SEQ ID NO: 17812
  source 1..31: mol_type = other DNA

SEQ ID NO: 27721 - DNA, 28 bp, synthetic construct
  source 1..28: mol_type = other DNA
ggtgcgggcacccgactatcggtgctag

SEQ ID NO: 27722 - DNA, 31 bp, synthetic construct; identical to SEQ ID NO: 18128
  source 1..31: mol_type = other DNA

SEQ ID NO: 27723 - DNA, 28 bp, synthetic construct
  source 1..28: mol_type = other DNA
ggtaaaggaaccagactcacagttgtag

SEQ ID NO: 27724 - DNA, 31 bp, synthetic construct; identical to SEQ ID NO: 17882
  source 1..31: mol_type = other DNA

SEQ ID NO: 27725 - DNA, 28 bp, synthetic construct
  source 1..28: mol_type = other DNA
ggtcccggcaccaggctcacggttttag

SEQ ID NO: 27726 - DNA, 31 bp, synthetic construct; identical to SEQ ID NO: 17884
  source 1..31: mol_type = other DNA

SEQ ID NO: 27727 - DNA, 28 bp, synthetic construct
  source 1..28: mol_type = other DNA
ggtcatggaaccaagctgtctgtcctgg

SEQ ID NO: 27728 - DNA, 31 bp, synthetic construct; identical to SEQ ID NO: 17826
  source 1..31: mol_type = other DNA

SEQ ID NO: 27729 - DNA, 28 bp, synthetic construct
  source 1..28: mol_type = other DNA
ggtcccggcaccaggctcacggttttag

SEQ ID NO: 27730 - DNA, 31 bp, synthetic construct; identical to SEQ ID NO: 17844
  source 1..31: mol_type = other DNA

SEQ ID NO: 27731 - DNA, 28 bp, synthetic construct
  source 1..28: mol_type = other DNA
ggtcccggcaccaggctcacggttttag

SEQ ID NO: 27732 - DNA, 31 bp, synthetic construct; identical to SEQ ID NO: 18176
  source 1..31: mol_type = other DNA

SEQ ID NO: 27733 - DNA, 28 bp, synthetic construct
  source 1..28: mol_type = other DNA
ggagaaggaagccggctcattgttgtag

SEQ ID NO: 27734 - DNA, 31 bp, synthetic construct; identical to SEQ ID NO: 17884
  source 1..31: mol_type = other DNA

SEQ ID NO: 27735 - DNA, 28 bp, synthetic construct
  source 1..28: mol_type = other DNA
ggtcccggcaccaggctcacggttttag

SEQ ID NO: 27736 - DNA, 31 bp, synthetic construct; identical to SEQ ID NO: 18128
  source 1..31: mol_type = other DNA

SEQ ID NO: 27737 - DNA, 28 bp, synthetic construct
  source 1..28: mol_type = other DNA
ggctcagggaccaggcttttggtaatag

SEQ ID NO: 27738 - DNA, 31 bp, synthetic construct; identical to SEQ ID NO: 17884
  source 1..31: mol_type = other DNA

SEQ ID NO: 27739 - DNA, 28 bp, synthetic construct
  source 1..28: mol_type = other DNA
ggtcccggcaccaggctcacggttttag

SEQ ID NO: 27740 - DNA, 31 bp, synthetic construct; identical to SEQ ID NO: 17826
  source 1..31: mol_type = other DNA

SEQ ID NO: 27741 - DNA, 28 bp, synthetic construct
  source 1..28: mol_type = other DNA
gggccaggcactcggctcctcgtgttag

SEQ ID NO: 27742 - DNA, 31 bp, synthetic construct; identical to SEQ ID NO: 17996
  source 1..31: mol_type = other DNA

SEQ ID NO: 27743 - DNA, 28 bp, synthetic construct
  source 1..28: mol_type = other DNA
ggtcatggaaccaagctgtctgtcctgg

SEQ ID NO: 27744 - DNA, 31 bp, synthetic construct; identical to SEQ ID NO: 17844
  source 1..31: mol_type = other DNA

SEQ ID NO: 27745 - DNA, 28 bp, synthetic construct
  source 1..28: mol_type = other DNA
ggtcatggaaccaagctgtctgtcctgg

SEQ ID NO: 27746 - DNA, 31 bp, synthetic construct; identical to SEQ ID NO: 18166
  source 1..31: mol_type = other DNA

SEQ ID NO: 27747 - DNA, 28 bp, synthetic construct
  source 1..28: mol_type = other DNA
ggaccagggacacgactcaccgtcctag

SEQ ID NO: 27748 - DNA, 31 bp, synthetic construct; identical to SEQ ID NO: 17996
  source 1..31: mol_type = other DNA

SEQ ID NO: 27749 - DNA, 28 bp, synthetic construct
  source 1..28: mol_type = other DNA
ggaccagggacacgactcaccgtcctag

SEQ ID NO: 27750 - DNA, 31 bp, synthetic construct; identical to SEQ ID NO: 17838
  source 1..31: mol_type = other DNA

SEQ ID NO: 27751 - DNA, 28 bp, synthetic construct
  source 1..28: mol_type = other DNA
ggagaggggactcgactctctgttctag

SEQ ID NO: 27752 - DNA, 31 bp, synthetic construct; identical to SEQ ID NO: 17832
  source 1..31: mol_type = other DNA

SEQ ID NO: 27753 - DNA, 28 bp, synthetic construct
  source 1..28: mol_type = other DNA
gcggcaggcacccggctcactgtgacag

SEQ ID NO: 27754 - DNA, 31 bp, synthetic construct; identical to SEQ ID NO: 17828
  source 1..31: mol_type = other DNA

SEQ ID NO: 27755 - DNA, 28 bp, synthetic construct
  source 1..28: mol_type = other DNA
ggtgcgggcacccgactatcggtgctag

SEQ ID NO: 27756 - DNA, 31 bp, synthetic construct; identical to SEQ ID NO: 17908
  source 1..31: mol_type = other DNA

SEQ ID NO: 27757 - DNA, 28 bp, synthetic construct
  source 1..28: mol_type = other DNA
ggctcagggaccaggcttttggtaatag

SEQ ID NO: 27758 - DNA, 31 bp, synthetic construct; identical to SEQ ID NO: 17814
  source 1..31: mol_type = other DNA

SEQ ID NO: 27759 - DNA, 28 bp, synthetic construct
  source 1..28: mol_type = other DNA
ggtaaaggaaccagactcacagttgtag

SEQ ID NO: 27760 - DNA, 31 bp, synthetic construct; identical to SEQ ID NO: 17840
  source 1..31: mol_type = other DNA

SEQ ID NO: 27761 - DNA, 28 bp, synthetic construct
  source 1..28: mol_type = other DNA
ggtaaaggaaccagactcacagttgtag

SEQ ID NO: 27762 - DNA, 31 bp, synthetic construct; identical to SEQ ID NO: 17850
  source 1..31: mol_type = other DNA

SEQ ID NO: 27763 - DNA, 28 bp, synthetic construct
  source 1..28: mol_type = other DNA
ggtaaaggaaccagactcacagttgtag

SEQ ID NO: 27764 - DNA, 31 bp, synthetic construct; identical to SEQ ID NO: 17850
  source 1..31: mol_type = other DNA

SEQ ID NO: 27765 - DNA, 28 bp, synthetic construct
  source 1..28: mol_type = other DNA
gggccaggcactcggctcctcgtgttag

SEQ ID NO: 27766 - DNA, 31 bp, synthetic construct; identical to SEQ ID NO: 17900
  source 1..31: mol_type = other DNA

SEQ ID NO: 27767 - DNA, 28 bp, synthetic construct
  source 1..28: mol_type = other DNA
ggtcccggcaccaggctcacggttttag

SEQ ID NO: 27768 - DNA, 31 bp, synthetic construct; identical to SEQ ID NO: 18064
  source 1..31: mol_type = other DNA

SEQ ID NO: 27769 - DNA, 28 bp, synthetic construct
  source 1..28: mol_type = other DNA
ggtcccggcaccaggctcacggttttag

SEQ ID NO: 27770 - DNA, 31 bp, synthetic construct; identical to SEQ ID NO: 18006
  source 1..31: mol_type = other DNA

SEQ ID NO: 27771 - DNA, 28 bp, synthetic construct
  source 1..28: mol_type = other DNA
ggtaaaggaaccagactcacagttgtag

SEQ ID NO: 27772 - DNA, 31 bp, synthetic construct; identical to SEQ ID NO: 18000
  source 1..31: mol_type = other DNA

SEQ ID NO: 27773 - DNA, 28 bp, synthetic construct
  source 1..28: mol_type = other DNA
ggaccagggacacgactcaccgtcctag

SEQ ID NO: 27774 - DNA, 31 bp, synthetic construct; identical to SEQ ID NO: 18126
  source 1..31: mol_type = other DNA

SEQ ID NO: 27775 - DNA, 28 bp, synthetic construct
  source 1..28: mol_type = other DNA
ggctcagggaccaggcttttggtaatag

SEQ ID NO: 27776 - DNA, 31 bp, synthetic construct; identical to SEQ ID NO: 18126
  source 1..31: mol_type = other DNA

SEQ ID NO: 27777 - DNA, 28 bp, synthetic construct
  source 1..28: mol_type = other DNA
ggtaaaggaaccagactcacagttgtag

SEQ ID NO: 27778 - DNA, 31 bp, synthetic construct; identical to SEQ ID NO: 18126
  source 1..31: mol_type = other DNA

SEQ ID NO: 27779 - DNA, 28 bp, synthetic construct
  source 1..28: mol_type = other DNA
ggtgaaggctcaaagctgacagtgctgg

SEQ ID NO: 27780 - DNA, 31 bp, synthetic construct; identical to SEQ ID NO: 17840
  source 1..31: mol_type = other DNA

SEQ ID NO: 27781 - DNA, 28 bp, synthetic construct
  source 1..28: mol_type = other DNA
ggtaaaggaaccagactcacagttgtag

SEQ ID NO: 27782 - DNA, 31 bp, synthetic construct; identical to SEQ ID NO: 17826
  source 1..31: mol_type = other DNA

SEQ ID NO: 27783 - DNA, 28 bp, synthetic construct
  source 1..28: mol_type = other DNA
ggtaaaggaaccagactcacagttgtag

SEQ ID NO: 27784 - DNA, 31 bp, synthetic construct; identical to SEQ ID NO: 18126
  source 1..31: mol_type = other DNA

SEQ ID NO: 27785 - DNA, 28 bp, synthetic construct
  source 1..28: mol_type = other DNA
ggtgaaggctcaaagctgacagtgctgg

SEQ ID NO: 27786 - DNA, 31 bp, synthetic construct; identical to SEQ ID NO: 17996
  source 1..31: mol_type = other DNA

SEQ ID NO: 27787 - DNA, 28 bp, synthetic construct
  source 1..28: mol_type = other DNA
ggtcatggaaccaagctgtctgtcctgg

SEQ ID NO: 27788 - DNA, 31 bp, synthetic construct; identical to SEQ ID NO: 17996
  source 1..31: mol_type = other DNA

SEQ ID NO: 27789 - DNA, 28 bp, synthetic construct
  source 1..28: mol_type = other DNA
gggccaggcactcggctcctcgtgttag

SEQ ID NO: 27790 - DNA, 31 bp, synthetic construct; identical to SEQ ID NO: 17812
  source 1..31: mol_type = other DNA

SEQ ID NO: 27791 - DNA, 28 bp, synthetic construct
  source 1..28: mol_type = other DNA
ggtcccggcaccaggctcacggttttag

SEQ ID NO: 27792 - DNA, 31 bp, synthetic construct; identical to SEQ ID NO: 17996
  source 1..31: mol_type = other DNA

SEQ ID NO: 27793 - DNA, 28 bp, synthetic construct
  source 1..28: mol_type = other DNA
gggccaggcactcggctcctcgtgttag

SEQ ID NO: 27794 - DNA, 31 bp, synthetic construct; identical to SEQ ID NO: 17884
  source 1..31: mol_type = other DNA

SEQ ID NO: 27795 - DNA, 28 bp, synthetic construct
  source 1..28: mol_type = other DNA
ggtgaaggctcaaagctgacagtgctgg

SEQ ID NO: 27796 - DNA, 31 bp, synthetic construct; identical to SEQ ID NO: 17856
  source 1..31: mol_type = other DNA

SEQ ID NO: 27797 - DNA, 28 bp, synthetic construct
  source 1..28: mol_type = other DNA
ggtcccggcaccaggctcacggttttag

SEQ ID NO: 27798 - DNA, 31 bp, synthetic construct; identical to SEQ ID NO: 17858
  source 1..31: mol_type = other DNA

SEQ ID NO: 27799 - DNA, 28 bp, synthetic construct
  source 1..28: mol_type = other DNA
ggaccagggacacgactcaccgtcctag

SEQ ID NO: 27800 - DNA, 31 bp, synthetic construct; identical to SEQ ID NO: 17828
  source 1..31: mol_type = other DNA

SEQ ID NO: 27801 - DNA, 28 bp, synthetic construct
  source 1..28: mol_type = other DNA
gcggcaggcacccggctcactgtgacag

SEQ ID NO: 27802 - DNA, 31 bp, synthetic construct; identical to SEQ ID NO: 17812
  source 1..31: mol_type = other DNA

SEQ ID NO: 27803 - DNA, 28 bp, synthetic construct
  source 1..28: mol_type = other DNA
ggaccagggacacgactcaccgtcctag

SEQ ID NO: 27804 - DNA, 31 bp, synthetic construct; identical to SEQ ID NO: 17826
  source 1..31: mol_type = other DNA

SEQ ID NO: 27805 - DNA, 28 bp, synthetic construct
  source 1..28: mol_type = other DNA
gggccaggcactcggctcctcgtgttag

SEQ ID NO: 27806 - DNA, 31 bp, synthetic construct; identical to SEQ ID NO: 17884
  source 1..31: mol_type = other DNA

SEQ ID NO: 27807 - DNA, 28 bp, synthetic construct
  source 1..28: mol_type = other DNA
ggtgaaggctcaaagctgacagtgctgg

SEQ ID NO: 27808 - DNA, 34 bp, synthetic construct; identical to SEQ ID NO: 18488
  source 1..34: mol_type = other DNA

SEQ ID NO: 27809 - DNA, 28 bp, synthetic construct
  source 1..28: mol_type = other DNA
ggaccagggacacgactcaccgtcctag

SEQ ID NO: 27810 - DNA, 31 bp, synthetic construct; identical to SEQ ID NO: 18944
  source 1..31: mol_type = other DNA

SEQ ID NO: 27811 - DNA, 28 bp, synthetic construct
  source 1..28: mol_type = other DNA
ggaccagggacacgactcaccgtcctag

SEQ ID NO: 27812 - DNA, 31 bp, synthetic construct; identical to SEQ ID NO: 17812
  source 1..31: mol_type = other DNA

SEQ ID NO: 27813 - DNA, 28 bp, synthetic construct
  source 1..28: mol_type = other DNA
ggaccagggacacgactcaccgtcctag

SEQ ID NO: 27814 - DNA, 31 bp, synthetic construct; identical to SEQ ID NO: 17850
  source 1..31: mol_type = other DNA

SEQ ID NO: 27815 - DNA, 28 bp, synthetic construct
  source 1..28: mol_type = other DNA
ggtcatggaaccaagctgtctgtcctgg

SEQ ID NO: 27816 - DNA, 31 bp, synthetic construct; identical to SEQ ID NO: 17814
  source 1..31: mol_type = other DNA

SEQ ID NO: 27817 - DNA, 28 bp, synthetic construct
  source 1..28: mol_type = other DNA
gcggcaggcacccggctcactgtgacag

SEQ ID NO: 27818 - DNA, 31 bp, synthetic construct; identical to SEQ ID NO: 17816
  source 1..31: mol_type = other DNA

SEQ ID NO: 27819 - DNA, 28 bp, synthetic construct
  source 1..28: mol_type = other DNA
ggaccagggacacgactcaccgtcctag

SEQ ID NO: 27820 - DNA, 31 bp, synthetic construct; identical to SEQ ID NO: 17812
  source 1..31: mol_type = other DNA

SEQ ID NO: 27821 - DNA, 28 bp, synthetic construct
  source 1..28: mol_type = other DNA
ggagaggggactcgactctctgttctag

SEQ ID NO: 27822 - DNA, 31 bp, synthetic construct; identical to SEQ ID NO: 17844
  source 1..31: mol_type = other DNA

SEQ ID NO: 27823 - DNA, 28 bp, synthetic construct
  source 1..28: mol_type = other DNA
gggccaggcactcggctcctcgtgttag

SEQ ID NO: 27824 - DNA, 31 bp, synthetic construct; identical to SEQ ID NO: 17814
  source 1..31: mol_type = other DNA

SEQ ID NO: 27825 - DNA, 28 bp, synthetic construct
  source 1..28: mol_type = other DNA
ggctcagggaccaggcttttggtaatag

SEQ ID NO: 27826 - DNA, 31 bp, synthetic construct; identical to SEQ ID NO: 17810
  source 1..31: mol_type = other DNA

SEQ ID NO: 27827 - DNA, 28 bp, synthetic construct
  source 1..28: mol_type = other DNA
ggaccagggacacgactcaccgtcctag

SEQ ID NO: 27828 - DNA, 31 bp, synthetic construct; identical to SEQ ID NO: 17898
  source 1..31: mol_type = other DNA

SEQ ID NO: 27829 - DNA, 28 bp, synthetic construct
  source 1..28: mol_type = other DNA
gggccaggcactcggctcctcgtgttag

SEQ ID NO: 27830 - DNA, 31 bp, synthetic construct; identical to SEQ ID NO: 17844
  source 1..31: mol_type = other DNA

SEQ ID NO: 27831 - DNA, 28 bp, synthetic construct
  source 1..28: mol_type = other DNA
ggctcaggaaccagactgactgttctcg

SEQ ID NO: 27832 - DNA, 31 bp, synthetic construct; identical to SEQ ID NO: 18126
  source 1..31: mol_type = other DNA

SEQ ID NO: 27833 - protein, 26 aa, synthetic construct
EAAVTQSPRNKVAVTGGKVTLSCNQT

SEQ ID NO: 27834 - protein, 26 aa, synthetic construct
GDSVTQTEGLVTVTEGLPVKLNCTYQ

SEQ ID NO: 27835 - protein, 26 aa, synthetic construct
VTLLEQNPRWRLVPRGQAVNLRCILK

SEQ ID NO: 27836 - protein, 26 aa, synthetic construct
AQSVTQPDARVTVSEGASLQLRCKYS

SEQ ID NO: 27837 - protein, 26 aa, synthetic construct
DPKIIQKPKYLVAVTGSEKILICEQY

SEQ ID NO: 27838 - protein, 26 aa, synthetic construct
AQSVTQPDARVTVSEGASLQLRCKYS

SEQ ID NO: 27839 - protein, 26 aa, synthetic construct
EAAVTQSPRNKVAVTGGKVTLSCNQT

SEQ ID NO: 27840 - protein, 26 aa, synthetic construct
GDSVTQTEGPVTLSEGTSLTVNCSYE

SEQ ID NO: 27841 - protein, 26 aa, synthetic construct
EAAVTQSPRSKVAVTGGKVTLSCHQT

SEQ ID NO: 27842 - protein, 26 aa, synthetic construct
AQKVTQTQTSISVMEKTTVTMDCVYE

SEQ ID NO: 27843 - protein, 25 aa, synthetic construct
NTKITQSPRYLILGRANKSLECEQH

SEQ ID NO: 27844 - protein, 25 aa, synthetic construct
LAKTTQPPSMEAYEGQEVNVSCSHT

SEQ ID NO: 27845 - protein, 26 aa, synthetic construct
DPKIIQKPKYLVAVTGSEKILICEQY

SEQ ID NO: 27846 - protein, 26 aa, synthetic construct
SQWGEENLQALSIQEGEDVTMNCSYK

SEQ ID NO: 27847 - protein, 26 aa, synthetic construct
ETAVFQTPNYHVTQVGNEVSFNCKQT

SEQ ID NO: 27848 - protein, 26 aa, synthetic construct
GDSVTQTEGLVTLTEGLPVMLNCTYQ

SEQ ID NO: 27849 - protein, 25 aa, synthetic construct
NTKITQSPRYLILGRANKSLECEQH

SEQ ID NO: 27850 - protein, 26 aa, synthetic construct
GDSVTQTEGPVTVSESESLIINCTYS

SEQ ID NO: 27851 - protein, 25 aa, synthetic construct
NTKITQSPRYLILGRANKSLECEQH

SEQ ID NO: 27852 - protein, 26 aa, synthetic construct
QQKVQQSPESLIVPEGGMASLNCTSS

SEQ ID NO: 27853 - protein, 26 aa, synthetic construct
SVLLYQKPNRDICQSGTSLKIQCVAD

SEQ ID NO: 27854 - protein, 26 aa, synthetic construct
GEKVEQHESTLSVREGDSAVINCTYT

SEQ ID NO: 27855 - protein, 26 aa, synthetic construct
EAGVTQSPRYAVLQEGQAVSFWCDPI

SEQ ID NO: 27856 - protein, 26 aa, synthetic construct
GQQVQQSPASLVLQEGENAELQCNFS

SEQ ID NO: 27857 - protein, 26 aa, synthetic construct
EAGVTQSPRYAVLQEGQAVSFWCDPI

SEQ ID NO: 27858 - protein, 26 aa, synthetic construct
QQKVQQSPESLSVPEGGMASLNCTSS

SEQ ID NO: 27859 - protein, 26 aa, synthetic construct
EAGVTQSPRYAVLQEGQAVSFWCDPI

SEQ ID NO: 27860 - protein, 26 aa, synthetic construct
SQLAEENPWALSVHEGESVTVNCSYK

SEQ ID NO: 27861 - protein, 26 aa, synthetic construct
EAGVTQSPRYAVLQEGQAVSFWCDPI

SEQ ID NO: 27862 - protein, 26 aa, synthetic construct
QQKVQQSPESLIVPEGGMASLNCTFS

SEQ ID NO: 27863 - protein, 26 aa, synthetic construct
EAGVTQSPRYAVLQEGQAVSFWCDPI

SEQ ID NO: 27864 - protein, 26 aa, synthetic construct
AQKVTQTQTSISVMEKTTVTMDCVYE

SEQ ID NO: 27865 - protein, 26 aa, synthetic construct
DMKVTQMPRYLIKRMGENVLLECGQD

SEQ ID NO: 27866 - protein, 26 aa, synthetic construct
GEQVEQRPPHLSVREGDSAIIICTYT

SEQ ID NO: 27867 - protein, 26 aa, synthetic construct
DMKVTQMPRYLIKRMGENVLLECGQD

SEQ ID NO: 27868 - protein, 26 aa, synthetic construct
GEKVEQHESTLSVREGDSAVINCTYT

SEQ ID NO: 27869 - protein, 26 aa, synthetic construct
DPKIIQKPKYLVAVTGSEKILICEQY

SEQ ID NO: 27870 - protein, 26 aa, synthetic construct
AQSVTQPDARVTVSEGASLQLRCKYS

SEQ ID NO: 27871 - protein, 26 aa, synthetic construct
DPKIIQKPKYLVAVTGSEKILICEQY

SEQ ID NO: 27872 - protein, 26 aa, synthetic construct
QQKVQQSPESLTVSEGAMASLNCTFS

SEQ ID NO: 27873 - protein, 26 aa, synthetic construct
DPKIIQKPKYLVAVTGSEKILICEQY

SEQ ID NO: 27874 - protein, 26 aa, synthetic construct
GDSVTQTEGLVTVTEGLPVKLNCTYQ

SEQ ID NO: 27875 - protein, 26 aa, synthetic construct
DPKIIQKPKYLVAVTGSEKILICEQY

SEQ ID NO: 27876 - protein, 26 aa, synthetic construct
SQWGEENLQALSIQEGEDVTMNCSYK

SEQ ID NO: 27877 - protein, 26 aa, synthetic construct
DPKIIQKPKYLVAVTGSEKILICEQY

SEQ ID NO: 27878 - protein, 26 aa, synthetic construct
AQKVTQTQTSISVMEKTTVTMDCVYE

SEQ ID NO: 27879 - protein, 26 aa, synthetic construct
ETAVFQTPNYHVTQVGNEVSFNCKQT

SEQ ID NO: 27880 - protein, 26 aa, synthetic construct
GDSVTQTEGQVTVSESKSLIINCTYS

SEQ ID NO: 27881 - protein, 26 aa, synthetic construct
ETAVFQTPNYHVTQVGNEVSFNCKQT

SEQ ID NO: 27882 - protein, 26 aa, synthetic construct
GQQVQQSPASLVLQEGENAELQCNFS

SEQ ID NO: 27883 - protein, 26 aa, synthetic construct
ETAVFQTPNYHVTQVGNEVSFNCKQT

SEQ ID NO: 27884 - protein, 26 aa, synthetic construct
GDKVKQSPSALSLQEGTNSALRCNFS

SEQ ID NO: 27885 - protein, 26 aa, synthetic construct
ETAVFQTPNYHVTQVGNEVSFNCKQT

SEQ ID NO: 27886 - protein, 26 aa, synthetic construct
GQQVQQSPASLVLQEGENAELQCNFS

SEQ ID NO: 27887 - protein, 26 aa, synthetic construct
ETAVFQTPNYHVTQVGNEVSFNCKQT

SEQ ID NO: 27888 - protein, 26 aa, synthetic construct
GDSVTQTEGQVTVSESKSLIINCTYS

SEQ ID NO: 27889 - protein, 26 aa, synthetic construct
ETAVFQTPNYHVTQVGNEVSFNCKQT

SEQ ID NO: 27890 - protein, 26 aa, synthetic construct
GQQVQQSPASLVLQEGENAELQCNFS

SEQ ID NO: 27891 - protein, 26 aa, synthetic construct
ETAVFQTPNYHVTQVGNEVSFNCKQT

SEQ ID NO: 27892 - protein, 25 aa, synthetic construct
GQGVEQPDNLMSVEGTFARVNCTYS

SEQ ID NO: 27893 - protein, 26 aa, synthetic construct
EAAVTQSPRNKVAVTGGKVTLSCNQT

SEQ ID NO: 27894 - protein, 26 aa, synthetic construct
AQKVTQTQTSISVMEKTTVTMDCVYE

SEQ ID NO: 27895 - protein, 26 aa, synthetic construct
EAAVTQSPRNKVAVTGGKVTLSCNQT

SEQ ID NO: 27896 - protein, 26 aa, synthetic construct
SQWGEENLQALSIQEGEDVTMNCSYK

SEQ ID NO: 27897 - protein, 26 aa, synthetic construct
EAAVTQSPRNKVAVTGGKVTLSCNQT

SEQ ID NO: 27898 - protein, 26 aa, synthetic construct
AQSVTQPDARVTVSEGASLQLRCKYS

SEQ ID NO: 27899 - protein, 26 aa, synthetic construct
EAAVTQSPRNKVAVTGGKVTLSCNQT

SEQ ID NO: 27900 - protein, 26 aa, synthetic construct
AQSVDQPDAHVTLSEGASLELRCSYS

SEQ ID NO: 27901 - protein, 26 aa, synthetic construct
EAAVTQSPRNKVAVTGGKVTLSCNQT

SEQ ID NO: 27902 - protein, 26 aa, synthetic construct
AQSVDQPDAHVTLYEGASLELRCSYS

SEQ ID NO: 27903 - protein, 26 aa, synthetic construct
EAAVTQSPRNKVAVTGGKVTLSCNQT

SEQ ID NO: 27904 - protein, 26 aa, synthetic construct
GEQVEQRPPHLSVREGDSAIIICTYT

SEQ ID NO: 27905 - protein, 26 aa, synthetic construct
EAAVTQSPRNKVAVTGGKVTLSCNQT

SEQ ID NO: 27906 - protein, 26 aa, synthetic construct
AQKVTQTQTSISVMEKTTVTMDCVYE

SEQ ID NO: 27907 - protein, 26 aa, synthetic construct
EAAVTQSPRNKVAVTGGKVTLSCNQT

SEQ ID NO: 27908 - protein, 26 aa, synthetic construct
QQQVRQSPQSLTVWEGETTILNCSYE

SEQ ID NO: 27909 - protein, 26 aa, synthetic construct
EAAVTQSPRNKVAVTGGKVTLSCNQT

SEQ ID NO: 27910 - protein, 26 aa, synthetic construct
QQKVQQSPESLIVPEGGMASLNCTFS

SEQ ID NO: 27911 - protein, 26 aa, synthetic construct
EAAVTQSPRNKVAVTGGKVTLSCNQT

SEQ ID NO: 27912 - protein, 26 aa, synthetic construct
GDSVTQKQGQVTLSEDDFLFINCTYS

SEQ ID NO: 27913 - protein, 26 aa, synthetic construct
EAAVTQSPRNKVAVTGGKVTLSCNQT

SEQ ID NO: 27914 - protein, 26 aa, synthetic construct
AQKVTQTQTSISVVEKTTVTMDCVYE

SEQ ID NO: 27915 - protein, 26 aa, synthetic construct
EAAVTQSPRNKVTVTGGNVTLSCRQT

SEQ ID NO: 27916 - protein, 26 aa, synthetic construct
GEQVEQRPPHLSVREGDSAVITCTYT

SEQ ID NO: 27917 - protein, 26 aa, synthetic construct
EAAVTQSPRNKVTVTGGNVTLSCRQT

SEQ ID NO: 27918 - protein, 26 aa, synthetic construct
GEQVEQRPPHLSVREGDSAFITCTYT

SEQ ID NO: 27919 - protein, 26 aa, synthetic construct
EAAVTQSPRNKVTVTGGNVTLSCRQT

SEQ ID NO: 27920 - protein, 26 aa, synthetic construct
GDSVIQMQGQVTLSENDFLFINCTYS

SEQ ID NO: 27921 - protein, 26 aa, synthetic construct
EAAVTQSPRSKVAVTGGKVTLSCHQT

SEQ ID NO: 27922 - protein, 26 aa, synthetic construct
AQKVTQTQTSISVMEKTTVTMDCVYE

SEQ ID NO: 27923 - protein, 26 aa, synthetic construct
EAAVTQSPRSKVAVTGGKVTLSCHQT

SEQ ID NO: 27924 - protein, 26 aa, synthetic construct
AQSVTQPDARVTVSEGASLQLRCKYS

SEQ ID NO: 27925 - protein, 26 aa, synthetic construct
EAAVTQSPRSKVAVTGGKVTLSCHQT

SEQ ID NO: 27926 - protein, 26 aa, synthetic construct
AQKVTQTQTSISVMEKTTVTMDCVYE

SEQ ID NO: 27927 - protein, 26 aa, synthetic construct
EAAVTQSPRSKVAVTGGKVTLSCHQT

SEQ ID NO: 27928 - protein, 26 aa, synthetic construct
AQSVTQPDARVTVSEGASLQLRCKYS

SEQ ID NO: 27929 - protein, 26 aa, synthetic construct
EAAVTQSPRSKVAVTGGKVTLSCHQT

SEQ ID NO: 27930 - protein, 26 aa, synthetic construct
AQKVTQTQTSISVMEKTTVTMDCVYE

SEQ ID NO: 27931 - protein, 26 aa, synthetic construct
EAAVTQSPRSKVAVTGGKVTLSCHQT

SEQ ID NO: 27932 - protein, 26 aa, synthetic construct
AQKVTQTQTSISVMEKTTVTMDCVYE

SEQ ID NO: 27933 - protein, 26 aa, synthetic construct
DTTVKQNPRYKLARVGKPVNLICSQT

SEQ ID NO: 27934 - protein, 26 aa, synthetic construct
SQWGEENLQALSIQEGEDVTMNCSYK

SEQ ID NO: 27935 - protein, 26 aa, synthetic construct
DTTVKQNPRYKLARVGKPVNLICSQT

SEQ ID NO: 27936 - protein, 26 aa, synthetic construct
GDSVTQTEGPVTVSESESLIINCTYS

SEQ ID NO: 27937 - protein, 26 aa, synthetic construct
AQTIHQWPVAEIKAVGSPLSLGCTIK

SEQ ID NO: 27938 - protein, 26 aa, synthetic construct
QQQVRQSPQSLTVWEGETAILNCSYE

SEQ ID NO: 27939 - protein, 26 aa, synthetic construct
AQTIHQWPVAEIKAVGSPLSLGCTIK

SEQ ID NO: 27940 - protein, 26 aa, synthetic construct
GDSVIQMQGQVTLSENDFLFINCTYS

SEQ ID NO: 27941 - protein, 26 aa, synthetic construct
GPKVLQIPSHQIIDMGQMVTLNCDPV

SEQ ID NO: 27942 - protein, 26 aa, synthetic construct
AQKVTQTQTSISVMEKTTVTMDCVYE

SEQ ID NO: 27943 - protein, 26 aa, synthetic construct
GALVYQYPRRTICKSGTSMRMECQAV

SEQ ID NO: 27944 - protein, 26 aa, synthetic construct
GDSVTQTEGQVTVSESKSLIINCTYS

SEQ ID NO: 27945 - protein, 26 aa, synthetic construct
GALVYQYPRRTICKSGTSMRMECQAV

SEQ ID NO: 27946 - protein, 26 aa, synthetic construct
QQQVRQSPQSLTVWEGETAILNCSYE

SEQ ID NO: 27947 - protein, 26 aa, synthetic construct
GGIITQTPKFLIGQEGQKLTLKCQQN

SEQ ID NO: 27948 - protein, 26 aa, synthetic construct
GDSVTQTEGLVTLTEGLPVMLNCTYQ

SEQ ID NO: 27949 - protein, 26 aa, synthetic construct
GGIITQTPKFLIGQEGQKLTLKCQQN

SEQ ID NO: 27950 - protein, 26 aa, synthetic construct
GQQVQQSPASLVLQEGENAELQCNFS

SEQ ID NO: 27951 - protein, 26 aa, synthetic construct
GGIITQTPKFLIGQEGQKLTLKCQQN

SEQ ID NO: 27952 - protein, 26 aa, synthetic construct
GQQVKQSSPSLTVQEGGISILNCDYE

SEQ ID NO: 27953 - protein, 26 aa, synthetic construct
GGIITQTPKFLIGQEGQKLTLKCQQN

SEQ ID NO: 27954 - protein, 26 aa, synthetic construct
GDSVTQTEGQVTVSESKSLIINCTYS

SEQ ID NO: 27955 - protein, 26 aa, synthetic construct
GGIITQTPKFLIGQEGQKLTLKCQQN

SEQ ID NO: 27956 - protein, 26 aa, synthetic construct
GQQVQQSPASLVLQEGENAELQCNFS

SEQ ID NO: 27957 - protein, 26 aa, synthetic construct
GGIITQTPKFLIGQEGQKLTLKCQQN

SEQ ID NO: 27958 - protein, 26 aa, synthetic construct
GQQVQQSPASLVLQEGENAELQCNFS

SEQ ID NO: 27959 - protein, 26 aa, synthetic construct
VTLLEQNPRWRLVPRGQAVNLRCILK

SEQ ID NO: 27960 - protein, 26 aa, synthetic construct
GDSVTQTEGLVTLTKGLPVMLNCTYQ

SEQ ID NO: 27961 - protein, 26 aa, synthetic construct
VTLLEQNPRWRLVPRGQAVNLRCILK

SEQ ID NO: 27962 - protein, 26 aa, synthetic construct
AQKVTQTQTSISVMEKTTVTMDCVYE

SEQ ID NO: 27963 - protein, 26 aa, synthetic construct
VTLLEQNPRWRLVPRGQAVNLRCILK

SEQ ID NO: 27964 - protein, 26 aa, synthetic construct
GEKVEQHESTLSVREGDSAVINCTYT

SEQ ID NO: 27965 - protein, 26 aa, synthetic construct
VTLLEQNPRWRLVPRGQAVNLRCILK

SEQ ID NO: 27966 - protein, 26 aa, synthetic construct
GEQVEQRPPHLSVREGDSAFITCTYT

SEQ ID NO: 27967 - protein, 26 aa, synthetic construct
VTLLEQNPRWRLVPRGQAVNLRCILK

SEQ ID NO: 27968 - protein, 26 aa, synthetic construct
AQSVTQPDARVTVSEGASLQLRCKYS

SEQ ID NO: 27969 - DNA, 78 bp, synthetic construct; identical to SEQ ID NO: 1487
  source 1..78: mol_type = other DNA

SEQ ID NO: 27970 - DNA, 78 bp, synthetic construct; identical to SEQ ID NO: 1600
  source 1..78: mol_type = other DNA

SEQ ID NO: 27971 - DNA, 78 bp, synthetic construct; identical to SEQ ID NO: 1507
  source 1..78: mol_type = other DNA

SEQ ID NO: 27972 - DNA, 78 bp, synthetic construct; identical to SEQ ID NO: 1504
  source 1..78: mol_type = other DNA

SEQ ID NO: 27973 - DNA, 78 bp, synthetic construct; identical to SEQ ID NO: 1499
  source 1..78: mol_type = other DNA

SEQ ID NO: 27974 - DNA, 78 bp, synthetic construct; identical to SEQ ID NO: 1496
  source 1..78: mol_type = other DNA

SEQ ID NO: 27975 - DNA, 78 bp, synthetic construct; identical to SEQ ID NO: 1487
  source 1..78: mol_type = other DNA

SEQ ID NO: 27976 - DNA, 78 bp, synthetic construct; identical to SEQ ID NO: 2072
  source 1..78: mol_type = other DNA

SEQ ID NO: 27977 - DNA, 78 bp, synthetic construct; identical to SEQ ID NO: 1491
  source 1..78: mol_type = other DNA

SEQ ID NO: 27978 - DNA, 78 bp, synthetic construct; identical to SEQ ID NO: 1528
  source 1..78: mol_type = other DNA

SEQ ID NO: 27979 - DNA, 75 bp, synthetic construct; identical to SEQ ID NO: 1579
  source 1..75: mol_type = other DNA

SEQ ID NO: 27980 - DNA, 75 bp, synthetic construct; identical to SEQ ID NO: 1590
  source 1..75: mol_type = other DNA

SEQ ID NO: 27981 - DNA, 78 bp, synthetic construct; identical to SEQ ID NO: 1499
  source 1..78: mol_type = other DNA

SEQ ID NO: 27982 - DNA, 78 bp, synthetic construct; identical to SEQ ID NO: 2562
  source 1..78: mol_type = other DNA

SEQ ID NO: 27983 - DNA, 78 bp, synthetic construct; identical to SEQ ID NO: 1583
  source 1..78: mol_type = other DNA

SEQ ID NO: 27984 - DNA, 78 bp, synthetic construct; identical to SEQ ID NO: 1546
  source 1..78: mol_type = other DNA

SEQ ID NO: 27985 - DNA, 75 bp, synthetic construct; identical to SEQ ID NO: 1579
  source 1..75: mol_type = other DNA

SEQ ID NO: 27986 - DNA, 78 bp, synthetic construct; identical to SEQ ID NO: 1614
  source 1..78: mol_type = other DNA

SEQ ID NO: 27987 - DNA, 75 bp, synthetic construct; identical to SEQ ID NO: 1579
  source 1..75: mol_type = other DNA

SEQ ID NO: 27988 - DNA, 78 bp, synthetic construct; identical to SEQ ID NO: 1512
  source 1..78: mol_type = other DNA

SEQ ID NO: 27989 - DNA, 78 bp, synthetic construct; identical to SEQ ID NO: 2051
  source 1..78: mol_type = other DNA

SEQ ID NO: 27990 - DNA, 78 bp, synthetic construct; identical to SEQ ID NO: 1796
  source 1..78: mol_type = other DNA

SEQ ID NO: 27991 - DNA, 78 bp, synthetic construct; identical to SEQ ID NO: 1485
  source 1..78: mol_type = other DNA

SEQ ID NO: 27992 - DNA, 78 bp, synthetic construct; identical to SEQ ID NO: 1494
  source 1..78: mol_type = other DNA

SEQ ID NO: 27993 - DNA, 78 bp, synthetic construct; identical to SEQ ID NO: 1485
  source 1..78: mol_type = other DNA

SEQ ID NO: 27994 - DNA, 78 bp, synthetic construct; identical to SEQ ID NO: 1548
  source 1..78: mol_type = other DNA

SEQ ID NO: 27995 - DNA, 78 bp, synthetic construct; identical to SEQ ID NO: 1485
  source 1..78: mol_type = other DNA

SEQ ID NO: 27996 - DNA, 78 bp, synthetic construct; identical to SEQ ID NO: 1508
  source 1..78: mol_type = other DNA

SEQ ID NO: 27997 - DNA, 78 bp, synthetic construct; identical to SEQ ID NO: 1485
  source 1..78: mol_type = other DNA

SEQ ID NO: 27998 - DNA, 78 bp, synthetic construct; identical to SEQ ID NO: 1616
  source 1..78: mol_type = other DNA

SEQ ID NO: 27999 - DNA, 78 bp, synthetic construct; identical to SEQ ID NO: 1485
  source 1..78: mol_type = other DNA

SEQ ID NO: 28000 - DNA, 78 bp, synthetic construct; identical to SEQ ID NO: 1528
  source 1..78: mol_type = other DNA

SEQ ID NO: 28001 - DNA, 78 bp, synthetic construct; identical to SEQ ID NO: 1647
  source 1..78: mol_type = other DNA

SEQ ID NO: 28002 - DNA, 78 bp, synthetic construct; identical to SEQ ID NO: 1506
  source 1..78: mol_type = other DNA

SEQ ID NO: 28003 - DNA, 78 bp, synthetic construct; identical to SEQ ID NO: 1647
  source 1..78: mol_type = other DNA

SEQ ID NO: 28004 - DNA, 78 bp, synthetic construct; identical to SEQ ID NO: 1796
  source 1..78: mol_type = other DNA

SEQ ID NO: 28005 - DNA, 78 bp, synthetic construct; identical to SEQ ID NO: 1499
  source 1..78: mol_type = other DNA

SEQ ID NO: 28006 - DNA, 78 bp, synthetic construct; identical to SEQ ID NO: 1504
  source 1..78: mol_type = other DNA

SEQ ID NO: 28007 - DNA, 78 bp, synthetic construct; identical to SEQ ID NO: 1499
  source 1..78: mol_type = other DNA

SEQ ID NO: 28008 - DNA, 78 bp, synthetic construct; identical to SEQ ID NO: 1576
  source 1..78: mol_type = other DNA

SEQ ID NO: 28009 - DNA, 78 bp, synthetic construct; identical to SEQ ID NO: 1499
  source 1..78: mol_type = other DNA

SEQ ID NO: 28010 - DNA, 78 bp, synthetic construct; identical to SEQ ID NO: 1600
  source 1..78: mol_type = other DNA

SEQ ID NO: 28011 - DNA, 78 bp, synthetic construct; identical to SEQ ID NO: 1499
  source 1..78: mol_type = other DNA

SEQ ID NO: 28012 - DNA, 78 bp, synthetic construct; identical to SEQ ID NO: 1564
  source 1..78: mol_type = other DNA

SEQ ID NO: 28013 - DNA, 78 bp, synthetic construct; identical to SEQ ID NO: 1499
  source 1..78: mol_type = other DNA

SEQ ID NO: 28014 - DNA, 78 bp, synthetic construct; identical to SEQ ID NO: 1528
  source 1..78: mol_type = other DNA

SEQ ID NO: 28015 - DNA, 78 bp, synthetic construct; identical to SEQ ID NO: 1583
  source 1..78: mol_type = other DNA

SEQ ID NO: 28016 - DNA, 78 bp, synthetic construct; identical to SEQ ID NO: 1544
  source 1..78: mol_type = other DNA

SEQ ID NO: 28017 - DNA, 78 bp, synthetic construct; identical to SEQ ID NO: 1583
  source 1..78: mol_type = other DNA

SEQ ID NO: 28018 - DNA, 78 bp, synthetic construct; identical to SEQ ID NO: 1540
  source 1..78: mol_type = other DNA

SEQ ID NO: 28019 - DNA, 78 bp, synthetic construct; identical to SEQ ID NO: 1583
  source 1..78: mol_type = other DNA

SEQ ID NO: 28020 - DNA, 78 bp, synthetic construct; identical to SEQ ID NO: 1888
  source 1..78: mol_type = other DNA

SEQ ID NO: 28021 - DNA, 78 bp, synthetic construct; identical to SEQ ID NO: 1583
  source 1..78: mol_type = other DNA

SEQ ID NO: 28022 - DNA, 78 bp, synthetic construct; identical to SEQ ID NO: 1578
  source 1..78: mol_type = other DNA

SEQ ID NO: 28023 - DNA, 78 bp, synthetic construct; identical to SEQ ID NO: 1583
  source 1..78: mol_type = other DNA

SEQ ID NO: 28024 - DNA, 78 bp, synthetic construct; identical to SEQ ID NO: 1544
  source 1..78: mol_type = other DNA

SEQ ID NO: 28025 - DNA, 78 bp, synthetic construct; identical to SEQ ID NO: 1583
  source 1..78: mol_type = other DNA

SEQ ID NO: 28026 - DNA, 78 bp, synthetic construct; identical to SEQ ID NO: 1494
  source 1..78: mol_type = other DNA

SEQ ID NO: 28027 - DNA, 78 bp, synthetic construct; identical to SEQ ID NO: 1583
  source 1..78: mol_type = other DNA

SEQ ID NO: 28028 - DNA, 75 bp, synthetic construct; identical to SEQ ID NO: 1488
  source 1..75: mol_type = other DNA

SEQ ID NO: 28029 - DNA, 78 bp, synthetic construct; identical to SEQ ID NO: 1487
  source 1..78: mol_type = other DNA

SEQ ID NO: 28030 - DNA, 78 bp, synthetic construct; identical to SEQ ID NO: 1528
  source 1..78: mol_type = other DNA

SEQ ID NO: 28031 - DNA, 78 bp, synthetic construct; identical to SEQ ID NO: 1487
  source 1..78: mol_type = other DNA

SEQ ID NO: 28032 - DNA, 78 bp, synthetic construct; identical to SEQ ID NO: 1564
  source 1..78: mol_type = other DNA

SEQ ID NO: 28033 - DNA, 78 bp, synthetic construct; identical to SEQ ID NO: 1487
  source 1..78: mol_type = other DNA

SEQ ID NO: 28034 - DNA, 78 bp, synthetic construct; identical to SEQ ID NO: 1504
  source 1..78: mol_type = other DNA

SEQ ID NO: 28035 - DNA, 78 bp, synthetic construct; identical to SEQ ID NO: 1487
  source 1..78: mol_type = other DNA

SEQ ID NO: 28036 - DNA, 78 bp, synthetic construct; identical to SEQ ID NO: 1764
  source 1..78: mol_type = other DNA

SEQ ID NO: 28037 - DNA, 78 bp, synthetic construct; identical to SEQ ID NO: 1487
  source 1..78: mol_type = other DNA

SEQ ID NO: 28038 - DNA, 78 bp, synthetic construct; identical to SEQ ID NO: 1882
  source 1..78: mol_type = other DNA

SEQ ID NO: 28039 - DNA, 78 bp, synthetic construct; identical to SEQ ID NO: 1487
  source 1..78: mol_type = other DNA

SEQ ID NO: 28040 - DNA, 78 bp, synthetic construct; identical to SEQ ID NO: 1506
  source 1..78: mol_type = other DNA

SEQ ID NO: 28041 - DNA, 78 bp, synthetic construct; identical to SEQ ID NO: 1487
  source 1..78: mol_type = other DNA

SEQ ID NO: 28042 - DNA, 78 bp, synthetic construct; identical to SEQ ID NO: 1528
  source 1..78: mol_type = other DNA

SEQ ID NO: 28043 - DNA, 78 bp, synthetic construct; identical to SEQ ID NO: 1487
  source 1..78: mol_type = other DNA

SEQ ID NO: 28044 - DNA, 78 bp, synthetic construct; identical to SEQ ID NO: 20138
  source 1..78: mol_type = other DNA

SEQ ID NO: 28045 - DNA, 78 bp, synthetic construct; identical to SEQ ID NO: 1487
  source 1..78: mol_type = other DNA

SEQ ID NO: 28046 - DNA, 78 bp, synthetic construct; identical to SEQ ID NO: 1616
  source 1..78: mol_type = other DNA

SEQ ID NO: 28047 - DNA, 78 bp, synthetic construct; identical to SEQ ID NO: 1487
  source 1..78: mol_type = other DNA

SEQ ID NO: 28048 - DNA, 78 bp, synthetic construct; identical to SEQ ID NO: 1994
  source 1..78: mol_type = other DNA

SEQ ID NO: 28049 - DNA, 78 bp, synthetic construct; identical to SEQ ID NO: 1487
  source 1..78: mol_type = other DNA

SEQ ID NO: 28050 - DNA, 78 bp, synthetic construct; identical to SEQ ID NO: 1490
  source 1..78: mol_type = other DNA

SEQ ID NO: 28051 - DNA, 78 bp, synthetic construct; identical to SEQ ID NO: 1521
  source 1..78: mol_type = other DNA

SEQ ID NO: 28052 - DNA, 78 bp, synthetic construct; identical to SEQ ID NO: 1526
  source 1..78: mol_type = other DNA

SEQ ID NO: 28053 - DNA, 78 bp, synthetic construct; identical to SEQ ID NO: 1521
  source 1..78: mol_type = other DNA

SEQ ID NO: 28054 - DNA, 78 bp, synthetic construct; identical to SEQ ID NO: 2330
  source 1..78: mol_type = other DNA

SEQ ID NO: 28055 - DNA, 78 bp, synthetic construct; identical to SEQ ID NO: 1521
  source 1..78: mol_type = other DNA

SEQ ID NO: 28056 - DNA, 78 bp, synthetic construct; identical to SEQ ID NO: 1940
  source 1..78: mol_type = other DNA

SEQ ID NO: 28057 - DNA, 78 bp, synthetic construct; identical to SEQ ID NO: 1491
  source 1..78: mol_type = other DNA

SEQ ID NO: 28058 - DNA, 78 bp, synthetic construct; identical to SEQ ID NO: 1528
  source 1..78: mol_type = other DNA

SEQ ID NO: 28059 - DNA, 78 bp, synthetic construct; identical to SEQ ID NO: 1491
  source 1..78: mol_type = other DNA

SEQ ID NO: 28060 - DNA, 78 bp, synthetic construct; identical to SEQ ID NO: 1504
  source 1..78: mol_type = other DNA

SEQ ID NO: 28061 - DNA, 78 bp, synthetic construct; identical to SEQ ID NO: 1491
  source 1..78: mol_type = other DNA

SEQ ID NO: 28062 - DNA, 78 bp, synthetic construct; identical to SEQ ID NO: 1528
  source 1..78: mol_type = other DNA

SEQ ID NO: 28063 - DNA, 78 bp, synthetic construct; identical to SEQ ID NO: 1491
  source 1..78: mol_type = other DNA

SEQ ID NO: 28064 - DNA, 78 bp, synthetic construct; identical to SEQ ID NO: 1504
  source 1..78: mol_type = other DNA

SEQ ID NO: 28065 - DNA, 78 bp, synthetic construct; identical to SEQ ID NO: 1491
  source 1..78: mol_type = other DNA

SEQ ID NO: 28066 - DNA, 78 bp, synthetic construct; identical to SEQ ID NO: 1528
  source 1..78: mol_type = other DNA

SEQ ID NO: 28067 - DNA, 78 bp, synthetic construct; identical to SEQ ID NO: 1491
  source 1..78: mol_type = other DNA

SEQ ID NO: 28068 - DNA, 78 bp, synthetic construct; identical to SEQ ID NO: 1528
  source 1..78: mol_type = other DNA

SEQ ID NO: 28069 - DNA, 78 bp, synthetic construct; identical to SEQ ID NO: 1783
  source 1..78: mol_type = other DNA

SEQ ID NO: 28070 - DNA, 78 bp, synthetic construct; identical to SEQ ID NO: 1564
  source 1..78: mol_type = other DNA

SEQ ID NO: 28071 - DNA, 78 bp, synthetic construct; identical to SEQ ID NO: 1783
  source 1..78: mol_type = other DNA

SEQ ID NO: 28072 - DNA, 78 bp, synthetic construct; identical to SEQ ID NO: 1614
  source 1..78: mol_type = other DNA

SEQ ID NO: 28073 - DNA, 78 bp, synthetic construct; identical to SEQ ID NO: 1519
  source 1..78: mol_type = other DNA

SEQ ID NO: 28074 - DNA, 78 bp, synthetic construct; identical to SEQ ID NO: 1552
  source 1..78: mol_type = other DNA

SEQ ID NO: 28075 - DNA, 78 bp, synthetic construct; identical to SEQ ID NO: 1519
  source 1..78: mol_type = other DNA

SEQ ID NO: 28076 - DNA, 78 bp, synthetic construct; identical to SEQ ID NO: 1940
  source 1..78: mol_type = other DNA

SEQ ID NO: 28077 - DNA, 78 bp, synthetic construct; identical to SEQ ID NO: 1575
  source 1..78: mol_type = other DNA

SEQ ID NO: 28078 - DNA, 78 bp, synthetic construct; identical to SEQ ID NO: 1528
  source 1..78: mol_type = other DNA

SEQ ID NO: 28079 - DNA, 78 bp, synthetic construct; identical to SEQ ID NO: 1563
  source 1..78: mol_type = other DNA

SEQ ID NO: 28080 - DNA, 78 bp, synthetic construct; identical to SEQ ID NO: 1544
  source 1..78: mol_type = other DNA

SEQ ID NO: 28081 - DNA, 78 bp, synthetic construct; identical to SEQ ID NO: 1563
  source 1..78: mol_type = other DNA

SEQ ID NO: 28082 - DNA, 78 bp, synthetic construct; identical to SEQ ID NO: 1552
  source 1..78: mol_type = other DNA

SEQ ID NO: 28083 - DNA, 78 bp, synthetic construct; identical to SEQ ID NO: 1511
  source 1..78: mol_type = other DNA

SEQ ID NO: 28084 - DNA, 78 bp, synthetic construct; identical to SEQ ID NO: 1546
  source 1..78: mol_type = other DNA

SEQ ID NO: 28085 - DNA, 78 bp, synthetic construct; identical to SEQ ID NO: 1511
  source 1..78: mol_type = other DNA

SEQ ID NO: 28086 - DNA, 78 bp, synthetic construct; identical to SEQ ID NO: 1540
  source 1..78: mol_type = other DNA

SEQ ID NO: 28087 - DNA, 78 bp, synthetic construct; identical to SEQ ID NO: 1511
  source 1..78: mol_type = other DNA

SEQ ID NO: 28088 - DNA, 78 bp, synthetic construct; identical to SEQ ID NO: 1732
  source 1..78: mol_type = other DNA

SEQ ID NO: 28089 - DNA, 78 bp, synthetic construct; identical to SEQ ID NO: 1511
  source 1..78: mol_type = other DNA

SEQ ID NO: 28090 - DNA, 78 bp, synthetic construct; identical to SEQ ID NO: 1544
  source 1..78: mol_type = other DNA

SEQ ID NO: 28091 - DNA, 78 bp, synthetic construct; identical to SEQ ID NO: 1511
  source 1..78: mol_type = other DNA

SEQ ID NO: 28092 - DNA, 78 bp, synthetic construct; identical to SEQ ID NO: 1540
  source 1..78: mol_type = other DNA

SEQ ID NO: 28093 - DNA, 78 bp, synthetic construct; identical to SEQ ID NO: 1511
  source 1..78: mol_type = other DNA

SEQ ID NO: 28094 - DNA, 78 bp, synthetic construct; identical to SEQ ID NO: 1540
  source 1..78: mol_type = other DNA

SEQ ID NO: 28095 - DNA, 78 bp, synthetic construct; identical to SEQ ID NO: 1507
  source 1..78: mol_type = other DNA

SEQ ID NO: 28096 - DNA, 78 bp, synthetic construct; identical to SEQ ID NO: 1492
  source 1..78: mol_type = other DNA

SEQ ID NO: 28097 - DNA, 78 bp, synthetic construct; identical to SEQ ID NO: 1507
  source 1..78: mol_type = other DNA

SEQ ID NO: 28098 - DNA, 78 bp, synthetic construct; identical to SEQ ID NO: 1528
  source 1..78: mol_type = other DNA

SEQ ID NO: 28099 - DNA, 78 bp, synthetic construct; identical to SEQ ID NO: 1507
  source 1..78: mol_type = other DNA

SEQ ID NO: 28100 - DNA, 78 bp, synthetic construct; identical to SEQ ID NO: 1538
  source 1..78: mol_type = other DNA

SEQ ID NO: 28101 - DNA, 78 bp, synthetic construct; identical to SEQ ID NO: 1507
  source 1..78: mol_type = other DNA

SEQ ID NO: 28102 - DNA, 78 bp, synthetic construct; identical to SEQ ID NO: 2330
  source 1..78: mol_type = other DNA

SEQ ID NO: 28103 - DNA, 78 bp, synthetic construct; identical to SEQ ID NO: 1507
  source 1..78: mol_type = other DNA

SEQ ID NO: 28104 - DNA, 78 bp, synthetic construct; identical to SEQ ID NO: 1504
  source 1..78: mol_type = other DNA

SEQ ID NO: 28105 - protein, 5 aa, synthetic construct
NNHNN

SEQ ID NO: 28106 - protein, 7 aa, synthetic construct
TTYLTIA

SEQ ID NO: 28107 - protein, 6 aa, synthetic construct
NSQYPW

SEQ ID NO: 28108 - protein, 6 aa, synthetic construct
SSVTPY

SEQ ID NO: 28109 - protein, 5 aa, synthetic construct
LGHNA

SEQ ID NO: 28110 - protein, 6 aa, synthetic construct
YSATPY

SEQ ID NO: 28111 - protein, 5 aa, synthetic construct
NNHNN

SEQ ID NO: 28112 - protein, 6 aa, synthetic construct
TKQYPT

SEQ ID NO: 28113 - protein, 5 aa, synthetic construct
NNHDY

SEQ ID NO: 28114 - protein, 7 aa, synthetic construct
TRDSSYF

SEQ ID NO: 28115 - protein, 5 aa, synthetic construct
LGHNA

SEQ ID NO: 28116 - protein, 7 aa, synthetic construct
NIATSEY

SEQ ID NO: 28117 - protein, 5 aa, synthetic construct
LGHNA

SEQ ID NO: 28118 - protein, 5 aa, synthetic construct
TYTTV

SEQ ID NO: 28119 - protein, 5 aa, synthetic construct
LGHDT

SEQ ID NO: 28120 - protein, 7 aa, synthetic construct
TIYSNPF

SEQ ID NO: 28121 - protein, 5 aa, synthetic construct
LGHNA

SEQ ID NO: 28122 - protein, 8 aa, synthetic construct
ATSIAYPN

SEQ ID NO: 28123 - protein, 5 aa, synthetic construct
LGHNA

SEQ ID NO: 28124 - protein, 6 aa, synthetic construct
DRNVDY

SEQ ID NO: 28125 - protein, 5 aa, synthetic construct
SQVVS

SEQ ID NO: 28126 - protein, 6 aa, synthetic construct
DTASSY

SEQ ID NO: 28127 - protein, 5 aa, synthetic construct
SGHDT

SEQ ID NO: 28128 - protein, 5 aa, synthetic construct
TSLNS

SEQ ID NO: 28129 - protein, 5 aa, synthetic construct
SGHDT

SEQ ID NO: 28130 - protein, 6 aa, synthetic construct
DRNFQY

SEQ ID NO: 28131 - protein, 5 aa, synthetic construct
SGHDT

SEQ ID NO: 28132 - protein, 5 aa, synthetic construct
TSITA

SEQ ID NO: 28133 - protein, 5 aa, synthetic construct
SGHDT

SEQ ID NO: 28134 - protein, 6 aa, synthetic construct
DRNSQY

SEQ ID NO: 28135 - protein, 5 aa, synthetic construct
SGHDT

SEQ ID NO: 28136 - protein, 7 aa, synthetic construct
TRDSSYF

SEQ ID NO: 28137 - protein, 5 aa, synthetic construct
MSHET

SEQ ID NO: 28138 - protein, 6 aa, synthetic construct
DSATAY

SEQ ID NO: 28139 - protein, 5 aa, synthetic construct
MSHET

SEQ ID NO: 28140 - protein, 6 aa, synthetic construct
DTASSY

SEQ ID NO: 28141 - protein, 5 aa, synthetic construct
LGHNA

SEQ ID NO: 28142 - protein, 6 aa, synthetic construct
SSVTPY

SEQ ID NO: 28143 - protein, 5 aa, synthetic construct
LGHNA

SEQ ID NO: 28144 - protein, 6 aa, synthetic construct
DGTSNN

SEQ ID NO: 28145 - protein, 5 aa, synthetic construct
LGHNA

SEQ ID NO: 28146 - protein, 7 aa, synthetic construct
TTYLTIA

SEQ ID NO: 28147 - protein, 5 aa, synthetic construct
LGHNA

SEQ ID NO: 28148 - protein, 5 aa, synthetic construct
TYTTV

SEQ ID NO: 28149 - protein, 5 aa, synthetic construct
LGHNA

SEQ ID NO: 28150 - protein, 7 aa, synthetic construct
TRDSSYF

SEQ ID NO: 28151 - protein, 5 aa, synthetic construct
LGHDT

SEQ ID NO: 28152 - protein, 8 aa, synthetic construct
TTSIAYPN

SEQ ID NO: 28153 - protein, 5 aa, synthetic construct
LGHDT

SEQ ID NO: 28154 - protein, 5 aa, synthetic construct
TSLNS

SEQ ID NO: 28155 - protein, 5 aa, synthetic construct
LGHDT

SEQ ID NO: 28156 - protein, 5 aa, synthetic construct
IAATT

SEQ ID NO: 28157 - protein, 5 aa, synthetic construct
LGHDT

SEQ ID NO: 28158 - protein, 5 aa, synthetic construct
STATR

SEQ ID NO: 28159 - protein, 5 aa, synthetic construct
LGHDT

SEQ ID NO: 28160 - protein, 8 aa, synthetic construct
TTSIAYPN

SEQ ID NO: 28161 - protein, 5 aa, synthetic construct
LGHDT

SEQ ID NO: 28162 - protein, 5 aa, synthetic construct
TSLNS

SEQ ID NO: 28163 - protein, 5 aa, synthetic construct
LGHDT

SEQ ID NO: 28164 - protein, 6 aa, synthetic construct
TSGFNG

SEQ ID NO: 28165 - protein, 5 aa, synthetic construct
NNHNN

SEQ ID NO: 28166 - protein, 7 aa, synthetic construct
TQDSSYF

SEQ ID NO: 28167 - protein, 5 aa, synthetic construct
NNHNN

SEQ ID NO: 28168 - protein, 5 aa, synthetic construct
TYTTV

SEQ ID NO: 28169 - protein, 5 aa, synthetic construct
NNHNN

SEQ ID NO: 28170 - protein, 6 aa, synthetic construct
SSVTPY

SEQ ID NO: 28171 - protein, 5 aa, synthetic construct
NNHNN

SEQ ID NO: 28172 - protein, 6 aa, synthetic construct
YSAAPY

SEQ ID NO: 28173 - protein, 5 aa, synthetic construct
NNHNN

SEQ ID NO: 28174 - protein, 6 aa, synthetic construct
YSAAPY

SEQ ID NO: 28175 - protein, 5 aa, synthetic construct
NNHNN

SEQ ID NO: 28176 - protein, 6 aa, synthetic construct
DSATAY

SEQ ID NO: 28177 - protein, 5 aa, synthetic construct
NNHNN

SEQ ID NO: 28178 - protein, 7 aa, synthetic construct
TQDSSYF

SEQ ID NO: 28179 - protein, 5 aa, synthetic construct
NNHNN

SEQ ID NO: 28180 - protein, 6 aa, synthetic construct
DSTFDY

SEQ ID NO: 28181 - protein, 5 aa, synthetic construct
NNHNN

SEQ ID NO: 28182 - protein, 6 aa, synthetic construct
DRNSQY

SEQ ID NO: 28183 - protein, 5 aa, synthetic construct
NNHNN

SEQ ID NO: 28184 - protein, 6 aa, synthetic construct
TTTYPT

SEQ ID NO: 28185 - protein, 5 aa, synthetic construct
NNHNN

SEQ ID NO: 28186 - protein, 7 aa, synthetic construct
TRDSSYF

SEQ ID NO: 28187 - protein, 5 aa, synthetic construct
NSHNY

SEQ ID NO: 28188 - protein, 6 aa, synthetic construct
DPNSYY

SEQ ID NO: 28189 - protein, 5 aa, synthetic construct
NSHNY

SEQ ID NO: 28190 - protein, 6 aa, synthetic construct
DPNSYY

SEQ ID NO: 28191 - protein, 5 aa, synthetic construct
NSHNY

SEQ ID NO: 28192 - protein, 6 aa, synthetic construct
TTGYPT

SEQ ID NO: 28193 - protein, 5 aa, synthetic construct
NNHDY

SEQ ID NO: 28194 - protein, 7 aa, synthetic construct
TQDSSYF

SEQ ID NO: 28195 - protein, 5 aa, synthetic construct
NNHDY

SEQ ID NO: 28196 - protein, 6 aa, synthetic construct
SSVTPY

SEQ ID NO: 28197 - protein, 5 aa, synthetic construct
NNHDY

SEQ ID NO: 28198 - protein, 7 aa, synthetic construct
TQDSSYF

SEQ ID NO: 28199 - protein, 5 aa, synthetic construct
NNHDY

SEQ ID NO: 28200 - protein, 6 aa, synthetic construct
SSVTPY

SEQ ID NO: 28201 - protein, 5 aa, synthetic construct
NNHDY

SEQ ID NO: 28202 - protein, 7 aa, synthetic construct
TQDSSYF

SEQ ID NO: 28203 - protein, 5 aa, synthetic construct
NNHDY

SEQ ID NO: 28204 - protein, 7 aa, synthetic construct
TQDSSYF

SEQ ID NO: 28205 - protein, 5 aa, synthetic construct
MNHDT

SEQ ID NO: 28206 - protein, 5 aa, synthetic construct
TYTTV

SEQ ID NO: 28207 - protein, 5 aa, synthetic construct
MNHDT

SEQ ID NO: 28208 - protein, 8 aa, synthetic construct
ATSIAYPN

SEQ ID NO: 28209 - protein, 6 aa, synthetic construct
GKSSPN

SEQ ID NO: 28210 - protein, 6 aa, synthetic construct
DSTFDY

SEQ ID NO: 28211 - protein, 6 aa, synthetic construct
GKSSPN

SEQ ID NO: 28212 - protein, 6 aa, synthetic construct
TTGYPT

SEQ ID NO: 28213 - protein, 5 aa, synthetic construct
SNHLY

SEQ ID NO: 28214 - protein, 7 aa, synthetic construct
TQDSSYF

SEQ ID NO: 28215 - protein, 6 aa, synthetic construct
GFQATS

SEQ ID NO: 28216 - protein, 8 aa, synthetic construct
TTSIAYPN

SEQ ID NO: 28217 - protein, 6 aa, synthetic construct
GFQATS

SEQ ID NO: 28218 - protein, 6 aa, synthetic construct
DSTFDY

SEQ ID NO: 28219 - protein, 5 aa, synthetic construct
FNHDT

SEQ ID NO: 28220 - protein, 6 aa, synthetic construct
TAYSTF

SEQ ID NO: 28221 - protein, 5 aa, synthetic construct
FNHDT

SEQ ID NO: 28222 - protein, 5 aa, synthetic construct
TSLNS

SEQ ID NO: 28223 - protein, 5 aa, synthetic construct
FNHDT

SEQ ID NO: 28224 - protein, 6 aa, synthetic construct
NDMFDY

SEQ ID NO: 28225 - protein, 5 aa, synthetic construct
FNHDT

SEQ ID NO: 28226 - protein, 8 aa, synthetic construct
TTSIAYPN

SEQ ID NO: 28227 - protein, 5 aa, synthetic construct
FNHDT

SEQ ID NO: 28228 - protein, 5 aa, synthetic construct
TSLNS

SEQ ID NO: 28229 - protein, 5 aa, synthetic construct
FNHDT

SEQ ID NO: 28230 - protein, 5 aa, synthetic construct
TSLNS

SEQ ID NO: 28231 - protein, 6 aa, synthetic construct
NSQYPW

SEQ ID NO: 28232 - protein, 6 aa, synthetic construct
TTYSPF

SEQ ID NO: 28233 - protein, 6 aa, synthetic construct
NSQYPW

SEQ ID NO: 28234 - protein, 7 aa, synthetic construct
TQDSSYF

SEQ ID NO: 28235 - protein, 6 aa, synthetic construct
NSQYPW

SEQ ID NO: 28236 - protein, 6 aa, synthetic construct
DTASSY

SEQ ID NO: 28237 - protein, 6 aa, synthetic construct
NSQYPW

SEQ ID NO: 28238 - protein, 6 aa, synthetic construct
DPNSYY

SEQ ID NO: 28239 - protein, 6 aa, synthetic construct
NSQYPW

SEQ ID NO: 28240 - protein, 6 aa, synthetic construct
SSVTPY

SEQ ID NO: 28241 - DNA, 15 bp, synthetic construct
  source 1..15: mol_type = other DNA
aataaccacaacaac

SEQ ID NO: 28242 - DNA, 21 bp, synthetic construct
  source 1..21: mol_type = other DNA
actacttatttaactattgcc

SEQ ID NO: 28243 - DNA, 18 bp, synthetic construct
  source 1..18: mol_type = other DNA
aattcccagtatccctgg

SEQ ID NO: 28244 - DNA, 18 bp, synthetic construct
  source 1..18: mol_type = other DNA
tcctctgtgacaccttat

SEQ ID NO: 28245 - DNA, 15 bp, synthetic construct
  source 1..15: mol_type = other DNA
ctaggccacaatgct

SEQ ID NO: 28246 - DNA, 18 bp, synthetic construct
  source 1..18: mol_type = other DNA
tactctgcgacaccttat

SEQ ID NO: 28247 - DNA, 15 bp, synthetic construct
  source 1..15: mol_type = other DNA
aataaccacaacaac

SEQ ID NO: 28248 - DNA, 18 bp, synthetic construct
  source 1..18: mol_type = other DNA
accaaacagtacccaacc

SEQ ID NO: 28249 - DNA, 15 bp, synthetic construct
  source 1..15: mol_type = other DNA
aataaccatgactat

SEQ ID NO: 28250 - DNA, 21 bp, synthetic construct
  source 1..21: mol_type = other DNA
acccgggacagttcttacttc

SEQ ID NO: 28251 - DNA, 15 bp, synthetic construct
  source 1..15: mol_type = other DNA
ctgggacataatgct

SEQ ID NO: 28252 - DNA, 21 bp, synthetic construct
  source 1..21: mol_type = other DNA
aacattgctacaagcgagtac

SEQ ID NO: 28253 - DNA, 15 bp, synthetic construct
  source 1..15: mol_type = other DNA
ctaggccacaatgct

SEQ ID NO: 28254 - DNA, 15 bp, synthetic construct
  source 1..15: mol_type = other DNA
acttatacaactgtt

SEQ ID NO: 28255 - DNA, 15 bp, synthetic construct
  source 1..15: mol_type = other DNA
ctgggccacgatact

SEQ ID NO: 28256 - DNA, 21 bp, synthetic construct
  source 1..21: mol_type = other DNA
actatttactcaaatcctttc

SEQ ID NO: 28257 - DNA, 15 bp, synthetic construct
  source 1..15: mol_type = other DNA
ctgggacataatgct

SEQ ID NO: 28258 - DNA, 24 bp, synthetic construct
  source 1..24: mol_type = other DNA
gccacaagcatagcttaccctaat

SEQ ID NO: 28259 - DNA, 15 bp, synthetic construct
  source 1..15: mol_type = other DNA
ctgggacataatgct

SEQ ID NO: 28260 - DNA, 18 bp, synthetic construct
  source 1..18: mol_type = other DNA
gatcgtaatgttgactac

SEQ ID NO: 28261 - DNA, 15 bp, synthetic construct
  source 1..15: mol_type = other DNA
agtcaagttgtttcg

SEQ ID NO: 28262 - DNA, 18 bp, synthetic construct
  source 1..18: mol_type = other DNA
gatactgcttcatcatac

SEQ ID NO: 28263 - DNA, 15 bp, synthetic construct
  source 1..15: mol_type = other DNA
tctggacatgatacc

SEQ ID NO: 28264 - DNA, 15 bp, synthetic construct
  source 1..15: mol_type = other DNA
acatctttgaacagt

SEQ ID NO: 28265 - DNA, 15 bp, synthetic construct
  source 1..15: mol_type = other DNA
tctggacatgatacc

SEQ ID NO: 28266 - DNA, 18 bp, synthetic construct
  source 1..18: mol_type = other DNA
gatcgtaattttcagtac

SEQ ID NO: 28267 - DNA, 15 bp, synthetic construct
  source 1..15: mol_type = other DNA
tctggacatgatacc

SEQ ID NO: 28268 - DNA, 15 bp, synthetic construct
  source 1..15: mol_type = other DNA
acatccataactgcc

SEQ ID NO: 28269 - DNA, 15 bp, synthetic construct
  source 1..15: mol_type = other DNA
tctggacatgatacc

SEQ ID NO: 28270 - DNA, 18 bp, synthetic construct
  source 1..18: mol_type = other DNA
gatcgtaattctcagtat

SEQ ID NO: 28271 - DNA, 15 bp, synthetic construct
  source 1..15: mol_type = other DNA
tctggacatgatacc

SEQ ID NO: 28272 - DNA, 21 bp, synthetic construct
  source 1..21: mol_type = other DNA
acccgggacagttcttacttc

SEQ ID NO: 28273 - DNA, 15 bp, synthetic construct
  source 1..15: mol_type = other DNA
atgagccatgaaaca

SEQ ID NO: 28274 - DNA, 18 bp, synthetic construct
  source 1..18: mol_type = other DNA
gacagtgccactgcttac

SEQ ID NO: 28275 - DNA, 15 bp, synthetic construct
  source 1..15: mol_type = other DNA
atgagccatgaaaca

SEQ ID NO: 28276 - DNA, 18 bp, synthetic construct
  source 1..18: mol_type = other DNA
gatactgcttcatcatac

SEQ ID NO: 28277 - DNA, 15 bp, synthetic construct
  source 1..15: mol_type = other DNA
ctaggccacaatgct

SEQ ID NO: 28278 - DNA, 18 bp, synthetic construct
  source 1..18: mol_type = other DNA
tcctctgtgacaccttat

SEQ ID NO: 28279 - DNA, 15 bp, synthetic construct
  source 1..15: mol_type = other DNA
ctaggccacaatgct

SEQ ID NO: 28280 - DNA, 18 bp, synthetic construct
  source 1..18: mol_type = other DNA
gatggtacttctaacaac

SEQ ID NO: 28281 - DNA, 15 bp, synthetic construct
  source 1..15: mol_type = other DNA
ctaggccacaatgct

SEQ ID NO: 28282 - DNA, 21 bp, synthetic construct
  source 1..21: mol_type = other DNA
actacttatttaactattgcc

SEQ ID NO: 28283 - DNA, 15 bp, synthetic construct
  source 1..15: mol_type = other DNA
ctaggccacaatgct

SEQ ID NO: 28284 - DNA, 15 bp, synthetic construct
  source 1..15: mol_type = other DNA
acttatacaactgtt

SEQ ID NO: 28285 - DNA, 15 bp, synthetic construct
  source 1..15: mol_type = other DNA
ctaggccacaatgct

SEQ ID NO: 28286 - DNA, 21 bp, synthetic construct
  source 1..21: mol_type = other DNA
acccgggacagttcttacttc

SEQ ID NO: 28287 - DNA, 15 bp, synthetic construct
  source 1..15: mol_type = other DNA
ctgggccacgatact

SEQ ID NO: 28288 - DNA, 24 bp, synthetic construct
  source 1..24: mol_type = other DNA
accacaagcatagcttaccctaat

SEQ ID NO: 28289 - DNA, 15 bp, synthetic construct
  source 1..15: mol_type = other DNA
ctgggccacgatact

SEQ ID NO: 28290 - DNA, 15 bp, synthetic construct
  source 1..15: mol_type = other DNA
acatctttgaacagt

SEQ ID NO: 28291 - DNA, 15 bp, synthetic construct
  source 1..15: mol_type = other DNA
ctgggccacgatact

SEQ ID NO: 28292 - DNA, 15 bp, synthetic construct
  source 1..15: mol_type = other DNA
atcgctgcgacaact

SEQ ID NO: 28293 - DNA, 15 bp, synthetic construct
  source 1..15: mol_type = other DNA
ctgggccacgatact

SEQ ID NO: 28294 - DNA, 15 bp, synthetic construct
  source 1..15: mol_type = other DNA
tccacagcaacccgg

SEQ ID NO: 28295 - DNA, 15 bp, synthetic construct
  source 1..15: mol_type = other DNA
ctgggccacgatact

SEQ ID NO: 28296 - DNA, 24 bp, synthetic construct
  source 1..24: mol_type = other DNA
accacaagcatagcttaccctaat

SEQ ID NO: 28297 - DNA, 15 bp, synthetic construct
  source 1..15: mol_type = other DNA
ctgggccacgatact

SEQ ID NO: 28298 - DNA, 15 bp, synthetic construct
  source 1..15: mol_type = other DNA
acatctttgaacagt

SEQ ID NO: 28299 - DNA, 15 bp, synthetic construct
  source 1..15: mol_type = other DNA
ctgggccacgatact

SEQ ID NO: 28300 - DNA, 18 bp, synthetic construct
  source 1..18: mol_type = other DNA
acctcagggttcaatggg

SEQ ID NO: 28301 - DNA, 15 bp, synthetic construct
  source 1..15: mol_type = other DNA
aataaccacaacaac

SEQ ID NO: 28302 - DNA, 21 bp, synthetic construct
  source 1..21: mol_type = other DNA
acccaggacagttcttacttc

SEQ ID NO: 28303 - DNA, 15 bp, synthetic construct
  source 1..15: mol_type = other DNA
aataaccacaacaac

SEQ ID NO: 28304 - DNA, 15 bp, synthetic construct
  source 1..15: mol_type = other DNA
acttacacaactgtt

SEQ ID NO: 28305 - DNA, 15 bp, synthetic construct
  source 1..15: mol_type = other DNA
aataaccacaacaac

SEQ ID NO: 28306 - DNA, 18 bp, synthetic construct
  source 1..18: mol_type = other DNA
tcctctgtgacaccttat

SEQ ID NO: 28307 - DNA, 15 bp, synthetic construct
  source 1..15: mol_type = other DNA
aataaccacaacaac

SEQ ID NO: 28308 - DNA, 18 bp, synthetic construct
  source 1..18: mol_type = other DNA
tacagtgcagcaccttac

SEQ ID NO: 28309 - DNA, 15 bp, synthetic construct
  source 1..15: mol_type = other DNA
aataaccacaacaac

SEQ ID NO: 28310 - DNA, 18 bp, synthetic construct
  source 1..18: mol_type = other DNA
tacagtgcagcaccttac

SEQ ID NO: 28311 - DNA, 15 bp, synthetic construct
  source 1..15: mol_type = other DNA
aataaccacaacaac

SEQ ID NO: 28312 - DNA, 18 bp, synthetic construct
  source 1..18: mol_type = other DNA
gacagtgccactgcttac

SEQ ID NO: 28313 - DNA, 15 bp, synthetic construct
  source 1..15: mol_type = other DNA
aataaccacaacaac

SEQ ID NO: 28314 - DNA, 21 bp, synthetic construct
  source 1..21: mol_type = other DNA
acccaggacagttcttacttc

SEQ ID NO: 28315 - DNA, 15 bp, synthetic construct
  source 1..15: mol_type = other DNA
aataaccacaacaac

SEQ ID NO: 28316 - DNA, 18 bp, synthetic construct
  source 1..18: mol_type = other DNA
gacagcacttttgactac

SEQ ID NO: 28317 - DNA, 15 bp, synthetic construct
  source 1..15: mol_type = other DNA
aataaccacaacaac

SEQ ID NO: 28318 - DNA, 18 bp, synthetic construct
  source 1..18: mol_type = other DNA
gatcgtaattctcagtat

SEQ ID NO: 28319 - DNA, 15 bp, synthetic construct
  source 1..15: mol_type = other DNA
aataaccacaacaac

SEQ ID NO: 28320 - DNA, 18 bp, synthetic construct
  source 1..18: mol_type = other DNA
accacaacgtacccaact

SEQ ID NO: 28321 - DNA, 15 bp, synthetic construct
  source 1..15: mol_type = other DNA
aataaccacaacaac

SEQ ID NO: 28322 - DNA, 21 bp, synthetic construct
  source 1..21: mol_type = other DNA
acccgggacagttcttacttc

SEQ ID NO: 28323 - DNA, 15 bp, synthetic construct
  source 1..15: mol_type = other DNA
aatagccacaactac

SEQ ID NO: 28324 - DNA, 18 bp, synthetic construct
  source 1..18: mol_type = other DNA
gaccctaacagttattac

SEQ ID NO: 28325 - DNA, 15 bp, synthetic construct
  source 1..15: mol_type = other DNA
aatagccacaactac

SEQ ID NO: 28326 - DNA, 18 bp, synthetic construct
  source 1..18: mol_type = other DNA
gaccctaacagttattac

SEQ ID NO: 28327 - DNA, 15 bp, synthetic construct
  source 1..15: mol_type = other DNA
aatagccacaactac

SEQ ID NO: 28328 - DNA, 18 bp, synthetic construct
  source 1..18: mol_type = other DNA
accacagggtacccgact

SEQ ID NO: 28329 - DNA, 15 bp, synthetic construct
  source 1..15: mol_type = other DNA
aataaccatgactat

SEQ ID NO: 28330 - DNA, 21 bp, synthetic construct
  source 1..21: mol_type = other DNA
acccaggacagttcttacttc

SEQ ID NO: 28331 - DNA, 15 bp, synthetic construct
  source 1..15: mol_type = other DNA
aataaccatgactat

SEQ ID NO: 28332 - DNA, 18 bp, synthetic construct
  source 1..18: mol_type = other DNA
tcctctgtgacaccttat

SEQ ID NO: 28333 - DNA, 15 bp, synthetic construct
  source 1..15: mol_type = other DNA
aataaccatgactat

SEQ ID NO: 28334 - DNA, 21 bp, synthetic construct
  source 1..21: mol_type = other DNA
acccaggacagttcttacttc

SEQ ID NO: 28335 - DNA, 15 bp, synthetic construct
  source 1..15: mol_type = other DNA
aataaccatgactat

SEQ ID NO: 28336 - DNA, 18 bp, synthetic construct
  source 1..18: mol_type = other DNA
tcctctgtgacaccttat

SEQ ID NO: 28337 - DNA, 15 bp, synthetic construct
  source 1..15: mol_type = other DNA
aataaccatgactat

SEQ ID NO: 28338 - DNA, 21 bp, synthetic construct
  source 1..21: mol_type = other DNA
acccaggacagttcttacttc

SEQ ID NO: 28339 - DNA, 15 bp, synthetic construct
  source 1..15: mol_type = other DNA
aataaccatgactat

SEQ ID NO: 28340 - DNA, 21 bp, synthetic construct
  source 1..21: mol_type = other DNA
acccaggacagttcttacttc

SEQ ID NO: 28341 - DNA, 15 bp, synthetic construct
  source 1..15: mol_type = other DNA
atgaatcatgatacc

SEQ ID NO: 28342 - DNA, 15 bp, synthetic construct
  source 1..15: mol_type = other DNA
acttacacaactgtt

SEQ ID NO: 28343 - DNA, 15 bp, synthetic construct
  source 1..15: mol_type = other DNA
atgaatcatgatacc

SEQ ID NO: 28344 - DNA, 24 bp, synthetic construct
  source 1..24: mol_type = other DNA
gccacaagcatagcttaccctaat

SEQ ID NO: 28345 - DNA, 18 bp, synthetic construct
  source 1..18: mol_type = other DNA
gggaaatcaagccctaac

SEQ ID NO: 28346 - DNA, 18 bp, synthetic construct
  source 1..18: mol_type = other DNA
gacagcacttttgactac

SEQ ID NO: 28347 - DNA, 18 bp, synthetic construct
  source 1..18: mol_type = other DNA
gggaaatcaagccctaac

SEQ ID NO: 28348 - DNA, 18 bp, synthetic construct
  source 1..18: mol_type = other DNA
accacagggtacccgact

SEQ ID NO: 28349 - DNA, 15 bp, synthetic construct
  source 1..15: mol_type = other DNA
tctaatcacctatat

SEQ ID NO: 28350 - DNA, 21 bp, synthetic construct
  source 1..21: mol_type = other DNA
acccaggacagttcttacttc

SEQ ID NO: 28351 - DNA, 18 bp, synthetic construct
  source 1..18: mol_type = other DNA
ggttttcaggcaacttct

SEQ ID NO: 28352 - DNA, 24 bp, synthetic construct
  source 1..24: mol_type = other DNA
accacaagcatagcttaccctaat

SEQ ID NO: 28353 - DNA, 18 bp, synthetic construct
  source 1..18: mol_type = other DNA
ggttttcaggcaacttct

SEQ ID NO: 28354 - DNA, 18 bp, synthetic construct
  source 1..18: mol_type = other DNA
gacagcacttttgactac

SEQ ID NO: 28355 - DNA, 15 bp, synthetic construct
  source 1..15: mol_type = other DNA
ttcaatcatgataca

SEQ ID NO: 28356 - DNA, 18 bp, synthetic construct
  source 1..18: mol_type = other DNA
actgcttactcaactttc

SEQ ID NO: 28357 - DNA, 15 bp, synthetic construct
  source 1..15: mol_type = other DNA
ttcaatcatgataca

SEQ ID NO: 28358 - DNA, 15 bp, synthetic construct
  source 1..15: mol_type = other DNA
acatctttgaacagt

SEQ ID NO: 28359 - DNA, 15 bp, synthetic construct
  source 1..15: mol_type = other DNA
ttcaatcatgataca

SEQ ID NO: 28360 - DNA, 18 bp, synthetic construct
  source 1..18: mol_type = other DNA
aatgatatgtttgactat

SEQ ID NO: 28361 - DNA, 15 bp, synthetic construct
  source 1..15: mol_type = other DNA
ttcaatcatgataca

SEQ ID NO: 28362 - DNA, 24 bp, synthetic construct
  source 1..24: mol_type = other DNA
accacaagcatagcttaccctaat

SEQ ID NO: 28363 - DNA, 15 bp, synthetic construct
  source 1..15: mol_type = other DNA
ttcaatcatgataca

SEQ ID NO: 28364 - DNA, 15 bp, synthetic construct
  source 1..15: mol_type = other DNA
acatctttgaacagt

SEQ ID NO: 28365 - DNA, 15 bp, synthetic construct
  source 1..15: mol_type = other DNA
ttcaatcatgataca

SEQ ID NO: 28366 - DNA, 15 bp, synthetic construct
  source 1..15: mol_type = other DNA
acatctttgaacagt

SEQ ID NO: 28367 - DNA, 18 bp, synthetic construct
  source 1..18: mol_type = other DNA
aattcccagtatccctgg

SEQ ID NO: 28368 - DNA, 18 bp, synthetic construct
  source 1..18: mol_type = other DNA
actacttactcacctttc

SEQ ID NO: 28369 - DNA, 18 bp, synthetic construct
  source 1..18: mol_type = other DNA
aattcccagtatccctgg

SEQ ID NO: 28370 - DNA, 21 bp, synthetic construct
  source 1..21: mol_type = other DNA
acccaggacagttcttacttc

SEQ ID NO: 28371 - DNA, 18 bp, synthetic construct
  source 1..18: mol_type = other DNA
aattcccagtatccctgg

SEQ ID NO: 28372 - DNA, 18 bp, synthetic construct
  source 1..18: mol_type = other DNA
gatactgcctcatcatac

SEQ ID NO: 28373 - DNA, 18 bp, synthetic construct
  source 1..18: mol_type = other DNA
aattcccagtatccctgg

SEQ ID NO: 28374 - DNA, 18 bp, synthetic construct
  source 1..18: mol_type = other DNA
gaccctaacagttattac

SEQ ID NO: 28375 - DNA, 18 bp, synthetic construct
  source 1..18: mol_type = other DNA
aattcccagtatccctgg

SEQ ID NO: 28376 - DNA, 18 bp, synthetic construct
  source 1..18: mol_type = other DNA
tcctctgtgacaccttat

SEQ ID NO: 28377 - protein, 17 aa, synthetic construct
MYWYRQDTGHGLRLIHY

SEQ ID NO: 28378 - protein, 17 aa, synthetic construct
FFWYVQYLNEAPQVLLR

SEQ ID NO: 28379 - protein, 17 aa, synthetic construct
MSWYQQDLQKQLQWLFT

SEQ ID NO: 28380 - protein, 17 aa, synthetic construct
LFWYVQYPRQGLQLLLK

SEQ ID NO: 28381 - protein, 17 aa, synthetic construct
MYWYRQSAKKPLEFMFS

SEQ ID NO: 28382 - protein, 17 aa, synthetic construct
LFWYVQYPRQGLQLLLK

SEQ ID NO: 28383 - protein, 17 aa, synthetic construct
MYWYRQDTGHGLRLIHY

SEQ ID NO: 28384 - protein, 17 aa, synthetic construct
LFWYVQYPGEGPQLLFK

SEQ ID NO: 28385 - protein, 17 aa, synthetic construct
MYWYRQDTGHGLRLIHY

SEQ ID NO: 28386 - protein, 17 aa, synthetic construct
LFWYKQTASGEIVFLIR

SEQ ID NO: 28387 - protein, 17 aa, synthetic construct
MYWYKQSAEKPPELMFL

SEQ ID NO: 28388 - protein, 17 aa, synthetic construct
IYWYRQVPHQGPQFIIQ

SEQ ID NO: 28389 - protein, 17 aa, synthetic construct
MYWYRQSAKKPLEFMFS

SEQ ID NO: 28390 - protein, 17 aa, synthetic construct
VHWYRQDSGRGPALIIL

SEQ ID NO: 28391 - protein, 17 aa, synthetic construct
MYWYKQDSKKLLKIMFS

SEQ ID NO: 28392 - protein, 17 aa, synthetic construct
LFWYVHYLNESPRLLLK

SEQ ID NO: 28393 - protein, 17 aa, synthetic construct
MYWYKQSAEKPPELMFL

SEQ ID NO: 28394 - protein, 17 aa, synthetic construct
LFWYVRYPGEGLQLLLK

SEQ ID NO: 28395 - protein, 17 aa, synthetic construct
MYWYKQSAEKPPELMFL

SEQ ID NO: 28396 - protein, 17 aa, synthetic construct
FWWYRQHSGKSPKMLMS

SEQ ID NO: 28397 - protein, 17 aa, synthetic construct
MFWYQQFQEQSLMLMAT

SEQ ID NO: 28398 - protein, 17 aa, synthetic construct
FPWYKQEAGKSLHFVID

SEQ ID NO: 28399 - protein, 17 aa, synthetic construct
LYWYQQPRDQGPQLLVY

SEQ ID NO: 28400 - protein, 17 aa, synthetic construct
MQWFYQRPGGSLVSLFY

SEQ ID NO: 28401 - protein, 17 aa, synthetic construct
LYWYQQPRDQGPQLLVY

SEQ ID NO: 28402 - protein, 17 aa, synthetic construct
FWWYRQHSGEGPKALMS

SEQ ID NO: 28403 - protein, 17 aa, synthetic construct
LYWYQQPRDQGPQLLVY

SEQ ID NO: 28404 - protein, 17 aa, synthetic construct
LQWYRQKSGEGPAQLIL

SEQ ID NO: 28405 - protein, 17 aa, synthetic construct
LYWYQQPRDQGPQLLVY

SEQ ID NO: 28406 - protein, 17 aa, synthetic construct
FWWYRQHSGEGPKALMS

SEQ ID NO: 28407 - protein, 17 aa, synthetic construct
LYWYQQPRDQGPQLLVY

SEQ ID NO: 28408 - protein, 17 aa, synthetic construct
LFWYKQTASGEIVFLIR

SEQ ID NO: 28409 - protein, 17 aa, synthetic construct
MYWYRQDPGLGLQLIYI

SEQ ID NO: 28410 - protein, 17 aa, synthetic construct
FSWYKQEAGAGLQLLMS

SEQ ID NO: 28411 - protein, 17 aa, synthetic construct
MYWYRQDPGLGLQLIYI

SEQ ID NO: 28412 - protein, 17 aa, synthetic construct
FPWYKQEAGKSLHFVID

SEQ ID NO: 28413 - protein, 17 aa, synthetic construct
MYWYRQSAKKPLEFMFS

SEQ ID NO: 28414 - protein, 17 aa, synthetic construct
LFWYVQYPRQGLQLLLK

SEQ ID NO: 28415 - protein, 17 aa, synthetic construct
MYWYRQSAKKPLEFMFS

SEQ ID NO: 28416 - protein, 17 aa, synthetic construct
FRWYRQHSAKGLEVLVS

SEQ ID NO: 28417 - protein, 17 aa, synthetic construct
MYWYRQSAKKPLEFMFS

SEQ ID NO: 28418 - protein, 17 aa, synthetic construct
FFWYVQYLNEAPQVLLR

SEQ ID NO: 28419 - protein, 17 aa, synthetic construct
MYWYRQSAKKPLEFMFS

SEQ ID NO: 28420 - protein, 17 aa, synthetic construct
VHWYRQDSGRGPALIIL

SEQ ID NO: 28421 - protein, 17 aa, synthetic construct
MYWYRQSAKKPLEFMFS

SEQ ID NO: 28422 - protein, 17 aa, synthetic construct
LFWYKQTASGEIVFLIR

SEQ ID NO: 28423 - protein, 17 aa, synthetic construct
MYWYKQDSKKLLKIMFS

SEQ ID NO: 28424 - protein, 17 aa, synthetic construct
LFWYVRYPGEGLQLLLK

SEQ ID NO: 28425 - protein, 17 aa, synthetic construct
MYWYKQDSKKLLKIMFS

SEQ ID NO: 28426 - protein, 17 aa, synthetic construct
MQWFYQRPGGSLVSLFY

SEQ ID NO: 28427 - protein, 17 aa, synthetic construct
MYWYKQDSKKLLKIMFS

SEQ ID NO: 28428 - protein, 17 aa, synthetic construct
VQWFLQNPRGSLMNLFY

SEQ ID NO: 28429 - protein, 17 aa, synthetic construct
MYWYKQDSKKLLKIMFS

SEQ ID NO: 28430 - protein, 17 aa, synthetic construct
LQWFYQHPGGRLVSLFY

SEQ ID NO: 28431 - protein, 17 aa, synthetic construct
MYWYKQDSKKLLKIMFS

SEQ ID NO: 28432 - protein, 17 aa, synthetic construct
LFWYVRYPGEGLQLLLK

SEQ ID NO: 28433 - protein, 17 aa, synthetic construct
MYWYKQDSKKLLKIMFS

SEQ ID NO: 28434 - protein, 17 aa, synthetic construct
MQWFYQRPGGSLVSLFY

SEQ ID NO: 28435 - protein, 17 aa, synthetic construct
MYWYKQDSKKLLKIMFS

SEQ ID NO: 28436 - protein, 17 aa, synthetic construct
LSWYQQREGHAPVFLSY

SEQ ID NO: 28437 - protein, 17 aa, synthetic construct
MYWYRQDTGHGLRLIHY

SEQ ID NO: 28438 - protein, 17 aa, synthetic construct
LFWYKQTASGEIVFLIR

SEQ ID NO: 28439 - protein, 17 aa, synthetic construct
MYWYRQDTGHGLRLIHY

SEQ ID NO: 28440 - protein, 17 aa, synthetic construct
VQWYRQKSGKGPAQLIL

SEQ ID NO: 28441 - protein, 17 aa, synthetic construct
MYWYRQDTGHGLRLIHY

SEQ ID NO: 28442 - protein, 17 aa, synthetic construct
LFWYVQYPRQGLQLLLK

SEQ ID NO: 28443 - protein, 17 aa, synthetic construct
MYWYRQDTGHGLRLIHY

SEQ ID NO: 28444 - protein, 17 aa, synthetic construct
LFWYVQYPGQSLQFLLK

SEQ ID NO: 28445 - protein, 17 aa, synthetic construct
MYWYRQDTGHGLRLIHY

SEQ ID NO: 28446 - protein, 17 aa, synthetic construct
LFWYVQYPGQSLQFLLK

SEQ ID NO: 28447 - protein, 17 aa, synthetic construct
MYWYRQDTGHGLRLIHY

SEQ ID NO: 28448 - protein, 17 aa, synthetic construct
FSWYKQEAGAGLQLLMS

SEQ ID NO: 28449 - protein, 17 aa, synthetic construct
MYWYRQDTGHGLRLIHY

SEQ ID NO: 28450 - protein, 17 aa, synthetic construct
LFWYKQTASGEIVFLIR

SEQ ID NO: 28451 - protein, 17 aa, synthetic construct
MYWYRQDTGHGLRLIHY

SEQ ID NO: 28452 - protein, 17 aa, synthetic construct
FPWYRQFPGKSPALLIA

SEQ ID NO: 28453 - protein, 17 aa, synthetic construct
MYWYRQDTGHGLRLIHY

SEQ ID NO: 28454 - protein, 17 aa, synthetic construct
FWWYRQHSGEGPKALMS

SEQ ID NO: 28455 - protein, 17 aa, synthetic construct
MYWYRQDTGHGLRLIHY

SEQ ID NO: 28456 - protein, 17 aa, synthetic construct
LFWYVQYPGQGPQLLLK

SEQ ID NO: 28457 - protein, 17 aa, synthetic construct
MYWYRQDTGHGLRLIHY

SEQ ID NO: 28458 - protein, 17 aa, synthetic construct
LFWYKQTASGEIVFLIR

SEQ ID NO: 28459 - protein, 17 aa, synthetic construct
MYWYRQDTGHGLRLIHY

SEQ ID NO: 28460 - protein, 17 aa, synthetic construct
FFWYKQEPGASLQLLMK

SEQ ID NO: 28461 - protein, 17 aa, synthetic construct
MYWYRQDTGHGLRLIHY

SEQ ID NO: 28462 - protein, 17 aa, synthetic construct
FFWYKQEPGASLQLLMK

SEQ ID NO: 28463 - protein, 17 aa, synthetic construct
MYWYRQDTGHGLRLIHY

SEQ ID NO: 28464 - protein, 17 aa, synthetic construct
LFWYVQYSGEGPQLLLQ

SEQ ID NO: 28465 - protein, 17 aa, synthetic construct
MYWYRQDTGHGLRLIHY

SEQ ID NO: 28466 - protein, 17 aa, synthetic construct
LFWYKQTASGEIVFLIR

SEQ ID NO: 28467 - protein, 17 aa, synthetic construct
MYWYRQDTGHGLRLIHY

SEQ ID NO: 28468 - protein, 17 aa, synthetic construct
LFWYVQYPRQGLQLLLK

SEQ ID NO: 28469 - protein, 17 aa, synthetic construct
MYWYRQDTGHGLRLIHY

SEQ ID NO: 28470 - protein, 17 aa, synthetic construct
LFWYKQTASGEIVFLIR

SEQ ID NO: 28471 - protein, 17 aa, synthetic construct
MYWYRQDTGHGLRLIHY

SEQ ID NO: 28472 - protein, 17 aa, synthetic construct
LFWYVQYPRQGLQLLLK

SEQ ID NO: 28473 - protein, 17 aa, synthetic construct
MYWYRQDTGHGLRLIHY

SEQ ID NO: 28474 - protein, 17 aa, synthetic construct
LFWYKQTASGEIVFLIR

SEQ ID NO: 28475 - protein, 17 aa, synthetic construct
MYWYRQDTGHGLRLIHY

SEQ ID NO: 28476 - protein, 17 aa, synthetic construct
LFWYKQTASGEIVFLIR

SEQ ID NO: 28477 - protein, 17 aa, synthetic construct
MYWYQKKPNQAPKLLLF

SEQ ID NO: 28478 - protein, 17 aa, synthetic construct
VQWYRQKSGKGPAQLIL

SEQ ID NO: 28479 - protein, 17 aa, synthetic construct
MYWYQKKPNQAPKLLLF

SEQ ID NO: 28480 - protein, 17 aa, synthetic construct
LFWYVRYPGEGLQLLLK

SEQ ID NO: 28481 - protein, 17 aa, synthetic construct
LYWYWQATGGTLQQLFY

SEQ ID NO: 28482 - protein, 17 aa, synthetic construct
FPWYWQFPRESPALLIA

SEQ ID NO: 28483 - protein, 17 aa, synthetic construct
LYWYWQATGGTLQQLFY

SEQ ID NO: 28484 - protein, 17 aa, synthetic construct
LFWYVQYSGEGPQLLLQ

SEQ ID NO: 28485 - protein, 17 aa, synthetic construct
FYWYKQILGQQMEFLVN

SEQ ID NO: 28486 - protein, 17 aa, synthetic construct
LFWYKQTASGEIVFLIR

SEQ ID NO: 28487 - protein, 17 aa, synthetic construct
VAWYRQSPQKTFELIAL

SEQ ID NO: 28488 - protein, 17 aa, synthetic construct
LFWYVRYPGEGLQLLLK

SEQ ID NO: 28489 - protein, 17 aa, synthetic construct
VAWYRQSPQKTFELIAL

SEQ ID NO: 28490 - protein, 17 aa, synthetic construct
FPWYHQFPGESPALLIA

SEQ ID NO: 28491 - protein, 17 aa, synthetic construct
MYWYRQDSGKGLRLIYY

SEQ ID NO: 28492 - protein, 17 aa, synthetic construct
LFWYVQHLNEAPKLLLK

SEQ ID NO: 28493 - protein, 17 aa, synthetic construct
MYWYRQDSGKGLRLIYY

SEQ ID NO: 28494 - protein, 17 aa, synthetic construct
MQWFYQRPGGSLVSLFY

SEQ ID NO: 28495 - protein, 17 aa, synthetic construct
MYWYRQDSGKGLRLIYY

SEQ ID NO: 28496 - protein, 17 aa, synthetic construct
FAWYKKYPDNSPTLLIS

SEQ ID NO: 28497 - protein, 17 aa, synthetic construct
MYWYRQDSGKGLRLIYY

SEQ ID NO: 28498 - protein, 17 aa, synthetic construct
LFWYVRYPGEGLQLLLK

SEQ ID NO: 28499 - protein, 17 aa, synthetic construct
MYWYRQDSGKGLRLIYY

SEQ ID NO: 28500 - protein, 17 aa, synthetic construct
MQWFYQRPGGSLVSLFY

SEQ ID NO: 28501 - protein, 17 aa, synthetic construct
MYWYRQDSGKGLRLIYY

SEQ ID NO: 28502 - protein, 17 aa, synthetic construct
MQWFYQRPGGSLVSLFY

SEQ ID NO: 28503 - protein, 17 aa, synthetic construct
MSWYQQDLQKQLQWLFT

SEQ ID NO: 28504 - protein, 17 aa, synthetic construct
LFWYVQHLNEAPKLLLK

SEQ ID NO: 28505 - protein, 17 aa, synthetic construct
MSWYQQDLQKQLQWLFT

SEQ ID NO: 28506 - protein, 17 aa, synthetic construct
LFWYKQTASGEIVFLIR

SEQ ID NO: 28507 - protein, 17 aa, synthetic construct
MSWYQQDLQKQLQWLFT

SEQ ID NO: 28508 - protein, 17 aa, synthetic construct
FPWYKQEAGKSLHFVID

SEQ ID NO: 28509 - protein, 17 aa, synthetic construct
MSWYQQDLQKQLQWLFT

SEQ ID NO: 28510 - protein, 17 aa, synthetic construct
FFWYKQEPGASLQLLMK

SEQ ID NO: 28511 - protein, 17 aa, synthetic construct
MSWYQQDLQKQLQWLFT

SEQ ID NO: 28512 - protein, 17 aa, synthetic construct
LFWYVQYPRQGLQLLLK

SEQ ID NO: 28513 - DNA, 51 bp, synthetic construct; identical to SEQ ID NO: 7423
  source 1..51: mol_type = other DNA

SEQ ID NO: 28514 - DNA, 51 bp, synthetic construct
  source 1..51: mol_type = other DNA
tttttctggtatgtgcaatatctcaacgaagcccctcaggtactcctgcgg

SEQ ID NO: 28515 - DNA, 51 bp, synthetic construct; identical to SEQ ID NO: 7443
  source 1..51: mol_type = other DNA

SEQ ID NO: 28516 - DNA, 51 bp, synthetic construct; identical to SEQ ID NO: 7432
  source 1..51: mol_type = other DNA

SEQ ID NO: 28517 - DNA, 51 bp, synthetic construct; identical to SEQ ID NO: 7435
  source 1..51: mol_type = other DNA

SEQ ID NO: 28518 - DNA, 51 bp, synthetic construct; identical to SEQ ID NO: 7432
  source 1..51: mol_type = other DNA

SEQ ID NO: 28519 - DNA, 51 bp, synthetic construct; identical to SEQ ID NO: 7423
  source 1..51: mol_type = other DNA

SEQ ID NO: 28520 - DNA, 51 bp, synthetic construct; identical to SEQ ID NO: 7458
  source 1..51: mol_type = other DNA

SEQ ID NO: 28521 - DNA, 51 bp, synthetic construct; identical to SEQ ID NO: 7427
  source 1..51: mol_type = other DNA

SEQ ID NO: 28522 - DNA, 51 bp, synthetic construct; identical to SEQ ID NO: 7426
  source 1..51: mol_type = other DNA

SEQ ID NO: 28523 - DNA, 51 bp, synthetic construct; identical to SEQ ID NO: 7515
  source 1..51: mol_type = other DNA

SEQ ID NO: 28524 - DNA, 51 bp, synthetic construct; identical to SEQ ID NO: 7526
  source 1..51: mol_type = other DNA

SEQ ID NO: 28525 - DNA, 51 bp, synthetic construct; identical to SEQ ID NO: 7435
  source 1..51: mol_type = other DNA

SEQ ID NO: 28526 - DNA, 51 bp, synthetic construct; identical to SEQ ID NO: 8498
  source 1..51: mol_type = other DNA

SEQ ID NO: 28527 - DNA, 51 bp, synthetic construct; identical to SEQ ID NO: 7519
  source 1..51: mol_type = other DNA

SEQ ID NO: 28528 - DNA, 51 bp, synthetic construct; identical to SEQ ID NO: 7628
  source 1..51: mol_type = other DNA

SEQ ID NO: 28529 - DNA, 51 bp, synthetic construct; identical to SEQ ID NO: 7515
  source 1..51: mol_type = other DNA

SEQ ID NO: 28530 - DNA, 51 bp, synthetic construct; identical to SEQ ID NO: 7480
  source 1..51: mol_type = other DNA

SEQ ID NO: 28531 - DNA, 51 bp, synthetic construct; identical to SEQ ID NO: 7515
  source 1..51: mol_type = other DNA

SEQ ID NO: 28532 - DNA, 51 bp, synthetic construct; identical to SEQ ID NO: 7448
  source 1..51: mol_type = other DNA

SEQ ID NO: 28533 - DNA, 51 bp, synthetic construct; identical to SEQ ID NO: 7987
  source 1..51: mol_type = other DNA

SEQ ID NO: 28534 - DNA, 51 bp, synthetic construct; identical to SEQ ID NO: 7474
  source 1..51: mol_type = other DNA

SEQ ID NO: 28535 - DNA, 51 bp, synthetic construct; identical to SEQ ID NO: 7421
  source 1..51: mol_type = other DNA

SEQ ID NO: 28536 - DNA, 51 bp, synthetic construct; identical to SEQ ID NO: 7430
  source 1..51: mol_type = other DNA

SEQ ID NO: 28537 - DNA, 51 bp, synthetic construct; identical to SEQ ID NO: 7421
  source 1..51: mol_type = other DNA

SEQ ID NO: 28538 - DNA, 51 bp, synthetic construct; identical to SEQ ID NO: 7944
  source 1..51: mol_type = other DNA

SEQ ID NO: 28539 - DNA, 51 bp, synthetic construct; identical to SEQ ID NO: 7421
  source 1..51: mol_type = other DNA

SEQ ID NO: 28540 - DNA, 51 bp, synthetic construct; identical to SEQ ID NO: 7444
  source 1..51: mol_type = other DNA

SEQ ID NO: 28541 - DNA, 51 bp, synthetic construct; identical to SEQ ID NO: 7421
  source 1..51: mol_type = other DNA

SEQ ID NO: 28542 - DNA, 51 bp, synthetic construct; identical to SEQ ID NO: 7552
  source 1..51: mol_type = other DNA

SEQ ID NO: 28543 - DNA, 51 bp, synthetic construct; identical to SEQ ID NO: 7421
  source 1..51: mol_type = other DNA

SEQ ID NO: 28544 - DNA, 51 bp, synthetic construct; identical to SEQ ID NO: 7426
  source 1..51: mol_type = other DNA

SEQ ID NO: 28545 - DNA, 51 bp, synthetic construct; identical to SEQ ID NO: 7583
  source 1..51: mol_type = other DNA

SEQ ID NO: 28546 - DNA, 51 bp, synthetic construct; identical to SEQ ID NO: 7442
  source 1..51: mol_type = other DNA

SEQ ID NO: 28547 - DNA, 51 bp, synthetic construct; identical to SEQ ID NO: 7583
  source 1..51: mol_type = other DNA

SEQ ID NO: 28548 - DNA, 51 bp, synthetic construct; identical to SEQ ID NO: 7474
  source 1..51: mol_type = other DNA

SEQ ID NO: 28549 - DNA, 51 bp, synthetic construct; identical to SEQ ID NO: 7435
  source 1..51: mol_type = other DNA

SEQ ID NO: 28550 - DNA, 51 bp, synthetic construct; identical to SEQ ID NO: 7432
  source 1..51: mol_type = other DNA

SEQ ID NO: 28551 - DNA, 51 bp, synthetic construct; identical to SEQ ID NO: 7435
  source 1..51: mol_type = other DNA

SEQ ID NO: 28552 - DNA, 51 bp, synthetic construct; identical to SEQ ID NO: 7512
  source 1..51: mol_type = other DNA

SEQ ID NO: 28553 - DNA, 51 bp, synthetic construct; identical to SEQ ID NO: 7435
  source 1..51: mol_type = other DNA

SEQ ID NO: 28554 - DNA, 51 bp, synthetic construct; identical to SEQ ID NO: 28514
  source 1..51: mol_type = other DNA

SEQ ID NO: 28555 - DNA, 51 bp, synthetic construct; identical to SEQ ID NO: 7435
  source 1..51: mol_type = other DNA

SEQ ID NO: 28556 - DNA, 51 bp, synthetic construct; identical to SEQ ID NO: 7500
  source 1..51: mol_type = other DNA

SEQ ID NO: 28557 - DNA, 51 bp, synthetic construct; identical to SEQ ID NO: 7435
  source 1..51: mol_type = other DNA

SEQ ID NO: 28558 - DNA, 51 bp, synthetic construct; identical to SEQ ID NO: 7426
  source 1..51: mol_type = other DNA

SEQ ID NO: 28559 - DNA, 51 bp, synthetic construct; identical to SEQ ID NO: 7519
  source 1..51: mol_type = other DNA

SEQ ID NO: 28560 - DNA, 51 bp, synthetic construct; identical to SEQ ID NO: 7480
  source 1..51: mol_type = other DNA

SEQ ID NO: 28561 - DNA, 51 bp, synthetic construct; identical to SEQ ID NO: 7519
  source 1..51: mol_type = other DNA

SEQ ID NO: 28562 - DNA, 51 bp, synthetic construct; identical to SEQ ID NO: 7430
  source 1..51: mol_type = other DNA

SEQ ID NO: 28563 - DNA, 51 bp, synthetic construct; identical to SEQ ID NO: 7519
  source 1..51: mol_type = other DNA

SEQ ID NO: 28564 - DNA, 51 bp, synthetic construct; identical to SEQ ID NO: 7678
  source 1..51: mol_type = other DNA

SEQ ID NO: 28565 - DNA, 51 bp, synthetic construct; identical to SEQ ID NO: 7519
  source 1..51: mol_type = other DNA

SEQ ID NO: 28566 - DNA, 51 bp, synthetic construct; identical to SEQ ID NO: 7514
  source 1..51: mol_type = other DNA

SEQ ID NO: 28567 - DNA, 51 bp, synthetic construct; identical to SEQ ID NO: 7519
  source 1..51: mol_type = other DNA

SEQ ID NO: 28568 - DNA, 51 bp, synthetic construct; identical to SEQ ID NO: 7480
  source 1..51: mol_type = other DNA

SEQ ID NO: 28569 - DNA, 51 bp, synthetic construct; identical to SEQ ID NO: 7519
  source 1..51: mol_type = other DNA

SEQ ID NO: 28570 - DNA, 51 bp, synthetic construct; identical to SEQ ID NO: 7430
  source 1..51: mol_type = other DNA

SEQ ID NO: 28571 - DNA, 51 bp, synthetic construct; identical to SEQ ID NO: 7519
  source 1..51: mol_type = other DNA

SEQ ID NO: 28572 - DNA, 51 bp, synthetic construct; identical to SEQ ID NO: 7424
  source 1..51: mol_type = other DNA

SEQ ID NO: 28573 - DNA, 51 bp, synthetic construct; identical to SEQ ID NO: 7423
  source 1..51: mol_type = other DNA

SEQ ID NO: 28574 - DNA, 51 bp, synthetic construct; identical to SEQ ID NO: 7426
  source 1..51: mol_type = other DNA

SEQ ID NO: 28575 - DNA, 51 bp, synthetic construct; identical to SEQ ID NO: 7423
  source 1..51: mol_type = other DNA

SEQ ID NO: 28576 - DNA, 51 bp, synthetic construct; identical to SEQ ID NO: 8070
  source 1..51: mol_type = other DNA

SEQ ID NO: 28577 - DNA, 51 bp, synthetic construct; identical to SEQ ID NO: 7423
  source 1..51: mol_type = other DNA

SEQ ID NO: 28578 - DNA, 51 bp, synthetic construct; identical to SEQ ID NO: 7432
  source 1..51: mol_type = other DNA

SEQ ID NO: 28579 - DNA, 51 bp, synthetic construct; identical to SEQ ID NO: 7423
  source 1..51: mol_type = other DNA

SEQ ID NO: 28580 - DNA, 51 bp, synthetic construct; identical to SEQ ID NO: 7700
  source 1..51: mol_type = other DNA

SEQ ID NO: 28581 - DNA, 51 bp, synthetic construct; identical to SEQ ID NO: 7423
  source 1..51: mol_type = other DNA

SEQ ID NO: 28582 - DNA, 51 bp, synthetic construct; identical to SEQ ID NO: 7700
  source 1..51: mol_type = other DNA

SEQ ID NO: 28583 - DNA, 51 bp, synthetic construct; identical to SEQ ID NO: 7423
  source 1..51: mol_type = other DNA

SEQ ID NO: 28584 - DNA, 51 bp, synthetic construct; identical to SEQ ID NO: 8286
  source 1..51: mol_type = other DNA

SEQ ID NO: 28585 - DNA, 51 bp, synthetic construct; identical to SEQ ID NO: 7423
  source 1..51: mol_type = other DNA

SEQ ID NO: 28586 - DNA, 51 bp, synthetic construct; identical to SEQ ID NO: 7426
  source 1..51: mol_type = other DNA

SEQ ID NO: 28587 - DNA, 51 bp, synthetic construct; identical to SEQ ID NO: 7423
  source 1..51: mol_type = other DNA

SEQ ID NO: 28588 - DNA, 51 bp, synthetic construct; identical to SEQ ID NO: 22578
  source 1..51: mol_type = other DNA

SEQ ID NO: 28589 - DNA, 51 bp, synthetic construct; identical to SEQ ID NO: 7423
  source 1..51: mol_type = other DNA

SEQ ID NO: 28590 - DNA, 51 bp, synthetic construct; identical to SEQ ID NO: 7552
  source 1..51: mol_type = other DNA

SEQ ID NO: 28591 - DNA, 51 bp, synthetic construct; identical to SEQ ID NO: 7423
  source 1..51: mol_type = other DNA

SEQ ID NO: 28592 - DNA, 51 bp, synthetic construct; identical to SEQ ID NO: 7930
  source 1..51: mol_type = other DNA

SEQ ID NO: 28593 - DNA, 51 bp, synthetic construct; identical to SEQ ID NO: 7423
  source 1..51: mol_type = other DNA

SEQ ID NO: 28594 - DNA, 51 bp, synthetic construct; identical to SEQ ID NO: 7426
  source 1..51: mol_type = other DNA

SEQ ID NO: 28595 - DNA, 51 bp, synthetic construct; identical to SEQ ID NO: 7457
  source 1..51: mol_type = other DNA

SEQ ID NO: 28596 - DNA, 51 bp, synthetic construct; identical to SEQ ID NO: 7462
  source 1..51: mol_type = other DNA

SEQ ID NO: 28597 - DNA, 51 bp, synthetic construct; identical to SEQ ID NO: 7457
  source 1..51: mol_type = other DNA

SEQ ID NO: 28598 - DNA, 51 bp, synthetic construct; identical to SEQ ID NO: 7462
  source 1..51: mol_type = other DNA

SEQ ID NO: 28599 - DNA, 51 bp, synthetic construct; identical to SEQ ID NO: 7457
  source 1..51: mol_type = other DNA

SEQ ID NO: 28600 - DNA, 51 bp, synthetic construct; identical to SEQ ID NO: 7876
  source 1..51: mol_type = other DNA

SEQ ID NO: 28601 - DNA, 51 bp, synthetic construct; identical to SEQ ID NO: 7427
  source 1..51: mol_type = other DNA

SEQ ID NO: 28602 - DNA, 51 bp, synthetic construct; identical to SEQ ID NO: 7426
  source 1..51: mol_type = other DNA

SEQ ID NO: 28603 - DNA, 51 bp, synthetic construct; identical to SEQ ID NO: 7427
  source 1..51: mol_type = other DNA

SEQ ID NO: 28604 - DNA, 51 bp, synthetic construct; identical to SEQ ID NO: 7432
  source 1..51: mol_type = other DNA

SEQ ID NO: 28605 - DNA, 51 bp, synthetic construct; identical to SEQ ID NO: 7427
  source 1..51: mol_type = other DNA

SEQ ID NO: 28606 - DNA, 51 bp, synthetic construct; identical to SEQ ID NO: 7426
  source 1..51: mol_type = other DNA

SEQ ID NO: 28607 - DNA, 51 bp, synthetic construct; identical to SEQ ID NO: 7427
  source 1..51: mol_type = other DNA

SEQ ID NO: 28608 - DNA, 51 bp, synthetic construct; identical to SEQ ID NO: 7432
  source 1..51: mol_type = other DNA

SEQ ID NO: 28609 - DNA, 51 bp, synthetic construct; identical to SEQ ID NO: 7427
  source 1..51: mol_type = other DNA

SEQ ID NO: 28610 - DNA, 51 bp, synthetic construct; identical to SEQ ID NO: 7426
  source 1..51: mol_type = other DNA

SEQ ID NO: 28611 - DNA, 51 bp, synthetic construct; identical to SEQ ID NO: 7427
  source 1..51: mol_type = other DNA

SEQ ID NO: 28612 - DNA, 51 bp, synthetic construct; identical to SEQ ID NO: 7426
  source 1..51: mol_type = other DNA

SEQ ID NO: 28613 - DNA, 51 bp, synthetic construct; identical to SEQ ID NO: 7719
  source 1..51: mol_type = other DNA

SEQ ID NO: 28614 - DNA, 51 bp, synthetic construct; identical to SEQ ID NO: 8070
  source 1..51: mol_type = other DNA

SEQ ID NO: 28615 - DNA, 51 bp, synthetic construct; identical to SEQ ID NO: 7719
  source 1..51: mol_type = other DNA

SEQ ID NO: 28616 - DNA, 51 bp, synthetic construct; identical to SEQ ID NO: 7480
  source 1..51: mol_type = other DNA

SEQ ID NO: 28617 - DNA, 51 bp, synthetic construct; identical to SEQ ID NO: 7455
  source 1..51: mol_type = other DNA

SEQ ID NO: 28618 - DNA, 51 bp, synthetic construct; identical to SEQ ID NO: 7702
  source 1..51: mol_type = other DNA

SEQ ID NO: 28619 - DNA, 51 bp, synthetic construct; identical to SEQ ID NO: 7455
  source 1..51: mol_type = other DNA

SEQ ID NO: 28620 - DNA, 51 bp, synthetic construct; identical to SEQ ID NO: 7876
  source 1..51: mol_type = other DNA

SEQ ID NO: 28621 - DNA, 51 bp, synthetic construct; identical to SEQ ID NO: 7511
  source 1..51: mol_type = other DNA

SEQ ID NO: 28622 - DNA, 51 bp, synthetic construct; identical to SEQ ID NO: 7426
  source 1..51: mol_type = other DNA

SEQ ID NO: 28623 - DNA, 51 bp, synthetic construct; identical to SEQ ID NO: 7499
  source 1..51: mol_type = other DNA

SEQ ID NO: 28624 - DNA, 51 bp, synthetic construct; identical to SEQ ID NO: 7480
  source 1..51: mol_type = other DNA

SEQ ID NO: 28625 - DNA, 51 bp, synthetic construct; identical to SEQ ID NO: 7499
  source 1..51: mol_type = other DNA

SEQ ID NO: 28626 - DNA, 51 bp, synthetic construct; identical to SEQ ID NO: 7870
  source 1..51: mol_type = other DNA

SEQ ID NO: 28627 - DNA, 51 bp, synthetic construct; identical to SEQ ID NO: 7447
  source 1..51: mol_type = other DNA

SEQ ID NO: 28628 - DNA, 51 bp, synthetic construct; identical to SEQ ID NO: 7482
  source 1..51: mol_type = other DNA

SEQ ID NO: 28629 - DNA, 51 bp, synthetic construct; identical to SEQ ID NO: 7447
  source 1..51: mol_type = other DNA

SEQ ID NO: 28630 - DNA, 51 bp, synthetic construct; identical to SEQ ID NO: 7430
  source 1..51: mol_type = other DNA

SEQ ID NO: 28631 - DNA, 51 bp, synthetic construct; identical to SEQ ID NO: 7447
  source 1..51: mol_type = other DNA

SEQ ID NO: 28632 - DNA, 51 bp, synthetic construct; identical to SEQ ID NO: 7498
  source 1..51: mol_type = other DNA

SEQ ID NO: 28633 - DNA, 51 bp, synthetic construct; identical to SEQ ID NO: 7447
  source 1..51: mol_type = other DNA

SEQ ID NO: 28634 - DNA, 51 bp, synthetic construct; identical to SEQ ID NO: 7480
  source 1..51: mol_type = other DNA

SEQ ID NO: 28635 - DNA, 51 bp, synthetic construct; identical to SEQ ID NO: 7447
  source 1..51: mol_type = other DNA

SEQ ID NO: 28636 - DNA, 51 bp, synthetic construct; identical to SEQ ID NO: 7430
  source 1..51: mol_type = other DNA

SEQ ID NO: 28637 - DNA, 51 bp, synthetic construct; identical to SEQ ID NO: 7447
  source 1..51: mol_type = other DNA

SEQ ID NO: 28638 - DNA, 51 bp, synthetic construct; identical to SEQ ID NO: 7430
  source 1..51: mol_type = other DNA

SEQ ID NO: 28639 - DNA, 51 bp, synthetic construct; identical to SEQ ID NO: 7443
  source 1..51: mol_type = other DNA

SEQ ID NO: 28640 - DNA, 51 bp, synthetic construct; identical to SEQ ID NO: 7428
  source 1..51: mol_type = other DNA

SEQ ID NO: 28641 - DNA, 51 bp, synthetic construct; identical to SEQ ID NO: 7443
  source 1..51: mol_type = other DNA

SEQ ID NO: 28642 - DNA, 51 bp, synthetic construct; identical to SEQ ID NO: 7426
  source 1..51: mol_type = other DNA

SEQ ID NO: 28643 - DNA, 51 bp, synthetic construct; identical to SEQ ID NO: 7443
  source 1..51: mol_type = other DNA

SEQ ID NO: 28644 - DNA, 51 bp, synthetic construct; identical to SEQ ID NO: 7474
  source 1..51: mol_type = other DNA

SEQ ID NO: 28645 - DNA, 51 bp, synthetic construct; identical to SEQ ID NO: 7443
  source 1..51: mol_type = other DNA

SEQ ID NO: 28646 - DNA, 51 bp, synthetic construct; identical to SEQ ID NO: 7462
  source 1..51: mol_type = other DNA

SEQ ID NO: 28647 - DNA, 51 bp, synthetic construct; identical to SEQ ID NO: 7443
  source 1..51: mol_type = other DNA

SEQ ID NO: 28648 - DNA, 51 bp, synthetic construct; identical to SEQ ID NO: 7432
  source 1..51: mol_type = other DNA

SEQ ID NO: 28649 - protein, 6 aa, synthetic construct
SYGAGS

SEQ ID NO: 28650 - protein, 7 aa, synthetic construct
SSTDNKR

SEQ ID NO: 28651 - protein, 6 aa, synthetic construct
LRSPGD

SEQ ID NO: 28652 - protein, 8 aa, synthetic construct
YYSGDPVV

SEQ ID NO: 28653 - protein, 6 aa, synthetic construct
YSYQKL

SEQ ID NO: 28654 - protein, 8 aa, synthetic construct
YYSGDPVV

SEQ ID NO: 28655 - protein, 6 aa, synthetic construct
SYGAGS

SEQ ID NO: 28656 - protein, 7 aa, synthetic construct
VPKANEK

SEQ ID NO: 28657 - protein, 6 aa, synthetic construct
SYVADS

SEQ ID NO: 28658 - protein, 8 aa, synthetic construct
QDSYKKEN

SEQ ID NO: 28659 - protein, 6 aa, synthetic construct
YNLKQL

SEQ ID NO: 28660 - protein, 7 aa, synthetic construct
GYKDYVV

SEQ ID NO: 28661 - protein, 6 aa, synthetic construct
YSYQKL

SEQ ID NO: 28662 - protein, 7 aa, synthetic construct
IRSNERE

SEQ ID NO: 28663 - protein, 6 aa, synthetic construct
YNNKQL

SEQ ID NO: 28664 - protein, 7 aa, synthetic construct
SSTDNKR

SEQ ID NO: 28665 - protein, 6 aa, synthetic construct
YNLKQL

SEQ ID NO: 28666 - protein, 7 aa, synthetic construct
VITAGQK

SEQ ID NO: 28667 - protein, 6 aa, synthetic construct
YNLKQL

SEQ ID NO: 28668 - protein, 6 aa, synthetic construct
IFSNGE

SEQ ID NO: 28669 - protein, 7 aa, synthetic construct
ANEGSEA

SEQ ID NO: 28670 - protein, 7 aa, synthetic construct
IRSNVDR

SEQ ID NO: 28671 - protein, 6 aa, synthetic construct
FRDEAV

SEQ ID NO: 28672 - protein, 5 aa, synthetic construct
NPSGT

SEQ ID NO: 28673 - protein, 6 aa, synthetic construct
FRDEAV

SEQ ID NO: 28674 - protein, 6 aa, synthetic construct
IFSDGD

SEQ ID NO: 28675 - protein, 6 aa, synthetic construct
FRDEAV

SEQ ID NO: 28676 - protein, 7 aa, synthetic construct
IRSNERE

SEQ ID NO: 28677 - protein, 6 aa, synthetic construct
FRDEAV

SEQ ID NO: 28678 - protein, 6 aa, synthetic construct
IFSNGD

SEQ ID NO: 28679 - protein, 6 aa, synthetic construct
FRDEAV

SEQ ID NO: 28680 - protein, 8 aa, synthetic construct
QDSYKKEN

SEQ ID NO: 28681 - protein, 6 aa, synthetic construct
SYDVDS

SEQ ID NO: 28682 - protein, 7 aa, synthetic construct
VLSNVDR

SEQ ID NO: 28683 - protein, 6 aa, synthetic construct
SYDVDS

SEQ ID NO: 28684 - protein, 7 aa, synthetic construct
IRSNVDR

SEQ ID NO: 28685 - protein, 6 aa, synthetic construct
YSYQKL

SEQ ID NO: 28686 - protein, 8 aa, synthetic construct
YYSGDPVV

SEQ ID NO: 28687 - protein, 6 aa, synthetic construct
YSYQKL

SEQ ID NO: 28688 - protein, 6 aa, synthetic construct
IFSDGE

SEQ ID NO: 28689 - protein, 6 aa, synthetic construct
YSYQKL

SEQ ID NO: 28690 - protein, 7 aa, synthetic construct
SSTDNKR

SEQ ID NO: 28691 - protein, 6 aa, synthetic construct
YSYQKL

SEQ ID NO: 28692 - protein, 7 aa, synthetic construct
IRSNERE

SEQ ID NO: 28693 - protein, 6 aa, synthetic construct
YSYQKL

SEQ ID NO: 28694 - protein, 8 aa, synthetic construct
QDSYKKEN

SEQ ID NO: 28695 - protein, 6 aa, synthetic construct
YNNKQL

SEQ ID NO: 28696 - protein, 7 aa, synthetic construct
VITAGQK

SEQ ID NO: 28697 - protein, 6 aa, synthetic construct
YNNKQL

SEQ ID NO: 28698 - protein, 5 aa, synthetic construct
NPSGT

SEQ ID NO: 28699 - protein, 6 aa, synthetic construct
YNNKQL

SEQ ID NO: 28700 - protein, 5 aa, synthetic construct
LVPGT

SEQ ID NO: 28701 - protein, 6 aa, synthetic construct
YNNKQL

SEQ ID NO: 28702 - protein, 5 aa, synthetic construct
NPSGT

SEQ ID NO: 28703 - protein, 6 aa, synthetic construct
YNNKQL

SEQ ID NO: 28704 - protein, 7 aa, synthetic construct
VITAGQK

SEQ ID NO: 28705 - protein, 6 aa, synthetic construct
YNNKQL

SEQ ID NO: 28706 - protein, 5 aa, synthetic construct
NPSGT

SEQ ID NO: 28707 - protein, 6 aa, synthetic construct
YNNKQL

SEQ ID NO: 28708 - protein, 6 aa, synthetic construct
VVLDGL

SEQ ID NO: 28709 - protein, 6 aa, synthetic construct
SYGAGS

SEQ ID NO: 28710 - protein, 8 aa, synthetic construct
QDSYKKEN

SEQ ID NO: 28711 - protein, 6 aa, synthetic construct
SYGAGS

SEQ ID NO: 28712 - protein, 7 aa, synthetic construct
IRSNERE

SEQ ID NO: 28713 - protein, 6 aa, synthetic construct
SYGAGS

SEQ ID NO: 28714 - protein, 8 aa, synthetic construct
YYSGDPVV

SEQ ID NO: 28715 - protein, 6 aa, synthetic construct
SYGAGS

SEQ ID NO: 28716 - protein, 8 aa, synthetic construct
YITGDTVV

SEQ ID NO: 28717 - protein, 6 aa, synthetic construct
SYGAGS

SEQ ID NO: 28718 - protein, 8 aa, synthetic construct
YITGDAVV

SEQ ID NO: 28719 - protein, 6 aa, synthetic construct
SYGAGS

SEQ ID NO: 28720 - protein, 7 aa, synthetic construct
VLSNVDR

SEQ ID NO: 28721 - protein, 6 aa, synthetic construct
SYGAGS

SEQ ID NO: 28722 - protein, 8 aa, synthetic construct
QDSYKKEN

SEQ ID NO: 28723 - protein, 6 aa, synthetic construct
SYGAGS

SEQ ID NO: 28724 - protein, 7 aa, synthetic construct
ISLVSNK

SEQ ID NO: 28725 - protein, 6 aa, synthetic construct
SYGAGS

SEQ ID NO: 28726 - protein, 6 aa, synthetic construct
IFSNGD

SEQ ID NO: 28727 - protein, 6 aa, synthetic construct
SYGAGS

SEQ ID NO: 28728 - protein, 7 aa, synthetic construct
VTTANNK

SEQ ID NO: 28729 - protein, 6 aa, synthetic construct
SYGAGS

SEQ ID NO: 28730 - protein, 8 aa, synthetic construct
QDSYKKEN

SEQ ID NO: 28731 - protein, 6 aa, synthetic construct
SYGAGN

SEQ ID NO: 28732 - protein, 7 aa, synthetic construct
VFSSTEI

SEQ ID NO: 28733 - protein, 6 aa, synthetic construct
SYGAGN

SEQ ID NO: 28734 - protein, 7 aa, synthetic construct
VFSSTEI

SEQ ID NO: 28735 - protein, 6 aa, synthetic construct
SYGAGN

SEQ ID NO: 28736 - protein, 7 aa, synthetic construct
VTTANNK

SEQ ID NO: 28737 - protein, 6 aa, synthetic construct
SYVADS

SEQ ID NO: 28738 - protein, 8 aa, synthetic construct
QDSYKKEN

SEQ ID NO: 28739 - protein, 6 aa, synthetic construct
SYVADS

SEQ ID NO: 28740 - protein, 8 aa, synthetic construct
YYSGDPVV

SEQ ID NO: 28741 - protein, 6 aa, synthetic construct
SYVADS

SEQ ID NO: 28742 - protein, 8 aa, synthetic construct
QDSYKKEN

SEQ ID NO: 28743 - protein, 6 aa, synthetic construct
SYVADS

SEQ ID NO: 28744 - protein, 8 aa, synthetic construct
YYSGDPVV

SEQ ID NO: 28745 - protein, 6 aa, synthetic construct
SYVADS

SEQ ID NO: 28746 - protein, 8 aa, synthetic construct
QDSYKKEN

SEQ ID NO: 28747 - protein, 6 aa, synthetic construct
SYVADS

SEQ ID NO: 28748 - protein, 8 aa, synthetic construct
QDSYKKEN

SEQ ID NO: 28749 - protein, 6 aa, synthetic construct
YYDKIL

SEQ ID NO: 28750 - protein, 7 aa, synthetic construct
IRSNERE

SEQ ID NO: 28751 - protein, 6 aa, synthetic construct
YYDKIL

SEQ ID NO: 28752 - protein, 7 aa, synthetic construct
VITAGQK

SEQ ID NO: 28753 - protein, 5 aa, synthetic construct
SITVG

SEQ ID NO: 28754 - protein, 7 aa, synthetic construct
IRPVSNK

SEQ ID NO: 28755 - protein, 5 aa, synthetic construct
SITVG

SEQ ID NO: 28756 - protein, 7 aa, synthetic construct
VTTANNK

SEQ ID NO: 28757 - protein, 6 aa, synthetic construct
FYNGKV

SEQ ID NO: 28758 - protein, 8 aa, synthetic construct
QDSYKKEN

SEQ ID NO: 28759 - protein, 7 aa, synthetic construct
STVNSAI

SEQ ID NO: 28760 - protein, 7 aa, synthetic construct
VITAGQK

SEQ ID NO: 28761 - protein, 7 aa, synthetic construct
STVNSAI

SEQ ID NO: 28762 - protein, 7 aa, synthetic construct
IRPVSNK

SEQ ID NO: 28763 - protein, 6 aa, synthetic construct
SITEND

SEQ ID NO: 28764 - protein, 7 aa, synthetic construct
SSTDNKR

SEQ ID NO: 28765 - protein, 6 aa, synthetic construct
SITEND

SEQ ID NO: 28766 - protein, 5 aa, synthetic construct
NPSGT

SEQ ID NO: 28767 - protein, 6 aa, synthetic construct
SITEND

SEQ ID NO: 28768 - protein, 7 aa, synthetic construct
VRSNVDK

SEQ ID NO: 28769 - protein, 6 aa, synthetic construct
SITEND

SEQ ID NO: 28770 - protein, 7 aa, synthetic construct
VITAGQK

SEQ ID NO: 28771 - protein, 6 aa, synthetic construct
SITEND

SEQ ID NO: 28772 - protein, 5 aa, synthetic construct
NPSGT

SEQ ID NO: 28773 - protein, 6 aa, synthetic construct
SITEND

SEQ ID NO: 28774 - protein, 5 aa, synthetic construct
NPSGT

SEQ ID NO: 28775 - protein, 6 aa, synthetic construct
LRSPGD

SEQ ID NO: 28776 - protein, 7 aa, synthetic construct
SSTDNKR

SEQ ID NO: 28777 - protein, 6 aa, synthetic construct
LRSPGD

SEQ ID NO: 28778 - protein, 8 aa, synthetic construct
QDSYKKEN

SEQ ID NO: 28779 - protein, 6 aa, synthetic construct
LRSPGD

SEQ ID NO: 28780 - protein, 7 aa, synthetic construct
IRSNVDR

SEQ ID NO: 28781 - protein, 6 aa, synthetic construct
LRSPGD

SEQ ID NO: 28782 - protein, 7 aa, synthetic construct
VFSSTEI

SEQ ID NO: 28783 - protein, 6 aa, synthetic construct
LRSPGD

SEQ ID NO: 28784 - protein, 8 aa, synthetic construct
YYSGDPVV

SEQ ID NO: 28785 - DNA, 18 bp, synthetic construct
  source 1..18: mol_type = other DNA
tcatatggtgctggcagc

SEQ ID NO: 28786 - DNA, 21 bp, synthetic construct
  source 1..21: mol_type = other DNA
agctccacagacaacaagagg

SEQ ID NO: 28787 - DNA, 18 bp, synthetic construct
  source 1..18: mol_type = other DNA
ctgcggagtcctggggac

SEQ ID NO: 28788 - DNA, 24 bp, synthetic construct
  source 1..24: mol_type = other DNA
tactattccggagacccagtggtt

SEQ ID NO: 28789 - DNA, 18 bp, synthetic construct
  source 1..18: mol_type = other DNA
tacagctatcaaaaactt

SEQ ID NO: 28790 - DNA, 24 bp, synthetic construct
  source 1..24: mol_type = other DNA
tactattccggagacccagtggtt

SEQ ID NO: 28791 - DNA, 18 bp, synthetic construct
  source 1..18: mol_type = other DNA
tcatatggtgctggcagc

SEQ ID NO: 28792 - DNA, 21 bp, synthetic construct
  source 1..21: mol_type = other DNA
gtcccaaaggccaacgagaag

SEQ ID NO: 28793 - DNA, 18 bp, synthetic construct
  source 1..18: mol_type = other DNA
tcatatgtcgctgacagc

SEQ ID NO: 28794 - DNA, 24 bp, synthetic construct
  source 1..24: mol_type = other DNA
caggactcttacaaaaaggaaaat

SEQ ID NO: 28795 - DNA, 18 bp, synthetic construct
  source 1..18: mol_type = other DNA
tacaatcttaaacagttg

SEQ ID NO: 28796 - DNA, 21 bp, synthetic construct
  source 1..21: mol_type = other DNA
ggatataaggactatgtggta

SEQ ID NO: 28797 - DNA, 18 bp, synthetic construct
  source 1..18: mol_type = other DNA
tacagctatcaaaaactt

SEQ ID NO: 28798 - DNA, 21 bp, synthetic construct
  source 1..21: mol_type = other DNA
atacgttcaaatgagcgagag

SEQ ID NO: 28799 - DNA, 18 bp, synthetic construct
  source 1..18: mol_type = other DNA
tacaataataagcaactc

SEQ ID NO: 28800 - DNA, 21 bp, synthetic construct
  source 1..21: mol_type = other DNA
agctccacagacaacaagagg

SEQ ID NO: 28801 - DNA, 18 bp, synthetic construct
  source 1..18: mol_type = other DNA
tacaatcttaaacagttg

SEQ ID NO: 28802 - DNA, 21 bp, synthetic construct
  source 1..21: mol_type = other DNA
gtcattacggctggccagaag

SEQ ID NO: 28803 - DNA, 18 bp, synthetic construct
  source 1..18: mol_type = other DNA
tacaatcttaaacagttg

SEQ ID NO: 28804 - DNA, 18 bp, synthetic construct
  source 1..18: mol_type = other DNA
atcttctccaatggtgaa

SEQ ID NO: 28805 - DNA, 21 bp, synthetic construct
  source 1..21: mol_type = other DNA
gcaaatgaaggctctgaagcc

SEQ ID NO: 28806 - DNA, 21 bp, synthetic construct
  source 1..21: mol_type = other DNA
attcgttcaaatgtggacaga

SEQ ID NO: 28807 - DNA, 18 bp, synthetic construct
  source 1..18: mol_type = other DNA
tttcgggatgaggctgtt

SEQ ID NO: 28808 - DNA, 15 bp, synthetic construct
  source 1..15: mol_type = other DNA
aatccttctgggaca

SEQ ID NO: 28809 - DNA, 18 bp, synthetic construct
  source 1..18: mol_type = other DNA
tttcgggatgaggctgtt

SEQ ID NO: 28810 - DNA, 18 bp, synthetic construct
  source 1..18: mol_type = other DNA
atcttctctgatggtgac

SEQ ID NO: 28811 - DNA, 18 bp, synthetic construct
  source 1..18: mol_type = other DNA
tttcgggatgaggctgtt

SEQ ID NO: 28812 - DNA, 21 bp, synthetic construct
  source 1..21: mol_type = other DNA
atacgttcaaatgagagagag

SEQ ID NO: 28813 - DNA, 18 bp, synthetic construct
  source 1..18: mol_type = other DNA
tttcgggatgaggctgtt

SEQ ID NO: 28814 - DNA, 18 bp, synthetic construct
  source 1..18: mol_type = other DNA
atcttctccaatggtgac

SEQ ID NO: 28815 - DNA, 18 bp, synthetic construct
  source 1..18: mol_type = other DNA
tttcgggatgaggctgtt

SEQ ID NO: 28816 - DNA, 24 bp, synthetic construct
  source 1..24: mol_type = other DNA
caggactcttacaaaaaggaaaat

SEQ ID NO: 28817 - DNA, 18 bp, synthetic construct
  source 1..18: mol_type = other DNA
tcatacgatgttgatagt

SEQ ID NO: 28818 - DNA, 21 bp, synthetic construct
  source 1..21: mol_type = other DNA
gtcctttcaaatgtggacaga

SEQ ID NO: 28819 - DNA, 18 bp, synthetic construct
  source 1..18: mol_type = other DNA
tcatacgatgttgatagt

SEQ ID NO: 28820 - DNA, 21 bp, synthetic construct
  source 1..21: mol_type = other DNA
attcgttcaaatgtggacaga

SEQ ID NO: 28821 - DNA, 18 bp, synthetic construct
  source 1..18: mol_type = other DNA
tacagctatcaaaaactt

SEQ ID NO: 28822 - DNA, 24 bp, synthetic construct
  source 1..24: mol_type = other DNA
tactattccggagacccagtggtt

SEQ ID NO: 28823 - DNA, 18 bp, synthetic construct
  source 1..18: mol_type = other DNA
tacagctatcaaaaactt

SEQ ID NO: 28824 - DNA, 18 bp, synthetic construct
  source 1..18: mol_type = other DNA
atcttctctgatggtgaa

SEQ ID NO: 28825 - DNA, 18 bp, synthetic construct
  source 1..18: mol_type = other DNA
tacagctatcaaaaactt

SEQ ID NO: 28826 - DNA, 21 bp, synthetic construct
  source 1..21: mol_type = other DNA
agctccacagacaacaagagg

SEQ ID NO: 28827 - DNA, 18 bp, synthetic construct
  source 1..18: mol_type = other DNA
tacagctatcaaaaactt

SEQ ID NO: 28828 - DNA, 21 bp, synthetic construct
  source 1..21: mol_type = other DNA
atacgttcaaatgagcgagag

SEQ ID NO: 28829 - DNA, 18 bp, synthetic construct
  source 1..18: mol_type = other DNA
tacagctatcaaaaactt

SEQ ID NO: 28830 - DNA, 24 bp, synthetic construct
  source 1..24: mol_type = other DNA
caggactcttacaaaaaggaaaat

SEQ ID NO: 28831 - DNA, 18 bp, synthetic construct
  source 1..18: mol_type = other DNA
tacaataataagcaactc

SEQ ID NO: 28832 - DNA, 21 bp, synthetic construct
  source 1..21: mol_type = other DNA
gtcattacggctggccagaag

SEQ ID NO: 28833 - DNA, 18 bp, synthetic construct
  source 1..18: mol_type = other DNA
tacaataataagcaactc

SEQ ID NO: 28834 - DNA, 15 bp, synthetic construct
  source 1..15: mol_type = other DNA
aatccttctgggaca

SEQ ID NO: 28835 - DNA, 18 bp, synthetic construct
  source 1..18: mol_type = other DNA
tacaataataagcaactc

SEQ ID NO: 28836 - DNA, 15 bp, synthetic construct
  source 1..15: mol_type = other DNA
ctggtgccaggaaca

SEQ ID NO: 28837 - DNA, 18 bp, synthetic construct
  source 1..18: mol_type = other DNA
tacaataataagcaactc

SEQ ID NO: 28838 - DNA, 15 bp, synthetic construct
  source 1..15: mol_type = other DNA
aatccttctgggaca

SEQ ID NO: 28839 - DNA, 18 bp, synthetic construct
  source 1..18: mol_type = other DNA
tacaataataagcaactc

SEQ ID NO: 28840 - DNA, 21 bp, synthetic construct
  source 1..21: mol_type = other DNA
gtcattacggctggccagaag

SEQ ID NO: 28841 - DNA, 18 bp, synthetic construct
  source 1..18: mol_type = other DNA
tacaataataagcaactc

SEQ ID NO: 28842 - DNA, 15 bp, synthetic construct
  source 1..15: mol_type = other DNA
aatccttctgggaca

SEQ ID NO: 28843 - DNA, 18 bp, synthetic construct
  source 1..18: mol_type = other DNA
tacaataataagcaactc

SEQ ID NO: 28844 - DNA, 18 bp, synthetic construct
  source 1..18: mol_type = other DNA
gttgttttggatggtttg

SEQ ID NO: 28845 - DNA, 18 bp, synthetic construct
  source 1..18: mol_type = other DNA
tcatatggtgctggcagc

SEQ ID NO: 28846 - DNA, 24 bp, synthetic construct
  source 1..24: mol_type = other DNA
caggactcttacaaaaaggaaaat

SEQ ID NO: 28847 - DNA, 18 bp, synthetic construct
  source 1..18: mol_type = other DNA
tcatatggtgctggcagc

SEQ ID NO: 28848 - DNA, 21 bp, synthetic construct
  source 1..21: mol_type = other DNA
atacgttcaaatgagcgagag

SEQ ID NO: 28849 - DNA, 18 bp, synthetic construct
  source 1..18: mol_type = other DNA
tcatatggtgctggcagc

SEQ ID NO: 28850 - DNA, 24 bp, synthetic construct
  source 1..24: mol_type = other DNA
tactattccggagacccagtggtt

SEQ ID NO: 28851 - DNA, 18 bp, synthetic construct
  source 1..18: mol_type = other DNA
tcatatggtgctggcagc

SEQ ID NO: 28852 - DNA, 24 bp, synthetic construct
  source 1..24: mol_type = other DNA
tacatcacaggagacaccgttgtt

SEQ ID NO: 28853 - DNA, 18 bp, synthetic construct
  source 1..18: mol_type = other DNA
tcatatggtgctggcagc

SEQ ID NO: 28854 - DNA, 24 bp, synthetic construct
  source 1..24: mol_type = other DNA
tacatcacaggagacgccgttgtt

SEQ ID NO: 28855 - DNA, 18 bp, synthetic construct
  source 1..18: mol_type = other DNA
tcatatggtgctggcagc

SEQ ID NO: 28856 - DNA, 21 bp, synthetic construct
  source 1..21: mol_type = other DNA
gtcctttcaaatgtggacaga

SEQ ID NO: 28857 - DNA, 18 bp, synthetic construct
  source 1..18: mol_type = other DNA
tcatatggtgctggcagc

SEQ ID NO: 28858 - DNA, 24 bp, synthetic construct
  source 1..24: mol_type = other DNA
caggactcttacaaaaaggaaaat

SEQ ID NO: 28859 - DNA, 18 bp, synthetic construct
  source 1..18: mol_type = other DNA
tcatatggtgctggcagc

SEQ ID NO: 28860 - DNA, 21 bp, synthetic construct
  source 1..21: mol_type = other DNA
ataagtttggtgtccaataaa

SEQ ID NO: 28861 - DNA, 18 bp, synthetic construct
  source 1..18: mol_type = other DNA
tcatatggtgctggcagc

SEQ ID NO: 28862 - DNA, 18 bp, synthetic construct
  source 1..18: mol_type = other DNA
atcttctccaatggtgac

SEQ ID NO: 28863 - DNA, 18 bp, synthetic construct
  source 1..18: mol_type = other DNA
tcatatggtgctggcagc

SEQ ID NO: 28864 - DNA, 21 bp, synthetic construct
  source 1..21: mol_type = other DNA
gtcacaactgccaacaacaag

SEQ ID NO: 28865 - DNA, 18 bp, synthetic construct
  source 1..18: mol_type = other DNA
tcatatggtgctggcagc

SEQ ID NO: 28866 - DNA, 24 bp, synthetic construct
  source 1..24: mol_type = other DNA
caggactcttacaaaaaggaaaat

SEQ ID NO: 28867 - DNA, 18 bp, synthetic construct
  source 1..18: mol_type = other DNA
tcatatggtgctggcaac

SEQ ID NO: 28868 - DNA, 21 bp, synthetic construct
  source 1..21: mol_type = other DNA
gttttctcaagtacggaaata

SEQ ID NO: 28869 - DNA, 18 bp, synthetic construct
  source 1..18: mol_type = other DNA
tcatatggtgctggcaac

SEQ ID NO: 28870 - DNA, 21 bp, synthetic construct
  source 1..21: mol_type = other DNA
gttttctcaagtacggaaata

SEQ ID NO: 28871 - DNA, 18 bp, synthetic construct
  source 1..18: mol_type = other DNA
tcatatggtgctggcaac

SEQ ID NO: 28872 - DNA, 21 bp, synthetic construct
  source 1..21: mol_type = other DNA
gtcacaactgccaacaacaag

SEQ ID NO: 28873 - DNA, 18 bp, synthetic construct
  source 1..18: mol_type = other DNA
tcatatgtcgctgacagc

SEQ ID NO: 28874 - DNA, 24 bp, synthetic construct
  source 1..24: mol_type = other DNA
caggactcttacaaaaaggaaaat

SEQ ID NO: 28875 - DNA, 18 bp, synthetic construct
  source 1..18: mol_type = other DNA
tcatatgtcgctgacagc

SEQ ID NO: 28876 - DNA, 24 bp, synthetic construct
  source 1..24: mol_type = other DNA
tactattccggagacccagtggtt

SEQ ID NO: 28877 - DNA, 18 bp, synthetic construct
  source 1..18: mol_type = other DNA
tcatatgtcgctgacagc

SEQ ID NO: 28878 - DNA, 24 bp, synthetic construct
  source 1..24: mol_type = other DNA
caggactcttacaaaaaggaaaat

SEQ ID NO: 28879 - DNA, 18 bp, synthetic construct
  source 1..18: mol_type = other DNA
tcatatgtcgctgacagc

SEQ ID NO: 28880 - DNA, 24 bp, synthetic construct
  source 1..24: mol_type = other DNA
tactattccggagacccagtggtt

SEQ ID NO: 28881 - DNA, 18 bp, synthetic construct
  source 1..18: mol_type = other DNA
tcatatgtcgctgacagc

SEQ ID NO: 28882 - DNA, 24 bp, synthetic construct
  source 1..24: mol_type = other DNA
caggactcttacaaaaaggaaaat

SEQ ID NO: 28883 - DNA, 18 bp, synthetic construct
  source 1..18: mol_type = other DNA
tcatatgtcgctgacagc

SEQ ID NO: 28884 - DNA, 24 bp, synthetic construct
  source 1..24: mol_type = other DNA
caggactcttacaaaaaggaaaat

SEQ ID NO: 28885 - DNA, 18 bp, synthetic construct
  source 1..18: mol_type = other DNA
tactatgataagattttg

SEQ ID NO: 28886 - DNA, 21 bp, synthetic construct
  source 1..21: mol_type = other DNA
atacgttcaaatgagcgagag

SEQ ID NO: 28887 - DNA, 18 bp, synthetic construct
  source 1..18: mol_type = other DNA
tactatgataagattttg

SEQ ID NO: 28888 - DNA, 21 bp, synthetic construct
  source 1..21: mol_type = other DNA
gtcattacggctggccagaag

SEQ ID NO: 28889 - DNA, 15 bp, synthetic construct
  source 1..15: mol_type = other DNA
tctattactgttggc

SEQ ID NO: 28890 - DNA, 21 bp, synthetic construct
  source 1..21: mol_type = other DNA
atacgtccagtgtccaataaa

SEQ ID NO: 28891 - DNA, 15 bp, synthetic construct
  source 1..15: mol_type = other DNA
tctattactgttggc

SEQ ID NO: 28892 - DNA, 21 bp, synthetic construct
  source 1..21: mol_type = other DNA
gtcacaactgccaacaacaag

SEQ ID NO: 28893 - DNA, 18 bp, synthetic construct
  source 1..18: mol_type = other DNA
ttctacaatggtaaagtc

SEQ ID NO: 28894 - DNA, 24 bp, synthetic construct
  source 1..24: mol_type = other DNA
caggactcttacaaaaaggaaaat

SEQ ID NO: 28895 - DNA, 21 bp, synthetic construct
  source 1..21: mol_type = other DNA
tctactgtgaactcagcaatc

SEQ ID NO: 28896 - DNA, 21 bp, synthetic construct
  source 1..21: mol_type = other DNA
gtcattacggctggccagaag

SEQ ID NO: 28897 - DNA, 21 bp, synthetic construct
  source 1..21: mol_type = other DNA
tctactgtgaactcagcaatc

SEQ ID NO: 28898 - DNA, 21 bp, synthetic construct
  source 1..21: mol_type = other DNA
atacgtccagtgtccaataaa

SEQ ID NO: 28899 - DNA, 18 bp, synthetic construct
  source 1..18: mol_type = other DNA
tcaataactgaaaacgat

SEQ ID NO: 28900 - DNA, 21 bp, synthetic construct
  source 1..21: mol_type = other DNA
agctccacagacaacaagagg

SEQ ID NO: 28901 - DNA, 18 bp, synthetic construct
  source 1..18: mol_type = other DNA
tcaataactgaaaacgat

SEQ ID NO: 28902 - DNA, 15 bp, synthetic construct
  source 1..15: mol_type = other DNA
aatccttctgggaca

SEQ ID NO: 28903 - DNA, 18 bp, synthetic construct
  source 1..18: mol_type = other DNA
tcaataactgaaaacgat

SEQ ID NO: 28904 - DNA, 21 bp, synthetic construct
  source 1..21: mol_type = other DNA
gtacgctcaaatgtggataag

SEQ ID NO: 28905 - DNA, 18 bp, synthetic construct
  source 1..18: mol_type = other DNA
tcaataactgaaaacgat

SEQ ID NO: 28906 - DNA, 21 bp, synthetic construct
  source 1..21: mol_type = other DNA
gtcattacggctggccagaag

SEQ ID NO: 28907 - DNA, 18 bp, synthetic construct
  source 1..18: mol_type = other DNA
tcaataactgaaaacgat

SEQ ID NO: 28908 - DNA, 15 bp, synthetic construct
  source 1..15: mol_type = other DNA
aatccttctgggaca

SEQ ID NO: 28909 - DNA, 18 bp, synthetic construct
  source 1..18: mol_type = other DNA
tcaataactgaaaacgat

SEQ ID NO: 28910 - DNA, 15 bp, synthetic construct
  source 1..15: mol_type = other DNA
aatccttctgggaca

SEQ ID NO: 28911 - DNA, 18 bp, synthetic construct
  source 1..18: mol_type = other DNA
ctgcggagtcctggggac

SEQ ID NO: 28912 - DNA, 21 bp, synthetic construct
  source 1..21: mol_type = other DNA
agctccacagacaacaagagg

SEQ ID NO: 28913 - DNA, 18 bp, synthetic construct
  source 1..18: mol_type = other DNA
ctgcggagtcctggggac

SEQ ID NO: 28914 - DNA, 24 bp, synthetic construct
  source 1..24: mol_type = other DNA
caggactcttacaaaaaggaaaat

SEQ ID NO: 28915 - DNA, 18 bp, synthetic construct
  source 1..18: mol_type = other DNA
ctgcggagtcctggggac

SEQ ID NO: 28916 - DNA, 21 bp, synthetic construct
  source 1..21: mol_type = other DNA
attcgttcaaatgtggacaga

SEQ ID NO: 28917 - DNA, 18 bp, synthetic construct
  source 1..18: mol_type = other DNA
ctgcggagtcctggggac

SEQ ID NO: 28918 - DNA, 21 bp, synthetic construct
  source 1..21: mol_type = other DNA
gttttctcaagtacggaaata

SEQ ID NO: 28919 - DNA, 18 bp, synthetic construct
  source 1..18: mol_type = other DNA
ctgcggagtcctggggac

SEQ ID NO: 28920 - DNA, 24 bp, synthetic construct
  source 1..24: mol_type = other DNA
tactattccggagacccagtggtt

SEQ ID NO: 28921 - protein, 36 aa, synthetic construct; identical to SEQ ID NO: 11875

SEQ ID NO: 28922 - protein, 33 aa, synthetic construct; identical to SEQ ID NO: 11918

SEQ ID NO: 28923 - protein, 35 aa, synthetic construct; identical to SEQ ID NO: 11895

SEQ ID NO: 28924 - protein, 33 aa, synthetic construct; identical to SEQ ID NO: 11892

SEQ ID NO: 28925 - protein, 36 aa, synthetic construct; identical to SEQ ID NO: 11887

SEQ ID NO: 28926 - protein, 33 aa, synthetic construct; identical to SEQ ID NO: 11892

SEQ ID NO: 28927 - protein, 36 aa, synthetic construct; identical to SEQ ID NO: 11875

SEQ ID NO: 28928 - protein, 33 aa, synthetic construct; identical to SEQ ID NO: 12094

SEQ ID NO: 28929 - protein, 36 aa, synthetic construct; identical to SEQ ID NO: 11879

SEQ ID NO: 28930 - protein, 33 aa, synthetic construct; identical to SEQ ID NO: 11916

SEQ ID NO: 28931 - protein, 36 aa, synthetic construct; identical to SEQ ID NO: 11967

SEQ ID NO: 28932 - protein, 31 aa, synthetic construct; identical to SEQ ID NO: 11978

SEQ ID NO: 28933 - protein, 36 aa, synthetic construct; identical to SEQ ID NO: 11887

SEQ ID NO: 28934 - protein, 33 aa, synthetic construct; identical to SEQ ID NO: 11952

SEQ ID NO: 28935 - protein, 36 aa, synthetic construct; identical to SEQ ID NO: 11971

SEQ ID NO: 28936 - protein, 33 aa, synthetic construct; identical to SEQ ID NO: 11918

SEQ ID NO: 28937 - protein, 36 aa, synthetic construct; identical to SEQ ID NO: 11967

SEQ ID NO: 28938 - protein, 33 aa, synthetic construct; identical to SEQ ID NO: 11932

SEQ ID NO: 28939 - protein, 36 aa, synthetic construct; identical to SEQ ID NO: 11967

SEQ ID NO: 28940 - protein, 33 aa, synthetic construct; identical to SEQ ID NO: 11900

SEQ ID NO: 28941 - protein, 37 aa, synthetic construct; identical to SEQ ID NO: 12439

SEQ ID NO: 28942 - protein, 33 aa, synthetic construct; identical to SEQ ID NO: 11926

SEQ ID NO: 28943 - protein, 37 aa, synthetic construct; identical to SEQ ID NO: 11873

SEQ ID NO: 28944 - protein, 33 aa, synthetic construct; identical to SEQ ID NO: 11882

SEQ ID NO: 28945 - protein, 37 aa, synthetic construct; identical to SEQ ID NO: 11873

SEQ ID NO: 28946 - protein, 33 aa, synthetic construct; identical to SEQ ID NO: 11874

SEQ ID NO: 28947 - protein, 37 aa, synthetic construct; identical to SEQ ID NO: 11873

SEQ ID NO: 28948 - protein, 33 aa, synthetic construct; identical to SEQ ID NO: 11896

SEQ ID NO: 28949 - protein, 37 aa, synthetic construct; identical to SEQ ID NO: 11873

SEQ ID NO: 28950 - protein, 33 aa, synthetic construct; identical to SEQ ID NO: 12004

SEQ ID NO: 28951 - protein, 37 aa, synthetic construct; identical to SEQ ID NO: 11873

SEQ ID NO: 28952 - protein, 33 aa, synthetic construct; identical to SEQ ID NO: 11916

SEQ ID NO: 28953 - protein, 36 aa, synthetic construct; identical to SEQ ID NO: 12035

SEQ ID NO: 28954 - protein, 33 aa, synthetic construct; identical to SEQ ID NO: 11894

SEQ ID NO: 28955 - protein, 36 aa, synthetic construct; identical to SEQ ID NO: 12035

SEQ ID NO: 28956 - protein, 33 aa, synthetic construct; identical to SEQ ID NO: 11926

SEQ ID NO: 28957 - protein, 36 aa, synthetic construct; identical to SEQ ID NO: 11887

SEQ ID NO: 28958 - protein, 33 aa, synthetic construct; identical to SEQ ID NO: 11892

SEQ ID NO: 28959 - protein, 36 aa, synthetic construct; identical to SEQ ID NO: 11887

SEQ ID NO: 28960 - protein, 33 aa, synthetic construct; identical to SEQ ID NO: 11964

SEQ ID NO: 28961 - protein, 36 aa, synthetic construct; identical to SEQ ID NO: 11887

SEQ ID NO: 28962 - protein, 33 aa, synthetic construct; identical to SEQ ID NO: 11918

SEQ ID NO: 28963 - protein, 36 aa, synthetic construct; identical to SEQ ID NO: 11887

SEQ ID NO: 28964 - protein, 33 aa, synthetic construct; identical to SEQ ID NO: 11952

SEQ ID NO: 28965 - protein, 36 aa, synthetic construct; identical to SEQ ID NO: 11887

SEQ ID NO: 28966 - protein, 33 aa, synthetic construct; identical to SEQ ID NO: 11916

SEQ ID NO: 28967 - protein, 36 aa, synthetic construct; identical to SEQ ID NO: 11971

SEQ ID NO: 28968 - protein, 33 aa, synthetic construct; identical to SEQ ID NO: 11932

SEQ ID NO: 28969 - protein, 36 aa, synthetic construct; identical to SEQ ID NO: 11971

SEQ ID NO: 28970 - protein, 33 aa, synthetic construct; identical to SEQ ID NO: 11928

SEQ ID NO: 28971 - protein, 36 aa, synthetic construct; identical to SEQ ID NO: 11971

SEQ ID NO: 28972 - protein, 33 aa, synthetic construct; identical to SEQ ID NO: 12276

SEQ ID NO: 28973 - protein, 36 aa, synthetic construct; identical to SEQ ID NO: 11971

SEQ ID NO: 28974 - protein, 33 aa, synthetic construct; identical to SEQ ID NO: 12138

SEQ ID NO: 28975 - protein, 36 aa, synthetic construct; identical to SEQ ID NO: 11971

SEQ ID NO: 28976 - protein, 33 aa, synthetic construct; identical to SEQ ID NO: 11932

SEQ ID NO: 28977 - protein, 36 aa, synthetic construct; identical to SEQ ID NO: 11971

SEQ ID NO: 28978 - protein, 33 aa, synthetic construct; identical to SEQ ID NO: 11882

SEQ ID NO: 28979 - protein, 36 aa, synthetic construct; identical to SEQ ID NO: 11971

SEQ ID NO: 28980 - protein, 33 aa, synthetic construct; identical to SEQ ID NO: 11876

SEQ ID NO: 28981 - protein, 36 aa, synthetic construct; identical to SEQ ID NO: 11875

SEQ ID NO: 28982 - protein, 33 aa, synthetic construct; identical to SEQ ID NO: 11878

SEQ ID NO: 28983 - protein, 36 aa, synthetic construct; identical to SEQ ID NO: 11875

SEQ ID NO: 28984 - protein, 33 aa, synthetic construct; identical to SEQ ID NO: 12030

SEQ ID NO: 28985 - protein, 36 aa, synthetic construct; identical to SEQ ID NO: 11875

SEQ ID NO: 28986 - protein, 33 aa, synthetic construct; identical to SEQ ID NO: 11892

SEQ ID NO: 28987 - protein, 36 aa, synthetic construct; identical to SEQ ID NO: 11875

SEQ ID NO: 28988 - protein, 33 aa, synthetic construct; identical to SEQ ID NO: 12152

SEQ ID NO: 28989 - protein, 36 aa, synthetic construct; identical to SEQ ID NO: 11875

SEQ ID NO: 28990 - protein, 33 aa, synthetic construct; identical to SEQ ID NO: 12152

SEQ ID NO: 28991 - protein, 36 aa, synthetic construct; identical to SEQ ID NO: 11875

SEQ ID NO: 28992 - protein, 33 aa, synthetic construct; identical to SEQ ID NO: 11894

SEQ ID NO: 28993 - protein, 36 aa, synthetic construct; identical to SEQ ID NO: 11875

SEQ ID NO: 28994 - protein, 33 aa, synthetic construct; identical to SEQ ID NO: 11878

SEQ ID NO: 28995 - protein, 36 aa, synthetic construct; identical to SEQ ID NO: 11875

SEQ ID NO: 28996 - protein, 33 aa, synthetic construct; identical to SEQ ID NO: 11940

SEQ ID NO: 28997 - protein, 36 aa, synthetic construct; identical to SEQ ID NO: 11875

SEQ ID NO: 28998 - protein, 33 aa, synthetic construct; identical to SEQ ID NO: 12542

SEQ ID NO: 28999 - protein, 36 aa, synthetic construct; identical to SEQ ID NO: 11875

SEQ ID NO: 29000 - protein, 33 aa, synthetic construct; identical to SEQ ID NO: 12382

SEQ ID NO: 29001 - protein, 36 aa, synthetic construct; identical to SEQ ID NO: 11875

SEQ ID NO: 29002 - protein, 33 aa, synthetic construct; identical to SEQ ID NO: 11878

SEQ ID NO: 29003 - protein, 36 aa, synthetic construct; identical to SEQ ID NO: 11909

SEQ ID NO: 29004 - protein, 33 aa, synthetic construct; identical to SEQ ID NO: 11914

SEQ ID NO: 29005 - protein, 36 aa, synthetic construct; identical to SEQ ID NO: 11909

SEQ ID NO: 29006 - protein, 33 aa, synthetic construct; identical to SEQ ID NO: 11914

SEQ ID NO: 29007 - protein, 36 aa, synthetic construct; identical to SEQ ID NO: 11909

SEQ ID NO: 29008 - protein, 33 aa, synthetic construct; identical to SEQ ID NO: 12328

SEQ ID NO: 29009 - protein, 36 aa, synthetic construct; identical to SEQ ID NO: 11879

SEQ ID NO: 29010 - protein, 33 aa, synthetic construct; identical to SEQ ID NO: 11878

SEQ ID NO: 29011 - protein, 36 aa, synthetic construct; identical to SEQ ID NO: 11879

SEQ ID NO: 29012 - protein, 33 aa, synthetic construct; identical to SEQ ID NO: 11892

SEQ ID NO: 29013 - protein, 36 aa, synthetic construct; identical to SEQ ID NO: 11879

SEQ ID NO: 29014 - protein, 33 aa, synthetic construct; identical to SEQ ID NO: 11878

SEQ ID NO: 29015 - protein, 36 aa, synthetic construct; identical to SEQ ID NO: 11879

SEQ ID NO: 29016 - protein, 33 aa, synthetic construct; identical to SEQ ID NO: 11892

SEQ ID NO: 29017 - protein, 36 aa, synthetic construct; identical to SEQ ID NO: 11879

SEQ ID NO: 29018 - protein, 33 aa, synthetic construct; identical to SEQ ID NO: 11878

SEQ ID NO: 29019 - protein, 36 aa, synthetic construct; identical to SEQ ID NO: 11879

SEQ ID NO: 29020 - protein, 33 aa, synthetic construct; identical to SEQ ID NO: 11878

SEQ ID NO: 29021 - protein, 36 aa, synthetic construct; identical to SEQ ID NO: 12171

SEQ ID NO: 29022 - protein, 33 aa, synthetic construct; identical to SEQ ID NO: 12030

SEQ ID NO: 29023 - protein, 36 aa, synthetic construct; identical to SEQ ID NO: 12171

SEQ ID NO: 29024 - protein, 33 aa, synthetic construct; identical to SEQ ID NO: 11932

SEQ ID NO: 29025 - protein, 36 aa, synthetic construct; identical to SEQ ID NO: 11907

SEQ ID NO: 29026 - protein, 33 aa, synthetic construct; identical to SEQ ID NO: 11940

SEQ ID NO: 29027 - protein, 36 aa, synthetic construct; identical to SEQ ID NO: 11907

SEQ ID NO: 29028 - protein, 33 aa, synthetic construct; identical to SEQ ID NO: 12328

SEQ ID NO: 29029 - protein, 37 aa, synthetic construct; identical to SEQ ID NO: 11963

SEQ ID NO: 29030 - protein, 33 aa, synthetic construct; identical to SEQ ID NO: 11878

SEQ ID NO: 29031 - protein, 37 aa, synthetic construct; identical to SEQ ID NO: 11951

SEQ ID NO: 29032 - protein, 33 aa, synthetic construct; identical to SEQ ID NO: 11932

SEQ ID NO: 29033 - protein, 37 aa, synthetic construct; identical to SEQ ID NO: 11951

SEQ ID NO: 29034 - protein, 33 aa, synthetic construct; identical to SEQ ID NO: 12322

SEQ ID NO: 29035 - protein, 36 aa, synthetic construct; identical to SEQ ID NO: 11899

SEQ ID NO: 29036 - protein, 33 aa, synthetic construct; identical to SEQ ID NO: 11918

SEQ ID NO: 29037 - protein, 36 aa, synthetic construct; identical to SEQ ID NO: 11899

SEQ ID NO: 29038 - protein, 33 aa, synthetic construct; identical to SEQ ID NO: 11928

SEQ ID NO: 29039 - protein, 36 aa, synthetic construct; identical to SEQ ID NO: 11899

SEQ ID NO: 29040 - protein, 33 aa, synthetic construct; identical to SEQ ID NO: 12120

SEQ ID NO: 29041 - protein, 36 aa, synthetic construct; identical to SEQ ID NO: 11899

SEQ ID NO: 29042 - protein, 33 aa, synthetic construct; identical to SEQ ID NO: 11932

SEQ ID NO: 29043 - protein, 36 aa, synthetic construct; identical to SEQ ID NO: 11899

SEQ ID NO: 29044 - protein, 33 aa, synthetic construct; identical to SEQ ID NO: 11928

SEQ ID NO: 29045 - protein, 36 aa, synthetic construct; identical to SEQ ID NO: 11899

SEQ ID NO: 29046 - protein, 33 aa, synthetic construct; identical to SEQ ID NO: 11928

SEQ ID NO: 29047 - protein, 35 aa, synthetic construct; identical to SEQ ID NO: 11895

SEQ ID NO: 29048 - protein, 33 aa, synthetic construct; identical to SEQ ID NO: 11880

SEQ ID NO: 29049 - protein, 35 aa, synthetic construct; identical to SEQ ID NO: 11895

SEQ ID NO: 29050 - protein, 33 aa, synthetic construct; identical to SEQ ID NO: 11878

SEQ ID NO: 29051 - protein, 35 aa, synthetic construct; identical to SEQ ID NO: 11895

SEQ ID NO: 29052 - protein, 33 aa, synthetic construct; identical to SEQ ID NO: 12238

SEQ ID NO: 29053 - protein, 35 aa, synthetic construct; identical to SEQ ID NO: 11895

SEQ ID NO: 29054 - protein, 33 aa, synthetic construct; identical to SEQ ID NO: 11914

SEQ ID NO: 29055 - protein, 35 aa, synthetic construct; identical to SEQ ID NO: 11895

SEQ ID NO: 29056 - protein, 33 aa, synthetic construct; identical to SEQ ID NO: 11892

SEQ ID NO: 29057 - DNA, 108 bp, synthetic construct; identical to SEQ ID NO: 13359
  source 1..108: mol_type = other DNA

SEQ ID NO: 29058 - DNA, 99 bp, synthetic construct; identical to SEQ ID NO: 13402
  source 1..99: mol_type = other DNA

SEQ ID NO: 29059 - DNA, 105 bp, synthetic construct; identical to SEQ ID NO: 13379
  source 1..105: mol_type = other DNA

SEQ ID NO: 29060 - DNA, 99 bp, synthetic construct; identical to SEQ ID NO: 13376
  source 1..99: mol_type = other DNA

SEQ ID NO: 29061 - DNA, 108 bp, synthetic construct; identical to SEQ ID NO: 13371
  source 1..108: mol_type = other DNA

SEQ ID NO: 29062 - DNA, 99 bp, synthetic construct; identical to SEQ ID NO: 13392
  source 1..99: mol_type = other DNA

SEQ ID NO: 29063 - DNA, 108 bp, synthetic construct; identical to SEQ ID NO: 13359
  source 1..108: mol_type = other DNA

SEQ ID NO: 29064 - DNA, 99 bp, synthetic construct; identical to SEQ ID NO: 13578
  source 1..99: mol_type = other DNA

SEQ ID NO: 29065 - DNA, 108 bp, synthetic construct; identical to SEQ ID NO: 13363
  source 1..108: mol_type = other DNA

SEQ ID NO: 29066 - DNA, 99 bp, synthetic construct; identical to SEQ ID NO: 13400
  source 1..99: mol_type = other DNA

SEQ ID NO: 29067 - DNA, 108 bp, synthetic construct; identical to SEQ ID NO: 13451
  source 1..108: mol_type = other DNA

SEQ ID NO: 29068 - DNA, 93 bp, synthetic construct; identical to SEQ ID NO: 13462
  source 1..93: mol_type = other DNA

SEQ ID NO: 29069 - DNA, 108 bp, synthetic construct; identical to SEQ ID NO: 13371
  source 1..108: mol_type = other DNA

SEQ ID NO: 29070 - DNA, 99 bp, synthetic construct; identical to SEQ ID NO: 13436
  source 1..99: mol_type = other DNA

SEQ ID NO: 29071 - DNA, 108 bp, synthetic construct; identical to SEQ ID NO: 13455
  source 1..108: mol_type = other DNA

SEQ ID NO: 29072 - DNA, 99 bp, synthetic construct; identical to SEQ ID NO: 13402
  source 1..99: mol_type = other DNA

SEQ ID NO: 29073 - DNA, 108 bp, synthetic construct; identical to SEQ ID NO: 13451
  source 1..108: mol_type = other DNA

SEQ ID NO: 29074 - DNA, 99 bp, synthetic construct; identical to SEQ ID NO: 13416
  source 1..99: mol_type = other DNA

SEQ ID NO: 29075 - DNA, 108 bp, synthetic construct; identical to SEQ ID NO: 13451
  source 1..108: mol_type = other DNA

SEQ ID NO: 29076 - DNA, 99 bp, synthetic construct; identical to SEQ ID NO: 13900
  source 1..99: mol_type = other DNA

SEQ ID NO: 29077 - DNA, 111 bp, synthetic construct; identical to SEQ ID NO: 13923
  source 1..111: mol_type = other DNA

SEQ ID NO: 29078 - DNA, 99 bp, synthetic construct; identical to SEQ ID NO: 13410
  source 1..99: mol_type = other DNA

SEQ ID NO: 29079 - DNA, 111 bp, synthetic construct; identical to SEQ ID NO: 13357
  source 1..111: mol_type = other DNA

SEQ ID NO: 29080 - DNA, 99 bp, synthetic construct; identical to SEQ ID NO: 13366
  source 1..99: mol_type = other DNA

SEQ ID NO: 29081 - DNA, 111 bp, synthetic construct; identical to SEQ ID NO: 13357
  source 1..111: mol_type = other DNA

SEQ ID NO: 29082 - DNA, 99 bp, synthetic construct; identical to SEQ ID NO: 13358
  source 1..99: mol_type = other DNA

SEQ ID NO: 29083 - DNA, 111 bp, synthetic construct; identical to SEQ ID NO: 13357
  source 1..111: mol_type = other DNA

SEQ ID NO: 29084 - DNA, 99 bp, synthetic construct; identical to SEQ ID NO: 13380
  source 1..99: mol_type = other DNA

SEQ ID NO: 29085 - DNA, 111 bp, synthetic construct; identical to SEQ ID NO: 13357
  source 1..111: mol_type = other DNA

SEQ ID NO: 29086 - DNA, 99 bp, synthetic construct; identical to SEQ ID NO: 13488
  source 1..99: mol_type = other DNA

SEQ ID NO: 29087 - DNA, 111 bp, synthetic construct; identical to SEQ ID NO: 13357
  source 1..111: mol_type = other DNA

SEQ ID NO: 29088 - DNA, 99 bp, synthetic construct; identical to SEQ ID NO: 13400
  source 1..99: mol_type = other DNA

SEQ ID NO: 29089 - DNA, 108 bp, synthetic construct; identical to SEQ ID NO: 13519
  source 1..108: mol_type = other DNA

SEQ ID NO: 29090 - DNA, 99 bp, synthetic construct; identical to SEQ ID NO: 13378
  source 1..99: mol_type = other DNA

SEQ ID NO: 29091 - DNA, 108 bp, synthetic construct; identical to SEQ ID NO: 13519
  source 1..108: mol_type = other DNA

SEQ ID NO: 29092 - DNA, 99 bp, synthetic construct; identical to SEQ ID NO: 13410
  source 1..99: mol_type = other DNA

SEQ ID NO: 29093 - DNA, 108 bp, synthetic construct; identical to SEQ ID NO: 13371
  source 1..108: mol_type = other DNA

SEQ ID NO: 29094 - DNA, 99 bp, synthetic construct; identical to SEQ ID NO: 13376
  source 1..99: mol_type = other DNA

SEQ ID NO: 29095 - DNA, 108 bp, synthetic construct; identical to SEQ ID NO: 13371
  source 1..108: mol_type = other DNA

SEQ ID NO: 29096 - DNA, 99 bp, synthetic construct; identical to SEQ ID NO: 13448
  source 1..99: mol_type = other DNA

SEQ ID NO: 29097 - DNA, 108 bp, synthetic construct; identical to SEQ ID NO: 13371
  source 1..108: mol_type = other DNA

SEQ ID NO: 29098 - DNA, 99 bp, synthetic construct; identical to SEQ ID NO: 13402
  source 1..99: mol_type = other DNA

SEQ ID NO: 29099 - DNA, 108 bp, synthetic construct; identical to SEQ ID NO: 13371
  source 1..108: mol_type = other DNA

SEQ ID NO: 29100 - DNA, 99 bp, synthetic construct; identical to SEQ ID NO: 13436
  source 1..99: mol_type = other DNA

SEQ ID NO: 29101 - DNA, 108 bp, synthetic construct; identical to SEQ ID NO: 13371
  source 1..108: mol_type = other DNA

SEQ ID NO: 29102 - DNA, 99 bp, synthetic construct; identical to SEQ ID NO: 13400
  source 1..99: mol_type = other DNA

SEQ ID NO: 29103 - DNA, 108 bp, synthetic construct; identical to SEQ ID NO: 13455
  source 1..108: mol_type = other DNA

SEQ ID NO: 29104 - DNA, 99 bp, synthetic construct; identical to SEQ ID NO: 13416
  source 1..99: mol_type = other DNA

SEQ ID NO: 29105 - DNA, 108 bp, synthetic construct; identical to SEQ ID NO: 13455
  source 1..108: mol_type = other DNA

SEQ ID NO: 29106 - DNA, 99 bp, synthetic construct; identical to SEQ ID NO: 13412
  source 1..99: mol_type = other DNA

SEQ ID NO: 29107 - DNA, 108 bp, synthetic construct; identical to SEQ ID NO: 13455
  source 1..108: mol_type = other DNA

SEQ ID NO: 29108 - DNA, 99 bp, synthetic construct; identical to SEQ ID NO: 13760
  source 1..99: mol_type = other DNA

SEQ ID NO: 29109 - DNA, 108 bp, synthetic construct; identical to SEQ ID NO: 13455
  source 1..108: mol_type = other DNA

SEQ ID NO: 29110 - DNA, 99 bp, synthetic construct; identical to SEQ ID NO: 13622
  source 1..99: mol_type = other DNA

SEQ ID NO: 29111 - DNA, 108 bp, synthetic construct; identical to SEQ ID NO: 13455
  source 1..108: mol_type = other DNA

SEQ ID NO: 29112 - DNA, 99 bp, synthetic construct; identical to SEQ ID NO: 13416
  source 1..99: mol_type = other DNA

SEQ ID NO: 29113 - DNA, 108 bp, synthetic construct; identical to SEQ ID NO: 13455
  source 1..108: mol_type = other DNA

SEQ ID NO: 29114 - DNA, 99 bp, synthetic construct; identical to SEQ ID NO: 13366
  source 1..99: mol_type = other DNA

SEQ ID NO: 29115 - DNA, 108 bp, synthetic construct; identical to SEQ ID NO: 13455
  source 1..108: mol_type = other DNA

SEQ ID NO: 29116 - DNA, 99 bp, synthetic construct; identical to SEQ ID NO: 13360
  source 1..99: mol_type = other DNA

SEQ ID NO: 29117 - DNA, 108 bp, synthetic construct; identical to SEQ ID NO: 13359
  source 1..108: mol_type = other DNA

SEQ ID NO: 29118 - DNA, 99 bp, synthetic construct; identical to SEQ ID NO: 13444
  source 1..99: mol_type = other DNA

SEQ ID NO: 29119 - DNA, 108 bp, synthetic construct; identical to SEQ ID NO: 13359
  source 1..108: mol_type = other DNA

SEQ ID NO: 29120 - DNA, 99 bp, synthetic construct; identical to SEQ ID NO: 13514
  source 1..99: mol_type = other DNA

SEQ ID NO: 29121 - DNA, 108 bp, synthetic construct; identical to SEQ ID NO: 13359
  source 1..108: mol_type = other DNA

SEQ ID NO: 29122 - DNA, 99 bp, synthetic construct; identical to SEQ ID NO: 13376
  source 1..99: mol_type = other DNA

SEQ ID NO: 29123 - DNA, 108 bp, synthetic construct; identical to SEQ ID NO: 13359
  source 1..108: mol_type = other DNA

SEQ ID NO: 29124 - DNA, 99 bp, synthetic construct; identical to SEQ ID NO: 13636
  source 1..99: mol_type = other DNA

SEQ ID NO: 29125 - DNA, 108 bp, synthetic construct; identical to SEQ ID NO: 13359
  source 1..108: mol_type = other DNA

SEQ ID NO: 29126 - DNA, 99 bp, synthetic construct; identical to SEQ ID NO: 13636
  source 1..99: mol_type = other DNA

SEQ ID NO: 29127 - DNA, 108 bp, synthetic construct; identical to SEQ ID NO: 13359
  source 1..108: mol_type = other DNA

SEQ ID NO: 29128 - DNA, 99 bp, synthetic construct; identical to SEQ ID NO: 13378
  source 1..99: mol_type = other DNA

SEQ ID NO: 29129 - DNA, 108 bp, synthetic construct; identical to SEQ ID NO: 13359
  source 1..108: mol_type = other DNA

SEQ ID NO: 29130 - DNA, 99 bp, synthetic construct; identical to SEQ ID NO: 13444
  source 1..99: mol_type = other DNA

SEQ ID NO: 29131 - DNA, 108 bp, synthetic construct; identical to SEQ ID NO: 13359
  source 1..108: mol_type = other DNA

SEQ ID NO: 29132 - DNA, 99 bp, synthetic construct; identical to SEQ ID NO: 13424
  source 1..99: mol_type = other DNA

SEQ ID NO: 29133 - DNA, 108 bp, synthetic construct; identical to SEQ ID NO: 13359
  source 1..108: mol_type = other DNA

SEQ ID NO: 29134 - DNA, 99 bp, synthetic construct; identical to SEQ ID NO: 14026
  source 1..99: mol_type = other DNA

SEQ ID NO: 29135 - DNA, 108 bp, synthetic construct; identical to SEQ ID NO: 13359
  source 1..108: mol_type = other DNA

SEQ ID NO: 29136 - DNA, 99 bp, synthetic construct; identical to SEQ ID NO: 13866
  source 1..99: mol_type = other DNA

SEQ ID NO: 29137 - DNA, 108 bp, synthetic construct; identical to SEQ ID NO: 13359
  source 1..108: mol_type = other DNA

SEQ ID NO: 29138 - DNA, 99 bp, synthetic construct; identical to SEQ ID NO: 13362
  source 1..99: mol_type = other DNA

SEQ ID NO: 29139 - DNA, 108 bp, synthetic construct; identical to SEQ ID NO: 13393
  source 1..108: mol_type = other DNA

SEQ ID NO: 29140 - DNA, 99 bp, synthetic construct; identical to SEQ ID NO: 13398
  source 1..99: mol_type = other DNA

SEQ ID NO: 29141 - DNA, 108 bp, synthetic construct; identical to SEQ ID NO: 13393
  source 1..108: mol_type = other DNA

SEQ ID NO: 29142 - DNA, 99 bp, synthetic construct; identical to SEQ ID NO: 13398
  source 1..99: mol_type = other DNA

SEQ ID NO: 29143 - DNA, 108 bp, synthetic construct; identical to SEQ ID NO: 13393
  source 1..108: mol_type = other DNA

SEQ ID NO: 29144 - DNA, 99 bp, synthetic construct; identical to SEQ ID NO: 13812
  source 1..99: mol_type = other DNA

SEQ ID NO: 29145 - DNA, 108 bp, synthetic construct; identical to SEQ ID NO: 13363
  source 1..108: mol_type = other DNA

SEQ ID NO: 29146 - DNA, 99 bp, synthetic construct; identical to SEQ ID NO: 13362
  source 1..99: mol_type = other DNA

SEQ ID NO: 29147 - DNA, 108 bp, synthetic construct; identical to SEQ ID NO: 13363
  source 1..108: mol_type = other DNA

SEQ ID NO: 29148 - DNA, 99 bp, synthetic construct; identical to SEQ ID NO: 13376
  source 1..99: mol_type = other DNA

SEQ ID NO: 29149 - DNA, 108 bp, synthetic construct; identical to SEQ ID NO: 13363
  source 1..108: mol_type = other DNA

SEQ ID NO: 29150 - DNA, 99 bp, synthetic construct; identical to SEQ ID NO: 13362
  source 1..99: mol_type = other DNA

SEQ ID NO: 29151 - DNA, 108 bp, synthetic construct; identical to SEQ ID NO: 13363
  source 1..108: mol_type = other DNA

SEQ ID NO: 29152 - DNA, 99 bp, synthetic construct; identical to SEQ ID NO: 13376
  source 1..99: mol_type = other DNA

SEQ ID NO: 29153 - DNA, 108 bp, synthetic construct; identical to SEQ ID NO: 13363
  source 1..108: mol_type = other DNA

SEQ ID NO: 29154 - DNA, 99 bp, synthetic construct; identical to SEQ ID NO: 13444
  source 1..99: mol_type = other DNA

SEQ ID NO: 29155 - DNA, 108 bp, synthetic construct; identical to SEQ ID NO: 13363
  source 1..108: mol_type = other DNA

SEQ ID NO: 29156 - DNA, 99 bp, synthetic construct; identical to SEQ ID NO: 13444
  source 1..99: mol_type = other DNA

SEQ ID NO: 29157 - DNA, 108 bp, synthetic construct; identical to SEQ ID NO: 13655
  source 1..108: mol_type = other DNA

SEQ ID NO: 29158 - DNA, 99 bp, synthetic construct; identical to SEQ ID NO: 13514
  source 1..99: mol_type = other DNA

SEQ ID NO: 29159 - DNA, 108 bp, synthetic construct; identical to SEQ ID NO: 13655
  source 1..108: mol_type = other DNA

SEQ ID NO: 29160 - DNA, 99 bp, synthetic construct; identical to SEQ ID NO: 13416
  source 1..99: mol_type = other DNA

SEQ ID NO: 29161 - DNA, 108 bp, synthetic construct; identical to SEQ ID NO: 13391
  source 1..108: mol_type = other DNA

SEQ ID NO: 29162 - DNA, 99 bp, synthetic construct; identical to SEQ ID NO: 13596
  source 1..99: mol_type = other DNA

SEQ ID NO: 29163 - DNA, 108 bp, synthetic construct; identical to SEQ ID NO: 13391
  source 1..108: mol_type = other DNA

SEQ ID NO: 29164 - DNA, 99 bp, synthetic construct; identical to SEQ ID NO: 13812
  source 1..99: mol_type = other DNA

SEQ ID NO: 29165 - DNA, 111 bp, synthetic construct; identical to SEQ ID NO: 13447
  source 1..111: mol_type = other DNA

SEQ ID NO: 29166 - DNA, 99 bp, synthetic construct; identical to SEQ ID NO: 13444
  source 1..99: mol_type = other DNA

SEQ ID NO: 29167 - DNA, 111 bp, synthetic construct; identical to SEQ ID NO: 13435
  source 1..111: mol_type = other DNA

SEQ ID NO: 29168 - DNA, 99 bp, synthetic construct; identical to SEQ ID NO: 13416
  source 1..99: mol_type = other DNA

SEQ ID NO: 29169 - DNA, 111 bp, synthetic construct; identical to SEQ ID NO: 13435
  source 1..111: mol_type = other DNA

SEQ ID NO: 29170 - DNA, 99 bp, synthetic construct; identical to SEQ ID NO: 13806
  source 1..99: mol_type = other DNA

SEQ ID NO: 29171 - DNA, 108 bp, synthetic construct; identical to SEQ ID NO: 13383
  source 1..108: mol_type = other DNA

SEQ ID NO: 29172 - DNA, 99 bp, synthetic construct; identical to SEQ ID NO: 13402
  source 1..99: mol_type = other DNA

SEQ ID NO: 29173 - DNA, 108 bp, synthetic construct; identical to SEQ ID NO: 13383
  source 1..108: mol_type = other DNA

SEQ ID NO: 29174 - DNA, 99 bp, synthetic construct; identical to SEQ ID NO: 13412
  source 1..99: mol_type = other DNA

SEQ ID NO: 29175 - DNA, 108 bp, synthetic construct; identical to SEQ ID NO: 13383
  source 1..108: mol_type = other DNA

SEQ ID NO: 29176 - DNA, 99 bp, synthetic construct; identical to SEQ ID NO: 13604
  source 1..99: mol_type = other DNA

SEQ ID NO: 29177 - DNA, 108 bp, synthetic construct; identical to SEQ ID NO: 13383
  source 1..108: mol_type = other DNA

SEQ ID NO: 29178 - DNA, 99 bp, synthetic construct; identical to SEQ ID NO: 13416
  source 1..99: mol_type = other DNA

SEQ ID NO: 29179 - DNA, 108 bp, synthetic construct; identical to SEQ ID NO: 13383
  source 1..108: mol_type = other DNA

SEQ ID NO: 29180 - DNA, 99 bp, synthetic construct; identical to SEQ ID NO: 13412
  source 1..99: mol_type = other DNA

SEQ ID NO: 29181 - DNA, 108 bp, synthetic construct; identical to SEQ ID NO: 13383
  source 1..108: mol_type = other DNA

SEQ ID NO: 29182 - DNA, 99 bp, synthetic construct; identical to SEQ ID NO: 13412
  source 1..99: mol_type = other DNA

SEQ ID NO: 29183 - DNA, 105 bp, synthetic construct; identical to SEQ ID NO: 13379
  source 1..105: mol_type = other DNA

SEQ ID NO: 29184 - DNA, 99 bp, synthetic construct; identical to SEQ ID NO: 13364
  source 1..99: mol_type = other DNA

SEQ ID NO: 29185 - DNA, 105 bp, synthetic construct; identical to SEQ ID NO: 13379
  source 1..105: mol_type = other DNA

SEQ ID NO: 29186 - DNA, 99 bp, synthetic construct; identical to SEQ ID NO: 13444
  source 1..99: mol_type = other DNA

SEQ ID NO: 29187 - DNA, 105 bp, synthetic construct; identical to SEQ ID NO: 13379
  source 1..105: mol_type = other DNA

SEQ ID NO: 29188 - DNA, 99 bp, synthetic construct; identical to SEQ ID NO: 13722
  source 1..99: mol_type = other DNA

SEQ ID NO: 29189 - DNA, 105 bp, synthetic construct; identical to SEQ ID NO: 13379
  source 1..105: mol_type = other DNA

SEQ ID NO: 29190 - DNA, 99 bp, synthetic construct; identical to SEQ ID NO: 13398
  source 1..99: mol_type = other DNA

SEQ ID NO: 29191 - DNA, 105 bp, synthetic construct; identical to SEQ ID NO: 13379
  source 1..105: mol_type = other DNA

SEQ ID NO: 29192 - DNA, 99 bp, synthetic construct; identical to SEQ ID NO: 13376
  source 1..99: mol_type = other DNA

SEQ ID NO: 29193 - protein, 13 aa, synthetic construct
CASGTGGENTLYF

SEQ ID NO: 29194 - protein, 14 aa, synthetic construct
CALRRGSALGRLHF

SEQ ID NO: 29195 - protein, 16 aa, synthetic construct
CTCSAELGGLAETLYF

SEQ ID NO: 29196 - protein, 13 aa, synthetic construct
CAVSPSGSWQLIF

SEQ ID NO: 29197 - protein, 15 aa, synthetic construct
CASSRNTGGALEQYF

SEQ ID NO: 29198 - protein, 13 aa, synthetic construct
CAVSPGSGGKLTL

SEQ ID NO: 29199 - protein, 14 aa, synthetic construct
CASGVGTRNAEQFF

SEQ ID NO: 29200 - protein, 13 aa, synthetic construct
CALSETGYQNFYF

SEQ ID NO: 29201 - protein, 15 aa, synthetic construct
CASSGGTGNTGQLYF

SEQ ID NO: 29202 - protein, 17 aa, synthetic construct
CAMREVNTGANTGKLTF

SEQ ID NO: 29203 - protein, 15 aa, synthetic construct
CASSQDANSGNTLYF

SEQ ID NO: 29204 - protein, 12 aa, synthetic construct
CIVTDMGYKLTF

SEQ ID NO: 29205 - protein, 14 aa, synthetic construct
CASSHRDRYAEQFF

SEQ ID NO: 29206 - protein, 16 aa, synthetic construct
CATDAGASSSFSKLVF

SEQ ID NO: 29207 - protein, 14 aa, synthetic construct
CASSSGLGGYEQYF

SEQ ID NO: 29208 - protein, 13 aa, synthetic construct
CALSAGSGGKLTL

SEQ ID NO: 29209 - protein, 13 aa, synthetic construct
CASSQEDGDTQYF

SEQ ID NO: 29210 - protein, 15 aa, synthetic construct
CALGDLASGSWQLIF

SEQ ID NO: 29211 - protein, 15 aa, synthetic construct
CASSPDRGSQNTLYF

SEQ ID NO: 29212 - protein, 14 aa, synthetic construct
CAASRRNNNNRIFF

SEQ ID NO: 29213 - protein, 15 aa, synthetic construct
CSSSRGEEDYAEQFF

SEQ ID NO: 29214 - protein, 15 aa, synthetic construct
CAASMMGGSNAKLTF

SEQ ID NO: 29215 - protein, 13 aa, synthetic construct
CASTDRDQDTQYF

SEQ ID NO: 29216 - protein, 15 aa, synthetic construct
CAMVPPSGGNYKPTF

SEQ ID NO: 29217 - protein, 13 aa, synthetic construct
CASSLGASYEQYF

SEQ ID NO: 29218 - protein, 15 aa, synthetic construct
CAASAASSGSWQLIF

SEQ ID NO: 29219 - protein, 13 aa, synthetic construct
CASSWGGSYEQYF

SEQ ID NO: 29220 - protein, 8 aa, synthetic construct
CAKARIFF

SEQ ID NO: 29221 - protein, 14 aa, synthetic construct
CASSWGGGQDTQYF

SEQ ID NO: 29222 - protein, 13 aa, synthetic construct
CAALDTNAYKVIF

SEQ ID NO: 29223 - protein, 13 aa, synthetic construct
CASSFMGNSDYTF

SEQ ID NO: 29224 - protein, 14 aa, synthetic construct
CAMREVNNNNAPRF

SEQ ID NO: 29225 - protein, 12 aa, synthetic construct
CASSLKGDEQYF

SEQ ID NO: 29226 - protein, 13 aa, synthetic construct
CAVLPANTDKVVF

SEQ ID NO: 29227 - protein, 14 aa, synthetic construct
CASSLGQTNTEVFF

SEQ ID NO: 29228 - protein, 12 aa, synthetic construct
CAASSAGNKLTF

SEQ ID NO: 29229 - protein, 15 aa, synthetic construct
CASTPGTGGALEQYF

SEQ ID NO: 29230 - protein, 13 aa, synthetic construct
CAVNSGSGGKLTL

SEQ ID NO: 29231 - protein, 13 aa, synthetic construct
CASSQRWGYEQYF

SEQ ID NO: 29232 - protein, 15 aa, synthetic construct
CAVTPISTGNYKYVF

SEQ ID NO: 29233 - protein, 13 aa, synthetic construct
CASSQEQVLEQYF

SEQ ID NO: 29234 - protein, 15 aa, synthetic construct
CALSGASSGSWQLIF

SEQ ID NO: 29235 - protein, 16 aa, synthetic construct
CASSQEVNSYNSPLYF

SEQ ID NO: 29236 - protein, 13 aa, synthetic construct
CATKGNSGTYQRF

SEQ ID NO: 29237 - protein, 14 aa, synthetic construct
CASSQWVWNSPLYF

SEQ ID NO: 29238 - protein, 12 aa, synthetic construct
CAIDTGYQNFYF

SEQ ID NO: 29239 - protein, 14 aa, synthetic construct
CASSTGLGEDTQYF

SEQ ID NO: 29240 - protein, 13 aa, synthetic construct
CALAPNYAQGLTF

SEQ ID NO: 29241 - protein, 15 aa, synthetic construct
CASSRLGGSSYEQYF

SEQ ID NO: 29242 - protein, 12 aa, synthetic construct
CALQGTGSKLSF

SEQ ID NO: 29243 - protein, 13 aa, synthetic construct
CASSYGQQDTQYF

SEQ ID NO: 29244 - protein, 11 aa, synthetic construct
CAGDSNYQLIW

SEQ ID NO: 29245 - protein, 15 aa, synthetic construct
CASSSQGEGQNTLYF

SEQ ID NO: 29246 - protein, 12 aa, synthetic construct
CAIAPGYQNFYF

SEQ ID NO: 29247 - protein, 15 aa, synthetic construct
CASSSGQDSAETLYF

SEQ ID NO: 29248 - protein, 13 aa, synthetic construct
CALGGNYAQGLTF

SEQ ID NO: 29249 - protein, 14 aa, synthetic construct
CASSFYRDGNTLYF

SEQ ID NO: 29250 - protein, 13 aa, synthetic construct
CAMDNNAGAKLTF

SEQ ID NO: 29251 - protein, 14 aa, synthetic construct
CASSPRDWGYEQYF

SEQ ID NO: 29252 - protein, 14 aa, synthetic construct
CAVRPGDSNYQLIW

SEQ ID NO: 29253 - protein, 13 aa, synthetic construct
CASGTGGENTLYF

SEQ ID NO: 29254 - protein, 13 aa, synthetic construct
CAMRDQGGRALIF

SEQ ID NO: 29255 - protein, 16 aa, synthetic construct
CASGSGLGGFAETLYF

SEQ ID NO: 29256 - protein, 13 aa, synthetic construct
CATDDQGGRALIF

SEQ ID NO: 29257 - protein, 14 aa, synthetic construct
CASGPGTGNSDYTF

SEQ ID NO: 29258 - protein, 13 aa, synthetic construct
CAVTVNYAQGLTF

SEQ ID NO: 29259 - protein, 14 aa, synthetic construct
CASGRLGASYEQYF

SEQ ID NO: 29260 - protein, 15 aa, synthetic construct
CALEVYQGGSAKLIF

SEQ ID NO: 29261 - protein, 13 aa, synthetic construct
CASGGQINQAPLF

SEQ ID NO: 29262 - protein, 16 aa, synthetic construct
CALEGNSGGSNAKLTF

SEQ ID NO: 29263 - protein, 12 aa, synthetic construct
CASGDSGGAPLF

SEQ ID NO: 29264 - protein, 13 aa, synthetic construct
CAVSQYSNNRIFF

SEQ ID NO: 29265 - protein, 14 aa, synthetic construct
CASGDNQINQAPLF

SEQ ID NO: 29266 - protein, 15 aa, synthetic construct
CAMREGGGSGGKLTL

SEQ ID NO: 29267 - protein, 15 aa, synthetic construct
CASGDIGGVNERLFF

SEQ ID NO: 29268 - protein, 14 aa, synthetic construct
CAATLGTGGYKVVF

SEQ ID NO: 29269 - protein, 15 aa, synthetic construct
CASGDGRANNQAPLF

SEQ ID NO: 29270 - protein, 13 aa, synthetic construct
CAVSRNNNNRIFF

SEQ ID NO: 29271 - protein, 15 aa, synthetic construct
CASGDGDWGYAEQFF

SEQ ID NO: 29272 - protein, 15 aa, synthetic construct
CALVGTSGGNYKPTF

SEQ ID NO: 29273 - protein, 14 aa, synthetic construct
CASGARQGSYEQYF

SEQ ID NO: 29274 - protein, 15 aa, synthetic construct
CAMREEGSGSWQLIF

SEQ ID NO: 29275 - protein, 16 aa, synthetic construct
CASSDDGGGNQDTQYF

SEQ ID NO: 29276 - protein, 13 aa, synthetic construct
CAVRGTNAYKVIF

SEQ ID NO: 29277 - protein, 15 aa, synthetic construct
CASSDASRANQAPLF

SEQ ID NO: 29278 - protein, 13 aa, synthetic construct
CAVLPGSFNKLTF

SEQ ID NO: 29279 - protein, 13 aa, synthetic construct
CASSDVANTEVFF

SEQ ID NO: 29280 - protein, 12 aa, synthetic construct
CAMSGGNYKYVF

SEQ ID NO: 29281 - protein, 14 aa, synthetic construct
CASSDAGGDSDYTF

SEQ ID NO: 29282 - protein, 13 aa, synthetic construct
CAMRDTNAYKVIF

SEQ ID NO: 29283 - protein, 12 aa, synthetic construct
CASSDDAETLYF

SEQ ID NO: 29284 - protein, 15 aa, synthetic construct
CAVSMRGGSGNKLIF

SEQ ID NO: 29285 - protein, 17 aa, synthetic construct
CASSDADWGASSYEQYF

SEQ ID NO: 29286 - protein, 15 aa, synthetic construct
CAMREYTGGADRLTF

SEQ ID NO: 29287 - protein, 13 aa, synthetic construct
CASSGTGNSDYTF

SEQ ID NO: 29288 - protein, 12 aa, synthetic construct
CAVSKGADRLTF

SEQ ID NO: 29289 - protein, 13 aa, synthetic construct
CASSGGIGNTLYF

SEQ ID NO: 29290 - protein, 17 aa, synthetic construct
CAMREVNTGANTGKLTF

SEQ ID NO: 29291 - protein, 16 aa, synthetic construct
CASSGGGADSGNTLYF

SEQ ID NO: 29292 - protein, 17 aa, synthetic construct
CAMREVNTGANTGKLTF

SEQ ID NO: 29293 - protein, 17 aa, synthetic construct
CASSRAGTGALYAEQFF

SEQ ID NO: 29294 - protein, 14 aa, synthetic construct
CATERGSALGRLHF

SEQ ID NO: 29295 - protein, 15 aa, synthetic construct
CASSRGLGGHGEQYF

SEQ ID NO: 29296 - protein, 15 aa, synthetic construct
CALGDPTSNTNKVVF

SEQ ID NO: 29297 - protein, 13 aa, synthetic construct
CAWSPETNERLFF

SEQ ID NO: 29298 - protein, 12 aa, synthetic construct
CAASQSNNRIFF

SEQ ID NO: 29299 - protein, 11 aa, synthetic construct
CAWLRDSDYTF

SEQ ID NO: 29300 - protein, 15 aa, synthetic construct
CAMRDRAGNTGKLIF

SEQ ID NO: 29301 - protein, 13 aa, synthetic construct
CASSFGGRDTQYF

SEQ ID NO: 29302 - protein, 16 aa, synthetic construct
CAMREGLSSGSWQLIF

SEQ ID NO: 29303 - protein, 15 aa, synthetic construct
CGARDLGGGDYEQYF

SEQ ID NO: 29304 - protein, 14 aa, synthetic construct
CALGAMPNYNVLYF

SEQ ID NO: 29305 - protein, 11 aa, synthetic construct
CGAEQLTEVFF

SEQ ID NO: 29306 - protein, 13 aa, synthetic construct
CAASDTNAYKVIF

SEQ ID NO: 29307 - protein, 13 aa, synthetic construct
CASNPTGGDEQYF

SEQ ID NO: 29308 - protein, 11 aa, synthetic construct
CALRSTGKLTF

SEQ ID NO: 29309 - protein, 11 aa, synthetic construct
CASSANTEVFF

SEQ ID NO: 29310 - protein, 13 aa, synthetic construct
CALERWGNNRIFF

SEQ ID NO: 29311 - protein, 14 aa, synthetic construct
CASSTGGWDAEQFF

SEQ ID NO: 29312 - protein, 15 aa, synthetic construct
CGARISGGSNAKLTF

SEQ ID NO: 29313 - protein, 14 aa, synthetic construct
CASSIVTGGDTLYF

SEQ ID NO: 29314 - protein, 12 aa, synthetic construct
CALGDYANKMIF

SEQ ID NO: 29315 - protein, 13 aa, synthetic construct
CASSMGSGNTLYF

SEQ ID NO: 29316 - protein, 13 aa, synthetic construct
CALGNYGNEKITF

SEQ ID NO: 29317 - protein, 14 aa, synthetic construct
CASSGDRGYAEQFF

SEQ ID NO: 29318 - protein, 14 aa, synthetic construct
CALGYGSSGNKLIF

SEQ ID NO: 29319 - protein, 15 aa, synthetic construct
CTCSAEGTGLNTLYF

SEQ ID NO: 29320 - protein, 15 aa, synthetic construct
CALSGLNYNQGKLIF

SEQ ID NO: 29321 - protein, 14 aa, synthetic construct
CTCSADRQNQAPLF

SEQ ID NO: 29322 - protein, 17 aa, synthetic construct
CAMREGETGGLSGKLTF

SEQ ID NO: 29323 - protein, 14 aa, synthetic construct
CTCSADRGNTEVFF

SEQ ID NO: 29324 - protein, 11 aa, synthetic construct
CAARGSAKLIF

SEQ ID NO: 29325 - protein, 15 aa, synthetic construct
CTCSADGGNTGQLYF

SEQ ID NO: 29326 - protein, 15 aa, synthetic construct
CAVTPPDYSNNRLTL

SEQ ID NO: 29327 - protein, 14 aa, synthetic construct
CTCSAGQGNTEVFF

SEQ ID NO: 29328 - protein, 12 aa, synthetic construct
CADGGSGNKLIF

SEQ ID NO: 29329 - DNA, 39 bp, synthetic construct
  source 1..39: mol_type = other DNA
tgtgccagcggaactgggggggaaaacaccttgtacttt

SEQ ID NO: 29330 - DNA, 42 bp, synthetic construct
  source 1..42: mol_type = other DNA
tgtgctctgaggagaggttcagccttagggaggctgcatttt

SEQ ID NO: 29331 - DNA, 48 bp, synthetic construct
  source 1..48: mol_type = other DNA
tgcacctgcagtgcagaattgggggggcttgcagaaacgctgtatttt

SEQ ID NO: 29332 - DNA, 39 bp, synthetic construct
  source 1..39: mol_type = other DNA
tgtgctgtgagtccttctggcagctggcaactcatcttt

SEQ ID NO: 29333 - DNA, 45 bp, synthetic construct
  source 1..45: mol_type = other DNA
tgtgccagcagccgaaatactgggggggcgcttgaacagtacttc

SEQ ID NO: 29334 - DNA, 39 bp, synthetic construct
  source 1..39: mol_type = other DNA
tgtgctgtgagccctggcagtggtggaaaactcactttg

SEQ ID NO: 29335 - DNA, 42 bp, synthetic construct
  source 1..42: mol_type = other DNA
tgtgccagcggtgtagggacacgaaatgctgagcagttcttc

SEQ ID NO: 29336 - DNA, 39 bp, synthetic construct
  source 1..39: mol_type = other DNA
tgtgctctgagtgagacgggttaccagaacttctatttt

SEQ ID NO: 29337 - DNA, 45 bp, synthetic construct
  source 1..45: mol_type = other DNA
tgtgccagcagtggcgggacaggtaacaccgggcagctctacttt

SEQ ID NO: 29338 - DNA, 51 bp, synthetic construct; identical to SEQ ID NO: 26046
  source 1..51: mol_type = other DNA

SEQ ID NO: 29339 - DNA, 45 bp, synthetic construct
  source 1..45: mol_type = other DNA
tgtgccagcagccaagacgcaaattctggaaatacgctctatttt

SEQ ID NO: 29340 - DNA, 36 bp, synthetic construct
  source 1..36: mol_type = other DNA
tgcattgtgactgacatgggctacaaacttaccttc

SEQ ID NO: 29341 - DNA, 42 bp, synthetic construct
  source 1..42: mol_type = other DNA
tgtgccagcagccaccgggacagatatgctgagcagttcttc

SEQ ID NO: 29342 - DNA, 48 bp, synthetic construct
  source 1..48: mol_type = other DNA
tgtgctacagatgcgggggcatcctcctccttcagcaagctggtgttt

SEQ ID NO: 29343 - DNA, 42 bp, synthetic construct
  source 1..42: mol_type = other DNA
tgtgccagcagctctggactggggggctatgaacagtacttc

SEQ ID NO: 29344 - DNA, 39 bp, synthetic construct
  source 1..39: mol_type = other DNA
tgtgctttgagtgctggcagtggtggaaaactcactttg

SEQ ID NO: 29345 - DNA, 39 bp, synthetic construct
  source 1..39: mol_type = other DNA
tgtgccagcagccaagaggacggagacacccagtacttt

SEQ ID NO: 29346 - DNA, 45 bp, synthetic construct
  source 1..45: mol_type = other DNA
tgtgctctgggtgatctggcttctggcagctggcaactcatcttt

SEQ ID NO: 29347 - DNA, 45 bp, synthetic construct
  source 1..45: mol_type = other DNA
tgtgccagcagcccggacagggggagtcaaaacaccttgtacttt

SEQ ID NO: 29348 - DNA, 42 bp, synthetic construct
  source 1..42: mol_type = other DNA
tgtgcagcaagcaggaggaataacaataacagaatcttcttt

SEQ ID NO: 29349 - DNA, 45 bp, synthetic construct
  source 1..45: mol_type = other DNA
tgtagttctagtaggggggaagaggactatgctgagcagttcttc

SEQ ID NO: 29350 - DNA, 45 bp, synthetic construct
  source 1..45: mol_type = other DNA
tgtgcagcaagcatgatgggaggaagcaatgcaaagctaaccttc

SEQ ID NO: 29351 - DNA, 39 bp, synthetic construct
  source 1..39: mol_type = other DNA
tgtgccagcacggacagggaccaagacacccagtacttt

SEQ ID NO: 29352 - DNA, 45 bp, synthetic construct
  source 1..45: mol_type = other DNA
tgtgctatggttcccccctcaggaggaaactacaaacctacgttt

SEQ ID NO: 29353 - DNA, 39 bp, synthetic construct
  source 1..39: mol_type = other DNA
tgtgccagcagcctgggggcctcctatgaacagtacttc

SEQ ID NO: 29354 - DNA, 45 bp, synthetic construct
  source 1..45: mol_type = other DNA
tgtgcagctagtgccgcatcttctggcagctggcaactcatcttt

SEQ ID NO: 29355 - DNA, 39 bp, synthetic construct
  source 1..39: mol_type = other DNA
tgtgccagcagctgggggggctcctatgaacagtacttc

SEQ ID NO: 29356 - DNA, 24 bp, synthetic construct
  source 1..24: mol_type = other DNA
tgtgctaaagccagaatcttcttt

SEQ ID NO: 29357 - DNA, 42 bp, synthetic construct
  source 1..42: mol_type = other DNA
tgtgccagcagttgggggggcggccaagacacccagtacttt

SEQ ID NO: 29358 - DNA, 39 bp, synthetic construct
  source 1..39: mol_type = other DNA
tgtgcagcccttgacacaaatgcttacaaagtcatcttt

SEQ ID NO: 29359 - DNA, 39 bp, synthetic construct
  source 1..39: mol_type = other DNA
tgtgccagcagttttatgggtaactccgactacaccttc

SEQ ID NO: 29360 - DNA, 42 bp, synthetic construct
  source 1..42: mol_type = other DNA
tgtgctatgagagaggtcaataacaacaatgccccacgattt

SEQ ID NO: 29361 - DNA, 36 bp, synthetic construct
  source 1..36: mol_type = other DNA
tgtgctagcagtttaaaaggggatgaacagtacttc

SEQ ID NO: 29362 - DNA, 39 bp, synthetic construct
  source 1..39: mol_type = other DNA
tgcgcagtcctccccgccaataccgacaaagtcgtcttt

SEQ ID NO: 29363 - DNA, 42 bp, synthetic construct
  source 1..42: mol_type = other DNA
tgtgctagcagtttggggcagacaaacacagaagtcttcttt

SEQ ID NO: 29364 - DNA, 36 bp, synthetic construct
  source 1..36: mol_type = other DNA
tgtgcagcaagcagtgcagggaacaagctaactttt

SEQ ID NO: 29365 - DNA, 45 bp, synthetic construct
  source 1..45: mol_type = other DNA
tgtgccagcacccccgggactgggggggcgcttgaacagtacttc

SEQ ID NO: 29366 - DNA, 39 bp, synthetic construct
  source 1..39: mol_type = other DNA
tgtgctgtgaactctggcagtggtggaaaactcactttg

SEQ ID NO: 29367 - DNA, 39 bp, synthetic construct
  source 1..39: mol_type = other DNA
tgtgccagcagccaaaggtgggggtatgaacagtacttc

SEQ ID NO: 29368 - DNA, 45 bp, synthetic construct
  source 1..45: mol_type = other DNA
tgtgcagtgaccccgatttctacaggaaactacaaatacgtcttt

SEQ ID NO: 29369 - DNA, 39 bp, synthetic construct
  source 1..39: mol_type = other DNA
tgtgccagcagccaagaacaggtcttggaacagtacttc

SEQ ID NO: 29370 - DNA, 45 bp, synthetic construct
  source 1..45: mol_type = other DNA
tgtgctctgagtggtgcatcttctggcagctggcaactcatcttt

SEQ ID NO: 29371 - DNA, 48 bp, synthetic construct
  source 1..48: mol_type = other DNA
tgtgccagcagccaagaagtgaattcctataattcgcccctctacttt

SEQ ID NO: 29372 - DNA, 39 bp, synthetic construct
  source 1..39: mol_type = other DNA
tgtgctacaaaagggaattctgggacttaccagaggttt

SEQ ID NO: 29373 - DNA, 42 bp, synthetic construct
  source 1..42: mol_type = other DNA
tgtgccagcagccaatgggtttggaattcgcccctctacttt

SEQ ID NO: 29374 - DNA, 36 bp, synthetic construct
  source 1..36: mol_type = other DNA
tgtgctatagacacgggttaccagaacttctatttt

SEQ ID NO: 29375 - DNA, 42 bp, synthetic construct
  source 1..42: mol_type = other DNA
tgtgccagcagcacgggactgggggaagacacccagtacttt

SEQ ID NO: 29376 - DNA, 39 bp, synthetic construct
  source 1..39: mol_type = other DNA
tgtgctctggcccctaactatgcccagggattaaccttc

SEQ ID NO: 29377 - DNA, 45 bp, synthetic construct
  source 1..45: mol_type = other DNA
tgtgccagcagccgactggggggaagctcctatgaacagtacttc

SEQ ID NO: 29378 - DNA, 36 bp, synthetic construct
  source 1..36: mol_type = other DNA
tgtgctttacaaggcactgggtctaagctgtcattt

SEQ ID NO: 29379 - DNA, 39 bp, synthetic construct
  source 1..39: mol_type = other DNA
tgtgccagcagctacggacaacaagacacccagtacttt

SEQ ID NO: 29380 - DNA, 33 bp, synthetic construct
  source 1..33: mol_type = other DNA
tgtgctggggatagcaactatcagttgatctgg

SEQ ID NO: 29381 - DNA, 45 bp, synthetic construct
  source 1..45: mol_type = other DNA
tgtgccagcagctcccagggggaaggtcaaaacaccttgtacttt

SEQ ID NO: 29382 - DNA, 36 bp, synthetic construct
  source 1..36: mol_type = other DNA
tgtgctatagctccgggttaccagaacttctatttt

SEQ ID NO: 29383 - DNA, 45 bp, synthetic construct
  source 1..45: mol_type = other DNA
tgtgccagcagctcgggacaagatagtgcagaaacgctgtatttt

SEQ ID NO: 29384 - DNA, 39 bp, synthetic construct
  source 1..39: mol_type = other DNA
tgtgctctgggtggtaactatgcccagggattaaccttc

SEQ ID NO: 29385 - DNA, 42 bp, synthetic construct
  source 1..42: mol_type = other DNA
tgtgccagcagcttttacagggatggaaatacgctctatttt

SEQ ID NO: 29386 - DNA, 39 bp, synthetic construct
  source 1..39: mol_type = other DNA
tgtgctatggataataatgcaggtgccaagctcacattc

SEQ ID NO: 29387 - DNA, 42 bp, synthetic construct
  source 1..42: mol_type = other DNA
tgtgccagcagtcctcgggactgggggtatgaacagtacttc

SEQ ID NO: 29388 - DNA, 42 bp, synthetic construct
  source 1..42: mol_type = other DNA
tgtgctgtgaggccgggggatagcaactatcagttgatctgg

SEQ ID NO: 29389 - DNA, 39 bp, synthetic construct; identical to SEQ ID NO: 29329
  source 1..39: mol_type = other DNA

SEQ ID NO: 29390 - DNA, 39 bp, synthetic construct
  source 1..39: mol_type = other DNA
tgtgctatgagagaccagggaggcagagctctgatattt

SEQ ID NO: 29391 - DNA, 48 bp, synthetic construct
  source 1..48: mol_type = other DNA
tgtgccagcggatcgggactgggggggtttgcagaaacgctgtatttt

SEQ ID NO: 29392 - DNA, 39 bp, synthetic construct
  source 1..39: mol_type = other DNA
tgtgctactgatgaccagggaggcagagctctgatattt

SEQ ID NO: 29393 - DNA, 42 bp, synthetic construct
  source 1..42: mol_type = other DNA
tgtgccagcggccccgggacagggaactccgactacaccttc

SEQ ID NO: 29394 - DNA, 39 bp, synthetic construct
  source 1..39: mol_type = other DNA
tgtgctgtgaccgttaactatgcccagggattaaccttc

SEQ ID NO: 29395 - DNA, 42 bp, synthetic construct
  source 1..42: mol_type = other DNA
tgtgccagcgggaggctgggggcctcctatgaacagtacttc

SEQ ID NO: 29396 - DNA, 45 bp, synthetic construct
  source 1..45: mol_type = other DNA
tgtgcactggaggtctatcaaggagggtctgcgaagctcatcttt

SEQ ID NO: 29397 - DNA, 39 bp, synthetic construct
  source 1..39: mol_type = other DNA
tgtgccagcgggggacaaatcaaccaggctccgcttttt

SEQ ID NO: 29398 - DNA, 48 bp, synthetic construct
  source 1..48: mol_type = other DNA
tgtgcactggagggtaattctggaggaagcaatgcaaagctaaccttc

SEQ ID NO: 29399 - DNA, 36 bp, synthetic construct
  source 1..36: mol_type = other DNA
tgtgccagcggtgactcagggggggctccgcttttt

SEQ ID NO: 29400 - DNA, 39 bp, synthetic construct
  source 1..39: mol_type = other DNA
tgcgcagtcagccaatatagcaataacagaatcttcttt

SEQ ID NO: 29401 - DNA, 42 bp, synthetic construct
  source 1..42: mol_type = other DNA
tgtgccagcggtgataatcaaatcaaccaggctccgcttttt

SEQ ID NO: 29402 - DNA, 45 bp, synthetic construct
  source 1..45: mol_type = other DNA
tgtgctatgagagagggcggtggcagtggtggaaaactcactttg

SEQ ID NO: 29403 - DNA, 45 bp, synthetic construct
  source 1..45: mol_type = other DNA
tgtgccagcggtgatataggaggggtcaacgaaagattatttttc

SEQ ID NO: 29404 - DNA, 42 bp, synthetic construct
  source 1..42: mol_type = other DNA
tgtgcagcaacgctagggactggaggctataaagtggtcttt

SEQ ID NO: 29405 - DNA, 45 bp, synthetic construct
  source 1..45: mol_type = other DNA
tgtgccagcggtgatggcagggcgaacaaccaggctccgcttttt

SEQ ID NO: 29406 - DNA, 39 bp, synthetic construct
  source 1..39: mol_type = other DNA
tgtgcagtgagccggaataacaataacagaatcttcttt

SEQ ID NO: 29407 - DNA, 45 bp, synthetic construct
  source 1..45: mol_type = other DNA
tgtgccagcggtgatggggactggggctatgctgagcagttcttc

SEQ ID NO: 29408 - DNA, 45 bp, synthetic construct
  source 1..45: mol_type = other DNA
tgtgctctggttggtacctcaggaggaaactacaaacctacgttt

SEQ ID NO: 29409 - DNA, 42 bp, synthetic construct
  source 1..42: mol_type = other DNA
tgtgccagcggtgcccgacagggctcctatgaacagtacttc

SEQ ID NO: 29410 - DNA, 45 bp, synthetic construct
  source 1..45: mol_type = other DNA
tgtgctatgagagaggaaggatctggcagctggcaactcatcttt

SEQ ID NO: 29411 - DNA, 48 bp, synthetic construct
  source 1..48: mol_type = other DNA
tgtgccagcagtgatgatggggggggtaaccaagacacccagtacttt

SEQ ID NO: 29412 - DNA, 39 bp, synthetic construct
  source 1..39: mol_type = other DNA
tgcgcagtcagaggcacaaatgcttacaaagtcatcttt

SEQ ID NO: 29413 - DNA, 45 bp, synthetic construct
  source 1..45: mol_type = other DNA
tgtgccagcagtgatgcaagcagggccaaccaggctccgcttttt

SEQ ID NO: 29414 - DNA, 39 bp, synthetic construct
  source 1..39: mol_type = other DNA
tgcgcagtccttcctggtagcttcaataagttgaccttt

SEQ ID NO: 29415 - DNA, 39 bp, synthetic construct
  source 1..39: mol_type = other DNA
tgtgccagcagtgatgttgcaaacacagaagtcttcttt

SEQ ID NO: 29416 - DNA, 36 bp, synthetic construct
  source 1..36: mol_type = other DNA
tgtgctatgagtggaggaaactacaaatacgtcttt

SEQ ID NO: 29417 - DNA, 42 bp, synthetic construct
  source 1..42: mol_type = other DNA
tgtgccagcagtgacgcagggggcgactccgactacaccttc

SEQ ID NO: 29418 - DNA, 39 bp, synthetic construct
  source 1..39: mol_type = other DNA
tgtgctatgagagacacaaatgcttacaaagtcatcttt

SEQ ID NO: 29419 - DNA, 36 bp, synthetic construct
  source 1..36: mol_type = other DNA
tgtgccagcagtgatgatgcagaaacgctgtatttt

SEQ ID NO: 29420 - DNA, 45 bp, synthetic construct
  source 1..45: mol_type = other DNA
tgtgctgtgagcatgagagggggcagtggcaacaagctcatcttt

SEQ ID NO: 29421 - DNA, 51 bp, synthetic construct
  source 1..51: mol_type = other DNA
tgtgccagcagtgatgcagactggggggcgagctcctatgaacagtacttc

SEQ ID NO: 29422 - DNA, 45 bp, synthetic construct
  source 1..45: mol_type = other DNA
tgtgctatgagagagtatacaggaggtgcagatagactcaccttt

SEQ ID NO: 29423 - DNA, 39 bp, synthetic construct
  source 1..39: mol_type = other DNA
tgtgccagcagtgggacagggaactccgactacaccttc

SEQ ID NO: 29424 - DNA, 36 bp, synthetic construct
  source 1..36: mol_type = other DNA
tgtgctgtgagcaaaggtgcagatagactcaccttt

SEQ ID NO: 29425 - DNA, 39 bp, synthetic construct
  source 1..39: mol_type = other DNA
tgtgccagcagtggggggattggaaatacgctctatttt

SEQ ID NO: 29426 - DNA, 51 bp, synthetic construct; identical to SEQ ID NO: 26046
  source 1..51: mol_type = other DNA

SEQ ID NO: 29427 - DNA, 48 bp, synthetic construct
  source 1..48: mol_type = other DNA
tgtgccagcagtggggggggcgccgattctggaaatacgctctatttt

SEQ ID NO: 29428 - DNA, 51 bp, synthetic construct; identical to SEQ ID NO: 26046
  source 1..51: mol_type = other DNA

SEQ ID NO: 29429 - DNA, 51 bp, synthetic construct
  source 1..51: mol_type = other DNA
tgtgctagcagtagagccgggacaggggccctctatgctgagcagttcttc

SEQ ID NO: 29430 - DNA, 42 bp, synthetic construct
  source 1..42: mol_type = other DNA
tgtgctactgaaagaggttcagccttagggaggctgcatttt

SEQ ID NO: 29431 - DNA, 45 bp, synthetic construct
  source 1..45: mol_type = other DNA
tgtgctagcagtaggggactgggggggcacggggaacagtacttc

SEQ ID NO: 29432 - DNA, 45 bp, synthetic construct
  source 1..45: mol_type = other DNA
tgtgctctgggtgatccgacttccaataccaacaaagtcgtcttt

SEQ ID NO: 29433 - DNA, 39 bp, synthetic construct
  source 1..39: mol_type = other DNA
tgtgcctggagcccggagaccaacgaaagattatttttc

SEQ ID NO: 29434 - DNA, 36 bp, synthetic construct
  source 1..36: mol_type = other DNA
tgtgcagcaagtcagagcaataacagaatcttcttt

SEQ ID NO: 29435 - DNA, 33 bp, synthetic construct
  source 1..33: mol_type = other DNA
tgtgcctggctcagggactccgactacaccttc

SEQ ID NO: 29436 - DNA, 45 bp, synthetic construct
  source 1..45: mol_type = other DNA
tgtgctatgagagatcgggcaggcaataccggaaaactcatcttt

SEQ ID NO: 29437 - DNA, 39 bp, synthetic construct
  source 1..39: mol_type = other DNA
tgtgccagcagcttcggggggagagacacccagtacttt

SEQ ID NO: 29438 - DNA, 48 bp, synthetic construct
  source 1..48: mol_type = other DNA
tgtgctatgagagagggcttatcttctggcagctggcaactcatcttt

SEQ ID NO: 29439 - DNA, 45 bp, synthetic construct
  source 1..45: mol_type = other DNA
tgtggtgctagggatctgggtgggggggactatgaacagtacttc

SEQ ID NO: 29440 - DNA, 42 bp, synthetic construct
  source 1..42: mol_type = other DNA
tgtgctctgggtgctatgcctaattacaacgtgctttacttc

SEQ ID NO: 29441 - DNA, 33 bp, synthetic construct
  source 1..33: mol_type = other DNA
tgtggtgctgaacagctcacagaagtcttcttt

SEQ ID NO: 29442 - DNA, 39 bp, synthetic construct
  source 1..39: mol_type = other DNA
tgtgcagcaagtgacacaaatgcttacaaagtcatcttt

SEQ ID NO: 29443 - DNA, 39 bp, synthetic construct
  source 1..39: mol_type = other DNA
tgtgccagcaacccgacagggggggatgaacagtacttc

SEQ ID NO: 29444 - DNA, 33 bp, synthetic construct
  source 1..33: mol_type = other DNA
tgtgctctgaggtccacaggcaaattaaccttt

SEQ ID NO: 29445 - DNA, 33 bp, synthetic construct
  source 1..33: mol_type = other DNA
tgtgccagcagcgccaacacagaagtcttcttt

SEQ ID NO: 29446 - DNA, 39 bp, synthetic construct
  source 1..39: mol_type = other DNA
tgtgctttggaacgttggggcaataacagaatcttcttt

SEQ ID NO: 29447 - DNA, 42 bp, synthetic construct
  source 1..42: mol_type = other DNA
tgtgccagcagtactggggggtgggatgctgagcagttcttc

SEQ ID NO: 29448 - DNA, 45 bp, synthetic construct
  source 1..45: mol_type = other DNA
tgcggtgcgaggatttctggaggaagcaatgcaaagctaaccttc

SEQ ID NO: 29449 - DNA, 42 bp, synthetic construct
  source 1..42: mol_type = other DNA
tgtgccagcagtatagtgacagggggcgacaccttgtacttt

SEQ ID NO: 29450 - DNA, 36 bp, synthetic construct
  source 1..36: mol_type = other DNA
tgtgctctgggggactatgcaaacaagatgatcttt

SEQ ID NO: 29451 - DNA, 39 bp, synthetic construct
  source 1..39: mol_type = other DNA
tgtgccagcagtatggggtctggaaatacgctctatttt

SEQ ID NO: 29452 - DNA, 39 bp, synthetic construct
  source 1..39: mol_type = other DNA
tgtgctttgggcaactatggaaatgagaaaataactttt

SEQ ID NO: 29453 - DNA, 42 bp, synthetic construct
  source 1..42: mol_type = other DNA
tgtgccagcagtggggacaggggatatgctgagcagttcttc

SEQ ID NO: 29454 - DNA, 42 bp, synthetic construct
  source 1..42: mol_type = other DNA
tgtgctttgggttatgggagcagtggcaacaagctcatcttt

SEQ ID NO: 29455 - DNA, 45 bp, synthetic construct
  source 1..45: mol_type = other DNA
tgcacctgcagtgcagaagggacagggctaaatacgctctatttt

SEQ ID NO: 29456 - DNA, 45 bp, synthetic construct
  source 1..45: mol_type = other DNA
tgtgctttgagtggtctgaattataaccaggggaagcttatcttt

SEQ ID NO: 29457 - DNA, 42 bp, synthetic construct
  source 1..42: mol_type = other DNA
tgcacctgcagtgcagatcgacaaaaccaggctccgcttttt

SEQ ID NO: 29458 - DNA, 51 bp, synthetic construct
  source 1..51: mol_type = other DNA
tgtgctatgagagagggcgagactggaggactaagtggtaaattaacattc

SEQ ID NO: 29459 - DNA, 42 bp, synthetic construct
  source 1..42: mol_type = other DNA
tgcacctgcagtgcagatcggggaaacacagaagtcttcttt

SEQ ID NO: 29460 - DNA, 33 bp, synthetic construct
  source 1..33: mol_type = other DNA
tgtgcagcaagagggtctgcgaagctcatcttt

SEQ ID NO: 29461 - DNA, 45 bp, synthetic construct
  source 1..45: mol_type = other DNA
tgcacctgcagtgcagatggggggaacaccgggcagctctacttt

SEQ ID NO: 29462 - DNA, 45 bp, synthetic construct
  source 1..45: mol_type = other DNA
tgcgcagtcacccccccggactacagcaacaacagacttactttg

SEQ ID NO: 29463 - DNA, 42 bp, synthetic construct
  source 1..42: mol_type = other DNA
tgcacctgcagtgcaggacaggggaacacagaagtcttcttt

SEQ ID NO: 29464 - DNA, 36 bp, synthetic construct
  source 1..36: mol_type = other DNA
tgtgccgatgggggcagtggcaacaagctcatcttt

SEQ ID NO: 29465 - protein, 9 aa, synthetic construct
GAGTRLSVL

SEQ ID NO: 29466 - protein, 10 aa, synthetic construct
GAGTQLIVIP

SEQ ID NO: 29467 - protein, 9 aa, synthetic construct
GSGTRLTVL

SEQ ID NO: 29468 - protein, 10 aa, synthetic construct
GSGTQLTVMP

SEQ ID NO: 29469 - protein, 9 aa, synthetic construct
GPGTRLTVL

SEQ ID NO: 29470 - protein, 10 aa, synthetic construct
GTGTRLQVNL

SEQ ID NO: 29471 - protein, 9 aa, synthetic construct
GPGTRLTVL

SEQ ID NO: 29472 - protein, 10 aa, synthetic construct
GKGTSLTVIP

SEQ ID NO: 29473 - protein, 9 aa, synthetic construct
GEGSKLTVL

SEQ ID NO: 29474 - protein, 10 aa, synthetic construct
GHGTILRVHP

SEQ ID NO: 29475 - protein, 9 aa, synthetic construct
GEGSRLIVV

SEQ ID NO: 29476 - protein, 10 aa, synthetic construct
GTGTSLLVDP

SEQ ID NO: 29477 - protein, 9 aa, synthetic construct
GPGTRLTVL

SEQ ID NO: 29478 - protein, 10 aa, synthetic construct
GQGTSLSVVP

SEQ ID NO: 29479 - protein, 9 aa, synthetic construct
GPGTRLTVL

SEQ ID NO: 29480 - protein, 10 aa, synthetic construct
GTGTRLQVNL

SEQ ID NO: 29481 - protein, 9 aa, synthetic construct
GPGTRLLVL

SEQ ID NO: 29482 - protein, 10 aa, synthetic construct
GSGTQLTVMP

SEQ ID NO: 29483 - protein, 9 aa, synthetic construct
GAGTRLSVL

SEQ ID NO: 29484 - protein, 10 aa, synthetic construct
GDGTQLVVKP

SEQ ID NO: 29485 - protein, 9 aa, synthetic construct
GPGTRLTVL

SEQ ID NO: 29486 - protein, 10 aa, synthetic construct
GKGTKLSVKS

SEQ ID NO: 29487 - protein, 9 aa, synthetic construct
GPGTRLLVL

SEQ ID NO: 29488 - protein, 10 aa, synthetic construct
GKGTSLVVHP

SEQ ID NO: 29489 - protein, 9 aa, synthetic construct
GPGTRLTVL

SEQ ID NO: 29490 - protein, 10 aa, synthetic construct
GSGTQLTVMP

SEQ ID NO: 29491 - protein, 9 aa, synthetic construct
GPGTRLTVL

SEQ ID NO: 29492 - protein, 10 aa, synthetic construct
GDGTQLVVKP

SEQ ID NO: 29493 - protein, 9 aa, synthetic construct
GPGTRLLVL

SEQ ID NO: 29494 - protein, 10 aa, synthetic construct
GKGTHLHVLP

SEQ ID NO: 29495 - protein, 9 aa, synthetic construct
GSGTRLLVI

SEQ ID NO: 29496 - protein, 10 aa, synthetic construct
GAGTKLSVKP

SEQ ID NO: 29497 - protein, 9 aa, synthetic construct
GPGTRLTVL

SEQ ID NO: 29498 - protein, 10 aa, synthetic construct
GTGTRLQVSP

SEQ ID NO: 29499 - protein, 9 aa, synthetic construct
GKGTRLTVV

SEQ ID NO: 29500 - protein, 10 aa, synthetic construct
GIGTRVLVRP

SEQ ID NO: 29501 - protein, 9 aa, synthetic construct
GPGTRLTVL

SEQ ID NO: 29502 - protein, 10 aa, synthetic construct
GTGTRLQVNL

SEQ ID NO: 29503 - protein, 9 aa, synthetic construct
GPGTRLTVL

SEQ ID NO: 29504 - protein, 10 aa, synthetic construct
GAGTRLKVIA

SEQ ID NO: 29505 - protein, 9 aa, synthetic construct
GPGTRLTVL

SEQ ID NO: 29506 - protein, 10 aa, synthetic construct
GSGTQLTVMP

SEQ ID NO: 29507 - protein, 9 aa, synthetic construct
AAGTRLTVT

SEQ ID NO: 29508 - protein, 10 aa, synthetic construct
GTGTKLQVVP

SEQ ID NO: 29509 - protein, 9 aa, synthetic construct
AAGTRLTVT

SEQ ID NO: 29510 - protein, 10 aa, synthetic construct
GKGTSLTVIP

SEQ ID NO: 29511 - protein, 9 aa, synthetic construct
GPGTRLLVL

SEQ ID NO: 29512 - protein, 10 aa, synthetic construct
GLGTRVSVFP

SEQ ID NO: 29513 - protein, 9 aa, synthetic construct
GPGTRLTVL

SEQ ID NO: 29514 - protein, 10 aa, synthetic construct
GKGAKLTVSP

SEQ ID NO: 29515 - protein, 9 aa, synthetic construct
GPGTRLLVL

SEQ ID NO: 29516 - protein, 10 aa, synthetic construct
GSGTKLIIKP

SEQ ID NO: 29517 - protein, 9 aa, synthetic construct
GAGTRLSVL

SEQ ID NO: 29518 - protein, 10 aa, synthetic construct
GKGTSLTVIP

SEQ ID NO: 29519 - protein, 9 aa, synthetic construct
GSGTRLTVL

SEQ ID NO: 29520 - protein, 10 aa, synthetic construct
GLGTRVSVFP

SEQ ID NO: 29521 - protein, 9 aa, synthetic construct
GEGSRLIVV

SEQ ID NO: 29522 - protein, 10 aa, synthetic construct
GGGTRLTVRP

SEQ ID NO: 29523 - protein, 9 aa, synthetic construct
GPGTRLTVL

SEQ ID NO: 29524 - protein, 10 aa, synthetic construct
GSGTKLIIKP

SEQ ID NO: 29525 - protein, 9 aa, synthetic construct
GAGTRLSVL

SEQ ID NO: 29526 - protein, 10 aa, synthetic construct
GTGTTVSVSP

SEQ ID NO: 29527 - protein, 9 aa, synthetic construct
GSGTRLTVL

SEQ ID NO: 29528 - protein, 10 aa, synthetic construct
GTGTTVSVSP

SEQ ID NO: 29529 - protein, 9 aa, synthetic construct
GSGTRLLVI

SEQ ID NO: 29530 - protein, 10 aa, synthetic construct
GLGTRVSVFP

SEQ ID NO: 29531 - protein, 9 aa, synthetic construct
GPGTRLTVL

SEQ ID NO: 29532 - protein, 10 aa, synthetic construct
GEGTKLTVSS

SEQ ID NO: 29533 - protein, 9 aa, synthetic construct
GEGTRLSVL

SEQ ID NO: 29534 - protein, 10 aa, synthetic construct
GKGTKLSVKS

SEQ ID NO: 29535 - protein, 9 aa, synthetic construct
GEGTRLSVL

SEQ ID NO: 29536 - protein, 10 aa, synthetic construct
GDGTQLVVKP

SEQ ID NO: 29537 - protein, 9 aa, synthetic construct
GEGTRLSVL

SEQ ID NO: 29538 - protein, 10 aa, synthetic construct
GTGTRLQVNL

SEQ ID NO: 29539 - protein, 9 aa, synthetic construct
GHGTKLSVL

SEQ ID NO: 29540 - protein, 10 aa, synthetic construct
GSGTRLLVSP

SEQ ID NO: 29541 - protein, 9 aa, synthetic construct
GEGTRLSVL

SEQ ID NO: 29542 - protein, 10 aa, synthetic construct
GDGTQLVVKP

SEQ ID NO: 29543 - protein, 9 aa, synthetic construct
GPGTRLTVL

SEQ ID NO: 29544 - protein, 10 aa, synthetic construct
GKGTSLVVHP

SEQ ID NO: 29545 - protein, 9 aa, synthetic construct
GPGTRLTVL

SEQ ID NO: 29546 - protein, 10 aa, synthetic construct
GSGTQLTVMP

SEQ ID NO: 29547 - protein, 9 aa, synthetic construct
GPGTRLLVL

SEQ ID NO: 29548 - protein, 10 aa, synthetic construct
GKGTHLHVLP

SEQ ID NO: 29549 - protein, 9 aa, synthetic construct
GEGTRLSVL

SEQ ID NO: 29550 - protein, 10 aa, synthetic construct
GAGTRLAVCP

SEQ ID NO: 29551 - protein, 9 aa, synthetic construct
GKGTRLTVV

SEQ ID NO: 29552 - protein, 10 aa, synthetic construct
GAGTRLKVIA

SEQ ID NO: 29553 - protein, 9 aa, synthetic construct
GSGTRLLVI

SEQ ID NO: 29554 - protein, 10 aa, synthetic construct
GKGTHLHVLP

SEQ ID NO: 29555 - protein, 9 aa, synthetic construct
GSGTRLTVL

SEQ ID NO: 29556 - protein, 10 aa, synthetic construct
GTGTLLSVKP

SEQ ID NO: 29557 - protein, 9 aa, synthetic construct
GPGTRLTVL

SEQ ID NO: 29558 - protein, 10 aa, synthetic construct
GKGTQLIIQP

SEQ ID NO: 29559 - protein, 9 aa, synthetic construct
GSGTRLLVI

SEQ ID NO: 29560 - protein, 10 aa, synthetic construct
GKGTQLIIQP

SEQ ID NO: 29561 - protein, 9 aa, synthetic construct
GEGSRLIVV

SEQ ID NO: 29562 - protein, 10 aa, synthetic construct
GHGTILRVHP

SEQ ID NO: 29563 - protein, 9 aa, synthetic construct
GEGSRLIVV

SEQ ID NO: 29564 - protein, 10 aa, synthetic construct
GHGTILRVHP

SEQ ID NO: 29565 - protein, 9 aa, synthetic construct
GPGTRLTVL

SEQ ID NO: 29566 - protein, 10 aa, synthetic construct
GAGTQLIVIP

SEQ ID NO: 29567 - protein, 9 aa, synthetic construct
GPGTRLTVL

SEQ ID NO: 29568 - protein, 10 aa, synthetic construct
GTGTRLQVLP

SEQ ID NO: 29569 - protein, 9 aa, synthetic construct
GHGTKLSVL

SEQ ID NO: 29570 - protein, 10 aa, synthetic construct
GDGTQLVVKP

SEQ ID NO: 29571 - protein, 9 aa, synthetic construct
GSGTRLLVI

SEQ ID NO: 29572 - protein, 10 aa, synthetic construct
GLGTTLQVQP

SEQ ID NO: 29573 - protein, 9 aa, synthetic construct
GPGTRLLVL

SEQ ID NO: 29574 - protein, 10 aa, synthetic construct
GSGTQLTVMP

SEQ ID NO: 29575 - protein, 9 aa, synthetic construct
GPGTRLTVL

SEQ ID NO: 29576 - protein, 10 aa, synthetic construct
GSGTKLTVEP

SEQ ID NO: 29577 - protein, 9 aa, synthetic construct
GKGTRLTVV

SEQ ID NO: 29578 - protein, 10 aa, synthetic construct
GKGTHLHVLP

SEQ ID NO: 29579 - protein, 9 aa, synthetic construct
GPGTRLTVL

SEQ ID NO: 29580 - protein, 10 aa, synthetic construct
GDGTVLTVKP

SEQ ID NO: 29581 - protein, 9 aa, synthetic construct
GKGTRLTVV

SEQ ID NO: 29582 - protein, 10 aa, synthetic construct
GDGTQLVVKP

SEQ ID NO: 29583 - protein, 9 aa, synthetic construct
GPGTRLTVL

SEQ ID NO: 29584 - protein, 10 aa, synthetic construct
GKGTKLSVKS

SEQ ID NO: 29585 - protein, 9 aa, synthetic construct
GAGTRLSVL

SEQ ID NO: 29586 - protein, 10 aa, synthetic construct
GLGTILRVRP

SEQ ID NO: 29587 - protein, 9 aa, synthetic construct
GEGSRLIVV

SEQ ID NO: 29588 - protein, 10 aa, synthetic construct
GAGTKLTIKP

SEQ ID NO: 29589 - protein, 9 aa, synthetic construct
GPGTRLTVL

SEQ ID NO: 29590 - protein, 10 aa, synthetic construct
GIGTLLSVKP

SEQ ID NO: 29591 - protein, 9 aa, synthetic construct
GEGSRLIVV

SEQ ID NO: 29592 - protein, 10 aa, synthetic construct
GQGTKLSIKP

SEQ ID NO: 29593 - protein, 9 aa, synthetic construct
GEGTRLSVL

SEQ ID NO: 29594 - protein, 10 aa, synthetic construct
GEGTQVTVIS

SEQ ID NO: 29595 - protein, 9 aa, synthetic construct
GKGTRLTVV

SEQ ID NO: 29596 - protein, 10 aa, synthetic construct
GEGTKLTVSS

SEQ ID NO: 29597 - protein, 9 aa, synthetic construct
GEGSKLTVL

SEQ ID NO: 29598 - protein, 10 aa, synthetic construct
GKGTQVVVLP

SEQ ID NO: 29599 - protein, 9 aa, synthetic construct
GKGTRLTVV

SEQ ID NO: 29600 - protein, 10 aa, synthetic construct
GTGTLLSVKP

SEQ ID NO: 29601 - DNA, 28 bp, synthetic construct
  source 1..28: mol_type = other DNA
ggtgcgggcacccgactatcggtgctag

SEQ ID NO: 29602 - DNA, 31 bp, synthetic construct; identical to SEQ ID NO: 17964
  source 1..31: mol_type = other DNA

SEQ ID NO: 29603 - DNA, 28 bp, synthetic construct
  source 1..28: mol_type = other DNA
ggctcaggaaccagactgactgttctcg

SEQ ID NO: 29604 - DNA, 31 bp, synthetic construct; identical to SEQ ID NO: 17884
  source 1..31: mol_type = other DNA

SEQ ID NO: 29605 - DNA, 28 bp, synthetic construct
  source 1..28: mol_type = other DNA
ggtcccggcaccaggctcacggttttag

SEQ ID NO: 29606 - DNA, 31 bp, synthetic construct; identical to SEQ ID NO: 17932
  source 1..31: mol_type = other DNA

SEQ ID NO: 29607 - DNA, 28 bp, synthetic construct
  source 1..28: mol_type = other DNA
ggaccagggacacgactcaccgtcctag

SEQ ID NO: 29608 - DNA, 31 bp, synthetic construct; identical to SEQ ID NO: 17850
  source 1..31: mol_type = other DNA

SEQ ID NO: 29609 - DNA, 28 bp, synthetic construct
  source 1..28: mol_type = other DNA
ggtgaaggctcaaagctgacagtgctgg

SEQ ID NO: 29610 - DNA, 31 bp, synthetic construct; identical to SEQ ID NO: 17840
  source 1..31: mol_type = other DNA

SEQ ID NO: 29611 - DNA, 28 bp, synthetic construct
  source 1..28: mol_type = other DNA
ggagaaggaagccggctcattgttgtag

SEQ ID NO: 29612 - DNA, 31 bp, synthetic construct; identical to SEQ ID NO: 17882
  source 1..31: mol_type = other DNA

SEQ ID NO: 29613 - DNA, 28 bp, synthetic construct
  source 1..28: mol_type = other DNA
ggaccagggacacgactcaccgtcctag

SEQ ID NO: 29614 - DNA, 31 bp, synthetic construct; identical to SEQ ID NO: 17906
  source 1..31: mol_type = other DNA

SEQ ID NO: 29615 - DNA, 28 bp, synthetic construct
  source 1..28: mol_type = other DNA
ggtcccggcaccaggctcacggttttag

SEQ ID NO: 29616 - DNA, 31 bp, synthetic construct; identical to SEQ ID NO: 17932
  source 1..31: mol_type = other DNA

SEQ ID NO: 29617 - DNA, 28 bp, synthetic construct
  source 1..28: mol_type = other DNA
gggccaggcactcggctcctcgtgttag

SEQ ID NO: 29618 - DNA, 31 bp, synthetic construct; identical to SEQ ID NO: 17884
  source 1..31: mol_type = other DNA

SEQ ID NO: 29619 - DNA, 28 bp, synthetic construct
  source 1..28: mol_type = other DNA
ggtgcgggcacccgactatcggtgctag

SEQ ID NO: 29620 - DNA, 31 bp, synthetic construct; identical to SEQ ID NO: 17812
  source 1..31: mol_type = other DNA

SEQ ID NO: 29621 - DNA, 28 bp, synthetic construct
  source 1..28: mol_type = other DNA
ggaccagggacacgactcaccgtcctag

SEQ ID NO: 29622 - DNA, 31 bp, synthetic construct; identical to SEQ ID NO: 17826
  source 1..31: mol_type = other DNA

SEQ ID NO: 29623 - DNA, 28 bp, synthetic construct
  source 1..28: mol_type = other DNA
gggccaggcactcggctcctcgtgttag

SEQ ID NO: 29624 - DNA, 31 bp, synthetic construct; identical to SEQ ID NO: 17878
  source 1..31: mol_type = other DNA

SEQ ID NO: 29625 - DNA, 28 bp, synthetic construct
  source 1..28: mol_type = other DNA
ggtcccggcaccaggctcacggttttag

SEQ ID NO: 29626 - DNA, 31 bp, synthetic construct; identical to SEQ ID NO: 17884
  source 1..31: mol_type = other DNA

SEQ ID NO: 29627 - DNA, 28 bp, synthetic construct
  source 1..28: mol_type = other DNA
ggtcccggcaccaggctcacggttttag

SEQ ID NO: 29628 - DNA, 31 bp, synthetic construct; identical to SEQ ID NO: 17812
  source 1..31: mol_type = other DNA

SEQ ID NO: 29629 - DNA, 28 bp, synthetic construct
  source 1..28: mol_type = other DNA
gggccaggcactcggctcctcgtgttag

SEQ ID NO: 29630 - DNA, 31 bp, synthetic construct; identical to SEQ ID NO: 17814
  source 1..31: mol_type = other DNA

SEQ ID NO: 29631 - DNA, 28 bp, synthetic construct
  source 1..28: mol_type = other DNA
ggctcagggaccaggcttttggtaatag

SEQ ID NO: 29632 - DNA, 31 bp, synthetic construct; identical to SEQ ID NO: 17910
  source 1..31: mol_type = other DNA

SEQ ID NO: 29633 - DNA, 28 bp, synthetic construct
  source 1..28: mol_type = other DNA
ggtcccggcaccaggctcacggttttag

SEQ ID NO: 29634 - DNA, 31 bp, synthetic construct; identical to SEQ ID NO: 17858
  source 1..31: mol_type = other DNA

SEQ ID NO: 29635 - DNA, 28 bp, synthetic construct
  source 1..28: mol_type = other DNA
ggtaaaggaaccagactcacagttgtag

SEQ ID NO: 29636 - DNA, 31 bp, synthetic construct; identical to SEQ ID NO: 18166
  source 1..31: mol_type = other DNA

SEQ ID NO: 29637 - DNA, 28 bp, synthetic construct
  source 1..28: mol_type = other DNA
ggtcccggcaccaggctcacggttttag

SEQ ID NO: 29638 - DNA, 31 bp, synthetic construct; identical to SEQ ID NO: 17932
  source 1..31: mol_type = other DNA

SEQ ID NO: 29639 - DNA, 28 bp, synthetic construct
  source 1..28: mol_type = other DNA
ggtcccggcaccaggctcacggttttag

SEQ ID NO: 29640 - DNA, 31 bp, synthetic construct; identical to SEQ ID NO: 17864
  source 1..31: mol_type = other DNA

SEQ ID NO: 29641 - DNA, 28 bp, synthetic construct
  source 1..28: mol_type = other DNA
ggtcccggcaccaggctcacggttttag

SEQ ID NO: 29642 - DNA, 31 bp, synthetic construct; identical to SEQ ID NO: 17884
  source 1..31: mol_type = other DNA

SEQ ID NO: 29643 - DNA, 28 bp, synthetic construct
  source 1..28: mol_type = other DNA
gcggcaggcacccggctcactgtgacag

SEQ ID NO: 29644 - DNA, 31 bp, synthetic construct; identical to SEQ ID NO: 17916
  source 1..31: mol_type = other DNA

SEQ ID NO: 29645 - DNA, 28 bp, synthetic construct
  source 1..28: mol_type = other DNA
gcggcaggcacccggctcactgtgacag

SEQ ID NO: 29646 - DNA, 31 bp, synthetic construct; identical to SEQ ID NO: 17850
  source 1..31: mol_type = other DNA

SEQ ID NO: 29647 - DNA, 28 bp, synthetic construct
  source 1..28: mol_type = other DNA
gggccaggcactcggctcctcgtgttag

SEQ ID NO: 29648 - DNA, 31 bp, synthetic construct; identical to SEQ ID NO: 17828
  source 1..31: mol_type = other DNA

SEQ ID NO: 29649 - DNA, 28 bp, synthetic construct
  source 1..28: mol_type = other DNA
ggtcccggcaccaggctcacggttttag

SEQ ID NO: 29650 - DNA, 31 bp, synthetic construct; identical to SEQ ID NO: 18008
  source 1..31: mol_type = other DNA

SEQ ID NO: 29651 - DNA, 28 bp, synthetic construct
  source 1..28: mol_type = other DNA
gggccaggcactcggctcctcgtgttag

SEQ ID NO: 29652 - DNA, 31 bp, synthetic construct; identical to SEQ ID NO: 17856
  source 1..31: mol_type = other DNA

SEQ ID NO: 29653 - DNA, 28 bp, synthetic construct
  source 1..28: mol_type = other DNA
ggtgcgggcacccgactatcggtgctag

SEQ ID NO: 29654 - DNA, 31 bp, synthetic construct; identical to SEQ ID NO: 17850
  source 1..31: mol_type = other DNA

SEQ ID NO: 29655 - DNA, 28 bp, synthetic construct
  source 1..28: mol_type = other DNA
ggctcaggaaccagactgactgttctcg

SEQ ID NO: 29656 - DNA, 31 bp, synthetic construct; identical to SEQ ID NO: 17828
  source 1..31: mol_type = other DNA

SEQ ID NO: 29657 - DNA, 28 bp, synthetic construct
  source 1..28: mol_type = other DNA
ggagaaggaagccggctcattgttgtag

SEQ ID NO: 29658 - DNA, 31 bp, synthetic construct; identical to SEQ ID NO: 17822
  source 1..31: mol_type = other DNA

SEQ ID NO: 29659 - DNA, 28 bp, synthetic construct
  source 1..28: mol_type = other DNA
ggtcccggcaccaggctcacggttttag

SEQ ID NO: 29660 - DNA, 31 bp, synthetic construct; identical to SEQ ID NO: 17856
  source 1..31: mol_type = other DNA

SEQ ID NO: 29661 - DNA, 28 bp, synthetic construct
  source 1..28: mol_type = other DNA
ggtgcgggcacccgactatcggtgctag

SEQ ID NO: 29662 - DNA, 31 bp, synthetic construct; identical to SEQ ID NO: 17832
  source 1..31: mol_type = other DNA

SEQ ID NO: 29663 - DNA, 28 bp, synthetic construct
  source 1..28: mol_type = other DNA
ggctcaggaaccagactgactgttctcg

SEQ ID NO: 29664 - DNA, 31 bp, synthetic construct; identical to SEQ ID NO: 17832
  source 1..31: mol_type = other DNA

SEQ ID NO: 29665 - DNA, 28 bp, synthetic construct
  source 1..28: mol_type = other DNA
ggctcagggaccaggcttttggtaatag

SEQ ID NO: 29666 - DNA, 31 bp, synthetic construct; identical to SEQ ID NO: 17828
  source 1..31: mol_type = other DNA

SEQ ID NO: 29667 - DNA, 28 bp, synthetic construct
  source 1..28: mol_type = other DNA
ggtcccggcaccaggctcacggttttag

SEQ ID NO: 29668 - DNA, 31 bp, synthetic construct; identical to SEQ ID NO: 17868
  source 1..31: mol_type = other DNA

SEQ ID NO: 29669 - DNA, 28 bp, synthetic construct
  source 1..28: mol_type = other DNA
ggagaggggactcgactctctgttctag

SEQ ID NO: 29670 - DNA, 31 bp, synthetic construct; identical to SEQ ID NO: 17826
  source 1..31: mol_type = other DNA

SEQ ID NO: 29671 - DNA, 28 bp, synthetic construct
  source 1..28: mol_type = other DNA
ggagaggggactcgactctctgttctag

SEQ ID NO: 29672 - DNA, 31 bp, synthetic construct; identical to SEQ ID NO: 17812
  source 1..31: mol_type = other DNA

SEQ ID NO: 29673 - DNA, 28 bp, synthetic construct
  source 1..28: mol_type = other DNA
ggagaggggactcgactctctgttctag

SEQ ID NO: 29674 - DNA, 31 bp, synthetic construct; identical to SEQ ID NO: 17932
  source 1..31: mol_type = other DNA

SEQ ID NO: 29675 - DNA, 28 bp, synthetic construct
  source 1..28: mol_type = other DNA
ggtcatggaaccaagctgtctgtcctgg

SEQ ID NO: 29676 - DNA, 31 bp, synthetic construct; identical to SEQ ID NO: 17838
  source 1..31: mol_type = other DNA

SEQ ID NO: 29677 - DNA, 28 bp, synthetic construct
  source 1..28: mol_type = other DNA
ggagaggggactcgactctctgttctag

SEQ ID NO: 29678 - DNA, 31 bp, synthetic construct; identical to SEQ ID NO: 17812
  source 1..31: mol_type = other DNA

SEQ ID NO: 29679 - DNA, 28 bp, synthetic construct
  source 1..28: mol_type = other DNA
ggaccagggacacgactcaccgtcctag

SEQ ID NO: 29680 - DNA, 31 bp, synthetic construct; identical to SEQ ID NO: 17878
  source 1..31: mol_type = other DNA

SEQ ID NO: 29681 - DNA, 28 bp, synthetic construct
  source 1..28: mol_type = other DNA
ggtcccggcaccaggctcacggttttag

SEQ ID NO: 29682 - DNA, 31 bp, synthetic construct; identical to SEQ ID NO: 17884
  source 1..31: mol_type = other DNA

SEQ ID NO: 29683 - DNA, 28 bp, synthetic construct
  source 1..28: mol_type = other DNA
gggccaggcactcggctcctcgtgttag

SEQ ID NO: 29684 - DNA, 31 bp, synthetic construct; identical to SEQ ID NO: 17814
  source 1..31: mol_type = other DNA

SEQ ID NO: 29685 - DNA, 28 bp, synthetic construct
  source 1..28: mol_type = other DNA
ggagaggggactcgactctctgttctag

SEQ ID NO: 29686 - DNA, 31 bp, synthetic construct; identical to SEQ ID NO: 18176
  source 1..31: mol_type = other DNA

SEQ ID NO: 29687 - DNA, 28 bp, synthetic construct
  source 1..28: mol_type = other DNA
ggtaaaggaaccagactcacagttgtag

SEQ ID NO: 29688 - DNA, 31 bp, synthetic construct; identical to SEQ ID NO: 17864
  source 1..31: mol_type = other DNA

SEQ ID NO: 29689 - DNA, 28 bp, synthetic construct
  source 1..28: mol_type = other DNA
ggctcagggaccaggcttttggtaatag

SEQ ID NO: 29690 - DNA, 31 bp, synthetic construct; identical to SEQ ID NO: 17814
  source 1..31: mol_type = other DNA

SEQ ID NO: 29691 - DNA, 28 bp, synthetic construct
  source 1..28: mol_type = other DNA
ggctcaggaaccagactgactgttctcg

SEQ ID NO: 29692 - DNA, 31 bp, synthetic construct; identical to SEQ ID NO: 17834
  source 1..31: mol_type = other DNA

SEQ ID NO: 29693 - DNA, 28 bp, synthetic construct
  source 1..28: mol_type = other DNA
ggtcccggcaccaggctcacggttttag

SEQ ID NO: 29694 - DNA, 31 bp, synthetic construct; identical to SEQ ID NO: 17844
  source 1..31: mol_type = other DNA

SEQ ID NO: 29695 - DNA, 28 bp, synthetic construct
  source 1..28: mol_type = other DNA
ggctcagggaccaggcttttggtaatag

SEQ ID NO: 29696 - DNA, 31 bp, synthetic construct; identical to SEQ ID NO: 17844
  source 1..31: mol_type = other DNA

SEQ ID NO: 29697 - DNA, 28 bp, synthetic construct
  source 1..28: mol_type = other DNA
ggagaaggaagccggctcattgttgtag

SEQ ID NO: 29698 - DNA, 31 bp, synthetic construct; identical to SEQ ID NO: 17840
  source 1..31: mol_type = other DNA

SEQ ID NO: 29699 - DNA, 28 bp, synthetic construct
  source 1..28: mol_type = other DNA
ggagaaggaagccggctcattgttgtag

SEQ ID NO: 29700 - DNA, 31 bp, synthetic construct; identical to SEQ ID NO: 17840
  source 1..31: mol_type = other DNA

SEQ ID NO: 29701 - DNA, 28 bp, synthetic construct
  source 1..28: mol_type = other DNA
ggaccagggacacgactcaccgtcctag

SEQ ID NO: 29702 - DNA, 31 bp, synthetic construct; identical to SEQ ID NO: 17964
  source 1..31: mol_type = other DNA

SEQ ID NO: 29703 - DNA, 28 bp, synthetic construct
  source 1..28: mol_type = other DNA
ggtcccggcaccaggctcacggttttag

SEQ ID NO: 29704 - DNA, 31 bp, synthetic construct; identical to SEQ ID NO: 18182
  source 1..31: mol_type = other DNA

SEQ ID NO: 29705 - DNA, 28 bp, synthetic construct
  source 1..28: mol_type = other DNA
ggtcatggaaccaagctgtctgtcctgg

SEQ ID NO: 29706 - DNA, 31 bp, synthetic construct; identical to SEQ ID NO: 17812
  source 1..31: mol_type = other DNA

SEQ ID NO: 29707 - DNA, 28 bp, synthetic construct
  source 1..28: mol_type = other DNA
ggctcagggaccaggcttttggtaatag

SEQ ID NO: 29708 - DNA, 31 bp, synthetic construct; identical to SEQ ID NO: 17880
  source 1..31: mol_type = other DNA

SEQ ID NO: 29709 - DNA, 28 bp, synthetic construct
  source 1..28: mol_type = other DNA
gggccaggcactcggctcctcgtgttag

SEQ ID NO: 29710 - DNA, 31 bp, synthetic construct; identical to SEQ ID NO: 17884
  source 1..31: mol_type = other DNA

SEQ ID NO: 29711 - DNA, 28 bp, synthetic construct
  source 1..28: mol_type = other DNA
ggtcccggcaccaggctcacggttttag

SEQ ID NO: 29712 - DNA, 31 bp, synthetic construct; identical to SEQ ID NO: 17820
  source 1..31: mol_type = other DNA

SEQ ID NO: 29713 - DNA, 28 bp, synthetic construct
  source 1..28: mol_type = other DNA
ggtaaaggaaccagactcacagttgtag

SEQ ID NO: 29714 - DNA, 31 bp, synthetic construct; identical to SEQ ID NO: 17814
  source 1..31: mol_type = other DNA

SEQ ID NO: 29715 - DNA, 28 bp, synthetic construct
  source 1..28: mol_type = other DNA
ggtcccggcaccaggctcacggttttag

SEQ ID NO: 29716 - DNA, 31 bp, synthetic construct; identical to SEQ ID NO: 18000
  source 1..31: mol_type = other DNA

SEQ ID NO: 29717 - DNA, 28 bp, synthetic construct
  source 1..28: mol_type = other DNA
ggtaaaggaaccagactcacagttgtag

SEQ ID NO: 29718 - DNA, 31 bp, synthetic construct; identical to SEQ ID NO: 17812
  source 1..31: mol_type = other DNA

SEQ ID NO: 29719 - DNA, 28 bp, synthetic construct
  source 1..28: mol_type = other DNA
ggaccagggacacgactcaccgtcctag

SEQ ID NO: 29720 - DNA, 31 bp, synthetic construct; identical to SEQ ID NO: 17826
  source 1..31: mol_type = other DNA

SEQ ID NO: 29721 - DNA, 28 bp, synthetic construct
  source 1..28: mol_type = other DNA
ggtgcgggcacccgactatcggtgctag

SEQ ID NO: 29722 - DNA, 31 bp, synthetic construct; identical to SEQ ID NO: 17900
  source 1..31: mol_type = other DNA

SEQ ID NO: 29723 - DNA, 28 bp, synthetic construct
  source 1..28: mol_type = other DNA
ggagaaggaagccggctcattgttgtag

SEQ ID NO: 29724 - DNA, 31 bp, synthetic construct; identical to SEQ ID NO: 17996
  source 1..31: mol_type = other DNA

SEQ ID NO: 29725 - DNA, 28 bp, synthetic construct
  source 1..28: mol_type = other DNA
ggaccagggacacgactcaccgtcctag

SEQ ID NO: 29726 - DNA, 31 bp, synthetic construct; identical to SEQ ID NO: 17940
  source 1..31: mol_type = other DNA

SEQ ID NO: 29727 - DNA, 28 bp, synthetic construct
  source 1..28: mol_type = other DNA
ggagaaggaagccggctcattgttgtag

SEQ ID NO: 29728 - DNA, 31 bp, synthetic construct; identical to SEQ ID NO: 17816
  source 1..31: mol_type = other DNA

SEQ ID NO: 29729 - DNA, 28 bp, synthetic construct
  source 1..28: mol_type = other DNA
ggagaggggactcgactctctgttctag

SEQ ID NO: 29730 - DNA, 31 bp, synthetic construct; identical to SEQ ID NO: 17818
  source 1..31: mol_type = other DNA

SEQ ID NO: 29731 - DNA, 28 bp, synthetic construct
  source 1..28: mol_type = other DNA
ggtaaaggaaccagactcacagttgtag

SEQ ID NO: 29732 - DNA, 31 bp, synthetic construct; identical to SEQ ID NO: 17868
  source 1..31: mol_type = other DNA

SEQ ID NO: 29733 - DNA, 28 bp, synthetic construct
  source 1..28: mol_type = other DNA
ggtgaaggctcaaagctgacagtgctgg

SEQ ID NO: 29734 - DNA, 31 bp, synthetic construct; identical to SEQ ID NO: 18128
  source 1..31: mol_type = other DNA

SEQ ID NO: 29735 - DNA, 28 bp, synthetic construct
  source 1..28: mol_type = other DNA
ggtaaaggaaccagactcacagttgtag

SEQ ID NO: 29736 - DNA, 31 bp, synthetic construct; identical to SEQ ID NO: 17834
  source 1..31: mol_type = other DNA

SEQ ID NO: 29737 - protein, 26 aa, synthetic construct
ETAVFQTPNYHVTQVGNEVSFNCKQT

SEQ ID NO: 29738 - protein, 26 aa, synthetic construct
GDSVTQTEGPVTVSESESLIINCTYS

SEQ ID NO: 29739 - protein, 26 aa, synthetic construct
EAAVTQSPRNKVAVTGGKVTLSCNQT

SEQ ID NO: 29740 - protein, 26 aa, synthetic construct
QQNVQQSPESLIVPEGARTSLNCTFS

SEQ ID NO: 29741 - protein, 26 aa, synthetic construct
ETAVFQTPNYHVTQVGNEVSFNCKQT

SEQ ID NO: 29742 - protein, 26 aa, synthetic construct
GDSVTQTEGPVTVSESESLIINCTYS

SEQ ID NO: 29743 - protein, 25 aa, synthetic construct
NTKITQSPRYLILGRANKSLECEQH

SEQ ID NO: 29744 - protein, 26 aa, synthetic construct
GDSVTQTEGQVTVSESKSLIINCTYS

SEQ ID NO: 29745 - protein, 25 aa, synthetic construct
NTKITQSPRYLILGRANKSLECEQH

SEQ ID NO: 29746 - protein, 26 aa, synthetic construct
QQKVQQSPESLIVPEGGMASLNCTSS

SEQ ID NO: 29747 - protein, 25 aa, synthetic construct
NTKITQSPRYLILGRANKSLECEQH

SEQ ID NO: 29748 - protein, 26 aa, synthetic construct
QQQVRQSPQSLTVWEGETAILNCSYE

SEQ ID NO: 29749 - protein, 26 aa, synthetic construct
EAGVTQSPRYAVLQEGQAVSFWCDPI

SEQ ID NO: 29750 - protein, 25 aa, synthetic construct
LAKTTQPPSMEAYEGQEVNVSCSHT

SEQ ID NO: 29751 - protein, 26 aa, synthetic construct
ETAVFQTPNYHVTQVGNEVSFNCKQT

SEQ ID NO: 29752 - protein, 26 aa, synthetic construct
GDSVTQTEGPVTVSESESLIINCTYS

SEQ ID NO: 29753 - protein, 26 aa, synthetic construct
ETAVFQTPNYHVTQVGNEVSFNCKQT

SEQ ID NO: 29754 - protein, 26 aa, synthetic construct
AQKVTQTQTSISVMEKTTVTMDCVYE

SEQ ID NO: 29755 - protein, 26 aa, synthetic construct
EAAVTQSPRNKVAVTGGKVTLSCNQT

SEQ ID NO: 29756 - protein, 25 aa, synthetic construct
LAKTTQPPSMEAYEGQEVNVSCSHT

SEQ ID NO: 29757 - protein, 26 aa, synthetic construct
EAAVTQSPRNKVAVTGGKVTLSCNQT

SEQ ID NO: 29758 - protein, 26 aa, synthetic construct
AQKVTQTQTSISVMEKTTVTMDCVYE

SEQ ID NO: 29759 - protein, 26 aa, synthetic construct
EAAVTQSPRSKVAVTGGKVTLSCHQT

SEQ ID NO: 29760 - protein, 26 aa, synthetic construct
GEQVEQRPPHLSVREGDSAFITCTYT

SEQ ID NO: 29761 - protein, 26 aa, synthetic construct
EAAVTQSPRSKVAVTGGKVTLSCHQT

SEQ ID NO: 29762 - protein, 26 aa, synthetic construct
GDSVTQTEGQVTVSESKSLIINCTYS

SEQ ID NO: 29763 - protein, 26 aa, synthetic construct
AQTIHQWPVAEIKAVGSPLSLGCTIK

SEQ ID NO: 29764 - protein, 26 aa, synthetic construct
AQSVTQPDARVTVSEGASLQLRCKYS

SEQ ID NO: 29765 - DNA, 78 bp, synthetic construct; identical to SEQ ID NO: 1583
  source 1..78: mol_type = other DNA

SEQ ID NO: 29766 - DNA, 78 bp, synthetic construct; identical to SEQ ID NO: 1614
  source 1..78: mol_type = other DNA

SEQ ID NO: 29767 - DNA, 78 bp, synthetic construct; identical to SEQ ID NO: 1487
  source 1..78: mol_type = other DNA

SEQ ID NO: 29768 - DNA, 78 bp, synthetic construct; identical to SEQ ID NO: 1560
  source 1..78: mol_type = other DNA

SEQ ID NO: 29769 - DNA, 78 bp, synthetic construct; identical to SEQ ID NO: 1583
  source 1..78: mol_type = other DNA

SEQ ID NO: 29770 - DNA, 78 bp, synthetic construct; identical to SEQ ID NO: 1614
  source 1..78: mol_type = other DNA

SEQ ID NO: 29771 - DNA, 75 bp, synthetic construct; identical to SEQ ID NO: 1579
  source 1..75: mol_type = other DNA

SEQ ID NO: 29772 - DNA, 78 bp, synthetic construct; identical to SEQ ID NO: 1846
  source 1..78: mol_type = other DNA

SEQ ID NO: 29773 - DNA, 75 bp, synthetic construct; identical to SEQ ID NO: 1579
  source 1..75: mol_type = other DNA

SEQ ID NO: 29774 - DNA, 78 bp, synthetic construct; identical to SEQ ID NO: 1512
  source 1..78: mol_type = other DNA

SEQ ID NO: 29775 - DNA, 75 bp, synthetic construct; identical to SEQ ID NO: 1579
  source 1..75: mol_type = other DNA

SEQ ID NO: 29776 - DNA, 78 bp, synthetic construct; identical to SEQ ID NO: 1552
  source 1..78: mol_type = other DNA

SEQ ID NO: 29777 - DNA, 78 bp, synthetic construct; identical to SEQ ID NO: 1485
  source 1..78: mol_type = other DNA

SEQ ID NO: 29778 - DNA, 75 bp, synthetic construct; identical to SEQ ID NO: 1590
  source 1..75: mol_type = other DNA

SEQ ID NO: 29779 - DNA, 78 bp, synthetic construct; identical to SEQ ID NO: 1583
  source 1..78: mol_type = other DNA

SEQ ID NO: 29780 - DNA, 78 bp, synthetic construct; identical to SEQ ID NO: 1614
  source 1..78: mol_type = other DNA

SEQ ID NO: 29781 - DNA, 78 bp, synthetic construct; identical to SEQ ID NO: 1583
  source 1..78: mol_type = other DNA

SEQ ID NO: 29782 - DNA, 78 bp, synthetic construct; identical to SEQ ID NO: 1528
  source 1..78: mol_type = other DNA

SEQ ID NO: 29783 - DNA, 78 bp, synthetic construct; identical to SEQ ID NO: 1487
  source 1..78: mol_type = other DNA

SEQ ID NO: 29784 - DNA, 75 bp, synthetic construct; identical to SEQ ID NO: 1590
  source 1..75: mol_type = other DNA

SEQ ID NO: 29785 - DNA, 78 bp, synthetic construct; identical to SEQ ID NO: 1487
  source 1..78: mol_type = other DNA

SEQ ID NO: 29786 - DNA, 78 bp, synthetic construct; identical to SEQ ID NO: 1528
  source 1..78: mol_type = other DNA

SEQ ID NO: 29787 - DNA, 78 bp, synthetic construct; identical to SEQ ID NO: 1491
  source 1..78: mol_type = other DNA

SEQ ID NO: 29788 - DNA, 78 bp, synthetic construct; identical to SEQ ID NO: 2330
  source 1..78: mol_type = other DNA

SEQ ID NO: 29789 - DNA, 78 bp, synthetic construct; identical to SEQ ID NO: 1491
  source 1..78: mol_type = other DNA

SEQ ID NO: 29790 - DNA, 78 bp, synthetic construct; identical to SEQ ID NO: 1544
  source 1..78: mol_type = other DNA

SEQ ID NO: 29791 - DNA, 78 bp, synthetic construct; identical to SEQ ID NO: 1519
  source 1..78: mol_type = other DNA

SEQ ID NO: 29792 - DNA, 78 bp, synthetic construct; identical to SEQ ID NO: 1514
  source 1..78: mol_type = other DNA

SEQ ID NO: 29793 - protein, 5 aa, synthetic construct
LGHDT

SEQ ID NO: 29794 - protein, 8 aa, synthetic construct
ATSIAYPN

SEQ ID NO: 29795 - protein, 5 aa, synthetic construct
NNHNN

SEQ ID NO: 29796 - protein, 6 aa, synthetic construct
DSASQY

SEQ ID NO: 29797 - protein, 5 aa, synthetic construct
LGHDT

SEQ ID NO: 29798 - protein, 8 aa, synthetic construct
ATSIAYPN

SEQ ID NO: 29799 - protein, 5 aa, synthetic construct
LGHNA

SEQ ID NO: 29800 - protein, 8 aa, synthetic construct
ATSIGYPN

SEQ ID NO: 29801 - protein, 5 aa, synthetic construct
LGHNA

SEQ ID NO: 29802 - protein, 6 aa, synthetic construct
DRNVDY

SEQ ID NO: 29803 - protein, 5 aa, synthetic construct
LGHNA

SEQ ID NO: 29804 - protein, 6 aa, synthetic construct
DSTFDY

SEQ ID NO: 29805 - protein, 5 aa, synthetic construct
SGHDT

SEQ ID NO: 29806 - protein, 7 aa, synthetic construct
NIATSEY

SEQ ID NO: 29807 - protein, 5 aa, synthetic construct
LGHDT

SEQ ID NO: 29808 - protein, 8 aa, synthetic construct
ATSIAYPN

SEQ ID NO: 29809 - protein, 5 aa, synthetic construct
LGHDT

SEQ ID NO: 29810 - protein, 7 aa, synthetic construct
TRDSSYF

SEQ ID NO: 29811 - protein, 5 aa, synthetic construct
NNHNN

SEQ ID NO: 29812 - protein, 7 aa, synthetic construct
NIATSEY

SEQ ID NO: 29813 - protein, 5 aa, synthetic construct
NNHNN

SEQ ID NO: 29814 - protein, 7 aa, synthetic construct
TQDSSYF

SEQ ID NO: 29815 - protein, 5 aa, synthetic construct
NNHDY

SEQ ID NO: 29816 - protein, 6 aa, synthetic construct
DPNSYY

SEQ ID NO: 29817 - protein, 5 aa, synthetic construct
NNHDY

SEQ ID NO: 29818 - protein, 8 aa, synthetic construct
TTSIAYPN

SEQ ID NO: 29819 - protein, 6 aa, synthetic construct
GKSSPN

SEQ ID NO: 29820 - protein, 6 aa, synthetic construct
YFGTPY

SEQ ID NO: 29821 - DNA, 15 bp, synthetic construct
  source 1..15: mol_type = other DNA
ctgggccacgatact

SEQ ID NO: 29822 - DNA, 24 bp, synthetic construct
  source 1..24: mol_type = other DNA
gccacaagcatagcttaccctaat

SEQ ID NO: 29823 - DNA, 15 bp, synthetic construct
  source 1..15: mol_type = other DNA
aataaccacaacaac

SEQ ID NO: 29824 - DNA, 18 bp, synthetic construct
  source 1..18: mol_type = other DNA
gacagtgcttctcagtat

SEQ ID NO: 29825 - DNA, 15 bp, synthetic construct
  source 1..15: mol_type = other DNA
ctgggccacgatact

SEQ ID NO: 29826 - DNA, 24 bp, synthetic construct
  source 1..24: mol_type = other DNA
gccacaagcatagcttaccctaat

SEQ ID NO: 29827 - DNA, 15 bp, synthetic construct
  source 1..15: mol_type = other DNA
ctgggacataatgct

(The sequence listing continues in the following parts.)

What is claimed is:

1. A transgenic effector cell comprising a heterologous polynucleotide encoding a T cell receptor (TCR) polypeptide that specifically binds an anaplastic lymphoma kinase (ALK) peptide in the context of specific HLA molecules.

2. The transgenic effector cell of claim 1, wherein the ALK peptide has at least about 85% amino acid sequence identity to a peptide selected from the group consisting of: RPRPSQPSSL (SEQ ID NO: 32957); IVRCIGVSL (SEQ ID NO: 32958); VPRKNITLI (SEQ ID NO: 32959); TAAEVSVRV (SEQ ID NO: 32960); AMLDLLHVA (SEQ ID NO: 32961); GGDLKSFLRETRPRPSQPSSLAMLDLLHVA (SEQ ID NO: 32962); FNHQNIVRCIGVSL (SEQ ID NO: 32963); and GGDLKSFLRETRPRPSQPSSLAM (SEQ ID NO: 32964).

3. The transgenic effector cell of claim 1, wherein the T cell receptor polypeptide comprises:
(i) a complementarity determining region (CDR) 1, wherein the sequence of CDR 1 is any CDR I sequence disclosed in SEQ ID NOs 2969-4452, 20513-21122, 28105-28240, 29793-29820, or 30321-30416, or any sequence that has at least 85% identity thereto;
(ii) a CDR 2, wherein the sequence of CDR 2 is any CDR 2 sequence disclosed in SEQ ID NOs 8905-10388, 22953-23562, 28649-28784, 29905-29932, or 30705-30800, or any sequence that has at least 85% identity thereto; and/or
(iii) a CDR 3, wherein the sequence of CDR 3 is any CDR 3 sequence disclosed in SEQ ID NOs 14841-16324, 25393-26002, 29193-29328, 30017-30044, or 31089-31184, or any sequence that has at least 85% identity thereto.

4. A polypeptide that specifically binds an ALK peptide or an antigen binding fragment thereof, the polypeptide comprising:
(i) a complementarity determining region (CDR) 1, wherein the sequence of CDR 1 is any CDR 1 sequence disclosed in SEQ ID NOs 2969-4452, 20513-21122, 28105-28240, 29793-29820, or 30321-30416, or any sequence that has at least 85% identity thereto;
(ii) a CDR 2, wherein the sequence of CDR 2 is any CDR 2 sequence disclosed in SEQ ID NOs 8905-10388, 22953-23562, 28649-28784, 29905-29932, or 30705-30800, or any sequence that has at least 85% identity thereto; and/or
(iii) a CDR 3, wherein the sequence of CDR 3 is any CDR 3 sequence disclosed in SEQ ID NOs 14841-16324, 25393-26002, 29193-29328, 30017-30044, or 31089-31184, or any sequence that has at least 85% identity thereto.

5. The polypeptide of claim 4, wherein the ALK peptide has at least about 90% amino acid sequence identity to a peptide selected from the group consisting of RPRPSQPSSL (SEQ ID NO: 32957); IVRCIGVSL (SEQ ID NO: 32958); VPRKNITLI (SEQ ID NO: 32959); TAAEVSVRV (SEQ ID NO: 32960); AMLDLLHVA (SEQ ID NO: 32961); GGDLKSFLRETRPRPSQPSSLAMLDLLHVA (SEQ ID NO: 32962); FNHQNIVRCIGVSL (SEQ ID NO: 32963); and GGDLKSFLRETRPRPSQPSSLAM (SEQ ID NO: 32964).

6. A polynucleotide encoding the polypeptide of claim 5.

7. A vector comprising the polynucleotide of claim 6.

8. The vector of claim 7, wherein the vector is a viral vector.

9. A pharmaceutical composition comprising an effector cell of claim 1, including a cell comprising a heterologous polynucleotide encoding a T-cell receptor (TCR) polypeptide that specifically binds an anaplastic lymphoma kinase (ALK) peptide.

10. The pharmaceutical composition of claim 9, wherein the ALK peptide has at least about 85% amino acid sequence identity to a peptide selected from the group consisting of RPRPSQPSSL (SEQ ID NO: 32957); IVRCIGVSL (SEQ ID NO: 32958); VPRKNITLI (SEQ ID NO: 32959); TAAEVSVRV (SEQ ID NO: 32960); AMLDLLHVA (SEQ ID NO: 32961); GGDLKSFLRETRPRPSQPSSLAMLDLLHVA (SEQ ID NO: 32962); FNHQNIVRCIGVSL (SEQ ID NO: 32963); and GGDLKSFLRETRPRPSQPSSLAM (SEQ ID NO: 32964).

11. A pharmaceutical composition comprising an antibody that specifically binds an ALK peptide, or an antigen binding fragment thereof, the antibody comprising:
(i) a complementarity determining region (CDR) 1, wherein the sequence of CDR 1 is any CDR 1 sequence disclosed in SEQ ID NOs 2969-4452, 20513-21122, 28105-28240, 29793-29820, or 30321-30416, or any sequence that has at least 85% identity thereto;
(ii) a CDR 2, wherein the sequence of CDR 2 is any CDR 2 sequence disclosed in SEQ ID NOs 8905-10388, 22953-23562, 28649-28784, 29905-29932, or 30705-30800, or any sequence that has at least 85% identity thereto; and/or
(iii) a CDR 3, wherein the sequence of CDR 3 is any CDR 3 sequence disclosed in SEQ ID NOs 14841-16324, 25393-26002, 29193-29328, 30017-30044, or 31089-31184, or any sequence that has at least 85% identity thereto.

12. The pharmaceutical composition of claim 11, wherein the ALK peptide has at least about 85% amino acid sequence identity to a peptide selected from the group consisting of RPRPSQPSSL (SEQ ID NO: 32957); IVRCIGVSL (SEQ ID NO: 32958); VPRKNITLI (SEQ ID NO: 32959); TAAEVSVRV (SEQ ID NO: 32960); AMLDLLHVA (SEQ ID NO: 32961); GGDLKSFLRETRPRPSQPSSLAMLDLLHVA (SEQ ID NO: 32962); FNHQNIVRCIGVSL (SEQ ID NO: 32963); and GGDLKSFLRETRPRPSQPSSLAM (SEQ ID NO: 32964).

13. A method for treating a subject having an ALK-positive neoplasia or an ALK-positive neoplasia that is resistant to ALK tyrosine kinase inhibitor therapy, the method comprising administering to the subject an effective amount of a transgenic effector cell of claim 1, thereby treating the subject.

14. A method for killing an ALK-positive neoplastic cell, reducing or inhibiting the growth of an ALK positive neoplasia, or reducing metastasis or inhibiting the development of metastasis in a subject having an ALK-positive neoplasia, the method comprising administering to the subject a transgenic effector cell comprising a heterologous polynucleotide encoding a T-cell receptor (TCR) polypeptide that specifically binds an anaplastic lymphoma kinase (ALK) peptide, thereby reducing or inhibiting the development of metastasis in the subject.

15. A method for treating an human leukocyte antigen (HLA) serotype A*02:01 subject, HLA-B*07:02 subject, having an anaplastic lymphoma kinase (ALK)-rearranged Non-Small Cell Lung Cancer (NSCLC) or anaplastic large cell lymphoma (ALCL) or one of said neoplasias that is resistant to ALK tyrosine kinase inhibitor therapy, the method comprising administering to the subject a transgenic effector cell of claim 1, including a cell comprising a heterologous polynucleotide encoding a T-cell receptor (TCR) polypeptide that specifically binds an anaplastic lymphoma kinase (ALK) peptide, thereby treating the subject.

16. The method of claim 15, wherein the method reduces or otherwise treats metastasis in the subject.

17. The method of claim 15, wherein the ALK rearrangement is an echinoderm microtubule-associate protein-like 4-ALK rearrangement (EML4-ALK).

18. A method of killing or reducing the growth of an ALK-positive neoplastic cell, the method comprising contacting the ALK-positive neoplastic cell with a transgenic effector cell comprising a heterologous polynucleotide encoding a TCR polypeptide that specifically binds an ALK peptide,
wherein the TCR polypeptide comprises each of:
(i) a complementarity determining region (CDR) 1, wherein the sequence of CDR 1 is any CDR 1 sequence disclosed in SEQ ID NOs 2969-4452, 20513-21122, 28105-28240, 29793-29820, or 30321-30416, or any sequence that has at least 85% identity thereto;
(ii) a CDR 2, wherein the sequence of CDR 2 is any CDR 2 sequence disclosed in SEQ ID NOs 8905-10388, 22953-23562, 28649-28784, 29905-29932, or 30705-30800, or any sequence that has at least 85% identity thereto; and
(iii) a CDR 3, wherein the sequence of CDR 3 is any CDR 3 sequence disclosed in SEQ ID NOs 14841-16324, 25393-26002, 29193-29328, 30017-30044, or 31089-31184, or any sequence that has at least 85% identity thereto.

19. A method of treating or reducing the growth of an ALK-positive neoplasia in a selected subject, the method comprising contacting the ALK-positive neoplasia with a transgenic effector cell comprising a heterologous polynucleotide encoding a TCR polypeptide that specifically binds an ALK peptide,
wherein the TCR polypeptide comprises each of:
(i) a complementarity determining region (CDR) 1, wherein the sequence of CDR 1 is any CDR 1 sequence disclosed in SEQ ID NOs 2969-4452, 20513-21122, 28105-28240, 29793-29820, or 30321-30416, or any sequence that has at least 85% identity thereto;
(ii) a CDR 2, wherein the sequence of CDR 2 is any CDR 2 sequence disclosed in SEQ ID NOs 8905-10388, 22953-23562, 28649-28784, 29905-29932, or 30705-30800, or any sequence that has at least 85% identity thereto; and
(iii) a CDR 3, wherein the sequence of CDR 3 is any CDR 3 sequence disclosed in SEQ ID NOs 14841-16324, 25393-26002, 29193-29328, 30017-30044, or 31089-31184, or any sequence that has at least 85% identity thereto,
and wherein the subject is selected for expression of an HLA-A*02:01 serotype or is selected for expression of an HLA-B*07:02 serotype.

20. A kit comprising an agent for administration to a subject with one or more ALK-positive cancers, wherein the agent comprises the pharmaceutical composition of claim 9.
